United States Patent Application Publication US 2005/0244851 A1 - sequence listing, part 138

SEQ ID NO: 5387380 - DNA, 25 bp, Homo sapien
tatccagaagcaccaaagctggcgg

SEQ ID NO: 5387381 - DNA, 25 bp, Homo sapien
agacaggagggaggtaccgcagcga

SEQ ID NO: 5387382 - DNA, 25 bp, Homo sapien
aggagggaggtaccgcagcgacccg

SEQ ID NO: 5387383 - DNA, 25 bp, Homo sapien
cacagacaggagggaggtaccgcag

SEQ ID NO: 5387384 - DNA, 25 bp, Homo sapien
acaggagggaggtaccgcagcgacc

SEQ ID NO: 5387385 - DNA, 25 bp, Homo sapien
gtcaagctccaggagaccggcatgc

SEQ ID NO: 5387386 - DNA, 25 bp, Homo sapien
tccaacccggtcaagctccaggaga

SEQ ID NO: 5387387 - DNA, 25 bp, Homo sapien
aacccggtcaagctccaggagaccg

SEQ ID NO: 5387388 - DNA, 25 bp, Homo sapien
cggcatgccccccacttgggacgct

SEQ ID NO: 5387389 - DNA, 25 bp, Homo sapien
agcgctaccataacgcaaagagagg

SEQ ID NO: 5387390 - DNA, 25 bp, Homo sapien
cagtcgccacggcagcgctaccata

SEQ ID NO: 5387391 - DNA, 25 bp, Homo sapien
ataacgcaaagagaggcggcaggcc

SEQ ID NO: 5387392 - DNA, 25 bp, Homo sapien
ggagggtcctctgcaagccagtcgc

SEQ ID NO: 5387393 - DNA, 25 bp, Homo sapien
cacacgccagtcgcccctcgtcggg

SEQ ID NO: 5387394 - DNA, 25 bp, Homo sapien
gtcgcccctcgtcgggcccgcagag

SEQ ID NO: 5387395 - DNA, 25 bp, Homo sapien
gccagtcgcccctcgtcgggcccgc

SEQ ID NO: 5387396 - DNA, 25 bp, Homo sapien
acacgccagtcgcccctcgtcgggc

SEQ ID NO: 5387397 - DNA, 25 bp, Homo sapien
accttgagccttcgcggtctgggca

SEQ ID NO: 5387398 - DNA, 25 bp, Homo sapien
tgcgtgcggcaaccttgagccttcg

SEQ ID NO: 5387399 - DNA, 25 bp, Homo sapien
cggtaccaggaaaaatctgcgtgcg

SEQ ID NO: 5387400 - DNA, 25 bp, Homo sapien
gaaaaatctgcgtgcggcaaccttg

SEQ ID NO: 5387401 - DNA, 25 bp, Homo sapien
ggcagaacggtagcccctcggcggc

SEQ ID NO: 5387402 - DNA, 25 bp, Homo sapien
ggaggcagaacggtagcccctcggc

SEQ ID NO: 5387403 - DNA, 25 bp, Homo sapien
tcggaggcagaacggtagcccctcg

SEQ ID NO: 5387404 - DNA, 25 bp, Homo sapien
gtcggaggcagaacggtagcccctc

SEQ ID NO: 5387405 - DNA, 25 bp, Homo sapien
aagaatataatacaactgttgtctg

SEQ ID NO: 5387406 - DNA, 25 bp, Homo sapien
gaatataatacaactgttgtctgcc

SEQ ID NO: 5387407 - DNA, 25 bp, Homo sapien
aatataatacaactgttgtctgcct

SEQ ID NO: 5387408 - DNA, 25 bp, Homo sapien
atataatacaactgttgtctgcctg

SEQ ID NO: 5387409 - DNA, 25 bp, Homo sapien
gacccactgtgcagaccgaatcaga

SEQ ID NO: 5387410 - DNA, 25 bp, Homo sapien
atgtttccagagatgcgcgagccac

SEQ ID NO: 5387411 - DNA, 25 bp, Homo sapien
tcagcggtccacacagagagagctc

SEQ ID NO: 5387412 - DNA, 25 bp, Homo sapien
tgtgtgtcccgagctcctgtggttt

SEQ ID NO: 5387413 - DNA, 25 bp, Homo sapien
aataggtgaaaagccagatcctgac

SEQ ID NO: 5387414 - DNA, 25 bp, Homo sapien
tgaaataggtgaaaagccagatcct

SEQ ID NO: 5387415 - DNA, 25 bp, Homo sapien
tctggtatcccttcgaatcattatg

SEQ ID NO: 5387416 - DNA, 25 bp, Homo sapien
ccgtctaggctgctatatggcaagc

SEQ ID NO: 5387417 - DNA, 25 bp, Homo sapien
cacaggacacaactgaattaaacag

SEQ ID NO: 5387418 - DNA, 25 bp, Homo sapien
tcagctgtaatttcacctgatactc

SEQ ID NO: 5387419 - DNA, 25 bp, Homo sapien
cagtgtcttctattgattcagctgt

SEQ ID NO: 5387420 - DNA, 25 bp, Homo sapien
tgaatacagattccccagtgtcttc

SEQ ID NO: 5387421 - DNA, 25 bp, Homo sapien
gagtacatgcaagctgaaagaatat

SEQ ID NO: 5387422 - DNA, 25 bp, Homo sapien
gggaacgtttcagtctgcaacagga

SEQ ID NO: 5387423 - DNA, 25 bp, Homo sapien
gacagttccacaaccaaggagaata

SEQ ID NO: 5387424 - DNA, 25 bp, Homo sapien
ttgaactttcagagtacatgcaagc

SEQ ID NO: 5387425 - DNA, 25 bp, Homo sapien
cacagtgatgtaagttggaggcctc

SEQ ID NO: 5387426 - DNA, 25 bp, Homo sapien
tttaactcaacgtgtcaggctcagg

SEQ ID NO: 5387427 - DNA, 25 bp, Homo sapien
gatagtcccgcaaatgtgacggcct

SEQ ID NO: 5387428 - DNA, 25 bp, Homo sapien
cacgagggagaatcgggctctctac

SEQ ID NO: 5387429 - DNA, 25 bp, Homo sapien
catatttgagacagaacagacaggg

SEQ ID NO: 5387430 - DNA, 25 bp, Homo sapien
ttttttcaaagagccagtggttcca

SEQ ID NO: 5387431 - DNA, 25 bp, Homo sapien
gcagatgcacattgagaaaaccctc

SEQ ID NO: 5387432 - DNA, 25 bp, Homo sapien
cagggctcggtcacaggtcatgaag

SEQ ID NO: 5387433 - DNA, 25 bp, Homo sapien
acgccgggtcaggagggttgcaaca

SEQ ID NO: 5387434 - DNA, 25 bp, Homo sapien
cgggtcaggagggttgcaacaaaat

SEQ ID NO: 5387435 - DNA, 25 bp, Homo sapien
ttgagacgccgggtcaggagggttg

SEQ ID NO: 5387436 - DNA, 25 bp, Homo sapien
caggagggttgcaacaaaatgatga

SEQ ID NO: 5387437 - DNA, 25 bp, Homo sapien
ggtgggttttactcagcctgcgtac

SEQ ID NO: 5387438 - DNA, 25 bp, Homo sapien
ttcgtcagccgacgggtggagggtg

SEQ ID NO: 5387439 - DNA, 25 bp, Homo sapien
gggttttactcagcctgcgtactgt

SEQ ID NO: 5387440 - DNA, 25 bp, Homo sapien
agagaaggggtttcgtcagccgacg

SEQ ID NO: 5387441 - DNA, 25 bp, Homo sapien
cctgccgttgcctggcaaaggccag

SEQ ID NO: 5387442 - DNA, 25 bp, Homo sapien
tcgaaagcagcgtcaacgcgcttcc

SEQ ID NO: 5387443 - DNA, 25 bp, Homo sapien
ccggaggattcgaaagcagcgtcaa

SEQ ID NO: 5387444 - DNA, 25 bp, Homo sapien
gtctttgccggaggattcgaaagca

SEQ ID NO: 5387445 - DNA, 25 bp, Homo sapien
tatggaaaatgccatggccgtggtg

SEQ ID NO: 5387446 - DNA, 25 bp, Homo sapien
cctatggaaaatgccatggccgtgg

SEQ ID NO: 5387447 - DNA, 25 bp, Homo sapien
tcctatggaaaatgccatggccgtg

SEQ ID NO: 5387448 - DNA, 25 bp, Homo sapien
atggaaaatgccatggccgtggtgg

SEQ ID NO: 5387449 - DNA, 25 bp, Homo sapien
tgatggcacattgttgtcattccag

SEQ ID NO: 5387450 - DNA, 25 bp, Homo sapien
atggcacattgttgtcattccagct

SEQ ID NO: 5387451 - DNA, 25 bp, Homo sapien
gatggcacattgttgtcattccagc

SEQ ID NO: 5387452 - DNA, 25 bp, Homo sapien
atgatggcacattgttgtcattcca

SEQ ID NO: 5387453 - DNA, 25 bp, Homo sapien
ttggtcggtccaaagcgttgaggct

SEQ ID NO: 5387454 - DNA, 25 bp, Homo sapien
aaaagtcaaccggtgttgtggtgca

SEQ ID NO: 5387455 - DNA, 25 bp, Homo sapien
ctgtagtcccaagtaatggggatgg

SEQ ID NO: 5387456 - DNA, 25 bp, Homo sapien
gggagagatcagaggcaggacaact

SEQ ID NO: 5387457 - DNA, 25 bp, Homo sapien
tcgaccctggaggttccgactgaga

SEQ ID NO: 5387458 - DNA, 25 bp, Homo sapien
gctggcagcagctgatcgaccctgg

SEQ ID NO: 5387459 - DNA, 25 bp, Homo sapien
ctaagtccggagctcgctggcagca

SEQ ID NO: 5387460 - DNA, 25 bp, Homo sapien
agatgcggacgctccagatccggct

SEQ ID NO: 5387461 - DNA, 25 bp, Homo sapien
tcaggcagcagctggtcgaccccag

SEQ ID NO: 5387462 - DNA, 25 bp, Homo sapien
ccagaggcccgaccgaggagcagcc

SEQ ID NO: 5387463 - DNA, 25 bp, Homo sapien
cctgccggtcgacctgggacatggc

SEQ ID NO: 5387464 - DNA, 25 bp, Homo sapien
gagggcctgccggtcgacctgggac

SEQ ID NO: 5387465 - DNA, 25 bp, Homo sapien
tcagaatgatcgtcaaagcccagct

SEQ ID NO: 5387466 - DNA, 25 bp, Homo sapien
gaagggcccagcttgtgtccagagt

SEQ ID NO: 5387467 - DNA, 25 bp, Homo sapien
ttgcaacaacacacatcacggaggg

SEQ ID NO: 5387468 - DNA, 25 bp, Homo sapien
tatggccctgcgtgagacttacacc

SEQ ID NO: 5387469 - DNA, 25 bp, Homo sapien
ctgggacccatgttcaactgctgtt

SEQ ID NO: 5387470 - DNA, 25 bp, Homo sapien
tgggacccatgttcaactgctgttc

SEQ ID NO: 5387471 - DNA, 25 bp, Homo sapien
ggacccatgttcaactgctgttcac

SEQ ID NO: 5387472 - DNA, 25 bp, Homo sapien
gggacccatgttcaactgctgttca

SEQ ID NO: 5387473 - DNA, 25 bp, Homo sapien
aaaagtagcctacgaagcactcgca

SEQ ID NO: 5387474 - DNA, 25 bp, Homo sapien
actgagatcgtttcggccccaagac

SEQ ID NO: 5387475 - DNA, 25 bp, Homo sapien
taggcttcaaagcttaccgcagcgg

SEQ ID NO: 5387476 - DNA, 25 bp, Homo sapien
tgagcattggcatcgggcatcttaa

SEQ ID NO: 5387477 - DNA, 25 bp, Homo sapien
gccctgcgggatgatgtagagtact

SEQ ID NO: 5387478 - DNA, 25 bp, Homo sapien
cgggatgatgtagagtacttccaca

SEQ ID NO: 5387479 - DNA, 25 bp, Homo sapien
atgaaattctgttgatgagggatgt

SEQ ID NO: 5387480 - DNA, 25 bp, Homo sapien
ggagctgcctcttgggtctgagttt

SEQ ID NO: 5387481 - DNA, 25 bp, Homo sapien
tccactgaattcatgacttttaatg

SEQ ID NO: 5387482 - DNA, 25 bp, Homo sapien
ctgaattcatgacttttaatggggg

SEQ ID NO: 5387483 - DNA, 25 bp, Homo sapien
cactgaattcatgacttttaatggg

SEQ ID NO: 5387484 - DNA, 25 bp, Homo sapien
gaattcatgacttttaatgggggaa

SEQ ID NO: 5387485 - DNA, 25 bp, Homo sapien
cacggcagacatagtgaatgagaaa

SEQ ID NO: 5387486 - DNA, 25 bp, Homo sapien
tggcacactctcatcgagaccacgg

SEQ ID NO: 5387487 - DNA, 25 bp, Homo sapien
gagaccacggcagacatagtgaatg

SEQ ID NO: 5387488 - DNA, 25 bp, Homo sapien
tcatcgagaccacggcagacatagt

SEQ ID NO: 5387489 - DNA, 25 bp, Homo sapien
tgacagatctgaaactggggctcac

SEQ ID NO: 5387490 - DNA, 25 bp, Homo sapien
tatttacaaatgacagatctgaaac

SEQ ID NO: 5387491 - DNA, 25 bp, Homo sapien
ctatttacaaatgacagatctgaaa

SEQ ID NO: 5387492 - DNA, 25 bp, Homo sapien
aaatgacagatctgaaactggggct

SEQ ID NO: 5387493 - DNA, 25 bp, Homo sapien
cgctgacatgctggaggttcgtgtc

SEQ ID NO: 5387494 - DNA, 25 bp, Homo sapien
acgctgacatgctggaggttcgtgt

SEQ ID NO: 5387495 - DNA, 25 bp, Homo sapien
tacttccaagtcgtaagacgctgta

SEQ ID NO: 5387496 - DNA, 25 bp, Homo sapien
atctacttccaagtcgtaagacgct

SEQ ID NO: 5387497 - DNA, 25 bp, Homo sapien
aagatctgagctcgaggccccccaa

SEQ ID NO: 5387498 - DNA, 25 bp, Homo sapien
cacgctgagccggcagaacgctcca

SEQ ID NO: 5387499 - DNA, 25 bp, Homo sapien
ttggttatcaagattatactaggat

SEQ ID NO: 5387500 - DNA, 25 bp, Homo sapien
gaagctcctaacacgttctgctctc

SEQ ID NO: 5387501 - DNA, 25 bp, Homo sapien
taataatcacctcattgtaggtttg

SEQ ID NO: 5387502 - DNA, 25 bp, Homo sapien
tagagcattcagaatagatttccta

SEQ ID NO: 5387503 - DNA, 25 bp, Homo sapien
gcatccttgtcaactgcaccagctg

SEQ ID NO: 5387504 - DNA, 25 bp, Homo sapien
catccttgtcaactgcaccagctgg

SEQ ID NO: 5387505 - DNA, 25 bp, Homo sapien
ggctccatttgcagtacccatcatg

SEQ ID NO: 5387506 - DNA, 25 bp, Homo sapien
tgcccaagtccaagattcattaggt

SEQ ID NO: 5387507 - DNA, 25 bp, Homo sapien
tgaaagaggcatggtatttacactg

SEQ ID NO: 5387508 - DNA, 25 bp, Homo sapien
tattgccgaagggatttgcttactc

SEQ ID NO: 5387509 - DNA, 25 bp, Homo sapien
tctgagcagtgtgatatatgcagca

SEQ ID NO: 5387510 - DNA, 25 bp, Homo sapien
gaaatgaactcatggaacagtacta

SEQ ID NO: 5387511 - DNA, 25 bp, Homo sapien
cagtactagacttgtgtatcagcac

SEQ ID NO: 5387512 - DNA, 25 bp, Homo sapien
tgtccttatgagacagcctcaacag

SEQ ID NO: 5387513 - DNA, 25 bp, Homo sapien
taccaatggatgaaacaactgagtc

SEQ ID NO: 5387514 - DNA, 25 bp, Homo sapien
tataagaagaactaggatttgagcc

SEQ ID NO: 5387515 - DNA, 25 bp, Homo sapien
gaattatgggacatgacacttggga

SEQ ID NO: 5387516 - DNA, 25 bp, Homo sapien
tgagccttcctaatctggccctagg

SEQ ID NO: 5387517 - DNA, 25 bp, Homo sapien
cgctcatcgcgctagagaagtgacc

SEQ ID NO: 5387518 - DNA, 25 bp, Homo sapien
taaatatgtgaggtcaacgggcaac

SEQ ID NO: 5387519 - DNA, 25 bp, Homo sapien
cctgcccagaaggaaagtggtaagt

SEQ ID NO: 5387520 - DNA, 25 bp, Homo sapien
tccgtgccagatagcataagcagag

SEQ ID NO: 5387521 - DNA, 25 bp, Homo sapien
ccagggaaagttgcggccatcatgc

SEQ ID NO: 5387522 - DNA, 25 bp, Homo sapien
aacacttcctcttcgggagtacagg

SEQ ID NO: 5387523 - DNA, 25 bp, Homo sapien
tgtggccctctcgtgtgactccaga

SEQ ID NO: 5387524 - DNA, 25 bp, Homo sapien
tgagtcgcaggaacttccgctccag

SEQ ID NO: 5387525 - DNA, 25 bp, Homo sapien
gtcctatgacaaccgtagacttaag

SEQ ID NO: 5387526 - DNA, 25 bp, Homo sapien
tcaaaatattgtcctatgacaaccg

SEQ ID NO: 5387527 - DNA, 25 bp, Homo sapien
tattgtcctatgacaaccgtagact

SEQ ID NO: 5387528 - DNA, 25 bp, Homo sapien
tgacaaccgtagacttaaggaacat

SEQ ID NO: 5387529 - DNA, 25 bp, Homo sapien
tttcaggaagttgagtgaggcctga

SEQ ID NO: 5387530 - DNA, 25 bp, Homo sapien
agcaatgtttcgtttagcctggcgg

SEQ ID NO: 5387531 - DNA, 25 bp, Homo sapien
tgcagtgctattttgccccttcttt

SEQ ID NO: 5387532 - DNA, 25 bp, Homo sapien
gagaagccccagttacctgaaagct

SEQ ID NO: 5387533 - DNA, 25 bp, Homo sapien
tctttctgatccttacaggaagcag

SEQ ID NO: 5387534 - DNA, 25 bp, Homo sapien
gaagggatcagagttccacctgcag

SEQ ID NO: 5387535 - DNA, 25 bp, Homo sapien
cttaactgagtatgacttagcatcc

SEQ ID NO: 5387536 - DNA, 25 bp, Homo sapien
cgcagatggtcacaggaatgaggaa

SEQ ID NO: 5387537 - DNA, 25 bp, Homo sapien
ggatgccctctgtgattcgtgcagg

SEQ ID NO: 5387538 - DNA, 25 bp, Homo sapien
aaagaatgactctggctcctagcag

SEQ ID NO: 5387539 - DNA, 25 bp, Homo sapien
tcatcatcagtagttaaagcagagg

SEQ ID NO: 5387540 - DNA, 25 bp, Homo sapien
taggtgtcaaaagtgctgcagagat

SEQ ID NO: 5387541 - DNA, 25 bp, Homo sapien
aagcagaggaaacgtgggaaccgct

SEQ ID NO: 5387542 - DNA, 25 bp, Homo sapien
cactgagcgttttcacagattggtc

SEQ ID NO: 5387543 - DNA, 25 bp, Homo sapien
gcactatcagtttcagacgcgtcca

SEQ ID NO: 5387544 - DNA, 25 bp, Homo sapien
aaaaaggcgcctttcatgcacggtc

SEQ ID NO: 5387545 - DNA, 25 bp, Homo sapien
tatccaaacgagaaagagacgactt

SEQ ID NO: 5387546 - DNA, 25 bp, Homo sapien
gtttatggcctcatcaacggttgca

SEQ ID NO: 5387547 - DNA, 25 bp, Homo sapien
ttcccagggagacaatatttccttc

SEQ ID NO: 5387548 - DNA, 25 bp, Homo sapien
ctgagtagtacttatcatccttttt

SEQ ID NO: 5387549 - DNA, 25 bp, Homo sapien
ccagggagacaatatttccttcatt

SEQ ID NO: 5387550 - DNA, 25 bp, Homo sapien
gagtagtacttatcatccttttttc

SEQ ID NO: 5387551 - DNA, 25 bp, Homo sapien
tgaaggacacaccagattccgggaa

SEQ ID NO: 5387552 - DNA, 25 bp, Homo sapien
gcttcagccacatggacatagcaca

SEQ ID NO: 5387553 - DNA, 25 bp, Homo sapien
ggaatccaccagaatcttgaaggac

SEQ ID NO: 5387554 - DNA, 25 bp, Homo sapien
ccatgatggcatccagctaataaaa

SEQ ID NO: 5387555 - DNA, 25 bp, Homo sapien
caccaggtgagccttgagaagcgct

SEQ ID NO: 5387556 - DNA, 25 bp, Homo sapien
tcatagagtcatagctcagcaaagg

SEQ ID NO: 5387557 - DNA, 25 bp, Homo sapien
gacttttaagatagatgctcaggga

SEQ ID NO: 5387558 - DNA, 25 bp, Homo sapien
gctgctatgccaggatcaccaggtg

SEQ ID NO: 5387559 - DNA, 25 bp, Homo sapien
agtgtagaaccacttgttggcgtcc

SEQ ID NO: 5387560 - DNA, 25 bp, Homo sapien
tacagtgtagaaccacttgttggcg

SEQ ID NO: 5387561 - DNA, 25 bp, Homo sapien
tggctacagtgtagaaccacttgtt

SEQ ID NO: 5387562 - DNA, 25 bp, Homo sapien
tggctggctacagtgtagaaccact

SEQ ID NO: 5387563 - DNA, 25 bp, Homo sapien
gaagtgcattggcacatctgtggcc

SEQ ID NO: 5387564 - DNA, 25 bp, Homo sapien
aagtgcattggcacatctgtggcca

SEQ ID NO: 5387565 - DNA, 25 bp, Homo sapien
agggcatgtgggaagaagtgcattg

SEQ ID NO: 5387566 - DNA, 25 bp, Homo sapien
gccggtcatctaacttccaattcaa

SEQ ID NO: 5387567 - DNA, 25 bp, Homo sapien
cactaaaggccggtcatctaacttc

SEQ ID NO: 5387568 - DNA, 25 bp, Homo sapien
aaaggccggtcatctaacttccaat

SEQ ID NO: 5387569 - DNA, 25 bp, Homo sapien
ctaaaggccggtcatctaacttcca

SEQ ID NO: 5387570 - DNA, 25 bp, Homo sapien
caaggtagaatctgctgacaaggca

SEQ ID NO: 5387571 - DNA, 25 bp, Homo sapien
caaggcagattgtcacggagttttt

SEQ ID NO: 5387572 - DNA, 25 bp, Homo sapien
caatgagttgtcagtgttgtctccc

SEQ ID NO: 5387573 - DNA, 25 bp, Homo sapien
tactgcctcaatcccagaagccttg

SEQ ID NO: 5387574 - DNA, 25 bp, Homo sapien
aatcttctttgtatcttttcaattt

SEQ ID NO: 5387575 - DNA, 25 bp, Homo sapien
cttctttgtatcttttcaattttag

SEQ ID NO: 5387576 - DNA, 25 bp, Homo sapien
ctaatcttctttgtatcttttcaat

SEQ ID NO: 5387577 - DNA, 25 bp, Homo sapien
gctaatcttctttgtatcttttcaa

SEQ ID NO: 5387578 - DNA, 25 bp, Homo sapien
tatagtgaatcctgcaagcctgctt

SEQ ID NO: 5387579 - DNA, 25 bp, Homo sapien
tgtcttcgacgttctaggcacagct

SEQ ID NO: 5387580 - DNA, 25 bp, Homo sapien
ccaattaaaagacgtcccgctgccg

SEQ ID NO: 5387581 - DNA, 25 bp, Homo sapien
aaagcggctgcaccttggagcgaaa

SEQ ID NO: 5387582 - DNA, 25 bp, Homo sapien
tcaggtacaaggctgtgtcgggacc

SEQ ID NO: 5387583 - DNA, 25 bp, Homo sapien
gctgattggcttcgtctgggtcacc

SEQ ID NO: 5387584 - DNA, 25 bp, Homo sapien
tgctggaacatgatgcaggtgctca

SEQ ID NO: 5387585 - DNA, 25 bp, Homo sapien
ggcatgcccatggagttctacagca

SEQ ID NO: 5387586 - DNA, 25 bp, Homo sapien
tccccaggttaatatctttctcctc

SEQ ID NO: 5387587 - DNA, 25 bp, Homo sapien
cccaggttaatatctttctcctctc

SEQ ID NO: 5387588 - DNA, 25 bp, Homo sapien
ttctcctctctcagatctccccagg

SEQ ID NO: 5387589 - DNA, 25 bp, Homo sapien
cctctctcagatctccccagggaaa

SEQ ID NO: 5387590 - DNA, 25 bp, Homo sapien
catgcattgcttgagagattgatgg

SEQ ID NO: 5387591 - DNA, 25 bp, Homo sapien
agagtagccatgcattgcttgagag

SEQ ID NO: 5387592 - DNA, 25 bp, Homo sapien
gagtagccatgcattgcttgagaga

SEQ ID NO: 5387593 - DNA, 25 bp, Homo sapien
tagccatgcattgcttgagagattg

SEQ ID NO: 5387594 - DNA, 25 bp, Homo sapien
ccagggatgagaaccttgttggact

SEQ ID NO: 5387595 - DNA, 25 bp, Homo sapien
caagaaggtatcagcttcaggcatc

SEQ ID NO: 5387596 - DNA, 25 bp, Homo sapien
aagaaggtatcagcttcaggcatca

SEQ ID NO: 5387597 - DNA, 25 bp, Homo sapien
tccatccagggatgagaaccttgtt

SEQ ID NO: 5387598 - DNA, 25 bp, Homo sapien
taaggaacttgcctcaggtaacaca

SEQ ID NO: 5387599 - DNA, 25 bp, Homo sapien
cccgcagcgtggttatgtggatcat

SEQ ID NO: 5387600 - DNA, 25 bp, Homo sapien
aagaacctgaggtgtatctgaccca

SEQ ID NO: 5387601 - DNA, 25 bp, Homo sapien
tcagtgatgtggcatggtgcttgcc

SEQ ID NO: 5387602 - DNA, 25 bp, Homo sapien
gaaacagatacgcaaggtccaacca

SEQ ID NO: 5387603 - DNA, 25 bp, Homo sapien
tcatagctctgactccaataggagg

SEQ ID NO: 5387604 - DNA, 25 bp, Homo sapien
ttcctaagtttgacatgccctgctg

SEQ ID NO: 5387605 - DNA, 25 bp, Homo sapien
aagggacggagtgttgcagcaatcc

SEQ ID NO: 5387606 - DNA, 25 bp, Homo sapien
ccaactgatgccttaagtctcaaag

SEQ ID NO: 5387607 - DNA, 25 bp, Homo sapien
tatgcgacagtactatgtggtccca

SEQ ID NO: 5387608 - DNA, 25 bp, Homo sapien
aaaaaatatgcgacagtactatgtg

SEQ ID NO: 5387609 - DNA, 25 bp, Homo sapien
taagtctcaaagtatacaatccttg

SEQ ID NO: 5387610 - DNA, 25 bp, Homo sapien
caaagatcaccattgatgaagtgtc

SEQ ID NO: 5387611 - DNA, 25 bp, Homo sapien
gttcagagtagcagtggcccttcaa

SEQ ID NO: 5387612 - DNA, 25 bp, Homo sapien
tgtccagatctatcagccacaaatg

SEQ ID NO: 5387613 - DNA, 25 bp, Homo sapien
gcagtggcccttcaaggtttgaaaa

SEQ ID NO: 5387614 - DNA, 25 bp, Homo sapien
tatttgcaccaagtaccagtcaagg

SEQ ID NO: 5387615 - DNA, 25 bp, Homo sapien
gaaatgatgatctgccttctagaaa

SEQ ID NO: 5387616 - DNA, 25 bp, Homo sapien
cacattagggtaaacagtagacact

SEQ ID NO: 5387617 - DNA, 25 bp, Homo sapien
cctatgaggaaatgatgatctgcct

SEQ ID NO: 5387618 - DNA, 25 bp, Homo sapien
gtaaattgctcattagcagaatctg

SEQ ID NO: 5387619 - DNA, 25 bp, Homo sapien
tgttgcagtaaccgccagcctggtc

SEQ ID NO: 5387620 - DNA, 25 bp, Homo sapien
cctggtctctgtacctcggtcttca

SEQ ID NO: 5387621 - DNA, 25 bp, Homo sapien
tgagtagcgggcctgttgcagtaac

SEQ ID NO: 5387622 - DNA, 25 bp, Homo sapien
gcagatggccaccaacattgagctt

SEQ ID NO: 5387623 - DNA, 25 bp, Homo sapien
tgcatggagctcataggtccctagg

SEQ ID NO: 5387624 - DNA, 25 bp, Homo sapien
aatgcaaaggtaagtgggctttcca

SEQ ID NO: 5387625 - DNA, 25 bp, Homo sapien
tgtaactgtacctgctagggccacc

SEQ ID NO: 5387626 - DNA, 25 bp, Homo sapien
cattgtgctcagattccacactggg

SEQ ID NO: 5387627 - DNA, 25 bp, Homo sapien
cacccatgcctgaatcctcattgtg

SEQ ID NO: 5387628 - DNA, 25 bp, Homo sapien
cacactgggtgtagcttctactgct

SEQ ID NO: 5387629 - DNA, 25 bp, Homo sapien
tgattgcaccacctttttgtatgtg

SEQ ID NO: 5387630 - DNA, 25 bp, Homo sapien
caggtgtcgtccatcaaccagtcct

SEQ ID NO: 5387631 - DNA, 25 bp, Homo sapien
ggtgtcgtccatcaaccagtcctct

SEQ ID NO: 5387632 - DNA, 25 bp, Homo sapien
gtgtcgtccatcaaccagtcctctg

SEQ ID NO: 5387633 - DNA, 25 bp, Homo sapien
accaggtgtcgtccatcaaccagtc

SEQ ID NO: 5387634 - DNA, 25 bp, Homo sapien
actgtctgtgagtgcattggcactg

SEQ ID NO: 5387635 - DNA, 25 bp, Homo sapien
cattggcactgttgtacagtaagta

SEQ ID NO: 5387636 - DNA, 25 bp, Homo sapien
cctctccaaactatcatgctgctgg

SEQ ID NO: 5387637 - DNA, 25 bp, Homo sapien
catgctgctggtattggcaatgaaa

SEQ ID NO: 5387638 - DNA, 25 bp, Homo sapien
aagcaggaggtggttacagatggaa

SEQ ID NO: 5387639 - DNA, 25 bp, Homo sapien
agcaggaggtggttacagatggaag

SEQ ID NO: 5387640 - DNA, 25 bp, Homo sapien
actggtgcaggtcgttatgaaggct

SEQ ID NO: 5387641 - DNA, 25 bp, Homo sapien
gcaggtcgttatgaaggctgaaagt

SEQ ID NO: 5387642 - DNA, 25 bp, Homo sapien
tcactggtgcaggtcgttatgaagg

SEQ ID NO: 5387643 - DNA, 25 bp, Homo sapien
tgaaagtagggtagtggcgatgggc

SEQ ID NO: 5387644 - DNA, 25 bp, Homo sapien
tgaggtggccccatgcaactttccc

SEQ ID NO: 5387645 - DNA, 25 bp, Homo sapien
aggtggccccatgcaactttcccgt

SEQ ID NO: 5387646 - DNA, 25 bp, Homo sapien
gggttgaggtggccccatgcaactt

SEQ ID NO: 5387647 - DNA, 25 bp, Homo sapien
ttgaggtggccccatgcaactttcc

SEQ ID NO: 5387648 - DNA, 25 bp, Homo sapien
ctccctccccagaggaggctgctgt

SEQ ID NO: 5387649 - DNA, 25 bp, Homo sapien
agaggaggctgctgtgcccgaagtt

SEQ ID NO: 5387650 - DNA, 25 bp, Homo sapien
ccccagaggaggctgctgtgcccga

SEQ ID NO: 5387651 - DNA, 25 bp, Homo sapien
cccagaggaggctgctgtgcccgaa

SEQ ID NO: 5387652 - DNA, 25 bp, Homo sapien
catgaggaaaacaccaacaggggga

SEQ ID NO: 5387653 - DNA, 25 bp, Homo sapien
tgcatgaggaaaacaccaacagggg

SEQ ID NO: 5387654 - DNA, 25 bp, Homo sapien
tgtgcatgaggaaaacaccaacagg

SEQ ID NO: 5387655 - DNA, 25 bp, Homo sapien
ctgtgcatgaggaaaacaccaacag

SEQ ID NO: 5387656 - DNA, 25 bp, Homo sapien
aagttgcccactctcagaggagttg

SEQ ID NO: 5387657 - DNA, 25 bp, Homo sapien
ggcaaagttgcccactctcagagga

SEQ ID NO: 5387658 - DNA, 25 bp, Homo sapien
cactctcagaggagttggcaaaagt

SEQ ID NO: 5387659 - DNA, 25 bp, Homo sapien
ctgttacggcaaagttgcccactct

SEQ ID NO: 5387660 - DNA, 25 bp, Homo sapien
cttcccagttgttgctgatggcctc

SEQ ID NO: 5387661 - DNA, 25 bp, Homo sapien
tcccagttgttgctgatggcctctc

SEQ ID NO: 5387662 - DNA, 25 bp, Homo sapien
ccttcccagttgttgctgatggcct

SEQ ID NO: 5387663 - DNA, 25 bp, Homo sapien
ccagttgttgctgatggcctctcca

SEQ ID NO: 5387664 - DNA, 25 bp, Homo sapien
ggcagtagtagatttgtaattccaa

SEQ ID NO: 5387665 - DNA, 25 bp, Homo sapien
gcagtagtagatttgtaattccaaa

SEQ ID NO: 5387666 - DNA, 25 bp, Homo sapien
gtggcagtagtagatttgtaattcc

SEQ ID NO: 5387667 - DNA, 25 bp, Homo sapien
tggtggcagtagtagatttgtaatt

SEQ ID NO: 5387668 - DNA, 25 bp, Homo sapien
tgtctctaccatcttgtcgtttggg

SEQ ID NO: 5387669 - DNA, 25 bp, Homo sapien
ttgaagttgtggctgccccgaggct

SEQ ID NO: 5387670 - DNA, 25 bp, Homo sapien
gagcatcagggctggtacttgaagt

SEQ ID NO: 5387671 - DNA, 25 bp, Homo sapien
gctgaagtgtctgctgaccctgggt

SEQ ID NO: 5387672 - DNA, 25 bp, Homo sapien
gtggaaccgtggtctctagccccat

SEQ ID NO: 5387673 - DNA, 25 bp, Homo sapien
tcctgtggaaccgtggtctctagcc

SEQ ID NO: 5387674 - DNA, 25 bp, Homo sapien
ctgtggaaccgtggtctctagcccc

SEQ ID NO: 5387675 - DNA, 25 bp, Homo sapien
agctcctgtggaaccgtggtctcta

SEQ ID NO: 5387676 - DNA, 25 bp, Homo sapien
cctgcgccctggctgtcagcacctc

SEQ ID NO: 5387677 - DNA, 25 bp, Homo sapien
ggctgtcagcacctccacttcttct

SEQ ID NO: 5387678 - DNA, 25 bp, Homo sapien
cttgtgcccctgcgccctggctgtc

SEQ ID NO: 5387679 - DNA, 25 bp, Homo sapien
gctgtcagcacctccacttcttctc

SEQ ID NO: 5387680 - DNA, 25 bp, Homo sapien
tgtgcaccctgtgggaccactgtcc

SEQ ID NO: 5387681 - DNA, 25 bp, Homo sapien
tgtgattgcccgcaggttatctgag

SEQ ID NO: 5387682 - DNA, 25 bp, Homo sapien
tgagtgtagtgaggtgtgcaccctg

SEQ ID NO: 5387683 - DNA, 25 bp, Homo sapien
agggtgggaatactgtgattgcccg

SEQ ID NO: 5387684 - DNA, 25 bp, Homo sapien
ccctatgacgcggagtctatcatgg

SEQ ID NO: 5387685 - DNA, 25 bp, Homo sapien
gacgcggagtctatcatggttgcag

SEQ ID NO: 5387686 - DNA, 25 bp, Homo sapien
aggacccctatgacgcggagtctat

SEQ ID NO: 5387687 - DNA, 25 bp, Homo sapien
gtctatcatggttgcagcctgctcc

SEQ ID NO: 5387688 - DNA, 25 bp, Homo sapien
ctgtgacacttgctgccagggtcct

SEQ ID NO: 5387689 - DNA, 25 bp, Homo sapien
tgtgacacttgctgccagggtcctc

SEQ ID NO: 5387690 - DNA, 25 bp, Homo sapien
agatgacatcgaactccacagtcat

SEQ ID NO: 5387691 - DNA, 25 bp, Homo sapien
ggacttgctgctcctagctctggtg

SEQ ID NO: 5387692 - DNA, 25 bp, Homo sapien
tacagcagtctggtacacaaatgca

SEQ ID NO: 5387693 - DNA, 25 bp, Homo sapien
aaccatatctgtttcttacgctgaa

SEQ ID NO: 5387694 - DNA, 25 bp, Homo sapien
cctcggtatcattcctcttggtgaa

SEQ ID NO: 5387695 - DNA, 25 bp, Homo sapien
cttccctactagttgaaagagccag

SEQ ID NO: 5387696 - DNA, 25 bp, Homo sapien
gcaccgtgcttgctcctgtgctcac

SEQ ID NO: 5387697 - DNA, 25 bp, Homo sapien
catgtggcaccgtgcttgctcctgt

SEQ ID NO: 5387698 - DNA, 25 bp, Homo sapien
ggcaggtggccagaaatctaggtcc

SEQ ID NO: 5387699 - DNA, 25 bp, Homo sapien
gttgaggtcgctttgtagatttcag

SEQ ID NO: 5387700 - DNA, 25 bp, Homo sapien
tctaggtccacctttgctgggaagg

SEQ ID NO: 5387701 - DNA, 25 bp, Homo sapien
cactagctggagtttggacggtagt

SEQ ID NO: 5387702 - DNA, 25 bp, Homo sapien
ctgagtctgttggagattagaagta

SEQ ID NO: 5387703 - DNA, 25 bp, Homo sapien
gagtctgttggagattagaagtatt

SEQ ID NO: 5387704 - DNA, 25 bp, Homo sapien
ctgttggagattagaagtatttctg

SEQ ID NO: 5387705 - DNA, 25 bp, Homo sapien
tctgagtctgttggagattagaagt

SEQ ID NO: 5387706 - DNA, 25 bp, Homo sapien
tgtcccaaggagtgctattttgatg

SEQ ID NO: 5387707 - DNA, 25 bp, Homo sapien
gatcttccagtcgtggataccagca

SEQ ID NO: 5387708 - DNA, 25 bp, Homo sapien
tttttgggtagcctatatcagaagg

SEQ ID NO: 5387709 - DNA, 25 bp, Homo sapien
agtcctgtgatatgacccgtcttca

SEQ ID NO: 5387710 - DNA, 25 bp, Homo sapien
attgctcccacaccaagttggaccc

SEQ ID NO: 5387711 - DNA, 25 bp, Homo sapien
cacaccaagttggaccccttggccg

SEQ ID NO: 5387712 - DNA, 25 bp, Homo sapien
tggaccccttggccggagttatcca

SEQ ID NO: 5387713 - DNA, 25 bp, Homo sapien
cttggccggagttatccaaggatat

SEQ ID NO: 5387714 - DNA, 25 bp, Homo sapien
tgggatctgtgagatctgatagagc

SEQ ID NO: 5387715 - DNA, 25 bp, Homo sapien
gatctgtgagatctgatagagcagc

SEQ ID NO: 5387716 - DNA, 25 bp, Homo sapien
tgtgtgggatctgtgagatctgata

SEQ ID NO: 5387717 - DNA, 25 bp, Homo sapien
tgtgggatctgtgagatctgataga

SEQ ID NO: 5387718 - DNA, 25 bp, Homo sapien
caggcatcttctgggccttattgga

SEQ ID NO: 5387719 - DNA, 25 bp, Homo sapien
catcttctgggccttattggatggt

SEQ ID NO: 5387720 - DNA, 25 bp, Homo sapien
tctgggccttattggatggttgcac

SEQ ID NO: 5387721 - DNA, 25 bp, Homo sapien
gggccttattggatggttgcaccat

SEQ ID NO: 5387722 - DNA, 25 bp, Homo sapien
tgcactctgtgttgcatctgtggtt

SEQ ID NO: 5387723 - DNA, 25 bp, Homo sapien
ttgcactctgtgttgcatctgtggt

SEQ ID NO: 5387724 - DNA, 25 bp, Homo sapien
gcactctgtgttgcatctgtggttt

SEQ ID NO: 5387725 - DNA, 25 bp, Homo sapien
ccaagatgcccagtgagggtataat

SEQ ID NO: 5387726 - DNA, 25 bp, Homo sapien
tgcccagtgagggtataatgtctga

SEQ ID NO: 5387727 - DNA, 25 bp, Homo sapien
attctttgagctgccaagatgccca

SEQ ID NO: 5387728 - DNA, 25 bp, Homo sapien
cagtgagggtataatgtctgagtgc

SEQ ID NO: 5387729 - DNA, 25 bp, Homo sapien
gatacatgaaggtggatttctctgc

SEQ ID NO: 5387730 - DNA, 25 bp, Homo sapien
tgattaacaagacgatgcacttgag

SEQ ID NO: 5387731 - DNA, 25 bp, Homo sapien
taataagcattagtgaccagccatg

SEQ ID NO: 5387732 - DNA, 25 bp, Homo sapien
cagatttggaaaggacgactcctaa

SEQ ID NO: 5387733 - DNA, 25 bp, Homo sapien
tctggagttaacactggccttccga

SEQ ID NO: 5387734 - DNA, 25 bp, Homo sapien
ttacagtgttgatcaccagtgccca

SEQ ID NO: 5387735 - DNA, 25 bp, Homo sapien
cagtctccctatagctctccagatt

SEQ ID NO: 5387736 - DNA, 25 bp, Homo sapien
agtcctcaccaggtaacatttccca

SEQ ID NO: 5387737 - DNA, 25 bp, Homo sapien
atgagtttgggattggctttatctc

SEQ ID NO: 5387738 - DNA, 25 bp, Homo sapien
gccaatgagtttgggattggcttta

SEQ ID NO: 5387739 - DNA, 25 bp, Homo sapien
atctctagtgtgagggttttcccag

SEQ ID NO: 5387740 - DNA, 25 bp, Homo sapien
tatctctagtgtgagggttttccca

SEQ ID NO: 5387741 - DNA, 25 bp, Homo sapien
gcgacttggcctctgagggctagaa

SEQ ID NO: 5387742 - DNA, 25 bp, Homo sapien
tctccatgagcctgggattcttcac

SEQ ID NO: 5387743 - DNA, 25 bp, Homo sapien
gaatcactgggaggcgctcacaggt

SEQ ID NO: 5387744 - DNA, 25 bp, Homo sapien
tgactgctctgtgacgtctgaggcc

SEQ ID NO: 5387745 - DNA, 25 bp, Homo sapien
ccccgggatgcgtgttgtaggcact

SEQ ID NO: 5387746 - DNA, 25 bp, Homo sapien
tcctgccgcttcagatttggaaacg

SEQ ID NO: 5387747 - DNA, 25 bp, Homo sapien
gttgccctcgcacacattttccaaa

SEQ ID NO: 5387748 - DNA, 25 bp, Homo sapien
ccgtgactgatgtgagttgccctcg

SEQ ID NO: 5387749 - DNA, 25 bp, Homo sapien
gaaaatatctctgatgtaataagtg

SEQ ID NO: 5387750 - DNA, 25 bp, Homo sapien
tttctttcaggttgatgtccatcag

SEQ ID NO: 5387751 - DNA, 25 bp, Homo sapien
tttcaggttgatgtccatcagaaaa

SEQ ID NO: 5387752 - DNA, 25 bp, Homo sapien
aaatatctctgatgtaataagtggg

SEQ ID NO: 5387753 - DNA, 25 bp, Homo sapien
tggaggaaagaagcgctctccatct

SEQ ID NO: 5387754 - DNA, 25 bp, Homo sapien
gcactggaggaaagaagcgctctcc

SEQ ID NO: 5387755 - DNA, 25 bp, Homo sapien
aggaaagaagcgctctccatctggc

SEQ ID NO: 5387756 - DNA, 25 bp, Homo sapien
aaagaagcgctctccatctggctct

SEQ ID NO: 5387757 - DNA, 25 bp, Homo sapien
ctatttggcagtgggatttaatgaa

SEQ ID NO: 5387758 - DNA, 25 bp, Homo sapien
tgggatttaatgaatccagcagtgc

SEQ ID NO: 5387759 - DNA, 25 bp, Homo sapien
ggtgttcagtcggctgagcagcaga

SEQ ID NO: 5387760 - DNA, 25 bp, Homo sapien
cattcctgggtgaggacggatgcta

SEQ ID NO: 5387761 - DNA, 25 bp, Homo sapien
gacaagcgcaataataaaacacctg

SEQ ID NO: 5387762 - DNA, 25 bp, Homo sapien
catttccaggcacaattgtgtcagc

SEQ ID NO: 5387763 - DNA, 25 bp, Homo sapien
gcatgttggtggcaccagttagaac

SEQ ID NO: 5387764 - DNA, 25 bp, Homo sapien
tgaacaaattcagtccatgagctgc

SEQ ID NO: 5387765 - DNA, 25 bp, Homo sapien
cactgctaagcaggtacagatgccg

SEQ ID NO: 5387766 - DNA, 25 bp, Homo sapien
acagatgccgctgcttcttggaacc

SEQ ID NO: 5387767 - DNA, 25 bp, Homo sapien
gcaggtacagatgccgctgcttctt

SEQ ID NO: 5387768 - DNA, 25 bp, Homo sapien
gagtggccgtgtcacaggctggcaa

SEQ ID NO: 5387769 - DNA, 25 bp, Homo sapien
cagggcgggcagaatcaatgagcac

SEQ ID NO: 5387770 - DNA, 25 bp, Homo sapien
gtcgctcattactgagggcctcagt

SEQ ID NO: 5387771 - DNA, 25 bp, Homo sapien
cacttgagatggcattttcctggca

SEQ ID NO: 5387772 - DNA, 25 bp, Homo sapien
ggcatgtggtcgctcattactgagg

SEQ ID NO: 5387773 - DNA, 25 bp, Homo sapien
tgttaaccttcaccttgcgtgcctt

SEQ ID NO: 5387774 - DNA, 25 bp, Homo sapien
cgctttggtgttaaccttcaccttg

SEQ ID NO: 5387775 - DNA, 25 bp, Homo sapien
ccttgcgtgccttcctcgcaggcat

SEQ ID NO: 5387776 - DNA, 25 bp, Homo sapien
ttggtgttaaccttcaccttgcgtg

SEQ ID NO: 5387777 - DNA, 25 bp, Homo sapien
tcatgcatcataaaggtacaggagc

SEQ ID NO: 5387778 - DNA, 25 bp, Homo sapien
tcattttgaagttgtggcctgcgcc

SEQ ID NO: 5387779 - DNA, 25 bp, Homo sapien
tgggctccatcaaacagctggaaca

SEQ ID NO: 5387780 - DNA, 25 bp, Homo sapien
ggcctctggcctcaacgtggtggat

SEQ ID NO: 5387781 - DNA, 25 bp, Homo sapien
caacatctcagctgacttgcagaag

SEQ ID NO: 5387782 - DNA, 25 bp, Homo sapien
gtctaagaagttcccaggtggcgct

SEQ ID NO: 5387783 - DNA, 25 bp, Homo sapien
gttctccaacttgtgtgagcagcag

SEQ ID NO: 5387784 - DNA, 25 bp, Homo sapien
tcaacagagggcttgttaaccccag

SEQ ID NO: 5387785 - DNA, 25 bp, Homo sapien
taggccccagccatcaagaagcaat

SEQ ID NO: 5387786 - DNA, 25 bp, Homo sapien
tgcagtgttgttcggctcagaccat

SEQ ID NO: 5387787 - DNA, 25 bp, Homo sapien
tcatcagtccctaggacaggatcct

SEQ ID NO: 5387788 - DNA, 25 bp, Homo sapien
tctcctagcccttagaaaaccaggc

SEQ ID NO: 5387789 - DNA, 25 bp, Homo sapien
tcccaacagccctgccaagtagttg

SEQ ID NO: 5387790 - DNA, 25 bp, Homo sapien
tgccaagtagttggcatgatctgca

SEQ ID NO: 5387791 - DNA, 25 bp, Homo sapien
gccaagtagttggcatgatctgcat

SEQ ID NO: 5387792 - DNA, 25 bp, Homo sapien
ctgccaagtagttggcatgatctgc

SEQ ID NO: 5387793 - DNA, 25 bp, Homo sapien
caccaggccagtgcatgtgggaagc

SEQ ID NO: 5387794 - DNA, 25 bp, Homo sapien
gtgaaggacagttgacaccaggcca

SEQ ID NO: 5387795 - DNA, 25 bp, Homo sapien
gaagctgtcagaagagtaagggtca

SEQ ID NO: 5387796 - DNA, 25 bp, Homo sapien
cttgctttttactgaactctgctgc

SEQ ID NO: 5387797 - DNA, 25 bp, Homo sapien
tacaggaggctcaattctggatgtg

SEQ ID NO: 5387798 - DNA, 25 bp, Homo sapien
agctagggtcccctccaacagcagg

SEQ ID NO: 5387799 - DNA, 25 bp, Homo sapien
ctgggagttgacaggagaaacctgt

SEQ ID NO: 5387800 - DNA, 25 bp, Homo sapien
cagcaggcaaggaatactcaggcca

SEQ ID NO: 5387801 - DNA, 25 bp, Homo sapien
tatggataacatgaactgctttctg

SEQ ID NO: 5387802 - DNA, 25 bp, Homo sapien
gctttctggatacgcaaacaaacac

SEQ ID NO: 5387803 - DNA, 25 bp, Homo sapien
gatacgcaaacaaacaccaatgaaa

SEQ ID NO: 5387804 - DNA, 25 bp, Homo sapien
tgctttatctaatgcagctatactg

SEQ ID NO: 5387805 - DNA, 25 bp, Homo sapien
tcttgcttgtggcaaaagaagctgt

SEQ ID NO: 5387806 - DNA, 25 bp, Homo sapien
caagtccaacactgaaaaattggta

SEQ ID NO: 5387807 - DNA, 25 bp, Homo sapien
catttcctggccagtaagcacagaa

SEQ ID NO: 5387808 - DNA, 25 bp, Homo sapien
aagaagctgtcaagtccaacactga

SEQ ID NO: 5387809 - DNA, 25 bp, Homo sapien
tgcccagggctgattgttgtgacat

SEQ ID NO: 5387810 - DNA, 25 bp, Homo sapien
atggctgcggccaaacccaagcacg

SEQ ID NO: 5387811 - DNA, 25 bp, Homo sapien
tggatgcccaaccagattcggagga

SEQ ID NO: 5387812 - DNA, 25 bp, Homo sapien
gacattggccgtatgctggatgccc

SEQ ID NO: 5387813 - DNA, 25 bp, Homo sapien
ctcgcagcagtttcggcgggtgttc

SEQ ID NO: 5387814 - DNA, 25 bp, Homo sapien
tgcagcacgccaaccacgagaagcg

SEQ ID NO: 5387815 - DNA, 25 bp, Homo sapien
tcctgtacacggtgtcctcgcagca

SEQ ID NO: 5387816 - DNA, 25 bp, Homo sapien
tctcggagacgtttttctacctcag

SEQ ID NO: 5387817 - DNA, 25 bp, Homo sapien
cgacagcgcccgctttgtgcagcgc

SEQ ID NO: 5387818 - DNA, 25 bp, Homo sapien
ccaccaccgacagcgcccgctttgt

SEQ ID NO: 5387819 - DNA, 25 bp, Homo sapien
cccgctttgtgcagcgcccgttgct

SEQ ID NO: 5387820 - DNA, 25 bp, Homo sapien
gtgcagcgcccgttgctcttcgcgt

SEQ ID NO: 5387821 - DNA, 25 bp, Homo sapien
tttgaatgtcaagcgagggagcctt

SEQ ID NO: 5387822 - DNA, 25 bp, Homo sapien
aagcacttttcagagcgaggccgag

SEQ ID NO: 5387823 - DNA, 25 bp, Homo sapien
cattgagtctcgagtcactagagcc

SEQ ID NO: 5387824 - DNA, 25 bp, Homo sapien
ttgactccggttacacagacatggg

SEQ ID NO: 5387825 - DNA, 25 bp, Homo sapien
aacaatgcaggagggggtggcatct

SEQ ID NO: 5387826 - DNA, 25 bp, Homo sapien
gggctggaagaacaatgcaggaggg

SEQ ID NO: 5387827 - DNA, 25 bp, Homo sapien
gcgagggctggaagaacaatgcagg

SEQ ID NO: 5387828 - DNA, 25 bp, Homo sapien
ggagggggtggcatctccttcagct

SEQ ID NO: 5387829 - DNA, 25 bp, Homo sapien
atggtggtgcggagccctggcctga

SEQ ID NO: 5387830 - DNA, 25 bp, Homo sapien
agaagagggctaatttgaggaacag

SEQ ID NO: 5387831 - DNA, 25 bp, Homo sapien
cagcagtgtgccgagaagagggcta

SEQ ID NO: 5387832 - DNA, 25 bp, Homo sapien
tgtgccgagaagagggctaatttga

SEQ ID NO: 5387833 - DNA, 25 bp, Homo sapien
tgagacaggccgctgatgatgcaca

SEQ ID NO: 5387834 - DNA, 25 bp, Homo sapien
cagaggcgatgagacaggccgctga

SEQ ID NO: 5387835 - DNA, 25 bp, Homo sapien
gatgatgcacaggacttgcggtaca

SEQ ID NO: 5387836 - DNA, 25 bp, Homo sapien
gccgctgatgatgcacaggacttgc

SEQ ID NO: 5387837 - DNA, 25 bp, Homo sapien
gatgccaatacctgtgaatacctgt

SEQ ID NO: 5387838 - DNA, 25 bp, Homo sapien
cgtgcaccggcaaaagaatagctgt

SEQ ID NO: 5387839 - DNA, 25 bp, Homo sapien
caaaggagctgagttaacgtgcacc

SEQ ID NO: 5387840 - DNA, 25 bp, Homo sapien
cacagcccagagactaggtgaggtc

SEQ ID NO: 5387841 - DNA, 25 bp, Homo sapien
cagctgctctggtaagataaagtcg

SEQ ID NO: 5387842 - DNA, 25 bp, Homo sapien
ttggttttggctccgtcctcgagaa

SEQ ID NO: 5387843 - DNA, 25 bp, Homo sapien
gaattgccactttgggtgctataga

SEQ ID NO: 5387844 - DNA, 25 bp, Homo sapien
taaagtcgaggtacagaggatgcct

SEQ ID NO: 5387845 - DNA, 25 bp, Homo sapien
taatagaacgtaagctccagcaatc

SEQ ID NO: 5387846 - DNA, 25 bp, Homo sapien
ctgggttctagctggacatgggcct

SEQ ID NO: 5387847 - DNA, 25 bp, Homo sapien
taggagaaggtcatgaccaagaaca

SEQ ID NO: 5387848 - DNA, 25 bp, Homo sapien
gacacaagtatttaccaaaggaatg

SEQ ID NO: 5387849 - DNA, 25 bp, Homo sapien
cagtaagacattgacagcatgcgcc

SEQ ID NO: 5387850 - DNA, 25 bp, Homo sapien
gccttgatcatcgtactgcggttat

SEQ ID NO: 5387851 - DNA, 25 bp, Homo sapien
caatgaaatgcaacgtgggatcctg

SEQ ID NO: 5387852 - DNA, 25 bp, Homo sapien
taaaagacattggtatcagctgggc

SEQ ID NO: 5387853 - DNA, 25 bp, Homo sapien
aatcctccattacaggtatggcctc

SEQ ID NO: 5387854 - DNA, 25 bp, Homo sapien
ttctaccagcaactttgctccagct

SEQ ID NO: 5387855 - DNA, 25 bp, Homo sapien
tatagtcacttctaccaccatgaaa

SEQ ID NO: 5387856 - DNA, 25 bp, Homo sapien
ggtatggcctcttttggtgttccca

SEQ ID NO: 5387857 - DNA, 25 bp, Homo sapien
gggcaactcctggtgagcatcaaga

SEQ ID NO: 5387858 - DNA, 25 bp, Homo sapien
ccttgaagatggttatactgaccgc

SEQ ID NO: 5387859 - DNA, 25 bp, Homo sapien
tgtactataatatctgggccaccct

SEQ ID NO: 5387860 - DNA, 25 bp, Homo sapien
catagaaaatggcaccacagcggaa

SEQ ID NO: 5387861 - DNA, 25 bp, Homo sapien
gtccaagggaaagacatttgatatt

SEQ ID NO: 5387862 - DNA, 25 bp, Homo sapien
ccctctgaatacttcctcagaaggc

SEQ ID NO: 5387863 - DNA, 25 bp, Homo sapien
caagggaaagacatttgatattccc

SEQ ID NO: 5387864 - DNA, 25 bp, Homo sapien
cttcctcagaaggcacatgaaagag

SEQ ID NO: 5387865 - DNA, 25 bp, Homo sapien
ctaagtggtcaactgcttggcaaaa

SEQ ID NO: 5387866 - DNA, 25 bp, Homo sapien
tgcttggcaaaatgtctcatctcga

SEQ ID NO: 5387867 - DNA, 25 bp, Homo sapien
aaatgtctcatctcgaagagcaagg

SEQ ID NO: 5387868 - DNA, 25 bp, Homo sapien
catctcgaagagcaaggtgtttgtt

SEQ ID NO: 5387869 - DNA, 25 bp, Homo sapien
tcttcacactggtagcactggattt

SEQ ID NO: 5387870 - DNA, 25 bp, Homo sapien
catgtcttgaacgttcaccgtgcaa

SEQ ID NO: 5387871 - DNA, 25 bp, Homo sapien
ccgtgcaattcacaatgaactcggg

SEQ ID NO: 5387872 - DNA, 25 bp, Homo sapien
aggagcagtcgttgttcagctggaa

SEQ ID NO: 5387873 - DNA, 25 bp, Homo sapien
ctgcgagacagacgcagtcgggttc

SEQ ID NO: 5387874 - DNA, 25 bp, Homo sapien
cgagacagacgcagtcgggttcaga

SEQ ID NO: 5387875 - DNA, 25 bp, Homo sapien
acgcagtcgggttcagatccggccc

SEQ ID NO: 5387876 - DNA, 25 bp, Homo sapien
gacagacgcagtcgggttcagatcc

SEQ ID NO: 5387877 - DNA, 25 bp, Homo sapien
ctctggcaggcttagaccactcctg

SEQ ID NO: 5387878 - DNA, 25 bp, Homo sapien
gcaggcttagaccactcctgggtct

SEQ ID NO: 5387879 - DNA, 25 bp, Homo sapien
tcccacgcctcagagccaggcggct

SEQ ID NO: 5387880 - DNA, 25 bp, Homo sapien
cggaaatcacgaccatcccacgcct

SEQ ID NO: 5387881 - DNA, 25 bp, Homo sapien
gctgctgcgccgcaagtccccgagc

SEQ ID NO: 5387882 - DNA, 25 bp, Homo sapien
agcgcgcgcaccctggatccccgac

SEQ ID NO: 5387883 - DNA, 25 bp, Homo sapien
gtccccgcggcgacccgaatggcca

SEQ ID NO: 5387884 - DNA, 25 bp, Homo sapien
gtgccagacgccaagcgctgctgcg

SEQ ID NO: 5387885 - DNA, 25 bp, Homo sapien
ctgttctcggtgtacgcgctcctgt

SEQ ID NO: 5387886 - DNA, 25 bp, Homo sapien
agagaggacgcgagacctttgcgcc

SEQ ID NO: 5387887 - DNA, 25 bp, Homo sapien
tctgcagagcttagtcgggagccag

SEQ ID NO: 5387888 - DNA, 25 bp, Homo sapien
tcaggacaaccgttcgactagggtc

SEQ ID NO: 5387889 - DNA, 25 bp, Homo sapien
ctagacccaactacccacgctcccg

SEQ ID NO: 5387890 - DNA, 25 bp, Homo sapien
tcccgcagccccacatctatcgcac

SEQ ID NO: 5387891 - DNA, 25 bp, Homo sapien
agacccaactacccacgctcccgca

SEQ ID NO: 5387892 - DNA, 25 bp, Homo sapien
cccgcagccccacatctatcgcact

SEQ ID NO: 5387893 - DNA, 25 bp, Homo sapien
agcttctcccgacggtgcagccgga

SEQ ID NO: 5387894 - DNA, 25 bp, Homo sapien
cgccagacaacttggcagggttcgg

SEQ ID NO: 5387895 - DNA, 25 bp, Homo sapien
cagggttcgggagatgtcgccccct

SEQ ID NO: 5387896 - DNA, 25 bp, Homo sapien
ggcaaaagggctggcgggtagatgg

SEQ ID NO: 5387897 - DNA, 25 bp, Homo sapien
cctcggctgctggcctctgggtatt

SEQ ID NO: 5387898 - DNA, 25 bp, Homo sapien
tggcctcggctgctggcctctgggt

SEQ ID NO: 5387899 - DNA, 25 bp, Homo sapien
gctgctggcctctgggtattctcac

SEQ ID NO: 5387900 - DNA, 25 bp, Homo sapien
cggctgctggcctctgggtattctc

SEQ ID NO: 5387901 - DNA, 25 bp, Homo sapien
aatccgcaaaaagttgccgcgatgc

SEQ ID NO: 5387902 - DNA, 25 bp, Homo sapien
acaatccgcaaaaagttgccgcgat

SEQ ID NO: 5387903 - DNA, 25 bp, Homo sapien
aagcaagaacaatccgcaaaaagtt

SEQ ID NO: 5387904 - DNA, 25 bp, Homo sapien
agcaagaacaatccgcaaaaagttg

SEQ ID NO: 5387905 - DNA, 25 bp, Homo sapien
agagggcaagcgcatcagaggaggc

SEQ ID NO: 5387906 - DNA, 25 bp, Homo sapien
aagcgcatcagaggaggcgacagca

SEQ ID NO: 5387907 - DNA, 25 bp, Homo sapien
ggcaagcgcatcagaggaggcgaca

SEQ ID NO: 5387908 - DNA, 25 bp, Homo sapien
gggagagggcaagcgcatcagagga

SEQ ID NO: 5387909 - DNA, 25 bp, Homo sapien
gccgaggctgctggggcccgcgctg

SEQ ID NO: 5387910 - DNA, 25 bp, Homo sapien
aggctgccccggctgcagcggctgt

SEQ ID NO: 5387911 - DNA, 25 bp, Homo sapien
agcggctgtggctgccgaggctgct

SEQ ID NO: 5387912 - DNA, 25 bp, Homo sapien
gcggaggctgccccggctgcagcgg

SEQ ID NO: 5387913 - DNA, 25 bp, Homo sapien
gcaggtgccgctcgcggagcctgca

SEQ ID NO: 5387914 - DNA, 25 bp, Homo sapien
caggtgccgctcgcggagcctgcat

SEQ ID NO: 5387915 - DNA, 25 bp, Homo sapien
aaggctgggacggtcgcttcacatc

SEQ ID NO: 5387916 - DNA, 25 bp, Homo sapien
ggcatcacgtgacggctgccgagtt

SEQ ID NO: 5387917 - DNA, 25 bp, Homo sapien
ctgaaggaactactggcgatcggga

SEQ ID NO: 5387918 - DNA, 25 bp, Homo sapien
gcctccggagttggcggctgagact

SEQ ID NO: 5387919 - DNA, 25 bp, Homo sapien
aggctgacaggaagggcgcgcgttc

SEQ ID NO: 5387920 - DNA, 25 bp, Homo sapien
acaactgaggctgtcccgctgcggg

SEQ ID NO: 5387921 - DNA, 25 bp, Homo sapien
gcgcgttcccgtgcgcctggcaaag

SEQ ID NO: 5387922 - DNA, 25 bp, Homo sapien
tggcaaagttccacgcccgcaggct

SEQ ID NO: 5387923 - DNA, 25 bp, Homo sapien
gccctggtcgcctagcctaggagaa

SEQ ID NO: 5387924 - DNA, 25 bp, Homo sapien
ctagcctaggagaacgccgtcccgg

SEQ ID NO: 5387925 - DNA, 25 bp, Homo sapien
cgctggagggtgcattgacaccgcc

SEQ ID NO: 5387926 - DNA, 25 bp, Homo sapien
tcccggggacacctgccgtgaggtc

SEQ ID NO: 5387927 - DNA, 25 bp, Homo sapien
cccaaagccaccgattattagcaca

SEQ ID NO: 5387928 - DNA, 25 bp, Homo sapien
aaagccaccgattattagcacatac

SEQ ID NO: 5387929 - DNA, 25 bp, Homo sapien
ctaccagaaagcaaatcagggtgag

SEQ ID NO: 5387930 - DNA, 25 bp, Homo sapien
ttccccaaagccaccgattattagc

SEQ ID NO: 5387931 - DNA, 25 bp, Homo sapien
cagcctcggactcggcctctggctg

SEQ ID NO: 5387932 - DNA, 25 bp, Homo sapien
acgtcctctcctgaaaggccatccc

SEQ ID NO: 5387933 - DNA, 25 bp, Homo sapien
gccatcccagcctcggactcggcct

SEQ ID NO: 5387934 - DNA, 25 bp, Homo sapien
tcccacgtcctctcctgaaaggcca

SEQ ID NO: 5387935 - DNA, 25 bp, Homo sapien
tttccgcaaagtccaagtgacccac

SEQ ID NO: 5387936 - DNA, 25 bp, Homo sapien
caaattcgtcttctttccgcaaagt

SEQ ID NO: 5387937 - DNA, 25 bp, Homo sapien
ttcgtcttctttccgcaaagtccaa

SEQ ID NO: 5387938 - DNA, 25 bp, Homo sapien
cttctttccgcaaagtccaagtgac

SEQ ID NO: 5387939 - DNA, 25 bp, Homo sapien
ggaaatcgcctcctaagctttagct

SEQ ID NO: 5387940 - DNA, 25 bp, Homo sapien
cctttccgcacatccttagggagca

SEQ ID NO: 5387941 - DNA, 25 bp, Homo sapien
catttccgtggaaatcgcctcctaa

SEQ ID NO: 5387942 - DNA, 25 bp, Homo sapien
cgccgggacgctgatcatttatttc

SEQ ID NO: 5387943 - DNA, 25 bp, Homo sapien
aaggaaggctctggtactgcaatag

SEQ ID NO: 5387944 - DNA, 25 bp, Homo sapien
tatcacctgaatctctggcaacgaa

SEQ ID NO: 5387945 - DNA, 25 bp, Homo sapien
tgttatctctatcaagcggtgcacc

SEQ ID NO: 5387946 - DNA, 25 bp, Homo sapien
tttgaggaccaggacaacgaacttc

SEQ ID NO: 5387947 - DNA, 25 bp, Homo sapien
aagattccaagttgtctaccccagg

SEQ ID NO: 5387948 - DNA, 25 bp, Homo sapien
tccaagttgtctaccccaggcctat

SEQ ID NO: 5387949 - DNA, 25 bp, Homo sapien
caaagattccaagttgtctacccca

SEQ ID NO: 5387950 - DNA, 25 bp, Homo sapien
ttgtctaccccaggcctatctgaac

SEQ ID NO: 5387951 - DNA, 25 bp, Homo sapien
gataatctattctcgggatcgtctt

SEQ ID NO: 5387952 - DNA, 25 bp, Homo sapien
tctagggaaattttcgataatctat

SEQ ID NO: 5387953 - DNA, 25 bp, Homo sapien
tattctcgggatcgtcttttgtttc

SEQ ID NO: 5387954 - DNA, 25 bp, Homo sapien
aaattttcgataatctattctcggg

SEQ ID NO: 5387955 - DNA, 25 bp, Homo sapien
ggatgtcttctccatttttcttcat

SEQ ID NO: 5387956 - DNA, 25 bp, Homo sapien
tggatgtcttctccatttttcttca

SEQ ID NO: 5387957 - DNA, 25 bp, Homo sapien
ctggatgtcttctccatttttcttc

SEQ ID NO: 5387958 - DNA, 25 bp, Homo sapien
gcctcttactgcattcctggtgaag

SEQ ID NO: 5387959 - DNA, 25 bp, Homo sapien
ggcaggccaacctcaagggaaaaga

SEQ ID NO: 5387960 - DNA, 25 bp, Homo sapien
gacctttggtgatcactagagaccc

SEQ ID NO: 5387961 - DNA, 25 bp, Homo sapien
taagtgctatttgcgaagggcaggc

SEQ ID NO: 5387962 - DNA, 25 bp, Homo sapien
tcccggtgctcggttccctctatta

SEQ ID NO: 5387963 - DNA, 25 bp, Homo sapien
ggatattactttctcccggtgctcg

SEQ ID NO: 5387964 - DNA, 25 bp, Homo sapien
cctctattacctcaactggacacat

SEQ ID NO: 5387965 - DNA, 25 bp, Homo sapien
tgctcggttccctctattacctcaa

SEQ ID NO: 5387966 - DNA, 25 bp, Homo sapien
ttggtaatagagaaccactctctcc

SEQ ID NO: 5387967 - DNA, 25 bp, Homo sapien
tctccctccaaccacactcacggag

SEQ ID NO: 5387968 - DNA, 25 bp, Homo sapien
aaattaaagtgacgcattggtaata

SEQ ID NO: 5387969 - DNA, 25 bp, Homo sapien
tccaaccacactcacggagatgtga

SEQ ID NO: 5387970 - DNA, 25 bp, Homo sapien
tatggaaatccaggtgcaatagcca

SEQ ID NO: 5387971 - DNA, 25 bp, Homo sapien
ctgacatcccgaaaggaccagaggg

SEQ ID NO: 5387972 - DNA, 25 bp, Homo sapien
cacctctaggtaggcttggtcagca

SEQ ID NO: 5387973 - DNA, 25 bp, Homo sapien
gaacaggcccaggatattaccttgg

SEQ ID NO: 5387974 - DNA, 25 bp, Homo sapien
atagcagacgatgaccttctcaaag

SEQ ID NO: 5387975 - DNA, 25 bp, Homo sapien
attttgctatagcagacgatgacct

SEQ ID NO: 5387976 - DNA, 25 bp, Homo sapien
tttgctatagcagacgatgaccttc

SEQ ID NO: 5387977 - DNA, 25 bp, Homo sapien
gctatagcagacgatgaccttctca

SEQ ID NO: 5387978 - DNA, 25 bp, Homo sapien
aagagtaacccattgggctgaactg

SEQ ID NO: 5387979 - DNA, 25 bp, Homo sapien
gagaaggataatgcagtacatgttt

SEQ ID NO: 5387980 - DNA, 25 bp, Homo sapien
gaacttcagtttaatcatgattcct

SEQ ID NO: 5387981 - DNA, 25 bp, Homo sapien
gagggagaaggataatgcagtacat

SEQ ID NO: 5387982 - DNA, 25 bp, Homo sapien
atgagggagaaggataatgcagtac

SEQ ID NO: 5387983 - DNA, 25 bp, Homo sapien
tctgattagttaaggaggagcagtt

SEQ ID NO: 5387984 - DNA, 25 bp, Homo sapien
gcccactgtgtaattcgctgagtaa

SEQ ID NO: 5387985 - DNA, 25 bp, Homo sapien
tagtaagtgtatatctctaggtttc

SEQ ID NO: 5387986 - DNA, 25 bp, Homo sapien
gagtaatacttgacatttgtcctgg

SEQ ID NO: 5387987 - DNA, 25 bp, Homo sapien
cgatgagagcgggagagtccagggc

SEQ ID NO: 5387988 - DNA, 25 bp, Homo sapien
gggaggcagcatgccttgggatggc

SEQ ID NO: 5387989 - DNA, 25 bp, Homo sapien
tccagggcgactccttgcttcatag

SEQ ID NO: 5387990 - DNA, 25 bp, Homo sapien
catggacgatgagagcgggagagtc

SEQ ID NO: 5387991 - DNA, 25 bp, Homo sapien
ggatggcgagacattcagtgaagac

SEQ ID NO: 5387992 - DNA, 25 bp, Homo sapien
ctacaaggatggcgagacattcagt

SEQ ID NO: 5387993 - DNA, 25 bp, Homo sapien
caaggatggcgagacattcagtgaa

SEQ ID NO: 5387994 - DNA, 25 bp, Homo sapien
tacaaggatggcgagacattcagtg

SEQ ID NO: 5387995 - DNA, 25 bp, Homo sapien
tcagggtgtgcgaggacagatctct

SEQ ID NO: 5387996 - DNA, 25 bp, Homo sapien
aaggcaggtcgcagacaccttggtg

SEQ ID NO: 5387997 - DNA, 25 bp, Homo sapien
gtgctgcttctaggacctcaccacc

SEQ ID NO: 5387998 - DNA, 25 bp, Homo sapien
ctcttttaaaggcaggtcgcagaca

SEQ ID NO: 5387999 - DNA, 25 bp, Homo sapien
ccgtgttagcctggttggtctcgaa

SEQ ID NO: 5388000 - DNA, 25 bp, Homo sapien
tgagactacaggcctcccaagtagc

SEQ ID NO: 5388001 - DNA, 25 bp, Homo sapien
ctcctgaccttgtgatctacccggc

SEQ ID NO: 5388002 - DNA, 25 bp, Homo sapien
gctgagactacaggcctcccaagta

SEQ ID NO: 5388003 - DNA, 25 bp, Homo sapien
tgtgtggagtgcaaccaccctggtc

SEQ ID NO: 5388004 - DNA, 25 bp, Homo sapien
catagagcatttccatcgttgaggg

SEQ ID NO: 5388005 - DNA, 25 bp, Homo sapien
gagaactcttaggaaaactggagca

SEQ ID NO: 5388006 - DNA, 25 bp, Homo sapien
cactggctgcgtttcaggtgcttaa

SEQ ID NO: 5388007 - DNA, 25 bp, Homo sapien
ttgagataactcaattggaggctgt

SEQ ID NO: 5388008 - DNA, 25 bp, Homo sapien
aaaggtataatcagcggcttcccag

SEQ ID NO: 5388009 - DNA, 25 bp, Homo sapien
aatccttacagactgcactgcaatg

SEQ ID NO: 5388010 - DNA, 25 bp, Homo sapien
tatgtaccagaaaattagatctcag

SEQ ID NO: 5388011 - DNA, 25 bp, Homo sapien
agtgctttcactaactgtccccttc

SEQ ID NO: 5388012 - DNA, 25 bp, Homo sapien
ctgtcactattactgccaccgctgg

SEQ ID NO: 5388013 - DNA, 25 bp, Homo sapien
caccgctggcagagtacgtacacat

SEQ ID NO: 5388014 - DNA, 25 bp, Homo sapien
aaaaccattatctccatagtccagg

SEQ ID NO: 5388015 - DNA, 25 bp, Homo sapien
gctgtatgaacagtattcccctctg

SEQ ID NO: 5388016 - DNA, 25 bp, Homo sapien
agaaattgctgaggcggttgacgct

SEQ ID NO: 5388017 - DNA, 25 bp, Homo sapien
gaatactggatccaggagcgcaact

SEQ ID NO: 5388018 - DNA, 25 bp, Homo sapien
caatgatgctgtattcagaaattgc

SEQ ID NO: 5388019 - DNA, 25 bp, Homo sapien
acccacgtcttgtggaggcagccat

SEQ ID NO: 5388020 - DNA, 25 bp, Homo sapien
tccagcaggactctagtgttcccca

SEQ ID NO: 5388021 - DNA, 25 bp, Homo sapien
ggatctgctcccctacttgtccatg

SEQ ID NO: 5388022 - DNA, 25 bp, Homo sapien
tccccttccatactgaggcagatgc

SEQ ID NO: 5388023 - DNA, 25 bp, Homo sapien
agcaaccaaggctcttgataccaga

SEQ ID NO: 5388024 - DNA, 25 bp, Homo sapien
catagttgggcagaaactttagtaa

SEQ ID NO: 5388025 - DNA, 25 bp, Homo sapien
tcatcatcatagttgggcagaaact

SEQ ID NO: 5388026 - DNA, 25 bp, Homo sapien
ttagtaaaaatagcaaccaaggctc

SEQ ID NO: 5388027 - DNA, 25 bp, Homo sapien
aaatgaaccatgtgtcttcctcctc

SEQ ID NO: 5388028 - DNA, 25 bp, Homo sapien
aatgaaccatgtgtcttcctcctcc

SEQ ID NO: 5388029 - DNA, 25 bp, Homo sapien
ggccaccccaggacgagtggtgaaa

SEQ ID NO: 5388030 - DNA, 25 bp, Homo sapien
caaataggctgaccatggtcagagt

SEQ ID NO: 5388031 - DNA, 25 bp, Homo sapien
tgcagtgggccaccccaggacgagt

SEQ ID NO: 5388032 - DNA, 25 bp, Homo sapien
accccaggacgagtggtgaaatggc

SEQ ID NO: 5388033 - DNA, 25 bp, Homo sapien
ggaagcggctggcttgccattgggt

SEQ ID NO: 5388034 - DNA, 25 bp, Homo sapien
gcttgccattgggtcttcagcatat

SEQ ID NO: 5388035 - DNA, 25 bp, Homo sapien
gggtcttcagcatatccgaatgatg

SEQ ID NO: 5388036 - DNA, 25 bp, Homo sapien
tatccgaatgatgagcatgtctgag

SEQ ID NO: 5388037 - DNA, 25 bp, Homo sapien
caagggtttgggctctcatggaaga

SEQ ID NO: 5388038 - DNA, 25 bp, Homo sapien
gcataggtagcgtcctgtcgagcga

SEQ ID NO: 5388039 - DNA, 25 bp, Homo sapien
gccgtctgtggaggaaggcacttca

SEQ ID NO: 5388040 - DNA, 25 bp, Homo sapien
tgaacaatggcgctatctgcagggc

SEQ ID NO: 5388041 - DNA, 25 bp, Homo sapien
ctctttgctgagtagcagaagtctg

SEQ ID NO: 5388042 - DNA, 25 bp, Homo sapien
ctgagtagcagaagtctgggaattt

SEQ ID NO: 5388043 - DNA, 25 bp, Homo sapien
tttgctgagtagcagaagtctggga

SEQ ID NO: 5388044 - DNA, 25 bp, Homo sapien
tgctgagtagcagaagtctgggaat

SEQ ID NO: 5388045 - DNA, 25 bp, Homo sapien
ggacaactggtcaactgagggctga

SEQ ID NO: 5388046 - DNA, 25 bp, Homo sapien
tgacttaaggcactacttcccagtc

SEQ ID NO: 5388047 - DNA, 25 bp, Homo sapien
tcgcacataggaaatatacagttgg

SEQ ID NO: 5388048 - DNA, 25 bp, Homo sapien
ccaggcacctcatgggatgacttaa

SEQ ID NO: 5388049 - DNA, 25 bp, Homo sapien
ctcattgaggtagcccatttctaga

SEQ ID NO: 5388050 - DNA, 25 bp, Homo sapien
agcatgtccaactgccggcagccat

SEQ ID NO: 5388051 - DNA, 25 bp, Homo sapien
gagattccttgatatttgggtggca

SEQ ID NO: 5388052 - DNA, 25 bp, Homo sapien
ggacttcagcaggtgtgccctcatt

SEQ ID NO: 5388053 - DNA, 25 bp, Homo sapien
gcagctcagcttcccgatctgtagc

SEQ ID NO: 5388054 - DNA, 25 bp, Homo sapien
gatctgtagcacattactcttctct

SEQ ID NO: 5388055 - DNA, 25 bp, Homo sapien
tgggttaattcacgccacctcgtag

SEQ ID NO: 5388056 - DNA, 25 bp, Homo sapien
ttccatggcaagaaaagataccagc

SEQ ID NO: 5388057 - DNA, 25 bp, Homo sapien
aatctctagacctttgctcatgtgg

SEQ ID NO: 5388058 - DNA, 25 bp, Homo sapien
taagttcaaatatctaagctcggct

SEQ ID NO: 5388059 - DNA, 25 bp, Homo sapien
tcactgtgtgcctttccggagatca

SEQ ID NO: 5388060 - DNA, 25 bp, Homo sapien
cacagcacaccattgatcagggaag

SEQ ID NO: 5388061 - DNA, 25 bp, Homo sapien
gatgtccctaatacccattaactcc

SEQ ID NO: 5388062 - DNA, 25 bp, Homo sapien
caactgaagttagaaggagataacc

SEQ ID NO: 5388063 - DNA, 25 bp, Homo sapien
agttagaaggagataaccttggtag

SEQ ID NO: 5388064 - DNA, 25 bp, Homo sapien
aggctgagatgctagatgtccctaa

SEQ ID NO: 5388065 - DNA, 25 bp, Homo sapien
tacactctttgatacttgcacaacc

SEQ ID NO: 5388066 - DNA, 25 bp, Homo sapien
gctcgtagcctaggaccaacaggct

SEQ ID NO: 5388067 - DNA, 25 bp, Homo sapien
tgcacaaccttgaaattgccgaatg

SEQ ID NO: 5388068 - DNA, 25 bp, Homo sapien
tgcaccaggccgatactcgtatttt

SEQ ID NO: 5388069 - DNA, 25 bp, Homo sapien
caaatgtgacttgcggaagtgattc

SEQ ID NO: 5388070 - DNA, 25 bp, Homo sapien
tgattccatgatgcctcagtgtctt

SEQ ID NO: 5388071 - DNA, 25 bp, Homo sapien
ctacacccaaatgtgacttgcggaa

SEQ ID NO: 5388072 - DNA, 25 bp, Homo sapien
tgatgcctcagtgtcttgtgtcgag

SEQ ID NO: 5388073 - DNA, 25 bp, Homo sapien
tagtcagcacactcacattcatggc

SEQ ID NO: 5388074 - DNA, 25 bp, Homo sapien
cagcacactcacattcatggctata

SEQ ID NO: 5388075 - DNA, 25 bp, Homo sapien
taaatagtcagcacactcacattca

SEQ ID NO: 5388076 - DNA, 25 bp, Homo sapien
cactcacattcatggctatatttag

SEQ ID NO: 5388077 - DNA, 25 bp, Homo sapien
gcctggaggagctaaaggtgccact

SEQ ID NO: 5388078 - DNA, 25 bp, Homo sapien
ggaagaaggatacatttagaataag

SEQ ID NO: 5388079 - DNA, 25 bp, Homo sapien
tagaataagtctccataaaagacat

SEQ ID NO: 5388080 - DNA, 25 bp, Homo sapien
gaatgtaccatatctggaagaagga

SEQ ID NO: 5388081 - DNA, 25 bp, Homo sapien
ctaggaatgtaccatatctggaaga

SEQ ID NO: 5388082 - DNA, 25 bp, Homo sapien
atcgtcttcatcctcttgcaagttt

SEQ ID NO: 5388083 - DNA, 25 bp, Homo sapien
gcagtgagtcatttatctagatatt

SEQ ID NO: 5388084 - DNA, 25 bp, Homo sapien
tatatttcagttggaaggcccaggc

SEQ ID NO: 5388085 - DNA, 25 bp, Homo sapien
ctttcctggaatgtaacttaagaag

SEQ ID NO: 5388086 - DNA, 25 bp, Homo sapien
ccaggcactagattgggcagcatca

SEQ ID NO: 5388087 - DNA, 25 bp, Homo sapien
taaacgcaacaaatctgactccgga

SEQ ID NO: 5388088 - DNA, 25 bp, Homo sapien
gaagacccatcccaaagcaatagag

SEQ ID NO: 5388089 - DNA, 25 bp, Homo sapien
ggtggcactgggatttaaacgcaac

SEQ ID NO: 5388090 - DNA, 25 bp, Homo sapien
cgtgcaatgcaatgggtgtcccgct

SEQ ID NO: 5388091 - DNA, 25 bp, Homo sapien
aaataattagagtgtttcttgcaga

SEQ ID NO: 5388092 - DNA, 25 bp, Homo sapien
tcacagaaaataattagagtgtttc

SEQ ID NO: 5388093 - DNA, 25 bp, Homo sapien
agaaaataattagagtgtttcttgc

SEQ ID NO: 5388094 - DNA, 25 bp, Homo sapien
taattagagtgtttcttgcagatat

SEQ ID NO: 5388095 - DNA, 25 bp, Homo sapien
gtttccttgagtactgatagagctg

SEQ ID NO: 5388096 - DNA, 25 bp, Homo sapien
ctgccgatgagacaggagccctgag

SEQ ID NO: 5388097 - DNA, 25 bp, Homo sapien
gccctgagaactgccctttaacaca

SEQ ID NO: 5388098 - DNA, 25 bp, Homo sapien
ttttggtacttccatatcggctttg

SEQ ID NO: 5388099 - DNA, 25 bp, Homo sapien
caggaagcattacttgatccacttt

SEQ ID NO: 5388100 - DNA, 25 bp, Homo sapien
agcattacttgatccactttctgtc

SEQ ID NO: 5388101 - DNA, 25 bp, Homo sapien
ctgcaggaagcattacttgatccac

SEQ ID NO: 5388102 - DNA, 25 bp, Homo sapien
ggaagcattacttgatccactttct

SEQ ID NO: 5388103 - DNA, 25 bp, Homo sapien
aagggtttctcatgggccttgatca

SEQ ID NO: 5388104 - DNA, 25 bp, Homo sapien
cctttgacggataagggtttctcat

SEQ ID NO: 5388105 - DNA, 25 bp, Homo sapien
tctcatgggccttgatcaaatcttc

SEQ ID NO: 5388106 - DNA, 25 bp, Homo sapien
gacggataagggtttctcatgggcc

SEQ ID NO: 5388107 - DNA, 25 bp, Homo sapien
gaaggtgtctttcgttgaacatgca

SEQ ID NO: 5388108 - DNA, 25 bp, Homo sapien
ctattccttggttcaatcttcagtt

SEQ ID NO: 5388109 - DNA, 25 bp, Homo sapien
tcttgtggtgttctccgattatttt

SEQ ID NO: 5388110 - DNA, 25 bp, Homo sapien
gcaacagggctgtgtctattccttg

SEQ ID NO: 5388111 - DNA, 25 bp, Homo sapien
gaagtttctagcttggatgtactgc

SEQ ID NO: 5388112 - DNA, 25 bp, Homo sapien
aaaccgccatctggattatctgctg

SEQ ID NO: 5388113 - DNA, 25 bp, Homo sapien
tcttccgaaaaccaaaccagctggc

SEQ ID NO: 5388114 - DNA, 25 bp, Homo sapien
catcagtcgcggttgcagaggcatc

SEQ ID NO: 5388115 - DNA, 25 bp, Homo sapien
actgcggcggtcactgcctggttcc

SEQ ID NO: 5388116 - DNA, 25 bp, Homo sapien
cctcagactttggagggatcctcaa

SEQ ID NO: 5388117 - DNA, 25 bp, Homo sapien
ggcactctccctgggtgaaggcctg

SEQ ID NO: 5388118 - DNA, 25 bp, Homo sapien
tggttccccaagtacagccacattg

SEQ ID NO: 5388119 - DNA, 25 bp, Homo sapien
gaatagtcatagctgggcctggcca

SEQ ID NO: 5388120 - DNA, 25 bp, Homo sapien
ggactttgcctgacccttcgatggg

SEQ ID NO: 5388121 - DNA, 25 bp, Homo sapien
gcttagacttgttcacagccacgga

SEQ ID NO: 5388122 - DNA, 25 bp, Homo sapien
taatgatctgagtgcggactttgcc

SEQ ID NO: 5388123 - DNA, 25 bp, Homo sapien
ccttgaccgtgaccctggagtctga

SEQ ID NO: 5388124 - DNA, 25 bp, Homo sapien
tgtcactagactcaatggcaggcct

SEQ ID NO: 5388125 - DNA, 25 bp, Homo sapien
cttttgatagatgcccatgggtgcc

SEQ ID NO: 5388126 - DNA, 25 bp, Homo sapien
gagagtttcccaggagctaaggctg

SEQ ID NO: 5388127 - DNA, 25 bp, Homo sapien
gctgaattcaatgggctcaccgtct

SEQ ID NO: 5388128 - DNA, 25 bp, Homo sapien
ccgtcttccgcatcaaatatcacag

SEQ ID NO: 5388129 - DNA, 25 bp, Homo sapien
ctggtgagagctgaattcaatgggc

SEQ ID NO: 5388130 - DNA, 25 bp, Homo sapien
agtgacaaccccagtctggtgagag

SEQ ID NO: 5388131 - DNA, 25 bp, Homo sapien
ggagacccacatagagattttccaa

SEQ ID NO: 5388132 - DNA, 25 bp, Homo sapien
ctgaagggatgggcacttgtttttc

SEQ ID NO: 5388133 - DNA, 25 bp, Homo sapien
tgaagggatgggcacttgtttttcc

SEQ ID NO: 5388134 - DNA, 25 bp, Homo sapien
ccttgggataaactgaggatgtgcc

SEQ ID NO: 5388135 - DNA, 25 bp, Homo sapien
tcggcagccaatgacacgtctgaag

SEQ ID NO: 5388136 - DNA, 25 bp, Homo sapien
cagactgtcggaaacactgtgggtt

SEQ ID NO: 5388137 - DNA, 25 bp, Homo sapien
acggacttatcggtgtcggcagcca

SEQ ID NO: 5388138 - DNA, 25 bp, Homo sapien
ggaactgcttggagcaatgctaagg

SEQ ID NO: 5388139 - DNA, 25 bp, Homo sapien
taaggtggaagggtcatcgtccgca

SEQ ID NO: 5388140 - DNA, 25 bp, Homo sapien
aatctagatcataaacaaatgtctt

SEQ ID NO: 5388141 - DNA, 25 bp, Homo sapien
gcatcaacgtgggaatctagatcat

SEQ ID NO: 5388142 - DNA, 25 bp, Homo sapien
ccacttgggagcgaagaatcaatac

SEQ ID NO: 5388143 - DNA, 25 bp, Homo sapien
ccttgatacgagttggaggtagttc

SEQ ID NO: 5388144 - DNA, 25 bp, Homo sapien
tattccttcattcgagttcatgcaa

SEQ ID NO: 5388145 - DNA, 25 bp, Homo sapien
tgtaggactagcaaagccacttggg

SEQ ID NO: 5388146 - DNA, 25 bp, Homo sapien
aggttcttcccatcgtgccacgtgt

SEQ ID NO: 5388147 - DNA, 25 bp, Homo sapien
aaagagacagttcactgctgctact

SEQ ID NO: 5388148 - DNA, 25 bp, Homo sapien
tagctgtttcgaggacagagatgac

SEQ ID NO: 5388149 - DNA, 25 bp, Homo sapien
ggagccactggagtactcgctgcag

SEQ ID NO: 5388150 - DNA, 25 bp, Homo sapien
ccaggcaaagggaatggctgagcct

SEQ ID NO: 5388151 - DNA, 25 bp, Homo sapien
tacagagtaattccttgcaaagaag

SEQ ID NO: 5388152 - DNA, 25 bp, Homo sapien
tgccagcaggcacgtaagttaagga

SEQ ID NO: 5388153 - DNA, 25 bp, Homo sapien
tctgacatgggctgtgctaagccag

SEQ ID NO: 5388154 - DNA, 25 bp, Homo sapien
agatgaaagatccaagagacgtgag

SEQ ID NO: 5388155 - DNA, 25 bp, Homo sapien
ttcgtgactgtgtcagacttcggtt

SEQ ID NO: 5388156 - DNA, 25 bp, Homo sapien
gatccaagagacgtgagtgaagttt

SEQ ID NO: 5388157 - DNA, 25 bp, Homo sapien
gcacctcagcatcagttcgtgactg

SEQ ID NO: 5388158 - DNA, 25 bp, Homo sapien
gaagaatcaccctttcggcagcaag

SEQ ID NO: 5388159 - DNA, 25 bp, Homo sapien
aaaaagtgcaaagtcaatagcagag

SEQ ID NO: 5388160 - DNA, 25 bp, Homo sapien
caccctttcggcagcaagctaaaaa

SEQ ID NO: 5388161 - DNA, 25 bp, Homo sapien
cactgaagaatcaccctttcggcag

SEQ ID NO: 5388162 - DNA, 25 bp, Homo sapien
aaaatagaagtgtctcacccaccct

SEQ ID NO: 5388163 - DNA, 25 bp, Homo sapien
aattttacccatcatagcactattc

SEQ ID NO: 5388164 - DNA, 25 bp, Homo sapien
cctccaaatcttttactgccagtta

SEQ ID NO: 5388165 - DNA, 25 bp, Homo sapien
taaaagttagatatgactaagcagc

SEQ ID NO: 5388166 - DNA, 25 bp, Homo sapien
cagaaatctctggaacacttttacc

SEQ ID NO: 5388167 - DNA, 25 bp, Homo sapien
tctctggaacacttttacccttctc

SEQ ID NO: 5388168 - DNA, 25 bp, Homo sapien
tcctccactcctcccagcttcaggg

SEQ ID NO: 5388169 - DNA, 25 bp, Homo sapien
tccagaaatctctggaacactttta

SEQ ID NO: 5388170 - DNA, 25 bp, Homo sapien
atagtttggcagtttaggatttaga

SEQ ID NO: 5388171 - DNA, 25 bp, Homo sapien
gactaacagaatctaccatgaaatt

SEQ ID NO: 5388172 - DNA, 25 bp, Homo sapien
ctgaggatagtttggcagtttagga

SEQ ID NO: 5388173 - DNA, 25 bp, Homo sapien
ggcagtttaggatttagactaacag

SEQ ID NO: 5388174 - DNA, 25 bp, Homo sapien
tgaacaccttcaaggacatattatc

SEQ ID NO: 5388175 - DNA, 25 bp, Homo sapien
cgtgaacaccttcaaggacatatta

SEQ ID NO: 5388176 - DNA, 25 bp, Homo sapien
ccgtgaacaccttcaaggacatatt

SEQ ID NO: 5388177 - DNA, 25 bp, Homo sapien
aaggacatattatcatcaccagtca

SEQ ID NO: 5388178 - DNA, 25 bp, Homo sapien
tgggccaatatctcattcactcaga

SEQ ID NO: 5388179 - DNA, 25 bp, Homo sapien
ctgtatatagggagaaaacctactg

SEQ ID NO: 5388180 - DNA, 25 bp, Homo sapien
tcacttggttaaaagcccataagga

SEQ ID NO: 5388181 - DNA, 25 bp, Homo sapien
taaatagatagcttaatccagggca

SEQ ID NO: 5388182 - DNA, 25 bp, Homo sapien
catttcaagaatggcccgaggtcac

SEQ ID NO: 5388183 - DNA, 25 bp, Homo sapien
ggatgtgaatctcagcctgcgtgga

SEQ ID NO: 5388184 - DNA, 25 bp, Homo sapien
caaagctgctcgttagactgagggc

SEQ ID NO: 5388185 - DNA, 25 bp, Homo sapien
tctgagtgtccaataaccagggagg

SEQ ID NO: 5388186 - DNA, 25 bp, Homo sapien
caggcacaactgaaggttaaccccg

SEQ ID NO: 5388187 - DNA, 25 bp, Homo sapien
cttgattttgagatgttaggccgac

SEQ ID NO: 5388188 - DNA, 25 bp, Homo sapien
gcccaactgttctagtgcagccagg

SEQ ID NO: 5388189 - DNA, 25 bp, Homo sapien
taggccgacagtgattgacagaaac

SEQ ID NO: 5388190 - DNA, 25 bp, Homo sapien
gatactctgccatctgagccctggt

SEQ ID NO: 5388191 - DNA, 25 bp, Homo sapien
tccagtgcttagtgcatgacacaga

SEQ ID NO: 5388192 - DNA, 25 bp, Homo sapien
tcagcatccctgaagcatcactggc

SEQ ID NO: 5388193 - DNA, 25 bp, Homo sapien
tatgttttcatgtctggccagtgcc

SEQ ID NO: 5388194 - DNA, 25 bp, Homo sapien
agtgggatgcttggcttgtggacag

SEQ ID NO: 5388195 - DNA, 25 bp, Homo sapien
cagatcagactcatggatagattta

SEQ ID NO: 5388196 - DNA, 25 bp, Homo sapien
aagtgtgcagtgtcttgccagatca

SEQ ID NO: 5388197 - DNA, 25 bp, Homo sapien
tggaaaggaaagtgtgcagtgtctt

SEQ ID NO: 5388198 - DNA, 25 bp, Homo sapien
ctaagaatacgagaataatgtccca

SEQ ID NO: 5388199 - DNA, 25 bp, Homo sapien
caggataatggttacacaggtatcc

SEQ ID NO: 5388200 - DNA, 25 bp, Homo sapien
cgagaataatgtcccatcaggataa

SEQ ID NO: 5388201 - DNA, 25 bp, Homo sapien
taatggttacacaggtatcccaaac

SEQ ID NO: 5388202 - DNA, 25 bp, Homo sapien
catggacctggctccctttgtaagt

SEQ ID NO: 5388203 - DNA, 25 bp, Homo sapien
gtaagtttaccagaatctgtcaact

SEQ ID NO: 5388204 - DNA, 25 bp, Homo sapien
taatcctcagagcactccctttctg

SEQ ID NO: 5388205 - DNA, 25 bp, Homo sapien
gctaaatgatatccatataacctct

SEQ ID NO: 5388206 - DNA, 25 bp, Homo sapien
ctcgctgttggaataggatgcttag

SEQ ID NO: 5388207 - DNA, 25 bp, Homo sapien
tgcttagtgttcgattctgctgttc

SEQ ID NO: 5388208 - DNA, 25 bp, Homo sapien
ggatgcttagtgttcgattctgctg

SEQ ID NO: 5388209 - DNA, 25 bp, Homo sapien
gatcagaagtgggtctgactcgctg

SEQ ID NO: 5388210 - DNA, 25 bp, Homo sapien
cactgatacatccttatctctgccc

SEQ ID NO: 5388211 - DNA, 25 bp, Homo sapien
gatacatccttatctctgccccaaa

SEQ ID NO: 5388212 - DNA, 25 bp, Homo sapien
aaatgctaagacttttgtaacatga

SEQ ID NO: 5388213 - DNA, 25 bp, Homo sapien
taagacttttgtaacatgaaaagcc

SEQ ID NO: 5388214 - DNA, 25 bp, Homo sapien
actgatccagggcttcaacatcgaa

SEQ ID NO: 5388215 - DNA, 25 bp, Homo sapien
acatctcagactgatccagggcttc

SEQ ID NO: 5388216 - DNA, 25 bp, Homo sapien
cagactgatccagggcttcaacatc

SEQ ID NO: 5388217 - DNA, 25 bp, Homo sapien
tcacatctcagactgatccagggct

SEQ ID NO: 5388218 - DNA, 25 bp, Homo sapien
tccagaagttttaggaagtcctgtg

SEQ ID NO: 5388219 - DNA, 25 bp, Homo sapien
cagccgttggatttcaatccttctt

SEQ ID NO: 5388220 - DNA, 25 bp, Homo sapien
taaccagccgttggatttcaatcct

SEQ ID NO: 5388221 - DNA, 25 bp, Homo sapien
tcataaccagccgttggatttcaat

SEQ ID NO: 5388222 - DNA, 25 bp, Homo sapien
gtgatcataaccagccgttggattt

SEQ ID NO: 5388223 - DNA, 25 bp, Homo sapien
ctcactccttaggtttgtaactaag

SEQ ID NO: 5388224 - DNA, 25 bp, Homo sapien
tacacagagctgcaataacactccc

SEQ ID NO: 5388225 - DNA, 25 bp, Homo sapien
cagcatagagtttcaaacaggagaa

SEQ ID NO: 5388226 - DNA, 25 bp, Homo sapien
ggtttgtaactaagtcagcatagag

SEQ ID NO: 5388227 - DNA, 25 bp, Homo sapien
agtaagcagagcttgaacaacttgg

SEQ ID NO: 5388228 - DNA, 25 bp, Homo sapien
gagtaagcagagcttgaacaacttg

SEQ ID NO: 5388229 - DNA, 25 bp, Homo sapien
gtaagcagagcttgaacaacttggt

SEQ ID NO: 5388230 - DNA, 25 bp, Homo sapien
ggctcgtgattcctccatgcactct

SEQ ID NO: 5388231 - DNA, 25 bp, Homo sapien
ggctatggagttctctattatttta

SEQ ID NO: 5388232 - DNA, 25 bp, Homo sapien
tgaaaaacttccagggctcgtgatt

SEQ ID NO: 5388233 - DNA, 25 bp, Homo sapien
acttccagggctcgtgattcctcca

SEQ ID NO: 5388234 - DNA, 25 bp, Homo sapien
tctgcattcccaatgaggccctagg

SEQ ID NO: 5388235 - DNA, 25 bp, Homo sapien
tatcaagtgcgccagcatcatcggg

SEQ ID NO: 5388236 - DNA, 25 bp, Homo sapien
tatatacggcgttactgctgggagc

SEQ ID NO: 5388237 - DNA, 25 bp, Homo sapien
tgttgacacataggtcgctgagccc

SEQ ID NO: 5388238 - DNA, 25 bp, Homo sapien
tcaagacatcgctcatattgttccc

SEQ ID NO: 5388239 - DNA, 25 bp, Homo sapien
aagacatcgctcatattgttccctt

SEQ ID NO: 5388240 - DNA, 25 bp, Homo sapien
ctcatcaagacatcgctcatattgt

SEQ ID NO: 5388241 - DNA, 25 bp, Homo sapien
tcatcaagacatcgctcatattgtt

SEQ ID NO: 5388242 - DNA, 25 bp, Homo sapien
ctgagacagccacctgggtctgctc

SEQ ID NO: 5388243 - DNA, 25 bp, Homo sapien
cttctttcccggcaggctgcctctc

SEQ ID NO: 5388244 - DNA, 25 bp, Homo sapien
ttatctccttctttcccggcaggct

SEQ ID NO: 5388245 - DNA, 25 bp, Homo sapien
gagacagccacctgggtctgctcac

SEQ ID NO: 5388246 - DNA, 25 bp, Homo sapien
tcatttcctcggtgccctctgcttt

SEQ ID NO: 5388247 - DNA, 25 bp, Homo sapien
gcagtgctggccttgggctttctca

SEQ ID NO: 5388248 - DNA, 25 bp, Homo sapien
caacagcccactggatctgccacgt

SEQ ID NO: 5388249 - DNA, 25 bp, Homo sapien
ccacgtgtccacctgtgtgcagtgc

SEQ ID NO: 5388250 - DNA, 25 bp, Homo sapien
ccttcagggattgcttttggccagt

SEQ ID NO: 5388251 - DNA, 25 bp, Homo sapien
atggaagcttttccgtctctgcagc

SEQ ID NO: 5388252 - DNA, 25 bp, Homo sapien
gcttttggccagtcccatggaagct

SEQ ID NO: 5388253 - DNA, 25 bp, Homo sapien
tctgcagctgagatggaacccctca

SEQ ID NO: 5388254 - DNA, 25 bp, Homo sapien
gggtttctgaatcactcatcttatc

SEQ ID NO: 5388255 - DNA, 25 bp, Homo sapien
ttctgaatcactcatcttatcacac

SEQ ID NO: 5388256 - DNA, 25 bp, Homo sapien
ggggtttctgaatcactcatcttat

SEQ ID NO: 5388257 - DNA, 25 bp, Homo sapien
gtttctgaatcactcatcttatcac

SEQ ID NO: 5388258 - DNA, 25 bp, Homo sapien
ttggctaaagggtgttccccactga

SEQ ID NO: 5388259 - DNA, 25 bp, Homo sapien
caataaagacattaagctctgacca

SEQ ID NO: 5388260 - DNA, 25 bp, Homo sapien
gcttgtacagtatccagacccagac

SEQ ID NO: 5388261 - DNA, 25 bp, Homo sapien
tccccactgattgtatttgagagct

SEQ ID NO: 5388262 - DNA, 25 bp, Homo sapien
agaaggagagccaaagacgacactg

SEQ ID NO: 5388263 - DNA, 25 bp, Homo sapien
catttcagagattaagatcacgcgg

SEQ ID NO: 5388264 - DNA, 25 bp, Homo sapien
gatcacgcgggtagcaaagtcttca

SEQ ID NO: 5388265 - DNA, 25 bp, Homo sapien
tagcccagagggctataaactccca

SEQ ID NO: 5388266 - DNA, 25 bp, Homo sapien
tactcagtttagctcttagagactc

SEQ ID NO: 5388267 - DNA, 25 bp, Homo sapien
tgaggatttccttggtttctctctt

SEQ ID NO: 5388268 - DNA, 25 bp, Homo sapien
gaggatttccttggtttctctcttg

SEQ ID NO: 5388269 - DNA, 25 bp, Homo sapien
ccttgaggatttccttggtttctct

SEQ ID NO: 5388270 - DNA, 25 bp, Homo sapien
ctgttccttgaggatttccttggtt

SEQ ID NO: 5388271 - DNA, 25 bp, Homo sapien
cctagggaggtctaactggaactgc

SEQ ID NO: 5388272 - DNA, 25 bp, Homo sapien
gacaacccttaacagctagtccagg

SEQ ID NO: 5388273 - DNA, 25 bp, Homo sapien
gttgagaggctataaaacccatgcc

SEQ ID NO: 5388274 - DNA, 25 bp, Homo sapien
caggcataattggtgcaagacaacc

SEQ ID NO: 5388275 - DNA, 25 bp, Homo sapien
gaggctggctgtgccttagacacag

SEQ ID NO: 5388276 - DNA, 25 bp, Homo sapien
tctcatacccctacagaggctggct

SEQ ID NO: 5388277 - DNA, 25 bp, Homo sapien
taaattgtgtagtggaagtctgaac

SEQ ID NO: 5388278 - DNA, 25 bp, Homo sapien
aaatcaagatttcctgaccaccagg

SEQ ID NO: 5388279 - DNA, 25 bp, Homo sapien
ggtcatgcaaccatccctaggaagt

SEQ ID NO: 5388280 - DNA, 25 bp, Homo sapien
cattgtcatttagcgaaagttcccc

SEQ ID NO: 5388281 - DNA, 25 bp, Homo sapien
tcaccagatgggttaaggcaacact

SEQ ID NO: 5388282 - DNA, 25 bp, Homo sapien
caatgggaaaggtgacaactgctca

SEQ ID NO: 5388283 - DNA, 25 bp, Homo sapien
tcacccgcatcccaaccttaccttc

SEQ ID NO: 5388284 - DNA, 25 bp, Homo sapien
tattgtagtttttggctgagcatgg

SEQ ID NO: 5388285 - DNA, 25 bp, Homo sapien
acccgcatcccaaccttaccttctg

SEQ ID NO: 5388286 - DNA, 25 bp, Homo sapien
cgcatcccaaccttaccttctgagt

SEQ ID NO: 5388287 - DNA, 25 bp, Homo sapien
tttggaaactagagacagtgagtga

SEQ ID NO: 5388288 - DNA, 25 bp, Homo sapien
actaaaagtcaagttgctagatttg

SEQ ID NO: 5388289 - DNA, 25 bp, Homo sapien
gtccccacaactgtcagaaacagag

SEQ ID NO: 5388290 - DNA, 25 bp, Homo sapien
ttgttaatacccagtctagagctct

SEQ ID NO: 5388291 - DNA, 25 bp, Homo sapien
gctgtaaaaatgatgttgccggtca

SEQ ID NO: 5388292 - DNA, 25 bp, Homo sapien
gataacatagatgcaaagagctgag

SEQ ID NO: 5388293 - DNA, 25 bp, Homo sapien
ctgagagccagaagacaccgatgac

SEQ ID NO: 5388294 - DNA, 25 bp, Homo sapien
tttcccagtggagagagtcaccttt

SEQ ID NO: 5388295 - DNA, 25 bp, Homo sapien
tgctgcagcaaaagcgtcaggagat

SEQ ID NO: 5388296 - DNA, 25 bp, Homo sapien
ggttgcctggtaatcaatttccaag

SEQ ID NO: 5388297 - DNA, 25 bp, Homo sapien
tgcagcaaaagcgtcaggagatgag

SEQ ID NO: 5388298 - DNA, 25 bp, Homo sapien
gcaaaagcgtcaggagatgaggttc

SEQ ID NO: 5388299 - DNA, 25 bp, Homo sapien
aatacatggtgtttggctgattcac

SEQ ID NO: 5388300 - DNA, 25 bp, Homo sapien
ggctgattcactatgactgatttgt

SEQ ID NO: 5388301 - DNA, 25 bp, Homo sapien
ttgatgctctacagatggattgaag

SEQ ID NO: 5388302 - DNA, 25 bp, Homo sapien
cacttggcgtgtttgtttgggcatg

SEQ ID NO: 5388303 - DNA, 25 bp, Homo sapien
tccaaaggcgtttcttctgaagtca

SEQ ID NO: 5388304 - DNA, 25 bp, Homo sapien
ctcaggatggtttgcagcgccactt

SEQ ID NO: 5388305 - DNA, 25 bp, Homo sapien
gacagagctggccacgttctaaggc

SEQ ID NO: 5388306 - DNA, 25 bp, Homo sapien
aaaggctactgcgaaacgccctgca

SEQ ID NO: 5388307 - DNA, 25 bp, Homo sapien
tgcgaaacgccctgcaaccaaagga

SEQ ID NO: 5388308 - DNA, 25 bp, Homo sapien
tggccacgttctaaggcgggatctg

SEQ ID NO: 5388309 - DNA, 25 bp, Homo sapien
tctctaatagcaatttggtcttttc

SEQ ID NO: 5388310 - DNA, 25 bp, Homo sapien
cctcgaatcctcatcaaccaccatg

SEQ ID NO: 5388311 - DNA, 25 bp, Homo sapien
caccatgtgaagatcttccaaagct

SEQ ID NO: 5388312 - DNA, 25 bp, Homo sapien
ccatgtgaagatcttccaaagcttc

SEQ ID NO: 5388313 - DNA, 25 bp, Homo sapien
taactactttcagtggcttctagag

SEQ ID NO: 5388314 - DNA, 25 bp, Homo sapien
acagcctgtaactactttcagtggc

SEQ ID NO: 5388315 - DNA, 25 bp, Homo sapien
aagcagatggtattaacagcctgta

SEQ ID NO: 5388316 - DNA, 25 bp, Homo sapien
tcagtggcttctagagcaaagggca

SEQ ID NO: 5388317 - DNA, 25 bp, Homo sapien
taaatccttagggtggaaccagcac

SEQ ID NO: 5388318 - DNA, 25 bp, Homo sapien
ccggatgattccaaggcacagccaa

SEQ ID NO: 5388319 - DNA, 25 bp, Homo sapien
gatgatgctgcaagagtaccctgta

SEQ ID NO: 5388320 - DNA, 25 bp, Homo sapien
tcatattagaataggcctgcggaaa

SEQ ID NO: 5388321 - DNA, 25 bp, Homo sapien
ggcactggccatagaagtacagtaa

SEQ ID NO: 5388322 - DNA, 25 bp, Homo sapien
tgctaaagctttaggcttacgaaag

SEQ ID NO: 5388323 - DNA, 25 bp, Homo sapien
taggcttacgaaaggcatccgtggc

SEQ ID NO: 5388324 - DNA, 25 bp, Homo sapien
catagaagtacagtaaggtgaggca

SEQ ID NO: 5388325 - DNA, 25 bp, Homo sapien
tcaaaagatacccacatcccagtcc

SEQ ID NO: 5388326 - DNA, 25 bp, Homo sapien
gacctctacgagctttgccataaaa

SEQ ID NO: 5388327 - DNA, 25 bp, Homo sapien
ggcatttgcgagttcatcctcaaaa

SEQ ID NO: 5388328 - DNA, 25 bp, Homo sapien
ccctgaagatttgagacctctacga

SEQ ID NO: 5388329 - DNA, 25 bp, Homo sapien
tattgtatttcccttttccaccata

SEQ ID NO: 5388330 - DNA, 25 bp, Homo sapien
ctattgtatttcccttttccaccat

SEQ ID NO: 5388331 - DNA, 25 bp, Homo sapien
tgtacaggcaatctggaccatactc

SEQ ID NO: 5388332 - DNA, 25 bp, Homo sapien
cagctttgctggtgttaaaggacag

SEQ ID NO: 5388333 - DNA, 25 bp, Homo sapien
gcagctttgctggtgttaaaggaca

SEQ ID NO: 5388334 - DNA, 25 bp, Homo sapien
accatactcagattagatgtcctgc

SEQ ID NO: 5388335 - DNA, 25 bp, Homo sapien
ctggagatccttgactctgcaatag

SEQ ID NO: 5388336 - DNA, 25 bp, Homo sapien
tctgcaatagatttcgtactgtttc

SEQ ID NO: 5388337 - DNA, 25 bp, Homo sapien
gatagaccattatattaacagtttc

SEQ ID NO: 5388338 - DNA, 25 bp, Homo sapien
ccttgactctgcaatagatttcgta

SEQ ID NO: 5388339 - DNA, 25 bp, Homo sapien
caaactctgggagcaagaagcctga

SEQ ID NO: 5388340 - DNA, 25 bp, Homo sapien
tactaagggcttctcgtatgacaaa

SEQ ID NO: 5388341 - DNA, 25 bp, Homo sapien
gctctaggagaccagtgaatccgct

SEQ ID NO: 5388342 - DNA, 25 bp, Homo sapien
gaagattcatagacccaaactctgg

SEQ ID NO: 5388343 - DNA, 25 bp, Homo sapien
tctagccgtatggatgccaacagca

SEQ ID NO: 5388344 - DNA, 25 bp, Homo sapien
gcagcacagtaagtagccggtgtta

SEQ ID NO: 5388345 - DNA, 25 bp, Homo sapien
gaggtcaaactaacagtcacactgg

SEQ ID NO: 5388346 - DNA, 25 bp, Homo sapien
tatggtcagtgtaacctcaggccct

SEQ ID NO: 5388347 - DNA, 25 bp, Homo sapien
gactcagggccgaaattcaagcagg

SEQ ID NO: 5388348 - DNA, 25 bp, Homo sapien
taagacacctcaacaagtagcatgc

SEQ ID NO: 5388349 - DNA, 25 bp, Homo sapien
tatgggactactactcagtgactgg

SEQ ID NO: 5388350 - DNA, 25 bp, Homo sapien
taaacttagtcttctgagtgcccag

SEQ ID NO: 5388351 - DNA, 25 bp, Homo sapien
tactacattgattaagctgctacag

SEQ ID NO: 5388352 - DNA, 25 bp, Homo sapien
taactttaggccaaaatagtgtcca

SEQ ID NO: 5388353 - DNA, 25 bp, Homo sapien
caccaaattcccaagtgataggatt

SEQ ID NO: 5388354 - DNA, 25 bp, Homo sapien
gaaagggcagagaatctatatactg

SEQ ID NO: 5388355 - DNA, 25 bp, Homo sapien
taaggattcagatgctacagaagga

SEQ ID NO: 5388356 - DNA, 25 bp, Homo sapien
tacagaaggaagagcccaaaaacag

SEQ ID NO: 5388357 - DNA, 25 bp, Homo sapien
aaaagataggctgcccagtaaatgg

SEQ ID NO: 5388358 - DNA, 25 bp, Homo sapien
aaagttcaatgcttacagtacagga

SEQ ID NO: 5388359 - DNA, 25 bp, Homo sapien
tatagacttgagacccatgaaaatg

SEQ ID NO: 5388360 - DNA, 25 bp, Homo sapien
tagattaactctgagactgaaagga

SEQ ID NO: 5388361 - DNA, 25 bp, Homo sapien
gaaggtggccatatttctatttgta

SEQ ID NO: 5388362 - DNA, 25 bp, Homo sapien
gaacagaggaatacatacagtatgt

SEQ ID NO: 5388363 - DNA, 25 bp, Homo sapien
tttcatgattagaataacactgtcc

SEQ ID NO: 5388364 - DNA, 25 bp, Homo sapien
ccttgaagattctttattcgagagc

SEQ ID NO: 5388365 - DNA, 25 bp, Homo sapien
tcgagagcagtcaggtctaacaacc

SEQ ID NO: 5388366 - DNA, 25 bp, Homo sapien
tcaggtctaacaaccattcctccaa

SEQ ID NO: 5388367 - DNA, 25 bp, Homo sapien
gagggatttgactcctggctggaag

SEQ ID NO: 5388368 - DNA, 25 bp, Homo sapien
agggatttgactcctggctggaagt

SEQ ID NO: 5388369 - DNA, 25 bp, Homo sapien
aggagggatttgactcctggctgga

SEQ ID NO: 5388370 - DNA, 25 bp, Homo sapien
ggagggatttgactcctggctggaa

SEQ ID NO: 5388371 - DNA, 25 bp, Homo sapien
aagatttcaaagcaagctccggttc

SEQ ID NO: 5388372 - DNA, 25 bp, Homo sapien
tcaaagcaagctccggttcctggtg

SEQ ID NO: 5388373 - DNA, 25 bp, Homo sapien
aagcaagctccggttcctggtgtct

SEQ ID NO: 5388374 - DNA, 25 bp, Homo sapien
gctccggttcctggtgtctctgcat

SEQ ID NO: 5388375 - DNA, 25 bp, Homo sapien
gttgttgccacacaaatcagaccca

SEQ ID NO: 5388376 - DNA, 25 bp, Homo sapien
gcgactcactagtcaagattgctat

SEQ ID NO: 5388377 - DNA, 25 bp, Homo sapien
catggtgctgcaaccctccaaaaca

SEQ ID NO: 5388378 - DNA, 25 bp, Homo sapien
ttcttagcagttgttgccacacaaa

SEQ ID NO: 5388379 - DNA, 25 bp, Homo sapien
aatttgtctattaccccaagatgtt

SEQ ID NO: 5388380 - DNA, 25 bp, Homo sapien
ttgctaatttgtctattaccccaag

SEQ ID NO: 5388381 - DNA, 25 bp, Homo sapien
gctaatttgtctattaccccaagat

SEQ ID NO: 5388382 - DNA, 25 bp, Homo sapien
taatttgtctattaccccaagatgt

SEQ ID NO: 5388383 - DNA, 25 bp, Homo sapien
gatgggacaagacattttctcgtaa

SEQ ID NO: 5388384 - DNA, 25 bp, Homo sapien
acatgaaaacaagccccgatgatgg

SEQ ID NO: 5388385 - DNA, 25 bp, Homo sapien
tgtatccttcgaaacacagtggtgt

SEQ ID NO: 5388386 - DNA, 25 bp, Homo sapien
tctcgtaatgtaattgtatccttcg

SEQ ID NO: 5388387 - DNA, 25 bp, Homo sapien
ctttacagtttttgtcagagccaac

SEQ ID NO: 5388388 - DNA, 25 bp, Homo sapien
ttttaatgttttggtagcagtctgg

SEQ ID NO: 5388389 - DNA, 25 bp, Homo sapien
ggctaagtgggagttcagattttta

SEQ ID NO: 5388390 - DNA, 25 bp, Homo sapien
gcagtctggaacctgtagctttaca

SEQ ID NO: 5388391 - DNA, 25 bp, Homo sapien
ctggggtgaaggtggcaactggaag

SEQ ID NO: 5388392 - DNA, 25 bp, Homo sapien
tggggtgaaggtggcaactggaaga

SEQ ID NO: 5388393 - DNA, 25 bp, Homo sapien
ggggtgaaggtggcaactggaagag

SEQ ID NO: 5388394 - DNA, 25 bp, Homo sapien
ttgaagctcagctgggcattgtatc

SEQ ID NO: 5388395 - DNA, 25 bp, Homo sapien
tgttgaagctcagctgggcattgta

SEQ ID NO: 5388396 - DNA, 25 bp, Homo sapien
tgaagctcagctgggcattgtatcc

SEQ ID NO: 5388397 - DNA, 25 bp, Homo sapien
catgttgaagctcagctgggcattg

SEQ ID NO: 5388398 - DNA, 25 bp, Homo sapien
taggtgctggtgaccaaggcataga

SEQ ID NO: 5388399 - DNA, 25 bp, Homo sapien
tggtgaccaaggcatagactgaatt

SEQ ID NO: 5388400 - DNA, 25 bp, Homo sapien
cagacaggaagttatcagggtggtg

SEQ ID NO: 5388401 - DNA, 25 bp, Homo sapien
gaagttatcagggtggtggtaggtg

SEQ ID NO: 5388402 - DNA, 25 bp, Homo sapien
ggtcttcgctgcagcagcaggaccc

SEQ ID NO: 5388403 - DNA, 25 bp, Homo sapien
tgcaggtcttcgctgcagcagcagg

SEQ ID NO: 5388404 - DNA, 25 bp, Homo sapien
ttggagaactgcaggtcttcgctgc

SEQ ID NO: 5388405 - DNA, 25 bp, Homo sapien
ggagaactgcaggtcttcgctgcag

SEQ ID NO: 5388406 - DNA, 25 bp, Homo sapien
aattggctcctagaattccaaataa

SEQ ID NO: 5388407 - DNA, 25 bp, Homo sapien
tctccagttcaaagattaactgtag

SEQ ID NO: 5388408 - DNA, 25 bp, Homo sapien
gatgtgtaagaatcaagtaattggc

SEQ ID NO: 5388409 - DNA, 25 bp, Homo sapien
agaatcttcacaccgatctgatgtg

SEQ ID NO: 5388410 - DNA, 25 bp, Homo sapien
tggggacttgtcctcagagcttgtg

SEQ ID NO: 5388411 - DNA, 25 bp, Homo sapien
aacatatgctgtggctagcttcatt

SEQ ID NO: 5388412 - DNA, 25 bp, Homo sapien
agaacatatgctgtggctagcttca

SEQ ID NO: 5388413 - DNA, 25 bp, Homo sapien
gcttcatttatctggggacttgtcc

SEQ ID NO: 5388414 - DNA, 25 bp, Homo sapien
acatctgggtgagtcctgttaccca

SEQ ID NO: 5388415 - DNA, 25 bp, Homo sapien
ccaggaaggctgctgacactacctt

SEQ ID NO: 5388416 - DNA, 25 bp, Homo sapien
ttctacatctgggtgagtcctgtta

SEQ ID NO: 5388417 - DNA, 25 bp, Homo sapien
ggctgctgacactaccttgacccag

SEQ ID NO: 5388418 - DNA, 25 bp, Homo sapien
gacattctaagctttcatcaaccag

SEQ ID NO: 5388419 - DNA, 25 bp, Homo sapien
atggtggcgaggttcacggtatcac

SEQ ID NO: 5388420 - DNA, 25 bp, Homo sapien
tcaaccaggagggaagtatttcggc

SEQ ID NO: 5388421 - DNA, 25 bp, Homo sapien
cgaggttcacggtatcacagaagga

SEQ ID NO: 5388422 - DNA, 25 bp, Homo sapien
tctcatggcaacaagaacattctct

SEQ ID NO: 5388423 - DNA, 25 bp, Homo sapien
attctcatggcaacaagaacattct

SEQ ID NO: 5388424 - DNA, 25 bp, Homo sapien
ctcatggcaacaagaacattctctg

SEQ ID NO: 5388425 - DNA, 25 bp, Homo sapien
ttctcatggcaacaagaacattctc

SEQ ID NO: 5388426 - DNA, 25 bp, Homo sapien
tacaaaacagatgggcagctaaatc

SEQ ID NO: 5388427 - DNA, 25 bp, Homo sapien
aacggtattgtctctcttataccca

SEQ ID NO: 5388428 - DNA, 25 bp, Homo sapien
aaaaatgtcaaaccatgtgaacacg

SEQ ID NO: 5388429 - DNA, 25 bp, Homo sapien
catgtgaacacgattagggaagggt

SEQ ID NO: 5388430 - DNA, 25 bp, Homo sapien
tgcattgcttaagggagagcttaca

SEQ ID NO: 5388431 - DNA, 25 bp, Homo sapien
ccaaggagccgaaaacagcctttct

SEQ ID NO: 5388432 - DNA, 25 bp, Homo sapien
taagttagtatttgcccaaggagcc

SEQ ID NO: 5388433 - DNA, 25 bp, Homo sapien
gagcttacatgctagatcactaaga

SEQ ID NO: 5388434 - DNA, 25 bp, Homo sapien
actgaatgaaaaatcgagcataagg

SEQ ID NO: 5388435 - DNA, 25 bp, Homo sapien
cactttggaggggtggatctattat

SEQ ID NO: 5388436 - DNA, 25 bp, Homo sapien
tgaaaaatcgagcataaggtgatat

SEQ ID NO: 5388437 - DNA, 25 bp, Homo sapien
cgagcataaggtgatataagtaata

SEQ ID NO: 5388438 - DNA, 25 bp, Homo sapien
gccataggatgcttcagtcagaaca

SEQ ID NO: 5388439 - DNA, 25 bp, Homo sapien
cttaaaataggattgcgatgaccac

SEQ ID NO: 5388440 - DNA, 25 bp, Homo sapien
cattcaatccaaggtgttactggtg

SEQ ID NO: 5388441 - DNA, 25 bp, Homo sapien
tttaaaggacaagcctactggctgc

SEQ ID NO: 5388442 - DNA, 25 bp, Homo sapien
gctttgaagacgtaagtgtctctcc

SEQ ID NO: 5388443 - DNA, 25 bp, Homo sapien
gcaaccgcttctcgctttgaagacg

SEQ ID NO: 5388444 - DNA, 25 bp, Homo sapien
actgctgctgcaagctacgcatctg

SEQ ID NO: 5388445 - DNA, 25 bp, Homo sapien
tctgttgcgttcagactctagggtc

SEQ ID NO: 5388446 - DNA, 25 bp, Homo sapien
gatgctccatgttcgtcacctcttc

SEQ ID NO: 5388447 - DNA, 25 bp, Homo sapien
ttcttcccatgttcttcgagcaaga

SEQ ID NO: 5388448 - DNA, 25 bp, Homo sapien
tttggcttctcttagcaaagatctc

SEQ ID NO: 5388449 - DNA, 25 bp, Homo sapien
catgttcttcgagcaagatgctcca

SEQ ID NO: 5388450 - DNA, 25 bp, Homo sapien
tgtctgtactccacaacaatcggtg

SEQ ID NO: 5388451 - DNA, 25 bp, Homo sapien
caatcggtgaacaacaagtgaattc

SEQ ID NO: 5388452 - DNA, 25 bp, Homo sapien
gaaccacatgtgcactttcagaatg

SEQ ID NO: 5388453 - DNA, 25 bp, Homo sapien
tcagaatggctacagatctatgccc

SEQ ID NO: 5388454 - DNA, 25 bp, Homo sapien
tagtaaactttcatcgcaaccagca

SEQ ID NO: 5388455 - DNA, 25 bp, Homo sapien
tgattccaggaacctagggcttgac

SEQ ID NO: 5388456 - DNA, 25 bp, Homo sapien
gagccaaggtttgagcccatgcaat

SEQ ID NO: 5388457 - DNA, 25 bp, Homo sapien
gaaccagagggcaaacattttaggc

SEQ ID NO: 5388458 - DNA, 25 bp, Homo sapien
gaatcattccactgtaacaagactt

SEQ ID NO: 5388459 - DNA, 25 bp, Homo sapien
tctgagaataacaagtaatatgcct

SEQ ID NO: 5388460 - DNA, 25 bp, Homo sapien
tattattgtttctgcaaccatactg

SEQ ID NO: 5388461 - DNA, 25 bp, Homo sapien
tcttctcttgtgatgaagttattaa

SEQ ID NO: 5388462 - DNA, 25 bp, Homo sapien
gagaccgttcctctatgagactgga

SEQ ID NO: 5388463 - DNA, 25 bp, Homo sapien
tgagaaatctaggttgcaccctcct

SEQ ID NO: 5388464 - DNA, 25 bp, Homo sapien
tttggcaaatacagccgggtaccca

SEQ ID NO: 5388465 - DNA, 25 bp, Homo sapien
gagaggcaccacctagcattgtgat

SEQ ID NO: 5388466 - DNA, 25 bp, Homo sapien
ctccaatattcagttgcatgtcagc

SEQ ID NO: 5388467 - DNA, 25 bp, Homo sapien
gaactaggatgatgctttcacctcc

SEQ ID NO: 5388468 - DNA, 25 bp, Homo sapien
tcaagagtaagatccccaaacagtc

SEQ ID NO: 5388469 - DNA, 25 bp, Homo sapien
cataaagatggcactagagaactag

SEQ ID NO: 5388470 - DNA, 25 bp, Homo sapien
caacacttagtgtcagcatgacagg

SEQ ID NO: 5388471 - DNA, 25 bp, Homo sapien
cttagtatcactcagggtggaaggc

SEQ ID NO: 5388472 - DNA, 25 bp, Homo sapien
cagagaaatctaacccacttggctt

SEQ ID NO: 5388473 - DNA, 25 bp, Homo sapien
cctaagagcaaaagaggtatcctgt

SEQ ID NO: 5388474 - DNA, 25 bp, Homo sapien
gcatcattttcaaggttaagagacc

SEQ ID NO: 5388475 - DNA, 25 bp, Homo sapien
ccctggatcaaagcgtagaacacgg

SEQ ID NO: 5388476 - DNA, 25 bp, Homo sapien
tataatgaagtgaggcaacgaaccc

SEQ ID NO: 5388477 - DNA, 25 bp, Homo sapien
tacaagtcaagtaactaagcctcag

SEQ ID NO: 5388478 - DNA, 25 bp, Homo sapien
gactattccctgctcattcctgaca

SEQ ID NO: 5388479 - DNA, 25 bp, Homo sapien
tcctgacagaggtgtccgcactgtt

SEQ ID NO: 5388480 - DNA, 25 bp, Homo sapien
cagtgtggagtcattaaaacagtcc

SEQ ID NO: 5388481 - DNA, 25 bp, Homo sapien
tctttcgagtcagtagagagtcact

SEQ ID NO: 5388482 - DNA, 25 bp, Homo sapien
taaacgctgtatcccaaatggacag

SEQ ID NO: 5388483 - DNA, 25 bp, Homo sapien
gtacaaaccagtcttgaaccaagta

SEQ ID NO: 5388484 - DNA, 25 bp, Homo sapien
ccatcactgtccttgtaaagttgta

SEQ ID NO: 5388485 - DNA, 25 bp, Homo sapien
gggacatgctagtcgttctccatca

SEQ ID NO: 5388486 - DNA, 25 bp, Homo sapien
ggatggtggagctttaccgacagaa

SEQ ID NO: 5388487 - DNA, 25 bp, Homo sapien
agatggtttgtcatatatcttctcc

SEQ ID NO: 5388488 - DNA, 25 bp, Homo sapien
gctttaccgacagaacagctagatg

SEQ ID NO: 5388489 - DNA, 25 bp, Homo sapien
tatcttctcctctcgcagagtgtct

SEQ ID NO: 5388490 - DNA, 25 bp, Homo sapien
agcagttactccacgcatgcattcc

SEQ ID NO: 5388491 - DNA, 25 bp, Homo sapien
cacagaggcagatacttcggcaaag

SEQ ID NO: 5388492 - DNA, 25 bp, Homo sapien
tttcagaagtagcaacagcagttac

SEQ ID NO: 5388493 - DNA, 25 bp, Homo sapien
gaggcagatacttcggcaaagacag

SEQ ID NO: 5388494 - DNA, 25 bp, Homo sapien
ggcaacttctcgctgtagtcgggcc

SEQ ID NO: 5388495 - DNA, 25 bp, Homo sapien
ctgtagtcgggccactgccaacttc

SEQ ID NO: 5388496 - DNA, 25 bp, Homo sapien
cccctcacttgttctttgggcaact

SEQ ID NO: 5388497 - DNA, 25 bp, Homo sapien
tcacttgttctttgggcaacttctc

SEQ ID NO: 5388498 - DNA, 25 bp, Homo sapien
aagaagggagactagactaggagac

SEQ ID NO: 5388499 - DNA, 25 bp, Homo sapien
gtatacaagttttgggagcctgtgg

SEQ ID NO: 5388500 - DNA, 25 bp, Homo sapien
gactaggagacattccaggtataca

SEQ ID NO: 5388501 - DNA, 25 bp, Homo sapien
ccaggtatacaagttttgggagcct

SEQ ID NO: 5388502 - DNA, 25 bp, Homo sapien
acagcaaacacaaatgtcttttggg

SEQ ID NO: 5388503 - DNA, 25 bp, Homo sapien
ctgactcagggcagctaggtgatga

SEQ ID NO: 5388504 - DNA, 25 bp, Homo sapien
gatgaaggagcagaatttgcaagaa

SEQ ID NO: 5388505 - DNA, 25 bp, Homo sapien
atttgcaagaacagcaaacacaaat

SEQ ID NO: 5388506 - DNA, 25 bp, Homo sapien
gtttcttagagacacggacttgctc

SEQ ID NO: 5388507 - DNA, 25 bp, Homo sapien
atgtttcttagagacacggacttgc

SEQ ID NO: 5388508 - DNA, 25 bp, Homo sapien
aatgtttcttagagacacggacttg

SEQ ID NO: 5388509 - DNA, 25 bp, Homo sapien
tgtttcttagagacacggacttgct

SEQ ID NO: 5388510 - DNA, 25 bp, Homo sapien
ttttcatcattgagctttgtatcct

SEQ ID NO: 5388511 - DNA, 25 bp, Homo sapien
tcatcattgagctttgtatcctgtt

SEQ ID NO: 5388512 - DNA, 25 bp, Homo sapien
cattgagctttgtatcctgtttaga

SEQ ID NO: 5388513 - DNA, 25 bp, Homo sapien
gagctttgtatcctgtttagattct

SEQ ID NO: 5388514 - DNA, 25 bp, Homo sapien
gttactcacactctctctgtgggag

SEQ ID NO: 5388515 - DNA, 25 bp, Homo sapien
cactgatactagacttggcatctca

SEQ ID NO: 5388516 - DNA, 25 bp, Homo sapien
gacactgttctgcttgagttcagac

SEQ ID NO: 5388517 - DNA, 25 bp, Homo sapien
taccagctcactggctagggaaagt

SEQ ID NO: 5388518 - DNA, 25 bp, Homo sapien
tcaactgactggcttctgtgttatg

SEQ ID NO: 5388519 - DNA, 25 bp, Homo sapien
ctccctggaaaaacctgcagtgctg

SEQ ID NO: 5388520 - DNA, 25 bp, Homo sapien
gctgtaaaaaccagcccatgccact

SEQ ID NO: 5388521 - DNA, 25 bp, Homo sapien
tccaagaatggataactgctgctcc

SEQ ID NO: 5388522 - DNA, 25 bp, Homo sapien
tttgctgtggaaacacgatcaaacc

SEQ ID NO: 5388523 - DNA, 25 bp, Homo sapien
ccatcaggactatcgaaagaagggc

SEQ ID NO: 5388524 - DNA, 25 bp, Homo sapien
gaagggccagacaaccagactaaaa

SEQ ID NO: 5388525 - DNA, 25 bp, Homo sapien
caatgactcaaatcattgaagaacc

SEQ ID NO: 5388526 - DNA, 25 bp, Homo sapien
gcaatgaatgcaagtcatagccctg

SEQ ID NO: 5388527 - DNA, 25 bp, Homo sapien
tgaatgcaagtcatagccctggcac

SEQ ID NO: 5388528 - DNA, 25 bp, Homo sapien
aatgcaagtcatagccctggcactg

SEQ ID NO: 5388529 - DNA, 25 bp, Homo sapien
ttagcaatgaatgcaagtcatagcc

SEQ ID NO: 5388530 - DNA, 25 bp, Homo sapien
ttctgaggagtaaacggcatttcct

SEQ ID NO: 5388531 - DNA, 25 bp, Homo sapien
tattttcatctactctgccacataa

SEQ ID NO: 5388532 - DNA, 25 bp, Homo sapien
tttccaactgtggttccaactgaac

SEQ ID NO: 5388533 - DNA, 25 bp, Homo sapien
gactgtctatggtaaccttcctcct

SEQ ID NO: 5388534 - DNA, 25 bp, Homo sapien
ggacccagcaataggaatgattcca

SEQ ID NO: 5388535 - DNA, 25 bp, Homo sapien
gaattcacagtgtgaggacccagca

SEQ ID NO: 5388536 - DNA, 25 bp, Homo sapien
tcatggaagagacgaatgtgaccgt

SEQ ID NO: 5388537 - DNA, 25 bp, Homo sapien
ccgtggagtggaaacatgcatagca

SEQ ID NO: 5388538 - DNA, 25 bp, Homo sapien
cttgtggcacgtgaggtgaagactc

SEQ ID NO: 5388539 - DNA, 25 bp, Homo sapien
gccatttacaaaagcaagccacaac

SEQ ID NO: 5388540 - DNA, 25 bp, Homo sapien
ggtctgcagatagcaacttgtggca

SEQ ID NO: 5388541 - DNA, 25 bp, Homo sapien
ggcagaattcgttccaatgtccaga

SEQ ID NO: 5388542 - DNA, 25 bp, Homo sapien
tcaatcagcattaagccagtttggg

SEQ ID NO: 5388543 - DNA, 25 bp, Homo sapien
atcaatcagcattaagccagtttgg

SEQ ID NO: 5388544 - DNA, 25 bp, Homo sapien
catcaatcagcattaagccagtttg

SEQ ID NO: 5388545 - DNA, 25 bp, Homo sapien
cttcacttcgggggcagcaaggcgc

SEQ ID NO: 5388546 - DNA, 25 bp, Homo sapien
ggttgactccgcagcgccttcactt

SEQ ID NO: 5388547 - DNA, 25 bp, Homo sapien
ctggccttcggtggagcatgctgct

SEQ ID NO: 5388548 - DNA, 25 bp, Homo sapien
ccaggggttgactccgcagcgcctt

SEQ ID NO: 5388549 - DNA, 25 bp, Homo sapien
cagagccgggagttgccaaacttgc

SEQ ID NO: 5388550 - DNA, 25 bp, Homo sapien
aacttgccatgtccagagcgcggag

SEQ ID NO: 5388551 - DNA, 25 bp, Homo sapien
tgccaaacttgccatgtccagagcg

SEQ ID NO: 5388552 - DNA, 25 bp, Homo sapien
gagccgggagttgccaaacttgcca

SEQ ID NO: 5388553 - DNA, 25 bp, Homo sapien
tccgctttgttgtgttccgccgcca

SEQ ID NO: 5388554 - DNA, 25 bp, Homo sapien
tcctccgctttgttgtgttccgccg

SEQ ID NO: 5388555 - DNA, 25 bp, Homo sapien
cgcgctcctccgctttgttgtgttc

SEQ ID NO: 5388556 - DNA, 25 bp, Homo sapien
ctttgttgtgttccgccgccagtcc

SEQ ID NO: 5388557 - DNA, 25 bp, Homo sapien
agttatttgcttaagaagccaagaa

SEQ ID NO: 5388558 - DNA, 25 bp, Homo sapien
tctccttatgtgatgctgtatgaaa

SEQ ID NO: 5388559 - DNA, 25 bp, Homo sapien
aaacatgtttaatctgagtctgagc

SEQ ID NO: 5388560 - DNA, 25 bp, Homo sapien
tgagcaaggcctttgctataattcc

SEQ ID NO: 5388561 - DNA, 25 bp, Homo sapien
aatctgctttctatccctgtagaat

SEQ ID NO: 5388562 - DNA, 25 bp, Homo sapien
tgtttttagcatatgcaccgttatg

SEQ ID NO: 5388563 - DNA, 25 bp, Homo sapien
tatccctgtagaattgcctcttcta

SEQ ID NO: 5388564 - DNA, 25 bp, Homo sapien
ttagcatatgcaccgttatgcaacc

SEQ ID NO: 5388565 - DNA, 25 bp, Homo sapien
tcttaggaatgctgacctggaccca

SEQ ID NO: 5388566 - DNA, 25 bp, Homo sapien
gcaaaaacaaaagtgggcagtctta

SEQ ID NO: 5388567 - DNA, 25 bp, Homo sapien
gacccagtagggatgcctacaacag

SEQ ID NO: 5388568 - DNA, 25 bp, Homo sapien
ggatgcctacaacagatattcttga

SEQ ID NO: 5388569 - DNA, 25 bp, Homo sapien
ccaagagttagtgcataaagaaagc

SEQ ID NO: 5388570 - DNA, 25 bp, Homo sapien
cataaaagaattaatatctgccttc

SEQ ID NO: 5388571 - DNA, 25 bp, Homo sapien
gcatgctgtttcattacctcaggaa

SEQ ID NO: 5388572 - DNA, 25 bp, Homo sapien
ggtttggtgccaagagacagtccaa

SEQ ID NO: 5388573 - DNA, 25 bp, Homo sapien
ccttgtgctggacagagggcatagc

SEQ ID NO: 5388574 - DNA, 25 bp, Homo sapien
gagaggccagactcttatcctggca

SEQ ID NO: 5388575 - DNA, 25 bp, Homo sapien
tacgaccgttcaggaataacataac

SEQ ID NO: 5388576 - DNA, 25 bp, Homo sapien
gcaatacccaatttcgagagccctg

SEQ ID NO: 5388577 - DNA, 25 bp, Homo sapien
gttagatagatcaccacttccctcg

SEQ ID NO: 5388578 - DNA, 25 bp, Homo sapien
cagcccagtaccagtgaagcaggtg

SEQ ID NO: 5388579 - DNA, 25 bp, Homo sapien
gatcttcttctgactagggactata

SEQ ID NO: 5388580 - DNA, 25 bp, Homo sapien
gacttcccctcaggaaattagtgag

SEQ ID NO: 5388581 - DNA, 25 bp, Homo sapien
gagcctatactgatttatgggagca

SEQ ID NO: 5388582 - DNA, 25 bp, Homo sapien
cagaatattagacaggaccccaaaa

SEQ ID NO: 5388583 - DNA, 25 bp, Homo sapien
tcaccaagtggcaacaagagtatgc

SEQ ID NO: 5388584 - DNA, 25 bp, Homo sapien
taaaggactgctcattgctagacag

SEQ ID NO: 5388585 - DNA, 25 bp, Homo sapien
tttttagccagacaaggacttagta

SEQ ID NO: 5388586 - DNA, 25 bp, Homo sapien
ctacctgagcaagcaaataagaaca

SEQ ID NO: 5388587 - DNA, 25 bp, Homo sapien
taaatcttgaagcaagcaaggatca

SEQ ID NO: 5388588 - DNA, 25 bp, Homo sapien
aagctataaaggatgctacctgagc

SEQ ID NO: 5388589 - DNA, 25 bp, Homo sapien
tcaagctgagtcagcagatgctcaa

SEQ ID NO: 5388590 - DNA, 25 bp, Homo sapien
tcctgtgttgctcctcaagctgagt

SEQ ID NO: 5388591 - DNA, 25 bp, Homo sapien
tcctcaagctgagtcagcagatgct

SEQ ID NO: 5388592 - DNA, 25 bp, Homo sapien
ctccagagactcctgtgttgctcct

SEQ ID NO: 5388593 - DNA, 25 bp, Homo sapien
agatggaggcttcgctgacagcagc

SEQ ID NO: 5388594 - DNA, 25 bp, Homo sapien
ttagctattcccacctcatagtcca

SEQ ID NO: 5388595 - DNA, 25 bp, Homo sapien
gcatgagagtggtacacttgggcta

SEQ ID NO: 5388596 - DNA, 25 bp, Homo sapien
tacacttgggctatactgagatgga

SEQ ID NO: 5388597 - DNA, 25 bp, Homo sapien
gagagcagcaacgtgttctgctcca

SEQ ID NO: 5388598 - DNA, 25 bp, Homo sapien
tctcccgttgttcccgttatgactg

SEQ ID NO: 5388599 - DNA, 25 bp, Homo sapien
tatgactgagagcagcaacgtgttc

SEQ ID NO: 5388600 - DNA, 25 bp, Homo sapien
gttgttcccgttatgactgagagca

SEQ ID NO: 5388601 - DNA, 25 bp, Homo sapien
aggagacaaggctactcccaactcc

SEQ ID NO: 5388602 - DNA, 25 bp, Homo sapien
cgcaaagtggcccacgcaaggagca

SEQ ID NO: 5388603 - DNA, 25 bp, Homo sapien
cacgcaaggagcactgggtgatatg

SEQ ID NO: 5388604 - DNA, 25 bp, Homo sapien
gtgatatggtcatcggactgggcca

SEQ ID NO: 5388605 - DNA, 25 bp, Homo sapien
tgatatggtcatcggactgggccat

SEQ ID NO: 5388606 - DNA, 25 bp, Homo sapien
gcctgactgcctgtgttcctggatc

SEQ ID NO: 5388607 - DNA, 25 bp, Homo sapien
tctgcttcctaatgagaatacacag

SEQ ID NO: 5388608 - DNA, 25 bp, Homo sapien
ttcctcgacggcacttgacaaagcg

SEQ ID NO: 5388609 - DNA, 25 bp, Homo sapien
tcctggatcaagtggcaagtttgca

SEQ ID NO: 5388610 - DNA, 25 bp, Homo sapien
tgcttgttttttgtttgttcattta

SEQ ID NO: 5388611 - DNA, 25 bp, Homo sapien
tagcttgtcatgcttgttttttgtt

SEQ ID NO: 5388612 - DNA, 25 bp, Homo sapien
tctatgtgtggctcaaaacagcagt

SEQ ID NO: 5388613 - DNA, 25 bp, Homo sapien
taatatccctcctaagcaaatggcg

SEQ ID NO: 5388614 - DNA, 25 bp, Homo sapien
caacataaggtctcaggtaggaaat

SEQ ID NO: 5388615 - DNA, 25 bp, Homo sapien
gcaaatggcgactacctgaagaaaa

SEQ ID NO: 5388616 - DNA, 25 bp, Homo sapien
cacacttgtgtgcaatgttacctag

SEQ ID NO: 5388617 - DNA, 25 bp, Homo sapien
aactcatggttttcggatggcaccc

SEQ ID NO: 5388618 - DNA, 25 bp, Homo sapien
gatgtccgcttcagaagttaggaac

SEQ ID NO: 5388619 - DNA, 25 bp, Homo sapien
catggagagtgtaatgatgtccgct

SEQ ID NO: 5388620 - DNA, 25 bp, Homo sapien
taattgcaatgttagggtgacaatt

SEQ ID NO: 5388621 - DNA, 25 bp, Homo sapien
aattgcaatgttagggtgacaattt

SEQ ID NO: 5388622 - DNA, 25 bp, Homo sapien
tatacccacaactaaggatggcagg

SEQ ID NO: 5388623 - DNA, 25 bp, Homo sapien
ggagaagtgaagcatcccgattgac

SEQ ID NO: 5388624 - DNA, 25 bp, Homo sapien
gagcttccaggccacctaagtaata

SEQ ID NO: 5388625 - DNA, 25 bp, Homo sapien
cccgattgactcctcagtactgaag

SEQ ID NO: 5388626 - DNA, 25 bp, Homo sapien
tcctcctgtattggggaagactgtc

SEQ ID NO: 5388627 - DNA, 25 bp, Homo sapien
gcatggccactcagatatcctgaat

SEQ ID NO: 5388628 - DNA, 25 bp, Homo sapien
cctcctgtattggggaagactgtcc

SEQ ID NO: 5388629 - DNA, 25 bp, Homo sapien
ggggaagactgtccccttcaatcca

SEQ ID NO: 5388630 - DNA, 25 bp, Homo sapien
caggcccaggtcactttgggagcca

SEQ ID NO: 5388631 - DNA, 25 bp, Homo sapien
taaggcatctggtgacgccatgagt

SEQ ID NO: 5388632 - DNA, 25 bp, Homo sapien
tcctctccaagttttctgctgcaag

SEQ ID NO: 5388633 - DNA, 25 bp, Homo sapien
gcaagcctgtgatagccagctggca

SEQ ID NO: 5388634 - DNA, 25 bp, Homo sapien
gacatgcacttctctcctactaggt

SEQ ID NO: 5388635 - DNA, 25 bp, Homo sapien
tcagtctggcaagtgaccgtgaact

SEQ ID NO: 5388636 - DNA, 25 bp, Homo sapien
taaagactgcgcagcctggaatcga

SEQ ID NO: 5388637 - DNA, 25 bp, Homo sapien
cccaggtttattttgcgagcacagt

SEQ ID NO: 5388638 - DNA, 25 bp, Homo sapien
ctcacttttgcataagactctaaac

SEQ ID NO: 5388639 - DNA, 25 bp, Homo sapien
gactctaaacattgctgaagaccca

SEQ ID NO: 5388640 - DNA, 25 bp, Homo sapien
cctgtagtgataatgtgtatagccc

SEQ ID NO: 5388641 - DNA, 25 bp, Homo sapien
tatagccctggagacatacacgcat

SEQ ID NO: 5388642 - DNA, 25 bp, Homo sapien
ctctgcttgctccctcattccacat

SEQ ID NO: 5388643 - DNA, 25 bp, Homo sapien
caagagccaaccagtgacctcagct

SEQ ID NO: 5388644 - DNA, 25 bp, Homo sapien
atcaggaccactgtagccacttcca

SEQ ID NO: 5388645 - DNA, 25 bp, Homo sapien
gaagcaagagccaaccagtgacctc

SEQ ID NO: 5388646 - DNA, 25 bp, Homo sapien
ctgaagcaagagccaaccagtgacc

SEQ ID NO: 5388647 - DNA, 25 bp, Homo sapien
ctttatctagtgccttccactcatt

SEQ ID NO: 5388648 - DNA, 25 bp, Homo sapien
ttatctagtgccttccactcattca

SEQ ID NO: 5388649 - DNA, 25 bp, Homo sapien
tttatctagtgccttccactcattc

SEQ ID NO: 5388650 - DNA, 25 bp, Homo sapien
tatctagtgccttccactcattcat

SEQ ID NO: 5388651 - DNA, 25 bp, Homo sapien
aactgaaagatccactccccagatt

SEQ ID NO: 5388652 - DNA, 25 bp, Homo sapien
gggatagagaactgaaagatccact

SEQ ID NO: 5388653 - DNA, 25 bp, Homo sapien
gagaactgaaagatccactccccag

SEQ ID NO: 5388654 - DNA, 25 bp, Homo sapien
tggggatagagaactgaaagatcca

SEQ ID NO: 5388655 - DNA, 25 bp, Homo sapien
tatgtagctttacgatgcttgcaca

SEQ ID NO: 5388656 - DNA, 25 bp, Homo sapien
gagagaggtgtagacaaccgtttcc

SEQ ID NO: 5388657 - DNA, 25 bp, Homo sapien
aaggtatacagcttggaggccctga

SEQ ID NO: 5388658 - DNA, 25 bp, Homo sapien
tccgaagttgtcgaagagggcagct

SEQ ID NO: 5388659 - DNA, 25 bp, Homo sapien
aagaaccaggataatctgcttgagg

SEQ ID NO: 5388660 - DNA, 25 bp, Homo sapien
gaggagtggcctttttgatggcaga

SEQ ID NO: 5388661 - DNA, 25 bp, Homo sapien
caaagaaccaggataatctgcttga

SEQ ID NO: 5388662 - DNA, 25 bp, Homo sapien
acaaagaaccaggataatctgcttg

SEQ ID NO: 5388663 - DNA, 25 bp, Homo sapien
tcttcataataccatcatcaaagat

SEQ ID NO: 5388664 - DNA, 25 bp, Homo sapien
atccttcttcataataccatcatca

SEQ ID NO: 5388665 - DNA, 25 bp, Homo sapien
catcatcaaagatgggcaaagcaat

SEQ ID NO: 5388666 - DNA, 25 bp, Homo sapien
caaagatgggcaaagcaatgatgct

SEQ ID NO: 5388667 - DNA, 25 bp, Homo sapien
gagacagactggctctaccaggttg

SEQ ID NO: 5388668 - DNA, 25 bp, Homo sapien
tactctaggtatggcatcatcagct

SEQ ID NO: 5388669 - DNA, 25 bp, Homo sapien
aggttggaacgaagccagtctctcc

SEQ ID NO: 5388670 - DNA, 25 bp, Homo sapien
ctcactgtactctaggtatggcatc

SEQ ID NO: 5388671 - DNA, 25 bp, Homo sapien
tgccacttccatgtcggggttcctt

SEQ ID NO: 5388672 - DNA, 25 bp, Homo sapien
agcacatggtaactgttagaaaggc

SEQ ID NO: 5388673 - DNA, 25 bp, Homo sapien
gcacatggtaactgttagaaaggct

SEQ ID NO: 5388674 - DNA, 25 bp, Homo sapien
agaagcacatggtaactgttagaaa

SEQ ID NO: 5388675 - DNA, 25 bp, Homo sapien
gaagcacatggtaactgttagaaag

SEQ ID NO: 5388676 - DNA, 25 bp, Homo sapien
tgttgaactatcgaaagggaggact

SEQ ID NO: 5388677 - DNA, 25 bp, Homo sapien
ggtctcctaatggactgcctcctaa

SEQ ID NO: 5388678 - DNA, 25 bp, Homo sapien
cacctagcagagtgtgggctgccaa

SEQ ID NO: 5388679 - DNA, 25 bp, Homo sapien
tggttcccaggctattgccccaggg

SEQ ID NO: 5388680 - DNA, 25 bp, Homo sapien
aacacccctactcttcaactgcatg

SEQ ID NO: 5388681 - DNA, 25 bp, Homo sapien
gaacacccctactcttcaactgcat

SEQ ID NO: 5388682 - DNA, 25 bp, Homo sapien
agaacacccctactcttcaactgca

SEQ ID NO: 5388683 - DNA, 25 bp, Homo sapien
aacagcatttaaggttgcctcttgg

SEQ ID NO: 5388684 - DNA, 25 bp, Homo sapien
cagcatttaaggttgcctcttggtg

SEQ ID NO: 5388685 - DNA, 25 bp, Homo sapien
aagataaacagcatttaaggttgcc

SEQ ID NO: 5388686 - DNA, 25 bp, Homo sapien
gataaacagcatttaaggttgcctc

SEQ ID NO: 5388687 - DNA, 25 bp, Homo sapien
agacctttgagctgcccgcagccgt

SEQ ID NO: 5388688 - DNA, 25 bp, Homo sapien
tgagatgctcctccatgggaagggc

SEQ ID NO: 5388689 - DNA, 25 bp, Homo sapien
aaatttcctgagacctttgagctgc

SEQ ID NO: 5388690 - DNA, 25 bp, Homo sapien
cttcggctaacttttggaccctgct

SEQ ID NO: 5388691 - DNA, 25 bp, Homo sapien
tcttcctaccctagagctgttttct

SEQ ID NO: 5388692 - DNA, 25 bp, Homo sapien
tcctaccctagagctgttttctcta

SEQ ID NO: 5388693 - DNA, 25 bp, Homo sapien
cctccttccacttcaaacctgctct

SEQ ID NO: 5388694 - DNA, 25 bp, Homo sapien
tttcttcttcctaccctagagctgt

SEQ ID NO: 5388695 - DNA, 25 bp, Homo sapien
ctccacagctgacttcctggatctt

SEQ ID NO: 5388696 - DNA, 25 bp, Homo sapien
tgaatccatcgcaacatttcctcca

SEQ ID NO: 5388697 - DNA, 25 bp, Homo sapien
gctgacttcctggatcttcactcat

SEQ ID NO: 5388698 - DNA, 25 bp, Homo sapien
ctctgactagcgctggccttgctgc

SEQ ID NO: 5388699 - DNA, 25 bp, Homo sapien
ctctcttatgtgctgtatcgatttg

SEQ ID NO: 5388700 - DNA, 25 bp, Homo sapien
ttctctcttatgtgctgtatcgatt

SEQ ID NO: 5388701 - DNA, 25 bp, Homo sapien
ctcttatgtgctgtatcgatttgaa

SEQ ID NO: 5388702 - DNA, 25 bp, Homo sapien
ttttctctcttatgtgctgtatcga

SEQ ID NO: 5388703 - DNA, 25 bp, Homo sapien
gtccacaatgtgacactgagtcttt

SEQ ID NO: 5388704 - DNA, 25 bp, Homo sapien
gtgacactgagtcttttggattctg

SEQ ID NO: 5388705 - DNA, 25 bp, Homo sapien
caatgtgacactgagtcttttggat

SEQ ID NO: 5388706 - DNA, 25 bp, Homo sapien
gcaagtccacaatgtgacactgagt

SEQ ID NO: 5388707 - DNA, 25 bp, Homo sapien
aatatgcatctagtccatctttggc

SEQ ID NO: 5388708 - DNA, 25 bp, Homo sapien
atatgcatctagtccatctttggct

SEQ ID NO: 5388709 - DNA, 25 bp, Homo sapien
ccttgtgaaatctaaatatgcatct

SEQ ID NO: 5388710 - DNA, 25 bp, Homo sapien
aaagccttggtcaatagttgtagca

SEQ ID NO: 5388711 - DNA, 25 bp, Homo sapien
tggcaagtagaactaacacaaagcc

SEQ ID NO: 5388712 - DNA, 25 bp, Homo sapien
gatgctaagttcatggcaagtagaa

SEQ ID NO: 5388713 - DNA, 25 bp, Homo sapien
tctctctgatgctaagttcatggca

SEQ ID NO: 5388714 - DNA, 25 bp, Homo sapien
ggctaaggaaggattttcttagcat

SEQ ID NO: 5388715 - DNA, 25 bp, Homo sapien
ctggctaaggaaggattttcttagc

SEQ ID NO: 5388716 - DNA, 25 bp, Homo sapien
tggctaaggaaggattttcttagca

SEQ ID NO: 5388717 - DNA, 25 bp, Homo sapien
gtgctactccttattcaagaccaag

SEQ ID NO: 5388718 - DNA, 25 bp, Homo sapien
aagtttgcaactatagtgctactcc

SEQ ID NO: 5388719 - DNA, 25 bp, Homo sapien
cagcccaaggcccataagtttgcaa

SEQ ID NO: 5388720 - DNA, 25 bp, Homo sapien
tgaattaaacatatctgcaggctga

SEQ ID NO: 5388721 - DNA, 25 bp, Homo sapien
gttgttgtttatcagcaacagtggc

SEQ ID NO: 5388722 - DNA, 25 bp, Homo sapien
tttgggatgaaatctcaaaccccca

SEQ ID NO: 5388723 - DNA, 25 bp, Homo sapien
catgcagtgaggctagttgtgtgac

SEQ ID NO: 5388724 - DNA, 25 bp, Homo sapien
ttcttggcaatccctcctataccta

SEQ ID NO: 5388725 - DNA, 25 bp, Homo sapien
agtaggaaagcccttaaacatacag

SEQ ID NO: 5388726 - DNA, 25 bp, Homo sapien
ctgtgatttaaagtaggaaagccct

SEQ ID NO: 5388727 - DNA, 25 bp, Homo sapien
accaggaactagctgggctctaaag

SEQ ID NO: 5388728 - DNA, 25 bp, Homo sapien
cacaccaggaactagctgggctcta

SEQ ID NO: 5388729 - DNA, 25 bp, Homo sapien
caccaggcaaaggtggttgtggaga

SEQ ID NO: 5388730 - DNA, 25 bp, Homo sapien
ttcacaccaggaactagctgggctc

SEQ ID NO: 5388731 - DNA, 25 bp, Homo sapien
gaggaaacttcagggaaatgctaag

SEQ ID NO: 5388732 - DNA, 25 bp, Homo sapien
caaaagaaccagaggaaacttcagg

SEQ ID NO: 5388733 - DNA, 25 bp, Homo sapien
tccaaaagaaccagaggaaacttca

SEQ ID NO: 5388734 - DNA, 25 bp, Homo sapien
aaccagaggaaacttcagggaaatg

SEQ ID NO: 5388735 - DNA, 25 bp, Homo sapien
ccaggagctcctgcccctgcaagct

SEQ ID NO: 5388736 - DNA, 25 bp, Homo sapien
ctgcaagctcttctgtaaggccttc

SEQ ID NO: 5388737 - DNA, 25 bp, Homo sapien
tcctgcccctgcaagctcttctgta

SEQ ID NO: 5388738 - DNA, 25 bp, Homo sapien
tgcccctgcaagctcttctgtaagg

SEQ ID NO: 5388739 - DNA, 25 bp, Homo sapien
gtgaagtccagcgacagagcagctc

SEQ ID NO: 5388740 - DNA, 25 bp, Homo sapien
aagctccgaactactgaataacagg

SEQ ID NO: 5388741 - DNA, 25 bp, Homo sapien
ttcatgacagccagtttttgaagga

SEQ ID NO: 5388742 - DNA, 25 bp, Homo sapien
gaaggactgtagtcactcaggcaca

SEQ ID NO: 5388743 - DNA, 25 bp, Homo sapien
cagcctcctgaattaattcatattc

SEQ ID NO: 5388744 - DNA, 25 bp, Homo sapien
acgtgcaaagcttattcccatggaa

SEQ ID NO: 5388745 - DNA, 25 bp, Homo sapien
tctgggctgaatgaacgtgcaaagc

SEQ ID NO: 5388746 - DNA, 25 bp, Homo sapien
taattcatattctgggctgaatgaa

SEQ ID NO: 5388747 - DNA, 25 bp, Homo sapien
taatcgccttgtcctataggatcct

SEQ ID NO: 5388748 - DNA, 25 bp, Homo sapien
ccatgtggcagtttgtttagtcctc

SEQ ID NO: 5388749 - DNA, 25 bp, Homo sapien
tccttgggcaatttcagcgttctca

SEQ ID NO: 5388750 - DNA, 25 bp, Homo sapien
cagaagcggatctgctgcctgctgc

SEQ ID NO: 5388751 - DNA, 25 bp, Homo sapien
caagaataatgcactcctttcggaa

SEQ ID NO: 5388752 - DNA, 25 bp, Homo sapien
tatggctccaagaataatgcactcc

SEQ ID NO: 5388753 - DNA, 25 bp, Homo sapien
gatacaattgttttatggctccaag

SEQ ID NO: 5388754 - DNA, 25 bp, Homo sapien
actcctttcggaaatccagcagtca

SEQ ID NO: 5388755 - DNA, 25 bp, Homo sapien
caaggagaaccagcgggaccttgtg

SEQ ID NO: 5388756 - DNA, 25 bp, Homo sapien
gcataagacaaacaaaggagggttc

SEQ ID NO: 5388757 - DNA, 25 bp, Homo sapien
cactgctctaagctggcagagctta

SEQ ID NO: 5388758 - DNA, 25 bp, Homo sapien
ccctatcggagcaaaggcagtcaga

SEQ ID NO: 5388759 - DNA, 25 bp, Homo sapien
caagactgctgtctagagacagcct

SEQ ID NO: 5388760 - DNA, 25 bp, Homo sapien
tataagaatcccccgtctgtttcca

SEQ ID NO: 5388761 - DNA, 25 bp, Homo sapien
gactgctgtctagagacagcctttt

SEQ ID NO: 5388762 - DNA, 25 bp, Homo sapien
agactgctgtctagagacagccttt

SEQ ID NO: 5388763 - DNA, 25 bp, Homo sapien
gcacttgaggtagcttatctcattt

SEQ ID NO: 5388764 - DNA, 25 bp, Homo sapien
ggcacttgaggtagcttatctcatt

SEQ ID NO: 5388765 - DNA, 25 bp, Homo sapien
tcttaagtagggagggagacaccac

SEQ ID NO: 5388766 - DNA, 25 bp, Homo sapien
tttcagaatgcaggaccgcagtctt

SEQ ID NO: 5388767 - DNA, 25 bp, Homo sapien
cagagcagggaacgttgtcagatga

SEQ ID NO: 5388768 - DNA, 25 bp, Homo sapien
ttgtcagatgaagccaaggaacgtg

SEQ ID NO: 5388769 - DNA, 25 bp, Homo sapien
ccttttgacactggcttctcacaat

SEQ ID NO: 5388770 - DNA, 25 bp, Homo sapien
gacactggcttctcacaattctgag

SEQ ID NO: 5388771 - DNA, 25 bp, Homo sapien
agtcaaatattttgaggccttttga

SEQ ID NO: 5388772 - DNA, 25 bp, Homo sapien
cttaggactccctggaaaacagtca

SEQ ID NO: 5388773 - DNA, 25 bp, Homo sapien
tgcggagacttgctccctgggctgc

SEQ ID NO: 5388774 - DNA, 25 bp, Homo sapien
gcattcaaaggccacgctaacagaa

SEQ ID NO: 5388775 - DNA, 25 bp, Homo sapien
taacagaacagactcggttttcctg

SEQ ID NO: 5388776 - DNA, 25 bp, Homo sapien
tcctcccgcggttggttatcctctg

SEQ ID NO: 5388777 - DNA, 25 bp, Homo sapien
ctgtttcgagtcaacttcagagcct

SEQ ID NO: 5388778 - DNA, 25 bp, Homo sapien
gtgcaatcctgtttgacaaatgaag

SEQ ID NO: 5388779 - DNA, 25 bp, Homo sapien
ctgctagcaagcaccggagcgacaa

SEQ ID NO: 5388780 - DNA, 25 bp, Homo sapien
gagccgcttcggttcattttcctgg

SEQ ID NO: 5388781 - DNA, 25 bp, Homo sapien
ttaaggtaagacaagtgtgagccgc

SEQ ID NO: 5388782 - DNA, 25 bp, Homo sapien
taccccaaagcttgccaagataaag

SEQ ID NO: 5388783 - DNA, 25 bp, Homo sapien
gcttgtggccagtcttcctgatttt

SEQ ID NO: 5388784 - DNA, 25 bp, Homo sapien
cagagacaaccaggcttctagcttc

SEQ ID NO: 5388785 - DNA, 25 bp, Homo sapien
taaagctggcccaacagctctgagt

SEQ ID NO: 5388786 - DNA, 25 bp, Homo sapien
taagtcctaactaatgtgtcctcgt

SEQ ID NO: 5388787 - DNA, 25 bp, Homo sapien
tcataaaacctggtaggaaactata

SEQ ID NO: 5388788 - DNA, 25 bp, Homo sapien
tgcctatgcagctctagcaagtttt

SEQ ID NO: 5388789 - DNA, 25 bp, Homo sapien
agccatcagtctgccagaagaccta

SEQ ID NO: 5388790 - DNA, 25 bp, Homo sapien
ctgtttggttcataaaaggagagag

SEQ ID NO: 5388791 - DNA, 25 bp, Homo sapien
cctgatgaaacccttttgtaggaga

SEQ ID NO: 5388792 - DNA, 25 bp, Homo sapien
ccttgagctcaaatgtacctctgga

SEQ ID NO: 5388793 - DNA, 25 bp, Homo sapien
agaccagcccatcagtgcatctcaa

SEQ ID NO: 5388794 - DNA, 25 bp, Homo sapien
tcctagctcactgtaggaagccagc

SEQ ID NO: 5388795 - DNA, 25 bp, Homo sapien
aagcgaagttcctaaatgttggact

SEQ ID NO: 5388796 - DNA, 25 bp, Homo sapien
ctgtaggaagccagctaagagctga

SEQ ID NO: 5388797 - DNA, 25 bp, Homo sapien
ggttctgtatattctggccaccaaa

SEQ ID NO: 5388798 - DNA, 25 bp, Homo sapien
tgtccacgggcagcgcctgtgttta

SEQ ID NO: 5388799 - DNA, 25 bp, Homo sapien
acgggcagcgcctgtgtttaattca

SEQ ID NO: 5388800 - DNA, 25 bp, Homo sapien
tagagttctgtaagctgctgcccaa

SEQ ID NO: 5388801 - DNA, 25 bp, Homo sapien
taggaccagatcctagagttctgta

SEQ ID NO: 5388802 - DNA, 25 bp, Homo sapien
aactggaatatcagggtggaaagat

SEQ ID NO: 5388803 - DNA, 25 bp, Homo sapien
caactggaatatcagggtggaaaga

SEQ ID NO: 5388804 - DNA, 25 bp, Homo sapien
tgtgtgatacagagagtgggcacac

SEQ ID NO: 5388805 - DNA, 25 bp, Homo sapien
gagtgggcacacaactcaggcttgg

SEQ ID NO: 5388806 - DNA, 25 bp, Homo sapien
caggattctcaaccactgtgatgtc

SEQ ID NO: 5388807 - DNA, 25 bp, Homo sapien
ggattctcaaccactgtgatgtcct

SEQ ID NO: 5388808 - DNA, 25 bp, Homo sapien
acagcaggattctcaaccactgtga

SEQ ID NO: 5388809 - DNA, 25 bp, Homo sapien
agcaggattctcaaccactgtgatg

SEQ ID NO: 5388810 - DNA, 25 bp, Homo sapien
tgtccagagataatccctgtgcttc

SEQ ID NO: 5388811 - DNA, 25 bp, Homo sapien
gctggttccccaatatcctgctgat

SEQ ID NO: 5388812 - DNA, 25 bp, Homo sapien
actgtggcttcttaagctgatttct

SEQ ID NO: 5388813 - DNA, 25 bp, Homo sapien
tgctgccttgcaacccgaaatactg

SEQ ID NO: 5388814 - DNA, 25 bp, Homo sapien
ctgcttgtaggaaactccttggttt

SEQ ID NO: 5388815 - DNA, 25 bp, Homo sapien
caagaaatcatgttcgggtaataca

SEQ ID NO: 5388816 - DNA, 25 bp, Homo sapien
ccaatagggccctgtatgggcacaa

SEQ ID NO: 5388817 - DNA, 25 bp, Homo sapien
tatccaccctcgagttatagctatc

SEQ ID NO: 5388818 - DNA, 25 bp, Homo sapien
tagctatcaataggtcagaggttcc

SEQ ID NO: 5388819 - DNA, 25 bp, Homo sapien
cagctctccactgagtgtattggtg

SEQ ID NO: 5388820 - DNA, 25 bp, Homo sapien
tctccactgagtgtattggtgccct

SEQ ID NO: 5388821 - DNA, 25 bp, Homo sapien
gctctccactgagtgtattggtgcc

SEQ ID NO: 5388822 - DNA, 25 bp, Homo sapien
ctccactgagtgtattggtgccctt

SEQ ID NO: 5388823 - DNA, 25 bp, Homo sapien
aggatgcctaattcaccatgggctg

SEQ ID NO: 5388824 - DNA, 25 bp, Homo sapien
ggatgcctaattcaccatgggctgg

SEQ ID NO: 5388825 - DNA, 25 bp, Homo sapien
ctgaacaggaccagggttttttgct

SEQ ID NO: 5388826 - DNA, 25 bp, Homo sapien
tgaacaggaccagggttttttgctg

SEQ ID NO: 5388827 - DNA, 25 bp, Homo sapien
ttatctgtcctggtagatagccctt

SEQ ID NO: 5388828 - DNA, 25 bp, Homo sapien
tcagagctctcatcttatctgtcct

SEQ ID NO: 5388829 - DNA, 25 bp, Homo sapien
ttgtttccattccgggtaagtcaga

SEQ ID NO: 5388830 - DNA, 25 bp, Homo sapien
ggtagatagccctttctttgtgtat

SEQ ID NO: 5388831 - DNA, 25 bp, Homo sapien
ggctctgaagtaattgcagactgtg

SEQ ID NO: 5388832 - DNA, 25 bp, Homo sapien
agattaaactctgtcccttctggaa

SEQ ID NO: 5388833 - DNA, 25 bp, Homo sapien
catcttagccaagggatggggccat

SEQ ID NO: 5388834 - DNA, 25 bp, Homo sapien
catcactgatttgcgatgcaggcaa

SEQ ID NO: 5388835 - DNA, 25 bp, Homo sapien
tggcgaccatacatctgacaacctg

SEQ ID NO: 5388836 - DNA, 25 bp, Homo sapien
cttggtaataaatctggcgaccata

SEQ ID NO: 5388837 - DNA, 25 bp, Homo sapien
taaatctggcgaccatacatctgac

SEQ ID NO: 5388838 - DNA, 25 bp, Homo sapien
gacaacctgcccatggctccagaca

SEQ ID NO: 5388839 - DNA, 25 bp, Homo sapien
tgctggaggcatatcttgccctatt

SEQ ID NO: 5388840 - DNA, 25 bp, Homo sapien
aacatgcagtccttagggctgtgcc

SEQ ID NO: 5388841 - DNA, 25 bp, Homo sapien
tattctctgtgaccggatctgcctc

SEQ ID NO: 5388842 - DNA, 25 bp, Homo sapien
gggctgtgccatcatttcgttcctg

SEQ ID NO: 5388843 - DNA, 25 bp, Homo sapien
ttcctgatccatggccaggtgggtc

SEQ ID NO: 5388844 - DNA, 25 bp, Homo sapien
caagatgcagctgccaaaatggggc

SEQ ID NO: 5388845 - DNA, 25 bp, Homo sapien
agctgccaaaatggggcttcttcca

SEQ ID NO: 5388846 - DNA, 25 bp, Homo sapien
ttttcctgatccatggccaggtggg

SEQ ID NO: 5388847 - DNA, 25 bp, Homo sapien
gagcaacagggaacaaattggagca

SEQ ID NO: 5388848 - DNA, 25 bp, Homo sapien
gggaacaaattggagcagtcaggaa

SEQ ID NO: 5388849 - DNA, 25 bp, Homo sapien
cttgagaatacagagcaacagggaa

SEQ ID NO: 5388850 - DNA, 25 bp, Homo sapien
gaatacagagcaacagggaacaaat

SEQ ID NO: 5388851 - DNA, 25 bp, Homo sapien
ccttccattcaaatgattggaaatc

SEQ ID NO: 5388852 - DNA, 25 bp, Homo sapien
ttgccttccattcaaatgattggaa

SEQ ID NO: 5388853 - DNA, 25 bp, Homo sapien
attcaaatgattggaaatctccttc

SEQ ID NO: 5388854 - DNA, 25 bp, Homo sapien
tccattcaaatgattggaaatctcc

SEQ ID NO: 5388855 - DNA, 25 bp, Homo sapien
ttcaagagtaagtaacaccaccttc

SEQ ID NO: 5388856 - DNA, 25 bp, Homo sapien
agagtaagtaacaccaccttctgag

SEQ ID NO: 5388857 - DNA, 25 bp, Homo sapien
caaagcgttcaagagtaagtaacac

SEQ ID NO: 5388858 - DNA, 25 bp, Homo sapien
gcgttcaagagtaagtaacaccacc

SEQ ID NO: 5388859 - DNA, 25 bp, Homo sapien
tgcaatgagcctagaagagccttta

SEQ ID NO: 5388860 - DNA, 25 bp, Homo sapien
tcttggactgtattctgggaagctt

SEQ ID NO: 5388861 - DNA, 25 bp, Homo sapien
gctatcatccgcagggtcactggtt

SEQ ID NO: 5388862 - DNA, 25 bp, Homo sapien
tagaagagcctttatcacacaggat

SEQ ID NO: 5388863 - DNA, 25 bp, Homo sapien
tgagtagattcgcttcagacagaag

SEQ ID NO: 5388864 - DNA, 25 bp, Homo sapien
ccctagagagtaaggccatgtggaa

SEQ ID NO: 5388865 - DNA, 25 bp, Homo sapien
cactcacagatagaatcgtggccct

SEQ ID NO: 5388866 - DNA, 25 bp, Homo sapien
cagattcaaatccaccactcacaga

SEQ ID NO: 5388867 - DNA, 25 bp, Homo sapien
ctgccagcttaaagtgataggccca

SEQ ID NO: 5388868 - DNA, 25 bp, Homo sapien
aaaggaccatgtgcggccttgaggt

SEQ ID NO: 5388869 - DNA, 25 bp, Homo sapien
cagcttaaagtgataggcccagaca

SEQ ID NO: 5388870 - DNA, 25 bp, Homo sapien
tgccgcctctgactagtccacaggg

SEQ ID NO: 5388871 - DNA, 25 bp, Homo sapien
catttggcaacgatgtaattggata

SEQ ID NO: 5388872 - DNA, 25 bp, Homo sapien
gctgttatgggctgactcatttggc

SEQ ID NO: 5388873 - DNA, 25 bp, Homo sapien
tgaaggaaacagcacgctgttatgg

SEQ ID NO: 5388874 - DNA, 25 bp, Homo sapien
gactcatttggcaacgatgtaattg

SEQ ID NO: 5388875 - DNA, 25 bp, Homo sapien
cttcattaacaattgcacccctggt

SEQ ID NO: 5388876 - DNA, 25 bp, Homo sapien
gcacccctggttctcaattgcgaca

SEQ ID NO: 5388877 - DNA, 25 bp, Homo sapien
ctcaattgcgacactccacactggt

SEQ ID NO: 5388878 - DNA, 25 bp, Homo sapien
caattgcgacactccacactggttt

SEQ ID NO: 5388879 - DNA, 25 bp, Homo sapien
tgaagcaagttgctcccagttgact

SEQ ID NO: 5388880 - DNA, 25 bp, Homo sapien
tctaaaactatggatacagcgctat

SEQ ID NO: 5388881 - DNA, 25 bp, Homo sapien
tctagcggtaggaatgggtagacca

SEQ ID NO: 5388882 - DNA, 25 bp, Homo sapien
aaagtaagcctcgttgttctcgtgc

SEQ ID NO: 5388883 - DNA, 25 bp, Homo sapien
tggacacagataactcgcttccaca

SEQ ID NO: 5388884 - DNA, 25 bp, Homo sapien
gacacagataactcgcttccacagt

SEQ ID NO: 5388885 - DNA, 25 bp, Homo sapien
cagataactcgcttccacagtccat

SEQ ID NO: 5388886 - DNA, 25 bp, Homo sapien
taagtgaagacatggacacagataa

SEQ ID NO: 5388887 - DNA, 25 bp, Homo sapien
tgtattgccaaatatggttctgctg

SEQ ID NO: 5388888 - DNA, 25 bp, Homo sapien
tattgccaaatatggttctgctgaa

SEQ ID NO: 5388889 - DNA, 25 bp, Homo sapien
tatgtattgccaaatatggttctgc

SEQ ID NO: 5388890 - DNA, 25 bp, Homo sapien
tgccaaatatggttctgctgaacat

SEQ ID NO: 5388891 - DNA, 25 bp, Homo sapien
tcagtgtgtctcctgagtactcggg

SEQ ID NO: 5388892 - DNA, 25 bp, Homo sapien
tgtgtctcctgagtactcgggtaca

SEQ ID NO: 5388893 - DNA, 25 bp, Homo sapien
ctgagtactcgggtacagagttcct

SEQ ID NO: 5388894 - DNA, 25 bp, Homo sapien
agtgtgtctcctgagtactcgggta

SEQ ID NO: 5388895 - DNA, 25 bp, Homo sapien
gacgttgatgagcaataattctatg

SEQ ID NO: 5388896 - DNA, 25 bp, Homo sapien
ccccatttgttcagtgaattcagaa

SEQ ID NO: 5388897 - DNA, 25 bp, Homo sapien
ctctaagtgcgatgagtggctctca

SEQ ID NO: 5388898 - DNA, 25 bp, Homo sapien
tctgtcacctgctcgactgttttga

SEQ ID NO: 5388899 - DNA, 25 bp, Homo sapien
tatcttgggagcagatgacagtagc

SEQ ID NO: 5388900 - DNA, 25 bp, Homo sapien
cttgaggagcccaaaacggaatttg

SEQ ID NO: 5388901 - DNA, 25 bp, Homo sapien
tcaagcaattctgaggaccgggcag

SEQ ID NO: 5388902 - DNA, 25 bp, Homo sapien
gaattgtcacgatgaagaaaggctg

SEQ ID NO: 5388903 - DNA, 25 bp, Homo sapien
tttccttggcaactccaataccgag

SEQ ID NO: 5388904 - DNA, 25 bp, Homo sapien
tctctatatgagcaaaacatgttcc

SEQ ID NO: 5388905 - DNA, 25 bp, Homo sapien
ggactgacgccctctattgaagctg

SEQ ID NO: 5388906 - DNA, 25 bp, Homo sapien
ccaataccgagacactggaggaaga

SEQ ID NO: 5388907 - DNA, 25 bp, Homo sapien
gaggatgcctgtggatgcgagggcc

SEQ ID NO: 5388908 - DNA, 25 bp, Homo sapien
ggatgcctgtggatgcgagggccca

SEQ ID NO: 5388909 - DNA, 25 bp, Homo sapien
aggatgcctgtggatgcgagggccc

SEQ ID NO: 5388910 - DNA, 25 bp, Homo sapien
agtgattctactacagaagctcggg

SEQ ID NO: 5388911 - DNA, 25 bp, Homo sapien
tgagtttctgtgcatctcgtagaac

SEQ ID NO: 5388912 - DNA, 25 bp, Homo sapien
catgctgcagactggatgacctctt

SEQ ID NO: 5388913 - DNA, 25 bp, Homo sapien
gaagctcgggtaagctccattttgt

SEQ ID NO: 5388914 - DNA, 25 bp, Homo sapien
gggattcccgaggtctttctgcgaa

SEQ ID NO: 5388915 - DNA, 25 bp, Homo sapien
aaatccaggcaataggggattcccg

SEQ ID NO: 5388916 - DNA, 25 bp, Homo sapien
tgctcctgcgtagggtgctcctgtc

SEQ ID NO: 5388917 - DNA, 25 bp, Homo sapien
cagcagagtgcgagtggtcacgagc

SEQ ID NO: 5388918 - DNA, 25 bp, Homo sapien
ccacgttactataagcagagctaag

SEQ ID NO: 5388919 - DNA, 25 bp, Homo sapien
ctaaggttgtgtgtagagcttctca

SEQ ID NO: 5388920 - DNA, 25 bp, Homo sapien
cagagctaaggttgtgtgtagagct

SEQ ID NO: 5388921 - DNA, 25 bp, Homo sapien
gggtgcatataactacttccacgtt

SEQ ID NO: 5388922 - DNA, 25 bp, Homo sapien
agagagttgtgggctttgtactgcc

SEQ ID NO: 5388923 - DNA, 25 bp, Homo sapien
gagagagagttgtgggctttgtact

SEQ ID NO: 5388924 - DNA, 25 bp, Homo sapien
acagagagagagttgtgggctttgt

SEQ ID NO: 5388925 - DNA, 25 bp, Homo sapien
agagttgtgggctttgtactgcctc

SEQ ID NO: 5388926 - DNA, 25 bp, Homo sapien
ccttgtccacgtgcaaaggggtcct

SEQ ID NO: 5388927 - DNA, 25 bp, Homo sapien
cacagatgaccagaagcaggcacat

SEQ ID NO: 5388928 - DNA, 25 bp, Homo sapien
tcacagatgaccagaagcaggcaca

SEQ ID NO: 5388929 - DNA, 25 bp, Homo sapien
cacatggccttgtccacgtgcaaag

SEQ ID NO: 5388930 - DNA, 25 bp, Homo sapien
ctgcccacttctccgggaccagact

SEQ ID NO: 5388931 - DNA, 25 bp, Homo sapien
ccacagatgtgccacgccttcagga

SEQ ID NO: 5388932 - DNA, 25 bp, Homo sapien
cagagtaacaggctgtttaggagag

SEQ ID NO: 5388933 - DNA, 25 bp, Homo sapien
tagtcattcaaccttggtgtgggcc

SEQ ID NO: 5388934 - DNA, 25 bp, Homo sapien
gtgacatggcacatgtgtcaccatg

SEQ ID NO: 5388935 - DNA, 25 bp, Homo sapien
attggtgtttctcccttgaggtgga

SEQ ID NO: 5388936 - DNA, 25 bp, Homo sapien
catgtgtcaccatgagcaatccaac

SEQ ID NO: 5388937 - DNA, 25 bp, Homo sapien
aatccaaccaggcatcccactacag

SEQ ID NO: 5388938 - DNA, 25 bp, Homo sapien
gagtaagagcacctacgaaaggttc

SEQ ID NO: 5388939 - DNA, 25 bp, Homo sapien
gtaagagcacctacgaaaggttcca

SEQ ID NO: 5388940 - DNA, 25 bp, Homo sapien
cttgagtaagagcacctacgaaagg

SEQ ID NO: 5388941 - DNA, 25 bp, Homo sapien
taagagcacctacgaaaggttccat

SEQ ID NO: 5388942 - DNA, 25 bp, Homo sapien
tgtttgcctgcattgccagatggca

SEQ ID NO: 5388943 - DNA, 25 bp, Homo sapien
gtttgcctgcattgccagatggcat

SEQ ID NO: 5388944 - DNA, 25 bp, Homo sapien
cctgagggcaacggtggcctccctt

SEQ ID NO: 5388945 - DNA, 25 bp, Homo sapien
tccctgagggcaacggtggcctccc

SEQ ID NO: 5388946 - DNA, 25 bp, Homo sapien
attccctgagggcaacggtggcctc

SEQ ID NO: 5388947 - DNA, 25 bp, Homo sapien
ctgagggcaacggtggcctcccttt

SEQ ID NO: 5388948 - DNA, 25 bp, Homo sapien
tcatgatgagatgggttataactcc

SEQ ID NO: 5388949 - DNA, 25 bp, Homo sapien
tccaaacccacagagatggtaatgt

SEQ ID NO: 5388950 - DNA, 25 bp, Homo sapien
ttggcataaatgtctcatgatgaga

SEQ ID NO: 5388951 - DNA, 25 bp, Homo sapien
aatgtgagttataaattcctcccag

SEQ ID NO: 5388952 - DNA, 25 bp, Homo sapien
ccccaaggaaatagcgttctcaata

SEQ ID NO: 5388953 - DNA, 25 bp, Homo sapien
atagcgttctcaataccatcatggg

SEQ ID NO: 5388954 - DNA, 25 bp, Homo sapien
catcatggggttctttatgcccgaa

SEQ ID NO: 5388955 - DNA, 25 bp, Homo sapien
tttatgcccgaagcataaagaacat

SEQ ID NO: 5388956 - DNA, 25 bp, Homo sapien
tgccccttgactgcctgaagcctca

SEQ ID NO: 5388957 - DNA, 25 bp, Homo sapien
ccccttgactgcctgaagcctcatt

SEQ ID NO: 5388958 - DNA, 25 bp, Homo sapien
gccccttgactgcctgaagcctcat

SEQ ID NO: 5388959 - DNA, 25 bp, Homo sapien
ctgccccttgactgcctgaagcctc

SEQ ID NO: 5388960 - DNA, 25 bp, Homo sapien
acctttccatgtgtcccggccatgg

SEQ ID NO: 5388961 - DNA, 25 bp, Homo sapien
gcacctttccatgtgtcccggccat

SEQ ID NO: 5388962 - DNA, 25 bp, Homo sapien
cctttccatgtgtcccggccatggg

SEQ ID NO: 5388963 - DNA, 25 bp, Homo sapien
cttgcacctttccatgtgtcccggc

SEQ ID NO: 5388964 - DNA, 25 bp, Homo sapien
tgttggagcaacatagaacacctac

SEQ ID NO: 5388965 - DNA, 25 bp, Homo sapien
gacatggctgcctataaatccaaag

SEQ ID NO: 5388966 - DNA, 25 bp, Homo sapien
gaaccaggtcatgttgtgacgtcag

SEQ ID NO: 5388967 - DNA, 25 bp, Homo sapien
ccaggctttcgaagacagtccagct

SEQ ID NO: 5388968 - DNA, 25 bp, Homo sapien
acattttcccccagttaaatagctg

SEQ ID NO: 5388969 - DNA, 25 bp, Homo sapien
cattttcccccagttaaatagctgt

SEQ ID NO: 5388970 - DNA, 25 bp, Homo sapien
gctgtcttctgtcccataacctcca

SEQ ID NO: 5388971 - DNA, 25 bp, Homo sapien
ctgagacatccatgctgtcttctgt

SEQ ID NO: 5388972 - DNA, 25 bp, Homo sapien
catgctgtcttctgtcccataacct

SEQ ID NO: 5388973 - DNA, 25 bp, Homo sapien
gagacatccatgctgtcttctgtcc

SEQ ID NO: 5388974 - DNA, 25 bp, Homo sapien
tccatgatactcctggggcctgcat

SEQ ID NO: 5388975 - DNA, 25 bp, Homo sapien
ctggggcctgcattgtctggggtca

SEQ ID NO: 5388976 - DNA, 25 bp, Homo sapien
cagctaggttcagggtgagacaccc

SEQ ID NO: 5388977 - DNA, 25 bp, Homo sapien
taggttcagggtgagacacccatcc

SEQ ID NO: 5388978 - DNA, 25 bp, Homo sapien
caaacagctaggttcagggtgagac

SEQ ID NO: 5388979 - DNA, 25 bp, Homo sapien
tgaaagcaaacagctaggttcaggg

SEQ ID NO: 5388980 - DNA, 25 bp, Homo sapien
gagtctcagtcaggctctccatggc

SEQ ID NO: 5388981 - DNA, 25 bp, Homo sapien
gagactcctgtccatgtgaaccttt

SEQ ID NO: 5388982 - DNA, 25 bp, Homo sapien
gtgctatttaagacccattgtgaag

SEQ ID NO: 5388983 - DNA, 25 bp, Homo sapien
gcagccttccggaactatggccaag

SEQ ID NO: 5388984 - DNA, 25 bp, Homo sapien
aggttgggaatctcaggaagtggcg

SEQ ID NO: 5388985 - DNA, 25 bp, Homo sapien
ggggacccatgccacactgaaaaac

SEQ ID NO: 5388986 - DNA, 25 bp, Homo sapien
ggtgcattatctttcgtgcaaaaat

SEQ ID NO: 5388987 - DNA, 25 bp, Homo sapien
aacgtggccctctagaaggaggttg

SEQ ID NO: 5388988 - DNA, 25 bp, Homo sapien
tctggaggccactttactgggaagg

SEQ ID NO: 5388989 - DNA, 25 bp, Homo sapien
aacaggtctggatggccagtctgga

SEQ ID NO: 5388990 - DNA, 25 bp, Homo sapien
ggaaacctcctatgtgagcgtcgaa

SEQ ID NO: 5388991 - DNA, 25 bp, Homo sapien
tcagtttgggattcaccaatgccct

SEQ ID NO: 5388992 - DNA, 25 bp, Homo sapien
gcgtagcgtaacagtcttcccacag

SEQ ID NO: 5388993 - DNA, 25 bp, Homo sapien
ctgtggtgcttcctccagccaggcc

SEQ ID NO: 5388994 - DNA, 25 bp, Homo sapien
gccaccaaggccctgtatacacgtc

SEQ ID NO: 5388995 - DNA, 25 bp, Homo sapien
tgactcgggcccactgggccttctg

SEQ ID NO: 5388996 - DNA, 25 bp, Homo sapien
ctcttgcataggagttttcctccct

SEQ ID NO: 5388997 - DNA, 25 bp, Homo sapien
cctgcctcctcttgcataggagttt

SEQ ID NO: 5388998 - DNA, 25 bp, Homo sapien
gggcctgtgacttggctgcccctgc

SEQ ID NO: 5388999 - DNA, 25 bp, Homo sapien
tgccttcattacacaaatgctgctg

SEQ ID NO: 5389000 - DNA, 25 bp, Homo sapien
cttgacggcgctggggacacgggag

SEQ ID NO: 5389001 - DNA, 25 bp, Homo sapien
cggcgctggggacacgggagaagga

SEQ ID NO: 5389002 - DNA, 25 bp, Homo sapien
tggggcttgacggcgctggggacac

SEQ ID NO: 5389003 - DNA, 25 bp, Homo sapien
ggcttgacggcgctggggacacggg

SEQ ID NO: 5389004 - DNA, 25 bp, Homo sapien
ctggggacacgggagaaggagccac

SEQ ID NO: 5389005 - DNA, 25 bp, Homo sapien
gggacacgggagaaggagccacagc

SEQ ID NO: 5389006 - DNA, 25 bp, Homo sapien
tggggacacgggagaaggagccaca

SEQ ID NO: 5389007 - DNA, 25 bp, Homo sapien
ggacacgggagaaggagccacagct

SEQ ID NO: 5389008 - DNA, 25 bp, Homo sapien
ctggggacacgggagaaggagccac

SEQ ID NO: 5389009 - DNA, 25 bp, Homo sapien
gacacgggagaaggagccacagctt

SEQ ID NO: 5389010 - DNA, 25 bp, Homo sapien
tggggacacgggagaaggagccaca

SEQ ID NO: 5389011 - DNA, 25 bp, Homo sapien
acgggagaaggagccacagcttcac

SEQ ID NO: 5389012 - DNA, 25 bp, Homo sapien
ctggggacacgggagaaggagccac

SEQ ID NO: 5389013 - DNA, 25 bp, Homo sapien
tggggacacgggagaaggagccaca

SEQ ID NO: 5389014 - DNA, 25 bp, Homo sapien
acagcttcactctggggcttgacgg

SEQ ID NO: 5389015 - DNA, 25 bp, Homo sapien
aggagccacagcttcactctggggc

SEQ ID NO: 5389016 - DNA, 25 bp, Homo sapien
ctggggacacgggagaaggagccac

SEQ ID NO: 5389017 - DNA, 25 bp, Homo sapien
tggggacacgggagaaggagccaca

SEQ ID NO: 5389018 - DNA, 25 bp, Homo sapien
acagcttcactctggggcttgacgg

SEQ ID NO: 5389019 - DNA, 25 bp, Homo sapien
aggagccacagcttcactctggggc

SEQ ID NO: 5389020 - DNA, 25 bp, Homo sapien
agagcccttggtaaatgccttggca

SEQ ID NO: 5389021 - DNA, 25 bp, Homo sapien
gtggtccacagagcccttggtaaat

SEQ ID NO: 5389022 - DNA, 25 bp, Homo sapien
gccccccaagagaatccgctcccat

SEQ ID NO: 5389023 - DNA, 25 bp, Homo sapien
atgccttggcattgagagttggcag

SEQ ID NO: 5389024 - DNA, 25 bp, Homo sapien
ctttcagtgtaatacttgctagaga

SEQ ID NO: 5389025 - DNA, 25 bp, Homo sapien
cattacatccagttgagcttcgaac

SEQ ID NO: 5389026 - DNA, 25 bp, Homo sapien
gttgagcttcgaacattttctacag

SEQ ID NO: 5389027 - DNA, 25 bp, Homo sapien
ccagttgagcttcgaacattttcta

SEQ ID NO: 5389028 - DNA, 25 bp, Homo sapien
catccagttgagcttcgaacatttt

SEQ ID NO: 5389029 - DNA, 25 bp, Homo sapien
attacatttgcataaagcaatcgct

SEQ ID NO: 5389030 - DNA, 25 bp, Homo sapien
gcaactagcataacacaattacaat

SEQ ID NO: 5389031 - DNA, 25 bp, Homo sapien
attgaaatcccatcttgcattacat

SEQ ID NO: 5389032 - DNA, 25 bp, Homo sapien
tttgcataaagcaatcgctctttcc

SEQ ID NO: 5389033 - DNA, 25 bp, Homo sapien
ctacgctgcagggagacggcgttcc

SEQ ID NO: 5389034 - DNA, 25 bp, Homo sapien
gggaagtgcgttgtagccccagatt

SEQ ID NO: 5389035 - DNA, 25 bp, Homo sapien
aagtgcgttgtagccccagattctc

SEQ ID NO: 5389036 - DNA, 25 bp, Homo sapien
ggagggaagtgcgttgtagccccag

SEQ ID NO: 5389037 - DNA, 25 bp, Homo sapien
agcaaacattccgaaggtaggtagc

SEQ ID NO: 5389038 - DNA, 25 bp, Homo sapien
tctgacttgggaagagttgccaatc

SEQ ID NO: 5389039 - DNA, 25 bp, Homo sapien
caaacattccgaaggtaggtagcca

SEQ ID NO: 5389040 - DNA, 25 bp, Homo sapien
ggtctgacttgggaagagttgccaa

SEQ ID NO: 5389041 - DNA, 25 bp, Homo sapien
ccccagaacatgagcagacctcccc

SEQ ID NO: 5389042 - DNA, 25 bp, Homo sapien
ggcagcccccagaacatgagcagac

SEQ ID NO: 5389043 - DNA, 25 bp, Homo sapien
ccagaacatgagcagacctcccctg

SEQ ID NO: 5389044 - DNA, 25 bp, Homo sapien
agaacatgagcagacctcccctgca

SEQ ID NO: 5389045 - DNA, 25 bp, Homo sapien
atccagccatgtagggctctccaac

SEQ ID NO: 5389046 - DNA, 25 bp, Homo sapien
cattcggcctaaggctctgagacac

SEQ ID NO: 5389047 - DNA, 25 bp, Homo sapien
cagtccagctttgaatgatgaattg

SEQ ID NO: 5389048 - DNA, 25 bp, Homo sapien
gggaaatgccagtttccagtcctct

SEQ ID NO: 5389049 - DNA, 25 bp, Homo sapien
gatccttgcagaggaattgtgcaaa

SEQ ID NO: 5389050 - DNA, 25 bp, Homo sapien
aagccggtagctgcagcaaagcttg

SEQ ID NO: 5389051 - DNA, 25 bp, Homo sapien
gaagccggtagctgcagcaaagctt

SEQ ID NO: 5389052 - DNA, 25 bp, Homo sapien
agccggtagctgcagcaaagcttgg

SEQ ID NO: 5389053 - DNA, 25 bp, Homo sapien
agtaggatgtgagcagacatgtccc

SEQ ID NO: 5389054 - DNA, 25 bp, Homo sapien
cttcccgtgttcaaggtaatgatga

SEQ ID NO: 5389055 - DNA, 25 bp, Homo sapien
tgccatcaggttgttgcagcttggg

SEQ ID NO: 5389056 - DNA, 25 bp, Homo sapien
gagtctccacaattgttccaccatg

SEQ ID NO: 5389057 - DNA, 25 bp, Homo sapien
tgaatgaccgtcagcgaacgtcgct

SEQ ID NO: 5389058 - DNA, 25 bp, Homo sapien
tctgaatccattctggcaatgtgct

SEQ ID NO: 5389059 - DNA, 25 bp, Homo sapien
tctataactctctggaaatgtctga

SEQ ID NO: 5389060 - DNA, 25 bp, Homo sapien
tattcctttgcaatgcgccaactgg

SEQ ID NO: 5389061 - DNA, 25 bp, Homo sapien
aaatcctagactttcaggtccacct

SEQ ID NO: 5389062 - DNA, 25 bp, Homo sapien
aatcctagactttcaggtccacctc

SEQ ID NO: 5389063 - DNA, 25 bp, Homo sapien
atcctagactttcaggtccacctct

SEQ ID NO: 5389064 - DNA, 25 bp, Homo sapien
ggttgactgcggacattcattctcc

SEQ ID NO: 5389065 - DNA, 25 bp, Homo sapien
gccatggttgactgcggacattcat

SEQ ID NO: 5389066 - DNA, 25 bp, Homo sapien
ttcattctccctcctcgtgtctgag

SEQ ID NO: 5389067 - DNA, 25 bp, Homo sapien
tcgtgtctgagctgacgcagcttca

SEQ ID NO: 5389068 - DNA, 25 bp, Homo sapien
gaacccgacctctctcaggttgaca

SEQ ID NO: 5389069 - DNA, 25 bp, Homo sapien
ctcaggttgacatccctctccaggg

SEQ ID NO: 5389070 - DNA, 25 bp, Homo sapien
aaactggaatgaacccgacctctct

SEQ ID NO: 5389071 - DNA, 25 bp, Homo sapien
tggtgttttttaagcccagaattca

SEQ ID NO: 5389072 - DNA, 25 bp, Homo sapien
ccactgagcaggataggcttttctg

SEQ ID NO: 5389073 - DNA, 25 bp, Homo sapien
tgagagtgaaaggaggcttggattc

SEQ ID NO: 5389074 - DNA, 25 bp, Homo sapien
ggcttttctgggtgctactcaatgt

SEQ ID NO: 5389075 - DNA, 25 bp, Homo sapien
ttggattcactgcacctcgcctttc

SEQ ID NO: 5389076 - DNA, 25 bp, Homo sapien
taccatgatagactccaacgctgaa

SEQ ID NO: 5389077 - DNA, 25 bp, Homo sapien
agcccgatctgcttccatccgaggt

SEQ ID NO: 5389078 - DNA, 25 bp, Homo sapien
tcttatgagtgttgggtgccacctc

SEQ ID NO: 5389079 - DNA, 25 bp, Homo sapien
tgggcctctaagcaagtgctcctct

SEQ ID NO: 5389080 - DNA, 25 bp, Homo sapien
gctgctacggccctttggaaagcct

SEQ ID NO: 5389081 - DNA, 25 bp, Homo sapien
ttgacatttgttgctgctacggccc

SEQ ID NO: 5389082 - DNA, 25 bp, Homo sapien
ctgggtaagttatgcctttgcagcc

SEQ ID NO: 5389083 - DNA, 25 bp, Homo sapien
ggaattctactaataatgtcctgaa

SEQ ID NO: 5389084 - DNA, 25 bp, Homo sapien
cagacactcctattctctccaaccg

SEQ ID NO: 5389085 - DNA, 25 bp, Homo sapien
tattctctccaaccgccattgcatc

SEQ ID NO: 5389086 - DNA, 25 bp, Homo sapien
tccaaccgccattgcatccgtgata

SEQ ID NO: 5389087 - DNA, 25 bp, Homo sapien
cattgcatccgtgatactgacagta

SEQ ID NO: 5389088 - DNA, 25 bp, Homo sapien
agttgcctatggactgggacctgga

SEQ ID NO: 5389089 - DNA, 25 bp, Homo sapien
gctctggcctcacttcaggaagagt

SEQ ID NO: 5389090 - DNA, 25 bp, Homo sapien
tcctttgacaggaagttgcctatgg

SEQ ID NO: 5389091 - DNA, 25 bp, Homo sapien
gattttgcttgggatgctctggcct

SEQ ID NO: 5389092 - DNA, 25 bp, Homo sapien
gatgcgtggaggcaggtcttaccta

SEQ ID NO: 5389093 - DNA, 25 bp, Homo sapien
tcttacctatcgcatgtggaggagg

SEQ ID NO: 5389094 - DNA, 25 bp, Homo sapien
cactcatgagtgaggaacgctaaag

SEQ ID NO: 5389095 - DNA, 25 bp, Homo sapien
gctattgcaatagagagaacactca

SEQ ID NO: 5389096 - DNA, 25 bp, Homo sapien
tgcagttttcagctagctcgtccag

SEQ ID NO: 5389097 - DNA, 25 bp, Homo sapien
tcaatgttctttgtggtgccttcag

SEQ ID NO: 5389098 - DNA, 25 bp, Homo sapien
tttcagctagctcgtccagagtgtt

SEQ ID NO: 5389099 - DNA, 25 bp, Homo sapien
cagggcacgggatgtgttttatttg

SEQ ID NO: 5389100 - DNA, 25 bp, Homo sapien
atttatggccgcgatcagaaggtcc

SEQ ID NO: 5389101 - DNA, 25 bp, Homo sapien
agagtttgccgacggcccctgagaa

SEQ ID NO: 5389102 - DNA, 25 bp, Homo sapien
ggagaagtcctcctagacagggttg

SEQ ID NO: 5389103 - DNA, 25 bp, Homo sapien
ctccccttgggctgcggaacagagt

SEQ ID NO: 5389104 - DNA, 25 bp, Homo sapien
tctgccgcctgcgtgggtgccccgg

SEQ ID NO: 5389105 - DNA, 25 bp, Homo sapien
gcttccttccgtcgctcctctgccg

SEQ ID NO: 5389106 - DNA, 25 bp, Homo sapien
ctcctctgccgcctgcgtgggtgcc

SEQ ID NO: 5389107 - DNA, 25 bp, Homo sapien
ggcttccttccgtcgctcctctgcc

SEQ ID NO: 5389108 - DNA, 25 bp, Homo sapien
tgctcagtgcggccctgggaacttc

SEQ ID NO: 5389109 - DNA, 25 bp, Homo sapien
atgctcagtgcggccctgggaactt

SEQ ID NO: 5389110 - DNA, 25 bp, Homo sapien
agggtgactgtttcaccctttgtag

SEQ ID NO: 5389111 - DNA, 25 bp, Homo sapien
tgaaaagcaaggtgatggaggaggg

SEQ ID NO: 5389112 - DNA, 25 bp, Homo sapien
gggcaagagggtgactgtttcaccc

SEQ ID NO: 5389113 - DNA, 25 bp, Homo sapien
ggaggggcaagagggtgactgtttc

SEQ ID NO: 5389114 - DNA, 25 bp, Homo sapien
tggcaaccgtatgctccaactgctg

SEQ ID NO: 5389115 - DNA, 25 bp, Homo sapien
cagttggttttaaggtgaactgcaa

SEQ ID NO: 5389116 - DNA, 25 bp, Homo sapien
tctgcccagatctgccggtggcaac

SEQ ID NO: 5389117 - DNA, 25 bp, Homo sapien
caccagttggttttaaggtgaactg

SEQ ID NO: 5389118 - DNA, 25 bp, Homo sapien
tatatattcccacatctgtatacat

SEQ ID NO: 5389119 - DNA, 25 bp, Homo sapien
tccttcctccttgtgtgtcatgggc

SEQ ID NO: 5389120 - DNA, 25 bp, Homo sapien
tccttgtgtgtcatgggctcctggc

SEQ ID NO: 5389121 - DNA, 25 bp, Homo sapien
ttcctccttgtgtgtcatgggctcc

SEQ ID NO: 5389122 - DNA, 25 bp, Homo sapien
ctccttgtgtgtcatgggctcctgg

SEQ ID NO: 5389123 - DNA, 25 bp, Homo sapien
cccatgcatacaggtagtttttggc

SEQ ID NO: 5389124 - DNA, 25 bp, Homo sapien
tcccgtgtaggtctctgcattattc

SEQ ID NO: 5389125 - DNA, 25 bp, Homo sapien
ctgggccatggctcccgtgtaggtc

SEQ ID NO: 5389126 - DNA, 25 bp, Homo sapien
catacaggtagtttttggctcttgc

SEQ ID NO: 5389127 - DNA, 25 bp, Homo sapien
gccataggaatgcacttcctcttgg

SEQ ID NO: 5389128 - DNA, 25 bp, Homo sapien
tatgttgtgcacatggttgccaggg

SEQ ID NO: 5389129 - DNA, 25 bp, Homo sapien
gaaataggtctctgcccaagaaata

SEQ ID NO: 5389130 - DNA, 25 bp, Homo sapien
cttggcttggaggtagtcagcgcca

SEQ ID NO: 5389131 - DNA, 25 bp, Homo sapien
gcttattgtactgcacctcgtcagg

SEQ ID NO: 5389132 - DNA, 25 bp, Homo sapien
tccacagaagagcttattgtactgc

SEQ ID NO: 5389133 - DNA, 25 bp, Homo sapien
ctgtccacagaagagcttattgtac

SEQ ID NO: 5389134 - DNA, 25 bp, Homo sapien
gaagagcttattgtactgcacctcg

SEQ ID NO: 5389135 - DNA, 25 bp, Homo sapien
tataagcccttgtgaaggacagacg

SEQ ID NO: 5389136 - DNA, 25 bp, Homo sapien
cagacgttgtcaccatggattccaa

SEQ ID NO: 5389137 - DNA, 25 bp, Homo sapien
ggctttcttagcctgcctcaggagg

SEQ ID NO: 5389138 - DNA, 25 bp, Homo sapien
gcattgataactgagcaggacccgg

SEQ ID NO: 5389139 - DNA, 25 bp, Homo sapien
actcatggtgttaggaccttttgct

SEQ ID NO: 5389140 - DNA, 25 bp, Homo sapien
tggcgggttgtcagctgaaactctg

SEQ ID NO: 5389141 - DNA, 25 bp, Homo sapien
ttgctgaagactggcgggttgtcag

SEQ ID NO: 5389142 - DNA, 25 bp, Homo sapien
catggtgttaggaccttttgctgaa

SEQ ID NO: 5389143 - DNA, 25 bp, Homo sapien
gatttcttagttagagcagaccttc

SEQ ID NO: 5389144 - DNA, 25 bp, Homo sapien
taacctagctacgatatggagaaaa

SEQ ID NO: 5389145 - DNA, 25 bp, Homo sapien
gacagggaaaataacctagctacga

SEQ ID NO: 5389146 - DNA, 25 bp, Homo sapien
cagaccttcctgattctggagggcc

SEQ ID NO: 5389147 - DNA, 25 bp, Homo sapien
ctaagacgccttattgaaggccctg

SEQ ID NO: 5389148 - DNA, 25 bp, Homo sapien
aagacgccttattgaaggccctgct

SEQ ID NO: 5389149 - DNA, 25 bp, Homo sapien
aaggccctgcttttagtgagtaggg

SEQ ID NO: 5389150 - DNA, 25 bp, Homo sapien
gacgccttattgaaggccctgcttt

SEQ ID NO: 5389151 - DNA, 25 bp, Homo sapien
aaaggcccaccaggttagaaagctg

SEQ ID NO: 5389152 - DNA, 25 bp, Homo sapien
cgactggctgtggttcttaagcaaa

SEQ ID NO: 5389153 - DNA, 25 bp, Homo sapien
cagggacgcttgtcagagttagcaa

SEQ ID NO: 5389154 - DNA, 25 bp, Homo sapien
ccaggactggatgattgtcagaggc

SEQ ID NO: 5389155 - DNA, 25 bp, Homo sapien
ggaagtctgctcttcaagggttgcc

SEQ ID NO: 5389156 - DNA, 25 bp, Homo sapien
gtagggaagtctgctcttcaagggt

SEQ ID NO: 5389157 - DNA, 25 bp, Homo sapien
gtctgctcttcaagggttgccaggt

SEQ ID NO: 5389158 - DNA, 25 bp, Homo sapien
ggactggacaactgaacaatctgtc

SEQ ID NO: 5389159 - DNA, 25 bp, Homo sapien
ggccagtggatcttgtgtctggtca

SEQ ID NO: 5389160 - DNA, 25 bp, Homo sapien
tcaggaaacgtttctcacatggcca

SEQ ID NO: 5389161 - DNA, 25 bp, Homo sapien
gagcctgtgataagagggtgtccct

SEQ ID NO: 5389162 - DNA, 25 bp, Homo sapien
tgtccctgggaattggatgtcagga

SEQ ID NO: 5389163 - DNA, 25 bp, Homo sapien
cacttggcggagctgatgctgtctc

SEQ ID NO: 5389164 - DNA, 25 bp, Homo sapien
catagttgatgccactttgtgaata

SEQ ID NO: 5389165 - DNA, 25 bp, Homo sapien
tgttcccttcccataatacttcatc

SEQ ID NO: 5389166 - DNA, 25 bp, Homo sapien
taattcagtgggtcccacttggcgg

SEQ ID NO: 5389167 - DNA, 25 bp, Homo sapien
gccttgggaattggctgaagagttt

SEQ ID NO: 5389168 - DNA, 25 bp, Homo sapien
tggtgcccatggctagcacgttgga

SEQ ID NO: 5389169 - DNA, 25 bp, Homo sapien
tgtttacagagagaggtaccacctt

SEQ ID NO: 5389170 - DNA, 25 bp, Homo sapien
gaaggttaagactactgtttacaga

SEQ ID NO: 5389171 - DNA, 25 bp, Homo sapien
catgcgggacatgaaaaacgtttgc

SEQ ID NO: 5389172 - DNA, 25 bp, Homo sapien
ccattgaggtgttacgtgggcagca

SEQ ID NO: 5389173 - DNA, 25 bp, Homo sapien
ccttcttggatctgtcacgggctgg

SEQ ID NO: 5389174 - DNA, 25 bp, Homo sapien
tcccagccgagacgaaaatgaacag

SEQ ID NO: 5389175 - DNA, 25 bp, Homo sapien
caattgcttatctgccagtgagtac

SEQ ID NO: 5389176 - DNA, 25 bp, Homo sapien
tctgccagtgagtaccaacgagtgg

SEQ ID NO: 5389177 - DNA, 25 bp, Homo sapien
gagtggcaaaatgaataaccaagga

SEQ ID NO: 5389178 - DNA, 25 bp, Homo sapien
tcaatttttgggcaattgcttatct

SEQ ID NO: 5389179 - DNA, 25 bp, Homo sapien
cctgtgatatttgggttctgctgtc

SEQ ID NO: 5389180 - DNA, 25 bp, Homo sapien
gaatccatgttgcaggatcgcctgg

SEQ ID NO: 5389181 - DNA, 25 bp, Homo sapien
cgagtccaattgctcctggttcaga

SEQ ID NO: 5389182 - DNA, 25 bp, Homo sapien
catggttctgtttccccgagtccaa

SEQ ID NO: 5389183 - DNA, 25 bp, Homo sapien
ggaaccgtagattatgaatagaggc

SEQ ID NO: 5389184 - DNA, 25 bp, Homo sapien
gaggatgaggaaccgtagattatga

SEQ ID NO: 5389185 - DNA, 25 bp, Homo sapien
aaccgtagattatgaatagaggcac

SEQ ID NO: 5389186 - DNA, 25 bp, Homo sapien
tgaggaaccgtagattatgaataga

SEQ ID NO: 5389187 - DNA, 25 bp, Homo sapien
gcaagtattttggtctattagaaaa

SEQ ID NO: 5389188 - DNA, 25 bp, Homo sapien
tgagcaagtattttggtctattaga

SEQ ID NO: 5389189 - DNA, 25 bp, Homo sapien
tgattgagcaagtattttggtctat

SEQ ID NO: 5389190 - DNA, 25 bp, Homo sapien
gctctgtgaggttactttattttta

SEQ ID NO: 5389191 - DNA, 25 bp, Homo sapien
ctcctactgggttaatgaacaggca

SEQ ID NO: 5389192 - DNA, 25 bp, Homo sapien
caatacaaaactctgccagtggcaa

SEQ ID NO: 5389193 - DNA, 25 bp, Homo sapien
tgccgaaaaccttgaattgctcttg

SEQ ID NO: 5389194 - DNA, 25 bp, Homo sapien
tgaatcattccatgcactttcaata

SEQ ID NO: 5389195 - DNA, 25 bp, Homo sapien
ttgaagatgagatacgtctgtgtgc

SEQ ID NO: 5389196 - DNA, 25 bp, Homo sapien
agtgttcgaatcaatctaatctttt

SEQ ID NO: 5389197 - DNA, 25 bp, Homo sapien
gatgagatacgtctgtgtgcttttc

SEQ ID NO: 5389198 - DNA, 25 bp, Homo sapien
tatcttgaagatgagatacgtctgt

SEQ ID NO: 5389199 - DNA, 25 bp, Homo sapien
cgatgatgtcggccatcttgttagg

SEQ ID NO: 5389200 - DNA, 25 bp, Homo sapien
acgatgatgtcggccatcttgttag

SEQ ID NO: 5389201 - DNA, 25 bp, Homo sapien
gaaatgctccccctgcatatggcta

SEQ ID NO: 5389202 - DNA, 25 bp, Homo sapien
ttgggaaatgctccccctgcatatg

SEQ ID NO: 5389203 - DNA, 25 bp, Homo sapien
gggaaatgctccccctgcatatggc

SEQ ID NO: 5389204 - DNA, 25 bp, Homo sapien
aatgctccccctgcatatggctact

SEQ ID NO: 5389205 - DNA, 25 bp, Homo sapien
tttgtcttcagatccttttctcctt

SEQ ID NO: 5389206 - DNA, 25 bp, Homo sapien
tatgatttgtcttcagatccttttc

SEQ ID NO: 5389207 - DNA, 25 bp, Homo sapien
ttatgatttgtcttcagatcctttt

SEQ ID NO: 5389208 - DNA, 25 bp, Homo sapien
gatttgtcttcagatccttttctcc

SEQ ID NO: 5389209 - DNA, 25 bp, Homo sapien
ccaggcgccagcatctttatcagct

SEQ ID NO: 5389210 - DNA, 25 bp, Homo sapien
tgtcagatcctccacggcagttgtt

SEQ ID NO: 5389211 - DNA, 25 bp, Homo sapien
cttcggggcgacctgtgcttgtcag

SEQ ID NO: 5389212 - DNA, 25 bp, Homo sapien
gttattgtcaagtgaggtaacagtg

SEQ ID NO: 5389213 - DNA, 25 bp, Homo sapien
ctttgcatgcccctcacttcatttt

SEQ ID NO: 5389214 - DNA, 25 bp, Homo sapien
tttggaagagtcaggtctgcatagg

SEQ ID NO: 5389215 - DNA, 25 bp, Homo sapien
ctgacttgggtaaaagcatcacttt

SEQ ID NO: 5389216 - DNA, 25 bp, Homo sapien
tactgttttgctgtttggaagagtc

SEQ ID NO: 5389217 - DNA, 25 bp, Homo sapien
tgaaagccaccgtcaagaggaaata

SEQ ID NO: 5389218 - DNA, 25 bp, Homo sapien
aaagccaccgtcaagaggaaataca

SEQ ID NO: 5389219 - DNA, 25 bp, Homo sapien
gaaagccaccgtcaagaggaaatac

SEQ ID NO: 5389220 - DNA, 25 bp, Homo sapien
attaaatgcaaaaagtgcctggtcc

SEQ ID NO: 5389221 - DNA, 25 bp, Homo sapien
ttttgtcacaggagaagtcatataa

SEQ ID NO: 5389222 - DNA, 25 bp, Homo sapien
gttatagacttgttaacagtagaca

SEQ ID NO: 5389223 - DNA, 25 bp, Homo sapien
ccatatactagtatttgggagagaa

SEQ ID NO: 5389224 - DNA, 25 bp, Homo sapien
cattgtattcttcagaccgttcatg

SEQ ID NO: 5389225 - DNA, 25 bp, Homo sapien
aaagagttctggttcgtggcaggta

SEQ ID NO: 5389226 - DNA, 25 bp, Homo sapien
tcttcagaccgttcatgagctttgg

SEQ ID NO: 5389227 - DNA, 25 bp, Homo sapien
tttcttagcatcttgtatggactca

SEQ ID NO: 5389228 - DNA, 25 bp, Homo sapien
gcctatagtttgcaagggcaccacc

SEQ ID NO: 5389229 - DNA, 25 bp, Homo sapien
tagagcagtgatgcctatagtttgc

SEQ ID NO: 5389230 - DNA, 25 bp, Homo sapien
caagagactcctagagcagtgatgc

SEQ ID NO: 5389231 - DNA, 25 bp, Homo sapien
aggttcttccaagagactcctagag

SEQ ID NO: 5389232 - DNA, 25 bp, Homo sapien
cctttgcttcctagagctagaagag

SEQ ID NO: 5389233 - DNA, 25 bp, Homo sapien
ctagaagagagttggtggcatcaca

SEQ ID NO: 5389234 - DNA, 25 bp, Homo sapien
tcacagttgagcttttgggcacctg

SEQ ID NO: 5389235 - DNA, 25 bp, Homo sapien
tatttcttgggcagcaccctgcctg

SEQ ID NO: 5389236 - DNA, 25 bp, Homo sapien
tggtaagaggttgtgcagtcaatgc

SEQ ID NO: 5389237 - DNA, 25 bp, Homo sapien
ttcctaagcaaaaccagacgttgtc

SEQ ID NO: 5389238 - DNA, 25 bp, Homo sapien
cagtcaatgcaaggttagcacccag

SEQ ID NO: 5389239 - DNA, 25 bp, Homo sapien
taaagttgattgttagaccagggag

SEQ ID NO: 5389240 - DNA, 25 bp, Homo sapien
ggatctgtggttctttgtcatgtac

SEQ ID NO: 5389241 - DNA, 25 bp, Homo sapien
tcttaagtgaggaagtggagcgaat

SEQ ID NO: 5389242 - DNA, 25 bp, Homo sapien
tctccttttagaatgatgctttgaa

SEQ ID NO: 5389243 - DNA, 25 bp, Homo sapien
gaagggccttcgtcaaaattctctc

SEQ ID NO: 5389244 - DNA, 25 bp, Homo sapien
gatgtatgtgagtgtaatacctctg

SEQ ID NO: 5389245 - DNA, 25 bp, Homo sapien
tatgtgagtgtaatacctctgtcag

SEQ ID NO: 5389246 - DNA, 25 bp, Homo sapien
caaatgatgtatgtgagtgtaatac

SEQ ID NO: 5389247 - DNA, 25 bp, Homo sapien
tcttccttcaaatgatgtatgtgag

SEQ ID NO: 5389248 - DNA, 25 bp, Homo sapien
atattgctgttgtagccatgctctc

SEQ ID NO: 5389249 - DNA, 25 bp, Homo sapien
cctgtgaattcccccgataactggt

SEQ ID NO: 5389250 - DNA, 25 bp, Homo sapien
ctgtgaattcccccgataactggtt

SEQ ID NO: 5389251 - DNA, 25 bp, Homo sapien
aatattgctgttgtagccatgctct

SEQ ID NO: 5389252 - DNA, 25 bp, Homo sapien
gccctataggttgggcaccgcagtg

SEQ ID NO: 5389253 - DNA, 25 bp, Homo sapien
cacatgccctttgctcggcaggact

SEQ ID NO: 5389254 - DNA, 25 bp, Homo sapien
cctttgctcggcaggactgctcttc

SEQ ID NO: 5389255 - DNA, 25 bp, Homo sapien
tcaaggtctctgcttgccctatagg

SEQ ID NO: 5389256 - DNA, 25 bp, Homo sapien
tctgtggcccttcctaagtccttgc

SEQ ID NO: 5389257 - DNA, 25 bp, Homo sapien
gctgcatgctcttggggaacgcttt

SEQ ID NO: 5389258 - DNA, 25 bp, Homo sapien
ttccctctgactttgagaaggcaac

SEQ ID NO: 5389259 - DNA, 25 bp, Homo sapien
agtggcccgggcacaaagccatcag

SEQ ID NO: 5389260 - DNA, 25 bp, Homo sapien
tggctgtgctgtagactctcaacga

SEQ ID NO: 5389261 - DNA, 25 bp, Homo sapien
gggtagctcttgtaaccagtggctg

SEQ ID NO: 5389262 - DNA, 25 bp, Homo sapien
ctggtgttaacactccgagcaaggg

SEQ ID NO: 5389263 - DNA, 25 bp, Homo sapien
caaagcgtgttatgtgacttgctgc

SEQ ID NO: 5389264 - DNA, 25 bp, Homo sapien
ctgtgataagaataagcaggtactc

SEQ ID NO: 5389265 - DNA, 25 bp, Homo sapien
tgataagaataagcaggtactcaga

SEQ ID NO: 5389266 - DNA, 25 bp, Homo sapien
aaggccaggcttcaaggtggggtct

SEQ ID NO: 5389267 - DNA, 25 bp, Homo sapien
ggggtctccaaacagataacagatg

SEQ ID NO: 5389268 - DNA, 25 bp, Homo sapien
gtattcattccatttcgacttgtca

SEQ ID NO: 5389269 - DNA, 25 bp, Homo sapien
tattcattccatttcgacttgtcac

SEQ ID NO: 5389270 - DNA, 25 bp, Homo sapien
ctcttcgaggatgacaagaacagcc

SEQ ID NO: 5389271 - DNA, 25 bp, Homo sapien
caggaaagggctgttcggagtttct

SEQ ID NO: 5389272 - DNA, 25 bp, Homo sapien
agtagtggctggcttgtggctcttc

SEQ ID NO: 5389273 - DNA, 25 bp, Homo sapien
ggaaccatcaggaatactgtttggt

SEQ ID NO: 5389274 - DNA, 25 bp, Homo sapien
gcatggtggccagatagtatcttac

SEQ ID NO: 5389275 - DNA, 25 bp, Homo sapien
ttaaaagaccgggacatgcgggtgc

SEQ ID NO: 5389276 - DNA, 25 bp, Homo sapien
tgtaactttagaggccgatgggatg

SEQ ID NO: 5389277 - DNA, 25 bp, Homo sapien
tatcttacgagagggttgatctact

SEQ ID NO: 5389278 - DNA, 25 bp, Homo sapien
ttctgggtccgtacatatgcatgtc

SEQ ID NO: 5389279 - DNA, 25 bp, Homo sapien
tatggaatactctaccaaaacctgg

SEQ ID NO: 5389280 - DNA, 25 bp, Homo sapien
tgtctatagcagtcatcccagttgt

SEQ ID NO: 5389281 - DNA, 25 bp, Homo sapien
gagtacattgggtgcattctgggtc

SEQ ID NO: 5389282 - DNA, 25 bp, Homo sapien
ggcttccggcttgggtggcttgtgg

SEQ ID NO: 5389283 - DNA, 25 bp, Homo sapien
acttgatagcatttatatgagtttc

SEQ ID NO: 5389284 - DNA, 25 bp, Homo sapien
ctcttggaaatgaacagctctgaga

SEQ ID NO: 5389285 - DNA, 25 bp, Homo sapien
tgtgtgaggctcctcattagcaggc

SEQ ID NO: 5389286 - DNA, 25 bp, Homo sapien
aagaattccggtggatgagactacg

SEQ ID NO: 5389287 - DNA, 25 bp, Homo sapien
tcaagtccctggcagaaaagcagaa

SEQ ID NO: 5389288 - DNA, 25 bp, Homo sapien
tgagactacggatccggcgaatggc

SEQ ID NO: 5389289 - DNA, 25 bp, Homo sapien
gaatggctgacgcatggatccaagc

SEQ ID NO: 5389290 - DNA, 25 bp, Homo sapien
cgagagcttcctattatatcatcat

SEQ ID NO: 5389291 - DNA, 25 bp, Homo sapien
ctgaatccaaccttcgagagcttcc

SEQ ID NO: 5389292 - DNA, 25 bp, Homo sapien
ttagggcatggcaaggagctcctga

SEQ ID NO: 5389293 - DNA, 25 bp, Homo sapien
tctaggaggtatttggcatggctgc

SEQ ID NO: 5389294 - DNA, 25 bp, Homo sapien
tccatttcatagtagtgtggctgag

SEQ ID NO: 5389295 - DNA, 25 bp, Homo sapien
tcatagtagtgtggctgagagcaaa

SEQ ID NO: 5389296 - DNA, 25 bp, Homo sapien
ggaatgaattagaaaatgagcgtta

SEQ ID NO: 5389297 - DNA, 25 bp, Homo sapien
gaaaatgagcgttataaaactcctg

SEQ ID NO: 5389298 - DNA, 25 bp, Homo sapien
gaattagaaaatgagcgttataaaa

SEQ ID NO: 5389299 - DNA, 25 bp, Homo sapien
tagaaaatgagcgttataaaactcc

SEQ ID NO: 5389300 - DNA, 25 bp, Homo sapien
cgaggctgacttgaatggaggaaat

SEQ ID NO: 5389301 - DNA, 25 bp, Homo sapien
tcaagtaacaggttgatggaaaact

SEQ ID NO: 5389302 - DNA, 25 bp, Homo sapien
gaaaactttctcatggacgaggctg

SEQ ID NO: 5389303 - DNA, 25 bp, Homo sapien
tcatcatcagtggtcgctaaatcca

SEQ ID NO: 5389304 - DNA, 25 bp, Homo sapien
gcctgggaaacggagggtgacaaca

SEQ ID NO: 5389305 - DNA, 25 bp, Homo sapien
ttacatggctcgtgcatttccacag

SEQ ID NO: 5389306 - DNA, 25 bp, Homo sapien
tggctcgtgcatttccacagctcag

SEQ ID NO: 5389307 - DNA, 25 bp, Homo sapien
tgccactgtcccttcttcattgtgt

SEQ ID NO: 5389308 - DNA, 25 bp, Homo sapien
cgtgcatttccacagctcagggctt

SEQ ID NO: 5389309 - DNA, 25 bp, Homo sapien
ggtgagtcagtctgtgcgtgtctct

SEQ ID NO: 5389310 - DNA, 25 bp, Homo sapien
gaaccagtcccttgtgtatggcaaa

SEQ ID NO: 5389311 - DNA, 25 bp, Homo sapien
gatatccaccacattaatgaaatca

SEQ ID NO: 5389312 - DNA, 25 bp, Homo sapien
tatggcaaagtggatagcttctgga

SEQ ID NO: 5389313 - DNA, 25 bp, Homo sapien
gggttgaatatctttctggagcaag

SEQ ID NO: 5389314 - DNA, 25 bp, Homo sapien
gaagggacacattctagctgctttt

SEQ ID NO: 5389315 - DNA, 25 bp, Homo sapien
caccttgtacttgcttctgagagcc

SEQ ID NO: 5389316 - DNA, 25 bp, Homo sapien
catgtcagaagggacacattctagc

SEQ ID NO: 5389317 - DNA, 25 bp, Homo sapien
ggctgaaacagcactcttggccaca

SEQ ID NO: 5389318 - DNA, 25 bp, Homo sapien
tcctgagttgatttcctgagtacat

SEQ ID NO: 5389319 - DNA, 25 bp, Homo sapien
taggcactttgttcagggaggtctt

SEQ ID NO: 5389320 - DNA, 25 bp, Homo sapien
tccaaaagcattgggccccttggcc

SEQ ID NO: 5389321 - DNA, 25 bp, Homo sapien
ggctggcaggagatcgcctcactgt

SEQ ID NO: 5389322 - DNA, 25 bp, Homo sapien
tctaagagcatggtgacaaattgag

SEQ ID NO: 5389323 - DNA, 25 bp, Homo sapien
tagacctatactggtccatcccaga

SEQ ID NO: 5389324 - DNA, 25 bp, Homo sapien
taggcatagtccatattctaagagc

SEQ ID NO: 5389325 - DNA, 25 bp, Homo sapien
agtttaaccactttcatggaccgat

SEQ ID NO: 5389326 - DNA, 25 bp, Homo sapien
gacaatgtaagtaacaacttgaagg

SEQ ID NO: 5389327 - DNA, 25 bp, Homo sapien
gatccctcactatttggaccagata

SEQ ID NO: 5389328 - DNA, 25 bp, Homo sapien
taaaccagtgacaatgtaagtaaca

SEQ ID NO: 5389329 - DNA, 25 bp, Homo sapien
tgtgacctctaaccccagcatgcct

SEQ ID NO: 5389330 - DNA, 25 bp, Homo sapien
ctgtgacctctaaccccagcatgcc

SEQ ID NO: 5389331 - DNA, 25 bp, Homo sapien
ctgtctggaagagccttccttgctg

SEQ ID NO: 5389332 - DNA, 25 bp, Homo sapien
ccagcatgcctcctgtctggaagag

SEQ ID NO: 5389333 - DNA, 25 bp, Homo sapien
ggaagcagctgaaactagcaggcca

SEQ ID NO: 5389334 - DNA, 25 bp, Homo sapien
aaactagcaggccaatctttatttc

SEQ ID NO: 5389335 - DNA, 25 bp, Homo sapien
ccagagaccaaaatattgaattagc

SEQ ID NO: 5389336 - DNA, 25 bp, Homo sapien
aattatccctcatcctcatgcagtg

SEQ ID NO: 5389337 - DNA, 25 bp, Homo sapien
taccagacgtgtccaaggaggtacc

SEQ ID NO: 5389338 - DNA, 25 bp, Homo sapien
tgttagccggagcaaaagggcctcc

SEQ ID NO: 5389339 - DNA, 25 bp, Homo sapien
agttctcaacagagtccacgtggca

SEQ ID NO: 5389340 - DNA, 25 bp, Homo sapien
ggtaccttgggcttaattccagcag

SEQ ID NO: 5389341 - DNA, 25 bp, Homo sapien
cggatctggcccctggaagtatgtt

SEQ ID NO: 5389342 - DNA, 25 bp, Homo sapien
tggagggtcagccagtgtaccagtt

SEQ ID NO: 5389343 - DNA, 25 bp, Homo sapien
cgttgtttcctggccttggcgtgga

SEQ ID NO: 5389344 - DNA, 25 bp, Homo sapien
caaattcatcgtttctaattgctca

SEQ ID NO: 5389345 - DNA, 25 bp, Homo sapien
gctgagccattttccgctagaagtt

SEQ ID NO: 5389346 - DNA, 25 bp, Homo sapien
tccaatcctggttctatcggctaac

SEQ ID NO: 5389347 - DNA, 25 bp, Homo sapien
taaggattagctggaatgaggcaag

SEQ ID NO: 5389348 - DNA, 25 bp, Homo sapien
gcatgctacctcatgttggagggaa

SEQ ID NO: 5389349 - DNA, 25 bp, Homo sapien
cacgacacctcgctactctttttat

SEQ ID NO: 5389350 - DNA, 25 bp, Homo sapien
gtgtgccacgacacctcgctactct

SEQ ID NO: 5389351 - DNA, 25 bp, Homo sapien
cgacacctcgctactctttttatat

SEQ ID NO: 5389352 - DNA, 25 bp, Homo sapien
gtgccacgacacctcgctactcttt

SEQ ID NO: 5389353 - DNA, 25 bp, Homo sapien
cagcaacatcagacagcattgagag

SEQ ID NO: 5389354 - DNA, 25 bp, Homo sapien
caaaatccctgtaaccaaagaagct

SEQ ID NO: 5389355 - DNA, 25 bp, Homo sapien
ttgagagggaccagcgagcttgatc

SEQ ID NO: 5389356 - DNA, 25 bp, Homo sapien
tcatgtccaggtgggttaccctgtc

SEQ ID NO: 5389357 - DNA, 25 bp, Homo sapien
aaacaggtaaggcttatcagaagtc

SEQ ID NO: 5389358 - DNA, 25 bp, Homo sapien
gtctttgctgtgtactgcttcctgt

SEQ ID NO: 5389359 - DNA, 25 bp, Homo sapien
ggtaaggcttatcagaagtcagtct

SEQ ID NO: 5389360 - DNA, 25 bp, Homo sapien
aggcttatcagaagtcagtctgtct

SEQ ID NO: 5389361 - DNA, 25 bp, Homo sapien
accctaagaaatcatcagtatcatc

SEQ ID NO: 5389362 - DNA, 25 bp, Homo sapien
taacctagtagtaacctatagttgc

SEQ ID NO: 5389363 - DNA, 25 bp, Homo sapien
caagtaacctagtagtaacctatag

SEQ ID NO: 5389364 - DNA, 25 bp, Homo sapien
aataaccctaagaaatcatcagtat

SEQ ID NO: 5389365 - DNA, 25 bp, Homo sapien
ggccctgagattactgatcaactcc

SEQ ID NO: 5389366 - DNA, 25 bp, Homo sapien
tgggccctgagattactgatcaact

SEQ ID NO: 5389367 - DNA, 25 bp, Homo sapien
ccctgggccctgagattactgatca

SEQ ID NO: 5389368 - DNA, 25 bp, Homo sapien
tcctcctccgcacagatctggaaag

SEQ ID NO: 5389369 - DNA, 25 bp, Homo sapien
ttccagcacctcaacaaggacaagg

SEQ ID NO: 5389370 - DNA, 25 bp, Homo sapien
agccagctcatctgcgagccttctt

SEQ ID NO: 5389371 - DNA, 25 bp, Homo sapien
tacaggtcaagcttgctgagcccgg

SEQ ID NO: 5389372 - DNA, 25 bp, Homo sapien
cccgggcagtcctgcaagcaggtgt

SEQ ID NO: 5389373 - DNA, 25 bp, Homo sapien
cacgccctgttagtgctgttgtcca

SEQ ID NO: 5389374 - DNA, 25 bp, Homo sapien
cctgtttcttgtgagtcgtcttatc

SEQ ID NO: 5389375 - DNA, 25 bp, Homo sapien
tgcaccatggtctgagttggcctgt

SEQ ID NO: 5389376 - DNA, 25 bp, Homo sapien
gagtgtgtggcctcttgtgtcctgc

SEQ ID NO: 5389377 - DNA, 25 bp, Homo sapien
tcaaaagtgggggcttggggcggca

SEQ ID NO: 5389378 - DNA, 25 bp, Homo sapien
gatgtctggaaagcctgtgatggta

SEQ ID NO: 5389379 - DNA, 25 bp, Homo sapien
cttttgcatatagctcttggagtaa

SEQ ID NO: 5389380 - DNA, 25 bp, Homo sapien
ggattcttgagaaccctgagtctgt

SEQ ID NO: 5389381 - DNA, 25 bp, Homo sapien
gttccacagcgcaaatcttgaattg

SEQ ID NO: 5389382 - DNA, 25 bp, Homo sapien
gcttgagcactctgcggcggtctct

SEQ ID NO: 5389383 - DNA, 25 bp, Homo sapien
aagcgtctgctgcttgagcactctg

SEQ ID NO: 5389384 - DNA, 25 bp, Homo sapien
tgtggcctggtgaagcgtctgctgc

SEQ ID NO: 5389385 - DNA, 25 bp, Homo sapien
tggtgaagcgtctgctgcttgagca

SEQ ID NO: 5389386 - DNA, 25 bp, Homo sapien
tttttggaatccggatgctgttgaa

SEQ ID NO: 5389387 - DNA, 25 bp, Homo sapien
tttggaatccggatgctgttgaagg

SEQ ID NO: 5389388 - DNA, 25 bp, Homo sapien
ggtttttggaatccggatgctgttg

SEQ ID NO: 5389389 - DNA, 25 bp, Homo sapien
tggggtttttggaatccggatgctg

SEQ ID NO: 5389390 - DNA, 25 bp, Homo sapien
tctgcaaagcatctctgtagcccag

SEQ ID NO: 5389391 - DNA, 25 bp, Homo sapien
ctctggatagattgcaggtgtggaa

SEQ ID NO: 5389392 - DNA, 25 bp, Homo sapien
cctgtcttggcacaactctggatag

SEQ ID NO: 5389393 - DNA, 25 bp, Homo sapien
caaatcagcagtctcgtcctgtgga

SEQ ID NO: 5389394 - DNA, 25 bp, Homo sapien
aggattctgcaaacaaggtgtcgcc

SEQ ID NO: 5389395 - DNA, 25 bp, Homo sapien
tcctggcatagagagcactgctttg

SEQ ID NO: 5389396 - DNA, 25 bp, Homo sapien
tgttgtagagaaaactagggagaac

SEQ ID NO: 5389397 - DNA, 25 bp, Homo sapien
caaggtgtcgccgtccaaatgtact

SEQ ID NO: 5389398 - DNA, 25 bp, Homo sapien
tggtgccgcacggtgacgactgcca

SEQ ID NO: 5389399 - DNA, 25 bp, Homo sapien
ccatgtgttggtgccgcacggtgac

SEQ ID NO: 5389400 - DNA, 25 bp, Homo sapien
acggtgacgactgccaaagattgcc

SEQ ID NO: 5389401 - DNA, 25 bp, Homo sapien
gacgggtctccccatgtgttggtgc

SEQ ID NO: 5389402 - DNA, 25 bp, Homo sapien
ttattggtcagccactactgcccgg

SEQ ID NO: 5389403 - DNA, 25 bp, Homo sapien
cgtgacatcagctgagaacgtcttg

SEQ ID NO: 5389404 - DNA, 25 bp, Homo sapien
gagcgatccatctctcacagactgt

SEQ ID NO: 5389405 - DNA, 25 bp, Homo sapien
tgttccttacagagggagcgatcca

SEQ ID NO: 5389406 - DNA, 25 bp, Homo sapien
catgcaaagcttatacgtgtatcac

SEQ ID NO: 5389407 - DNA, 25 bp, Homo sapien
gcttatttaattcgtccatgcaaag

SEQ ID NO: 5389408 - DNA, 25 bp, Homo sapien
tcacatggatgttcaggttctgaat

SEQ ID NO: 5389409 - DNA, 25 bp, Homo sapien
gtagtttcacatctctcaaaaatgg

SEQ ID NO: 5389410 - DNA, 25 bp, Homo sapien
gaaggaggtccattcctatgggcat

SEQ ID NO: 5389411 - DNA, 25 bp, Homo sapien
tgctcagtcctatgcagcgcaggct

SEQ ID NO: 5389412 - DNA, 25 bp, Homo sapien
cgatggtctcatgcggatgctggcc

SEQ ID NO: 5389413 - DNA, 25 bp, Homo sapien
cagttaaatattggcaccctttgcc

SEQ ID NO: 5389414 - DNA, 25 bp, Homo sapien
tcaaacatctcgtagtgacgtgtct

SEQ ID NO: 5389415 - DNA, 25 bp, Homo sapien
tctcgtagtgacgtgtctgcctcac

SEQ ID NO: 5389416 - DNA, 25 bp, Homo sapien
catctcgtagtgacgtgtctgcctc

SEQ ID NO: 5389417 - DNA, 25 bp, Homo sapien
aacatctcgtagtgacgtgtctgcc

SEQ ID NO: 5389418 - DNA, 25 bp, Homo sapien
cctcggcaccatgtcgatgaggagt

SEQ ID NO: 5389419 - DNA, 25 bp, Homo sapien
tatggtgaggccgatcagaacgcct

SEQ ID NO: 5389420 - DNA, 25 bp, Homo sapien
gaagaatggagaagcccatcacgcc

SEQ ID NO: 5389421 - DNA, 25 bp, Homo sapien
cagaccgccgagtcatgcttgaaca

SEQ ID NO: 5389422 - DNA, 25 bp, Homo sapien
tgcttgaacacttccgcgctcagaa

SEQ ID NO: 5389423 - DNA, 25 bp, Homo sapien
ggtttatagctggtctcgcccgtgc

SEQ ID NO: 5389424 - DNA, 25 bp, Homo sapien
tgatgcccaaagctctcacgagtga

SEQ ID NO: 5389425 - DNA, 25 bp, Homo sapien
gcttaaggtagcttctagggtctcc

SEQ ID NO: 5389426 - DNA, 25 bp, Homo sapien
tctgggaactgacgccatatgtggt

SEQ ID NO: 5389427 - DNA, 25 bp, Homo sapien
caggcccgtaacctcccacgccagg

SEQ ID NO: 5389428 - DNA, 25 bp, Homo sapien
caggtccacgctgcccaaggaggcc

SEQ ID NO: 5389429 - DNA, 25 bp, Homo sapien
ttgtgcaggcccgtaacctcccacg

SEQ ID NO: 5389430 - DNA, 25 bp, Homo sapien
taggtttgtgcaggcccgtaacctc

SEQ ID NO: 5389431 - DNA, 25 bp, Homo sapien
gcctggaccctacaacgcacttggt

SEQ ID NO: 5389432 - DNA, 25 bp, Homo sapien
gcaaatctactcaggatccaaggca

SEQ ID NO: 5389433 - DNA, 25 bp, Homo sapien
tgcaatggccgctcacaggaatgga

SEQ ID NO: 5389434 - DNA, 25 bp, Homo sapien
caggaatggaagatgaaccgcggac

SEQ ID NO: 5389435 - DNA, 25 bp, Homo sapien
gacaaagccctgagcgccacctcgc

SEQ ID NO: 5389436 - DNA, 25 bp, Homo sapien
ctcgccctccgctgcatgctccgta

SEQ ID NO: 5389437 - DNA, 25 bp, Homo sapien
catgctccgtagatggggccaccag

SEQ ID NO: 5389438 - DNA, 25 bp, Homo sapien
ctccgctgcatgctccgtagatggg

SEQ ID NO: 5389439 - DNA, 25 bp, Homo sapien
aagattctaggagcccatcttccct

SEQ ID NO: 5389440 - DNA, 25 bp, Homo sapien
ccaagattctaggagcccatcttcc

SEQ ID NO: 5389441 - DNA, 25 bp, Homo sapien
tcactctccccgctgatccctgctc

SEQ ID NO: 5389442 - DNA, 25 bp, Homo sapien
cctgcccctcgagccccttgccaga

SEQ ID NO: 5389443 - DNA, 25 bp, Homo sapien
cagagcctgactcatttcagcttca

SEQ ID NO: 5389444 - DNA, 25 bp, Homo sapien
gactagggaccgagtcagtggccac

SEQ ID NO: 5389445 - DNA, 25 bp, Homo sapien
tgccactttgctccaaatgtcaggg

SEQ ID NO: 5389446 - DNA, 25 bp, Homo sapien
tcttgagagtctgcctgaggatgct

SEQ ID NO: 5389447 - DNA, 25 bp, Homo sapien
tcatgtgcgcaaaccagagtcagaa

SEQ ID NO: 5389448 - DNA, 25 bp, Homo sapien
tgtaccccaactgcggtcagtgagg

SEQ ID NO: 5389449 - DNA, 25 bp, Homo sapien
agtgaagcctagaccgagatcgtgt

SEQ ID NO: 5389450 - DNA, 25 bp, Homo sapien
caggtgtccagcgaatgaggtttcc

SEQ ID NO: 5389451 - DNA, 25 bp, Homo sapien
acccacactgcctaccccaagggct

SEQ ID NO: 5389452 - DNA, 25 bp, Homo sapien
cacaaagctgttcagacccacactg

SEQ ID NO: 5389453 - DNA, 25 bp, Homo sapien
ctgttccaggtgaggagacattgca

SEQ ID NO: 5389454 - DNA, 25 bp, Homo sapien
ccctcctgttccaggtgaggagaca

SEQ ID NO: 5389455 - DNA, 25 bp, Homo sapien
cacccagcaggtcaacatcggctaa

SEQ ID NO: 5389456 - DNA, 25 bp, Homo sapien
gattcttgggccagagctctgtccc

SEQ ID NO: 5389457 - DNA, 25 bp, Homo sapien
caaggagcccatgccatgtcaccat

SEQ ID NO: 5389458 - DNA, 25 bp, Homo sapien
caacatcggctaagacaaggagccc

SEQ ID NO: 5389459 - DNA, 25 bp, Homo sapien
gaatcccacttaaaatggagacact

SEQ ID NO: 5389460 - DNA, 25 bp, Homo sapien
cagcatgaacttcaacacggccagg

SEQ ID NO: 5389461 - DNA, 25 bp, Homo sapien
ggatgctgcaaagaatcccacttaa

SEQ ID NO: 5389462 - DNA, 25 bp, Homo sapien
gagtgctctactggtcagaaccttc

SEQ ID NO: 5389463 - DNA, 25 bp, Homo sapien
tgtatagggtcaaagcatctctccg

SEQ ID NO: 5389464 - DNA, 25 bp, Homo sapien
tcaaaagcactgaagcgggagtccc

SEQ ID NO: 5389465 - DNA, 25 bp, Homo sapien
catgtggcccctgatacgatgtgac

SEQ ID NO: 5389466 - DNA, 25 bp, Homo sapien
gaattgcatgtcaacagccccaggt

SEQ ID NO: 5389467 - DNA, 25 bp, Homo sapien
ccagatggctctcctgcggtgcacg

SEQ ID NO: 5389468 - DNA, 25 bp, Homo sapien
ggctctcctgcggtgcacgtgctcc

SEQ ID NO: 5389469 - DNA, 25 bp, Homo sapien
gatggctctcctgcggtgcacgtgc

SEQ ID NO: 5389470 - DNA, 25 bp, Homo sapien
gctctcctgcggtgcacgtgctcct

SEQ ID NO: 5389471 - DNA, 25 bp, Homo sapien
aaatgaaggcatacgtccacacgaa

SEQ ID NO: 5389472 - DNA, 25 bp, Homo sapien
aatgaaggcatacgtccacacgaag

SEQ ID NO: 5389473 - DNA, 25 bp, Homo sapien
gcccagccttttggtgccatgtcta

SEQ ID NO: 5389474 - DNA, 25 bp, Homo sapien
gctcttgaataagggttgatgcccc

SEQ ID NO: 5389475 - DNA, 25 bp, Homo sapien
ccttgtatgagtacgtccttaggag

SEQ ID NO: 5389476 - DNA, 25 bp, Homo sapien
tccatatggcaacctgggtgatcca

SEQ ID NO: 5389477 - DNA, 25 bp, Homo sapien
tgagaagagcgtccctgaaggcatt

SEQ ID NO: 5389478 - DNA, 25 bp, Homo sapien
aacctacggcattacccatcctgag

SEQ ID NO: 5389479 - DNA, 25 bp, Homo sapien
gctgacggcggatctcggaattata

SEQ ID NO: 5389480 - DNA, 25 bp, Homo sapien
cggaattataggttatgctcaagaa

SEQ ID NO: 5389481 - DNA, 25 bp, Homo sapien
gaggcagcagcctgtagccatttgc

SEQ ID NO: 5389482 - DNA, 25 bp, Homo sapien
agccctggagcagagtccccaggtc

SEQ ID NO: 5389483 - DNA, 25 bp, Homo sapien
caggtcctgttccagttccccagag

SEQ ID NO: 5389484 - DNA, 25 bp, Homo sapien
agagagccagctggcctgactgctc

SEQ ID NO: 5389485 - DNA, 25 bp, Homo sapien
gctcacacagcttgaaagctcctta

SEQ ID NO: 5389486 - DNA, 25 bp, Homo sapien
tccttagttaacaactctgaaggct

SEQ ID NO: 5389487 - DNA, 25 bp, Homo sapien
tagttaacaactctgaaggcttaaa

SEQ ID NO: 5389488 - DNA, 25 bp, Homo sapien
cagcttgaaagctccttagttaaca

SEQ ID NO: 5389489 - DNA, 25 bp, Homo sapien
ttccctctcaacatgcccgactcca

SEQ ID NO: 5389490 - DNA, 25 bp, Homo sapien
caacatgcccgactccacccgggaa

SEQ ID NO: 5389491 - DNA, 25 bp, Homo sapien
tgacccccagaatgttgtctgttcc

SEQ ID NO: 5389492 - DNA, 25 bp, Homo sapien
atttgcatccctgcaacaagttctt

SEQ ID NO: 5389493 - DNA, 25 bp, Homo sapien
tctgggagcagcctagttgagaggt

SEQ ID NO: 5389494 - DNA, 25 bp, Homo sapien
ggagcagcctagttgagaggtcatg

SEQ ID NO: 5389495 - DNA, 25 bp, Homo sapien
agcagcctagttgagaggtcatgga

SEQ ID NO: 5389496 - DNA, 25 bp, Homo sapien
cagcctagttgagaggtcatggatg

SEQ ID NO: 5389497 - DNA, 25 bp, Homo sapien
tggatgacagaaggaatatcacccc

SEQ ID NO: 5389498 - DNA, 25 bp, Homo sapien
gaatatcacccccaagatgacacag

SEQ ID NO: 5389499 - DNA, 25 bp, Homo sapien
gacagaaggaatatcacccccaaga

SEQ ID NO: 5389500 - DNA, 25 bp, Homo sapien
tatcacccccaagatgacacaggct

SEQ ID NO: 5389501 - DNA, 25 bp, Homo sapien
taagtaggtgctaatgtgctgcctg

SEQ ID NO: 5389502 - DNA, 25 bp, Homo sapien
gggcagaagagacaattcaggcaat

SEQ ID NO: 5389503 - DNA, 25 bp, Homo sapien
acagtcctaacgctggaatcaggga

SEQ ID NO: 5389504 - DNA, 25 bp, Homo sapien
tgaatgctgtgagcaacgtggcccc

SEQ ID NO: 5389505 - DNA, 25 bp, Homo sapien
agtagggcagccacaacttgcgtgc

SEQ ID NO: 5389506 - DNA, 25 bp, Homo sapien
tacacaggattgagaatgtccggcc

SEQ ID NO: 5389507 - DNA, 25 bp, Homo sapien
gaagcttccactgtgaggtgacaac

SEQ ID NO: 5389508 - DNA, 25 bp, Homo sapien
gagatagaagcgacatccaagctgg

SEQ ID NO: 5389509 - DNA, 25 bp, Homo sapien
tccccaagggagcttccatctccat

SEQ ID NO: 5389510 - DNA, 25 bp, Homo sapien
agggagcttccatctccatactcct

SEQ ID NO: 5389511 - DNA, 25 bp, Homo sapien
ccaagggagcttccatctccatact

SEQ ID NO: 5389512 - DNA, 25 bp, Homo sapien
atatccccaagggagcttccatctc

SEQ ID NO: 5389513 - DNA, 25 bp, Homo sapien
tgcttctttctgacagggaacagtg

SEQ ID NO: 5389514 - DNA, 25 bp, Homo sapien
aggaaggaacaaatgcctgcttctt

SEQ ID NO: 5389515 - DNA, 25 bp, Homo sapien
cttctttctgacagggaacagtggt

SEQ ID NO: 5389516 - DNA, 25 bp, Homo sapien
cctgcttctttctgacagggaacag

SEQ ID NO: 5389517 - DNA, 25 bp, Homo sapien
tccatcattgggacctctggtaaaa

SEQ ID NO: 5389518 - DNA, 25 bp, Homo sapien
catcattgggacctctggtaaaatt

SEQ ID NO: 5389519 - DNA, 25 bp, Homo sapien
ttccatcattgggacctctggtaaa

SEQ ID NO: 5389520 - DNA, 25 bp, Homo sapien
tcttccatcattgggacctctggta

SEQ ID NO: 5389521 - DNA, 25 bp, Homo sapien
tgtgaggcttacagagaactctcgt

SEQ ID NO: 5389522 - DNA, 25 bp, Homo sapien
gaactctcgtggacttctcgcatgc

SEQ ID NO: 5389523 - DNA, 25 bp, Homo sapien
aggcaaacaccccatggcatgtggg

SEQ ID NO: 5389524 - DNA, 25 bp, Homo sapien
gctgatcaagctggccaagttctgt

SEQ ID NO: 5389525 - DNA, 25 bp, Homo sapien
tccgtgttgccatttaagatactca

SEQ ID NO: 5389526 - DNA, 25 bp, Homo sapien
ccttggcagaagtgttgtagtagcc

SEQ ID NO: 5389527 - DNA, 25 bp, Homo sapien
tgtagtagcccacaattccgtgttg

SEQ ID NO: 5389528 - DNA, 25 bp, Homo sapien
tcaaacgtccaaccaaaagtgacag

SEQ ID NO: 5389529 - DNA, 25 bp, Homo sapien
tagaatgagattgtagcagccaagt

SEQ ID NO: 5389530 - DNA, 25 bp, Homo sapien
gagattgtagcagccaagttcaccc

SEQ ID NO: 5389531 - DNA, 25 bp, Homo sapien
tctttagaatgagattgtagcagcc

SEQ ID NO: 5389532 - DNA, 25 bp, Homo sapien
ttgtagcagccaagttcacccaaag

SEQ ID NO: 5389533 - DNA, 25 bp, Homo sapien
ctagcactttaaggcctgtggattc

SEQ ID NO: 5389534 - DNA, 25 bp, Homo sapien
cccacaaccagaaattaggagggca

SEQ ID NO: 5389535 - DNA, 25 bp, Homo sapien
aattaggagggcacatttgtaaata

SEQ ID NO: 5389536 - DNA, 25 bp, Homo sapien
gtggattcatggactggataatttg

SEQ ID NO: 5389537 - DNA, 25 bp, Homo sapien
gtggcttcaccaactgtggcatttt

SEQ ID NO: 5389538 - DNA, 25 bp, Homo sapien
tgtaaggacaggtagccagccacac

SEQ ID NO: 5389539 - DNA, 25 bp, Homo sapien
tgtgttagaggccacagatcccata

SEQ ID NO: 5389540 - DNA, 25 bp, Homo sapien
acagatcccatagtggcttcaccaa

SEQ ID NO: 5389541 - DNA, 25 bp, Homo sapien
tcttgggaaatcgatgggagaagaa

SEQ ID NO: 5389542 - DNA, 25 bp, Homo sapien
aaaagggagcgtacacttcaggaca

SEQ ID NO: 5389543 - DNA, 25 bp, Homo sapien
aaagaaaagggagcgtacacttcag

SEQ ID NO: 5389544 - DNA, 25 bp, Homo sapien
ttcgcatttcacacttgctcttggg

SEQ ID NO: 5389545 - DNA, 25 bp, Homo sapien
tgtcctgagtcgtcaacccaaacag

SEQ ID NO: 5389546 - DNA, 25 bp, Homo sapien
aaaaggccgtaaagagtctctctgt

SEQ ID NO: 5389547 - DNA, 25 bp, Homo sapien
caggggcctgaatgtctcatttccc

SEQ ID NO: 5389548 - DNA, 25 bp, Homo sapien
cagattggtcttgatgcagctaaca

SEQ ID NO: 5389549 - DNA, 25 bp, Homo sapien
ccagcggtgctgacggtgtatgcac

SEQ ID NO: 5389550 - DNA, 25 bp, Homo sapien
tcacaggaaagcaatgccagcatag

SEQ ID NO: 5389551 - DNA, 25 bp, Homo sapien
gaggaaatgagagctttagtctttg

SEQ ID NO: 5389552 - DNA, 25 bp, Homo sapien
cacccagtgggctgatcacaggaaa

SEQ ID NO: 5389553 - DNA, 25 bp, Homo sapien
taaccatcctcagggtgaaacaggg

SEQ ID NO: 5389554 - DNA, 25 bp, Homo sapien
atccatagcgctaggccctggcact

SEQ ID NO: 5389555 - DNA, 25 bp, Homo sapien
ggcactccagggatagaacactctc

SEQ ID NO: 5389556 - DNA, 25 bp, Homo sapien
tgacttccaggtgcaagtgtccaag

SEQ ID NO: 5389557 - DNA, 25 bp, Homo sapien
cataacccagtagtgtcatgtctgt

SEQ ID NO: 5389558 - DNA, 25 bp, Homo sapien
ctgcagcaccataacccagtagtgt

SEQ ID NO: 5389559 - DNA, 25 bp, Homo sapien
gcaccataacccagtagtgtcatgt

SEQ ID NO: 5389560 - DNA, 25 bp, Homo sapien
acccagtagtgtcatgtctgtgttg

SEQ ID NO: 5389561 - DNA, 25 bp, Homo sapien
tctgatttagggccagatcaaacac

SEQ ID NO: 5389562 - DNA, 25 bp, Homo sapien
cctctgatttagggccagatcaaac

SEQ ID NO: 5389563 - DNA, 25 bp, Homo sapien
gcctctgatttagggccagatcaaa

SEQ ID NO: 5389564 - DNA, 25 bp, Homo sapien
ctgatttagggccagatcaaacacc

SEQ ID NO: 5389565 - DNA, 25 bp, Homo sapien
gaccttctgtggcaagcatcccatg

SEQ ID NO: 5389566 - DNA, 25 bp, Homo sapien
gctggaccttctgtggcaagcatcc

SEQ ID NO: 5389567 - DNA, 25 bp, Homo sapien
tgtggcaagcatcccatggccctcg

SEQ ID NO: 5389568 - DNA, 25 bp, Homo sapien
atggccctcgcagctgatggtggca

SEQ ID NO: 5389569 - DNA, 25 bp, Homo sapien
acagcggccgcgttgctgtaacgcc

SEQ ID NO: 5389570 - DNA, 25 bp, Homo sapien
cgatgacaggacgtccaggatggca

SEQ ID NO: 5389571 - DNA, 25 bp, Homo sapien
ccacaggacaatcgccgatgacagg

SEQ ID NO: 5389572 - DNA, 25 bp, Homo sapien
tgtactccctatgggcagagtgcac

SEQ ID NO: 5389573 - DNA, 25 bp, Homo sapien
tatgggcttatgaaaaaacgtgcaa

SEQ ID NO: 5389574 - DNA, 25 bp, Homo sapien
atgaaaaaacgtgcaaaacttgatg

SEQ ID NO: 5389575 - DNA, 25 bp, Homo sapien
aaaacgtgcaaaacttgatgaaagt

SEQ ID NO: 5389576 - DNA, 25 bp, Homo sapien
ttatgggcttatgaaaaaacgtgca

SEQ ID NO: 5389577 - DNA, 25 bp, Homo sapien
aaagcagaggcgctgtacctcataa

SEQ ID NO: 5389578 - DNA, 25 bp, Homo sapien
aaacccaaaagcagaggcgctgtac

SEQ ID NO: 5389579 - DNA, 25 bp, Homo sapien
ggcgctgtacctcataacggagaca

SEQ ID NO: 5389580 - DNA, 25 bp, Homo sapien
tgcaaacccaaaagcagaggcgctg

SEQ ID NO: 5389581 - DNA, 25 bp, Homo sapien
tctgcaagtggtcagtggcgcagta

SEQ ID NO: 5389582 - DNA, 25 bp, Homo sapien
gacagtccccacacaactgtgttgt

SEQ ID NO: 5389583 - DNA, 25 bp, Homo sapien
acagaggccagtgcctacatggact

SEQ ID NO: 5389584 - DNA, 25 bp, Homo sapien
atcagctcatcacaatatcccttct

SEQ ID NO: 5389585 - DNA, 25 bp, Homo sapien
tggtgtccgagcgtttccagaccct

SEQ ID NO: 5389586 - DNA, 25 bp, Homo sapien
aaccactggtgtccgagcgtttcca

SEQ ID NO: 5389587 - DNA, 25 bp, Homo sapien
gagagtgaaccactggtgtccgagc

SEQ ID NO: 5389588 - DNA, 25 bp, Homo sapien
gagcgtttccagacccttcctgaaa

SEQ ID NO: 5389589 - DNA, 25 bp, Homo sapien
acagcacgtgctccataactgttaa

SEQ ID NO: 5389590 - DNA, 25 bp, Homo sapien
tgcaagcaccgaggcggcctataaa

SEQ ID NO: 5389591 - DNA, 25 bp, Homo sapien
gcagctgatccctggcgggactgct

SEQ ID NO: 5389592 - DNA, 25 bp, Homo sapien
tgacgtgtgcaaaaaaagcagctga

SEQ ID NO: 5389593 - DNA, 25 bp, Homo sapien
ccaggacgtttccaacttccctcat

SEQ ID NO: 5389594 - DNA, 25 bp, Homo sapien
gaacactgccatggttggaccacca

SEQ ID NO: 5389595 - DNA, 25 bp, Homo sapien
tccattaggagcgagagttatgtca

SEQ ID NO: 5389596 - DNA, 25 bp, Homo sapien
tgtagttaggactggaattctagcc

SEQ ID NO: 5389597 - DNA, 25 bp, Homo sapien
tacaaatagcctggactgagttctg

SEQ ID NO: 5389598 - DNA, 25 bp, Homo sapien
accctgtctagttcctgagcaatct

SEQ ID NO: 5389599 - DNA, 25 bp, Homo sapien
tctcccacaccctgtctagttcctg

SEQ ID NO: 5389600 - DNA, 25 bp, Homo sapien
aatctgtgattctttcaggctcaac

SEQ ID NO: 5389601 - DNA, 25 bp, Homo sapien
tctgtgattctttcaggctcaactg

SEQ ID NO: 5389602 - DNA, 25 bp, Homo sapien
tgttcctcaaatttgcaccaagaaa

SEQ ID NO: 5389603 - DNA, 25 bp, Homo sapien
cttccagtgttcctcaaatttgcac

SEQ ID NO: 5389604 - DNA, 25 bp, Homo sapien
caaatttgcaccaagaaaacgtcca

SEQ ID NO: 5389605 - DNA, 25 bp, Homo sapien
ccagtgttcctcaaatttgcaccaa

SEQ ID NO: 5389606 - DNA, 25 bp, Homo sapien
caaatgggacggttagctcattaac

SEQ ID NO: 5389607 - DNA, 25 bp, Homo sapien
tgggacggttagctcattaacagga

SEQ ID NO: 5389608 - DNA, 25 bp, Homo sapien
gaaattatctgaagaccaaatggga

SEQ ID NO: 5389609 - DNA, 25 bp, Homo sapien
aagaccaaatgggacggttagctca

SEQ ID NO: 5389610 - DNA, 25 bp, Homo sapien
gactgagaaagaagctagtccagag

SEQ ID NO: 5389611 - DNA, 25 bp, Homo sapien
agaagccagttcctcgctgagggct

SEQ ID NO: 5389612 - DNA, 25 bp, Homo sapien
ctgcacgaggcgctgactgagaaag

SEQ ID NO: 5389613 - DNA, 25 bp, Homo sapien
aggaggagaccatccgcagagcaag

SEQ ID NO: 5389614 - DNA, 25 bp, Homo sapien
tggtctcgcctttctagaaccagaa

SEQ ID NO: 5389615 - DNA, 25 bp, Homo sapien
taacgcgtgatgttcctgtcagcca

SEQ ID NO: 5389616 - DNA, 25 bp, Homo sapien
tcatgcccgtgaacagagaagcatt

SEQ ID NO: 5389617 - DNA, 25 bp, Homo sapien
tatttgcagcttgtcatgcccgtga

SEQ ID NO: 5389618 - DNA, 25 bp, Homo sapien
tggtgcatggtggtgctaggtcctg

SEQ ID NO: 5389619 - DNA, 25 bp, Homo sapien
tggtgctaggtcctgccatgtgatt

SEQ ID NO: 5389620 - DNA, 25 bp, Homo sapien
tgtgattctcatgacttgcatacag

SEQ ID NO: 5389621 - DNA, 25 bp, Homo sapien
ttctcatgacttgcatacagccact

SEQ ID NO: 5389622 - DNA, 25 bp, Homo sapien
gatgcagtttatccacacaatgtgg

SEQ ID NO: 5389623 - DNA, 25 bp, Homo sapien
tctttttgtaggtaacaaagatgca

SEQ ID NO: 5389624 - DNA, 25 bp, Homo sapien
aggctccagagatatcctcctgggc

SEQ ID NO: 5389625 - DNA, 25 bp, Homo sapien
ggctccagagatatcctcctgggca

SEQ ID NO: 5389626 - DNA, 25 bp, Homo sapien
ctcctggtagagctgtgagcagatc

SEQ ID NO: 5389627 - DNA, 25 bp, Homo sapien
tattggtatcgttccaaaaatccca

SEQ ID NO: 5389628 - DNA, 25 bp, Homo sapien
tcaccacgtgaatgtgggaactatt

SEQ ID NO: 5389629 - DNA, 25 bp, Homo sapien
tccaaaaatcccactcctggtagag

SEQ ID NO: 5389630 - DNA, 25 bp, Homo sapien
cttggggtccaatcagcagttccta

SEQ ID NO: 5389631 - DNA, 25 bp, Homo sapien
ctaaacccgatgaaactggagtggc

SEQ ID NO: 5389632 - DNA, 25 bp, Homo sapien
tcagcagttcctaaacccgatgaaa

SEQ ID NO: 5389633 - DNA, 25 bp, Homo sapien
ctggagtggcatgggcagtaagaga

SEQ ID NO: 5389634 - DNA, 25 bp, Homo sapien
caaggagagggcactgaaccagcat

SEQ ID NO: 5389635 - DNA, 25 bp, Homo sapien
gacaaggagagggcactgaaccagc

SEQ ID NO: 5389636 - DNA, 25 bp, Homo sapien
gggacaaggagagggcactgaacca

SEQ ID NO: 5389637 - DNA, 25 bp, Homo sapien
ggggacaaggagagggcactgaacc

SEQ ID NO: 5389638 - DNA, 25 bp, Homo sapien
agcatctgagctactgtggctgccc

SEQ ID NO: 5389639 - DNA, 25 bp, Homo sapien
ccagctcagcctgaccactgtcact

SEQ ID NO: 5389640 - DNA, 25 bp, Homo sapien
ctcagcatctgagctactgtggctg

SEQ ID NO: 5389641 - DNA, 25 bp, Homo sapien
tgtcactcagcatctgagctactgt

SEQ ID NO: 5389642 - DNA, 25 bp, Homo sapien
gccggctgccttgtagcaatgcgat

SEQ ID NO: 5389643 - DNA, 25 bp, Homo sapien
gcaatgcgattaacccctatgaagg

SEQ ID NO: 5389644 - DNA, 25 bp, Homo sapien
tgccagatggaacaggagggtcctt

SEQ ID NO: 5389645 - DNA, 25 bp, Homo sapien
ggaggcatagaaaccaacatgccag

SEQ ID NO: 5389646 - DNA, 25 bp, Homo sapien
taactggcattataggcatgtgcta

SEQ ID NO: 5389647 - DNA, 25 bp, Homo sapien
gagtaactggcattataggcatgtg

SEQ ID NO: 5389648 - DNA, 25 bp, Homo sapien
agtaactggcattataggcatgtgc

SEQ ID NO: 5389649 - DNA, 25 bp, Homo sapien
gtaactggcattataggcatgtgct

SEQ ID NO: 5389650 - DNA, 25 bp, Homo sapien
gcatctggaccctcaatctgtcgca

SEQ ID NO: 5389651 - DNA, 25 bp, Homo sapien
ggccttggaatgtgctaccaacctc

SEQ ID NO: 5389652 - DNA, 25 bp, Homo sapien
tgctaccaacctccgaaatcactga

SEQ ID NO: 5389653 - DNA, 25 bp, Homo sapien
tcaacaattcctgagcactcatgga

SEQ ID NO: 5389654 - DNA, 25 bp, Homo sapien
gcacctgcaactgaattcttgtcca

SEQ ID NO: 5389655 - DNA, 25 bp, Homo sapien
cacctgcaactgaattcttgtccag

SEQ ID NO: 5389656 - DNA, 25 bp, Homo sapien
cctgcaactgaattcttgtccagcg

SEQ ID NO: 5389657 - DNA, 25 bp, Homo sapien
ctgcaactgaattcttgtccagcgt

SEQ ID NO: 5389658 - DNA, 25 bp, Homo sapien
tcactacctgatgagtaggaaagat

SEQ ID NO: 5389659 - DNA, 25 bp, Homo sapien
cctatcactacctgatgagtaggaa

SEQ ID NO: 5389660 - DNA, 25 bp, Homo sapien
tatcactacctgatgagtaggaaag

SEQ ID NO: 5389661 - DNA, 25 bp, Homo sapien
actacctgatgagtaggaaagatac

SEQ ID NO: 5389662 - DNA, 25 bp, Homo sapien
caaacaatagtgcaatgtagcccat

SEQ ID NO: 5389663 - DNA, 25 bp, Homo sapien
gcaaacaatagtgcaatgtagccca

SEQ ID NO: 5389664 - DNA, 25 bp, Homo sapien
ttgcaaacaatagtgcaatgtagcc

SEQ ID NO: 5389665 - DNA, 25 bp, Homo sapien
aacaatagtgcaatgtagcccattg

SEQ ID NO: 5389666 - DNA, 25 bp, Homo sapien
tgcaaactactgcaagacatctgta

SEQ ID NO: 5389667 - DNA, 25 bp, Homo sapien
tgcatgtgcaggtgaactgcccctt

SEQ ID NO: 5389668 - DNA, 25 bp, Homo sapien
catagtggcaggcaagagtgcatgt

SEQ ID NO: 5389669 - DNA, 25 bp, Homo sapien
tcggttcacgaattccccggctcaa

SEQ ID NO: 5389670 - DNA, 25 bp, Homo sapien
tgtggcaagctctcaccaaacgtct

SEQ ID NO: 5389671 - DNA, 25 bp, Homo sapien
taactcatacagtgggaaagcacac

SEQ ID NO: 5389672 - DNA, 25 bp, Homo sapien
gatactgcatctaagctccacctgg

SEQ ID NO: 5389673 - DNA, 25 bp, Homo sapien
tatgccccactcagatcaacagaag

SEQ ID NO: 5389674 - DNA, 25 bp, Homo sapien
gccttgaaagcgcttccggctctcc

SEQ ID NO: 5389675 - DNA, 25 bp, Homo sapien
ctgctccgccttgaaagcgcttccg

SEQ ID NO: 5389676 - DNA, 25 bp, Homo sapien
ttgaaagcgcttccggctctccacc

SEQ ID NO: 5389677 - DNA, 25 bp, Homo sapien
tgctccgccttgaaagcgcttccgg

SEQ ID NO: 5389678 - DNA, 25 bp, Homo sapien
tgtagatactaaggctgagggactt

SEQ ID NO: 5389679 - DNA, 25 bp, Homo sapien
gatactaaggctgagggacttggat

SEQ ID NO: 5389680 - DNA, 25 bp, Homo sapien
atctgtagatactaaggctgaggga

SEQ ID NO: 5389681 - DNA, 25 bp, Homo sapien
tagatactaaggctgagggacttgg

SEQ ID NO: 5389682 - DNA, 25 bp, Homo sapien
ctgtcctggaacaagcccacagttc

SEQ ID NO: 5389683 - DNA, 25 bp, Homo sapien
ctctccaaggtcactagacccggtg

SEQ ID NO: 5389684 - DNA, 25 bp, Homo sapien
ttctcatcagcgctcatcagtggcc

SEQ ID NO: 5389685 - DNA, 25 bp, Homo sapien
aaggtcactagacccggtgttgagg

SEQ ID NO: 5389686 - DNA, 25 bp, Homo sapien
ggagtgactcaaacaagaagccagg

SEQ ID NO: 5389687 - DNA, 25 bp, Homo sapien
catgaaagagaccaccgccaaggag

SEQ ID NO: 5389688 - DNA, 25 bp, Homo sapien
gctacatgaaagagaccaccgccaa

SEQ ID NO: 5389689 - DNA, 25 bp, Homo sapien
aggagtgactcaaacaagaagccag

SEQ ID NO: 5389690 - DNA, 25 bp, Homo sapien
ttcaagcccgaaacaaactcctctg

SEQ ID NO: 5389691 - DNA, 25 bp, Homo sapien
tgaaatgccattgttaacctcctcc

SEQ ID NO: 5389692 - DNA, 25 bp, Homo sapien
aaatgccattgttaacctcctccac

SEQ ID NO: 5389693 - DNA, 25 bp, Homo sapien
atgccattgttaacctcctccacat

SEQ ID NO: 5389694 - DNA, 25 bp, Homo sapien
ccaccctcttctgggatccctttct

SEQ ID NO: 5389695 - DNA, 25 bp, Homo sapien
ttaaagtcgtttttatcacatctgc

SEQ ID NO: 5389696 - DNA, 25 bp, Homo sapien
cattttcctggactgcactgggcta

SEQ ID NO: 5389697 - DNA, 25 bp, Homo sapien
cacccacgggtaaagggagccacag

SEQ ID NO: 5389698 - DNA, 25 bp, Homo sapien
aactccgaggctttacatccgaggg

SEQ ID NO: 5389699 - DNA, 25 bp, Homo sapien
ttccccaaatgactagcactgtgac

SEQ ID NO: 5389700 - DNA, 25 bp, Homo sapien
cccaaatgactagcactgtgacatc

SEQ ID NO: 5389701 - DNA, 25 bp, Homo sapien
ggaactcagaggtccagaaacttcc

SEQ ID NO: 5389702 - DNA, 25 bp, Homo sapien
aactcagaggtccagaaacttccag

SEQ ID NO: 5389703 - DNA, 25 bp, Homo sapien
atgagagaggtgggggaaacgttca

SEQ ID NO: 5389704 - DNA, 25 bp, Homo sapien
agagaggtgggggaaacgttcacag

SEQ ID NO: 5389705 - DNA, 25 bp, Homo sapien
ttgaggaaaacaagatgagagaggt

SEQ ID NO: 5389706 - DNA, 25 bp, Homo sapien
cttgaggaaaacaagatgagagagg

SEQ ID NO: 5389707 - DNA, 25 bp, Homo sapien
cagtcacgttccagttgcaggtttc

SEQ ID NO: 5389708 - DNA, 25 bp, Homo sapien
ctcagtcacgttccagttgcaggtt

SEQ ID NO: 5389709 - DNA, 25 bp, Homo sapien
cacgttccagttgcaggtttccaac

SEQ ID NO: 5389710 - DNA, 25 bp, Homo sapien
tccaactgatcatcagttgtctcct

SEQ ID NO: 5389711 - DNA, 25 bp, Homo sapien
tattcatgagtgatactgacctata

SEQ ID NO: 5389712 - DNA, 25 bp, Homo sapien
aaacacaatgagatttagtttgcaa

SEQ ID NO: 5389713 - DNA, 25 bp, Homo sapien
aagactttttgtatctatattcatg

SEQ ID NO: 5389714 - DNA, 25 bp, Homo sapien
aactcctgaccttttatgaacatgg

SEQ ID NO: 5389715 - DNA, 25 bp, Homo sapien
aaccagcgtctgagtttccactgtg

SEQ ID NO: 5389716 - DNA, 25 bp, Homo sapien
tgtgttagcggctgacaacaccgcc

SEQ ID NO: 5389717 - DNA, 25 bp, Homo sapien
caacaccgcctgaagaagacgggtc

SEQ ID NO: 5389718 - DNA, 25 bp, Homo sapien
ggcggcaaaactgactccggtccaa

SEQ ID NO: 5389719 - DNA, 25 bp, Homo sapien
cgggcaacagcagcacatattggcc

SEQ ID NO: 5389720 - DNA, 25 bp, Homo sapien
tggccgacgagacccttgatactca

SEQ ID NO: 5389721 - DNA, 25 bp, Homo sapien
agcagcacatattggccgacgagac

SEQ ID NO: 5389722 - DNA, 25 bp, Homo sapien
tattggccgacgagacccttgatac

SEQ ID NO: 5389723 - DNA, 25 bp, Homo sapien
aatgatggagaaccaggacacccac

SEQ ID NO: 5389724 - DNA, 25 bp, Homo sapien
cgtgaggtttcaggcgggtgctgct

SEQ ID NO: 5389725 - DNA, 25 bp, Homo sapien
taaaggcagccaccgcgagggccag

SEQ ID NO: 5389726 - DNA, 25 bp, Homo sapien
tcttcctgtagttctgggcttcgtg

SEQ ID NO: 5389727 - DNA, 25 bp, Homo sapien
gttacaaagatgtagtgagaattcc

SEQ ID NO: 5389728 - DNA, 25 bp, Homo sapien
ctccacactcatgttggatgcaggc

SEQ ID NO: 5389729 - DNA, 25 bp, Homo sapien
tgcaggcacactcacaagttacaaa

SEQ ID NO: 5389730 - DNA, 25 bp, Homo sapien
cactcatgttggatgcaggcacact

SEQ ID NO: 5389731 - DNA, 25 bp, Homo sapien
gccggccgggtcgggcagctcgcgc

SEQ ID NO: 5389732 - DNA, 25 bp, Homo sapien
ccggccgggtcgggcagctcgcgct

SEQ ID NO: 5389733 - DNA, 25 bp, Homo sapien
cggccgggtcgggcagctcgcgctc

SEQ ID NO: 5389734 - DNA, 25 bp, Homo sapien
cgccggccgggtcgggcagctcgcg

SEQ ID NO: 5389735 - DNA, 25 bp, Homo sapien
ccgtcgctgaactggccgctctcgc

SEQ ID NO: 5389736 - DNA, 25 bp, Homo sapien
cgtcgctgaactggccgctctcgct

SEQ ID NO: 5389737 - DNA, 25 bp, Homo sapien
tgcggcgctggatgcccgcggccgg

SEQ ID NO: 5389738 - DNA, 25 bp, Homo sapien
cctgggagctgcggcgctggatgcc

SEQ ID NO: 5389739 - DNA, 25 bp, Homo sapien
gcagccggtggcgcgtggccccggg

SEQ ID NO: 5389740 - DNA, 25 bp, Homo sapien
ggagctgcggcgctggatgcccgcg

SEQ ID NO: 5389741 - DNA, 25 bp, Homo sapien
actcgagtcagaagtgcgaggcgcc

SEQ ID NO: 5389742 - DNA, 25 bp, Homo sapien
ggcggggactcgagtcagaagtgcg

SEQ ID NO: 5389743 - DNA, 25 bp, Homo sapien
ggcgacgacaagcgcggcggggact

SEQ ID NO: 5389744 - DNA, 25 bp, Homo sapien
gggactcgagtcagaagtgcgaggc

SEQ ID NO: 5389745 - DNA, 25 bp, Homo sapien
cagagcttggctagggcgtagcggg

SEQ ID NO: 5389746 - DNA, 25 bp, Homo sapien
cagacagcgcccctaatttggcatc

SEQ ID NO: 5389747 - DNA, 25 bp, Homo sapien
cactggattcctctggggtccgcga

SEQ ID NO: 5389748 - DNA, 25 bp, Homo sapien
ccgcggccgcgcgtgggtagcagac

SEQ ID NO: 5389749 - DNA, 25 bp, Homo sapien
gaaacacgttagacataagagcctc

SEQ ID NO: 5389750 - DNA, 25 bp, Homo sapien
tggagccacttgctaagggtcatga

SEQ ID NO: 5389751 - DNA, 25 bp, Homo sapien
gcctctatggaagaacctgcagatg

SEQ ID NO: 5389752 - DNA, 25 bp, Homo sapien
taagagcctccactgggaataaaca

SEQ ID NO: 5389753 - DNA, 25 bp, Homo sapien
cacctagcaatcttggtaaaatgca

SEQ ID NO: 5389754 - DNA, 25 bp, Homo sapien
ttttaattcctcaggtctggagtgg

SEQ ID NO: 5389755 - DNA, 25 bp, Homo sapien
aaggacaggcttcttaacttgaaag

SEQ ID NO: 5389756 - DNA, 25 bp, Homo sapien
gggtccaattttctgcagttctaac

SEQ ID NO: 5389757 - DNA, 25 bp, Homo sapien
caccagtccacttagagttggtgct

SEQ ID NO: 5389758 - DNA, 25 bp, Homo sapien
ggtggtcccttcagttctactcctc

SEQ ID NO: 5389759 - DNA, 25 bp, Homo sapien
tctgcccaccagtccacttagagtt

SEQ ID NO: 5389760 - DNA, 25 bp, Homo sapien
agagttggtgcttacttcccttatt

SEQ ID NO: 5389761 - DNA, 25 bp, Homo sapien
tgtctacttcaatcccagaataact

SEQ ID NO: 5389762 - DNA, 25 bp, Homo sapien
tacttcaatcccagaataactgttt

SEQ ID NO: 5389763 - DNA, 25 bp, Homo sapien
gaataactgtttataccagagctcg

SEQ ID NO: 5389764 - DNA, 25 bp, Homo sapien
ttataccagagctcgtccagcccat

SEQ ID NO: 5389765 - DNA, 25 bp, Homo sapien
caggagtgagggcaaggtttagacc

SEQ ID NO: 5389766 - DNA, 25 bp, Homo sapien
gtgagggcaaggtttagaccagagc

SEQ ID NO: 5389767 - DNA, 25 bp, Homo sapien
ggcaaggtttagaccagagccttcc

SEQ ID NO: 5389768 - DNA, 25 bp, Homo sapien
aagacaggagtgagggcaaggttta

SEQ ID NO: 5389769 - DNA, 25 bp, Homo sapien
tcacaatcagtaatgccacgctcca

SEQ ID NO: 5389770 - DNA, 25 bp, Homo sapien
gaacctgaggaagccctctaattcc

SEQ ID NO: 5389771 - DNA, 25 bp, Homo sapien
ggaatgaacctgaggaagccctcta

SEQ ID NO: 5389772 - DNA, 25 bp, Homo sapien
ctcccaggaatgaacctgaggaagc

SEQ ID NO: 5389773 - DNA, 25 bp, Homo sapien
ctgttcctatttgggtatcttggaa

SEQ ID NO: 5389774 - DNA, 25 bp, Homo sapien
tatttgggtatcttggaacctcctc

SEQ ID NO: 5389775 - DNA, 25 bp, Homo sapien
ctgtcttctgtgttgctcatgctgg

SEQ ID NO: 5389776 - DNA, 25 bp, Homo sapien
tcctatttgggtatcttggaacctc

SEQ ID NO: 5389777 - DNA, 25 bp, Homo sapien
tcgctgacgtcatgagctgatggct

SEQ ID NO: 5389778 - DNA, 25 bp, Homo sapien
caactcccactattactatttgtaa

SEQ ID NO: 5389779 - DNA, 25 bp, Homo sapien
ttattcttcaaagtcgctgacgtca

SEQ ID NO: 5389780 - DNA, 25 bp, Homo sapien
gctgatggctgtagtaatacttcaa

SEQ ID NO: 5389781 - DNA, 25 bp, Homo sapien
aggcgggacgatcctttgagtgcag

SEQ ID NO: 5389782 - DNA, 25 bp, Homo sapien
tgaggcgggacgatcctttgagtgc

SEQ ID NO: 5389783 - DNA, 25 bp, Homo sapien
cgggacgatcctttgagtgcaggag

SEQ ID NO: 5389784 - DNA, 25 bp, Homo sapien
gcgggacgatcctttgagtgcagga

SEQ ID NO: 5389785 - DNA, 25 bp, Homo sapien
gtgggtccctggcacctggtgaata

SEQ ID NO: 5389786 - DNA, 25 bp, Homo sapien
taaatgggcctttcgctggtgtgac

SEQ ID NO: 5389787 - DNA, 25 bp, Homo sapien
gcataagaattctcagtgccctgcc

SEQ ID NO: 5389788 - DNA, 25 bp, Homo sapien
tctgttgagcagataagggagcctg

SEQ ID NO: 5389789 - DNA, 25 bp, Homo sapien
ttcccactttcctgcctcatcatcc

SEQ ID NO: 5389790 - DNA, 25 bp, Homo sapien
ctttcccactttcctgcctcatcat

SEQ ID NO: 5389791 - DNA, 25 bp, Homo sapien
actttcctgcctcatcatcccacat

SEQ ID NO: 5389792 - DNA, 25 bp, Homo sapien
cccactttcctgcctcatcatccca

SEQ ID NO: 5389793 - DNA, 25 bp, Homo sapien
gaggacacttttaatccacgaggag

SEQ ID NO: 5389794 - DNA, 25 bp, Homo sapien
aaggcaatgtctgtgtgggtccctg

SEQ ID NO: 5389795 - DNA, 25 bp, Homo sapien
gaaatgtcggacaccagaatctgaa

SEQ ID NO: 5389796 - DNA, 25 bp, Homo sapien
taagtaggtctaagggccactggtg

SEQ ID NO: 5389797 - DNA, 25 bp, Homo sapien
catcagacagtaagtgagcagtgaa

SEQ ID NO: 5389798 - DNA, 25 bp, Homo sapien
tgcatcagacagtaagtgagcagtg

SEQ ID NO: 5389799 - DNA, 25 bp, Homo sapien
actgcatcagacagtaagtgagcag

SEQ ID NO: 5389800 - DNA, 25 bp, Homo sapien
aactgcatcagacagtaagtgagca

SEQ ID NO: 5389801 - DNA, 25 bp, Homo sapien
gcatttgcaaacaagagcgaatcct

SEQ ID NO: 5389802 - DNA, 25 bp, Homo sapien
agagcgaatcctccttggcataggg

SEQ ID NO: 5389803 - DNA, 25 bp, Homo sapien
tctaggaggtatcccagattccacc

SEQ ID NO: 5389804 - DNA, 25 bp, Homo sapien
gttctccataagcaaagcctccatg

SEQ ID NO: 5389805 - DNA, 25 bp, Homo sapien
cacttcctgcacctgagaagctcct

SEQ ID NO: 5389806 - DNA, 25 bp, Homo sapien
tcacttcctgcacctgagaagctcc

SEQ ID NO: 5389807 - DNA, 25 bp, Homo sapien
ggtccacggacatgtaactcagtga

SEQ ID NO: 5389808 - DNA, 25 bp, Homo sapien
tgtttcttggtccacggacatgtaa

SEQ ID NO: 5389809 - DNA, 25 bp, Homo sapien
agctttattccaggctgtttcttgg

SEQ ID NO: 5389810 - DNA, 25 bp, Homo sapien
tcttagctttattccaggctgtttc

SEQ ID NO: 5389811 - DNA, 25 bp, Homo sapien
cagaaaccctacaagccagaagaga

SEQ ID NO: 5389812 - DNA, 25 bp, Homo sapien
tgctccaattaaaagacacaaactg

SEQ ID NO: 5389813 - DNA, 25 bp, Homo sapien
ccatcagaccaacagtggatctctt

SEQ ID NO: 5389814 - DNA, 25 bp, Homo sapien
atcagaccaacagtggatctcttgg

SEQ ID NO: 5389815 - DNA, 25 bp, Homo sapien
aaaacttctttccttgcatgcttct

SEQ ID NO: 5389816 - DNA, 25 bp, Homo sapien
cttctttccttgcatgcttctctga

SEQ ID NO: 5389817 - DNA, 25 bp, Homo sapien
gtctcttgatatcaaaacttctttc

SEQ ID NO: 5389818 - DNA, 25 bp, Homo sapien
acagttttcacaaaggtctcttgat

SEQ ID NO: 5389819 - DNA, 25 bp, Homo sapien
taggacactgcctgaaacctttact

SEQ ID NO: 5389820 - DNA, 25 bp, Homo sapien
cctgaagaactaggaagtaggtaca

SEQ ID NO: 5389821 - DNA, 25 bp, Homo sapien
taaatgacatgaagcttttgcacag

SEQ ID NO: 5389822 - DNA, 25 bp, Homo sapien
agttttagaagcaccaagagatagc

SEQ ID NO: 5389823 - DNA, 25 bp, Homo sapien
agcagacagctgatacacttcatca

SEQ ID NO: 5389824 - DNA, 25 bp, Homo sapien
tcatatgctgcaagcagacagctga

SEQ ID NO: 5389825 - DNA, 25 bp, Homo sapien
gacagagggagaaataatttacata

SEQ ID NO: 5389826 - DNA, 25 bp, Homo sapien
tatagtcataacacttcgtacttcc

SEQ ID NO: 5389827 - DNA, 25 bp, Homo sapien
ccaatagtagggcttgcaaagattc

SEQ ID NO: 5389828 - DNA, 25 bp, Homo sapien
gcaaggccttactgacaacctactg

SEQ ID NO: 5389829 - DNA, 25 bp, Homo sapien
gacgtataaagacaatggattcagg

SEQ ID NO: 5389830 - DNA, 25 bp, Homo sapien
caatgaggatgatacagtttcagct

SEQ ID NO: 5389831 - DNA, 25 bp, Homo sapien
agaggagaaactgagctcccttgcc

SEQ ID NO: 5389832 - DNA, 25 bp, Homo sapien
tgcaaaaccggttctgctgatgtca

SEQ ID NO: 5389833 - DNA, 25 bp, Homo sapien
ccagggcattgaatgcatgaagggt

SEQ ID NO: 5389834 - DNA, 25 bp, Homo sapien
tgcccagcctgcaaaaccggttctg

SEQ ID NO: 5389835 - DNA, 25 bp, Homo sapien
tggggaagaaacagaagatagattt

SEQ ID NO: 5389836 - DNA, 25 bp, Homo sapien
ctggggaagaaacagaagatagatt

SEQ ID NO: 5389837 - DNA, 25 bp, Homo sapien
aaggtgttaggtcagctccctcgcc

SEQ ID NO: 5389838 - DNA, 25 bp, Homo sapien
catgagaaccaactgctgtaccctg

SEQ ID NO: 5389839 - DNA, 25 bp, Homo sapien
taagaagctgttgaggcagacccca

SEQ ID NO: 5389840 - DNA, 25 bp, Homo sapien
gccatgcaggaagcgtggaaatcct

SEQ ID NO: 5389841 - DNA, 25 bp, Homo sapien
tttgagtccatagaaaacaatatgc

SEQ ID NO: 5389842 - DNA, 25 bp, Homo sapien
tgttctgcccccaggattgacttac

SEQ ID NO: 5389843 - DNA, 25 bp, Homo sapien
tcagggatttgagtccatagaaaac

SEQ ID NO: 5389844 - DNA, 25 bp, Homo sapien
cagttgtcagggatttgagtccata

SEQ ID NO: 5389845 - DNA, 25 bp, Homo sapien
aaattgaggggtagtcatttgtcat

SEQ ID NO: 5389846 - DNA, 25 bp, Homo sapien
cttcttaactcttggtttttcagtg

SEQ ID NO: 5389847 - DNA, 25 bp, Homo sapien
cccaaacaaattgaggggtagtcat

SEQ ID NO: 5389848 - DNA, 25 bp, Homo sapien
caaacaaattgaggggtagtcattt

SEQ ID NO: 5389849 - DNA, 25 bp, Homo sapien
gcaaagccttgctcagaagtgaaaa

SEQ ID NO: 5389850 - DNA, 25 bp, Homo sapien
agccttgctcagaagtgaaaaacat

SEQ ID NO: 5389851 - DNA, 25 bp, Homo sapien
aaagccttgctcagaagtgaaaaac

SEQ ID NO: 5389852 - DNA, 25 bp, Homo sapien
ggcaaagccttgctcagaagtgaaa

SEQ ID NO: 5389853 - DNA, 25 bp, Homo sapien
tgtatgacaacctgccaggatctgc

SEQ ID NO: 5389854 - DNA, 25 bp, Homo sapien
ccttggtttgtatgacaacctgcca

SEQ ID NO: 5389855 - DNA, 25 bp, Homo sapien
taagtagcaggccagtccttggttt

SEQ ID NO: 5389856 - DNA, 25 bp, Homo sapien
cagtccttggtttgtatgacaacct

SEQ ID NO: 5389857 - DNA, 25 bp, Homo sapien
gagctgcagtgactacagaggttgc

SEQ ID NO: 5389858 - DNA, 25 bp, Homo sapien
tctggagggattgctcgagtgggca

SEQ ID NO: 5389859 - DNA, 25 bp, Homo sapien
cagaggttgcttcctgatgacaagg

SEQ ID NO: 5389860 - DNA, 25 bp, Homo sapien
cctgatgacaaggtctgggccattt

SEQ ID NO: 5389861 - DNA, 25 bp, Homo sapien
ttttaaatgggattgcctaatgctg

SEQ ID NO: 5389862 - DNA, 25 bp, Homo sapien
attttaaatgggattgcctaatgct

SEQ ID NO: 5389863 - DNA, 25 bp, Homo sapien
gcaatgccttgccggggaactgaca

SEQ ID NO: 5389864 - DNA, 25 bp, Homo sapien
atgccttgccggggaactgacaagc

SEQ ID NO: 5389865 - DNA, 25 bp, Homo sapien
ctgcaatgccttgccggggaactga

SEQ ID NO: 5389866 - DNA, 25 bp, Homo sapien
caatgccttgccggggaactgacaa

SEQ ID NO: 5389867 - DNA, 25 bp, Homo sapien
ggcttctcggttgtctgtggccagc

SEQ ID NO: 5389868 - DNA, 25 bp, Homo sapien
aaagattggcttctcggttgtctgt

SEQ ID NO: 5389869 - DNA, 25 bp, Homo sapien
aagattggcttctcggttgtctgtg

SEQ ID NO: 5389870 - DNA, 25 bp, Homo sapien
gagcggtgtccacgacttgtttgat

SEQ ID NO: 5389871 - DNA, 25 bp, Homo sapien
taggtagaaggtgtggaaatagccc

SEQ ID NO: 5389872 - DNA, 25 bp, Homo sapien
gagctctttcctgtctatgcggtga

SEQ ID NO: 5389873 - DNA, 25 bp, Homo sapien
caaattggcacccacgtcaacgagt

SEQ ID NO: 5389874 - DNA, 25 bp, Homo sapien
tattttaatgaacctgaaattctgt

SEQ ID NO: 5389875 - DNA, 25 bp, Homo sapien
tgaattatcatgagccaggttggct

SEQ ID NO: 5389876 - DNA, 25 bp, Homo sapien
cagtgtgatcgagacttcagctgca

SEQ ID NO: 5389877 - DNA, 25 bp, Homo sapien
acttaggaagcaacagcagccggtt

SEQ ID NO: 5389878 - DNA, 25 bp, Homo sapien
tcatttgtgtgactagctcgaccca

SEQ ID NO: 5389879 - DNA, 25 bp, Homo sapien
agtcacattgcatcagcctggttag

SEQ ID NO: 5389880 - DNA, 25 bp, Homo sapien
tccagaatcccttgttgtcccagaa

SEQ ID NO: 5389881 - DNA, 25 bp, Homo sapien
cataaaggtcattccatccagatgg

SEQ ID NO: 5389882 - DNA, 25 bp, Homo sapien
taaccaggtggcttgggtcaggcca

SEQ ID NO: 5389883 - DNA, 25 bp, Homo sapien
agccgaaaggctgaagtgttccctg

SEQ ID NO: 5389884 - DNA, 25 bp, Homo sapien
cctgttcgtgcatccctgggacatg

SEQ ID NO: 5389885 - DNA, 25 bp, Homo sapien
tgtgcagaccaatatagactcagag

SEQ ID NO: 5389886 - DNA, 25 bp, Homo sapien
tctggaacagaggaccaactcttgg

SEQ ID NO: 5389887 - DNA, 25 bp, Homo sapien
gatttctccaaaggcctctttctgc

SEQ ID NO: 5389888 - DNA, 25 bp, Homo sapien
ctccatgggccgtggtccctcatcc

SEQ ID NO: 5389889 - DNA, 25 bp, Homo sapien
ccagatttctccaaaggcctctttc

SEQ ID NO: 5389890 - DNA, 25 bp, Homo sapien
atgggccgtggtccctcatccgtaa

SEQ ID NO: 5389891 - DNA, 25 bp, Homo sapien
ggtcttcggggtcaataacacagct

SEQ ID NO: 5389892 - DNA, 25 bp, Homo sapien
tacctcttacaggacttgcctcagg

SEQ ID NO: 5389893 - DNA, 25 bp, Homo sapien
gtcaataacacagctggagctgtca

SEQ ID NO: 5389894 - DNA, 25 bp, Homo sapien
atacctcttacaggacttgcctcag

SEQ ID NO: 5389895 - DNA, 25 bp, Homo sapien
atgagtggcatgtcagtgcttggtt

SEQ ID NO: 5389896 - DNA, 25 bp, Homo sapien
ctgctggatgcccccaagagtgagt

SEQ ID NO: 5389897 - DNA, 25 bp, Homo sapien
gagtggcatgtcagtgcttggtttt

SEQ ID NO: 5389898 - DNA, 25 bp, Homo sapien
gctgctggatgcccccaagagtgag

SEQ ID NO: 5389899 - DNA, 25 bp, Homo sapien
tcaagcccccacatgacattcaaag

SEQ ID NO: 5389900 - DNA, 25 bp, Homo sapien
ttgagtatccctaaatctgagaatc

SEQ ID NO: 5389901 - DNA, 25 bp, Homo sapien
gatccatatctaagtacaggttgag

SEQ ID NO: 5389902 - DNA, 25 bp, Homo sapien
tgcgccctgcctagatccatatcta

SEQ ID NO: 5389903 - DNA, 25 bp, Homo sapien
ttttccttccgagccgacctctcca

SEQ ID NO: 5389904 - DNA, 25 bp, Homo sapien
ttcggcgcctcccaatgacaagcgg

SEQ ID NO: 5389905 - DNA, 25 bp, Homo sapien
cggagcattgtggtcccgtgcgcaa

SEQ ID NO: 5389906 - DNA, 25 bp, Homo sapien
tcccaatgacaagcggcgcggagca

SEQ ID NO: 5389907 - DNA, 25 bp, Homo sapien
gccgcggtcagggaagtaatgttcc

SEQ ID NO: 5389908 - DNA, 25 bp, Homo sapien
ttctttactcgggaacagctggaga

SEQ ID NO: 5389909 - DNA, 25 bp, Homo sapien
gtgtatccttttctgttcgccgccg

SEQ ID NO: 5389910 - DNA, 25 bp, Homo sapien
cggataaagagctctcgtgccgcca

SEQ ID NO: 5389911 - DNA, 25 bp, Homo sapien
ccttgggagcgtactggagttcttt

SEQ ID NO: 5389912 - DNA, 25 bp, Homo sapien
aaaggcctaagtgtttgccgcagcc

SEQ ID NO: 5389913 - DNA, 25 bp, Homo sapien
gggttagcgatgctgaaaggcctaa

SEQ ID NO: 5389914 - DNA, 25 bp, Homo sapien
tgatggcggctctcttctaccttgg

SEQ ID NO: 5389915 - DNA, 25 bp, Homo sapien
taaacactgcgattgtttatatgca

SEQ ID NO: 5389916 - DNA, 25 bp, Homo sapien
gcgattgtttatatgcacaggtttt

SEQ ID NO: 5389917 - DNA, 25 bp, Homo sapien
cactgcgattgtttatatgcacagg

SEQ ID NO: 5389918 - DNA, 25 bp, Homo sapien
aacactgcgattgtttatatgcaca

SEQ ID NO: 5389919 - DNA, 25 bp, Homo sapien
aactgaatactcttcggttactcat

SEQ ID NO: 5389920 - DNA, 25 bp, Homo sapien
atacgtttatggcatttctcaggca

SEQ ID NO: 5389921 - DNA, 25 bp, Homo sapien
tttgagatcaccattgaacacccac

SEQ ID NO: 5389922 - DNA, 25 bp, Homo sapien
tgaaatgtacccagttagtaagagg

SEQ ID NO: 5389923 - DNA, 25 bp, Homo sapien
taagaggtaggtgatccttgaaact

SEQ ID NO: 5389924 - DNA, 25 bp, Homo sapien
agatactcactctgccccccaagct

SEQ ID NO: 5389925 - DNA, 25 bp, Homo sapien
gacagatactcactctgccccccaa

SEQ ID NO: 5389926 - DNA, 25 bp, Homo sapien
gatactcactctgccccccaagctg

SEQ ID NO: 5389927 - DNA, 25 bp, Homo sapien
acagatactcactctgccccccaag

SEQ ID NO: 5389928 - DNA, 25 bp, Homo sapien
ttttgacacaggaggagctacctca

SEQ ID NO: 5389929 - DNA, 25 bp, Homo sapien
cagccagtaggcataatcgtaataa

SEQ ID NO: 5389930 - DNA, 25 bp, Homo sapien
tttggagagcaattgaataggaatc

SEQ ID NO: 5389931 - DNA, 25 bp, Homo sapien
tcctgtctttaggtcagaggttagg

SEQ ID NO: 5389932 - DNA, 25 bp, Homo sapien
tcaagagggaaagtaatcgttacaa

SEQ ID NO: 5389933 - DNA, 25 bp, Homo sapien
aatgccggttgagagttgtgtgtac

SEQ ID NO: 5389934 - DNA, 25 bp, Homo sapien
gaagtagatgaactcctagcattcc

SEQ ID NO: 5389935 - DNA, 25 bp, Homo sapien
tgtgtgtacttctgtgtatgctgag

SEQ ID NO: 5389936 - DNA, 25 bp, Homo sapien
tcagaggttctgaccagattggctg

SEQ ID NO: 5389937 - DNA, 25 bp, Homo sapien
tctaggccttactggaagccactga

SEQ ID NO: 5389938 - DNA, 25 bp, Homo sapien
tgtgtgcagtgcaacagatggtcat

SEQ ID NO: 5389939 - DNA, 25 bp, Homo sapien
gacacttcactaccagatgtgtgca

SEQ ID NO: 5389940 - DNA, 25 bp, Homo sapien
aaatatactccttccctgaagcgtg

SEQ ID NO: 5389941 - DNA, 25 bp, Homo sapien
tatgtggattactgtgatttgaaaa

SEQ ID NO: 5389942 - DNA, 25 bp, Homo sapien
tttcaggtaaatgtagtcttcctta

SEQ ID NO: 5389943 - DNA, 25 bp, Homo sapien
tcacaataacttacctagtagagat

SEQ ID NO: 5389944 - DNA, 25 bp, Homo sapien
gaggaggctaatatgtaactgcaac

SEQ ID NO: 5389945 - DNA, 25 bp, Homo sapien
tgtagttcctggacaatcaaaactg

SEQ ID NO: 5389946 - DNA, 25 bp, Homo sapien
ggaaacaaagatcccttagccatca

SEQ ID NO: 5389947 - DNA, 25 bp, Homo sapien
cataggatctgcttaaactgggtta

SEQ ID NO: 5389948 - DNA, 25 bp, Homo sapien
gagagcagaaggtcgctcatgctgg

SEQ ID NO: 5389949 - DNA, 25 bp, Homo sapien
tggagagcagaaggtcgctcatgct

SEQ ID NO: 5389950 - DNA, 25 bp, Homo sapien
agcagaaggtcgctcatgctggtcc

SEQ ID NO: 5389951 - DNA, 25 bp, Homo sapien
agagcagaaggtcgctcatgctggt

SEQ ID NO: 5389952 - DNA, 25 bp, Homo sapien
gcctcgaggacggagtctgagcctc

SEQ ID NO: 5389953 - DNA, 25 bp, Homo sapien
tgtcttcttgccagcctcgaggacg

SEQ ID NO: 5389954 - DNA, 25 bp, Homo sapien
ccagcctcgaggacggagtctgagc

SEQ ID NO: 5389955 - DNA, 25 bp, Homo sapien
tcgaggacggagtctgagcctccat

SEQ ID NO: 5389956 - DNA, 25 bp, Homo sapien
ggtgcaccacgcagggaggacagtg

SEQ ID NO: 5389957 - DNA, 25 bp, Homo sapien
ggaggacagtggacctgttctccat

SEQ ID NO: 5389958 - DNA, 25 bp, Homo sapien
cagggaggacagtggacctgttctc

SEQ ID NO: 5389959 - DNA, 25 bp, Homo sapien
gcagggaggacagtggacctgttct

SEQ ID NO: 5389960 - DNA, 25 bp, Homo sapien
ctaggttgtatctatttgtggatct

SEQ ID NO: 5389961 - DNA, 25 bp, Homo sapien
ctggagaagacctttctaggttgta

SEQ ID NO: 5389962 - DNA, 25 bp, Homo sapien
tgactacaatgtaccctggagaaga

SEQ ID NO: 5389963 - DNA, 25 bp, Homo sapien
gactacaatgtaccctggagaagac

SEQ ID NO: 5389964 - DNA, 25 bp, Homo sapien
cacattcattggcagagagggagac

SEQ ID NO: 5389965 - DNA, 25 bp, Homo sapien
gatgatgtcatttcaccctagccag

SEQ ID NO: 5389966 - DNA, 25 bp, Homo sapien
tgccaaaaactgtacccctggagtg

SEQ ID NO: 5389967 - DNA, 25 bp, Homo sapien
cagtatcctagagtgggctccagca

SEQ ID NO: 5389968 - DNA, 25 bp, Homo sapien
attgaaagggaaatgtctgccactt

SEQ ID NO: 5389969 - DNA, 25 bp, Homo sapien
cagagcttttaatgggccataaatt

SEQ ID NO: 5389970 - DNA, 25 bp, Homo sapien
taatgggccataaattgaaagggaa

SEQ ID NO: 5389971 - DNA, 25 bp, Homo sapien
cacttggaatctccgggcatttatc

SEQ ID NO: 5389972 - DNA, 25 bp, Homo sapien
cactgtgggtgccatttaaacctgc

SEQ ID NO: 5389973 - DNA, 25 bp, Homo sapien
tactagagattgagccaccaggaac

SEQ ID NO: 5389974 - DNA, 25 bp, Homo sapien
tgtgctccgatgtaaaacatggcgg

SEQ ID NO: 5389975 - DNA, 25 bp, Homo sapien
caggcaatggcccaaaacggtttat

SEQ ID NO: 5389976 - DNA, 25 bp, Homo sapien
gttctcttgcaagcatgtccccaaa

SEQ ID NO: 5389977 - DNA, 25 bp, Homo sapien
tgtccccaaataggccacaatgttg

SEQ ID NO: 5389978 - DNA, 25 bp, Homo sapien
tttattagaggtatccaaagccacc

SEQ ID NO: 5389979 - DNA, 25 bp, Homo sapien
tgtccttgactagtgagaccacagt

SEQ ID NO: 5389980 - DNA, 25 bp, Homo sapien
gcaaatcaataataccttgttatta

SEQ ID NO: 5389981 - DNA, 25 bp, Homo sapien
ggtgacacttgactttcccttctct

SEQ ID NO: 5389982 - DNA, 25 bp, Homo sapien
tgacataacttattcacaaaatgcc

SEQ ID NO: 5389983 - DNA, 25 bp, Homo sapien
caaaatgcctcaggtgacacttgac

SEQ ID NO: 5389984 - DNA, 25 bp, Homo sapien
atctcttatgcagttcacaaaatgg

SEQ ID NO: 5389985 - DNA, 25 bp, Homo sapien
gccatctagtaatgattctccaaac

SEQ ID NO: 5389986 - DNA, 25 bp, Homo sapien
gtttttgccatctagtaatgattct

SEQ ID NO: 5389987 - DNA, 25 bp, Homo sapien
tcttatgcagttcacaaaatggaag

SEQ ID NO: 5389988 - DNA, 25 bp, Homo sapien
gagagaccagatcctgatgacattg

SEQ ID NO: 5389989 - DNA, 25 bp, Homo sapien
gatgacattgtctgatccctgaagc

SEQ ID NO: 5389990 - DNA, 25 bp, Homo sapien
tgagaggttagaaatgcagtggcca

SEQ ID NO: 5389991 - DNA, 25 bp, Homo sapien
cactatatgtgcctgagaaaaagcc

SEQ ID NO: 5389992 - DNA, 25 bp, Homo sapien
ctcacccttggtccataggataggt

SEQ ID NO: 5389993 - DNA, 25 bp, Homo sapien
tcacccttggtccataggataggtt

SEQ ID NO: 5389994 - DNA, 25 bp, Homo sapien
tccctgtcatatatcctgagcccac

SEQ ID NO: 5389995 - DNA, 25 bp, Homo sapien
cctgtcatatatcctgagcccacta

SEQ ID NO: 5389996 - DNA, 25 bp, Homo sapien
cctccctgtcatatatcctgagccc

SEQ ID NO: 5389997 - DNA, 25 bp, Homo sapien
gtcatatatcctgagcccactacta

SEQ ID NO: 5389998 - DNA, 25 bp, Homo sapien
ttcccattatcgtggtcagcttgct

SEQ ID NO: 5389999 - DNA, 25 bp, Homo sapien
tcccattatcgtggtcagcttgctc

SEQ ID NO: 5390000 - DNA, 25 bp, Homo sapien
aattcccattatcgtggtcagcttg

SEQ ID NO: 5390001 - DNA, 25 bp, Homo sapien
aaaattcccattatcgtggtcagct

SEQ ID NO: 5390002 - DNA, 25 bp, Homo sapien
tcatgtaggttgctatgtacagcct

SEQ ID NO: 5390003 - DNA, 25 bp, Homo sapien
gatcattagttaaaattcggctggc

SEQ ID NO: 5390004 - DNA, 25 bp, Homo sapien
tctgcagctagacaacctaatagtt

SEQ ID NO: 5390005 - DNA, 25 bp, Homo sapien
taaatgggatctggtgatgtagctc

SEQ ID NO: 5390006 - DNA, 25 bp, Homo sapien
gatggagccgaacatatctcacggt

SEQ ID NO: 5390007 - DNA, 25 bp, Homo sapien
gacatttattggtgatacgtctgcc

SEQ ID NO: 5390008 - DNA, 25 bp, Homo sapien
caaacatttcatagattccaggtcc

SEQ ID NO: 5390009 - DNA, 25 bp, Homo sapien
ccaggtccattagcagttgaattga

SEQ ID NO: 5390010 - DNA, 25 bp, Homo sapien
atcaacgacttaactagggctcccg

SEQ ID NO: 5390011 - DNA, 25 bp, Homo sapien
gattgacgaacagacactgagagct

SEQ ID NO: 5390012 - DNA, 25 bp, Homo sapien
tagtaaggacaccagatcgcgtggg

SEQ ID NO: 5390013 - DNA, 25 bp, Homo sapien
catggtaggcttaatgggaccttca

SEQ ID NO: 5390014 - DNA, 25 bp, Homo sapien
cttgatgcttcggccactgtacttc

SEQ ID NO: 5390015 - DNA, 25 bp, Homo sapien
actgtacttcatatgagaggtcgaa

SEQ ID NO: 5390016 - DNA, 25 bp, Homo sapien
tacttcatatgagaggtcgaaaact

SEQ ID NO: 5390017 - DNA, 25 bp, Homo sapien
gatgcttcggccactgtacttcata

SEQ ID NO: 5390018 - DNA, 25 bp, Homo sapien
caacaagaaaaacaataactggata

SEQ ID NO: 5390019 - DNA, 25 bp, Homo sapien
ctacaacaagaaaaacaataactgg

SEQ ID NO: 5390020 - DNA, 25 bp, Homo sapien
acaagaaaaacaataactggatatt

SEQ ID NO: 5390021 - DNA, 25 bp, Homo sapien
tacaacaagaaaaacaataactgga

SEQ ID NO: 5390022 - DNA, 25 bp, Homo sapien
caagatcttggtagcaaaaagccca

SEQ ID NO: 5390023 - DNA, 25 bp, Homo sapien
tttttgcaaaactaagggccgcatg

SEQ ID NO: 5390024 - DNA, 25 bp, Homo sapien
aagttcacattgcagagctccctgg

SEQ ID NO: 5390025 - DNA, 25 bp, Homo sapien
tgtgcccattcttgaagcgatgagt

SEQ ID NO: 5390026 - DNA, 25 bp, Homo sapien
ttttcttttaagtcttcttggctca

SEQ ID NO: 5390027 - DNA, 25 bp, Homo sapien
tttcttttaagtcttcttggctcat

SEQ ID NO: 5390028 - DNA, 25 bp, Homo sapien
tggaaaagttacagtgatctcaaca

SEQ ID NO: 5390029 - DNA, 25 bp, Homo sapien
ttggaaaagttacagtgatctcaac

SEQ ID NO: 5390030 - DNA, 25 bp, Homo sapien
gggcatcaaagagggcggcttccct

SEQ ID NO: 5390031 - DNA, 25 bp, Homo sapien
gagaaacacgggcatcaaagagggc

SEQ ID NO: 5390032 - DNA, 25 bp, Homo sapien
aggagacgctactcgggagagctgc

SEQ ID NO: 5390033 - DNA, 25 bp, Homo sapien
ctcccggaggagacgctactcggga

SEQ ID NO: 5390034 - DNA, 25 bp, Homo sapien
gttccggaagggaaccgatcactga

SEQ ID NO: 5390035 - DNA, 25 bp, Homo sapien
catggagacacgtgtggttccggaa

SEQ ID NO: 5390036 - DNA, 25 bp, Homo sapien
ccgatcactgaagccgctggaagat

SEQ ID NO: 5390037 - DNA, 25 bp, Homo sapien
cagggacaacggctcatggagacac

SEQ ID NO: 5390038 - DNA, 25 bp, Homo sapien
tcttcttcattaaccagtgtggaat

SEQ ID NO: 5390039 - DNA, 25 bp, Homo sapien
cttcttcttcattaaccagtgtgga

SEQ ID NO: 5390040 - DNA, 25 bp, Homo sapien
ttcttcttcattaaccagtgtggaa

SEQ ID NO: 5390041 - DNA, 25 bp, Homo sapien
ttattcagcagtttatacttaaaca

SEQ ID NO: 5390042 - DNA, 25 bp, Homo sapien
tttattcagcagtttatacttaaac

SEQ ID NO: 5390043 - DNA, 25 bp, Homo sapien
tgtcatcaaatcagttggagaagag

SEQ ID NO: 5390044 - DNA, 25 bp, Homo sapien
aatcagttggagaagagtttgtatc

SEQ ID NO: 5390045 - DNA, 25 bp, Homo sapien
aatgtcaagcaatgactcagcatgt

SEQ ID NO: 5390046 - DNA, 25 bp, Homo sapien
tcaagcaatgactcagcatgtcttt

SEQ ID NO: 5390047 - DNA, 25 bp, Homo sapien
gctgggacatgagtaagaacttttt

SEQ ID NO: 5390048 - DNA, 25 bp, Homo sapien
cgtcattgcaaaaccctctgtaggg

SEQ ID NO: 5390049 - DNA, 25 bp, Homo sapien
ctacgtcgtcattgcaaaaccctct

SEQ ID NO: 5390050 - DNA, 25 bp, Homo sapien
gtgctgggacatgagtaagaacttt

SEQ ID NO: 5390051 - DNA, 25 bp, Homo sapien
caaggttagggaatcctcttctcca

SEQ ID NO: 5390052 - DNA, 25 bp, Homo sapien
tctctgaatctgtgcactgccctga

SEQ ID NO: 5390053 - DNA, 25 bp, Homo sapien
catgtttcctgaggatgacccatca

SEQ ID NO: 5390054 - DNA, 25 bp, Homo sapien
gaagacttattgctggctcaatcga

SEQ ID NO: 5390055 - DNA, 25 bp, Homo sapien
tgtcaacatcacatctcgcagttct

SEQ ID NO: 5390056 - DNA, 25 bp, Homo sapien
cagtcctacagaaacttgctacttg

SEQ ID NO: 5390057 - DNA, 25 bp, Homo sapien
tctcctgcactttccaggccttaaa

SEQ ID NO: 5390058 - DNA, 25 bp, Homo sapien
gtttctcagcggttgtctctgtgtc

SEQ ID NO: 5390059 - DNA, 25 bp, Homo sapien
tctctatttgtgacacataatgtat

SEQ ID NO: 5390060 - DNA, 25 bp, Homo sapien
ctgtttctttgaactctctatttgt

SEQ ID NO: 5390061 - DNA, 25 bp, Homo sapien
tgtttctttgaactctctatttgtg

SEQ ID NO: 5390062 - DNA, 25 bp, Homo sapien
actctctatttgtgacacataatgt

SEQ ID NO: 5390063 - DNA, 25 bp, Homo sapien
cacaggtttgtacactgttaacatg

SEQ ID NO: 5390064 - DNA, 25 bp, Homo sapien
tctcaaacaggtccacatctctcac

SEQ ID NO: 5390065 - DNA, 25 bp, Homo sapien
tgggaaatttatatccaggaactct

SEQ ID NO: 5390066 - DNA, 25 bp, Homo sapien
aacttccacaggtttgtacactgtt

SEQ ID NO: 5390067 - DNA, 25 bp, Homo sapien
gtttttgacagcagacccggatggt

SEQ ID NO: 5390068 - DNA, 25 bp, Homo sapien
taggaggcatgtctccatgggtctc

SEQ ID NO: 5390069 - DNA, 25 bp, Homo sapien
ctttgcgcagcattgttgaggtgag

SEQ ID NO: 5390070 - DNA, 25 bp, Homo sapien
tctgcaggtcttgtgagcaaaagtg

SEQ ID NO: 5390071 - DNA, 25 bp, Homo sapien
tgcagtaatgagaggcgtattccac

SEQ ID NO: 5390072 - DNA, 25 bp, Homo sapien
cttcggtaatatagtcacagatgag

SEQ ID NO: 5390073 - DNA, 25 bp, Homo sapien
cgtattccacgtctctgggtgctga

SEQ ID NO: 5390074 - DNA, 25 bp, Homo sapien
caaggtttccgaggatggattggac

SEQ ID NO: 5390075 - DNA, 25 bp, Homo sapien
gttttgctgagggacgtggcacaca

SEQ ID NO: 5390076 - DNA, 25 bp, Homo sapien
aagaaacaccaagccaaacagtagc

SEQ ID NO: 5390077 - DNA, 25 bp, Homo sapien
tgctgtgttttgctgagggacgtgg

SEQ ID NO: 5390078 - DNA, 25 bp, Homo sapien
caccaagccaaacagtagccaacat

SEQ ID NO: 5390079 - DNA, 25 bp, Homo sapien
cgcagcccgaatccgaggtatttga

SEQ ID NO: 5390080 - DNA, 25 bp, Homo sapien
cacttgtgcgggaacggtaataccg

SEQ ID NO: 5390081 - DNA, 25 bp, Homo sapien
tcaccactgcctcggaatgggaaag

SEQ ID NO: 5390082 - DNA, 25 bp, Homo sapien
ggtatttgagatcacggacttcacc

SEQ ID NO: 5390083 - DNA, 25 bp, Homo sapien
gcagaacattattgtatgaggcctt

SEQ ID NO: 5390084 - DNA, 25 bp, Homo sapien
cactgggtaataggataggtgcaac

SEQ ID NO: 5390085 - DNA, 25 bp, Homo sapien
ccaccatcaatacatgggaggttgt

SEQ ID NO: 5390086 - DNA, 25 bp, Homo sapien
tttgtactgttttacctgcccacca

SEQ ID NO: 5390087 - DNA, 25 bp, Homo sapien
ggcactgcgcccgtcgtatattgtc

SEQ ID NO: 5390088 - DNA, 25 bp, Homo sapien
tcaggtttcctaaccttggcactat

SEQ ID NO: 5390089 - DNA, 25 bp, Homo sapien
cattttgggccacattgttgtgagg

SEQ ID NO: 5390090 - DNA, 25 bp, Homo sapien
gaggctgtcttatgcattgtcaaat

SEQ ID NO: 5390091 - DNA, 25 bp, Homo sapien
agtgtgtgatctgaggaccgttgtc

SEQ ID NO: 5390092 - DNA, 25 bp, Homo sapien
tagaatctcctctgcacatgcatgg

SEQ ID NO: 5390093 - DNA, 25 bp, Homo sapien
ggtttagcagatagccaaggtttgg

SEQ ID NO: 5390094 - DNA, 25 bp, Homo sapien
caatgttagaactgtcctgtcaccc

SEQ ID NO: 5390095 - DNA, 25 bp, Homo sapien
ggaattttgttaaaatatggtgatg

SEQ ID NO: 5390096 - DNA, 25 bp, Homo sapien
ttttgttaaaatatggtgatggtgg

SEQ ID NO: 5390097 - DNA, 25 bp, Homo sapien
ctgggaattttgttaaaatatggtg

SEQ ID NO: 5390098 - DNA, 25 bp, Homo sapien
attttgttaaaatatggtgatggtg

SEQ ID NO: 5390099 - DNA, 25 bp, Homo sapien
aatccccaagaaactgctggtgtca

SEQ ID NO: 5390100 - DNA, 25 bp, Homo sapien
tgggtcctatagtaactcttcaatt

SEQ ID NO: 5390101 - DNA, 25 bp, Homo sapien
cctcttttgggtatacaatcagaag

SEQ ID NO: 5390102 - DNA, 25 bp, Homo sapien
gtttctacactgttatttcctggtg

SEQ ID NO: 5390103 - DNA, 25 bp, Homo sapien
gttttttcgtagatgctctttatca

SEQ ID NO: 5390104 - DNA, 25 bp, Homo sapien
tgaataggagttgcttatctcaggg

SEQ ID NO: 5390105 - DNA, 25 bp, Homo sapien
tattacaagataccatgaagcagtc

SEQ ID NO: 5390106 - DNA, 25 bp, Homo sapien
ggatatataaccagctttgcattct

SEQ ID NO: 5390107 - DNA, 25 bp, Homo sapien
cttggcctgccaagatactggcatt

SEQ ID NO: 5390108 - DNA, 25 bp, Homo sapien
tgtgtacagtaaggaggttagcaac

SEQ ID NO: 5390109 - DNA, 25 bp, Homo sapien
gaaggtagattgcagataaatggca

SEQ ID NO: 5390110 - DNA, 25 bp, Homo sapien
tggcttgtatacagtggcattgtgt

SEQ ID NO: 5390111 - DNA, 25 bp, Homo sapien
cacaagaattctttaattaggatac

SEQ ID NO: 5390112 - DNA, 25 bp, Homo sapien
gatacttagtaaactgtgttctcac

SEQ ID NO: 5390113 - DNA, 25 bp, Homo sapien
ggtatcagttcattaaagcaaagtt

SEQ ID NO: 5390114 - DNA, 25 bp, Homo sapien
tcatctgcagacttagtggtatcag

SEQ ID NO: 5390115 - DNA, 25 bp, Homo sapien
gggatatgaaggaaatcctcagcag

SEQ ID NO: 5390116 - DNA, 25 bp, Homo sapien
tattcttgagtatgatcgcttaggg

SEQ ID NO: 5390117 - DNA, 25 bp, Homo sapien
tgttgacttgatacctacgatggct

SEQ ID NO: 5390118 - DNA, 25 bp, Homo sapien
tagttaaaggtattggcgtattcca

SEQ ID NO: 5390119 - DNA, 25 bp, Homo sapien
tagacctgggttttaggatgtagca

SEQ ID NO: 5390120 - DNA, 25 bp, Homo sapien
cgaatgcagttggtattgaggtctt

SEQ ID NO: 5390121 - DNA, 25 bp, Homo sapien
gaactggattaatatcctgcatcac

SEQ ID NO: 5390122 - DNA, 25 bp, Homo sapien
tctaatcttgctatggcgaatgcag

SEQ ID NO: 5390123 - DNA, 25 bp, Homo sapien
gaaagtttctatcttgttctaacac

SEQ ID NO: 5390124 - DNA, 25 bp, Homo sapien
ctaaatctggactgacttactcttc

SEQ ID NO: 5390125 - DNA, 25 bp, Homo sapien
tgttcaggattaagtcacatatcat

SEQ ID NO: 5390126 - DNA, 25 bp, Homo sapien
catatcatattcgaaaacacttggc

SEQ ID NO: 5390127 - DNA, 25 bp, Homo sapien
cacaaacactgggaagcctcgtctt

SEQ ID NO: 5390128 - DNA, 25 bp, Homo sapien
taattctatagaactatccactgag

SEQ ID NO: 5390129 - DNA, 25 bp, Homo sapien
ctttaatcagtttggttccagaagc

SEQ ID NO: 5390130 - DNA, 25 bp, Homo sapien
tttccaagcttgaagttagaatcac

SEQ ID NO: 5390131 - DNA, 25 bp, Homo sapien
gggtcgtggctgcctatctggagtg

SEQ ID NO: 5390132 - DNA, 25 bp, Homo sapien
tggggtcgtggctgcctatctggag

SEQ ID NO: 5390133 - DNA, 25 bp, Homo sapien
ctttggggtcgtggctgcctatctg

SEQ ID NO: 5390134 - DNA, 25 bp, Homo sapien
gtcgtggctgcctatctggagtgct

SEQ ID NO: 5390135 - DNA, 25 bp, Homo sapien
tcaggtgctgcactatctggcaatc

SEQ ID NO: 5390136 - DNA, 25 bp, Homo sapien
ttgacacctgcgctgatcatttgtg

SEQ ID NO: 5390137 - DNA, 25 bp, Homo sapien
agaaacctgcagaccttgctcggca

SEQ ID NO: 5390138 - DNA, 25 bp, Homo sapien
gctcggcacctgttaccttgtgtga

SEQ ID NO: 5390139 - DNA, 25 bp, Homo sapien
gcaggaagattgtcagttaagtcga

SEQ ID NO: 5390140 - DNA, 25 bp, Homo sapien
tcttacactttgacagagataggct

SEQ ID NO: 5390141 - DNA, 25 bp, Homo sapien
gagcagcctgaagtgttagtcaccg

SEQ ID NO: 5390142 - DNA, 25 bp, Homo sapien
cagtatcagcttgaggatttgtcca

SEQ ID NO: 5390143 - DNA, 25 bp, Homo sapien
tagcggctgcattcgtggtctgtgc

SEQ ID NO: 5390144 - DNA, 25 bp, Homo sapien
tggtctgtgcaaacacttcgtggtt

SEQ ID NO: 5390145 - DNA, 25 bp, Homo sapien
cttggtacctagagactgtcatgca

SEQ ID NO: 5390146 - DNA, 25 bp, Homo sapien
tcaaaccagcatcggaaagacttcc

SEQ ID NO: 5390147 - DNA, 25 bp, Homo sapien
actcgtttctcacagggcctattgg

SEQ ID NO: 5390148 - DNA, 25 bp, Homo sapien
tgtttctgggagtcacaggtaggcg

SEQ ID NO: 5390149 - DNA, 25 bp, Homo sapien
gtgctgcagaaacacgatcatgttc

SEQ ID NO: 5390150 - DNA, 25 bp, Homo sapien
gatcatgttcatcactcgtttctca

SEQ ID NO: 5390151 - DNA, 25 bp, Homo sapien
acttgatctggaaggctgctttgga

SEQ ID NO: 5390152 - DNA, 25 bp, Homo sapien
gggatagacccttccctgctgcggc

SEQ ID NO: 5390153 - DNA, 25 bp, Homo sapien
tagggttctggacagcttaggatcc

SEQ ID NO: 5390154 - DNA, 25 bp, Homo sapien
taacactgcgtttccatggaggcct

SEQ ID NO: 5390155 - DNA, 25 bp, Homo sapien
ttgcttctcttcgtagtttcaccac

SEQ ID NO: 5390156 - DNA, 25 bp, Homo sapien
caatacgctatcaagttgaggtttt

SEQ ID NO: 5390157 - DNA, 25 bp, Homo sapien
ctcttcgtagtttcaccacatagga

SEQ ID NO: 5390158 - DNA, 25 bp, Homo sapien
ttcccaaacaatacgctatcaagtt

SEQ ID NO: 5390159 - DNA, 25 bp, Homo sapien
tattcctggaatacaagcatgattc

SEQ ID NO: 5390160 - DNA, 25 bp, Homo sapien
gattacagactaaaagcctttcttc

SEQ ID NO: 5390161 - DNA, 25 bp, Homo sapien
aacactaacagaagttctagccaga

SEQ ID NO: 5390162 - DNA, 25 bp, Homo sapien
catgaaagggaaagacctataaact

SEQ ID NO: 5390163 - DNA, 25 bp, Homo sapien
gataaaccctgaggatataatgata

SEQ ID NO: 5390164 - DNA, 25 bp, Homo sapien
tatgattgcacttatatgaagtgcc

SEQ ID NO: 5390165 - DNA, 25 bp, Homo sapien
tatgaagtgcctagattattagtca

SEQ ID NO: 5390166 - DNA, 25 bp, Homo sapien
gcctagattattagtcaaatacata

SEQ ID NO: 5390167 - DNA, 25 bp, Homo sapien
ggtgtttggcggctctccaatctaa

SEQ ID NO: 5390168 - DNA, 25 bp, Homo sapien
gcggctctccaatctaatgatgaca

SEQ ID NO: 5390169 - DNA, 25 bp, Homo sapien
tagtttaggtgtttggcggctctcc

SEQ ID NO: 5390170 - DNA, 25 bp, Homo sapien
atatagtttaggtgtttggcggctc

SEQ ID NO: 5390171 - DNA, 25 bp, Homo sapien
agagagaaactgctagggcagagag

SEQ ID NO: 5390172 - DNA, 25 bp, Homo sapien
tagagggtattcacttgtcacagga

SEQ ID NO: 5390173 - DNA, 25 bp, Homo sapien
caaggtttgagtgtgtgagcccacc

SEQ ID NO: 5390174 - DNA, 25 bp, Homo sapien
catatggttccctatcgtaagcgag

SEQ ID NO: 5390175 - DNA, 25 bp, Homo sapien
tgtacgttgggctgtaattaacgcc

SEQ ID NO: 5390176 - DNA, 25 bp, Homo sapien
atctccatctcctgagtggcagcag

SEQ ID NO: 5390177 - DNA, 25 bp, Homo sapien
atctcctgagtggcagcagctgtct

SEQ ID NO: 5390178 - DNA, 25 bp, Homo sapien
agcagctgtcttcttcctggggcat

SEQ ID NO: 5390179 - DNA, 25 bp, Homo sapien
ctgtgttttcactccatctccatct

SEQ ID NO: 5390180 - DNA, 25 bp, Homo sapien
ctgaaacctggtatagactgagcct

SEQ ID NO: 5390181 - DNA, 25 bp, Homo sapien
gcttcttggctctcaaccgtgacaa

SEQ ID NO: 5390182 - DNA, 25 bp, Homo sapien
tgtgatctgaagagcaagttcccct

SEQ ID NO: 5390183 - DNA, 25 bp, Homo sapien
tgcaaagagcacctgaccaactaag

SEQ ID NO: 5390184 - DNA, 25 bp, Homo sapien
tatctgagattacacgtgcacaaca

SEQ ID NO: 5390185 - DNA, 25 bp, Homo sapien
acagtaagcctagttttattcattt

SEQ ID NO: 5390186 - DNA, 25 bp, Homo sapien
tctgagattacacgtgcacaacacc

SEQ ID NO: 5390187 - DNA, 25 bp, Homo sapien
ccaacagtaagcctagttttattca

SEQ ID NO: 5390188 - DNA, 25 bp, Homo sapien
tctcttgaatcctaagcaggctggt

SEQ ID NO: 5390189 - DNA, 25 bp, Homo sapien
tgtgtgcccctagctcattctggag

SEQ ID NO: 5390190 - DNA, 25 bp, Homo sapien
ggctggtcatgcttggcccagaatt

SEQ ID NO: 5390191 - DNA, 25 bp, Homo sapien
gctgaaacataattgcgagtctgaa

SEQ ID NO: 5390192 - DNA, 25 bp, Homo sapien
caaaaatcgtgtgatgtctgatcca

SEQ ID NO: 5390193 - DNA, 25 bp, Homo sapien
aaatcgtgtgatgtctgatccatgc

SEQ ID NO: 5390194 - DNA, 25 bp, Homo sapien
tagagattgtcttctcacctggctt

SEQ ID NO: 5390195 - DNA, 25 bp, Homo sapien
gtgtgatgtctgatccatgctttga

SEQ ID NO: 5390196 - DNA, 25 bp, Homo sapien
tactttggccagcaatgaaaccttt

SEQ ID NO: 5390197 - DNA, 25 bp, Homo sapien
caaacttccagtttgaggatccggg

SEQ ID NO: 5390198 - DNA, 25 bp, Homo sapien
ggtgcaaatgtcttggtcctagaat

SEQ ID NO: 5390199 - DNA, 25 bp, Homo sapien
cttctcttgcatctgtgacacgggc

SEQ ID NO: 5390200 - DNA, 25 bp, Homo sapien
ggagtaaaatgtgcctcgaatctca

SEQ ID NO: 5390201 - DNA, 25 bp, Homo sapien
cgaatctcagaccagagataaattc

SEQ ID NO: 5390202 - DNA, 25 bp, Homo sapien
aatgtgcctcgaatctcagaccaga

SEQ ID NO: 5390203 - DNA, 25 bp, Homo sapien
ggtgatgaaaggagtaaaatgtgcc

SEQ ID NO: 5390204 - DNA, 25 bp, Homo sapien
tacactggcttgatgtgatccacct

SEQ ID NO: 5390205 - DNA, 25 bp, Homo sapien
gactgtgcagagagtctgcaggttg

SEQ ID NO: 5390206 - DNA, 25 bp, Homo sapien
acctgccagaaatgtccttcccctg

SEQ ID NO: 5390207 - DNA, 25 bp, Homo sapien
actgtgcagagagtctgcaggttgt

SEQ ID NO: 5390208 - DNA, 25 bp, Homo sapien
tgaagtccaggtagcatacagaaga

SEQ ID NO: 5390209 - DNA, 25 bp, Homo sapien
acagcgaaggcaaagtggatttcct

SEQ ID NO: 5390210 - DNA, 25 bp, Homo sapien
tgtgcgttcacattacagagctgac

SEQ ID NO: 5390211 - DNA, 25 bp, Homo sapien
gaatcccaagagttcgctttacatg

SEQ ID NO: 5390212 - DNA, 25 bp, Homo sapien
tgtgtatggatttagaaatgggaca

SEQ ID NO: 5390213 - DNA, 25 bp, Homo sapien
tcagacggacatggcccccaacatt

SEQ ID NO: 5390214 - DNA, 25 bp, Homo sapien
tttgtgatcagacggacatggcccc

SEQ ID NO: 5390215 - DNA, 25 bp, Homo sapien
cctttgtgatcagacggacatggcc

SEQ ID NO: 5390216 - DNA, 25 bp, Homo sapien
ctcctttgtgatcagacggacatgg

SEQ ID NO: 5390217 - DNA, 25 bp, Homo sapien
ctacggcaacatcttctttggttat

SEQ ID NO: 5390218 - DNA, 25 bp, Homo sapien
tacggcaacatcttctttggttatg

SEQ ID NO: 5390219 - DNA, 25 bp, Homo sapien
ggcaacatcttctttggttatgtat

SEQ ID NO: 5390220 - DNA, 25 bp, Homo sapien
tgaggctacggcaacatcttctttg

SEQ ID NO: 5390221 - DNA, 25 bp, Homo sapien
cttgctcccctccaaccccctggat

SEQ ID NO: 5390222 - DNA, 25 bp, Homo sapien
tcaaccatgttctcggtcccttgct

SEQ ID NO: 5390223 - DNA, 25 bp, Homo sapien
aatcaaccatgttctcggtcccttg

SEQ ID NO: 5390224 - DNA, 25 bp, Homo sapien
ttaatcaaccatgttctcggtccct

SEQ ID NO: 5390225 - DNA, 25 bp, Homo sapien
tgggctacagaatagctgtccactt

SEQ ID NO: 5390226 - DNA, 25 bp, Homo sapien
tgcttcatggcagttagactactcc

SEQ ID NO: 5390227 - DNA, 25 bp, Homo sapien
tactccattctcgaacaaatctcaa

SEQ ID NO: 5390228 - DNA, 25 bp, Homo sapien
tctcttccaaagcaagaattgggct

SEQ ID NO: 5390229 - DNA, 25 bp, Homo sapien
tctttttcaagccaaagattctcta

SEQ ID NO: 5390230 - DNA, 25 bp, Homo sapien
catctcacccagccaagagatcttt

SEQ ID NO: 5390231 - DNA, 25 bp, Homo sapien
gatctttttcaagccaaagattctc

SEQ ID NO: 5390232 - DNA, 25 bp, Homo sapien
ccagccaagagatctttttcaagcc

SEQ ID NO: 5390233 - DNA, 25 bp, Homo sapien
gtgagcgatattgtttcagctgaaa

SEQ ID NO: 5390234 - DNA, 25 bp, Homo sapien
cagtgagcgatattgtttcagctga

SEQ ID NO: 5390235 - DNA, 25 bp, Homo sapien
agtgagcgatattgtttcagctgaa

SEQ ID NO: 5390236 - DNA, 25 bp, Homo sapien
caatgaggactgtctgccaatggta

SEQ ID NO: 5390237 - DNA, 25 bp, Homo sapien
atgaggactgtctgccaatggtacc

SEQ ID NO: 5390238 - DNA, 25 bp, Homo sapien
gaggactgtctgccaatggtaccac

SEQ ID NO: 5390239 - DNA, 25 bp, Homo sapien
tcaatgaggactgtctgccaatggt

SEQ ID NO: 5390240 - DNA, 25 bp, Homo sapien
gatgtgaatccggtcagtattccta

SEQ ID NO: 5390241 - DNA, 25 bp, Homo sapien
cttagtatagatgtgaatccggtca

SEQ ID NO: 5390242 - DNA, 25 bp, Homo sapien
cagtattcctacttgcacagaacat

SEQ ID NO: 5390243 - DNA, 25 bp, Homo sapien
gaatccggtcagtattcctacttgc

SEQ ID NO: 5390244 - DNA, 25 bp, Homo sapien
aaagtgtctgaactcttccactgtt

SEQ ID NO: 5390245 - DNA, 25 bp, Homo sapien
catacactggcaaagtgtctgaact

SEQ ID NO: 5390246 - DNA, 25 bp, Homo sapien
tacactggcaaagtgtctgaactct

SEQ ID NO: 5390247 - DNA, 25 bp, Homo sapien
gtcatacactggcaaagtgtctgaa

SEQ ID NO: 5390248 - DNA, 25 bp, Homo sapien
tttatcctggatatggttgaggcta

SEQ ID NO: 5390249 - DNA, 25 bp, Homo sapien
tggctgggatgtaagtccgtcttct

SEQ ID NO: 5390250 - DNA, 25 bp, Homo sapien
cacagtctgagatagtttgaacctt

SEQ ID NO: 5390251 - DNA, 25 bp, Homo sapien
aactggccaggttctgactgtgcaa

SEQ ID NO: 5390252 - DNA, 25 bp, Homo sapien
tatcaggagcatactatatacccag

SEQ ID NO: 5390253 - DNA, 25 bp, Homo sapien
ggacagagaaatccctgcattctag

SEQ ID NO: 5390254 - DNA, 25 bp, Homo sapien
tatacccagtactattctagatgct

SEQ ID NO: 5390255 - DNA, 25 bp, Homo sapien
gaatgtaacagttaggtcttataaa

SEQ ID NO: 5390256 - DNA, 25 bp, Homo sapien
atagcaaaagtcatgaggaccaagc

SEQ ID NO: 5390257 - DNA, 25 bp, Homo sapien
tatagcaaaagtcatgaggaccaag

SEQ ID NO: 5390258 - DNA, 25 bp, Homo sapien
ctccatggtcaccttctatatactc

SEQ ID NO: 5390259 - DNA, 25 bp, Homo sapien
ccatggtcaccttctatatactcac

SEQ ID NO: 5390260 - DNA, 25 bp, Homo sapien
tccatggtcaccttctatatactca

SEQ ID NO: 5390261 - DNA, 25 bp, Homo sapien
agcactgccttgaggagtctcacac

SEQ ID NO: 5390262 - DNA, 25 bp, Homo sapien
cagcactgccttgaggagtctcaca

SEQ ID NO: 5390263 - DNA, 25 bp, Homo sapien
gcactgccttgaggagtctcacaca

SEQ ID NO: 5390264 - DNA, 25 bp, Homo sapien
cactgccttgaggagtctcacacat

SEQ ID NO: 5390265 - DNA, 25 bp, Homo sapien
gacactacagtattttcctcccgga

SEQ ID NO: 5390266 - DNA, 25 bp, Homo sapien
tcttccgacggactgcagtggtctt

SEQ ID NO: 5390267 - DNA, 25 bp, Homo sapien
cattgccagccctctacaggaaagg

SEQ ID NO: 5390268 - DNA, 25 bp, Homo sapien
taggtgcagagactacattgccagc

SEQ ID NO: 5390269 - DNA, 25 bp, Homo sapien
ggttgtggtacaaaaaatgatcgaa

SEQ ID NO: 5390270 - DNA, 25 bp, Homo sapien
ttaggttgtggtacaaaaaatgatc

SEQ ID NO: 5390271 - DNA, 25 bp, Homo sapien
gtggtacaaaaaatgatcgaatatc

SEQ ID NO: 5390272 - DNA, 25 bp, Homo sapien
caaaaaatgatcgaatatcatgctg

SEQ ID NO: 5390273 - DNA, 25 bp, Homo sapien
catggagaaatcctgcggtgttcca

SEQ ID NO: 5390274 - DNA, 25 bp, Homo sapien
cttgggaacctagccaccattggta

SEQ ID NO: 5390275 - DNA, 25 bp, Homo sapien
tcctgcggtgttccagttgacagcc

SEQ ID NO: 5390276 - DNA, 25 bp, Homo sapien
ctagccaccattggtatgaggaaac

SEQ ID NO: 5390277 - DNA, 25 bp, Homo sapien
tgggacatgctgactgaacatgagg

SEQ ID NO: 5390278 - DNA, 25 bp, Homo sapien
gcagcaagaagatctgatgggacat

SEQ ID NO: 5390279 - DNA, 25 bp, Homo sapien
ttcctgggaacttaggacacatggg

SEQ ID NO: 5390280 - DNA, 25 bp, Homo sapien
gggcctagagtaatcttcagactcc

SEQ ID NO: 5390281 - DNA, 25 bp, Homo sapien
taaaacaaactgatgtcagcatagc

SEQ ID NO: 5390282 - DNA, 25 bp, Homo sapien
aaatatataatagtccactatcatc

SEQ ID NO: 5390283 - DNA, 25 bp, Homo sapien
gtccactatcatctacactgaataa

SEQ ID NO: 5390284 - DNA, 25 bp, Homo sapien
aactgatgtcagcatagctatatat

SEQ ID NO: 5390285 - DNA, 25 bp, Homo sapien
tagtttatgaacagtggcatgggag

SEQ ID NO: 5390286 - DNA, 25 bp, Homo sapien
cagcataggtgatgttctaaaacag

SEQ ID NO: 5390287 - DNA, 25 bp, Homo sapien
tctgccattatggtagtttatgaac

SEQ ID NO: 5390288 - DNA, 25 bp, Homo sapien
ggttgagaggtaaggttagcagtga

SEQ ID NO: 5390289 - DNA, 25 bp, Homo sapien
gagcaagattagcaatgactatggc

SEQ ID NO: 5390290 - DNA, 25 bp, Homo sapien
gactatggctaatgttatgatggct

SEQ ID NO: 5390291 - DNA, 25 bp, Homo sapien
gatggctaaactgaacaatgatgaa

SEQ ID NO: 5390292 - DNA, 25 bp, Homo sapien
caatgatgaatgctgtcacaggaag

SEQ ID NO: 5390293 - DNA, 25 bp, Homo sapien
ggttgaggtctctttgacatttagc

SEQ ID NO: 5390294 - DNA, 25 bp, Homo sapien
ttgaggtctctttgacatttagcag

SEQ ID NO: 5390295 - DNA, 25 bp, Homo sapien
gttgaggtctctttgacatttagca

SEQ ID NO: 5390296 - DNA, 25 bp, Homo sapien
ttctaaagataattatacctgctgg

SEQ ID NO: 5390297 - DNA, 25 bp, Homo sapien
ctaaagataattatacctgctggat

SEQ ID NO: 5390298 - DNA, 25 bp, Homo sapien
tctaaagataattatacctgctgga

SEQ ID NO: 5390299 - DNA, 25 bp, Homo sapien
tcaactcatggagactcaagcaggt

SEQ ID NO: 5390300 - DNA, 25 bp, Homo sapien
aggtgaccttaaacaagatactaat

SEQ ID NO: 5390301 - DNA, 25 bp, Homo sapien
caggtattgggaacatgtctggttt

SEQ ID NO: 5390302 - DNA, 25 bp, Homo sapien
gagacatatcaccatcaactcatgg

SEQ ID NO: 5390303 - DNA, 25 bp, Homo sapien
gaggctgccctcatgtccttatcaa

SEQ ID NO: 5390304 - DNA, 25 bp, Homo sapien
gagttagcacccattgcaggaagga

SEQ ID NO: 5390305 - DNA, 25 bp, Homo sapien
cctacaatgtatccgcatgcctaaa

SEQ ID NO: 5390306 - DNA, 25 bp, Homo sapien
gattcaatctgtgaagcgcaaagcc

SEQ ID NO: 5390307 - DNA, 25 bp, Homo sapien
taaggcacatttaatatacctttcc

SEQ ID NO: 5390308 - DNA, 25 bp, Homo sapien
cagtttgtttatccgaggagctgaa

SEQ ID NO: 5390309 - DNA, 25 bp, Homo sapien
tttccctattctcagtgtcataaag

SEQ ID NO: 5390310 - DNA, 25 bp, Homo sapien
cagtgtcataaagatagcctcctat

SEQ ID NO: 5390311 - DNA, 25 bp, Homo sapien
gagtgaacaaagcttccttccttaa

SEQ ID NO: 5390312 - DNA, 25 bp, Homo sapien
tccttccttaactcttcagaactgt

SEQ ID NO: 5390313 - DNA, 25 bp, Homo sapien
tccttaactcttcagaactgtcatt

SEQ ID NO: 5390314 - DNA, 25 bp, Homo sapien
cttccttaactcttcagaactgtca

SEQ ID NO: 5390315 - DNA, 25 bp, Homo sapien
tttctttcctaccgttcagtgtgct

SEQ ID NO: 5390316 - DNA, 25 bp, Homo sapien
ttcagtgtgctccctgtaacttgag

SEQ ID NO: 5390317 - DNA, 25 bp, Homo sapien
tcagtgtgctccctgtaacttgagc

SEQ ID NO: 5390318 - DNA, 25 bp, Homo sapien
tctttcctaccgttcagtgtgctcc

SEQ ID NO: 5390319 - DNA, 25 bp, Homo sapien
cgattcaacattccccacataaggg

SEQ ID NO: 5390320 - DNA, 25 bp, Homo sapien
tagggttccatttgcaataaggtag

SEQ ID NO: 5390321 - DNA, 25 bp, Homo sapien
gcaataaggtagtgaatattcacag

SEQ ID NO: 5390322 - DNA, 25 bp, Homo sapien
taagggtgtctagggttccatttgc

SEQ ID NO: 5390323 - DNA, 25 bp, Homo sapien
caacatgacttgctgcagtaaatgt

SEQ ID NO: 5390324 - DNA, 25 bp, Homo sapien
tgtccagggtcccagtacaactcag

SEQ ID NO: 5390325 - DNA, 25 bp, Homo sapien
tccagggtcccagtacaactcagca

SEQ ID NO: 5390326 - DNA, 25 bp, Homo sapien
caaatacaacatgacttgctgcagt

SEQ ID NO: 5390327 - DNA, 25 bp, Homo sapien
aagcactccataaaaagtcctgaga

SEQ ID NO: 5390328 - DNA, 25 bp, Homo sapien
acagaagcactccataaaaagtcct

SEQ ID NO: 5390329 - DNA, 25 bp, Homo sapien
gcactccataaaaagtcctgagaca

SEQ ID NO: 5390330 - DNA, 25 bp, Homo sapien
agcactccataaaaagtcctgagac

SEQ ID NO: 5390331 - DNA, 25 bp, Homo sapien
cacgcgagtgtcaggatccttttga

SEQ ID NO: 5390332 - DNA, 25 bp, Homo sapien
aatgcttaggatagccacgcgagtg

SEQ ID NO: 5390333 - DNA, 25 bp, Homo sapien
ttccatctatcctaatgtaacgagt

SEQ ID NO: 5390334 - DNA, 25 bp, Homo sapien
gattaaccagatgtattctttctga

SEQ ID NO: 5390335 - DNA, 25 bp, Homo sapien
tggagcatgcttaaatggtgagcaa

SEQ ID NO: 5390336 - DNA, 25 bp, Homo sapien
aaatttaagcgaatcattctgaagc

SEQ ID NO: 5390337 - DNA, 25 bp, Homo sapien
ttattttcgatgactgcttctgtgc

SEQ ID NO: 5390338 - DNA, 25 bp, Homo sapien
gcaagcttggagcatgcttaaatgg

SEQ ID NO: 5390339 - DNA, 25 bp, Homo sapien
gaaggggttgtccaatgttatcctc

SEQ ID NO: 5390340 - DNA, 25 bp, Homo sapien
taggtcagatttaagtgtttgatcc

SEQ ID NO: 5390341 - DNA, 25 bp, Homo sapien
ttaggtcagatttaagtgtttgatc

SEQ ID NO: 5390342 - DNA, 25 bp, Homo sapien
tgcctaggccaatatctagaagggg

SEQ ID NO: 5390343 - DNA, 25 bp, Homo sapien
cagagctggggttaactttctgtcg

SEQ ID NO: 5390344 - DNA, 25 bp, Homo sapien
agagctggggttaactttctgtcgc

SEQ ID NO: 5390345 - DNA, 25 bp, Homo sapien
agctggggttaactttctgtcgcgt

SEQ ID NO: 5390346 - DNA, 25 bp, Homo sapien
gagctggggttaactttctgtcgcg

SEQ ID NO: 5390347 - DNA, 25 bp, Homo sapien
atattttttaccaccatgtgttcaa

SEQ ID NO: 5390348 - DNA, 25 bp, Homo sapien
tggaacaaggagagtatattgaaaa

SEQ ID NO: 5390349 - DNA, 25 bp, Homo sapien
tgtaaacaatgaacactgatctaac

SEQ ID NO: 5390350 - DNA, 25 bp, Homo sapien
cctgtctaaaacattgtcctaccca

SEQ ID NO: 5390351 - DNA, 25 bp, Homo sapien
gggaccttgataaaatcactcttcg

SEQ ID NO: 5390352 - DNA, 25 bp, Homo sapien
tgcacagctaagaccagaaccagaa

SEQ ID NO: 5390353 - DNA, 25 bp, Homo sapien
tctatgtggataatcctgcctgtga

SEQ ID NO: 5390354 - DNA, 25 bp, Homo sapien
tttattgccagtatacagaacgaga

SEQ ID NO: 5390355 - DNA, 25 bp, Homo sapien
attataagcaagcaccactacacct

SEQ ID NO: 5390356 - DNA, 25 bp, Homo sapien
tgggattataagcaagcaccactac

SEQ ID NO: 5390357 - DNA, 25 bp, Homo sapien
gggattataagcaagcaccactaca

SEQ ID NO: 5390358 - DNA, 25 bp, Homo sapien
gctgggattataagcaagcaccact

SEQ ID NO: 5390359 - DNA, 25 bp, Homo sapien
cctgcacgcctgtaggatagtaggt

SEQ ID NO: 5390360 - DNA, 25 bp, Homo sapien
ggcagcatttgtccctatcccatca

SEQ ID NO: 5390361 - DNA, 25 bp, Homo sapien
tcaccagaagcagtccatcatggac

SEQ ID NO: 5390362 - DNA, 25 bp, Homo sapien
cagtgcagggtcctgagtccaacag

SEQ ID NO: 5390363 - DNA, 25 bp, Homo sapien
cctctgtagggtactgaacatggaa

SEQ ID NO: 5390364 - DNA, 25 bp, Homo sapien
taaagatgaatatagttcgggcacg

SEQ ID NO: 5390365 - DNA, 25 bp, Homo sapien
ccaagtaactaggatgacatgcaca

SEQ ID NO: 5390366 - DNA, 25 bp, Homo sapien
tatttacaggttctaccatggtggt

SEQ ID NO: 5390367 - DNA, 25 bp, Homo sapien
tttttcccactcttcaaagctggta

SEQ ID NO: 5390368 - DNA, 25 bp, Homo sapien
catgcgagttatcaaccccatgact

SEQ ID NO: 5390369 - DNA, 25 bp, Homo sapien
tggcacctgaatttggagttctcat

SEQ ID NO: 5390370 - DNA, 25 bp, Homo sapien
cttggcaatagcagtttgtttaaac

SEQ ID NO: 5390371 - DNA, 25 bp, Homo sapien
gatcaaatggaatacgctgtctgac

SEQ ID NO: 5390372 - DNA, 25 bp, Homo sapien
aatggaatacgctgtctgactttag

SEQ ID NO: 5390373 - DNA, 25 bp, Homo sapien
tggaatacgctgtctgactttaggg

SEQ ID NO: 5390374 - DNA, 25 bp, Homo sapien
gaagatcaaatggaatacgctgtct

SEQ ID NO: 5390375 - DNA, 25 bp, Homo sapien
gatttgatgcccctctacaatccca

SEQ ID NO: 5390376 - DNA, 25 bp, Homo sapien
tgtcacttaatagctggtgaagttc

SEQ ID NO: 5390377 - DNA, 25 bp, Homo sapien
cacttaatagctggtgaagttcatt

SEQ ID NO: 5390378 - DNA, 25 bp, Homo sapien
agttcattaagatttgatgcccctc

SEQ ID NO: 5390379 - DNA, 25 bp, Homo sapien
aacaatgaatttgcctgaatatgca

SEQ ID NO: 5390380 - DNA, 25 bp, Homo sapien
tgtattgaaagtcactgaattgcac

SEQ ID NO: 5390381 - DNA, 25 bp, Homo sapien
gatgatgaaaagtggtaatggttgc

SEQ ID NO: 5390382 - DNA, 25 bp, Homo sapien
aaactacatacagtcgcctataggg

SEQ ID NO: 5390383 - DNA, 25 bp, Homo sapien
tttagacaacgaattctccttagag

SEQ ID NO: 5390384 - DNA, 25 bp, Homo sapien
cttagaggtggaaatggtacaaaat

SEQ ID NO: 5390385 - DNA, 25 bp, Homo sapien
gtctggagttcgacaacagcttggc

SEQ ID NO: 5390386 - DNA, 25 bp, Homo sapien
tcaagatattctagacactattctg

SEQ ID NO: 5390387 - DNA, 25 bp, Homo sapien
tgtataatagtccaccaattatttc

SEQ ID NO: 5390388 - DNA, 25 bp, Homo sapien
atatgtataatagtccaccaattat

SEQ ID NO: 5390389 - DNA, 25 bp, Homo sapien
tataatagtccaccaattatttcat

SEQ ID NO: 5390390 - DNA, 25 bp, Homo sapien
gaataaagaatgattaataacctga

SEQ ID NO: 5390391 - DNA, 25 bp, Homo sapien
aaagagagcttcaatctgcataaaa

SEQ ID NO: 5390392 - DNA, 25 bp, Homo sapien
ctttttgcatagtcggtccatcttc

SEQ ID NO: 5390393 - DNA, 25 bp, Homo sapien
tctttttgcatagtcggtccatctt

SEQ ID NO: 5390394 - DNA, 25 bp, Homo sapien
ggaaagagagcttcaatctgcataa

SEQ ID NO: 5390395 - DNA, 25 bp, Homo sapien
cttatctggtctgcacgtaagtttt

SEQ ID NO: 5390396 - DNA, 25 bp, Homo sapien
tggtctgcacgtaagttttagtttc

SEQ ID NO: 5390397 - DNA, 25 bp, Homo sapien
tatctggtctgcacgtaagttttag

SEQ ID NO: 5390398 - DNA, 25 bp, Homo sapien
tctgcacgtaagttttagtttctct

SEQ ID NO: 5390399 - DNA, 25 bp, Homo sapien
aagttcgaagtataaggattgtaat

SEQ ID NO: 5390400 - DNA, 25 bp, Homo sapien
taagttcgaagtataaggattgtaa

SEQ ID NO: 5390401 - DNA, 25 bp, Homo sapien
ttaagttcgaagtataaggattgta

SEQ ID NO: 5390402 - DNA, 25 bp, Homo sapien
cctaaagctggtgttcctgtaagaa

SEQ ID NO: 5390403 - DNA, 25 bp, Homo sapien
cagaactgtcactttactggtcgac

SEQ ID NO: 5390404 - DNA, 25 bp, Homo sapien
tgcatctgcggttaagagaccataa

SEQ ID NO: 5390405 - DNA, 25 bp, Homo sapien
caataaaatcctgctgcgagttgca

SEQ ID NO: 5390406 - DNA, 25 bp, Homo sapien
ggacttagctctgggatccattttt

SEQ ID NO: 5390407 - DNA, 25 bp, Homo sapien
tctggacttagctctgggatccatt

SEQ ID NO: 5390408 - DNA, 25 bp, Homo sapien
tcttctggacttagctctgggatcc

SEQ ID NO: 5390409 - DNA, 25 bp, Homo sapien
tttcttctggacttagctctgggat

SEQ ID NO: 5390410 - DNA, 25 bp, Homo sapien
cagagacgaagggaccactattaac

SEQ ID NO: 5390411 - DNA, 25 bp, Homo sapien
gggtacctcagagacgaagggacca

SEQ ID NO: 5390412 - DNA, 25 bp, Homo sapien
tcctctttatagaagtaagtaattc

SEQ ID NO: 5390413 - DNA, 25 bp, Homo sapien
ctctttatagaagtaagtaattcca

SEQ ID NO: 5390414 - DNA, 25 bp, Homo sapien
gattaggctgggtattatgtgcaga

SEQ ID NO: 5390415 - DNA, 25 bp, Homo sapien
tgactaaaaattgagccctaatgag

SEQ ID NO: 5390416 - DNA, 25 bp, Homo sapien
caaaatgctggttaatcacatcctc

SEQ ID NO: 5390417 - DNA, 25 bp, Homo sapien
taaaggaaggccactgaatactgag

SEQ ID NO: 5390418 - DNA, 25 bp, Homo sapien
tgacagctacgtttttctgctcccc

SEQ ID NO: 5390419 - DNA, 25 bp, Homo sapien
caagtgaggctttatcccctactac

SEQ ID NO: 5390420 - DNA, 25 bp, Homo sapien
caaggtgtcacattcgtagagtcaa

SEQ ID NO: 5390421 - DNA, 25 bp, Homo sapien
tcacatttttatctgcctgcaaggt

SEQ ID NO: 5390422 - DNA, 25 bp, Homo sapien
gtctcctacttgatacaaagttttc

SEQ ID NO: 5390423 - DNA, 25 bp, Homo sapien
aaatcattagatttacaggtctcct

SEQ ID NO: 5390424 - DNA, 25 bp, Homo sapien
agcaacctgattgtcactgatgaac

SEQ ID NO: 5390425 - DNA, 25 bp, Homo sapien
tctcacattctattagaagtctgac

SEQ ID NO: 5390426 - DNA, 25 bp, Homo sapien
ccaggtaaaaacataaaggcactga

SEQ ID NO: 5390427 - DNA, 25 bp, Homo sapien
aggtaaaaacataaaggcactgatg

SEQ ID NO: 5390428 - DNA, 25 bp, Homo sapien
caggtaaaaacataaaggcactgat

SEQ ID NO: 5390429 - DNA, 25 bp, Homo sapien
accaggtaaaaacataaaggcactg

SEQ ID NO: 5390430 - DNA, 25 bp, Homo sapien
gttgattgtaagtactccaagctcc

SEQ ID NO: 5390431 - DNA, 25 bp, Homo sapien
tcagttgattgtaagtactccaagc

SEQ ID NO: 5390432 - DNA, 25 bp, Homo sapien
tgattgtaagtactccaagctcctc

SEQ ID NO: 5390433 - DNA, 25 bp, Homo sapien
gattgtaagtactccaagctcctcc

SEQ ID NO: 5390434 - DNA, 25 bp, Homo sapien
ctaggggtcactttgaaagcttctt

SEQ ID NO: 5390435 - DNA, 25 bp, Homo sapien
cctaggggtcactttgaaagcttct

SEQ ID NO: 5390436 - DNA, 25 bp, Homo sapien
taggggtcactttgaaagcttcttc

SEQ ID NO: 5390437 - DNA, 25 bp, Homo sapien
cacacagaactaaacaagttcctac

SEQ ID NO: 5390438 - DNA, 25 bp, Homo sapien
ggaaaagtataggagctgaggtaac

SEQ ID NO: 5390439 - DNA, 25 bp, Homo sapien
taggagctgaggtaacacacagaac

SEQ ID NO: 5390440 - DNA, 25 bp, Homo sapien
gaggtaacacacagaactaaacaag

SEQ ID NO: 5390441 - DNA, 25 bp, Homo sapien
ttcagagctggctaatactggtagt

SEQ ID NO: 5390442 - DNA, 25 bp, Homo sapien
gccccagagccctcaatgttttcag

SEQ ID NO: 5390443 - DNA, 25 bp, Homo sapien
ctggctaatactggtagtggtggca

SEQ ID NO: 5390444 - DNA, 25 bp, Homo sapien
agagccctcaatgttttcagagctg

SEQ ID NO: 5390445 - DNA, 25 bp, Homo sapien
gatgggtactctggcctggcaataa

SEQ ID NO: 5390446 - DNA, 25 bp, Homo sapien
taattggctaaagctgagaagcagc

SEQ ID NO: 5390447 - DNA, 25 bp, Homo sapien
cacactgttcgccttagggtggaag

SEQ ID NO: 5390448 - DNA, 25 bp, Homo sapien
cccctgagatatgaggctagtcctg

SEQ ID NO: 5390449 - DNA, 25 bp, Homo sapien
tctcttggtccaattcctcttccga

SEQ ID NO: 5390450 - DNA, 25 bp, Homo sapien
tggtccaattcctcttccgatggct

SEQ ID NO: 5390451 - DNA, 25 bp, Homo sapien
aggtagatgagctgtaggaactatg

SEQ ID NO: 5390452 - DNA, 25 bp, Homo sapien
tgtaggaactatgtctctcttggtc

SEQ ID NO: 5390453 - DNA, 25 bp, Homo sapien
ctatcacaaggagggttattttaat

SEQ ID NO: 5390454 - DNA, 25 bp, Homo sapien
tcacagctttagttacatgatcaag

SEQ ID NO: 5390455 - DNA, 25 bp, Homo sapien
tcagtttgaatagcatcccattttg

SEQ ID NO: 5390456 - DNA, 25 bp, Homo sapien
tgagaaccgggacaaacttccttga

SEQ ID NO: 5390457 - DNA, 25 bp, Homo sapien
tatagagttccattaagcagcctgc

SEQ ID NO: 5390458 - DNA, 25 bp, Homo sapien
gggatctttcacctactcatatgag

SEQ ID NO: 5390459 - DNA, 25 bp, Homo sapien
taagtaacagggttcacgaaatgca

SEQ ID NO: 5390460 - DNA, 25 bp, Homo sapien
gcagcctgctagaacatagtgtaaa

SEQ ID NO: 5390461 - DNA, 25 bp, Homo sapien
tcatgaagagacaacttcagtcttc

SEQ ID NO: 5390462 - DNA, 25 bp, Homo sapien
tagatatgacctgtttaaaactcac

SEQ ID NO: 5390463 - DNA, 25 bp, Homo sapien
aaacatactgtcatagataacctca

SEQ ID NO: 5390464 - DNA, 25 bp, Homo sapien
gcctttagcattaccaaaaatcagt

SEQ ID NO: 5390465 - DNA, 25 bp, Homo sapien
ctgcacccggtcccctctactgaag

SEQ ID NO: 5390466 - DNA, 25 bp, Homo sapien
actgcacccggtcccctctactgaa

SEQ ID NO: 5390467 - DNA, 25 bp, Homo sapien
gctacaaagagatgtactgtcatcc

SEQ ID NO: 5390468 - DNA, 25 bp, Homo sapien
gatttaggataaatctgaaaggctc

SEQ ID NO: 5390469 - DNA, 25 bp, Homo sapien
tgtatatctacaatagagctcttgg

SEQ ID NO: 5390470 - DNA, 25 bp, Homo sapien
gatgctgtgttaccaggcacgaaaa

SEQ ID NO: 5390471 - DNA, 25 bp, Homo sapien
agagacataaacagagggaagacaa

SEQ ID NO: 5390472 - DNA, 25 bp, Homo sapien
taagccacccagttgcggtatgctt

SEQ ID NO: 5390473 - DNA, 25 bp, Homo sapien
cattagggtatcaccaatgtaacca

SEQ ID NO: 5390474 - DNA, 25 bp, Homo sapien
tacaagtcaagaaagagagccctgg

SEQ ID NO: 5390475 - DNA, 25 bp, Homo sapien
aaaatccagcagattatcagattca

SEQ ID NO: 5390476 - DNA, 25 bp, Homo sapien
gttatgaaccctaggcatgatgatc

SEQ ID NO: 5390477 - DNA, 25 bp, Homo sapien
ttctggaatggaagtagctttgctc

SEQ ID NO: 5390478 - DNA, 25 bp, Homo sapien
tagtctgtcaggcaaaaaatccagc

SEQ ID NO: 5390479 - DNA, 25 bp, Homo sapien
aaagcccatccagttgcattctaga

SEQ ID NO: 5390480 - DNA, 25 bp, Homo sapien
cagtaatacgcaagacacattcctt

SEQ ID NO: 5390481 - DNA, 25 bp, Homo sapien
gtcagtaatacgcaagacacattcc

SEQ ID NO: 5390482 - DNA, 25 bp, Homo sapien
cagaaagtggttgtgactctcaaag

SEQ ID NO: 5390483 - DNA, 25 bp, Homo sapien
ggttgtgactctcaaagaagtaaca

SEQ ID NO: 5390484 - DNA, 25 bp, Homo sapien
tgatgggcctgttgcgaaggacctt

SEQ ID NO: 5390485 - DNA, 25 bp, Homo sapien
gcctgttgcgaaggaccttctgaac

SEQ ID NO: 5390486 - DNA, 25 bp, Homo sapien
gtcccctaaggcgatcatctcgtca

SEQ ID NO: 5390487 - DNA, 25 bp, Homo sapien
taaggcgatcatctcgtcagtcccc

SEQ ID NO: 5390488 - DNA, 25 bp, Homo sapien
catactgtctgagatatgtctgcag

SEQ ID NO: 5390489 - DNA, 25 bp, Homo sapien
gaagctagtactttaccaacataag

SEQ ID NO: 5390490 - DNA, 25 bp, Homo sapien
ccaacataaggaggtatcccagtaa

SEQ ID NO: 5390491 - DNA, 25 bp, Homo sapien
ggcttagactctgtacagggctgtg

SEQ ID NO: 5390492 - DNA, 25 bp, Homo sapien
ggctcagtgacaaacccaccaaaga

SEQ ID NO: 5390493 - DNA, 25 bp, Homo sapien
agaaagttccagaatcatcaggtac

SEQ ID NO: 5390494 - DNA, 25 bp, Homo sapien
gttccagaatcatcaggtaccacct

SEQ ID NO: 5390495 - DNA, 25 bp, Homo sapien
tgaggctcagtgacaaacccaccaa

SEQ ID NO: 5390496 - DNA, 25 bp, Homo sapien
caagtacgaacatctgcatgaatct

SEQ ID NO: 5390497 - DNA, 25 bp, Homo sapien
gagcaagtacgaacatctgcatgaa

SEQ ID NO: 5390498 - DNA, 25 bp, Homo sapien
caggagcaagtacgaacatctgcat

SEQ ID NO: 5390499 - DNA, 25 bp, Homo sapien
cccctcaggagcaagtacgaacatc

SEQ ID NO: 5390500 - DNA, 25 bp, Homo sapien
gtgtggcataagcatcaacatggag

SEQ ID NO: 5390501 - DNA, 25 bp, Homo sapien
tgtggcataagcatcaacatggaga

SEQ ID NO: 5390502 - DNA, 25 bp, Homo sapien
agtgtggcataagcatcaacatgga

SEQ ID NO: 5390503 - DNA, 25 bp, Homo sapien
gttcagcagtgtgtaatgctgtctc

SEQ ID NO: 5390504 - DNA, 25 bp, Homo sapien
ctagttcagcagtgtgtaatgctgt

SEQ ID NO: 5390505 - DNA, 25 bp, Homo sapien
tcagcagtgtgtaatgctgtctcac

SEQ ID NO: 5390506 - DNA, 25 bp, Homo sapien
tagttcagcagtgtgtaatgctgtc

SEQ ID NO: 5390507 - DNA, 25 bp, Homo sapien
accagcaggggactagccttctcca

SEQ ID NO: 5390508 - DNA, 25 bp, Homo sapien
ggggactagccttctccatcaccat

SEQ ID NO: 5390509 - DNA, 25 bp, Homo sapien
aggggactagccttctccatcacca

SEQ ID NO: 5390510 - DNA, 25 bp, Homo sapien
ccaaccagcaggggactagccttct

SEQ ID NO: 5390511 - DNA, 25 bp, Homo sapien
tacacagcactgatgatggcagaaa

SEQ ID NO: 5390512 - DNA, 25 bp, Homo sapien
tccaaacctgtgcggctgagctgga

SEQ ID NO: 5390513 - DNA, 25 bp, Homo sapien
gctggagaggaactaactctgctac

SEQ ID NO: 5390514 - DNA, 25 bp, Homo sapien
tctgctacacagcactgatgatggc

SEQ ID NO: 5390515 - DNA, 25 bp, Homo sapien
tcattgtgtgaagccagcctaaaca

SEQ ID NO: 5390516 - DNA, 25 bp, Homo sapien
gaaaagtttaacacatgtctctcag

SEQ ID NO: 5390517 - DNA, 25 bp, Homo sapien
tataagataacataggtttcaggca

SEQ ID NO: 5390518 - DNA, 25 bp, Homo sapien
catatctatctataaccacagtgga

SEQ ID NO: 5390519 - DNA, 25 bp, Homo sapien
tgggatttttgtgtgagcgtccttt

SEQ ID NO: 5390520 - DNA, 25 bp, Homo sapien
atgggatttttgtgtgagcgtcctt

SEQ ID NO: 5390521 - DNA, 25 bp, Homo sapien
gatgggatttttgtgtgagcgtcct

SEQ ID NO: 5390522 - DNA, 25 bp, Homo sapien
ctccacctcaaagagaaaaaaggat

SEQ ID NO: 5390523 - DNA, 25 bp, Homo sapien
gcaggtgccttgcctgtaatcacag

SEQ ID NO: 5390524 - DNA, 25 bp, Homo sapien
gtggcaggtgccttgcctgtaatca

SEQ ID NO: 5390525 - DNA, 25 bp, Homo sapien
aggagatcggttgaacccaggagac

SEQ ID NO: 5390526 - DNA, 25 bp, Homo sapien
taagcgctcataccataaatacaac

SEQ ID NO: 5390527 - DNA, 25 bp, Homo sapien
gaataaagggcacacgcatagggag

SEQ ID NO: 5390528 - DNA, 25 bp, Homo sapien
gacaaggagcctgtctttttaggca

SEQ ID NO: 5390529 - DNA, 25 bp, Homo sapien
tagtacccaatacagtgttaagcgc

SEQ ID NO: 5390530 - DNA, 25 bp, Homo sapien
atgccattaaattccgttcaacttt

SEQ ID NO: 5390531 - DNA, 25 bp, Homo sapien
aaatgccattaaattccgttcaact

SEQ ID NO: 5390532 - DNA, 25 bp, Homo sapien
aatgccattaaattccgttcaactt

SEQ ID NO: 5390533 - DNA, 25 bp, Homo sapien
cagccacgccacttccagccagtca

SEQ ID NO: 5390534 - DNA, 25 bp, Homo sapien
ccacgccacttccagccagtcacac

SEQ ID NO: 5390535 - DNA, 25 bp, Homo sapien
agccacgccacttccagccagtcac

SEQ ID NO: 5390536 - DNA, 25 bp, Homo sapien
gccacgccacttccagccagtcaca

SEQ ID NO: 5390537 - DNA, 25 bp, Homo sapien
cgccacaggtttgggacgtgtccgc

SEQ ID NO: 5390538 - DNA, 25 bp, Homo sapien
tcaacgggacaacgtgaaagtagat

SEQ ID NO: 5390539 - DNA, 25 bp, Homo sapien
gcgtattcgccgcagaatctccaac

SEQ ID NO: 5390540 - DNA, 25 bp, Homo sapien
cctaagcggaagtgacgttcaacgg

SEQ ID NO: 5390541 - DNA, 25 bp, Homo sapien
cagtaaaaactcacgaaactccgca

SEQ ID NO: 5390542 - DNA, 25 bp, Homo sapien
ctcaggctccaactcgtgggaaaag

SEQ ID NO: 5390543 - DNA, 25 bp, Homo sapien
caactcgtgggaaaaggtagctctt

SEQ ID NO: 5390544 - DNA, 25 bp, Homo sapien
ggtagctcttttacaagtgggcaaa

SEQ ID NO: 5390545 - DNA, 25 bp, Homo sapien
ttggaggaagatttggcacggctct

SEQ ID NO: 5390546 - DNA, 25 bp, Homo sapien
aggaagatttggcacggctctccgc

SEQ ID NO: 5390547 - DNA, 25 bp, Homo sapien
gaagatttggcacggctctccgcgg

SEQ ID NO: 5390548 - DNA, 25 bp, Homo sapien
tgaggttggaggaagatttggcacg

SEQ ID NO: 5390549 - DNA, 25 bp, Homo sapien
tactgctctctcgtgtggctggcgc

SEQ ID NO: 5390550 - DNA, 25 bp, Homo sapien
agaattttcagcttcgaccggttgg

SEQ ID NO: 5390551 - DNA, 25 bp, Homo sapien
aaagcaaacccctcgaggcctagcg

SEQ ID NO: 5390552 - DNA, 25 bp, Homo sapien
gaaaggtttccgagtccctgccatg

SEQ ID NO: 5390553 - DNA, 25 bp, Homo sapien
atagtgcaccatcagcatatcctca

SEQ ID NO: 5390554 - DNA, 25 bp, Homo sapien
tctggttgacaagcaatagtgcacc

SEQ ID NO: 5390555 - DNA, 25 bp, Homo sapien
caagattatccagtctgtgtttcca

SEQ ID NO: 5390556 - DNA, 25 bp, Homo sapien
ggaatcttatgtcccgctcacaggt

SEQ ID NO: 5390557 - DNA, 25 bp, Homo sapien
tggtccttatggctcttgatcccga

SEQ ID NO: 5390558 - DNA, 25 bp, Homo sapien
gtgagccagtggcaaggatgatcat

SEQ ID NO: 5390559 - DNA, 25 bp, Homo sapien
ttgatcccgatagcagtgagccagt

SEQ ID NO: 5390560 - DNA, 25 bp, Homo sapien
ccgatagcagtgagccagtggcaag

SEQ ID NO: 5390561 - DNA, 25 bp, Homo sapien
ctgtgtgctaattggtatttgtgta

SEQ ID NO: 5390562 - DNA, 25 bp, Homo sapien
tatttgtgtatagcacagcaaattg

SEQ ID NO: 5390563 - DNA, 25 bp, Homo sapien
gtgtatagcacagcaaattgtcagc

SEQ ID NO: 5390564 - DNA, 25 bp, Homo sapien
gtatagcacagcaaattgtcagctg

SEQ ID NO: 5390565 - DNA, 25 bp, Homo sapien
taagaattgccacaagtatatgtgc

SEQ ID NO: 5390566 - DNA, 25 bp, Homo sapien
gctattataggtatccctttggaga

SEQ ID NO: 5390567 - DNA, 25 bp, Homo sapien
taccttctaccttgatctggctcgg

SEQ ID NO: 5390568 - DNA, 25 bp, Homo sapien
ttattctccagccattaccttctac

SEQ ID NO: 5390569 - DNA, 25 bp, Homo sapien
taactgtcccacataattgccttgg

SEQ ID NO: 5390570 - DNA, 25 bp, Homo sapien
tgatttcctgtgtataactcaccga

SEQ ID NO: 5390571 - DNA, 25 bp, Homo sapien
tttcttcgcggataggtttttcaga

SEQ ID NO: 5390572 - DNA, 25 bp, Homo sapien
caagaaacctgtgtgcattaacgtc

SEQ ID NO: 5390573 - DNA, 25 bp, Homo sapien
atataatagatgcattttagcaatg

SEQ ID NO: 5390574 - DNA, 25 bp, Homo sapien
taggagatagctgtatgcatttatt

SEQ ID NO: 5390575 - DNA, 25 bp, Homo sapien
acctttggcttttgcatgattgtaa

SEQ ID NO: 5390576 - DNA, 25 bp, Homo sapien
agctgaagagctatataatacagtc

SEQ ID NO: 5390577 - DNA, 25 bp, Homo sapien
gagggagagcctgttatggtactaa

SEQ ID NO: 5390578 - DNA, 25 bp, Homo sapien
gaatacgcctgtttgggatggagta

SEQ ID NO: 5390579 - DNA, 25 bp, Homo sapien
gaagggtcaggcattcataaatctg

SEQ ID NO: 5390580 - DNA, 25 bp, Homo sapien
aacaaaagctgtaccatgacccttg

SEQ ID NO: 5390581 - DNA, 25 bp, Homo sapien
tgtgcagtcaagtcattagttttcc

SEQ ID NO: 5390582 - DNA, 25 bp, Homo sapien
tctcttcgaaacctgaaacctgctg

SEQ ID NO: 5390583 - DNA, 25 bp, Homo sapien
tggagcagcacagattcagacagct

SEQ ID NO: 5390584 - DNA, 25 bp, Homo sapien
gaatctcagtcctgacaagaggtga

SEQ ID NO: 5390585 - DNA, 25 bp, Homo sapien
tgtgtactatatgtattctgtattc

SEQ ID NO: 5390586 - DNA, 25 bp, Homo sapien
gaatgtgtactatatgtattctgta

SEQ ID NO: 5390587 - DNA, 25 bp, Homo sapien
tttaagaatgtgtactatatgtatt

SEQ ID NO: 5390588 - DNA, 25 bp, Homo sapien
tgtactatatgtattctgtattctc

SEQ ID NO: 5390589 - DNA, 25 bp, Homo sapien
tattgaatgctttacgaatttccgt

SEQ ID NO: 5390590 - DNA, 25 bp, Homo sapien
ttgaatgctttacgaatttccgtgt

SEQ ID NO: 5390591 - DNA, 25 bp, Homo sapien
attgaatgctttacgaatttccgtg

SEQ ID NO: 5390592 - DNA, 25 bp, Homo sapien
tgaatgctttacgaatttccgtgtc

SEQ ID NO: 5390593 - DNA, 25 bp, Homo sapien
tccaggaacagttaagggatcccat

SEQ ID NO: 5390594 - DNA, 25 bp, Homo sapien
tacagataacccaatcagaagagca

SEQ ID NO: 5390595 - DNA, 25 bp, Homo sapien
tgcttcaaagacaggagatctacgg

SEQ ID NO: 5390596 - DNA, 25 bp, Homo sapien
cctaggaatattatgcctggctggt

SEQ ID NO: 5390597 - DNA, 25 bp, Homo sapien
ggttagggatgctaagaagagccca

SEQ ID NO: 5390598 - DNA, 25 bp, Homo sapien
ttttgcagccagcacaatgtgaccc

SEQ ID NO: 5390599 - DNA, 25 bp, Homo sapien
tgtacaatgtgtgctgatgcaagcc

SEQ ID NO: 5390600 - DNA, 25 bp, Homo sapien
tgtttgcagcggatcactggacatc

SEQ ID NO: 5390601 - DNA, 25 bp, Homo sapien
tcaacgaggccgagaatagcatatg

SEQ ID NO: 5390602 - DNA, 25 bp, Homo sapien
caaggttgggctacgttcagaagaa

SEQ ID NO: 5390603 - DNA, 25 bp, Homo sapien
tcgtttgagatacagtgggcctggc

SEQ ID NO: 5390604 - DNA, 25 bp, Homo sapien
tccacaatatggaggcgaataagcc

SEQ ID NO: 5390605 - DNA, 25 bp, Homo sapien
ggtgaatgtagaccacagaagcctt

SEQ ID NO: 5390606 - DNA, 25 bp, Homo sapien
gactggctgtatgagggtctgcaac

SEQ ID NO: 5390607 - DNA, 25 bp, Homo sapien
acttgggaaggtagaataatctgac

SEQ ID NO: 5390608 - DNA, 25 bp, Homo sapien
ctaatgttgctaggtaggtaggcca

SEQ ID NO: 5390609 - DNA, 25 bp, Homo sapien
gattggcactaccatacatctggtt

SEQ ID NO: 5390610 - DNA, 25 bp, Homo sapien
cccaggattctcaagcctaaacgtg

SEQ ID NO: 5390611 - DNA, 25 bp, Homo sapien
taagtgctgcctaaacctgtgtttc

SEQ ID NO: 5390612 - DNA, 25 bp, Homo sapien
gatatcactgtttagatcctcccag

SEQ ID NO: 5390613 - DNA, 25 bp, Homo sapien
tctggaaagtagctggcgaggttac

SEQ ID NO: 5390614 - DNA, 25 bp, Homo sapien
ccagagctataggtacagtgtgatc

SEQ ID NO: 5390615 - DNA, 25 bp, Homo sapien
cactctagagtggacatacggaaag

SEQ ID NO: 5390616 - DNA, 25 bp, Homo sapien
gtggagaccgctaaactaatgatgt

SEQ ID NO: 5390617 - DNA, 25 bp, Homo sapien
aagtcatctctaacggtgcagcagg

SEQ ID NO: 5390618 - DNA, 25 bp, Homo sapien
cagtatctacacgtttccgcaagag

SEQ ID NO: 5390619 - DNA, 25 bp, Homo sapien
cacaagatgtgaagctagggagagc

SEQ ID NO: 5390620 - DNA, 25 bp, Homo sapien
ggagaagtccagtatcagcagagtc

SEQ ID NO: 5390621 - DNA, 25 bp, Homo sapien
ttctgtggtgccgagcattagcccc

SEQ ID NO: 5390622 - DNA, 25 bp, Homo sapien
gcttagagcgcttgcagtacttgta

SEQ ID NO: 5390623 - DNA, 25 bp, Homo sapien
gaagacaccgggctcaattcctgtt

SEQ ID NO: 5390624 - DNA, 25 bp, Homo sapien
gaaaagagaacgtacaaagctgtct

SEQ ID NO: 5390625 - DNA, 25 bp, Homo sapien
catcggaccacagaggcgtagaact

SEQ ID NO: 5390626 - DNA, 25 bp, Homo sapien
cgtagaacttcgctgatgctttggg

SEQ ID NO: 5390627 - DNA, 25 bp, Homo sapien
tcagggaagccattgcatcggacca

SEQ ID NO: 5390628 - DNA, 25 bp, Homo sapien
tgtgtatcctcgaaggtccaccttg

SEQ ID NO: 5390629 - DNA, 25 bp, Homo sapien
tcacagatggcggtaagctttggct

SEQ ID NO: 5390630 - DNA, 25 bp, Homo sapien
cgccttcacagatggcggtaagctt

SEQ ID NO: 5390631 - DNA, 25 bp, Homo sapien
catgcagtgactgttagcgggtcct

SEQ ID NO: 5390632 - DNA, 25 bp, Homo sapien
gactgttagcgggtcctctgtggat

SEQ ID NO: 5390633 - DNA, 25 bp, Homo sapien
tgagggcctcattgatgtaagtccg

SEQ ID NO: 5390634 - DNA, 25 bp, Homo sapien
agtagatccttgcagtgtcattgag

SEQ ID NO: 5390635 - DNA, 25 bp, Homo sapien
tgtttcttcccgctgggacactcca

SEQ ID NO: 5390636 - DNA, 25 bp, Homo sapien
tgtaagtccgaaggtagtagatcct

SEQ ID NO: 5390637 - DNA, 25 bp, Homo sapien
caaaaggcgtcatcttcagccagaa

SEQ ID NO: 5390638 - DNA, 25 bp, Homo sapien
gcgatctgcgatggaagcaactcct

SEQ ID NO: 5390639 - DNA, 25 bp, Homo sapien
cagaaggagccagagtctggccacg

SEQ ID NO: 5390640 - DNA, 25 bp, Homo sapien
gccaaaaggcgtcatcttcagccag

SEQ ID NO: 5390641 - DNA, 25 bp, Homo sapien
caggattaaggaagcttctagctca

SEQ ID NO: 5390642 - DNA, 25 bp, Homo sapien
gagatctctgccctgcgcactgttg

SEQ ID NO: 5390643 - DNA, 25 bp, Homo sapien
ccattcctgactttatcctacaggg

SEQ ID NO: 5390644 - DNA, 25 bp, Homo sapien
tagcaacctgtatgacacagcagag

SEQ ID NO: 5390645 - DNA, 25 bp, Homo sapien
acatgtgccctaatgggaggtgccc

SEQ ID NO: 5390646 - DNA, 25 bp, Homo sapien
gccaagcacatgtgccctaatggga

SEQ ID NO: 5390647 - DNA, 25 bp, Homo sapien
cacattcggcgttggaggccctgtt

SEQ ID NO: 5390648 - DNA, 25 bp, Homo sapien
gggtggcgagcatcttgcaaacccc

SEQ ID NO: 5390649 - DNA, 25 bp, Homo sapien
gtcataggtgccgttgatcctcctc

SEQ ID NO: 5390650 - DNA, 25 bp, Homo sapien
gaggttgtaggcgaggacagtggtg

SEQ ID NO: 5390651 - DNA, 25 bp, Homo sapien
ccaaaaaagtcataggtgccgttga

SEQ ID NO: 5390652 - DNA, 25 bp, Homo sapien
cagtggtgtagtgattgaacccaaa

SEQ ID NO: 5390653 - DNA, 25 bp, Homo sapien
tcagggagagccatgctttgagaag

SEQ ID NO: 5390654 - DNA, 25 bp, Homo sapien
ctccgaaccccaggcacttggcagt

SEQ ID NO: 5390655 - DNA, 25 bp, Homo sapien
gctttgagaagagaacgtcataggg

SEQ ID NO: 5390656 - DNA, 25 bp, Homo sapien
gctggggcgggggagctctccgaac

SEQ ID NO: 5390657 - DNA, 25 bp, Homo sapien
ctgcagccaagctcctgtcacggat

SEQ ID NO: 5390658 - DNA, 25 bp, Homo sapien
taatctccattcttgaaaataggat

SEQ ID NO: 5390659 - DNA, 25 bp, Homo sapien
ccattcttgaaaataggatgtgcaa

SEQ ID NO: 5390660 - DNA, 25 bp, Homo sapien
tcctgtcacggatccgcgtcttcat

SEQ ID NO: 5390661 - DNA, 25 bp, Homo sapien
ctaggccatccttatcatgtgcggg

SEQ ID NO: 5390662 - DNA, 25 bp, Homo sapien
gctcaacaaatgcttcctggctgcc

SEQ ID NO: 5390663 - DNA, 25 bp, Homo sapien
tacgtggcacccaaacactatgatg

SEQ ID NO: 5390664 - DNA, 25 bp, Homo sapien
tattttctctaatgaggcctaggcc

SEQ ID NO: 5390665 - DNA, 25 bp, Homo sapien
gagcctttattagattgtggccaac

SEQ ID NO: 5390666 - DNA, 25 bp, Homo sapien
tgactggcgcggtacacatcgttgt

SEQ ID NO: 5390667 - DNA, 25 bp, Homo sapien
tcgttgtacagatgccaggcctcag

SEQ ID NO: 5390668 - DNA, 25 bp, Homo sapien
tgatggaaatcacgccaccttgact

SEQ ID NO: 5390669 - DNA, 25 bp, Homo sapien
catcttggagcgtctgtggtaggtc

SEQ ID NO: 5390670 - DNA, 25 bp, Homo sapien
tgctgttccgtagccatagccctgg

SEQ ID NO: 5390671 - DNA, 25 bp, Homo sapien
taaaccgctgcacgatggtctcatt

SEQ ID NO: 5390672 - DNA, 25 bp, Homo sapien
aaagggctcattcagcgtgatccaa

SEQ ID NO: 5390673 - DNA, 25 bp, Homo sapien
gcatcaacgtctgctgcaaatcctg

SEQ ID NO: 5390674 - DNA, 25 bp, Homo sapien
tgggaagaagccagatcagctgttg

SEQ ID NO: 5390675 - DNA, 25 bp, Homo sapien
agtcatgctttccatgggaagccct

SEQ ID NO: 5390676 - DNA, 25 bp, Homo sapien
gaagccctaggttagatgtgccagc

SEQ ID NO: 5390677 - DNA, 25 bp, Homo sapien
catcagggaggatgcgagaccagga

SEQ ID NO: 5390678 - DNA, 25 bp, Homo sapien
tgatgtacctggtggttccatcagg

SEQ ID NO: 5390679 - DNA, 25 bp, Homo sapien
agttcaggcccgcttcattgatgta

SEQ ID NO: 5390680 - DNA, 25 bp, Homo sapien
gatgagcctcacgtagtagttcagg

SEQ ID NO: 5390681 - DNA, 25 bp, Homo sapien
tggcatcgttctcaaccctcagtgg

SEQ ID NO: 5390682 - DNA, 25 bp, Homo sapien
ggtgtgtgagaaaacgtgtcccaaa

SEQ ID NO: 5390683 - DNA, 25 bp, Homo sapien
cagatcctcagcaatcttgtgataa

SEQ ID NO: 5390684 - DNA, 25 bp, Homo sapien
ctgtcacaggccacgtctccaatgg

SEQ ID NO: 5390685 - DNA, 25 bp, Homo sapien
taatgacctctgtgtagtacctggc

SEQ ID NO: 5390686 - DNA, 25 bp, Homo sapien
gaaaccgtccgtacagaaactcatc

SEQ ID NO: 5390687 - DNA, 25 bp, Homo sapien
caaagttgtccatcagagaccaggc

SEQ ID NO: 5390688 - DNA, 25 bp, Homo sapien
ggcgacataccctcgaaggtctata

SEQ ID NO: 5390689 - DNA, 25 bp, Homo sapien
gaactgcagcattcggtcagcggct

SEQ ID NO: 5390690 - DNA, 25 bp, Homo sapien
tgtcaaacaagtcaatcaaggcagg

SEQ ID NO: 5390691 - DNA, 25 bp, Homo sapien
tccgtgttcggattggtcagcccca

SEQ ID NO: 5390692 - DNA, 25 bp, Homo sapien
gaaattcccctgagccataacctag

SEQ ID NO: 5390693 - DNA, 25 bp, Homo sapien
cacaggcgatgtctccagtggcatt

SEQ ID NO: 5390694 - DNA, 25 bp, Homo sapien
caaacgactttagccttggagggca

SEQ ID NO: 5390695 - DNA, 25 bp, Homo sapien
tattcagatcggcatccagctggtg

SEQ ID NO: 5390696 - DNA, 25 bp, Homo sapien
tctgataagcggaagaggacacgcc

SEQ ID NO: 5390697 - DNA, 25 bp, Homo sapien
ggaaaagtgaaggctctgactttgg

SEQ ID NO: 5390698 - DNA, 25 bp, Homo sapien
gatggaaaagtgaaggctctgactt

SEQ ID NO: 5390699 - DNA, 25 bp, Homo sapien
taggtggtagcagtctttttgcccc

SEQ ID NO: 5390700 - DNA, 25 bp, Homo sapien
gaggtttactgtattaggtggtagc

SEQ ID NO: 5390701 - DNA, 25 bp, Homo sapien
aagttgacgtggtgcaggccaaacc

SEQ ID NO: 5390702 - DNA, 25 bp, Homo sapien
tgtaggaacgaacatccacagagtc

SEQ ID NO: 5390703 - DNA, 25 bp, Homo sapien
ccatcaatgagggaacgagcaatgt

SEQ ID NO: 5390704 - DNA, 25 bp, Homo sapien
ggcagatttcctgggagtccttgac

SEQ ID NO: 5390705 - DNA, 25 bp, Homo sapien
agtcaactgagataagttattacct

SEQ ID NO: 5390706 - DNA, 25 bp, Homo sapien
agataagttattacctcggaccagc

SEQ ID NO: 5390707 - DNA, 25 bp, Homo sapien
actgagataagttattacctcggac

SEQ ID NO: 5390708 - DNA, 25 bp, Homo sapien
gagaagggtattagaagctgtttga

SEQ ID NO: 5390709 - DNA, 25 bp, Homo sapien
catggttcacgtgttgggagaagcc

SEQ ID NO: 5390710 - DNA, 25 bp, Homo sapien
cctcagggtggctgggtagtctcca

SEQ ID NO: 5390711 - DNA, 25 bp, Homo sapien
cagcatgaagtgcaagaagcgctca

SEQ ID NO: 5390712 - DNA, 25 bp, Homo sapien
gaggtgtaatgcgacagacccagaa

SEQ ID NO: 5390713 - DNA, 25 bp, Homo sapien
taccttgtggtaactgtcgctggcc

SEQ ID NO: 5390714 - DNA, 25 bp, Homo sapien
gatggagaacttgtacacctgagcc

SEQ ID NO: 5390715 - DNA, 25 bp, Homo sapien
cgttaaaggctcctgtggaggcacc

SEQ ID NO: 5390716 - DNA, 25 bp, Homo sapien
agcagaaggccgcatagtccaggaa

SEQ ID NO: 5390717 - DNA, 25 bp, Homo sapien
gggccaggctgccagtcagagaaca

SEQ ID NO: 5390718 - DNA, 25 bp, Homo sapien
ctgaagggccaggctgccagtcaga

SEQ ID NO: 5390719 - DNA, 25 bp, Homo sapien
gccaggctgccagtcagagaacaag

SEQ ID NO: 5390720 - DNA, 25 bp, Homo sapien
caggctgccagtcagagaacaagac

SEQ ID NO: 5390721 - DNA, 25 bp, Homo sapien
ggaacaatagaaggaggatatggct

SEQ ID NO: 5390722 - DNA, 25 bp, Homo sapien
gctgctgcgggtctgttgatctgaa

SEQ ID NO: 5390723 - DNA, 25 bp, Homo sapien
tggaacaatagaaggaggatatggc

SEQ ID NO: 5390724 - DNA, 25 bp, Homo sapien
ctgctgcgggtctgttgatctgaac

SEQ ID NO: 5390725 - DNA, 25 bp, Homo sapien
cccaatggtgagcacttggtcttta

SEQ ID NO: 5390726 - DNA, 25 bp, Homo sapien
taatatcaaacccaatggtgagcac

SEQ ID NO: 5390727 - DNA, 25 bp, Homo sapien
tcattaatatcaaacccaatggtga

SEQ ID NO: 5390728 - DNA, 25 bp, Homo sapien
tcaaacccaatggtgagcacttggt

SEQ ID NO: 5390729 - DNA, 25 bp, Homo sapien
agtgcaccagatgtcactcaaaacc

SEQ ID NO: 5390730 - DNA, 25 bp, Homo sapien
cagtgcaccagatgtcactcaaaac

SEQ ID NO: 5390731 - DNA, 25 bp, Homo sapien
acctcttcagcaatggcccactcac

SEQ ID NO: 5390732 - DNA, 25 bp, Homo sapien
aaaacctcttcagcaatggcccact

SEQ ID NO: 5390733 - DNA, 25 bp, Homo sapien
ggctgaagagcagactggctgggtt

SEQ ID NO: 5390734 - DNA, 25 bp, Homo sapien
agagcagactggctgggttcttcat

SEQ ID NO: 5390735 - DNA, 25 bp, Homo sapien
aaaaggctgaagagcagactggctg

SEQ ID NO: 5390736 - DNA, 25 bp, Homo sapien
ttcaaaaaggctgaagagcagactg

SEQ ID NO: 5390737 - DNA, 25 bp, Homo sapien
tctgggagttttaggttgaagatga

SEQ ID NO: 5390738 - DNA, 25 bp, Homo sapien
agtctgggagttttaggttgaagat

SEQ ID NO: 5390739 - DNA, 25 bp, Homo sapien
gcagtctgggagttttaggttgaag

SEQ ID NO: 5390740 - DNA, 25 bp, Homo sapien
tgggagttttaggttgaagatgaaa

SEQ ID NO: 5390741 - DNA, 25 bp, Homo sapien
cagctttagtcatcacaggcacaag

SEQ ID NO: 5390742 - DNA, 25 bp, Homo sapien
cctccgcacaacagagatggtttta

SEQ ID NO: 5390743 - DNA, 25 bp, Homo sapien
cattagcctagcaacaagctctggt

SEQ ID NO: 5390744 - DNA, 25 bp, Homo sapien
tctgctgcctgtcagaggcacgcca

SEQ ID NO: 5390745 - DNA, 25 bp, Homo sapien
tactcagcttctgccgcagacttgc

SEQ ID NO: 5390746 - DNA, 25 bp, Homo sapien
cataagacaaatcaagagagaggaa

SEQ ID NO: 5390747 - DNA, 25 bp, Homo sapien
ttttggcattcataagacaaatcaa

SEQ ID NO: 5390748 - DNA, 25 bp, Homo sapien
tttactcagcttctgccgcagactt

SEQ ID NO: 5390749 - DNA, 25 bp, Homo sapien
tcagatgttacaggtatatttttgg

SEQ ID NO: 5390750 - DNA, 25 bp, Homo sapien
agatgttacaggtatatttttgggc

SEQ ID NO: 5390751 - DNA, 25 bp, Homo sapien
tgttacaggtatatttttgggctgc

SEQ ID NO: 5390752 - DNA, 25 bp, Homo sapien
gatgttacaggtatatttttgggct

SEQ ID NO: 5390753 - DNA, 25 bp, Homo sapien
atatgggtggttctagcaggagctc

SEQ ID NO: 5390754 - DNA, 25 bp, Homo sapien
aagcgcagatatgggtggttctagc

SEQ ID NO: 5390755 - DNA, 25 bp, Homo sapien
caggagctccgggatatcttcagct

SEQ ID NO: 5390756 - DNA, 25 bp, Homo sapien
tcttcagctcgcaggacaacagaga

SEQ ID NO: 5390757 - DNA, 25 bp, Homo sapien
catagtcggcgaagaggtcagcaaa

SEQ ID NO: 5390758 - DNA, 25 bp, Homo sapien
tgaagccgtgcagtcttgagggcct

SEQ ID NO: 5390759 - DNA, 25 bp, Homo sapien
cagcaaaggcttcggttctccggag

SEQ ID NO: 5390760 - DNA, 25 bp, Homo sapien
tgtgacgctcttgattcctggtggg

SEQ ID NO: 5390761 - DNA, 25 bp, Homo sapien
aataccttataatgggtgatctgac

SEQ ID NO: 5390762 - DNA, 25 bp, Homo sapien
tgtgcccatgacagaaataccttat

SEQ ID NO: 5390763 - DNA, 25 bp, Homo sapien
taatgggtgatctgactggcatgga

SEQ ID NO: 5390764 - DNA, 25 bp, Homo sapien
gacagaaataccttataatgggtga

SEQ ID NO: 5390765 - DNA, 25 bp, Homo sapien
tcattggttagaggaccagcggtgg

SEQ ID NO: 5390766 - DNA, 25 bp, Homo sapien
gaccactcaggttgtgcagcaagtc

SEQ ID NO: 5390767 - DNA, 25 bp, Homo sapien
gaggaccagcggtggaaatgaaatt

SEQ ID NO: 5390768 - DNA, 25 bp, Homo sapien
tgtcccctgctacaaagttagaact

SEQ ID NO: 5390769 - DNA, 25 bp, Homo sapien
caataaagactacatgccaagacag

SEQ ID NO: 5390770 - DNA, 25 bp, Homo sapien
ttagcagggcaataaagactacatg

SEQ ID NO: 5390771 - DNA, 25 bp, Homo sapien
aagactacatgccaagacagctcca

SEQ ID NO: 5390772 - DNA, 25 bp, Homo sapien
cccagcatgaaaaacttagcagggc

SEQ ID NO: 5390773 - DNA, 25 bp, Homo sapien
attgcactggaaagctcagacatca

SEQ ID NO: 5390774 - DNA, 25 bp, Homo sapien
tctgtcttgctttctactaatagat

SEQ ID NO: 5390775 - DNA, 25 bp, Homo sapien
tacttaattgtacatacttgtggag

SEQ ID NO: 5390776 - DNA, 25 bp, Homo sapien
tgtggagtacattttgacaaggttt

SEQ ID NO: 5390777 - DNA, 25 bp, Homo sapien
ggtattagactgtcccacgtgggcc

SEQ ID NO: 5390778 - DNA, 25 bp, Homo sapien
tgttaaaagctgcaacacaggaact

SEQ ID NO: 5390779 - DNA, 25 bp, Homo sapien
gggccttagcctcagacagttattt

SEQ ID NO: 5390780 - DNA, 25 bp, Homo sapien
caggaactgttagtatcataaacgg

SEQ ID NO: 5390781 - DNA, 25 bp, Homo sapien
caacttcactgggacaggaaacaca

SEQ ID NO: 5390782 - DNA, 25 bp, Homo sapien
gttatttgctcaataggacagcaca

SEQ ID NO: 5390783 - DNA, 25 bp, Homo sapien
gaagcctgtgttggtatgaaacctg

SEQ ID NO: 5390784 - DNA, 25 bp, Homo sapien
gaaacacttctgtccctagcagagc

SEQ ID NO: 5390785 - DNA, 25 bp, Homo sapien
aatcttcgagcaagtagttagggtt

SEQ ID NO: 5390786 - DNA, 25 bp, Homo sapien
caatcttcgagcaagtagttagggt

SEQ ID NO: 5390787 - DNA, 25 bp, Homo sapien
tcaatcttcgagcaagtagttaggg

SEQ ID NO: 5390788 - DNA, 25 bp, Homo sapien
tcttcgagcaagtagttagggttaa

SEQ ID NO: 5390789 - DNA, 25 bp, Homo sapien
gcctgggtgagctcaattagaacat

SEQ ID NO: 5390790 - DNA, 25 bp, Homo sapien
cctgggtgagctcaattagaacatg

SEQ ID NO: 5390791 - DNA, 25 bp, Homo sapien
caagtagggatcttcttcatagctc

SEQ ID NO: 5390792 - DNA, 25 bp, Homo sapien
ttgacccttcttccgagtgtttgct

SEQ ID NO: 5390793 - DNA, 25 bp, Homo sapien
gtccagatatacaagacttgaccct

SEQ ID NO: 5390794 - DNA, 25 bp, Homo sapien
tatacaagacttgacccttcttccg

SEQ ID NO: 5390795 - DNA, 25 bp, Homo sapien
tattataccaatgtccagatataca

SEQ ID NO: 5390796 - DNA, 25 bp, Homo sapien
ccagttaacaagctcgctcctcttt

SEQ ID NO: 5390797 - DNA, 25 bp, Homo sapien
tcctctttaatgctgactcgtcctc

SEQ ID NO: 5390798 - DNA, 25 bp, Homo sapien
tcttcagagtctatctctgattcga

SEQ ID NO: 5390799 - DNA, 25 bp, Homo sapien
tgtgagtcgatgaataactttctct

SEQ ID NO: 5390800 - DNA, 25 bp, Homo sapien
ttatcctagcaactcgtactgtcag

SEQ ID NO: 5390801 - DNA, 25 bp, Homo sapien
caagccgtccgaaagtacatctggt

SEQ ID NO: 5390802 - DNA, 25 bp, Homo sapien
tacatctggtgacgtaaggtccgca

SEQ ID NO: 5390803 - DNA, 25 bp, Homo sapien
ggtccgcaatgttctagcataagcc

SEQ ID NO: 5390804 - DNA, 25 bp, Homo sapien
gtttggcaatcacaagtggcctatg

SEQ ID NO: 5390805 - DNA, 25 bp, Homo sapien
cagagcttacagaagtgaccgagca

SEQ ID NO: 5390806 - DNA, 25 bp, Homo sapien
tccgacagaacaacacgaagtttgg

SEQ ID NO: 5390807 - DNA, 25 bp, Homo sapien
tgaccgagcatgtaagcagtaccag

SEQ ID NO: 5390808 - DNA, 25 bp, Homo sapien
gattcggcagtactcagagaagccc

SEQ ID NO: 5390809 - DNA, 25 bp, Homo sapien
cattgatcccgttcacaggagcagg

SEQ ID NO: 5390810 - DNA, 25 bp, Homo sapien
cacaataaggttagagattcggcag

SEQ ID NO: 5390811 - DNA, 25 bp, Homo sapien
cctttctgaggtgaagcacaataag

SEQ ID NO: 5390812 - DNA, 25 bp, Homo sapien
tttgtgcccttaacatccccttgtc

SEQ ID NO: 5390813 - DNA, 25 bp, Homo sapien
ttaacatccccttgtcaagcattta

SEQ ID NO: 5390814 - DNA, 25 bp, Homo sapien
gcatttacaaatacactacttacat

SEQ ID NO: 5390815 - DNA, 25 bp, Homo sapien
aagcatttacaaatacactacttac

SEQ ID NO: 5390816 - DNA, 25 bp, Homo sapien
tggtccctaactccaaaacagtcac

SEQ ID NO: 5390817 - DNA, 25 bp, Homo sapien
cacatgacatctcagaaaatgtttt

SEQ ID NO: 5390818 - DNA, 25 bp, Homo sapien
acagtcacatgaacaagtatctcac

SEQ ID NO: 5390819 - DNA, 25 bp, Homo sapien
tctcagaaaatgttttggtccctaa

SEQ ID NO: 5390820 - DNA, 25 bp, Homo sapien
tgatttattcagtaaccggaaagct

SEQ ID NO: 5390821 - DNA, 25 bp, Homo sapien
ttccacacggatgattgatttattc

SEQ ID NO: 5390822 - DNA, 25 bp, Homo sapien
tcctcttgatctagattgacatcag

SEQ ID NO: 5390823 - DNA, 25 bp, Homo sapien
ctagattgacatcaggtgtttccac

SEQ ID NO: 5390824 - DNA, 25 bp, Homo sapien
cagtgcatccgagccatagcttcag

SEQ ID NO: 5390825 - DNA, 25 bp, Homo sapien
tgtcgcactgtaatcctccatgaag

SEQ ID NO: 5390826 - DNA, 25 bp, Homo sapien
tagcttcagagagacgaatcatgct

SEQ ID NO: 5390827 - DNA, 25 bp, Homo sapien
gaatcatgctctcaagctgtcgcac

SEQ ID NO: 5390828 - DNA, 25 bp, Homo sapien
cagatcatcactcaagttagagaaa

SEQ ID NO: 5390829 - DNA, 25 bp, Homo sapien
gatcatcactcaagttagagaaaca

SEQ ID NO: 5390830 - DNA, 25 bp, Homo sapien
tcatcactcaagttagagaaacatt

SEQ ID NO: 5390831 - DNA, 25 bp, Homo sapien
catcactcaagttagagaaacattt

SEQ ID NO: 5390832 - DNA, 25 bp, Homo sapien
tttaggaactaaggtagatgacagg

SEQ ID NO: 5390833 - DNA, 25 bp, Homo sapien
caactattgatttaggcgcataaac

SEQ ID NO: 5390834 - DNA, 25 bp, Homo sapien
cataatggcctagatgaatccaatg

SEQ ID NO: 5390835 - DNA, 25 bp, Homo sapien
ctgggtccagaacagagttagtcca

SEQ ID NO: 5390836 - DNA, 25 bp, Homo sapien
gaatgcaaatctactatgcgcctgg

SEQ ID NO: 5390837 - DNA, 25 bp, Homo sapien
ttaaactgtcttgcaaagagaagat

SEQ ID NO: 5390838 - DNA, 25 bp, Homo sapien
tcttctgatatcatcgagggaatag

SEQ ID NO: 5390839 - DNA, 25 bp, Homo sapien
tagacacgatcaattgattcctcaa

SEQ ID NO: 5390840 - DNA, 25 bp, Homo sapien
caatagtagggtaaagtgcagtggc

SEQ ID NO: 5390841 - DNA, 25 bp, Homo sapien
atacatgggcaaattgaggcctagg

SEQ ID NO: 5390842 - DNA, 25 bp, Homo sapien
atgagacactgttctcttaggcagg

SEQ ID NO: 5390843 - DNA, 25 bp, Homo sapien
gaactaacatttatagggccctcag

SEQ ID NO: 5390844 - DNA, 25 bp, Homo sapien
caaaatggacgtccgggcgttcaga

SEQ ID NO: 5390845 - DNA, 25 bp, Homo sapien
agtgtccactgattgggtttgctgc

SEQ ID NO: 5390846 - DNA, 25 bp, Homo sapien
aatcgggacatgatgggagctgaca

SEQ ID NO: 5390847 - DNA, 25 bp, Homo sapien
gataaagaagagatcgaatcgggac

SEQ ID NO: 5390848 - DNA, 25 bp, Homo sapien
agcttcatgaatagcaacttgatcc

SEQ ID NO: 5390849 - DNA, 25 bp, Homo sapien
gaatagcaacttgatcccgcacgtc

SEQ ID NO: 5390850 - DNA, 25 bp, Homo sapien
tggatatggtctgctgttccatagc

SEQ ID NO: 5390851 - DNA, 25 bp, Homo sapien
tgctttagtgatggatatggtctgc

SEQ ID NO: 5390852 - DNA, 25 bp, Homo sapien
agctctggggctgaactcctccacg

SEQ ID NO: 5390853 - DNA, 25 bp, Homo sapien
cagcagcactggacgctttaccact

SEQ ID NO: 5390854 - DNA, 25 bp, Homo sapien
gacgctttaccactggtgtagacag

SEQ ID NO: 5390855 - DNA, 25 bp, Homo sapien
gacaaactcatgagattcttcatct

SEQ ID NO: 5390856 - DNA, 25 bp, Homo sapien
gttatcacataaagactcattaata

SEQ ID NO: 5390857 - DNA, 25 bp, Homo sapien
aggttatcacataaagactcattaa

SEQ ID NO: 5390858 - DNA, 25 bp, Homo sapien
tatcacataaagactcattaatatg

SEQ ID NO: 5390859 - DNA, 25 bp, Homo sapien
taaagactcattaatatgtgattat

SEQ ID NO: 5390860 - DNA, 25 bp, Homo sapien
taatattcatggctcggtgtcacct

SEQ ID NO: 5390861 - DNA, 25 bp, Homo sapien
ggtgctgctagagtaagacataaca

SEQ ID NO: 5390862 - DNA, 25 bp, Homo sapien
gaagtacacatgttttgcaggcaac

SEQ ID NO: 5390863 - DNA, 25 bp, Homo sapien
catatacagcactgagaacatggca

SEQ ID NO: 5390864 - DNA, 25 bp, Homo sapien
agcatcagcaggacaccccgtttta

SEQ ID NO: 5390865 - DNA, 25 bp, Homo sapien
gctcttagctgtacttgggtcacca

SEQ ID NO: 5390866 - DNA, 25 bp, Homo sapien
tatgtcccctcgaagagaggtccct

SEQ ID NO: 5390867 - DNA, 25 bp, Homo sapien
tggaacgccaccaaagagcatcagc

SEQ ID NO: 5390868 - DNA, 25 bp, Homo sapien
ttcacagtcatttggttcttaatgc

SEQ ID NO: 5390869 - DNA, 25 bp, Homo sapien
tatagtagggaacaggctggtacaa

SEQ ID NO: 5390870 - DNA, 25 bp, Homo sapien
gtacaaagattgtggtatagatttt

SEQ ID NO: 5390871 - DNA, 25 bp, Homo sapien
ttcttaatgctctcagctgtctgtt

SEQ ID NO: 5390872 - DNA, 25 bp, Homo sapien
cgggaattagtttctgcacgtgctc

SEQ ID NO: 5390873 - DNA, 25 bp, Homo sapien
ccttgggttggttggcgcaacacag

SEQ ID NO: 5390874 - DNA, 25 bp, Homo sapien
tcaacaccactgacacgggaattag

SEQ ID NO: 5390875 - DNA, 25 bp, Homo sapien
cgcaacacagcaggcaagaaagacc

SEQ ID NO: 5390876 - DNA, 25 bp, Homo sapien
tgtccctgtaaagtcacacttgtca

SEQ ID NO: 5390877 - DNA, 25 bp, Homo sapien
ggagacgtcaggcacaacaatcagt

SEQ ID NO: 5390878 - DNA, 25 bp, Homo sapien
gggatactccctcgaggaagctcag

SEQ ID NO: 5390879 - DNA, 25 bp, Homo sapien
ttgtcaccagcttgagctgattcca

SEQ ID NO: 5390880 - DNA, 25 bp, Homo sapien
catcttgtcagtcttaaggaacttc

SEQ ID NO: 5390881 - DNA, 25 bp, Homo sapien
gctttcctttctatgcagcaaatgg

SEQ ID NO: 5390882 - DNA, 25 bp, Homo sapien
taagatttagggatccaagtacctc

SEQ ID NO: 5390883 - DNA, 25 bp, Homo sapien
attgcttccaagctagcctgtccta

SEQ ID NO: 5390884 - DNA, 25 bp, Homo sapien
tctggatgaggtgagctctcgaatc

SEQ ID NO: 5390885 - DNA, 25 bp, Homo sapien
gaaaagttccgctcacaagctctgg

SEQ ID NO: 5390886 - DNA, 25 bp, Homo sapien
cctgttggcacaaactggatttcgg

SEQ ID NO: 5390887 - DNA, 25 bp, Homo sapien
ccactgatgcgagtgagcaaaccaa

SEQ ID NO: 5390888 - DNA, 25 bp, Homo sapien
gtctggtaggcaggtcttggaatgc

SEQ ID NO: 5390889 - DNA, 25 bp, Homo sapien
tacggtctttgacgaatgttttcaa

SEQ ID NO: 5390890 - DNA, 25 bp, Homo sapien
aaaaatccttggcaagagggatctc

SEQ ID NO: 5390891 - DNA, 25 bp, Homo sapien
tcaaggcccgacacaggtaagggta

SEQ ID NO: 5390892 - DNA, 25 bp, Homo sapien
gaaagttgctggttaaattgttcca

SEQ ID NO: 5390893 - DNA, 25 bp, Homo sapien
tgtgtttctctcaggacgaatcagt

SEQ ID NO: 5390894 - DNA, 25 bp, Homo sapien
aattgttccaggtccacaaaactca

SEQ ID NO: 5390895 - DNA, 25 bp, Homo sapien
caaaactcacaaccaatgtgtttct

SEQ ID NO: 5390896 - DNA, 25 bp, Homo sapien
cgcaggctccggaggcgggcgaggc

SEQ ID NO: 5390897 - DNA, 25 bp, Homo sapien
ccgcaggctccggaggcgggcgagg

SEQ ID NO: 5390898 - DNA, 25 bp, Homo sapien
acctcgtcgcggacctccaggtgct

SEQ ID NO: 5390899 - DNA, 25 bp, Homo sapien
aacagtttctggcacttctcggcca

SEQ ID NO: 5390900 - DNA, 25 bp, Homo sapien
ttctcggccacctcgtcgcggacct

SEQ ID NO: 5390901 - DNA, 25 bp, Homo sapien
agtttctggcacttctcggccacct

SEQ ID NO: 5390902 - DNA, 25 bp, Homo sapien
gaaccaatcgtgacacaggagctgg

SEQ ID NO: 5390903 - DNA, 25 bp, Homo sapien
gagctggagatttcgcgccaaacct

SEQ ID NO: 5390904 - DNA, 25 bp, Homo sapien
ggaaagggatttcgcgccaaatgca

SEQ ID NO: 5390905 - DNA, 25 bp, Homo sapien
cttagtgccgaggattcgcctgcgc

SEQ ID NO: 5390906 - DNA, 25 bp, Homo sapien
ccagtgacagtccagatgtgggagt

SEQ ID NO: 5390907 - DNA, 25 bp, Homo sapien
tctcccaaattggacccagtgacag

SEQ ID NO: 5390908 - DNA, 25 bp, Homo sapien
aatgttagctctcccaaattggacc

SEQ ID NO: 5390909 - DNA, 25 bp, Homo sapien
gatgtgggagtctgttacaaaagaa

SEQ ID NO: 5390910 - DNA, 25 bp, Homo sapien
tgttgtttcaattcatgatcaccag

SEQ ID NO: 5390911 - DNA, 25 bp, Homo sapien
tcattgccagtttgtcacctcactg

SEQ ID NO: 5390912 - DNA, 25 bp, Homo sapien
caccctgtggtgaacaataagcata

SEQ ID NO: 5390913 - DNA, 25 bp, Homo sapien
gagaggcattactgggttaaaggat

SEQ ID NO: 5390914 - DNA, 25 bp, Homo sapien
ccggataaggaaagcttgggtcctg

SEQ ID NO: 5390915 - DNA, 25 bp, Homo sapien
gaaagcttgggtcctgtaagcttca

SEQ ID NO: 5390916 - DNA, 25 bp, Homo sapien
gctgcaccggataaggaaagcttgg

SEQ ID NO: 5390917 - DNA, 25 bp, Homo sapien
ctacaaggctgcaccggataaggaa

SEQ ID NO: 5390918 - DNA, 25 bp, Homo sapien
agctccaagtacaggctgtgctgag

SEQ ID NO: 5390919 - DNA, 25 bp, Homo sapien
gacaaagtaggtggacatgccttca

SEQ ID NO: 5390920 - DNA, 25 bp, Homo sapien
tttccacttctgatgggaggagccc

SEQ ID NO: 5390921 - DNA, 25 bp, Homo sapien
caagggatgtcaggtatgagtcata

SEQ ID NO: 5390922 - DNA, 25 bp, Homo sapien
gatgctagtgtctatgcagccaggc

SEQ ID NO: 5390923 - DNA, 25 bp, Homo sapien
gggagccattcacgtcaatgatata

SEQ ID NO: 5390924 - DNA, 25 bp, Homo sapien
cttatacagggataaaatgcaccat

SEQ ID NO: 5390925 - DNA, 25 bp, Homo sapien
tatacagggataaaatgcaccatgg

SEQ ID NO: 5390926 - DNA, 25 bp, Homo sapien
caccatgggagccattcacgtcaat

SEQ ID NO: 5390927 - DNA, 25 bp, Homo sapien
gtggggttagatgtggatccagtca

SEQ ID NO: 5390928 - DNA, 25 bp, Homo sapien
tggggttagatgtggatccagtcat

SEQ ID NO: 5390929 - DNA, 25 bp, Homo sapien
atgggtggtgtccagaatggcaggc

SEQ ID NO: 5390930 - DNA, 25 bp, Homo sapien
tgggtggtgtccagaatggcaggca

SEQ ID NO: 5390931 - DNA, 25 bp, Homo sapien
gggtggtgtccagaatggcaggcac

SEQ ID NO: 5390932 - DNA, 25 bp, Homo sapien
tgatgggtggtgtccagaatggcag

SEQ ID NO: 5390933 - DNA, 25 bp, Homo sapien
caggtgtataccaggaagggaccag

SEQ ID NO: 5390934 - DNA, 25 bp, Homo sapien
tgtataccaggaagggaccaggaca

SEQ ID NO: 5390935 - DNA, 25 bp, Homo sapien
gtataccaggaagggaccaggacat

SEQ ID NO: 5390936 - DNA, 25 bp, Homo sapien
ggtgtataccaggaagggaccagga

SEQ ID NO: 5390937 - DNA, 25 bp, Homo sapien
agtgaatgcagtggccctcacgctg

SEQ ID NO: 5390938 - DNA, 25 bp, Homo sapien
atgcagtggccctcacgctgaagct

SEQ ID NO: 5390939 - DNA, 25 bp, Homo sapien
gtccgagtgaatgcagtggccctca

SEQ ID NO: 5390940 - DNA, 25 bp, Homo sapien
agatcttggggtccgagtgaatgca

SEQ ID NO: 5390941 - DNA, 25 bp, Homo sapien
ctcccacggcgctaaaaccacgtgg

SEQ ID NO: 5390942 - DNA, 25 bp, Homo sapien
tgatagtaagatggtcacgtttttc

SEQ ID NO: 5390943 - DNA, 25 bp, Homo sapien
cgctaaaaccacgtggttttgatag

SEQ ID NO: 5390944 - DNA, 25 bp, Homo sapien
gttttgatagtaagatggtcacgtt

SEQ ID NO: 5390945 - DNA, 25 bp, Homo sapien
gacaggtgagtatttggaagatcct

SEQ ID NO: 5390946 - DNA, 25 bp, Homo sapien
gaagatcctgagcagttttaggaga

SEQ ID NO: 5390947 - DNA, 25 bp, Homo sapien
ctgcaatatagtgaatggacaggtg

SEQ ID NO: 5390948 - DNA, 25 bp, Homo sapien
caatatagtgaatggacaggtgagt

SEQ ID NO: 5390949 - DNA, 25 bp, Homo sapien
atctaaaggccaggcgaagtgattc

SEQ ID NO: 5390950 - DNA, 25 bp, Homo sapien
tcggcaaatataagaatgagacagg

SEQ ID NO: 5390951 - DNA, 25 bp, Homo sapien
agaactaatctaatgcaatcggcaa

SEQ ID NO: 5390952 - DNA, 25 bp, Homo sapien
caatacaagcatgcctccatcactg

SEQ ID NO: 5390953 - DNA, 25 bp, Homo sapien
acatgattagcagatccttggcaag

SEQ ID NO: 5390954 - DNA, 25 bp, Homo sapien
tatcttcagatctgcaaagcacaag

SEQ ID NO: 5390955 - DNA, 25 bp, Homo sapien
cttcatcacatgattagcagatcct

SEQ ID NO: 5390956 - DNA, 25 bp, Homo sapien
gaaatatcttcagatctgcaaagca

SEQ ID NO: 5390957 - DNA, 25 bp, Homo sapien
taaggtattctggtaggatatgaaa

SEQ ID NO: 5390958 - DNA, 25 bp, Homo sapien
cataatgggcagatgttcgtggtcc

SEQ ID NO: 5390959 - DNA, 25 bp, Homo sapien
taagaacagctctagggccaatatt

SEQ ID NO: 5390960 - DNA, 25 bp, Homo sapien
tattgtactattttagggtctagca

SEQ ID NO: 5390961 - DNA, 25 bp, Homo sapien
taaagtacagcctgtgcactagcag

SEQ ID NO: 5390962 - DNA, 25 bp, Homo sapien
aacgaacctatactgaattactcca

SEQ ID NO: 5390963 - DNA, 25 bp, Homo sapien
taaccagtagtttagctttacataa

SEQ ID NO: 5390964 - DNA, 25 bp, Homo sapien
tatttcctactgatgcatgtctgaa

SEQ ID NO: 5390965 - DNA, 25 bp, Homo sapien
ggaacatggaggtctgacgaacatt

SEQ ID NO: 5390966 - DNA, 25 bp, Homo sapien
tcgtttgggatcacgagggaacatg

SEQ ID NO: 5390967 - DNA, 25 bp, Homo sapien
tgacgaacattatgcaatcccagaa

SEQ ID NO: 5390968 - DNA, 25 bp, Homo sapien
gaaacagcatagtaactcgttccaa

SEQ ID NO: 5390969 - DNA, 25 bp, Homo sapien
tatagacatttaacatggtggaccc

SEQ ID NO: 5390970 - DNA, 25 bp, Homo sapien
gattatacagtccaggcaatgagga

SEQ ID NO: 5390971 - DNA, 25 bp, Homo sapien
tggtggaccctacgataaaaagctc

SEQ ID NO: 5390972 - DNA, 25 bp, Homo sapien
gaaaatctctcagggtcttacttag

SEQ ID NO: 5390973 - DNA, 25 bp, Homo sapien
tctcgactttttaacaattgccatt

SEQ ID NO: 5390974 - DNA, 25 bp, Homo sapien
ctggttctcaatctgtgaggaatcg

SEQ ID NO: 5390975 - DNA, 25 bp, Homo sapien
tctcaatctgtgaggaatcgccata

SEQ ID NO: 5390976 - DNA, 25 bp, Homo sapien
tatatttgttggctcataaatgtct

SEQ ID NO: 5390977 - DNA, 25 bp, Homo sapien
gctaatgcgaatgaactcacagcag

SEQ ID NO: 5390978 - DNA, 25 bp, Homo sapien
aaacaggatactccacttacaagac

SEQ ID NO: 5390979 - DNA, 25 bp, Homo sapien
cacttatgtcgtaattcacttttaa

SEQ ID NO: 5390980 - DNA, 25 bp, Homo sapien
gaacttatgaacttatttgtaagca

SEQ ID NO: 5390981 - DNA, 25 bp, Homo sapien
ggctccaaagcggaaggaatcaatg

SEQ ID NO: 5390982 - DNA, 25 bp, Homo sapien
aaagcggaaggaatcaatgtaagcc

SEQ ID NO: 5390983 - DNA, 25 bp, Homo sapien
ctccaaagcggaaggaatcaatgta

SEQ ID NO: 5390984 - DNA, 25 bp, Homo sapien
ccaaagcggaaggaatcaatgtaag

SEQ ID NO: 5390985 - DNA, 25 bp, Homo sapien
caattccatgatgtaaagctctctc

SEQ ID NO: 5390986 - DNA, 25 bp, Homo sapien
catgaacatatcgtaagagttggac

SEQ ID NO: 5390987 - DNA, 25 bp, Homo sapien
aagctctctctgttagcagttgagg

SEQ ID NO: 5390988 - DNA, 25 bp, Homo sapien
catgtattctttgagctcctgacaa

SEQ ID NO: 5390989 - DNA, 25 bp, Homo sapien
ctactgagggctgaataactttttc

SEQ ID NO: 5390990 - DNA, 25 bp, Homo sapien
cagtcctcaagtgactaccatccta

SEQ ID NO: 5390991 - DNA, 25 bp, Homo sapien
tctctaaagtagaattaaactactg

SEQ ID NO: 5390992 - DNA, 25 bp, Homo sapien
tcctacaattaacaatgcaatcttg

SEQ ID NO: 5390993 - DNA, 25 bp, Homo sapien
tgaccagtggtgacagacatcaatg

SEQ ID NO: 5390994 - DNA, 25 bp, Homo sapien
taactcccaggatacaatgtgaatt

SEQ ID NO: 5390995 - DNA, 25 bp, Homo sapien
aatgtgaattcccagtttaaggtca

SEQ ID NO: 5390996 - DNA, 25 bp, Homo sapien
cctattatacaatctgacagtgaca

SEQ ID NO: 5390997 - DNA, 25 bp, Homo sapien
tgggtcaggcatggtatagaaaggt

SEQ ID NO: 5390998 - DNA, 25 bp, Homo sapien
gggtcaggcatggtatagaaaggtc

SEQ ID NO: 5390999 - DNA, 25 bp, Homo sapien
aaggtcttacagccaatggatattt

SEQ ID NO: 5391000 - DNA, 25 bp, Homo sapien
gaaaaacatggattatcttcccaag

SEQ ID NO: 5391001 - DNA, 25 bp, Homo sapien
tttgataaaacttgagatgaggatg

SEQ ID NO: 5391002 - DNA, 25 bp, Homo sapien
tcaaatgaatgctacaactgaaaga

SEQ ID NO: 5391003 - DNA, 25 bp, Homo sapien
tgaggatgttaatagctgacaaact

SEQ ID NO: 5391004 - DNA, 25 bp, Homo sapien
ccaaatgacccaacagcttttcatt

SEQ ID NO: 5391005 - DNA, 25 bp, Homo sapien
acccaacagcttttcatttggtgtg

SEQ ID NO: 5391006 - DNA, 25 bp, Homo sapien
tgacccaacagcttttcatttggtg

SEQ ID NO: 5391007 - DNA, 25 bp, Homo sapien
aatgacccaacagcttttcatttgg

SEQ ID NO: 5391008 - DNA, 25 bp, Homo sapien
aaaagttcgctatactaatatgggc

SEQ ID NO: 5391009 - DNA, 25 bp, Homo sapien
tataccttggtacagtgactcagtg

SEQ ID NO: 5391010 - DNA, 25 bp, Homo sapien
tgactcagtgcttagtagatgctgc

SEQ ID NO: 5391011 - DNA, 25 bp, Homo sapien
caaaatttggccagaacacgcagtt

SEQ ID NO: 5391012 - DNA, 25 bp, Homo sapien
taagcatagccaatgcttcacaata

SEQ ID NO: 5391013 - DNA, 25 bp, Homo sapien
gcttcacaatattctagtcttagag

SEQ ID NO: 5391014 - DNA, 25 bp, Homo sapien
tttgaatggctcacatgggaactgt

SEQ ID NO: 5391015 - DNA, 25 bp, Homo sapien
atttcgactccagcttccctaagca

SEQ ID NO: 5391016 - DNA, 25 bp, Homo sapien
aagtccatctaggtgcataaaatac

SEQ ID NO: 5391017 - DNA, 25 bp, Homo sapien
ccatctaggtgcataaaatactttt

SEQ ID NO: 5391018 - DNA, 25 bp, Homo sapien
aattaagtccatctaggtgcataaa

SEQ ID NO: 5391019 - DNA, 25 bp, Homo sapien
gtccatctaggtgcataaaatactt

SEQ ID NO: 5391020 - DNA, 25 bp, Homo sapien
taaaagccatttcaatgtccaaacc

SEQ ID NO: 5391021 - DNA, 25 bp, Homo sapien
tcttccataacttcgtggtaatggt

SEQ ID NO: 5391022 - DNA, 25 bp, Homo sapien
gaatatttgtaccatggtgtcagca

SEQ ID NO: 5391023 - DNA, 25 bp, Homo sapien
cagttagatgtctatgggtattaga

SEQ ID NO: 5391024 - DNA, 25 bp, Homo sapien
gcacatttgcttatatagctgtggg

SEQ ID NO: 5391025 - DNA, 25 bp, Homo sapien
gggactgagccaggtatgcattatt

SEQ ID NO: 5391026 - DNA, 25 bp, Homo sapien
ggactgagccaggtatgcattattt

SEQ ID NO: 5391027 - DNA, 25 bp, Homo sapien
aatgcacatttgcttatatagctgt

SEQ ID NO: 5391028 - DNA, 25 bp, Homo sapien
tcaaaatagtagtctcatggcaata

SEQ ID NO: 5391029 - DNA, 25 bp, Homo sapien
aatagtagtctcatggcaataaacc

SEQ ID NO: 5391030 - DNA, 25 bp, Homo sapien
tagtctcatggcaataaaccttaat

SEQ ID NO: 5391031 - DNA, 25 bp, Homo sapien
tatatgattgttgctatataagatg

SEQ ID NO: 5391032 - DNA, 25 bp, Homo sapien
tgccagactggagacggaagactgc

SEQ ID NO: 5391033 - DNA, 25 bp, Homo sapien
ggaagactgcctgactagttgatgt

SEQ ID NO: 5391034 - DNA, 25 bp, Homo sapien
tttctcggaagagatggcagatgcc

SEQ ID NO: 5391035 - DNA, 25 bp, Homo sapien
tctcggaagagatggcagatgccag

SEQ ID NO: 5391036 - DNA, 25 bp, Homo sapien
ggcactgtggaaacctaacaattct

SEQ ID NO: 5391037 - DNA, 25 bp, Homo sapien
aagcactaactctgtgggctaggca

SEQ ID NO: 5391038 - DNA, 25 bp, Homo sapien
aattggagagaagacgaaaggacac

SEQ ID NO: 5391039 - DNA, 25 bp, Homo sapien
caccggaaatccttagtgagcagat

SEQ ID NO: 5391040 - DNA, 25 bp, Homo sapien
tgcctcttagctagttcaactaaac

SEQ ID NO: 5391041 - DNA, 25 bp, Homo sapien
gccgcttgcctcttagctagttcaa

SEQ ID NO: 5391042 - DNA, 25 bp, Homo sapien
tcttagctagttcaactaaacctgg

SEQ ID NO: 5391043 - DNA, 25 bp, Homo sapien
ttattgccgcttgcctcttagctag

SEQ ID NO: 5391044 - DNA, 25 bp, Homo sapien
gaggaaaataatgtcctcaggccca

SEQ ID NO: 5391045 - DNA, 25 bp, Homo sapien
ctcaggcccaggttagtcagttaat

SEQ ID NO: 5391046 - DNA, 25 bp, Homo sapien
cacattgtgcgagcgaattcagact

SEQ ID NO: 5391047 - DNA, 25 bp, Homo sapien
tctgctggttggaacaagacaaacg

SEQ ID NO: 5391048 - DNA, 25 bp, Homo sapien
taacggcgattacagagggcatgag

SEQ ID NO: 5391049 - DNA, 25 bp, Homo sapien
tgaggtcctcatagcactaaaaagc

SEQ ID NO: 5391050 - DNA, 25 bp, Homo sapien
gctaggtgttagatgataacggcga

SEQ ID NO: 5391051 - DNA, 25 bp, Homo sapien
tatatgcctcctagtactgggctag

SEQ ID NO: 5391052 - DNA, 25 bp, Homo sapien
tgagaaagaatccaagctgtctgca

SEQ ID NO: 5391053 - DNA, 25 bp, Homo sapien
cctgtgatacatagcagtgctgagc

SEQ ID NO: 5391054 - DNA, 25 bp, Homo sapien
ggtcaacagttatgacatccctgag

SEQ ID NO: 5391055 - DNA, 25 bp, Homo sapien
taactgatgcattggtcttgaggtc

SEQ ID NO: 5391056 - DNA, 25 bp, Homo sapien
taatccctgcatgccaaaatagacc

SEQ ID NO: 5391057 - DNA, 25 bp, Homo sapien
gggctaacagtctgtccaagagaaa

SEQ ID NO: 5391058 - DNA, 25 bp, Homo sapien
ccaatcagttagtggaggctgccct

SEQ ID NO: 5391059 - DNA, 25 bp, Homo sapien
cacagggtcaaagtagggttcatta

SEQ ID NO: 5391060 - DNA, 25 bp, Homo sapien
caggtcaaattctagaggcacaaac

SEQ ID NO: 5391061 - DNA, 25 bp, Homo sapien
catgtgaacgcttgcaagggccaaa

SEQ ID NO: 5391062 - DNA, 25 bp, Homo sapien
taaagaatgatgtctcactcctgtg

SEQ ID NO: 5391063 - DNA, 25 bp, Homo sapien
cactcctgtggccaacatacatgaa

SEQ ID NO: 5391064 - DNA, 25 bp, Homo sapien
ttgtatcctggttaacagtagctct

SEQ ID NO: 5391065 - DNA, 25 bp, Homo sapien
gatcaatgactctgttgtctaatct

SEQ ID NO: 5391066 - DNA, 25 bp, Homo sapien
cctaagatcaatgactctgttgtct

SEQ ID NO: 5391067 - DNA, 25 bp, Homo sapien
cctggttaacagtagctcttccttc

SEQ ID NO: 5391068 - DNA, 25 bp, Homo sapien
ggcaactcgataccaaaaggtttga

SEQ ID NO: 5391069 - DNA, 25 bp, Homo sapien
gagtaagtttaaataacaatggagc

SEQ ID NO: 5391070 - DNA, 25 bp, Homo sapien
caaactaaatatacagcggaagcat

SEQ ID NO: 5391071 - DNA, 25 bp, Homo sapien
gacacccttagtacatcaggttttc

SEQ ID NO: 5391072 - DNA, 25 bp, Homo sapien
ctgcaggggcagacggggttcagcc

SEQ ID NO: 5391073 - DNA, 25 bp, Homo sapien
gcctcaggccgaacagcatcatcca

SEQ ID NO: 5391074 - DNA, 25 bp, Homo sapien
gcagacggggttcagccaaactgat

SEQ ID NO: 5391075 - DNA, 25 bp, Homo sapien
ttctgcctcaggccgaacagcatca

SEQ ID NO: 5391076 - DNA, 25 bp, Homo sapien
catttgcttctagtaaaaaaacaga

SEQ ID NO: 5391077 - DNA, 25 bp, Homo sapien
ttattatggcaaattctgtaagctc

SEQ ID NO: 5391078 - DNA, 25 bp, Homo sapien
cttaaaactacatttgcttctagta

SEQ ID NO: 5391079 - DNA, 25 bp, Homo sapien
taaaactacatttgcttctagtaaa

SEQ ID NO: 5391080 - DNA, 25 bp, Homo sapien
tgacctcaagtgacacttatggtat

SEQ ID NO: 5391081 - DNA, 25 bp, Homo sapien
aagtacatcatcgttagttgatgca

SEQ ID NO: 5391082 - DNA, 25 bp, Homo sapien
aaagtacatcatcgttagttgatgc

SEQ ID NO: 5391083 - DNA, 25 bp, Homo sapien
taaaagtacatcatcgttagttgat

SEQ ID NO: 5391084 - DNA, 25 bp, Homo sapien
ctttaaaagtacatcatcgttagtt

SEQ ID NO: 5391085 - DNA, 25 bp, Homo sapien
caaatctatttctatatgcgatttt

SEQ ID NO: 5391086 - DNA, 25 bp, Homo sapien
ccaaatctatttctatatgcgattt

SEQ ID NO: 5391087 - DNA, 25 bp, Homo sapien
cccaaatctatttctatatgcgatt

SEQ ID NO: 5391088 - DNA, 25 bp, Homo sapien
aatctatttctatatgcgattttat

SEQ ID NO: 5391089 - DNA, 25 bp, Homo sapien
acttttctcacaacaccttctacat

SEQ ID NO: 5391090 - DNA, 25 bp, Homo sapien
aacatgtaactcaacgtcttgctgt

SEQ ID NO: 5391091 - DNA, 25 bp, Homo sapien
aactcaacgtcttgctgtgtacagc

SEQ ID NO: 5391092 - DNA, 25 bp, Homo sapien
tgtaactcaacgtcttgctgtgtac

SEQ ID NO: 5391093 - DNA, 25 bp, Homo sapien
tggtgttacaactttccctctgatt

SEQ ID NO: 5391094 - DNA, 25 bp, Homo sapien
ccatccacatctggtgttacaactt

SEQ ID NO: 5391095 - DNA, 25 bp, Homo sapien
ccacatctggtgttacaactttccc

SEQ ID NO: 5391096 - DNA, 25 bp, Homo sapien
ctctgatttcagacactgttccttc

SEQ ID NO: 5391097 - DNA, 25 bp, Homo sapien
tgcatggtctcccaccgccacaaga

SEQ ID NO: 5391098 - DNA, 25 bp, Homo sapien
gacattaaactgctgctgacgtagg

SEQ ID NO: 5391099 - DNA, 25 bp, Homo sapien
tgctgctgacgtaggactaagaagc

SEQ ID NO: 5391100 - DNA, 25 bp, Homo sapien
gagcctggacattaaactgctgctg

SEQ ID NO: 5391101 - DNA, 25 bp, Homo sapien
tgataatttcagtgctacacaaaga

SEQ ID NO: 5391102 - DNA, 25 bp, Homo sapien
cagtgataatttcagtgctacacaa

SEQ ID NO: 5391103 - DNA, 25 bp, Homo sapien
gtccagtgataatttcagtgctaca

SEQ ID NO: 5391104 - DNA, 25 bp, Homo sapien
ccagtgataatttcagtgctacaca

SEQ ID NO: 5391105 - DNA, 25 bp, Homo sapien
ttgctcctatttaaaacacttcact

SEQ ID NO: 5391106 - DNA, 25 bp, Homo sapien
gctcatatgtttcacgcttgaaaga

SEQ ID NO: 5391107 - DNA, 25 bp, Homo sapien
caatatgcagacttatgctcatatg

SEQ ID NO: 5391108 - DNA, 25 bp, Homo sapien
tgccttccacatggtacgtataaaa

SEQ ID NO: 5391109 - DNA, 25 bp, Homo sapien
taattaaactttagagcgatgctag

SEQ ID NO: 5391110 - DNA, 25 bp, Homo sapien
ttagatttcatcagtctttagggtc

SEQ ID NO: 5391111 - DNA, 25 bp, Homo sapien
aaagtagcttgaagtcttagatttc

SEQ ID NO: 5391112 - DNA, 25 bp, Homo sapien
aaagatttactttggtctgtgagga

SEQ ID NO: 5391113 - DNA, 25 bp, Homo sapien
cgaaagagctttaataatgaaacca

SEQ ID NO: 5391114 - DNA, 25 bp, Homo sapien
aagagctttaataatgaaaccaatc

SEQ ID NO: 5391115 - DNA, 25 bp, Homo sapien
gagctttaataatgaaaccaatcct

SEQ ID NO: 5391116 - DNA, 25 bp, Homo sapien
gctttaataatgaaaccaatcctac

SEQ ID NO: 5391117 - DNA, 25 bp, Homo sapien
ctttagctctgcttgtatgaactct

SEQ ID NO: 5391118 - DNA, 25 bp, Homo sapien
gtattgtcaagtctctaacccgaac

SEQ ID NO: 5391119 - DNA, 25 bp, Homo sapien
tgtcaagtctctaacccgaaccaaa

SEQ ID NO: 5391120 - DNA, 25 bp, Homo sapien
gcacgtacccaaacaacttcatcag

SEQ ID NO: 5391121 - DNA, 25 bp, Homo sapien
tcttgtgattgtatcattgaagata

SEQ ID NO: 5391122 - DNA, 25 bp, Homo sapien
tgattgtatcattgaagatattcca

SEQ ID NO: 5391123 - DNA, 25 bp, Homo sapien
tgtgattgtatcattgaagatattc

SEQ ID NO: 5391124 - DNA, 25 bp, Homo sapien
gattgtatcattgaagatattccat

SEQ ID NO: 5391125 - DNA, 25 bp, Homo sapien
gacacgcttctagtaggccaaactc

SEQ ID NO: 5391126 - DNA, 25 bp, Homo sapien
cccgcaagaaacgcggtccggagag

SEQ ID NO: 5391127 - DNA, 25 bp, Homo sapien
caccccggggacacgcttctagtag

SEQ ID NO: 5391128 - DNA, 25 bp, Homo sapien
gggcaagggctctaggcgcccggac

SEQ ID NO: 5391129 - DNA, 25 bp, Homo sapien
gcgtccatgatctcccgcggcttct

SEQ ID NO: 5391130 - DNA, 25 bp, Homo sapien
ttccgccgcgtccatgatctcccgc

SEQ ID NO: 5391131 - DNA, 25 bp, Homo sapien
tctcctgactcttgcggctggcgct

SEQ ID NO: 5391132 - DNA, 25 bp, Homo sapien
gccgcgtccatgatctcccgcggct

SEQ ID NO: 5391133 - DNA, 25 bp, Homo sapien
cctcgcaggcttccgtaaggcaggc

SEQ ID NO: 5391134 - DNA, 25 bp, Homo sapien
aactgggcagtggacaccaccctcc

SEQ ID NO: 5391135 - DNA, 25 bp, Homo sapien
gcaggcttccgtaaggcaggccaaa

SEQ ID NO: 5391136 - DNA, 25 bp, Homo sapien
aggcttccgtaaggcaggccaaagg

SEQ ID NO: 5391137 - DNA, 25 bp, Homo sapien
aggtgcggctccagaaagatcgcga

SEQ ID NO: 5391138 - DNA, 25 bp, Homo sapien
tcgcggtagtttcgctggattggct

SEQ ID NO: 5391139 - DNA, 25 bp, Homo sapien
ctatctcgagatcccggagcgctgg

SEQ ID NO: 5391140 - DNA, 25 bp, Homo sapien
cagaaagatcgcgagagctgcggct

SEQ ID NO: 5391141 - DNA, 25 bp, Homo sapien
tcttcagcttcgtcccaactgcgac

SEQ ID NO: 5391142 - DNA, 25 bp, Homo sapien
gctctcttcagcttcgtcccaactg

SEQ ID NO: 5391143 - DNA, 25 bp, Homo sapien
gccagctctcttcagcttcgtccca

SEQ ID NO: 5391144 - DNA, 25 bp, Homo sapien
agcttcgtcccaactgcgacttctg

SEQ ID NO: 5391145 - DNA, 25 bp, Homo sapien
ttcccctgggcgacgtagctgcttg

SEQ ID NO: 5391146 - DNA, 25 bp, Homo sapien
gccaaggcagcatgggttaccagtc

SEQ ID NO: 5391147 - DNA, 25 bp, Homo sapien
cattgccctgcttgttgggacagag

SEQ ID NO: 5391148 - DNA, 25 bp, Homo sapien
gaggaggcctcttcgcaatccattg

SEQ ID NO: 5391149 - DNA, 25 bp, Homo sapien
tccatggacctagttgttgctgtta

SEQ ID NO: 5391150 - DNA, 25 bp, Homo sapien
gctgttaagagggttgaagtgccat

SEQ ID NO: 5391151 - DNA, 25 bp, Homo sapien
tgtcttgacaggaatcagcgtcgga

SEQ ID NO: 5391152 - DNA, 25 bp, Homo sapien
tgacttttgggtaggtccatggacc

SEQ ID NO: 5391153 - DNA, 25 bp, Homo sapien
tcatgtcagggtaggagaggactct

SEQ ID NO: 5391154 - DNA, 25 bp, Homo sapien
ccaaaagagtagagtatggagggct

SEQ ID NO: 5391155 - DNA, 25 bp, Homo sapien
cttctctacagaatccatcatgtca

SEQ ID NO: 5391156 - DNA, 25 bp, Homo sapien
gctgcaggaatcagacttctcttgt

SEQ ID NO: 5391157 - DNA, 25 bp, Homo sapien
cagccccgtgaactgagctccataa

SEQ ID NO: 5391158 - DNA, 25 bp, Homo sapien
tatcactcagaaggggcaggtgtcc

SEQ ID NO: 5391159 - DNA, 25 bp, Homo sapien
ggtgtgtgtggtattctacattcag

SEQ ID NO: 5391160 - DNA, 25 bp, Homo sapien
aggtgtccaagaggcccttttgact

SEQ ID NO: 5391161 - DNA, 25 bp, Homo sapien
ccctttatacgagtgcattctgcaa

SEQ ID NO: 5391162 - DNA, 25 bp, Homo sapien
agttaatcactaaggtccactctag

SEQ ID NO: 5391163 - DNA, 25 bp, Homo sapien
tagttgactcagtctccggaagatc

SEQ ID NO: 5391164 - DNA, 25 bp, Homo sapien
tgtggcattctcttctaactatcag

SEQ ID NO: 5391165 - DNA, 25 bp, Homo sapien
atcctctcttcattcgtccaagaat

SEQ ID NO: 5391166 - DNA, 25 bp, Homo sapien
tctcttcattcgtccaagaatgatc

SEQ ID NO: 5391167 - DNA, 25 bp, Homo sapien
ttcattcgtccaagaatgatctcag

SEQ ID NO: 5391168 - DNA, 25 bp, Homo sapien
tcttcattcgtccaagaatgatctc

SEQ ID NO: 5391169 - DNA, 25 bp, Homo sapien
tccatagctgagtcagatccagcat

SEQ ID NO: 5391170 - DNA, 25 bp, Homo sapien
gagtcagatccagcattgggcactt

SEQ ID NO: 5391171 - DNA, 25 bp, Homo sapien
cattgggcacttgaggaagaagcca

SEQ ID NO: 5391172 - DNA, 25 bp, Homo sapien
tcaccctccatagctgagtcagatc

SEQ ID NO: 5391173 - DNA, 25 bp, Homo sapien
ccattctacattcacaagcccacag

SEQ ID NO: 5391174 - DNA, 25 bp, Homo sapien
cccattctacattcacaagcccaca

SEQ ID NO: 5391175 - DNA, 25 bp, Homo sapien
actggcattctgcttgacagatttt

SEQ ID NO: 5391176 - DNA, 25 bp, Homo sapien
cactggcattctgcttgacagattt

SEQ ID NO: 5391177 - DNA, 25 bp, Homo sapien
tgttgggcttccctctacctcccca

SEQ ID NO: 5391178 - DNA, 25 bp, Homo sapien
gcttcggctcaatcaacacataatg

SEQ ID NO: 5391179 - DNA, 25 bp, Homo sapien
gtccttcttatgcttcggctcaatc

SEQ ID NO: 5391180 - DNA, 25 bp, Homo sapien
ggctcaatcaacacataatgctctc

SEQ ID NO: 5391181 - DNA, 25 bp, Homo sapien
cttatgcttcggctcaatcaacaca

SEQ ID NO: 5391182 - DNA, 25 bp, Homo sapien
agtcaaagggctacttggctgggaa

SEQ ID NO: 5391183 - DNA, 25 bp, Homo sapien
tagtgtataggtatgaaagcaagtc

SEQ ID NO: 5391184 - DNA, 25 bp, Homo sapien
acccccacgggtgtgcatagaggaa

SEQ ID NO: 5391185 - DNA, 25 bp, Homo sapien
tcttggtaaagtaatcggctttgat

SEQ ID NO: 5391186 - DNA, 25 bp, Homo sapien
ttatgtagcagcacctggaatactg

SEQ ID NO: 5391187 - DNA, 25 bp, Homo sapien
tatgtagcagcacctggaatactgg

SEQ ID NO: 5391188 - DNA, 25 bp, Homo sapien
tagcagcacctggaatactggggtt

SEQ ID NO: 5391189 - DNA, 25 bp, Homo sapien
cagcacctggaatactggggttttc

SEQ ID NO: 5391190 - DNA, 25 bp, Homo sapien
tacattccaggaagggacacgcctt

SEQ ID NO: 5391191 - DNA, 25 bp, Homo sapien
cacgccttccactataggtggtcat

SEQ ID NO: 5391192 - DNA, 25 bp, Homo sapien
gtaaaactgtgtcttcacagaaagg

SEQ ID NO: 5391193 - DNA, 25 bp, Homo sapien
tgaagtatagcatgatttcagtttt

SEQ ID NO: 5391194 - DNA, 25 bp, Homo sapien
ggtatctaagggaggacctgcatca

SEQ ID NO: 5391195 - DNA, 25 bp, Homo sapien
tgtgtttctccaaacgactgggctt

SEQ ID NO: 5391196 - DNA, 25 bp, Homo sapien
ggatctgggcagacccactcatttg

SEQ ID NO: 5391197 - DNA, 25 bp, Homo sapien
gaaggccactcctcaatgctatagg

SEQ ID NO: 5391198 - DNA, 25 bp, Homo sapien
tcttctgggtgggttgggtagggca

SEQ ID NO: 5391199 - DNA, 25 bp, Homo sapien
gctggaagaaggctgagtagccata

SEQ ID NO: 5391200 - DNA, 25 bp, Homo sapien
aaggaaggagtattgccccgcctgt

SEQ ID NO: 5391201 - DNA, 25 bp, Homo sapien
tacagttccaaagcaacaccgtctt

SEQ ID NO: 5391202 - DNA, 25 bp, Homo sapien
gcctgaccagtttcggtaaatgcta

SEQ ID NO: 5391203 - DNA, 25 bp, Homo sapien
tcagcctgaccagtttcggtaaatg

SEQ ID NO: 5391204 - DNA, 25 bp, Homo sapien
gaccagtttcggtaaatgctaactc

SEQ ID NO: 5391205 - DNA, 25 bp, Homo sapien
cagtttcggtaaatgctaactccat

SEQ ID NO: 5391206 - DNA, 25 bp, Homo sapien
ccagatatccctgccagagaaaatg

SEQ ID NO: 5391207 - DNA, 25 bp, Homo sapien
ttgctggcggttccacaatagccac

SEQ ID NO: 5391208 - DNA, 25 bp, Homo sapien
aggagccagatatccctgccagaga

SEQ ID NO: 5391209 - DNA, 25 bp, Homo sapien
accaacttagggactgccgagagga

SEQ ID NO: 5391210 - DNA, 25 bp, Homo sapien
ttgatggtgccaagcgagtatggaa

SEQ ID NO: 5391211 - DNA, 25 bp, Homo sapien
aaaagatgcagtcctgagtgtcatc

SEQ ID NO: 5391212 - DNA, 25 bp, Homo sapien
cctgagtgtcatcaaaggcagttga

SEQ ID NO: 5391213 - DNA, 25 bp, Homo sapien
tttcaacatcagacgaataatgcag

SEQ ID NO: 5391214 - DNA, 25 bp, Homo sapien
tgcagtgaaaatgttcatggcttcc

SEQ ID NO: 5391215 - DNA, 25 bp, Homo sapien
ggatgggcagcatgctcatttccaa

SEQ ID NO: 5391216 - DNA, 25 bp, Homo sapien
ccagggtgtgacagggatgggcagc

SEQ ID NO: 5391217 - DNA, 25 bp, Homo sapien
gttcatggcttccagggtgtgacag

SEQ ID NO: 5391218 - DNA, 25 bp, Homo sapien
tcactcagggtttctgccagaattt

SEQ ID NO: 5391219 - DNA, 25 bp, Homo sapien
tgggggtctgtcatgtctaccacat

SEQ ID NO: 5391220 - DNA, 25 bp, Homo sapien
tggcccatggcaagctctgcatggc

SEQ ID NO: 5391221 - DNA, 25 bp, Homo sapien
gaggatgaggccatttggagacaat

SEQ ID NO: 5391222 - DNA, 25 bp, Homo sapien
tctgggaggtggacgaccaacaggc

SEQ ID NO: 5391223 - DNA, 25 bp, Homo sapien
caacaggccttggccgggcctcctg

SEQ ID NO: 5391224 - DNA, 25 bp, Homo sapien
aacaggccttggccgggcctcctgg

SEQ ID NO: 5391225 - DNA, 25 bp, Homo sapien
ggaggtggacgaccaacaggccttg

SEQ ID NO: 5391226 - DNA, 25 bp, Homo sapien
gaactgtggctgtcccttgctcaat

SEQ ID NO: 5391227 - DNA, 25 bp, Homo sapien
aaataggattcgacagaactgtggc

SEQ ID NO: 5391228 - DNA, 25 bp, Homo sapien
tctggacaaataattccggtccagg

SEQ ID NO: 5391229 - DNA, 25 bp, Homo sapien
gggtaccagatgcaattgggaatct

SEQ ID NO: 5391230 - DNA, 25 bp, Homo sapien
cagggagcgttttgaagtgaactct

SEQ ID NO: 5391231 - DNA, 25 bp, Homo sapien
atccagagagtcgatacagggagcg

SEQ ID NO: 5391232 - DNA, 25 bp, Homo sapien
ccagagagtcgatacagggagcgtt

SEQ ID NO: 5391233 - DNA, 25 bp, Homo sapien
tacagggagcgttttgaagtgaact

SEQ ID NO: 5391234 - DNA, 25 bp, Homo sapien
tccatgtcacgtttgtccatgtcac

SEQ ID NO: 5391235 - DNA, 25 bp, Homo sapien
ctgcaggtagccaggatatcggatc

SEQ ID NO: 5391236 - DNA, 25 bp, Homo sapien
tggcaaagcagatgggtctccagtt

SEQ ID NO: 5391237 - DNA, 25 bp, Homo sapien
tttccacgtccactgatgaagaggt

SEQ ID NO: 5391238 - DNA, 25 bp, Homo sapien
gggtctccagttgccctttcctgag

SEQ ID NO: 5391239 - DNA, 25 bp, Homo sapien
tcccaaatgcttccgtggcagacag

SEQ ID NO: 5391240 - DNA, 25 bp, Homo sapien
ttctataaagtaatgaatttgcttg

SEQ ID NO: 5391241 - DNA, 25 bp, Homo sapien
gaagagtgttctataaagtaatgaa

SEQ ID NO: 5391242 - DNA, 25 bp, Homo sapien
tataaagtaatgaatttgcttggag

SEQ ID NO: 5391243 - DNA, 25 bp, Homo sapien
ttgggaagagtgttctataaagtaa

SEQ ID NO: 5391244 - DNA, 25 bp, Homo sapien
cagagtaggcttgccaaaggaagtg

SEQ ID NO: 5391245 - DNA, 25 bp, Homo sapien
aatcccaggagcctaacaagttgtc

SEQ ID NO: 5391246 - DNA, 25 bp, Homo sapien
ttcccatatcctacggcttggcagg

SEQ ID NO: 5391247 - DNA, 25 bp, Homo sapien
catgacgtgaacagcttcctttggg

SEQ ID NO: 5391248 - DNA, 25 bp, Homo sapien
tcactacacgctctggaatgttcag

SEQ ID NO: 5391249 - DNA, 25 bp, Homo sapien
tacactgtaggtgctgaaatcaacc

SEQ ID NO: 5391250 - DNA, 25 bp, Homo sapien
gaacttggccacaggtcctgcctag

SEQ ID NO: 5391251 - DNA, 25 bp, Homo sapien
taccacgagacatacagcaactaag

SEQ ID NO: 5391252 - DNA, 25 bp, Homo sapien
tcagactcagtggaaacagatgaat

SEQ ID NO: 5391253 - DNA, 25 bp, Homo sapien
ctcagactcagtggaaacagatgaa

SEQ ID NO: 5391254 - DNA, 25 bp, Homo sapien
agactcagtggaaacagatgaatgt

SEQ ID NO: 5391255 - DNA, 25 bp, Homo sapien
actcagactcagtggaaacagatga

SEQ ID NO: 5391256 - DNA, 25 bp, Homo sapien
gcctcggtgatggaaatccacttgt

SEQ ID NO: 5391257 - DNA, 25 bp, Homo sapien
tagaggatggggttcagacaacagt

SEQ ID NO: 5391258 - DNA, 25 bp, Homo sapien
tttggctccaaggaaagcatagagg

SEQ ID NO: 5391259 - DNA, 25 bp, Homo sapien
aaagctagggcctcggtgatggaaa

SEQ ID NO: 5391260 - DNA, 25 bp, Homo sapien
gatgaaggagtcgatgctgatccca

SEQ ID NO: 5391261 - DNA, 25 bp, Homo sapien
gatcccaatgtagtaaggcagccaa

SEQ ID NO: 5391262 - DNA, 25 bp, Homo sapien
tgatgacaaagaggaggtcggccac

SEQ ID NO: 5391263 - DNA, 25 bp, Homo sapien
ggataaggccaaccatgatgtgctg

SEQ ID NO: 5391264 - DNA, 25 bp, Homo sapien
cctcggtgtagttatctgaagtgta

SEQ ID NO: 5391265 - DNA, 25 bp, Homo sapien
tcctcggtgtagttatctgaagtgt

SEQ ID NO: 5391266 - DNA, 25 bp, Homo sapien
ctcggtgtagttatctgaagtgtat

SEQ ID NO: 5391267 - DNA, 25 bp, Homo sapien
cggtgtagttatctgaagtgtatat

SEQ ID NO: 5391268 - DNA, 25 bp, Homo sapien
gcaaaagaggcaaaggaatggacat

SEQ ID NO: 5391269 - DNA, 25 bp, Homo sapien
ctgcaaaagaggcaaaggaatggac

SEQ ID NO: 5391270 - DNA, 25 bp, Homo sapien
tgcaaaagaggcaaaggaatggaca

SEQ ID NO: 5391271 - DNA, 25 bp, Homo sapien
taatgtagaatcctacaactctcct

SEQ ID NO: 5391272 - DNA, 25 bp, Homo sapien
ttcagcaagcattaacccagttaaa

SEQ ID NO: 5391273 - DNA, 25 bp, Homo sapien
tcccatagtgacttcattatatcct

SEQ ID NO: 5391274 - DNA, 25 bp, Homo sapien
acgctgagggtttcaaagtcacatc

SEQ ID NO: 5391275 - DNA, 25 bp, Homo sapien
cccgaagttaaagcgggcgcaatct

SEQ ID NO: 5391276 - DNA, 25 bp, Homo sapien
agtcaccaggcgcttaaccccgaag

SEQ ID NO: 5391277 - DNA, 25 bp, Homo sapien
ccagtgtcaagaacagtcaccaggc

SEQ ID NO: 5391278 - DNA, 25 bp, Homo sapien
caagaacagtcaccaggcgcttaac

SEQ ID NO: 5391279 - DNA, 25 bp, Homo sapien
gtttgcaaacagcgtgcaagccgcc

SEQ ID NO: 5391280 - DNA, 25 bp, Homo sapien
aaacagcgtgcaagccgccgcgcgc

SEQ ID NO: 5391281 - DNA, 25 bp, Homo sapien
aacagcgtgcaagccgccgcgcgcg

SEQ ID NO: 5391282 - DNA, 25 bp, Homo sapien
tgcaaacagcgtgcaagccgccgcg

SEQ ID NO: 5391283 - DNA, 25 bp, Homo sapien
cgcactatataggcatggtcaagaa

SEQ ID NO: 5391284 - DNA, 25 bp, Homo sapien
ccgcactatataggcatggtcaaga

SEQ ID NO: 5391285 - DNA, 25 bp, Homo sapien
tcaaacgtttgtacatttatgacaa

SEQ ID NO: 5391286 - DNA, 25 bp, Homo sapien
tgtacatttatgacaaagcaggttg

SEQ ID NO: 5391287 - DNA, 25 bp, Homo sapien
tatgacaaagcaggttgaaactgga

SEQ ID NO: 5391288 - DNA, 25 bp, Homo sapien
gggctgcgctctaagttcaaacgtt

SEQ ID NO: 5391289 - DNA, 25 bp, Homo sapien
cagatgcggtggctactggagcact

SEQ ID NO: 5391290 - DNA, 25 bp, Homo sapien
cggtggctactggagcactcaggcc

SEQ ID NO: 5391291 - DNA, 25 bp, Homo sapien
cctcggcgtcactttgctacctgct

SEQ ID NO: 5391292 - DNA, 25 bp, Homo sapien
ctggttctccagatgcggtggctac

SEQ ID NO: 5391293 - DNA, 25 bp, Homo sapien
taagcccggagagatgaaatgccag

SEQ ID NO: 5391294 - DNA, 25 bp, Homo sapien
cagatcactaggaacttgcacagaa

SEQ ID NO: 5391295 - DNA, 25 bp, Homo sapien
ggagaaaccagcaaataagcccgga

SEQ ID NO: 5391296 - DNA, 25 bp, Homo sapien
tatttatagaaggacgaactgcgtg

SEQ ID NO: 5391297 - DNA, 25 bp, Homo sapien
ggtgctattgcctcaaaaatcatgg

SEQ ID NO: 5391298 - DNA, 25 bp, Homo sapien
aacaggctcggtgctattgcctcaa

SEQ ID NO: 5391299 - DNA, 25 bp, Homo sapien
tcaaaaatcatggtgtcaaactggg

SEQ ID NO: 5391300 - DNA, 25 bp, Homo sapien
tcacaaagtttgctgtgctcctgtg

SEQ ID NO: 5391301 - DNA, 25 bp, Homo sapien
aagggctttgcttaaccagacaaat

SEQ ID NO: 5391302 - DNA, 25 bp, Homo sapien
aaaccatcctgaggctaaagcaaaa

SEQ ID NO: 5391303 - DNA, 25 bp, Homo sapien
ctgttttctagcctctaagtgtaac

SEQ ID NO: 5391304 - DNA, 25 bp, Homo sapien
aagctgtgctttccgagacacttat

SEQ ID NO: 5391305 - DNA, 25 bp, Homo sapien
cttagctagagcttgactggaggag

SEQ ID NO: 5391306 - DNA, 25 bp, Homo sapien
cacagggatgagtctaatgagaggc

SEQ ID NO: 5391307 - DNA, 25 bp, Homo sapien
acagggatgagtctaatgagaggct

SEQ ID NO: 5391308 - DNA, 25 bp, Homo sapien
cagggatgagtctaatgagaggctt

SEQ ID NO: 5391309 - DNA, 25 bp, Homo sapien
agggatgagtctaatgagaggcttc

SEQ ID NO: 5391310 - DNA, 25 bp, Homo sapien
aagcccagttctcttgcgctgctga

SEQ ID NO: 5391311 - DNA, 25 bp, Homo sapien
cccagttctcttgcgctgctgaatt

SEQ ID NO: 5391312 - DNA, 25 bp, Homo sapien
aaagcccagttctcttgcgctgctg

SEQ ID NO: 5391313 - DNA, 25 bp, Homo sapien
agttctcttgcgctgctgaattttt

SEQ ID NO: 5391314 - DNA, 25 bp, Homo sapien
tcagagagaatcttagaatgctgtg

SEQ ID NO: 5391315 - DNA, 25 bp, Homo sapien
ctgttttatccccaccttcagtcag

SEQ ID NO: 5391316 - DNA, 25 bp, Homo sapien
gagaatcttagaatgctgtggtttt

SEQ ID NO: 5391317 - DNA, 25 bp, Homo sapien
tgttttatccccaccttcagtcaga

SEQ ID NO: 5391318 - DNA, 25 bp, Homo sapien
tctctgggcccatacctttgtgccc

SEQ ID NO: 5391319 - DNA, 25 bp, Homo sapien
agtctctgggcccatacctttgtgc

SEQ ID NO: 5391320 - DNA, 25 bp, Homo sapien
gtctctgggcccatacctttgtgcc

SEQ ID NO: 5391321 - DNA, 25 bp, Homo sapien
ctgtgaacagaacaggctgtcttga

SEQ ID NO: 5391322 - DNA, 25 bp, Homo sapien
gaacagaacaggctgtcttgaatta

SEQ ID NO: 5391323 - DNA, 25 bp, Homo sapien
cagaacaggctgtcttgaattaatt

SEQ ID NO: 5391324 - DNA, 25 bp, Homo sapien
tgtgaacagaacaggctgtcttgaa

SEQ ID NO: 5391325 - DNA, 25 bp, Homo sapien
aacatgctcttccacagttgggttt

SEQ ID NO: 5391326 - DNA, 25 bp, Homo sapien
catgctcttccacagttgggttttt

SEQ ID NO: 5391327 - DNA, 25 bp, Homo sapien
cagtggctcatctcaaacatgctct

SEQ ID NO: 5391328 - DNA, 25 bp, Homo sapien
tgctcttccacagttgggtttttgg

SEQ ID NO: 5391329 - DNA, 25 bp, Homo sapien
ttgactctgtcaggtggtgcaggct

SEQ ID NO: 5391330 - DNA, 25 bp, Homo sapien
cctttgactctgtcaggtggtgcag

SEQ ID NO: 5391331 - DNA, 25 bp, Homo sapien
cactgacctttgactctgtcaggtg

SEQ ID NO: 5391332 - DNA, 25 bp, Homo sapien
gagctcatcactgacctttgactct

SEQ ID NO: 5391333 - DNA, 25 bp, Homo sapien
ggcccatgggccagcctcgtaaggt

SEQ ID NO: 5391334 - DNA, 25 bp, Homo sapien
catgggccagcctcgtaaggtcttt

SEQ ID NO: 5391335 - DNA, 25 bp, Homo sapien
ggccttgctgccctgcacaatggca

SEQ ID NO: 5391336 - DNA, 25 bp, Homo sapien
acaatggcatctcggcccatgggcc

SEQ ID NO: 5391337 - DNA, 25 bp, Homo sapien
tccagggatcttatttagagatgag

SEQ ID NO: 5391338 - DNA, 25 bp, Homo sapien
agtctgtccagggatcttatttaga

SEQ ID NO: 5391339 - DNA, 25 bp, Homo sapien
gtcatacttttctacgctgtcagct

SEQ ID NO: 5391340 - DNA, 25 bp, Homo sapien
gagatgagtcatacttttctacgct

SEQ ID NO: 5391341 - DNA, 25 bp, Homo sapien
tcccaaatcgatcactttgcttctt

SEQ ID NO: 5391342 - DNA, 25 bp, Homo sapien
tccctgtgggtgaacccgtagatag

SEQ ID NO: 5391343 - DNA, 25 bp, Homo sapien
gcttcttgattatgatatccctgtg

SEQ ID NO: 5391344 - DNA, 25 bp, Homo sapien
tttagctcttcttggaactcctttc

SEQ ID NO: 5391345 - DNA, 25 bp, Homo sapien
ggctcctttttatcaaaggccattg

SEQ ID NO: 5391346 - DNA, 25 bp, Homo sapien
tccggctcctttttatcaaaggcca

SEQ ID NO: 5391347 - DNA, 25 bp, Homo sapien
tatcaaaggccattgctatatccat

SEQ ID NO: 5391348 - DNA, 25 bp, Homo sapien
ttatcaaaggccattgctatatcca

SEQ ID NO: 5391349 - DNA, 25 bp, Homo sapien
aaccttcttgactgactcattccca

SEQ ID NO: 5391350 - DNA, 25 bp, Homo sapien
accttcttgactgactcattcccac

SEQ ID NO: 5391351 - DNA, 25 bp, Homo sapien
ccaaccttcttgactgactcattcc

SEQ ID NO: 5391352 - DNA, 25 bp, Homo sapien
caaccttcttgactgactcattccc

SEQ ID NO: 5391353 - DNA, 25 bp, Homo sapien
tcgtccttaacttggccattcccag

SEQ ID NO: 5391354 - DNA, 25 bp, Homo sapien
gaccatgaccttcgtccttaacttg

SEQ ID NO: 5391355 - DNA, 25 bp, Homo sapien
gtgaccatgaccttcgtccttaact

SEQ ID NO: 5391356 - DNA, 25 bp, Homo sapien
cgtccttaacttggccattcccagc

SEQ ID NO: 5391357 - DNA, 25 bp, Homo sapien
tgagaagcacagcttcagaaccctc

SEQ ID NO: 5391358 - DNA, 25 bp, Homo sapien
gaggatctgtaaccccagtttgaga

SEQ ID NO: 5391359 - DNA, 25 bp, Homo sapien
gactgaggatctgtaaccccagttt

SEQ ID NO: 5391360 - DNA, 25 bp, Homo sapien
ttcagaaccctcgaagtagcagcgg

SEQ ID NO: 5391361 - DNA, 25 bp, Homo sapien
ataaaattggctcactctgctgctg

SEQ ID NO: 5391362 - DNA, 25 bp, Homo sapien
acacctatgaagcagaggaatgtta

SEQ ID NO: 5391363 - DNA, 25 bp, Homo sapien
aaaaataaaattggctcactctgct

SEQ ID NO: 5391364 - DNA, 25 bp, Homo sapien
tccaaccttgtttgtaaggatctaa

SEQ ID NO: 5391365 - DNA, 25 bp, Homo sapien
taatggtaatgatccgatcttcgga

SEQ ID NO: 5391366 - DNA, 25 bp, Homo sapien
gtgttcctgtaatggtaatgatccg

SEQ ID NO: 5391367 - DNA, 25 bp, Homo sapien
tcctgtaatggtaatgatccgatct

SEQ ID NO: 5391368 - DNA, 25 bp, Homo sapien
ggtaatgatccgatcttcggatcct

SEQ ID NO: 5391369 - DNA, 25 bp, Homo sapien
ggctcatcaattttgatcaaagctc

SEQ ID NO: 5391370 - DNA, 25 bp, Homo sapien
ctaaaggctcatcaattttgatcaa

SEQ ID NO: 5391371 - DNA, 25 bp, Homo sapien
gctcatcaattttgatcaaagctcc

SEQ ID NO: 5391372 - DNA, 25 bp, Homo sapien
aaggctcatcaattttgatcaaagc

SEQ ID NO: 5391373 - DNA, 25 bp, Homo sapien
tcatgacagatttgtttagtccact

SEQ ID NO: 5391374 - DNA, 25 bp, Homo sapien
ctactcatgacagatttgtttagtc

SEQ ID NO: 5391375 - DNA, 25 bp, Homo sapien
ctcatgacagatttgtttagtccac

SEQ ID NO: 5391376 - DNA, 25 bp, Homo sapien
tgacagatttgtttagtccactgac

SEQ ID NO: 5391377 - DNA, 25 bp, Homo sapien
cctttgccaataatagatccagcca

SEQ ID NO: 5391378 - DNA, 25 bp, Homo sapien
gatccagccaaatctctgggaatag

SEQ ID NO: 5391379 - DNA, 25 bp, Homo sapien
cacctttgccaataatagatccagc

SEQ ID NO: 5391380 - DNA, 25 bp, Homo sapien
cagccaaatctctgggaatagttac

SEQ ID NO: 5391381 - DNA, 25 bp, Homo sapien
cttttctgttataggtcatgaggtc

SEQ ID NO: 5391382 - DNA, 25 bp, Homo sapien
cccttttctgttataggtcatgagg

SEQ ID NO: 5391383 - DNA, 25 bp, Homo sapien
tttctgttataggtcatgaggtctc

SEQ ID NO: 5391384 - DNA, 25 bp, Homo sapien
ttttctgttataggtcatgaggtct

SEQ ID NO: 5391385 - DNA, 25 bp, Homo sapien
aggaagaggaacattccgagctctg

SEQ ID NO: 5391386 - DNA, 25 bp, Homo sapien
gaggaacattccgagctctgctacc

SEQ ID NO: 5391387 - DNA, 25 bp, Homo sapien
ggaacattccgagctctgctaccac

SEQ ID NO: 5391388 - DNA, 25 bp, Homo sapien
gaagaggaacattccgagctctgct

SEQ ID NO: 5391389 - DNA, 25 bp, Homo sapien
cacctcttccctgcatcagaaatct

SEQ ID NO: 5391390 - DNA, 25 bp, Homo sapien
ggtcctcgacgagggctcatataaa

SEQ ID NO: 5391391 - DNA, 25 bp, Homo sapien
ccccgaccaggagacattttgtcaa

SEQ ID NO: 5391392 - DNA, 25 bp, Homo sapien
cgacgagggctcatataaacataat

SEQ ID NO: 5391393 - DNA, 25 bp, Homo sapien
tgggcgtccacggtcgtcagcaaac

SEQ ID NO: 5391394 - DNA, 25 bp, Homo sapien
gggcgtccacggtcgtcagcaaaca

SEQ ID NO: 5391395 - DNA, 25 bp, Homo sapien
gtccacggtcgtcagcaaacaccat

SEQ ID NO: 5391396 - DNA, 25 bp, Homo sapien
gcgtccacggtcgtcagcaaacacc

SEQ ID NO: 5391397 - DNA, 25 bp, Homo sapien
ggtttcatcgtaaaaattgggatca

SEQ ID NO: 5391398 - DNA, 25 bp, Homo sapien
cataatcataggtttcatcgtaaaa

SEQ ID NO: 5391399 - DNA, 25 bp, Homo sapien
aattgggatcataaggctgtgcatg

SEQ ID NO: 5391400 - DNA, 25 bp, Homo sapien
ttgggatcataaggctgtgcatgtc

SEQ ID NO: 5391401 - DNA, 25 bp, Homo sapien
tttgatgggagactcagaaataaga

SEQ ID NO: 5391402 - DNA, 25 bp, Homo sapien
tgatctttatgcactctacaaccct

SEQ ID NO: 5391403 - DNA, 25 bp, Homo sapien
cagaaataagatcaaggatgatctt

SEQ ID NO: 5391404 - DNA, 25 bp, Homo sapien
tgcactctacaaccctattgggttt

SEQ ID NO: 5391405 - DNA, 25 bp, Homo sapien
gaacaactctatcagtgaaatgagg

SEQ ID NO: 5391406 - DNA, 25 bp, Homo sapien
agaacaactctatcagtgaaatgag

SEQ ID NO: 5391407 - DNA, 25 bp, Homo sapien
ataagaacaactctatcagtgaaat

SEQ ID NO: 5391408 - DNA, 25 bp, Homo sapien
tccaataagaacaactctatcagtg

SEQ ID NO: 5391409 - DNA, 25 bp, Homo sapien
tggaaaagcgtgatggttgtttgtg

SEQ ID NO: 5391410 - DNA, 25 bp, Homo sapien
ctggaaaagcgtgatggttgtttgt

SEQ ID NO: 5391411 - DNA, 25 bp, Homo sapien
aaaagcgtgatggttgtttgtgtgt

SEQ ID NO: 5391412 - DNA, 25 bp, Homo sapien
gaaaagcgtgatggttgtttgtgtg

SEQ ID NO: 5391413 - DNA, 25 bp, Homo sapien
gcactgatatgcaatatatgctggg

SEQ ID NO: 5391414 - DNA, 25 bp, Homo sapien
atgctggcgttgtagtctgtatgga

SEQ ID NO: 5391415 - DNA, 25 bp, Homo sapien
tgtttcgatatcagcactgatatgc

SEQ ID NO: 5391416 - DNA, 25 bp, Homo sapien
aactgaaatgctggcgttgtagtct

SEQ ID NO: 5391417 - DNA, 25 bp, Homo sapien
tgttcttggtcggatcaacaactga

SEQ ID NO: 5391418 - DNA, 25 bp, Homo sapien
agtgttcttggtcggatcaacaact

SEQ ID NO: 5391419 - DNA, 25 bp, Homo sapien
gaagtgttcttggtcggatcaacaa

SEQ ID NO: 5391420 - DNA, 25 bp, Homo sapien
aagtgttcttggtcggatcaacaac

SEQ ID NO: 5391421 - DNA, 25 bp, Homo sapien
cccagactgatgtgaattgaaagcc

SEQ ID NO: 5391422 - DNA, 25 bp, Homo sapien
tgtctatcgccagagcaacacaggc

SEQ ID NO: 5391423 - DNA, 25 bp, Homo sapien
gaaagcctggtgttcacttccaata

SEQ ID NO: 5391424 - DNA, 25 bp, Homo sapien
tgcaatcatgcaaatccgaggaccc

SEQ ID NO: 5391425 - DNA, 25 bp, Homo sapien
aaaccatcgagggaggcgagtgata

SEQ ID NO: 5391426 - DNA, 25 bp, Homo sapien
agtgatagcaaactttgtttagtgc

SEQ ID NO: 5391427 - DNA, 25 bp, Homo sapien
ctcctgaaaccatcgagggaggcga

SEQ ID NO: 5391428 - DNA, 25 bp, Homo sapien
ctctcctcctgaaaccatcgaggga

SEQ ID NO: 5391429 - DNA, 25 bp, Homo sapien
gccatcagctcgctatggaaatgct

SEQ ID NO: 5391430 - DNA, 25 bp, Homo sapien
aggcactttgtaaagtgaagggact

SEQ ID NO: 5391431 - DNA, 25 bp, Homo sapien
tggataaatagtgtacctctatggc

SEQ ID NO: 5391432 - DNA, 25 bp, Homo sapien
gagggccaccttgttaaatccttca

SEQ ID NO: 5391433 - DNA, 25 bp, Homo sapien
gaaaattgtcactgtgggtaactga

SEQ ID NO: 5391434 - DNA, 25 bp, Homo sapien
gtaactgaaggtagactgagtcctg

SEQ ID NO: 5391435 - DNA, 25 bp, Homo sapien
tcctgtagcaagcttgaaaattgtc

SEQ ID NO: 5391436 - DNA, 25 bp, Homo sapien
tcatctggtggattcttagtttaga

SEQ ID NO: 5391437 - DNA, 25 bp, Homo sapien
cgaaagagagttgaattgtctgtgt

SEQ ID NO: 5391438 - DNA, 25 bp, Homo sapien
ttctgagaacaatggtcactccact

SEQ ID NO: 5391439 - DNA, 25 bp, Homo sapien
tggtcactccactgtccaaattact

SEQ ID NO: 5391440 - DNA, 25 bp, Homo sapien
cccatgcttcccccgaaagagagtt

SEQ ID NO: 5391441 - DNA, 25 bp, Homo sapien
tccattagctgggaaccacctattg

SEQ ID NO: 5391442 - DNA, 25 bp, Homo sapien
ttagctgggaaccacctattgatca

SEQ ID NO: 5391443 - DNA, 25 bp, Homo sapien
tgggaaccacctattgatcatctgc

SEQ ID NO: 5391444 - DNA, 25 bp, Homo sapien
gctgggaaccacctattgatcatct

SEQ ID NO: 5391445 - DNA, 25 bp, Homo sapien
gtcaccattcctttggcctgtaaag

SEQ ID NO: 5391446 - DNA, 25 bp, Homo sapien
catctgaagggagtcaccattcctt

SEQ ID NO: 5391447 - DNA, 25 bp, Homo sapien
tggcctgtaaagtcacctttactgc

SEQ ID NO: 5391448 - DNA, 25 bp, Homo sapien
gtcacctttactgctacgaaaccgc

SEQ ID NO: 5391449 - DNA, 25 bp, Homo sapien
ctataaaaagttggaaccaggcagc

SEQ ID NO: 5391450 - DNA, 25 bp, Homo sapien
catgtagggattaggccctagactt

SEQ ID NO: 5391451 - DNA, 25 bp, Homo sapien
tggtatggcaagagctggtgaaacc

SEQ ID NO: 5391452 - DNA, 25 bp, Homo sapien
cagatccatgtagggattaggccct

SEQ ID NO: 5391453 - DNA, 25 bp, Homo sapien
ggtgaaaccaccagatccatgtagg

SEQ ID NO: 5391454 - DNA, 25 bp, Homo sapien
gcataaaggcacaatttaggaaacc

SEQ ID NO: 5391455 - DNA, 25 bp, Homo sapien
tgagctcagggcataaaggcacaat

SEQ ID NO: 5391456 - DNA, 25 bp, Homo sapien
tcaaatgagctcagggcataaaggc

SEQ ID NO: 5391457 - DNA, 25 bp, Homo sapien
gtgttcctcaaatgagctcagggca

SEQ ID NO: 5391458 - DNA, 25 bp, Homo sapien
tcctaaaggcatatctagaagatta

SEQ ID NO: 5391459 - DNA, 25 bp, Homo sapien
caggttggttctgacagatacttta

SEQ ID NO: 5391460 - DNA, 25 bp, Homo sapien
gtctttgcagcaaatcctaaaggca

SEQ ID NO: 5391461 - DNA, 25 bp, Homo sapien
tgcagcaaatcctaaaggcatatct

SEQ ID NO: 5391462 - DNA, 25 bp, Homo sapien
cagaacgtcatcttctaggtgcagc

SEQ ID NO: 5391463 - DNA, 25 bp, Homo sapien
tcctgttgccagaacgtcatcttct

SEQ ID NO: 5391464 - DNA, 25 bp, Homo sapien
ggtgcagctcatcaggatgttgtaa

SEQ ID NO: 5391465 - DNA, 25 bp, Homo sapien
gagcttctgctgtgttgggaattcc

SEQ ID NO: 5391466 - DNA, 25 bp, Homo sapien
gattgatttgggctgtgttacggta

SEQ ID NO: 5391467 - DNA, 25 bp, Homo sapien
gcagctggaacgcactcaattatct

SEQ ID NO: 5391468 - DNA, 25 bp, Homo sapien
tgggaactggttctactgtggcctg

SEQ ID NO: 5391469 - DNA, 25 bp, Homo sapien
tatataccaaatacccctgcagctg

SEQ ID NO: 5391470 - DNA, 25 bp, Homo sapien
ggtccgtgagtgacggtggttgggc

SEQ ID NO: 5391471 - DNA, 25 bp, Homo sapien
gtgacggtggttgggcaattttata

SEQ ID NO: 5391472 - DNA, 25 bp, Homo sapien
tggttgtcagccaaacttctatggg

SEQ ID NO: 5391473 - DNA, 25 bp, Homo sapien
gtggttgtcagccaaacttctatgg

SEQ ID NO: 5391474 - DNA, 25 bp, Homo sapien
gcagaagattaggaatgaccaaaat

SEQ ID NO: 5391475 - DNA, 25 bp, Homo sapien
gaaggtggtggaaaatttggaggca

SEQ ID NO: 5391476 - DNA, 25 bp, Homo sapien
ggaagtccttgcagaagattaggaa

SEQ ID NO: 5391477 - DNA, 25 bp, Homo sapien
agccttggaagtccttgcagaagat

SEQ ID NO: 5391478 - DNA, 25 bp, Homo sapien
catctccgatacctgtggcttttgg

SEQ ID NO: 5391479 - DNA, 25 bp, Homo sapien
tctccgatacctgtggcttttggcc

SEQ ID NO: 5391480 - DNA, 25 bp, Homo sapien
tggcagaaacgggcagtacttttac

SEQ ID NO: 5391481 - DNA, 25 bp, Homo sapien
gcagtacttttacatctccgatacc

SEQ ID NO: 5391482 - DNA, 25 bp, Homo sapien
ccagaaacactagagggccactact

SEQ ID NO: 5391483 - DNA, 25 bp, Homo sapien
gccagaaacactagagggccactac

SEQ ID NO: 5391484 - DNA, 25 bp, Homo sapien
atcattgccagaaacactagagggc

SEQ ID NO: 5391485 - DNA, 25 bp, Homo sapien
attgccagaaacactagagggccac

SEQ ID NO: 5391486 - DNA, 25 bp, Homo sapien
cagtcccagtgaggatatcatctgg

SEQ ID NO: 5391487 - DNA, 25 bp, Homo sapien
tgaggatatcatctgggaaatacct

SEQ ID NO: 5391488 - DNA, 25 bp, Homo sapien
ccaagtctgataccagtcccagtga

SEQ ID NO: 5391489 - DNA, 25 bp, Homo sapien
gaaatacctcatgtgtcccaggagt

SEQ ID NO: 5391490 - DNA, 25 bp, Homo sapien
ctgctctgtgatctctggtgggaat

SEQ ID NO: 5391491 - DNA, 25 bp, Homo sapien
tgttctgctctgtgatctctggtgg

SEQ ID NO: 5391492 - DNA, 25 bp, Homo sapien
cttttgcatgttctgctctgtgatc

SEQ ID NO: 5391493 - DNA, 25 bp, Homo sapien
ttctgctctgtgatctctggtggga

SEQ ID NO: 5391494 - DNA, 25 bp, Homo sapien
agtccctacttacccagcgctggtg

SEQ ID NO: 5391495 - DNA, 25 bp, Homo sapien
gtttcagggtgcagggccatcccac

SEQ ID NO: 5391496 - DNA, 25 bp, Homo sapien
gaaactgacaatgcaaggtagtgcc

SEQ ID NO: 5391497 - DNA, 25 bp, Homo sapien
tctctttagctttcggcatttccac

SEQ ID NO: 5391498 - DNA, 25 bp, Homo sapien
atccagcgggttcccttcaggccct

SEQ ID NO: 5391499 - DNA, 25 bp, Homo sapien
tgcatccagcgggttcccttcaggc

SEQ ID NO: 5391500 - DNA, 25 bp, Homo sapien
ctcggctttgcatccagcgggttcc

SEQ ID NO: 5391501 - DNA, 25 bp, Homo sapien
gctttgcatccagcgggttcccttc

SEQ ID NO: 5391502 - DNA, 25 bp, Homo sapien
atggggtttggaagtggggtctatg

SEQ ID NO: 5391503 - DNA, 25 bp, Homo sapien
tggaagtggggtctatggcctgtcc

SEQ ID NO: 5391504 - DNA, 25 bp, Homo sapien
ctgtgaggagaaatggggtttggaa

SEQ ID NO: 5391505 - DNA, 25 bp, Homo sapien
gtttggaagtggggtctatggcctg

SEQ ID NO: 5391506 - DNA, 25 bp, Homo sapien
gccaattgcattatgcttgtccaca

SEQ ID NO: 5391507 - DNA, 25 bp, Homo sapien
caattgcattatgcttgtccacacc

SEQ ID NO: 5391508 - DNA, 25 bp, Homo sapien
ttgtgcttgtccttgagggacgttg

SEQ ID NO: 5391509 - DNA, 25 bp, Homo sapien
ctgggccaattgcattatgcttgtc

SEQ ID NO: 5391510 - DNA, 25 bp, Homo sapien
ctgtgttgagtcctggctgctggga

SEQ ID NO: 5391511 - DNA, 25 bp, Homo sapien
tcctcctcctcaggaggaaacattg

SEQ ID NO: 5391512 - DNA, 25 bp, Homo sapien
ctggctgctgggactggccccaagc

SEQ ID NO: 5391513 - DNA, 25 bp, Homo sapien
gctgctgggactggccccaagcctc

SEQ ID NO: 5391514 - DNA, 25 bp, Homo sapien
cagttgtccacgagaaattttatta

SEQ ID NO: 5391515 - DNA, 25 bp, Homo sapien
tattatgtggaaagttcgtattgaa

SEQ ID NO: 5391516 - DNA, 25 bp, Homo sapien
gttcgtattgaatgtgtctgccaaa

SEQ ID NO: 5391517 - DNA, 25 bp, Homo sapien
caagcaacacacttcatcagttgtc

SEQ ID NO: 5391518 - DNA, 25 bp, Homo sapien
agtcagagagaagctccttttgaaa

SEQ ID NO: 5391519 - DNA, 25 bp, Homo sapien
tgcaagaaataagtcagagagaagc

SEQ ID NO: 5391520 - DNA, 25 bp, Homo sapien
cagagagaaatatcccttggctcat

SEQ ID NO: 5391521 - DNA, 25 bp, Homo sapien
cttttgcaagaaataagtcagagag

SEQ ID NO: 5391522 - DNA, 25 bp, Homo sapien
gccctggggtcatccttgcaaggga

SEQ ID NO: 5391523 - DNA, 25 bp, Homo sapien
tcttggagctgctgggaaccagggg

SEQ ID NO: 5391524 - DNA, 25 bp, Homo sapien
accaggggccctggggtcatccttg

SEQ ID NO: 5391525 - DNA, 25 bp, Homo sapien
catcttggagctgctgggaaccagg

SEQ ID NO: 5391526 - DNA, 25 bp, Homo sapien
gactataaactcctcgaaggcacat

SEQ ID NO: 5391527 - DNA, 25 bp, Homo sapien
agctccaggactaataagggtttga

SEQ ID NO: 5391528 - DNA, 25 bp, Homo sapien
tgtgtgcatcacataccaaccatac

SEQ ID NO: 5391529 - DNA, 25 bp, Homo sapien
cacaggatccaatcttttgctggtg

SEQ ID NO: 5391530 - DNA, 25 bp, Homo sapien
attgattgaattaagggctgaattt

SEQ ID NO: 5391531 - DNA, 25 bp, Homo sapien
gaattaagggctgaattttgcagtg

SEQ ID NO: 5391532 - DNA, 25 bp, Homo sapien
taagggctgaattttgcagtgccat

SEQ ID NO: 5391533 - DNA, 25 bp, Homo sapien
aattaagggctgaattttgcagtgc

SEQ ID NO: 5391534 - DNA, 25 bp, Homo sapien
gacttgcatgtggtctgtagcccct

SEQ ID NO: 5391535 - DNA, 25 bp, Homo sapien
tttacccaatgccactgatacactg

SEQ ID NO: 5391536 - DNA, 25 bp, Homo sapien
gatttgactgctcccctggattttg

SEQ ID NO: 5391537 - DNA, 25 bp, Homo sapien
cagcatgatctggatgtaagacatg

SEQ ID NO: 5391538 - DNA, 25 bp, Homo sapien
gccagctcttactgcaagtgtgatt

SEQ ID NO: 5391539 - DNA, 25 bp, Homo sapien
cagctcttactgcaagtgtgatttc

SEQ ID NO: 5391540 - DNA, 25 bp, Homo sapien
gctcttactgcaagtgtgatttcct

SEQ ID NO: 5391541 - DNA, 25 bp, Homo sapien
tcagccagctcttactgcaagtgtg

SEQ ID NO: 5391542 - DNA, 25 bp, Homo sapien
ggggcggaaatggagatgggtatct

SEQ ID NO: 5391543 - DNA, 25 bp, Homo sapien
ctttggggggcggaaatggagatgg

SEQ ID NO: 5391544 - DNA, 25 bp, Homo sapien
gggtatctgagaaatagggcagccc

SEQ ID NO: 5391545 - DNA, 25 bp, Homo sapien
gcggaaatggagatgggtatctgag

SEQ ID NO: 5391546 - DNA, 25 bp, Homo sapien
gcccgaggaacccgcaggccgcagg

SEQ ID NO: 5391547 - DNA, 25 bp, Homo sapien
cccgaggaacccgcaggccgcaggc

SEQ ID NO: 5391548 - DNA, 25 bp, Homo sapien
cgcccgaggaacccgcaggccgcag

SEQ ID NO: 5391549 - DNA, 25 bp, Homo sapien
ccgcccgaggaacccgcaggccgca

SEQ ID NO: 5391550 - DNA, 25 bp, Homo sapien
cgacgcagctcatccatctggaaaa

SEQ ID NO: 5391551 - DNA, 25 bp, Homo sapien
aattaaggcccgcaaagccttgccg

SEQ ID NO: 5391552 - DNA, 25 bp, Homo sapien
atctggaaaactgccgtgggatgct

SEQ ID NO: 5391553 - DNA, 25 bp, Homo sapien
cgggctctatcggtgcaaggtgcta

SEQ ID NO: 5391554 - DNA, 25 bp, Homo sapien
tttgtgcccaacgtgttcatagagg

SEQ ID NO: 5391555 - DNA, 25 bp, Homo sapien
ggtgatccaacactggtgtcagggc

SEQ ID NO: 5391556 - DNA, 25 bp, Homo sapien
catggataggtttctgagtgtgcag

SEQ ID NO: 5391557 - DNA, 25 bp, Homo sapien
gccatcaattagacagtgggagaga

SEQ ID NO: 5391558 - DNA, 25 bp, Homo sapien
gtggaagtacctggtgagagcccac

SEQ ID NO: 5391559 - DNA, 25 bp, Homo sapien
cagcatgagggttcagttggctgga

SEQ ID NO: 5391560 - DNA, 25 bp, Homo sapien
tgtcatcacatacccagccatgttc

SEQ ID NO: 5391561 - DNA, 25 bp, Homo sapien
tggctggatcttgagaattgctgtg

SEQ ID NO: 5391562 - DNA, 25 bp, Homo sapien
cagatgcgatattgaaaaatcaaag

SEQ ID NO: 5391563 - DNA, 25 bp, Homo sapien
ccagatgcgatattgaaaaatcaaa

SEQ ID NO: 5391564 - DNA, 25 bp, Homo sapien
cccagatgcgatattgaaaaatcaa

SEQ ID NO: 5391565 - DNA, 25 bp, Homo sapien
agatgcgatattgaaaaatcaaagg

SEQ ID NO: 5391566 - DNA, 25 bp, Homo sapien
ggaatggtctcctttgtagccagct

SEQ ID NO: 5391567 - DNA, 25 bp, Homo sapien
ttctctcgtacaatcagtttctcct

SEQ ID NO: 5391568 - DNA, 25 bp, Homo sapien
ttccttctctcgtacaatcagtttc

SEQ ID NO: 5391569 - DNA, 25 bp, Homo sapien
tcctgtttggaatggtctcctttgt

SEQ ID NO: 5391570 - DNA, 25 bp, Homo sapien
taactgttcctcgacatcggctggg

SEQ ID NO: 5391571 - DNA, 25 bp, Homo sapien
gtatcctgtcgggacccagccaaga

SEQ ID NO: 5391572 - DNA, 25 bp, Homo sapien
gcagggcacgggaggtatcctgtcg

SEQ ID NO: 5391573 - DNA, 25 bp, Homo sapien
gggtgaaaaggtgggccatgatcac

SEQ ID NO: 5391574 - DNA, 25 bp, Homo sapien
aggaggcaaagaaatccactgggca

SEQ ID NO: 5391575 - DNA, 25 bp, Homo sapien
tcggagaggtagctgattaaaagtc

SEQ ID NO: 5391576 - DNA, 25 bp, Homo sapien
tgggcacagcgagagtgtgacacta

SEQ ID NO: 5391577 - DNA, 25 bp, Homo sapien
gctccattataaagccggaaatcct

SEQ ID NO: 5391578 - DNA, 25 bp, Homo sapien
tcaggtgttagacgaatggtcttga

SEQ ID NO: 5391579 - DNA, 25 bp, Homo sapien
gtcttgagctggcaaaacccatggg

SEQ ID NO: 5391580 - DNA, 25 bp, Homo sapien
ttagacgaatggtcttgagctggca

SEQ ID NO: 5391581 - DNA, 25 bp, Homo sapien
gaatggtcttgagctggcaaaaccc

SEQ ID NO: 5391582 - DNA, 25 bp, Homo sapien
gataatgattccatcagaggtgaag

SEQ ID NO: 5391583 - DNA, 25 bp, Homo sapien
atcagaggtgaagacacagggtagc

SEQ ID NO: 5391584 - DNA, 25 bp, Homo sapien
taatgattccatcagaggtgaagac

SEQ ID NO: 5391585 - DNA, 25 bp, Homo sapien
ctgtggagataatgattccatcaga

SEQ ID NO: 5391586 - DNA, 25 bp, Homo sapien
tgttgtccatcttggatcaaactga

SEQ ID NO: 5391587 - DNA, 25 bp, Homo sapien
tgcccacaaaccggccctgtgagtg

SEQ ID NO: 5391588 - DNA, 25 bp, Homo sapien
cagcatgtggatgtaacgggctggg

SEQ ID NO: 5391589 - DNA, 25 bp, Homo sapien
actgacccctagaataaaagtcagc

SEQ ID NO: 5391590 - DNA, 25 bp, Homo sapien
tctgggacagcctataagcttccag

SEQ ID NO: 5391591 - DNA, 25 bp, Homo sapien
gcattgctttatccccaacctcata

SEQ ID NO: 5391592 - DNA, 25 bp, Homo sapien
gacagcctataagcttccagcattg

SEQ ID NO: 5391593 - DNA, 25 bp, Homo sapien
ttagctttgagatcctgttggggtc

SEQ ID NO: 5391594 - DNA, 25 bp, Homo sapien
tcactgtatctttccactgtcaaca

SEQ ID NO: 5391595 - DNA, 25 bp, Homo sapien
caacttgttaaccttttcactgtat

SEQ ID NO: 5391596 - DNA, 25 bp, Homo sapien
gtcaacattgcaaaatgatagggtt

SEQ ID NO: 5391597 - DNA, 25 bp, Homo sapien
caatgccattctaaccaacttgtta

SEQ ID NO: 5391598 - DNA, 25 bp, Homo sapien
cactttgattagcttcattctgaag

SEQ ID NO: 5391599 - DNA, 25 bp, Homo sapien
ctgggatttcgaatacgatctgtcc

SEQ ID NO: 5391600 - DNA, 25 bp, Homo sapien
catcactttcactttgattagcttc

SEQ ID NO: 5391601 - DNA, 25 bp, Homo sapien
tgtggtcaggtcactgggatttcga

SEQ ID NO: 5391602 - DNA, 25 bp, Homo sapien
tcgcaaacatgggtcggcatgagaa

SEQ ID NO: 5391603 - DNA, 25 bp, Homo sapien
cgcaaacatgggtcggcatgagaaa

SEQ ID NO: 5391604 - DNA, 25 bp, Homo sapien
ccacagccactctcaatgcttcctg

SEQ ID NO: 5391605 - DNA, 25 bp, Homo sapien
agcccacagccactctcaatgcttc

SEQ ID NO: 5391606 - DNA, 25 bp, Homo sapien
cagccactctcaatgcttcctgggt

SEQ ID NO: 5391607 - DNA, 25 bp, Homo sapien
cactctcaatgcttcctgggttttc

SEQ ID NO: 5391608 - DNA, 25 bp, Homo sapien
tttgaacaggttcagctattactga

SEQ ID NO: 5391609 - DNA, 25 bp, Homo sapien
cattttgaacaggttcagctattac

SEQ ID NO: 5391610 - DNA, 25 bp, Homo sapien
attttgaacaggttcagctattact

SEQ ID NO: 5391611 - DNA, 25 bp, Homo sapien
ttttgaacaggttcagctattactg

SEQ ID NO: 5391612 - DNA, 25 bp, Homo sapien
ggaccaggtgcagggttgactcttt

SEQ ID NO: 5391613 - DNA, 25 bp, Homo sapien
gtagtcagaaagagtgcggccatct

SEQ ID NO: 5391614 - DNA, 25 bp, Homo sapien
gcttgcctgcaaagatgagcctctg

SEQ ID NO: 5391615 - DNA, 25 bp, Homo sapien
agctgcttgcctgcaaagatgagcc

SEQ ID NO: 5391616 - DNA, 25 bp, Homo sapien
ctttatcctggatcttggccttcac

SEQ ID NO: 5391617 - DNA, 25 bp, Homo sapien
gggggtgccttctttatcctggatc

SEQ ID NO: 5391618 - DNA, 25 bp, Homo sapien
gggtgccttctttatcctggatctt

SEQ ID NO: 5391619 - DNA, 25 bp, Homo sapien
ttctttatcctggatcttggccttc

SEQ ID NO: 5391620 - DNA, 25 bp, Homo sapien
gtcttgccagtcagggtcttcacga

SEQ ID NO: 5391621 - DNA, 25 bp, Homo sapien
gtcactgggctccacttccagggtg

SEQ ID NO: 5391622 - DNA, 25 bp, Homo sapien
ggtcttgccagtcagggtcttcacg

SEQ ID NO: 5391623 - DNA, 25 bp, Homo sapien
ggtgtcactgggctccacttccagg

SEQ ID NO: 5391624 - DNA, 25 bp, Homo sapien
accacctctcagacacaggaccagg

SEQ ID NO: 5391625 - DNA, 25 bp, Homo sapien
cctctcagacacaggaccaggtgca

SEQ ID NO: 5391626 - DNA, 25 bp, Homo sapien
ctctcagacacaggaccaggtgcag

SEQ ID NO: 5391627 - DNA, 25 bp, Homo sapien
cacctctcagacacaggaccaggtg

SEQ ID NO: 5391628 - DNA, 25 bp, Homo sapien
gttatagtcagaatgagtgcagtca

SEQ ID NO: 5391629 - DNA, 25 bp, Homo sapien
gatgttatagtcagaatgagtgcag

SEQ ID NO: 5391630 - DNA, 25 bp, Homo sapien
tgttatagtcagaatgagtgcagtc

SEQ ID NO: 5391631 - DNA, 25 bp, Homo sapien
ttatagtcagaatgagtgcagtcat

SEQ ID NO: 5391632 - DNA, 25 bp, Homo sapien
aagggcaatggtcttgctggtaagg

SEQ ID NO: 5391633 - DNA, 25 bp, Homo sapien
gggcaatggtcttgctggtaagggt

SEQ ID NO: 5391634 - DNA, 25 bp, Homo sapien
ggcaatggtcttgctggtaagggtc

SEQ ID NO: 5391635 - DNA, 25 bp, Homo sapien
gcaatggtcttgctggtaagggtct

SEQ ID NO: 5391636 - DNA, 25 bp, Homo sapien
caagggcaatgcagaatgtagaacg

SEQ ID NO: 5391637 - DNA, 25 bp, Homo sapien
aggtccctctctgttgcttggcaac

SEQ ID NO: 5391638 - DNA, 25 bp, Homo sapien
cgctgcaaaggggtatactgggcat

SEQ ID NO: 5391639 - DNA, 25 bp, Homo sapien
gcttggcaactctgcgttcttcttc

SEQ ID NO: 5391640 - DNA, 25 bp, Homo sapien
ttcccgaaggagctgtgaactctgc

SEQ ID NO: 5391641 - DNA, 25 bp, Homo sapien
tgccaacatcgtactggctgggctc

SEQ ID NO: 5391642 - DNA, 25 bp, Homo sapien
gagtgtcgtgccttccgggaattaa

SEQ ID NO: 5391643 - DNA, 25 bp, Homo sapien
tgagggcagcacgtgtaatgacatt

SEQ ID NO: 5391644 - DNA, 25 bp, Homo sapien
tcctgttttccacctgtgcaaacct

SEQ ID NO: 5391645 - DNA, 25 bp, Homo sapien
ctctgctaaggcatgaggtacttcc

SEQ ID NO: 5391646 - DNA, 25 bp, Homo sapien
ctttcctgttttccacctgtgcaaa

SEQ ID NO: 5391647 - DNA, 25 bp, Homo sapien
ctgttttccacctgtgcaaacctct

SEQ ID NO: 5391648 - DNA, 25 bp, Homo sapien
ccacagttgtggaagaagaaacatt

SEQ ID NO: 5391649 - DNA, 25 bp, Homo sapien
gcgcctggcctgtgtaaatgaaata

SEQ ID NO: 5391650 - DNA, 25 bp, Homo sapien
taaaccatccatagcaccacagttg

SEQ ID NO: 5391651 - DNA, 25 bp, Homo sapien
tgcagctttgcgctctatgagaatc

SEQ ID NO: 5391652 - DNA, 25 bp, Homo sapien
tcccttcttccttctctctctccat

SEQ ID NO: 5391653 - DNA, 25 bp, Homo sapien
cttcccttcttccttctctctctcc

SEQ ID NO: 5391654 - DNA, 25 bp, Homo sapien
ttcccttcttccttctctctctcca

SEQ ID NO: 5391655 - DNA, 25 bp, Homo sapien
ttcgcattgccaaattcagctggaa

SEQ ID NO: 5391656 - DNA, 25 bp, Homo sapien
ctgttcgcattgccaaattcagctg

SEQ ID NO: 5391657 - DNA, 25 bp, Homo sapien
gcattgccaaattcagctggaacat

SEQ ID NO: 5391658 - DNA, 25 bp, Homo sapien
tgttcgcattgccaaattcagctgg

SEQ ID NO: 5391659 - DNA, 25 bp, Homo sapien
tggacatagattgcagcactcctaa

SEQ ID NO: 5391660 - DNA, 25 bp, Homo sapien
tcctgacactggacatagattgcag

SEQ ID NO: 5391661 - DNA, 25 bp, Homo sapien
gcactcctaatgccctgtttgtctc

SEQ ID NO: 5391662 - DNA, 25 bp, Homo sapien
gacactggacatagattgcagcact

SEQ ID NO: 5391663 - DNA, 25 bp, Homo sapien
agccaaagaccagtgttagatccag

SEQ ID NO: 5391664 - DNA, 25 bp, Homo sapien
tgggtgctgtgggtgaacaccttcc

SEQ ID NO: 5391665 - DNA, 25 bp, Homo sapien
agaccagtgttagatccagaaagaa

SEQ ID NO: 5391666 - DNA, 25 bp, Homo sapien
ccaaagaccagtgttagatccagaa

SEQ ID NO: 5391667 - DNA, 25 bp, Homo sapien
ttgtgtcaccaacttgtccaggcat

SEQ ID NO: 5391668 - DNA, 25 bp, Homo sapien
tctcatgaaagccacatctccgaag

SEQ ID NO: 5391669 - DNA, 25 bp, Homo sapien
gccacctggatctaggagcagctct

SEQ ID NO: 5391670 - DNA, 25 bp, Homo sapien
ttccacacagagactcaaaccccag

SEQ ID NO: 5391671 - DNA, 25 bp, Homo sapien
agccacatctccgaagtctgacaac

SEQ ID NO: 5391672 - DNA, 25 bp, Homo sapien
gagggatgcctttgctactgaccaa

SEQ ID NO: 5391673 - DNA, 25 bp, Homo sapien
tactgaccaatacacagatgttgca

SEQ ID NO: 5391674 - DNA, 25 bp, Homo sapien
gatctctgagcccatgactggagct

SEQ ID NO: 5391675 - DNA, 25 bp, Homo sapien
gttgcagtggctgttagcacaagtc

SEQ ID NO: 5391676 - DNA, 25 bp, Homo sapien
cacccctatatcctttgtgcaactt

SEQ ID NO: 5391677 - DNA, 25 bp, Homo sapien
aggtctgctaccaccacccctatat

SEQ ID NO: 5391678 - DNA, 25 bp, Homo sapien
tcacataaggtctgctaccaccacc

SEQ ID NO: 5391679 - DNA, 25 bp, Homo sapien
tatcctttgtgcaactttgagtgag

SEQ ID NO: 5391680 - DNA, 25 bp, Homo sapien
tccacataggaaggcggctgtagga

SEQ ID NO: 5391681 - DNA, 25 bp, Homo sapien
tgctctgaacccatccaccacttgc

SEQ ID NO: 5391682 - DNA, 25 bp, Homo sapien
cactgaggatgagggcctagaaagt

SEQ ID NO: 5391683 - DNA, 25 bp, Homo sapien
gagtggggtccacggacatgcccca

SEQ ID NO: 5391684 - DNA, 25 bp, Homo sapien
ctgtcattccatcacctccgaaggg

SEQ ID NO: 5391685 - DNA, 25 bp, Homo sapien
gcaagtcacaaggacgggagcagaa

SEQ ID NO: 5391686 - DNA, 25 bp, Homo sapien
tagaaaatcccatgattccaatggc

SEQ ID NO: 5391687 - DNA, 25 bp, Homo sapien
ggagcagaatcagactccctcagca

SEQ ID NO: 5391688 - DNA, 25 bp, Homo sapien
catcttttctcacactgttctctcc

SEQ ID NO: 5391689 - DNA, 25 bp, Homo sapien
tgttctctccagtgtcagggagtgt

SEQ ID NO: 5391690 - DNA, 25 bp, Homo sapien
tctctccagtgtcagggagtgtgag

SEQ ID NO: 5391691 - DNA, 25 bp, Homo sapien
agggagtgtgaggatctgggctctg

SEQ ID NO: 5391692 - DNA, 25 bp, Homo sapien
ctaagtgggacgtggagcctcactt

SEQ ID NO: 5391693 - DNA, 25 bp, Homo sapien
tcacttggtgcttgtagccctggtg

SEQ ID NO: 5391694 - DNA, 25 bp, Homo sapien
ctgcagccctaatttatctgatgca

SEQ ID NO: 5391695 - DNA, 25 bp, Homo sapien
gcagccctaatttatctgatgcaag

SEQ ID NO: 5391696 - DNA, 25 bp, Homo sapien
ttttattgtcccacgaagactgcac

SEQ ID NO: 5391697 - DNA, 25 bp, Homo sapien
gggcaggcacgtggttttattgtcc

SEQ ID NO: 5391698 - DNA, 25 bp, Homo sapien
tcagggaagcgagtattctattggc

SEQ ID NO: 5391699 - DNA, 25 bp, Homo sapien
tatcaagctggcgagaggaaggaca

SEQ ID NO: 5391700 - DNA, 25 bp, Homo sapien
ggcggttttactcctggtgtccaca

SEQ ID NO: 5391701 - DNA, 25 bp, Homo sapien
tggagccagcccaccggcggtttta

SEQ ID NO: 5391702 - DNA, 25 bp, Homo sapien
cttggatttgcgcagccaagggcgt

SEQ ID NO: 5391703 - DNA, 25 bp, Homo sapien
tttcaggcgcacagagataaggtgg

SEQ ID NO: 5391704 - DNA, 25 bp, Homo sapien
ccataacagtaaatgagtcagcgag

SEQ ID NO: 5391705 - DNA, 25 bp, Homo sapien
aacagtaaatgagtcagcgagtggc

SEQ ID NO: 5391706 - DNA, 25 bp, Homo sapien
tttgacccagcaaggggatgcagtc

SEQ ID NO: 5391707 - DNA, 25 bp, Homo sapien
gggatgcagtccataacagtaaatg

SEQ ID NO: 5391708 - DNA, 25 bp, Homo sapien
cctagtgggaggcaaaagtggataa

SEQ ID NO: 5391709 - DNA, 25 bp, Homo sapien
gtgggaggcaaaagtggataattca

SEQ ID NO: 5391710 - DNA, 25 bp, Homo sapien
cttcctagtgggaggcaaaagtgga

SEQ ID NO: 5391711 - DNA, 25 bp, Homo sapien
ctagtgggaggcaaaagtggataat

SEQ ID NO: 5391712 - DNA, 25 bp, Homo sapien
agtcccgcccacatttgtgaggaca

SEQ ID NO: 5391713 - DNA, 25 bp, Homo sapien
gggttccagtctcttcagggacagt

SEQ ID NO: 5391714 - DNA, 25 bp, Homo sapien
tgataacctgcctcttttccttagg

SEQ ID NO: 5391715 - DNA, 25 bp, Homo sapien
ttcagggacagtcccgcccacattt

SEQ ID NO: 5391716 - DNA, 25 bp, Homo sapien
ctacattgtacctctttacctgaga

SEQ ID NO: 5391717 - DNA, 25 bp, Homo sapien
ctctggaacttctacattgtacctc

SEQ ID NO: 5391718 - DNA, 25 bp, Homo sapien
ggaacttctacattgtacctcttta

SEQ ID NO: 5391719 - DNA, 25 bp, Homo sapien
cttctacattgtacctctttacctg

SEQ ID NO: 5391720 - DNA, 25 bp, Homo sapien
catgccaaatgcagcggctgcctgc

SEQ ID NO: 5391721 - DNA, 25 bp, Homo sapien
tttgaatggatcaacagaagcacct

SEQ ID NO: 5391722 - DNA, 25 bp, Homo sapien
catcctgtcccagtaaaccctagag

SEQ ID NO: 5391723 - DNA, 25 bp, Homo sapien
agaggttcagaccaagcccagctgt

SEQ ID NO: 5391724 - DNA, 25 bp, Homo sapien
tgatattggcatttcggttggagca

SEQ ID NO: 5391725 - DNA, 25 bp, Homo sapien
ttcggttggagcaaacagaatttca

SEQ ID NO: 5391726 - DNA, 25 bp, Homo sapien
cagaggaatgcaaggcggtagagat

SEQ ID NO: 5391727 - DNA, 25 bp, Homo sapien
tttgctatcagatatctgtgatatt

SEQ ID NO: 5391728 - DNA, 25 bp, Homo sapien
tgatcactgcctggaagccctctca

SEQ ID NO: 5391729 - DNA, 25 bp, Homo sapien
caagtcttctgctcaattccccctc

SEQ ID NO: 5391730 - DNA, 25 bp, Homo sapien
tccattaagccctccttgatcactg

SEQ ID NO: 5391731 - DNA, 25 bp, Homo sapien
gtcttctgctcaattccccctcctc

SEQ ID NO: 5391732 - DNA, 25 bp, Homo sapien
tcaccatgaacgtctttgacatgag

SEQ ID NO: 5391733 - DNA, 25 bp, Homo sapien
catgaacgtctttgacatgaggcta

SEQ ID NO: 5391734 - DNA, 25 bp, Homo sapien
gcccctcaccatgaacgtctttgac

SEQ ID NO: 5391735 - DNA, 25 bp, Homo sapien
tgaacgtctttgacatgaggctagc

SEQ ID NO: 5391736 - DNA, 25 bp, Homo sapien
tcactcactgctaaccaagtgtgtc

SEQ ID NO: 5391737 - DNA, 25 bp, Homo sapien
ggttaggagtatctttttctcagag

SEQ ID NO: 5391738 - DNA, 25 bp, Homo sapien
caagtgtgtccattatgtttgctca

SEQ ID NO: 5391739 - DNA, 25 bp, Homo sapien
tcttccccactatgagaaaaatcgc

SEQ ID NO: 5391740 - DNA, 25 bp, Homo sapien
cagccctcagatgggctggcagcag

SEQ ID NO: 5391741 - DNA, 25 bp, Homo sapien
gcagccctcagatgggctggcagca

SEQ ID NO: 5391742 - DNA, 25 bp, Homo sapien
agatgtctcacatcccacttgtgca

SEQ ID NO: 5391743 - DNA, 25 bp, Homo sapien
tgctctggcctgcacagatgtctca

SEQ ID NO: 5391744 - DNA, 25 bp, Homo sapien
tgggttctgacactgtgctgcatct

SEQ ID NO: 5391745 - DNA, 25 bp, Homo sapien
cactctgcatagacaccctcctctc

SEQ ID NO: 5391746 - DNA, 25 bp, Homo sapien
tacatagatatcattcttaccctgc

SEQ ID NO: 5391747 - DNA, 25 bp, Homo sapien
cctacatagatatcattcttaccct

SEQ ID NO: 5391748 - DNA, 25 bp, Homo sapien
ctggacctctttcctacatagatat

SEQ ID NO: 5391749 - DNA, 25 bp, Homo sapien
tagatatcattcttaccctgctcag

SEQ ID NO: 5391750 - DNA, 25 bp, Homo sapien
caccaactctggacagtgcttgaag

SEQ ID NO: 5391751 - DNA, 25 bp, Homo sapien
caggaaacgcaggatggatcagaga

SEQ ID NO: 5391752 - DNA, 25 bp, Homo sapien
tccgtcttgggtgtgaatcatggct

SEQ ID NO: 5391753 - DNA, 25 bp, Homo sapien
tcagagagcttcagggtgtgcacaa

SEQ ID NO: 5391754 - DNA, 25 bp, Homo sapien
gatctctgtttgtactgctgggcaa

SEQ ID NO: 5391755 - DNA, 25 bp, Homo sapien
tctgtgcaaaagccactctggcttg

SEQ ID NO: 5391756 - DNA, 25 bp, Homo sapien
ttctgtgcaaaagccactctggctt

SEQ ID NO: 5391757 - DNA, 25 bp, Homo sapien
ttgatctctgtttgtactgctgggc

SEQ ID NO: 5391758 - DNA, 25 bp, Homo sapien
taaagaggaatggtagtgagagtgt

SEQ ID NO: 5391759 - DNA, 25 bp, Homo sapien
ttaaagaggaatggtagtgagagtg

SEQ ID NO: 5391760 - DNA, 25 bp, Homo sapien
tgcacactgggtcttagcatacccg

SEQ ID NO: 5391761 - DNA, 25 bp, Homo sapien
tccagccactagagattgcacactg

SEQ ID NO: 5391762 - DNA, 25 bp, Homo sapien
tagcatacccgtttcctttcaaata

SEQ ID NO: 5391763 - DNA, 25 bp, Homo sapien
cctggatcaaggctggacatctgag

SEQ ID NO: 5391764 - DNA, 25 bp, Homo sapien
gccaactccctgattagaactgaga

SEQ ID NO: 5391765 - DNA, 25 bp, Homo sapien
gagccaactccctgattagaactga

SEQ ID NO: 5391766 - DNA, 25 bp, Homo sapien
catgaggccgttttggcattgagct

SEQ ID NO: 5391767 - DNA, 25 bp, Homo sapien
tgtagatttgagaagggtgattgca

SEQ ID NO: 5391768 - DNA, 25 bp, Homo sapien
gttgactaagtcgtttgtctgttga

SEQ ID NO: 5391769 - DNA, 25 bp, Homo sapien
ttgttgactaagtcgtttgtctgtt

SEQ ID NO: 5391770 - DNA, 25 bp, Homo sapien
tgaagagtctttgttgagggccatc

SEQ ID NO: 5391771 - DNA, 25 bp, Homo sapien
tgactaagtcgtttgtctgttgaag

SEQ ID NO: 5391772 - DNA, 25 bp, Homo sapien
catgggtctgcagtgcctgctccac

SEQ ID NO: 5391773 - DNA, 25 bp, Homo sapien
ccccatgggtctgcagtgcctgctc

SEQ ID NO: 5391774 - DNA, 25 bp, Homo sapien
tcatccccatgggtctgcagtgcct

SEQ ID NO: 5391775 - DNA, 25 bp, Homo sapien
catccccatgggtctgcagtgcctg

SEQ ID NO: 5391776 - DNA, 25 bp, Homo sapien
tctgttcatcccgttccagctcttg

SEQ ID NO: 5391777 - DNA, 25 bp, Homo sapien
gttccagctcttgacggcctttctt

SEQ ID NO: 5391778 - DNA, 25 bp, Homo sapien
gttcatcccgttccagctcttgacg

SEQ ID NO: 5391779 - DNA, 25 bp, Homo sapien
gctcttgacggcctttctttgactt

SEQ ID NO: 5391780 - DNA, 25 bp, Homo sapien
tctgccagtctttgaattcccccat

SEQ ID NO: 5391781 - DNA, 25 bp, Homo sapien
cttaatcccctggactatggctttg

SEQ ID NO: 5391782 - DNA, 25 bp, Homo sapien
cccctggactatggctttgtttctc

SEQ ID NO: 5391783 - DNA, 25 bp, Homo sapien
ttctctgccagtctttgaattcccc

SEQ ID NO: 5391784 - DNA, 25 bp, Homo sapien
tcatatcttacatttgataccgaag

SEQ ID NO: 5391785 - DNA, 25 bp, Homo sapien
gattcatatcttacatttgataccg

SEQ ID NO: 5391786 - DNA, 25 bp, Homo sapien
ttctcagcatctggtgtgaagattc

SEQ ID NO: 5391787 - DNA, 25 bp, Homo sapien
ttcatatcttacatttgataccgaa

SEQ ID NO: 5391788 - DNA, 25 bp, Homo sapien
gtcccttaaacataatgagctttat

SEQ ID NO: 5391789 - DNA, 25 bp, Homo sapien
cccttaaacataatgagctttatta

SEQ ID NO: 5391790 - DNA, 25 bp, Homo sapien
ttatttgttggttaatacacagagc

SEQ ID NO: 5391791 - DNA, 25 bp, Homo sapien
ttgttggttaatacacagagccagg

SEQ ID NO: 5391792 - DNA, 25 bp, Homo sapien
aaggcagttgtagtgctgaccggag

SEQ ID NO: 5391793 - DNA, 25 bp, Homo sapien
ttgtagtgctgaccggaggccacgt

SEQ ID NO: 5391794 - DNA, 25 bp, Homo sapien
tccttcctgctagttcttctgaggg

SEQ ID NO: 5391795 - DNA, 25 bp, Homo sapien
cacgtggggatggatctgtgaagcc

SEQ ID NO: 5391796 - DNA, 25 bp, Homo sapien
gatggccactaggactgatggtgcc

SEQ ID NO: 5391797 - DNA, 25 bp, Homo sapien
tgccctgggctgtctggttggtcat

SEQ ID NO: 5391798 - DNA, 25 bp, Homo sapien
cttgatggccactaggactgatggt

SEQ ID NO: 5391799 - DNA, 25 bp, Homo sapien
cactaggactgatggtgccctgggc

SEQ ID NO: 5391800 - DNA, 25 bp, Homo sapien
tattgtgtgcatcaactcagcctct

SEQ ID NO: 5391801 - DNA, 25 bp, Homo sapien
tcttttgaaaatgccgaagggtaga

SEQ ID NO: 5391802 - DNA, 25 bp, Homo sapien
ggtggcaagcatatttggtcggaaa

SEQ ID NO: 5391803 - DNA, 25 bp, Homo sapien
tttggactgagtcagctctgccgcc

SEQ ID NO: 5391804 - DNA, 25 bp, Homo sapien
aggaatttgccagaggagagcacag

SEQ ID NO: 5391805 - DNA, 25 bp, Homo sapien
gactaggaatttgccagaggagagc

SEQ ID NO: 5391806 - DNA, 25 bp, Homo sapien
ctgactaggaatttgccagaggaga

SEQ ID NO: 5391807 - DNA, 25 bp, Homo sapien
ctaggaatttgccagaggagagcac

SEQ ID NO: 5391808 - DNA, 25 bp, Homo sapien
ggaccagtaggttagagtccttgct

SEQ ID NO: 5391809 - DNA, 25 bp, Homo sapien
tggaccagtaggttagagtccttgc

SEQ ID NO: 5391810 - DNA, 25 bp, Homo sapien
gaccagtaggttagagtccttgctc

SEQ ID NO: 5391811 - DNA, 25 bp, Homo sapien
ctggaccagtaggttagagtccttg

SEQ ID NO: 5391812 - DNA, 25 bp, Homo sapien
cagcgttacagcatggagacacaag

SEQ ID NO: 5391813 - DNA, 25 bp, Homo sapien
gaatccccattatgatctccctggt

SEQ ID NO: 5391814 - DNA, 25 bp, Homo sapien
agatactactttcttagggacagcg

SEQ ID NO: 5391815 - DNA, 25 bp, Homo sapien
cacacataatgctaaagatactact

SEQ ID NO: 5391816 - DNA, 25 bp, Homo sapien
caaaaggtgtttatgacttagatca

SEQ ID NO: 5391817 - DNA, 25 bp, Homo sapien
tagatcaaccattgatttgagaaga

SEQ ID NO: 5391818 - DNA, 25 bp, Homo sapien
ggcttgccaagcttcacatgcacaa

SEQ ID NO: 5391819 - DNA, 25 bp, Homo sapien
tctctgcttcttgtatacttgtaat

SEQ ID NO: 5391820 - DNA, 25 bp, Homo sapien
cagatctgtaccataaggtggaaca

SEQ ID NO: 5391821 - DNA, 25 bp, Homo sapien
caagatataaagacagcacccagat

SEQ ID NO: 5391822 - DNA, 25 bp, Homo sapien
taatatcttcatgaataccgcttcg

SEQ ID NO: 5391823 - DNA, 25 bp, Homo sapien
tcatgaataccgcttcggctacacc

SEQ ID NO: 5391824 - DNA, 25 bp, Homo sapien
cttatatgtggcctacaagctgtgc

SEQ ID NO: 5391825 - DNA, 25 bp, Homo sapien
tggcctacaagctgtgcttctgctt

SEQ ID NO: 5391826 - DNA, 25 bp, Homo sapien
tgcttccatttctcacaactgattt

SEQ ID NO: 5391827 - DNA, 25 bp, Homo sapien
ccatttctcacaactgatttctggt

SEQ ID NO: 5391828 - DNA, 25 bp, Homo sapien
tctttgccaagcctagcgtctttgg

SEQ ID NO: 5391829 - DNA, 25 bp, Homo sapien
caagcctagcgtctttgggactcaa

SEQ ID NO: 5391830 - DNA, 25 bp, Homo sapien
catgcttctggggtgtaattcttca

SEQ ID NO: 5391831 - DNA, 25 bp, Homo sapien
tagcgtctttgggactcaacttctt

SEQ ID NO: 5391832 - DNA, 25 bp, Homo sapien
cttctctctcccaattttatctcca

SEQ ID NO: 5391833 - DNA, 25 bp, Homo sapien
ccctgatgtgtttcttctctctccc

SEQ ID NO: 5391834 - DNA, 25 bp, Homo sapien
tctctcccaattttatctccactgc

SEQ ID NO: 5391835 - DNA, 25 bp, Homo sapien
cccaattttatctccactgccccca

SEQ ID NO: 5391836 - DNA, 25 bp, Homo sapien
aaaaaccactgtgacatattatttt

SEQ ID NO: 5391837 - DNA, 25 bp, Homo sapien
aaaaccactgtgacatattatttta

SEQ ID NO: 5391838 - DNA, 25 bp, Homo sapien
aattagcagaccatggctccttggc

SEQ ID NO: 5391839 - DNA, 25 bp, Homo sapien
gctacggaagtcactaaaggctgcc

SEQ ID NO: 5391840 - DNA, 25 bp, Homo sapien
cagcctatggccacgtggcacaatt

SEQ ID NO: 5391841 - DNA, 25 bp, Homo sapien
tcttcttcctggcaaagctacggaa

SEQ ID NO: 5391842 - DNA, 25 bp, Homo sapien
gggagggatggaatctcagccttac

SEQ ID NO: 5391843 - DNA, 25 bp, Homo sapien
ctgggagggatggaatctcagcctt

SEQ ID NO: 5391844 - DNA, 25 bp, Homo sapien
tgggagggatggaatctcagcctta

SEQ ID NO: 5391845 - DNA, 25 bp, Homo sapien
gaggtaatagaaatgccagatcgtc

SEQ ID NO: 5391846 - DNA, 25 bp, Homo sapien
agtgtcaggcttgcatttccagcag

SEQ ID NO: 5391847 - DNA, 25 bp, Homo sapien
ttgtctggaatagaaagttcacgac

SEQ ID NO: 5391848 - DNA, 25 bp, Homo sapien
aacggtcttcttggtgtattggtgg

SEQ ID NO: 5391849 - DNA, 25 bp, Homo sapien
gaaagggagaatattgaactatgct

SEQ ID NO: 5391850 - DNA, 25 bp, Homo sapien
tcaccctgggctcaagaaagggaga

SEQ ID NO: 5391851 - DNA, 25 bp, Homo sapien
tattgaactatgctaagtgggacct

SEQ ID NO: 5391852 - DNA, 25 bp, Homo sapien
caccctgggctcaagaaagggagaa

SEQ ID NO: 5391853 - DNA, 25 bp, Homo sapien
ctgaagacgggttgtgtattacagg

SEQ ID NO: 5391854 - DNA, 25 bp, Homo sapien
tactgaagacgggttgtgtattaca

SEQ ID NO: 5391855 - DNA, 25 bp, Homo sapien
ctgatactgaagacgggttgtgtat

SEQ ID NO: 5391856 - DNA, 25 bp, Homo sapien
tgatactgaagacgggttgtgtatt

SEQ ID NO: 5391857 - DNA, 25 bp, Homo sapien
ctccaaaagacatccacagtctgca

SEQ ID NO: 5391858 - DNA, 25 bp, Homo sapien
tccaaaagacatccacagtctgcac

SEQ ID NO: 5391859 - DNA, 25 bp, Homo sapien
ccaaaagacatccacagtctgcaca

SEQ ID NO: 5391860 - DNA, 25 bp, Homo sapien
atggtgtgatacatctttcgatttt

SEQ ID NO: 5391861 - DNA, 25 bp, Homo sapien
tggtgtgatacatctttcgattttc

SEQ ID NO: 5391862 - DNA, 25 bp, Homo sapien
tgatacatctttcgattttctctct

SEQ ID NO: 5391863 - DNA, 25 bp, Homo sapien
gtgtgatacatctttcgattttctc

SEQ ID NO: 5391864 - DNA, 25 bp, Homo sapien
tgttgtagtctgaatatccacctgt

SEQ ID NO: 5391865 - DNA, 25 bp, Homo sapien
gttgtagtctgaatatccacctgtg

SEQ ID NO: 5391866 - DNA, 25 bp, Homo sapien
tctgaatatccacctgtgctccatt

SEQ ID NO: 5391867 - DNA, 25 bp, Homo sapien
tatccacctgtgctccattatcaca

SEQ ID NO: 5391868 - DNA, 25 bp, Homo sapien
tcagcaagaggtggttgtactggca

SEQ ID NO: 5391869 - DNA, 25 bp, Homo sapien
tggcaggtgagtggagcaaggtgat

SEQ ID NO: 5391870 - DNA, 25 bp, Homo sapien
cagtttggagctggcaatgtgtgga

SEQ ID NO: 5391871 - DNA, 25 bp, Homo sapien
tcagggagattcagcaagaggtggt

SEQ ID NO: 5391872 - DNA, 25 bp, Homo sapien
aggtgaagtgaaagacaggcttctg

SEQ ID NO: 5391873 - DNA, 25 bp, Homo sapien
ctgtggaccagaaggtgaagtgaaa

SEQ ID NO: 5391874 - DNA, 25 bp, Homo sapien
tggaccagaaggtgaagtgaaagac

SEQ ID NO: 5391875 - DNA, 25 bp, Homo sapien
gaagtgaaagacaggcttctgcttg

SEQ ID NO: 5391876 - DNA, 25 bp, Homo sapien
gaggataggagtctgctgtcacaga

SEQ ID NO: 5391877 - DNA, 25 bp, Homo sapien
gataggagtctgctgtcacagacaa

SEQ ID NO: 5391878 - DNA, 25 bp, Homo sapien
ctaggaggataggagtctgctgtca

SEQ ID NO: 5391879 - DNA, 25 bp, Homo sapien
ggtgctaggaggataggagtctgct

SEQ ID NO: 5391880 - DNA, 25 bp, Homo sapien
tgcagggtccgggataggaaagaat

SEQ ID NO: 5391881 - DNA, 25 bp, Homo sapien
ctgcctgaagcactgtcttggttcc

SEQ ID NO: 5391882 - DNA, 25 bp, Homo sapien
tccaggagcagaaacgggcagaagt

SEQ ID NO: 5391883 - DNA, 25 bp, Homo sapien
aaggaactgcctgaagcactgtctt

SEQ ID NO: 5391884 - DNA, 25 bp, Homo sapien
ttaattagtcagaacattgtgaagg

SEQ ID NO: 5391885 - DNA, 25 bp, Homo sapien
taattagtcagaacattgtgaaggg

SEQ ID NO: 5391886 - DNA, 25 bp, Homo sapien
tcagaacattgtgaaggggagaggc

SEQ ID NO: 5391887 - DNA, 25 bp, Homo sapien
tagtcagaacattgtgaaggggaga

SEQ ID NO: 5391888 - DNA, 25 bp, Homo sapien
tcagcatgtgtaaccccattctgcg

SEQ ID NO: 5391889 - DNA, 25 bp, Homo sapien
catgtgtaaccccattctgcgtctg

SEQ ID NO: 5391890 - DNA, 25 bp, Homo sapien
aggcctcagcatgtgtaaccccatt

SEQ ID NO: 5391891 - DNA, 25 bp, Homo sapien
tgtgtaaccccattctgcgtctgct

SEQ ID NO: 5391892 - DNA, 25 bp, Homo sapien
tgccctacaattctgctggctcctg

SEQ ID NO: 5391893 - DNA, 25 bp, Homo sapien
gcagcaagggctgcgtctcttaact

SEQ ID NO: 5391894 - DNA, 25 bp, Homo sapien
gcgtctcttaactttgactccaaac

SEQ ID NO: 5391895 - DNA, 25 bp, Homo sapien
actgtgcttgtttgccctacaattc

SEQ ID NO: 5391896 - DNA, 25 bp, Homo sapien
gaccaaactgaatcacctgcattgt

SEQ ID NO: 5391897 - DNA, 25 bp, Homo sapien
ctgcattgtagcctctggtcgccat

SEQ ID NO: 5391898 - DNA, 25 bp, Homo sapien
aaactgaatcacctgcattgtagcc

SEQ ID NO: 5391899 - DNA, 25 bp, Homo sapien
cctgcattgtagcctctggtcgcca

SEQ ID NO: 5391900 - DNA, 25 bp, Homo sapien
tagattctgcctctgtttgatgtgc

SEQ ID NO: 5391901 - DNA, 25 bp, Homo sapien
taattaaggaacgaatgctgggaac

SEQ ID NO: 5391902 - DNA, 25 bp, Homo sapien
taagctggtccgacagagctaccaa

SEQ ID NO: 5391903 - DNA, 25 bp, Homo sapien
tggttttaggtcttggcaagtcaag

SEQ ID NO: 5391904 - DNA, 25 bp, Homo sapien
catctggtaaaactcttggaagcta

SEQ ID NO: 5391905 - DNA, 25 bp, Homo sapien
tccccaagttggtcacggagttcca

SEQ ID NO: 5391906 - DNA, 25 bp, Homo sapien
ttaacccactccattctgtggaagg

SEQ ID NO: 5391907 - DNA, 25 bp, Homo sapien
cagtctttttgtacactctccaaat

SEQ ID NO: 5391908 - DNA, 25 bp, Homo sapien
tgttaattcccaagtctctctgcct

SEQ ID NO: 5391909 - DNA, 25 bp, Homo sapien
tccctcttggtactctcctttctgt

SEQ ID NO: 5391910 - DNA, 25 bp, Homo sapien
ctgttaattcccaagtctctctgcc

SEQ ID NO: 5391911 - DNA, 25 bp, Homo sapien
tataaactcttggtctggttctgcc

SEQ ID NO: 5391912 - DNA, 25 bp, Homo sapien
tgtgtctcacctcatagatcagatc

SEQ ID NO: 5391913 - DNA, 25 bp, Homo sapien
ccttgtcctctggtgacatgtgctg

SEQ ID NO: 5391914 - DNA, 25 bp, Homo sapien
gatccaccacaggaagattcccatt

SEQ ID NO: 5391915 - DNA, 25 bp, Homo sapien
ttttctgcctccatgtgatccacca

SEQ ID NO: 5391916 - DNA, 25 bp, Homo sapien
tccatattttatccacattagcacc

SEQ ID NO: 5391917 - DNA, 25 bp, Homo sapien
catattttatccacattagcaccac

SEQ ID NO: 5391918 - DNA, 25 bp, Homo sapien
ttatccatattttatccacattagc

SEQ ID NO: 5391919 - DNA, 25 bp, Homo sapien
tatccatattttatccacattagca

SEQ ID NO: 5391920 - DNA, 25 bp, Homo sapien
gcatgccgatgcctttgaggatgtc

SEQ ID NO: 5391921 - DNA, 25 bp, Homo sapien
gtggcctgactccagttcttgtcaa

SEQ ID NO: 5391922 - DNA, 25 bp, Homo sapien
ttttttgcttgttctgtggcctgac

SEQ ID NO: 5391923 - DNA, 25 bp, Homo sapien
tcatttgatatgcaccggcaggtgt

SEQ ID NO: 5391924 - DNA, 25 bp, Homo sapien
catactgcttatgcaccatgcttca

SEQ ID NO: 5391925 - DNA, 25 bp, Homo sapien
tctcttcatgaagctcagaccatac

SEQ ID NO: 5391926 - DNA, 25 bp, Homo sapien
tcctctctttggtgtcactatttga

SEQ ID NO: 5391927 - DNA, 25 bp, Homo sapien
ttggtcccgcaacctacttctgtag

SEQ ID NO: 5391928 - DNA, 25 bp, Homo sapien
tgatgacatgaccattgcctcggca

SEQ ID NO: 5391929 - DNA, 25 bp, Homo sapien
ccagtctcctttaggatgaacacgg

SEQ ID NO: 5391930 - DNA, 25 bp, Homo sapien
tgaacacggacttctcttgagaagg

SEQ ID NO: 5391931 - DNA, 25 bp, Homo sapien
ggatgctcagtgatgacatgaccat

SEQ ID NO: 5391932 - DNA, 25 bp, Homo sapien
atagatatagcaatgccacttctat

SEQ ID NO: 5391933 - DNA, 25 bp, Homo sapien
tagatatagcaatgccacttctata

SEQ ID NO: 5391934 - DNA, 25 bp, Homo sapien
agatatagcaatgccacttctatat

SEQ ID NO: 5391935 - DNA, 25 bp, Homo sapien
tggtaccttggctagcacgcagagc

SEQ ID NO: 5391936 - DNA, 25 bp, Homo sapien
tttagagacctctgaggatcttccc

SEQ ID NO: 5391937 - DNA, 25 bp, Homo sapien
gaaggatcctctctcgtggcttcac

SEQ ID NO: 5391938 - DNA, 25 bp, Homo sapien
aattgcacttgtgtctttagagacc

SEQ ID NO: 5391939 - DNA, 25 bp, Homo sapien
tatcctgaagacacatacgctaggg

SEQ ID NO: 5391940 - DNA, 25 bp, Homo sapien
cctacctgtactgggaattaatttg

SEQ ID NO: 5391941 - DNA, 25 bp, Homo sapien
aatttggtctgtcgttcaagtaggg

SEQ ID NO: 5391942 - DNA, 25 bp, Homo sapien
tttccgatagccaggacagccctgc

SEQ ID NO: 5391943 - DNA, 25 bp, Homo sapien
ctcagagatattatccttctcttcc

SEQ ID NO: 5391944 - DNA, 25 bp, Homo sapien
ttttctggccattgagcaggtggtt

SEQ ID NO: 5391945 - DNA, 25 bp, Homo sapien
tcttttctggccattgagcaggtgg

SEQ ID NO: 5391946 - DNA, 25 bp, Homo sapien
gtcttttctggccattgagcaggtg

SEQ ID NO: 5391947 - DNA, 25 bp, Homo sapien
cacagagtggtcatgtcttttctgg

SEQ ID NO: 5391948 - DNA, 25 bp, Homo sapien
gtggtacagacttctaggacaggga

SEQ ID NO: 5391949 - DNA, 25 bp, Homo sapien
agggatcagaagcaagggtcccaga

SEQ ID NO: 5391950 - DNA, 25 bp, Homo sapien
cagacttctaggacagggatcagaa

SEQ ID NO: 5391951 - DNA, 25 bp, Homo sapien
gggatcagaagcaagggtcccagaa

SEQ ID NO: 5391952 - DNA, 25 bp, Homo sapien
cctggacactggcatccctgttaca

SEQ ID NO: 5391953 - DNA, 25 bp, Homo sapien
gttgcggcacagcatcaagtgatct

SEQ ID NO: 5391954 - DNA, 25 bp, Homo sapien
caatgctgctatatgacaagaagac

SEQ ID NO: 5391955 - DNA, 25 bp, Homo sapien
cactcttgccattttcttggttgcg

SEQ ID NO: 5391956 - DNA, 25 bp, Homo sapien
tacccaggagcctaaggcgctcctt

SEQ ID NO: 5391957 - DNA, 25 bp, Homo sapien
ctcctttgctgcttccggcatgagc

SEQ ID NO: 5391958 - DNA, 25 bp, Homo sapien
tgcttccggcatgagctacccagga

SEQ ID NO: 5391959 - DNA, 25 bp, Homo sapien
tgctgcttccggcatgagctaccca

SEQ ID NO: 5391960 - DNA, 25 bp, Homo sapien
gtgttttactgtgtgtcggagtgtc

SEQ ID NO: 5391961 - DNA, 25 bp, Homo sapien
gcgttatcaacaggggcctagggca

SEQ ID NO: 5391962 - DNA, 25 bp, Homo sapien
catccggaccttgcgggatggctcg

SEQ ID NO: 5391963 - DNA, 25 bp, Homo sapien
ctagtaacaccgaagccctctcgtg

SEQ ID NO: 5391964 - DNA, 25 bp, Homo sapien
aagcttcaaagttgcggcaaacagt

SEQ ID NO: 5391965 - DNA, 25 bp, Homo sapien
caccggcaccccgaagcttcaaagt

SEQ ID NO: 5391966 - DNA, 25 bp, Homo sapien
ccggcaccccgaagcttcaaagttg

SEQ ID NO: 5391967 - DNA, 25 bp, Homo sapien
caaagttgcggcaaacagttgcggg

SEQ ID NO: 5391968 - DNA, 25 bp, Homo sapien
ccgccgggttgccagacgctggaat

SEQ ID NO: 5391969 - DNA, 25 bp, Homo sapien
gatggcgtctgactgcgccgttcct

SEQ ID NO: 5391970 - DNA, 25 bp, Homo sapien
ttcagtgctgaggagccagagtcgc

SEQ ID NO: 5391971 - DNA, 25 bp, Homo sapien
cagaggtgtacagcagatggcgtct

SEQ ID NO: 5391972 - DNA, 25 bp, Homo sapien
tttcttgcgctcgggaagctcgggg

SEQ ID NO: 5391973 - DNA, 25 bp, Homo sapien
ttcttgcgctcgggaagctcggggc

SEQ ID NO: 5391974 - DNA, 25 bp, Homo sapien
ctttcttgcgctcgggaagctcggg

SEQ ID NO: 5391975 - DNA, 25 bp, Homo sapien
ttctcccagccagacgcgggaactt

SEQ ID NO: 5391976 - DNA, 25 bp, Homo sapien
gctgccggcgcagactttgctcttt

SEQ ID NO: 5391977 - DNA, 25 bp, Homo sapien
gcggctctggcgagacgggtgagtg

SEQ ID NO: 5391978 - DNA, 25 bp, Homo sapien
tcccagaggttacggcggcggctct

SEQ ID NO: 5391979 - DNA, 25 bp, Homo sapien
tcatgcaacgggaccgaaccttggg

SEQ ID NO: 5391980 - DNA, 25 bp, Homo sapien
gcgctgactgcgaaatctgtgcata

SEQ ID NO: 5391981 - DNA, 25 bp, Homo sapien
tgcataggcgttcagtgccagtgga

SEQ ID NO: 5391982 - DNA, 25 bp, Homo sapien
gtttcctttcccgtagcgctgactg

SEQ ID NO: 5391983 - DNA, 25 bp, Homo sapien
tgagcaagccaagaagttttgcagc

SEQ ID NO: 5391984 - DNA, 25 bp, Homo sapien
agcaagccaagaagttttgcagctt

SEQ ID NO: 5391985 - DNA, 25 bp, Homo sapien
ctgagcaagccaagaagttttgcag

SEQ ID NO: 5391986 - DNA, 25 bp, Homo sapien
aagccaagaagttttgcagcttcct

SEQ ID NO: 5391987 - DNA, 25 bp, Homo sapien
tactgccaaggcctctatagtcaat

SEQ ID NO: 5391988 - DNA, 25 bp, Homo sapien
ccaaggcctctatagtcaatggaga

SEQ ID NO: 5391989 - DNA, 25 bp, Homo sapien
ctatagtcaatggagatgactgaca

SEQ ID NO: 5391990 - DNA, 25 bp, Homo sapien
ggcctctatagtcaatggagatgac

SEQ ID NO: 5391991 - DNA, 25 bp, Homo sapien
gatacttgtctatatgtccagctcc

SEQ ID NO: 5391992 - DNA, 25 bp, Homo sapien
gctactctactatggcccctcccct

SEQ ID NO: 5391993 - DNA, 25 bp, Homo sapien
ccctcctgctactctactatggccc

SEQ ID NO: 5391994 - DNA, 25 bp, Homo sapien
ggcataggctctccatgcagcccat

SEQ ID NO: 5391995 - DNA, 25 bp, Homo sapien
tagagaaggcaagtgtgacaaaaac

SEQ ID NO: 5391996 - DNA, 25 bp, Homo sapien
tgagaagtggtaggagactccgggt

SEQ ID NO: 5391997 - DNA, 25 bp, Homo sapien
gagactccgggtagttaacgcatag

SEQ ID NO: 5391998 - DNA, 25 bp, Homo sapien
tagttaacgcatagagaaggcaagt

SEQ ID NO: 5391999 - DNA, 25 bp, Homo sapien
cgaaaaacaatgctagcagtaacat

SEQ ID NO: 5392000 - DNA, 25 bp, Homo sapien
gagccgaaaaacaatgctagcagta

SEQ ID NO: 5392001 - DNA, 25 bp, Homo sapien
gccgaaaaacaatgctagcagtaac

SEQ ID NO: 5392002 - DNA, 25 bp, Homo sapien
ctgagccgaaaaacaatgctagcag

SEQ ID NO: 5392003 - DNA, 25 bp, Homo sapien
gacatccagctgctaaagaacagtt

SEQ ID NO: 5392004 - DNA, 25 bp, Homo sapien
gataggcacagcacacgctttctgg

SEQ ID NO: 5392005 - DNA, 25 bp, Homo sapien
tagtactaacgtccagaaattcctc

SEQ ID NO: 5392006 - DNA, 25 bp, Homo sapien
ctcaattcttctacgatgtgggcca

SEQ ID NO: 5392007 - DNA, 25 bp, Homo sapien
tttctcttgtgacagacggtgcttg

SEQ ID NO: 5392008 - DNA, 25 bp, Homo sapien
ttttctcttgtgacagacggtgctt

SEQ ID NO: 5392009 - DNA, 25 bp, Homo sapien
cagccacagtggctatggtcctttg

SEQ ID NO: 5392010 - DNA, 25 bp, Homo sapien
ttgtcaacctgagagttgacttttg

SEQ ID NO: 5392011 - DNA, 25 bp, Homo sapien
gacttttgaatgctgacagacgttg

SEQ ID NO: 5392012 - DNA, 25 bp, Homo sapien
ttctgccatagaacacactcacagc

SEQ ID NO: 5392013 - DNA, 25 bp, Homo sapien
taatgatggatgcttaaccccaggg

SEQ ID NO: 5392014 - DNA, 25 bp, Homo sapien
tggttatcacactcataccctgggt

SEQ ID NO: 5392015 - DNA, 25 bp, Homo sapien
ggatcattcccgtgactggccatgg

SEQ ID NO: 5392016 - DNA, 25 bp, Homo sapien
ggatgactccttagacttcccaaga

SEQ ID NO: 5392017 - DNA, 25 bp, Homo sapien
caccactgatacatctggtttctga

SEQ ID NO: 5392018 - DNA, 25 bp, Homo sapien
actgatacatctggtttctgatgca

SEQ ID NO: 5392019 - DNA, 25 bp, Homo sapien
aaatcttcttgctagagagatttga

SEQ ID NO: 5392020 - DNA, 25 bp, Homo sapien
cttcttgctagagagatttgagggg

SEQ ID NO: 5392021 - DNA, 25 bp, Homo sapien
tcttgctagagagatttgaggggaa

SEQ ID NO: 5392022 - DNA, 25 bp, Homo sapien
ttgctagagagatttgaggggaaca

SEQ ID NO: 5392023 - DNA, 25 bp, Homo sapien
ccatggccttagcacagcactaact

SEQ ID NO: 5392024 - DNA, 25 bp, Homo sapien
tgtctctagtgatgtcctcccatgg

SEQ ID NO: 5392025 - DNA, 25 bp, Homo sapien
tttctcaagtgcacagcaccatggc

SEQ ID NO: 5392026 - DNA, 25 bp, Homo sapien
tccattgtcctgcttctatgcacac

SEQ ID NO: 5392027 - DNA, 25 bp, Homo sapien
gctagtatctgtagcgtctctctcc

SEQ ID NO: 5392028 - DNA, 25 bp, Homo sapien
ttcagatcttgattgctagtatctg

SEQ ID NO: 5392029 - DNA, 25 bp, Homo sapien
gatcttgattgctagtatctgtagc

SEQ ID NO: 5392030 - DNA, 25 bp, Homo sapien
tgattgctagtatctgtagcgtctc

SEQ ID NO: 5392031 - DNA, 25 bp, Homo sapien
cttgtgagatgttaacagcttacta

SEQ ID NO: 5392032 - DNA, 25 bp, Homo sapien
gagtcataagtcttcactatgaaca

SEQ ID NO: 5392033 - DNA, 25 bp, Homo sapien
caggagtcataagtcttcactatga

SEQ ID NO: 5392034 - DNA, 25 bp, Homo sapien
atttctgtacttgtgagatgttaac

SEQ ID NO: 5392035 - DNA, 25 bp, Homo sapien
caggagccccgtagtttctccaagc

SEQ ID NO: 5392036 - DNA, 25 bp, Homo sapien
gccttgttagtgatagccagattat

SEQ ID NO: 5392037 - DNA, 25 bp, Homo sapien
gggtcctggcttgggtaatcataga

SEQ ID NO: 5392038 - DNA, 25 bp, Homo sapien
tcttattggcactaggccttgttag

SEQ ID NO: 5392039 - DNA, 25 bp, Homo sapien
agttctgactgtggcactgtctcct

SEQ ID NO: 5392040 - DNA, 25 bp, Homo sapien
gcaggcactgatgggtaaacacatg

SEQ ID NO: 5392041 - DNA, 25 bp, Homo sapien
tgaacccacagctgaaacttgtaca

SEQ ID NO: 5392042 - DNA, 25 bp, Homo sapien
gggagctcctgcctgtatgaaccca

SEQ ID NO: 5392043 - DNA, 25 bp, Homo sapien
tccctgatggtgatgtgtgcgtctg

SEQ ID NO: 5392044 - DNA, 25 bp, Homo sapien
tccagtgcgcccgtatgtgcataga

SEQ ID NO: 5392045 - DNA, 25 bp, Homo sapien
gcgtgcagagtatgctccctgatgg

SEQ ID NO: 5392046 - DNA, 25 bp, Homo sapien
cacatgtgcaggtgggttccagtgc

SEQ ID NO: 5392047 - DNA, 25 bp, Homo sapien
tgatataaatcccaacagtgcttgg

SEQ ID NO: 5392048 - DNA, 25 bp, Homo sapien
cacctgtatttataaggactcctga

SEQ ID NO: 5392049 - DNA, 25 bp, Homo sapien
tgcttgggagcagggcaatgtcttt

SEQ ID NO: 5392050 - DNA, 25 bp, Homo sapien
gtatttataaggactcctgatataa

SEQ ID NO: 5392051 - DNA, 25 bp, Homo sapien
ttaggaataggcaagtcaagaggct

SEQ ID NO: 5392052 - DNA, 25 bp, Homo sapien
tttctcttttaggaataggcaagtc

SEQ ID NO: 5392053 - DNA, 25 bp, Homo sapien
ctcttttaggaataggcaagtcaag

SEQ ID NO: 5392054 - DNA, 25 bp, Homo sapien
taggcaagtcaagaggctgaaaaat

SEQ ID NO: 5392055 - DNA, 25 bp, Homo sapien
tccaaagagcaacctaacagtcact

SEQ ID NO: 5392056 - DNA, 25 bp, Homo sapien
acagtcacttgctgggtatggagga

SEQ ID NO: 5392057 - DNA, 25 bp, Homo sapien
gagcaacctaacagtcacttgctgg

SEQ ID NO: 5392058 - DNA, 25 bp, Homo sapien
caacctaacagtcacttgctgggta

SEQ ID NO: 5392059 - DNA, 25 bp, Homo sapien
atatcctctcttttgaatgatatac

SEQ ID NO: 5392060 - DNA, 25 bp, Homo sapien
gtatatcctctcttttgaatgatat

SEQ ID NO: 5392061 - DNA, 25 bp, Homo sapien
tcacgtatatcctctcttttgaatg

SEQ ID NO: 5392062 - DNA, 25 bp, Homo sapien
acgtatatcctctcttttgaatgat

SEQ ID NO: 5392063 - DNA, 25 bp, Homo sapien
ttccacgttgtctactcttctcaag

SEQ ID NO: 5392064 - DNA, 25 bp, Homo sapien
gtcctcttgagaagttgaattttgc

SEQ ID NO: 5392065 - DNA, 25 bp, Homo sapien
tactcttctcaagaatgtcctcttg

SEQ ID NO: 5392066 - DNA, 25 bp, Homo sapien
aattgccttccacgttgtctactct

SEQ ID NO: 5392067 - DNA, 25 bp, Homo sapien
gtttgagcttagatgggtccatatg

SEQ ID NO: 5392068 - DNA, 25 bp, Homo sapien
cagacttaacatgaggaaaagccag

SEQ ID NO: 5392069 - DNA, 25 bp, Homo sapien
aaaagccagagtgtaggtgggaata

SEQ ID NO: 5392070 - DNA, 25 bp, Homo sapien
ccatatgattgacttcttcaatttc

SEQ ID NO: 5392071 - DNA, 25 bp, Homo sapien
tcttcttccacatgcgccgaggata

SEQ ID NO: 5392072 - DNA, 25 bp, Homo sapien
aggataggggtccagagcctgccat

SEQ ID NO: 5392073 - DNA, 25 bp, Homo sapien
ccagagcctgccataagggagtgga

SEQ ID NO: 5392074 - DNA, 25 bp, Homo sapien
ggtggaccttcgtggtatacattcc

SEQ ID NO: 5392075 - DNA, 25 bp, Homo sapien
tctggggctggtgctacaggagaca

SEQ ID NO: 5392076 - DNA, 25 bp, Homo sapien
tggggctggtgctacaggagacagg

SEQ ID NO: 5392077 - DNA, 25 bp, Homo sapien
gtttctactcagaaatccttctggg

SEQ ID NO: 5392078 - DNA, 25 bp, Homo sapien
gggtttctactcagaaatccttctg

SEQ ID NO: 5392079 - DNA, 25 bp, Homo sapien
aaggaaccttcaatgattggccctg

SEQ ID NO: 5392080 - DNA, 25 bp, Homo sapien
tggagatcccaaggaaccttcaatg

SEQ ID NO: 5392081 - DNA, 25 bp, Homo sapien
caggtgaagagaagcaatgagtgat

SEQ ID NO: 5392082 - DNA, 25 bp, Homo sapien
gccctggggtcttactgggagataa

SEQ ID NO: 5392083 - DNA, 25 bp, Homo sapien
tggttcagattgctccttgtggact

SEQ ID NO: 5392084 - DNA, 25 bp, Homo sapien
gagaatattccggtctactggttca

SEQ ID NO: 5392085 - DNA, 25 bp, Homo sapien
gcagacctggtaaaaataatggcat

SEQ ID NO: 5392086 - DNA, 25 bp, Homo sapien
ttggtggcttcatgaagcagacctg

SEQ ID NO: 5392087 - DNA, 25 bp, Homo sapien
gttcccaaagccatgaggactgctg

SEQ ID NO: 5392088 - DNA, 25 bp, Homo sapien
ccagtatgaagatgttatatgtgac

SEQ ID NO: 5392089 - DNA, 25 bp, Homo sapien
tcagattgtgaacccagtgtcattt

SEQ ID NO: 5392090 - DNA, 25 bp, Homo sapien
tatatgtgactggtataatttactg

SEQ ID NO: 5392091 - DNA, 25 bp, Homo sapien
gccaatactaccagaggtaaagaat

SEQ ID NO: 5392092 - DNA, 25 bp, Homo sapien
ccaatactaccagaggtaaagaata

SEQ ID NO: 5392093 - DNA, 25 bp, Homo sapien
ctttctgacttctgtccttcatctt

SEQ ID NO: 5392094 - DNA, 25 bp, Homo sapien
ttctgacttctgtccttcatctttt

SEQ ID NO: 5392095 - DNA, 25 bp, Homo sapien
catgggttctgggttgtttgtgttt

SEQ ID NO: 5392096 - DNA, 25 bp, Homo sapien
catttggagttcatgggttctgggt

SEQ ID NO: 5392097 - DNA, 25 bp, Homo sapien
gaattaagagctgaatcgctaacca

SEQ ID NO: 5392098 - DNA, 25 bp, Homo sapien
tcgctaaccatttggagttcatggg

SEQ ID NO: 5392099 - DNA, 25 bp, Homo sapien
caagattcccttctcgaatctcctt

SEQ ID NO: 5392100 - DNA, 25 bp, Homo sapien
tccatagagtcattctggagctgcc

SEQ ID NO: 5392101 - DNA, 25 bp, Homo sapien
atctccttccatagagtcattctgg

SEQ ID NO: 5392102 - DNA, 25 bp, Homo sapien
ccttctcgaatctccttccatagag

SEQ ID NO: 5392103 - DNA, 25 bp, Homo sapien
gccacagtggtggaaccctcataga

SEQ ID NO: 5392104 - DNA, 25 bp, Homo sapien
gaaatcttcaagtcagccgctctca

SEQ ID NO: 5392105 - DNA, 25 bp, Homo sapien
ttcaagaagtgacatgcccgcatct

SEQ ID NO: 5392106 - DNA, 25 bp, Homo sapien
tgaaagggccccagatactacttag

SEQ ID NO: 5392107 - DNA, 25 bp, Homo sapien
aaagcccaaaattcagtagtcacac

SEQ ID NO: 5392108 - DNA, 25 bp, Homo sapien
gaaaaagcccaaaattcagtagtca

SEQ ID NO: 5392109 - DNA, 25 bp, Homo sapien
aaaagcccaaaattcagtagtcaca

SEQ ID NO: 5392110 - DNA, 25 bp, Homo sapien
cgtagcagacaactgagcaaggagc

SEQ ID NO: 5392111 - DNA, 25 bp, Homo sapien
caaggagctcgggacaggattagac

SEQ ID NO: 5392112 - DNA, 25 bp, Homo sapien
ttagaccagctggagacactgacca

SEQ ID NO: 5392113 - DNA, 25 bp, Homo sapien
tgaaacctcactcaatgccgtggcc

SEQ ID NO: 5392114 - DNA, 25 bp, Homo sapien
gattgaacaagaggttatgttctcg

SEQ ID NO: 5392115 - DNA, 25 bp, Homo sapien
gaggttatgttctcgtgctgatgga

SEQ ID NO: 5392116 - DNA, 25 bp, Homo sapien
ttatgttctcgtgctgatggaatgg

SEQ ID NO: 5392117 - DNA, 25 bp, Homo sapien
caagaggttatgttctcgtgctgat

SEQ ID NO: 5392118 - DNA, 25 bp, Homo sapien
ttttcaacattgtcagcctgggatt

SEQ ID NO: 5392119 - DNA, 25 bp, Homo sapien
caactcagagccatgtctgttttct

SEQ ID NO: 5392120 - DNA, 25 bp, Homo sapien
gcttttgcacaacaactcagagcca

SEQ ID NO: 5392121 - DNA, 25 bp, Homo sapien
tcaacattgtcagcctgggatttct

SEQ ID NO: 5392122 - DNA, 25 bp, Homo sapien
taatgataactagaggacacgtgtc

SEQ ID NO: 5392123 - DNA, 25 bp, Homo sapien
cattctaaatgccagttatccaaga

SEQ ID NO: 5392124 - DNA, 25 bp, Homo sapien
cgtgtctcattctaaatgccagtta

SEQ ID NO: 5392125 - DNA, 25 bp, Homo sapien
gaggacacgtgtctcattctaaatg

SEQ ID NO: 5392126 - DNA, 25 bp, Homo sapien
gagcagagtcctcactattttggaa

SEQ ID NO: 5392127 - DNA, 25 bp, Homo sapien
tctgggctgatttccctggacacat

SEQ ID NO: 5392128 - DNA, 25 bp, Homo sapien
tgctgctccagagtcatgcatggaa

SEQ ID NO: 5392129 - DNA, 25 bp, Homo sapien
tccgtaaaggtaattgctgtcttcc

SEQ ID NO: 5392130 - DNA, 25 bp, Homo sapien
cccttccactgcatcctctgggcac

SEQ ID NO: 5392131 - DNA, 25 bp, Homo sapien
tccacgagggacaccccactcgcct

SEQ ID NO: 5392132 - DNA, 25 bp, Homo sapien
ttcatgtgacatctccacgagggac

SEQ ID NO: 5392133 - DNA, 25 bp, Homo sapien
atctccacgagggacaccccactcg

SEQ ID NO: 5392134 - DNA, 25 bp, Homo sapien
tcatgtgacatctccacgagggaca

SEQ ID NO: 5392135 - DNA, 25 bp, Homo sapien
gccacatctgaagtgagtttgggaa

SEQ ID NO: 5392136 - DNA, 25 bp, Homo sapien
ggaggagtcctcttctacatcgttc

SEQ ID NO: 5392137 - DNA, 25 bp, Homo sapien
gaacctagatcccattttggaggag

SEQ ID NO: 5392138 - DNA, 25 bp, Homo sapien
tctcagaagatctgtcttgtccact

SEQ ID NO: 5392139 - DNA, 25 bp, Homo sapien
tccacactgctgatgagcccggcat

SEQ ID NO: 5392140 - DNA, 25 bp, Homo sapien
caggtcttcactgacctttcatgga

SEQ ID NO: 5392141 - DNA, 25 bp, Homo sapien
tgacgttctaggagtggaaagagac

SEQ ID NO: 5392142 - DNA, 25 bp, Homo sapien
gggttgaaagctaaatggtcacatt

SEQ ID NO: 5392143 - DNA, 25 bp, Homo sapien
tcatttggctgtaaaggcccttaaa

SEQ ID NO: 5392144 - DNA, 25 bp, Homo sapien
tcccaagtgtcaatactcttcatgt

SEQ ID NO: 5392145 - DNA, 25 bp, Homo sapien
catttggctgtaaaggcccttaaag

SEQ ID NO: 5392146 - DNA, 25 bp, Homo sapien
tttgtattcccaagtgtcaatactc

SEQ ID NO: 5392147 - DNA, 25 bp, Homo sapien
ccatgccaaagctacgtagctctga

SEQ ID NO: 5392148 - DNA, 25 bp, Homo sapien
ctgagagcccagaatgcaaccagac

SEQ ID NO: 5392149 - DNA, 25 bp, Homo sapien
caaagctacgtagctctgagagccc

SEQ ID NO: 5392150 - DNA, 25 bp, Homo sapien
ggtataaggatcctgagtgagggaa

SEQ ID NO: 5392151 - DNA, 25 bp, Homo sapien
tctccattcctgttcaacccttgga

SEQ ID NO: 5392152 - DNA, 25 bp, Homo sapien
catctttcacagtctcgggctttgg

SEQ ID NO: 5392153 - DNA, 25 bp, Homo sapien
gttcaacccttggagctccaacaat

SEQ ID NO: 5392154 - DNA, 25 bp, Homo sapien
caatgctgaacatctttcacagtct

SEQ ID NO: 5392155 - DNA, 25 bp, Homo sapien
cttggctcgtgctgtgtggtttaac

SEQ ID NO: 5392156 - DNA, 25 bp, Homo sapien
tggctcgtgctgtgtggtttaactg

SEQ ID NO: 5392157 - DNA, 25 bp, Homo sapien
tgtccttggctcgtgctgtgtggtt

SEQ ID NO: 5392158 - DNA, 25 bp, Homo sapien
cttgtccttggctcgtgctgtgtgg

SEQ ID NO: 5392159 - DNA, 25 bp, Homo sapien
gtcactcagtctctgaacatagtct

SEQ ID NO: 5392160 - DNA, 25 bp, Homo sapien
cacacaatgatttgatgagaaatgc

SEQ ID NO: 5392161 - DNA, 25 bp, Homo sapien
acatagtctctaaatacagcttcac

SEQ ID NO: 5392162 - DNA, 25 bp, Homo sapien
aaatacagcttcactcacacaatga

SEQ ID NO: 5392163 - DNA, 25 bp, Homo sapien
aaaggctttctgacttttgtgccaa

SEQ ID NO: 5392164 - DNA, 25 bp, Homo sapien
tctggataggtaatgctgatggttc

SEQ ID NO: 5392165 - DNA, 25 bp, Homo sapien
cattatctgtactctctcttaggga

SEQ ID NO: 5392166 - DNA, 25 bp, Homo sapien
ttggattctactgggcctgattgga

SEQ ID NO: 5392167 - DNA, 25 bp, Homo sapien
ttacaatgaggccttcattactcct

SEQ ID NO: 5392168 - DNA, 25 bp, Homo sapien
acaatgaggccttcattactccttc

SEQ ID NO: 5392169 - DNA, 25 bp, Homo sapien
tacaatgaggccttcattactcctt

SEQ ID NO: 5392170 - DNA, 25 bp, Homo sapien
ttctcagacattcgtatctcaacca

SEQ ID NO: 5392171 - DNA, 25 bp, Homo sapien
tcttctcagacattcgtatctcaac

SEQ ID NO: 5392172 - DNA, 25 bp, Homo sapien
ctcttctcagacattcgtatctcaa

SEQ ID NO: 5392173 - DNA, 25 bp, Homo sapien
tctcagacattcgtatctcaaccat

SEQ ID NO: 5392174 - DNA, 25 bp, Homo sapien
ccttcccgcacagacatgctgggag

SEQ ID NO: 5392175 - DNA, 25 bp, Homo sapien
caaccataagcccttcccgcacaga

SEQ ID NO: 5392176 - DNA, 25 bp, Homo sapien
agctgcactgccaaccataagccct

SEQ ID NO: 5392177 - DNA, 25 bp, Homo sapien
ttcccgcacagacatgctgggagct

SEQ ID NO: 5392178 - DNA, 25 bp, Homo sapien
tcagatacactgtagtgcttgccta

SEQ ID NO: 5392179 - DNA, 25 bp, Homo sapien
cctgagagttgctccggttgattga

SEQ ID NO: 5392180 - DNA, 25 bp, Homo sapien
gctccggttgattgagtactttgaa

SEQ ID NO: 5392181 - DNA, 25 bp, Homo sapien
gatacactgtagtgcttgcctactg

SEQ ID NO: 5392182 - DNA, 25 bp, Homo sapien
ggcccaacatcaagtacagaggttg

SEQ ID NO: 5392183 - DNA, 25 bp, Homo sapien
atcaagtacagaggttgtggcagca

SEQ ID NO: 5392184 - DNA, 25 bp, Homo sapien
aacatcaagtacagaggttgtggca

SEQ ID NO: 5392185 - DNA, 25 bp, Homo sapien
ccaacatcaagtacagaggttgtgg

SEQ ID NO: 5392186 - DNA, 25 bp, Homo sapien
tggcctgggacatcgtattctgaag

SEQ ID NO: 5392187 - DNA, 25 bp, Homo sapien
caatgtgctaccgatggctggcatc

SEQ ID NO: 5392188 - DNA, 25 bp, Homo sapien
cagggcattgccctcatttggtgga

SEQ ID NO: 5392189 - DNA, 25 bp, Homo sapien
aagggatctgtttccctgatcatgg

SEQ ID NO: 5392190 - DNA, 25 bp, Homo sapien
ctccctcatcgtttgtggggcaatg

SEQ ID NO: 5392191 - DNA, 25 bp, Homo sapien
ccctcatcgtttgtggggcaatggc

SEQ ID NO: 5392192 - DNA, 25 bp, Homo sapien
gactccctcatcgtttgtggggcaa

SEQ ID NO: 5392193 - DNA, 25 bp, Homo sapien
ctcatcgtttgtggggcaatggcca

SEQ ID NO: 5392194 - DNA, 25 bp, Homo sapien
ttatactggtggtatggccagtatg

SEQ ID NO: 5392195 - DNA, 25 bp, Homo sapien
tatactggtggtatggccagtatga

SEQ ID NO: 5392196 - DNA, 25 bp, Homo sapien
atatttatcacaggcgcagctgaga

SEQ ID NO: 5392197 - DNA, 25 bp, Homo sapien
agatattccgaaatccttccctgaa

SEQ ID NO: 5392198 - DNA, 25 bp, Homo sapien
gagagaaacagtgtatgtccagata

SEQ ID NO: 5392199 - DNA, 25 bp, Homo sapien
cgaaatccttccctgaattaattct

SEQ ID NO: 5392200 - DNA, 25 bp, Homo sapien
aatccgtaggagtaacactggtcag

SEQ ID NO: 5392201 - DNA, 25 bp, Homo sapien
cactggtcagttctaaatcaaacat

SEQ ID NO: 5392202 - DNA, 25 bp, Homo sapien
cgcatcctgtatgagaatccgtagg

SEQ ID NO: 5392203 - DNA, 25 bp, Homo sapien
tgtatgtttccgcatcctgtatgag

SEQ ID NO: 5392204 - DNA, 25 bp, Homo sapien
tatagctgccagcataggttgagtg

SEQ ID NO: 5392205 - DNA, 25 bp, Homo sapien
catctctttgtaataatatagctgc

SEQ ID NO: 5392206 - DNA, 25 bp, Homo sapien
ccagcataggttgagtgcaccctga

SEQ ID NO: 5392207 - DNA, 25 bp, Homo sapien
aattatactgatgaccggattccca

SEQ ID NO: 5392208 - DNA, 25 bp, Homo sapien
attctgactaagatggtgtctcatt

SEQ ID NO: 5392209 - DNA, 25 bp, Homo sapien
tgccaaccctttgacattggatagc

SEQ ID NO: 5392210 - DNA, 25 bp, Homo sapien
tgtgaaaatgtagccgttgccaacc

SEQ ID NO: 5392211 - DNA, 25 bp, Homo sapien
gatgtcatttgaagtcgttttagtg

SEQ ID NO: 5392212 - DNA, 25 bp, Homo sapien
ggatagctattgtcttaggaactgc

SEQ ID NO: 5392213 - DNA, 25 bp, Homo sapien
gagctctacacagtgacttgccaca

SEQ ID NO: 5392214 - DNA, 25 bp, Homo sapien
ccacatagaccatggtgtgcaagtt

SEQ ID NO: 5392215 - DNA, 25 bp, Homo sapien
gacaggtatcttcctgatctctgtg

SEQ ID NO: 5392216 - DNA, 25 bp, Homo sapien
tgcacaatgagttgcacagttgaga

SEQ ID NO: 5392217 - DNA, 25 bp, Homo sapien
ttgtaattcttccaagcctagagcc

SEQ ID NO: 5392218 - DNA, 25 bp, Homo sapien
tgtaattcttccaagcctagagcca

SEQ ID NO: 5392219 - DNA, 25 bp, Homo sapien
attgtaattcttccaagcctagagc

SEQ ID NO: 5392220 - DNA, 25 bp, Homo sapien
tctccctatcaaagggttttcaaca

SEQ ID NO: 5392221 - DNA, 25 bp, Homo sapien
tatcaaagggttttcaacacttgtc

SEQ ID NO: 5392222 - DNA, 25 bp, Homo sapien
gtcctgtagctatataaacccaggg

SEQ ID NO: 5392223 - DNA, 25 bp, Homo sapien
caccagaagtgagggttcgtaaatt

SEQ ID NO: 5392224 - DNA, 25 bp, Homo sapien
gtgaggtcacccatttgtggaaagc

SEQ ID NO: 5392225 - DNA, 25 bp, Homo sapien
tgaggtcacccatttgtggaaagcc

SEQ ID NO: 5392226 - DNA, 25 bp, Homo sapien
gaggtcacccatttgtggaaagcca

SEQ ID NO: 5392227 - DNA, 25 bp, Homo sapien
aggtcacccatttgtggaaagccag

SEQ ID NO: 5392228 - DNA, 25 bp, Homo sapien
tgccatggtgacagggattctgcca

SEQ ID NO: 5392229 - DNA, 25 bp, Homo sapien
gacacttggcaaaagtatcctcggg

SEQ ID NO: 5392230 - DNA, 25 bp, Homo sapien
ggcatcataacatctgctccgaggt

SEQ ID NO: 5392231 - DNA, 25 bp, Homo sapien
tgtactgcacggtccttctggtcat

SEQ ID NO: 5392232 - DNA, 25 bp, Homo sapien
ctgtttgctggcagcggactgctgc

SEQ ID NO: 5392233 - DNA, 25 bp, Homo sapien
ttttccctcgtgtggagagttgatg

SEQ ID NO: 5392234 - DNA, 25 bp, Homo sapien
cactgctgctctaggagaaggctgc

SEQ ID NO: 5392235 - DNA, 25 bp, Homo sapien
gtgtgctccccgtcagctgtcactg

SEQ ID NO: 5392236 - DNA, 25 bp, Homo sapien
gggcccgagcagggtttctctcatg

SEQ ID NO: 5392237 - DNA, 25 bp, Homo sapien
cagaggtgctgatgataacccctgc

SEQ ID NO: 5392238 - DNA, 25 bp, Homo sapien
gatgataacccctgcaggtgacacc

SEQ ID NO: 5392239 - DNA, 25 bp, Homo sapien
tcctgagaatggcaagcaggtgtat

SEQ ID NO: 5392240 - DNA, 25 bp, Homo sapien
gatattacccatcagcagctcatca

SEQ ID NO: 5392241 - DNA, 25 bp, Homo sapien
gagagaaggttaaagatattaccca

SEQ ID NO: 5392242 - DNA, 25 bp, Homo sapien
aaagatattacccatcagcagctca

SEQ ID NO: 5392243 - DNA, 25 bp, Homo sapien
ggttaaagatattacccatcagcag

SEQ ID NO: 5392244 - DNA, 25 bp, Homo sapien
gccaatcagcacgttgtgttcttct

SEQ ID NO: 5392245 - DNA, 25 bp, Homo sapien
ctttctgatgccaggtatccttgta

SEQ ID NO: 5392246 - DNA, 25 bp, Homo sapien
gccaggtatccttgtattttaggag

SEQ ID NO: 5392247 - DNA, 25 bp, Homo sapien
tcaagacagccaatcagcacgttgt

SEQ ID NO: 5392248 - DNA, 25 bp, Homo sapien
gaatggaagacaccatagtcactta

SEQ ID NO: 5392249 - DNA, 25 bp, Homo sapien
tcattctccgaatggaagacaccat

SEQ ID NO: 5392250 - DNA, 25 bp, Homo sapien
ctctggaacattggactttcattct

SEQ ID NO: 5392251 - DNA, 25 bp, Homo sapien
gtcacttaacgtttgagctgcagtt

SEQ ID NO: 5392252 - DNA, 25 bp, Homo sapien
tgtctctctactgctcagatcccaa

SEQ ID NO: 5392253 - DNA, 25 bp, Homo sapien
aagtcgctgagccccgcttctcttt

SEQ ID NO: 5392254 - DNA, 25 bp, Homo sapien
tactgctcagatcccaagtcgctga

SEQ ID NO: 5392255 - DNA, 25 bp, Homo sapien
cactgaaaccttacatggcatcatt

SEQ ID NO: 5392256 - DNA, 25 bp, Homo sapien
tatgatacgacagatttccttgtgg

SEQ ID NO: 5392257 - DNA, 25 bp, Homo sapien
cagtttccatgatatgatacgacag

SEQ ID NO: 5392258 - DNA, 25 bp, Homo sapien
gcagtgcgtctattcgagatgttgt

SEQ ID NO: 5392259 - DNA, 25 bp, Homo sapien
tgtggttttgccataggcattggcg

SEQ ID NO: 5392260 - DNA, 25 bp, Homo sapien
gattggaaccagcttaaggacagag

SEQ ID NO: 5392261 - DNA, 25 bp, Homo sapien
tgcagtagttagacagattggaacc

SEQ ID NO: 5392262 - DNA, 25 bp, Homo sapien
agttgtagttattgcccttcggcgc

SEQ ID NO: 5392263 - DNA, 25 bp, Homo sapien
ccttcggcgcactttgagtaaatag

SEQ ID NO: 5392264 - DNA, 25 bp, Homo sapien
cataaattgatctctcaatgacagc

SEQ ID NO: 5392265 - DNA, 25 bp, Homo sapien
ggcagctgttgttcataaattgatc

SEQ ID NO: 5392266 - DNA, 25 bp, Homo sapien
gaaaagtgctttgacgtaagtggtc

SEQ ID NO: 5392267 - DNA, 25 bp, Homo sapien
agatttggaacaactataaggcagc

SEQ ID NO: 5392268 - DNA, 25 bp, Homo sapien
tttcccatttctgcctgaacctctt

SEQ ID NO: 5392269 - DNA, 25 bp, Homo sapien
ctaagactcaggtggctttggtgag

SEQ ID NO: 5392270 - DNA, 25 bp, Homo sapien
tttttctcacttccatatagacatg

SEQ ID NO: 5392271 - DNA, 25 bp, Homo sapien
agctttttcttgctacctgatttaa

SEQ ID NO: 5392272 - DNA, 25 bp, Homo sapien
aatagccccgatcgattttctccca

SEQ ID NO: 5392273 - DNA, 25 bp, Homo sapien
ttctcccatccacgggaggaataag

SEQ ID NO: 5392274 - DNA, 25 bp, Homo sapien
agtggacacaaaccgggagtgttag

SEQ ID NO: 5392275 - DNA, 25 bp, Homo sapien
ggagtgttagagctagtgcagcttc

SEQ ID NO: 5392276 - DNA, 25 bp, Homo sapien
gagatatcaccagtttggacgaacc

SEQ ID NO: 5392277 - DNA, 25 bp, Homo sapien
tatcaccagtttggacgaaccattt

SEQ ID NO: 5392278 - DNA, 25 bp, Homo sapien
agtttggacgaaccattttctctca

SEQ ID NO: 5392279 - DNA, 25 bp, Homo sapien
gaggagatatcaccagtttggacga

SEQ ID NO: 5392280 - DNA, 25 bp, Homo sapien
aatgcagtatcaccaagcaaggaag

SEQ ID NO: 5392281 - DNA, 25 bp, Homo sapien
taattgcatagtaccttcagagaca

SEQ ID NO: 5392282 - DNA, 25 bp, Homo sapien
ggcaaacccacactatgcatttgtg

SEQ ID NO: 5392283 - DNA, 25 bp, Homo sapien
ggttaatcgaggaagtacattcaga

SEQ ID NO: 5392284 - DNA, 25 bp, Homo sapien
ttcctttccttgctgaagtgaacag

SEQ ID NO: 5392285 - DNA, 25 bp, Homo sapien
ttccttgctgaagtgaacagctttg

SEQ ID NO: 5392286 - DNA, 25 bp, Homo sapien
cttgctgaagtgaacagctttgccc

SEQ ID NO: 5392287 - DNA, 25 bp, Homo sapien
tgctgaagtgaacagctttgccctc

SEQ ID NO: 5392288 - DNA, 25 bp, Homo sapien
cagattccgtttttggccttatatg

SEQ ID NO: 5392289 - DNA, 25 bp, Homo sapien
ctatggattctttatggtgtttaca

SEQ ID NO: 5392290 - DNA, 25 bp, Homo sapien
ggccttatatgaacttccctatgga

SEQ ID NO: 5392291 - DNA, 25 bp, Homo sapien
tctacatcagtcagagctagaaacc

SEQ ID NO: 5392292 - DNA, 25 bp, Homo sapien
ccaaattgtaaagaccatgaaggct

SEQ ID NO: 5392293 - DNA, 25 bp, Homo sapien
gccaaattgtaaagaccatgaaggc

SEQ ID NO: 5392294 - DNA, 25 bp, Homo sapien
accaaacaaagattggctttttcag

SEQ ID NO: 5392295 - DNA, 25 bp, Homo sapien
caaagattggctttttcagttaact

SEQ ID NO: 5392296 - DNA, 25 bp, Homo sapien
ctcttaaccaaacaaagattggctt

SEQ ID NO: 5392297 - DNA, 25 bp, Homo sapien
cctcttaaccaaacaaagattggct

SEQ ID NO: 5392298 - DNA, 25 bp, Homo sapien
ctcatggagacctttggaagatcag

SEQ ID NO: 5392299 - DNA, 25 bp, Homo sapien
ggttgtgttgtagtcacccatggca

SEQ ID NO: 5392300 - DNA, 25 bp, Homo sapien
gacaacattatcttcatggtagccc

SEQ ID NO: 5392301 - DNA, 25 bp, Homo sapien
tcagaggcaggttgctcccttgcca

SEQ ID NO: 5392302 - DNA, 25 bp, Homo sapien
cttcaggaaagaatatgcgagagtg

SEQ ID NO: 5392303 - DNA, 25 bp, Homo sapien
tgctgatgaggcgatatccatatct

SEQ ID NO: 5392304 - DNA, 25 bp, Homo sapien
tgcgagagtgctgctttgctgatga

SEQ ID NO: 5392305 - DNA, 25 bp, Homo sapien
gctttgctgatgaggcgatatccat

SEQ ID NO: 5392306 - DNA, 25 bp, Homo sapien
cttggcaacaaattcccataacttt

SEQ ID NO: 5392307 - DNA, 25 bp, Homo sapien
tctcccttggcaacaaattcccata

SEQ ID NO: 5392308 - DNA, 25 bp, Homo sapien
ccttggcaacaaattcccataactt

SEQ ID NO: 5392309 - DNA, 25 bp, Homo sapien
tcccttggcaacaaattcccataac

SEQ ID NO: 5392310 - DNA, 25 bp, Homo sapien
taggcaggcaggtggtttaaactgc

SEQ ID NO: 5392311 - DNA, 25 bp, Homo sapien
ctagctttgccacttaggcaggcag

SEQ ID NO: 5392312 - DNA, 25 bp, Homo sapien
cctcctttgtgattgtaataagggc

SEQ ID NO: 5392313 - DNA, 25 bp, Homo sapien
cacttaggcaggcaggtggtttaaa

SEQ ID NO: 5392314 - DNA, 25 bp, Homo sapien
agtaaactgaggatgtatggagagt

SEQ ID NO: 5392315 - DNA, 25 bp, Homo sapien
gtttaggagtaaactgaggatgtat

SEQ ID NO: 5392316 - DNA, 25 bp, Homo sapien
gagtaaactgaggatgtatggagag

SEQ ID NO: 5392317 - DNA, 25 bp, Homo sapien
agatgggtgtattcagggtgatatg

SEQ ID NO: 5392318 - DNA, 25 bp, Homo sapien
catggttggaagaagtggagatgcc

SEQ ID NO: 5392319 - DNA, 25 bp, Homo sapien
aagaagtggagatgccagctggcaa

SEQ ID NO: 5392320 - DNA, 25 bp, Homo sapien
gccacttctggtagatcagggacag

SEQ ID NO: 5392321 - DNA, 25 bp, Homo sapien
tctggctggcttttgagacttctct

SEQ ID NO: 5392322 - DNA, 25 bp, Homo sapien
cttgcattgtggctagcattgcttg

SEQ ID NO: 5392323 - DNA, 25 bp, Homo sapien
ttttctcagtggtggatatcagaca

SEQ ID NO: 5392324 - DNA, 25 bp, Homo sapien
ggtggatatcagacattcaggtggc

SEQ ID NO: 5392325 - DNA, 25 bp, Homo sapien
ccacttgcattgtggctagcattgc

SEQ ID NO: 5392326 - DNA, 25 bp, Homo sapien
tttgctattcactctctttttcatg

SEQ ID NO: 5392327 - DNA, 25 bp, Homo sapien
tcactctctttttcatgtatgttgg

SEQ ID NO: 5392328 - DNA, 25 bp, Homo sapien
actctctttttcatgtatgttggca

SEQ ID NO: 5392329 - DNA, 25 bp, Homo sapien
gctattcactctctttttcatgtat

SEQ ID NO: 5392330 - DNA, 25 bp, Homo sapien
gctgctcttctccctccttcccctg

SEQ ID NO: 5392331 - DNA, 25 bp, Homo sapien
ttatctctgctgctcttctccctcc

SEQ ID NO: 5392332 - DNA, 25 bp, Homo sapien
ctctgctgctcttctccctccttcc

SEQ ID NO: 5392333 - DNA, 25 bp, Homo sapien
tgctcttctccctccttcccctggt

SEQ ID NO: 5392334 - DNA, 25 bp, Homo sapien
agagagagagccatgtcccgtacca

SEQ ID NO: 5392335 - DNA, 25 bp, Homo sapien
cagagagagagccatgtcccgtacc

SEQ ID NO: 5392336 - DNA, 25 bp, Homo sapien
agagagccatgtcccgtaccacttc

SEQ ID NO: 5392337 - DNA, 25 bp, Homo sapien
agagagagccatgtcccgtaccact

SEQ ID NO: 5392338 - DNA, 25 bp, Homo sapien
taggatactgggctactgggtacat

SEQ ID NO: 5392339 - DNA, 25 bp, Homo sapien
tggctgaaagttcattatttgtgga

SEQ ID NO: 5392340 - DNA, 25 bp, Homo sapien
tatttgtggaagtatagaggaggta

SEQ ID NO: 5392341 - DNA, 25 bp, Homo sapien
tatccattcacattgacacacttgg

SEQ ID NO: 5392342 - DNA, 25 bp, Homo sapien
attcacattgacacacttggctgaa

SEQ ID NO: 5392343 - DNA, 25 bp, Homo sapien
ttccttttggatgtgatcctggaat

SEQ ID NO: 5392344 - DNA, 25 bp, Homo sapien
tgaacactggtaagttctgagcaaa

SEQ ID NO: 5392345 - DNA, 25 bp, Homo sapien
gatcctggaattcaggtcagatcca

SEQ ID NO: 5392346 - DNA, 25 bp, Homo sapien
tgagcaaaacttccaaagaccagat

SEQ ID NO: 5392347 - DNA, 25 bp, Homo sapien
tacttatgcttgtactgaggcaagt

SEQ ID NO: 5392348 - DNA, 25 bp, Homo sapien
tgaggcaagtatttgaacaagagtg

SEQ ID NO: 5392349 - DNA, 25 bp, Homo sapien
atccacatgcatagtggccatccac

SEQ ID NO: 5392350 - DNA, 25 bp, Homo sapien
tggaagaaggccaagtgccctcttt

SEQ ID NO: 5392351 - DNA, 25 bp, Homo sapien
gagacagtttaacagctgcctaacc

SEQ ID NO: 5392352 - DNA, 25 bp, Homo sapien
tatgtacataatccctgttgctttg

SEQ ID NO: 5392353 - DNA, 25 bp, Homo sapien
ggatttcgcggctgtgatagcaaga

SEQ ID NO: 5392354 - DNA, 25 bp, Homo sapien
tgcttctcagtaagaagggtgggtt

SEQ ID NO: 5392355 - DNA, 25 bp, Homo sapien
aaagctgagaccattttatgaagat

SEQ ID NO: 5392356 - DNA, 25 bp, Homo sapien
cattaaaaagctgagaccattttat

SEQ ID NO: 5392357 - DNA, 25 bp, Homo sapien
tataaggtttcaataatatctaaaa

SEQ ID NO: 5392358 - DNA, 25 bp, Homo sapien
tgtaatcataggtgttgaaagtaaa

SEQ ID NO: 5392359 - DNA, 25 bp, Homo sapien
attcacatgctatgttacactgacg

SEQ ID NO: 5392360 - DNA, 25 bp, Homo sapien
gtcctcttggtattcacatgctatg

SEQ ID NO: 5392361 - DNA, 25 bp, Homo sapien
catgctatgttacactgacgttcaa

SEQ ID NO: 5392362 - DNA, 25 bp, Homo sapien
tcttggtattcacatgctatgttac

SEQ ID NO: 5392363 - DNA, 25 bp, Homo sapien
ttggctgtagtccactctctggtac

SEQ ID NO: 5392364 - DNA, 25 bp, Homo sapien
tggtactgtgctgacgcagctgaca

SEQ ID NO: 5392365 - DNA, 25 bp, Homo sapien
tgattggctgtagtccactctctgg

SEQ ID NO: 5392366 - DNA, 25 bp, Homo sapien
actgtgctgacgcagctgacagtgc

SEQ ID NO: 5392367 - DNA, 25 bp, Homo sapien
caagaaggtggctatcctttgattc

SEQ ID NO: 5392368 - DNA, 25 bp, Homo sapien
aagaaggtggctatcctttgattca

SEQ ID NO: 5392369 - DNA, 25 bp, Homo sapien
tcctttgattcactgggtcttggtg

SEQ ID NO: 5392370 - DNA, 25 bp, Homo sapien
ttctttatgcgctctttccctcttc

SEQ ID NO: 5392371 - DNA, 25 bp, Homo sapien
tcagtcatagttctttatgcgctct

SEQ ID NO: 5392372 - DNA, 25 bp, Homo sapien
gaagagccatgtcccagaaaaggac

SEQ ID NO: 5392373 - DNA, 25 bp, Homo sapien
cagaagagccatgtcccagaaaagg

SEQ ID NO: 5392374 - DNA, 25 bp, Homo sapien
gaatcttccctttaatcattggtgt

SEQ ID NO: 5392375 - DNA, 25 bp, Homo sapien
tggtgtcttgaactcttctaagcat

SEQ ID NO: 5392376 - DNA, 25 bp, Homo sapien
gcttgaaagatttgataccaattta

SEQ ID NO: 5392377 - DNA, 25 bp, Homo sapien
tctaagtgtcaactttgtttcattc

SEQ ID NO: 5392378 - DNA, 25 bp, Homo sapien
gattccagcaggtatctcttagagg

SEQ ID NO: 5392379 - DNA, 25 bp, Homo sapien
gaggcatcacctcttacaggactca

SEQ ID NO: 5392380 - DNA, 25 bp, Homo sapien
gaagccctggactggattccatgat

SEQ ID NO: 5392381 - DNA, 25 bp, Homo sapien
gactcaccaaagctcttgctaggta

SEQ ID NO: 5392382 - DNA, 25 bp, Homo sapien
aaagtatattagctccagattcaaa

SEQ ID NO: 5392383 - DNA, 25 bp, Homo sapien
tatattagctccagattcaaatgca

SEQ ID NO: 5392384 - DNA, 25 bp, Homo sapien
tattagctccagattcaaatgcaga

SEQ ID NO: 5392385 - DNA, 25 bp, Homo sapien
gcccaaaagtatattagctccagat

SEQ ID NO: 5392386 - DNA, 25 bp, Homo sapien
gattctgcaaaccttagcccatagg

SEQ ID NO: 5392387 - DNA, 25 bp, Homo sapien
gaaacaagtggagatagagcctcag

SEQ ID NO: 5392388 - DNA, 25 bp, Homo sapien
gagcctcagtcagcttggatccctg

SEQ ID NO: 5392389 - DNA, 25 bp, Homo sapien
acaatgggcattagctgaagaggac

SEQ ID NO: 5392390 - DNA, 25 bp, Homo sapien
gatgattggcattgttgagccagtg

SEQ ID NO: 5392391 - DNA, 25 bp, Homo sapien
tgatgattggcattgttgagccagt

SEQ ID NO: 5392392 - DNA, 25 bp, Homo sapien
gctgatgattggcattgttgagcca

SEQ ID NO: 5392393 - DNA, 25 bp, Homo sapien
ctgatgattggcattgttgagccag

SEQ ID NO: 5392394 - DNA, 25 bp, Homo sapien
catgtgcatgcatcctgtagcttct

SEQ ID NO: 5392395 - DNA, 25 bp, Homo sapien
ttccaaatggtctgcccctgtgacc

SEQ ID NO: 5392396 - DNA, 25 bp, Homo sapien
cttccaaatggtctgcccctgtgac

SEQ ID NO: 5392397 - DNA, 25 bp, Homo sapien
tcttccaaatggtctgcccctgtga

SEQ ID NO: 5392398 - DNA, 25 bp, Homo sapien
aatgggcccacgtcttctttctaga

SEQ ID NO: 5392399 - DNA, 25 bp, Homo sapien
tcccatgcaacaaccaggaccttgg

SEQ ID NO: 5392400 - DNA, 25 bp, Homo sapien
gaaacctagtttacgtcctcagcaa

SEQ ID NO: 5392401 - DNA, 25 bp, Homo sapien
tacaaatgtaagcagagaagcctaa

SEQ ID NO: 5392402 - DNA, 25 bp, Homo sapien
ctgcattgaagccctcactcagtgt

SEQ ID NO: 5392403 - DNA, 25 bp, Homo sapien
gccctcactcagtgtggcttcaatc

SEQ ID NO: 5392404 - DNA, 25 bp, Homo sapien
gcattgaagccctcactcagtgtgg

SEQ ID NO: 5392405 - DNA, 25 bp, Homo sapien
ttgaagccctcactcagtgtggctt

SEQ ID NO: 5392406 - DNA, 25 bp, Homo sapien
tatatgtgcagtcatagaaggccca

SEQ ID NO: 5392407 - DNA, 25 bp, Homo sapien
caatccacgggagaaatgagcaggg

SEQ ID NO: 5392408 - DNA, 25 bp, Homo sapien
tattctgaagcgactatatatgtgc

SEQ ID NO: 5392409 - DNA, 25 bp, Homo sapien
cttgctaagggagaaagcggctttc

SEQ ID NO: 5392410 - DNA, 25 bp, Homo sapien
tccacggaacaccagtgcatgcagg

SEQ ID NO: 5392411 - DNA, 25 bp, Homo sapien
gaattcatggacaagaagctgccag

SEQ ID NO: 5392412 - DNA, 25 bp, Homo sapien
gaggagcttgttttctgaccacggg

SEQ ID NO: 5392413 - DNA, 25 bp, Homo sapien
gaggtttctcaaccattccacggaa

SEQ ID NO: 5392414 - DNA, 25 bp, Homo sapien
taaaagtttaggaagcagtgagatg

SEQ ID NO: 5392415 - DNA, 25 bp, Homo sapien
gatggtaaggactagacctccggcc

SEQ ID NO: 5392416 - DNA, 25 bp, Homo sapien
ttcagctaaacagctgaagcccaaa

SEQ ID NO: 5392417 - DNA, 25 bp, Homo sapien
tctctatgtcctgagttttctgcat

SEQ ID NO: 5392418 - DNA, 25 bp, Homo sapien
cattttggttgcatgacttttctta

SEQ ID NO: 5392419 - DNA, 25 bp, Homo sapien
tggtggctatcctctgtttcttgag

SEQ ID NO: 5392420 - DNA, 25 bp, Homo sapien
tagacttcctgatgttgcaaaaccc

SEQ ID NO: 5392421 - DNA, 25 bp, Homo sapien
tgctgatcaagagaatggtggctat

SEQ ID NO: 5392422 - DNA, 25 bp, Homo sapien
aacatttactataatacagcaatgc

SEQ ID NO: 5392423 - DNA, 25 bp, Homo sapien
catcttcagtatactaacatttact

SEQ ID NO: 5392424 - DNA, 25 bp, Homo sapien
aatcaaatacacgtgattttacaaa

SEQ ID NO: 5392425 - DNA, 25 bp, Homo sapien
atttactataatacagcaatgcctt

SEQ ID NO: 5392426 - DNA, 25 bp, Homo sapien
gaaacagaaccaacgagattatata

SEQ ID NO: 5392427 - DNA, 25 bp, Homo sapien
tgattacagtaagctaaaggccaaa

SEQ ID NO: 5392428 - DNA, 25 bp, Homo sapien
ggaatagtcacttgcatacaaaata

SEQ ID NO: 5392429 - DNA, 25 bp, Homo sapien
ttagacctgtagtaattagtcaggg

SEQ ID NO: 5392430 - DNA, 25 bp, Homo sapien
tgttttatctgtgttgccaactcca

SEQ ID NO: 5392431 - DNA, 25 bp, Homo sapien
tttagatcaggaaagacaagtgtgt

SEQ ID NO: 5392432 - DNA, 25 bp, Homo sapien
gaagcaagcctttgctagtacatca

SEQ ID NO: 5392433 - DNA, 25 bp, Homo sapien
gtatagtaacccctcatatgcctgc

SEQ ID NO: 5392434 - DNA, 25 bp, Homo sapien
ttcaggctcaatacccaggagtttg

SEQ ID NO: 5392435 - DNA, 25 bp, Homo sapien
caatacccaggagtttgtatcaaca

SEQ ID NO: 5392436 - DNA, 25 bp, Homo sapien
ccaaagttcaggctcaatacccagg

SEQ ID NO: 5392437 - DNA, 25 bp, Homo sapien
caggagtttgtatcaacaatgaagt

SEQ ID NO: 5392438 - DNA, 25 bp, Homo sapien
aattcttcattactgcttatagcac

SEQ ID NO: 5392439 - DNA, 25 bp, Homo sapien
ttactgcttatagcacaggagacag

SEQ ID NO: 5392440 - DNA, 25 bp, Homo sapien
tttctcaatatgcagttaacaattc

SEQ ID NO: 5392441 - DNA, 25 bp, Homo sapien
tcaatatgcagttaacaattcttca

SEQ ID NO: 5392442 - DNA, 25 bp, Homo sapien
atccagagtaaatgatggagttctc

SEQ ID NO: 5392443 - DNA, 25 bp, Homo sapien
tccagagtaaatgatggagttctca

SEQ ID NO: 5392444 - DNA, 25 bp, Homo sapien
gctcaaatgtcaggttattagacag

SEQ ID NO: 5392445 - DNA, 25 bp, Homo sapien
ctttaatgggccaagtatcatcctg

SEQ ID NO: 5392446 - DNA, 25 bp, Homo sapien
ttctttaatgggccaagtatcatcc

SEQ ID NO: 5392447 - DNA, 25 bp, Homo sapien
tctgctcaaatgtcaggttattaga

SEQ ID NO: 5392448 - DNA, 25 bp, Homo sapien
tattctaagcatctagtgtactttc

SEQ ID NO: 5392449 - DNA, 25 bp, Homo sapien
attttgttctattctaagcatctag

SEQ ID NO: 5392450 - DNA, 25 bp, Homo sapien
tgttctattctaagcatctagtgta

SEQ ID NO: 5392451 - DNA, 25 bp, Homo sapien
agcatctagtgtactttctggcaga

SEQ ID NO: 5392452 - DNA, 25 bp, Homo sapien
caccagaagtatggaaatcaagact

SEQ ID NO: 5392453 - DNA, 25 bp, Homo sapien
taagtaaaatggacttgcattgctc

SEQ ID NO: 5392454 - DNA, 25 bp, Homo sapien
cagggaatacactggcatagagagc

SEQ ID NO: 5392455 - DNA, 25 bp, Homo sapien
tactgatatgtactactgacaaagg

SEQ ID NO: 5392456 - DNA, 25 bp, Homo sapien
tcaaaagggctattaagctattaac

SEQ ID NO: 5392457 - DNA, 25 bp, Homo sapien
tagtggggctccgattttcaagaat

SEQ ID NO: 5392458 - DNA, 25 bp, Homo sapien
tccagaaattctcaaaagggctatt

SEQ ID NO: 5392459 - DNA, 25 bp, Homo sapien
ggcaaacttccttcgcattagtggg

SEQ ID NO: 5392460 - DNA, 25 bp, Homo sapien
tggattgtgattaccgttgtgaaca

SEQ ID NO: 5392461 - DNA, 25 bp, Homo sapien
tgattaccgttgtgaacaaggtgag

SEQ ID NO: 5392462 - DNA, 25 bp, Homo sapien
attcaatagttaggtttttcagaga

SEQ ID NO: 5392463 - DNA, 25 bp, Homo sapien
aaataaccttgtggattgtgattac

SEQ ID NO: 5392464 - DNA, 25 bp, Homo sapien
gccagtgtacgatttatagcaagga

SEQ ID NO: 5392465 - DNA, 25 bp, Homo sapien
cctctgtgtcagtataagggactga

SEQ ID NO: 5392466 - DNA, 25 bp, Homo sapien
tgagagtactgtccctacaacagcg

SEQ ID NO: 5392467 - DNA, 25 bp, Homo sapien
tatagtatgtcctgtgaactttgcc

SEQ ID NO: 5392468 - DNA, 25 bp, Homo sapien
gctctgaggcattaaccttgttgca

SEQ ID NO: 5392469 - DNA, 25 bp, Homo sapien
tcatcacggagcagaaaaaagggca

SEQ ID NO: 5392470 - DNA, 25 bp, Homo sapien
gcctcctgaggctgaaactgctgtt

SEQ ID NO: 5392471 - DNA, 25 bp, Homo sapien
tatcattcctatggagcctcctgag

SEQ ID NO: 5392472 - DNA, 25 bp, Homo sapien
ctaagagactattgtgtctgtctgc

SEQ ID NO: 5392473 - DNA, 25 bp, Homo sapien
taagagactattgtgtctgtctgca

SEQ ID NO: 5392474 - DNA, 25 bp, Homo sapien
aagagactattgtgtctgtctgcac

SEQ ID NO: 5392475 - DNA, 25 bp, Homo sapien
aaagccttccatttggtgtgtaaat

SEQ ID NO: 5392476 - DNA, 25 bp, Homo sapien
tgcctttgacagggtccttcagtgc

SEQ ID NO: 5392477 - DNA, 25 bp, Homo sapien
cctttgacagggtccttcagtgcct

SEQ ID NO: 5392478 - DNA, 25 bp, Homo sapien
tttgacagggtccttcagtgcctgt

SEQ ID NO: 5392479 - DNA, 25 bp, Homo sapien
ctttgacagggtccttcagtgcctg

SEQ ID NO: 5392480 - DNA, 25 bp, Homo sapien
ggaggcttagggtccatgacatcaa

SEQ ID NO: 5392481 - DNA, 25 bp, Homo sapien
cttaggaatgatgatctaaccagaa

SEQ ID NO: 5392482 - DNA, 25 bp, Homo sapien
aggcttagggtccatgacatcaaac

SEQ ID NO: 5392483 - DNA, 25 bp, Homo sapien
tggtcttaggaatgatgatctaacc

SEQ ID NO: 5392484 - DNA, 25 bp, Homo sapien
ggaggactgatgtaaagaatcagga

SEQ ID NO: 5392485 - DNA, 25 bp, Homo sapien
gaaggaggactgatgtaaagaatca

SEQ ID NO: 5392486 - DNA, 25 bp, Homo sapien
aagaatcaggattttctggacaagt

SEQ ID NO: 5392487 - DNA, 25 bp, Homo sapien
caggattttctggacaagttgatga

SEQ ID NO: 5392488 - DNA, 25 bp, Homo sapien
tgaatgagtgatagatggataaaag

SEQ ID NO: 5392489 - DNA, 25 bp, Homo sapien
tagatggataaaagtccagtgtcca

SEQ ID NO: 5392490 - DNA, 25 bp, Homo sapien
ctgaatgagtgatagatggataaaa

SEQ ID NO: 5392491 - DNA, 25 bp, Homo sapien
gatggataaaagtccagtgtccaca

SEQ ID NO: 5392492 - DNA, 25 bp, Homo sapien
tgctaactttgagttagcaaggtgc

SEQ ID NO: 5392493 - DNA, 25 bp, Homo sapien
ggtgctaactttgagttagcaaggt

SEQ ID NO: 5392494 - DNA, 25 bp, Homo sapien
ctaactttgagttagcaaggtgcat

SEQ ID NO: 5392495 - DNA, 25 bp, Homo sapien
aaaaggtgctaactttgagttagca

SEQ ID NO: 5392496 - DNA, 25 bp, Homo sapien
tcatggcaacaactttttatggctc

SEQ ID NO: 5392497 - DNA, 25 bp, Homo sapien
tggcaacaactttttatggctcttt

SEQ ID NO: 5392498 - DNA, 25 bp, Homo sapien
ttcatggcaacaactttttatggct

SEQ ID NO: 5392499 - DNA, 25 bp, Homo sapien
catggcaacaactttttatggctct

SEQ ID NO: 5392500 - DNA, 25 bp, Homo sapien
tccgtaaaagttcctgcaggcagag

SEQ ID NO: 5392501 - DNA, 25 bp, Homo sapien
tacatttgccaaggactgggtacat

SEQ ID NO: 5392502 - DNA, 25 bp, Homo sapien
gtcacttggctgatactccgtaaaa

SEQ ID NO: 5392503 - DNA, 25 bp, Homo sapien
tgctggtaagcccacttcttcgcaa

SEQ ID NO: 5392504 - DNA, 25 bp, Homo sapien
tggactgtaagctatttccccagga

SEQ ID NO: 5392505 - DNA, 25 bp, Homo sapien
ccactcgggtggttttagatgactt

SEQ ID NO: 5392506 - DNA, 25 bp, Homo sapien
tagtagctgaaacaaccactcgggt

SEQ ID NO: 5392507 - DNA, 25 bp, Homo sapien
taattcaaatagcacccactggttc

SEQ ID NO: 5392508 - DNA, 25 bp, Homo sapien
gtctcccgtgcaaagcgatccatca

SEQ ID NO: 5392509 - DNA, 25 bp, Homo sapien
ccgagctgcagcctctctaatctgg

SEQ ID NO: 5392510 - DNA, 25 bp, Homo sapien
gcgatccatcaaagtcacttgctgg

SEQ ID NO: 5392511 - DNA, 25 bp, Homo sapien
agagctgggtctcccgtgcaaagcg

SEQ ID NO: 5392512 - DNA, 25 bp, Homo sapien
aactgcaagcctatcaccggcaggg

SEQ ID NO: 5392513 - DNA, 25 bp, Homo sapien
ggaactgcaagcctatcaccggcag

SEQ ID NO: 5392514 - DNA, 25 bp, Homo sapien
tgggaactgcaagcctatcaccggc

SEQ ID NO: 5392515 - DNA, 25 bp, Homo sapien
ctgggaactgcaagcctatcaccgg

SEQ ID NO: 5392516 - DNA, 25 bp, Homo sapien
aacatggagacttgaatcccctgtg

SEQ ID NO: 5392517 - DNA, 25 bp, Homo sapien
gtgaaaatgaacatggagacttgaa

SEQ ID NO: 5392518 - DNA, 25 bp, Homo sapien
gaaaatgaacatggagacttgaatc

SEQ ID NO: 5392519 - DNA, 25 bp, Homo sapien
aatgaacatggagacttgaatcccc

SEQ ID NO: 5392520 - DNA, 25 bp, Homo sapien
gctctaagtagtcacactccttacc

SEQ ID NO: 5392521 - DNA, 25 bp, Homo sapien
ctgctctaagtagtcacactcctta

SEQ ID NO: 5392522 - DNA, 25 bp, Homo sapien
tctaagtagtcacactccttaccat

SEQ ID NO: 5392523 - DNA, 25 bp, Homo sapien
tctgctctaagtagtcacactcctt

SEQ ID NO: 5392524 - DNA, 25 bp, Homo sapien
gacagtcgtttgcatttagaccgct

SEQ ID NO: 5392525 - DNA, 25 bp, Homo sapien
ttaatagggttttcgctgctagcca

SEQ ID NO: 5392526 - DNA, 25 bp, Homo sapien
aagtctcagtgtgctctaattggcc

SEQ ID NO: 5392527 - DNA, 25 bp, Homo sapien
taattggccatgattagcatggctc

SEQ ID NO: 5392528 - DNA, 25 bp, Homo sapien
gccaaaagatttggacatcattact

SEQ ID NO: 5392529 - DNA, 25 bp, Homo sapien
caaaagatttggacatcattactgg

SEQ ID NO: 5392530 - DNA, 25 bp, Homo sapien
ctgccaaaagatttggacatcatta

SEQ ID NO: 5392531 - DNA, 25 bp, Homo sapien
aagatttggacatcattactggttc

SEQ ID NO: 5392532 - DNA, 25 bp, Homo sapien
agtaagtgttgctggagtaagctgt

SEQ ID NO: 5392533 - DNA, 25 bp, Homo sapien
gttgctggagtaagctgtaacagct

SEQ ID NO: 5392534 - DNA, 25 bp, Homo sapien
gaatgttgctggagtaagtgttgct

SEQ ID NO: 5392535 - DNA, 25 bp, Homo sapien
tgtaacagctaacacgtagaggctg

SEQ ID NO: 5392536 - DNA, 25 bp, Homo sapien
ttgtcaccttctcgtctggttggtg

SEQ ID NO: 5392537 - DNA, 25 bp, Homo sapien
cttctcgtctggttggtgaaggcac

SEQ ID NO: 5392538 - DNA, 25 bp, Homo sapien
ctcgtctggttggtgaaggcacata

SEQ ID NO: 5392539 - DNA, 25 bp, Homo sapien
caccttctcgtctggttggtgaagg

SEQ ID NO: 5392540 - DNA, 25 bp, Homo sapien
caagcacagatagttttattggtga

SEQ ID NO: 5392541 - DNA, 25 bp, Homo sapien
taaaaccagtcttaggctgggtgcc

SEQ ID NO: 5392542 - DNA, 25 bp, Homo sapien
ggttgacgcatgtggatcactttga

SEQ ID NO: 5392543 - DNA, 25 bp, Homo sapien
ttgaaaacagccttaccaaaatggc

SEQ ID NO: 5392544 - DNA, 25 bp, Homo sapien
caacatactgaatggcccaacagtg

SEQ ID NO: 5392545 - DNA, 25 bp, Homo sapien
ttgagcttactttattatgcaggtc

SEQ ID NO: 5392546 - DNA, 25 bp, Homo sapien
gaaagtcatctgagcataatgcaag

SEQ ID NO: 5392547 - DNA, 25 bp, Homo sapien
cccaacagtgacataacatctcaaa

SEQ ID NO: 5392548 - DNA, 25 bp, Homo sapien
cttctgttataagagagtttctctg

SEQ ID NO: 5392549 - DNA, 25 bp, Homo sapien
cattctcagcagactaactaacaca

SEQ ID NO: 5392550 - DNA, 25 bp, Homo sapien
ttcaacagacgatttggatatcaaa

SEQ ID NO: 5392551 - DNA, 25 bp, Homo sapien
tacttgcatgtttaggttcattgca

SEQ ID NO: 5392552 - DNA, 25 bp, Homo sapien
gttatgctctcctctatttcaattt

SEQ ID NO: 5392553 - DNA, 25 bp, Homo sapien
ttatgctctcctctatttcaatttc

SEQ ID NO: 5392554 - DNA, 25 bp, Homo sapien
tgtctctaagccctaaatcagactg

SEQ ID NO: 5392555 - DNA, 25 bp, Homo sapien
tcagcagtctgcctaagcacagcca

SEQ ID NO: 5392556 - DNA, 25 bp, Homo sapien
taagccctaaatcagactgcttgat

SEQ ID NO: 5392557 - DNA, 25 bp, Homo sapien
gcttgatatctctgcagttttgtac

SEQ ID NO: 5392558 - DNA, 25 bp, Homo sapien
cctcaatcagaggacatttctgctc

SEQ ID NO: 5392559 - DNA, 25 bp, Homo sapien
tcatcagtcaagcaggcagaccaca

SEQ ID NO: 5392560 - DNA, 25 bp, Homo sapien
gatgaggagggtgggtctagtggtc

SEQ ID NO: 5392561 - DNA, 25 bp, Homo sapien
tcagacaaaggctgagaggtagact

SEQ ID NO: 5392562 - DNA, 25 bp, Homo sapien
ttccccaagggctacgcaaacgata

SEQ ID NO: 5392563 - DNA, 25 bp, Homo sapien
gttcgtatagtaagctgtcccaggg

SEQ ID NO: 5392564 - DNA, 25 bp, Homo sapien
ctgtcactgtaaaactgtaggcgtg

SEQ ID NO: 5392565 - DNA, 25 bp, Homo sapien
tctctttgccaagatcaatccccat

SEQ ID NO: 5392566 - DNA, 25 bp, Homo sapien
agcaccaaaatctggtcacactcat

SEQ ID NO: 5392567 - DNA, 25 bp, Homo sapien
aatctggtcacactcattggctatg

SEQ ID NO: 5392568 - DNA, 25 bp, Homo sapien
taagaaataaggttgttaacatcac

SEQ ID NO: 5392569 - DNA, 25 bp, Homo sapien
tataagaaataaggttgttaacatc

SEQ ID NO: 5392570 - DNA, 25 bp, Homo sapien
tctgagatatgaccagttgcacaca

SEQ ID NO: 5392571 - DNA, 25 bp, Homo sapien
aacaatgcctgtagcggtcatgagt

SEQ ID NO: 5392572 - DNA, 25 bp, Homo sapien
tagcggtcatgagtcttggcaagaa

SEQ ID NO: 5392573 - DNA, 25 bp, Homo sapien
atcatgatgatcagtgtttgacccc

SEQ ID NO: 5392574 - DNA, 25 bp, Homo sapien
ctttcacatagagatgttctttcct

SEQ ID NO: 5392575 - DNA, 25 bp, Homo sapien
ttcacatagagatgttctttccttc

SEQ ID NO: 5392576 - DNA, 25 bp, Homo sapien
tttcacatagagatgttctttcctt

SEQ ID NO: 5392577 - DNA, 25 bp, Homo sapien
tctttcacatagagatgttctttcc

SEQ ID NO: 5392578 - DNA, 25 bp, Homo sapien
ttattcttcagctgctcttgtggag

SEQ ID NO: 5392579 - DNA, 25 bp, Homo sapien
tattcttcagctgctcttgtggagc

SEQ ID NO: 5392580 - DNA, 25 bp, Homo sapien
ccaggtggatgcttgaaaatgcttc

SEQ ID NO: 5392581 - DNA, 25 bp, Homo sapien
ggatgcttgaaaatgcttccttgtt

SEQ ID NO: 5392582 - DNA, 25 bp, Homo sapien
agccaggtggatgcttgaaaatgct

SEQ ID NO: 5392583 - DNA, 25 bp, Homo sapien
ggtggatgcttgaaaatgcttcctt

SEQ ID NO: 5392584 - DNA, 25 bp, Homo sapien
ggatctgggaaagtaacctgtatca

SEQ ID NO: 5392585 - DNA, 25 bp, Homo sapien
gaactaagccttctcgtcagggaac

SEQ ID NO: 5392586 - DNA, 25 bp, Homo sapien
aattcaaaggacagaacagatggct

SEQ ID NO: 5392587 - DNA, 25 bp, Homo sapien
catacatgaacataggagccttgca

SEQ ID NO: 5392588 - DNA, 25 bp, Homo sapien
gcagttgtaacgcaggcagctgtaa

SEQ ID NO: 5392589 - DNA, 25 bp, Homo sapien
cagttgtaacgcaggcagctgtaat

SEQ ID NO: 5392590 - DNA, 25 bp, Homo sapien
taaaattgggttctgatcctgtcaa

SEQ ID NO: 5392591 - DNA, 25 bp, Homo sapien
tactgtcacattgtctaagatggaa

SEQ ID NO: 5392592 - DNA, 25 bp, Homo sapien
tacacaaagacttcattactgtcac

SEQ ID NO: 5392593 - DNA, 25 bp, Homo sapien
tcaggagtccatgtttcttggatag

SEQ ID NO: 5392594 - DNA, 25 bp, Homo sapien
gaagcctgaacagtcgatcaacctg

SEQ ID NO: 5392595 - DNA, 25 bp, Homo sapien
tattaccataaagtagtgcctcagg

SEQ ID NO: 5392596 - DNA, 25 bp, Homo sapien
tagggtctatagtagcagagatccc

SEQ ID NO: 5392597 - DNA, 25 bp, Homo sapien
gaaatgccccagatactctagggtc

SEQ ID NO: 5392598 - DNA, 25 bp, Homo sapien
ggtgtgcaccaccacgaccagttaa

SEQ ID NO: 5392599 - DNA, 25 bp, Homo sapien
gtgtgcaccaccacgaccagttaat

SEQ ID NO: 5392600 - DNA, 25 bp, Homo sapien
tcaggtaggccaagataggtgctta

SEQ ID NO: 5392601 - DNA, 25 bp, Homo sapien
catcaggtaggccaagataggtgct

SEQ ID NO: 5392602 - DNA, 25 bp, Homo sapien
caggtaggccaagataggtgcttac

SEQ ID NO: 5392603 - DNA, 25 bp, Homo sapien
caggtggggagtaagactctttcct

SEQ ID NO: 5392604 - DNA, 25 bp, Homo sapien
tccacccagcccgataaagcatgcc

SEQ ID NO: 5392605 - DNA, 25 bp, Homo sapien
gctggcagtaccctgctctccacag

SEQ ID NO: 5392606 - DNA, 25 bp, Homo sapien
cacccagcccgataaagcatgccga

SEQ ID NO: 5392607 - DNA, 25 bp, Homo sapien
ccgctccacccagcccgataaagca

SEQ ID NO: 5392608 - DNA, 25 bp, Homo sapien
cgacctgtaaccatctcaggctaac

SEQ ID NO: 5392609 - DNA, 25 bp, Homo sapien
gacctgtaaccatctcaggctaaca

SEQ ID NO: 5392610 - DNA, 25 bp, Homo sapien
acgacctgtaaccatctcaggctaa

SEQ ID NO: 5392611 - DNA, 25 bp, Homo sapien
aacgacctgtaaccatctcaggcta

SEQ ID NO: 5392612 - DNA, 25 bp, Homo sapien
gtggtcagagatggtttctcttgtt

SEQ ID NO: 5392613 - DNA, 25 bp, Homo sapien
agtgacaatggggagtttccaaggg

SEQ ID NO: 5392614 - DNA, 25 bp, Homo sapien
tctcttgttggcttatgtctccctg

SEQ ID NO: 5392615 - DNA, 25 bp, Homo sapien
tggcttatgtctccctgatttttgt

SEQ ID NO: 5392616 - DNA, 25 bp, Homo sapien
gatacctgtggtagtaccatttcgt

SEQ ID NO: 5392617 - DNA, 25 bp, Homo sapien
tgcaatcagatgtttgtccagtaca

SEQ ID NO: 5392618 - DNA, 25 bp, Homo sapien
tctacaactgcatcattgaaagctg

SEQ ID NO: 5392619 - DNA, 25 bp, Homo sapien
agtgttagctgctgcaatcagatgt

SEQ ID NO: 5392620 - DNA, 25 bp, Homo sapien
tcccgaatcatttctagcttgtttt

SEQ ID NO: 5392621 - DNA, 25 bp, Homo sapien
tctcaaccatttgctgatattcccg

SEQ ID NO: 5392622 - DNA, 25 bp, Homo sapien
cacattctcatatgcaacagatagg

SEQ ID NO: 5392623 - DNA, 25 bp, Homo sapien
tctcatatgcaacagataggaggtt

SEQ ID NO: 5392624 - DNA, 25 bp, Homo sapien
gccagcttcgcctggtacaccagat

SEQ ID NO: 5392625 - DNA, 25 bp, Homo sapien
ggccagcttcgcctggtacaccaga

SEQ ID NO: 5392626 - DNA, 25 bp, Homo sapien
agcttcgcctggtacaccagatcct

SEQ ID NO: 5392627 - DNA, 25 bp, Homo sapien
tcggccagcttcgcctggtacacca

SEQ ID NO: 5392628 - DNA, 25 bp, Homo sapien
tcatatgggtgttgtggatccggaa

SEQ ID NO: 5392629 - DNA, 25 bp, Homo sapien
caaggacccatgtacctcagttgga

SEQ ID NO: 5392630 - DNA, 25 bp, Homo sapien
taaactctcaatgtgcatggtacac

SEQ ID NO: 5392631 - DNA, 25 bp, Homo sapien
ggaaatggacttgtttaaactctca

SEQ ID NO: 5392632 - DNA, 25 bp, Homo sapien
cagaacgatgggtcaggcaccgtga

SEQ ID NO: 5392633 - DNA, 25 bp, Homo sapien
aacgatgggtcaggcaccgtgaagg

SEQ ID NO: 5392634 - DNA, 25 bp, Homo sapien
ctgcagaacgatgggtcaggcaccg

SEQ ID NO: 5392635 - DNA, 25 bp, Homo sapien
agaacgatgggtcaggcaccgtgaa

SEQ ID NO: 5392636 - DNA, 25 bp, Homo sapien
gtcacaccagggtgatacccactag

SEQ ID NO: 5392637 - DNA, 25 bp, Homo sapien
cagtgttctggagtgccttttcatc

SEQ ID NO: 5392638 - DNA, 25 bp, Homo sapien
ctggagtgccttttcatcagtcaca

SEQ ID NO: 5392639 - DNA, 25 bp, Homo sapien
gtcaatataattcctgtttcataca

SEQ ID NO: 5392640 - DNA, 25 bp, Homo sapien
tggccatgcttgcaggagtgtaagg

SEQ ID NO: 5392641 - DNA, 25 bp, Homo sapien
tagtgatgttgacctaatactcaac

SEQ ID NO: 5392642 - DNA, 25 bp, Homo sapien
tgacctaatactcaacatccaagta

SEQ ID NO: 5392643 - DNA, 25 bp, Homo sapien
caacatccaagtataagaatctaag

SEQ ID NO: 5392644 - DNA, 25 bp, Homo sapien
acaggtacaacacctcttgccttct

SEQ ID NO: 5392645 - DNA, 25 bp, Homo sapien
aacaggtacaacacctcttgccttc

SEQ ID NO: 5392646 - DNA, 25 bp, Homo sapien
caacaggtacaacacctcttgcctt

SEQ ID NO: 5392647 - DNA, 25 bp, Homo sapien
aatattaacagtcaaggcacctagg

SEQ ID NO: 5392648 - DNA, 25 bp, Homo sapien
gagcaaccacccataggtccggagt

SEQ ID NO: 5392649 - DNA, 25 bp, Homo sapien
gaagagactcaatcactgcaggcag

SEQ ID NO: 5392650 - DNA, 25 bp, Homo sapien
cccggcttggaaggtcagatgcaaa

SEQ ID NO: 5392651 - DNA, 25 bp, Homo sapien
gtttgtttaatcatcccctagtaga

SEQ ID NO: 5392652 - DNA, 25 bp, Homo sapien
aaatctctgaggtgactctttctct

SEQ ID NO: 5392653 - DNA, 25 bp, Homo sapien
gattcatattccttgtgatctttac

SEQ ID NO: 5392654 - DNA, 25 bp, Homo sapien
tccatgtataaaagaccatggttct

SEQ ID NO: 5392655 - DNA, 25 bp, Homo sapien
acagagaagaaaagtatgactcggg

SEQ ID NO: 5392656 - DNA, 25 bp, Homo sapien
ttgtatcatcatcccttacaaccca

SEQ ID NO: 5392657 - DNA, 25 bp, Homo sapien
gatcttttggaagctaagatttata

SEQ ID NO: 5392658 - DNA, 25 bp, Homo sapien
gatgagtgactttcccgaggacaca

SEQ ID NO: 5392659 - DNA, 25 bp, Homo sapien
ttcattgagatagccagaaatgcca

SEQ ID NO: 5392660 - DNA, 25 bp, Homo sapien
cacatgctctttttcattgagatag

SEQ ID NO: 5392661 - DNA, 25 bp, Homo sapien
gccacaatcaatcttgataaaactg

SEQ ID NO: 5392662 - DNA, 25 bp, Homo sapien
gccagaaatgccacaatcaatcttg

SEQ ID NO: 5392663 - DNA, 25 bp, Homo sapien
catgacaccccatgagcttggaatt

SEQ ID NO: 5392664 - DNA, 25 bp, Homo sapien
agtgtgtaccttgctagtctctaaa

SEQ ID NO: 5392665 - DNA, 25 bp, Homo sapien
tttcagtagacccaggatgcatagg

SEQ ID NO: 5392666 - DNA, 25 bp, Homo sapien
cattgaggtagcttccagtttggga

SEQ ID NO: 5392667 - DNA, 25 bp, Homo sapien
taaaagcaggaaggtcactctcatc

SEQ ID NO: 5392668 - DNA, 25 bp, Homo sapien
tatgaaacttagctgctcttcccct

SEQ ID NO: 5392669 - DNA, 25 bp, Homo sapien
tgaaccagattcagcagtaatgccc

SEQ ID NO: 5392670 - DNA, 25 bp, Homo sapien
tcccctgaagcaggctatgaaactt

SEQ ID NO: 5392671 - DNA, 25 bp, Homo sapien
ttatgaggtggtgaaagggcttcat

SEQ ID NO: 5392672 - DNA, 25 bp, Homo sapien
cttatgaggtggtgaaagggcttca

SEQ ID NO: 5392673 - DNA, 25 bp, Homo sapien
tggtgaaagggcttcattagctgtc

SEQ ID NO: 5392674 - DNA, 25 bp, Homo sapien
ggtggtgaaagggcttcattagctg

SEQ ID NO: 5392675 - DNA, 25 bp, Homo sapien
agttgtagaggcttgtacagtgcca

SEQ ID NO: 5392676 - DNA, 25 bp, Homo sapien
tgctgtagtggtagaaactcaatgt

SEQ ID NO: 5392677 - DNA, 25 bp, Homo sapien
caatgttaaccagtttgttcccaca

SEQ ID NO: 5392678 - DNA, 25 bp, Homo sapien
atttcgagttcccatgctgctgtag

SEQ ID NO: 5392679 - DNA, 25 bp, Homo sapien
gcctttaggtgcattggtagcctga

SEQ ID NO: 5392680 - DNA, 25 bp, Homo sapien
agcctttaggtgcattggtagcctg

SEQ ID NO: 5392681 - DNA, 25 bp, Homo sapien
cctttaggtgcattggtagcctgag

SEQ ID NO: 5392682 - DNA, 25 bp, Homo sapien
aagcctttaggtgcattggtagcct

SEQ ID NO: 5392683 - DNA, 25 bp, Homo sapien
tgcctattagccatagtgagatacc

SEQ ID NO: 5392684 - DNA, 25 bp, Homo sapien
aatgtgcatgacatccatagtcacc

SEQ ID NO: 5392685 - DNA, 25 bp, Homo sapien
ccagagaaataatgcctattagcca

SEQ ID NO: 5392686 - DNA, 25 bp, Homo sapien
tcacagaaagggatatctagatggc

SEQ ID NO: 5392687 - DNA, 25 bp, Homo sapien
tatcagactctgctcgatcaagcga

SEQ ID NO: 5392688 - DNA, 25 bp, Homo sapien
catcttcagcttgaggcagatctca

SEQ ID NO: 5392689 - DNA, 25 bp, Homo sapien
tatgacaatgtatcctacggtggta

SEQ ID NO: 5392690 - DNA, 25 bp, Homo sapien
tacggtggtaggcattctatctgca

SEQ ID NO: 5392691 - DNA, 25 bp, Homo sapien
aaatatgactttcggttcaggcacc

SEQ ID NO: 5392692 - DNA, 25 bp, Homo sapien
cacttgatcccattgtatgcaattg

SEQ ID NO: 5392693 - DNA, 25 bp, Homo sapien
gcatgttataaatagagcctacaat

SEQ ID NO: 5392694 - DNA, 25 bp, Homo sapien
ctaaggcagcacattgtggtaaaaa

SEQ ID NO: 5392695 - DNA, 25 bp, Homo sapien
ttggcaataacagtagtgaagctgg

SEQ ID NO: 5392696 - DNA, 25 bp, Homo sapien
tcaatagcctcagtggaagatctag

SEQ ID NO: 5392697 - DNA, 25 bp, Homo sapien
gaatgtagaacccatatcctaccag

SEQ ID NO: 5392698 - DNA, 25 bp, Homo sapien
taaagagggaatcgctacggctgga

SEQ ID NO: 5392699 - DNA, 25 bp, Homo sapien
agatgtgtgctatttagaagacccc

SEQ ID NO: 5392700 - DNA, 25 bp, Homo sapien
ggactggtattagaaagcccacttg

SEQ ID NO: 5392701 - DNA, 25 bp, Homo sapien
gggcttttgctatcatccagaactg

SEQ ID NO: 5392702 - DNA, 25 bp, Homo sapien
tcaagtatcagctctgtcggtaaca

SEQ ID NO: 5392703 - DNA, 25 bp, Homo sapien
aatcagccaaatcacctgagatgac

SEQ ID NO: 5392704 - DNA, 25 bp, Homo sapien
gagatgacaaacatcataatcatag

SEQ ID NO: 5392705 - DNA, 25 bp, Homo sapien
caggcctagctatttctaaagtcca

SEQ ID NO: 5392706 - DNA, 25 bp, Homo sapien
cacagctgctaagtactccctttct

SEQ ID NO: 5392707 - DNA, 25 bp, Homo sapien
tcccattcctcatcaggccccggtg

SEQ ID NO: 5392708 - DNA, 25 bp, Homo sapien
aaaatcttcacaaacgaagcattca

SEQ ID NO: 5392709 - DNA, 25 bp, Homo sapien
gcttctataccgcaaaagaaataat

SEQ ID NO: 5392710 - DNA, 25 bp, Homo sapien
tacaaggcaatcaaacaaatcacaa

SEQ ID NO: 5392711 - DNA, 25 bp, Homo sapien
tcttcacaaacgaagcattcaacaa

SEQ ID NO: 5392712 - DNA, 25 bp, Homo sapien
atttccagtacccagaatagttcct

SEQ ID NO: 5392713 - DNA, 25 bp, Homo sapien
gtggaatatataaactccaccaaag

SEQ ID NO: 5392714 - DNA, 25 bp, Homo sapien
taagtgactcagttaataaagaagt

SEQ ID NO: 5392715 - DNA, 25 bp, Homo sapien
cttcctcccaccttataatgtactt

SEQ ID NO: 5392716 - DNA, 25 bp, Homo sapien
ggagatacaatcctacaggttcaca

SEQ ID NO: 5392717 - DNA, 25 bp, Homo sapien
tggatcattatggagaccaggagga

SEQ ID NO: 5392718 - DNA, 25 bp, Homo sapien
ccagccctcaaaggataattgtagg

SEQ ID NO: 5392719 - DNA, 25 bp, Homo sapien
tgggagatactccagaaaagaggct

SEQ ID NO: 5392720 - DNA, 25 bp, Homo sapien
tatgattttagacgtggggtctccc

SEQ ID NO: 5392721 - DNA, 25 bp, Homo sapien
tctgttttatatagtgggtttctac

SEQ ID NO: 5392722 - DNA, 25 bp, Homo sapien
cacaagattgtgtgtaaatgtgttt

SEQ ID NO: 5392723 - DNA, 25 bp, Homo sapien
tagtgggtttctacacaagattgtg

SEQ ID NO: 5392724 - DNA, 25 bp, Homo sapien
tgaattgctgcgaaccttccaagaa

SEQ ID NO: 5392725 - DNA, 25 bp, Homo sapien
tattggagaagcacgttcacatgca

SEQ ID NO: 5392726 - DNA, 25 bp, Homo sapien
gcagtttgactcttctccacgttgg

SEQ ID NO: 5392727 - DNA, 25 bp, Homo sapien
tccacgttggagtaattaccctgca

SEQ ID NO: 5392728 - DNA, 25 bp, Homo sapien
taggctctgctaggaaactggagtc

SEQ ID NO: 5392729 - DNA, 25 bp, Homo sapien
ctggttaggctctgctaggaaactg

SEQ ID NO: 5392730 - DNA, 25 bp, Homo sapien
catttttgacttcagctggatagac

SEQ ID NO: 5392731 - DNA, 25 bp, Homo sapien
cctgagaggggcatttttgacttca

SEQ ID NO: 5392732 - DNA, 25 bp, Homo sapien
gcaatatactcatgtcaaggacagt

SEQ ID NO: 5392733 - DNA, 25 bp, Homo sapien
tcaccaaccacaataagcagcactg

SEQ ID NO: 5392734 - DNA, 25 bp, Homo sapien
tacaaccagtttcacctgttttgca

SEQ ID NO: 5392735 - DNA, 25 bp, Homo sapien
taatgcccgtaagtccttcaaagga

SEQ ID NO: 5392736 - DNA, 25 bp, Homo sapien
ctgggaagaaagctaactgacacag

SEQ ID NO: 5392737 - DNA, 25 bp, Homo sapien
gctaactgacacagtggagatgaaa

SEQ ID NO: 5392738 - DNA, 25 bp, Homo sapien
gttttagaaacctattgatataagc

SEQ ID NO: 5392739 - DNA, 25 bp, Homo sapien
tgatataagctagaagagacatatt

SEQ ID NO: 5392740 - DNA, 25 bp, Homo sapien
tacagacaggacctctctatgctgc

SEQ ID NO: 5392741 - DNA, 25 bp, Homo sapien
tctagttgagaaatacctttgtggt

SEQ ID NO: 5392742 - DNA, 25 bp, Homo sapien
tcaaaggtcaatagaactgagattg

SEQ ID NO: 5392743 - DNA, 25 bp, Homo sapien
aagaattatccaacctcaaaggtca

SEQ ID NO: 5392744 - DNA, 25 bp, Homo sapien
caagtgatcaagtaaatattccagg

SEQ ID NO: 5392745 - DNA, 25 bp, Homo sapien
taacaaatgaagcatggtacctttt

SEQ ID NO: 5392746 - DNA, 25 bp, Homo sapien
gaggaatgccaatggaggaacacca

SEQ ID NO: 5392747 - DNA, 25 bp, Homo sapien
caccatggattggttcaagtgatca

SEQ ID NO: 5392748 - DNA, 25 bp, Homo sapien
agagacgtaacctggggtaattgct

SEQ ID NO: 5392749 - DNA, 25 bp, Homo sapien
attgctggggatattttggctttct

SEQ ID NO: 5392750 - DNA, 25 bp, Homo sapien
tttcttgtacatgttcttaatctgt

SEQ ID NO: 5392751 - DNA, 25 bp, Homo sapien
taacctggggtaattgctggggata

SEQ ID NO: 5392752 - DNA, 25 bp, Homo sapien
aagaggaggagaccgatcagttgca

SEQ ID NO: 5392753 - DNA, 25 bp, Homo sapien
taaaagaggaggagaccgatcagtt

SEQ ID NO: 5392754 - DNA, 25 bp, Homo sapien
gaggaggagaccgatcagttgcacc

SEQ ID NO: 5392755 - DNA, 25 bp, Homo sapien
aggaggagaccgatcagttgcacct

SEQ ID NO: 5392756 - DNA, 25 bp, Homo sapien
tagagccaattagggctggtgcaga

SEQ ID NO: 5392757 - DNA, 25 bp, Homo sapien
tggagagctttagacttcccctggg

SEQ ID NO: 5392758 - DNA, 25 bp, Homo sapien
tgggtctgtatccaggttccagggc

SEQ ID NO: 5392759 - DNA, 25 bp, Homo sapien
cctctggctgaacagagtggagagc

SEQ ID NO: 5392760 - DNA, 25 bp, Homo sapien
tcaccgaggattcataaagtattgc

SEQ ID NO: 5392761 - DNA, 25 bp, Homo sapien
cttggtggactgcattaaaacgtgt

SEQ ID NO: 5392762 - DNA, 25 bp, Homo sapien
gagttttgtatagcttcgttttgga

SEQ ID NO: 5392763 - DNA, 25 bp, Homo sapien
gagcccaaaaagtacatcaccgagg

SEQ ID NO: 5392764 - DNA, 25 bp, Homo sapien
tcactttagcctaggaggtcgaggc

SEQ ID NO: 5392765 - DNA, 25 bp, Homo sapien
actttagcctaggaggtcgaggctg

SEQ ID NO: 5392766 - DNA, 25 bp, Homo sapien
agctacgggaggctgagttgggagg

SEQ ID NO: 5392767 - DNA, 25 bp, Homo sapien
tgggcgtggcacattcctgtagtcc

SEQ ID NO: 5392768 - DNA, 25 bp, Homo sapien
tctcccgcggattagaccagttagg

SEQ ID NO: 5392769 - DNA, 25 bp, Homo sapien
tacagctctgggcttacaacgggag

SEQ ID NO: 5392770 - DNA, 25 bp, Homo sapien
tttacgcctggccaaataagggtca

SEQ ID NO: 5392771 - DNA, 25 bp, Homo sapien
taagggtcagactaagcaaggcgcc

SEQ ID NO: 5392772 - DNA, 25 bp, Homo sapien
ctgagtgctgcccaaaggcagaaac

SEQ ID NO: 5392773 - DNA, 25 bp, Homo sapien
aaggcagaaactgcatgctctgcca

SEQ ID NO: 5392774 - DNA, 25 bp, Homo sapien
aaactgcatgctctgccaccgcgca

SEQ ID NO: 5392775 - DNA, 25 bp, Homo sapien
gcccaaaggcagaaactgcatgctc

SEQ ID NO: 5392776 - DNA, 25 bp, Homo sapien
tcttcaatcactactcgagatagag

SEQ ID NO: 5392777 - DNA, 25 bp, Homo sapien
gactggtggccgttttctcttaatg

SEQ ID NO: 5392778 - DNA, 25 bp, Homo sapien
tctcttaatgtgttatgttcattca

SEQ ID NO: 5392779 - DNA, 25 bp, Homo sapien
gagatagagctttggcttgtcttcc

SEQ ID NO: 5392780 - DNA, 25 bp, Homo sapien
cttggctttcctaatgtctatatct

SEQ ID NO: 5392781 - DNA, 25 bp, Homo sapien
ttggctttcctaatgtctatatctg

SEQ ID NO: 5392782 - DNA, 25 bp, Homo sapien
gatggtaaaagctacaactgccacc

SEQ ID NO: 5392783 - DNA, 25 bp, Homo sapien
caggaattggcgctctcacaagaga

SEQ ID NO: 5392784 - DNA, 25 bp, Homo sapien
gagacatacccagacaggtgtccct

SEQ ID NO: 5392785 - DNA, 25 bp, Homo sapien
tcctttagagggcaattgttgggct

SEQ ID NO: 5392786 - DNA, 25 bp, Homo sapien
gatcttagccccttggatatcctgt

SEQ ID NO: 5392787 - DNA, 25 bp, Homo sapien
ggcttcctgctgcatgcaaagtcag

SEQ ID NO: 5392788 - DNA, 25 bp, Homo sapien
tgttttatctccagcgccgtaaggc

SEQ ID NO: 5392789 - DNA, 25 bp, Homo sapien
aagtcttaaagagcacctcaccagg

SEQ ID NO: 5392790 - DNA, 25 bp, Homo sapien
agttactccattatccccagaagca

SEQ ID NO: 5392791 - DNA, 25 bp, Homo sapien
ctgctagttactccattatccccag

SEQ ID NO: 5392792 - DNA, 25 bp, Homo sapien
ctccattatccccagaagcagaaca

SEQ ID NO: 5392793 - DNA, 25 bp, Homo sapien
tatccccagaagcagaacatcccat

SEQ ID NO: 5392794 - DNA, 25 bp, Homo sapien
tagcctctaagtactttttatatac

SEQ ID NO: 5392795 - DNA, 25 bp, Homo sapien
agcctctaagtactttttatataca

SEQ ID NO: 5392796 - DNA, 25 bp, Homo sapien
gtagcctctaagtactttttatata

SEQ ID NO: 5392797 - DNA, 25 bp, Homo sapien
gttgaatacctacatgtgcacctca

SEQ ID NO: 5392798 - DNA, 25 bp, Homo sapien
tctttaaacaagtggtgcaggagca

SEQ ID NO: 5392799 - DNA, 25 bp, Homo sapien
caaagtaaggcaggcctcgcatggt

SEQ ID NO: 5392800 - DNA, 25 bp, Homo sapien
aaggataatctttaaacaagtggtg

SEQ ID NO: 5392801 - DNA, 25 bp, Homo sapien
gaaagacatccttgattgtagttaa

SEQ ID NO: 5392802 - DNA, 25 bp, Homo sapien
aattaactgatacttgcctttggga

SEQ ID NO: 5392803 - DNA, 25 bp, Homo sapien
tactgtgtaacttttgtatgctgaa

SEQ ID NO: 5392804 - DNA, 25 bp, Homo sapien
taaaagtaaggatgaccaaatgcaa

SEQ ID NO: 5392805 - DNA, 25 bp, Homo sapien
tgatagttgtgttcttaagggaggt

SEQ ID NO: 5392806 - DNA, 25 bp, Homo sapien
ttgatagttgtgttcttaagggagg

SEQ ID NO: 5392807 - DNA, 25 bp, Homo sapien
tttctaaccacagtgacttcagtaa

SEQ ID NO: 5392808 - DNA, 25 bp, Homo sapien
gcttcttcttacttactcgagagtt

SEQ ID NO: 5392809 - DNA, 25 bp, Homo sapien
ccgtataatgaacatttcagcttct

SEQ ID NO: 5392810 - DNA, 25 bp, Homo sapien
cattgtgatttaattcaccgcttga

SEQ ID NO: 5392811 - DNA, 25 bp, Homo sapien
gacatgagtgctctaatagcctcct

SEQ ID NO: 5392812 - DNA, 25 bp, Homo sapien
cattgggtaactgttgtttagacca

SEQ ID NO: 5392813 - DNA, 25 bp, Homo sapien
tgtcccgccttttgagctattagcc

SEQ ID NO: 5392814 - DNA, 25 bp, Homo sapien
taggtatagatactctgtcccgcct

SEQ ID NO: 5392815 - DNA, 25 bp, Homo sapien
aacactgggatgtgatgtctccgtc

SEQ ID NO: 5392816 - DNA, 25 bp, Homo sapien
gccagtccccttaatactttgagaa

SEQ ID NO: 5392817 - DNA, 25 bp, Homo sapien
tgttcctacgagaaggccaagagtg

SEQ ID NO: 5392818 - DNA, 25 bp, Homo sapien
catctgcagtgtacactggcaaaca

SEQ ID NO: 5392819 - DNA, 25 bp, Homo sapien
accttgacaagatgactactgatga

SEQ ID NO: 5392820 - DNA, 25 bp, Homo sapien
tggtaattcttatcctctctactgg

SEQ ID NO: 5392821 - DNA, 25 bp, Homo sapien
ttatcctctctactgggaggataag

SEQ ID NO: 5392822 - DNA, 25 bp, Homo sapien
tccaccttgacaagatgactactga

SEQ ID NO: 5392823 - DNA, 25 bp, Homo sapien
tgtataaactttgggcaccatttgg

SEQ ID NO: 5392824 - DNA, 25 bp, Homo sapien
ggcctaaattccagaactacaggaa

SEQ ID NO: 5392825 - DNA, 25 bp, Homo sapien
caaaggtaatgtacctgccaaggca

SEQ ID NO: 5392826 - DNA, 25 bp, Homo sapien
ggtggtttagctatggcgttccaaa

SEQ ID NO: 5392827 - DNA, 25 bp, Homo sapien
tcacctctttacattagcaaccaaa

SEQ ID NO: 5392828 - DNA, 25 bp, Homo sapien
aatgccagaaatttgatatcacctc

SEQ ID NO: 5392829 - DNA, 25 bp, Homo sapien
aaggacccatgaattaacactgtgc

SEQ ID NO: 5392830 - DNA, 25 bp, Homo sapien
ccaaaaggacattgaaagctagaat

SEQ ID NO: 5392831 - DNA, 25 bp, Homo sapien
tcaatgacaagcctccgaaaatggt

SEQ ID NO: 5392832 - DNA, 25 bp, Homo sapien
gaagcactggagcatttcaagccct

SEQ ID NO: 5392833 - DNA, 25 bp, Homo sapien
catgtgcaagctcgtggcagcagca

SEQ ID NO: 5392834 - DNA, 25 bp, Homo sapien
gctttatgctaccagcagcccaggg

SEQ ID NO: 5392835 - DNA, 25 bp, Homo sapien
caagtccacgcatgatttagcccag

SEQ ID NO: 5392836 - DNA, 25 bp, Homo sapien
cattccatctatgccggcctttgtg

SEQ ID NO: 5392837 - DNA, 25 bp, Homo sapien
gattcctcacttcacgcgggtctgt

SEQ ID NO: 5392838 - DNA, 25 bp, Homo sapien
aacaaggaattgcacctcaggctct

SEQ ID NO: 5392839 - DNA, 25 bp, Homo sapien
ataattatattggacttctctttat

SEQ ID NO: 5392840 - DNA, 25 bp, Homo sapien
agaataattatattggacttctctt

SEQ ID NO: 5392841 - DNA, 25 bp, Homo sapien
tagaataattatattggacttctct

SEQ ID NO: 5392842 - DNA, 25 bp, Homo sapien
atgtttcagggactagaataattat

SEQ ID NO: 5392843 - DNA, 25 bp, Homo sapien
gaatggtgaccaacacagggctaag

SEQ ID NO: 5392844 - DNA, 25 bp, Homo sapien
tcatttcaaaagtctggtaagccag

SEQ ID NO: 5392845 - DNA, 25 bp, Homo sapien
catgagcgtcctgagttctagaagc

SEQ ID NO: 5392846 - DNA, 25 bp, Homo sapien
aaaaggagtgaccattccatgagcg

SEQ ID NO: 5392847 - DNA, 25 bp, Homo sapien
ctcactatggtaattgtagtcaggg

SEQ ID NO: 5392848 - DNA, 25 bp, Homo sapien
gggtctcactatggtaattgtagtc

SEQ ID NO: 5392849 - DNA, 25 bp, Homo sapien
ccagaagataagtatggggtctcac

SEQ ID NO: 5392850 - DNA, 25 bp, Homo sapien
tctcactatggtaattgtagtcagg

SEQ ID NO: 5392851 - DNA, 25 bp, Homo sapien
ggcaccggagactgtttaacaaaca

SEQ ID NO: 5392852 - DNA, 25 bp, Homo sapien
ccaaaagttttccatgctgtctgcg

SEQ ID NO: 5392853 - DNA, 25 bp, Homo sapien
caatggctcctgaatctccgtgatg

SEQ ID NO: 5392854 - DNA, 25 bp, Homo sapien
tgatgatccttgagtgcaccacgtt

SEQ ID NO: 5392855 - DNA, 25 bp, Homo sapien
ggcctcttcttaggggcttatacac

SEQ ID NO: 5392856 - DNA, 25 bp, Homo sapien
ccatatggcctcttcttaggggctt

SEQ ID NO: 5392857 - DNA, 25 bp, Homo sapien
ttatacaccctgaattgatactcct

SEQ ID NO: 5392858 - DNA, 25 bp, Homo sapien
caccctgaattgatactcctttctc

SEQ ID NO: 5392859 - DNA, 25 bp, Homo sapien
tccctgatttggtacagcttctgaa

SEQ ID NO: 5392860 - DNA, 25 bp, Homo sapien
gatttggtacagcttctgaacttct

SEQ ID NO: 5392861 - DNA, 25 bp, Homo sapien
cttctcctgtttcatgggatagagc

SEQ ID NO: 5392862 - DNA, 25 bp, Homo sapien
ccttctcctgtttcatgggatagag

SEQ ID NO: 5392863 - DNA, 25 bp, Homo sapien
ccggagctacatgttgggttgaatc

SEQ ID NO: 5392864 - DNA, 25 bp, Homo sapien
tgatagctccgcttcttctccggag

SEQ ID NO: 5392865 - DNA, 25 bp, Homo sapien
cattgtgatagctccgcttcttctc

SEQ ID NO: 5392866 - DNA, 25 bp, Homo sapien
gcttcttctccggagctacatgttg

SEQ ID NO: 5392867 - DNA, 25 bp, Homo sapien
aaagggaagagatttctccacactc

SEQ ID NO: 5392868 - DNA, 25 bp, Homo sapien
gcaaagggaagagatttctccacac

SEQ ID NO: 5392869 - DNA, 25 bp, Homo sapien
ccgcaaagggaagagatttctccac

SEQ ID NO: 5392870 - DNA, 25 bp, Homo sapien
ctgaaccgcaaagggaagagatttc

SEQ ID NO: 5392871 - DNA, 25 bp, Homo sapien
tattgcttgtaaacaaatcttggaa

SEQ ID NO: 5392872 - DNA, 25 bp, Homo sapien
gtagtatggcttgccctagagtcat

SEQ ID NO: 5392873 - DNA, 25 bp, Homo sapien
caatgctgtattgatgattagtagt

SEQ ID NO: 5392874 - DNA, 25 bp, Homo sapien
aggaacatgcatctgccggacagca

SEQ ID NO: 5392875 - DNA, 25 bp, Homo sapien
ggtgatctcctagtggggtcttctt

SEQ ID NO: 5392876 - DNA, 25 bp, Homo sapien
ctcttcccgtatctgtctcagaagt

SEQ ID NO: 5392877 - DNA, 25 bp, Homo sapien
tctctggtgatctcctagtggggtc

SEQ ID NO: 5392878 - DNA, 25 bp, Homo sapien
cagcaacctcttcccgtatctgtct

SEQ ID NO: 5392879 - DNA, 25 bp, Homo sapien
aaagactactgggaggagtgtcctc

SEQ ID NO: 5392880 - DNA, 25 bp, Homo sapien
tacacgggacaattagcaaagcatc

SEQ ID NO: 5392881 - DNA, 25 bp, Homo sapien
gaggagtgtcctccagcgtacacgg

SEQ ID NO: 5392882 - DNA, 25 bp, Homo sapien
cactaaattgccaaggagggagcaa

SEQ ID NO: 5392883 - DNA, 25 bp, Homo sapien
tgtgaaagcagcatccggcacacgg

SEQ ID NO: 5392884 - DNA, 25 bp, Homo sapien
aagaatcatccttaacagagtaggg

SEQ ID NO: 5392885 - DNA, 25 bp, Homo sapien
ctggcttcctgtgctactctctgtg

SEQ ID NO: 5392886 - DNA, 25 bp, Homo sapien
agcatccggcacacgggatggtaga

SEQ ID NO: 5392887 - DNA, 25 bp, Homo sapien
gagcagccatattttttgagcacca

SEQ ID NO: 5392888 - DNA, 25 bp, Homo sapien
tggggaagagcagccatattttttg

SEQ ID NO: 5392889 - DNA, 25 bp, Homo sapien
tttgagcaccaactacacacaaggt

SEQ ID NO: 5392890 - DNA, 25 bp, Homo sapien
ttttttgagcaccaactacacacaa

SEQ ID NO: 5392891 - DNA, 25 bp, Homo sapien
gaatctccgctttggtaggtgggaa

SEQ ID NO: 5392892 - DNA, 25 bp, Homo sapien
cagttggctttgacatggatcaggc

SEQ ID NO: 5392893 - DNA, 25 bp, Homo sapien
ggtgggaagactctagataacattt

SEQ ID NO: 5392894 - DNA, 25 bp, Homo sapien
ctctggcttgcatacgaatctccgc

SEQ ID NO: 5392895 - DNA, 25 bp, Homo sapien
atagcaagtatttaacccaggaact

SEQ ID NO: 5392896 - DNA, 25 bp, Homo sapien
ttcttttatatcgtcaggacccagt

SEQ ID NO: 5392897 - DNA, 25 bp, Homo sapien
gttctctcgcctgtattaaatagca

SEQ ID NO: 5392898 - DNA, 25 bp, Homo sapien
tatatcgtcaggacccagtgactga

SEQ ID NO: 5392899 - DNA, 25 bp, Homo sapien
gcagcatcagtaccaatttcaagac

SEQ ID NO: 5392900 - DNA, 25 bp, Homo sapien
cagatgtttgaagggataaatcagg

SEQ ID NO: 5392901 - DNA, 25 bp, Homo sapien
agtctaactaatgaacgtctcccag

SEQ ID NO: 5392902 - DNA, 25 bp, Homo sapien
aagcacagctgacagatgtttgaag

SEQ ID NO: 5392903 - DNA, 25 bp, Homo sapien
ggtgctggctccactcgagacggta

SEQ ID NO: 5392904 - DNA, 25 bp, Homo sapien
gagacggtacaacagccccttctat

SEQ ID NO: 5392905 - DNA, 25 bp, Homo sapien
acaaggctgactctgagagtcgctg

SEQ ID NO: 5392906 - DNA, 25 bp, Homo sapien
ggctccactcgagacggtacaacag

SEQ ID NO: 5392907 - DNA, 25 bp, Homo sapien
cgccgtctgttttccaccctgctga

SEQ ID NO: 5392908 - DNA, 25 bp, Homo sapien
taaccttgattcactcgccgtctgt

SEQ ID NO: 5392909 - DNA, 25 bp, Homo sapien
aacataaccttgattcactcgccgt

SEQ ID NO: 5392910 - DNA, 25 bp, Homo sapien
gattcactcgccgtctgttttccac

SEQ ID NO: 5392911 - DNA, 25 bp, Homo sapien
cctcagtctctccccgaccttcctt

SEQ ID NO: 5392912 - DNA, 25 bp, Homo sapien
atgccaaacactttacccaagctgg

SEQ ID NO: 5392913 - DNA, 25 bp, Homo sapien
cagtctctccccgaccttccttggg

SEQ ID NO: 5392914 - DNA, 25 bp, Homo sapien
gccaaacactttacccaagctggct

SEQ ID NO: 5392915 - DNA, 25 bp, Homo sapien
gagccggatcccacttaaaatgagg

SEQ ID NO: 5392916 - DNA, 25 bp, Homo sapien
tggagccggatcccacttaaaatga

SEQ ID NO: 5392917 - DNA, 25 bp, Homo sapien
ggagccggatcccacttaaaatgag

SEQ ID NO: 5392918 - DNA, 25 bp, Homo sapien
ctggagccggatcccacttaaaatg

SEQ ID NO: 5392919 - DNA, 25 bp, Homo sapien
tgaaggttatattcaatgagtgact

SEQ ID NO: 5392920 - DNA, 25 bp, Homo sapien
tcaatgagtgactgctggactcctc

SEQ ID NO: 5392921 - DNA, 25 bp, Homo sapien
tatattcaatgagtgactgctggac

SEQ ID NO: 5392922 - DNA, 25 bp, Homo sapien
agtctttttgaaggttatattcaat

SEQ ID NO: 5392923 - DNA, 25 bp, Homo sapien
cactcgcccacacctcacagctgtt

SEQ ID NO: 5392924 - DNA, 25 bp, Homo sapien
cacagctgttacttcatgacagcag

SEQ ID NO: 5392925 - DNA, 25 bp, Homo sapien
tgagctgccacggattccaggcttt

SEQ ID NO: 5392926 - DNA, 25 bp, Homo sapien
caggctttttggcctcccctagcct

SEQ ID NO: 5392927 - DNA, 25 bp, Homo sapien
tctgccaatcagtatcatgtcttca

SEQ ID NO: 5392928 - DNA, 25 bp, Homo sapien
tcaactttagggaatgttgcatcca

SEQ ID NO: 5392929 - DNA, 25 bp, Homo sapien
cttttatcaggaacagttgtaggca

SEQ ID NO: 5392930 - DNA, 25 bp, Homo sapien
gttgcatccatttagcatgactctg

SEQ ID NO: 5392931 - DNA, 25 bp, Homo sapien
gctttatgttaaatggacactgagc

SEQ ID NO: 5392932 - DNA, 25 bp, Homo sapien
tggcttaaaggcaagtcattcatta

SEQ ID NO: 5392933 - DNA, 25 bp, Homo sapien
taggatttctcacatgagtgtcgga

SEQ ID NO: 5392934 - DNA, 25 bp, Homo sapien
tgaacccagatcttcccttacattg

SEQ ID NO: 5392935 - DNA, 25 bp, Homo sapien
catcaatgtagatgcatttattctc

SEQ ID NO: 5392936 - DNA, 25 bp, Homo sapien
cctgccagaacatcaatgtagatgc

SEQ ID NO: 5392937 - DNA, 25 bp, Homo sapien
agtttgacattatgtagacagcaag

SEQ ID NO: 5392938 - DNA, 25 bp, Homo sapien
aaagtttgacattatgtagacagca

SEQ ID NO: 5392939 - DNA, 25 bp, Homo sapien
cttcattttcatacgtagaaacagt

SEQ ID NO: 5392940 - DNA, 25 bp, Homo sapien
tagtgtagagtttagtaactgggcc

SEQ ID NO: 5392941 - DNA, 25 bp, Homo sapien
caggagatcctgactatgatgatgg

SEQ ID NO: 5392942 - DNA, 25 bp, Homo sapien
tggtgccagttttcacaatggcgtt

SEQ ID NO: 5392943 - DNA, 25 bp, Homo sapien
tatccccagaaaagacacacgcaga

SEQ ID NO: 5392944 - DNA, 25 bp, Homo sapien
tgcttcccagtcactctctctcggg

SEQ ID NO: 5392945 - DNA, 25 bp, Homo sapien
cactgtgtgatgaatagaactcttc

SEQ ID NO: 5392946 - DNA, 25 bp, Homo sapien
tgtgtgatgaatagaactcttcctg

SEQ ID NO: 5392947 - DNA, 25 bp, Homo sapien
cactggtccttaaggtctgcttttt

SEQ ID NO: 5392948 - DNA, 25 bp, Homo sapien
cctccacaccttccctagaggctct

SEQ ID NO: 5392949 - DNA, 25 bp, Homo sapien
ttgctctgatcactacttctggact

SEQ ID NO: 5392950 - DNA, 25 bp, Homo sapien
acaccttccctagaggctctcacct

SEQ ID NO: 5392951 - DNA, 25 bp, Homo sapien
ccttccctagaggctctcaccttca

SEQ ID NO: 5392952 - DNA, 25 bp, Homo sapien
taatgaattttctaccaaagtcacg

SEQ ID NO: 5392953 - DNA, 25 bp, Homo sapien
cttaatgaattttctaccaaagtca

SEQ ID NO: 5392954 - DNA, 25 bp, Homo sapien
tgaattttctaccaaagtcacgttc

SEQ ID NO: 5392955 - DNA, 25 bp, Homo sapien
aatgaattttctaccaaagtcacgt

SEQ ID NO: 5392956 - DNA, 25 bp, Homo sapien
tttctgttatgacacttctagcttg

SEQ ID NO: 5392957 - DNA, 25 bp, Homo sapien
tgtttctgttatgacacttctagct

SEQ ID NO: 5392958 - DNA, 25 bp, Homo sapien
tttgtttctgttatgacacttctag

SEQ ID NO: 5392959 - DNA, 25 bp, Homo sapien
ctgttatgacacttctagcttgtcc

SEQ ID NO: 5392960 - DNA, 25 bp, Homo sapien
gtcccaaaggatctttatgaccata

SEQ ID NO: 5392961 - DNA, 25 bp, Homo sapien
ttagtagagtgctttaactgaagtg

SEQ ID NO: 5392962 - DNA, 25 bp, Homo sapien
aagtgtagaagtcttgtcccaaagg

SEQ ID NO: 5392963 - DNA, 25 bp, Homo sapien
gtagaagtcttgtcccaaaggatct

SEQ ID NO: 5392964 - DNA, 25 bp, Homo sapien
ttccatctggagtggtataggtgag

SEQ ID NO: 5392965 - DNA, 25 bp, Homo sapien
tccatctggagtggtataggtgaga

SEQ ID NO: 5392966 - DNA, 25 bp, Homo sapien
ccatctggagtggtataggtgagat

SEQ ID NO: 5392967 - DNA, 25 bp, Homo sapien
cagggtttagcagcccgtgaaccca

SEQ ID NO: 5392968 - DNA, 25 bp, Homo sapien
gcaagccagggaccaccacgagggg

SEQ ID NO: 5392969 - DNA, 25 bp, Homo sapien
cagggaccaccacgaggggcagcgg

SEQ ID NO: 5392970 - DNA, 25 bp, Homo sapien
agccagggaccaccacgaggggcag

SEQ ID NO: 5392971 - DNA, 25 bp, Homo sapien
caagccagggaccaccacgaggggc

SEQ ID NO: 5392972 - DNA, 25 bp, Homo sapien
taaatcttagcggttgaagcagagc

SEQ ID NO: 5392973 - DNA, 25 bp, Homo sapien
gactttaggcagttgctccgacaga

SEQ ID NO: 5392974 - DNA, 25 bp, Homo sapien
gcaggtagggtatctttccagtaca

SEQ ID NO: 5392975 - DNA, 25 bp, Homo sapien
gagagtgtgttgtccttgagcctgc

SEQ ID NO: 5392976 - DNA, 25 bp, Homo sapien
gagtgtgttggtagttgatgcaact

SEQ ID NO: 5392977 - DNA, 25 bp, Homo sapien
taacaggagtgtgttggtagttgat

SEQ ID NO: 5392978 - DNA, 25 bp, Homo sapien
tggtagttgatgcaactatcagtag

SEQ ID NO: 5392979 - DNA, 25 bp, Homo sapien
gttgatgcaactatcagtagtcaag

SEQ ID NO: 5392980 - DNA, 25 bp, Homo sapien
gagcagttgtcccatttaggacaaa

SEQ ID NO: 5392981 - DNA, 25 bp, Homo sapien
tgtagcaaaatgagcagttgtccca

SEQ ID NO: 5392982 - DNA, 25 bp, Homo sapien
cagttgtcccatttaggacaaatag

SEQ ID NO: 5392983 - DNA, 25 bp, Homo sapien
aaaatgagcagttgtcccatttagg

SEQ ID NO: 5392984 - DNA, 25 bp, Homo sapien
ggcccagtggtgacgagttccctta

SEQ ID NO: 5392985 - DNA, 25 bp, Homo sapien
tctaccaaaccgcagagatagtggc

SEQ ID NO: 5392986 - DNA, 25 bp, Homo sapien
cacaggctgcaaagatctatgggaa

SEQ ID NO: 5392987 - DNA, 25 bp, Homo sapien
tctatgtattggacccaaggccctg

SEQ ID NO: 5392988 - DNA, 25 bp, Homo sapien
ccctggtttatccaaccgccagttg

SEQ ID NO: 5392989 - DNA, 25 bp, Homo sapien
cctggtttatccaaccgccagttgt

SEQ ID NO: 5392990 - DNA, 25 bp, Homo sapien
ctggtttatccaaccgccagttgtc

SEQ ID NO: 5392991 - DNA, 25 bp, Homo sapien
aacattttctctcagctgtaccatg

SEQ ID NO: 5392992 - DNA, 25 bp, Homo sapien
acattttctctcagctgtaccatgt

SEQ ID NO: 5392993 - DNA, 25 bp, Homo sapien
tctggaattctagagaagatgcttt

SEQ ID NO: 5392994 - DNA, 25 bp, Homo sapien
ctggaattctagagaagatgctttt

SEQ ID NO: 5392995 - DNA, 25 bp, Homo sapien
tatctcctgaagatgtgcaattttc

SEQ ID NO: 5392996 - DNA, 25 bp, Homo sapien
cagacaggggttgagcattatctcc

SEQ ID NO: 5392997 - DNA, 25 bp, Homo sapien
tgctgtagtatcgaatcagacaggg

SEQ ID NO: 5392998 - DNA, 25 bp, Homo sapien
tcttcttggctaaagccaatttata

SEQ ID NO: 5392999 - DNA, 25 bp, Homo sapien
tttccaatattgtagcaagggctag

SEQ ID NO: 5393000 - DNA, 25 bp, Homo sapien
ctgctcagtggacaaccaaagacaa

SEQ ID NO: 5393001 - DNA, 25 bp, Homo sapien
tagattattggagtgtggtctccca

SEQ ID NO: 5393002 - DNA, 25 bp, Homo sapien
aattccctcattaggacctgtacgt

SEQ ID NO: 5393003 - DNA, 25 bp, Homo sapien
ctgtaatagacagttgggcttttat

SEQ ID NO: 5393004 - DNA, 25 bp, Homo sapien
tagacagttgggcttttataagcat

SEQ ID NO: 5393005 - DNA, 25 bp, Homo sapien
gtaatagacagttgggcttttataa

SEQ ID NO: 5393006 - DNA, 25 bp, Homo sapien
taatagacagttgggcttttataag

SEQ ID NO: 5393007 - DNA, 25 bp, Homo sapien
gttgggtcaaaagcacgagaaagtg

SEQ ID NO: 5393008 - DNA, 25 bp, Homo sapien
tcctgttgggtcaaaagcacgagaa

SEQ ID NO: 5393009 - DNA, 25 bp, Homo sapien
cctgttgggtcaaaagcacgagaaa

SEQ ID NO: 5393010 - DNA, 25 bp, Homo sapien
tgttgggtcaaaagcacgagaaagt

SEQ ID NO: 5393011 - DNA, 25 bp, Homo sapien
tatggatgttatcagtaagaagagt

SEQ ID NO: 5393012 - DNA, 25 bp, Homo sapien
gatgttatcagtaagaagagttggg

SEQ ID NO: 5393013 - DNA, 25 bp, Homo sapien
ctgtttcttatggatgttatcagta

SEQ ID NO: 5393014 - DNA, 25 bp, Homo sapien
tcttatggatgttatcagtaagaag

SEQ ID NO: 5393015 - DNA, 25 bp, Homo sapien
tgttccagccagattgtcctcacac

SEQ ID NO: 5393016 - DNA, 25 bp, Homo sapien
tatcgaggatggtcatcttcagtga

SEQ ID NO: 5393017 - DNA, 25 bp, Homo sapien
ttccagccagattgtcctcacaccc

SEQ ID NO: 5393018 - DNA, 25 bp, Homo sapien
tcttcagtgaagcatacagctttgg

SEQ ID NO: 5393019 - DNA, 25 bp, Homo sapien
tgtgtattggttagtatctttttct

SEQ ID NO: 5393020 - DNA, 25 bp, Homo sapien
gttgaaccatgccaatattatccat

SEQ ID NO: 5393021 - DNA, 25 bp, Homo sapien
cctccacatgttgaaccatgccaat

SEQ ID NO: 5393022 - DNA, 25 bp, Homo sapien
cacatgttgaaccatgccaatatta

SEQ ID NO: 5393023 - DNA, 25 bp, Homo sapien
ctagggtgacccatggcacaagcca

SEQ ID NO: 5393024 - DNA, 25 bp, Homo sapien
cgcccattcttcagccggtacgggt

SEQ ID NO: 5393025 - DNA, 25 bp, Homo sapien
tcttcagccggtacgggtccacctg

SEQ ID NO: 5393026 - DNA, 25 bp, Homo sapien
gttactcctcacgaagctagggtga

SEQ ID NO: 5393027 - DNA, 25 bp, Homo sapien
agtatccagtgttacacacaatggt

SEQ ID NO: 5393028 - DNA, 25 bp, Homo sapien
tatccagtgttacacacaatggtat

SEQ ID NO: 5393029 - DNA, 25 bp, Homo sapien
gtatccagtgttacacacaatggta

SEQ ID NO: 5393030 - DNA, 25 bp, Homo sapien
atccagtgttacacacaatggtatc

SEQ ID NO: 5393031 - DNA, 25 bp, Homo sapien
ggcctcatccatggtagtcacctca

SEQ ID NO: 5393032 - DNA, 25 bp, Homo sapien
tggtggtgacaaagacgtcgccctc

SEQ ID NO: 5393033 - DNA, 25 bp, Homo sapien
ggtgacaaagacgtcgccctcctga

SEQ ID NO: 5393034 - DNA, 25 bp, Homo sapien
gtagtcacctcatagccctccatgg

SEQ ID NO: 5393035 - DNA, 25 bp, Homo sapien
tggtgatgatgacgctggccctgaa

SEQ ID NO: 5393036 - DNA, 25 bp, Homo sapien
gtgatgatgacgctggccctgaaac

SEQ ID NO: 5393037 - DNA, 25 bp, Homo sapien
cttggtgatgatgacgctggccctg

SEQ ID NO: 5393038 - DNA, 25 bp, Homo sapien
ttggtgatgatgacgctggccctga

SEQ ID NO: 5393039 - DNA, 25 bp, Homo sapien
tgcccttatcgccatagcctgctac

SEQ ID NO: 5393040 - DNA, 25 bp, Homo sapien
acagctcttgcccttatcgccatag

SEQ ID NO: 5393041 - DNA, 25 bp, Homo sapien
tcttgcccttatcgccatagcctgc

SEQ ID NO: 5393042 - DNA, 25 bp, Homo sapien
gctcttgcccttatcgccatagcct

SEQ ID NO: 5393043 - DNA, 25 bp, Homo sapien
acgtctgtggcctgcttgataccac

SEQ ID NO: 5393044 - DNA, 25 bp, Homo sapien
catcacgtctgtggcctgcttgata

SEQ ID NO: 5393045 - DNA, 25 bp, Homo sapien
tcacgtctgtggcctgcttgatacc

SEQ ID NO: 5393046 - DNA, 25 bp, Homo sapien
gcaatcatcacgtctgtggcctgct

SEQ ID NO: 5393047 - DNA, 25 bp, Homo sapien
ctttggatatacctcggaagctcag

SEQ ID NO: 5393048 - DNA, 25 bp, Homo sapien
gtggaccccgattgtggtctctttg

SEQ ID NO: 5393049 - DNA, 25 bp, Homo sapien
gatatacctcggaagctcagcagga

SEQ ID NO: 5393050 - DNA, 25 bp, Homo sapien
tcttgtacaggttgtggaccccgat

SEQ ID NO: 5393051 - DNA, 25 bp, Homo sapien
ctgtggatgaggttggtaaggtcgc

SEQ ID NO: 5393052 - DNA, 25 bp, Homo sapien
tggatgaggttggtaaggtcgcccg

SEQ ID NO: 5393053 - DNA, 25 bp, Homo sapien
tgtggatgaggttggtaaggtcgcc

SEQ ID NO: 5393054 - DNA, 25 bp, Homo sapien
gtggatgaggttggtaaggtcgccc

SEQ ID NO: 5393055 - DNA, 25 bp, Homo sapien
tgaggtacatcatctgctcaatgca

SEQ ID NO: 5393056 - DNA, 25 bp, Homo sapien
gaggtacatcatctgctcaatgcac

SEQ ID NO: 5393057 - DNA, 25 bp, Homo sapien
ttgaggtacatcatctgctcaatgc

SEQ ID NO: 5393058 - DNA, 25 bp, Homo sapien
tcctcgtctgtttcgcccttccagg

SEQ ID NO: 5393059 - DNA, 25 bp, Homo sapien
cgtctgtttcgcccttccaggcatg

SEQ ID NO: 5393060 - DNA, 25 bp, Homo sapien
cacaggtactcctcgtctgtttcgc

SEQ ID NO: 5393061 - DNA, 25 bp, Homo sapien
aggtactcctcgtctgtttcgccct

SEQ ID NO: 5393062 - DNA, 25 bp, Homo sapien
aatgccagtgctggctgaaatgcca

SEQ ID NO: 5393063 - DNA, 25 bp, Homo sapien
ccagctttggcaatggcagcagccg

SEQ ID NO: 5393064 - DNA, 25 bp, Homo sapien
cagcagccgcatggtcctgggtaga

SEQ ID NO: 5393065 - DNA, 25 bp, Homo sapien
agagaagatgttgcagctggaccac

SEQ ID NO: 5393066 - DNA, 25 bp, Homo sapien
tgatgaggctcattaggacggcagt

SEQ ID NO: 5393067 - DNA, 25 bp, Homo sapien
tgaggctcattaggacggcagtctc

SEQ ID NO: 5393068 - DNA, 25 bp, Homo sapien
gatgaggctcattaggacggcagtc

SEQ ID NO: 5393069 - DNA, 25 bp, Homo sapien
ggcagtctccacggtcctgtgcaga

SEQ ID NO: 5393070 - DNA, 25 bp, Homo sapien
cttgcgtccccaggctgcgactttg

SEQ ID NO: 5393071 - DNA, 25 bp, Homo sapien
tccccaggctgcgactttgtagggc

SEQ ID NO: 5393072 - DNA, 25 bp, Homo sapien
cgctcccatatgcgcatcaggcctg

SEQ ID NO: 5393073 - DNA, 25 bp, Homo sapien
cgtccccaggctgcgactttgtagg

SEQ ID NO: 5393074 - DNA, 25 bp, Homo sapien
catcaccttgatggcgcactctgtc

SEQ ID NO: 5393075 - DNA, 25 bp, Homo sapien
tatgttacagatccatcctggccag

SEQ ID NO: 5393076 - DNA, 25 bp, Homo sapien
caaatattgttttgcacgacacagg

SEQ ID NO: 5393077 - DNA, 25 bp, Homo sapien
tcagtgcagctgtgtcctattgagg

SEQ ID NO: 5393078 - DNA, 25 bp, Homo sapien
ctgagaagtcctgaccagggcgcct

SEQ ID NO: 5393079 - DNA, 25 bp, Homo sapien
tgcctgagaagtcctgaccagggcg

SEQ ID NO: 5393080 - DNA, 25 bp, Homo sapien
agaagtcctgaccagggcgcctgaa

SEQ ID NO: 5393081 - DNA, 25 bp, Homo sapien
aagtcctgaccagggcgcctgaaga

SEQ ID NO: 5393082 - DNA, 25 bp, Homo sapien
aacaaagctgcaggcgttatgctac

SEQ ID NO: 5393083 - DNA, 25 bp, Homo sapien
tacactacaaggctccaataaaaaa

SEQ ID NO: 5393084 - DNA, 25 bp, Homo sapien
gcaattcccatcaaattagcattga

SEQ ID NO: 5393085 - DNA, 25 bp, Homo sapien
aaaatctacagtcatctgatcttca

SEQ ID NO: 5393086 - DNA, 25 bp, Homo sapien
cataatgataggagcttggttcagt

SEQ ID NO: 5393087 - DNA, 25 bp, Homo sapien
gagaaactgttctgatagggacaga

SEQ ID NO: 5393088 - DNA, 25 bp, Homo sapien
tgccactgcagttctcatggatctc

SEQ ID NO: 5393089 - DNA, 25 bp, Homo sapien
tgggatccaaccttaggctttggct

SEQ ID NO: 5393090 - DNA, 25 bp, Homo sapien
caactggacagttaagaatggtcac

SEQ ID NO: 5393091 - DNA, 25 bp, Homo sapien
gacagttaagaatggtcacatgaac

SEQ ID NO: 5393092 - DNA, 25 bp, Homo sapien
agaaagccaactggacagttaagaa

SEQ ID NO: 5393093 - DNA, 25 bp, Homo sapien
taagaatggtcacatgaacttgatc

SEQ ID NO: 5393094 - DNA, 25 bp, Homo sapien
aatgtgtcttcaactggcaagtccc

SEQ ID NO: 5393095 - DNA, 25 bp, Homo sapien
tcctgaggtagaaaggtctaggaat

SEQ ID NO: 5393096 - DNA, 25 bp, Homo sapien
aactggcaagtccctgtgattattt

SEQ ID NO: 5393097 - DNA, 25 bp, Homo sapien
taggaatgtgtcttcaactggcaag

SEQ ID NO: 5393098 - DNA, 25 bp, Homo sapien
gctgattaaagctcgaattcccaca

SEQ ID NO: 5393099 - DNA, 25 bp, Homo sapien
agctgattaaagctcgaattcccac

SEQ ID NO: 5393100 - DNA, 25 bp, Homo sapien
taaagctcgaattcccacatctctt

SEQ ID NO: 5393101 - DNA, 25 bp, Homo sapien
gattaaagctcgaattcccacatct

SEQ ID NO: 5393102 - DNA, 25 bp, Homo sapien
tcctttatgcaaggaatgctcaagt

SEQ ID NO: 5393103 - DNA, 25 bp, Homo sapien
ctttatgcaaggaatgctcaagtta

SEQ ID NO: 5393104 - DNA, 25 bp, Homo sapien
cctttatgcaaggaatgctcaagtt

SEQ ID NO: 5393105 - DNA, 25 bp, Homo sapien
tgccgactgactcttagcaatgagt

SEQ ID NO: 5393106 - DNA, 25 bp, Homo sapien
caatgagttggaatgtcttattttg

SEQ ID NO: 5393107 - DNA, 25 bp, Homo sapien
cgactgactcttagcaatgagttgg

SEQ ID NO: 5393108 - DNA, 25 bp, Homo sapien
ctcctgccgactgactcttagcaat

SEQ ID NO: 5393109 - DNA, 25 bp, Homo sapien
ggcattttatatctgcagacccatt

SEQ ID NO: 5393110 - DNA, 25 bp, Homo sapien
ctgatttgaggataagtcccaccat

SEQ ID NO: 5393111 - DNA, 25 bp, Homo sapien
ttgaggataagtcccaccattcttc

SEQ ID NO: 5393112 - DNA, 25 bp, Homo sapien
ggataagtcccaccattcttcagta

SEQ ID NO: 5393113 - DNA, 25 bp, Homo sapien
taagtcccaccattcttcagtactc

SEQ ID NO: 5393114 - DNA, 25 bp, Homo sapien
ttcgtttctcgagatggcttttagc

SEQ ID NO: 5393115 - DNA, 25 bp, Homo sapien
catccccagaccttatggttaaaag

SEQ ID NO: 5393116 - DNA, 25 bp, Homo sapien
aacatcttttcctattcgtttctcg

SEQ ID NO: 5393117 - DNA, 25 bp, Homo sapien
gatggcttttagctccatccccaga

SEQ ID NO: 5393118 - DNA, 25 bp, Homo sapien
tgcgttataaaccaccgcttacgaa

SEQ ID NO: 5393119 - DNA, 25 bp, Homo sapien
aacctttgttctaaagcattgccga

SEQ ID NO: 5393120 - DNA, 25 bp, Homo sapien
tgttctaaagcattgccgattttac

SEQ ID NO: 5393121 - DNA, 25 bp, Homo sapien
acgtacttttcaaatcctacatgcg

SEQ ID NO: 5393122 - DNA, 25 bp, Homo sapien
agagccaacaagcactcagctggtt

SEQ ID NO: 5393123 - DNA, 25 bp, Homo sapien
agcttactatgccagagccaacaag

SEQ ID NO: 5393124 - DNA, 25 bp, Homo sapien
gccaacaagcactcagctggttaaa

SEQ ID NO: 5393125 - DNA, 25 bp, Homo sapien
aagagcttactatgccagagccaac

SEQ ID NO: 5393126 - DNA, 25 bp, Homo sapien
cccacgagcttctattgttctaaac

SEQ ID NO: 5393127 - DNA, 25 bp, Homo sapien
agaaaccagtaaagccccacgagct

SEQ ID NO: 5393128 - DNA, 25 bp, Homo sapien
taaagccccacgagcttctattgtt

SEQ ID NO: 5393129 - DNA, 25 bp, Homo sapien
ctcagaaaccagtaaagccccacga

SEQ ID NO: 5393130 - DNA, 25 bp, Homo sapien
gcccctggcaattggctttggcagt

SEQ ID NO: 5393131 - DNA, 25 bp, Homo sapien
agctaattggaaaaccatgcttgtg

SEQ ID NO: 5393132 - DNA, 25 bp, Homo sapien
tttttggtgtggcttgaatctgatc

SEQ ID NO: 5393133 - DNA, 25 bp, Homo sapien
ggaaaaccatgcttgtgatatagca

SEQ ID NO: 5393134 - DNA, 25 bp, Homo sapien
cttgaaagtgggcaagatagcagat

SEQ ID NO: 5393135 - DNA, 25 bp, Homo sapien
aaagtgggcaagatagcagatggtc

SEQ ID NO: 5393136 - DNA, 25 bp, Homo sapien
tgaaagtgggcaagatagcagatgg

SEQ ID NO: 5393137 - DNA, 25 bp, Homo sapien
aagtgggcaagatagcagatggtct

SEQ ID NO: 5393138 - DNA, 25 bp, Homo sapien
atctaatcgatcaggcagagcagaa

SEQ ID NO: 5393139 - DNA, 25 bp, Homo sapien
cttggtggctaaatctaatcgatca

SEQ ID NO: 5393140 - DNA, 25 bp, Homo sapien
cagagcagaaggagtgtgagctttg

SEQ ID NO: 5393141 - DNA, 25 bp, Homo sapien
ctgtgactcagtctcgctgctcttg

SEQ ID NO: 5393142 - DNA, 25 bp, Homo sapien
cctctcttggaacacactcagtttt

SEQ ID NO: 5393143 - DNA, 25 bp, Homo sapien
tgaatgagtattggcaaacaccaag

SEQ ID NO: 5393144 - DNA, 25 bp, Homo sapien
aagccatagccatgttccaaaatga

SEQ ID NO: 5393145 - DNA, 25 bp, Homo sapien
aaacaccaccacattgagtcaaagc

SEQ ID NO: 5393146 - DNA, 25 bp, Homo sapien
gcatgttttagattggctatagcca

SEQ ID NO: 5393147 - DNA, 25 bp, Homo sapien
gcacctgggcatgttttagattggc

SEQ ID NO: 5393148 - DNA, 25 bp, Homo sapien
tgagattccaatcaggcacctgggc

SEQ ID NO: 5393149 - DNA, 25 bp, Homo sapien
aactcagtgatgagattccaatcag

SEQ ID NO: 5393150 - DNA, 25 bp, Homo sapien
gaagtattgtaagataggttatctt

SEQ ID NO: 5393151 - DNA, 25 bp, Homo sapien
tgaagtattgtaagataggttatct

SEQ ID NO: 5393152 - DNA, 25 bp, Homo sapien
agtattgtaagataggttatcttta

SEQ ID NO: 5393153 - DNA, 25 bp, Homo sapien
gtgaagtattgtaagataggttatc

SEQ ID NO: 5393154 - DNA, 25 bp, Homo sapien
tggtggtctgattcaatatgcttgg

SEQ ID NO: 5393155 - DNA, 25 bp, Homo sapien
gatatgtgttcacgatttccagtga

SEQ ID NO: 5393156 - DNA, 25 bp, Homo sapien
catagaaaatgtgcaactgagagtc

SEQ ID NO: 5393157 - DNA, 25 bp, Homo sapien
tcaatatgcttggagaccgcagtca

SEQ ID NO: 5393158 - DNA, 25 bp, Homo sapien
tctggtgttttgtaatcgttagtag

SEQ ID NO: 5393159 - DNA, 25 bp, Homo sapien
aaatggaatgttgtagacctccaat

SEQ ID NO: 5393160 - DNA, 25 bp, Homo sapien
ctccaatcggtggacatgtctttct

SEQ ID NO: 5393161 - DNA, 25 bp, Homo sapien
cctcttttctgtggtaacactgttc

SEQ ID NO: 5393162 - DNA, 25 bp, Homo sapien
gttgggatataggatgccacagaaa

SEQ ID NO: 5393163 - DNA, 25 bp, Homo sapien
tctggataattcttaacgttagtgc

SEQ ID NO: 5393164 - DNA, 25 bp, Homo sapien
gataattcttaacgttagtgcaatg

SEQ ID NO: 5393165 - DNA, 25 bp, Homo sapien
tctttgggtcctcattatctgttgg

SEQ ID NO: 5393166 - DNA, 25 bp, Homo sapien
gtgaaataagattagttccaattgt

SEQ ID NO: 5393167 - DNA, 25 bp, Homo sapien
ctgtgaaataagattagttccaatt

SEQ ID NO: 5393168 - DNA, 25 bp, Homo sapien
tgtgaaataagattagttccaattg

SEQ ID NO: 5393169 - DNA, 25 bp, Homo sapien
tgaaataagattagttccaattgtt

SEQ ID NO: 5393170 - DNA, 25 bp, Homo sapien
gagacaggaccaatctgcatattag

SEQ ID NO: 5393171 - DNA, 25 bp, Homo sapien
tgggagacaggaccaatctgcatat

SEQ ID NO: 5393172 - DNA, 25 bp, Homo sapien
gacaggaccaatctgcatattagac

SEQ ID NO: 5393173 - DNA, 25 bp, Homo sapien
taggcggaagtctgggagacaggac

SEQ ID NO: 5393174 - DNA, 25 bp, Homo sapien
tgtagtagtatactactggatgaag

SEQ ID NO: 5393175 - DNA, 25 bp, Homo sapien
cttgcatgctgtagtagtatactac

SEQ ID NO: 5393176 - DNA, 25 bp, Homo sapien
gctgtagtagtatactactggatga

SEQ ID NO: 5393177 - DNA, 25 bp, Homo sapien
catgctgtagtagtatactactgga

SEQ ID NO: 5393178 - DNA, 25 bp, Homo sapien
aatcagtgaggtagcagtagaagga

SEQ ID NO: 5393179 - DNA, 25 bp, Homo sapien
ggtagttggtgaatagaatcagtga

SEQ ID NO: 5393180 - DNA, 25 bp, Homo sapien
gttggtgaatagaatcagtgaggta

SEQ ID NO: 5393181 - DNA, 25 bp, Homo sapien
cagtgaggtagcagtagaaggaaac

SEQ ID NO: 5393182 - DNA, 25 bp, Homo sapien
caaatgtatggaggggagaagtgaa

SEQ ID NO: 5393183 - DNA, 25 bp, Homo sapien
tcaaatgtatggaggggagaagtga

SEQ ID NO: 5393184 - DNA, 25 bp, Homo sapien
tggcattcgattcttctgctttggt

SEQ ID NO: 5393185 - DNA, 25 bp, Homo sapien
ttaccacatggacctggcattcgat

SEQ ID NO: 5393186 - DNA, 25 bp, Homo sapien
taccacatggacctggcattcgatt

SEQ ID NO: 5393187 - DNA, 25 bp, Homo sapien
ccacatggacctggcattcgattct

SEQ ID NO: 5393188 - DNA, 25 bp, Homo sapien
tagttgctgcgaatttttaatatgc

SEQ ID NO: 5393189 - DNA, 25 bp, Homo sapien
cattctgatataccaatgaaatata

SEQ ID NO: 5393190 - DNA, 25 bp, Homo sapien
gcttctgatgaactgagattggagt

SEQ ID NO: 5393191 - DNA, 25 bp, Homo sapien
ccaatgaaatatagatcaaggattt

SEQ ID NO: 5393192 - DNA, 25 bp, Homo sapien
tccaagttgcaggtccaaggaagaa

SEQ ID NO: 5393193 - DNA, 25 bp, Homo sapien
gctctctgccagtaacaacgtttaa

SEQ ID NO: 5393194 - DNA, 25 bp, Homo sapien
tatacgtgtaaccagaatgagccgg

SEQ ID NO: 5393195 - DNA, 25 bp, Homo sapien
tgctgagaaagtcaccgatggcctt

SEQ ID NO: 5393196 - DNA, 25 bp, Homo sapien
ccgcttctcaattggctactaacta

SEQ ID NO: 5393197 - DNA, 25 bp, Homo sapien
tgttctgtggttgatccgcttctca

SEQ ID NO: 5393198 - DNA, 25 bp, Homo sapien
tactaactacctttgccttagctcc

SEQ ID NO: 5393199 - DNA, 25 bp, Homo sapien
gggcttttgactttactgtgttctg

SEQ ID NO: 5393200 - DNA, 25 bp, Homo sapien
aattcctgatgaggtagcatccata

SEQ ID NO: 5393201 - DNA, 25 bp, Homo sapien
tgatgaggtagcatccatatgcaac

SEQ ID NO: 5393202 - DNA, 25 bp, Homo sapien
cgtgcctgcaaggtcaaaatgtcag

SEQ ID NO: 5393203 - DNA, 25 bp, Homo sapien
gtgcctgcaaggtcaaaatgtcagc

SEQ ID NO: 5393204 - DNA, 25 bp, Homo sapien
agattgcagaagagactgaacactg

SEQ ID NO: 5393205 - DNA, 25 bp, Homo sapien
tgcagaagagactgaacactgcgct

SEQ ID NO: 5393206 - DNA, 25 bp, Homo sapien
cagaagagactgaacactgcgctag

SEQ ID NO: 5393207 - DNA, 25 bp, Homo sapien
aagagactgaacactgcgctaggct

SEQ ID NO: 5393208 - DNA, 25 bp, Homo sapien
ttggtgaagatctgtactctattac

SEQ ID NO: 5393209 - DNA, 25 bp, Homo sapien
gaagatctgtactctattacggatc

SEQ ID NO: 5393210 - DNA, 25 bp, Homo sapien
tgtactctattacggatccttttgc

SEQ ID NO: 5393211 - DNA, 25 bp, Homo sapien
tctattacggatccttttgccattt

SEQ ID NO: 5393212 - DNA, 25 bp, Homo sapien
tgtaaaattgttccctccagccctg

SEQ ID NO: 5393213 - DNA, 25 bp, Homo sapien
ttatttaatagctagcactgctgac

SEQ ID NO: 5393214 - DNA, 25 bp, Homo sapien
cactgctgactcaataacagtaaga

SEQ ID NO: 5393215 - DNA, 25 bp, Homo sapien
tgggtgttccccatagaggtaattg

SEQ ID NO: 5393216 - DNA, 25 bp, Homo sapien
tgcatgaccatcaccagacaccaag

SEQ ID NO: 5393217 - DNA, 25 bp, Homo sapien
gaacaagaccatggaccacagagtc

SEQ ID NO: 5393218 - DNA, 25 bp, Homo sapien
ctgattcatctgctacttgatgtcc

SEQ ID NO: 5393219 - DNA, 25 bp, Homo sapien
gtcctggaaatgtctacctcctgag

SEQ ID NO: 5393220 - DNA, 25 bp, Homo sapien
tgatctttttgcctccccttctttg

SEQ ID NO: 5393221 - DNA, 25 bp, Homo sapien
ctgctttgctgcctattatggaaat

SEQ ID NO: 5393222 - DNA, 25 bp, Homo sapien
gttatacacagcctccagatcacca

SEQ ID NO: 5393223 - DNA, 25 bp, Homo sapien
tactttacctctgacggttatacac

SEQ ID NO: 5393224 - DNA, 25 bp, Homo sapien
gctgcctattatggaaattgcattt

SEQ ID NO: 5393225 - DNA, 25 bp, Homo sapien
gtgatgtcgaatgccagcctgaagg

SEQ ID NO: 5393226 - DNA, 25 bp, Homo sapien
cttgtctgggatgtgatgtcgaatg

SEQ ID NO: 5393227 - DNA, 25 bp, Homo sapien
tgccagcctgaaggcaataggagtg

SEQ ID NO: 5393228 - DNA, 25 bp, Homo sapien
tgtcgaatgccagcctgaaggcaat

SEQ ID NO: 5393229 - DNA, 25 bp, Homo sapien
ctgtcttgccggcatcagattccaa

SEQ ID NO: 5393230 - DNA, 25 bp, Homo sapien
gcatcagattccaatacattatcag

SEQ ID NO: 5393231 - DNA, 25 bp, Homo sapien
catcagattccaatacattatcagc

SEQ ID NO: 5393232 - DNA, 25 bp, Homo sapien
gagtcacgctcaaagttattaacca

SEQ ID NO: 5393233 - DNA, 25 bp, Homo sapien
tattaaccaagcacccacttgggcc

SEQ ID NO: 5393234 - DNA, 25 bp, Homo sapien
caaactttgccaatttactagagtc

SEQ ID NO: 5393235 - DNA, 25 bp, Homo sapien
acttgggccatgaattgagcttgct

SEQ ID NO: 5393236 - DNA, 25 bp, Homo sapien
cctcaaagtaggaacattctatgat

SEQ ID NO: 5393237 - DNA, 25 bp, Homo sapien
ctcaaagtaggaacattctatgatt

SEQ ID NO: 5393238 - DNA, 25 bp, Homo sapien
ttttatgattcctcgccagccttca

SEQ ID NO: 5393239 - DNA, 25 bp, Homo sapien
tcaggttcacacaacaattctctca

SEQ ID NO: 5393240 - DNA, 25 bp, Homo sapien
ttgacattagaaccttggagaatct

SEQ ID NO: 5393241 - DNA, 25 bp, Homo sapien
ttctctcactatgtaccattttgac

SEQ ID NO: 5393242 - DNA, 25 bp, Homo sapien
ttctgcaggtgagccaatattaagc

SEQ ID NO: 5393243 - DNA, 25 bp, Homo sapien
gaggatgtacaaagtcaacaagttc

SEQ ID NO: 5393244 - DNA, 25 bp, Homo sapien
gtacaaagtcaacaagttcttcttg

SEQ ID NO: 5393245 - DNA, 25 bp, Homo sapien
ctgaggttgaggatgtacaaagtca

SEQ ID NO: 5393246 - DNA, 25 bp, Homo sapien
aagtcaacaagttcttcttgattct

SEQ ID NO: 5393247 - DNA, 25 bp, Homo sapien
gtactgagtatactgtaattcctca

SEQ ID NO: 5393248 - DNA, 25 bp, Homo sapien
ggagtactgagtatactgtaattcc

SEQ ID NO: 5393249 - DNA, 25 bp, Homo sapien
cagcttggagtactgagtatactgt

SEQ ID NO: 5393250 - DNA, 25 bp, Homo sapien
gagtatactgtaattcctcaaccaa

SEQ ID NO: 5393251 - DNA, 25 bp, Homo sapien
ggtagttccttgcttcattaatatt

SEQ ID NO: 5393252 - DNA, 25 bp, Homo sapien
tgctgctcctctatcgcagccctct

SEQ ID NO: 5393253 - DNA, 25 bp, Homo sapien
gtctggtagttccttgcttcattaa

SEQ ID NO: 5393254 - DNA, 25 bp, Homo sapien
atgtctggtagttccttgcttcatt

SEQ ID NO: 5393255 - DNA, 25 bp, Homo sapien
tcctgagtgaggcagtgccttgccc

SEQ ID NO: 5393256 - DNA, 25 bp, Homo sapien
tgctccattttttaagcccgttgga

SEQ ID NO: 5393257 - DNA, 25 bp, Homo sapien
gcccgttggaaaagcgcaatatttg

SEQ ID NO: 5393258 - DNA, 25 bp, Homo sapien
ccttctgcctccctcacactgggag

SEQ ID NO: 5393259 - DNA, 25 bp, Homo sapien
tctgcattctccttcgcagtcagga

SEQ ID NO: 5393260 - DNA, 25 bp, Homo sapien
gtggaaaggccaccgcacgtttaga

SEQ ID NO: 5393261 - DNA, 25 bp, Homo sapien
tgagcggccacttaaaacttcctag

SEQ ID NO: 5393262 - DNA, 25 bp, Homo sapien
aatgagtttctcacaatgagcggcc

SEQ ID NO: 5393263 - DNA, 25 bp, Homo sapien
catttagtggatacctgggtgtcat

SEQ ID NO: 5393264 - DNA, 25 bp, Homo sapien
tgggcatttagtggatacctgggtg

SEQ ID NO: 5393265 - DNA, 25 bp, Homo sapien
gttgggcatttagtggatacctggg

SEQ ID NO: 5393266 - DNA, 25 bp, Homo sapien
ggcatttagtggatacctgggtgtc

SEQ ID NO: 5393267 - DNA, 25 bp, Homo sapien
gaagctgggctgtaattgagtttca

SEQ ID NO: 5393268 - DNA, 25 bp, Homo sapien
gaatccatacctatggtggctggga

SEQ ID NO: 5393269 - DNA, 25 bp, Homo sapien
tcaactgacccgtgtacttatattt

SEQ ID NO: 5393270 - DNA, 25 bp, Homo sapien
tctattctcaatacaagagccagat

SEQ ID NO: 5393271 - DNA, 25 bp, Homo sapien
aaatatctgaagttgtgaagagaac

SEQ ID NO: 5393272 - DNA, 25 bp, Homo sapien
gccttgcactgggtactgtccgggt

SEQ ID NO: 5393273 - DNA, 25 bp, Homo sapien
cactgggtactgtccgggttgacta

SEQ ID NO: 5393274 - DNA, 25 bp, Homo sapien
gagaacatgtacaataaccatccct

SEQ ID NO: 5393275 - DNA, 25 bp, Homo sapien
cagttcccatttcactatatgagaa

SEQ ID NO: 5393276 - DNA, 25 bp, Homo sapien
tcccctccagactctttcaccaaag

SEQ ID NO: 5393277 - DNA, 25 bp, Homo sapien
tgaagtacaaatggagttcaggttc

SEQ ID NO: 5393278 - DNA, 25 bp, Homo sapien
tatatgagaatgaaccctggaaata

SEQ ID NO: 5393279 - DNA, 25 bp, Homo sapien
gactattgccactactacaagggtg

SEQ ID NO: 5393280 - DNA, 25 bp, Homo sapien
gaaccatagggttctcatcccaact

SEQ ID NO: 5393281 - DNA, 25 bp, Homo sapien
cagaagaataccaagaaccataggg

SEQ ID NO: 5393282 - DNA, 25 bp, Homo sapien
catcccaactgggtggactattgcc

SEQ ID NO: 5393283 - DNA, 25 bp, Homo sapien
gcccacacgggtattatcttccacg

SEQ ID NO: 5393284 - DNA, 25 bp, Homo sapien
ctcttggaacagtttgtcagtgccc

SEQ ID NO: 5393285 - DNA, 25 bp, Homo sapien
taggaaaacagtcgctgggaatccc

SEQ ID NO: 5393286 - DNA, 25 bp, Homo sapien
tgtatgaagcagcacaagatgttga

SEQ ID NO: 5393287 - DNA, 25 bp, Homo sapien
cacatctcccaagttgaaccccggg

SEQ ID NO: 5393288 - DNA, 25 bp, Homo sapien
ctcagttaccacatctcccaagttg

SEQ ID NO: 5393289 - DNA, 25 bp, Homo sapien
ggtctcctcagttaccacatctccc

SEQ ID NO: 5393290 - DNA, 25 bp, Homo sapien
gttaccacatctcccaagttgaacc

SEQ ID NO: 5393291 - DNA, 25 bp, Homo sapien
gggcagaaacaggataagcatgcca

SEQ ID NO: 5393292 - DNA, 25 bp, Homo sapien
gagtgtggggggcatagactaccag

SEQ ID NO: 5393293 - DNA, 25 bp, Homo sapien
tgggcagaaacaggataagcatgcc

SEQ ID NO: 5393294 - DNA, 25 bp, Homo sapien
gggggcatagactaccagaaacatc

SEQ ID NO: 5393295 - DNA, 25 bp, Homo sapien
tctctgctggactgcattacttgga

SEQ ID NO: 5393296 - DNA, 25 bp, Homo sapien
ttctctgctggactgcattacttgg

SEQ ID NO: 5393297 - DNA, 25 bp, Homo sapien
ctctgctggactgcattacttggac

SEQ ID NO: 5393298 - DNA, 25 bp, Homo sapien
atacctcacgtgatgcacagctaca

SEQ ID NO: 5393299 - DNA, 25 bp, Homo sapien
aaatacctgtaaagtccaatgattg

SEQ ID NO: 5393300 - DNA, 25 bp, Homo sapien
tttgctgacctacaatagttaaagg

SEQ ID NO: 5393301 - DNA, 25 bp, Homo sapien
gcacattgtgtattcaggctaaaaa

SEQ ID NO: 5393302 - DNA, 25 bp, Homo sapien
tggcacgtgtgtgtaagcccaccta

SEQ ID NO: 5393303 - DNA, 25 bp, Homo sapien
aaagcaagtgtcagaatgaaccctg

SEQ ID NO: 5393304 - DNA, 25 bp, Homo sapien
aggagggaagaaactctgggcacat

SEQ ID NO: 5393305 - DNA, 25 bp, Homo sapien
aaaggtctgtggcttcactactcca

SEQ ID NO: 5393306 - DNA, 25 bp, Homo sapien
agaagtgagtgagaccacaaaccca

SEQ ID NO: 5393307 - DNA, 25 bp, Homo sapien
gctttagaactaatggtgtatataa

SEQ ID NO: 5393308 - DNA, 25 bp, Homo sapien
ctgctgcgttgatgggatcatattt

SEQ ID NO: 5393309 - DNA, 25 bp, Homo sapien
tggtgtatataattgagttgctgag

SEQ ID NO: 5393310 - DNA, 25 bp, Homo sapien
catattttccaaccagtctgcttta

SEQ ID NO: 5393311 - DNA, 25 bp, Homo sapien
taatggaaaattctcctggtatatt

SEQ ID NO: 5393312 - DNA, 25 bp, Homo sapien
gtaatggaaaattctcctggtatat

SEQ ID NO: 5393313 - DNA, 25 bp, Homo sapien
aagctgtgcacctatacttgcaatt

SEQ ID NO: 5393314 - DNA, 25 bp, Homo sapien
caattttagctgactgtttccactc

SEQ ID NO: 5393315 - DNA, 25 bp, Homo sapien
cttgcaattttagctgactgtttcc

SEQ ID NO: 5393316 - DNA, 25 bp, Homo sapien
tatacttgcaattttagctgactgt

SEQ ID NO: 5393317 - DNA, 25 bp, Homo sapien
atgttctcatcagcgtgggcttctg

SEQ ID NO: 5393318 - DNA, 25 bp, Homo sapien
catgttctcatcagcgtgggcttct

SEQ ID NO: 5393319 - DNA, 25 bp, Homo sapien
tctcatcagcgtgggcttctgtctc

SEQ ID NO: 5393320 - DNA, 25 bp, Homo sapien
gttctcatcagcgtgggcttctgtc

SEQ ID NO: 5393321 - DNA, 25 bp, Homo sapien
tctctggtcatcacttttctgcaaa

SEQ ID NO: 5393322 - DNA, 25 bp, Homo sapien
tcttttctctggtcatcacttttct

SEQ ID NO: 5393323 - DNA, 25 bp, Homo sapien
ttctctggtcatcacttttctgcaa

SEQ ID NO: 5393324 - DNA, 25 bp, Homo sapien
ttttctctggtcatcacttttctgc

SEQ ID NO: 5393325 - DNA, 25 bp, Homo sapien
gcaactcctgggtagattcacaaga

SEQ ID NO: 5393326 - DNA, 25 bp, Homo sapien
tctcatttgcaagaatcaccacctg

SEQ ID NO: 5393327 - DNA, 25 bp, Homo sapien
caagaagtctcattcatccacgtgc

SEQ ID NO: 5393328 - DNA, 25 bp, Homo sapien
tcattcagtttgtgggcagatcact

SEQ ID NO: 5393329 - DNA, 25 bp, Homo sapien
gcggttcccaagctcttgcagcgtg

SEQ ID NO: 5393330 - DNA, 25 bp, Homo sapien
gcacccatgttcagcggttcccaag

SEQ ID NO: 5393331 - DNA, 25 bp, Homo sapien
catgttcagcggttcccaagctctt

SEQ ID NO: 5393332 - DNA, 25 bp, Homo sapien
gttatagcttgcacccatgttcagc

SEQ ID NO: 5393333 - DNA, 25 bp, Homo sapien
gctatagaacatgcctaggttcatc

SEQ ID NO: 5393334 - DNA, 25 bp, Homo sapien
gaacatgcctaggttcatctggaat

SEQ ID NO: 5393335 - DNA, 25 bp, Homo sapien
attctgctatagaacatgcctaggt

SEQ ID NO: 5393336 - DNA, 25 bp, Homo sapien
tagaacatgcctaggttcatctgga

SEQ ID NO: 5393337 - DNA, 25 bp, Homo sapien
tcagtgctcatttttatagatttta

SEQ ID NO: 5393338 - DNA, 25 bp, Homo sapien
gatgccgagctcctgactgatgatc

SEQ ID NO: 5393339 - DNA, 25 bp, Homo sapien
aatcagcagcttccatgatgccgag

SEQ ID NO: 5393340 - DNA, 25 bp, Homo sapien
tctatgttttggaggaaagacaccg

SEQ ID NO: 5393341 - DNA, 25 bp, Homo sapien
tatccatgtccgtgaatcaaggtct

SEQ ID NO: 5393342 - DNA, 25 bp, Homo sapien
cagtaaccagtaactattagagaag

SEQ ID NO: 5393343 - DNA, 25 bp, Homo sapien
tggtcccatttgacggcgatggaaa

SEQ ID NO: 5393344 - DNA, 25 bp, Homo sapien
cgttcattgctggagtagccaaaga

SEQ ID NO: 5393345 - DNA, 25 bp, Homo sapien
gcgatggaaatgaatcagactcccc

SEQ ID NO: 5393346 - DNA, 25 bp, Homo sapien
cttcttcattgcgggtagaccagga

SEQ ID NO: 5393347 - DNA, 25 bp, Homo sapien
ggctgttgcgctggcaatgcttctt

SEQ ID NO: 5393348 - DNA, 25 bp, Homo sapien
gagagagaaggctgttgcgctggca

SEQ ID NO: 5393349 - DNA, 25 bp, Homo sapien
cgggtagaccaggagaggaaaatat

SEQ ID NO: 5393350 - DNA, 25 bp, Homo sapien
tcccagacaaagtgaatagcaacca

SEQ ID NO: 5393351 - DNA, 25 bp, Homo sapien
agagaagcaaccaccagatactttc

SEQ ID NO: 5393352 - DNA, 25 bp, Homo sapien
ccaccagatactttctcatcccaga

SEQ ID NO: 5393353 - DNA, 25 bp, Homo sapien
gaggaaaaagtgatccggaagagaa

SEQ ID NO: 5393354 - DNA, 25 bp, Homo sapien
aagcattgcatacaggtgaggaggc

SEQ ID NO: 5393355 - DNA, 25 bp, Homo sapien
tcctctaaccgccagggtagctgat

SEQ ID NO: 5393356 - DNA, 25 bp, Homo sapien
gttgaatacatactggcgagcctct

SEQ ID NO: 5393357 - DNA, 25 bp, Homo sapien
caaggagtggtgaacataactgcct

SEQ ID NO: 5393358 - DNA, 25 bp, Homo sapien
ggaactgatctgctaagggaaatgc

SEQ ID NO: 5393359 - DNA, 25 bp, Homo sapien
cagtcttgctgtgaccaagagctgc

SEQ ID NO: 5393360 - DNA, 25 bp, Homo sapien
aacccctctggtgacatgcttcgta

SEQ ID NO: 5393361 - DNA, 25 bp, Homo sapien
gaaatgctgctaactcatgctttag

SEQ ID NO: 5393362 - DNA, 25 bp, Homo sapien
ctgaaggaacgacattcttcaaatg

SEQ ID NO: 5393363 - DNA, 25 bp, Homo sapien
tgaaggaacgacattcttcaaatgc

SEQ ID NO: 5393364 - DNA, 25 bp, Homo sapien
gctcatggagcagattactagcagt

SEQ ID NO: 5393365 - DNA, 25 bp, Homo sapien
atgtttagagtcagcttcattgtct

SEQ ID NO: 5393366 - DNA, 25 bp, Homo sapien
tactagcagtaacgttcctaactcg

SEQ ID NO: 5393367 - DNA, 25 bp, Homo sapien
ccaacaacagtagctcatggagcag

SEQ ID NO: 5393368 - DNA, 25 bp, Homo sapien
tcctggctctgtagcaaccactttc

SEQ ID NO: 5393369 - DNA, 25 bp, Homo sapien
tctggtagacctgacataatctcac

SEQ ID NO: 5393370 - DNA, 25 bp, Homo sapien
taccatctccacgagttgctcaaat

SEQ ID NO: 5393371 - DNA, 25 bp, Homo sapien
gcacaactctacctttggtgaagaa

SEQ ID NO: 5393372 - DNA, 25 bp, Homo sapien
gagtaccaacggacttgactggtaa

SEQ ID NO: 5393373 - DNA, 25 bp, Homo sapien
ccaacggacttgactggtaaagcca

SEQ ID NO: 5393374 - DNA, 25 bp, Homo sapien
ctttggagagtaccaacggacttga

SEQ ID NO: 5393375 - DNA, 25 bp, Homo sapien
tggagagtaccaacggacttgactg

SEQ ID NO: 5393376 - DNA, 25 bp, Homo sapien
cacctgccctgttgtctcctgaggt

SEQ ID NO: 5393377 - DNA, 25 bp, Homo sapien
tgtctcctgaggtatcagcagctgc

SEQ ID NO: 5393378 - DNA, 25 bp, Homo sapien
caaggagaacactatctatgtcata

SEQ ID NO: 5393379 - DNA, 25 bp, Homo sapien
ggagaacactatctatgtcatacat

SEQ ID NO: 5393380 - DNA, 25 bp, Homo sapien
tcatgtgttagtcaagaagacacag

SEQ ID NO: 5393381 - DNA, 25 bp, Homo sapien
catgtgttagtcaagaagacacaga

SEQ ID NO: 5393382 - DNA, 25 bp, Homo sapien
tgtgttagtcaagaagacacagagc

SEQ ID NO: 5393383 - DNA, 25 bp, Homo sapien
gtgttagtcaagaagacacagagct

SEQ ID NO: 5393384 - DNA, 25 bp, Homo sapien
acaagttcacgcagaggaaagaatc

SEQ ID NO: 5393385 - DNA, 25 bp, Homo sapien
agcttggacaagttcacgcagagga

SEQ ID NO: 5393386 - DNA, 25 bp, Homo sapien
cttcacattctgactggacatgtga

SEQ ID NO: 5393387 - DNA, 25 bp, Homo sapien
tgttgttaggaagtagcttggacaa

SEQ ID NO: 5393388 - DNA, 25 bp, Homo sapien
gctttctgtagtagaaactgctgac

SEQ ID NO: 5393389 - DNA, 25 bp, Homo sapien
gaaactgctgacttgtcagctaatg

SEQ ID NO: 5393390 - DNA, 25 bp, Homo sapien
ttttgctttctgtagtagaaactgc

SEQ ID NO: 5393391 - DNA, 25 bp, Homo sapien
gacttgtcagctaatgcaggctgaa

SEQ ID NO: 5393392 - DNA, 25 bp, Homo sapien
gcgcagtttgaccttatacgtttta

SEQ ID NO: 5393393 - DNA, 25 bp, Homo sapien
caagcaaataggcatttatctcagt

SEQ ID NO: 5393394 - DNA, 25 bp, Homo sapien
caactcaaagctaggagggcacttc

SEQ ID NO: 5393395 - DNA, 25 bp, Homo sapien
gtggtcagggcgcagtttgacctta

SEQ ID NO: 5393396 - DNA, 25 bp, Homo sapien
aactttgcattatagctttattgtt

SEQ ID NO: 5393397 - DNA, 25 bp, Homo sapien
cctgtgctctttgctactgcataat

SEQ ID NO: 5393398 - DNA, 25 bp, Homo sapien
atactattagaattcactcctgtgc

SEQ ID NO: 5393399 - DNA, 25 bp, Homo sapien
tagaattcactcctgtgctctttgc

SEQ ID NO: 5393400 - DNA, 25 bp, Homo sapien
cacattggtcaaggttactgaaata

SEQ ID NO: 5393401 - DNA, 25 bp, Homo sapien
gctccacattggtcaaggttactga

SEQ ID NO: 5393402 - DNA, 25 bp, Homo sapien
attggtcaaggttactgaaatatgc

SEQ ID NO: 5393403 - DNA, 25 bp, Homo sapien
tccacattggtcaaggttactgaaa

SEQ ID NO: 5393404 - DNA, 25 bp, Homo sapien
ggctctcttatccagccagactcag

SEQ ID NO: 5393405 - DNA, 25 bp, Homo sapien
ttcttggcgtggtttcttggctctc

SEQ ID NO: 5393406 - DNA, 25 bp, Homo sapien
ctctcttatccagccagactcagta

SEQ ID NO: 5393407 - DNA, 25 bp, Homo sapien
tcccacattgctgattcttggcgtg

SEQ ID NO: 5393408 - DNA, 25 bp, Homo sapien
taagatagtataacagcttcttcca

SEQ ID NO: 5393409 - DNA, 25 bp, Homo sapien
ccttgatgtacagttcctattggca

SEQ ID NO: 5393410 - DNA, 25 bp, Homo sapien
tatttaagatagtataacagcttct

SEQ ID NO: 5393411 - DNA, 25 bp, Homo sapien
cttccactatccttgatgtacagtt

SEQ ID NO: 5393412 - DNA, 25 bp, Homo sapien
tctgcttcccaatcaacatgtccaa

SEQ ID NO: 5393413 - DNA, 25 bp, Homo sapien
caatcaacatgtccaacttgcacag

SEQ ID NO: 5393414 - DNA, 25 bp, Homo sapien
tgtccaacttgcacagaaaggtctc

SEQ ID NO: 5393415 - DNA, 25 bp, Homo sapien
cctgtgtgttgcttggtgttaaaat

SEQ ID NO: 5393416 - DNA, 25 bp, Homo sapien
tagaaagcctttggtaactgagaaa

SEQ ID NO: 5393417 - DNA, 25 bp, Homo sapien
tagtcctagtgagaagaaatgccat

SEQ ID NO: 5393418 - DNA, 25 bp, Homo sapien
tatatcaaagaatgcttggcgatgc

SEQ ID NO: 5393419 - DNA, 25 bp, Homo sapien
tgtgcaaaggctaattcatggaact

SEQ ID NO: 5393420 - DNA, 25 bp, Homo sapien
caggataagggcttacatgcggttt

SEQ ID NO: 5393421 - DNA, 25 bp, Homo sapien
catgcggtttatactcaacagtgat

SEQ ID NO: 5393422 - DNA, 25 bp, Homo sapien
acagacaccaggataagggcttaca

SEQ ID NO: 5393423 - DNA, 25 bp, Homo sapien
ggcttacatgcggtttatactcaac

SEQ ID NO: 5393424 - DNA, 25 bp, Homo sapien
ttgtgtaaggaagaattgcaagatg

SEQ ID NO: 5393425 - DNA, 25 bp, Homo sapien
gtccccaattcattgtcttcagact

SEQ ID NO: 5393426 - DNA, 25 bp, Homo sapien
tcacatgcatgagtgttccaggtgg

SEQ ID NO: 5393427 - DNA, 25 bp, Homo sapien
tatcagtgtcgactaaaagtgcagt

SEQ ID NO: 5393428 - DNA, 25 bp, Homo sapien
tctgatgcgcccttgaaggacaaca

SEQ ID NO: 5393429 - DNA, 25 bp, Homo sapien
gaaggagaaagatagcgctgcttat

SEQ ID NO: 5393430 - DNA, 25 bp, Homo sapien
cagtgggaagcaacgggtttctgat

SEQ ID NO: 5393431 - DNA, 25 bp, Homo sapien
tatctctgcggatgaataacaaggt

SEQ ID NO: 5393432 - DNA, 25 bp, Homo sapien
ataatttacttgctaagggctttga

SEQ ID NO: 5393433 - DNA, 25 bp, Homo sapien
taagtataatttacttgctaagggc

SEQ ID NO: 5393434 - DNA, 25 bp, Homo sapien
agtataatttacttgctaagggctt

SEQ ID NO: 5393435 - DNA, 25 bp, Homo sapien
attaagtataatttacttgctaagg

SEQ ID NO: 5393436 - DNA, 25 bp, Homo sapien
ggtatgggcccgatagcttatagct

SEQ ID NO: 5393437 - DNA, 25 bp, Homo sapien
tggggtatgggcccgatagcttata

SEQ ID NO: 5393438 - DNA, 25 bp, Homo sapien
tatgggcccgatagcttatagctga

SEQ ID NO: 5393439 - DNA, 25 bp, Homo sapien
agtacgggaaggatataaccaacat

SEQ ID NO: 5393440 - DNA, 25 bp, Homo sapien
taattcttttatcagacataatttc

SEQ ID NO: 5393441 - DNA, 25 bp, Homo sapien
aagtaattcttttatcagacataat

SEQ ID NO: 5393442 - DNA, 25 bp, Homo sapien
aaagtaattcttttatcagacataa

SEQ ID NO: 5393443 - DNA, 25 bp, Homo sapien
tatttatcaaagtaattcttttatc

SEQ ID NO: 5393444 - DNA, 25 bp, Homo sapien
aattgccgggctctgccatcttagc

SEQ ID NO: 5393445 - DNA, 25 bp, Homo sapien
gaggagttgaacctcagattataaa

SEQ ID NO: 5393446 - DNA, 25 bp, Homo sapien
taagaggagttgaacctcagattat

SEQ ID NO: 5393447 - DNA, 25 bp, Homo sapien
tttaagttttatgcaattgccgggc

SEQ ID NO: 5393448 - DNA, 25 bp, Homo sapien
gctgctcacgaatattcctcccgtt

SEQ ID NO: 5393449 - DNA, 25 bp, Homo sapien
tattcctcccgttttgccacatagg

SEQ ID NO: 5393450 - DNA, 25 bp, Homo sapien
ccgttttgccacataggtgggtgtg

SEQ ID NO: 5393451 - DNA, 25 bp, Homo sapien
cacgaatattcctcccgttttgcca

SEQ ID NO: 5393452 - DNA, 25 bp, Homo sapien
aaagtgatcgagttgtgatgaaatc

SEQ ID NO: 5393453 - DNA, 25 bp, Homo sapien
ctcaaagtgatcgagttgtgatgaa

SEQ ID NO: 5393454 - DNA, 25 bp, Homo sapien
gaaatcttcggggtgtaagctggat

SEQ ID NO: 5393455 - DNA, 25 bp, Homo sapien
gctggatgctttgagttaagctacg

SEQ ID NO: 5393456 - DNA, 25 bp, Homo sapien
gttgcgacttatctcctctatatat

SEQ ID NO: 5393457 - DNA, 25 bp, Homo sapien
ggatagagagcgttagtaatattag

SEQ ID NO: 5393458 - DNA, 25 bp, Homo sapien
tctatatatggatagagagcgttag

SEQ ID NO: 5393459 - DNA, 25 bp, Homo sapien
gcgacttatctcctctatatatgga

SEQ ID NO: 5393460 - DNA, 25 bp, Homo sapien
ttgtttatggggttgtgcagaccca

SEQ ID NO: 5393461 - DNA, 25 bp, Homo sapien
tttatggggttgtgcagacccatct

SEQ ID NO: 5393462 - DNA, 25 bp, Homo sapien
tggggttgtgcagacccatctagac

SEQ ID NO: 5393463 - DNA, 25 bp, Homo sapien
tatggggttgtgcagacccatctag

SEQ ID NO: 5393464 - DNA, 25 bp, Homo sapien
aatacattctaagcatagaatttat

SEQ ID NO: 5393465 - DNA, 25 bp, Homo sapien
tacattctaagcatagaatttatca

SEQ ID NO: 5393466 - DNA, 25 bp, Homo sapien
atacattctaagcatagaatttatc

SEQ ID NO: 5393467 - DNA, 25 bp, Homo sapien
ttctaagcatagaatttatcaaata

SEQ ID NO: 5393468 - DNA, 25 bp, Homo sapien
tgtgcattgaaagatgatacaatga

SEQ ID NO: 5393469 - DNA, 25 bp, Homo sapien
ctgtgcattgaaagatgatacaatg

SEQ ID NO: 5393470 - DNA, 25 bp, Homo sapien
tattccatagcaagtgcagtcggcc

SEQ ID NO: 5393471 - DNA, 25 bp, Homo sapien
tacctaagatgcaagtacccaatgc

SEQ ID NO: 5393472 - DNA, 25 bp, Homo sapien
ttgacctagcaaagaggatgcgttc

SEQ ID NO: 5393473 - DNA, 25 bp, Homo sapien
tcaaaggtgtgtcatatcagcagca

SEQ ID NO: 5393474 - DNA, 25 bp, Homo sapien
ggagtttcgacagttttgcccatcc

SEQ ID NO: 5393475 - DNA, 25 bp, Homo sapien
catataccggattggagtaatttgt

SEQ ID NO: 5393476 - DNA, 25 bp, Homo sapien
taattttgcatataccggattggag

SEQ ID NO: 5393477 - DNA, 25 bp, Homo sapien
cctttcatcaacacttcctaaggag

SEQ ID NO: 5393478 - DNA, 25 bp, Homo sapien
cccagcagttagtggtcctttcaaa

SEQ ID NO: 5393479 - DNA, 25 bp, Homo sapien
caaatcagagtttaggtagatgggc

SEQ ID NO: 5393480 - DNA, 25 bp, Homo sapien
tgtggaagcttgaaagcactgggtc

SEQ ID NO: 5393481 - DNA, 25 bp, Homo sapien
gatgggcggcgctgtgtgtggaagc

SEQ ID NO: 5393482 - DNA, 25 bp, Homo sapien
agtgctcactgcccattatcttaag

SEQ ID NO: 5393483 - DNA, 25 bp, Homo sapien
ttagtgctcactgcccattatctta

SEQ ID NO: 5393484 - DNA, 25 bp, Homo sapien
tgctcactgcccattatcttaagac

SEQ ID NO: 5393485 - DNA, 25 bp, Homo sapien
ctcactgcccattatcttaagacat

SEQ ID NO: 5393486 - DNA, 25 bp, Homo sapien
aaagacctccatcgttgtgatcatg

SEQ ID NO: 5393487 - DNA, 25 bp, Homo sapien
tttgttgggtctatcataaagccag

SEQ ID NO: 5393488 - DNA, 25 bp, Homo sapien
cctccattgataataggttgtcttc

SEQ ID NO: 5393489 - DNA, 25 bp, Homo sapien
taaagccaggatctaaaagacctcc

SEQ ID NO: 5393490 - DNA, 25 bp, Homo sapien
ggttatcaaagtcaccaagaggacg

SEQ ID NO: 5393491 - DNA, 25 bp, Homo sapien
ttacaaagcactaaaccaattacta

SEQ ID NO: 5393492 - DNA, 25 bp, Homo sapien
caagaggacgagaggcacaatgatg

SEQ ID NO: 5393493 - DNA, 25 bp, Homo sapien
ccaattactaaggtggttatcaaag

SEQ ID NO: 5393494 - DNA, 25 bp, Homo sapien
aatcgttggagaccccactctctaa

SEQ ID NO: 5393495 - DNA, 25 bp, Homo sapien
gagaccccactctctaacgggaaca

SEQ ID NO: 5393496 - DNA, 25 bp, Homo sapien
tttgcccatacaaatcgttggagac

SEQ ID NO: 5393497 - DNA, 25 bp, Homo sapien
gggaacacctggagcattccagctc

SEQ ID NO: 5393498 - DNA, 25 bp, Homo sapien
gacacaagtgaccctaagactatgg

SEQ ID NO: 5393499 - DNA, 25 bp, Homo sapien
cagacacacaacgatgatatagacc

SEQ ID NO: 5393500 - DNA, 25 bp, Homo sapien
cgatgatatagacccacaacgatga

SEQ ID NO: 5393501 - DNA, 25 bp, Homo sapien
acgatgatatagacacaagtgaccc

SEQ ID NO: 5393502 - DNA, 25 bp, Homo sapien
gatatgatcagacttgctgctcttt

SEQ ID NO: 5393503 - DNA, 25 bp, Homo sapien
tgtgcctgaccagttggtggagcat

SEQ ID NO: 5393504 - DNA, 25 bp, Homo sapien
ttgtgctgatatgatcagacttgct

SEQ ID NO: 5393505 - DNA, 25 bp, Homo sapien
tgtgtgcctgaccagttggtggagc

SEQ ID NO: 5393506 - DNA, 25 bp, Homo sapien
ccagtggttgatttaagaccaggta

SEQ ID NO: 5393507 - DNA, 25 bp, Homo sapien
agtggttgatttaagaccaggtatt

SEQ ID NO: 5393508 - DNA, 25 bp, Homo sapien
cagtggttgatttaagaccaggtat

SEQ ID NO: 5393509 - DNA, 25 bp, Homo sapien
tccagtggttgatttaagaccaggt

SEQ ID NO: 5393510 - DNA, 25 bp, Homo sapien
aaaatttgatcagaaagagtttttg

SEQ ID NO: 5393511 - DNA, 25 bp, Homo sapien
tgagaaaatttgatcagaaagagtt

SEQ ID NO: 5393512 - DNA, 25 bp, Homo sapien
agaaaatttgatcagaaagagtttt

SEQ ID NO: 5393513 - DNA, 25 bp, Homo sapien
aatttgatcagaaagagtttttgat

SEQ ID NO: 5393514 - DNA, 25 bp, Homo sapien
tgaaacattgggaaatgaataagac

SEQ ID NO: 5393515 - DNA, 25 bp, Homo sapien
aagtctgaaacattgggaaatgaat

SEQ ID NO: 5393516 - DNA, 25 bp, Homo sapien
ttaaagtctgaaacattgggaaatg

SEQ ID NO: 5393517 - DNA, 25 bp, Homo sapien
aaacattgggaaatgaataagacat

SEQ ID NO: 5393518 - DNA, 25 bp, Homo sapien
gaggacaccctaaatagaacttgag

SEQ ID NO: 5393519 - DNA, 25 bp, Homo sapien
tcctgacagcgtagacggtcctcta

SEQ ID NO: 5393520 - DNA, 25 bp, Homo sapien
caaaacaatgtggagtcctgacagc

SEQ ID NO: 5393521 - DNA, 25 bp, Homo sapien
tctaaggtaattgagggaggacacc

SEQ ID NO: 5393522 - DNA, 25 bp, Homo sapien
agaggcaatctttccattagtgcag

SEQ ID NO: 5393523 - DNA, 25 bp, Homo sapien
agccatcacataactgacagctaga

SEQ ID NO: 5393524 - DNA, 25 bp, Homo sapien
cattgtaacagtagccatcacataa

SEQ ID NO: 5393525 - DNA, 25 bp, Homo sapien
ggtacatttgtctcggggtccagct

SEQ ID NO: 5393526 - DNA, 25 bp, Homo sapien
aaccacatgatcaagtactctggaa

SEQ ID NO: 5393527 - DNA, 25 bp, Homo sapien
tactctggaaaaacgtgctttagct

SEQ ID NO: 5393528 - DNA, 25 bp, Homo sapien
catgtaagtagggtttggtgacatc

SEQ ID NO: 5393529 - DNA, 25 bp, Homo sapien
tagggtttggtgacatctgtgtgaa

SEQ ID NO: 5393530 - DNA, 25 bp, Homo sapien
gacagacacattcaacacttccatc

SEQ ID NO: 5393531 - DNA, 25 bp, Homo sapien
ttcacacaatagtggtggcacacgt

SEQ ID NO: 5393532 - DNA, 25 bp, Homo sapien
catccccaatggtacatgattcaga

SEQ ID NO: 5393533 - DNA, 25 bp, Homo sapien
cttcatagcgcgttggacagacaca

SEQ ID NO: 5393534 - DNA, 25 bp, Homo sapien
tgttaataagagcaattgtggactt

SEQ ID NO: 5393535 - DNA, 25 bp, Homo sapien
tatgttaataagagcaattgtggac

SEQ ID NO: 5393536 - DNA, 25 bp, Homo sapien
aaatatgttaataagagcaattgtg

SEQ ID NO: 5393537 - DNA, 25 bp, Homo sapien
taataagagcaattgtggactttca

SEQ ID NO: 5393538 - DNA, 25 bp, Homo sapien
tgatttcagcttagacaccacttcc

SEQ ID NO: 5393539 - DNA, 25 bp, Homo sapien
tcttaatgccgaacatagtgacagg

SEQ ID NO: 5393540 - DNA, 25 bp, Homo sapien
cactgatgaactgactcatgggata

SEQ ID NO: 5393541 - DNA, 25 bp, Homo sapien
tagtgacaggctcattgtaaacatc

SEQ ID NO: 5393542 - DNA, 25 bp, Homo sapien
cattttgacaaaaatcctcacagac

SEQ ID NO: 5393543 - DNA, 25 bp, Homo sapien
ctgtcttaccacagtttggcccagt

SEQ ID NO: 5393544 - DNA, 25 bp, Homo sapien
tctgtctccggtgtattccggctgg

SEQ ID NO: 5393545 - DNA, 25 bp, Homo sapien
ccggctggcagtggcagtaaggctg

SEQ ID NO: 5393546 - DNA, 25 bp, Homo sapien
tgctgaggtacttgaaaattcttct

SEQ ID NO: 5393547 - DNA, 25 bp, Homo sapien
ctgctgaggtacttgaaaattcttc

SEQ ID NO: 5393548 - DNA, 25 bp, Homo sapien
tacttgaaaattcttctatccccat

SEQ ID NO: 5393549 - DNA, 25 bp, Homo sapien
gaggtacttgaaaattcttctatcc

SEQ ID NO: 5393550 - DNA, 25 bp, Homo sapien
ccattctggcagtagttgctacagt

SEQ ID NO: 5393551 - DNA, 25 bp, Homo sapien
tgctacagtggttgacttcacatct

SEQ ID NO: 5393552 - DNA, 25 bp, Homo sapien
gaactgatggtacgcaagttcctcc

SEQ ID NO: 5393553 - DNA, 25 bp, Homo sapien
gaataactgggccaacagtgacacc

SEQ ID NO: 5393554 - DNA, 25 bp, Homo sapien
tcaaattggatgtaaccttcagcag

SEQ ID NO: 5393555 - DNA, 25 bp, Homo sapien
taaagagcacaagtcttcaaattgg

SEQ ID NO: 5393556 - DNA, 25 bp, Homo sapien
tagacactgagtgccttataaagag

SEQ ID NO: 5393557 - DNA, 25 bp, Homo sapien
ctgactgtgagggtaaggacccaga

SEQ ID NO: 5393558 - DNA, 25 bp, Homo sapien
catgctaaatccaagcatggattgg

SEQ ID NO: 5393559 - DNA, 25 bp, Homo sapien
caagcaaagaaattcgcatgctaaa

SEQ ID NO: 5393560 - DNA, 25 bp, Homo sapien
ctaacaggctgtcatcattgcaggt

SEQ ID NO: 5393561 - DNA, 25 bp, Homo sapien
acaggctgtcatcattgcaggtgcc

SEQ ID NO: 5393562 - DNA, 25 bp, Homo sapien
ccatggccaaatttttgaactcgaa

SEQ ID NO: 5393563 - DNA, 25 bp, Homo sapien
gaaatacaccatttttaggtcctgc

SEQ ID NO: 5393564 - DNA, 25 bp, Homo sapien
caaagatatcgatcctatgtggatg

SEQ ID NO: 5393565 - DNA, 25 bp, Homo sapien
taagtactctactgaaccatggcca

SEQ ID NO: 5393566 - DNA, 25 bp, Homo sapien
tgcgttcactaaaataatccacagc

SEQ ID NO: 5393567 - DNA, 25 bp, Homo sapien
aagtcagcccaatatatgcgttcac

SEQ ID NO: 5393568 - DNA, 25 bp, Homo sapien
aattagagccatcatacagaacact

SEQ ID NO: 5393569 - DNA, 25 bp, Homo sapien
catacagaacactgccaatgatgga

SEQ ID NO: 5393570 - DNA, 25 bp, Homo sapien
tcttttgtactaaaatccttctcag

SEQ ID NO: 5393571 - DNA, 25 bp, Homo sapien
tatatgggaatgatccccaacaaca

SEQ ID NO: 5393572 - DNA, 25 bp, Homo sapien
ttctatatgggaatgatccccaaca

SEQ ID NO: 5393573 - DNA, 25 bp, Homo sapien
ttcttttgtactaaaatccttctca

SEQ ID NO: 5393574 - DNA, 25 bp, Homo sapien
tactgcaatagcatagggttctcca

SEQ ID NO: 5393575 - DNA, 25 bp, Homo sapien
caatagcatagggttctccagccat

SEQ ID NO: 5393576 - DNA, 25 bp, Homo sapien
ggatttactgcaatagcatagggtt

SEQ ID NO: 5393577 - DNA, 25 bp, Homo sapien
tgcaatagcatagggttctccagcc

SEQ ID NO: 5393578 - DNA, 25 bp, Homo sapien
gtgcagttggggccattcagctgcc

SEQ ID NO: 5393579 - DNA, 25 bp, Homo sapien
tttgttaagagtctggtgcagttgg

SEQ ID NO: 5393580 - DNA, 25 bp, Homo sapien
ctggtgcagttggggccattcagct

SEQ ID NO: 5393581 - DNA, 25 bp, Homo sapien
atttgttaagagtctggtgcagttg

SEQ ID NO: 5393582 - DNA, 25 bp, Homo sapien
tacgttgatagagtacctcagactg

SEQ ID NO: 5393583 - DNA, 25 bp, Homo sapien
cagtgagtagtgtagtaactgaacc

SEQ ID NO: 5393584 - DNA, 25 bp, Homo sapien
tagagtacctcagactggtccagtg

SEQ ID NO: 5393585 - DNA, 25 bp, Homo sapien
gcattctagaatgatcagtccagta

SEQ ID NO: 5393586 - DNA, 25 bp, Homo sapien
tcaacagctttgccattggatatga

SEQ ID NO: 5393587 - DNA, 25 bp, Homo sapien
taatcaacagctttgccattggata

SEQ ID NO: 5393588 - DNA, 25 bp, Homo sapien
ctaatcaacagctttgccattggat

SEQ ID NO: 5393589 - DNA, 25 bp, Homo sapien
acagctttgccattggatatgaaag

SEQ ID NO: 5393590 - DNA, 25 bp, Homo sapien
tatgagaaatttgttgatgatcgcc

SEQ ID NO: 5393591 - DNA, 25 bp, Homo sapien
attccgcctggattaaactgagtac

SEQ ID NO: 5393592 - DNA, 25 bp, Homo sapien
cccaggatatcagtgtcattagcaa

SEQ ID NO: 5393593 - DNA, 25 bp, Homo sapien
gatgatcgccactgtagttgaatgg

SEQ ID NO: 5393594 - DNA, 25 bp, Homo sapien
tttatacattgatgggaacatgtgc

SEQ ID NO: 5393595 - DNA, 25 bp, Homo sapien
acacatttatatgatccttccacat

SEQ ID NO: 5393596 - DNA, 25 bp, Homo sapien
ctgctatgcaggtgttatttctttc

SEQ ID NO: 5393597 - DNA, 25 bp, Homo sapien
ttgatgggaacatgtgccaaacacc

SEQ ID NO: 5393598 - DNA, 25 bp, Homo sapien
aaatccaggcttacagcgacagaaa

SEQ ID NO: 5393599 - DNA, 25 bp, Homo sapien
tttgattacaatatgcatcatctcc

SEQ ID NO: 5393600 - DNA, 25 bp, Homo sapien
tgaaatccaggcttacagcgacaga

SEQ ID NO: 5393601 - DNA, 25 bp, Homo sapien
tctgaaatccaggcttacagcgaca

SEQ ID NO: 5393602 - DNA, 25 bp, Homo sapien
cgatcacactggagatccataggga

SEQ ID NO: 5393603 - DNA, 25 bp, Homo sapien
tgaaccatctccgcagtcatcaagt

SEQ ID NO: 5393604 - DNA, 25 bp, Homo sapien
acaaggccttgctttatatgtcagc

SEQ ID NO: 5393605 - DNA, 25 bp, Homo sapien
aactcatcctttttacaaggccttg

SEQ ID NO: 5393606 - DNA, 25 bp, Homo sapien
attgcacatttgctccgactgtagg

SEQ ID NO: 5393607 - DNA, 25 bp, Homo sapien
gtcaccgcattcatcaatcccattg

SEQ ID NO: 5393608 - DNA, 25 bp, Homo sapien
cttcatctgaattgtcaccgcattc

SEQ ID NO: 5393609 - DNA, 25 bp, Homo sapien
cattgcacatttgctccgactgtag

SEQ ID NO: 5393610 - DNA, 25 bp, Homo sapien
ctcgtggatggacaaagaaatttga

SEQ ID NO: 5393611 - DNA, 25 bp, Homo sapien
ctgtgaggtctcgtggatggacaaa

SEQ ID NO: 5393612 - DNA, 25 bp, Homo sapien
ggtctcgtggatggacaaagaaatt

SEQ ID NO: 5393613 - DNA, 25 bp, Homo sapien
tgaggtctcgtggatggacaaagaa

SEQ ID NO: 5393614 - DNA, 25 bp, Homo sapien
aggaactcatcagctctacatatat

SEQ ID NO: 5393615 - DNA, 25 bp, Homo sapien
atcagagttgtctccacagtcgtcc

SEQ ID NO: 5393616 - DNA, 25 bp, Homo sapien
caaaggaactcatcagctctacata

SEQ ID NO: 5393617 - DNA, 25 bp, Homo sapien
gagttgtctccacagtcgtcctctc

SEQ ID NO: 5393618 - DNA, 25 bp, Homo sapien
agtcgcatgagttattgctgccaga

SEQ ID NO: 5393619 - DNA, 25 bp, Homo sapien
ttgaacgcaaaagtcgcatgagtta

SEQ ID NO: 5393620 - DNA, 25 bp, Homo sapien
cagactttccacaatgtttgctgtc

SEQ ID NO: 5393621 - DNA, 25 bp, Homo sapien
caaaagtcgcatgagttattgctgc

SEQ ID NO: 5393622 - DNA, 25 bp, Homo sapien
gtcatgaattccatcacacagccat

SEQ ID NO: 5393623 - DNA, 25 bp, Homo sapien
cagtcatgaattccatcacacagcc

SEQ ID NO: 5393624 - DNA, 25 bp, Homo sapien
cacacagtcatgaattccatcacac

SEQ ID NO: 5393625 - DNA, 25 bp, Homo sapien
cacagtcatgaattccatcacacag

SEQ ID NO: 5393626 - DNA, 25 bp, Homo sapien
taattggaatacagtgggctttatt

SEQ ID NO: 5393627 - DNA, 25 bp, Homo sapien
ctaattggaatacagtgggctttat

SEQ ID NO: 5393628 - DNA, 25 bp, Homo sapien
tttttgcaccgaaactgatcttcct

SEQ ID NO: 5393629 - DNA, 25 bp, Homo sapien
tcaaagatgctgaaatacatccatc

SEQ ID NO: 5393630 - DNA, 25 bp, Homo sapien
catcactggcacatatatattcacg

SEQ ID NO: 5393631 - DNA, 25 bp, Homo sapien
tcacgtgatgagcaagtaggagaag

SEQ ID NO: 5393632 - DNA, 25 bp, Homo sapien
ccatcagcacaatcatattctccat

SEQ ID NO: 5393633 - DNA, 25 bp, Homo sapien
acactgaccattggaacaccggaac

SEQ ID NO: 5393634 - DNA, 25 bp, Homo sapien
caccggaactgatctttggaacaac

SEQ ID NO: 5393635 - DNA, 25 bp, Homo sapien
ttggaacaccggaactgatctttgg

SEQ ID NO: 5393636 - DNA, 25 bp, Homo sapien
ccattttgctggtatacactgacca

SEQ ID NO: 5393637 - DNA, 25 bp, Homo sapien
aattacaaatgtggttctaaagcgc

SEQ ID NO: 5393638 - DNA, 25 bp, Homo sapien
aatgtggttctaaagcgctgctttc

SEQ ID NO: 5393639 - DNA, 25 bp, Homo sapien
ttctaaagcgctgctttctttttga

SEQ ID NO: 5393640 - DNA, 25 bp, Homo sapien
tacaaatgtggttctaaagcgctgc

SEQ ID NO: 5393641 - DNA, 25 bp, Homo sapien
atctccatcacaccaaaaccttgaa

SEQ ID NO: 5393642 - DNA, 25 bp, Homo sapien
atctgcacagtcaaaatctccatca

SEQ ID NO: 5393643 - DNA, 25 bp, Homo sapien
aaaatctccatcacaccaaaacctt

SEQ ID NO: 5393644 - DNA, 25 bp, Homo sapien
cagtcaaaatctccatcacaccaaa

SEQ ID NO: 5393645 - DNA, 25 bp, Homo sapien
gaggaaatctttcaatgtacatgtc

SEQ ID NO: 5393646 - DNA, 25 bp, Homo sapien
ggaaatctttcaatgtacatgtctg

SEQ ID NO: 5393647 - DNA, 25 bp, Homo sapien
cacagaggaaatctttcaatgtaca

SEQ ID NO: 5393648 - DNA, 25 bp, Homo sapien
tggcacagaggaaatctttcaatgt

SEQ ID NO: 5393649 - DNA, 25 bp, Homo sapien
tagaaaaccgcagcagactcagaag

SEQ ID NO: 5393650 - DNA, 25 bp, Homo sapien
agatgtcagtacaatgatattcagc

SEQ ID NO: 5393651 - DNA, 25 bp, Homo sapien
gatattcagccgcttagaaaaccgc

SEQ ID NO: 5393652 - DNA, 25 bp, Homo sapien
agactcagaagcaggcgagcccttc

SEQ ID NO: 5393653 - DNA, 25 bp, Homo sapien
gtcattttggctatcacaccgccag

SEQ ID NO: 5393654 - DNA, 25 bp, Homo sapien
tacactggaattcatgaggtccaca

SEQ ID NO: 5393655 - DNA, 25 bp, Homo sapien
caccgccagtgatcgggaatacagt

SEQ ID NO: 5393656 - DNA, 25 bp, Homo sapien
tcatctgaattatcactgcagtcat

SEQ ID NO: 5393657 - DNA, 25 bp, Homo sapien
gtaatggaaagaaccagagtttgca

SEQ ID NO: 5393658 - DNA, 25 bp, Homo sapien
tgtaatggaaagaaccagagtttgc

SEQ ID NO: 5393659 - DNA, 25 bp, Homo sapien
taatggaaagaaccagagtttgcat

SEQ ID NO: 5393660 - DNA, 25 bp, Homo sapien
ctgtaatggaaagaaccagagtttg

SEQ ID NO: 5393661 - DNA, 25 bp, Homo sapien
ctagggtggcgtactgtctactgcc

SEQ ID NO: 5393662 - DNA, 25 bp, Homo sapien
tacttccactaccacaagggaggac

SEQ ID NO: 5393663 - DNA, 25 bp, Homo sapien
ggtgaagccgttaattctggattcc

SEQ ID NO: 5393664 - DNA, 25 bp, Homo sapien
cacaagggaggacggcctgacctag

SEQ ID NO: 5393665 - DNA, 25 bp, Homo sapien
ttatggatcttctcctgaaactgtc

SEQ ID NO: 5393666 - DNA, 25 bp, Homo sapien
tggatcttctcctgaaactgtccag

SEQ ID NO: 5393667 - DNA, 25 bp, Homo sapien
tcttctcctgaaactgtccagtgcc

SEQ ID NO: 5393668 - DNA, 25 bp, Homo sapien
tctcctgaaactgtccagtgccctg

SEQ ID NO: 5393669 - DNA, 25 bp, Homo sapien
tttagagtacatgtgttgctgtcac

SEQ ID NO: 5393670 - DNA, 25 bp, Homo sapien
tacatgtgttgctgtcacagtccat

SEQ ID NO: 5393671 - DNA, 25 bp, Homo sapien
ttagagtacatgtgttgctgtcaca

SEQ ID NO: 5393672 - DNA, 25 bp, Homo sapien
agtacatgtgttgctgtcacagtcc

SEQ ID NO: 5393673 - DNA, 25 bp, Homo sapien
tatcaacagcaacgtaagattaagc

SEQ ID NO: 5393674 - DNA, 25 bp, Homo sapien
tcaacgagtgtcatatatcaacagc

SEQ ID NO: 5393675 - DNA, 25 bp, Homo sapien
acagcaacgtaagattaagcagcag

SEQ ID NO: 5393676 - DNA, 25 bp, Homo sapien
tgtcatatatcaacagcaacgtaag

SEQ ID NO: 5393677 - DNA, 25 bp, Homo sapien
aatgcttcgtagtcttacactggaa

SEQ ID NO: 5393678 - DNA, 25 bp, Homo sapien
tacactggaaatagtctggagaaca

SEQ ID NO: 5393679 - DNA, 25 bp, Homo sapien
gcacagtctggatcctcgtcacaaa

SEQ ID NO: 5393680 - DNA, 25 bp, Homo sapien
gttggcctcgtctgatgcatctgca

SEQ ID NO: 5393681 - DNA, 25 bp, Homo sapien
gttcttggtacatttgaattgacct

SEQ ID NO: 5393682 - DNA, 25 bp, Homo sapien
gaattgacctgacaggcagacatgt

SEQ ID NO: 5393683 - DNA, 25 bp, Homo sapien
taagtttactgggatacatttctgg

SEQ ID NO: 5393684 - DNA, 25 bp, Homo sapien
gtcatcttgcccattacatcttaag

SEQ ID NO: 5393685 - DNA, 25 bp, Homo sapien
gttgagttcatcagaattgtctcca

SEQ ID NO: 5393686 - DNA, 25 bp, Homo sapien
gtctccacaatcattctctccatca

SEQ ID NO: 5393687 - DNA, 25 bp, Homo sapien
tctccatcacagatgaaagctggta

SEQ ID NO: 5393688 - DNA, 25 bp, Homo sapien
agcacagagtccagtcccacactga

SEQ ID NO: 5393689 - DNA, 25 bp, Homo sapien
accacagtcatccacggtgtcacat

SEQ ID NO: 5393690 - DNA, 25 bp, Homo sapien
gtcatccacggtgtcacatttccac

SEQ ID NO: 5393691 - DNA, 25 bp, Homo sapien
cacatttccaccagaatggaataca

SEQ ID NO: 5393692 - DNA, 25 bp, Homo sapien
aatggaatacatttgtcagttttgc

SEQ ID NO: 5393693 - DNA, 25 bp, Homo sapien
cctattatcagctgccagatagaag

SEQ ID NO: 5393694 - DNA, 25 bp, Homo sapien
agttagtgggacatgcacaagtgtg

SEQ ID NO: 5393695 - DNA, 25 bp, Homo sapien
gataagcaagtcctattatcagctg

SEQ ID NO: 5393696 - DNA, 25 bp, Homo sapien
cagatagaagttagtgggacatgca

SEQ ID NO: 5393697 - DNA, 25 bp, Homo sapien
ctaaaaggcacaaatgactgcaacc

SEQ ID NO: 5393698 - DNA, 25 bp, Homo sapien
ttatttatcatgcagagatgtttgg

SEQ ID NO: 5393699 - DNA, 25 bp, Homo sapien
accattatttatcatgcagagatgt

SEQ ID NO: 5393700 - DNA, 25 bp, Homo sapien
caaatgactgcaaccaccattattt

SEQ ID NO: 5393701 - DNA, 25 bp, Homo sapien
tgtctataagaatgatacacctgga

SEQ ID NO: 5393702 - DNA, 25 bp, Homo sapien
caatgttagtgcaatcacccctgga

SEQ ID NO: 5393703 - DNA, 25 bp, Homo sapien
ccgatgttttatgggcacggctgag

SEQ ID NO: 5393704 - DNA, 25 bp, Homo sapien
acctggatatctgtgatggcatgcc

SEQ ID NO: 5393705 - DNA, 25 bp, Homo sapien
aatgtgattttcatcggcccagtag

SEQ ID NO: 5393706 - DNA, 25 bp, Homo sapien
aatatgaggatactcgcagcagtca

SEQ ID NO: 5393707 - DNA, 25 bp, Homo sapien
tgttagtgccataggtctagaaatc

SEQ ID NO: 5393708 - DNA, 25 bp, Homo sapien
tccattccaacacggccaatatgag

SEQ ID NO: 5393709 - DNA, 25 bp, Homo sapien
tacctgtttgccaaagacagaagcc

SEQ ID NO: 5393710 - DNA, 25 bp, Homo sapien
cctctacctgtttgccaaagacaga

SEQ ID NO: 5393711 - DNA, 25 bp, Homo sapien
ctacctgtttgccaaagacagaagc

SEQ ID NO: 5393712 - DNA, 25 bp, Homo sapien
ctctacctgtttgccaaagacagaa

SEQ ID NO: 5393713 - DNA, 25 bp, Homo sapien
tttccaatccaatcgacagcaagtg

SEQ ID NO: 5393714 - DNA, 25 bp, Homo sapien
tctgtgtcagaccaatagaggtttt

SEQ ID NO: 5393715 - DNA, 25 bp, Homo sapien
taacgagtatagtagggtacaagcc

SEQ ID NO: 5393716 - DNA, 25 bp, Homo sapien
taaagacaagtctctgggaaacttc

SEQ ID NO: 5393717 - DNA, 25 bp, Homo sapien
cgatccaatagatgaattcttctct

SEQ ID NO: 5393718 - DNA, 25 bp, Homo sapien
ccattgggtcggctagaatcgatcc

SEQ ID NO: 5393719 - DNA, 25 bp, Homo sapien
aacacattctatttatgcgactgcc

SEQ ID NO: 5393720 - DNA, 25 bp, Homo sapien
tcttctctgtaatcaaagtctatag

SEQ ID NO: 5393721 - DNA, 25 bp, Homo sapien
aaaagtgtgtagttggagccatcag

SEQ ID NO: 5393722 - DNA, 25 bp, Homo sapien
catcagtgctaattttccttatctc

SEQ ID NO: 5393723 - DNA, 25 bp, Homo sapien
attttccttatctcatgatgatcag

SEQ ID NO: 5393724 - DNA, 25 bp, Homo sapien
ttaaaagtgtgtagttggagccatc

SEQ ID NO: 5393725 - DNA, 25 bp, Homo sapien
agtgaattcaataagaacggctata

SEQ ID NO: 5393726 - DNA, 25 bp, Homo sapien
caggatccatatgtataactgaggt

SEQ ID NO: 5393727 - DNA, 25 bp, Homo sapien
aataattcacaaggccataaggcaa

SEQ ID NO: 5393728 - DNA, 25 bp, Homo sapien
caatgttattatgaacagagcatac

SEQ ID NO: 5393729 - DNA, 25 bp, Homo sapien
cgtcatccttcagttggaatccagg

SEQ ID NO: 5393730 - DNA, 25 bp, Homo sapien
tgagagcgatttgcagccatttggg

SEQ ID NO: 5393731 - DNA, 25 bp, Homo sapien
tgatgcattgctggctacagggaaa

SEQ ID NO: 5393732 - DNA, 25 bp, Homo sapien
tatttcatacccatctgtacagagg

SEQ ID NO: 5393733 - DNA, 25 bp, Homo sapien
tcatttatatggcagtttctctcat

SEQ ID NO: 5393734 - DNA, 25 bp, Homo sapien
tattgtcgcaaagacctccactggg

SEQ ID NO: 5393735 - DNA, 25 bp, Homo sapien
gacagtcttgagaacatccactgac

SEQ ID NO: 5393736 - DNA, 25 bp, Homo sapien
tccactgggaatgcacctgccattt

SEQ ID NO: 5393737 - DNA, 25 bp, Homo sapien
ttcatcagaatggtcaggacagtca

SEQ ID NO: 5393738 - DNA, 25 bp, Homo sapien
taaattcttctgtaccacactgtcg

SEQ ID NO: 5393739 - DNA, 25 bp, Homo sapien
cactttgggtttaaaggtgcttcat

SEQ ID NO: 5393740 - DNA, 25 bp, Homo sapien
gtatttagaagacaccgcccatcag

SEQ ID NO: 5393741 - DNA, 25 bp, Homo sapien
caaattgcttgggaatgcatacttt

SEQ ID NO: 5393742 - DNA, 25 bp, Homo sapien
tgcatactttattatggcacatgaa

SEQ ID NO: 5393743 - DNA, 25 bp, Homo sapien
tttattatggcacatgaaagcattt

SEQ ID NO: 5393744 - DNA, 25 bp, Homo sapien
cacagtcgtcatcatggtcacaaac

SEQ ID NO: 5393745 - DNA, 25 bp, Homo sapien
agagccctggcagctgaacatgtca

SEQ ID NO: 5393746 - DNA, 25 bp, Homo sapien
tcaccatcacaaagccaatgtcggg

SEQ ID NO: 5393747 - DNA, 25 bp, Homo sapien
gcacgcaggcacgagagccctggca

SEQ ID NO: 5393748 - DNA, 25 bp, Homo sapien
aagctcatcgcttccatctggacag

SEQ ID NO: 5393749 - DNA, 25 bp, Homo sapien
aatacatttttgtgcggaacaagca

SEQ ID NO: 5393750 - DNA, 25 bp, Homo sapien
tctccatcacaaatccaatgcttag

SEQ ID NO: 5393751 - DNA, 25 bp, Homo sapien
tccatcacaaatccaatgcttagaa

SEQ ID NO: 5393752 - DNA, 25 bp, Homo sapien
tgtgcggaacaagcaaattggttcc

SEQ ID NO: 5393753 - DNA, 25 bp, Homo sapien
aaaatgcatcttccactaggacaac

SEQ ID NO: 5393754 - DNA, 25 bp, Homo sapien
cgcatatccaggtattcaaaatgca

SEQ ID NO: 5393755 - DNA, 25 bp, Homo sapien
tcacaatctttctgaccatcgcata

SEQ ID NO: 5393756 - DNA, 25 bp, Homo sapien
tctttctgaccatcgcatatccagg

SEQ ID NO: 5393757 - DNA, 25 bp, Homo sapien
gaattacatcttatgaaccctgtgg

SEQ ID NO: 5393758 - DNA, 25 bp, Homo sapien
tgggcactttaattcatctgaatag

SEQ ID NO: 5393759 - DNA, 25 bp, Homo sapien
gacccgtcgcatatccaggttggca

SEQ ID NO: 5393760 - DNA, 25 bp, Homo sapien
actccaagcttatagaaatgtgtgc

SEQ ID NO: 5393761 - DNA, 25 bp, Homo sapien
tctgcacagcggaactcaaccgtgg

SEQ ID NO: 5393762 - DNA, 25 bp, Homo sapien
gcatcgtgctgatcttggaatacaa

SEQ ID NO: 5393763 - DNA, 25 bp, Homo sapien
gaactcaaccgtggcacaggttgaa

SEQ ID NO: 5393764 - DNA, 25 bp, Homo sapien
gcatctgcacaatctatgttctggt

SEQ ID NO: 5393765 - DNA, 25 bp, Homo sapien
catgaggaatgcagcggcgattata

SEQ ID NO: 5393766 - DNA, 25 bp, Homo sapien
tcagagttgtctccgcagtcatttt

SEQ ID NO: 5393767 - DNA, 25 bp, Homo sapien
tccatcacataacttgccatgagga

SEQ ID NO: 5393768 - DNA, 25 bp, Homo sapien
tatagcatggcttgaagcctcttcg

SEQ ID NO: 5393769 - DNA, 25 bp, Homo sapien
tccacattcaaactccgaataagcg

SEQ ID NO: 5393770 - DNA, 25 bp, Homo sapien
agtgaggaatgccatcacaggtgag

SEQ ID NO: 5393771 - DNA, 25 bp, Homo sapien
tccgaataagcgttgcaggaggaat

SEQ ID NO: 5393772 - DNA, 25 bp, Homo sapien
cacaggtgagctggtagtcaatgca

SEQ ID NO: 5393773 - DNA, 25 bp, Homo sapien
tcacacatctgttgtcctctagcaa

SEQ ID NO: 5393774 - DNA, 25 bp, Homo sapien
tagcaatattcggtcccctctgcag

SEQ ID NO: 5393775 - DNA, 25 bp, Homo sapien
cattcaataatgcacatggagaaag

SEQ ID NO: 5393776 - DNA, 25 bp, Homo sapien
tgcaggaacaattcactctcccatt

SEQ ID NO: 5393777 - DNA, 25 bp, Homo sapien
cattggctgatgtggaatatcggaa

SEQ ID NO: 5393778 - DNA, 25 bp, Homo sapien
ccccagtccgaccagaatatataat

SEQ ID NO: 5393779 - DNA, 25 bp, Homo sapien
gctattggtgtcattggcaacagct

SEQ ID NO: 5393780 - DNA, 25 bp, Homo sapien
tgttggaccgcagtatagctcttct

SEQ ID NO: 5393781 - DNA, 25 bp, Homo sapien
cattacccactgctatgcagatggt

SEQ ID NO: 5393782 - DNA, 25 bp, Homo sapien
acctggattgaaaattgcaacccca

SEQ ID NO: 5393783 - DNA, 25 bp, Homo sapien
gcaaccccataggagtattttggca

SEQ ID NO: 5393784 - DNA, 25 bp, Homo sapien
ttctaagcgcttcacttcattaccc

SEQ ID NO: 5393785 - DNA, 25 bp, Homo sapien
catttgggatttgatgacagtcatt

SEQ ID NO: 5393786 - DNA, 25 bp, Homo sapien
tctgggatccatcgtattcacacct

SEQ ID NO: 5393787 - DNA, 25 bp, Homo sapien
gaaatacagcttctctgcacggtag

SEQ ID NO: 5393788 - DNA, 25 bp, Homo sapien
tatgtctgtactgaccaccacttga

SEQ ID NO: 5393789 - DNA, 25 bp, Homo sapien
tgcacggtagtcgatagtaagtcca

SEQ ID NO: 5393790 - DNA, 25 bp, Homo sapien
gatacttggatgttgttcattccag

SEQ ID NO: 5393791 - DNA, 25 bp, Homo sapien
cattccagttggtccaaaacattaa

SEQ ID NO: 5393792 - DNA, 25 bp, Homo sapien
tgttcattccagttggtccaaaaca

SEQ ID NO: 5393793 - DNA, 25 bp, Homo sapien
tggatgttgttcattccagttggtc

SEQ ID NO: 5393794 - DNA, 25 bp, Homo sapien
gacattcatccaaggctagcacatg

SEQ ID NO: 5393795 - DNA, 25 bp, Homo sapien
ccagtacagtgtatcccaggctctg

SEQ ID NO: 5393796 - DNA, 25 bp, Homo sapien
ttctgacatggtgatgacagcttcc

SEQ ID NO: 5393797 - DNA, 25 bp, Homo sapien
ccaggctctgtgataggcaagtcct

SEQ ID NO: 5393798 - DNA, 25 bp, Homo sapien
ttctccacaaaatctccaaaataaa

SEQ ID NO: 5393799 - DNA, 25 bp, Homo sapien
caaaatctccaaaataaaaatgcag

SEQ ID NO: 5393800 - DNA, 25 bp, Homo sapien
aaatctccaaaataaaaatgcagtc

SEQ ID NO: 5393801 - DNA, 25 bp, Homo sapien
atctccaaaataaaaatgcagtcat

SEQ ID NO: 5393802 - DNA, 25 bp, Homo sapien
cggagataagcaccgactttctgaa

SEQ ID NO: 5393803 - DNA, 25 bp, Homo sapien
gtccggagctgctagagcagagcat

SEQ ID NO: 5393804 - DNA, 25 bp, Homo sapien
gactttctgaagattaaactaacat

SEQ ID NO: 5393805 - DNA, 25 bp, Homo sapien
taacattggcatgtccggagctgct

SEQ ID NO: 5393806 - DNA, 25 bp, Homo sapien
ttttactgaacttaacgaagatgga

SEQ ID NO: 5393807 - DNA, 25 bp, Homo sapien
ccatctatcacttttactgaactta

SEQ ID NO: 5393808 - DNA, 25 bp, Homo sapien
ttaaagaggtactggtagagtgatc

SEQ ID NO: 5393809 - DNA, 25 bp, Homo sapien
aagaggtactggtagagtgatcaca

SEQ ID NO: 5393810 - DNA, 25 bp, Homo sapien
tcatgctgatcttcatctgactttc

SEQ ID NO: 5393811 - DNA, 25 bp, Homo sapien
gcagatgagatgcagcctataaata

SEQ ID NO: 5393812 - DNA, 25 bp, Homo sapien
tactgtcatgctgatcttcatctga

SEQ ID NO: 5393813 - DNA, 25 bp, Homo sapien
gcagcctataaatactgtcatgctg

SEQ ID NO: 5393814 - DNA, 25 bp, Homo sapien
gtgagtgacctggaccttcatagag

SEQ ID NO: 5393815 - DNA, 25 bp, Homo sapien
tgttgtcagtgccaaattgccagtg

SEQ ID NO: 5393816 - DNA, 25 bp, Homo sapien
cattgatgattctgacaagggaggt

SEQ ID NO: 5393817 - DNA, 25 bp, Homo sapien
tgtgcatctcagtgggccagagtta

SEQ ID NO: 5393818 - DNA, 25 bp, Homo sapien
agacagagttcacatctgcagacat

SEQ ID NO: 5393819 - DNA, 25 bp, Homo sapien
ctgaagacagagttcacatctgcag

SEQ ID NO: 5393820 - DNA, 25 bp, Homo sapien
agttcacatctgcagacattcccta

SEQ ID NO: 5393821 - DNA, 25 bp, Homo sapien
acagagttcacatctgcagacattc

SEQ ID NO: 5393822 - DNA, 25 bp, Homo sapien
ggccttgccaatattcttgatttca

SEQ ID NO: 5393823 - DNA, 25 bp, Homo sapien
ccgggccttgccaatattcttgatt

SEQ ID NO: 5393824 - DNA, 25 bp, Homo sapien
gcaccgggccttgccaatattcttg

SEQ ID NO: 5393825 - DNA, 25 bp, Homo sapien
atcgcaccgggccttgccaatattc

SEQ ID NO: 5393826 - DNA, 25 bp, Homo sapien
tagcaatggtatggtggtatgtaga

SEQ ID NO: 5393827 - DNA, 25 bp, Homo sapien
gtatgtagatcatttcccatcctcc

SEQ ID NO: 5393828 - DNA, 25 bp, Homo sapien
tatggtggtatgtagatcatttccc

SEQ ID NO: 5393829 - DNA, 25 bp, Homo sapien
gattgcatagcaatggtatggtggt

SEQ ID NO: 5393830 - DNA, 25 bp, Homo sapien
ttggaacaatagtcaacagagtgtc

SEQ ID NO: 5393831 - DNA, 25 bp, Homo sapien
ctgggctgcaggtatactgatgagc

SEQ ID NO: 5393832 - DNA, 25 bp, Homo sapien
tcagactgtcccaaaggcatttgga

SEQ ID NO: 5393833 - DNA, 25 bp, Homo sapien
cacagtttctgtgcttatacagcag

SEQ ID NO: 5393834 - DNA, 25 bp, Homo sapien
cagctgacccaaggtttgagatctt

SEQ ID NO: 5393835 - DNA, 25 bp, Homo sapien
gagatcttgagaaacgctcccctgg

SEQ ID NO: 5393836 - DNA, 25 bp, Homo sapien
ccgagtcctccgcatttacagcaaa

SEQ ID NO: 5393837 - DNA, 25 bp, Homo sapien
agaatgggtgccttcactccgggct

SEQ ID NO: 5393838 - DNA, 25 bp, Homo sapien
gatgccttccatgcgctaggcagca

SEQ ID NO: 5393839 - DNA, 25 bp, Homo sapien
taggcagcagccgaccccgaaacag

SEQ ID NO: 5393840 - DNA, 25 bp, Homo sapien
cagcctccgggctaggggatgcctt

SEQ ID NO: 5393841 - DNA, 25 bp, Homo sapien
ccatgccgggctgcccgcggcttgc

SEQ ID NO: 5393842 - DNA, 25 bp, Homo sapien
cgggaatttcctcgataaagacaga

SEQ ID NO: 5393843 - DNA, 25 bp, Homo sapien
tgtgcatcactgtaaaagattcggt

SEQ ID NO: 5393844 - DNA, 25 bp, Homo sapien
gagttgcttacagccaccattgtcc

SEQ ID NO: 5393845 - DNA, 25 bp, Homo sapien
cagtaaatagccttcatgcctcagg

SEQ ID NO: 5393846 - DNA, 25 bp, Homo sapien
tttaacctccttcaggttgactcca

SEQ ID NO: 5393847 - DNA, 25 bp, Homo sapien
catggttatcgtttctgtggcatca

SEQ ID NO: 5393848 - DNA, 25 bp, Homo sapien
tgtggcatcattcttgtggcccctt

SEQ ID NO: 5393849 - DNA, 25 bp, Homo sapien
tctgacagacccgtttgcatgtgct

SEQ ID NO: 5393850 - DNA, 25 bp, Homo sapien
aacatacatgatcaacaatcttcga

SEQ ID NO: 5393851 - DNA, 25 bp, Homo sapien
tgtcagaccagtagatgtaagcccc

SEQ ID NO: 5393852 - DNA, 25 bp, Homo sapien
agccccaaagactgcaactgaaaac

SEQ ID NO: 5393853 - DNA, 25 bp, Homo sapien
ctgtcagaccagtagatgtaagccc

SEQ ID NO: 5393854 - DNA, 25 bp, Homo sapien
gattctctctatcttgtctgtgcga

SEQ ID NO: 5393855 - DNA, 25 bp, Homo sapien
tccctccagtctcaaggtcgattct

SEQ ID NO: 5393856 - DNA, 25 bp, Homo sapien
gcgagcatcacaccagtacaattta

SEQ ID NO: 5393857 - DNA, 25 bp, Homo sapien
tatcttgtctgtgcgagcatcacac

SEQ ID NO: 5393858 - DNA, 25 bp, Homo sapien
ctcatagtcgatggagatgccattc

SEQ ID NO: 5393859 - DNA, 25 bp, Homo sapien
atacagggcatttgtccccattcag

SEQ ID NO: 5393860 - DNA, 25 bp, Homo sapien
tgctattcccatgcttacaaggaca

SEQ ID NO: 5393861 - DNA, 25 bp, Homo sapien
atccaagcgagcctttccaatacag

SEQ ID NO: 5393862 - DNA, 25 bp, Homo sapien
gaaccattgagtcttgcaacttcaa

SEQ ID NO: 5393863 - DNA, 25 bp, Homo sapien
tctgggtgcacagctatagatcttg

SEQ ID NO: 5393864 - DNA, 25 bp, Homo sapien
ttacataacggaaagaaccattgag

SEQ ID NO: 5393865 - DNA, 25 bp, Homo sapien
agttgaaaccatgatctgtccaata

SEQ ID NO: 5393866 - DNA, 25 bp, Homo sapien
tcccaagccattggtaatgatatct

SEQ ID NO: 5393867 - DNA, 25 bp, Homo sapien
agtcaacagctatcccttccactct

SEQ ID NO: 5393868 - DNA, 25 bp, Homo sapien
tcttcccaagccattggtaatgata

SEQ ID NO: 5393869 - DNA, 25 bp, Homo sapien
tccagtcaacagctatcccttccac

SEQ ID NO: 5393870 - DNA, 25 bp, Homo sapien
tctgtccagtagatggtatcatttt

SEQ ID NO: 5393871 - DNA, 25 bp, Homo sapien
aacaacaactatataaccttctgcc

SEQ ID NO: 5393872 - DNA, 25 bp, Homo sapien
gtaatgaggactgattcttgtacac

SEQ ID NO: 5393873 - DNA, 25 bp, Homo sapien
gaggttggctgttagatctggtaat

SEQ ID NO: 5393874 - DNA, 25 bp, Homo sapien
taaccttctgccataaacagttcct

SEQ ID NO: 5393875 - DNA, 25 bp, Homo sapien
aaatatctcacctgcaaggcaacag

SEQ ID NO: 5393876 - DNA, 25 bp, Homo sapien
aaataccccttggactcgcagagtt

SEQ ID NO: 5393877 - DNA, 25 bp, Homo sapien
gatggcccagtcttccctatgctag

SEQ ID NO: 5393878 - DNA, 25 bp, Homo sapien
tctgtcctggctacttggctataac

SEQ ID NO: 5393879 - DNA, 25 bp, Homo sapien
tttcatatgcgattaagaatggagc

SEQ ID NO: 5393880 - DNA, 25 bp, Homo sapien
tcatatgcgattaagaatggagcat

SEQ ID NO: 5393881 - DNA, 25 bp, Homo sapien
taaatttgatcaatggctctaaaat

SEQ ID NO: 5393882 - DNA, 25 bp, Homo sapien
ttcttttcatatgcgattaagaatg

SEQ ID NO: 5393883 - DNA, 25 bp, Homo sapien
cctgatataggcatcaaagcatcca

SEQ ID NO: 5393884 - DNA, 25 bp, Homo sapien
catggaaatctattcccacggcaaa

SEQ ID NO: 5393885 - DNA, 25 bp, Homo sapien
tcaagaggtattcccctgattcctt

SEQ ID NO: 5393886 - DNA, 25 bp, Homo sapien
catccattttgtcacttggttcaag

SEQ ID NO: 5393887 - DNA, 25 bp, Homo sapien
gatgttggtaaacaaagttgagagc

SEQ ID NO: 5393888 - DNA, 25 bp, Homo sapien
gacatacggttcttttggagataat

SEQ ID NO: 5393889 - DNA, 25 bp, Homo sapien
cacatacaagtccttgtagtttcag

SEQ ID NO: 5393890 - DNA, 25 bp, Homo sapien
tccaccattgtttagttggcaggaa

SEQ ID NO: 5393891 - DNA, 25 bp, Homo sapien
ggagatgtaccacattcgctgctca

SEQ ID NO: 5393892 - DNA, 25 bp, Homo sapien
tgaagtgtgaaatactctcaacttg

SEQ ID NO: 5393893 - DNA, 25 bp, Homo sapien
aagtgtgaaatactctcaacttggg

SEQ ID NO: 5393894 - DNA, 25 bp, Homo sapien
gagatgtaccacattcgctgctcat

SEQ ID NO: 5393895 - DNA, 25 bp, Homo sapien
ggctaagttttggtctgcccaccac

SEQ ID NO: 5393896 - DNA, 25 bp, Homo sapien
ccgtctcttttgctgcaggttccta

SEQ ID NO: 5393897 - DNA, 25 bp, Homo sapien
aagtcttattccgtaggatggtggg

SEQ ID NO: 5393898 - DNA, 25 bp, Homo sapien
tcatatgaactaccccagaagtctt

SEQ ID NO: 5393899 - DNA, 25 bp, Homo sapien
caatattctggtggaaattctggtc

SEQ ID NO: 5393900 - DNA, 25 bp, Homo sapien
tacgccccatatttagtcactctgg

SEQ ID NO: 5393901 - DNA, 25 bp, Homo sapien
ggctaatactgaatacgccccatat

SEQ ID NO: 5393902 - DNA, 25 bp, Homo sapien
tggtggaaattctggtctggaaaaa

SEQ ID NO: 5393903 - DNA, 25 bp, Homo sapien
taaacctggagcagacttgtactgc

SEQ ID NO: 5393904 - DNA, 25 bp, Homo sapien
tgagtttcagcagtaaacctggagc

SEQ ID NO: 5393905 - DNA, 25 bp, Homo sapien
ggtgcaagccttctactaggtagtg

SEQ ID NO: 5393906 - DNA, 25 bp, Homo sapien
tgctccttctatgtcagccttggta

SEQ ID NO: 5393907 - DNA, 25 bp, Homo sapien
tccaggtctctctctatgaacatag

SEQ ID NO: 5393908 - DNA, 25 bp, Homo sapien
ggtctctctctatgaacatagccat

SEQ ID NO: 5393909 - DNA, 25 bp, Homo sapien
cttccaggtctctctctatgaacat

SEQ ID NO: 5393910 - DNA, 25 bp, Homo sapien
caggtctctctctatgaacatagcc

SEQ ID NO: 5393911 - DNA, 25 bp, Homo sapien
tctctcagtaactcaatgtcaccag

SEQ ID NO: 5393912 - DNA, 25 bp, Homo sapien
ctagtggtacagttgggtgttggct

SEQ ID NO: 5393913 - DNA, 25 bp, Homo sapien
caccagtataaatgatgaccaaacc

SEQ ID NO: 5393914 - DNA, 25 bp, Homo sapien
gtgttggctgccttaattccatcct

SEQ ID NO: 5393915 - DNA, 25 bp, Homo sapien
gttttccacatagtctatcgataga

SEQ ID NO: 5393916 - DNA, 25 bp, Homo sapien
caggttgcatctatttatggttcca

SEQ ID NO: 5393917 - DNA, 25 bp, Homo sapien
tgaactgatccaataaagcttgttt

SEQ ID NO: 5393918 - DNA, 25 bp, Homo sapien
tctttcattgactcgattacttcta

SEQ ID NO: 5393919 - DNA, 25 bp, Homo sapien
ggctgcttagaaaagtcaactgctg

SEQ ID NO: 5393920 - DNA, 25 bp, Homo sapien
tccacatttcttaggagtaagccag

SEQ ID NO: 5393921 - DNA, 25 bp, Homo sapien
tagaaagtctagtgtatcagtggca

SEQ ID NO: 5393922 - DNA, 25 bp, Homo sapien
gcaaacaagcaagcgaagtcagtga

SEQ ID NO: 5393923 - DNA, 25 bp, Homo sapien
tacaatgacatggactacttagagt

SEQ ID NO: 5393924 - DNA, 25 bp, Homo sapien
gatcatgtatgccagcaacaatagg

SEQ ID NO: 5393925 - DNA, 25 bp, Homo sapien
cattttagaaatcactcagtggaac

SEQ ID NO: 5393926 - DNA, 25 bp, Homo sapien
tactgtaggcagtttgagccagagc

SEQ ID NO: 5393927 - DNA, 25 bp, Homo sapien
aattgtgtttccatcggtccagtag

SEQ ID NO: 5393928 - DNA, 25 bp, Homo sapien
tatttgccatgttaattgtgtttcc

SEQ ID NO: 5393929 - DNA, 25 bp, Homo sapien
gctattactgccatccatatttgcc

SEQ ID NO: 5393930 - DNA, 25 bp, Homo sapien
tcttgctattactgccatccatatt

SEQ ID NO: 5393931 - DNA, 25 bp, Homo sapien
tgctagccctctgatactctgaata

SEQ ID NO: 5393932 - DNA, 25 bp, Homo sapien
ccagtataaattacgtgacacccaa

SEQ ID NO: 5393933 - DNA, 25 bp, Homo sapien
ggtgagctgcaagacactgtggctt

SEQ ID NO: 5393934 - DNA, 25 bp, Homo sapien
tctagccttgccacattaatttgcg

SEQ ID NO: 5393935 - DNA, 25 bp, Homo sapien
ggattgtcaatatccactcctctga

SEQ ID NO: 5393936 - DNA, 25 bp, Homo sapien
tgcatcgaagtctatcacagtaacg

SEQ ID NO: 5393937 - DNA, 25 bp, Homo sapien
cacagtaacgtcatcaatatcaggg

SEQ ID NO: 5393938 - DNA, 25 bp, Homo sapien
taaacgttcctcagatgcatcgaag

SEQ ID NO: 5393939 - DNA, 25 bp, Homo sapien
tctgaagaaagcttcatcaagtggg

SEQ ID NO: 5393940 - DNA, 25 bp, Homo sapien
tcattagctgcacaaggattgggag

SEQ ID NO: 5393941 - DNA, 25 bp, Homo sapien
gattgattagacacatgtgagagca

SEQ ID NO: 5393942 - DNA, 25 bp, Homo sapien
caggcagcactcctattgtgattga

SEQ ID NO: 5393943 - DNA, 25 bp, Homo sapien
ttcactcccatatagagacacagca

SEQ ID NO: 5393944 - DNA, 25 bp, Homo sapien
gacaatgtgttggtcctccagtctg

SEQ ID NO: 5393945 - DNA, 25 bp, Homo sapien
gaaaggtattcatgacctcggatga

SEQ ID NO: 5393946 - DNA, 25 bp, Homo sapien
tgaaggtcaaatggctgtgcactgg

SEQ ID NO: 5393947 - DNA, 25 bp, Homo sapien
gtttgttccatcatagagggctgaa

SEQ ID NO: 5393948 - DNA, 25 bp, Homo sapien
tttgttccatcatagagggctgaat

SEQ ID NO: 5393949 - DNA, 25 bp, Homo sapien
ttgttccatcatagagggctgaata

SEQ ID NO: 5393950 - DNA, 25 bp, Homo sapien
ccttttctcaaagtggtccacagtt

SEQ ID NO: 5393951 - DNA, 25 bp, Homo sapien
cacagttagtccattaggccaagcc

SEQ ID NO: 5393952 - DNA, 25 bp, Homo sapien
ggcgtctgtccacactatccttttc

SEQ ID NO: 5393953 - DNA, 25 bp, Homo sapien
agtccattaggccaagccccagttt

SEQ ID NO: 5393954 - DNA, 25 bp, Homo sapien
gtctttatagatggtttttctccca

SEQ ID NO: 5393955 - DNA, 25 bp, Homo sapien
ctttatagatggtttttctcccagc

SEQ ID NO: 5393956 - DNA, 25 bp, Homo sapien
ttatagatggtttttctcccagcac

SEQ ID NO: 5393957 - DNA, 25 bp, Homo sapien
tatagatggtttttctcccagcacc

SEQ ID NO: 5393958 - DNA, 25 bp, Homo sapien
tgcgaggaaaatttgcatcccagtc

SEQ ID NO: 5393959 - DNA, 25 bp, Homo sapien
tcaatgcgaggaaaatttgcatccc

SEQ ID NO: 5393960 - DNA, 25 bp, Homo sapien
agaggcagattcaatgcgaggaaaa

SEQ ID NO: 5393961 - DNA, 25 bp, Homo sapien
cagattcaatgcgaggaaaatttgc

SEQ ID NO: 5393962 - DNA, 25 bp, Homo sapien
taatgaactgtaagcacatcacatg

SEQ ID NO: 5393963 - DNA, 25 bp, Homo sapien
agtgtggtctctacccagagttcaa

SEQ ID NO: 5393964 - DNA, 25 bp, Homo sapien
taaatgtggtctccttatataaccc

SEQ ID NO: 5393965 - DNA, 25 bp, Homo sapien
tcaaaggtccagttaaagatagata

SEQ ID NO: 5393966 - DNA, 25 bp, Homo sapien
ctggattaaactgggtcaaaagaca

SEQ ID NO: 5393967 - DNA, 25 bp, Homo sapien
cattcatggattagtaagtgtctgg

SEQ ID NO: 5393968 - DNA, 25 bp, Homo sapien
aacaacttgtagcattataggcata

SEQ ID NO: 5393969 - DNA, 25 bp, Homo sapien
aaaagaaactacagtctacagatgc

SEQ ID NO: 5393970 - DNA, 25 bp, Homo sapien
ccttctggagtagccaggccatgct

SEQ ID NO: 5393971 - DNA, 25 bp, Homo sapien
tcttagggagccatctagtttggcc

SEQ ID NO: 5393972 - DNA, 25 bp, Homo sapien
tatccagtcgactgtcaggccttct

SEQ ID NO: 5393973 - DNA, 25 bp, Homo sapien
ggtgttccatggctcctgctattag

SEQ ID NO: 5393974 - DNA, 25 bp, Homo sapien
gctttccccggtatattctgtcttc

SEQ ID NO: 5393975 - DNA, 25 bp, Homo sapien
aagctttccccggtatattctgtct

SEQ ID NO: 5393976 - DNA, 25 bp, Homo sapien
tcagaaagctttccccggtatattc

SEQ ID NO: 5393977 - DNA, 25 bp, Homo sapien
tttccccggtatattctgtcttcta

SEQ ID NO: 5393978 - DNA, 25 bp, Homo sapien
tctgatctcatgacgaatagaaaag

SEQ ID NO: 5393979 - DNA, 25 bp, Homo sapien
tagactatagtctcttttgtgaaga

SEQ ID NO: 5393980 - DNA, 25 bp, Homo sapien
gattgaagtgaaaatcaagtgctat

SEQ ID NO: 5393981 - DNA, 25 bp, Homo sapien
ctcaatccaggaacaagtagactat

SEQ ID NO: 5393982 - DNA, 25 bp, Homo sapien
tacttggctgcactttagatgattg

SEQ ID NO: 5393983 - DNA, 25 bp, Homo sapien
agtggttgctacagcctccattgtt

SEQ ID NO: 5393984 - DNA, 25 bp, Homo sapien
ttgactgtgtgcttgtgctgctcac

SEQ ID NO: 5393985 - DNA, 25 bp, Homo sapien
cagcttccaaccttcataacatgag

SEQ ID NO: 5393986 - DNA, 25 bp, Homo sapien
tcatctgactgatcttcgcaatcaa

SEQ ID NO: 5393987 - DNA, 25 bp, Homo sapien
tcccattgcagagtttctctggctg

SEQ ID NO: 5393988 - DNA, 25 bp, Homo sapien
ggcagactgaggtgtcattagcaca

SEQ ID NO: 5393989 - DNA, 25 bp, Homo sapien
cattagcacaaggatgcttgggtgg

SEQ ID NO: 5393990 - DNA, 25 bp, Homo sapien
tcatttccgttacaaccagcaggag

SEQ ID NO: 5393991 - DNA, 25 bp, Homo sapien
atcacagcgccacaaatcaggaacg

SEQ ID NO: 5393992 - DNA, 25 bp, Homo sapien
tgtggtcacacaatcgtatggtacc

SEQ ID NO: 5393993 - DNA, 25 bp, Homo sapien
tcaggaacgcaattaccatcagggt

SEQ ID NO: 5393994 - DNA, 25 bp, Homo sapien
gatatggtagcttagatggcactcc

SEQ ID NO: 5393995 - DNA, 25 bp, Homo sapien
tctcccatcctgtgtaacttgcatt

SEQ ID NO: 5393996 - DNA, 25 bp, Homo sapien
tatggtagcttagatggcactccat

SEQ ID NO: 5393997 - DNA, 25 bp, Homo sapien
gcattgatatggtagcttagatggc

SEQ ID NO: 5393998 - DNA, 25 bp, Homo sapien
gattttcctccggatggagagctac

SEQ ID NO: 5393999 - DNA, 25 bp, Homo sapien
cctctgaagaacctatgatgaccat

SEQ ID NO: 5394000 - DNA, 25 bp, Homo sapien
tgaaatccgcttctgttaactgttg

SEQ ID NO: 5394001 - DNA, 25 bp, Homo sapien
ttctcgccaaatttgaaatccgctt

SEQ ID NO: 5394002 - DNA, 25 bp, Homo sapien
ctatgactgatcatattttgcaaag

SEQ ID NO: 5394003 - DNA, 25 bp, Homo sapien
gccaggcgaatgacagggttatcat

SEQ ID NO: 5394004 - DNA, 25 bp, Homo sapien
catccccatggatatgttgagagcc

SEQ ID NO: 5394005 - DNA, 25 bp, Homo sapien
tgcaaagtaagccaggcgaatgaca

SEQ ID NO: 5394006 - DNA, 25 bp, Homo sapien
acacagcccacctcatcactcccgt

SEQ ID NO: 5394007 - DNA, 25 bp, Homo sapien
tttagtacaattgatctgggcttca

SEQ ID NO: 5394008 - DNA, 25 bp, Homo sapien
catctgaactgattatcaaagcaag

SEQ ID NO: 5394009 - DNA, 25 bp, Homo sapien
cttctttagtacaattgatctgggc

SEQ ID NO: 5394010 - DNA, 25 bp, Homo sapien
atatatttgtacttggaaactgttg

SEQ ID NO: 5394011 - DNA, 25 bp, Homo sapien
ttggaaactgttgtacagtatcatt

SEQ ID NO: 5394012 - DNA, 25 bp, Homo sapien
cttggaaactgttgtacagtatcat

SEQ ID NO: 5394013 - DNA, 25 bp, Homo sapien
tatatatttgtacttggaaactgtt

SEQ ID NO: 5394014 - DNA, 25 bp, Homo sapien
cagagtcgcagtgccatttgctgct

SEQ ID NO: 5394015 - DNA, 25 bp, Homo sapien
ggttagtggctcacaagttgggaat

SEQ ID NO: 5394016 - DNA, 25 bp, Homo sapien
gcatcttccacttttgcatacgaat

SEQ ID NO: 5394017 - DNA, 25 bp, Homo sapien
tgccatttgctgctaatgcatcttc

SEQ ID NO: 5394018 - DNA, 25 bp, Homo sapien
ttccgcaagaaaactggtctacctg

SEQ ID NO: 5394019 - DNA, 25 bp, Homo sapien
tctgtctggtcaccacagtcgtctt

SEQ ID NO: 5394020 - DNA, 25 bp, Homo sapien
gtcacacagccatgctctgggaatg

SEQ ID NO: 5394021 - DNA, 25 bp, Homo sapien
gaatgcaacgcccatttccgcaaga

SEQ ID NO: 5394022 - DNA, 25 bp, Homo sapien
ccaagaggagactagagcatagcac

SEQ ID NO: 5394023 - DNA, 25 bp, Homo sapien
aagattagcagagcagccccatagg

SEQ ID NO: 5394024 - DNA, 25 bp, Homo sapien
tatgtaatctaaccagagcgctatg

SEQ ID NO: 5394025 - DNA, 25 bp, Homo sapien
tgtgtatgacccatctcacgttgtg

SEQ ID NO: 5394026 - DNA, 25 bp, Homo sapien
gatgttgacagagaacggctaccaa

SEQ ID NO: 5394027 - DNA, 25 bp, Homo sapien
tattattcacttcgccgcatcctgg

SEQ ID NO: 5394028 - DNA, 25 bp, Homo sapien
aacaccctgactgtgtccacttgct

SEQ ID NO: 5394029 - DNA, 25 bp, Homo sapien
ccactgtgtatgtgctgtttcctct

SEQ ID NO: 5394030 - DNA, 25 bp, Homo sapien
ctctctttccagaggtaactacttt

SEQ ID NO: 5394031 - DNA, 25 bp, Homo sapien
aatatcattaacatcagtttactgt

SEQ ID NO: 5394032 - DNA, 25 bp, Homo sapien
tatcattaacatcagtttactgtta

SEQ ID NO: 5394033 - DNA, 25 bp, Homo sapien
ccctctctttccagaggtaactact

SEQ ID NO: 5394034 - DNA, 25 bp, Homo sapien
gcaagtttgattggattcatcttca

SEQ ID NO: 5394035 - DNA, 25 bp, Homo sapien
aactgatcatcaggacagctatgat

SEQ ID NO: 5394036 - DNA, 25 bp, Homo sapien
agtcattagctccatcacaaagcca

SEQ ID NO: 5394037 - DNA, 25 bp, Homo sapien
tctcttggggatgcagcgattattc

SEQ ID NO: 5394038 - DNA, 25 bp, Homo sapien
gaaactctccagctttacatatgtg

SEQ ID NO: 5394039 - DNA, 25 bp, Homo sapien
catttccaccgagcttggatacagt

SEQ ID NO: 5394040 - DNA, 25 bp, Homo sapien
acagtgtctgtttttgcagcgaaac

SEQ ID NO: 5394041 - DNA, 25 bp, Homo sapien
tcgcttccgtctaggcagtcatcgt

SEQ ID NO: 5394042 - DNA, 25 bp, Homo sapien
ttgattatcggcacaagcacacacc

SEQ ID NO: 5394043 - DNA, 25 bp, Homo sapien
tagccaagcaaagtgtactacagcc

SEQ ID NO: 5394044 - DNA, 25 bp, Homo sapien
ttatttactcggcacatattgtcac

SEQ ID NO: 5394045 - DNA, 25 bp, Homo sapien
tttcatccaaaagttgattatcggc

SEQ ID NO: 5394046 - DNA, 25 bp, Homo sapien
gaatcagatgctccttgaagactgt

SEQ ID NO: 5394047 - DNA, 25 bp, Homo sapien
ttcagaatcagatgctccttgaaga

SEQ ID NO: 5394048 - DNA, 25 bp, Homo sapien
ctctttcagaatcagatgctccttg

SEQ ID NO: 5394049 - DNA, 25 bp, Homo sapien
gctccttgaagactgtgtttatatt

SEQ ID NO: 5394050 - DNA, 25 bp, Homo sapien
gctcacaactgaacatcggaatgca

SEQ ID NO: 5394051 - DNA, 25 bp, Homo sapien
gtctaacaggacaatatgaaaccat

SEQ ID NO: 5394052 - DNA, 25 bp, Homo sapien
taatgtctgagattcaaaagatgca

SEQ ID NO: 5394053 - DNA, 25 bp, Homo sapien
cagctgctttgatcaatgtagtaaa

SEQ ID NO: 5394054 - DNA, 25 bp, Homo sapien
cttgttgctttcgtggatcataaat

SEQ ID NO: 5394055 - DNA, 25 bp, Homo sapien
gggtggtctttcatgcctcagcaat

SEQ ID NO: 5394056 - DNA, 25 bp, Homo sapien
caaataggggtggtctttcatgcct

SEQ ID NO: 5394057 - DNA, 25 bp, Homo sapien
ctgaagcccaaataggggtggtctt

SEQ ID NO: 5394058 - DNA, 25 bp, Homo sapien
ggtctttcatgcctcagcaatgtca

SEQ ID NO: 5394059 - DNA, 25 bp, Homo sapien
ggaaccattcatataatcagtccag

SEQ ID NO: 5394060 - DNA, 25 bp, Homo sapien
gaacacataatttccatgatgcgac

SEQ ID NO: 5394061 - DNA, 25 bp, Homo sapien
gcgacagtccgaaagggtggttcaa

SEQ ID NO: 5394062 - DNA, 25 bp, Homo sapien
tcatataatcagtccagaacacata

SEQ ID NO: 5394063 - DNA, 25 bp, Homo sapien
catcctcaattttacctaagaattt

SEQ ID NO: 5394064 - DNA, 25 bp, Homo sapien
tcatcctcaattttacctaagaatt

SEQ ID NO: 5394065 - DNA, 25 bp, Homo sapien
acagccaactgcatcatcctcaatt

SEQ ID NO: 5394066 - DNA, 25 bp, Homo sapien
tggccacagcatctttgaagtcaca

SEQ ID NO: 5394067 - DNA, 25 bp, Homo sapien
tgaagtcacaaaaatctgccgattg

SEQ ID NO: 5394068 - DNA, 25 bp, Homo sapien
cagagttaaaccgtttggccacagc

SEQ ID NO: 5394069 - DNA, 25 bp, Homo sapien
taataggcatcacaccagtataatg

SEQ ID NO: 5394070 - DNA, 25 bp, Homo sapien
cgactctgagaagctttttccagcc

SEQ ID NO: 5394071 - DNA, 25 bp, Homo sapien
tggccatcattggtccagtaaagat

SEQ ID NO: 5394072 - DNA, 25 bp, Homo sapien
cattaatggttttcctatggccatc

SEQ ID NO: 5394073 - DNA, 25 bp, Homo sapien
tctgggatgagacatttcaccctct

SEQ ID NO: 5394074 - DNA, 25 bp, Homo sapien
tggaatgcaaagaaccaccaatgtc

SEQ ID NO: 5394075 - DNA, 25 bp, Homo sapien
taagcattgcctcgcagtcttcagg

SEQ ID NO: 5394076 - DNA, 25 bp, Homo sapien
tcttcaggttgaaaggtagacactc

SEQ ID NO: 5394077 - DNA, 25 bp, Homo sapien
cctggcggtcattgtggctattaga

SEQ ID NO: 5394078 - DNA, 25 bp, Homo sapien
accaagaactctctatgttgcattt

SEQ ID NO: 5394079 - DNA, 25 bp, Homo sapien
gaactctctatgttgcattttggtc

SEQ ID NO: 5394080 - DNA, 25 bp, Homo sapien
tgcattttggtccttgaaagtgtct

SEQ ID NO: 5394081 - DNA, 25 bp, Homo sapien
ctatgttgcattttggtccttgaaa

SEQ ID NO: 5394082 - DNA, 25 bp, Homo sapien
aaagtaggcagacagcctctgtcac

SEQ ID NO: 5394083 - DNA, 25 bp, Homo sapien
cctctaaaagattggagagaccacc

SEQ ID NO: 5394084 - DNA, 25 bp, Homo sapien
gagaccaccatttacaccatccatg

SEQ ID NO: 5394085 - DNA, 25 bp, Homo sapien
tctaaaactgtcaggaccctatcat

SEQ ID NO: 5394086 - DNA, 25 bp, Homo sapien
tcattctgcaccaaacaacgtgatc

SEQ ID NO: 5394087 - DNA, 25 bp, Homo sapien
tcgatcctcctaaaatatcactttg

SEQ ID NO: 5394088 - DNA, 25 bp, Homo sapien
tgcaccaaacaacgtgatcgatcct

SEQ ID NO: 5394089 - DNA, 25 bp, Homo sapien
caacgtgatcgatcctcctaaaata

SEQ ID NO: 5394090 - DNA, 25 bp, Homo sapien
tccattaagatctagtccaaacacc

SEQ ID NO: 5394091 - DNA, 25 bp, Homo sapien
taaatgctgcagtgtcttgaaactt

SEQ ID NO: 5394092 - DNA, 25 bp, Homo sapien
ttattatctgtaaaggaacctccag

SEQ ID NO: 5394093 - DNA, 25 bp, Homo sapien
gccgaaggagttatctgagtatacc

SEQ ID NO: 5394094 - DNA, 25 bp, Homo sapien
atctcctgcgatatagctatcgtga

SEQ ID NO: 5394095 - DNA, 25 bp, Homo sapien
taagcacacaattaatgttcctcaa

SEQ ID NO: 5394096 - DNA, 25 bp, Homo sapien
gatatagctatcgtgatgtccttca

SEQ ID NO: 5394097 - DNA, 25 bp, Homo sapien
taaaatattcaagaagtaagcagac

SEQ ID NO: 5394098 - DNA, 25 bp, Homo sapien
tccaagggcaactctagaaaacttc

SEQ ID NO: 5394099 - DNA, 25 bp, Homo sapien
tagaatatagtagacaacaccaagt

SEQ ID NO: 5394100 - DNA, 25 bp, Homo sapien
ctagattacttgttcctaagccaaa

SEQ ID NO: 5394101 - DNA, 25 bp, Homo sapien
catgatcaatagtctaatgaaaacc

SEQ ID NO: 5394102 - DNA, 25 bp, Homo sapien
taaagctagtctgacacacactgga

SEQ ID NO: 5394103 - DNA, 25 bp, Homo sapien
gggtagtttgatgttaatgtcacag

SEQ ID NO: 5394104 - DNA, 25 bp, Homo sapien
agtttgatgttaatgtcacagtgtc

SEQ ID NO: 5394105 - DNA, 25 bp, Homo sapien
ccagaagaacttgagttctggttaa

SEQ ID NO: 5394106 - DNA, 25 bp, Homo sapien
ttctgccggccaattaggaaactgg

SEQ ID NO: 5394107 - DNA, 25 bp, Homo sapien
tctaaagcacgagggtttaccagat

SEQ ID NO: 5394108 - DNA, 25 bp, Homo sapien
ctgggcgtcctttcccataaaagag

SEQ ID NO: 5394109 - DNA, 25 bp, Homo sapien
ggtttctgcgtgaaagtctaaagca

SEQ ID NO: 5394110 - DNA, 25 bp, Homo sapien
tatccctttgtctgtaactgtctgg

SEQ ID NO: 5394111 - DNA, 25 bp, Homo sapien
tatattacagttgcccaaacatgtg

SEQ ID NO: 5394112 - DNA, 25 bp, Homo sapien
ggcatttattaaaacatcgggcaca

SEQ ID NO: 5394113 - DNA, 25 bp, Homo sapien
actgtctggatagcaaaaacatgac

SEQ ID NO: 5394114 - DNA, 25 bp, Homo sapien
taactgctgctgagtagacagatgt

SEQ ID NO: 5394115 - DNA, 25 bp, Homo sapien
cttcccaagttgaagccagtcctgc

SEQ ID NO: 5394116 - DNA, 25 bp, Homo sapien
tatggatcgacttcacatgcatggc

SEQ ID NO: 5394117 - DNA, 25 bp, Homo sapien
agtcctgcagcgacaagtccgagtt

SEQ ID NO: 5394118 - DNA, 25 bp, Homo sapien
gaatatcagtcccattaaatcggtt

SEQ ID NO: 5394119 - DNA, 25 bp, Homo sapien
gttatcagaattggttgcatacaaa

SEQ ID NO: 5394120 - DNA, 25 bp, Homo sapien
tcaaacacagttataccataaagat

SEQ ID NO: 5394121 - DNA, 25 bp, Homo sapien
tcggtttatccttacgatattgtag

SEQ ID NO: 5394122 - DNA, 25 bp, Homo sapien
ggcgacattcccgtagtcagtaaag

SEQ ID NO: 5394123 - DNA, 25 bp, Homo sapien
gactaggtctagtgccagtgcagct

SEQ ID NO: 5394124 - DNA, 25 bp, Homo sapien
tagtccaagtaaagatctacccagt

SEQ ID NO: 5394125 - DNA, 25 bp, Homo sapien
tgttcggttcatcccatccatgtca

SEQ ID NO: 5394126 - DNA, 25 bp, Homo sapien
ttcaaaaggttctgaaaatgaaatg

SEQ ID NO: 5394127 - DNA, 25 bp, Homo sapien
gaaaatgaaatgacttatcattcat

SEQ ID NO: 5394128 - DNA, 25 bp, Homo sapien
ttctgaaaatgaaatgacttatcat

SEQ ID NO: 5394129 - DNA, 25 bp, Homo sapien
ctgaaaatgaaatgacttatcattc

SEQ ID NO: 5394130 - DNA, 25 bp, Homo sapien
ctctcattcacctttttattatgaa

SEQ ID NO: 5394131 - DNA, 25 bp, Homo sapien
tatgaaagcaaattcgctttttagg

SEQ ID NO: 5394132 - DNA, 25 bp, Homo sapien
cattcacctttttattatgaaagca

SEQ ID NO: 5394133 - DNA, 25 bp, Homo sapien
tgaaagcaaattcgctttttaggcc

SEQ ID NO: 5394134 - DNA, 25 bp, Homo sapien
gcaaaaaccatttctattaatagct

SEQ ID NO: 5394135 - DNA, 25 bp, Homo sapien
taatagctttagtctccatgaatct

SEQ ID NO: 5394136 - DNA, 25 bp, Homo sapien
tagctttagtctccatgaatctttc

SEQ ID NO: 5394137 - DNA, 25 bp, Homo sapien
attaatagctttagtctccatgaat

SEQ ID NO: 5394138 - DNA, 25 bp, Homo sapien
gctaacatcttgatctgagaccagc

SEQ ID NO: 5394139 - DNA, 25 bp, Homo sapien
agaccagcagccttcagaaccgtga

SEQ ID NO: 5394140 - DNA, 25 bp, Homo sapien
taaccgtgttaccattatgacaacc

SEQ ID NO: 5394141 - DNA, 25 bp, Homo sapien
catggcgagaaggtgatcatctgcc

SEQ ID NO: 5394142 - DNA, 25 bp, Homo sapien
tattgctctgcacaccaatggttcc

SEQ ID NO: 5394143 - DNA, 25 bp, Homo sapien
tcaccagaagattgcttattgctct

SEQ ID NO: 5394144 - DNA, 25 bp, Homo sapien
cattgctgccaacaatacataatac

SEQ ID NO: 5394145 - DNA, 25 bp, Homo sapien
cctcagaagccagccaatggaagtt

SEQ ID NO: 5394146 - DNA, 25 bp, Homo sapien
gatttgtggtccgtcttgtgctccc

SEQ ID NO: 5394147 - DNA, 25 bp, Homo sapien
cagcctatcggacctggagcagaaa

SEQ ID NO: 5394148 - DNA, 25 bp, Homo sapien
ctccaagtcagcctatcggacctgg

SEQ ID NO: 5394149 - DNA, 25 bp, Homo sapien
gacatactgtactaggatgatgttc

SEQ ID NO: 5394150 - DNA, 25 bp, Homo sapien
taagatgtggcattgctaaattatg

SEQ ID NO: 5394151 - DNA, 25 bp, Homo sapien
tctgggctaaagaatattcttctct

SEQ ID NO: 5394152 - DNA, 25 bp, Homo sapien
ctttctgggctaaagaatattcttc

SEQ ID NO: 5394153 - DNA, 25 bp, Homo sapien
tgggctaaagaatattcttctctaa

SEQ ID NO: 5394154 - DNA, 25 bp, Homo sapien
gcttgtggtatgctttcactagtgt

SEQ ID NO: 5394155 - DNA, 25 bp, Homo sapien
tcttaacctaaagtacatagagtta

SEQ ID NO: 5394156 - DNA, 25 bp, Homo sapien
aggaaactcaaggaattctgcttgt

SEQ ID NO: 5394157 - DNA, 25 bp, Homo sapien
aattctgcttgtggtatgctttcac

SEQ ID NO: 5394158 - DNA, 25 bp, Homo sapien
ctggcaagaacagggagtatgtccc

SEQ ID NO: 5394159 - DNA, 25 bp, Homo sapien
gcaagaacagggagtatgtcccttt

SEQ ID NO: 5394160 - DNA, 25 bp, Homo sapien
caagaacagggagtatgtccctttc

SEQ ID NO: 5394161 - DNA, 25 bp, Homo sapien
ggcaagaacagggagtatgtccctt

SEQ ID NO: 5394162 - DNA, 25 bp, Homo sapien
tgatccatttctgttaataacaaga

SEQ ID NO: 5394163 - DNA, 25 bp, Homo sapien
tcagcaccaattgtgaatgccagct

SEQ ID NO: 5394164 - DNA, 25 bp, Homo sapien
gtgaatgccagctatattctgatcc

SEQ ID NO: 5394165 - DNA, 25 bp, Homo sapien
aattgtgaatgccagctatattctg

SEQ ID NO: 5394166 - DNA, 25 bp, Homo sapien
ccattgtcatgcatgtactctatca

SEQ ID NO: 5394167 - DNA, 25 bp, Homo sapien
cacgtatgccattgtcatgcatgta

SEQ ID NO: 5394168 - DNA, 25 bp, Homo sapien
ttgggatatgactacatcttcttcc

SEQ ID NO: 5394169 - DNA, 25 bp, Homo sapien
aaaggattgaatcacgtatgccatt

SEQ ID NO: 5394170 - DNA, 25 bp, Homo sapien
tactcatttagctatataggccaag

SEQ ID NO: 5394171 - DNA, 25 bp, Homo sapien
gtaagatgcttctcaattcaactgc

SEQ ID NO: 5394172 - DNA, 25 bp, Homo sapien
ggccaagttattgtgagactcctga

SEQ ID NO: 5394173 - DNA, 25 bp, Homo sapien
gaatatgtgaaaccaaggcaatcca

SEQ ID NO: 5394174 - DNA, 25 bp, Homo sapien
cacacactgacagggtaaatgttaa

SEQ ID NO: 5394175 - DNA, 25 bp, Homo sapien
cacagacatttgacatgagtataga

SEQ ID NO: 5394176 - DNA, 25 bp, Homo sapien
catgacagagttgtacccgtgtgag

SEQ ID NO: 5394177 - DNA, 25 bp, Homo sapien
tgcttaccctcattcaaaacaggaa

SEQ ID NO: 5394178 - DNA, 25 bp, Homo sapien
aaaataggagtcattatatcaataa

SEQ ID NO: 5394179 - DNA, 25 bp, Homo sapien
ggaaaataggagtcattatatcaat

SEQ ID NO: 5394180 - DNA, 25 bp, Homo sapien
ttaggaaaataggagtcattatatc

SEQ ID NO: 5394181 - DNA, 25 bp, Homo sapien
ctttaggaaaataggagtcattata

SEQ ID NO: 5394182 - DNA, 25 bp, Homo sapien
agatgtaaaggtttccaggaactgc

SEQ ID NO: 5394183 - DNA, 25 bp, Homo sapien
tcctggaacactagccagagaccgg

SEQ ID NO: 5394184 - DNA, 25 bp, Homo sapien
tgtgcttcttgcaggcgagatgtaa

SEQ ID NO: 5394185 - DNA, 25 bp, Homo sapien
gagaccggcacttcctggactttaa

SEQ ID NO: 5394186 - DNA, 25 bp, Homo sapien
gacaaaaacttcctagttgctacca

SEQ ID NO: 5394187 - DNA, 25 bp, Homo sapien
acaaaaacttcctagttgctaccat

SEQ ID NO: 5394188 - DNA, 25 bp, Homo sapien
accatgtgaggttcctatgaggacc

SEQ ID NO: 5394189 - DNA, 25 bp, Homo sapien
tcaggaacttaatgtcaggcactcc

SEQ ID NO: 5394190 - DNA, 25 bp, Homo sapien
tatgaggaccctgatacaagagctg

SEQ ID NO: 5394191 - DNA, 25 bp, Homo sapien
gatccctgtggattacacacctgag

SEQ ID NO: 5394192 - DNA, 25 bp, Homo sapien
agaagacggtagagtgtaagggaca

SEQ ID NO: 5394193 - DNA, 25 bp, Homo sapien
agtgagagaagacggtagagtgtaa

SEQ ID NO: 5394194 - DNA, 25 bp, Homo sapien
tcaagtgagagaagacggtagagtg

SEQ ID NO: 5394195 - DNA, 25 bp, Homo sapien
gaagacggtagagtgtaagggacat

SEQ ID NO: 5394196 - DNA, 25 bp, Homo sapien
atagcttcaattactgctttgttga

SEQ ID NO: 5394197 - DNA, 25 bp, Homo sapien
catagcttcaattactgctttgttg

SEQ ID NO: 5394198 - DNA, 25 bp, Homo sapien
actgccattaccattcttatctagc

SEQ ID NO: 5394199 - DNA, 25 bp, Homo sapien
cattcttatctagcatttgcagggc

SEQ ID NO: 5394200 - DNA, 25 bp, Homo sapien
cactgccattaccattcttatctag

SEQ ID NO: 5394201 - DNA, 25 bp, Homo sapien
tcactgccattaccattcttatcta

SEQ ID NO: 5394202 - DNA, 25 bp, Homo sapien
ttctcaagcagtgcacatcccacag

SEQ ID NO: 5394203 - DNA, 25 bp, Homo sapien
tgtaattttgttctcaagcagtgca

SEQ ID NO: 5394204 - DNA, 25 bp, Homo sapien
ttttgttctcaagcagtgcacatcc

SEQ ID NO: 5394205 - DNA, 25 bp, Homo sapien
taattttgttctcaagcagtgcaca

SEQ ID NO: 5394206 - DNA, 25 bp, Homo sapien
agtttaggatatgttccatcagaca

SEQ ID NO: 5394207 - DNA, 25 bp, Homo sapien
cagtttaggatatgttccatcagac

SEQ ID NO: 5394208 - DNA, 25 bp, Homo sapien
taggatatgttccatcagacatttc

SEQ ID NO: 5394209 - DNA, 25 bp, Homo sapien
tttaggatatgttccatcagacatt

SEQ ID NO: 5394210 - DNA, 25 bp, Homo sapien
aatcagggtgacacatacagaaccg

SEQ ID NO: 5394211 - DNA, 25 bp, Homo sapien
tacaaacaaagatccggtcaccgac

SEQ ID NO: 5394212 - DNA, 25 bp, Homo sapien
tagagatttcgagtgagccagtcaa

SEQ ID NO: 5394213 - DNA, 25 bp, Homo sapien
tgtgaagctccagatcaatcagggt

SEQ ID NO: 5394214 - DNA, 25 bp, Homo sapien
cattcagttctggaaatatatcagc

SEQ ID NO: 5394215 - DNA, 25 bp, Homo sapien
tcagttctggaaatatatcagctac

SEQ ID NO: 5394216 - DNA, 25 bp, Homo sapien
ttcagttctggaaatatatcagcta

SEQ ID NO: 5394217 - DNA, 25 bp, Homo sapien
attcagttctggaaatatatcagct

SEQ ID NO: 5394218 - DNA, 25 bp, Homo sapien
gcagtatctggtcatactgactgag

SEQ ID NO: 5394219 - DNA, 25 bp, Homo sapien
agtatctggtcatactgactgagaa

SEQ ID NO: 5394220 - DNA, 25 bp, Homo sapien
tcttcttgaaagctttatccatata

SEQ ID NO: 5394221 - DNA, 25 bp, Homo sapien
cagcagtatctggtcatactgactg

SEQ ID NO: 5394222 - DNA, 25 bp, Homo sapien
ggataacataaaactgggcctcatg

SEQ ID NO: 5394223 - DNA, 25 bp, Homo sapien
taacataaaactgggcctcatgacc

SEQ ID NO: 5394224 - DNA, 25 bp, Homo sapien
gataacataaaactgggcctcatga

SEQ ID NO: 5394225 - DNA, 25 bp, Homo sapien
atggataacataaaactgggcctca

SEQ ID NO: 5394226 - DNA, 25 bp, Homo sapien
gttccagtagcttgtgttgcagggt

SEQ ID NO: 5394227 - DNA, 25 bp, Homo sapien
gcagaacaggttccagtagcttgtg

SEQ ID NO: 5394228 - DNA, 25 bp, Homo sapien
aacaggttccagtagcttgtgttgc

SEQ ID NO: 5394229 - DNA, 25 bp, Homo sapien
ccagtagcttgtgttgcagggtaca

SEQ ID NO: 5394230 - DNA, 25 bp, Homo sapien
gattcaatccaacaaatcatatctt

SEQ ID NO: 5394231 - DNA, 25 bp, Homo sapien
aaggattgaagaatattgattgtcc

SEQ ID NO: 5394232 - DNA, 25 bp, Homo sapien
tttgaagattctcttgattcaatcc

SEQ ID NO: 5394233 - DNA, 25 bp, Homo sapien
tccattgactgagcttagagttgcc

SEQ ID NO: 5394234 - DNA, 25 bp, Homo sapien
tagtataggtggtctatctgtaggt

SEQ ID NO: 5394235 - DNA, 25 bp, Homo sapien
ttaatagtataggtggtctatctgt

SEQ ID NO: 5394236 - DNA, 25 bp, Homo sapien
aatagtataggtggtctatctgtag

SEQ ID NO: 5394237 - DNA, 25 bp, Homo sapien
aattaatagtataggtggtctatct

SEQ ID NO: 5394238 - DNA, 25 bp, Homo sapien
ctaggccattcgggccttcccttgt

SEQ ID NO: 5394239 - DNA, 25 bp, Homo sapien
tggcttgtcgtggagggaaagttag

SEQ ID NO: 5394240 - DNA, 25 bp, Homo sapien
atccattgtcttgggctaggccatt

SEQ ID NO: 5394241 - DNA, 25 bp, Homo sapien
cttttccacatatccattgtcttgg

SEQ ID NO: 5394242 - DNA, 25 bp, Homo sapien
ccttgcaagatctgttgtctggctg

SEQ ID NO: 5394243 - DNA, 25 bp, Homo sapien
gctgcattaggtagccttccacaca

SEQ ID NO: 5394244 - DNA, 25 bp, Homo sapien
cacacaactgcaagtgtaggatcca

SEQ ID NO: 5394245 - DNA, 25 bp, Homo sapien
caagtgtaggatccatgtgtgtttc

SEQ ID NO: 5394246 - DNA, 25 bp, Homo sapien
gaaagagcacgaatgttcaatggca

SEQ ID NO: 5394247 - DNA, 25 bp, Homo sapien
tggaaagagcacgaatgttcaatgg

SEQ ID NO: 5394248 - DNA, 25 bp, Homo sapien
ggaaagagcacgaatgttcaatggc

SEQ ID NO: 5394249 - DNA, 25 bp, Homo sapien
gaatccatcctcacagtaacatctt

SEQ ID NO: 5394250 - DNA, 25 bp, Homo sapien
taacatcttgtactatttctgacca

SEQ ID NO: 5394251 - DNA, 25 bp, Homo sapien
ccatcttctgttatttcgaatccat

SEQ ID NO: 5394252 - DNA, 25 bp, Homo sapien
gttatttcgaatccatcctcacagt

SEQ ID NO: 5394253 - DNA, 25 bp, Homo sapien
tactgacaattcagctgttggcaat

SEQ ID NO: 5394254 - DNA, 25 bp, Homo sapien
tttatactgacaattcagctgttgg

SEQ ID NO: 5394255 - DNA, 25 bp, Homo sapien
tcagctgttggcaattggataacag

SEQ ID NO: 5394256 - DNA, 25 bp, Homo sapien
gacaattcagctgttggcaattgga

SEQ ID NO: 5394257 - DNA, 25 bp, Homo sapien
agaggggccacaaactctctcgaga

SEQ ID NO: 5394258 - DNA, 25 bp, Homo sapien
ctccatcgggcaccgagcccttccc

SEQ ID NO: 5394259 - DNA, 25 bp, Homo sapien
atcgggcaccgagcccttcccggag

SEQ ID NO: 5394260 - DNA, 25 bp, Homo sapien
gaggggccacaaactctctcgagac

SEQ ID NO: 5394261 - DNA, 25 bp, Homo sapien
aaagaagggactagctcacagatgg

SEQ ID NO: 5394262 - DNA, 25 bp, Homo sapien
taggaaaattcccacgcacaaagcg

SEQ ID NO: 5394263 - DNA, 25 bp, Homo sapien
gaaatttctgaaggtactactagga

SEQ ID NO: 5394264 - DNA, 25 bp, Homo sapien
tcacagatggattaatcaaggactg

SEQ ID NO: 5394265 - DNA, 25 bp, Homo sapien
tgtcattgatttcttatcgttatgc

SEQ ID NO: 5394266 - DNA, 25 bp, Homo sapien
tctaagcaatactttatctacatcc

SEQ ID NO: 5394267 - DNA, 25 bp, Homo sapien
tatctacatccatcaaattatacct

SEQ ID NO: 5394268 - DNA, 25 bp, Homo sapien
tatttctgatttgccttatggtttc

SEQ ID NO: 5394269 - DNA, 25 bp, Homo sapien
aaccgtaagtcttctttacatcaca

SEQ ID NO: 5394270 - DNA, 25 bp, Homo sapien
accgtaagtcttctttacatcacac

SEQ ID NO: 5394271 - DNA, 25 bp, Homo sapien
tttacatcacactgactatctaaag

SEQ ID NO: 5394272 - DNA, 25 bp, Homo sapien
tcacactgactatctaaagtttgac

SEQ ID NO: 5394273 - DNA, 25 bp, Homo sapien
gcttaggcaaaatggttacctccat

SEQ ID NO: 5394274 - DNA, 25 bp, Homo sapien
ctgagtctgtagtctcggttaattt

SEQ ID NO: 5394275 - DNA, 25 bp, Homo sapien
tctcggttaatttccgcttaggcaa

SEQ ID NO: 5394276 - DNA, 25 bp, Homo sapien
tccgcttaggcaaaatggttacctc

SEQ ID NO: 5394277 - DNA, 25 bp, Homo sapien
ttccataggttctggtattatgtat

SEQ ID NO: 5394278 - DNA, 25 bp, Homo sapien
tataaacttctctattcacaatact

SEQ ID NO: 5394279 - DNA, 25 bp, Homo sapien
gctataaacttctctattcacaata

SEQ ID NO: 5394280 - DNA, 25 bp, Homo sapien
cataggttctggtattatgtatcaa

SEQ ID NO: 5394281 - DNA, 25 bp, Homo sapien
ggagcaacatacaccagggccagtt

SEQ ID NO: 5394282 - DNA, 25 bp, Homo sapien
atagtgttaagaggtaaggccctag

SEQ ID NO: 5394283 - DNA, 25 bp, Homo sapien
ccaaggcacaggtataactatgtaa

SEQ ID NO: 5394284 - DNA, 25 bp, Homo sapien
gccctagggaagatattaagccatg

SEQ ID NO: 5394285 - DNA, 25 bp, Homo sapien
tacttacaggattcgcagtttcacg

SEQ ID NO: 5394286 - DNA, 25 bp, Homo sapien
tattttacgagaataggtgtcacca

SEQ ID NO: 5394287 - DNA, 25 bp, Homo sapien
gatgcggaggaccactcctacttaa

SEQ ID NO: 5394288 - DNA, 25 bp, Homo sapien
tctttctgggagctagtgcatgcaa

SEQ ID NO: 5394289 - DNA, 25 bp, Homo sapien
tggccattactacatcatgaatgct

SEQ ID NO: 5394290 - DNA, 25 bp, Homo sapien
cagtggccattactacatcatgaat

SEQ ID NO: 5394291 - DNA, 25 bp, Homo sapien
tcagtggccattactacatcatgaa

SEQ ID NO: 5394292 - DNA, 25 bp, Homo sapien
agtggccattactacatcatgaatg

SEQ ID NO: 5394293 - DNA, 25 bp, Homo sapien
gcaatcggagattatgatcccatga

SEQ ID NO: 5394294 - DNA, 25 bp, Homo sapien
tctaggcaatcggagattatgatcc

SEQ ID NO: 5394295 - DNA, 25 bp, Homo sapien
ggagattatgatcccatgatttacc

SEQ ID NO: 5394296 - DNA, 25 bp, Homo sapien
ctcatctaggcaatcggagattatg

SEQ ID NO: 5394297 - DNA, 25 bp, Homo sapien
tatcaaagaagttaagagctgagcc

SEQ ID NO: 5394298 - DNA, 25 bp, Homo sapien
tatgaggagtcaaacctaaaatgca

SEQ ID NO: 5394299 - DNA, 25 bp, Homo sapien
tgcctccgcttccaatgtgttcact

SEQ ID NO: 5394300 - DNA, 25 bp, Homo sapien
ataaaccctgaaaacgcgctgaatt

SEQ ID NO: 5394301 - DNA, 25 bp, Homo sapien
ataaatgacttacgaggaaaagcgt

SEQ ID NO: 5394302 - DNA, 25 bp, Homo sapien
tgacttacgaggaaaagcgtcaaat

SEQ ID NO: 5394303 - DNA, 25 bp, Homo sapien
cagcagatgtgacagtgggccaaga

SEQ ID NO: 5394304 - DNA, 25 bp, Homo sapien
ggctatagagtgagaattcggcccc

SEQ ID NO: 5394305 - DNA, 25 bp, Homo sapien
ccacacttgaaatagtcagatttcc

SEQ ID NO: 5394306 - DNA, 25 bp, Homo sapien
tactaaatatagtgggcaacagagc

SEQ ID NO: 5394307 - DNA, 25 bp, Homo sapien
agtgagcttcacataattacacagc

SEQ ID NO: 5394308 - DNA, 25 bp, Homo sapien
cagaaagttcccataataagaagcc

SEQ ID NO: 5394309 - DNA, 25 bp, Homo sapien
gctccgcctccccagttctcaccat

SEQ ID NO: 5394310 - DNA, 25 bp, Homo sapien
ccccagttctcaccattctccttcc

SEQ ID NO: 5394311 - DNA, 25 bp, Homo sapien
ccgcctccccagttctcaccattct

SEQ ID NO: 5394312 - DNA, 25 bp, Homo sapien
agttctcaccattctccttccccag

SEQ ID NO: 5394313 - DNA, 25 bp, Homo sapien
taaaagaaacagctacgtagtgtgg

SEQ ID NO: 5394314 - DNA, 25 bp, Homo sapien
taggctaaaatgaaaggatactaga

SEQ ID NO: 5394315 - DNA, 25 bp, Homo sapien
ggtcaaattctgctctagttacatg

SEQ ID NO: 5394316 - DNA, 25 bp, Homo sapien
taatccttttacgatgtcatcatac

SEQ ID NO: 5394317 - DNA, 25 bp, Homo sapien
tccactaaactaatgtgagcctaag

SEQ ID NO: 5394318 - DNA, 25 bp, Homo sapien
taacacatttctgagccatgcaaga

SEQ ID NO: 5394319 - DNA, 25 bp, Homo sapien
agctactgtcacctatgtagttggg

SEQ ID NO: 5394320 - DNA, 25 bp, Homo sapien
tcaaggcccactatgaagaacctgt

SEQ ID NO: 5394321 - DNA, 25 bp, Homo sapien
catattcctccaaataaccgtcttc

SEQ ID NO: 5394322 - DNA, 25 bp, Homo sapien
ttataaccaaaactggtctctctgg

SEQ ID NO: 5394323 - DNA, 25 bp, Homo sapien
ctagatgccaatgtcagtaactact

SEQ ID NO: 5394324 - DNA, 25 bp, Homo sapien
caaataaccgtcttcttgtcgttgt

SEQ ID NO: 5394325 - DNA, 25 bp, Homo sapien
ttagaaagaattggcagctacttta

SEQ ID NO: 5394326 - DNA, 25 bp, Homo sapien
tagaaagaattggcagctactttac

SEQ ID NO: 5394327 - DNA, 25 bp, Homo sapien
tgctctccctgatgtcagtctgtgt

SEQ ID NO: 5394328 - DNA, 25 bp, Homo sapien
tccttgttcttgtcagccgtgaaac

SEQ ID NO: 5394329 - DNA, 25 bp, Homo sapien
gtcagtctgtgtcagcaagccactc

SEQ ID NO: 5394330 - DNA, 25 bp, Homo sapien
aagctcgtaagtttttgctctccct

SEQ ID NO: 5394331 - DNA, 25 bp, Homo sapien
tcagtgtaccaaggcaggtaagaca

SEQ ID NO: 5394332 - DNA, 25 bp, Homo sapien
tatgccaacacattgtcagtgtacc

SEQ ID NO: 5394333 - DNA, 25 bp, Homo sapien
ttgtcagtgtaccaaggcaggtaag

SEQ ID NO: 5394334 - DNA, 25 bp, Homo sapien
gaagtatgccaacacattgtcagtg

SEQ ID NO: 5394335 - DNA, 25 bp, Homo sapien
tatggctatatacttgttgataatg

SEQ ID NO: 5394336 - DNA, 25 bp, Homo sapien
tatacttgttgataatgatatcatc

SEQ ID NO: 5394337 - DNA, 25 bp, Homo sapien
ggctatatacttgttgataatgata

SEQ ID NO: 5394338 - DNA, 25 bp, Homo sapien
atttatggctatatacttgttgata

SEQ ID NO: 5394339 - DNA, 25 bp, Homo sapien
tatgttggtgcagtaaatggtgtct

SEQ ID NO: 5394340 - DNA, 25 bp, Homo sapien
tggctttcaacatcatgactgtatg

SEQ ID NO: 5394341 - DNA, 25 bp, Homo sapien
ggtctctattctaacaagtcagctg

SEQ ID NO: 5394342 - DNA, 25 bp, Homo sapien
gactgtatgtctgagtgtggttctc

SEQ ID NO: 5394343 - DNA, 25 bp, Homo sapien
tcttacaaattgagaaggatgattg

SEQ ID NO: 5394344 - DNA, 25 bp, Homo sapien
ccctgggtcaaagtagcttattgtt

SEQ ID NO: 5394345 - DNA, 25 bp, Homo sapien
tggcttgccaggagagtcaaccctg

SEQ ID NO: 5394346 - DNA, 25 bp, Homo sapien
tgagaatgctcatgatcttacaaat

SEQ ID NO: 5394347 - DNA, 25 bp, Homo sapien
ccatgtagttatgcgttttgattga

SEQ ID NO: 5394348 - DNA, 25 bp, Homo sapien
tttgattgagcttctaaatcctgaa

SEQ ID NO: 5394349 - DNA, 25 bp, Homo sapien
tatgcgttttgattgagcttctaaa

SEQ ID NO: 5394350 - DNA, 25 bp, Homo sapien
acactgtgttagctgtgtcccagca

SEQ ID NO: 5394351 - DNA, 25 bp, Homo sapien
aatgttatgactcttgaaattggca

SEQ ID NO: 5394352 - DNA, 25 bp, Homo sapien
tgtgaagcccaccattgcatagcac

SEQ ID NO: 5394353 - DNA, 25 bp, Homo sapien
gatgtttgattaatcctaaatgacc

SEQ ID NO: 5394354 - DNA, 25 bp, Homo sapien
gactaatctgcgctataaatcctaa

SEQ ID NO: 5394355 - DNA, 25 bp, Homo sapien
gagtctggccaaatatcaaattcca

SEQ ID NO: 5394356 - DNA, 25 bp, Homo sapien
tgaataagagcacaggttccagagt

SEQ ID NO: 5394357 - DNA, 25 bp, Homo sapien
gcagagtaaactcaagaccatttct

SEQ ID NO: 5394358 - DNA, 25 bp, Homo sapien
tggtatatggagttgtggttacaaa

SEQ ID NO: 5394359 - DNA, 25 bp, Homo sapien
ctcctgtttaatggatgaatgcatc

SEQ ID NO: 5394360 - DNA, 25 bp, Homo sapien
ctacaagttgatttgcaagtttttc

SEQ ID NO: 5394361 - DNA, 25 bp, Homo sapien
tcttctcctgtttaatggatgaatg

SEQ ID NO: 5394362 - DNA, 25 bp, Homo sapien
tgtttaatggatgaatgcatcacac

SEQ ID NO: 5394363 - DNA, 25 bp, Homo sapien
gcctgtgcaggaatagcagacaccg

SEQ ID NO: 5394364 - DNA, 25 bp, Homo sapien
ggtttttgagtgaagccagtaagaa

SEQ ID NO: 5394365 - DNA, 25 bp, Homo sapien
cagttgaagtgtccgagtcaggaaa

SEQ ID NO: 5394366 - DNA, 25 bp, Homo sapien
tgcttgctcagcgatctgtatcttc

SEQ ID NO: 5394367 - DNA, 25 bp, Homo sapien
tcaggtgacgaaaaacaacttgtgt

SEQ ID NO: 5394368 - DNA, 25 bp, Homo sapien
ggtgaaatagggaacttatgctgtc

SEQ ID NO: 5394369 - DNA, 25 bp, Homo sapien
cactgatccaggaagtcttgattca

SEQ ID NO: 5394370 - DNA, 25 bp, Homo sapien
cataagataagtttaagcaagggac

SEQ ID NO: 5394371 - DNA, 25 bp, Homo sapien
tccacaggtggtagtatatgttgaa

SEQ ID NO: 5394372 - DNA, 25 bp, Homo sapien
agtgtcttcaacttaggctatagag

SEQ ID NO: 5394373 - DNA, 25 bp, Homo sapien
tgttgaatggattacacaagtgtct

SEQ ID NO: 5394374 - DNA, 25 bp, Homo sapien
tgaaaaagctcccagcgaacctggc

SEQ ID NO: 5394375 - DNA, 25 bp, Homo sapien
gaagcataacaccacactgctgtga

SEQ ID NO: 5394376 - DNA, 25 bp, Homo sapien
aaagaagcataacaccacactgctg

SEQ ID NO: 5394377 - DNA, 25 bp, Homo sapien
aaaaagaagcataacaccacactgc

SEQ ID NO: 5394378 - DNA, 25 bp, Homo sapien
caaaaaagaagcataacaccacact

SEQ ID NO: 5394379 - DNA, 25 bp, Homo sapien
caatgtactccttcgtcatacccat

SEQ ID NO: 5394380 - DNA, 25 bp, Homo sapien
tccttcgtcatacccatctgggcag

SEQ ID NO: 5394381 - DNA, 25 bp, Homo sapien
ctgacaatgtactccttcgtcatac

SEQ ID NO: 5394382 - DNA, 25 bp, Homo sapien
tactccttcgtcatacccatctggg

SEQ ID NO: 5394383 - DNA, 25 bp, Homo sapien
tgaacacatttgttggtaccaaggc

SEQ ID NO: 5394384 - DNA, 25 bp, Homo sapien
ttgttggtaccaaggcaagcaatgt

SEQ ID NO: 5394385 - DNA, 25 bp, Homo sapien
caagcaatgtgattcaaggggcact

SEQ ID NO: 5394386 - DNA, 25 bp, Homo sapien
cagctgggataaatgaacacatttg

SEQ ID NO: 5394387 - DNA, 25 bp, Homo sapien
tctaactgggtgatagctcctaact

SEQ ID NO: 5394388 - DNA, 25 bp, Homo sapien
tgttctaactgggtgatagctccta

SEQ ID NO: 5394389 - DNA, 25 bp, Homo sapien
actgggtgatagctcctaactgcaa

SEQ ID NO: 5394390 - DNA, 25 bp, Homo sapien
gatagctcctaactgcaattttgaa

SEQ ID NO: 5394391 - DNA, 25 bp, Homo sapien
cagcaggagattatttgaggggtcc

SEQ ID NO: 5394392 - DNA, 25 bp, Homo sapien
tactgggtagcagccgtttaaaatc

SEQ ID NO: 5394393 - DNA, 25 bp, Homo sapien
tagcagccgtttaaaatcagaagtg

SEQ ID NO: 5394394 - DNA, 25 bp, Homo sapien
tgggtagcagccgtttaaaatcaga

SEQ ID NO: 5394395 - DNA, 25 bp, Homo sapien
cacgatctattatggcatcagtaaa

SEQ ID NO: 5394396 - DNA, 25 bp, Homo sapien
ctggtaaaataacttttcgcaatgg

SEQ ID NO: 5394397 - DNA, 25 bp, Homo sapien
tggtacccttttataatgttcacga

SEQ ID NO: 5394398 - DNA, 25 bp, Homo sapien
ttcgcaatggtacccttttataatg

SEQ ID NO: 5394399 - DNA, 25 bp, Homo sapien
ctgtgtatgatctctcaaatcctgc

SEQ ID NO: 5394400 - DNA, 25 bp, Homo sapien
tgtatcctgtgtatgatctctcaaa

SEQ ID NO: 5394401 - DNA, 25 bp, Homo sapien
ggttcttttcgctttgtatcctgtg

SEQ ID NO: 5394402 - DNA, 25 bp, Homo sapien
caaatcctgcttggatatatttgtt

SEQ ID NO: 5394403 - DNA, 25 bp, Homo sapien
tcaagaacataagtatcataaaatg

SEQ ID NO: 5394404 - DNA, 25 bp, Homo sapien
cataagtatcataaaatggctccat

SEQ ID NO: 5394405 - DNA, 25 bp, Homo sapien
gaacataagtatcataaaatggctc

SEQ ID NO: 5394406 - DNA, 25 bp, Homo sapien
ctcaagaacataagtatcataaaat

SEQ ID NO: 5394407 - DNA, 25 bp, Homo sapien
agtcccataatatgagattctggag

SEQ ID NO: 5394408 - DNA, 25 bp, Homo sapien
gagtcccataatatgagattctgga

SEQ ID NO: 5394409 - DNA, 25 bp, Homo sapien
caagtcgtagggttggcatttgcta

SEQ ID NO: 5394410 - DNA, 25 bp, Homo sapien
gctataaagggcatttatttgtaca

SEQ ID NO: 5394411 - DNA, 25 bp, Homo sapien
ttgtacaggaaagggataataatct

SEQ ID NO: 5394412 - DNA, 25 bp, Homo sapien
tgactttgcaactccgggtatccat

SEQ ID NO: 5394413 - DNA, 25 bp, Homo sapien
gaaaagttcaagacgtaggtatgag

SEQ ID NO: 5394414 - DNA, 25 bp, Homo sapien
caactaattgtattgttggcatctg

SEQ ID NO: 5394415 - DNA, 25 bp, Homo sapien
agtatctgtagagagctcaactaat

SEQ ID NO: 5394416 - DNA, 25 bp, Homo sapien
cctgtgtgaacacataagtatctgt

SEQ ID NO: 5394417 - DNA, 25 bp, Homo sapien
ctgaaccaattgagcttcctctcct

SEQ ID NO: 5394418 - DNA, 25 bp, Homo sapien
cctccatcagagtcaaagcttgact

SEQ ID NO: 5394419 - DNA, 25 bp, Homo sapien
gcttgacttatcctcggtcctttgt

SEQ ID NO: 5394420 - DNA, 25 bp, Homo sapien
tcacctcaatgcctgaaccaattga

SEQ ID NO: 5394421 - DNA, 25 bp, Homo sapien
catccaagctcatgcagaataagag

SEQ ID NO: 5394422 - DNA, 25 bp, Homo sapien
gaagagggcgttttctaagatcaat

SEQ ID NO: 5394423 - DNA, 25 bp, Homo sapien
gctgcctataactgataacatccaa

SEQ ID NO: 5394424 - DNA, 25 bp, Homo sapien
ggagactgctgcctataactgataa

SEQ ID NO: 5394425 - DNA, 25 bp, Homo sapien
ttctaaaggattgggtcctagagta

SEQ ID NO: 5394426 - DNA, 25 bp, Homo sapien
ttccacgaactagagcacaaaacac

SEQ ID NO: 5394427 - DNA, 25 bp, Homo sapien
gtattccacgaactagagcacaaaa

SEQ ID NO: 5394428 - DNA, 25 bp, Homo sapien
aaaggattgggtcctagagtaatgg

SEQ ID NO: 5394429 - DNA, 25 bp, Homo sapien
caaggaagtggtttagttggcatcc

SEQ ID NO: 5394430 - DNA, 25 bp, Homo sapien
ctcctgattagggttgagctgtcca

SEQ ID NO: 5394431 - DNA, 25 bp, Homo sapien
tagttggcatccgaacagaacctgg

SEQ ID NO: 5394432 - DNA, 25 bp, Homo sapien
cacaggagtccaggcagttatacca

SEQ ID NO: 5394433 - DNA, 25 bp, Homo sapien
cattggcagaaacccaaactgaatt

SEQ ID NO: 5394434 - DNA, 25 bp, Homo sapien
tccaaaaagtcatgaagaatttcat

SEQ ID NO: 5394435 - DNA, 25 bp, Homo sapien
gggaaagtttccagacattggcaga

SEQ ID NO: 5394436 - DNA, 25 bp, Homo sapien
gcttgtatcattcaggttagttgga

SEQ ID NO: 5394437 - DNA, 25 bp, Homo sapien
gtcaaattcggaaatttccacctga

SEQ ID NO: 5394438 - DNA, 25 bp, Homo sapien
cattgtcaaattcggaaatttccac

SEQ ID NO: 5394439 - DNA, 25 bp, Homo sapien
cattcattgtcaaattcggaaattt

SEQ ID NO: 5394440 - DNA, 25 bp, Homo sapien
acattttccccaatatcaaactgac

SEQ ID NO: 5394441 - DNA, 25 bp, Homo sapien
tagcaggcatgttgcaagatcatcg

SEQ ID NO: 5394442 - DNA, 25 bp, Homo sapien
attccaccaattgaattcaaagctt

SEQ ID NO: 5394443 - DNA, 25 bp, Homo sapien
gtttagaggattcattagcaggcat

SEQ ID NO: 5394444 - DNA, 25 bp, Homo sapien
caagatcatcgtgtggagagttcat

SEQ ID NO: 5394445 - DNA, 25 bp, Homo sapien
cattttaatgagctaccgtactgta

SEQ ID NO: 5394446 - DNA, 25 bp, Homo sapien
ggaaaccagctttagaccatatatg

SEQ ID NO: 5394447 - DNA, 25 bp, Homo sapien
aaaaacattgcttgtggtaactggg

SEQ ID NO: 5394448 - DNA, 25 bp, Homo sapien
tagtgggtcaatactagaggttcca

SEQ ID NO: 5394449 - DNA, 25 bp, Homo sapien
tctagagtacagaagacattcaggt

SEQ ID NO: 5394450 - DNA, 25 bp, Homo sapien
tgtagatggataaagccttctagag

SEQ ID NO: 5394451 - DNA, 25 bp, Homo sapien
aagacattcaggttgtagatggagt

SEQ ID NO: 5394452 - DNA, 25 bp, Homo sapien
ggataaagccttctagagtacagaa

SEQ ID NO: 5394453 - DNA, 25 bp, Homo sapien
ggtagtttgactctggaaccactgt

SEQ ID NO: 5394454 - DNA, 25 bp, Homo sapien
tcaggctgttcatatgagctccaaa

SEQ ID NO: 5394455 - DNA, 25 bp, Homo sapien
ggagtttaccatgtaccacgtacta

SEQ ID NO: 5394456 - DNA, 25 bp, Homo sapien
aaggatccgcccatatcttcccatg

SEQ ID NO: 5394457 - DNA, 25 bp, Homo sapien
gttcactatcccttatatacgccat

SEQ ID NO: 5394458 - DNA, 25 bp, Homo sapien
cttctggaatgtgtgacggttttgt

SEQ ID NO: 5394459 - DNA, 25 bp, Homo sapien
tcttgttcactatcccttatatacg

SEQ ID NO: 5394460 - DNA, 25 bp, Homo sapien
gtttcttgttcactatcccttatat

SEQ ID NO: 5394461 - DNA, 25 bp, Homo sapien
gaacatgtacaaataagtcctactg

SEQ ID NO: 5394462 - DNA, 25 bp, Homo sapien
cagatattatcctaacctccattga

SEQ ID NO: 5394463 - DNA, 25 bp, Homo sapien
tctcactctgtcagtggtctaccca

SEQ ID NO: 5394464 - DNA, 25 bp, Homo sapien
tatatatcttcaagtatacaagtac

SEQ ID NO: 5394465 - DNA, 25 bp, Homo sapien
tgttagaataaagccacccaaataa

SEQ ID NO: 5394466 - DNA, 25 bp, Homo sapien
caatgtaatgccagaccaggttcaa

SEQ ID NO: 5394467 - DNA, 25 bp, Homo sapien
taaatgcggtatctgttaaatagca

SEQ ID NO: 5394468 - DNA, 25 bp, Homo sapien
gctatagagcaatgttggcacccag

SEQ ID NO: 5394469 - DNA, 25 bp, Homo sapien
gcttaggccctgtctgagaatctcc

SEQ ID NO: 5394470 - DNA, 25 bp, Homo sapien
cagagacacatttgcgggtaaggat

SEQ ID NO: 5394471 - DNA, 25 bp, Homo sapien
gagaatctcctatgtcctccgtggc

SEQ ID NO: 5394472 - DNA, 25 bp, Homo sapien
ttttccgagtcagcgtataaagcca

SEQ ID NO: 5394473 - DNA, 25 bp, Homo sapien
gttgtaataaacacaggcgtgcagt

SEQ ID NO: 5394474 - DNA, 25 bp, Homo sapien
ctctctagtttctggtaaaccagcc

SEQ ID NO: 5394475 - DNA, 25 bp, Homo sapien
gaagcttgtctttttgcgcctgcct

SEQ ID NO: 5394476 - DNA, 25 bp, Homo sapien
cctaataattgccagttccatccat

SEQ ID NO: 5394477 - DNA, 25 bp, Homo sapien
taggattactagacattactggaga

SEQ ID NO: 5394478 - DNA, 25 bp, Homo sapien
gttttccctgcaacattgattgaag

SEQ ID NO: 5394479 - DNA, 25 bp, Homo sapien
tatggcaaatgataggcgtctagct

SEQ ID NO: 5394480 - DNA, 25 bp, Homo sapien
cttgtgggatattgcgcaagaaatc

SEQ ID NO: 5394481 - DNA, 25 bp, Homo sapien
tccataaggaatactgccagactac

SEQ ID NO: 5394482 - DNA, 25 bp, Homo sapien
tattagaaatctaccggcatgctct

SEQ ID NO: 5394483 - DNA, 25 bp, Homo sapien
ggaactgggtactccaagatcctgc

SEQ ID NO: 5394484 - DNA, 25 bp, Homo sapien
tcagcaggtgacgtattccgcaagg

SEQ ID NO: 5394485 - DNA, 25 bp, Homo sapien
tcaaatagacgcaaacatgcaaagc

SEQ ID NO: 5394486 - DNA, 25 bp, Homo sapien
ttttctgtagcatccctggaacaag

SEQ ID NO: 5394487 - DNA, 25 bp, Homo sapien
ggtagaaacactctggcctcttcca

SEQ ID NO: 5394488 - DNA, 25 bp, Homo sapien
tctgggctgtagaccttcaaataga

SEQ ID NO: 5394489 - DNA, 25 bp, Homo sapien
tagaatttcaggtaccgtgtccagc

SEQ ID NO: 5394490 - DNA, 25 bp, Homo sapien
tgtacgaatggaatgctatagcctg

SEQ ID NO: 5394491 - DNA, 25 bp, Homo sapien
tattaggcccataagaacagctgac

SEQ ID NO: 5394492 - DNA, 25 bp, Homo sapien
actcccgagggtgtgcgtattagac

SEQ ID NO: 5394493 - DNA, 25 bp, Homo sapien
catgaggcattttggcgagagccac

SEQ ID NO: 5394494 - DNA, 25 bp, Homo sapien
catagatgcttcacatcacgcagag

SEQ ID NO: 5394495 - DNA, 25 bp, Homo sapien
taaactggattacacaacatggaag

SEQ ID NO: 5394496 - DNA, 25 bp, Homo sapien
taagtgctgcgacactcagagtcca

SEQ ID NO: 5394497 - DNA, 25 bp, Homo sapien
gacttggaagagctacacacagccc

SEQ ID NO: 5394498 - DNA, 25 bp, Homo sapien
gaattagcaaagaacaatagcactg

SEQ ID NO: 5394499 - DNA, 25 bp, Homo sapien
tgcaaatgaaatatccctagacttt

SEQ ID NO: 5394500 - DNA, 25 bp, Homo sapien
cccaagccattatgagccgggtcca

SEQ ID NO: 5394501 - DNA, 25 bp, Homo sapien
gtatcaaaagaacctcaaggtaaga

SEQ ID NO: 5394502 - DNA, 25 bp, Homo sapien
gggcagttagattgtgtatcaaaag

SEQ ID NO: 5394503 - DNA, 25 bp, Homo sapien
caaggtaagatgcatcattggtgct

SEQ ID NO: 5394504 - DNA, 25 bp, Homo sapien
gaatgagagaggatcgaccgagagg

SEQ ID NO: 5394505 - DNA, 25 bp, Homo sapien
taatcaatcagggtgaatactggtc

SEQ ID NO: 5394506 - DNA, 25 bp, Homo sapien
tcggtgcatacaggcctggtacact

SEQ ID NO: 5394507 - DNA, 25 bp, Homo sapien
cagggtgaatactggtcggtgcata

SEQ ID NO: 5394508 - DNA, 25 bp, Homo sapien
gaatactggtcggtgcatacaggcc

SEQ ID NO: 5394509 - DNA, 25 bp, Homo sapien
ggcagaatgcaagaccctataccaa

SEQ ID NO: 5394510 - DNA, 25 bp, Homo sapien
ggatgttgaaatacggtctcactac

SEQ ID NO: 5394511 - DNA, 25 bp, Homo sapien
tacttgtataatgtagggccaaagc

SEQ ID NO: 5394512 - DNA, 25 bp, Homo sapien
ccacttgaaaaggagagggctaaag

SEQ ID NO: 5394513 - DNA, 25 bp, Homo sapien
tcctgtggaaaaagtgatcggctca

SEQ ID NO: 5394514 - DNA, 25 bp, Homo sapien
caaaataaagcgaagcaattcctgc

SEQ ID NO: 5394515 - DNA, 25 bp, Homo sapien
tgttcataccccttatggtaagtgg

SEQ ID NO: 5394516 - DNA, 25 bp, Homo sapien
gatattgacatgtcagcatacctgg

SEQ ID NO: 5394517 - DNA, 25 bp, Homo sapien
tagtgttaacacaatcacattgaaa

SEQ ID NO: 5394518 - DNA, 25 bp, Homo sapien
tgtgtactgccctgagatattaata

SEQ ID NO: 5394519 - DNA, 25 bp, Homo sapien
tttcaagtttcttaggctatttgga

SEQ ID NO: 5394520 - DNA, 25 bp, Homo sapien
tcaagtttcttaggctatttggaaa

SEQ ID NO: 5394521 - DNA, 25 bp, Homo sapien
aatcatctagaacagcagtcatctg

SEQ ID NO: 5394522 - DNA, 25 bp, Homo sapien
cacatgtaaggtaaatccgaatggc

SEQ ID NO: 5394523 - DNA, 25 bp, Homo sapien
gaatggcatgagaacctttctactc

SEQ ID NO: 5394524 - DNA, 25 bp, Homo sapien
aaagaatcatctagaacagcagtca

SEQ ID NO: 5394525 - DNA, 25 bp, Homo sapien
ctcgtctgaatcatcagggcagtca

SEQ ID NO: 5394526 - DNA, 25 bp, Homo sapien
tctgggagacacaagtcacgtgatc

SEQ ID NO: 5394527 - DNA, 25 bp, Homo sapien
agccagctctgggagacacaagtca

SEQ ID NO: 5394528 - DNA, 25 bp, Homo sapien
ggtatctaaagactcgtctgaatca

SEQ ID NO: 5394529 - DNA, 25 bp, Homo sapien
caacattaaataggtctcggtgagc

SEQ ID NO: 5394530 - DNA, 25 bp, Homo sapien
gaagtgttgggaataccttagccat

SEQ ID NO: 5394531 - DNA, 25 bp, Homo sapien
ggtgacaacttctgctactagatgg

SEQ ID NO: 5394532 - DNA, 25 bp, Homo sapien
tccgcctgataccagcagcataaat

SEQ ID NO: 5394533 - DNA, 25 bp, Homo sapien
ccttttatttcaactgtatcatcaa

SEQ ID NO: 5394534 - DNA, 25 bp, Homo sapien
tcaactgtatcatcaaataagtctc

SEQ ID NO: 5394535 - DNA, 25 bp, Homo sapien
gtattctccagaatcaaagccatgg

SEQ ID NO: 5394536 - DNA, 25 bp, Homo sapien
aaagccatggagtaaatgaacttca

SEQ ID NO: 5394537 - DNA, 25 bp, Homo sapien
caattccctcatctgacaggttgtg

SEQ ID NO: 5394538 - DNA, 25 bp, Homo sapien
gttgtgtgaacataaggattggctc

SEQ ID NO: 5394539 - DNA, 25 bp, Homo sapien
cctcatctgacaggttgtgtgaaca

SEQ ID NO: 5394540 - DNA, 25 bp, Homo sapien
tctgacaggttgtgtgaacataagg

SEQ ID NO: 5394541 - DNA, 25 bp, Homo sapien
caagatgaagcagccatttgaagct

SEQ ID NO: 5394542 - DNA, 25 bp, Homo sapien
atgaagcagccatttgaagcttcca

SEQ ID NO: 5394543 - DNA, 25 bp, Homo sapien
ttgaagcttccaaagaccactcgag

SEQ ID NO: 5394544 - DNA, 25 bp, Homo sapien
aagcttccaaagaccactcgagcat

SEQ ID NO: 5394545 - DNA, 25 bp, Homo sapien
tttgacagaagcagatgtaacaggt

SEQ ID NO: 5394546 - DNA, 25 bp, Homo sapien
atgtaacaggtttctttttatctct

SEQ ID NO: 5394547 - DNA, 25 bp, Homo sapien
gcctaaagaagggtgaatcttctct

SEQ ID NO: 5394548 - DNA, 25 bp, Homo sapien
ctaaagaagggtgaatcttctctgt

SEQ ID NO: 5394549 - DNA, 25 bp, Homo sapien
tataaaaggcattgggccatcctct

SEQ ID NO: 5394550 - DNA, 25 bp, Homo sapien
gtaacgtcagcatcactccctttgt

SEQ ID NO: 5394551 - DNA, 25 bp, Homo sapien
tctcgacctgaaatagtctatgagt

SEQ ID NO: 5394552 - DNA, 25 bp, Homo sapien
taagataggaaatagtaacgtcagc

SEQ ID NO: 5394553 - DNA, 25 bp, Homo sapien
tcaaccacttttctagttaatgaag

SEQ ID NO: 5394554 - DNA, 25 bp, Homo sapien
caaccacttttctagttaatgaagt

SEQ ID NO: 5394555 - DNA, 25 bp, Homo sapien
ctgtattttgaacctcaaccacttt

SEQ ID NO: 5394556 - DNA, 25 bp, Homo sapien
tgttgtttagtacatggaacgtctc

SEQ ID NO: 5394557 - DNA, 25 bp, Homo sapien
cctatgtgttaacctggacatatac

SEQ ID NO: 5394558 - DNA, 25 bp, Homo sapien
gaaattagaattagaccagaaggtc

SEQ ID NO: 5394559 - DNA, 25 bp, Homo sapien
cactatttgtagcttgttgatgcac

SEQ ID NO: 5394560 - DNA, 25 bp, Homo sapien
cacaaataccatgcagcagttttca

SEQ ID NO: 5394561 - DNA, 25 bp, Homo sapien
gagagacctgaatcaatgtccctgg

SEQ ID NO: 5394562 - DNA, 25 bp, Homo sapien
cagggctaaatctactgtacttctg

SEQ ID NO: 5394563 - DNA, 25 bp, Homo sapien
tcagtccggaaaaagccttaagcag

SEQ ID NO: 5394564 - DNA, 25 bp, Homo sapien
tcatttccacatgacacaagtagga

SEQ ID NO: 5394565 - DNA, 25 bp, Homo sapien
aaaccttgatatgctgtctctgtcc

SEQ ID NO: 5394566 - DNA, 25 bp, Homo sapien
catcgcctccaccatttctctgtgc

SEQ ID NO: 5394567 - DNA, 25 bp, Homo sapien
acaaaaccttgatatgctgtctctg

SEQ ID NO: 5394568 - DNA, 25 bp, Homo sapien
atttactcattgccatgcctgtgag

SEQ ID NO: 5394569 - DNA, 25 bp, Homo sapien
ttaaatactagtaataatatggtac

SEQ ID NO: 5394570 - DNA, 25 bp, Homo sapien
tttaaatactagtaataatatggta

SEQ ID NO: 5394571 - DNA, 25 bp, Homo sapien
cacattcttaccttttaaatactag

SEQ ID NO: 5394572 - DNA, 25 bp, Homo sapien
tggagcctctttggtataggaaaaa

SEQ ID NO: 5394573 - DNA, 25 bp, Homo sapien
cctatctgtatagttgggacttgac

SEQ ID NO: 5394574 - DNA, 25 bp, Homo sapien
aaatctggattggattctgggcttc

SEQ ID NO: 5394575 - DNA, 25 bp, Homo sapien
taaactgaccctcccatgaataata

SEQ ID NO: 5394576 - DNA, 25 bp, Homo sapien
ctttagcactggtatatcaataggc

SEQ ID NO: 5394577 - DNA, 25 bp, Homo sapien
taaatatggcaacaagagtgacctc

SEQ ID NO: 5394578 - DNA, 25 bp, Homo sapien
tatacagaactaggaactgctactg

SEQ ID NO: 5394579 - DNA, 25 bp, Homo sapien
tgatagcctccatatactgacccct

SEQ ID NO: 5394580 - DNA, 25 bp, Homo sapien
gaaacagtgttctcacagcaatatt

SEQ ID NO: 5394581 - DNA, 25 bp, Homo sapien
gagaaatagagatggcttacaagca

SEQ ID NO: 5394582 - DNA, 25 bp, Homo sapien
tatactagcctacttgaactcatgc

SEQ ID NO: 5394583 - DNA, 25 bp, Homo sapien
taatgcagtatattatggctacgca

SEQ ID NO: 5394584 - DNA, 25 bp, Homo sapien
cataaatctatttgtgctgaacaca

SEQ ID NO: 5394585 - DNA, 25 bp, Homo sapien
tgctagccagattaacaaatcaagg

SEQ ID NO: 5394586 - DNA, 25 bp, Homo sapien
tacatcacaggaaggtcatgcctct

SEQ ID NO: 5394587 - DNA, 25 bp, Homo sapien
aacattgctctagactgacgatggg

SEQ ID NO: 5394588 - DNA, 25 bp, Homo sapien
tattatgtaaattcttcccaagatc

SEQ ID NO: 5394589 - DNA, 25 bp, Homo sapien
ttcccaagatcgtctatcattccaa

SEQ ID NO: 5394590 - DNA, 25 bp, Homo sapien
taacaacagtatgtaagatgggtct

SEQ ID NO: 5394591 - DNA, 25 bp, Homo sapien
caaatgtatggattgagactatata

SEQ ID NO: 5394592 - DNA, 25 bp, Homo sapien
gctgggaaagcttgagccataggtc

SEQ ID NO: 5394593 - DNA, 25 bp, Homo sapien
aagcttgagccataggtctttcacc

SEQ ID NO: 5394594 - DNA, 25 bp, Homo sapien
tcacctattccttgttgaaggctgc

SEQ ID NO: 5394595 - DNA, 25 bp, Homo sapien
tcagtgtactgtgaggccacagtca

SEQ ID NO: 5394596 - DNA, 25 bp, Homo sapien
tgtgatgtcctcttggatacagtga

SEQ ID NO: 5394597 - DNA, 25 bp, Homo sapien
gagttccacttgctgaggtcaagca

SEQ ID NO: 5394598 - DNA, 25 bp, Homo sapien
tagtgtgcccagaacagagagctag

SEQ ID NO: 5394599 - DNA, 25 bp, Homo sapien
gagagtcgttttccctctactagaa

SEQ ID NO: 5394600 - DNA, 25 bp, Homo sapien
tggtgccctgttgttccacatggaa

SEQ ID NO: 5394601 - DNA, 25 bp, Homo sapien
caagtctataacgtcctgtggacaa

SEQ ID NO: 5394602 - DNA, 25 bp, Homo sapien
tgaagctgattggaattggtgccct

SEQ ID NO: 5394603 - DNA, 25 bp, Homo sapien
gctaaatcagtttccctaagtcaag

SEQ ID NO: 5394604 - DNA, 25 bp, Homo sapien
tcatcaacaccaattgtgtctgatg

SEQ ID NO: 5394605 - DNA, 25 bp, Homo sapien
ctattcatcaacaccaattgtgtct

SEQ ID NO: 5394606 - DNA, 25 bp, Homo sapien
catcaacaccaattgtgtctgatgc

SEQ ID NO: 5394607 - DNA, 25 bp, Homo sapien
attcatcaacaccaattgtgtctga

SEQ ID NO: 5394608 - DNA, 25 bp, Homo sapien
ttccaacatcacttgaagattcagt

SEQ ID NO: 5394609 - DNA, 25 bp, Homo sapien
gaagattcagtggttcttcgggtaa

SEQ ID NO: 5394610 - DNA, 25 bp, Homo sapien
gattcagtggttcttcgggtaactg

SEQ ID NO: 5394611 - DNA, 25 bp, Homo sapien
cttgaagattcagtggttcttcggg

SEQ ID NO: 5394612 - DNA, 25 bp, Homo sapien
tttcattttgcactttttcagagta

SEQ ID NO: 5394613 - DNA, 25 bp, Homo sapien
tcattttgcactttttcagagtaaa

SEQ ID NO: 5394614 - DNA, 25 bp, Homo sapien
cgtttttcattttgcactttttcag

SEQ ID NO: 5394615 - DNA, 25 bp, Homo sapien
tttttcattttgcactttttcagag

SEQ ID NO: 5394616 - DNA, 25 bp, Homo sapien
ggcacaaactcatggcagcgttgat

SEQ ID NO: 5394617 - DNA, 25 bp, Homo sapien
tagctctgttggctcaccattgaat

SEQ ID NO: 5394618 - DNA, 25 bp, Homo sapien
cagcgttgatgccaaggcactgcta

SEQ ID NO: 5394619 - DNA, 25 bp, Homo sapien
tattgtataataacgtggctccaag

SEQ ID NO: 5394620 - DNA, 25 bp, Homo sapien
tgaacatgctactcaatggactgat

SEQ ID NO: 5394621 - DNA, 25 bp, Homo sapien
taacctgccacgcacattaatggag

SEQ ID NO: 5394622 - DNA, 25 bp, Homo sapien
tcgtgaagtataggaaagaaggcca

SEQ ID NO: 5394623 - DNA, 25 bp, Homo sapien
taaagcatccaataaagtctcgtga

SEQ ID NO: 5394624 - DNA, 25 bp, Homo sapien
gaatggcagtcaacctacttgtaat

SEQ ID NO: 5394625 - DNA, 25 bp, Homo sapien
ccatgaacacatgatagcaggctca

SEQ ID NO: 5394626 - DNA, 25 bp, Homo sapien
agcaggctcatgcatttcaattgtc

SEQ ID NO: 5394627 - DNA, 25 bp, Homo sapien
ccttttcctggaatggccatgccat

SEQ ID NO: 5394628 - DNA, 25 bp, Homo sapien
tctttggtccattcttcgaggtcaa

SEQ ID NO: 5394629 - DNA, 25 bp, Homo sapien
aaattccaggcacaatgtgaagctg

SEQ ID NO: 5394630 - DNA, 25 bp, Homo sapien
gatttctagacacaaaatgccttga

SEQ ID NO: 5394631 - DNA, 25 bp, Homo sapien
ggagaggtactggataattgtcaca

SEQ ID NO: 5394632 - DNA, 25 bp, Homo sapien
tactgggtaccatgattatcttgtc

SEQ ID NO: 5394633 - DNA, 25 bp, Homo sapien
acactttcaagtcagaccatggtac

SEQ ID NO: 5394634 - DNA, 25 bp, Homo sapien
tttttgagcacctacccaatggaga

SEQ ID NO: 5394635 - DNA, 25 bp, Homo sapien
tatatctggctcctgaatacacatt

SEQ ID NO: 5394636 - DNA, 25 bp, Homo sapien
catggtacattttgtcctcctcata

SEQ ID NO: 5394637 - DNA, 25 bp, Homo sapien
ctcctcataagaagaattgcctttc

SEQ ID NO: 5394638 - DNA, 25 bp, Homo sapien
tacattttgtcctcctcataagaag

SEQ ID NO: 5394639 - DNA, 25 bp, Homo sapien
tgtcctcctcataagaagaattgcc

SEQ ID NO: 5394640 - DNA, 25 bp, Homo sapien
taagtcgcatatatctggccatgtg

SEQ ID NO: 5394641 - DNA, 25 bp, Homo sapien
ttcccatggagagtggtcagactgc

SEQ ID NO: 5394642 - DNA, 25 bp, Homo sapien
ctttgtgggtgcattgtaagtcgca

SEQ ID NO: 5394643 - DNA, 25 bp, Homo sapien
aatctgcatgcgctttgtgggtgca

SEQ ID NO: 5394644 - DNA, 25 bp, Homo sapien
ccagttgcaattatgcttctcatca

SEQ ID NO: 5394645 - DNA, 25 bp, Homo sapien
cattagagcttgcaataaatatctc

SEQ ID NO: 5394646 - DNA, 25 bp, Homo sapien
gcagctccttaaggtatttcacata

SEQ ID NO: 5394647 - DNA, 25 bp, Homo sapien
cagtgaatggcatgcataatgcagc

SEQ ID NO: 5394648 - DNA, 25 bp, Homo sapien
gattgattagggtgttggcactcac

SEQ ID NO: 5394649 - DNA, 25 bp, Homo sapien
tactgaattaaggtaggtactccac

SEQ ID NO: 5394650 - DNA, 25 bp, Homo sapien
tgatccagaggcatcacatgaagct

SEQ ID NO: 5394651 - DNA, 25 bp, Homo sapien
ggcattccaatgagatgacactgac

SEQ ID NO: 5394652 - DNA, 25 bp, Homo sapien
tcagaccttttctttattcacgttc

SEQ ID NO: 5394653 - DNA, 25 bp, Homo sapien
tttctttattcacgttcataaatgc

SEQ ID NO: 5394654 - DNA, 25 bp, Homo sapien
gaccttttctttattcacgttcata

SEQ ID NO: 5394655 - DNA, 25 bp, Homo sapien
cttttctttattcacgttcataaat

SEQ ID NO: 5394656 - DNA, 25 bp, Homo sapien
agttcatctggtgtagtggtttcag

SEQ ID NO: 5394657 - DNA, 25 bp, Homo sapien
gagttcatctggtgtagtggtttca

SEQ ID NO: 5394658 - DNA, 25 bp, Homo sapien
gttcatctggtgtagtggtttcagc

SEQ ID NO: 5394659 - DNA, 25 bp, Homo sapien
gaagacttccatgcaccaacatttc

SEQ ID NO: 5394660 - DNA, 25 bp, Homo sapien
taatatgtcatgtgtggtccaccca

SEQ ID NO: 5394661 - DNA, 25 bp, Homo sapien
tgctctgatccctcactgtttttcc

SEQ ID NO: 5394662 - DNA, 25 bp, Homo sapien
cttctttaacatgtgtgaagatctc

SEQ ID NO: 5394663 - DNA, 25 bp, Homo sapien
cctcacgtgtaatggctgatgtcca

SEQ ID NO: 5394664 - DNA, 25 bp, Homo sapien
tctctactgggaacattgcacctta

SEQ ID NO: 5394665 - DNA, 25 bp, Homo sapien
tctagtgatacagaatgccgctggg

SEQ ID NO: 5394666 - DNA, 25 bp, Homo sapien
cagtacctgtgcctaaacgatcaga

SEQ ID NO: 5394667 - DNA, 25 bp, Homo sapien
catttatgtaagaaggcagtacctg

SEQ ID NO: 5394668 - DNA, 25 bp, Homo sapien
tcaaagtcaggatttaatgtacatt

SEQ ID NO: 5394669 - DNA, 25 bp, Homo sapien
ctttatattcaaagtcaggatttaa

SEQ ID NO: 5394670 - DNA, 25 bp, Homo sapien
ttgctgaaggaaaggatgtttgctc

SEQ ID NO: 5394671 - DNA, 25 bp, Homo sapien
taatgtacatttgctgaaggaaagg

SEQ ID NO: 5394672 - DNA, 25 bp, Homo sapien
attatcagccctattttacagaggg

SEQ ID NO: 5394673 - DNA, 25 bp, Homo sapien
cccaagatggtgcagctactaagtg

SEQ ID NO: 5394674 - DNA, 25 bp, Homo sapien
tcagccctattttacagagggtaaa

SEQ ID NO: 5394675 - DNA, 25 bp, Homo sapien
taacttgcccaagatggtgcagcta

SEQ ID NO: 5394676 - DNA, 25 bp, Homo sapien
cacagtcaataagcacttttcaaga

SEQ ID NO: 5394677 - DNA, 25 bp, Homo sapien
ggatccaagtccagccctaagatga

SEQ ID NO: 5394678 - DNA, 25 bp, Homo sapien
gcctgaattacttcccatatgccaa

SEQ ID NO: 5394679 - DNA, 25 bp, Homo sapien
cacaggcaagatgaatcaaacttaa

SEQ ID NO: 5394680 - DNA, 25 bp, Homo sapien
tcatcctcgtattcttctttccgaa

SEQ ID NO: 5394681 - DNA, 25 bp, Homo sapien
agacagaaatgcaggattcatcctc

SEQ ID NO: 5394682 - DNA, 25 bp, Homo sapien
cgtattcttctttccgaacccacat

SEQ ID NO: 5394683 - DNA, 25 bp, Homo sapien
cagaaatgcaggattcatcctcgta

SEQ ID NO: 5394684 - DNA, 25 bp, Homo sapien
tattcttattacaaattgcactcaa

SEQ ID NO: 5394685 - DNA, 25 bp, Homo sapien
tattacaaattgcactcaactctca

SEQ ID NO: 5394686 - DNA, 25 bp, Homo sapien
caaattgcactcaactctcacttac

SEQ ID NO: 5394687 - DNA, 25 bp, Homo sapien
tcttattacaaattgcactcaactc

SEQ ID NO: 5394688 - DNA, 25 bp, Homo sapien
tctcgggcttgggtttacaatgtcg

SEQ ID NO: 5394689 - DNA, 25 bp, Homo sapien
atagtgactctcgggcttgggttta

SEQ ID NO: 5394690 - DNA, 25 bp, Homo sapien
cgggcttgggtttacaatgtcgtga

SEQ ID NO: 5394691 - DNA, 25 bp, Homo sapien
gactctcgggcttgggtttacaatg

SEQ ID NO: 5394692 - DNA, 25 bp, Homo sapien
tcacagctatctgaatacgctttgg

SEQ ID NO: 5394693 - DNA, 25 bp, Homo sapien
aagtgattttcacgctattgctaga

SEQ ID NO: 5394694 - DNA, 25 bp, Homo sapien
cgctttggttacttcccttggctct

SEQ ID NO: 5394695 - DNA, 25 bp, Homo sapien
ttccaacgggtcaacattttctgcc

SEQ ID NO: 5394696 - DNA, 25 bp, Homo sapien
gacatcatcatttcaaggcgagcta

SEQ ID NO: 5394697 - DNA, 25 bp, Homo sapien
tcatgtggacgtggtgatacaacac

SEQ ID NO: 5394698 - DNA, 25 bp, Homo sapien
cacagactagcattaggcctctcaa

SEQ ID NO: 5394699 - DNA, 25 bp, Homo sapien
gaagagcccaatagcagtagtctgc

SEQ ID NO: 5394700 - DNA, 25 bp, Homo sapien
taaacttctaccattcaccagctgc

SEQ ID NO: 5394701 - DNA, 25 bp, Homo sapien
caaagattattaaactcgcacaggg

SEQ ID NO: 5394702 - DNA, 25 bp, Homo sapien
caaaggctagaatctggctgccaac

SEQ ID NO: 5394703 - DNA, 25 bp, Homo sapien
aaccagttaaccattccaaggccag

SEQ ID NO: 5394704 - DNA, 25 bp, Homo sapien
cttaacgcggagaacctggagctcg

SEQ ID NO: 5394705 - DNA, 25 bp, Homo sapien
tagaattcgcggacagaagcgcaca

SEQ ID NO: 5394706 - DNA, 25 bp, Homo sapien
caaaagctcgcagttgagggccatc

SEQ ID NO: 5394707 - DNA, 25 bp, Homo sapien
ttaacctgggagctaagttgagggc

SEQ ID NO: 5394708 - DNA, 25 bp, Homo sapien
ttatctgcaagcatcgcccagcagg

SEQ ID NO: 5394709 - DNA, 25 bp, Homo sapien
atctgcaagcatcgcccagcaggaa

SEQ ID NO: 5394710 - DNA, 25 bp, Homo sapien
tatctgcaagcatcgcccagcagga

SEQ ID NO: 5394711 - DNA, 25 bp, Homo sapien
caataatcccgagagagtgagtaag

SEQ ID NO: 5394712 - DNA, 25 bp, Homo sapien
caatcggcaataatcccgagagagt

SEQ ID NO: 5394713 - DNA, 25 bp, Homo sapien
gtaaggcgaggagaaactcggacat

SEQ ID NO: 5394714 - DNA, 25 bp, Homo sapien
tcagcaccctggcaatcggcaataa

SEQ ID NO: 5394715 - DNA, 25 bp, Homo sapien
aggaagcctgcgctggagactgctc

SEQ ID NO: 5394716 - DNA, 25 bp, Homo sapien
tcgcccggtaaggaagcctgcgctg

SEQ ID NO: 5394717 - DNA, 25 bp, Homo sapien
taaggaagcctgcgctggagactgc

SEQ ID NO: 5394718 - DNA, 25 bp, Homo sapien
tgtggtcgcccggtaaggaagcctg

SEQ ID NO: 5394719 - DNA, 25 bp, Homo sapien
cttggagcctggaatcgagcggcgt

SEQ ID NO: 5394720 - DNA, 25 bp, Homo sapien
ctggaatcgagcggcgtcatttaca

SEQ ID NO: 5394721 - DNA, 25 bp, Homo sapien
ggagcctggaatcgagcggcgtcat

SEQ ID NO: 5394722 - DNA, 25 bp, Homo sapien
atcgagcggcgtcatttacaaatgt

SEQ ID NO: 5394723 - DNA, 25 bp, Homo sapien
ggaaagtaactcgaagctggttctg

SEQ ID NO: 5394724 - DNA, 25 bp, Homo sapien
gaaatggtttcctcggctctacaca

SEQ ID NO: 5394725 - DNA, 25 bp, Homo sapien
tcaatgagtccagccagtcagcctt

SEQ ID NO: 5394726 - DNA, 25 bp, Homo sapien
tctgatcttacatcacgcaagaggg

SEQ ID NO: 5394727 - DNA, 25 bp, Homo sapien
ccccaggcagggaacaataaagcaa

SEQ ID NO: 5394728 - DNA, 25 bp, Homo sapien
caataaagcaacgaattggcagcgt

SEQ ID NO: 5394729 - DNA, 25 bp, Homo sapien
gaaaaggctattgaggtccccaggc

SEQ ID NO: 5394730 - DNA, 25 bp, Homo sapien
tcattaaccgttgcgtaagaaggga

SEQ ID NO: 5394731 - DNA, 25 bp, Homo sapien
tctgaaagattaccaccaatcgccc

SEQ ID NO: 5394732 - DNA, 25 bp, Homo sapien
gattaccaccaatcgccctccactt

SEQ ID NO: 5394733 - DNA, 25 bp, Homo sapien
cttctgaaagattaccaccaatcgc

SEQ ID NO: 5394734 - DNA, 25 bp, Homo sapien
tgaaagattaccaccaatcgccctc

SEQ ID NO: 5394735 - DNA, 25 bp, Homo sapien
aagagcatcttgcttaattcacact

SEQ ID NO: 5394736 - DNA, 25 bp, Homo sapien
cttcaaagagcatcttgcttaattc

SEQ ID NO: 5394737 - DNA, 25 bp, Homo sapien
caaagagcatcttgcttaattcaca

SEQ ID NO: 5394738 - DNA, 25 bp, Homo sapien
ttaattcacactcagaattgctttc

SEQ ID NO: 5394739 - DNA, 25 bp, Homo sapien
tagtggtgaacaagctaatgaaggc

SEQ ID NO: 5394740 - DNA, 25 bp, Homo sapien
gacatgcagatgtcccaagtatcca

SEQ ID NO: 5394741 - DNA, 25 bp, Homo sapien
ggattcgatcgtaccgacatgcaga

SEQ ID NO: 5394742 - DNA, 25 bp, Homo sapien
ctttatattgtaaacaggctgtagg

SEQ ID NO: 5394743 - DNA, 25 bp, Homo sapien
tcttagatttcttgggttttatgag

SEQ ID NO: 5394744 - DNA, 25 bp, Homo sapien
ctatcttagatttcttgggttttat

SEQ ID NO: 5394745 - DNA, 25 bp, Homo sapien
tcctggcagtttgatggcaaggtgt

SEQ ID NO: 5394746 - DNA, 25 bp, Homo sapien
cttagatttcttgggttttatgagc

SEQ ID NO: 5394747 - DNA, 25 bp, Homo sapien
ctgaaagtctacattcacacttcca

SEQ ID NO: 5394748 - DNA, 25 bp, Homo sapien
aagtctacattcacacttccatata

SEQ ID NO: 5394749 - DNA, 25 bp, Homo sapien
gaaagtctacattcacacttccata

SEQ ID NO: 5394750 - DNA, 25 bp, Homo sapien
tctacattcacacttccatatatac

SEQ ID NO: 5394751 - DNA, 25 bp, Homo sapien
atctcatctctcatttctccatttc

SEQ ID NO: 5394752 - DNA, 25 bp, Homo sapien
tcatctctcatttctccatttccca

SEQ ID NO: 5394753 - DNA, 25 bp, Homo sapien
catctctcatttctccatttcccat

SEQ ID NO: 5394754 - DNA, 25 bp, Homo sapien
cttcttggatctcatctctcatttc

SEQ ID NO: 5394755 - DNA, 25 bp, Homo sapien
cttagcattgatacccttgagtggc

SEQ ID NO: 5394756 - DNA, 25 bp, Homo sapien
ggagcagataaagcaccacggcctt

SEQ ID NO: 5394757 - DNA, 25 bp, Homo sapien
ttgatacccttgagtggcactggag

SEQ ID NO: 5394758 - DNA, 25 bp, Homo sapien
agatatgactgaaggggaacttgca

SEQ ID NO: 5394759 - DNA, 25 bp, Homo sapien
aaagctggtctggacaatttctgac

SEQ ID NO: 5394760 - DNA, 25 bp, Homo sapien
aatgactggtttgattagactcttt

SEQ ID NO: 5394761 - DNA, 25 bp, Homo sapien
gactggtttgattagactcttttat

SEQ ID NO: 5394762 - DNA, 25 bp, Homo sapien
gctggtctggacaatttctgactgt

SEQ ID NO: 5394763 - DNA, 25 bp, Homo sapien
tctctctttggatgttgctgccacg

SEQ ID NO: 5394764 - DNA, 25 bp, Homo sapien
gaagcttggcctgtacttgtagtta

SEQ ID NO: 5394765 - DNA, 25 bp, Homo sapien
gttaacctcaacactggcaatcctc

SEQ ID NO: 5394766 - DNA, 25 bp, Homo sapien
gctgccacgacacctaatgtgaagc

SEQ ID NO: 5394767 - DNA, 25 bp, Homo sapien
agtgaggagttggagattcctcatt

SEQ ID NO: 5394768 - DNA, 25 bp, Homo sapien
gagtgaggagttggagattcctcat

SEQ ID NO: 5394769 - DNA, 25 bp, Homo sapien
gtgaggagttggagattcctcattc

SEQ ID NO: 5394770 - DNA, 25 bp, Homo sapien
gaagtttgtctttatctgcgctttt

SEQ ID NO: 5394771 - DNA, 25 bp, Homo sapien
gaccgaatagtaagattccagattt

SEQ ID NO: 5394772 - DNA, 25 bp, Homo sapien
tatactttactatagccgtgaccga

SEQ ID NO: 5394773 - DNA, 25 bp, Homo sapien
gaggatagtttttgacaaatgattg

SEQ ID NO: 5394774 - DNA, 25 bp, Homo sapien
gttagagggattcttgagcgccatc

SEQ ID NO: 5394775 - DNA, 25 bp, Homo sapien
acacctctgttggaaagtgctttca

SEQ ID NO: 5394776 - DNA, 25 bp, Homo sapien
tgtggtcccggttgacctccaagga

SEQ ID NO: 5394777 - DNA, 25 bp, Homo sapien
agtgctttcactaaatctcatcaaa

SEQ ID NO: 5394778 - DNA, 25 bp, Homo sapien
agattagtccactaatgcaggccag

SEQ ID NO: 5394779 - DNA, 25 bp, Homo sapien
actaatgcaggccagtggactatct

SEQ ID NO: 5394780 - DNA, 25 bp, Homo sapien
tagtccactaatgcaggccagtgga

SEQ ID NO: 5394781 - DNA, 25 bp, Homo sapien
taatgcaggccagtggactatcttc

SEQ ID NO: 5394782 - DNA, 25 bp, Homo sapien
ctctctccagatcagcaggtgtagg

SEQ ID NO: 5394783 - DNA, 25 bp, Homo sapien
agatcagcaggtgtagggatttcag

SEQ ID NO: 5394784 - DNA, 25 bp, Homo sapien
gcatggccaggacagggtggagaca

SEQ ID NO: 5394785 - DNA, 25 bp, Homo sapien
acagggtggagacagcagaacatcc

SEQ ID NO: 5394786 - DNA, 25 bp, Homo sapien
agaaagcatggccaggacagggtgg

SEQ ID NO: 5394787 - DNA, 25 bp, Homo sapien
cagggtggagacagcagaacatcca

SEQ ID NO: 5394788 - DNA, 25 bp, Homo sapien
ctgataccagactaccaggagatct

SEQ ID NO: 5394789 - DNA, 25 bp, Homo sapien
ataccagactaccaggagatcttct

SEQ ID NO: 5394790 - DNA, 25 bp, Homo sapien
tgataccagactaccaggagatctt

SEQ ID NO: 5394791 - DNA, 25 bp, Homo sapien
gataccagactaccaggagatcttc

SEQ ID NO: 5394792 - DNA, 25 bp, Homo sapien
ggtgttcacggcaaatgtctcttat

SEQ ID NO: 5394793 - DNA, 25 bp, Homo sapien
tggtcttaaggtgttcacggcaaat

SEQ ID NO: 5394794 - DNA, 25 bp, Homo sapien
ttaaggtgttcacggcaaatgtctc

SEQ ID NO: 5394795 - DNA, 25 bp, Homo sapien
tataatgcattcataaagtttggtc

SEQ ID NO: 5394796 - DNA, 25 bp, Homo sapien
taaggagcagtttcctgtaacgtct

SEQ ID NO: 5394797 - DNA, 25 bp, Homo sapien
acgtcttgcaacgtgcttggatgcc

SEQ ID NO: 5394798 - DNA, 25 bp, Homo sapien
catatttaaggagcagtttcctgta

SEQ ID NO: 5394799 - DNA, 25 bp, Homo sapien
cagtttcctgtaacgtcttgcaacg

SEQ ID NO: 5394800 - DNA, 25 bp, Homo sapien
cataggaagcactattttctaattt

SEQ ID NO: 5394801 - DNA, 25 bp, Homo sapien
gcataggaagcactattttctaatt

SEQ ID NO: 5394802 - DNA, 25 bp, Homo sapien
tttctttagcataggaagcactatt

SEQ ID NO: 5394803 - DNA, 25 bp, Homo sapien
gctccaacagctggtgtgaacattc

SEQ ID NO: 5394804 - DNA, 25 bp, Homo sapien
acattctgaagccaattagctcatg

SEQ ID NO: 5394805 - DNA, 25 bp, Homo sapien
tagcagagtcccagatagtcagcga

SEQ ID NO: 5394806 - DNA, 25 bp, Homo sapien
tagtcagcgaccctgcagcaatgat

SEQ ID NO: 5394807 - DNA, 25 bp, Homo sapien
tgcatttgaaataaggatgctgcag

SEQ ID NO: 5394808 - DNA, 25 bp, Homo sapien
gctacattctcgcagacatggtctg

SEQ ID NO: 5394809 - DNA, 25 bp, Homo sapien
aataaggatgctgcagttagatcta

SEQ ID NO: 5394810 - DNA, 25 bp, Homo sapien
gtttacaattacagatctctgctac

SEQ ID NO: 5394811 - DNA, 25 bp, Homo sapien
cgtggaacgggtattgcaaagccac

SEQ ID NO: 5394812 - DNA, 25 bp, Homo sapien
gggtcctgcagacatttgctcccgg

SEQ ID NO: 5394813 - DNA, 25 bp, Homo sapien
gtattgcaaagccaccggtgcaggg

SEQ ID NO: 5394814 - DNA, 25 bp, Homo sapien
cagacatttgctcccggtactgctg

SEQ ID NO: 5394815 - DNA, 25 bp, Homo sapien
tctccccacctttatggagacgtgc

SEQ ID NO: 5394816 - DNA, 25 bp, Homo sapien
tagcactgtcactacccaacacttt

SEQ ID NO: 5394817 - DNA, 25 bp, Homo sapien
tttttagcactgtcactacccaaca

SEQ ID NO: 5394818 - DNA, 25 bp, Homo sapien
ctctgctcccctcagagattggctt

SEQ ID NO: 5394819 - DNA, 25 bp, Homo sapien
taaatttgacactgtttaacattgt

SEQ ID NO: 5394820 - DNA, 25 bp, Homo sapien
ctaaatttgacactgtttaacattg

SEQ ID NO: 5394821 - DNA, 25 bp, Homo sapien
ttctctgtacaatctgtgggagtgg

SEQ ID NO: 5394822 - DNA, 25 bp, Homo sapien
ttttctctgtacaatctgtgggagt

SEQ ID NO: 5394823 - DNA, 25 bp, Homo sapien
tctgtacaatctgtgggagtgggct

SEQ ID NO: 5394824 - DNA, 25 bp, Homo sapien
ggagtgggctggaagtacccaccat

SEQ ID NO: 5394825 - DNA, 25 bp, Homo sapien
tacgtcctgtgaattgtagcctttg

SEQ ID NO: 5394826 - DNA, 25 bp, Homo sapien
tgtgtacgtcctgtgaattgtagcc

SEQ ID NO: 5394827 - DNA, 25 bp, Homo sapien
gggaaatctgtgtacgtcctgtgaa

SEQ ID NO: 5394828 - DNA, 25 bp, Homo sapien
attccttatttgctcccataaaaat

SEQ ID NO: 5394829 - DNA, 25 bp, Homo sapien
aagatctttaactgaggtccacgca

SEQ ID NO: 5394830 - DNA, 25 bp, Homo sapien
ggagggtaatctactgtattcagtc

SEQ ID NO: 5394831 - DNA, 25 bp, Homo sapien
gagctgcagccttaaatccctgggc

SEQ ID NO: 5394832 - DNA, 25 bp, Homo sapien
gggctcaaaagattgtcccacgtca

SEQ ID NO: 5394833 - DNA, 25 bp, Homo sapien
gacgttgttgtccagcaggctcatt

SEQ ID NO: 5394834 - DNA, 25 bp, Homo sapien
gtctttttatgaagaggttgcattt

SEQ ID NO: 5394835 - DNA, 25 bp, Homo sapien
tcctttgtggcaggacgttgttgtc

SEQ ID NO: 5394836 - DNA, 25 bp, Homo sapien
tgtggcaggacgttgttgtccagca

SEQ ID NO: 5394837 - DNA, 25 bp, Homo sapien
caataaaggccaacgtcctcaagct

SEQ ID NO: 5394838 - DNA, 25 bp, Homo sapien
taaggccctattcaagtggctcctg

SEQ ID NO: 5394839 - DNA, 25 bp, Homo sapien
tacttatagggagtttcagccaaac

SEQ ID NO: 5394840 - DNA, 25 bp, Homo sapien
ggcagttatcttaaggtgcagacct

SEQ ID NO: 5394841 - DNA, 25 bp, Homo sapien
tggacaggtgccgaattacctccat

SEQ ID NO: 5394842 - DNA, 25 bp, Homo sapien
ttctgtggacaggtgccgaattacc

SEQ ID NO: 5394843 - DNA, 25 bp, Homo sapien
tctgtggacaggtgccgaattacct

SEQ ID NO: 5394844 - DNA, 25 bp, Homo sapien
tgtggacaggtgccgaattacctcc

SEQ ID NO: 5394845 - DNA, 25 bp, Homo sapien
ctggggaatttctgtgttgaggaac

SEQ ID NO: 5394846 - DNA, 25 bp, Homo sapien
cattcagctggggaatttctgtgtt

SEQ ID NO: 5394847 - DNA, 25 bp, Homo sapien
tcacaattggcgcctttggcacttc

SEQ ID NO: 5394848 - DNA, 25 bp, Homo sapien
aaatacagggtgtttggcattcagc

SEQ ID NO: 5394849 - DNA, 25 bp, Homo sapien
tccatcagaccagacgcactctttt

SEQ ID NO: 5394850 - DNA, 25 bp, Homo sapien
tccaataaaactgtcagagttaggc

SEQ ID NO: 5394851 - DNA, 25 bp, Homo sapien
gccgtcttctttgggagctcatggg

SEQ ID NO: 5394852 - DNA, 25 bp, Homo sapien
ctcggtgcaaccaacactggctgtc

SEQ ID NO: 5394853 - DNA, 25 bp, Homo sapien
catcctcctcaaatgattcattcat

SEQ ID NO: 5394854 - DNA, 25 bp, Homo sapien
ttgtgtgcctttttctctaactcca

SEQ ID NO: 5394855 - DNA, 25 bp, Homo sapien
gtgtgcctttttctctaactccaca

SEQ ID NO: 5394856 - DNA, 25 bp, Homo sapien
tccacatcctcctcaaatgattcat

SEQ ID NO: 5394857 - DNA, 25 bp, Homo sapien
cagataaaaacaatagagcaaagtc

SEQ ID NO: 5394858 - DNA, 25 bp, Homo sapien
gccaatgaatttgacatcttagata

SEQ ID NO: 5394859 - DNA, 25 bp, Homo sapien
gaaaactccatccagactaatcaga

SEQ ID NO: 5394860 - DNA, 25 bp, Homo sapien
aaaagtttcagcttagcttctacct

SEQ ID NO: 5394861 - DNA, 25 bp, Homo sapien
gtggatggctcatggactataaatg

SEQ ID NO: 5394862 - DNA, 25 bp, Homo sapien
taaaacccattatgctgcagtgcac

SEQ ID NO: 5394863 - DNA, 25 bp, Homo sapien
tagccttttcgaataattgtgacca

SEQ ID NO: 5394864 - DNA, 25 bp, Homo sapien
gcagttctttccaagttataagtaa

SEQ ID NO: 5394865 - DNA, 25 bp, Homo sapien
tcaaaggtttatgccaaaaccataa

SEQ ID NO: 5394866 - DNA, 25 bp, Homo sapien
caagaatcttgggtaactgtgaggt

SEQ ID NO: 5394867 - DNA, 25 bp, Homo sapien
tcttgggtaactgtgaggttgttca

SEQ ID NO: 5394868 - DNA, 25 bp, Homo sapien
tgaggttgttcagtataccagcact

SEQ ID NO: 5394869 - DNA, 25 bp, Homo sapien
gaatcttgggtaactgtgaggttgt

SEQ ID NO: 5394870 - DNA, 25 bp, Homo sapien
aatgcttactatcatctgagccctt

SEQ ID NO: 5394871 - DNA, 25 bp, Homo sapien
tgcttactatcatctgagcccttca

SEQ ID NO: 5394872 - DNA, 25 bp, Homo sapien
aaatgcttactatcatctgagccct

SEQ ID NO: 5394873 - DNA, 25 bp, Homo sapien
cttactatcatctgagcccttcagc

SEQ ID NO: 5394874 - DNA, 25 bp, Homo sapien
cctttgacccacacaggcattttta

SEQ ID NO: 5394875 - DNA, 25 bp, Homo sapien
gaacatcttcatagtcttacctaca

SEQ ID NO: 5394876 - DNA, 25 bp, Homo sapien
cagaaaagccgttgttcacaaaaag

SEQ ID NO: 5394877 - DNA, 25 bp, Homo sapien
ttagcatagatgattcctttgaccc

SEQ ID NO: 5394878 - DNA, 25 bp, Homo sapien
tgctgaacagaaaagtcgacgccgt

SEQ ID NO: 5394879 - DNA, 25 bp, Homo sapien
gccgtgatgactgcctgctgaacag

SEQ ID NO: 5394880 - DNA, 25 bp, Homo sapien
aaagtcgacgccgttgtctctgctc

SEQ ID NO: 5394881 - DNA, 25 bp, Homo sapien
tctcagggtgttcatagtatagtgg

SEQ ID NO: 5394882 - DNA, 25 bp, Homo sapien
tttagtgggaatagcatttaatatg

SEQ ID NO: 5394883 - DNA, 25 bp, Homo sapien
gtatttagtgggaatagcatttaat

SEQ ID NO: 5394884 - DNA, 25 bp, Homo sapien
tagtgggaatagcatttaatatgta

SEQ ID NO: 5394885 - DNA, 25 bp, Homo sapien
agaatgtcaatggtatttagtggga

SEQ ID NO: 5394886 - DNA, 25 bp, Homo sapien
cttttttctcacaagttctatccat

SEQ ID NO: 5394887 - DNA, 25 bp, Homo sapien
tctctccaggacttttttctcacaa

SEQ ID NO: 5394888 - DNA, 25 bp, Homo sapien
ttctgaagtttcctctctccaggac

SEQ ID NO: 5394889 - DNA, 25 bp, Homo sapien
tctgaagtttcctctctccaggact

SEQ ID NO: 5394890 - DNA, 25 bp, Homo sapien
cagggtgaattgatcaacagagttc

SEQ ID NO: 5394891 - DNA, 25 bp, Homo sapien
tgggcctgagacacatgtgtcctca

SEQ ID NO: 5394892 - DNA, 25 bp, Homo sapien
tatgtggcaatgactgaaaatgaac

SEQ ID NO: 5394893 - DNA, 25 bp, Homo sapien
cagggtatctaaaccccaagtatca

SEQ ID NO: 5394894 - DNA, 25 bp, Homo sapien
tcctctccaactgccgccccccaaa

SEQ ID NO: 5394895 - DNA, 25 bp, Homo sapien
caaccgggagtggagtgatgggcat

SEQ ID NO: 5394896 - DNA, 25 bp, Homo sapien
agctacaaacctgaaggcaaccggg

SEQ ID NO: 5394897 - DNA, 25 bp, Homo sapien
gcagctacaaacctgaaggcaaccg

SEQ ID NO: 5394898 - DNA, 25 bp, Homo sapien
ctacaaacctgaaggcaaccgggag

SEQ ID NO: 5394899 - DNA, 25 bp, Homo sapien
tcacttaagagaaaccttcatcaaa

SEQ ID NO: 5394900 - DNA, 25 bp, Homo sapien
acacagcctaaagtaacagaagacc

SEQ ID NO: 5394901 - DNA, 25 bp, Homo sapien
tgtggaatcatcaggactaaaatgt

SEQ ID NO: 5394902 - DNA, 25 bp, Homo sapien
tgtagcaggatttaagactggaagt

SEQ ID NO: 5394903 - DNA, 25 bp, Homo sapien
gagacttcgatgaaatattccaaag

SEQ ID NO: 5394904 - DNA, 25 bp, Homo sapien
tacagactagaaggaattgcagtac

SEQ ID NO: 5394905 - DNA, 25 bp, Homo sapien
ttcttcacctataatgagacttcga

SEQ ID NO: 5394906 - DNA, 25 bp, Homo sapien
gttatatctctgcatgtgcatccga

SEQ ID NO: 5394907 - DNA, 25 bp, Homo sapien
gattcaaacataaaggatgaccaga

SEQ ID NO: 5394908 - DNA, 25 bp, Homo sapien
gacagaagtcttgccgaaggacaaa

SEQ ID NO: 5394909 - DNA, 25 bp, Homo sapien
gctcttctatcatgtacttggcaaa

SEQ ID NO: 5394910 - DNA, 25 bp, Homo sapien
ttagcccaagtctcagcataattgc

SEQ ID NO: 5394911 - DNA, 25 bp, Homo sapien
tcatctgtgaaaagtattggaaagt

SEQ ID NO: 5394912 - DNA, 25 bp, Homo sapien
ctcctgatgtgatagaccagtatct

SEQ ID NO: 5394913 - DNA, 25 bp, Homo sapien
tgtagtaagttgaaggtaagctacc

SEQ ID NO: 5394914 - DNA, 25 bp, Homo sapien
tatgcctatattagagtcctacacc

SEQ ID NO: 5394915 - DNA, 25 bp, Homo sapien
caaggtgaggcaaagttctttgaaa

SEQ ID NO: 5394916 - DNA, 25 bp, Homo sapien
tgtagacttcgataggtctctctgg

SEQ ID NO: 5394917 - DNA, 25 bp, Homo sapien
tgctgtagttcctcctattatcaac

SEQ ID NO: 5394918 - DNA, 25 bp, Homo sapien
tctggtggtctggtcatctgtgaat

SEQ ID NO: 5394919 - DNA, 25 bp, Homo sapien
aatgatggctgcattactactccca

SEQ ID NO: 5394920 - DNA, 25 bp, Homo sapien
agcaatgatggctgcattactactc

SEQ ID NO: 5394921 - DNA, 25 bp, Homo sapien
caatgatggctgcattactactccc

SEQ ID NO: 5394922 - DNA, 25 bp, Homo sapien
gatggctgcattactactcccatcc

SEQ ID NO: 5394923 - DNA, 25 bp, Homo sapien
gagaattccagcaggaagtactcat

SEQ ID NO: 5394924 - DNA, 25 bp, Homo sapien
aacacagctgcaaaccactggagag

SEQ ID NO: 5394925 - DNA, 25 bp, Homo sapien
aattaagagcttgcaagcctccgtg

SEQ ID NO: 5394926 - DNA, 25 bp, Homo sapien
gcctccgtgtgcttgggaaacacag

SEQ ID NO: 5394927 - DNA, 25 bp, Homo sapien
cagatctttagtcatacccaggagg

SEQ ID NO: 5394928 - DNA, 25 bp, Homo sapien
tgatcaaaatctgagcttgctaggc

SEQ ID NO: 5394929 - DNA, 25 bp, Homo sapien
gaaaggattcaaggtgagtccataa

SEQ ID NO: 5394930 - DNA, 25 bp, Homo sapien
tatggtggtttatacctgcaatacc

SEQ ID NO: 5394931 - DNA, 25 bp, Homo sapien
cttttcctcgtgcatatttttcatc

SEQ ID NO: 5394932 - DNA, 25 bp, Homo sapien
ttcaggcaatcttttcctcgtgcat

SEQ ID NO: 5394933 - DNA, 25 bp, Homo sapien
atcttttcctcgtgcatatttttca

SEQ ID NO: 5394934 - DNA, 25 bp, Homo sapien
aggcaatcttttcctcgtgcatatt

SEQ ID NO: 5394935 - DNA, 25 bp, Homo sapien
gcaggaatgtgtgtacaaggagttc

SEQ ID NO: 5394936 - DNA, 25 bp, Homo sapien
caatggaccccagtagacttccgac

SEQ ID NO: 5394937 - DNA, 25 bp, Homo sapien
gacttccgacttggatttgcagcag

SEQ ID NO: 5394938 - DNA, 25 bp, Homo sapien
gattccgttgaagcaagtcgctgtg

SEQ ID NO: 5394939 - DNA, 25 bp, Homo sapien
ctcaaagagatcaagttgtgatgaa

SEQ ID NO: 5394940 - DNA, 25 bp, Homo sapien
gatgaaatcttgtggtgtaagccag

SEQ ID NO: 5394941 - DNA, 25 bp, Homo sapien
aagagatcaagttgtgatgaaatct

SEQ ID NO: 5394942 - DNA, 25 bp, Homo sapien
aatcttgtggtgtaagccagatgct

SEQ ID NO: 5394943 - DNA, 25 bp, Homo sapien
gtgtcttgcttggaataattaagct

SEQ ID NO: 5394944 - DNA, 25 bp, Homo sapien
tcttgcttggaataattaagctaca

SEQ ID NO: 5394945 - DNA, 25 bp, Homo sapien
ttcagtgtcttgcttggaataatta

SEQ ID NO: 5394946 - DNA, 25 bp, Homo sapien
atgtttatggggtcgtgcagaccca

SEQ ID NO: 5394947 - DNA, 25 bp, Homo sapien
ccaatatttttcgttcctgtgacca

SEQ ID NO: 5394948 - DNA, 25 bp, Homo sapien
gtgaccaatggatagctcttatcct

SEQ ID NO: 5394949 - DNA, 25 bp, Homo sapien
tgcaccaatatttttcgttcctgtg

SEQ ID NO: 5394950 - DNA, 25 bp, Homo sapien
tatttttcgttcctgtgaccaatgg

SEQ ID NO: 5394951 - DNA, 25 bp, Homo sapien
taggcatgggggcatgagttagcag

SEQ ID NO: 5394952 - DNA, 25 bp, Homo sapien
ggaaagccatgttattaggcatggg

SEQ ID NO: 5394953 - DNA, 25 bp, Homo sapien
atgagttagcagttcttgcatactt

SEQ ID NO: 5394954 - DNA, 25 bp, Homo sapien
agttagcagttcttgcatactttct

SEQ ID NO: 5394955 - DNA, 25 bp, Homo sapien
atctaatgttttggttaaactatat

SEQ ID NO: 5394956 - DNA, 25 bp, Homo sapien
ggtagataagaagttacaggcttct

SEQ ID NO: 5394957 - DNA, 25 bp, Homo sapien
tagattcacaatctaatgttttggt

SEQ ID NO: 5394958 - DNA, 25 bp, Homo sapien
acaggcttctattattagattcaca

SEQ ID NO: 5394959 - DNA, 25 bp, Homo sapien
tatggtctatcataatctaatgagt

SEQ ID NO: 5394960 - DNA, 25 bp, Homo sapien
tctaatgagtcaaaatcattcattt

SEQ ID NO: 5394961 - DNA, 25 bp, Homo sapien
taatgagtcaaaatcattcatttta

SEQ ID NO: 5394962 - DNA, 25 bp, Homo sapien
tgagtcaaaatcattcattttaatt

SEQ ID NO: 5394963 - DNA, 25 bp, Homo sapien
tttggatattatagaaacttattga

SEQ ID NO: 5394964 - DNA, 25 bp, Homo sapien
gatattatagaaacttattgattgg

SEQ ID NO: 5394965 - DNA, 25 bp, Homo sapien
atagaaacttattgattggaaatca

SEQ ID NO: 5394966 - DNA, 25 bp, Homo sapien
tactcttttttggatattatagaaa

SEQ ID NO: 5394967 - DNA, 25 bp, Homo sapien
actgtagagaggtgtagatcatctc

SEQ ID NO: 5394968 - DNA, 25 bp, Homo sapien
tgtagatcatctcagtctttaactt

SEQ ID NO: 5394969 - DNA, 25 bp, Homo sapien
tagagaggtgtagatcatctcagtc

SEQ ID NO: 5394970 - DNA, 25 bp, Homo sapien
gttaatgctggataactttacagtg

SEQ ID NO: 5394971 - DNA, 25 bp, Homo sapien
catgggagcatctcaagcgtagcca

SEQ ID NO: 5394972 - DNA, 25 bp, Homo sapien
ccaaagtcaatatgcagagtgtcct

SEQ ID NO: 5394973 - DNA, 25 bp, Homo sapien
gccacagggtgtgttcgacgagcat

SEQ ID NO: 5394974 - DNA, 25 bp, Homo sapien
ttccccagatgctcagatggcggcg

SEQ ID NO: 5394975 - DNA, 25 bp, Homo sapien
tcattcaccagtgctctgtatgcct

SEQ ID NO: 5394976 - DNA, 25 bp, Homo sapien
cattcaccagtgctctgtatgcctc

SEQ ID NO: 5394977 - DNA, 25 bp, Homo sapien
cacttccacctgagtttaatgccat

SEQ ID NO: 5394978 - DNA, 25 bp, Homo sapien
caggtatctgcacacctttgcattg

SEQ ID NO: 5394979 - DNA, 25 bp, Homo sapien
gccagaaatgtccaacctgcactga

SEQ ID NO: 5394980 - DNA, 25 bp, Homo sapien
cctgcactgacttagctctgatgta

SEQ ID NO: 5394981 - DNA, 25 bp, Homo sapien
ccaaaactctaaccttgttagcatc

SEQ ID NO: 5394982 - DNA, 25 bp, Homo sapien
tttccataataacaaccccttcaga

SEQ ID NO: 5394983 - DNA, 25 bp, Homo sapien
atttgaatccaaaactctaaccttg

SEQ ID NO: 5394984 - DNA, 25 bp, Homo sapien
catctggacttatttccataataac

SEQ ID NO: 5394985 - DNA, 25 bp, Homo sapien
ttatgtaacggttcctgtaatacag

SEQ ID NO: 5394986 - DNA, 25 bp, Homo sapien
cacacggtgtttgatgcaggcgaac

SEQ ID NO: 5394987 - DNA, 25 bp, Homo sapien
gtgagcgctgattatcccgaagtca

SEQ ID NO: 5394988 - DNA, 25 bp, Homo sapien
cactgtcagctaggattgattttca

SEQ ID NO: 5394989 - DNA, 25 bp, Homo sapien
gggcagagcagtactagagattaca

SEQ ID NO: 5394990 - DNA, 25 bp, Homo sapien
tttctgtagttcatgtacagagacg

SEQ ID NO: 5394991 - DNA, 25 bp, Homo sapien
gagacgaaggcacactgttcctctg

SEQ ID NO: 5394992 - DNA, 25 bp, Homo sapien
tgttcctctgtcgagttcactgcag

SEQ ID NO: 5394993 - DNA, 25 bp, Homo sapien
ggctgctttatccttagcatttcag

SEQ ID NO: 5394994 - DNA, 25 bp, Homo sapien
agtaactggcaaatattcagggtgg

SEQ ID NO: 5394995 - DNA, 25 bp, Homo sapien
caaatgctaagttttgggacaggaa

SEQ ID NO: 5394996 - DNA, 25 bp, Homo sapien
gccttgtggttgtcagagatccctg

SEQ ID NO: 5394997 - DNA, 25 bp, Homo sapien
gaagaaattggcgtaagtaactggc

SEQ ID NO: 5394998 - DNA, 25 bp, Homo sapien
attttcacaatccaacccatttcag

SEQ ID NO: 5394999 - DNA, 25 bp, Homo sapien
ttcacaatccaacccatttcagtgt

SEQ ID NO: 5395000 - DNA, 25 bp, Homo sapien
tttcacaatccaacccatttcagtg

SEQ ID NO: 5395001 - DNA, 25 bp, Homo sapien
ttttcacaatccaacccatttcagt

SEQ ID NO: 5395002 - DNA, 25 bp, Homo sapien
gcttccagagtcatccaggagtcct

SEQ ID NO: 5395003 - DNA, 25 bp, Homo sapien
ctttctgcactctggtatgttccct

SEQ ID NO: 5395004 - DNA, 25 bp, Homo sapien
ccatgccttagggtggcttccagag

SEQ ID NO: 5395005 - DNA, 25 bp, Homo sapien
gagtcctggcagtagtttccttggc

SEQ ID NO: 5395006 - DNA, 25 bp, Homo sapien
caggatgagctatcatatatgaaat

SEQ ID NO: 5395007 - DNA, 25 bp, Homo sapien
ctttcctttggagttattatccatc

SEQ ID NO: 5395008 - DNA, 25 bp, Homo sapien
taatatacaggaaaatacttctgag

SEQ ID NO: 5395009 - DNA, 25 bp, Homo sapien
tctgagaattaatgacattctttcc

SEQ ID NO: 5395010 - DNA, 25 bp, Homo sapien
tcttgtcgtggaatggaggattcag

SEQ ID NO: 5395011 - DNA, 25 bp, Homo sapien
tccctgtcttgtcgtggaatggagg

SEQ ID NO: 5395012 - DNA, 25 bp, Homo sapien
tcattcatctgatggcagtcctttc

SEQ ID NO: 5395013 - DNA, 25 bp, Homo sapien
cattcatctgatggcagtcctttct

SEQ ID NO: 5395014 - DNA, 25 bp, Homo sapien
ttgagtttcaggctgttcatgggtg

SEQ ID NO: 5395015 - DNA, 25 bp, Homo sapien
tgggtgggcgtgtcaagaaggctct

SEQ ID NO: 5395016 - DNA, 25 bp, Homo sapien
ttagatcttgagtttcaggctgttc

SEQ ID NO: 5395017 - DNA, 25 bp, Homo sapien
ctgttcatgggtgggcgtgtcaaga

SEQ ID NO: 5395018 - DNA, 25 bp, Homo sapien
tgtgtaacgcgtgctgaggcaagat

SEQ ID NO: 5395019 - DNA, 25 bp, Homo sapien
caagatgcagtcagtacaaaggagt

SEQ ID NO: 5395020 - DNA, 25 bp, Homo sapien
cacagaactgttgcaccagctgcag

SEQ ID NO: 5395021 - DNA, 25 bp, Homo sapien
tagtaaaagatgtgtaacgcgtgct

SEQ ID NO: 5395022 - DNA, 25 bp, Homo sapien
taagaatatctaattcagcagagcc

SEQ ID NO: 5395023 - DNA, 25 bp, Homo sapien
taatccctgttagaagcagaactct

SEQ ID NO: 5395024 - DNA, 25 bp, Homo sapien
gagccaaagttgcaaaacccagaag

SEQ ID NO: 5395025 - DNA, 25 bp, Homo sapien
gaactctcccgtatcccaagaataa

SEQ ID NO: 5395026 - DNA, 25 bp, Homo sapien
tagacccacatattccacctactgg

SEQ ID NO: 5395027 - DNA, 25 bp, Homo sapien
gacccacatattccacctactggag

SEQ ID NO: 5395028 - DNA, 25 bp, Homo sapien
acatattccacctactggagacacc

SEQ ID NO: 5395029 - DNA, 25 bp, Homo sapien
ccacatattccacctactggagaca

SEQ ID NO: 5395030 - DNA, 25 bp, Homo sapien
gattgattagtttctaagcctgagg

SEQ ID NO: 5395031 - DNA, 25 bp, Homo sapien
gctggataatctttagattgattag

SEQ ID NO: 5395032 - DNA, 25 bp, Homo sapien
ggtaaaatgggccatgattccttct

SEQ ID NO: 5395033 - DNA, 25 bp, Homo sapien
tctcaccagcttctgtaggggcctt

SEQ ID NO: 5395034 - DNA, 25 bp, Homo sapien
aatgatcaggttccgaaaactcccg

SEQ ID NO: 5395035 - DNA, 25 bp, Homo sapien
aactcccgcgcaaatatcttatagc

SEQ ID NO: 5395036 - DNA, 25 bp, Homo sapien
taagttaagtctcagtctctatgcc

SEQ ID NO: 5395037 - DNA, 25 bp, Homo sapien
aatgaacctcaactgcagtcctgaa

SEQ ID NO: 5395038 - DNA, 25 bp, Homo sapien
catagagtacaccaagatcggtaaa

SEQ ID NO: 5395039 - DNA, 25 bp, Homo sapien
tatataactcactaggaatggagca

SEQ ID NO: 5395040 - DNA, 25 bp, Homo sapien
caggtggagagctaaatatataact

SEQ ID NO: 5395041 - DNA, 25 bp, Homo sapien
tgtctgtgttgtaccaccaaacatg

SEQ ID NO: 5395042 - DNA, 25 bp, Homo sapien
tttcattgaggggatgaaccacatc

SEQ ID NO: 5395043 - DNA, 25 bp, Homo sapien
gaatttcattgaggggatgaaccac

SEQ ID NO: 5395044 - DNA, 25 bp, Homo sapien
tggaatttcattgaggggatgaacc

SEQ ID NO: 5395045 - DNA, 25 bp, Homo sapien
cattgaggggatgaaccacatcccc

SEQ ID NO: 5395046 - DNA, 25 bp, Homo sapien
ggcttatatagtacccagaaggtca

SEQ ID NO: 5395047 - DNA, 25 bp, Homo sapien
tggatgccgtatgcacaaagtatgc

SEQ ID NO: 5395048 - DNA, 25 bp, Homo sapien
tttagtctaaaacagccgtaagcaa

SEQ ID NO: 5395049 - DNA, 25 bp, Homo sapien
gacatgctgtagctgtgaaggtcaa

SEQ ID NO: 5395050 - DNA, 25 bp, Homo sapien
catcagggaattgtccagcaaataa

SEQ ID NO: 5395051 - DNA, 25 bp, Homo sapien
tatatgtttttgataaggcacattc

SEQ ID NO: 5395052 - DNA, 25 bp, Homo sapien
aaataactgaagacctcaaagctga

SEQ ID NO: 5395053 - DNA, 25 bp, Homo sapien
tcttctactgggtgctttaatatca

SEQ ID NO: 5395054 - DNA, 25 bp, Homo sapien
tttctgtgctgttcacttgctctct

SEQ ID NO: 5395055 - DNA, 25 bp, Homo sapien
ttgagagttcccgtagcagaaaagg

SEQ ID NO: 5395056 - DNA, 25 bp, Homo sapien
tgctgtcttgtctgcgacttttctg

SEQ ID NO: 5395057 - DNA, 25 bp, Homo sapien
gctgaaagtgccatcgccggctgct

SEQ ID NO: 5395058 - DNA, 25 bp, Homo sapien
cctcctcagacaagagaaaagtcat

SEQ ID NO: 5395059 - DNA, 25 bp, Homo sapien
catcctcctcagacaagagaaaagt

SEQ ID NO: 5395060 - DNA, 25 bp, Homo sapien
gggccaccctggaaagtccttgcca

SEQ ID NO: 5395061 - DNA, 25 bp, Homo sapien
ggccaccctggaaagtccttgccat

SEQ ID NO: 5395062 - DNA, 25 bp, Homo sapien
actgggttaagagcttcctccaagc

SEQ ID NO: 5395063 - DNA, 25 bp, Homo sapien
gctaactccgcttgttgtaaatgca

SEQ ID NO: 5395064 - DNA, 25 bp, Homo sapien
cactcagttcataggcacagatgac

SEQ ID NO: 5395065 - DNA, 25 bp, Homo sapien
cagaaaacactgaggcacactcagt

SEQ ID NO: 5395066 - DNA, 25 bp, Homo sapien
tcactaggtggttctgtgaactggt

SEQ ID NO: 5395067 - DNA, 25 bp, Homo sapien
gaacaatttctaatgactgcattgg

SEQ ID NO: 5395068 - DNA, 25 bp, Homo sapien
gcacccagccagattaagaacaatt

SEQ ID NO: 5395069 - DNA, 25 bp, Homo sapien
tattgctcttggaattagagtccaa

SEQ ID NO: 5395070 - DNA, 25 bp, Homo sapien
gagtccaagtttctgtatagaaagc

SEQ ID NO: 5395071 - DNA, 25 bp, Homo sapien
gaattgagatccactttaggtatga

SEQ ID NO: 5395072 - DNA, 25 bp, Homo sapien
ggtatgacttacacacaagatttca

SEQ ID NO: 5395073 - DNA, 25 bp, Homo sapien
tctatatggaaagtgctggtctagg

SEQ ID NO: 5395074 - DNA, 25 bp, Homo sapien
ttaaagttatatatgtgccccacat

SEQ ID NO: 5395075 - DNA, 25 bp, Homo sapien
tagaatgatttcagtatatccatgg

SEQ ID NO: 5395076 - DNA, 25 bp, Homo sapien
tttattgtcattagtcacacaggac

SEQ ID NO: 5395077 - DNA, 25 bp, Homo sapien
gaaagagctcaacatgatttggcac

SEQ ID NO: 5395078 - DNA, 25 bp, Homo sapien
cagagaattctctttatcatcctca

SEQ ID NO: 5395079 - DNA, 25 bp, Homo sapien
gatctttagattctccccagagctg

SEQ ID NO: 5395080 - DNA, 25 bp, Homo sapien
ccagaggaagggcatagcccagggt

SEQ ID NO: 5395081 - DNA, 25 bp, Homo sapien
tgggggtaagaaggccatggcaaag

SEQ ID NO: 5395082 - DNA, 25 bp, Homo sapien
gaaggccatggcaaaggggtgaagc

SEQ ID NO: 5395083 - DNA, 25 bp, Homo sapien
ggaatgtgggggtaagaaggccatg

SEQ ID NO: 5395084 - DNA, 25 bp, Homo sapien
tgcccactctgacatagggagttat

SEQ ID NO: 5395085 - DNA, 25 bp, Homo sapien
cactctgacatagggagttatgtgc

SEQ ID NO: 5395086 - DNA, 25 bp, Homo sapien
tctgacatagggagttatgtgcaaa

SEQ ID NO: 5395087 - DNA, 25 bp, Homo sapien
cccactctgacatagggagttatgt

SEQ ID NO: 5395088 - DNA, 25 bp, Homo sapien
tgcaaatacaagctatcagccctag

SEQ ID NO: 5395089 - DNA, 25 bp, Homo sapien
cttatatagtgtcatgcaactgctg

SEQ ID NO: 5395090 - DNA, 25 bp, Homo sapien
tttatacataaatgggcatgagctc

SEQ ID NO: 5395091 - DNA, 25 bp, Homo sapien
tagctttgggtagagacatgctcca

SEQ ID NO: 5395092 - DNA, 25 bp, Homo sapien
gagtgaaactatgaaaactgaagac

SEQ ID NO: 5395093 - DNA, 25 bp, Homo sapien
cacagaagtactgtttagggttgag

SEQ ID NO: 5395094 - DNA, 25 bp, Homo sapien
tatgaaaactgaagacggccagaag

SEQ ID NO: 5395095 - DNA, 25 bp, Homo sapien
cagaagtactgtttagggttgagag

SEQ ID NO: 5395096 - DNA, 25 bp, Homo sapien
tgtgtcttaattcaaaaacataggc

SEQ ID NO: 5395097 - DNA, 25 bp, Homo sapien
gtatattctgtcgtgttttagcatt

SEQ ID NO: 5395098 - DNA, 25 bp, Homo sapien
ctgtcgtgttttagcattaggcgta

SEQ ID NO: 5395099 - DNA, 25 bp, Homo sapien
tagcattaggcgtattttttctgtg

SEQ ID NO: 5395100 - DNA, 25 bp, Homo sapien
ctgcctaatcgatgcctgagcgtca

SEQ ID NO: 5395101 - DNA, 25 bp, Homo sapien
tcagttttctcactctggggcgagg

SEQ ID NO: 5395102 - DNA, 25 bp, Homo sapien
tcatccctgcctaatcgatgcctga

SEQ ID NO: 5395103 - DNA, 25 bp, Homo sapien
ttttctcactctggggcgagggtcc

SEQ ID NO: 5395104 - DNA, 25 bp, Homo sapien
actaaagccaaatttgatgcttttg

SEQ ID NO: 5395105 - DNA, 25 bp, Homo sapien
catcaccactttccaggcatctacc

SEQ ID NO: 5395106 - DNA, 25 bp, Homo sapien
gaatagcactatccactttctggtt

SEQ ID NO: 5395107 - DNA, 25 bp, Homo sapien
tatcaccccctaggtaatctttcac

SEQ ID NO: 5395108 - DNA, 25 bp, Homo sapien
ttcaggcattgtgcctacttccttg

SEQ ID NO: 5395109 - DNA, 25 bp, Homo sapien
ttctttatcctgcaccaaggaagca

SEQ ID NO: 5395110 - DNA, 25 bp, Homo sapien
ctgtaaggacggaaaagttgctggc

SEQ ID NO: 5395111 - DNA, 25 bp, Homo sapien
ggaagcacctacagcaggtgcttga

SEQ ID NO: 5395112 - DNA, 25 bp, Homo sapien
ctttatcctgcaccaaggaagcacc

SEQ ID NO: 5395113 - DNA, 25 bp, Homo sapien
tatggtctcgtagatatctttatct

SEQ ID NO: 5395114 - DNA, 25 bp, Homo sapien
cacacgcatgtgcatttgttttaaa

SEQ ID NO: 5395115 - DNA, 25 bp, Homo sapien
tttatctacccagattttattggca

SEQ ID NO: 5395116 - DNA, 25 bp, Homo sapien
aggacaaccttctctacttgtgcaa

SEQ ID NO: 5395117 - DNA, 25 bp, Homo sapien
ctatggcttcagtgaagtaacataa

SEQ ID NO: 5395118 - DNA, 25 bp, Homo sapien
tatggcttcagtgaagtaacataaa

SEQ ID NO: 5395119 - DNA, 25 bp, Homo sapien
cactgagtcttactgagcccacttt

SEQ ID NO: 5395120 - DNA, 25 bp, Homo sapien
tgttctcagcgttatcatccccatc

SEQ ID NO: 5395121 - DNA, 25 bp, Homo sapien
gtcatactctatgcacacagccatc

SEQ ID NO: 5395122 - DNA, 25 bp, Homo sapien
tttgttcatctgagcacagtaggtc

SEQ ID NO: 5395123 - DNA, 25 bp, Homo sapien
tcttgcttagcccatttttcaaaac

SEQ ID NO: 5395124 - DNA, 25 bp, Homo sapien
tgacttgccggtgacaacagattct

SEQ ID NO: 5395125 - DNA, 25 bp, Homo sapien
tcaaaactccactgaggttccaagt

SEQ ID NO: 5395126 - DNA, 25 bp, Homo sapien
ctcgatgacttgccggtgacaacag

SEQ ID NO: 5395127 - DNA, 25 bp, Homo sapien
cttgcctctgtgtatttgacagctg

SEQ ID NO: 5395128 - DNA, 25 bp, Homo sapien
tgtcctgcaaggcaatggccagtaa

SEQ ID NO: 5395129 - DNA, 25 bp, Homo sapien
caaggcaatggccagtaagaggcat

SEQ ID NO: 5395130 - DNA, 25 bp, Homo sapien
ctctgtgtatttgacagctgctgtc

SEQ ID NO: 5395131 - DNA, 25 bp, Homo sapien
cacttttgttctactgctgcttgag

SEQ ID NO: 5395132 - DNA, 25 bp, Homo sapien
tggacaaattggattcataaaggac

SEQ ID NO: 5395133 - DNA, 25 bp, Homo sapien
catcccactggcaccgttgttcaag

SEQ ID NO: 5395134 - DNA, 25 bp, Homo sapien
taggtagcataggagagcctgaaga

SEQ ID NO: 5395135 - DNA, 25 bp, Homo sapien
ggtactgattcaatccattccttag

SEQ ID NO: 5395136 - DNA, 25 bp, Homo sapien
gtcagctggtttaggtactgattca

SEQ ID NO: 5395137 - DNA, 25 bp, Homo sapien
actgattcaatccattccttagcaa

SEQ ID NO: 5395138 - DNA, 25 bp, Homo sapien
ggtttaggtactgattcaatccatt

SEQ ID NO: 5395139 - DNA, 25 bp, Homo sapien
gaagcgatcagtaagtacctcacag

SEQ ID NO: 5395140 - DNA, 25 bp, Homo sapien
gaggacatccacgttgtcaccggag

SEQ ID NO: 5395141 - DNA, 25 bp, Homo sapien
tgaatttggacgacagccagtggga

SEQ ID NO: 5395142 - DNA, 25 bp, Homo sapien
aacagatagtatccccgatgctcca

SEQ ID NO: 5395143 - DNA, 25 bp, Homo sapien
gcttctaggactatcataagcacct

SEQ ID NO: 5395144 - DNA, 25 bp, Homo sapien
taagcaccttgaattgtggcttttc

SEQ ID NO: 5395145 - DNA, 25 bp, Homo sapien
ttaaatagcttctaggactatcata

SEQ ID NO: 5395146 - DNA, 25 bp, Homo sapien
ggactatcataagcaccttgaattg

SEQ ID NO: 5395147 - DNA, 25 bp, Homo sapien
agtaggttgcctttccaggacctgg

SEQ ID NO: 5395148 - DNA, 25 bp, Homo sapien
gaatatgggccaaacaaagctgggt

SEQ ID NO: 5395149 - DNA, 25 bp, Homo sapien
gcatcagggccatgtatgaacaacc

SEQ ID NO: 5395150 - DNA, 25 bp, Homo sapien
ggtgtgacaaccatcatcatgaagt

SEQ ID NO: 5395151 - DNA, 25 bp, Homo sapien
tttcccaatgcgaagcagcactgca

SEQ ID NO: 5395152 - DNA, 25 bp, Homo sapien
tatgaacctcttggcaccagattgg

SEQ ID NO: 5395153 - DNA, 25 bp, Homo sapien
cattttgcatacttgcttagcggtg

SEQ ID NO: 5395154 - DNA, 25 bp, Homo sapien
gacataagagggtccattactgtat

SEQ ID NO: 5395155 - DNA, 25 bp, Homo sapien
cagaggttttcaccacgccctgtag

SEQ ID NO: 5395156 - DNA, 25 bp, Homo sapien
gagtcttagcatagtcagggtcata

SEQ ID NO: 5395157 - DNA, 25 bp, Homo sapien
cataacccctagtcaatgtacgtga

SEQ ID NO: 5395158 - DNA, 25 bp, Homo sapien
taaccagttgcataaccagcatgtg

SEQ ID NO: 5395159 - DNA, 25 bp, Homo sapien
atacaagatgatgtttttatctgca

SEQ ID NO: 5395160 - DNA, 25 bp, Homo sapien
gatgatgtttttatctgcagaagtc

SEQ ID NO: 5395161 - DNA, 25 bp, Homo sapien
tgatgtttttatctgcagaagtcat

SEQ ID NO: 5395162 - DNA, 25 bp, Homo sapien
cttgcatacaagatgatgtttttat

SEQ ID NO: 5395163 - DNA, 25 bp, Homo sapien
tattgtgggcttccaaacatgaaca

SEQ ID NO: 5395164 - DNA, 25 bp, Homo sapien
ctgaactgaggctaaacagcaggcc

SEQ ID NO: 5395165 - DNA, 25 bp, Homo sapien
catgccctggcctgttaaatttaca

SEQ ID NO: 5395166 - DNA, 25 bp, Homo sapien
gcaggccaaggacaaagaaagctat

SEQ ID NO: 5395167 - DNA, 25 bp, Homo sapien
gctttgccgatggtagagatatcca

SEQ ID NO: 5395168 - DNA, 25 bp, Homo sapien
gagcccaactatgagacaaatgccc

SEQ ID NO: 5395169 - DNA, 25 bp, Homo sapien
aaatttagcaaaaccgcactcgagt

SEQ ID NO: 5395170 - DNA, 25 bp, Homo sapien
tggcccaaaaagacagtccagtatg

SEQ ID NO: 5395171 - DNA, 25 bp, Homo sapien
ctaatagacttctagttcccttgct

SEQ ID NO: 5395172 - DNA, 25 bp, Homo sapien
gagtgattttcatgatcagaatttc

SEQ ID NO: 5395173 - DNA, 25 bp, Homo sapien
acttctcagagtgattttcatgatc

SEQ ID NO: 5395174 - DNA, 25 bp, Homo sapien
cttgctttgttgtataacttctcag

SEQ ID NO: 5395175 - DNA, 25 bp, Homo sapien
tacacttagagcacgtttttttaga

SEQ ID NO: 5395176 - DNA, 25 bp, Homo sapien
tatatacacttagagcacgtttttt

SEQ ID NO: 5395177 - DNA, 25 bp, Homo sapien
gagcacgtttttttagaaggcagta

SEQ ID NO: 5395178 - DNA, 25 bp, Homo sapien
ttagagcacgtttttttagaaggca

SEQ ID NO: 5395179 - DNA, 25 bp, Homo sapien
tgctgttgtctctcggtctgtcacg

SEQ ID NO: 5395180 - DNA, 25 bp, Homo sapien
aatggaaagcactgaacccagatgc

SEQ ID NO: 5395181 - DNA, 25 bp, Homo sapien
tatcagataccgtggcctctctggc

SEQ ID NO: 5395182 - DNA, 25 bp, Homo sapien
ccagatgcccaaccacggaagatat

SEQ ID NO: 5395183 - DNA, 25 bp, Homo sapien
tcacatacctgagaaaagagccatt

SEQ ID NO: 5395184 - DNA, 25 bp, Homo sapien
tgtggaatcccagcagtctactcag

SEQ ID NO: 5395185 - DNA, 25 bp, Homo sapien
tgaaggacccaagcaagaacaaagc

SEQ ID NO: 5395186 - DNA, 25 bp, Homo sapien
tcctccgcgatgtaccagtaaaaag

SEQ ID NO: 5395187 - DNA, 25 bp, Homo sapien
tcagcgagcatcattgtctaagaca

SEQ ID NO: 5395188 - DNA, 25 bp, Homo sapien
tctaagacaagttctcaaggacctc

SEQ ID NO: 5395189 - DNA, 25 bp, Homo sapien
caaacttaggtcaatggatgagcca

SEQ ID NO: 5395190 - DNA, 25 bp, Homo sapien
gattcattttaacggcaggcatgtg

SEQ ID NO: 5395191 - DNA, 25 bp, Homo sapien
ccccaaaacatcttgtcactaaggc

SEQ ID NO: 5395192 - DNA, 25 bp, Homo sapien
ttatttcaagcttggatgatttccc

SEQ ID NO: 5395193 - DNA, 25 bp, Homo sapien
ggcaaagtatatcatagaatatctg

SEQ ID NO: 5395194 - DNA, 25 bp, Homo sapien
gtcactaaggcaaagtatatcatag

SEQ ID NO: 5395195 - DNA, 25 bp, Homo sapien
tgtaaaaaataagtaccacacttgc

SEQ ID NO: 5395196 - DNA, 25 bp, Homo sapien
agaagtcagggtgctgtcaaagaga

SEQ ID NO: 5395197 - DNA, 25 bp, Homo sapien
caaagagagcttaccctaaagtctg

SEQ ID NO: 5395198 - DNA, 25 bp, Homo sapien
ctacactgattaaagatttgctgtg

SEQ ID NO: 5395199 - DNA, 25 bp, Homo sapien
tgctgataattaagcatgaattcaa

SEQ ID NO: 5395200 - DNA, 25 bp, Homo sapien
gatgtcaggtcttccctttcatgag

SEQ ID NO: 5395201 - DNA, 25 bp, Homo sapien
tctaggctccacattagatgtcagg

SEQ ID NO: 5395202 - DNA, 25 bp, Homo sapien
gaaatgatgcgtgaacacaaggctg

SEQ ID NO: 5395203 - DNA, 25 bp, Homo sapien
tcggtactatccaaggtctcaggca

SEQ ID NO: 5395204 - DNA, 25 bp, Homo sapien
gagaaacatgttccaatagatggca

SEQ ID NO: 5395205 - DNA, 25 bp, Homo sapien
taagcagggactactataataccag

SEQ ID NO: 5395206 - DNA, 25 bp, Homo sapien
tgtgcctcagactgcaaaagttatg

SEQ ID NO: 5395207 - DNA, 25 bp, Homo sapien
cagacaagacaagctactgaatacg

SEQ ID NO: 5395208 - DNA, 25 bp, Homo sapien
gcctttcaagcgacagatgcctcat

SEQ ID NO: 5395209 - DNA, 25 bp, Homo sapien
aagctactgaatacgttcacatctg

SEQ ID NO: 5395210 - DNA, 25 bp, Homo sapien
gtgaaaacttaatgatgattttgtg

SEQ ID NO: 5395211 - DNA, 25 bp, Homo sapien
catctacttgtatcgctgctgcaca

SEQ ID NO: 5395212 - DNA, 25 bp, Homo sapien
tgagcattttatcctgcgctcagat

SEQ ID NO: 5395213 - DNA, 25 bp, Homo sapien
catgatgtgtctgtcaaatttcagc

SEQ ID NO: 5395214 - DNA, 25 bp, Homo sapien
ttccaccaatgggattttcttgagc

SEQ ID NO: 5395215 - DNA, 25 bp, Homo sapien
attttcaggtgctgcgtaaaagctc

SEQ ID NO: 5395216 - DNA, 25 bp, Homo sapien
caggtgctgcgtaaaagctctccat

SEQ ID NO: 5395217 - DNA, 25 bp, Homo sapien
ttcaggtgctgcgtaaaagctctcc

SEQ ID NO: 5395218 - DNA, 25 bp, Homo sapien
tgctgcgtaaaagctctccatacaa

SEQ ID NO: 5395219 - DNA, 25 bp, Homo sapien
ccatggttaccttgtaacacgcagt

SEQ ID NO: 5395220 - DNA, 25 bp, Homo sapien
aagatcctggcacgacttctttgcc

SEQ ID NO: 5395221 - DNA, 25 bp, Homo sapien
aacacgcagtacatcactttgtgca

SEQ ID NO: 5395222 - DNA, 25 bp, Homo sapien
tcagtgagaagatcctggcacgact

SEQ ID NO: 5395223 - DNA, 25 bp, Homo sapien
cacacttggcagtttgacttgatcc

SEQ ID NO: 5395224 - DNA, 25 bp, Homo sapien
gctgcagaatgcctaattgggcatt

SEQ ID NO: 5395225 - DNA, 25 bp, Homo sapien
ggcattccaagcttcacacttggca

SEQ ID NO: 5395226 - DNA, 25 bp, Homo sapien
gcagtttgacttgatccaacattgc

SEQ ID NO: 5395227 - DNA, 25 bp, Homo sapien
tctgcaactgtctggcaagctcatg

SEQ ID NO: 5395228 - DNA, 25 bp, Homo sapien
ggactggccaattccctctaaggat

SEQ ID NO: 5395229 - DNA, 25 bp, Homo sapien
ggtcatgtccatcccactagaggtg

SEQ ID NO: 5395230 - DNA, 25 bp, Homo sapien
caaaatcagtaagtggtagggtcag

SEQ ID NO: 5395231 - DNA, 25 bp, Homo sapien
aatgaaggtaagttgatcgtactgt

SEQ ID NO: 5395232 - DNA, 25 bp, Homo sapien
atgaaggtaagttgatcgtactgtc

SEQ ID NO: 5395233 - DNA, 25 bp, Homo sapien
gagatgtatgtaactcagatgtcat

SEQ ID NO: 5395234 - DNA, 25 bp, Homo sapien
cgtaagagatgtatgtaactcagat

SEQ ID NO: 5395235 - DNA, 25 bp, Homo sapien
tatacgtaagagatgtatgtaactc

SEQ ID NO: 5395236 - DNA, 25 bp, Homo sapien
gctgaaggttatacgtaagagatgt

SEQ ID NO: 5395237 - DNA, 25 bp, Homo sapien
attttggatctcatttctaattgtg

SEQ ID NO: 5395238 - DNA, 25 bp, Homo sapien
tgaggcaatgtgctatctctctgag

SEQ ID NO: 5395239 - DNA, 25 bp, Homo sapien
tagcagttgttaacaccatagtgtg

SEQ ID NO: 5395240 - DNA, 25 bp, Homo sapien
taaaatggctcttatagcagttgtt

SEQ ID NO: 5395241 - DNA, 25 bp, Homo sapien
tgtaggaccgcatgttaccacaggg

SEQ ID NO: 5395242 - DNA, 25 bp, Homo sapien
cagcaggtatcatagtgtaggaccg

SEQ ID NO: 5395243 - DNA, 25 bp, Homo sapien
tgacgccgacgaaccattctggagg

SEQ ID NO: 5395244 - DNA, 25 bp, Homo sapien
gttccctatgtcaccggcaacagca

SEQ ID NO: 5395245 - DNA, 25 bp, Homo sapien
tatagcaacttggttgacattatca

SEQ ID NO: 5395246 - DNA, 25 bp, Homo sapien
tttgcatgtatagcaacttggttga

SEQ ID NO: 5395247 - DNA, 25 bp, Homo sapien
caacttggttgacattatcaccatc

SEQ ID NO: 5395248 - DNA, 25 bp, Homo sapien
tgcatgtatagcaacttggttgaca

SEQ ID NO: 5395249 - DNA, 25 bp, Homo sapien
ccctcatggatcataaatagagtca

SEQ ID NO: 5395250 - DNA, 25 bp, Homo sapien
cataaatagagtcagaatagggacc

SEQ ID NO: 5395251 - DNA, 25 bp, Homo sapien
tggttgtgatccctcatggatcata

SEQ ID NO: 5395252 - DNA, 25 bp, Homo sapien
gctcctttctgagagaggtggttgt

SEQ ID NO: 5395253 - DNA, 25 bp, Homo sapien
cacagccagcttatggacatagtaa

SEQ ID NO: 5395254 - DNA, 25 bp, Homo sapien
gacatagtaagggttttcttgtgcg

SEQ ID NO: 5395255 - DNA, 25 bp, Homo sapien
tctctgaagggcatcactggcatcc

SEQ ID NO: 5395256 - DNA, 25 bp, Homo sapien
tcaaagatcagtgggtttgcggttg

SEQ ID NO: 5395257 - DNA, 25 bp, Homo sapien
gcatctgcacagctgtaactgccat

SEQ ID NO: 5395258 - DNA, 25 bp, Homo sapien
gtgtccagttgttggcccaagtcca

SEQ ID NO: 5395259 - DNA, 25 bp, Homo sapien
cagtgtccagttgttggcccaagtc

SEQ ID NO: 5395260 - DNA, 25 bp, Homo sapien
gctgtaactgccatcaacagtgtcc

SEQ ID NO: 5395261 - DNA, 25 bp, Homo sapien
ttggaaacttcttgcaacgcactta

SEQ ID NO: 5395262 - DNA, 25 bp, Homo sapien
cgaggcaggcatccccttttggcag

SEQ ID NO: 5395263 - DNA, 25 bp, Homo sapien
cagacaacattgtacttggaaactt

SEQ ID NO: 5395264 - DNA, 25 bp, Homo sapien
tctagtcctgccaatcaaaaccgag

SEQ ID NO: 5395265 - DNA, 25 bp, Homo sapien
catttggggagtgaatctgacagga

SEQ ID NO: 5395266 - DNA, 25 bp, Homo sapien
tccaaatatcaatccgagagttttt

SEQ ID NO: 5395267 - DNA, 25 bp, Homo sapien
tttttatgtagggaatggatgcagt

SEQ ID NO: 5395268 - DNA, 25 bp, Homo sapien
ggcttctattgcctcattccaggaa

SEQ ID NO: 5395269 - DNA, 25 bp, Homo sapien
agaagtatgttttgaggtcctctgc

SEQ ID NO: 5395270 - DNA, 25 bp, Homo sapien
ggtcctctgctgatacaaaatgtac

SEQ ID NO: 5395271 - DNA, 25 bp, Homo sapien
tgaacttgagaacaatggaaaaggt

SEQ ID NO: 5395272 - DNA, 25 bp, Homo sapien
ttggactggataacttcaatcactg

SEQ ID NO: 5395273 - DNA, 25 bp, Homo sapien
tgcattgatccaggttctcatctct

SEQ ID NO: 5395274 - DNA, 25 bp, Homo sapien
cctagttactgtgattgctctttta

SEQ ID NO: 5395275 - DNA, 25 bp, Homo sapien
tccttctcagacctagttactgtga

SEQ ID NO: 5395276 - DNA, 25 bp, Homo sapien
tgctcttttacagtcacaatggacc

SEQ ID NO: 5395277 - DNA, 25 bp, Homo sapien
cagtcaaactgtcgttggtctccac

SEQ ID NO: 5395278 - DNA, 25 bp, Homo sapien
ttgccacagtgaaaggtacaattag

SEQ ID NO: 5395279 - DNA, 25 bp, Homo sapien
gcaagggtgctctgatagaaggaga

SEQ ID NO: 5395280 - DNA, 25 bp, Homo sapien
atactccactacagtcaaactgtcg

SEQ ID NO: 5395281 - DNA, 25 bp, Homo sapien
ttggagaaatcaatcaatgtgcaca

SEQ ID NO: 5395282 - DNA, 25 bp, Homo sapien
tggagaaatcaatcaatgtgcacat

SEQ ID NO: 5395283 - DNA, 25 bp, Homo sapien
cttggagaaatcaatcaatgtgcac

SEQ ID NO: 5395284 - DNA, 25 bp, Homo sapien
cattgcaagtttccccaggcagcag

SEQ ID NO: 5395285 - DNA, 25 bp, Homo sapien
aagactctccgctcatctgcagaag

SEQ ID NO: 5395286 - DNA, 25 bp, Homo sapien
cagcagatgtcttgtagctgccgtt

SEQ ID NO: 5395287 - DNA, 25 bp, Homo sapien
agggagctacaaacaccacttcgcc

SEQ ID NO: 5395288 - DNA, 25 bp, Homo sapien
taaggtaaacctgggacaatagatc

SEQ ID NO: 5395289 - DNA, 25 bp, Homo sapien
taaaacgcgcatcttcaatggccgg

SEQ ID NO: 5395290 - DNA, 25 bp, Homo sapien
gccctgcgtgctagtggcattgaaa

SEQ ID NO: 5395291 - DNA, 25 bp, Homo sapien
tacatcctactttggccaggcggca

SEQ ID NO: 5395292 - DNA, 25 bp, Homo sapien
tcttcctaggaggcctattgccttt

SEQ ID NO: 5395293 - DNA, 25 bp, Homo sapien
aaggcccgacttgtctccatagaca

SEQ ID NO: 5395294 - DNA, 25 bp, Homo sapien
ttcttcctaggaggcctattgcctt

SEQ ID NO: 5395295 - DNA, 25 bp, Homo sapien
gcccgacttgtctccatagacacag

SEQ ID NO: 5395296 - DNA, 25 bp, Homo sapien
atattggttgtacttcacttcactc

SEQ ID NO: 5395297 - DNA, 25 bp, Homo sapien
tgacaatattggttgtacttcactt

SEQ ID NO: 5395298 - DNA, 25 bp, Homo sapien
caatattggttgtacttcacttcac

SEQ ID NO: 5395299 - DNA, 25 bp, Homo sapien
attggttgtacttcacttcactctc

SEQ ID NO: 5395300 - DNA, 25 bp, Homo sapien
caaaaccagattcaatacccctggg

SEQ ID NO: 5395301 - DNA, 25 bp, Homo sapien
tgtggtccaaaaccagattcaatac

SEQ ID NO: 5395302 - DNA, 25 bp, Homo sapien
tccaaaaccagattcaatacccctg

SEQ ID NO: 5395303 - DNA, 25 bp, Homo sapien
tggtccaaaaccagattcaataccc

SEQ ID NO: 5395304 - DNA, 25 bp, Homo sapien
cagctgtgattctgacaatgagctt

SEQ ID NO: 5395305 - DNA, 25 bp, Homo sapien
gcttggtgttgggtcaagttttctg

SEQ ID NO: 5395306 - DNA, 25 bp, Homo sapien
gagcttggtgttgggtcaagttttc

SEQ ID NO: 5395307 - DNA, 25 bp, Homo sapien
tgattctgacaatgagcttggtgtt

SEQ ID NO: 5395308 - DNA, 25 bp, Homo sapien
gaaactgatcaaacatacgattgca

SEQ ID NO: 5395309 - DNA, 25 bp, Homo sapien
ccttggacttctctaatcgcagttg

SEQ ID NO: 5395310 - DNA, 25 bp, Homo sapien
gggactgccaaggttgatcagcatg

SEQ ID NO: 5395311 - DNA, 25 bp, Homo sapien
gttgtgacacaccattgcattcaca

SEQ ID NO: 5395312 - DNA, 25 bp, Homo sapien
ccttgggactattccagctgcagaa

SEQ ID NO: 5395313 - DNA, 25 bp, Homo sapien
gatataagaacctattcttttccca

SEQ ID NO: 5395314 - DNA, 25 bp, Homo sapien
tcatgtgccgtttggcaaagccact

SEQ ID NO: 5395315 - DNA, 25 bp, Homo sapien
cacttgcttattgactgaccttggg

SEQ ID NO: 5395316 - DNA, 25 bp, Homo sapien
gaatgagggtcgtttggctttccac

SEQ ID NO: 5395317 - DNA, 25 bp, Homo sapien
ggtgaagtcctgaaacatagttgct

SEQ ID NO: 5395318 - DNA, 25 bp, Homo sapien
aagcagtatgaagatgggcacgaga

SEQ ID NO: 5395319 - DNA, 25 bp, Homo sapien
ccactaggtggctttcccaggtgaa

SEQ ID NO: 5395320 - DNA, 25 bp, Homo sapien
gtgggcttctggcaaactcttcttg

SEQ ID NO: 5395321 - DNA, 25 bp, Homo sapien
ttagtgggcttctggcaaactcttc

SEQ ID NO: 5395322 - DNA, 25 bp, Homo sapien
tgggcttctggcaaactcttcttga

SEQ ID NO: 5395323 - DNA, 25 bp, Homo sapien
tagtgggcttctggcaaactcttct

SEQ ID NO: 5395324 - DNA, 25 bp, Homo sapien
gtccacaacatcaacaatcagctgc

SEQ ID NO: 5395325 - DNA, 25 bp, Homo sapien
aaggataggtagatactgaatagcc

SEQ ID NO: 5395326 - DNA, 25 bp, Homo sapien
taggtagatactgaatagccaaaaa

SEQ ID NO: 5395327 - DNA, 25 bp, Homo sapien
agattctgacagaaggataggtaga

SEQ ID NO: 5395328 - DNA, 25 bp, Homo sapien
aaatgtttttatcacagctttcaaa

SEQ ID NO: 5395329 - DNA, 25 bp, Homo sapien
ctaataaatgtttttatcacagctt

SEQ ID NO: 5395330 - DNA, 25 bp, Homo sapien
aatgtttttatcacagctttcaaac

SEQ ID NO: 5395331 - DNA, 25 bp, Homo sapien
tttgctaataaatgtttttatcaca

SEQ ID NO: 5395332 - DNA, 25 bp, Homo sapien
aactatggctgcctggaattgaagg

SEQ ID NO: 5395333 - DNA, 25 bp, Homo sapien
gtgtgacactctaaaaccacctctg

SEQ ID NO: 5395334 - DNA, 25 bp, Homo sapien
tccttcttgaaaaagagaccccatg

SEQ ID NO: 5395335 - DNA, 25 bp, Homo sapien
tatggctgcctggaattgaaggccc

SEQ ID NO: 5395336 - DNA, 25 bp, Homo sapien
tttgaaaaggtagtaggcatcggtg

SEQ ID NO: 5395337 - DNA, 25 bp, Homo sapien
tagaaaggaaaacggcactgctgaa

SEQ ID NO: 5395338 - DNA, 25 bp, Homo sapien
cccttcgcgggattgctgagggcaa

SEQ ID NO: 5395339 - DNA, 25 bp, Homo sapien
cctcctaaataaccagttggtggtg

SEQ ID NO: 5395340 - DNA, 25 bp, Homo sapien
gggaaccgagttcaatgaaatcctc

SEQ ID NO: 5395341 - DNA, 25 bp, Homo sapien
ctgagcctggccgactcagggaacc

SEQ ID NO: 5395342 - DNA, 25 bp, Homo sapien
aatcctcagacgcataaagcacagg

SEQ ID NO: 5395343 - DNA, 25 bp, Homo sapien
taaagcacagggtgccggcccaccg

SEQ ID NO: 5395344 - DNA, 25 bp, Homo sapien
gtccctcgacatgttcccgcgcctg

SEQ ID NO: 5395345 - DNA, 25 bp, Homo sapien
atgttcccgcgcctgaaaggtgcag

SEQ ID NO: 5395346 - DNA, 25 bp, Homo sapien
tcgacatgttcccgcgcctgaaagg

SEQ ID NO: 5395347 - DNA, 25 bp, Homo sapien
cccgcgcctgaaaggtgcagaaaac

SEQ ID NO: 5395348 - DNA, 25 bp, Homo sapien
gcagcggtgtggagggaacggacgc

SEQ ID NO: 5395349 - DNA, 25 bp, Homo sapien
aaggcgacccgctctgggcaacgcg

SEQ ID NO: 5395350 - DNA, 25 bp, Homo sapien
ctctggacgagactgagctaggcgt

SEQ ID NO: 5395351 - DNA, 25 bp, Homo sapien
gctggccgctcaggcgcagcggtgt

SEQ ID NO: 5395352 - DNA, 25 bp, Homo sapien
ccaagacgatgaaagccagggaaca

SEQ ID NO: 5395353 - DNA, 25 bp, Homo sapien
ctgtccctgggatttaagatactgg

SEQ ID NO: 5395354 - DNA, 25 bp, Homo sapien
catcaggtcgaaggtgacaaggctt

SEQ ID NO: 5395355 - DNA, 25 bp, Homo sapien
catagctgcaagcaccagagagcac

SEQ ID NO: 5395356 - DNA, 25 bp, Homo sapien
caatagtttgtggactagttgccag

SEQ ID NO: 5395357 - DNA, 25 bp, Homo sapien
gtcaaatgatttacccacaccccaa

SEQ ID NO: 5395358 - DNA, 25 bp, Homo sapien
ggcaaatgcctgaaccaatagtttg

SEQ ID NO: 5395359 - DNA, 25 bp, Homo sapien
gatgacagccaggtatacacagggt

SEQ ID NO: 5395360 - DNA, 25 bp, Homo sapien
caacttcagacacccgaggaagagg

SEQ ID NO: 5395361 - DNA, 25 bp, Homo sapien
taattgtccctgtttatctccccac

SEQ ID NO: 5395362 - DNA, 25 bp, Homo sapien
gtccatagcttgaaaccctgtttat

SEQ ID NO: 5395363 - DNA, 25 bp, Homo sapien
cattcagtaattacagctggctcct

SEQ ID NO: 5395364 - DNA, 25 bp, Homo sapien
tgaagctttccaagagcttaatact

SEQ ID NO: 5395365 - DNA, 25 bp, Homo sapien
cacacatgggtgagcagctttgcca

SEQ ID NO: 5395366 - DNA, 25 bp, Homo sapien
gacagacgctttggtttgactacga

SEQ ID NO: 5395367 - DNA, 25 bp, Homo sapien
ccgttaagtgctccatgatgctgct

SEQ ID NO: 5395368 - DNA, 25 bp, Homo sapien
tccctaaagggagaaccagagcaat

SEQ ID NO: 5395369 - DNA, 25 bp, Homo sapien
ttagccactatgaagcgtaagccca

SEQ ID NO: 5395370 - DNA, 25 bp, Homo sapien
tgtggtggcccatcacacactgtgg

SEQ ID NO: 5395371 - DNA, 25 bp, Homo sapien
tcaaatgggccctactggacttccg

SEQ ID NO: 5395372 - DNA, 25 bp, Homo sapien
gcacccggcctaatgtaagcttttg

SEQ ID NO: 5395373 - DNA, 25 bp, Homo sapien
tctgtgaatcatgggaatacctgcc

SEQ ID NO: 5395374 - DNA, 25 bp, Homo sapien
tcgtggccctttgaggacacaagaa

SEQ ID NO: 5395375 - DNA, 25 bp, Homo sapien
gaaggctccgatgataacctggcaa

SEQ ID NO: 5395376 - DNA, 25 bp, Homo sapien
gatggctgcccaattaatcccaaag

SEQ ID NO: 5395377 - DNA, 25 bp, Homo sapien
aaccggaaattcaatgtggcaccac

SEQ ID NO: 5395378 - DNA, 25 bp, Homo sapien
ccaagtgtgagcgtttgaagctgca

SEQ ID NO: 5395379 - DNA, 25 bp, Homo sapien
catgagtgcggttatacaacaggcc

SEQ ID NO: 5395380 - DNA, 25 bp, Homo sapien
tcgtgtcggcgaaaagaaagaattc

SEQ ID NO: 5395381 - DNA, 25 bp, Homo sapien
ccgaggacatgtgtaaccatcataa

SEQ ID NO: 5395382 - DNA, 25 bp, Homo sapien
tgatgccgaggacatgtgtaaccat

SEQ ID NO: 5395383 - DNA, 25 bp, Homo sapien
acatgtgatgccgaggacatgtgta

SEQ ID NO: 5395384 - DNA, 25 bp, Homo sapien
tgtgatgccgaggacatgtgtaacc

SEQ ID NO: 5395385 - DNA, 25 bp, Homo sapien
cagggattggagatctgaagccgcc

SEQ ID NO: 5395386 - DNA, 25 bp, Homo sapien
gaagccgccacaggtttgtggcaga

SEQ ID NO: 5395387 - DNA, 25 bp, Homo sapien
cagatggctctgtgtcagctatgac

SEQ ID NO: 5395388 - DNA, 25 bp, Homo sapien
gatcaggtaaatatgggcacactct

SEQ ID NO: 5395389 - DNA, 25 bp, Homo sapien
tcttccctaggttctgttgtaagca

SEQ ID NO: 5395390 - DNA, 25 bp, Homo sapien
tccctaggttctgttgtaagcagag

SEQ ID NO: 5395391 - DNA, 25 bp, Homo sapien
cctaggttctgttgtaagcagagac

SEQ ID NO: 5395392 - DNA, 25 bp, Homo sapien
taggttctgttgtaagcagagacct

SEQ ID NO: 5395393 - DNA, 25 bp, Homo sapien
gcccaagaaaacggagcgatttcac

SEQ ID NO: 5395394 - DNA, 25 bp, Homo sapien
tgcccaagaaaacggagcgatttca

SEQ ID NO: 5395395 - DNA, 25 bp, Homo sapien
gggctgcccaagaaaacggagcgat

SEQ ID NO: 5395396 - DNA, 25 bp, Homo sapien
gctgcccaagaaaacggagcgattt

SEQ ID NO: 5395397 - DNA, 25 bp, Homo sapien
aagataatgagcttgaaattgggtg

SEQ ID NO: 5395398 - DNA, 25 bp, Homo sapien
ctgaaccattgccaagttaatagac

SEQ ID NO: 5395399 - DNA, 25 bp, Homo sapien
cattgccaagttaatagacaatgaa

SEQ ID NO: 5395400 - DNA, 25 bp, Homo sapien
aatgagcttgaaattgggtgttaaa

SEQ ID NO: 5395401 - DNA, 25 bp, Homo sapien
aaagtcatgttttgatgtatcacta

SEQ ID NO: 5395402 - DNA, 25 bp, Homo sapien
catgttttgatgtatcactatgtaa

SEQ ID NO: 5395403 - DNA, 25 bp, Homo sapien
acaaagtcatgttttgatgtatcac

SEQ ID NO: 5395404 - DNA, 25 bp, Homo sapien
agtcatgttttgatgtatcactatg

SEQ ID NO: 5395405 - DNA, 25 bp, Homo sapien
tcaggtgtagaatacagatattcag

SEQ ID NO: 5395406 - DNA, 25 bp, Homo sapien
aaattctggagcctttttgaaagct

SEQ ID NO: 5395407 - DNA, 25 bp, Homo sapien
ttttgaaagctgttcaggtgtagaa

SEQ ID NO: 5395408 - DNA, 25 bp, Homo sapien
tcttataatatctggtctcttgcag

SEQ ID NO: 5395409 - DNA, 25 bp, Homo sapien
taggacaaagtgggtaacacccaca

SEQ ID NO: 5395410 - DNA, 25 bp, Homo sapien
gacaaagtgggtaacacccacagta

SEQ ID NO: 5395411 - DNA, 25 bp, Homo sapien
aggacaaagtgggtaacacccacag

SEQ ID NO: 5395412 - DNA, 25 bp, Homo sapien
caaagtgggtaacacccacagtaca

SEQ ID NO: 5395413 - DNA, 25 bp, Homo sapien
tctaaaagccaaagttgctctttta

SEQ ID NO: 5395414 - DNA, 25 bp, Homo sapien
aaagattttattgatcatatatgaa

SEQ ID NO: 5395415 - DNA, 25 bp, Homo sapien
catggtcggcagtataattctaaaa

SEQ ID NO: 5395416 - DNA, 25 bp, Homo sapien
cactgaattaatcaaagcgcagctc

SEQ ID NO: 5395417 - DNA, 25 bp, Homo sapien
gaattcatgcttagctgttgagatg

SEQ ID NO: 5395418 - DNA, 25 bp, Homo sapien
gttgagatgacaacatcagccatgc

SEQ ID NO: 5395419 - DNA, 25 bp, Homo sapien
catgcacagtacttggaaatagtca

SEQ ID NO: 5395420 - DNA, 25 bp, Homo sapien
atcagccatgcacagtacttggaaa

SEQ ID NO: 5395421 - DNA, 25 bp, Homo sapien
tgctgggtaagtagccccagtgtaa

SEQ ID NO: 5395422 - DNA, 25 bp, Homo sapien
taagacagaagatcccaatgccttt

SEQ ID NO: 5395423 - DNA, 25 bp, Homo sapien
tgtaagacagaagatcccaatgcct

SEQ ID NO: 5395424 - DNA, 25 bp, Homo sapien
ctttgctgggtaagtagccccagtg

SEQ ID NO: 5395425 - DNA, 25 bp, Homo sapien
tcaattgtgcagtggaaagaggcta

SEQ ID NO: 5395426 - DNA, 25 bp, Homo sapien
ggtctgtctgggcaacaccttatca

SEQ ID NO: 5395427 - DNA, 25 bp, Homo sapien
gactcaccagtcgacaaggtcttgg

SEQ ID NO: 5395428 - DNA, 25 bp, Homo sapien
cagtcatctatagtgtaaaagcagc

SEQ ID NO: 5395429 - DNA, 25 bp, Homo sapien
taaatgtgtacaacagtatacctac

SEQ ID NO: 5395430 - DNA, 25 bp, Homo sapien
cagtgataattatcgtacagctaaa

SEQ ID NO: 5395431 - DNA, 25 bp, Homo sapien
taatgattttggaaaaagccgagtc

SEQ ID NO: 5395432 - DNA, 25 bp, Homo sapien
tatacctactttgtgcagtgtgcta

SEQ ID NO: 5395433 - DNA, 25 bp, Homo sapien
cagattttagaaccactttgtgagg

SEQ ID NO: 5395434 - DNA, 25 bp, Homo sapien
ggcaccctaattggagtcttgttaa

SEQ ID NO: 5395435 - DNA, 25 bp, Homo sapien
gtaaagtaatattctggcaccctaa

SEQ ID NO: 5395436 - DNA, 25 bp, Homo sapien
caggagcttatatgcctacctttaa

SEQ ID NO: 5395437 - DNA, 25 bp, Homo sapien
gaccttatcatgagaattggccaaa

SEQ ID NO: 5395438 - DNA, 25 bp, Homo sapien
ggaggcaagtccatgagtcctataa

SEQ ID NO: 5395439 - DNA, 25 bp, Homo sapien
taaggtacaggatcattcatgtctc

SEQ ID NO: 5395440 - DNA, 25 bp, Homo sapien
taactcactgaagttgatagggcag

SEQ ID NO: 5395441 - DNA, 25 bp, Homo sapien
gacctctattgcatgcctgaaactg

SEQ ID NO: 5395442 - DNA, 25 bp, Homo sapien
catgagtggccaggaatttctcacc

SEQ ID NO: 5395443 - DNA, 25 bp, Homo sapien
gtttcaggcgagtgacttaacctcc

SEQ ID NO: 5395444 - DNA, 25 bp, Homo sapien
tccaacagtgccaattcacagggct

SEQ ID NO: 5395445 - DNA, 25 bp, Homo sapien
acttggcactaatgccatcactcag

SEQ ID NO: 5395446 - DNA, 25 bp, Homo sapien
gcactaatgccatcactcagtggtg

SEQ ID NO: 5395447 - DNA, 25 bp, Homo sapien
gaaagggcagtaaaacttggcacta

SEQ ID NO: 5395448 - DNA, 25 bp, Homo sapien
tgccatcactcagtggtgtgccact

SEQ ID NO: 5395449 - DNA, 25 bp, Homo sapien
tatttgcaagagaaccatatcccta

SEQ ID NO: 5395450 - DNA, 25 bp, Homo sapien
cagagtctgtttccctacctataaa

SEQ ID NO: 5395451 - DNA, 25 bp, Homo sapien
cagagtaatcaatggtcctgcagtg

SEQ ID NO: 5395452 - DNA, 25 bp, Homo sapien
gaagcacactttcaattaatggaag

SEQ ID NO: 5395453 - DNA, 25 bp, Homo sapien
cctcctctgtgcaagatgaagtgcc

SEQ ID NO: 5395454 - DNA, 25 bp, Homo sapien
ctcctctgtgcaagatgaagtgcca

SEQ ID NO: 5395455 - DNA, 25 bp, Homo sapien
tcctctgtgcaagatgaagtgccat

SEQ ID NO: 5395456 - DNA, 25 bp, Homo sapien
cacgtggaaattgagtcctaagtct

SEQ ID NO: 5395457 - DNA, 25 bp, Homo sapien
tgtgaaggtttctccaagtacagac

SEQ ID NO: 5395458 - DNA, 25 bp, Homo sapien
aggtttctccaagtacagacacgtg

SEQ ID NO: 5395459 - DNA, 25 bp, Homo sapien
cagacacgtggaaattgagtcctaa

SEQ ID NO: 5395460 - DNA, 25 bp, Homo sapien
tcatttagtagaggctttggaacac

SEQ ID NO: 5395461 - DNA, 25 bp, Homo sapien
caaggaacgcacaatttagggagat

SEQ ID NO: 5395462 - DNA, 25 bp, Homo sapien
gaatgagaggctaaaggacactaac

SEQ ID NO: 5395463 - DNA, 25 bp, Homo sapien
taggtctgggtctatgtccgctgag

SEQ ID NO: 5395464 - DNA, 25 bp, Homo sapien
tatgaactcaagaatgcatggaagg

SEQ ID NO: 5395465 - DNA, 25 bp, Homo sapien
gctacttaaactcgattccagatga

SEQ ID NO: 5395466 - DNA, 25 bp, Homo sapien
tgacaggtagtgaaaacaggccagc

SEQ ID NO: 5395467 - DNA, 25 bp, Homo sapien
agtttcacaaagtcctgcaccccaa

SEQ ID NO: 5395468 - DNA, 25 bp, Homo sapien
gggaacctgcggatgatgcatagca

SEQ ID NO: 5395469 - DNA, 25 bp, Homo sapien
tgttagctatgtgtctggcaacctc

SEQ ID NO: 5395470 - DNA, 25 bp, Homo sapien
tgtccccaggcatcagtaaaattga

SEQ ID NO: 5395471 - DNA, 25 bp, Homo sapien
tattacccgtaaggatgaatgtgtt

SEQ ID NO: 5395472 - DNA, 25 bp, Homo sapien
tccctttaggtaccagatgctgcag

SEQ ID NO: 5395473 - DNA, 25 bp, Homo sapien
gaaaatcggacctaatgatcagcct

SEQ ID NO: 5395474 - DNA, 25 bp, Homo sapien
tgacaagtaaaatgaagccaccctg

SEQ ID NO: 5395475 - DNA, 25 bp, Homo sapien
tgtactctaatcaggccacatgcag

SEQ ID NO: 5395476 - DNA, 25 bp, Homo sapien
cgtgcagtatcaaggccacagtgtg

SEQ ID NO: 5395477 - DNA, 25 bp, Homo sapien
gagcttgaattatctgacgaggtgg

SEQ ID NO: 5395478 - DNA, 25 bp, Homo sapien
tattttcaccatgatgagagcttga

SEQ ID NO: 5395479 - DNA, 25 bp, Homo sapien
tgtcacagggatcaacagtcagatt

SEQ ID NO: 5395480 - DNA, 25 bp, Homo sapien
cctttaaggccgagcatcttcttta

SEQ ID NO: 5395481 - DNA, 25 bp, Homo sapien
atggacagaaccgcaccgccatttc

SEQ ID NO: 5395482 - DNA, 25 bp, Homo sapien
aaggccgagcatcttctttaaatgg

SEQ ID NO: 5395483 - DNA, 25 bp, Homo sapien
atttcctttaaggccgagcatcttc

SEQ ID NO: 5395484 - DNA, 25 bp, Homo sapien
gaaactggcttttctatagaactgg

SEQ ID NO: 5395485 - DNA, 25 bp, Homo sapien
tgtttgtgctgtcctggcattaatt

SEQ ID NO: 5395486 - DNA, 25 bp, Homo sapien
caatgacgtgactatgcaaataggc

SEQ ID NO: 5395487 - DNA, 25 bp, Homo sapien
gcaaataggcacatgtctgaacact

SEQ ID NO: 5395488 - DNA, 25 bp, Homo sapien
gcaagactgtcttgcttgaactatg

SEQ ID NO: 5395489 - DNA, 25 bp, Homo sapien
agactgtcttgcttgaactatgagg

SEQ ID NO: 5395490 - DNA, 25 bp, Homo sapien
ctgtcttgcttgaactatgaggaat

SEQ ID NO: 5395491 - DNA, 25 bp, Homo sapien
caaacttttaaagccaacatgaaat

SEQ ID NO: 5395492 - DNA, 25 bp, Homo sapien
tccttgcagcctaccttgaaactat

SEQ ID NO: 5395493 - DNA, 25 bp, Homo sapien
gggtctccttgcagcctaccttgaa

SEQ ID NO: 5395494 - DNA, 25 bp, Homo sapien
cagcctaccttgaaactatgtccca

SEQ ID NO: 5395495 - DNA, 25 bp, Homo sapien
ttgcagcctaccttgaaactatgtc

SEQ ID NO: 5395496 - DNA, 25 bp, Homo sapien
ctcaatgaagcctccaatttctagg

SEQ ID NO: 5395497 - DNA, 25 bp, Homo sapien
ggttgccaattctcattctatctct

SEQ ID NO: 5395498 - DNA, 25 bp, Homo sapien
actatctagcttctaggttgccaat

SEQ ID NO: 5395499 - DNA, 25 bp, Homo sapien
cactatgcccaacatctttcctatt

SEQ ID NO: 5395500 - DNA, 25 bp, Homo sapien
aagaggatcttgcagtaaggtgtca

SEQ ID NO: 5395501 - DNA, 25 bp, Homo sapien
gatcttgcagtaaggtgtcagaaaa

SEQ ID NO: 5395502 - DNA, 25 bp, Homo sapien
cttgcagtaaggtgtcagaaaatcc

SEQ ID NO: 5395503 - DNA, 25 bp, Homo sapien
tgcagtaaggtgtcagaaaatccaa

SEQ ID NO: 5395504 - DNA, 25 bp, Homo sapien
cacctccttttgatgtgttttgcat

SEQ ID NO: 5395505 - DNA, 25 bp, Homo sapien
tgtaaaaacagtgtagatctagctg

SEQ ID NO: 5395506 - DNA, 25 bp, Homo sapien
ttgctgtagctattcctggcattgg

SEQ ID NO: 5395507 - DNA, 25 bp, Homo sapien
tttgcttggtaatgtatgctgaata

SEQ ID NO: 5395508 - DNA, 25 bp, Homo sapien
cattgggcaacacatgtttttaata

SEQ ID NO: 5395509 - DNA, 25 bp, Homo sapien
ggttgtacgcatctttactaccagc

SEQ ID NO: 5395510 - DNA, 25 bp, Homo sapien
tacaaggtatcacgaatagagcatg

SEQ ID NO: 5395511 - DNA, 25 bp, Homo sapien
gaccaacctggtcattatggtgaga

SEQ ID NO: 5395512 - DNA, 25 bp, Homo sapien
tcctgatcgctactatgtacaaggt

SEQ ID NO: 5395513 - DNA, 25 bp, Homo sapien
gagctgtgtctagggtaccgccaga

SEQ ID NO: 5395514 - DNA, 25 bp, Homo sapien
caaggaagcattagggagctgtgtc

SEQ ID NO: 5395515 - DNA, 25 bp, Homo sapien
catgccacacgttagtatctcaggt

SEQ ID NO: 5395516 - DNA, 25 bp, Homo sapien
agaaaaactggctgcgggaacactg

SEQ ID NO: 5395517 - DNA, 25 bp, Homo sapien
cttaaatttgtggtcagtcttatgg

SEQ ID NO: 5395518 - DNA, 25 bp, Homo sapien
tggtttcttaaatttgtggtcagtc

SEQ ID NO: 5395519 - DNA, 25 bp, Homo sapien
caggatttggtttcttaaatttgtg

SEQ ID NO: 5395520 - DNA, 25 bp, Homo sapien
aaatttgtggtcagtcttatgggaa

SEQ ID NO: 5395521 - DNA, 25 bp, Homo sapien
aatgacttctccattctcaaacaca

SEQ ID NO: 5395522 - DNA, 25 bp, Homo sapien
tatccatgagtgatcacataacaca

SEQ ID NO: 5395523 - DNA, 25 bp, Homo sapien
ttttgtgcaaatgtgactgatttcc

SEQ ID NO: 5395524 - DNA, 25 bp, Homo sapien
cacattatgtcatatcctagggaaa

SEQ ID NO: 5395525 - DNA, 25 bp, Homo sapien
agtagatgtaatggcctattaaatg

SEQ ID NO: 5395526 - DNA, 25 bp, Homo sapien
ctgtattactgtaagcagtactctt

SEQ ID NO: 5395527 - DNA, 25 bp, Homo sapien
agacagccttataatgaaaagctct

SEQ ID NO: 5395528 - DNA, 25 bp, Homo sapien
taaaactatggtcaagataattgca

SEQ ID NO: 5395529 - DNA, 25 bp, Homo sapien
agcaaacatataagggagctcagtg

SEQ ID NO: 5395530 - DNA, 25 bp, Homo sapien
gtgtggatgcattcttagcccagca

SEQ ID NO: 5395531 - DNA, 25 bp, Homo sapien
accatagcccttagcagtgattttg

SEQ ID NO: 5395532 - DNA, 25 bp, Homo sapien
gattataggcacatataccatagcc

SEQ ID NO: 5395533 - DNA, 25 bp, Homo sapien
cataatggatttacaggactctgaa

SEQ ID NO: 5395534 - DNA, 25 bp, Homo sapien
tactcttgacatgaatacacctgct

SEQ ID NO: 5395535 - DNA, 25 bp, Homo sapien
ggctaaagccgagatacccacaaat

SEQ ID NO: 5395536 - DNA, 25 bp, Homo sapien
cagcaaagggaactgcctggctaaa

SEQ ID NO: 5395537 - DNA, 25 bp, Homo sapien
gtagaacaattgaggcattacattc

SEQ ID NO: 5395538 - DNA, 25 bp, Homo sapien
tccattactttcatccctctcagtt

SEQ ID NO: 5395539 - DNA, 25 bp, Homo sapien
gaggcattacattctacaattccat

SEQ ID NO: 5395540 - DNA, 25 bp, Homo sapien
tagggtcattgcttgaaaacttcaa

SEQ ID NO: 5395541 - DNA, 25 bp, Homo sapien
tgactcctactccatgaggagttga

SEQ ID NO: 5395542 - DNA, 25 bp, Homo sapien
catgaggagttgacaggttcagcta

SEQ ID NO: 5395543 - DNA, 25 bp, Homo sapien
tattctttaaccatagaaatacttg

SEQ ID NO: 5395544 - DNA, 25 bp, Homo sapien
tttaaccatagaaatacttgactcc

SEQ ID NO: 5395545 - DNA, 25 bp, Homo sapien
tgagtttgaagttccaactcacgca

SEQ ID NO: 5395546 - DNA, 25 bp, Homo sapien
tttgaagttccaactcacgcacttg

SEQ ID NO: 5395547 - DNA, 25 bp, Homo sapien
caaacctattcggaattcctcccat

SEQ ID NO: 5395548 - DNA, 25 bp, Homo sapien
agttccaactcacgcacttgttttc

SEQ ID NO: 5395549 - DNA, 25 bp, Homo sapien
gactcagtagtctaatacaagtgat

SEQ ID NO: 5395550 - DNA, 25 bp, Homo sapien
gatgcaaatgtagtaaatagaagac

SEQ ID NO: 5395551 - DNA, 25 bp, Homo sapien
ctgggacagcagtaaagtaagcaat

SEQ ID NO: 5395552 - DNA, 25 bp, Homo sapien
cccctatacatctgtctgggacagc

SEQ ID NO: 5395553 - DNA, 25 bp, Homo sapien
tgacacaagaatctctacaacttga

SEQ ID NO: 5395554 - DNA, 25 bp, Homo sapien
ctctacaacttgatcagtaatatcc

SEQ ID NO: 5395555 - DNA, 25 bp, Homo sapien
ctacaacttgatcagtaatatccaa

SEQ ID NO: 5395556 - DNA, 25 bp, Homo sapien
gacacaagaatctctacaacttgat

SEQ ID NO: 5395557 - DNA, 25 bp, Homo sapien
gtgaaatgccctgctgatgtcatca

SEQ ID NO: 5395558 - DNA, 25 bp, Homo sapien
agttggtttgtgaaatgccctgctg

SEQ ID NO: 5395559 - DNA, 25 bp, Homo sapien
cgttgtaaggctattacgaagttgg

SEQ ID NO: 5395560 - DNA, 25 bp, Homo sapien
ggctattacgaagttggtttgtgaa

SEQ ID NO: 5395561 - DNA, 25 bp, Homo sapien
ctggggccattccacccaacaggcc

SEQ ID NO: 5395562 - DNA, 25 bp, Homo sapien
tctggggccattccacccaacaggc

SEQ ID NO: 5395563 - DNA, 25 bp, Homo sapien
ccttttccatggatctctggctcca

SEQ ID NO: 5395564 - DNA, 25 bp, Homo sapien
cttttccatggatctctggctccaa

SEQ ID NO: 5395565 - DNA, 25 bp, Homo sapien
aatgttcttcactccgatctgcact

SEQ ID NO: 5395566 - DNA, 25 bp, Homo sapien
ttcttcactccgatctgcactgttt

SEQ ID NO: 5395567 - DNA, 25 bp, Homo sapien
ctgcactgttttcacgctgacagta

SEQ ID NO: 5395568 - DNA, 25 bp, Homo sapien
gttttcacgctgacagtagattagc

SEQ ID NO: 5395569 - DNA, 25 bp, Homo sapien
ccaactgccccaatatctgtattac

SEQ ID NO: 5395570 - DNA, 25 bp, Homo sapien
aagtccaactgccccaatatctgta

SEQ ID NO: 5395571 - DNA, 25 bp, Homo sapien
aatatctgtattaccctttactcta

SEQ ID NO: 5395572 - DNA, 25 bp, Homo sapien
atatctgtattaccctttactctaa

SEQ ID NO: 5395573 - DNA, 25 bp, Homo sapien
attttctgatactaccttgccctgt

SEQ ID NO: 5395574 - DNA, 25 bp, Homo sapien
tttcaaagggtaacgggatcagcat

SEQ ID NO: 5395575 - DNA, 25 bp, Homo sapien
ctgtttcaaagggtaacgggatcag

SEQ ID NO: 5395576 - DNA, 25 bp, Homo sapien
ctgatactaccttgccctgtttcaa

SEQ ID NO: 5395577 - DNA, 25 bp, Homo sapien
gattcacctgatagccacaggaaga

SEQ ID NO: 5395578 - DNA, 25 bp, Homo sapien
ggcagaacaggagtgttgctacagc

SEQ ID NO: 5395579 - DNA, 25 bp, Homo sapien
acgcctcatgacgtcagccagctat

SEQ ID NO: 5395580 - DNA, 25 bp, Homo sapien
cagctatcccaacaggactcaggga

SEQ ID NO: 5395581 - DNA, 25 bp, Homo sapien
aataagttttatatgagtagcccag

SEQ ID NO: 5395582 - DNA, 25 bp, Homo sapien
taagttttatatgagtagcccagtg

SEQ ID NO: 5395583 - DNA, 25 bp, Homo sapien
tggaaactcttattcctcactcttc

SEQ ID NO: 5395584 - DNA, 25 bp, Homo sapien
aagttttatatgagtagcccagtgt

SEQ ID NO: 5395585 - DNA, 25 bp, Homo sapien
tgggctgaacactggatgaagattt

SEQ ID NO: 5395586 - DNA, 25 bp, Homo sapien
gcatttacaataagtggtgggctga

SEQ ID NO: 5395587 - DNA, 25 bp, Homo sapien
ctagctgtgtgattaccagaagaca

SEQ ID NO: 5395588 - DNA, 25 bp, Homo sapien
ccctgttgtcaagctgtcagtcagc

SEQ ID NO: 5395589 - DNA, 25 bp, Homo sapien
gaactgaccacaggatttagaggca

SEQ ID NO: 5395590 - DNA, 25 bp, Homo sapien
taagatgtggactacgaactgacca

SEQ ID NO: 5395591 - DNA, 25 bp, Homo sapien
tggtgaccctgactaaaactatttc

SEQ ID NO: 5395592 - DNA, 25 bp, Homo sapien
aatagttttaactcagaacaggagg

SEQ ID NO: 5395593 - DNA, 25 bp, Homo sapien
tgtgatcaggaatcagcttcataaa

SEQ ID NO: 5395594 - DNA, 25 bp, Homo sapien
cttgggtctgtgatcaggaatcagc

SEQ ID NO: 5395595 - DNA, 25 bp, Homo sapien
ctgagttgaatacaaccacatcagc

SEQ ID NO: 5395596 - DNA, 25 bp, Homo sapien
aacttggcacttgggtctgatgatg

SEQ ID NO: 5395597 - DNA, 25 bp, Homo sapien
caactggttctcgtgaaaatacaga

SEQ ID NO: 5395598 - DNA, 25 bp, Homo sapien
atccatattggaaatccctctcctg

SEQ ID NO: 5395599 - DNA, 25 bp, Homo sapien
gttaagcactgaacttgcaaagagg

SEQ ID NO: 5395600 - DNA, 25 bp, Homo sapien
cagccagttcggtcaggttaagcac

SEQ ID NO: 5395601 - DNA, 25 bp, Homo sapien
ctgaacagacccttgacccgcttgt

SEQ ID NO: 5395602 - DNA, 25 bp, Homo sapien
cccttgacccgcttgtgataaccta

SEQ ID NO: 5395603 - DNA, 25 bp, Homo sapien
gattttcctgaacagacccttgacc

SEQ ID NO: 5395604 - DNA, 25 bp, Homo sapien
ctgattttcctgaacagacccttga

SEQ ID NO: 5395605 - DNA, 25 bp, Homo sapien
taggagcccaaacagctgtgcggac

SEQ ID NO: 5395606 - DNA, 25 bp, Homo sapien
gaatggctcaggtactgtgcaagac

SEQ ID NO: 5395607 - DNA, 25 bp, Homo sapien
tcagctggaagaacgtaggagccca

SEQ ID NO: 5395608 - DNA, 25 bp, Homo sapien
tataagtcacatcaacgagcaggtg

SEQ ID NO: 5395609 - DNA, 25 bp, Homo sapien
agtgggaggtaaccaaatcactggg

SEQ ID NO: 5395610 - DNA, 25 bp, Homo sapien
cttcatattggttggaaccagaagg

SEQ ID NO: 5395611 - DNA, 25 bp, Homo sapien
agggcagttccctaacacacactct

SEQ ID NO: 5395612 - DNA, 25 bp, Homo sapien
cctgttacttcatattggttggaac

SEQ ID NO: 5395613 - DNA, 25 bp, Homo sapien
taaccatataatataggtgggagtc

SEQ ID NO: 5395614 - DNA, 25 bp, Homo sapien
gagacagagtagacttacctatggc

SEQ ID NO: 5395615 - DNA, 25 bp, Homo sapien
aaggtatttgctgtgaccatgtaga

SEQ ID NO: 5395616 - DNA, 25 bp, Homo sapien
tataatccaactgggtaggggacca

SEQ ID NO: 5395617 - DNA, 25 bp, Homo sapien
gaagagtcaacatgtgaagacatca

SEQ ID NO: 5395618 - DNA, 25 bp, Homo sapien
tgaagagtcaacatgtgaagacatc

SEQ ID NO: 5395619 - DNA, 25 bp, Homo sapien
accatatccagacatgaagagtcaa

SEQ ID NO: 5395620 - DNA, 25 bp, Homo sapien
cagactaagttccacaaaggtaggg

SEQ ID NO: 5395621 - DNA, 25 bp, Homo sapien
ccattttgggttgctatcaggatca

SEQ ID NO: 5395622 - DNA, 25 bp, Homo sapien
cagggctatgttgttcaccaccgtt

SEQ ID NO: 5395623 - DNA, 25 bp, Homo sapien
tcatgacagcgaggaggaaagaagt

SEQ ID NO: 5395624 - DNA, 25 bp, Homo sapien
tttgattactatagtccatccatcc

SEQ ID NO: 5395625 - DNA, 25 bp, Homo sapien
ttttgattactatagtccatccatc

SEQ ID NO: 5395626 - DNA, 25 bp, Homo sapien
tattcatcccctcaggtaggccagg

SEQ ID NO: 5395627 - DNA, 25 bp, Homo sapien
caactgatgccggaagaaaaagagt

SEQ ID NO: 5395628 - DNA, 25 bp, Homo sapien
ggaggctttccctaggcatctcaca

SEQ ID NO: 5395629 - DNA, 25 bp, Homo sapien
tagttacaacgaaagccagaaaaga

SEQ ID NO: 5395630 - DNA, 25 bp, Homo sapien
caatgttgacctgcttcataccaaa

SEQ ID NO: 5395631 - DNA, 25 bp, Homo sapien
gaagctggatccaggcttcttgcat

SEQ ID NO: 5395632 - DNA, 25 bp, Homo sapien
cataccaaaaggttaacattccatt

SEQ ID NO: 5395633 - DNA, 25 bp, Homo sapien
gctggatccaggcttcttgcatttt

SEQ ID NO: 5395634 - DNA, 25 bp, Homo sapien
aatttctgacgagatgcaacaggac

SEQ ID NO: 5395635 - DNA, 25 bp, Homo sapien
caaggaaggcaattggatgtacagc

SEQ ID NO: 5395636 - DNA, 25 bp, Homo sapien
ctgagtgacaactgtcttcctttcc

SEQ ID NO: 5395637 - DNA, 25 bp, Homo sapien
gccactagcaagcaggagttagctg

SEQ ID NO: 5395638 - DNA, 25 bp, Homo sapien
atcaacatctgaaggtttatcatca

SEQ ID NO: 5395639 - DNA, 25 bp, Homo sapien
tcaacatctgaaggtttatcatcaa

SEQ ID NO: 5395640 - DNA, 25 bp, Homo sapien
catcaacatctgaaggtttatcatc

SEQ ID NO: 5395641 - DNA, 25 bp, Homo sapien
gcattgataatgcaaattccttcgt

SEQ ID NO: 5395642 - DNA, 25 bp, Homo sapien
ctagaacacaatagctgagaagcat

SEQ ID NO: 5395643 - DNA, 25 bp, Homo sapien
gctgagaagcattgataatgcaaat

SEQ ID NO: 5395644 - DNA, 25 bp, Homo sapien
aatagctgagaagcattgataatgc

SEQ ID NO: 5395645 - DNA, 25 bp, Homo sapien
tctcctgtggccactttagaagcag

SEQ ID NO: 5395646 - DNA, 25 bp, Homo sapien
gacactatgcattctcagagacgat

SEQ ID NO: 5395647 - DNA, 25 bp, Homo sapien
ccatgtaactggaatgctcactgct

SEQ ID NO: 5395648 - DNA, 25 bp, Homo sapien
ttaataaacggcaagaacatcagct

SEQ ID NO: 5395649 - DNA, 25 bp, Homo sapien
tccatagaatgcttcaatgatgagg

SEQ ID NO: 5395650 - DNA, 25 bp, Homo sapien
gaagggtataaacgacacagtctcc

SEQ ID NO: 5395651 - DNA, 25 bp, Homo sapien
caccagctgtttatgggagcctcca

SEQ ID NO: 5395652 - DNA, 25 bp, Homo sapien
aaatataaagcagatgtccgggctc

SEQ ID NO: 5395653 - DNA, 25 bp, Homo sapien
aaatgcgttcttccctatggtcttc

SEQ ID NO: 5395654 - DNA, 25 bp, Homo sapien
atgaaaatgcgttcttccctatggt

SEQ ID NO: 5395655 - DNA, 25 bp, Homo sapien
tgaaaatgcgttcttccctatggtc

SEQ ID NO: 5395656 - DNA, 25 bp, Homo sapien
gaaaatgcgttcttccctatggtct

SEQ ID NO: 5395657 - DNA, 25 bp, Homo sapien
catcagtcacaggtagaggcttcct

SEQ ID NO: 5395658 - DNA, 25 bp, Homo sapien
aagggaacaatctggacgatcccca

SEQ ID NO: 5395659 - DNA, 25 bp, Homo sapien
tgtccacctctataacacattatac

SEQ ID NO: 5395660 - DNA, 25 bp, Homo sapien
caatctggacgatccccacttcaat

SEQ ID NO: 5395661 - DNA, 25 bp, Homo sapien
ggacgatccccacttcaatctgcag

SEQ ID NO: 5395662 - DNA, 25 bp, Homo sapien
tggtattactgcatgggacactgat

SEQ ID NO: 5395663 - DNA, 25 bp, Homo sapien
gacactgatagttgcaggcaaggca

SEQ ID NO: 5395664 - DNA, 25 bp, Homo sapien
gtctggctggccttagttcaacaag

SEQ ID NO: 5395665 - DNA, 25 bp, Homo sapien
gagctgtccacaactctccaaagaa

SEQ ID NO: 5395666 - DNA, 25 bp, Homo sapien
gaaatctgactttaagcagcaggga

SEQ ID NO: 5395667 - DNA, 25 bp, Homo sapien
cacaggacggaattgatggagatat

SEQ ID NO: 5395668 - DNA, 25 bp, Homo sapien
aatgcccgcatattgccacaggacg

SEQ ID NO: 5395669 - DNA, 25 bp, Homo sapien
caagacatgatagaaaatgcccgca

SEQ ID NO: 5395670 - DNA, 25 bp, Homo sapien
ctgatgtccctttacatatgtccaa

SEQ ID NO: 5395671 - DNA, 25 bp, Homo sapien
ctgatgatccagatatactgatgtc

SEQ ID NO: 5395672 - DNA, 25 bp, Homo sapien
cctttacatatgtccaatctggcta

SEQ ID NO: 5395673 - DNA, 25 bp, Homo sapien
ccagatatactgatgtccctttaca

SEQ ID NO: 5395674 - DNA, 25 bp, Homo sapien
gtttaaccttggtcactggatggcc

SEQ ID NO: 5395675 - DNA, 25 bp, Homo sapien
gacatgagacagcagcctataccca

SEQ ID NO: 5395676 - DNA, 25 bp, Homo sapien
tcctgtgatccctgtaagccatgca

SEQ ID NO: 5395677 - DNA, 25 bp, Homo sapien
acaagatgggaaagcattcacagcc

SEQ ID NO: 5395678 - DNA, 25 bp, Homo sapien
gataatgttacgatacaagctctgc

SEQ ID NO: 5395679 - DNA, 25 bp, Homo sapien
gacagagtagctattctagaagaca

SEQ ID NO: 5395680 - DNA, 25 bp, Homo sapien
cgttagggacagctagccagacctg

SEQ ID NO: 5395681 - DNA, 25 bp, Homo sapien
aagagttgagaccaggaaatgacgt

SEQ ID NO: 5395682 - DNA, 25 bp, Homo sapien
ttaatcctttcttcctggtatccat

SEQ ID NO: 5395683 - DNA, 25 bp, Homo sapien
cttctgttctctctccttttaatcc

SEQ ID NO: 5395684 - DNA, 25 bp, Homo sapien
tttaatcctttcttcctggtatcca

SEQ ID NO: 5395685 - DNA, 25 bp, Homo sapien
ctgttctctctccttttaatccttt

SEQ ID NO: 5395686 - DNA, 25 bp, Homo sapien
gtcacctggcttttcgagtccctct

SEQ ID NO: 5395687 - DNA, 25 bp, Homo sapien
ctggcttttcgagtccctctgcctt

SEQ ID NO: 5395688 - DNA, 25 bp, Homo sapien
acctggcttttcgagtccctctgcc

SEQ ID NO: 5395689 - DNA, 25 bp, Homo sapien
ggcttttcgagtccctctgccttga

SEQ ID NO: 5395690 - DNA, 25 bp, Homo sapien
taggctgaatgggatatgtctgtgc

SEQ ID NO: 5395691 - DNA, 25 bp, Homo sapien
gatatgtctgtgcttctgaagacaa

SEQ ID NO: 5395692 - DNA, 25 bp, Homo sapien
tgtctaacccaccattcagtgtagg

SEQ ID NO: 5395693 - DNA, 25 bp, Homo sapien
acaggacagtgtctaacccaccatt

SEQ ID NO: 5395694 - DNA, 25 bp, Homo sapien
gcaggtacaccagaagtgacatttc

SEQ ID NO: 5395695 - DNA, 25 bp, Homo sapien
tccagagataggacagtcagtggat

SEQ ID NO: 5395696 - DNA, 25 bp, Homo sapien
gagtgctcctcattaggaagtccag

SEQ ID NO: 5395697 - DNA, 25 bp, Homo sapien
tagtacctgctattcaagatgctgt

SEQ ID NO: 5395698 - DNA, 25 bp, Homo sapien
attaccacagacaatggaagatggc

SEQ ID NO: 5395699 - DNA, 25 bp, Homo sapien
gatgctgttcttaccggctttggtc

SEQ ID NO: 5395700 - DNA, 25 bp, Homo sapien
tacagtggttttggatactgtacac

SEQ ID NO: 5395701 - DNA, 25 bp, Homo sapien
cctaggactaacaagaaaggctgcc

SEQ ID NO: 5395702 - DNA, 25 bp, Homo sapien
taaaactatactgttcctaggacta

SEQ ID NO: 5395703 - DNA, 25 bp, Homo sapien
ctaacacaataagatctaagacatt

SEQ ID NO: 5395704 - DNA, 25 bp, Homo sapien
acacattcatctatattcacagctc

SEQ ID NO: 5395705 - DNA, 25 bp, Homo sapien
ccaacaaggcccacacattcatcta

SEQ ID NO: 5395706 - DNA, 25 bp, Homo sapien
tcatctatattcacagctcctacca

SEQ ID NO: 5395707 - DNA, 25 bp, Homo sapien
cattcatctatattcacagctccta

SEQ ID NO: 5395708 - DNA, 25 bp, Homo sapien
ctctcagtaactttcctacataaag

SEQ ID NO: 5395709 - DNA, 25 bp, Homo sapien
tctcagtaactttcctacataaaga

SEQ ID NO: 5395710 - DNA, 25 bp, Homo sapien
taactttcctacataaagactgaga

SEQ ID NO: 5395711 - DNA, 25 bp, Homo sapien
cagtaactttcctacataaagactg

SEQ ID NO: 5395712 - DNA, 25 bp, Homo sapien
tcaacattactggattgacattttc

SEQ ID NO: 5395713 - DNA, 25 bp, Homo sapien
ctatcaacattactggattgacatt

SEQ ID NO: 5395714 - DNA, 25 bp, Homo sapien
caacattactggattgacattttcc

SEQ ID NO: 5395715 - DNA, 25 bp, Homo sapien
cattactggattgacattttccctt

SEQ ID NO: 5395716 - DNA, 25 bp, Homo sapien
caacctgcctaatgataatatctga

SEQ ID NO: 5395717 - DNA, 25 bp, Homo sapien
gagcactcccgtagtcccagatact

SEQ ID NO: 5395718 - DNA, 25 bp, Homo sapien
aaaagttgattggtagctggtaaga

SEQ ID NO: 5395719 - DNA, 25 bp, Homo sapien
cagtcacatgcacctatatttggtc

SEQ ID NO: 5395720 - DNA, 25 bp, Homo sapien
agaaactgtgtcaggtccctttcta

SEQ ID NO: 5395721 - DNA, 25 bp, Homo sapien
tgctctcggacatcattattttagt

SEQ ID NO: 5395722 - DNA, 25 bp, Homo sapien
tgtgtcaggtccctttctatatctc

SEQ ID NO: 5395723 - DNA, 25 bp, Homo sapien
ttttctgatgctctcggacatcatt

SEQ ID NO: 5395724 - DNA, 25 bp, Homo sapien
tggacaagcatcaggtcatataaac

SEQ ID NO: 5395725 - DNA, 25 bp, Homo sapien
ctaaggttgatgagtaaactgtctc

SEQ ID NO: 5395726 - DNA, 25 bp, Homo sapien
gaagtaatgagagactcaggacaga

SEQ ID NO: 5395727 - DNA, 25 bp, Homo sapien
gacaagccaaatgatgctgaggtca

SEQ ID NO: 5395728 - DNA, 25 bp, Homo sapien
cagaaaggtgtatcttaggagagca

SEQ ID NO: 5395729 - DNA, 25 bp, Homo sapien
gatacttagacagtgcactcgtacc

SEQ ID NO: 5395730 - DNA, 25 bp, Homo sapien
gaaagatatcgattacactggagaa

SEQ ID NO: 5395731 - DNA, 25 bp, Homo sapien
gccacacggaagatcaggatacacc

SEQ ID NO: 5395732 - DNA, 25 bp, Homo sapien
cttctaggccagtcagaacaccggc

SEQ ID NO: 5395733 - DNA, 25 bp, Homo sapien
gagtacagcatttgatgggcttaca

SEQ ID NO: 5395734 - DNA, 25 bp, Homo sapien
gaacaccggcctatggcagaatcaa

SEQ ID NO: 5395735 - DNA, 25 bp, Homo sapien
tacagaacatcaactatgcgccaac

SEQ ID NO: 5395736 - DNA, 25 bp, Homo sapien
tcccagtcctgactgggcaacagag

SEQ ID NO: 5395737 - DNA, 25 bp, Homo sapien
aatatcaacatcactggtaatcaga

SEQ ID NO: 5395738 - DNA, 25 bp, Homo sapien
cacaaagagataccagtatacaccc

SEQ ID NO: 5395739 - DNA, 25 bp, Homo sapien
gataaactacacttactctacagac

SEQ ID NO: 5395740 - DNA, 25 bp, Homo sapien
catatggagatgtcataagacagct

SEQ ID NO: 5395741 - DNA, 25 bp, Homo sapien
cagctggatatgtgtctagagttca

SEQ ID NO: 5395742 - DNA, 25 bp, Homo sapien
caccaatggacttagatggcgaaga

SEQ ID NO: 5395743 - DNA, 25 bp, Homo sapien
aaagctgagagaccagtcaagaggc

SEQ ID NO: 5395744 - DNA, 25 bp, Homo sapien
gcttcagcactgagactaatggatt

SEQ ID NO: 5395745 - DNA, 25 bp, Homo sapien
ggaagacacattgcgcatcactaga

SEQ ID NO: 5395746 - DNA, 25 bp, Homo sapien
cacgctatagctcataaaggaagac

SEQ ID NO: 5395747 - DNA, 25 bp, Homo sapien
taaccatccaggtactaaagtgagt

SEQ ID NO: 5395748 - DNA, 25 bp, Homo sapien
tccacattagaatttagattaaaac

SEQ ID NO: 5395749 - DNA, 25 bp, Homo sapien
aacatgctacctgcaaaatgaaaat

SEQ ID NO: 5395750 - DNA, 25 bp, Homo sapien
gaaaaattctgtgcaaccaaccagg

SEQ ID NO: 5395751 - DNA, 25 bp, Homo sapien
ccaggtcaataactgcatatctact

SEQ ID NO: 5395752 - DNA, 25 bp, Homo sapien
aaagggtatatactctatcatctca

SEQ ID NO: 5395753 - DNA, 25 bp, Homo sapien
ggcctgatagaaacagtgcattaag

SEQ ID NO: 5395754 - DNA, 25 bp, Homo sapien
cctaatctatggaaatagaaatcag

SEQ ID NO: 5395755 - DNA, 25 bp, Homo sapien
tatgaagctcaagaacaggctaacc

SEQ ID NO: 5395756 - DNA, 25 bp, Homo sapien
agtactcacatttaagctctgccat

SEQ ID NO: 5395757 - DNA, 25 bp, Homo sapien
acatcccacaccaaggtgccacagt

SEQ ID NO: 5395758 - DNA, 25 bp, Homo sapien
caaggtgccacagtactcacattta

SEQ ID NO: 5395759 - DNA, 25 bp, Homo sapien
gccatgacactatcaccttggctgt

SEQ ID NO: 5395760 - DNA, 25 bp, Homo sapien
taaattggtatgcaacaagatcttc

SEQ ID NO: 5395761 - DNA, 25 bp, Homo sapien
attggtatgcaacaagatcttcaag

SEQ ID NO: 5395762 - DNA, 25 bp, Homo sapien
gaataaattggtatgcaacaagatc

SEQ ID NO: 5395763 - DNA, 25 bp, Homo sapien
aaatgaataaattggtatgcaacaa

SEQ ID NO: 5395764 - DNA, 25 bp, Homo sapien
gagtccacgaatgccaggatcactg

SEQ ID NO: 5395765 - DNA, 25 bp, Homo sapien
tggagtccacgaatgccaggatcac

SEQ ID NO: 5395766 - DNA, 25 bp, Homo sapien
aatgttttctggagtccacgaatgc

SEQ ID NO: 5395767 - DNA, 25 bp, Homo sapien
tttctggagtccacgaatgccagga

SEQ ID NO: 5395768 - DNA, 25 bp, Homo sapien
tcacgactaaatgggtcctttgtaa

SEQ ID NO: 5395769 - DNA, 25 bp, Homo sapien
taaatatcacgactaaatgggtcct

SEQ ID NO: 5395770 - DNA, 25 bp, Homo sapien
ctataaatatcacgactaaatgggt

SEQ ID NO: 5395771 - DNA, 25 bp, Homo sapien
tatcacgactaaatgggtcctttgt

SEQ ID NO: 5395772 - DNA, 25 bp, Homo sapien
tatgagaactcatcagacaagggag

SEQ ID NO: 5395773 - DNA, 25 bp, Homo sapien
aagcaatttatgagaactcatcaga

SEQ ID NO: 5395774 - DNA, 25 bp, Homo sapien
aactgatgaattctcaaggctttcc

SEQ ID NO: 5395775 - DNA, 25 bp, Homo sapien
gataaaactgatgaattctcaaggc

SEQ ID NO: 5395776 - DNA, 25 bp, Homo sapien
gatgtgtgcaacttccactatccag

SEQ ID NO: 5395777 - DNA, 25 bp, Homo sapien
ccaaaaacatgcagtggtggcagtg

SEQ ID NO: 5395778 - DNA, 25 bp, Homo sapien
gatggcgatgttagttgcactgcac

SEQ ID NO: 5395779 - DNA, 25 bp, Homo sapien
gatctttttcctagcaggatggcga

SEQ ID NO: 5395780 - DNA, 25 bp, Homo sapien
catataaattcttggatggattttt

SEQ ID NO: 5395781 - DNA, 25 bp, Homo sapien
tctctgtgcataatagatggcaatc

SEQ ID NO: 5395782 - DNA, 25 bp, Homo sapien
caatttcagtaacggattttggctc

SEQ ID NO: 5395783 - DNA, 25 bp, Homo sapien
caatccttaggaagtatccagtttg

SEQ ID NO: 5395784 - DNA, 25 bp, Homo sapien
catgaagaacctaagtggaaagact

SEQ ID NO: 5395785 - DNA, 25 bp, Homo sapien
tgcagacagctctagtcactttggt

SEQ ID NO: 5395786 - DNA, 25 bp, Homo sapien
ccagacctgttactacaatgcagac

SEQ ID NO: 5395787 - DNA, 25 bp, Homo sapien
caagtatttgtttggccagacctgt

SEQ ID NO: 5395788 - DNA, 25 bp, Homo sapien
gctgagtcacggcattctttgaact

SEQ ID NO: 5395789 - DNA, 25 bp, Homo sapien
tatgcctgctctaacagccatcctg

SEQ ID NO: 5395790 - DNA, 25 bp, Homo sapien
tgaactatgccagctgatcatcagt

SEQ ID NO: 5395791 - DNA, 25 bp, Homo sapien
atttcctgccaaagacatgtgggca

SEQ ID NO: 5395792 - DNA, 25 bp, Homo sapien
gattgacggtactagaaaatagctt

SEQ ID NO: 5395793 - DNA, 25 bp, Homo sapien
cggattagcgtatggacttcaaaga

SEQ ID NO: 5395794 - DNA, 25 bp, Homo sapien
gcagatagttaattcacaaacgcag

SEQ ID NO: 5395795 - DNA, 25 bp, Homo sapien
tactattaatggcactacagaaccc

SEQ ID NO: 5395796 - DNA, 25 bp, Homo sapien
gtatacctcacaaccaatagagtgg

SEQ ID NO: 5395797 - DNA, 25 bp, Homo sapien
tatcaagtgtgaacaggctgacaag

SEQ ID NO: 5395798 - DNA, 25 bp, Homo sapien
gtgagagtcactacaaccctgaagt

SEQ ID NO: 5395799 - DNA, 25 bp, Homo sapien
tgccatggtgaacagctccaaaacc

SEQ ID NO: 5395800 - DNA, 25 bp, Homo sapien
agctgacaatagcacagcaggtaac

SEQ ID NO: 5395801 - DNA, 25 bp, Homo sapien
gcaggtaacacaagctttctaaaat

SEQ ID NO: 5395802 - DNA, 25 bp, Homo sapien
gggttagtcgaaatatggaatctca

SEQ ID NO: 5395803 - DNA, 25 bp, Homo sapien
gatctttcacccataattttgtaac

SEQ ID NO: 5395804 - DNA, 25 bp, Homo sapien
gcgaagctttccgtcaggaaggcct

SEQ ID NO: 5395805 - DNA, 25 bp, Homo sapien
taactgagggcgactaggagccaga

SEQ ID NO: 5395806 - DNA, 25 bp, Homo sapien
tatgtgcttaatcctcagacgaggg

SEQ ID NO: 5395807 - DNA, 25 bp, Homo sapien
tgagggtcttcacactcggctggca

SEQ ID NO: 5395808 - DNA, 25 bp, Homo sapien
aaaacgcaattcgaacacgaccagt

SEQ ID NO: 5395809 - DNA, 25 bp, Homo sapien
cacgaccagtttgcagaaggcacaa

SEQ ID NO: 5395810 - DNA, 25 bp, Homo sapien
gaaggcacaaaatgccacggcgtga

SEQ ID NO: 5395811 - DNA, 25 bp, Homo sapien
agcacgcacgacatgtaggcaccaa

SEQ ID NO: 5395812 - DNA, 25 bp, Homo sapien
cccagccggcgacgcgctgacgccg

SEQ ID NO: 5395813 - DNA, 25 bp, Homo sapien
tctctccctcctggccaccggcgcg

SEQ ID NO: 5395814 - DNA, 25 bp, Homo sapien
cggcgcggcccagccggcgacgcgc

SEQ ID NO: 5395815 - DNA, 25 bp, Homo sapien
tgtctctccctcctggccaccggcg

SEQ ID NO: 5395816 - DNA, 25 bp, Homo sapien
tctctccaaagaataactactaatg

SEQ ID NO: 5395817 - DNA, 25 bp, Homo sapien
taatgagcacgatgccttggtaaca

SEQ ID NO: 5395818 - DNA, 25 bp, Homo sapien
caaagaataactactaatgagcacg

SEQ ID NO: 5395819 - DNA, 25 bp, Homo sapien
taactactaatgagcacgatgcctt

SEQ ID NO: 5395820 - DNA, 25 bp, Homo sapien
tccagatggtgtagctgtaagaaag

SEQ ID NO: 5395821 - DNA, 25 bp, Homo sapien
tttccagatggtgtagctgtaagaa

SEQ ID NO: 5395822 - DNA, 25 bp, Homo sapien
ccattttccagatggtgtagctgta

SEQ ID NO: 5395823 - DNA, 25 bp, Homo sapien
agatggtgtagctgtaagaaagaag

SEQ ID NO: 5395824 - DNA, 25 bp, Homo sapien
tagcccaagaaggtgcttctggccc

SEQ ID NO: 5395825 - DNA, 25 bp, Homo sapien
gcccaagaaggtgcttctggcccac

SEQ ID NO: 5395826 - DNA, 25 bp, Homo sapien
ttgatgaaagttccgtatctgatgc

SEQ ID NO: 5395827 - DNA, 25 bp, Homo sapien
tccacccaagtggaaaccatattga

SEQ ID NO: 5395828 - DNA, 25 bp, Homo sapien
gaaaccatattgatgaaagttccgt

SEQ ID NO: 5395829 - DNA, 25 bp, Homo sapien
tctgatgcagatgatttagcaaaca

SEQ ID NO: 5395830 - DNA, 25 bp, Homo sapien
gagtgccagtgcgacttccagtatt

SEQ ID NO: 5395831 - DNA, 25 bp, Homo sapien
ccagtgcgacttccagtattgttct

SEQ ID NO: 5395832 - DNA, 25 bp, Homo sapien
ttgtcagagtgccagtgcgacttcc

SEQ ID NO: 5395833 - DNA, 25 bp, Homo sapien
cctttttgtcagagtgccagtgcga

SEQ ID NO: 5395834 - DNA, 25 bp, Homo sapien
gcaaatgagaggcaggggaaataca

SEQ ID NO: 5395835 - DNA, 25 bp, Homo sapien
aggcaaatgagaggcaggggaaata

SEQ ID NO: 5395836 - DNA, 25 bp, Homo sapien
ctgggaggcaaatgagaggcagggg

SEQ ID NO: 5395837 - DNA, 25 bp, Homo sapien
ggaggcaaatgagaggcaggggaaa

SEQ ID NO: 5395838 - DNA, 25 bp, Homo sapien
tctttggtttccagttcaaagcgtg

SEQ ID NO: 5395839 - DNA, 25 bp, Homo sapien
taaaagtctagtccaggtaaaatca

SEQ ID NO: 5395840 - DNA, 25 bp, Homo sapien
cttattccattgtgcaggtttcctc

SEQ ID NO: 5395841 - DNA, 25 bp, Homo sapien
gcgtgtgaccttattccattgtgca

SEQ ID NO: 5395842 - DNA, 25 bp, Homo sapien
aataccacaggaatccgaaaggcaa

SEQ ID NO: 5395843 - DNA, 25 bp, Homo sapien
cacaggaatccgaaaggcaaaaatg

SEQ ID NO: 5395844 - DNA, 25 bp, Homo sapien
gaatccgaaaggcaaaaatgatcat

SEQ ID NO: 5395845 - DNA, 25 bp, Homo sapien
tgttgaatcctccacaggggacaat

SEQ ID NO: 5395846 - DNA, 25 bp, Homo sapien
tcagcatcatattatctcggtgcca

SEQ ID NO: 5395847 - DNA, 25 bp, Homo sapien
taatctcaagaccaaatcggaacag

SEQ ID NO: 5395848 - DNA, 25 bp, Homo sapien
tagattataggtagtaggcgactcg

SEQ ID NO: 5395849 - DNA, 25 bp, Homo sapien
tgaaacatcagacccaaaaaattgg

SEQ ID NO: 5395850 - DNA, 25 bp, Homo sapien
aaggaagcaatcattcctttatact

SEQ ID NO: 5395851 - DNA, 25 bp, Homo sapien
gccaattatctccatgtttatttaa

SEQ ID NO: 5395852 - DNA, 25 bp, Homo sapien
gaagcaatcattcctttatacttct

SEQ ID NO: 5395853 - DNA, 25 bp, Homo sapien
tattttgctctaaaggaagcaatca

SEQ ID NO: 5395854 - DNA, 25 bp, Homo sapien
ctaatgtgcaatcgtgtccagcgga

SEQ ID NO: 5395855 - DNA, 25 bp, Homo sapien
tacagttaagaagggagccataacc

SEQ ID NO: 5395856 - DNA, 25 bp, Homo sapien
gaatttcttgtttgcgaccttggag

SEQ ID NO: 5395857 - DNA, 25 bp, Homo sapien
gggacacagatatgccccatgggca

SEQ ID NO: 5395858 - DNA, 25 bp, Homo sapien
tgtgaaatttaggaaagtggtatta

SEQ ID NO: 5395859 - DNA, 25 bp, Homo sapien
gagtttcaagttgcaaagaatgact

SEQ ID NO: 5395860 - DNA, 25 bp, Homo sapien
tgaaatttaggaaagtggtattatg

SEQ ID NO: 5395861 - DNA, 25 bp, Homo sapien
catgttaatggtcattgaaggaaaa

SEQ ID NO: 5395862 - DNA, 25 bp, Homo sapien
cagttattggtaccagtcaaaatta

SEQ ID NO: 5395863 - DNA, 25 bp, Homo sapien
caatctggaatcaggatcagttgag

SEQ ID NO: 5395864 - DNA, 25 bp, Homo sapien
aaactctctaaaagtacagaactca

SEQ ID NO: 5395865 - DNA, 25 bp, Homo sapien
cgtccaggtcactttaagacttcgg

SEQ ID NO: 5395866 - DNA, 25 bp, Homo sapien
gctggtgcaaaggtaacccatgtta

SEQ ID NO: 5395867 - DNA, 25 bp, Homo sapien
aagaacagggtgagcttaacactga

SEQ ID NO: 5395868 - DNA, 25 bp, Homo sapien
catatgtaaactaaggaactgctgc

SEQ ID NO: 5395869 - DNA, 25 bp, Homo sapien
caggcacgtgcatgaacagcttaac

SEQ ID NO: 5395870 - DNA, 25 bp, Homo sapien
cacaggaattagtctctgaaccaca

SEQ ID NO: 5395871 - DNA, 25 bp, Homo sapien
tactgatgcattgtagtgcgagcac

SEQ ID NO: 5395872 - DNA, 25 bp, Homo sapien
tactgatgtatggtagtgcgggcac

SEQ ID NO: 5395873 - DNA, 25 bp, Homo sapien
cttcctcgtggtctgatttggtttc

SEQ ID NO: 5395874 - DNA, 25 bp, Homo sapien
ttacatgccatcttccatattgtct

SEQ ID NO: 5395875 - DNA, 25 bp, Homo sapien
catattgtcttcctcgtggtctgat

SEQ ID NO: 5395876 - DNA, 25 bp, Homo sapien
cctcgtggtctgatttggtttccat

SEQ ID NO: 5395877 - DNA, 25 bp, Homo sapien
ttgagtgctcgataaggtggtgctt

SEQ ID NO: 5395878 - DNA, 25 bp, Homo sapien
tgaggggtaatgctctgcaagtaag

SEQ ID NO: 5395879 - DNA, 25 bp, Homo sapien
tcagcagctcggtgggttccaagtg

SEQ ID NO: 5395880 - DNA, 25 bp, Homo sapien
cgagtcagagtacccctgaggggta

SEQ ID NO: 5395881 - DNA, 25 bp, Homo sapien
cacaaatagcactggaatgccttca

SEQ ID NO: 5395882 - DNA, 25 bp, Homo sapien
tgccaagcctaaacacatctggttg

SEQ ID NO: 5395883 - DNA, 25 bp, Homo sapien
aaaatactcttcagctagggaatgc

SEQ ID NO: 5395884 - DNA, 25 bp, Homo sapien
caggcagtttctaaccagtgtttgg

SEQ ID NO: 5395885 - DNA, 25 bp, Homo sapien
tgggtttcaaaagcacctaccatga

SEQ ID NO: 5395886 - DNA, 25 bp, Homo sapien
gatttgtgattcacctgacagctag

SEQ ID NO: 5395887 - DNA, 25 bp, Homo sapien
cctaccatgatgtctcaacagagaa

SEQ ID NO: 5395888 - DNA, 25 bp, Homo sapien
aatttccacatgaccaagattcaga

SEQ ID NO: 5395889 - DNA, 25 bp, Homo sapien
caatcagagagggaaagatgccttc

SEQ ID NO: 5395890 - DNA, 25 bp, Homo sapien
gatgactttggtatctgcctaggaa

SEQ ID NO: 5395891 - DNA, 25 bp, Homo sapien
taggcaatgtttcgaggcagcagct

SEQ ID NO: 5395892 - DNA, 25 bp, Homo sapien
tagaatcagtcagtcccaagacagt

SEQ ID NO: 5395893 - DNA, 25 bp, Homo sapien
tagacttcctggtttagaatgagtt

SEQ ID NO: 5395894 - DNA, 25 bp, Homo sapien
aatgtttgatactagacttcctggt

SEQ ID NO: 5395895 - DNA, 25 bp, Homo sapien
tgcgcctggctcatattcccttttc

SEQ ID NO: 5395896 - DNA, 25 bp, Homo sapien
tgagttgttttcctatactccccta

SEQ ID NO: 5395897 - DNA, 25 bp, Homo sapien
gcaggacgggaagctctaaccagtt

SEQ ID NO: 5395898 - DNA, 25 bp, Homo sapien
taaccagttaggcaaagtcactcat

SEQ ID NO: 5395899 - DNA, 25 bp, Homo sapien
aaagtcctactgagctcggcaaaag

SEQ ID NO: 5395900 - DNA, 25 bp, Homo sapien
tattatgaaatgtacagcaggacgg

SEQ ID NO: 5395901 - DNA, 25 bp, Homo sapien
ttgatctttttgcgagacagacagg

SEQ ID NO: 5395902 - DNA, 25 bp, Homo sapien
tctttttgcgagacagacaggagtc

SEQ ID NO: 5395903 - DNA, 25 bp, Homo sapien
gtcatatcatctaggcctgacatgt

SEQ ID NO: 5395904 - DNA, 25 bp, Homo sapien
agtcttgtgctccatcaagcaattc

SEQ ID NO: 5395905 - DNA, 25 bp, Homo sapien
taggcctgacatgtagtcttgtgct

SEQ ID NO: 5395906 - DNA, 25 bp, Homo sapien
tatcatctaggcctgacatgtagtc

SEQ ID NO: 5395907 - DNA, 25 bp, Homo sapien
ttctctgccctggaaggtagatctc

SEQ ID NO: 5395908 - DNA, 25 bp, Homo sapien
aatttgtgtattttccagtatgctt

SEQ ID NO: 5395909 - DNA, 25 bp, Homo sapien
tgaggtctcaatatgcagtatatgc

SEQ ID NO: 5395910 - DNA, 25 bp, Homo sapien
tgtgtattttccagtatgcttaact

SEQ ID NO: 5395911 - DNA, 25 bp, Homo sapien
ttatgactcactaccggaagaccga

SEQ ID NO: 5395912 - DNA, 25 bp, Homo sapien
tttcagcagttcatcggagttgggc

SEQ ID NO: 5395913 - DNA, 25 bp, Homo sapien
taaacccgtgtgtagccataagaac

SEQ ID NO: 5395914 - DNA, 25 bp, Homo sapien
tgacaagtctaaaggctcagcctgg

SEQ ID NO: 5395915 - DNA, 25 bp, Homo sapien
tgcaattgtctaccaagagaagaat

SEQ ID NO: 5395916 - DNA, 25 bp, Homo sapien
tagataacaattgcaattgtctacc

SEQ ID NO: 5395917 - DNA, 25 bp, Homo sapien
caattgcaattgtctaccaagagaa

SEQ ID NO: 5395918 - DNA, 25 bp, Homo sapien
taacaattgcaattgtctaccaaga

SEQ ID NO: 5395919 - DNA, 25 bp, Homo sapien
actgtgaattcgcaggtgttctttc

SEQ ID NO: 5395920 - DNA, 25 bp, Homo sapien
tgtgcatttgaacttgcgattacct

SEQ ID NO: 5395921 - DNA, 25 bp, Homo sapien
tgaacttgcgattacctgctccttg

SEQ ID NO: 5395922 - DNA, 25 bp, Homo sapien
cctgctccttgggttagcatttggt

SEQ ID NO: 5395923 - DNA, 25 bp, Homo sapien
agagacaacatcttgggttatagct

SEQ ID NO: 5395924 - DNA, 25 bp, Homo sapien
catcttgggttatagctgcttgagc

SEQ ID NO: 5395925 - DNA, 25 bp, Homo sapien
cagttttatcacaggccagtaggaa

SEQ ID NO: 5395926 - DNA, 25 bp, Homo sapien
taggaaagacttcaacgacttttca

SEQ ID NO: 5395927 - DNA, 25 bp, Homo sapien
tcttcattcttctcgtggcggtact

SEQ ID NO: 5395928 - DNA, 25 bp, Homo sapien
tgatgtcaagcgcttgtagccccgg

SEQ ID NO: 5395929 - DNA, 25 bp, Homo sapien
caaacgtgtagctacagagagggca

SEQ ID NO: 5395930 - DNA, 25 bp, Homo sapien
ttgtgtgtcaccatatgccgctcga

SEQ ID NO: 5395931 - DNA, 25 bp, Homo sapien
cagaggtcagtgcagtggctaaaaa

SEQ ID NO: 5395932 - DNA, 25 bp, Homo sapien
cacccaggcatgtagtgcatttgta

SEQ ID NO: 5395933 - DNA, 25 bp, Homo sapien
gctcatgaaattccatgcctctgca

SEQ ID NO: 5395934 - DNA, 25 bp, Homo sapien
catttgtaattgtaacagctgcaga

SEQ ID NO: 5395935 - DNA, 25 bp, Homo sapien
aatggctgtgtcactgcgctgaagg

SEQ ID NO: 5395936 - DNA, 25 bp, Homo sapien
tctggcgtgccaaggcgagacagct

SEQ ID NO: 5395937 - DNA, 25 bp, Homo sapien
gaccatcgcgttcctccagttttct

SEQ ID NO: 5395938 - DNA, 25 bp, Homo sapien
gaaggtactcctcgatgctgactgc

SEQ ID NO: 5395939 - DNA, 25 bp, Homo sapien
tccatcatagccagtgagaaatgct

SEQ ID NO: 5395940 - DNA, 25 bp, Homo sapien
gaaagcagttaaccttggtgccacg

SEQ ID NO: 5395941 - DNA, 25 bp, Homo sapien
cattgtccactagactgagcgtccc

SEQ ID NO: 5395942 - DNA, 25 bp, Homo sapien
tgagcgtccctaaccacagatacat

SEQ ID NO: 5395943 - DNA, 25 bp, Homo sapien
tcttttgagtaacttcactgatttt

SEQ ID NO: 5395944 - DNA, 25 bp, Homo sapien
gtcttttgagtaacttcactgattt

SEQ ID NO: 5395945 - DNA, 25 bp, Homo sapien
ccatgatgaatgtcttttgagtaac

SEQ ID NO: 5395946 - DNA, 25 bp, Homo sapien
aattcaattggatttgcattaatag

SEQ ID NO: 5395947 - DNA, 25 bp, Homo sapien
attcaattggatttgcattaatagc

SEQ ID NO: 5395948 - DNA, 25 bp, Homo sapien
aaattcaattggatttgcattaata

SEQ ID NO: 5395949 - DNA, 25 bp, Homo sapien
tttttctagtgtaaaatcaacctca

SEQ ID NO: 5395950 - DNA, 25 bp, Homo sapien
acaggaatgaggtacaaaagtagct

SEQ ID NO: 5395951 - DNA, 25 bp, Homo sapien
ttttctagtgtaaaatcaacctcat

SEQ ID NO: 5395952 - DNA, 25 bp, Homo sapien
gaatgaggtacaaaagtagctgaaa

SEQ ID NO: 5395953 - DNA, 25 bp, Homo sapien
ttatgttaagccatttaagtaaaca

SEQ ID NO: 5395954 - DNA, 25 bp, Homo sapien
tgttcacagtggaagacaggtactc

SEQ ID NO: 5395955 - DNA, 25 bp, Homo sapien
attatcactggtttagtgtcctgca

SEQ ID NO: 5395956 - DNA, 25 bp, Homo sapien
tttgtagcaagcctgtgttcacagt

SEQ ID NO: 5395957 - DNA, 25 bp, Homo sapien
aatctaggtaactgtatttatcatc

SEQ ID NO: 5395958 - DNA, 25 bp, Homo sapien
ttagtttaaggaagcacatattcag

SEQ ID NO: 5395959 - DNA, 25 bp, Homo sapien
catttgttgaggtctatagattctc

SEQ ID NO: 5395960 - DNA, 25 bp, Homo sapien
cactatgaaaggcaaagggacctga

SEQ ID NO: 5395961 - DNA, 25 bp, Homo sapien
gacatattggcactagttacctaaa

SEQ ID NO: 5395962 - DNA, 25 bp, Homo sapien
tagtacagcatcttggccgctctct

SEQ ID NO: 5395963 - DNA, 25 bp, Homo sapien
aaacaaccgtgagggaagaggatga

SEQ ID NO: 5395964 - DNA, 25 bp, Homo sapien
tctcattacacagctacatgggcgg

SEQ ID NO: 5395965 - DNA, 25 bp, Homo sapien
gaatatcaagatgtagagactgcta

SEQ ID NO: 5395966 - DNA, 25 bp, Homo sapien
tattggcacagaatgatagagtcca

SEQ ID NO: 5395967 - DNA, 25 bp, Homo sapien
gaatgggaatctgtagtagtctgca

SEQ ID NO: 5395968 - DNA, 25 bp, Homo sapien
agactgctaacactcaacgattttg

SEQ ID NO: 5395969 - DNA, 25 bp, Homo sapien
aatatagacaatatgcacttgtctt

SEQ ID NO: 5395970 - DNA, 25 bp, Homo sapien
caatatgcacttgtctttcacatta

SEQ ID NO: 5395971 - DNA, 25 bp, Homo sapien
gcacttgtctttcacattactgtgt

SEQ ID NO: 5395972 - DNA, 25 bp, Homo sapien
tagacaatatgcacttgtctttcac

SEQ ID NO: 5395973 - DNA, 25 bp, Homo sapien
tctgactggcagacaaaactcttcc

SEQ ID NO: 5395974 - DNA, 25 bp, Homo sapien
tagctgctcctaatcgcaaacaaag

SEQ ID NO: 5395975 - DNA, 25 bp, Homo sapien
cagtggcatccgtatcatctgggag

SEQ ID NO: 5395976 - DNA, 25 bp, Homo sapien
tattcagctttgtgtcaccagcacc

SEQ ID NO: 5395977 - DNA, 25 bp, Homo sapien
gaaactgtgtcatcccctgataata

SEQ ID NO: 5395978 - DNA, 25 bp, Homo sapien
tgtaatcaagtttctaaaggcgctc

SEQ ID NO: 5395979 - DNA, 25 bp, Homo sapien
gaataactttccatagcaccttgca

SEQ ID NO: 5395980 - DNA, 25 bp, Homo sapien
gaaatgcctcaagcttaactttgga

SEQ ID NO: 5395981 - DNA, 25 bp, Homo sapien
tccactctgtagctgtaatggtttg

SEQ ID NO: 5395982 - DNA, 25 bp, Homo sapien
cctcaaattgtttccactctgtagc

SEQ ID NO: 5395983 - DNA, 25 bp, Homo sapien
tgtaatggtttgaagtcgaagtcga

SEQ ID NO: 5395984 - DNA, 25 bp, Homo sapien
ggtttgaagtcgaagtcgaaagtca

SEQ ID NO: 5395985 - DNA, 25 bp, Homo sapien
gcaagcaaaatgacgcctgtcccat

SEQ ID NO: 5395986 - DNA, 25 bp, Homo sapien
tagatagtccatgcagaacctggct

SEQ ID NO: 5395987 - DNA, 25 bp, Homo sapien
tgggacaagaaccagaaccgcgaac

SEQ ID NO: 5395988 - DNA, 25 bp, Homo sapien
gaacctggcttcacagtgcttaggc

SEQ ID NO: 5395989 - DNA, 25 bp, Homo sapien
catgcatttcgtattcgtctaccac

SEQ ID NO: 5395990 - DNA, 25 bp, Homo sapien
aatgccttgcacttagtagggtccc

SEQ ID NO: 5395991 - DNA, 25 bp, Homo sapien
cacccggatgaatgtaggtccttaa

SEQ ID NO: 5395992 - DNA, 25 bp, Homo sapien
gtagggtcccaataagtgaccattg

SEQ ID NO: 5395993 - DNA, 25 bp, Homo sapien
tgatcaccatgcacctaagatagct

SEQ ID NO: 5395994 - DNA, 25 bp, Homo sapien
gaagatacttagtctcctccacaga

SEQ ID NO: 5395995 - DNA, 25 bp, Homo sapien
tgtaatatctgccatgtgtgctccc

SEQ ID NO: 5395996 - DNA, 25 bp, Homo sapien
tactagcacgtaggcaaactcatgt

SEQ ID NO: 5395997 - DNA, 25 bp, Homo sapien
ttatcggactgaagaacgtcctgta

SEQ ID NO: 5395998 - DNA, 25 bp, Homo sapien
cggactgaagaacgtcctgtaggtg

SEQ ID NO: 5395999 - DNA, 25 bp, Homo sapien
tcggactgaagaacgtcctgtaggt

SEQ ID NO: 5396000 - DNA, 25 bp, Homo sapien
tatcggactgaagaacgtcctgtag

SEQ ID NO: 5396001 - DNA, 25 bp, Homo sapien
catggtagcataacatgacccagac

SEQ ID NO: 5396002 - DNA, 25 bp, Homo sapien
gctatatgctaaacatgcagatctg

SEQ ID NO: 5396003 - DNA, 25 bp, Homo sapien
cacctggataactacagtgacttcc

SEQ ID NO: 5396004 - DNA, 25 bp, Homo sapien
gaaaatacttgtgtctaaaggctgg

SEQ ID NO: 5396005 - DNA, 25 bp, Homo sapien
ggctcaaggatgcagagaattacaa

SEQ ID NO: 5396006 - DNA, 25 bp, Homo sapien
aatagtctcatctaggaaaagagag

SEQ ID NO: 5396007 - DNA, 25 bp, Homo sapien
gataattttatggtggacactatgc

SEQ ID NO: 5396008 - DNA, 25 bp, Homo sapien
tatttgtgatggtagtgtagaggac

SEQ ID NO: 5396009 - DNA, 25 bp, Homo sapien
gagagaaatgttcgtggaaatttgt

SEQ ID NO: 5396010 - DNA, 25 bp, Homo sapien
tattgagagaaatgttcgtggaaat

SEQ ID NO: 5396011 - DNA, 25 bp, Homo sapien
ttgagagaaatgttcgtggaaattt

SEQ ID NO: 5396012 - DNA, 25 bp, Homo sapien
tgagagaaatgttcgtggaaatttg

SEQ ID NO: 5396013 - DNA, 25 bp, Homo sapien
tgcctcactaaacccacatgacaca

SEQ ID NO: 5396014 - DNA, 25 bp, Homo sapien
gatgtgtcactgtttccttccctgc

SEQ ID NO: 5396015 - DNA, 25 bp, Homo sapien
ggagatacaaatggatgtgtcactg

SEQ ID NO: 5396016 - DNA, 25 bp, Homo sapien
caaatgtgatctgagcgtggccaac

SEQ ID NO: 5396017 - DNA, 25 bp, Homo sapien
ggccccatagtgtcatagtcttcct

SEQ ID NO: 5396018 - DNA, 25 bp, Homo sapien
tctggatcgtggcttctggccccat

SEQ ID NO: 5396019 - DNA, 25 bp, Homo sapien
taattgcggtctggatcgtggcttc

SEQ ID NO: 5396020 - DNA, 25 bp, Homo sapien
tgtaccattgttaattgcggtctgg

SEQ ID NO: 5396021 - DNA, 25 bp, Homo sapien
gagtcacaagaatcataagttttcc

SEQ ID NO: 5396022 - DNA, 25 bp, Homo sapien
ctcatgtgatttcgggtagccaaga

SEQ ID NO: 5396023 - DNA, 25 bp, Homo sapien
tcatctcatgtgatttcgggtagcc

SEQ ID NO: 5396024 - DNA, 25 bp, Homo sapien
tgatttcgggtagccaagagtcaca

SEQ ID NO: 5396025 - DNA, 25 bp, Homo sapien
gagatggtgtcacttttacctagaa

SEQ ID NO: 5396026 - DNA, 25 bp, Homo sapien
ttacagtagttggttgcttcccaaa

SEQ ID NO: 5396027 - DNA, 25 bp, Homo sapien
agatctttcagagacattggatgag

SEQ ID NO: 5396028 - DNA, 25 bp, Homo sapien
tagtcagcacattgtgtaaattgca

SEQ ID NO: 5396029 - DNA, 25 bp, Homo sapien
taaaagtttgcgtcttccagtcacc

SEQ ID NO: 5396030 - DNA, 25 bp, Homo sapien
aactttgattgtgctggaaccggaa

SEQ ID NO: 5396031 - DNA, 25 bp, Homo sapien
cccattgtgggacgaaagaatgtca

SEQ ID NO: 5396032 - DNA, 25 bp, Homo sapien
ccgaattaaaggcaatctggctgtc

SEQ ID NO: 5396033 - DNA, 25 bp, Homo sapien
taataagaaagctacctgaccaggt

SEQ ID NO: 5396034 - DNA, 25 bp, Homo sapien
tagaactagacaggtaatagccggg

SEQ ID NO: 5396035 - DNA, 25 bp, Homo sapien
tatgactgtagacagccaggcaccg

SEQ ID NO: 5396036 - DNA, 25 bp, Homo sapien
tcctaagatgtaactgccgcaatgt

SEQ ID NO: 5396037 - DNA, 25 bp, Homo sapien
aagaggccaagtgattttagacact

SEQ ID NO: 5396038 - DNA, 25 bp, Homo sapien
agaggccaagtgattttagacactt

SEQ ID NO: 5396039 - DNA, 25 bp, Homo sapien
gaagaggccaagtgattttagacac

SEQ ID NO: 5396040 - DNA, 25 bp, Homo sapien
gtagaatctcgttgttgtgccaggg

SEQ ID NO: 5396041 - DNA, 25 bp, Homo sapien
tcctggtccagagggttggcaatac

SEQ ID NO: 5396042 - DNA, 25 bp, Homo sapien
tggttgggcacactagctggactcg

SEQ ID NO: 5396043 - DNA, 25 bp, Homo sapien
tggaccatctacagaggcttgtaga

SEQ ID NO: 5396044 - DNA, 25 bp, Homo sapien
aagcacaaaacacactctctaaaca

SEQ ID NO: 5396045 - DNA, 25 bp, Homo sapien
gaagaagcacaaaacacactctcta

SEQ ID NO: 5396046 - DNA, 25 bp, Homo sapien
ctgcagaagaagcacaaaacacact

SEQ ID NO: 5396047 - DNA, 25 bp, Homo sapien
gcacaaaacacactctctaaacact

SEQ ID NO: 5396048 - DNA, 25 bp, Homo sapien
tagtacataaattgtccactttacc

SEQ ID NO: 5396049 - DNA, 25 bp, Homo sapien
agtacataaattgtccactttacca

SEQ ID NO: 5396050 - DNA, 25 bp, Homo sapien
ccaccagacaagaaagattagagta

SEQ ID NO: 5396051 - DNA, 25 bp, Homo sapien
gagtaataaacacggggcattagct

SEQ ID NO: 5396052 - DNA, 25 bp, Homo sapien
gcggagccgggcaaacagaatctgc

SEQ ID NO: 5396053 - DNA, 25 bp, Homo sapien
gccttccgaacaactgcacaacagg

SEQ ID NO: 5396054 - DNA, 25 bp, Homo sapien
ataatccgcgggtctgcacttgcct

SEQ ID NO: 5396055 - DNA, 25 bp, Homo sapien
ttaaaatgaaaacggcagcggagcc

SEQ ID NO: 5396056 - DNA, 25 bp, Homo sapien
accacaagggcttaggcaagttcag

SEQ ID NO: 5396057 - DNA, 25 bp, Homo sapien
tgaccacaagggcttaggcaagttc

SEQ ID NO: 5396058 - DNA, 25 bp, Homo sapien
gaccacaagggcttaggcaagttca

SEQ ID NO: 5396059 - DNA, 25 bp, Homo sapien
tgaataccaattgacgggggaaaca

SEQ ID NO: 5396060 - DNA, 25 bp, Homo sapien
cttttctagcgctgtgttaactagg

SEQ ID NO: 5396061 - DNA, 25 bp, Homo sapien
agcgctgtgttaactaggatatgca

SEQ ID NO: 5396062 - DNA, 25 bp, Homo sapien
tctagcgctgtgttaactaggatat

SEQ ID NO: 5396063 - DNA, 25 bp, Homo sapien
ttttctagcgctgtgttaactagga

SEQ ID NO: 5396064 - DNA, 25 bp, Homo sapien
ccagttagaagggaccatgccaatt

SEQ ID NO: 5396065 - DNA, 25 bp, Homo sapien
tgggtgggtaaagatcataggacta

SEQ ID NO: 5396066 - DNA, 25 bp, Homo sapien
ggaggcctagtgacaaatacgtatt

SEQ ID NO: 5396067 - DNA, 25 bp, Homo sapien
agttaccttgttacctccgtgcttg

SEQ ID NO: 5396068 - DNA, 25 bp, Homo sapien
gcttacaatccaaggacataatact

SEQ ID NO: 5396069 - DNA, 25 bp, Homo sapien
gtatatctaggactcataatggttt

SEQ ID NO: 5396070 - DNA, 25 bp, Homo sapien
tgattaccttacttaactcctacca

SEQ ID NO: 5396071 - DNA, 25 bp, Homo sapien
ctcctaccaaaggaaactagtcatt

SEQ ID NO: 5396072 - DNA, 25 bp, Homo sapien
tatgctcactatcatgcctgaagga

SEQ ID NO: 5396073 - DNA, 25 bp, Homo sapien
tatctgacatgagggcagaccttgt

SEQ ID NO: 5396074 - DNA, 25 bp, Homo sapien
tgctctatacaaaccatcagaagga

SEQ ID NO: 5396075 - DNA, 25 bp, Homo sapien
gaatccacgatcattcaacaacttg

SEQ ID NO: 5396076 - DNA, 25 bp, Homo sapien
gcccataaaaggtgtaaagtcagta

SEQ ID NO: 5396077 - DNA, 25 bp, Homo sapien
gtaactgccagagtacgttggaatg

SEQ ID NO: 5396078 - DNA, 25 bp, Homo sapien
taaaaggtgtaaagtcagtaactgc

SEQ ID NO: 5396079 - DNA, 25 bp, Homo sapien
aactgccagagtacgttggaatgtg

SEQ ID NO: 5396080 - DNA, 25 bp, Homo sapien
agctattgtagtcccacgaaattaa

SEQ ID NO: 5396081 - DNA, 25 bp, Homo sapien
tttttctaagatacagatataactg

SEQ ID NO: 5396082 - DNA, 25 bp, Homo sapien
tgattgttttagttgccccacccta

SEQ ID NO: 5396083 - DNA, 25 bp, Homo sapien
aactgaaatacacttttagctattg

SEQ ID NO: 5396084 - DNA, 25 bp, Homo sapien
tttcttgcaaaaggcattccatgct

SEQ ID NO: 5396085 - DNA, 25 bp, Homo sapien
tgaagtagcaacagcttgtctctta

SEQ ID NO: 5396086 - DNA, 25 bp, Homo sapien
cttcatctgaagtagcaacagcttg

SEQ ID NO: 5396087 - DNA, 25 bp, Homo sapien
tcatctgaagtagcaacagcttgtc

SEQ ID NO: 5396088 - DNA, 25 bp, Homo sapien
ccttcaaggtagcaagaggtgtggc

SEQ ID NO: 5396089 - DNA, 25 bp, Homo sapien
gaggtgtggctcatcttaatagatc

SEQ ID NO: 5396090 - DNA, 25 bp, Homo sapien
catggaggtaccgtaatgcttctac

SEQ ID NO: 5396091 - DNA, 25 bp, Homo sapien
gctcttccagaggaaaacaattacc

SEQ ID NO: 5396092 - DNA, 25 bp, Homo sapien
cacacatgttccctctctcaacaaa

SEQ ID NO: 5396093 - DNA, 25 bp, Homo sapien
ccctgtataaatccaccatctgtgc

SEQ ID NO: 5396094 - DNA, 25 bp, Homo sapien
aagcacacatgttccctctctcaac

SEQ ID NO: 5396095 - DNA, 25 bp, Homo sapien
cctgtataaatccaccatctgtgct

SEQ ID NO: 5396096 - DNA, 25 bp, Homo sapien
ctgcaataaaagcgaacaatttctt

SEQ ID NO: 5396097 - DNA, 25 bp, Homo sapien
atgaatcaagtaaatggcttatctt

SEQ ID NO: 5396098 - DNA, 25 bp, Homo sapien
gcaataaaagcgaacaatttctttc

SEQ ID NO: 5396099 - DNA, 25 bp, Homo sapien
gaatcaagtaaatggcttatctttt

SEQ ID NO: 5396100 - DNA, 25 bp, Homo sapien
ttaggacagataaaggccaattctc

SEQ ID NO: 5396101 - DNA, 25 bp, Homo sapien
tgcaaacacttatcagaagccctgg

SEQ ID NO: 5396102 - DNA, 25 bp, Homo sapien
tgagcccaaagaggtcacactgttg

SEQ ID NO: 5396103 - DNA, 25 bp, Homo sapien
cctccgtttcattaagatacagtgg

SEQ ID NO: 5396104 - DNA, 25 bp, Homo sapien
tgctacaataacatattacgatgcc

SEQ ID NO: 5396105 - DNA, 25 bp, Homo sapien
tattacgatgccagaacatattact

SEQ ID NO: 5396106 - DNA, 25 bp, Homo sapien
tatatgcagtattgcttcaatctga

SEQ ID NO: 5396107 - DNA, 25 bp, Homo sapien
aaatttattatacttcctgtaagat

SEQ ID NO: 5396108 - DNA, 25 bp, Homo sapien
tggatatattcctgattaagcctga

SEQ ID NO: 5396109 - DNA, 25 bp, Homo sapien
aattctgaatggcatctgtgcttgg

SEQ ID NO: 5396110 - DNA, 25 bp, Homo sapien
gaagcacaattctgaatggcatctg

SEQ ID NO: 5396111 - DNA, 25 bp, Homo sapien
cagtgtgaagcacaattctgaatgg

SEQ ID NO: 5396112 - DNA, 25 bp, Homo sapien
tatctaaaggaagcaccctagtctc

SEQ ID NO: 5396113 - DNA, 25 bp, Homo sapien
cacagaagatgcttaggtggtacct

SEQ ID NO: 5396114 - DNA, 25 bp, Homo sapien
taactgagacgcaacaataccaccc

SEQ ID NO: 5396115 - DNA, 25 bp, Homo sapien
cagttgcaaaccaagaatgcctttc

SEQ ID NO: 5396116 - DNA, 25 bp, Homo sapien
gatcccagttctgttttacacgcaa

SEQ ID NO: 5396117 - DNA, 25 bp, Homo sapien
tcagatcccagttctgttttacacg

SEQ ID NO: 5396118 - DNA, 25 bp, Homo sapien
ctctggctgctaagtacttggtcgg

SEQ ID NO: 5396119 - DNA, 25 bp, Homo sapien
ctaagtacttggtcggtaatagcct

SEQ ID NO: 5396120 - DNA, 25 bp, Homo sapien
ttaattagctctgctccggcggtaa

SEQ ID NO: 5396121 - DNA, 25 bp, Homo sapien
agcctttttcctgtcgccatctcgg

SEQ ID NO: 5396122 - DNA, 25 bp, Homo sapien
ctgcagttccgtcgccaacctgata

SEQ ID NO: 5396123 - DNA, 25 bp, Homo sapien
aaattggagtccgacaagcctgcag

SEQ ID NO: 5396124 - DNA, 25 bp, Homo sapien
tgttttgaatttatagcactgcagc

SEQ ID NO: 5396125 - DNA, 25 bp, Homo sapien
tatggacatgccttgctgcctggac

SEQ ID NO: 5396126 - DNA, 25 bp, Homo sapien
gattcgttctgttccaataacctga

SEQ ID NO: 5396127 - DNA, 25 bp, Homo sapien
gcactgcagctccatagtaatgtag

SEQ ID NO: 5396128 - DNA, 25 bp, Homo sapien
cagttggaatcagctgaggatacag

SEQ ID NO: 5396129 - DNA, 25 bp, Homo sapien
caattcgatgataagtatgtgggct

SEQ ID NO: 5396130 - DNA, 25 bp, Homo sapien
gctcctatcgtaagcagacaattcg

SEQ ID NO: 5396131 - DNA, 25 bp, Homo sapien
ggatacagtgtgagcagtgactctg

SEQ ID NO: 5396132 - DNA, 25 bp, Homo sapien
ccagccttataagcatgggaaactt

SEQ ID NO: 5396133 - DNA, 25 bp, Homo sapien
taagcccagccagccttataagcat

SEQ ID NO: 5396134 - DNA, 25 bp, Homo sapien
gactttaattaagcccagccagcct

SEQ ID NO: 5396135 - DNA, 25 bp, Homo sapien
atccattgactttaattaagcccag

SEQ ID NO: 5396136 - DNA, 25 bp, Homo sapien
tgctctgaatcttagaacggggcac

SEQ ID NO: 5396137 - DNA, 25 bp, Homo sapien
caaggatgaatattcacattgctgc

SEQ ID NO: 5396138 - DNA, 25 bp, Homo sapien
tcagctccactgcaaggatgaatat

SEQ ID NO: 5396139 - DNA, 25 bp, Homo sapien
tgaatattcacattgctgctctgaa

SEQ ID NO: 5396140 - DNA, 25 bp, Homo sapien
catcttaagtgtaacactgagagca

SEQ ID NO: 5396141 - DNA, 25 bp, Homo sapien
tttcaatctcatcttaagtgtaaca

SEQ ID NO: 5396142 - DNA, 25 bp, Homo sapien
aagaaacctttctccataatcctgc

SEQ ID NO: 5396143 - DNA, 25 bp, Homo sapien
ctggttatacttcttaactgtatta

SEQ ID NO: 5396144 - DNA, 25 bp, Homo sapien
taatcagagtgctccttaacagcca

SEQ ID NO: 5396145 - DNA, 25 bp, Homo sapien
aaagattcggagagcgcagatcacc

SEQ ID NO: 5396146 - DNA, 25 bp, Homo sapien
gcaatggccccagtgttaagtttta

SEQ ID NO: 5396147 - DNA, 25 bp, Homo sapien
ggccctggacgatcacacaatggaa

SEQ ID NO: 5396148 - DNA, 25 bp, Homo sapien
ctgaggttgcctttgatagcactca

SEQ ID NO: 5396149 - DNA, 25 bp, Homo sapien
accaggagttttatccatctgaggt

SEQ ID NO: 5396150 - DNA, 25 bp, Homo sapien
tgaggttgcctttgatagcactcac

SEQ ID NO: 5396151 - DNA, 25 bp, Homo sapien
gccactcacgggtacttagagctgc

SEQ ID NO: 5396152 - DNA, 25 bp, Homo sapien
gaataaagttgtgcagcaaatgaga

SEQ ID NO: 5396153 - DNA, 25 bp, Homo sapien
cttagagctgcgtcatttaggagca

SEQ ID NO: 5396154 - DNA, 25 bp, Homo sapien
agcacggaagtgccactcacgggta

SEQ ID NO: 5396155 - DNA, 25 bp, Homo sapien
ctatggcatgaaaccggcaaaatga

SEQ ID NO: 5396156 - DNA, 25 bp, Homo sapien
tgcaactctagcatgatttctgtga

SEQ ID NO: 5396157 - DNA, 25 bp, Homo sapien
ccggcaaaatgagccatctaaacat

SEQ ID NO: 5396158 - DNA, 25 bp, Homo sapien
tgtgaaggtgtgtttgaagtcttac

SEQ ID NO: 5396159 - DNA, 25 bp, Homo sapien
caatgccctccatgagaatagttgc

SEQ ID NO: 5396160 - DNA, 25 bp, Homo sapien
gccctccatgagaatagttgctatg

SEQ ID NO: 5396161 - DNA, 25 bp, Homo sapien
gaatagttgctatggatattatgag

SEQ ID NO: 5396162 - DNA, 25 bp, Homo sapien
tagttgctatggatattatgagaaa

SEQ ID NO: 5396163 - DNA, 25 bp, Homo sapien
gttctgaatgcaaaccccaataggg

SEQ ID NO: 5396164 - DNA, 25 bp, Homo sapien
ttggactatggtcagaagtaacccc

SEQ ID NO: 5396165 - DNA, 25 bp, Homo sapien
caatagggtagcaactgccacggta

SEQ ID NO: 5396166 - DNA, 25 bp, Homo sapien
gcaaatggtggctatcgtacgccgt

SEQ ID NO: 5396167 - DNA, 25 bp, Homo sapien
tctctatttaggtggtttgtctttg

SEQ ID NO: 5396168 - DNA, 25 bp, Homo sapien
cccttttaatgttgcactgatgtgg

SEQ ID NO: 5396169 - DNA, 25 bp, Homo sapien
gaaatttcagacacttatatcccaa

SEQ ID NO: 5396170 - DNA, 25 bp, Homo sapien
ctatccttagggagagctgcttgat

SEQ ID NO: 5396171 - DNA, 25 bp, Homo sapien
tggtccaccttgacagctctagcaa

SEQ ID NO: 5396172 - DNA, 25 bp, Homo sapien
cacagtacacaagtaggaatcacca

SEQ ID NO: 5396173 - DNA, 25 bp, Homo sapien
caaacatgacatcgaagtggccata

SEQ ID NO: 5396174 - DNA, 25 bp, Homo sapien
gctggccactactgttctgttgaga

SEQ ID NO: 5396175 - DNA, 25 bp, Homo sapien
gcagccttgtatccagtcctatgta

SEQ ID NO: 5396176 - DNA, 25 bp, Homo sapien
tcctccaaagctaggatggtgcctg

SEQ ID NO: 5396177 - DNA, 25 bp, Homo sapien
gacactggagcaacaatgttctgca

SEQ ID NO: 5396178 - DNA, 25 bp, Homo sapien
ggcagcttactacacaacttgcatg

SEQ ID NO: 5396179 - DNA, 25 bp, Homo sapien
gtgccttctgcacgtgacctaagac

SEQ ID NO: 5396180 - DNA, 25 bp, Homo sapien
tgtgccttctgcacgtgacctaaga

SEQ ID NO: 5396181 - DNA, 25 bp, Homo sapien
gatgtgccttctgcacgtgacctaa

SEQ ID NO: 5396182 - DNA, 25 bp, Homo sapien
atgtgccttctgcacgtgacctaag

SEQ ID NO: 5396183 - DNA, 25 bp, Homo sapien
tcctctacaccgtcgattgcggcgg

SEQ ID NO: 5396184 - DNA, 25 bp, Homo sapien
tcatcctctacaccgtcgattgcgg

SEQ ID NO: 5396185 - DNA, 25 bp, Homo sapien
ctacaccgtcgattgcggcggcttt

SEQ ID NO: 5396186 - DNA, 25 bp, Homo sapien
ttctcgctcatcctctacaccgtcg

SEQ ID NO: 5396187 - DNA, 25 bp, Homo sapien
tgaatcttccgctgtgcaactgcag

SEQ ID NO: 5396188 - DNA, 25 bp, Homo sapien
gaatctgcttaaacgtatggaccca

SEQ ID NO: 5396189 - DNA, 25 bp, Homo sapien
tcaaacggagtaaaccagggcagtg

SEQ ID NO: 5396190 - DNA, 25 bp, Homo sapien
tcctgccgcgcaacaattaaggtcg

SEQ ID NO: 5396191 - DNA, 25 bp, Homo sapien
aaactttgcagtcaccacttacagg

SEQ ID NO: 5396192 - DNA, 25 bp, Homo sapien
cttggcagtgcctgaaacagcttat

SEQ ID NO: 5396193 - DNA, 25 bp, Homo sapien
tattacacgtgcatcagatacagag

SEQ ID NO: 5396194 - DNA, 25 bp, Homo sapien
ctctaagaagctcctgtgtgatcca

SEQ ID NO: 5396195 - DNA, 25 bp, Homo sapien
tagaggtatcttaacagcttgtatg

SEQ ID NO: 5396196 - DNA, 25 bp, Homo sapien
gatctaaataagtatgtagaacact

SEQ ID NO: 5396197 - DNA, 25 bp, Homo sapien
tttatctcctgatgtgagatctaaa

SEQ ID NO: 5396198 - DNA, 25 bp, Homo sapien
aattattaacaagtcagagttttca

SEQ ID NO: 5396199 - DNA, 25 bp, Homo sapien
gaagtgaacattagaagccagtcca

SEQ ID NO: 5396200 - DNA, 25 bp, Homo sapien
cagctggcagtctcaatggagctca

SEQ ID NO: 5396201 - DNA, 25 bp, Homo sapien
ggtgtgtaccaggaacatgtatacc

SEQ ID NO: 5396202 - DNA, 25 bp, Homo sapien
aagtaccagaagagcttacctccaa

SEQ ID NO: 5396203 - DNA, 25 bp, Homo sapien
tagcaagcaagaggctgtcaggtgt

SEQ ID NO: 5396204 - DNA, 25 bp, Homo sapien
taagtcatggtgaatgcctcacacc

SEQ ID NO: 5396205 - DNA, 25 bp, Homo sapien
tctactttgggtataacagcagacc

SEQ ID NO: 5396206 - DNA, 25 bp, Homo sapien
catggataagggactgctagagaac

SEQ ID NO: 5396207 - DNA, 25 bp, Homo sapien
cattaattggccttgtccgggcagt

SEQ ID NO: 5396208 - DNA, 25 bp, Homo sapien
ctgggtcatcgtttgcaaatacaca

SEQ ID NO: 5396209 - DNA, 25 bp, Homo sapien
ttgtccgggcagtcctgagcagcgc

SEQ ID NO: 5396210 - DNA, 25 bp, Homo sapien
ctaatcctgggtcatcgtttgcaaa

SEQ ID NO: 5396211 - DNA, 25 bp, Homo sapien
aagaagggtattatttcagctggga

SEQ ID NO: 5396212 - DNA, 25 bp, Homo sapien
aagggtattatttcagctgggagag

SEQ ID NO: 5396213 - DNA, 25 bp, Homo sapien
gaaagaagggtattatttcagctgg

SEQ ID NO: 5396214 - DNA, 25 bp, Homo sapien
ctgaggaaagaagggtattatttca

SEQ ID NO: 5396215 - DNA, 25 bp, Homo sapien
cctgaagggcaaggttgactattgt

SEQ ID NO: 5396216 - DNA, 25 bp, Homo sapien
ccacctgaagggcaaggttgactat

SEQ ID NO: 5396217 - DNA, 25 bp, Homo sapien
tgccacctgaagggcaaggttgact

SEQ ID NO: 5396218 - DNA, 25 bp, Homo sapien
tgaagggcaaggttgactattgttt

SEQ ID NO: 5396219 - DNA, 25 bp, Homo sapien
gaattaatcgaaatgagatgcccca

SEQ ID NO: 5396220 - DNA, 25 bp, Homo sapien
ggttaacatgggctgagtctcaaaa

SEQ ID NO: 5396221 - DNA, 25 bp, Homo sapien
agggcagtacctatcatgaagtggg

SEQ ID NO: 5396222 - DNA, 25 bp, Homo sapien
aaatagacttgaagctcagcacacc

SEQ ID NO: 5396223 - DNA, 25 bp, Homo sapien
gcaggaacattcttaggtagagaca

SEQ ID NO: 5396224 - DNA, 25 bp, Homo sapien
catttcgtgtgaataccgtggtgga

SEQ ID NO: 5396225 - DNA, 25 bp, Homo sapien
tgaaggagacgctcgggtttcatcc

SEQ ID NO: 5396226 - DNA, 25 bp, Homo sapien
ggaggtagcacctagctctaatagc

SEQ ID NO: 5396227 - DNA, 25 bp, Homo sapien
ctttgaataacttttcttcatctgg

SEQ ID NO: 5396228 - DNA, 25 bp, Homo sapien
ttgaataacttttcttcatctggtt

SEQ ID NO: 5396229 - DNA, 25 bp, Homo sapien
tgaataacttttcttcatctggttt

SEQ ID NO: 5396230 - DNA, 25 bp, Homo sapien
tttgaataacttttcttcatctggt

SEQ ID NO: 5396231 - DNA, 25 bp, Homo sapien
gggcctccctgatcctggtcctaat

SEQ ID NO: 5396232 - DNA, 25 bp, Homo sapien
taaccccagggctcatttgcataag

SEQ ID NO: 5396233 - DNA, 25 bp, Homo sapien
taattgcgactgactggcaccagac

SEQ ID NO: 5396234 - DNA, 25 bp, Homo sapien
tgatttctatgcagcttgcccaaga

SEQ ID NO: 5396235 - DNA, 25 bp, Homo sapien
tggcagagggattgtctaccacctt

SEQ ID NO: 5396236 - DNA, 25 bp, Homo sapien
caggcgcttatgaaaaaatgtttgc

SEQ ID NO: 5396237 - DNA, 25 bp, Homo sapien
tgaagatcttagacaaaggccagca

SEQ ID NO: 5396238 - DNA, 25 bp, Homo sapien
ggcatctacacctttgagttgaaga

SEQ ID NO: 5396239 - DNA, 25 bp, Homo sapien
gaaaagggacgccaatacccatatg

SEQ ID NO: 5396240 - DNA, 25 bp, Homo sapien
agtgtgcggcggtcccagtcatgat

SEQ ID NO: 5396241 - DNA, 25 bp, Homo sapien
aatgctgtacgctccataactttga

SEQ ID NO: 5396242 - DNA, 25 bp, Homo sapien
ccaaatgtgttgagcctgtcgtcat

SEQ ID NO: 5396243 - DNA, 25 bp, Homo sapien
tcaattcttgttcatgacagagaga

SEQ ID NO: 5396244 - DNA, 25 bp, Homo sapien
gcattcacttaagaatagctaccaa

SEQ ID NO: 5396245 - DNA, 25 bp, Homo sapien
tttccagaaacctctacctgcctgt

SEQ ID NO: 5396246 - DNA, 25 bp, Homo sapien
gacaattcatgagacaattcccatt

SEQ ID NO: 5396247 - DNA, 25 bp, Homo sapien
gagtcaggagccaaaccatctttct

SEQ ID NO: 5396248 - DNA, 25 bp, Homo sapien
tagttccaacttttacctgatgctg

SEQ ID NO: 5396249 - DNA, 25 bp, Homo sapien
aactagagcttcaaaggagtcttgg

SEQ ID NO: 5396250 - DNA, 25 bp, Homo sapien
cattctgccgtgaatatagaaacca

SEQ ID NO: 5396251 - DNA, 25 bp, Homo sapien
cctatttgccatggccactgcttgt

SEQ ID NO: 5396252 - DNA, 25 bp, Homo sapien
ctatttgccatggccactgcttgtg

SEQ ID NO: 5396253 - DNA, 25 bp, Homo sapien
tcctatttgccatggccactgcttg

SEQ ID NO: 5396254 - DNA, 25 bp, Homo sapien
tggtcctgggtcccttcactcttgg

SEQ ID NO: 5396255 - DNA, 25 bp, Homo sapien
ctggtcctgggtcccttcactcttg

SEQ ID NO: 5396256 - DNA, 25 bp, Homo sapien
gaagctgcctgggtaaacttacact

SEQ ID NO: 5396257 - DNA, 25 bp, Homo sapien
tatgcatataaacttccgtgatcag

SEQ ID NO: 5396258 - DNA, 25 bp, Homo sapien
tgttaggaagctcaaacactgtact

SEQ ID NO: 5396259 - DNA, 25 bp, Homo sapien
cacttgtttacaaagagcagtacct

SEQ ID NO: 5396260 - DNA, 25 bp, Homo sapien
taatcacgctgctcatttgggtgcg

SEQ ID NO: 5396261 - DNA, 25 bp, Homo sapien
tatcatgaatcaggcaactagtggg

SEQ ID NO: 5396262 - DNA, 25 bp, Homo sapien
tctagtagggtagccatccgtttcc

SEQ ID NO: 5396263 - DNA, 25 bp, Homo sapien
ttctgaaacacaaacggaggctctg

SEQ ID NO: 5396264 - DNA, 25 bp, Homo sapien
cctccctgagtaggcattgacttga

SEQ ID NO: 5396265 - DNA, 25 bp, Homo sapien
taaggagccgttatgtagtgccgtg

SEQ ID NO: 5396266 - DNA, 25 bp, Homo sapien
ggcctctgcgataaagcctccctga

SEQ ID NO: 5396267 - DNA, 25 bp, Homo sapien
tcagtgatccgtgcgttgaggactc

SEQ ID NO: 5396268 - DNA, 25 bp, Homo sapien
tttccttgagtagaaaatagcccaa

SEQ ID NO: 5396269 - DNA, 25 bp, Homo sapien
gttgattgacttgttgacgggcaga

SEQ ID NO: 5396270 - DNA, 25 bp, Homo sapien
gaacaacttgctacaggtcttatgg

SEQ ID NO: 5396271 - DNA, 25 bp, Homo sapien
gtagaaaccaaatttgagcccagat

SEQ ID NO: 5396272 - DNA, 25 bp, Homo sapien
aaactgaagtgcctccatcgtaggg

SEQ ID NO: 5396273 - DNA, 25 bp, Homo sapien
catgaaacagtgaagcagctcgcct

SEQ ID NO: 5396274 - DNA, 25 bp, Homo sapien
tcaagaatgtttcagcaaggcccag

SEQ ID NO: 5396275 - DNA, 25 bp, Homo sapien
aaggaacgaatatctcaggctacgg

SEQ ID NO: 5396276 - DNA, 25 bp, Homo sapien
tagacaacgtaggaatatgcagctg

SEQ ID NO: 5396277 - DNA, 25 bp, Homo sapien
tatgtacgcataaacaaacagcgca

SEQ ID NO: 5396278 - DNA, 25 bp, Homo sapien
tactgttcctttaatgcccagctgg

SEQ ID NO: 5396279 - DNA, 25 bp, Homo sapien
tgaatccttgacagtgcaacctatg

SEQ ID NO: 5396280 - DNA, 25 bp, Homo sapien
tatacgcctagactgtggctataga

SEQ ID NO: 5396281 - DNA, 25 bp, Homo sapien
cagtgaactaggaggcctttcccgt

SEQ ID NO: 5396282 - DNA, 25 bp, Homo sapien
tctactacattaggagggaaacgcc

SEQ ID NO: 5396283 - DNA, 25 bp, Homo sapien
tgttcggtccttgaactgctccaag

SEQ ID NO: 5396284 - DNA, 25 bp, Homo sapien
tttgacatgctgtacaaaggcaggc

SEQ ID NO: 5396285 - DNA, 25 bp, Homo sapien
gcaaaattcttagcacgggtcccag

SEQ ID NO: 5396286 - DNA, 25 bp, Homo sapien
tcagttggctgacaatgcctgcgct

SEQ ID NO: 5396287 - DNA, 25 bp, Homo sapien
tataaaacatggttcgcaagctcac

SEQ ID NO: 5396288 - DNA, 25 bp, Homo sapien
ccaccctcgctgaaagtgaactgac

SEQ ID NO: 5396289 - DNA, 25 bp, Homo sapien
cctcgctgaaagtgaactgactgct

SEQ ID NO: 5396290 - DNA, 25 bp, Homo sapien
tgctggaatatgaaatcgtcatcat

SEQ ID NO: 5396291 - DNA, 25 bp, Homo sapien
tgaactgactgctggaatatgaaat

SEQ ID NO: 5396292 - DNA, 25 bp, Homo sapien
gctgcggcgtatattttggtattgc

SEQ ID NO: 5396293 - DNA, 25 bp, Homo sapien
tgttcactcactgattgctgcggcg

SEQ ID NO: 5396294 - DNA, 25 bp, Homo sapien
ggtatgttgattgtaacacagcaca

SEQ ID NO: 5396295 - DNA, 25 bp, Homo sapien
taaccgccctgtagatgtgaaaaag

SEQ ID NO: 5396296 - DNA, 25 bp, Homo sapien
aattagagatgcacaggctttgcag

SEQ ID NO: 5396297 - DNA, 25 bp, Homo sapien
attagagatgcacaggctttgcagc

SEQ ID NO: 5396298 - DNA, 25 bp, Homo sapien
ttagagatgcacaggctttgcagca

SEQ ID NO: 5396299 - DNA, 25 bp, Homo sapien
gggctgatgaaatgataatcaaaac

SEQ ID NO: 5396300 - DNA, 25 bp, Homo sapien
cttgagcatactagtatcagttggg

SEQ ID NO: 5396301 - DNA, 25 bp, Homo sapien
tactctgtactaggcctgggagctg

SEQ ID NO: 5396302 - DNA, 25 bp, Homo sapien
gggctttccaattccaccacagtag

SEQ ID NO: 5396303 - DNA, 25 bp, Homo sapien
ctcattgcagataaattcaaagatc

SEQ ID NO: 5396304 - DNA, 25 bp, Homo sapien
tgcagataaattcaaagatcgtatt

SEQ ID NO: 5396305 - DNA, 25 bp, Homo sapien
tcaaagatcgtatttatatgaagca

SEQ ID NO: 5396306 - DNA, 25 bp, Homo sapien
atttatatgaagcagagcctgttcc

SEQ ID NO: 5396307 - DNA, 25 bp, Homo sapien
agcagcagcaatacttttaggctgc

SEQ ID NO: 5396308 - DNA, 25 bp, Homo sapien
ctaactcgtaacagctctcaagaaa

SEQ ID NO: 5396309 - DNA, 25 bp, Homo sapien
accttcctcacctaactcgtaacag

SEQ ID NO: 5396310 - DNA, 25 bp, Homo sapien
ttttaggctgctgagtatttttctc

SEQ ID NO: 5396311 - DNA, 25 bp, Homo sapien
tatgggcggtttgtctttgagagaa

SEQ ID NO: 5396312 - DNA, 25 bp, Homo sapien
ccaggccttagtcagtcttagctcc

SEQ ID NO: 5396313 - DNA, 25 bp, Homo sapien
gacccactgcgcgttccttcaagca

SEQ ID NO: 5396314 - DNA, 25 bp, Homo sapien
taaacttgctaactaatctcttagc

SEQ ID NO: 5396315 - DNA, 25 bp, Homo sapien
gactgcactgagtacacacaaggta

SEQ ID NO: 5396316 - DNA, 25 bp, Homo sapien
cagaaactggatgagcaaatggacc

SEQ ID NO: 5396317 - DNA, 25 bp, Homo sapien
taacagctaagaggctactggcaat

SEQ ID NO: 5396318 - DNA, 25 bp, Homo sapien
cagtggtgatgtgcctacccttata

SEQ ID NO: 5396319 - DNA, 25 bp, Homo sapien
tgctgagatcagtacaggaggagct

SEQ ID NO: 5396320 - DNA, 25 bp, Homo sapien
gagctgagatttcccgcacactaaa

SEQ ID NO: 5396321 - DNA, 25 bp, Homo sapien
gcacactaaagttgaaaagctctcg

SEQ ID NO: 5396322 - DNA, 25 bp, Homo sapien
tagcttttgaatggacagtcccctg

SEQ ID NO: 5396323 - DNA, 25 bp, Homo sapien
ttggctgtctcttttccagtctcta

SEQ ID NO: 5396324 - DNA, 25 bp, Homo sapien
tggctgtctcttttccagtctctac

SEQ ID NO: 5396325 - DNA, 25 bp, Homo sapien
tttggctgtctcttttccagtctct

SEQ ID NO: 5396326 - DNA, 25 bp, Homo sapien
tctggcctgccaatttcaacttgaa

SEQ ID NO: 5396327 - DNA, 25 bp, Homo sapien
gatttgatgcaaatacctccaggga

SEQ ID NO: 5396328 - DNA, 25 bp, Homo sapien
ctgatgaacagttatgtcaagtcga

SEQ ID NO: 5396329 - DNA, 25 bp, Homo sapien
gattttgcaccatcgggaaaaggta

SEQ ID NO: 5396330 - DNA, 25 bp, Homo sapien
tggctttatcagctctcatagtttc

SEQ ID NO: 5396331 - DNA, 25 bp, Homo sapien
gctctcatagtttcttgggtcacaa

SEQ ID NO: 5396332 - DNA, 25 bp, Homo sapien
taccatatctgatgacacagtgatc

SEQ ID NO: 5396333 - DNA, 25 bp, Homo sapien
cttttcagatcctctaactttcctg

SEQ ID NO: 5396334 - DNA, 25 bp, Homo sapien
ccaccatttggagggcttatgagca

SEQ ID NO: 5396335 - DNA, 25 bp, Homo sapien
cttatgagcaatgtaagtccacctc

SEQ ID NO: 5396336 - DNA, 25 bp, Homo sapien
caaagagttaaagagtgttcccgca

SEQ ID NO: 5396337 - DNA, 25 bp, Homo sapien
gcattgctgggtaggttaatatcac

SEQ ID NO: 5396338 - DNA, 25 bp, Homo sapien
aagcctccttttgcaaacagactcc

SEQ ID NO: 5396339 - DNA, 25 bp, Homo sapien
taacaaaagcctccttttgcaaaca

SEQ ID NO: 5396340 - DNA, 25 bp, Homo sapien
aaaagcctccttttgcaaacagact

SEQ ID NO: 5396341 - DNA, 25 bp, Homo sapien
acaaaagcctccttttgcaaacaga

SEQ ID NO: 5396342 - DNA, 25 bp, Homo sapien
taaatctgcctaaatccttcattgc

SEQ ID NO: 5396343 - DNA, 25 bp, Homo sapien
gtttactgaagtaaatctgcctaaa

SEQ ID NO: 5396344 - DNA, 25 bp, Homo sapien
ccgcaagtgtccaaaggtgtttact

SEQ ID NO: 5396345 - DNA, 25 bp, Homo sapien
gtggaaggtgtagggataatctctt

SEQ ID NO: 5396346 - DNA, 25 bp, Homo sapien
taaaacctgacaggtctgcctgcga

SEQ ID NO: 5396347 - DNA, 25 bp, Homo sapien
aaaacgtggcactttacagccctca

SEQ ID NO: 5396348 - DNA, 25 bp, Homo sapien
tgcctgcgagggtttaaacagttcc

SEQ ID NO: 5396349 - DNA, 25 bp, Homo sapien
aaagttgtcacgagaggtttctgct

SEQ ID NO: 5396350 - DNA, 25 bp, Homo sapien
aatcagacttattaaagccaaatcg

SEQ ID NO: 5396351 - DNA, 25 bp, Homo sapien
ctctctggtccgctggtaaacaatc

SEQ ID NO: 5396352 - DNA, 25 bp, Homo sapien
tattaaagccaaatcgtaggcagca

SEQ ID NO: 5396353 - DNA, 25 bp, Homo sapien
ggtccgctggtaaacaatcagactt

SEQ ID NO: 5396354 - DNA, 25 bp, Homo sapien
gaattcgatcccctcctgacacttt

SEQ ID NO: 5396355 - DNA, 25 bp, Homo sapien
ttcgatcccctcctgacacttttta

SEQ ID NO: 5396356 - DNA, 25 bp, Homo sapien
tctgggggagaattcgatcccctcc

SEQ ID NO: 5396357 - DNA, 25 bp, Homo sapien
gggagaattcgatcccctcctgaca

SEQ ID NO: 5396358 - DNA, 25 bp, Homo sapien
cgggtggccatgaatagtacagaca

SEQ ID NO: 5396359 - DNA, 25 bp, Homo sapien
ctcaagtgttgagcgggtggccatg

SEQ ID NO: 5396360 - DNA, 25 bp, Homo sapien
gaatagtacagacatgccatcttgt

SEQ ID NO: 5396361 - DNA, 25 bp, Homo sapien
tacagacatgccatcttgtaacact

SEQ ID NO: 5396362 - DNA, 25 bp, Homo sapien
agctatataaggctggtaactaggg

SEQ ID NO: 5396363 - DNA, 25 bp, Homo sapien
gcatcagctatataaggctggtaac

SEQ ID NO: 5396364 - DNA, 25 bp, Homo sapien
ggtggagcatcagctatataaggct

SEQ ID NO: 5396365 - DNA, 25 bp, Homo sapien
tggagcatcagctatataaggctgg

SEQ ID NO: 5396366 - DNA, 25 bp, Homo sapien
tattttactcagctactaccctgtg

SEQ ID NO: 5396367 - DNA, 25 bp, Homo sapien
gatatgaaaggcattcaggtcagca

SEQ ID NO: 5396368 - DNA, 25 bp, Homo sapien
gagacacagcggatcagatatgaaa

SEQ ID NO: 5396369 - DNA, 25 bp, Homo sapien
ctgtggcagaatgcaaatggagcct

SEQ ID NO: 5396370 - DNA, 25 bp, Homo sapien
tcatggaccacacgcgaaatcagac

SEQ ID NO: 5396371 - DNA, 25 bp, Homo sapien
tgtttcctaaatgaaccagcaaggc

SEQ ID NO: 5396372 - DNA, 25 bp, Homo sapien
ccaaaagatacacgcatggatggct

SEQ ID NO: 5396373 - DNA, 25 bp, Homo sapien
tcccaccagatgacacaagagttgg

SEQ ID NO: 5396374 - DNA, 25 bp, Homo sapien
tggcacatagctattaaggcaaagg

SEQ ID NO: 5396375 - DNA, 25 bp, Homo sapien
caagtggtaagctgatgctgttggc

SEQ ID NO: 5396376 - DNA, 25 bp, Homo sapien
tactagttacacttttcctgagaga

SEQ ID NO: 5396377 - DNA, 25 bp, Homo sapien
ccatggagcctactgattattatcg

SEQ ID NO: 5396378 - DNA, 25 bp, Homo sapien
tgtctgtgagcattgcaaacctgca

SEQ ID NO: 5396379 - DNA, 25 bp, Homo sapien
gaatgaatggtacagtggacacccc

SEQ ID NO: 5396380 - DNA, 25 bp, Homo sapien
ggacaccccagcaccattgacgtta

SEQ ID NO: 5396381 - DNA, 25 bp, Homo sapien
tagtgtctaccttgggaagccacgg

SEQ ID NO: 5396382 - DNA, 25 bp, Homo sapien
tactggctctgctacgaaggaaagc

SEQ ID NO: 5396383 - DNA, 25 bp, Homo sapien
taaacgcggcactgctagaggctag

SEQ ID NO: 5396384 - DNA, 25 bp, Homo sapien
tttgcaagttacaaacgggccgcac

SEQ ID NO: 5396385 - DNA, 25 bp, Homo sapien
tggatatctttggagcgccctcaga

SEQ ID NO: 5396386 - DNA, 25 bp, Homo sapien
ccgctccgagtgctcatttctgact

SEQ ID NO: 5396387 - DNA, 25 bp, Homo sapien
cgagtgctcatttctgactccaagg

SEQ ID NO: 5396388 - DNA, 25 bp, Homo sapien
tccgagtgctcatttctgactccaa

SEQ ID NO: 5396389 - DNA, 25 bp, Homo sapien
gggcatctcccgctccgagtgctca

SEQ ID NO: 5396390 - DNA, 25 bp, Homo sapien
ctgactgaactttcttgaaaccgac

SEQ ID NO: 5396391 - DNA, 25 bp, Homo sapien
gagtcaggcgactgaggatcatctg

SEQ ID NO: 5396392 - DNA, 25 bp, Homo sapien
gaactttcttgaaaccgacacacat

SEQ ID NO: 5396393 - DNA, 25 bp, Homo sapien
gtgttacaaagtgagtcaggcgact

SEQ ID NO: 5396394 - DNA, 25 bp, Homo sapien
tctgcgggcaactcgctttttgcct

SEQ ID NO: 5396395 - DNA, 25 bp, Homo sapien
tatgggttaacttggccctggcact

SEQ ID NO: 5396396 - DNA, 25 bp, Homo sapien
cttgtctgcgggcaactcgcttttt

SEQ ID NO: 5396397 - DNA, 25 bp, Homo sapien
aggagactgactgcccgctatgggt

SEQ ID NO: 5396398 - DNA, 25 bp, Homo sapien
aaagtgccattctaggttcctggat

SEQ ID NO: 5396399 - DNA, 25 bp, Homo sapien
caaaaccagaacattgctcggtcag

SEQ ID NO: 5396400 - DNA, 25 bp, Homo sapien
gctcggtcagattaaacccagtgaa

SEQ ID NO: 5396401 - DNA, 25 bp, Homo sapien
gataaatcctagcaattcccaaagg

SEQ ID NO: 5396402 - DNA, 25 bp, Homo sapien
tcagcctggataacgggctcctcca

SEQ ID NO: 5396403 - DNA, 25 bp, Homo sapien
aaactgccgggaaaagtctcgctgc

SEQ ID NO: 5396404 - DNA, 25 bp, Homo sapien
tccagaccatgtagaaactgccggg

SEQ ID NO: 5396405 - DNA, 25 bp, Homo sapien
cgggaaaagtctcgctgcgccctgc

SEQ ID NO: 5396406 - DNA, 25 bp, Homo sapien
attggcttgtttgcgcctcttgcac

SEQ ID NO: 5396407 - DNA, 25 bp, Homo sapien
gggattggcttgtttgcgcctcttg

SEQ ID NO: 5396408 - DNA, 25 bp, Homo sapien
ctgggattggcttgtttgcgcctct

SEQ ID NO: 5396409 - DNA, 25 bp, Homo sapien
gcttgtttgcgcctcttgcaccggg

SEQ ID NO: 5396410 - DNA, 25 bp, Homo sapien
cagttcgcatggactcggcgccctg

SEQ ID NO: 5396411 - DNA, 25 bp, Homo sapien
cggatcagatggcagttcgcatgga

SEQ ID NO: 5396412 - DNA, 25 bp, Homo sapien
tcagatggcagttcgcatggactcg

SEQ ID NO: 5396413 - DNA, 25 bp, Homo sapien
tgcttcggcagcacgcaggctcgat

SEQ ID NO: 5396414 - DNA, 25 bp, Homo sapien
atcgcccgcgcccattgaaacgcgc

SEQ ID NO: 5396415 - DNA, 25 bp, Homo sapien
ctagcaaccaaacacagcgacaatg

SEQ ID NO: 5396416 - DNA, 25 bp, Homo sapien
acagcgacaatgtgggcatcgcccg

SEQ ID NO: 5396417 - DNA, 25 bp, Homo sapien
cgcccattgaaacgcgcgcgggccg

SEQ ID NO: 5396418 - DNA, 25 bp, Homo sapien
caacgccaaagcgaaacttcggcgg

SEQ ID NO: 5396419 - DNA, 25 bp, Homo sapien
ccaacgccaaagcgaaacttcggcg

SEQ ID NO: 5396420 - DNA, 25 bp, Homo sapien
gccccgaggcgctttgtgtttgtta

SEQ ID NO: 5396421 - DNA, 25 bp, Homo sapien
cacccgcgaggggatcagagagaca

SEQ ID NO: 5396422 - DNA, 25 bp, Homo sapien
ccgcgaggggatcagagagacaaga

SEQ ID NO: 5396423 - DNA, 25 bp, Homo sapien
cgcgaggggatcagagagacaagaa

SEQ ID NO: 5396424 - DNA, 25 bp, Homo sapien
acccgcgaggggatcagagagacaa

SEQ ID NO: 5396425 - DNA, 25 bp, Homo sapien
tggatgaagcacactcgggcaaatt

SEQ ID NO: 5396426 - DNA, 25 bp, Homo sapien
gtaattataggaagcccactcgccc

SEQ ID NO: 5396427 - DNA, 25 bp, Homo sapien
taagaccgcttgactcagggctagg

SEQ ID NO: 5396428 - DNA, 25 bp, Homo sapien
tcctgaccgtatgagggaatgcaca

SEQ ID NO: 5396429 - DNA, 25 bp, Homo sapien
gagaatcctgaaaactcggtggagg

SEQ ID NO: 5396430 - DNA, 25 bp, Homo sapien
ggaagatgctgtgcctcgaggatta

SEQ ID NO: 5396431 - DNA, 25 bp, Homo sapien
tgcctcgaggattagtttaaacagg

SEQ ID NO: 5396432 - DNA, 25 bp, Homo sapien
ctaaaaatcgagagaggcgctgcat

SEQ ID NO: 5396433 - DNA, 25 bp, Homo sapien
aagaagccgcgaagtgtgggggaga

SEQ ID NO: 5396434 - DNA, 25 bp, Homo sapien
tggaagcgaagaaacagctcccgga

SEQ ID NO: 5396435 - DNA, 25 bp, Homo sapien
aagcatgaagaagccgcgaagtgtg

SEQ ID NO: 5396436 - DNA, 25 bp, Homo sapien
gtggaagcgaagaaacagctcccgg

SEQ ID NO: 5396437 - DNA, 25 bp, Homo sapien
ggttagaactgatctctttcggcca

SEQ ID NO: 5396438 - DNA, 25 bp, Homo sapien
aggaccgttattcctgcagagcagg

SEQ ID NO: 5396439 - DNA, 25 bp, Homo sapien
ctgtacaaaaacctcgccaagagtg

SEQ ID NO: 5396440 - DNA, 25 bp, Homo sapien
cgccaagagtgtcgggaggcaggac

SEQ ID NO: 5396441 - DNA, 25 bp, Homo sapien
gaaacacgcgccacctatctttgtg

SEQ ID NO: 5396442 - DNA, 25 bp, Homo sapien
aattgaagcgccctgagcgtgagca

SEQ ID NO: 5396443 - DNA, 25 bp, Homo sapien
gacgtgttacgcctcttctaatgac

SEQ ID NO: 5396444 - DNA, 25 bp, Homo sapien
tgagcatcatgtgaaaacgtgatcg

SEQ ID NO: 5396445 - DNA, 25 bp, Homo sapien
agatcccgggtcctcaatccagata

SEQ ID NO: 5396446 - DNA, 25 bp, Homo sapien
aaagatcccgggtcctcaatccaga

SEQ ID NO: 5396447 - DNA, 25 bp, Homo sapien
ggaaagatcccgggtcctcaatcca

SEQ ID NO: 5396448 - DNA, 25 bp, Homo sapien
aagatcccgggtcctcaatccagat

SEQ ID NO: 5396449 - DNA, 25 bp, Homo sapien
tctttttaggtaccagagccagaaa

SEQ ID NO: 5396450 - DNA, 25 bp, Homo sapien
gagaaacgagaaaggccatagagaa

SEQ ID NO: 5396451 - DNA, 25 bp, Homo sapien
ggagctgcatcttagggcatgtgta

SEQ ID NO: 5396452 - DNA, 25 bp, Homo sapien
taaaatagaacactcggttggccga

SEQ ID NO: 5396453 - DNA, 25 bp, Homo sapien
gaaactgatctttcatctagaggaa

SEQ ID NO: 5396454 - DNA, 25 bp, Homo sapien
caggaggtgggcaacttcttttgga

SEQ ID NO: 5396455 - DNA, 25 bp, Homo sapien
caagccaagccaaacggttttctca

SEQ ID NO: 5396456 - DNA, 25 bp, Homo sapien
ggttttctcacgtgcagactcgcaa

SEQ ID NO: 5396457 - DNA, 25 bp, Homo sapien
tctgagaagccctttcaaacaaaac

SEQ ID NO: 5396458 - DNA, 25 bp, Homo sapien
caaaacaggaccagagaagctcaga

SEQ ID NO: 5396459 - DNA, 25 bp, Homo sapien
aaaaatcaggagcatctctctgaga

SEQ ID NO: 5396460 - DNA, 25 bp, Homo sapien
ctaggataggaggggaaagtctatt

SEQ ID NO: 5396461 - DNA, 25 bp, Homo sapien
acccgcaggctgtggaatctcgcac

SEQ ID NO: 5396462 - DNA, 25 bp, Homo sapien
tgtggaatctcgcacgtcacctggc

SEQ ID NO: 5396463 - DNA, 25 bp, Homo sapien
caggctgtggaatctcgcacgtcac

SEQ ID NO: 5396464 - DNA, 25 bp, Homo sapien
aacatccctgctgcgagacccgcag

SEQ ID NO: 5396465 - DNA, 25 bp, Homo sapien
cccgcccgccgcccggtcagctgac

SEQ ID NO: 5396466 - DNA, 25 bp, Homo sapien
ccccgcccgccgcccggtcagctga

SEQ ID NO: 5396467 - DNA, 25 bp, Homo sapien
ccgcgagccgcgctccgagcgggcg

SEQ ID NO: 5396468 - DNA, 25 bp, Homo sapien
tgccgggggctgattaccatgagaa

SEQ ID NO: 5396469 - DNA, 25 bp, Homo sapien
gctgattaccatgagaaaggctgtg

SEQ ID NO: 5396470 - DNA, 25 bp, Homo sapien
tgatgccgggggctgattaccatga

SEQ ID NO: 5396471 - DNA, 25 bp, Homo sapien
taagttggatgcgacgcaggcccga

SEQ ID NO: 5396472 - DNA, 25 bp, Homo sapien
cagaaaacttggagtaagttggatg

SEQ ID NO: 5396473 - DNA, 25 bp, Homo sapien
cttggagtaagttggatgcgacgca

SEQ ID NO: 5396474 - DNA, 25 bp, Homo sapien
agtaagttggatgcgacgcaggccc

SEQ ID NO: 5396475 - DNA, 25 bp, Homo sapien
cagttgcatttcctacgttctcctt

SEQ ID NO: 5396476 - DNA, 25 bp, Homo sapien
gcctcaccagggaattgaaaaccaa

SEQ ID NO: 5396477 - DNA, 25 bp, Homo sapien
agcagcctcaccagggaattgaaaa

SEQ ID NO: 5396478 - DNA, 25 bp, Homo sapien
ccagttgcatttcctacgttctcct

SEQ ID NO: 5396479 - DNA, 25 bp, Homo sapien
actcttctccctcgctgtgattctt

SEQ ID NO: 5396480 - DNA, 25 bp, Homo sapien
tatctgatatctcccttttgcaatt

SEQ ID NO: 5396481 - DNA, 25 bp, Homo sapien
atcatttcgttttgaaaacagaacg

SEQ ID NO: 5396482 - DNA, 25 bp, Homo sapien
ttttgtgcctcttttatgtgtccag

SEQ ID NO: 5396483 - DNA, 25 bp, Homo sapien
gagcattcccttttggaattgtagc

SEQ ID NO: 5396484 - DNA, 25 bp, Homo sapien
ccattcataatgaactgagcattcc

SEQ ID NO: 5396485 - DNA, 25 bp, Homo sapien
ttaagaccattcataatgaactgag

SEQ ID NO: 5396486 - DNA, 25 bp, Homo sapien
tgtcctggggtttgcgctaatttca

SEQ ID NO: 5396487 - DNA, 25 bp, Homo sapien
ctggatgctgtgattggcccttgtt

SEQ ID NO: 5396488 - DNA, 25 bp, Homo sapien
tgccttttggacctaacacttaggc

SEQ ID NO: 5396489 - DNA, 25 bp, Homo sapien
cacccgctctgcacattgtgaccca

SEQ ID NO: 5396490 - DNA, 25 bp, Homo sapien
gtgtttctgacccacttgtgcccac

SEQ ID NO: 5396491 - DNA, 25 bp, Homo sapien
tgtcaggctcagtgcagcagtctct

SEQ ID NO: 5396492 - DNA, 25 bp, Homo sapien
gccagggcataattccatgagagaa

SEQ ID NO: 5396493 - DNA, 25 bp, Homo sapien
gaatcagagtgcaaaatgggcccca

SEQ ID NO: 5396494 - DNA, 25 bp, Homo sapien
tgggccccacagcagatacaatgag

SEQ ID NO: 5396495 - DNA, 25 bp, Homo sapien
gaccagctttgcagatgtgtcctcg

SEQ ID NO: 5396496 - DNA, 25 bp, Homo sapien
aagagtctttctatggttggttgac

SEQ ID NO: 5396497 - DNA, 25 bp, Homo sapien
gatgtgtcctcgacgtgattagtcc

SEQ ID NO: 5396498 - DNA, 25 bp, Homo sapien
tctccgtcaataccttggaccagct

SEQ ID NO: 5396499 - DNA, 25 bp, Homo sapien
atctggcttgccatagtacaaggca

SEQ ID NO: 5396500 - DNA, 25 bp, Homo sapien
gctagttcctttcctagacctttca

SEQ ID NO: 5396501 - DNA, 25 bp, Homo sapien
aaggaatctggcttgccatagtaca

SEQ ID NO: 5396502 - DNA, 25 bp, Homo sapien
ggaatctggcttgccatagtacaag

SEQ ID NO: 5396503 - DNA, 25 bp, Homo sapien
tgtttttaagacaagcgctgcactc

SEQ ID NO: 5396504 - DNA, 25 bp, Homo sapien
gagctaattcagtgagcacactctg

SEQ ID NO: 5396505 - DNA, 25 bp, Homo sapien
tctcccatgtggttgatgaggacag

SEQ ID NO: 5396506 - DNA, 25 bp, Homo sapien
cctctatgaggaccagagctaattc

SEQ ID NO: 5396507 - DNA, 25 bp, Homo sapien
tttactgtcagaccagataggccaa

SEQ ID NO: 5396508 - DNA, 25 bp, Homo sapien
accagataggccaaccagcttgccc

SEQ ID NO: 5396509 - DNA, 25 bp, Homo sapien
agataggccaaccagcttgccccct

SEQ ID NO: 5396510 - DNA, 25 bp, Homo sapien
cttttactgtcagaccagataggcc

SEQ ID NO: 5396511 - DNA, 25 bp, Homo sapien
gctccctcatttcgtcacgaacagg

SEQ ID NO: 5396512 - DNA, 25 bp, Homo sapien
ttcgtcacgaacaggaaagagccac

SEQ ID NO: 5396513 - DNA, 25 bp, Homo sapien
cttacagaggtttcacctgatgcca

SEQ ID NO: 5396514 - DNA, 25 bp, Homo sapien
ggaaagagccacaattttctagctg

SEQ ID NO: 5396515 - DNA, 25 bp, Homo sapien
gcactaagcagggataaagttcttg

SEQ ID NO: 5396516 - DNA, 25 bp, Homo sapien
aacagttgcgtggaacctgctgcca

SEQ ID NO: 5396517 - DNA, 25 bp, Homo sapien
attgtgaagcacaagcaggctttgc

SEQ ID NO: 5396518 - DNA, 25 bp, Homo sapien
tcaggtttcgtgataaggctcaatg

SEQ ID NO: 5396519 - DNA, 25 bp, Homo sapien
tccccaggcggttgaatggagagac

SEQ ID NO: 5396520 - DNA, 25 bp, Homo sapien
ccgaaggttgatatggacggtctgc

SEQ ID NO: 5396521 - DNA, 25 bp, Homo sapien
gatgaactcagcacaacgttgaatg

SEQ ID NO: 5396522 - DNA, 25 bp, Homo sapien
cctgacacgtggagcattgatgaac

SEQ ID NO: 5396523 - DNA, 25 bp, Homo sapien
gataacaccagtgcggatctcctcc

SEQ ID NO: 5396524 - DNA, 25 bp, Homo sapien
gagataacaccagtgcggatctcct

SEQ ID NO: 5396525 - DNA, 25 bp, Homo sapien
tcagagataacaccagtgcggatct

SEQ ID NO: 5396526 - DNA, 25 bp, Homo sapien
cagagataacaccagtgcggatctc

SEQ ID NO: 5396527 - DNA, 25 bp, Homo sapien
gttctccatcttcatatcccaccat

SEQ ID NO: 5396528 - DNA, 25 bp, Homo sapien
tcttgagaaggcaaacccctttgtc

SEQ ID NO: 5396529 - DNA, 25 bp, Homo sapien
tgagattctgcaatgtcctcttgag

SEQ ID NO: 5396530 - DNA, 25 bp, Homo sapien
cttcctgagattctgcaatgtcctc

SEQ ID NO: 5396531 - DNA, 25 bp, Homo sapien
tactagcggtgtgtcctacacgcca

SEQ ID NO: 5396532 - DNA, 25 bp, Homo sapien
gaaggagccagccactgtaggtatg

SEQ ID NO: 5396533 - DNA, 25 bp, Homo sapien
gcagacccaacagctttcttggaag

SEQ ID NO: 5396534 - DNA, 25 bp, Homo sapien
tacaagtcaataagcaagcagaccc

SEQ ID NO: 5396535 - DNA, 25 bp, Homo sapien
aaggaaatcattgcaggcgatttta

SEQ ID NO: 5396536 - DNA, 25 bp, Homo sapien
ttcaaaaataaggtgaatgatctcg

SEQ ID NO: 5396537 - DNA, 25 bp, Homo sapien
taaaaagcaatcctggtcctattcc

SEQ ID NO: 5396538 - DNA, 25 bp, Homo sapien
ggtgaatgatctcgaaaggaaatca

SEQ ID NO: 5396539 - DNA, 25 bp, Homo sapien
gaatacttccagacaaaagcagggc

SEQ ID NO: 5396540 - DNA, 25 bp, Homo sapien
aggcctcattctgactgaaggagcc

SEQ ID NO: 5396541 - DNA, 25 bp, Homo sapien
tgaaggagccattcagaatacttcc

SEQ ID NO: 5396542 - DNA, 25 bp, Homo sapien
acagtgacctgcaggcctcattctg

SEQ ID NO: 5396543 - DNA, 25 bp, Homo sapien
gaatctggtcctttgtgttttatga

SEQ ID NO: 5396544 - DNA, 25 bp, Homo sapien
ttagtgttgtggaagttggacagag

SEQ ID NO: 5396545 - DNA, 25 bp, Homo sapien
gaatgggtattaagattccacgaat

SEQ ID NO: 5396546 - DNA, 25 bp, Homo sapien
cacgaataaatcccctgccatttct

SEQ ID NO: 5396547 - DNA, 25 bp, Homo sapien
gttgaagacccctgatccacgttgg

SEQ ID NO: 5396548 - DNA, 25 bp, Homo sapien
agacttctaagaggcaatgatagag

SEQ ID NO: 5396549 - DNA, 25 bp, Homo sapien
tgaagacctatttgatcatctagcg

SEQ ID NO: 5396550 - DNA, 25 bp, Homo sapien
tccacgttgggctttcggagaagac

SEQ ID NO: 5396551 - DNA, 25 bp, Homo sapien
gcttttccctatctctcacctcacc

SEQ ID NO: 5396552 - DNA, 25 bp, Homo sapien
ctccagctacttcagtcaaaagagc

SEQ ID NO: 5396553 - DNA, 25 bp, Homo sapien
cagctacttcagtcaaaagagcttc

SEQ ID NO: 5396554 - DNA, 25 bp, Homo sapien
ctacttcagtcaaaagagcttcact

SEQ ID NO: 5396555 - DNA, 25 bp, Homo sapien
gatcttaaatcctcaagttctgcag

SEQ ID NO: 5396556 - DNA, 25 bp, Homo sapien
tggatattgcctctgaagacaacag

SEQ ID NO: 5396557 - DNA, 25 bp, Homo sapien
tcacagtcacccctgtaaagcagac

SEQ ID NO: 5396558 - DNA, 25 bp, Homo sapien
aacagtctgtcagcgcacattctca

SEQ ID NO: 5396559 - DNA, 25 bp, Homo sapien
tggcctcttcgtgcgctcatttgca

SEQ ID NO: 5396560 - DNA, 25 bp, Homo sapien
tcccagcgcacagctatttaatagt

SEQ ID NO: 5396561 - DNA, 25 bp, Homo sapien
aatactcgattgctctcccagcgca

SEQ ID NO: 5396562 - DNA, 25 bp, Homo sapien
catttgcatgccaatactcgattgc

SEQ ID NO: 5396563 - DNA, 25 bp, Homo sapien
tagcatgcatttgtgtattatgggc

SEQ ID NO: 5396564 - DNA, 25 bp, Homo sapien
gccatcacagcgcattctgtaaatg

SEQ ID NO: 5396565 - DNA, 25 bp, Homo sapien
tgtaaatgaattaacagtagcatgc

SEQ ID NO: 5396566 - DNA, 25 bp, Homo sapien
catttgtgtattatgggcccagaag

SEQ ID NO: 5396567 - DNA, 25 bp, Homo sapien
tggcaggtaatgacttgcaattagc

SEQ ID NO: 5396568 - DNA, 25 bp, Homo sapien
tgtctcacaaactgtacaaaactgt

SEQ ID NO: 5396569 - DNA, 25 bp, Homo sapien
gagaaaaatgatccttccagttaag

SEQ ID NO: 5396570 - DNA, 25 bp, Homo sapien
taagtagagcctccctgtgtctcac

SEQ ID NO: 5396571 - DNA, 25 bp, Homo sapien
agagatggtgcctgttgagaaattc

SEQ ID NO: 5396572 - DNA, 25 bp, Homo sapien
ggagagatggtgcctgttgagaaat

SEQ ID NO: 5396573 - DNA, 25 bp, Homo sapien
gagagatggtgcctgttgagaaatt

SEQ ID NO: 5396574 - DNA, 25 bp, Homo sapien
tctatgattgtgacactgtactccc

SEQ ID NO: 5396575 - DNA, 25 bp, Homo sapien
gattgtgacactgtactccccctgg

SEQ ID NO: 5396576 - DNA, 25 bp, Homo sapien
atgattgtgacactgtactccccct

SEQ ID NO: 5396577 - DNA, 25 bp, Homo sapien
ttgtgacactgtactccccctgggc

SEQ ID NO: 5396578 - DNA, 25 bp, Homo sapien
ttcattgacagcaaccatagacctt

SEQ ID NO: 5396579 - DNA, 25 bp, Homo sapien
ggtttcctggctaacattatcgtag

SEQ ID NO: 5396580 - DNA, 25 bp, Homo sapien
cattatcgtagaagcaacaagttgg

SEQ ID NO: 5396581 - DNA, 25 bp, Homo sapien
tagcttgctttatgagtaacatggc

SEQ ID NO: 5396582 - DNA, 25 bp, Homo sapien
ccctctggctttatatgtcgaagaa

SEQ ID NO: 5396583 - DNA, 25 bp, Homo sapien
cgacgatgtaaatgcaggtggtgcc

SEQ ID NO: 5396584 - DNA, 25 bp, Homo sapien
taacatggcgagtttcttttgtccc

SEQ ID NO: 5396585 - DNA, 25 bp, Homo sapien
tctgtaacacatgagtccctgaggg

SEQ ID NO: 5396586 - DNA, 25 bp, Homo sapien
ttctgctcattgtaatcactcagga

SEQ ID NO: 5396587 - DNA, 25 bp, Homo sapien
gatcagcagaggtgttctgctcatt

SEQ ID NO: 5396588 - DNA, 25 bp, Homo sapien
ctcaggatcccatactcatcctgaa

SEQ ID NO: 5396589 - DNA, 25 bp, Homo sapien
tcatagatcagcagaggtgttctgc

SEQ ID NO: 5396590 - DNA, 25 bp, Homo sapien
tattcctgtataactcaggagatcc

SEQ ID NO: 5396591 - DNA, 25 bp, Homo sapien
agggagattgctgtggtaccttgat

SEQ ID NO: 5396592 - DNA, 25 bp, Homo sapien
ggagatccaggaagtacagttctgc

SEQ ID NO: 5396593 - DNA, 25 bp, Homo sapien
ggctggaactgcatgaagtgctata

SEQ ID NO: 5396594 - DNA, 25 bp, Homo sapien
tgtgactggcattgttttgcaactg

SEQ ID NO: 5396595 - DNA, 25 bp, Homo sapien
gcaactgtccggcataatttgttgt

SEQ ID NO: 5396596 - DNA, 25 bp, Homo sapien
aatcttggacattcttgtgactggc

SEQ ID NO: 5396597 - DNA, 25 bp, Homo sapien
cacatcgagttgagacttctccaag

SEQ ID NO: 5396598 - DNA, 25 bp, Homo sapien
aactcttgaagatttattggccttt

SEQ ID NO: 5396599 - DNA, 25 bp, Homo sapien
ttctctgagtggtgtaatccaaata

SEQ ID NO: 5396600 - DNA, 25 bp, Homo sapien
ctgagtggtgtaatccaaataaaat

SEQ ID NO: 5396601 - DNA, 25 bp, Homo sapien
tcttgaagatttattggcctttctc

SEQ ID NO: 5396602 - DNA, 25 bp, Homo sapien
tctgaaccaacaggaactgacatgg

SEQ ID NO: 5396603 - DNA, 25 bp, Homo sapien
gcaagcccaaagaggatctgaacca

SEQ ID NO: 5396604 - DNA, 25 bp, Homo sapien
acatggtttttgtagctgaagtgtc

SEQ ID NO: 5396605 - DNA, 25 bp, Homo sapien
actgacatggtttttgtagctgaag

SEQ ID NO: 5396606 - DNA, 25 bp, Homo sapien
tatccttttgaagggctccataagc

SEQ ID NO: 5396607 - DNA, 25 bp, Homo sapien
tgtttatccttttgaagggctccat

SEQ ID NO: 5396608 - DNA, 25 bp, Homo sapien
tttgaagggctccataagcaccatc

SEQ ID NO: 5396609 - DNA, 25 bp, Homo sapien
agggctccataagcaccatcattca

SEQ ID NO: 5396610 - DNA, 25 bp, Homo sapien
tgactgttcctatgacaaaggaggg

SEQ ID NO: 5396611 - DNA, 25 bp, Homo sapien
ggaataccgctaaagatcactgtcg

SEQ ID NO: 5396612 - DNA, 25 bp, Homo sapien
tagagaagctgacaccgtgactcac

SEQ ID NO: 5396613 - DNA, 25 bp, Homo sapien
ttcctagcgtgcatgggaataccgc

SEQ ID NO: 5396614 - DNA, 25 bp, Homo sapien
aacttagtccagtctggttctacca

SEQ ID NO: 5396615 - DNA, 25 bp, Homo sapien
acagaacccacagaaacttagtcca

SEQ ID NO: 5396616 - DNA, 25 bp, Homo sapien
ccacagaaacttagtccagtctggt

SEQ ID NO: 5396617 - DNA, 25 bp, Homo sapien
gaacccacagaaacttagtccagtc

SEQ ID NO: 5396618 - DNA, 25 bp, Homo sapien
tcttgtgagacagagtgacacattt

SEQ ID NO: 5396619 - DNA, 25 bp, Homo sapien
tggctggaagtgaaaatgcatgcaa

SEQ ID NO: 5396620 - DNA, 25 bp, Homo sapien
taagtactggattcatggctggaag

SEQ ID NO: 5396621 - DNA, 25 bp, Homo sapien
cattaggtctcagtattgcatgact

SEQ ID NO: 5396622 - DNA, 25 bp, Homo sapien
tcaaaccgtggcaatgcacgcttgc

SEQ ID NO: 5396623 - DNA, 25 bp, Homo sapien
atatcttgatctgtacttcaaaccg

SEQ ID NO: 5396624 - DNA, 25 bp, Homo sapien
gatctgtacttcaaaccgtggcaat

SEQ ID NO: 5396625 - DNA, 25 bp, Homo sapien
atgcacgcttgcaaaattccagcag

SEQ ID NO: 5396626 - DNA, 25 bp, Homo sapien
cacaaaaatctagggtgacatttaa

SEQ ID NO: 5396627 - DNA, 25 bp, Homo sapien
ctcagcctattggaattgaacacaa

SEQ ID NO: 5396628 - DNA, 25 bp, Homo sapien
taataaatgcaagccgcacccttgc

SEQ ID NO: 5396629 - DNA, 25 bp, Homo sapien
ccttgccccaaggttatgttttgct

SEQ ID NO: 5396630 - DNA, 25 bp, Homo sapien
cctgaattggatgtcacaaattctg

SEQ ID NO: 5396631 - DNA, 25 bp, Homo sapien
ctgcatttgcgtgttagtgctatca

SEQ ID NO: 5396632 - DNA, 25 bp, Homo sapien
tttgttgttgaggaacctgaattgg

SEQ ID NO: 5396633 - DNA, 25 bp, Homo sapien
tcagggatgacatttacttgtactt

SEQ ID NO: 5396634 - DNA, 25 bp, Homo sapien
tgtatgcattctgatcagagtgcac

SEQ ID NO: 5396635 - DNA, 25 bp, Homo sapien
cagagtgcaccttagagaaaataat

SEQ ID NO: 5396636 - DNA, 25 bp, Homo sapien
tcatcccgcgtgtcccctgaacttg

SEQ ID NO: 5396637 - DNA, 25 bp, Homo sapien
aatgaatactgtcatcaagaatgtg

SEQ ID NO: 5396638 - DNA, 25 bp, Homo sapien
aattgcattattgggctgacgaggc

SEQ ID NO: 5396639 - DNA, 25 bp, Homo sapien
gacgaggccagtagtcctcaaatct

SEQ ID NO: 5396640 - DNA, 25 bp, Homo sapien
catcaccagggcaattgcattattg

SEQ ID NO: 5396641 - DNA, 25 bp, Homo sapien
gcttggctagttctactcttttctt

SEQ ID NO: 5396642 - DNA, 25 bp, Homo sapien
tggtacatcgcctcagggcattcat

SEQ ID NO: 5396643 - DNA, 25 bp, Homo sapien
ctggtacatcgcctcagggcattca

SEQ ID NO: 5396644 - DNA, 25 bp, Homo sapien
tagtgtctaatctagtgcccagatg

SEQ ID NO: 5396645 - DNA, 25 bp, Homo sapien
tctcttcagttagactcttatgttc

SEQ ID NO: 5396646 - DNA, 25 bp, Homo sapien
tgcccagatggattctggcatacat

SEQ ID NO: 5396647 - DNA, 25 bp, Homo sapien
tactttcggatgaggttgtaattct

SEQ ID NO: 5396648 - DNA, 25 bp, Homo sapien
tataaagaatgcagcggataatggc

SEQ ID NO: 5396649 - DNA, 25 bp, Homo sapien
tggtcttgttgctaggatgaggcct

SEQ ID NO: 5396650 - DNA, 25 bp, Homo sapien
cacattatttgcctcagtgccatga

SEQ ID NO: 5396651 - DNA, 25 bp, Homo sapien
tcctctgaacagatggtgatggtct

SEQ ID NO: 5396652 - DNA, 25 bp, Homo sapien
ggcaggaaggaagattggtttggca

SEQ ID NO: 5396653 - DNA, 25 bp, Homo sapien
gatgccttcgataccacagagaaaa

SEQ ID NO: 5396654 - DNA, 25 bp, Homo sapien
tcttcccattagaagtctgtttact

SEQ ID NO: 5396655 - DNA, 25 bp, Homo sapien
agattggtttggcaggagaactggc

SEQ ID NO: 5396656 - DNA, 25 bp, Homo sapien
tccacatcaaaattccaatttgtgg

SEQ ID NO: 5396657 - DNA, 25 bp, Homo sapien
caaaattccaatttgtgggaggtgg

SEQ ID NO: 5396658 - DNA, 25 bp, Homo sapien
attccaatttgtgggaggtggacta

SEQ ID NO: 5396659 - DNA, 25 bp, Homo sapien
atcaaaattccaatttgtgggaggt

SEQ ID NO: 5396660 - DNA, 25 bp, Homo sapien
atggacagcaatggttttgatatct

SEQ ID NO: 5396661 - DNA, 25 bp, Homo sapien
aagttgtcgctgaaagtgtgctcac

SEQ ID NO: 5396662 - DNA, 25 bp, Homo sapien
gaaagttgtcgctgaaagtgtgctc

SEQ ID NO: 5396663 - DNA, 25 bp, Homo sapien
agttgtcgctgaaagtgtgctcact

SEQ ID NO: 5396664 - DNA, 25 bp, Homo sapien
cttttaatgtgcctccaggtttctg

SEQ ID NO: 5396665 - DNA, 25 bp, Homo sapien
ttgaggagtctgaatatgtcctttt

SEQ ID NO: 5396666 - DNA, 25 bp, Homo sapien
ttttccatattacttgaggagtctg

SEQ ID NO: 5396667 - DNA, 25 bp, Homo sapien
cttgaggagtctgaatatgtccttt

SEQ ID NO: 5396668 - DNA, 25 bp, Homo sapien
gctgtgctgcacaaagtattgcttc

SEQ ID NO: 5396669 - DNA, 25 bp, Homo sapien
ttcccatactgaaaggctgtgctgc

SEQ ID NO: 5396670 - DNA, 25 bp, Homo sapien
gaagctgagaccacggctgctgtct

SEQ ID NO: 5396671 - DNA, 25 bp, Homo sapien
ccaccaacgctctgtctggcagaag

SEQ ID NO: 5396672 - DNA, 25 bp, Homo sapien
aaaaaatcgccagatcgttctgttt

SEQ ID NO: 5396673 - DNA, 25 bp, Homo sapien
tgaagaagttgaatgtgcctctcta

SEQ ID NO: 5396674 - DNA, 25 bp, Homo sapien
gaagttgaatgtgcctctctaaccc

SEQ ID NO: 5396675 - DNA, 25 bp, Homo sapien
tcgtttctttagtaggctctcctct

SEQ ID NO: 5396676 - DNA, 25 bp, Homo sapien
cacagtgtgctctgatgtagtgtta

SEQ ID NO: 5396677 - DNA, 25 bp, Homo sapien
gattccgcccatcatgggcaaaggt

SEQ ID NO: 5396678 - DNA, 25 bp, Homo sapien
ggagcaagagcagcaaaatagcact

SEQ ID NO: 5396679 - DNA, 25 bp, Homo sapien
tgttactaggcaggccagattccgc

SEQ ID NO: 5396680 - DNA, 25 bp, Homo sapien
gacctccagctgagtgaaccattag

SEQ ID NO: 5396681 - DNA, 25 bp, Homo sapien
tctaaaggcagacccaagaggtttg

SEQ ID NO: 5396682 - DNA, 25 bp, Homo sapien
acagttaacaggagcaattttgccc

SEQ ID NO: 5396683 - DNA, 25 bp, Homo sapien
catggtcattgttaaggtcagggtc

SEQ ID NO: 5396684 - DNA, 25 bp, Homo sapien
catatagctcctagcacaccgtgtg

SEQ ID NO: 5396685 - DNA, 25 bp, Homo sapien
gatccttaagtgcatggtctggcta

SEQ ID NO: 5396686 - DNA, 25 bp, Homo sapien
tacagctatgtgtgagtctgcatct

SEQ ID NO: 5396687 - DNA, 25 bp, Homo sapien
tctgatgcgtctttcttagctccgt

SEQ ID NO: 5396688 - DNA, 25 bp, Homo sapien
tggctggaccactatggcatacgat

SEQ ID NO: 5396689 - DNA, 25 bp, Homo sapien
ggcatacgattcctccattgtcata

SEQ ID NO: 5396690 - DNA, 25 bp, Homo sapien
tagtccagggataagaacttgtagt

SEQ ID NO: 5396691 - DNA, 25 bp, Homo sapien
ttgtcataaaggtagaccatatggt

SEQ ID NO: 5396692 - DNA, 25 bp, Homo sapien
caaatggcagggactttggtggcct

SEQ ID NO: 5396693 - DNA, 25 bp, Homo sapien
cagggactttggtggcctgttagct

SEQ ID NO: 5396694 - DNA, 25 bp, Homo sapien
tggcctgttagctgcttctgtgata

SEQ ID NO: 5396695 - DNA, 25 bp, Homo sapien
gtggcctgttagctgcttctgtgat

SEQ ID NO: 5396696 - DNA, 25 bp, Homo sapien
gaataataggagttgttacacacac

SEQ ID NO: 5396697 - DNA, 25 bp, Homo sapien
tatagaaaaacaacgtgccagggat

SEQ ID NO: 5396698 - DNA, 25 bp, Homo sapien
cgttcgtaaaacattcatggaaggc

SEQ ID NO: 5396699 - DNA, 25 bp, Homo sapien
tcttatatttccaggcatctatgca

SEQ ID NO: 5396700 - DNA, 25 bp, Homo sapien
aagaggcagcctgctaatgcaagca

SEQ ID NO: 5396701 - DNA, 25 bp, Homo sapien
ggcagcctgctaatgcaagcaaggg

SEQ ID NO: 5396702 - DNA, 25 bp, Homo sapien
gcctgctaatgcaagcaagggtgtc

SEQ ID NO: 5396703 - DNA, 25 bp, Homo sapien
ctgctaatgcaagcaagggtgtctc

SEQ ID NO: 5396704 - DNA, 25 bp, Homo sapien
tgcacaaatatagccaaactgccag

SEQ ID NO: 5396705 - DNA, 25 bp, Homo sapien
ttctttgcacaaatatagccaaact

SEQ ID NO: 5396706 - DNA, 25 bp, Homo sapien
cttttctttgcacaaatatagccaa

SEQ ID NO: 5396707 - DNA, 25 bp, Homo sapien
tttgcacaaatatagccaaactgcc

SEQ ID NO: 5396708 - DNA, 25 bp, Homo sapien
ctaggttgttcttaggctcttttgg

SEQ ID NO: 5396709 - DNA, 25 bp, Homo sapien
tctaaagccagctcacagactgaag

SEQ ID NO: 5396710 - DNA, 25 bp, Homo sapien
gcccatgggcagagaatgcctctga

SEQ ID NO: 5396711 - DNA, 25 bp, Homo sapien
tgggccttggcttggttaactctgt

SEQ ID NO: 5396712 - DNA, 25 bp, Homo sapien
tctgcggttcgatcctggtttcctg

SEQ ID NO: 5396713 - DNA, 25 bp, Homo sapien
agtatggcgtttctcttgtctaaag

SEQ ID NO: 5396714 - DNA, 25 bp, Homo sapien
gtatggcgtttctcttgtctaaaga

SEQ ID NO: 5396715 - DNA, 25 bp, Homo sapien
tatggcgtttctcttgtctaaagat

SEQ ID NO: 5396716 - DNA, 25 bp, Homo sapien
tttgcactctgggtgtagccctcag

SEQ ID NO: 5396717 - DNA, 25 bp, Homo sapien
cagcaagctgttcgtcagagtcatc

SEQ ID NO: 5396718 - DNA, 25 bp, Homo sapien
ctttggtgactatctgcctacaggc

SEQ ID NO: 5396719 - DNA, 25 bp, Homo sapien
agctgcagcaagctgttcgtcagag

SEQ ID NO: 5396720 - DNA, 25 bp, Homo sapien
aatgtttgatgtattccagccctcc

SEQ ID NO: 5396721 - DNA, 25 bp, Homo sapien
cagccctcctgtgagcatgtttgag

SEQ ID NO: 5396722 - DNA, 25 bp, Homo sapien
acttaataggattagtcatgggaac

SEQ ID NO: 5396723 - DNA, 25 bp, Homo sapien
tctgcttcagggaggatactgccca

SEQ ID NO: 5396724 - DNA, 25 bp, Homo sapien
ccaaaatatggaacacggtcaatga

SEQ ID NO: 5396725 - DNA, 25 bp, Homo sapien
cacggtcaatgaaaagaggtggccc

SEQ ID NO: 5396726 - DNA, 25 bp, Homo sapien
tgggtccaaaatatggaacacggtc

SEQ ID NO: 5396727 - DNA, 25 bp, Homo sapien
tatggaacacggtcaatgaaaagag

SEQ ID NO: 5396728 - DNA, 25 bp, Homo sapien
tcaatgtaatctatactttctccac

SEQ ID NO: 5396729 - DNA, 25 bp, Homo sapien
tctccactcagttgggtcaatcttt

SEQ ID NO: 5396730 - DNA, 25 bp, Homo sapien
tgcctaaagttctgcaagtacttga

SEQ ID NO: 5396731 - DNA, 25 bp, Homo sapien
gtttggaacacctcacctcaggcga

SEQ ID NO: 5396732 - DNA, 25 bp, Homo sapien
tggagactgaccaggctcctgcttc

SEQ ID NO: 5396733 - DNA, 25 bp, Homo sapien
ttgtttgcttgattgttatagatct

SEQ ID NO: 5396734 - DNA, 25 bp, Homo sapien
tgtttgcttgattgttatagatctt

SEQ ID NO: 5396735 - DNA, 25 bp, Homo sapien
gatctgtgggtagaatgcctctgct

SEQ ID NO: 5396736 - DNA, 25 bp, Homo sapien
cactgaagcacaaccacactttgga

SEQ ID NO: 5396737 - DNA, 25 bp, Homo sapien
tctgcatgacctagtagggctttcc

SEQ ID NO: 5396738 - DNA, 25 bp, Homo sapien
tctgatttctgcacggatctgtggg

SEQ ID NO: 5396739 - DNA, 25 bp, Homo sapien
tccaggtagggagtttgacttctgc

SEQ ID NO: 5396740 - DNA, 25 bp, Homo sapien
tgtgatttacaatttgcaagcatcc

SEQ ID NO: 5396741 - DNA, 25 bp, Homo sapien
tctagctcattgatgtttacaaaac

SEQ ID NO: 5396742 - DNA, 25 bp, Homo sapien
gggatccacatttgattctagctca

SEQ ID NO: 5396743 - DNA, 25 bp, Homo sapien
aagatgtctcttgtccattgtgtca

SEQ ID NO: 5396744 - DNA, 25 bp, Homo sapien
tagtagagagctttccatggtcccc

SEQ ID NO: 5396745 - DNA, 25 bp, Homo sapien
tggtctggagtttttggcatatatc

SEQ ID NO: 5396746 - DNA, 25 bp, Homo sapien
agcaggactgctctcttccggtagt

SEQ ID NO: 5396747 - DNA, 25 bp, Homo sapien
tgagagggacaaaggtccttgtgcc

SEQ ID NO: 5396748 - DNA, 25 bp, Homo sapien
gagagggacaaaggtccttgtgcca

SEQ ID NO: 5396749 - DNA, 25 bp, Homo sapien
ctgagagggacaaaggtccttgtgc

SEQ ID NO: 5396750 - DNA, 25 bp, Homo sapien
agagggacaaaggtccttgtgccat

SEQ ID NO: 5396751 - DNA, 25 bp, Homo sapien
cactagtccacacgggctgcttctg

SEQ ID NO: 5396752 - DNA, 25 bp, Homo sapien
gatcctgcctggcaaaacggttcag

SEQ ID NO: 5396753 - DNA, 25 bp, Homo sapien
gggaacctctgagatgtctggtgtc

SEQ ID NO: 5396754 - DNA, 25 bp, Homo sapien
ggtcacagcctgaatgggaacctct

SEQ ID NO: 5396755 - DNA, 25 bp, Homo sapien
ctaactctgctaaaatgttggggca

SEQ ID NO: 5396756 - DNA, 25 bp, Homo sapien
aactctgctaaaatgttggggcaga

SEQ ID NO: 5396757 - DNA, 25 bp, Homo sapien
tgctaaaatgttggggcagatctct

SEQ ID NO: 5396758 - DNA, 25 bp, Homo sapien
ctctgctaaaatgttggggcagatc

SEQ ID NO: 5396759 - DNA, 25 bp, Homo sapien
tcaagttgtgggttgcttttccaca

SEQ ID NO: 5396760 - DNA, 25 bp, Homo sapien
cgtgtatgtactcttagatggtgac

SEQ ID NO: 5396761 - DNA, 25 bp, Homo sapien
tcagagctctatgctgactggtgcc

SEQ ID NO: 5396762 - DNA, 25 bp, Homo sapien
tccagatgctcctgccgtgtatgta

SEQ ID NO: 5396763 - DNA, 25 bp, Homo sapien
aaccgtgcagttgggagtagcctct

SEQ ID NO: 5396764 - DNA, 25 bp, Homo sapien
cataaaccgtgcagttgggagtagc

SEQ ID NO: 5396765 - DNA, 25 bp, Homo sapien
tggtgtcccacacataaaccgtgca

SEQ ID NO: 5396766 - DNA, 25 bp, Homo sapien
cacacataaaccgtgcagttgggag

SEQ ID NO: 5396767 - DNA, 25 bp, Homo sapien
gaggattacaaccaggtccctgctg

SEQ ID NO: 5396768 - DNA, 25 bp, Homo sapien
agctgaggattacaaccaggtccct

SEQ ID NO: 5396769 - DNA, 25 bp, Homo sapien
cccaagctgaggattacaaccaggt

SEQ ID NO: 5396770 - DNA, 25 bp, Homo sapien
tcccaagctgaggattacaaccagg

SEQ ID NO: 5396771 - DNA, 25 bp, Homo sapien
caagggcttctccttagaaatcatc

SEQ ID NO: 5396772 - DNA, 25 bp, Homo sapien
acggaaagatcatatcagcacagca

SEQ ID NO: 5396773 - DNA, 25 bp, Homo sapien
aatcatctggatatctttatgatcc

SEQ ID NO: 5396774 - DNA, 25 bp, Homo sapien
gcatctgtttggattggttgttaca

SEQ ID NO: 5396775 - DNA, 25 bp, Homo sapien
taataggtgccatgggaatatatcc

SEQ ID NO: 5396776 - DNA, 25 bp, Homo sapien
ggtgccatgggaatatatccactcc

SEQ ID NO: 5396777 - DNA, 25 bp, Homo sapien
tgtttgctttacgaaacatttggca

SEQ ID NO: 5396778 - DNA, 25 bp, Homo sapien
ggtttcactgtacctgaattaccac

SEQ ID NO: 5396779 - DNA, 25 bp, Homo sapien
tgacatatcagtagttctgttcctg

SEQ ID NO: 5396780 - DNA, 25 bp, Homo sapien
tcctggccttaactccctggtagct

SEQ ID NO: 5396781 - DNA, 25 bp, Homo sapien
caaaatacagtcatccagaactgtc

SEQ ID NO: 5396782 - DNA, 25 bp, Homo sapien
ttaactccctggtagctagccctgc

SEQ ID NO: 5396783 - DNA, 25 bp, Homo sapien
gacatcagctgcttaaggaaagcct

SEQ ID NO: 5396784 - DNA, 25 bp, Homo sapien
catcagctgcttaaggaaagcctct

SEQ ID NO: 5396785 - DNA, 25 bp, Homo sapien
acatcagctgcttaaggaaagcctc

SEQ ID NO: 5396786 - DNA, 25 bp, Homo sapien
ttacactggcaggttttcttagaaa

SEQ ID NO: 5396787 - DNA, 25 bp, Homo sapien
agaaaaatgacccattccatgatga

SEQ ID NO: 5396788 - DNA, 25 bp, Homo sapien
ccacataaatggcatacacctccag

SEQ ID NO: 5396789 - DNA, 25 bp, Homo sapien
tgaagaatacctaaatcccacaagt

SEQ ID NO: 5396790 - DNA, 25 bp, Homo sapien
gtgaacaatatccatcccggcaaag

SEQ ID NO: 5396791 - DNA, 25 bp, Homo sapien
gagggccccatctgagaaatagtaa

SEQ ID NO: 5396792 - DNA, 25 bp, Homo sapien
tgtggaccaatgaccagagtgccct

SEQ ID NO: 5396793 - DNA, 25 bp, Homo sapien
gtgacccaagaagaactcgagccta

SEQ ID NO: 5396794 - DNA, 25 bp, Homo sapien
aaaattcagatgttttcctaacagt

SEQ ID NO: 5396795 - DNA, 25 bp, Homo sapien
tgttttcctaacagtaatttcattc

SEQ ID NO: 5396796 - DNA, 25 bp, Homo sapien
ttcagatgttttcctaacagtaatt

SEQ ID NO: 5396797 - DNA, 25 bp, Homo sapien
aattcagatgttttcctaacagtaa

SEQ ID NO: 5396798 - DNA, 25 bp, Homo sapien
gacgccttgcagatggcctgctgga

SEQ ID NO: 5396799 - DNA, 25 bp, Homo sapien
gctttactaatgatgctccaggctc

SEQ ID NO: 5396800 - DNA, 25 bp, Homo sapien
caacatcatagaccttaagctgctg

SEQ ID NO: 5396801 - DNA, 25 bp, Homo sapien
caagctgggtctgacagtgacgcct

SEQ ID NO: 5396802 - DNA, 25 bp, Homo sapien
gagtcatggcttcccctattcgtat

SEQ ID NO: 5396803 - DNA, 25 bp, Homo sapien
tgccacaaggtaggccttaagtaaa

SEQ ID NO: 5396804 - DNA, 25 bp, Homo sapien
tatcacccctagaagcaatacactg

SEQ ID NO: 5396805 - DNA, 25 bp, Homo sapien
tagtttattcacacatagggatgtc

SEQ ID NO: 5396806 - DNA, 25 bp, Homo sapien
tcacatgggtaagtgatgcactgac

SEQ ID NO: 5396807 - DNA, 25 bp, Homo sapien
cagtcagtgccatcaaagaaacctt

SEQ ID NO: 5396808 - DNA, 25 bp, Homo sapien
caaagaaaccttgatatgcttgtgc

SEQ ID NO: 5396809 - DNA, 25 bp, Homo sapien
gattttgctgcatcgggcagtcagt

SEQ ID NO: 5396810 - DNA, 25 bp, Homo sapien
aaaggattttgctgcatcgggcagt

SEQ ID NO: 5396811 - DNA, 25 bp, Homo sapien
tatctgcctcctctctccacttttc

SEQ ID NO: 5396812 - DNA, 25 bp, Homo sapien
tctgcctcctctctccacttttccc

SEQ ID NO: 5396813 - DNA, 25 bp, Homo sapien
ctctgattatctgcctcctctctcc

SEQ ID NO: 5396814 - DNA, 25 bp, Homo sapien
tgcctcctctctccacttttccctt

SEQ ID NO: 5396815 - DNA, 25 bp, Homo sapien
tgagcatcaactcttaaagtctcca

SEQ ID NO: 5396816 - DNA, 25 bp, Homo sapien
ctgagcatcaactcttaaagtctcc

SEQ ID NO: 5396817 - DNA, 25 bp, Homo sapien
tgatgacaagccttctgctgatgag

SEQ ID NO: 5396818 - DNA, 25 bp, Homo sapien
gagtgctgtaatgtgtccatcactg

SEQ ID NO: 5396819 - DNA, 25 bp, Homo sapien
cactgtgagtattgattaccatttc

SEQ ID NO: 5396820 - DNA, 25 bp, Homo sapien
tgctaagtatatgtcttgatgacaa

SEQ ID NO: 5396821 - DNA, 25 bp, Homo sapien
tgcacctgcaggatgaattacatct

SEQ ID NO: 5396822 - DNA, 25 bp, Homo sapien
gcacctgcaggatgaattacatctt

SEQ ID NO: 5396823 - DNA, 25 bp, Homo sapien
aagccaacaatgtttgcacctgcag

SEQ ID NO: 5396824 - DNA, 25 bp, Homo sapien
aaggatgggttgacatggtttacac

SEQ ID NO: 5396825 - DNA, 25 bp, Homo sapien
ccaataatggagcaaatgtggcaca

SEQ ID NO: 5396826 - DNA, 25 bp, Homo sapien
ctttatacaatcaccaccaataatg

SEQ ID NO: 5396827 - DNA, 25 bp, Homo sapien
tgtggcacatccatccaaggatggg

SEQ ID NO: 5396828 - DNA, 25 bp, Homo sapien
tcaggaaccgaaatagattatctgt

SEQ ID NO: 5396829 - DNA, 25 bp, Homo sapien
ttgcccttggcagtaaccccagact

SEQ ID NO: 5396830 - DNA, 25 bp, Homo sapien
gatgcaatgctgattcaggaaccga

SEQ ID NO: 5396831 - DNA, 25 bp, Homo sapien
tgtttcccttgcctgtgtagttgga

SEQ ID NO: 5396832 - DNA, 25 bp, Homo sapien
attaaattcaccagtgtgatggaat

SEQ ID NO: 5396833 - DNA, 25 bp, Homo sapien
tgtgatggaataactgatattttgc

SEQ ID NO: 5396834 - DNA, 25 bp, Homo sapien
gctatattactgtagtccttcaaag

SEQ ID NO: 5396835 - DNA, 25 bp, Homo sapien
gatattttgctatattactgtagtc

SEQ ID NO: 5396836 - DNA, 25 bp, Homo sapien
ctcttgtgaggtaatgagtgatttt

SEQ ID NO: 5396837 - DNA, 25 bp, Homo sapien
gtaatgagtgattttacattatgca

SEQ ID NO: 5396838 - DNA, 25 bp, Homo sapien
ggagatgtagaggctcttgtgaggt

SEQ ID NO: 5396839 - DNA, 25 bp, Homo sapien
cttgtgaggtaatgagtgattttac

SEQ ID NO: 5396840 - DNA, 25 bp, Homo sapien
tggctctagaaagtcaactctggtt

SEQ ID NO: 5396841 - DNA, 25 bp, Homo sapien
gagccatttctgaggaatacattat

SEQ ID NO: 5396842 - DNA, 25 bp, Homo sapien
tgactcagatcaactcctaagactt

SEQ ID NO: 5396843 - DNA, 25 bp, Homo sapien
ggtcataggtcacatggtgtatagt

SEQ ID NO: 5396844 - DNA, 25 bp, Homo sapien
ccagggcctggatatcatctagtct

SEQ ID NO: 5396845 - DNA, 25 bp, Homo sapien
gatatcatctagtctttgggtaaca

SEQ ID NO: 5396846 - DNA, 25 bp, Homo sapien
gctgattacatgttgctgaacaatc

SEQ ID NO: 5396847 - DNA, 25 bp, Homo sapien
cagatttgttttaagctgattacat

SEQ ID NO: 5396848 - DNA, 25 bp, Homo sapien
tgtgatgaggcagcatcggtctttg

SEQ ID NO: 5396849 - DNA, 25 bp, Homo sapien
atgtgatgaggcagcatcggtcttt

SEQ ID NO: 5396850 - DNA, 25 bp, Homo sapien
gaaggaacagttttgtgtccttctg

SEQ ID NO: 5396851 - DNA, 25 bp, Homo sapien
gtgttgatacttgggaaggaacagt

SEQ ID NO: 5396852 - DNA, 25 bp, Homo sapien
gaacagttttgtgtccttctgcttg

SEQ ID NO: 5396853 - DNA, 25 bp, Homo sapien
cagtgttgatacttgggaaggaaca

SEQ ID NO: 5396854 - DNA, 25 bp, Homo sapien
ccagtaggagacatcccagtgaaag

SEQ ID NO: 5396855 - DNA, 25 bp, Homo sapien
cttgcaccagtaggagacatcccag

SEQ ID NO: 5396856 - DNA, 25 bp, Homo sapien
tgcaccagtaggagacatcccagtg

SEQ ID NO: 5396857 - DNA, 25 bp, Homo sapien
caccagtaggagacatcccagtgaa

SEQ ID NO: 5396858 - DNA, 25 bp, Homo sapien
aattaggagcttttttggcattcgc

SEQ ID NO: 5396859 - DNA, 25 bp, Homo sapien
atctatcttaatgcaaattaggagc

SEQ ID NO: 5396860 - DNA, 25 bp, Homo sapien
gcttacagtaatgcactaataaggt

SEQ ID NO: 5396861 - DNA, 25 bp, Homo sapien
aatttatgaaggttctcttccagtc

SEQ ID NO: 5396862 - DNA, 25 bp, Homo sapien
tatggtgctagctgaaaatgcagac

SEQ ID NO: 5396863 - DNA, 25 bp, Homo sapien
tgtaagttacatatggtgctagctg

SEQ ID NO: 5396864 - DNA, 25 bp, Homo sapien
tatgaaggactgactctctaatcag

SEQ ID NO: 5396865 - DNA, 25 bp, Homo sapien
ctttgattgctgaactagcaaacag

SEQ ID NO: 5396866 - DNA, 25 bp, Homo sapien
ttttcacacccacaagatggacttg

SEQ ID NO: 5396867 - DNA, 25 bp, Homo sapien
gagtgatttaagctaccctcctagt

SEQ ID NO: 5396868 - DNA, 25 bp, Homo sapien
gccagtactaaacaacattgctgaa

SEQ ID NO: 5396869 - DNA, 25 bp, Homo sapien
cagggatgcagcgtcaaatcaagaa

SEQ ID NO: 5396870 - DNA, 25 bp, Homo sapien
tttcaacgtgtctctgtaaatcatt

SEQ ID NO: 5396871 - DNA, 25 bp, Homo sapien
aacgtgtctctgtaaatcattgtaa

SEQ ID NO: 5396872 - DNA, 25 bp, Homo sapien
tcaacgtgtctctgtaaatcattgt

SEQ ID NO: 5396873 - DNA, 25 bp, Homo sapien
cgtgtctctgtaaatcattgtaata

SEQ ID NO: 5396874 - DNA, 25 bp, Homo sapien
ggacactgatccgtaattttagtca

SEQ ID NO: 5396875 - DNA, 25 bp, Homo sapien
tactggcaactatctgcttggacat

SEQ ID NO: 5396876 - DNA, 25 bp, Homo sapien
tttgagtattgtatttggacactga

SEQ ID NO: 5396877 - DNA, 25 bp, Homo sapien
tcaggaagatatgcagtgtaccaag

SEQ ID NO: 5396878 - DNA, 25 bp, Homo sapien
cacatctgtctcatcttggcataac

SEQ ID NO: 5396879 - DNA, 25 bp, Homo sapien
tctcttttttccgtagcacctgtcc

SEQ ID NO: 5396880 - DNA, 25 bp, Homo sapien
gcacctgtccctgagtgaataggcc

SEQ ID NO: 5396881 - DNA, 25 bp, Homo sapien
tacatctgtgaatgatgattccatt

SEQ ID NO: 5396882 - DNA, 25 bp, Homo sapien
tgggttagaactgccgtcacatggc

SEQ ID NO: 5396883 - DNA, 25 bp, Homo sapien
ccttgggttagaactgccgtcacat

SEQ ID NO: 5396884 - DNA, 25 bp, Homo sapien
ttccttgggttagaactgccgtcac

SEQ ID NO: 5396885 - DNA, 25 bp, Homo sapien
tgttccttgggttagaactgccgtc

SEQ ID NO: 5396886 - DNA, 25 bp, Homo sapien
atgaacaacagtgatcaccttccca

SEQ ID NO: 5396887 - DNA, 25 bp, Homo sapien
caacagtgatcaccttcccattggt

SEQ ID NO: 5396888 - DNA, 25 bp, Homo sapien
ttcccattggtcagcgcctctgcat

SEQ ID NO: 5396889 - DNA, 25 bp, Homo sapien
tgatcaccttcccattggtcagcgc

SEQ ID NO: 5396890 - DNA, 25 bp, Homo sapien
tcagagagtttcacgggcctgaaga

SEQ ID NO: 5396891 - DNA, 25 bp, Homo sapien
cacgggcctgaagatacactgaaga

SEQ ID NO: 5396892 - DNA, 25 bp, Homo sapien
taatacttcagagagtttcacgggc

SEQ ID NO: 5396893 - DNA, 25 bp, Homo sapien
cagtttcacagctaatacttcagag

SEQ ID NO: 5396894 - DNA, 25 bp, Homo sapien
ctgtctctgtgattccaactgggtc

SEQ ID NO: 5396895 - DNA, 25 bp, Homo sapien
tgggtccatctcttctcttgccact

SEQ ID NO: 5396896 - DNA, 25 bp, Homo sapien
aactgggtccatctcttctcttgcc

SEQ ID NO: 5396897 - DNA, 25 bp, Homo sapien
gtgattccaactgggtccatctctt

SEQ ID NO: 5396898 - DNA, 25 bp, Homo sapien
tcttttttccgacaccatatcaatg

SEQ ID NO: 5396899 - DNA, 25 bp, Homo sapien
tgattggatttcatcagagtgtggg

SEQ ID NO: 5396900 - DNA, 25 bp, Homo sapien
gacaccatatcaatgtaccttctgg

SEQ ID NO: 5396901 - DNA, 25 bp, Homo sapien
attagactgtaaggattctttgccg

SEQ ID NO: 5396902 - DNA, 25 bp, Homo sapien
gaagcattgagatcctggaggacag

SEQ ID NO: 5396903 - DNA, 25 bp, Homo sapien
tggaggaggatctcattccaatagc

SEQ ID NO: 5396904 - DNA, 25 bp, Homo sapien
tcgtatatcggaagcattgagatcc

SEQ ID NO: 5396905 - DNA, 25 bp, Homo sapien
gcagactgagtgaacttgattaccc

SEQ ID NO: 5396906 - DNA, 25 bp, Homo sapien
gaaactgtcattatgcaccatgaca

SEQ ID NO: 5396907 - DNA, 25 bp, Homo sapien
gctgaaactgtcattatgcaccatg

SEQ ID NO: 5396908 - DNA, 25 bp, Homo sapien
ctgctgaaactgtcattatgcacca

SEQ ID NO: 5396909 - DNA, 25 bp, Homo sapien
ctgtcattatgcaccatgacaatgc

SEQ ID NO: 5396910 - DNA, 25 bp, Homo sapien
cttgtgaacttataggcttgactaa

SEQ ID NO: 5396911 - DNA, 25 bp, Homo sapien
tgctgcaaaagctagtaaccaagat

SEQ ID NO: 5396912 - DNA, 25 bp, Homo sapien
ccaagatctcactgtttccttctct

SEQ ID NO: 5396913 - DNA, 25 bp, Homo sapien
acttataggcttgactaactgtgga

SEQ ID NO: 5396914 - DNA, 25 bp, Homo sapien
tctggtcctcaattgagcttctctg

SEQ ID NO: 5396915 - DNA, 25 bp, Homo sapien
tcatcagcatgtgagaaaacagaga

SEQ ID NO: 5396916 - DNA, 25 bp, Homo sapien
ttcattgtgattggacctctggtcc

SEQ ID NO: 5396917 - DNA, 25 bp, Homo sapien
gaagccaaaggatagctttcctgag

SEQ ID NO: 5396918 - DNA, 25 bp, Homo sapien
ccatgttctttctcgcgagtggaga

SEQ ID NO: 5396919 - DNA, 25 bp, Homo sapien
caccgatgcctacttgaagaagaag

SEQ ID NO: 5396920 - DNA, 25 bp, Homo sapien
cacgatccatcagagcatgctgggc

SEQ ID NO: 5396921 - DNA, 25 bp, Homo sapien
gcataaagccagagaccaagaaggt

SEQ ID NO: 5396922 - DNA, 25 bp, Homo sapien
tgtgaattgaatatgctaggattca

SEQ ID NO: 5396923 - DNA, 25 bp, Homo sapien
gctaggattcaatatcggtactgtg

SEQ ID NO: 5396924 - DNA, 25 bp, Homo sapien
aactccagctgtatctgtctttgtg

SEQ ID NO: 5396925 - DNA, 25 bp, Homo sapien
tatcggtactgtgatgcttaactcc

SEQ ID NO: 5396926 - DNA, 25 bp, Homo sapien
gctatagtgctaatcgtaagcatgt

SEQ ID NO: 5396927 - DNA, 25 bp, Homo sapien
gctctttcagagtaaatcttccaca

SEQ ID NO: 5396928 - DNA, 25 bp, Homo sapien
aatcttccacaacttgctatagtgc

SEQ ID NO: 5396929 - DNA, 25 bp, Homo sapien
tcattaaaggaaaagtctactagct

SEQ ID NO: 5396930 - DNA, 25 bp, Homo sapien
tatacttgtctggaatagctacaga

SEQ ID NO: 5396931 - DNA, 25 bp, Homo sapien
catcttcatgcagagacagatcatg

SEQ ID NO: 5396932 - DNA, 25 bp, Homo sapien
cctgagatgaacacttggattccac

SEQ ID NO: 5396933 - DNA, 25 bp, Homo sapien
gccaaagtgctcattatggaatgct

SEQ ID NO: 5396934 - DNA, 25 bp, Homo sapien
gaccagtcttggttctgcccaactg

SEQ ID NO: 5396935 - DNA, 25 bp, Homo sapien
agtgcacactcagaacaattgggtg

SEQ ID NO: 5396936 - DNA, 25 bp, Homo sapien
tcatatgaccagtcttggttctgcc

SEQ ID NO: 5396937 - DNA, 25 bp, Homo sapien
acaattgggtgtcctttgttgctgt

SEQ ID NO: 5396938 - DNA, 25 bp, Homo sapien
aatagcatctgcgtgaaaagttccg

SEQ ID NO: 5396939 - DNA, 25 bp, Homo sapien
tccgtttggtggcatagctctgatc

SEQ ID NO: 5396940 - DNA, 25 bp, Homo sapien
atttgggaaaacagggtcatacaca

SEQ ID NO: 5396941 - DNA, 25 bp, Homo sapien
gaatggtccacaactgaactgatgc

SEQ ID NO: 5396942 - DNA, 25 bp, Homo sapien
catactaaagttgagggtgtcaaac

SEQ ID NO: 5396943 - DNA, 25 bp, Homo sapien
taagattaataggagggagatgcac

SEQ ID NO: 5396944 - DNA, 25 bp, Homo sapien
gaaacctgtcctgctttcatatgtg

SEQ ID NO: 5396945 - DNA, 25 bp, Homo sapien
actggagaaactgatctgccaccca

SEQ ID NO: 5396946 - DNA, 25 bp, Homo sapien
attttggaatttaggcatttcactg

SEQ ID NO: 5396947 - DNA, 25 bp, Homo sapien
ttattttggaatttaggcatttcac

SEQ ID NO: 5396948 - DNA, 25 bp, Homo sapien
ttggaatttaggcatttcactggag

SEQ ID NO: 5396949 - DNA, 25 bp, Homo sapien
aatttaggcatttcactggagaaag

SEQ ID NO: 5396950 - DNA, 25 bp, Homo sapien
agatccctgccgtgcatctcaaact

SEQ ID NO: 5396951 - DNA, 25 bp, Homo sapien
taagttgctgtttggagtttgagtg

SEQ ID NO: 5396952 - DNA, 25 bp, Homo sapien
gagtttgagtgaattatggaaaacg

SEQ ID NO: 5396953 - DNA, 25 bp, Homo sapien
gggaggagatccctgccgtgcatct

SEQ ID NO: 5396954 - DNA, 25 bp, Homo sapien
ttctctttgttattgtcttgggatt

SEQ ID NO: 5396955 - DNA, 25 bp, Homo sapien
agtccacaactaattcatatgagca

SEQ ID NO: 5396956 - DNA, 25 bp, Homo sapien
tccacaactaattcatatgagcatt

SEQ ID NO: 5396957 - DNA, 25 bp, Homo sapien
agagtccacaactaattcatatgag

SEQ ID NO: 5396958 - DNA, 25 bp, Homo sapien
ttgactcagcaattcagagtccaca

SEQ ID NO: 5396959 - DNA, 25 bp, Homo sapien
tgtagtattgatcggtgtagaccac

SEQ ID NO: 5396960 - DNA, 25 bp, Homo sapien
tagaccaccgaggacacttacaaac

SEQ ID NO: 5396961 - DNA, 25 bp, Homo sapien
agttctgtgtcgatatccagctgca

SEQ ID NO: 5396962 - DNA, 25 bp, Homo sapien
gagtaaagtgtaataaatgcccctg

SEQ ID NO: 5396963 - DNA, 25 bp, Homo sapien
gagatgctcatttcttcccactcta

SEQ ID NO: 5396964 - DNA, 25 bp, Homo sapien
agagatgctcatttcttcccactct

SEQ ID NO: 5396965 - DNA, 25 bp, Homo sapien
gaccagtcttatttggggagcaggc

SEQ ID NO: 5396966 - DNA, 25 bp, Homo sapien
ctgactcagaccagtcttatttggg

SEQ ID NO: 5396967 - DNA, 25 bp, Homo sapien
caggcagtcactctatttgctggca

SEQ ID NO: 5396968 - DNA, 25 bp, Homo sapien
gagcaggcagtcactctatttgctg

SEQ ID NO: 5396969 - DNA, 25 bp, Homo sapien
ttggatccagtattttagggtagaa

SEQ ID NO: 5396970 - DNA, 25 bp, Homo sapien
caaggccaataattcactatttgcc

SEQ ID NO: 5396971 - DNA, 25 bp, Homo sapien
ttataggactggtctggtgttaatg

SEQ ID NO: 5396972 - DNA, 25 bp, Homo sapien
tctttcaactgaagacgtcccttta

SEQ ID NO: 5396973 - DNA, 25 bp, Homo sapien
taatagtgacttggtaatatctgct

SEQ ID NO: 5396974 - DNA, 25 bp, Homo sapien
gctaatgggctttgttgtctgatga

SEQ ID NO: 5396975 - DNA, 25 bp, Homo sapien
gcaaaggactctgctaaatggtcca

SEQ ID NO: 5396976 - DNA, 25 bp, Homo sapien
caagatatttgtgaaattaacctcc

SEQ ID NO: 5396977 - DNA, 25 bp, Homo sapien
aatcagcaataaagaatcagaaacc

SEQ ID NO: 5396978 - DNA, 25 bp, Homo sapien
acctgcttcatatgtgcagtatgtg

SEQ ID NO: 5396979 - DNA, 25 bp, Homo sapien
caataaagaatcagaaacctgcttc

SEQ ID NO: 5396980 - DNA, 25 bp, Homo sapien
cttcatatgtgcagtatgtggagtg

SEQ ID NO: 5396981 - DNA, 25 bp, Homo sapien
taagttcaatctctaagccagttag

SEQ ID NO: 5396982 - DNA, 25 bp, Homo sapien
acatactcatctacacctgtgtaca

SEQ ID NO: 5396983 - DNA, 25 bp, Homo sapien
taagccagttagatggctgcctttg

SEQ ID NO: 5396984 - DNA, 25 bp, Homo sapien
gctctcgctgctatcttaagttcaa

SEQ ID NO: 5396985 - DNA, 25 bp, Homo sapien
tgattggctaatcccatgaccttgg

SEQ ID NO: 5396986 - DNA, 25 bp, Homo sapien
gtttcgaatatagtatggtgcccca

SEQ ID NO: 5396987 - DNA, 25 bp, Homo sapien
tctcagagttacagggatagtgcac

SEQ ID NO: 5396988 - DNA, 25 bp, Homo sapien
agtgcacacagattcctccaatggg

SEQ ID NO: 5396989 - DNA, 25 bp, Homo sapien
gccgctaaatttgagatggttctat

SEQ ID NO: 5396990 - DNA, 25 bp, Homo sapien
tcattcttgctgagagttcaggttc

SEQ ID NO: 5396991 - DNA, 25 bp, Homo sapien
ccttagccgctaaatttgagatggt

SEQ ID NO: 5396992 - DNA, 25 bp, Homo sapien
gatggttctatacgttcattcttgc

SEQ ID NO: 5396993 - DNA, 25 bp, Homo sapien
catcacactactagactccaggctg

SEQ ID NO: 5396994 - DNA, 25 bp, Homo sapien
tatcatcacactactagactccagg

SEQ ID NO: 5396995 - DNA, 25 bp, Homo sapien
tgcttgagcctggacaggtctaggc

SEQ ID NO: 5396996 - DNA, 25 bp, Homo sapien
gagctatcatcacactactagactc

SEQ ID NO: 5396997 - DNA, 25 bp, Homo sapien
aaaagtcctaaagaatcttggaatg

SEQ ID NO: 5396998 - DNA, 25 bp, Homo sapien
caaaagtcctaaagaatcttggaat

SEQ ID NO: 5396999 - DNA, 25 bp, Homo sapien
ggcaaaagtcctaaagaatcttgga

SEQ ID NO: 5397000 - DNA, 25 bp, Homo sapien
gcaaaagtcctaaagaatcttggaa

SEQ ID NO: 5397001 - DNA, 25 bp, Homo sapien
atgtcatgccccttttggagaacac

SEQ ID NO: 5397002 - DNA, 25 bp, Homo sapien
tggagaacacacacccctgactttt

SEQ ID NO: 5397003 - DNA, 25 bp, Homo sapien
acttttgttgccctccatcaggatg

SEQ ID NO: 5397004 - DNA, 25 bp, Homo sapien
tgttgccctccatcaggatgttcac

SEQ ID NO: 5397005 - DNA, 25 bp, Homo sapien
caaagaaagggttaagagtgcactc

SEQ ID NO: 5397006 - DNA, 25 bp, Homo sapien
aaggtgtccttgagtccgtgaaatc

SEQ ID NO: 5397007 - DNA, 25 bp, Homo sapien
gacatcatttctgtaggtaacctgg

SEQ ID NO: 5397008 - DNA, 25 bp, Homo sapien
ctctgatagttgaaagtgctgctcc

SEQ ID NO: 5397009 - DNA, 25 bp, Homo sapien
tgactgagtctggatcagattcggc

SEQ ID NO: 5397010 - DNA, 25 bp, Homo sapien
tgagtctggatcagattcggcttac

SEQ ID NO: 5397011 - DNA, 25 bp, Homo sapien
catgactgagtctggatcagattcg

SEQ ID NO: 5397012 - DNA, 25 bp, Homo sapien
actgagtctggatcagattcggctt

SEQ ID NO: 5397013 - DNA, 25 bp, Homo sapien
cttgttggcagctattgtggcttta

SEQ ID NO: 5397014 - DNA, 25 bp, Homo sapien
tgttggcagctattgtggctttaaa

SEQ ID NO: 5397015 - DNA, 25 bp, Homo sapien
attgtggctttaaataaagtcgcgt

SEQ ID NO: 5397016 - DNA, 25 bp, Homo sapien
tcttgttggcagctattgtggcttt

SEQ ID NO: 5397017 - DNA, 25 bp, Homo sapien
tgtcatcaaatcgtagttaatcctg

SEQ ID NO: 5397018 - DNA, 25 bp, Homo sapien
cctgtggaataaagcttcatagtca

SEQ ID NO: 5397019 - DNA, 25 bp, Homo sapien
caaatcgtagttaatcctgtggaat

SEQ ID NO: 5397020 - DNA, 25 bp, Homo sapien
aatcctgtggaataaagcttcatag

SEQ ID NO: 5397021 - DNA, 25 bp, Homo sapien
ctgagtagagctaatgatgagaaaa

SEQ ID NO: 5397022 - DNA, 25 bp, Homo sapien
tgagtagagctaatgatgagaaaac

SEQ ID NO: 5397023 - DNA, 25 bp, Homo sapien
tctgagtagagctaatgatgagaaa

SEQ ID NO: 5397024 - DNA, 25 bp, Homo sapien
gatctgagtagagctaatgatgaga

SEQ ID NO: 5397025 - DNA, 25 bp, Homo sapien
ccaaatggtgttatcagtgcttatt

SEQ ID NO: 5397026 - DNA, 25 bp, Homo sapien
taaccaaatggtgttatcagtgctt

SEQ ID NO: 5397027 - DNA, 25 bp, Homo sapien
tcagtgcttattatattatctctgt

SEQ ID NO: 5397028 - DNA, 25 bp, Homo sapien
tcttagttcttgataaccaaatggt

SEQ ID NO: 5397029 - DNA, 25 bp, Homo sapien
tttttgatactcttttccctccatg

SEQ ID NO: 5397030 - DNA, 25 bp, Homo sapien
ttgatactcttttccctccatggta

SEQ ID NO: 5397031 - DNA, 25 bp, Homo sapien
ttccctccatggtatcccagggaaa

SEQ ID NO: 5397032 - DNA, 25 bp, Homo sapien
tggtatcccagggaaaacatccctc

SEQ ID NO: 5397033 - DNA, 25 bp, Homo sapien
taaatttcatataatgactagacac

SEQ ID NO: 5397034 - DNA, 25 bp, Homo sapien
tataatgactagacactagagggta

SEQ ID NO: 5397035 - DNA, 25 bp, Homo sapien
gacggagtttaactctgttgcaagg

SEQ ID NO: 5397036 - DNA, 25 bp, Homo sapien
tgactagacactagagggtattttt

SEQ ID NO: 5397037 - DNA, 25 bp, Homo sapien
tgtatacagagcctaatgtgagacc

SEQ ID NO: 5397038 - DNA, 25 bp, Homo sapien
cgttgcctctagaaggactggctgc

SEQ ID NO: 5397039 - DNA, 25 bp, Homo sapien
gaaaatgcctggtctcttgtccttg

SEQ ID NO: 5397040 - DNA, 25 bp, Homo sapien
gactctctgtgttcaaaggcgttgc

SEQ ID NO: 5397041 - DNA, 25 bp, Homo sapien
taaacctcgttgtaatggcacatca

SEQ ID NO: 5397042 - DNA, 25 bp, Homo sapien
gccctgctcgaattgaggatctctc

SEQ ID NO: 5397043 - DNA, 25 bp, Homo sapien
gatctctcctgaattaactgcaaag

SEQ ID NO: 5397044 - DNA, 25 bp, Homo sapien
tttgcatgaaaatgtgccctgctcg

SEQ ID NO: 5397045 - DNA, 25 bp, Homo sapien
cacatgaattgtttgagagtaacca

SEQ ID NO: 5397046 - DNA, 25 bp, Homo sapien
tgtgagcacatgaattgtttgagag

SEQ ID NO: 5397047 - DNA, 25 bp, Homo sapien
tctgtgtgagcacatgaattgtttg

SEQ ID NO: 5397048 - DNA, 25 bp, Homo sapien
gagcacatgaattgtttgagagtaa

SEQ ID NO: 5397049 - DNA, 25 bp, Homo sapien
tttatttgttgacaccattggctct

SEQ ID NO: 5397050 - DNA, 25 bp, Homo sapien
tccccttcttgggctacaacaatca

SEQ ID NO: 5397051 - DNA, 25 bp, Homo sapien
atttgttgacaccattggctcttcc

SEQ ID NO: 5397052 - DNA, 25 bp, Homo sapien
ccccttcttgggctacaacaatcat

SEQ ID NO: 5397053 - DNA, 25 bp, Homo sapien
gatttaaagaacatactctgttccc

SEQ ID NO: 5397054 - DNA, 25 bp, Homo sapien
aaagtggaaagattccttatttcat

SEQ ID NO: 5397055 - DNA, 25 bp, Homo sapien
catccaaatgtgagaagtttaattt

SEQ ID NO: 5397056 - DNA, 25 bp, Homo sapien
ccatccaaatgtgagaagtttaatt

SEQ ID NO: 5397057 - DNA, 25 bp, Homo sapien
caatgccgggtaagaattatcctga

SEQ ID NO: 5397058 - DNA, 25 bp, Homo sapien
tgatgtcacagtttgcccataggaa

SEQ ID NO: 5397059 - DNA, 25 bp, Homo sapien
tggcaagcagaacaaagagctgact

SEQ ID NO: 5397060 - DNA, 25 bp, Homo sapien
gaccatcagaatgctatgcccagtg

SEQ ID NO: 5397061 - DNA, 25 bp, Homo sapien
agccaccccacgcagcccatgtatt

SEQ ID NO: 5397062 - DNA, 25 bp, Homo sapien
cacccagcctattaatgtactcttt

SEQ ID NO: 5397063 - DNA, 25 bp, Homo sapien
tgtcatgggaataggctgcactccc

SEQ ID NO: 5397064 - DNA, 25 bp, Homo sapien
ccaagtggcccatgtcagttgtaca

SEQ ID NO: 5397065 - DNA, 25 bp, Homo sapien
gggtatctaaccactcagagacagg

SEQ ID NO: 5397066 - DNA, 25 bp, Homo sapien
gattgtggtacttggacagagccca

SEQ ID NO: 5397067 - DNA, 25 bp, Homo sapien
gaatagagcccaggtcagtaatgac

SEQ ID NO: 5397068 - DNA, 25 bp, Homo sapien
ttgaatagagcccaggtcagtaatg

SEQ ID NO: 5397069 - DNA, 25 bp, Homo sapien
atagagcccaggtcagtaatgactg

SEQ ID NO: 5397070 - DNA, 25 bp, Homo sapien
gtttgaatagagcccaggtcagtaa

SEQ ID NO: 5397071 - DNA, 25 bp, Homo sapien
ggcattcattgacaagttggctaac

SEQ ID NO: 5397072 - DNA, 25 bp, Homo sapien
tgtggcccgtctgcactaatggcat

SEQ ID NO: 5397073 - DNA, 25 bp, Homo sapien
gctgatctgagcttgcctgccactc

SEQ ID NO: 5397074 - DNA, 25 bp, Homo sapien
ttaaatgtgaggcagcccagtttct

SEQ ID NO: 5397075 - DNA, 25 bp, Homo sapien
catgtcacccttaatcatacatttt

SEQ ID NO: 5397076 - DNA, 25 bp, Homo sapien
gagttatgctttccagtatgtgatt

SEQ ID NO: 5397077 - DNA, 25 bp, Homo sapien
gcccatgtcacccttaatcatacat

SEQ ID NO: 5397078 - DNA, 25 bp, Homo sapien
ttgcccatgtcacccttaatcatac

SEQ ID NO: 5397079 - DNA, 25 bp, Homo sapien
gaaactctcctgatgttgctcccag

SEQ ID NO: 5397080 - DNA, 25 bp, Homo sapien
actgtgagtcctgagagcatagaaa

SEQ ID NO: 5397081 - DNA, 25 bp, Homo sapien
aaagcttctattcccatgtggctgc

SEQ ID NO: 5397082 - DNA, 25 bp, Homo sapien
atgttgctcccagaccgtgacccgt

SEQ ID NO: 5397083 - DNA, 25 bp, Homo sapien
ggataacagtccatccctgaagttt

SEQ ID NO: 5397084 - DNA, 25 bp, Homo sapien
tgttcccgatgatacagacccaaac

SEQ ID NO: 5397085 - DNA, 25 bp, Homo sapien
aggattgttcccgatgatacagacc

SEQ ID NO: 5397086 - DNA, 25 bp, Homo sapien
gataacagtccatccctgaagtttg

SEQ ID NO: 5397087 - DNA, 25 bp, Homo sapien
tggtaatttgatatctccaaaaatc

SEQ ID NO: 5397088 - DNA, 25 bp, Homo sapien
tatctccaaaaatcagggtaggcca

SEQ ID NO: 5397089 - DNA, 25 bp, Homo sapien
taaacaataagagctagatttgatg

SEQ ID NO: 5397090 - DNA, 25 bp, Homo sapien
gtcattttcttggtaaacaataaga

SEQ ID NO: 5397091 - DNA, 25 bp, Homo sapien
agaagcagggatactgacttctttt

SEQ ID NO: 5397092 - DNA, 25 bp, Homo sapien
cttttctgtttattattgcaattcg

SEQ ID NO: 5397093 - DNA, 25 bp, Homo sapien
ctgtttattattgcaattcgaatca

SEQ ID NO: 5397094 - DNA, 25 bp, Homo sapien
tgaagaagcagggatactgacttct

SEQ ID NO: 5397095 - DNA, 25 bp, Homo sapien
caactactcgatttcctagaaccag

SEQ ID NO: 5397096 - DNA, 25 bp, Homo sapien
tccttccaactactcgatttcctag

SEQ ID NO: 5397097 - DNA, 25 bp, Homo sapien
ttccaactactcgatttcctagaac

SEQ ID NO: 5397098 - DNA, 25 bp, Homo sapien
ccaactactcgatttcctagaacca

SEQ ID NO: 5397099 - DNA, 25 bp, Homo sapien
ctaagatctatggagagtttcagtg

SEQ ID NO: 5397100 - DNA, 25 bp, Homo sapien
cctaagatctatggagagtttcagt

SEQ ID NO: 5397101 - DNA, 25 bp, Homo sapien
taagatctatggagagtttcagtga

SEQ ID NO: 5397102 - DNA, 25 bp, Homo sapien
tgctcttcatagattccgccagcga

SEQ ID NO: 5397103 - DNA, 25 bp, Homo sapien
catctgctcttcatagattccgcca

SEQ ID NO: 5397104 - DNA, 25 bp, Homo sapien
gctcttcatagattccgccagcgag

SEQ ID NO: 5397105 - DNA, 25 bp, Homo sapien
tctgctcttcatagattccgccagc

SEQ ID NO: 5397106 - DNA, 25 bp, Homo sapien
ctagtagcaactgtgaccgttattt

SEQ ID NO: 5397107 - DNA, 25 bp, Homo sapien
tgagatctttgttgtagacgtatac

SEQ ID NO: 5397108 - DNA, 25 bp, Homo sapien
ttgtagacgtataccctgtggcacc

SEQ ID NO: 5397109 - DNA, 25 bp, Homo sapien
tagcaactgtgaccgttatttttct

SEQ ID NO: 5397110 - DNA, 25 bp, Homo sapien
caaatggaatgtgggcacctctgct

SEQ ID NO: 5397111 - DNA, 25 bp, Homo sapien
gaccaatccttatcgaaaatactga

SEQ ID NO: 5397112 - DNA, 25 bp, Homo sapien
tctttacaacaagctcttttgtgtt

SEQ ID NO: 5397113 - DNA, 25 bp, Homo sapien
accaggctgatggaccaatccttat

SEQ ID NO: 5397114 - DNA, 25 bp, Homo sapien
cttaaaagtagggtcagaagccttg

SEQ ID NO: 5397115 - DNA, 25 bp, Homo sapien
cacaagtccagatttgagagtgact

SEQ ID NO: 5397116 - DNA, 25 bp, Homo sapien
cttcatcttgggaatggtttcatct

SEQ ID NO: 5397117 - DNA, 25 bp, Homo sapien
catcagtgaataaggaccagttagc

SEQ ID NO: 5397118 - DNA, 25 bp, Homo sapien
caattggttctataaatacagccat

SEQ ID NO: 5397119 - DNA, 25 bp, Homo sapien
tcaattggttctataaatacagcca

SEQ ID NO: 5397120 - DNA, 25 bp, Homo sapien
cttcaattggttctataaatacagc

SEQ ID NO: 5397121 - DNA, 25 bp, Homo sapien
ttcaattggttctataaatacagcc

SEQ ID NO: 5397122 - DNA, 25 bp, Homo sapien
gtcaccagggactgctggttctttc

SEQ ID NO: 5397123 - DNA, 25 bp, Homo sapien
gggactgctggttctttcatcttct

SEQ ID NO: 5397124 - DNA, 25 bp, Homo sapien
ccagggactgctggttctttcatct

SEQ ID NO: 5397125 - DNA, 25 bp, Homo sapien
tgcctgtcaccagggactgctggtt

SEQ ID NO: 5397126 - DNA, 25 bp, Homo sapien
aaaggcactgtatctttcagaggaa

SEQ ID NO: 5397127 - DNA, 25 bp, Homo sapien
tcaaaggcactgtatctttcagagg

SEQ ID NO: 5397128 - DNA, 25 bp, Homo sapien
tagtaatcttttttatcaaaggcac

SEQ ID NO: 5397129 - DNA, 25 bp, Homo sapien
cttttttatcaaaggcactgtatct

SEQ ID NO: 5397130 - DNA, 25 bp, Homo sapien
tagcaactctctgagatatcttaat

SEQ ID NO: 5397131 - DNA, 25 bp, Homo sapien
tctatagcaactctctgagatatct

SEQ ID NO: 5397132 - DNA, 25 bp, Homo sapien
gttctctatagcaactctctgagat

SEQ ID NO: 5397133 - DNA, 25 bp, Homo sapien
tctctatagcaactctctgagatat

SEQ ID NO: 5397134 - DNA, 25 bp, Homo sapien
tctctctgtcattactagcattttc

SEQ ID NO: 5397135 - DNA, 25 bp, Homo sapien
ctctctctgtcattactagcatttt

SEQ ID NO: 5397136 - DNA, 25 bp, Homo sapien
atcttgtaaattagcagcagaacag

SEQ ID NO: 5397137 - DNA, 25 bp, Homo sapien
cttcagaaatcgttgggctctaggg

SEQ ID NO: 5397138 - DNA, 25 bp, Homo sapien
aatttgccattagagcgtaatcttg

SEQ ID NO: 5397139 - DNA, 25 bp, Homo sapien
gctctagggactatgtgcttgccat

SEQ ID NO: 5397140 - DNA, 25 bp, Homo sapien
ctatggtatgttcaaactgcactgt

SEQ ID NO: 5397141 - DNA, 25 bp, Homo sapien
gatacaatttccaagtcacagattc

SEQ ID NO: 5397142 - DNA, 25 bp, Homo sapien
cacaatggtggatacaatttccaag

SEQ ID NO: 5397143 - DNA, 25 bp, Homo sapien
ctgtcacacaatggtggatacaatt

SEQ ID NO: 5397144 - DNA, 25 bp, Homo sapien
cctcctttcggaatggacactgttt

SEQ ID NO: 5397145 - DNA, 25 bp, Homo sapien
acacttcattccagtagtagcagca

SEQ ID NO: 5397146 - DNA, 25 bp, Homo sapien
taggttatggattggtttcacctgt

SEQ ID NO: 5397147 - DNA, 25 bp, Homo sapien
gcttctcctcctttcggaatggaca

SEQ ID NO: 5397148 - DNA, 25 bp, Homo sapien
ttcatttattagattgtgtgaacag

SEQ ID NO: 5397149 - DNA, 25 bp, Homo sapien
attagattgtgtgaacagttttcca

SEQ ID NO: 5397150 - DNA, 25 bp, Homo sapien
ttattagattgtgtgaacagttttc

SEQ ID NO: 5397151 - DNA, 25 bp, Homo sapien
catttattagattgtgtgaacagtt

SEQ ID NO: 5397152 - DNA, 25 bp, Homo sapien
ggttgccattcatgtagctcccaaa

SEQ ID NO: 5397153 - DNA, 25 bp, Homo sapien
tcatgtagctcccaaaggtcgctgc

SEQ ID NO: 5397154 - DNA, 25 bp, Homo sapien
tccaggttgccattcatgtagctcc

SEQ ID NO: 5397155 - DNA, 25 bp, Homo sapien
gaggctcttaatcctttatcagttt

SEQ ID NO: 5397156 - DNA, 25 bp, Homo sapien
agagttgtaactgaatacagatgtg

SEQ ID NO: 5397157 - DNA, 25 bp, Homo sapien
gagttgtaactgaatacagatgtgt

SEQ ID NO: 5397158 - DNA, 25 bp, Homo sapien
ctaagagttgtaactgaatacagat

SEQ ID NO: 5397159 - DNA, 25 bp, Homo sapien
taagagttgtaactgaatacagatg

SEQ ID NO: 5397160 - DNA, 25 bp, Homo sapien
tcatgtagtggtagatgatgccgcc

SEQ ID NO: 5397161 - DNA, 25 bp, Homo sapien
cggctgactaccctttgagttattg

SEQ ID NO: 5397162 - DNA, 25 bp, Homo sapien
tgcatttcaggtttatacctgccaa

SEQ ID NO: 5397163 - DNA, 25 bp, Homo sapien
tgaagagcagtatcaccaaaccggc

SEQ ID NO: 5397164 - DNA, 25 bp, Homo sapien
gttgaattttagaagacatattcat

SEQ ID NO: 5397165 - DNA, 25 bp, Homo sapien
tagattatgagggtaaaaaggatcc

SEQ ID NO: 5397166 - DNA, 25 bp, Homo sapien
tatgagggtaaaaaggatccacagc

SEQ ID NO: 5397167 - DNA, 25 bp, Homo sapien
ggtaaaaaggatccacagcccttga

SEQ ID NO: 5397168 - DNA, 25 bp, Homo sapien
tgagggtaaaaaggatccacagccc

SEQ ID NO: 5397169 - DNA, 25 bp, Homo sapien
ctccaagtcgctgccaacagtgact

SEQ ID NO: 5397170 - DNA, 25 bp, Homo sapien
ctctactctctcagtgaagtcagag

SEQ ID NO: 5397171 - DNA, 25 bp, Homo sapien
tcgctgccaacagtgactctactct

SEQ ID NO: 5397172 - DNA, 25 bp, Homo sapien
agtgactctactctctcagtgaagt

SEQ ID NO: 5397173 - DNA, 25 bp, Homo sapien
agctaatgtactgatggctgcggga

SEQ ID NO: 5397174 - DNA, 25 bp, Homo sapien
aacagagagccccttagctagaaca

SEQ ID NO: 5397175 - DNA, 25 bp, Homo sapien
tgatggctgcgggaaccgttacaac

SEQ ID NO: 5397176 - DNA, 25 bp, Homo sapien
accgttacaacagagagccccttag

SEQ ID NO: 5397177 - DNA, 25 bp, Homo sapien
ctcattgagtggcatgaaggaagag

SEQ ID NO: 5397178 - DNA, 25 bp, Homo sapien
cggactcattgagtggcatgaagga

SEQ ID NO: 5397179 - DNA, 25 bp, Homo sapien
caggaacaacatagacaaaaataag

SEQ ID NO: 5397180 - DNA, 25 bp, Homo sapien
ccaggaacaacatagacaaaaataa

SEQ ID NO: 5397181 - DNA, 25 bp, Homo sapien
aaaagcaagatagtacaaagtggca

SEQ ID NO: 5397182 - DNA, 25 bp, Homo sapien
cagcacagtactgtggaagatgcca

SEQ ID NO: 5397183 - DNA, 25 bp, Homo sapien
tgggcctttgaatcataggctacat

SEQ ID NO: 5397184 - DNA, 25 bp, Homo sapien
taggctacatcatgctgctcagctg

SEQ ID NO: 5397185 - DNA, 25 bp, Homo sapien
aaaatgcatgctctgatagaattaa

SEQ ID NO: 5397186 - DNA, 25 bp, Homo sapien
aaatgcatgctctgatagaattaag

SEQ ID NO: 5397187 - DNA, 25 bp, Homo sapien
aatgcatgctctgatagaattaagg

SEQ ID NO: 5397188 - DNA, 25 bp, Homo sapien
tctgtacttggctgtcagagtcagc

SEQ ID NO: 5397189 - DNA, 25 bp, Homo sapien
ctgtacttggctgtcagagtcagca

SEQ ID NO: 5397190 - DNA, 25 bp, Homo sapien
gatttctctgacactattacttcac

SEQ ID NO: 5397191 - DNA, 25 bp, Homo sapien
catttacaactccatcctgctgaaa

SEQ ID NO: 5397192 - DNA, 25 bp, Homo sapien
tctgacactattacttcactctgtt

SEQ ID NO: 5397193 - DNA, 25 bp, Homo sapien
tttccaatgatttctctgacactat

SEQ ID NO: 5397194 - DNA, 25 bp, Homo sapien
tttttcagagtattcacaatgcaaa

SEQ ID NO: 5397195 - DNA, 25 bp, Homo sapien
gcaaagagtccacaaaagctgtctt

SEQ ID NO: 5397196 - DNA, 25 bp, Homo sapien
attgtaggagcaacaaacacagcaa

SEQ ID NO: 5397197 - DNA, 25 bp, Homo sapien
gagtattcacaatgcaaatgagcca

SEQ ID NO: 5397198 - DNA, 25 bp, Homo sapien
ctccaaggagcctcgtggatctgca

SEQ ID NO: 5397199 - DNA, 25 bp, Homo sapien
tctccaaggagcctcgtggatctgc

SEQ ID NO: 5397200 - DNA, 25 bp, Homo sapien
ggtgccccattaatgagataacttc

SEQ ID NO: 5397201 - DNA, 25 bp, Homo sapien
aacttcctgccttttgtgtatcacc

SEQ ID NO: 5397202 - DNA, 25 bp, Homo sapien
cttcctgccttttgtgtatcaccag

SEQ ID NO: 5397203 - DNA, 25 bp, Homo sapien
taatttgcataaagctggtgcccca

SEQ ID NO: 5397204 - DNA, 25 bp, Homo sapien
ccacttgcagaaagaaatgcactcc

SEQ ID NO: 5397205 - DNA, 25 bp, Homo sapien
gaaatgcactccacaaattagtcat

SEQ ID NO: 5397206 - DNA, 25 bp, Homo sapien
tccacttgcagaaagaaatgcactc

SEQ ID NO: 5397207 - DNA, 25 bp, Homo sapien
aagaaatgcactccacaaattagtc

SEQ ID NO: 5397208 - DNA, 25 bp, Homo sapien
tcttccccctccttgtctgttacaa

SEQ ID NO: 5397209 - DNA, 25 bp, Homo sapien
ctccttgtctgttacaagttatgac

SEQ ID NO: 5397210 - DNA, 25 bp, Homo sapien
cttccccctccttgtctgttacaag

SEQ ID NO: 5397211 - DNA, 25 bp, Homo sapien
cccctccttgtctgttacaagttat

SEQ ID NO: 5397212 - DNA, 25 bp, Homo sapien
gctttttcccatgcagtaatgactg

SEQ ID NO: 5397213 - DNA, 25 bp, Homo sapien
agtattgttccggagtatgtttcct

SEQ ID NO: 5397214 - DNA, 25 bp, Homo sapien
caaggggctgttcatgacaatccca

SEQ ID NO: 5397215 - DNA, 25 bp, Homo sapien
tgtaatttcatggttgtcttcttga

SEQ ID NO: 5397216 - DNA, 25 bp, Homo sapien
aataggttcaatacaacaccaggcc

SEQ ID NO: 5397217 - DNA, 25 bp, Homo sapien
tgtggtaccttaggcccatgaaaga

SEQ ID NO: 5397218 - DNA, 25 bp, Homo sapien
cctttctcatgatagagtttgtcac

SEQ ID NO: 5397219 - DNA, 25 bp, Homo sapien
gggagcaggttaggcctctgaggcc

SEQ ID NO: 5397220 - DNA, 25 bp, Homo sapien
gagcttggagagtatctatttcaca

SEQ ID NO: 5397221 - DNA, 25 bp, Homo sapien
tccctccctggtctattataactga

SEQ ID NO: 5397222 - DNA, 25 bp, Homo sapien
taactgaccgtaatgtaccatagag

SEQ ID NO: 5397223 - DNA, 25 bp, Homo sapien
taccatagaggttcacgatattctc

SEQ ID NO: 5397224 - DNA, 25 bp, Homo sapien
gaatggagatcattaagagaaagaa

SEQ ID NO: 5397225 - DNA, 25 bp, Homo sapien
ttagttttacaagtactgagctagc

SEQ ID NO: 5397226 - DNA, 25 bp, Homo sapien
caggaatggagatcattaagagaaa

SEQ ID NO: 5397227 - DNA, 25 bp, Homo sapien
aatcaggaatggagatcattaagag

SEQ ID NO: 5397228 - DNA, 25 bp, Homo sapien
ttgtatattaagaaggaatcttcag

SEQ ID NO: 5397229 - DNA, 25 bp, Homo sapien
gaggtttgatccactggccttccct

SEQ ID NO: 5397230 - DNA, 25 bp, Homo sapien
tgaggtttgatccactggccttccc

SEQ ID NO: 5397231 - DNA, 25 bp, Homo sapien
agcaaggctttgaggtttgatccac

SEQ ID NO: 5397232 - DNA, 25 bp, Homo sapien
tcaaaagcaaggctttgaggtttga

SEQ ID NO: 5397233 - DNA, 25 bp, Homo sapien
cttctgatgttatggcttttagagg

SEQ ID NO: 5397234 - DNA, 25 bp, Homo sapien
tataatggctgtgattctaggctcc

SEQ ID NO: 5397235 - DNA, 25 bp, Homo sapien
taccaccattaatgttgtaatgcag

SEQ ID NO: 5397236 - DNA, 25 bp, Homo sapien
cagccaaaagctttcttttataatg

SEQ ID NO: 5397237 - DNA, 25 bp, Homo sapien
tgcccttatttacgcctctctcaag

SEQ ID NO: 5397238 - DNA, 25 bp, Homo sapien
tttacaagcattggttggttcccca

SEQ ID NO: 5397239 - DNA, 25 bp, Homo sapien
ccaaagagtccaataaagtgtagct

SEQ ID NO: 5397240 - DNA, 25 bp, Homo sapien
ctcaaggcataattttgactcacag

SEQ ID NO: 5397241 - DNA, 25 bp, Homo sapien
cacaaaatatcagagttcctaagga

SEQ ID NO: 5397242 - DNA, 25 bp, Homo sapien
gtggcccaggaaatacggcataagc

SEQ ID NO: 5397243 - DNA, 25 bp, Homo sapien
gaaatacggcataagcagcacacaa

SEQ ID NO: 5397244 - DNA, 25 bp, Homo sapien
tccaccacagtttgcctcaaggcat

SEQ ID NO: 5397245 - DNA, 25 bp, Homo sapien
ttctgtaagtttcccttaagctcca

SEQ ID NO: 5397246 - DNA, 25 bp, Homo sapien
tgtctttccattttctgtaagtttc

SEQ ID NO: 5397247 - DNA, 25 bp, Homo sapien
cacttttatgtctttccattttctg

SEQ ID NO: 5397248 - DNA, 25 bp, Homo sapien
tacacttttatgtctttccattttc

SEQ ID NO: 5397249 - DNA, 25 bp, Homo sapien
cataaaatgctaagaccatatcctt

SEQ ID NO: 5397250 - DNA, 25 bp, Homo sapien
ggatgggatggtgagggtgatcaca

SEQ ID NO: 5397251 - DNA, 25 bp, Homo sapien
aaaatgctaagaccatatccttcat

SEQ ID NO: 5397252 - DNA, 25 bp, Homo sapien
ggatggtgagggtgatcacataaaa

SEQ ID NO: 5397253 - DNA, 25 bp, Homo sapien
cggttctcaccaacaacttgatatt

SEQ ID NO: 5397254 - DNA, 25 bp, Homo sapien
aattttagctatgataatagatatg

SEQ ID NO: 5397255 - DNA, 25 bp, Homo sapien
taagcagtatatgggacttccagtt

SEQ ID NO: 5397256 - DNA, 25 bp, Homo sapien
ctcttaagcagtatatgggacttcc

SEQ ID NO: 5397257 - DNA, 25 bp, Homo sapien
ctagctgaccacaggcttacaaatg

SEQ ID NO: 5397258 - DNA, 25 bp, Homo sapien
ggactgtgatcccattaaaagcaat

SEQ ID NO: 5397259 - DNA, 25 bp, Homo sapien
tccactggactgtgatcccattaaa

SEQ ID NO: 5397260 - DNA, 25 bp, Homo sapien
ctggactgtgatcccattaaaagca

SEQ ID NO: 5397261 - DNA, 25 bp, Homo sapien
cactggactgtgatcccattaaaag

SEQ ID NO: 5397262 - DNA, 25 bp, Homo sapien
tctttgcgaaaaacatctatactca

SEQ ID NO: 5397263 - DNA, 25 bp, Homo sapien
tgataacattgagcatgtattctgt

SEQ ID NO: 5397264 - DNA, 25 bp, Homo sapien
tgtccacatctttgcgaaaaacatc

SEQ ID NO: 5397265 - DNA, 25 bp, Homo sapien
ttctctccaggctctatgataacat

SEQ ID NO: 5397266 - DNA, 25 bp, Homo sapien
acatgtgtttcaagtataagaacca

SEQ ID NO: 5397267 - DNA, 25 bp, Homo sapien
catgtgtttcaagtataagaaccat

SEQ ID NO: 5397268 - DNA, 25 bp, Homo sapien
cacatgtgtttcaagtataagaacc

SEQ ID NO: 5397269 - DNA, 25 bp, Homo sapien
ccaccagtgtgtttttaccctccag

SEQ ID NO: 5397270 - DNA, 25 bp, Homo sapien
tgaatgaaagaacaatgccaccttc

SEQ ID NO: 5397271 - DNA, 25 bp, Homo sapien
tccaggctacaagaaaggattattg

SEQ ID NO: 5397272 - DNA, 25 bp, Homo sapien
aagaacaatgccaccttcagagaac

SEQ ID NO: 5397273 - DNA, 25 bp, Homo sapien
gacaaatacgacactgtcttaaaca

SEQ ID NO: 5397274 - DNA, 25 bp, Homo sapien
gatccttctattactgacaaatacg

SEQ ID NO: 5397275 - DNA, 25 bp, Homo sapien
tattactgacaaatacgacactgtc

SEQ ID NO: 5397276 - DNA, 25 bp, Homo sapien
ttttcctggtccgatccttctatta

SEQ ID NO: 5397277 - DNA, 25 bp, Homo sapien
ccaatgtgtccctgtagtattcaca

SEQ ID NO: 5397278 - DNA, 25 bp, Homo sapien
gattcttgacaatgtcactgcagac

SEQ ID NO: 5397279 - DNA, 25 bp, Homo sapien
tgtccctgtagtattcacagtacta

SEQ ID NO: 5397280 - DNA, 25 bp, Homo sapien
actatgaaagagattcttgacaatg

SEQ ID NO: 5397281 - DNA, 25 bp, Homo sapien
ttccatccagagtggataatctcca

SEQ ID NO: 5397282 - DNA, 25 bp, Homo sapien
attccatccagagtggataatctcc

SEQ ID NO: 5397283 - DNA, 25 bp, Homo sapien
tccatccagagtggataatctccat

SEQ ID NO: 5397284 - DNA, 25 bp, Homo sapien
aagaatacagcacatgcattgccct

SEQ ID NO: 5397285 - DNA, 25 bp, Homo sapien
tctgcatacagccagcatattttat

SEQ ID NO: 5397286 - DNA, 25 bp, Homo sapien
tacagccagcatattttatggaacc

SEQ ID NO: 5397287 - DNA, 25 bp, Homo sapien
ggaaccaatcagtgttgcagaacat

SEQ ID NO: 5397288 - DNA, 25 bp, Homo sapien
tctgcaagatgtactttaagaacac

SEQ ID NO: 5397289 - DNA, 25 bp, Homo sapien
tttgctgtgagggatagataatcta

SEQ ID NO: 5397290 - DNA, 25 bp, Homo sapien
taagaacaccattttcgaagaaata

SEQ ID NO: 5397291 - DNA, 25 bp, Homo sapien
ttagactcccattgtgaagctttgc

SEQ ID NO: 5397292 - DNA, 25 bp, Homo sapien
gaatggcattataagccaatgctta

SEQ ID NO: 5397293 - DNA, 25 bp, Homo sapien
caaagatttagaggattcattccag

SEQ ID NO: 5397294 - DNA, 25 bp, Homo sapien
tatttttagggctcaggtaagatct

SEQ ID NO: 5397295 - DNA, 25 bp, Homo sapien
tagtagggcaattgacacaggaaaa

SEQ ID NO: 5397296 - DNA, 25 bp, Homo sapien
ttaagggtcatgctttaataacaat

SEQ ID NO: 5397297 - DNA, 25 bp, Homo sapien
aagggtcatgctttaataacaatga

SEQ ID NO: 5397298 - DNA, 25 bp, Homo sapien
taagggtcatgctttaataacaatg

SEQ ID NO: 5397299 - DNA, 25 bp, Homo sapien
gggtcatgctttaataacaatgatg

SEQ ID NO: 5397300 - DNA, 25 bp, Homo sapien
gcactaacatctttatcactccatg

SEQ ID NO: 5397301 - DNA, 25 bp, Homo sapien
tcactccatgtgtttctagttttaa

SEQ ID NO: 5397302 - DNA, 25 bp, Homo sapien
gcgccctgtggcactaacatcttta

SEQ ID NO: 5397303 - DNA, 25 bp, Homo sapien
atttttcctgctatgcgccctgtgg

SEQ ID NO: 5397304 - DNA, 25 bp, Homo sapien
tgatgaagtagaggagagtgtttcc

SEQ ID NO: 5397305 - DNA, 25 bp, Homo sapien
tactgatgaagtagaggagagtgtt

SEQ ID NO: 5397306 - DNA, 25 bp, Homo sapien
gtacatcttagtactgatgaagtag

SEQ ID NO: 5397307 - DNA, 25 bp, Homo sapien
tcaaatggtacatcttagtactgat

SEQ ID NO: 5397308 - DNA, 25 bp, Homo sapien
tcctgtcttgcgggatttgccacct

SEQ ID NO: 5397309 - DNA, 25 bp, Homo sapien
cctgtcttgcgggatttgccacctg

SEQ ID NO: 5397310 - DNA, 25 bp, Homo sapien
ctgctcctgtcttgcgggatttgcc

SEQ ID NO: 5397311 - DNA, 25 bp, Homo sapien
gctcctgtcttgcgggatttgccac

SEQ ID NO: 5397312 - DNA, 25 bp, Homo sapien
gaaatgtatttccatcgacctttgt

SEQ ID NO: 5397313 - DNA, 25 bp, Homo sapien
gatctaaatgacaggtatataccac

SEQ ID NO: 5397314 - DNA, 25 bp, Homo sapien
tgccattttcggataaacaaaatca

SEQ ID NO: 5397315 - DNA, 25 bp, Homo sapien
gtccattaggaacaaaaacttgcca

SEQ ID NO: 5397316 - DNA, 25 bp, Homo sapien
tgccttggaagttgctggtgtatag

SEQ ID NO: 5397317 - DNA, 25 bp, Homo sapien
taagccgtacgaccattttaatgat

SEQ ID NO: 5397318 - DNA, 25 bp, Homo sapien
tcctatctagaagcatggaatggct

SEQ ID NO: 5397319 - DNA, 25 bp, Homo sapien
ttctgatttggctcttgccttggaa

SEQ ID NO: 5397320 - DNA, 25 bp, Homo sapien
gatatggaagatgtcttctacactg

SEQ ID NO: 5397321 - DNA, 25 bp, Homo sapien
ctgtgaataagtgggtccacactgg

SEQ ID NO: 5397322 - DNA, 25 bp, Homo sapien
atatgcttcttcctgatatggaaga

SEQ ID NO: 5397323 - DNA, 25 bp, Homo sapien
gatttgcattcactggaaacccaaa

SEQ ID NO: 5397324 - DNA, 25 bp, Homo sapien
cctggtagagcttcaccaatttctc

SEQ ID NO: 5397325 - DNA, 25 bp, Homo sapien
caatttctcatcaaagaaacaatcc

SEQ ID NO: 5397326 - DNA, 25 bp, Homo sapien
catcaaagaaacaatccactccaac

SEQ ID NO: 5397327 - DNA, 25 bp, Homo sapien
ctggtagagcttcaccaatttctca

SEQ ID NO: 5397328 - DNA, 25 bp, Homo sapien
ttctcctgccattgaagttccttca

SEQ ID NO: 5397329 - DNA, 25 bp, Homo sapien
ttccttcagtgactaccttttcacc

SEQ ID NO: 5397330 - DNA, 25 bp, Homo sapien
ctgcaatgctcatagagagagctct

SEQ ID NO: 5397331 - DNA, 25 bp, Homo sapien
ttgacatacctgcttgacttctgaa

SEQ ID NO: 5397332 - DNA, 25 bp, Homo sapien
tctggcataactgatggtggtgtca

SEQ ID NO: 5397333 - DNA, 25 bp, Homo sapien
gagtaaatgatttgcatctggcata

SEQ ID NO: 5397334 - DNA, 25 bp, Homo sapien
ggtgccagcatagatttaagccatc

SEQ ID NO: 5397335 - DNA, 25 bp, Homo sapien
caagactgcgtatttgaactgacag

SEQ ID NO: 5397336 - DNA, 25 bp, Homo sapien
agtagatgatcggatttgccaggtc

SEQ ID NO: 5397337 - DNA, 25 bp, Homo sapien
gaggaagtagatgatcggatttgcc

SEQ ID NO: 5397338 - DNA, 25 bp, Homo sapien
ttgcctggctaatccgatgtcccgg

SEQ ID NO: 5397339 - DNA, 25 bp, Homo sapien
tggtggaaaaggttgcctggctaat

SEQ ID NO: 5397340 - DNA, 25 bp, Homo sapien
actcctagcaccttctgagtagttt

SEQ ID NO: 5397341 - DNA, 25 bp, Homo sapien
gcaccttctgagtagtttctcctcc

SEQ ID NO: 5397342 - DNA, 25 bp, Homo sapien
ctagcaccttctgagtagtttctcc

SEQ ID NO: 5397343 - DNA, 25 bp, Homo sapien
aattccactcctagcaccttctgag

SEQ ID NO: 5397344 - DNA, 25 bp, Homo sapien
gaaaaaaatgcaatagtctcacaac

SEQ ID NO: 5397345 - DNA, 25 bp, Homo sapien
tttgagtgacacaaacaaagccact

SEQ ID NO: 5397346 - DNA, 25 bp, Homo sapien
gtctttgagtgacacaaacaaagcc

SEQ ID NO: 5397347 - DNA, 25 bp, Homo sapien
aaaaatgcaatagtctcacaaccat

SEQ ID NO: 5397348 - DNA, 25 bp, Homo sapien
tctgagttgtttcttaatggcaaaa

SEQ ID NO: 5397349 - DNA, 25 bp, Homo sapien
ctgagttgtttcttaatggcaaaat

SEQ ID NO: 5397350 - DNA, 25 bp, Homo sapien
ggtgtagtacaaagtctcagcctga

SEQ ID NO: 5397351 - DNA, 25 bp, Homo sapien
cacgcagatacttaggcaagtgtca

SEQ ID NO: 5397352 - DNA, 25 bp, Homo sapien
gatataatcacgcatcaacaggcaa

SEQ ID NO: 5397353 - DNA, 25 bp, Homo sapien
tctgtgcagctattcataagtgggt

SEQ ID NO: 5397354 - DNA, 25 bp, Homo sapien
tcaacggcatgactggaagatttct

SEQ ID NO: 5397355 - DNA, 25 bp, Homo sapien
tgaccctgaagatgtgtcaaaacat

SEQ ID NO: 5397356 - DNA, 25 bp, Homo sapien
gcctggtagactgtttactctgaca

SEQ ID NO: 5397357 - DNA, 25 bp, Homo sapien
gaggatgcagaatccgttttctttg

SEQ ID NO: 5397358 - DNA, 25 bp, Homo sapien
tatttctgttaagagacccgtgaaa

SEQ ID NO: 5397359 - DNA, 25 bp, Homo sapien
gactgacccggtgttccatcataac

SEQ ID NO: 5397360 - DNA, 25 bp, Homo sapien
gaaaattaaatacagaccctgctga

SEQ ID NO: 5397361 - DNA, 25 bp, Homo sapien
tgtcagcaactttgatctaccttgt

SEQ ID NO: 5397362 - DNA, 25 bp, Homo sapien
tccttggtaaaatgacagtcagcat

SEQ ID NO: 5397363 - DNA, 25 bp, Homo sapien
cttggtaaaatgacagtcagcatgt

SEQ ID NO: 5397364 - DNA, 25 bp, Homo sapien
tcaagatccataatcaacctgaata

SEQ ID NO: 5397365 - DNA, 25 bp, Homo sapien
tccataatcaacctgaatattcttt

SEQ ID NO: 5397366 - DNA, 25 bp, Homo sapien
ccacccctctccatacctctctcct

SEQ ID NO: 5397367 - DNA, 25 bp, Homo sapien
ctccatacctctctcctccacttac

SEQ ID NO: 5397368 - DNA, 25 bp, Homo sapien
tccccacccctctccatacctctct

SEQ ID NO: 5397369 - DNA, 25 bp, Homo sapien
ctctccatacctctctcctccactt

SEQ ID NO: 5397370 - DNA, 25 bp, Homo sapien
ttgtaattgctattgccagactcca

SEQ ID NO: 5397371 - DNA, 25 bp, Homo sapien
tttaagtggaatgacattattttgc

SEQ ID NO: 5397372 - DNA, 25 bp, Homo sapien
tgtaattgctattgccagactccat

SEQ ID NO: 5397373 - DNA, 25 bp, Homo sapien
agtggaatgacattattttgcccaa

SEQ ID NO: 5397374 - DNA, 25 bp, Homo sapien
tgggtgtccctgcataagatatacg

SEQ ID NO: 5397375 - DNA, 25 bp, Homo sapien
ggtgtccctgcataagatatacgac

SEQ ID NO: 5397376 - DNA, 25 bp, Homo sapien
cttgggtgtccctgcataagatata

SEQ ID NO: 5397377 - DNA, 25 bp, Homo sapien
tgtccctgcataagatatacgacat

SEQ ID NO: 5397378 - DNA, 25 bp, Homo sapien
ttaaatagctcccatgttcaatcac

SEQ ID NO: 5397379 - DNA, 25 bp, Homo sapien
agtatttattaaatagctcccatgt

SEQ ID NO: 5397380 - DNA, 25 bp, Homo sapien
ttgatatataagatctggtctctgt

SEQ ID NO: 5397381 - DNA, 25 bp, Homo sapien
ctttgatatataagatctggtctct

SEQ ID NO: 5397382 - DNA, 25 bp, Homo sapien
gatgatgaagtcataattacttcca

SEQ ID NO: 5397383 - DNA, 25 bp, Homo sapien
tatgaccgtagcctaaagaagatga

SEQ ID NO: 5397384 - DNA, 25 bp, Homo sapien
tacttccaactaatttatcttcatc

SEQ ID NO: 5397385 - DNA, 25 bp, Homo sapien
ttcaataacaagcagatatgaccgt

SEQ ID NO: 5397386 - DNA, 25 bp, Homo sapien
agaactccgcttctcattcacgtaa

SEQ ID NO: 5397387 - DNA, 25 bp, Homo sapien
ctccgcttctcattcacgtaagtgg

SEQ ID NO: 5397388 - DNA, 25 bp, Homo sapien
gaactccgcttctcattcacgtaag

SEQ ID NO: 5397389 - DNA, 25 bp, Homo sapien
actccgcttctcattcacgtaagtg

SEQ ID NO: 5397390 - DNA, 25 bp, Homo sapien
agggaagagatatcctgtgggatcc

SEQ ID NO: 5397391 - DNA, 25 bp, Homo sapien
tgacatcatcagtggatggagggaa

SEQ ID NO: 5397392 - DNA, 25 bp, Homo sapien
ggaagagatatcctgtgggatccat

SEQ ID NO: 5397393 - DNA, 25 bp, Homo sapien
ggagggaagagatatcctgtgggat

SEQ ID NO: 5397394 - DNA, 25 bp, Homo sapien
ggaaaattgagtggttagatctttg

SEQ ID NO: 5397395 - DNA, 25 bp, Homo sapien
tctttcccatgaacctcccatttgg

SEQ ID NO: 5397396 - DNA, 25 bp, Homo sapien
ttgagtggttagatctttgatatct

SEQ ID NO: 5397397 - DNA, 25 bp, Homo sapien
ctgacagtcactatttttctagcca

SEQ ID NO: 5397398 - DNA, 25 bp, Homo sapien
tgactcttagattcagtgctcaaag

SEQ ID NO: 5397399 - DNA, 25 bp, Homo sapien
tctccaaattttcatgaatacagta

SEQ ID NO: 5397400 - DNA, 25 bp, Homo sapien
taaacagtctgactcttagattcag

SEQ ID NO: 5397401 - DNA, 25 bp, Homo sapien
tcatgaatacagtaaacagtctgac

SEQ ID NO: 5397402 - DNA, 25 bp, Homo sapien
acttaataccaaataagtactagtg

SEQ ID NO: 5397403 - DNA, 25 bp, Homo sapien
caagataaactccaaaacacttaat

SEQ ID NO: 5397404 - DNA, 25 bp, Homo sapien
gaattgcaccagagatacatcatat

SEQ ID NO: 5397405 - DNA, 25 bp, Homo sapien
catctaatcggatactctcactgaa

SEQ ID NO: 5397406 - DNA, 25 bp, Homo sapien
ttgctgtacgttacagctctccatg

SEQ ID NO: 5397407 - DNA, 25 bp, Homo sapien
catgttgtttgctgtacgttacagc

SEQ ID NO: 5397408 - DNA, 25 bp, Homo sapien
tgtttgctgtacgttacagctctcc

SEQ ID NO: 5397409 - DNA, 25 bp, Homo sapien
tctccatgtgtaaactcagtcccat

SEQ ID NO: 5397410 - DNA, 25 bp, Homo sapien
catgtagaaacattatgtaactcat

SEQ ID NO: 5397411 - DNA, 25 bp, Homo sapien
aacaccgttaagatactccacgaga

SEQ ID NO: 5397412 - DNA, 25 bp, Homo sapien
acaccgttaagatactccacgagaa

SEQ ID NO: 5397413 - DNA, 25 bp, Homo sapien
caccgttaagatactccacgagaag

SEQ ID NO: 5397414 - DNA, 25 bp, Homo sapien
tattaggattctagtacccacaggt

SEQ ID NO: 5397415 - DNA, 25 bp, Homo sapien
cctgcctttctgtgggacatgggtc

SEQ ID NO: 5397416 - DNA, 25 bp, Homo sapien
catgggtccttcctacagaggtatg

SEQ ID NO: 5397417 - DNA, 25 bp, Homo sapien
cagaggtatgtggtttctagagacc

SEQ ID NO: 5397418 - DNA, 25 bp, Homo sapien
ttgtttcgccaaccacgggcatgag

SEQ ID NO: 5397419 - DNA, 25 bp, Homo sapien
tatagcacagaacaggtcggctgtc

SEQ ID NO: 5397420 - DNA, 25 bp, Homo sapien
tttttgccacatttatagcacagaa

SEQ ID NO: 5397421 - DNA, 25 bp, Homo sapien
cacagaacaggtcggctgtcctctg

SEQ ID NO: 5397422 - DNA, 25 bp, Homo sapien
agatggcttttcagaaggtgacctg

SEQ ID NO: 5397423 - DNA, 25 bp, Homo sapien
ggtgacctgcaacatcgatatctgt

SEQ ID NO: 5397424 - DNA, 25 bp, Homo sapien
caacatcgatatctgtcctccagag

SEQ ID NO: 5397425 - DNA, 25 bp, Homo sapien
agagatggcttttcagaaggtgacc

SEQ ID NO: 5397426 - DNA, 25 bp, Homo sapien
tatacactgagaacactaacttgtc

SEQ ID NO: 5397427 - DNA, 25 bp, Homo sapien
acactaacttgtcctctgaccacag

SEQ ID NO: 5397428 - DNA, 25 bp, Homo sapien
actaacttgtcctctgaccacagcc

SEQ ID NO: 5397429 - DNA, 25 bp, Homo sapien
agaacactaacttgtcctctgacca

SEQ ID NO: 5397430 - DNA, 25 bp, Homo sapien
ggcccaggaaacaatgtgctgagaa

SEQ ID NO: 5397431 - DNA, 25 bp, Homo sapien
cagaatgtgtctgtacatggcatgg

SEQ ID NO: 5397432 - DNA, 25 bp, Homo sapien
gatgtctgacgaatggcatagaacc

SEQ ID NO: 5397433 - DNA, 25 bp, Homo sapien
aatgtgctgagaacgaacagaaatc

SEQ ID NO: 5397434 - DNA, 25 bp, Homo sapien
tctccatcctttccatgccaaaaaa

SEQ ID NO: 5397435 - DNA, 25 bp, Homo sapien
tccatcctttccatgccaaaaaatg

SEQ ID NO: 5397436 - DNA, 25 bp, Homo sapien
catcctttccatgccaaaaaatgaa

SEQ ID NO: 5397437 - DNA, 25 bp, Homo sapien
ctctccatcctttccatgccaaaaa

SEQ ID NO: 5397438 - DNA, 25 bp, Homo sapien
tttctatgtctacctggaattctgg

SEQ ID NO: 5397439 - DNA, 25 bp, Homo sapien
ctatgtctacctggaattctggaac

SEQ ID NO: 5397440 - DNA, 25 bp, Homo sapien
aaaacatttctatgtctacctggaa

SEQ ID NO: 5397441 - DNA, 25 bp, Homo sapien
tcaaaaacatttctatgtctacctg

SEQ ID NO: 5397442 - DNA, 25 bp, Homo sapien
ctcctggtcaatcagtcttactaat

SEQ ID NO: 5397443 - DNA, 25 bp, Homo sapien
aatcagtcttactaatccttctcta

SEQ ID NO: 5397444 - DNA, 25 bp, Homo sapien
ggtcaatcagtcttactaatccttc

SEQ ID NO: 5397445 - DNA, 25 bp, Homo sapien
cctggtcaatcagtcttactaatcc

SEQ ID NO: 5397446 - DNA, 25 bp, Homo sapien
ttgctgggttgagccaccacgatga

SEQ ID NO: 5397447 - DNA, 25 bp, Homo sapien
actgtgtatcttactttgggtgtca

SEQ ID NO: 5397448 - DNA, 25 bp, Homo sapien
ctttgaacactggaacactcttggc

SEQ ID NO: 5397449 - DNA, 25 bp, Homo sapien
agccaccacgatgacaccactgtgt

SEQ ID NO: 5397450 - DNA, 25 bp, Homo sapien
ctccttcagacctatgaaattgcac

SEQ ID NO: 5397451 - DNA, 25 bp, Homo sapien
cacctccttcagacctatgaaattg

SEQ ID NO: 5397452 - DNA, 25 bp, Homo sapien
cctccttcagacctatgaaattgca

SEQ ID NO: 5397453 - DNA, 25 bp, Homo sapien
ctacacctccttcagacctatgaaa

SEQ ID NO: 5397454 - DNA, 25 bp, Homo sapien
tcccctccatatcgttgttccacca

SEQ ID NO: 5397455 - DNA, 25 bp, Homo sapien
catatcgttgttccaccaacacctt

SEQ ID NO: 5397456 - DNA, 25 bp, Homo sapien
cctccatatcgttgttccaccaaca

SEQ ID NO: 5397457 - DNA, 25 bp, Homo sapien
tccatatcgttgttccaccaacacc

SEQ ID NO: 5397458 - DNA, 25 bp, Homo sapien
tggattgctgtgcatagtctccttt

SEQ ID NO: 5397459 - DNA, 25 bp, Homo sapien
gcatagtctcctttaacaaggttag

SEQ ID NO: 5397460 - DNA, 25 bp, Homo sapien
tagtctcctttaacaaggttagaga

SEQ ID NO: 5397461 - DNA, 25 bp, Homo sapien
gctgtgcatagtctcctttaacaag

SEQ ID NO: 5397462 - DNA, 25 bp, Homo sapien
gaacgctaaagtccctgtggtctct

SEQ ID NO: 5397463 - DNA, 25 bp, Homo sapien
tagcctgaacgctaaagtccctgtg

SEQ ID NO: 5397464 - DNA, 25 bp, Homo sapien
tcttccacagccatgatattcctag

SEQ ID NO: 5397465 - DNA, 25 bp, Homo sapien
gatattcctagcctgaacgctaaag

SEQ ID NO: 5397466 - DNA, 25 bp, Homo sapien
atccaaccaactcatccagaagcat

SEQ ID NO: 5397467 - DNA, 25 bp, Homo sapien
ttaatccaaccaactcatccagaag

SEQ ID NO: 5397468 - DNA, 25 bp, Homo sapien
taatccaaccaactcatccagaagc

SEQ ID NO: 5397469 - DNA, 25 bp, Homo sapien
cttaatccaaccaactcatccagaa

SEQ ID NO: 5397470 - DNA, 25 bp, Homo sapien
cacactcgaaagaagctccaaccac

SEQ ID NO: 5397471 - DNA, 25 bp, Homo sapien
tcagtcctcattaaactctccaatg

SEQ ID NO: 5397472 - DNA, 25 bp, Homo sapien
gccaacaatatggtgtcctctgcag

SEQ ID NO: 5397473 - DNA, 25 bp, Homo sapien
tagtgtccctgcatgctccaaatca

SEQ ID NO: 5397474 - DNA, 25 bp, Homo sapien
cctgaatctactgcttgcaaataaa

SEQ ID NO: 5397475 - DNA, 25 bp, Homo sapien
ctcaagaagtgagaaggctttaaaa

SEQ ID NO: 5397476 - DNA, 25 bp, Homo sapien
tgcccagcccgaagtacttcccttc

SEQ ID NO: 5397477 - DNA, 25 bp, Homo sapien
tcaagaagtgagaaggctttaaaag

SEQ ID NO: 5397478 - DNA, 25 bp, Homo sapien
aagtacttcccttctatctcaagaa

SEQ ID NO: 5397479 - DNA, 25 bp, Homo sapien
attccccttaaggtccatgagggat

SEQ ID NO: 5397480 - DNA, 25 bp, Homo sapien
ccttaaggtccatgagggatagcct

SEQ ID NO: 5397481 - DNA, 25 bp, Homo sapien
atgagggatagcctgacatcaacag

SEQ ID NO: 5397482 - DNA, 25 bp, Homo sapien
gagggatagcctgacatcaacagcc

SEQ ID NO: 5397483 - DNA, 25 bp, Homo sapien
agaatcctcccagacaccaggtaac

SEQ ID NO: 5397484 - DNA, 25 bp, Homo sapien
aatcctcccagacaccaggtaactc

SEQ ID NO: 5397485 - DNA, 25 bp, Homo sapien
gaatcctcccagacaccaggtaact

SEQ ID NO: 5397486 - DNA, 25 bp, Homo sapien
aaagactttcagcatcaatccccat

SEQ ID NO: 5397487 - DNA, 25 bp, Homo sapien
tttaaaagactttcagcatcaatcc

SEQ ID NO: 5397488 - DNA, 25 bp, Homo sapien
taaaagactttcagcatcaatcccc

SEQ ID NO: 5397489 - DNA, 25 bp, Homo sapien
tgtactgataagaaagctgttaatt

SEQ ID NO: 5397490 - DNA, 25 bp, Homo sapien
cagtatgaatcccaacattccacag

SEQ ID NO: 5397491 - DNA, 25 bp, Homo sapien
aatattgtctggcagccctgaaaac

SEQ ID NO: 5397492 - DNA, 25 bp, Homo sapien
ctgacaataattgattttcagagca

SEQ ID NO: 5397493 - DNA, 25 bp, Homo sapien
ttttgtcaacaacttaacagctgtg

SEQ ID NO: 5397494 - DNA, 25 bp, Homo sapien
tttgagacattctccaaagctagcg

SEQ ID NO: 5397495 - DNA, 25 bp, Homo sapien
caaagctagcgaaaggcattgcaga

SEQ ID NO: 5397496 - DNA, 25 bp, Homo sapien
aagtattccttgatattgtttagca

SEQ ID NO: 5397497 - DNA, 25 bp, Homo sapien
aggcattgcagaaatgtaaagtatt

SEQ ID NO: 5397498 - DNA, 25 bp, Homo sapien
ggcacctcacaaatctgggatgatt

SEQ ID NO: 5397499 - DNA, 25 bp, Homo sapien
ctggcacctcacaaatctgggatga

SEQ ID NO: 5397500 - DNA, 25 bp, Homo sapien
tggcacctcacaaatctgggatgat

SEQ ID NO: 5397501 - DNA, 25 bp, Homo sapien
tggctccaagaacccagtgatgggc

SEQ ID NO: 5397502 - DNA, 25 bp, Homo sapien
gggctggaggtggttggtttccaga

SEQ ID NO: 5397503 - DNA, 25 bp, Homo sapien
aaaaatgtgcttgtgtccggtcagc

SEQ ID NO: 5397504 - DNA, 25 bp, Homo sapien
gaacccagtgatgggctctgatctt

SEQ ID NO: 5397505 - DNA, 25 bp, Homo sapien
ccctagcgatgagcaaacttttatc

SEQ ID NO: 5397506 - DNA, 25 bp, Homo sapien
gaaaagggaatgagatacgagagaa

SEQ ID NO: 5397507 - DNA, 25 bp, Homo sapien
tgagatacgagagaaagcctttccc

SEQ ID NO: 5397508 - DNA, 25 bp, Homo sapien
gagaaagcctttccctagcgatgag

SEQ ID NO: 5397509 - DNA, 25 bp, Homo sapien
ccaggaagtgactgtgaatccttca

SEQ ID NO: 5397510 - DNA, 25 bp, Homo sapien
ccccaggaagtgactgtgaatcctt

SEQ ID NO: 5397511 - DNA, 25 bp, Homo sapien
ctgccccaggaagtgactgtgaatc

SEQ ID NO: 5397512 - DNA, 25 bp, Homo sapien
tggcacaactttctgccccaggaag

SEQ ID NO: 5397513 - DNA, 25 bp, Homo sapien
tctggcttattattcacactcttct

SEQ ID NO: 5397514 - DNA, 25 bp, Homo sapien
agcaatgttgacttagctctcaaga

SEQ ID NO: 5397515 - DNA, 25 bp, Homo sapien
ttcacactcttctggacttgacatt

SEQ ID NO: 5397516 - DNA, 25 bp, Homo sapien
gacttagctctcaagaatccttttt

SEQ ID NO: 5397517 - DNA, 25 bp, Homo sapien
caaacaagaccttcagagagttctg

SEQ ID NO: 5397518 - DNA, 25 bp, Homo sapien
gcatgtcaactatggtgtaaacacc

SEQ ID NO: 5397519 - DNA, 25 bp, Homo sapien
tagatggcgcagaagatttttgagg

SEQ ID NO: 5397520 - DNA, 25 bp, Homo sapien
tctattctgcattgatctgtgctga

SEQ ID NO: 5397521 - DNA, 25 bp, Homo sapien
tttgctgtcagtccattactagtca

SEQ ID NO: 5397522 - DNA, 25 bp, Homo sapien
ttgctgtcagtccattactagtcat

SEQ ID NO: 5397523 - DNA, 25 bp, Homo sapien
cttgtgttgctgaattatttggtaa

SEQ ID NO: 5397524 - DNA, 25 bp, Homo sapien
ttgcttgtgttgctgaattatttgg

SEQ ID NO: 5397525 - DNA, 25 bp, Homo sapien
gttgctgaattatttggtaaagttc

SEQ ID NO: 5397526 - DNA, 25 bp, Homo sapien
tgctgaattatttggtaaagttcct

SEQ ID NO: 5397527 - DNA, 25 bp, Homo sapien
tttgccctatgccagtgttttccat

SEQ ID NO: 5397528 - DNA, 25 bp, Homo sapien
aaccatatcaccacgcaaatctcat

SEQ ID NO: 5397529 - DNA, 25 bp, Homo sapien
agcaaggcaagtcttatgtggtggc

SEQ ID NO: 5397530 - DNA, 25 bp, Homo sapien
gccatgttatgatgtgcttgcttcc

SEQ ID NO: 5397531 - DNA, 25 bp, Homo sapien
ttaaaacatcatacctcatgagaat

SEQ ID NO: 5397532 - DNA, 25 bp, Homo sapien
tgaccactgccatattggcgttgaa

SEQ ID NO: 5397533 - DNA, 25 bp, Homo sapien
atgattgctactgaacaataatacc

SEQ ID NO: 5397534 - DNA, 25 bp, Homo sapien
catattggcgttgaatgattgctac

SEQ ID NO: 5397535 - DNA, 25 bp, Homo sapien
cggttcatgaccactgccatattgg

SEQ ID NO: 5397536 - DNA, 25 bp, Homo sapien
ggtgggagagcacccaatatccgct

SEQ ID NO: 5397537 - DNA, 25 bp, Homo sapien
tgtcagttaacaccttagcagggca

SEQ ID NO: 5397538 - DNA, 25 bp, Homo sapien
tcttcacagtcgcatctgggagtca

SEQ ID NO: 5397539 - DNA, 25 bp, Homo sapien
gagaacgctgctcctgacgaggtgg

SEQ ID NO: 5397540 - DNA, 25 bp, Homo sapien
gaacatgtgtgagagcccaaggcta

SEQ ID NO: 5397541 - DNA, 25 bp, Homo sapien
tggtgtctccatgtagccgtcagaa

SEQ ID NO: 5397542 - DNA, 25 bp, Homo sapien
tattgtgcagcttgggataatgccg

SEQ ID NO: 5397543 - DNA, 25 bp, Homo sapien
cacgggcaggatgtgaatgtgtccc

SEQ ID NO: 5397544 - DNA, 25 bp, Homo sapien
ccctgaaaacactgacttaacaata

SEQ ID NO: 5397545 - DNA, 25 bp, Homo sapien
ccaggtaagaggttgtggcagtcca

SEQ ID NO: 5397546 - DNA, 25 bp, Homo sapien
ggcagtccaggctagcactaagcca

SEQ ID NO: 5397547 - DNA, 25 bp, Homo sapien
ttgtcagtagaccaaattgcctttg

SEQ ID NO: 5397548 - DNA, 25 bp, Homo sapien
gcttgtgctgccaaagagggtgccc

SEQ ID NO: 5397549 - DNA, 25 bp, Homo sapien
ctcggggcctgctacttgaaagtgc

SEQ ID NO: 5397550 - DNA, 25 bp, Homo sapien
gccaaagagggtgccccgaaaggca

SEQ ID NO: 5397551 - DNA, 25 bp, Homo sapien
cccctcttgtagtcagcttgtctga

SEQ ID NO: 5397552 - DNA, 25 bp, Homo sapien
tccttgccacggacaaaacagagat

SEQ ID NO: 5397553 - DNA, 25 bp, Homo sapien
agatttagcatgcatctgagacaag

SEQ ID NO: 5397554 - DNA, 25 bp, Homo sapien
gctcagagtgcggtgaagcattttt

SEQ ID NO: 5397555 - DNA, 25 bp, Homo sapien
tggagttcagcaatgaggagcccgt

SEQ ID NO: 5397556 - DNA, 25 bp, Homo sapien
tgctcaatttgcacagcaacactgt

SEQ ID NO: 5397557 - DNA, 25 bp, Homo sapien
cactgtgacctgcatgtgttaactc

SEQ ID NO: 5397558 - DNA, 25 bp, Homo sapien
cagaaatcagcttctaattccttag

SEQ ID NO: 5397559 - DNA, 25 bp, Homo sapien
gatgagagaactgagtgaatcccaa

SEQ ID NO: 5397560 - DNA, 25 bp, Homo sapien
agatttccagttcataccagctcga

SEQ ID NO: 5397561 - DNA, 25 bp, Homo sapien
cactgcagctgcagtacagtcacag

SEQ ID NO: 5397562 - DNA, 25 bp, Homo sapien
tgtgtctgctgactactcgagagtg

SEQ ID NO: 5397563 - DNA, 25 bp, Homo sapien
ccacagtcctgaaaagttctggaag

SEQ ID NO: 5397564 - DNA, 25 bp, Homo sapien
gctctcctagccaggtcagaaatgg

SEQ ID NO: 5397565 - DNA, 25 bp, Homo sapien
gaaatggccttcgtctgtgtacaac

SEQ ID NO: 5397566 - DNA, 25 bp, Homo sapien
tacaactggtttgttgtgttgttct

SEQ ID NO: 5397567 - DNA, 25 bp, Homo sapien
tccttcctccaatgtggttgcaaag

SEQ ID NO: 5397568 - DNA, 25 bp, Homo sapien
tatgcaagtcctcacattcacaagg

SEQ ID NO: 5397569 - DNA, 25 bp, Homo sapien
ccaattgataggtcactcagacatc

SEQ ID NO: 5397570 - DNA, 25 bp, Homo sapien
gattatccaattgataggtcactca

SEQ ID NO: 5397571 - DNA, 25 bp, Homo sapien
caattaaccacaagtggattatcca

SEQ ID NO: 5397572 - DNA, 25 bp, Homo sapien
gaatgccaaagatgtaagcgtctct

SEQ ID NO: 5397573 - DNA, 25 bp, Homo sapien
tctaattctgcacatggatactgga

SEQ ID NO: 5397574 - DNA, 25 bp, Homo sapien
ggttcccagtaatggccacgtttga

SEQ ID NO: 5397575 - DNA, 25 bp, Homo sapien
cctgagggcttgtgggaatgccaaa

SEQ ID NO: 5397576 - DNA, 25 bp, Homo sapien
tatgtttactgcgtcaccattcaca

SEQ ID NO: 5397577 - DNA, 25 bp, Homo sapien
ctgtgagtgagaacagtgtggcgat

SEQ ID NO: 5397578 - DNA, 25 bp, Homo sapien
cccacatcctggtgtgtggtgttcc

SEQ ID NO: 5397579 - DNA, 25 bp, Homo sapien
ccaaccccacatcctggtgtgtggt

SEQ ID NO: 5397580 - DNA, 25 bp, Homo sapien
gtgtgctgcatgtgctccttcaagc

SEQ ID NO: 5397581 - DNA, 25 bp, Homo sapien
tttcaagaggtttctctgaagcatc

SEQ ID NO: 5397582 - DNA, 25 bp, Homo sapien
agtttcaagaggtttctctgaagca

SEQ ID NO: 5397583 - DNA, 25 bp, Homo sapien
gtttcaagaggtttctctgaagcat

SEQ ID NO: 5397584 - DNA, 25 bp, Homo sapien
cctatagctaaagaggtggtttcca

SEQ ID NO: 5397585 - DNA, 25 bp, Homo sapien
cctgcctatagctaaagaggtggtt

SEQ ID NO: 5397586 - DNA, 25 bp, Homo sapien
ctggcctgcctatagctaaagaggt

SEQ ID NO: 5397587 - DNA, 25 bp, Homo sapien
tagctaaagaggtggtttccatcca

SEQ ID NO: 5397588 - DNA, 25 bp, Homo sapien
acagaattttctggtaggagcaggg

SEQ ID NO: 5397589 - DNA, 25 bp, Homo sapien
ttactacgactctgcaatatcccca

SEQ ID NO: 5397590 - DNA, 25 bp, Homo sapien
aacaaaggcaagttactacgactct

SEQ ID NO: 5397591 - DNA, 25 bp, Homo sapien
aacagaattttctggtaggagcagg

SEQ ID NO: 5397592 - DNA, 25 bp, Homo sapien
ctacttccccaagtattttcacagg

SEQ ID NO: 5397593 - DNA, 25 bp, Homo sapien
agtgcttaaattctacttccccaag

SEQ ID NO: 5397594 - DNA, 25 bp, Homo sapien
tctacttccccaagtattttcacag

SEQ ID NO: 5397595 - DNA, 25 bp, Homo sapien
caagtattttcacaggtacccccag

SEQ ID NO: 5397596 - DNA, 25 bp, Homo sapien
tgtccaattccttgtgtgttaatca

SEQ ID NO: 5397597 - DNA, 25 bp, Homo sapien
tagtgtcttccttgtaccactgtcc

SEQ ID NO: 5397598 - DNA, 25 bp, Homo sapien
gtccaattccttgtgtgttaatcat

SEQ ID NO: 5397599 - DNA, 25 bp, Homo sapien
ctactctaagaatttcattagtgtc

SEQ ID NO: 5397600 - DNA, 25 bp, Homo sapien
aagtttctgttttagattccaccat

SEQ ID NO: 5397601 - DNA, 25 bp, Homo sapien
tccaatattgcctgtccctgattct

SEQ ID NO: 5397602 - DNA, 25 bp, Homo sapien
tgttggaccatttcattagagcttc

SEQ ID NO: 5397603 - DNA, 25 bp, Homo sapien
tacctctcttgatatctcccatctg

SEQ ID NO: 5397604 - DNA, 25 bp, Homo sapien
tttcaactattagaattttcagtca

SEQ ID NO: 5397605 - DNA, 25 bp, Homo sapien
ggagtctgaggattgcactgtgaca

SEQ ID NO: 5397606 - DNA, 25 bp, Homo sapien
gaggagtctgaggattgcactgtga

SEQ ID NO: 5397607 - DNA, 25 bp, Homo sapien
gagtctgaggattgcactgtgacaa

SEQ ID NO: 5397608 - DNA, 25 bp, Homo sapien
gtctgaggattgcactgtgacaact

SEQ ID NO: 5397609 - DNA, 25 bp, Homo sapien
cagctgggcatcatgggaatgttcc

SEQ ID NO: 5397610 - DNA, 25 bp, Homo sapien
gggatgtattcatcgcacttaagaa

SEQ ID NO: 5397611 - DNA, 25 bp, Homo sapien
taagaaagctaatctgctctccaag

SEQ ID NO: 5397612 - DNA, 25 bp, Homo sapien
tgcagtgcctgcaaacaccgccagc

SEQ ID NO: 5397613 - DNA, 25 bp, Homo sapien
caagtggtaagatcagctcagactc

SEQ ID NO: 5397614 - DNA, 25 bp, Homo sapien
ttaatatagattgaccccagctggg

SEQ ID NO: 5397615 - DNA, 25 bp, Homo sapien
aaacttcacctctgggtagcaaggg

SEQ ID NO: 5397616 - DNA, 25 bp, Homo sapien
tgaccaaagctagaaggaatgcctt

SEQ ID NO: 5397617 - DNA, 25 bp, Homo sapien
gaaaatcattgttccaagtttcttg

SEQ ID NO: 5397618 - DNA, 25 bp, Homo sapien
tgttccaagtttcttgaggtgtaaa

SEQ ID NO: 5397619 - DNA, 25 bp, Homo sapien
atcattgttccaagtttcttgaggt

SEQ ID NO: 5397620 - DNA, 25 bp, Homo sapien
taaatgtaagcttctccataaaaga

SEQ ID NO: 5397621 - DNA, 25 bp, Homo sapien
caatagaggcaccagcgtagagaag

SEQ ID NO: 5397622 - DNA, 25 bp, Homo sapien
atcctccggaccgtggcaatgctca

SEQ ID NO: 5397623 - DNA, 25 bp, Homo sapien
aagttccaatagaggcaccagcgta

SEQ ID NO: 5397624 - DNA, 25 bp, Homo sapien
agaggcaccagcgtagagaaggctt

SEQ ID NO: 5397625 - DNA, 25 bp, Homo sapien
gacagtcccagagataacttctcgg

SEQ ID NO: 5397626 - DNA, 25 bp, Homo sapien
tctcggcacaccagaaaagtatcct

SEQ ID NO: 5397627 - DNA, 25 bp, Homo sapien
ggaatccccactttgttagcacatg

SEQ ID NO: 5397628 - DNA, 25 bp, Homo sapien
tggaattccaagtgtgacagtccca

SEQ ID NO: 5397629 - DNA, 25 bp, Homo sapien
catctgagaaagcataccaggaaaa

SEQ ID NO: 5397630 - DNA, 25 bp, Homo sapien
ccatctgagaaagcataccaggaaa

SEQ ID NO: 5397631 - DNA, 25 bp, Homo sapien
tagagatagatgagctggccatgag

SEQ ID NO: 5397632 - DNA, 25 bp, Homo sapien
catgagccactaggtgtgtctcttt

SEQ ID NO: 5397633 - DNA, 25 bp, Homo sapien
catcaagctttcatagtactggcca

SEQ ID NO: 5397634 - DNA, 25 bp, Homo sapien
ggccacatctggaaagattggagta

SEQ ID NO: 5397635 - DNA, 25 bp, Homo sapien
acacagccatagagagtgaagaaca

SEQ ID NO: 5397636 - DNA, 25 bp, Homo sapien
tgagtggacacagccatagagagtg

SEQ ID NO: 5397637 - DNA, 25 bp, Homo sapien
tggacacagccatagagagtgaaga

SEQ ID NO: 5397638 - DNA, 25 bp, Homo sapien
agtgaagaacaggagcttcatagag

SEQ ID NO: 5397639 - DNA, 25 bp, Homo sapien
ttctaatgacattgttccctctccc

SEQ ID NO: 5397640 - DNA, 25 bp, Homo sapien
ccattaaatctattagtctcactac

SEQ ID NO: 5397641 - DNA, 25 bp, Homo sapien
tacaccatcagcttttaaaagcacc

SEQ ID NO: 5397642 - DNA, 25 bp, Homo sapien
tacctgttctaatgacattgttccc

SEQ ID NO: 5397643 - DNA, 25 bp, Homo sapien
agccttgctttcagccaactcttct

SEQ ID NO: 5397644 - DNA, 25 bp, Homo sapien
cttgggaaccctagccttgctttca

SEQ ID NO: 5397645 - DNA, 25 bp, Homo sapien
ttgggaaccctagccttgctttcag

SEQ ID NO: 5397646 - DNA, 25 bp, Homo sapien
gcagcaattcccttgggaaccctag

SEQ ID NO: 5397647 - DNA, 25 bp, Homo sapien
gctcaaaacactgtggagtatccat

SEQ ID NO: 5397648 - DNA, 25 bp, Homo sapien
gtatccattttaacactatcactga

SEQ ID NO: 5397649 - DNA, 25 bp, Homo sapien
cttccaggctcaaaacactgtggag

SEQ ID NO: 5397650 - DNA, 25 bp, Homo sapien
ctggtgttgagagagggattgcttc

SEQ ID NO: 5397651 - DNA, 25 bp, Homo sapien
cccaaagcgctgatggatttgtgat

SEQ ID NO: 5397652 - DNA, 25 bp, Homo sapien
ttctcctgccgtctgtgtatctgag

SEQ ID NO: 5397653 - DNA, 25 bp, Homo sapien
tggacaagactaaatgcctgaagct

SEQ ID NO: 5397654 - DNA, 25 bp, Homo sapien
gaatacctggacagactgctagaac

SEQ ID NO: 5397655 - DNA, 25 bp, Homo sapien
caactttaatcaactctttcctcat

SEQ ID NO: 5397656 - DNA, 25 bp, Homo sapien
acaactttaatcaactctttcctca

SEQ ID NO: 5397657 - DNA, 25 bp, Homo sapien
cagtaacaactttaatcaactcttt

SEQ ID NO: 5397658 - DNA, 25 bp, Homo sapien
tgtccagtaacaactttaatcaact

SEQ ID NO: 5397659 - DNA, 25 bp, Homo sapien
ggagaaagtcgaacaaggaatttga

SEQ ID NO: 5397660 - DNA, 25 bp, Homo sapien
catctttgtgcagggactatgctaa

SEQ ID NO: 5397661 - DNA, 25 bp, Homo sapien
cgtcatctttgtgcagggactatgc

SEQ ID NO: 5397662 - DNA, 25 bp, Homo sapien
tgcacgtcatctttgtgcagggact

SEQ ID NO: 5397663 - DNA, 25 bp, Homo sapien
cacgtcatctttgtgcagggactat

SEQ ID NO: 5397664 - DNA, 25 bp, Homo sapien
tgtaccacatcctcacatattgata

SEQ ID NO: 5397665 - DNA, 25 bp, Homo sapien
acagcaaacaccacttcccatccat

SEQ ID NO: 5397666 - DNA, 25 bp, Homo sapien
gcttatactcctctggcatggtttt

SEQ ID NO: 5397667 - DNA, 25 bp, Homo sapien
gatatgttgaggaaatacacagcaa

SEQ ID NO: 5397668 - DNA, 25 bp, Homo sapien
catctgctgctaaaagccttttttc

SEQ ID NO: 5397669 - DNA, 25 bp, Homo sapien
ggatgctttccctacaagaatgtta

SEQ ID NO: 5397670 - DNA, 25 bp, Homo sapien
ttgtcagccagagattactccactg

SEQ ID NO: 5397671 - DNA, 25 bp, Homo sapien
cactgagtgccttggcaggagatga

SEQ ID NO: 5397672 - DNA, 25 bp, Homo sapien
tggagatccacagaaggcctatgaa

SEQ ID NO: 5397673 - DNA, 25 bp, Homo sapien
tggtgtaagatctcactgtgtaaac

SEQ ID NO: 5397674 - DNA, 25 bp, Homo sapien
cccaaccatgttggcggcatatcat

SEQ ID NO: 5397675 - DNA, 25 bp, Homo sapien
aagccacttctccttgtagggtagt

SEQ ID NO: 5397676 - DNA, 25 bp, Homo sapien
ggtagtccagctacgagctttctgc

SEQ ID NO: 5397677 - DNA, 25 bp, Homo sapien
catagggcggagtgagtaaaggaca

SEQ ID NO: 5397678 - DNA, 25 bp, Homo sapien
accagtttgacatagggcggagtga

SEQ ID NO: 5397679 - DNA, 25 bp, Homo sapien
gagtgagtaaaggacagaggcttac

SEQ ID NO: 5397680 - DNA, 25 bp, Homo sapien
ttggaccagtttgacatagggcgga

SEQ ID NO: 5397681 - DNA, 25 bp, Homo sapien
gatgctgttcccaaccaagtgcctg

SEQ ID NO: 5397682 - DNA, 25 bp, Homo sapien
tgggatgctgttcccaaccaagtgc

SEQ ID NO: 5397683 - DNA, 25 bp, Homo sapien
tcccctgggatgctgttcccaacca

SEQ ID NO: 5397684 - DNA, 25 bp, Homo sapien
cctgggatgctgttcccaaccaagt

SEQ ID NO: 5397685 - DNA, 25 bp, Homo sapien
ccagcactgtgggattcctcaaaat

SEQ ID NO: 5397686 - DNA, 25 bp, Homo sapien
tacatccaaccccaaggtcaacaag

SEQ ID NO: 5397687 - DNA, 25 bp, Homo sapien
tgttgccaactcctgtaaagtgggt

SEQ ID NO: 5397688 - DNA, 25 bp, Homo sapien
ggtcaacaaggtcaagcattgcaac

SEQ ID NO: 5397689 - DNA, 25 bp, Homo sapien
ggcatttcctgagggttacagcttt

SEQ ID NO: 5397690 - DNA, 25 bp, Homo sapien
tggaatatcagcagggactttttct

SEQ ID NO: 5397691 - DNA, 25 bp, Homo sapien
ttttcgcaccctctccttcaatgct

SEQ ID NO: 5397692 - DNA, 25 bp, Homo sapien
ctggcatttcctgagggttacagct

SEQ ID NO: 5397693 - DNA, 25 bp, Homo sapien
ataacagggaggagatacaagacaa

SEQ ID NO: 5397694 - DNA, 25 bp, Homo sapien
ggagatacaagacaacaatcttgtg

SEQ ID NO: 5397695 - DNA, 25 bp, Homo sapien
taagggtgaggattgagtgataaca

SEQ ID NO: 5397696 - DNA, 25 bp, Homo sapien
cagtgtaagggtgaggattgagtga

SEQ ID NO: 5397697 - DNA, 25 bp, Homo sapien
aagtgttcattagcccttcagtgag

SEQ ID NO: 5397698 - DNA, 25 bp, Homo sapien
cactcaaaggtgatgtgcacttcct

SEQ ID NO: 5397699 - DNA, 25 bp, Homo sapien
gaaataaggtatcatgagccaggag

SEQ ID NO: 5397700 - DNA, 25 bp, Homo sapien
tccaattgccaaagtgaagtgttca

SEQ ID NO: 5397701 - DNA, 25 bp, Homo sapien
catgtgtttgcaagtaagagagtct

SEQ ID NO: 5397702 - DNA, 25 bp, Homo sapien
tgggacagccatgtatttctaaagc

SEQ ID NO: 5397703 - DNA, 25 bp, Homo sapien
tatgcctccaaagtgtgcatcttaa

SEQ ID NO: 5397704 - DNA, 25 bp, Homo sapien
taatgtggcctataaacgttctgca

SEQ ID NO: 5397705 - DNA, 25 bp, Homo sapien
gagataacctaatgggcctcccctg

SEQ ID NO: 5397706 - DNA, 25 bp, Homo sapien
cacactgttgagtggcgtcgaatcc

SEQ ID NO: 5397707 - DNA, 25 bp, Homo sapien
aactgacgagtcacgtggcaccaag

SEQ ID NO: 5397708 - DNA, 25 bp, Homo sapien
tatggaaaagcctagcaatatggca

SEQ ID NO: 5397709 - DNA, 25 bp, Homo sapien
ttggagagagactgatacagctggc

SEQ ID NO: 5397710 - DNA, 25 bp, Homo sapien
tttgcttctctgtgcgtcttggaga

SEQ ID NO: 5397711 - DNA, 25 bp, Homo sapien
gctgacagtggttacactcagaagc

SEQ ID NO: 5397712 - DNA, 25 bp, Homo sapien
tggctgacagtggttacactcagaa

SEQ ID NO: 5397713 - DNA, 25 bp, Homo sapien
gatgtgtgtcgtttatctctgctga

SEQ ID NO: 5397714 - DNA, 25 bp, Homo sapien
tctctgctgaatttgatctttttat

SEQ ID NO: 5397715 - DNA, 25 bp, Homo sapien
agaggatgatgtgtgtcgtttatct

SEQ ID NO: 5397716 - DNA, 25 bp, Homo sapien
gatgatgtgtgtcgtttatctctgc

SEQ ID NO: 5397717 - DNA, 25 bp, Homo sapien
cttccaccttcttattacccgtgtg

SEQ ID NO: 5397718 - DNA, 25 bp, Homo sapien
gccagggccatccactgaagtcact

SEQ ID NO: 5397719 - DNA, 25 bp, Homo sapien
tgtgtctccctatgaagacgtactt

SEQ ID NO: 5397720 - DNA, 25 bp, Homo sapien
gggccatccactgaagtcacttcca

SEQ ID NO: 5397721 - DNA, 25 bp, Homo sapien
tttacagcccagtgaactacaatct

SEQ ID NO: 5397722 - DNA, 25 bp, Homo sapien
aaatttacagcccagtgaactacaa

SEQ ID NO: 5397723 - DNA, 25 bp, Homo sapien
agtgaactacaatcttagtatcagc

SEQ ID NO: 5397724 - DNA, 25 bp, Homo sapien
cagcccagtgaactacaatcttagt

SEQ ID NO: 5397725 - DNA, 25 bp, Homo sapien
ttgtcatgtctgtgccctgtgcttt

SEQ ID NO: 5397726 - DNA, 25 bp, Homo sapien
actacccttgtcatgtctgtgccct

SEQ ID NO: 5397727 - DNA, 25 bp, Homo sapien
ccacactacccttgtcatgtctgtg

SEQ ID NO: 5397728 - DNA, 25 bp, Homo sapien
tacccttgtcatgtctgtgccctgt

SEQ ID NO: 5397729 - DNA, 25 bp, Homo sapien
gggtgtatccatgccaatatcaggc

SEQ ID NO: 5397730 - DNA, 25 bp, Homo sapien
gctgcgttcaaggtttgcctagaag

SEQ ID NO: 5397731 - DNA, 25 bp, Homo sapien
tcctcaaagggtagtatcaacttgc

SEQ ID NO: 5397732 - DNA, 25 bp, Homo sapien
tgcaaccagattcacaagggagaag

SEQ ID NO: 5397733 - DNA, 25 bp, Homo sapien
tggaagtgaaactcccctttccaca

SEQ ID NO: 5397734 - DNA, 25 bp, Homo sapien
tcttttgctggtcagtctgtgtctg

SEQ ID NO: 5397735 - DNA, 25 bp, Homo sapien
ggctcgaattttggtcattgacagt

SEQ ID NO: 5397736 - DNA, 25 bp, Homo sapien
tagcagtaaccacaaggctcgaatt

SEQ ID NO: 5397737 - DNA, 25 bp, Homo sapien
agttcaaagtacagatattcggaca

SEQ ID NO: 5397738 - DNA, 25 bp, Homo sapien
gttcaaagtacagatattcggacat

SEQ ID NO: 5397739 - DNA, 25 bp, Homo sapien
gggaaactttgatatgatttgaaac

SEQ ID NO: 5397740 - DNA, 25 bp, Homo sapien
tctcttccccttgctaatgggaaac

SEQ ID NO: 5397741 - DNA, 25 bp, Homo sapien
ttcacagcactaaagagaagcacca

SEQ ID NO: 5397742 - DNA, 25 bp, Homo sapien
tttgaaacaccgtggtcattgttgg

SEQ ID NO: 5397743 - DNA, 25 bp, Homo sapien
gttccacagccagacatttgtacct

SEQ ID NO: 5397744 - DNA, 25 bp, Homo sapien
catacttctcaaagggttccacagc

SEQ ID NO: 5397745 - DNA, 25 bp, Homo sapien
gccagacatttgtacctcagaaaaa

SEQ ID NO: 5397746 - DNA, 25 bp, Homo sapien
acactgggccagaataccatacttc

SEQ ID NO: 5397747 - DNA, 25 bp, Homo sapien
cagaggtgcctctgtactccttgtg

SEQ ID NO: 5397748 - DNA, 25 bp, Homo sapien
ttgtgttgtgggaaaggacacacac

SEQ ID NO: 5397749 - DNA, 25 bp, Homo sapien
ctctgtactccttgtgttgtgggaa

SEQ ID NO: 5397750 - DNA, 25 bp, Homo sapien
gtgctcagaggtgcctctgtactcc

SEQ ID NO: 5397751 - DNA, 25 bp, Homo sapien
gcagggattcccatgataatcattt

SEQ ID NO: 5397752 - DNA, 25 bp, Homo sapien
tatgttggtgactcagggaaatcag

SEQ ID NO: 5397753 - DNA, 25 bp, Homo sapien
tccctgcagggattcccatgataat

SEQ ID NO: 5397754 - DNA, 25 bp, Homo sapien
tgtgctgcaaagcagtatgttggtg

SEQ ID NO: 5397755 - DNA, 25 bp, Homo sapien
taaaaggctttgtaagcaggattgt

SEQ ID NO: 5397756 - DNA, 25 bp, Homo sapien
ttgtaagcaggattgtgtcatccat

SEQ ID NO: 5397757 - DNA, 25 bp, Homo sapien
gctctttgactggtatcatcggtga

SEQ ID NO: 5397758 - DNA, 25 bp, Homo sapien
taggttcataatagatgatggacta

SEQ ID NO: 5397759 - DNA, 25 bp, Homo sapien
ggtgtgtgaatagaacagctatatc

SEQ ID NO: 5397760 - DNA, 25 bp, Homo sapien
gacgcaggttggcaaataggttaat

SEQ ID NO: 5397761 - DNA, 25 bp, Homo sapien
ggttaattttaacttcgcagattgc

SEQ ID NO: 5397762 - DNA, 25 bp, Homo sapien
tttctcactgagacgcaggttggca

SEQ ID NO: 5397763 - DNA, 25 bp, Homo sapien
aattctgctcatgtgaagcactggc

SEQ ID NO: 5397764 - DNA, 25 bp, Homo sapien
ctgggatgctgatggctacggtaaa

SEQ ID NO: 5397765 - DNA, 25 bp, Homo sapien
cctgggtctggatatccacctgtcc

SEQ ID NO: 5397766 - DNA, 25 bp, Homo sapien
aagccaaatgaatggcctgggtctg

SEQ ID NO: 5397767 - DNA, 25 bp, Homo sapien
gttttatggaatttttgtgagtcta

SEQ ID NO: 5397768 - DNA, 25 bp, Homo sapien
catctaagggcatcgggagcagcta

SEQ ID NO: 5397769 - DNA, 25 bp, Homo sapien
tctgtatcttcagcgtaactttttt

SEQ ID NO: 5397770 - DNA, 25 bp, Homo sapien
gcatcgggagcagctattttgacca

SEQ ID NO: 5397771 - DNA, 25 bp, Homo sapien
cctgagaggtagacatggagcccga

SEQ ID NO: 5397772 - DNA, 25 bp, Homo sapien
gacatggagcccgatgcctgcagag

SEQ ID NO: 5397773 - DNA, 25 bp, Homo sapien
gaggtagacatggagcccgatgcct

SEQ ID NO: 5397774 - DNA, 25 bp, Homo sapien
cactgcccctgagaggtagacatgg

SEQ ID NO: 5397775 - DNA, 25 bp, Homo sapien
tcttctgatttgaccaaggggtgct

SEQ ID NO: 5397776 - DNA, 25 bp, Homo sapien
ttcttctgatttgaccaaggggtgc

SEQ ID NO: 5397777 - DNA, 25 bp, Homo sapien
ttggacttgcctctcttagagccat

SEQ ID NO: 5397778 - DNA, 25 bp, Homo sapien
cctgagctgccacaatcctttggac

SEQ ID NO: 5397779 - DNA, 25 bp, Homo sapien
gccacaatcctttggacttgcctct

SEQ ID NO: 5397780 - DNA, 25 bp, Homo sapien
aatcctttggacttgcctctcttag

SEQ ID NO: 5397781 - DNA, 25 bp, Homo sapien
tccacaagtataagaggtgaactag

SEQ ID NO: 5397782 - DNA, 25 bp, Homo sapien
tagtcctccacaagtataagaggtg

SEQ ID NO: 5397783 - DNA, 25 bp, Homo sapien
ggtgaactagcaagcagagcctttg

SEQ ID NO: 5397784 - DNA, 25 bp, Homo sapien
tataagaggtgaactagcaagcaga

SEQ ID NO: 5397785 - DNA, 25 bp, Homo sapien
taattcacattcttcccgatgatga

SEQ ID NO: 5397786 - DNA, 25 bp, Homo sapien
cattcttcccgatgatgaagatccc

SEQ ID NO: 5397787 - DNA, 25 bp, Homo sapien
ctactttaaggatgtcactttccct

SEQ ID NO: 5397788 - DNA, 25 bp, Homo sapien
cttaattcacattcttcccgatgat

SEQ ID NO: 5397789 - DNA, 25 bp, Homo sapien
aacgccataatttggaaccacttgg

SEQ ID NO: 5397790 - DNA, 25 bp, Homo sapien
gggtgtgggttctgacagttgctca

SEQ ID NO: 5397791 - DNA, 25 bp, Homo sapien
tcagtagtgttagcgtaggcactgt

SEQ ID NO: 5397792 - DNA, 25 bp, Homo sapien
gggagcatcagcaacgccataattt

SEQ ID NO: 5397793 - DNA, 25 bp, Homo sapien
aagcagcacgaaagcttctaagtcc

SEQ ID NO: 5397794 - DNA, 25 bp, Homo sapien
gaaagcagcacgaaagcttctaagt

SEQ ID NO: 5397795 - DNA, 25 bp, Homo sapien
taaggggaacttaacatcctccata

SEQ ID NO: 5397796 - DNA, 25 bp, Homo sapien
ctagaaagcagcacgaaagcttcta

SEQ ID NO: 5397797 - DNA, 25 bp, Homo sapien
caagttgcgcatcgtgataaatggc

SEQ ID NO: 5397798 - DNA, 25 bp, Homo sapien
tctagtcaccaagacagcacgcgtg

SEQ ID NO: 5397799 - DNA, 25 bp, Homo sapien
taaatggcgtgaatatcctgagcgg

SEQ ID NO: 5397800 - DNA, 25 bp, Homo sapien
gactcctcggtatcagagcggacga

SEQ ID NO: 5397801 - DNA, 25 bp, Homo sapien
gagcctggaccagaacttggccgcc

SEQ ID NO: 5397802 - DNA, 25 bp, Homo sapien
agcctggaccagaacttggccgccg

SEQ ID NO: 5397803 - DNA, 25 bp, Homo sapien
gcctggaccagaacttggccgccgc

SEQ ID NO: 5397804 - DNA, 25 bp, Homo sapien
tatgacggttgattttacaccagga

SEQ ID NO: 5397805 - DNA, 25 bp, Homo sapien
gatatctagcgagaacttcctccgg

SEQ ID NO: 5397806 - DNA, 25 bp, Homo sapien
caaagttggcgtttgccgtctttct

SEQ ID NO: 5397807 - DNA, 25 bp, Homo sapien
tacaccaggaggtttgtctccgagg

SEQ ID NO: 5397808 - DNA, 25 bp, Homo sapien
tgtatatcagtatggtgcctttgta

SEQ ID NO: 5397809 - DNA, 25 bp, Homo sapien
actgagaagtatcacctctttagaa

SEQ ID NO: 5397810 - DNA, 25 bp, Homo sapien
gcctttgtacatattactcttcctc

SEQ ID NO: 5397811 - DNA, 25 bp, Homo sapien
taaatgctagttattctgctgcagc

SEQ ID NO: 5397812 - DNA, 25 bp, Homo sapien
aggaagggtaatataatcatgtctt

SEQ ID NO: 5397813 - DNA, 25 bp, Homo sapien
tgaggaagggtaatataatcatgtc

SEQ ID NO: 5397814 - DNA, 25 bp, Homo sapien
agaattgaggatgaggtttagtgag

SEQ ID NO: 5397815 - DNA, 25 bp, Homo sapien
gaattgaggatgaggtttagtgagg

SEQ ID NO: 5397816 - DNA, 25 bp, Homo sapien
catatactgagcatttagatacggt

SEQ ID NO: 5397817 - DNA, 25 bp, Homo sapien
gaattgcagattccccaagggcaga

SEQ ID NO: 5397818 - DNA, 25 bp, Homo sapien
gagctcatgtgtggaaaggtgcctc

SEQ ID NO: 5397819 - DNA, 25 bp, Homo sapien
tagatacggttattgttacaagctc

SEQ ID NO: 5397820 - DNA, 25 bp, Homo sapien
cttatgttgtgcttcatattttcag

SEQ ID NO: 5397821 - DNA, 25 bp, Homo sapien
tatgttgtgcttcatattttcagaa

SEQ ID NO: 5397822 - DNA, 25 bp, Homo sapien
attttcagaatacttttcaacagac

SEQ ID NO: 5397823 - DNA, 25 bp, Homo sapien
tttcagaatacttttcaacagacat

SEQ ID NO: 5397824 - DNA, 25 bp, Homo sapien
gcacagatacgccactgagtttgaa

SEQ ID NO: 5397825 - DNA, 25 bp, Homo sapien
gcaggattttatgctctgggtggac

SEQ ID NO: 5397826 - DNA, 25 bp, Homo sapien
tcttctacacgtcttgatcgcagga

SEQ ID NO: 5397827 - DNA, 25 bp, Homo sapien
gccttattagtaaagctgctgtgtc

SEQ ID NO: 5397828 - DNA, 25 bp, Homo sapien
agtgtcctctaagatttcttgtagc

SEQ ID NO: 5397829 - DNA, 25 bp, Homo sapien
aagacctagtgtcctctaagatttc

SEQ ID NO: 5397830 - DNA, 25 bp, Homo sapien
cctagtgtcctctaagatttcttgt

SEQ ID NO: 5397831 - DNA, 25 bp, Homo sapien
gacctagtgtcctctaagatttctt

SEQ ID NO: 5397832 - DNA, 25 bp, Homo sapien
gacagtatgcccttaagttcttttc

SEQ ID NO: 5397833 - DNA, 25 bp, Homo sapien
ccttattgcagtagttacaactttc

SEQ ID NO: 5397834 - DNA, 25 bp, Homo sapien
catcaactgtaggttttttggtagg

SEQ ID NO: 5397835 - DNA, 25 bp, Homo sapien
ttcggaattcctccgtataccagca

SEQ ID NO: 5397836 - DNA, 25 bp, Homo sapien
tgttatggtgacaaagataaacggc

SEQ ID NO: 5397837 - DNA, 25 bp, Homo sapien
gacagaaccaatcaaactggtgttg

SEQ ID NO: 5397838 - DNA, 25 bp, Homo sapien
ttaatgctaattgggaaaaagacag

SEQ ID NO: 5397839 - DNA, 25 bp, Homo sapien
taaacggcggcattgttttgctacc

SEQ ID NO: 5397840 - DNA, 25 bp, Homo sapien
tcacagggaaaatacgtaggtttgc

SEQ ID NO: 5397841 - DNA, 25 bp, Homo sapien
tcttattttccggagatggaagtca

SEQ ID NO: 5397842 - DNA, 25 bp, Homo sapien
tcacacagcgtaagttcacagggaa

SEQ ID NO: 5397843 - DNA, 25 bp, Homo sapien
gctgtgagggcaatatgtgtaatga

SEQ ID NO: 5397844 - DNA, 25 bp, Homo sapien
tgtcacacatcacaccccaaatatt

SEQ ID NO: 5397845 - DNA, 25 bp, Homo sapien
ttggttgcctcatatcaagtgtgta

SEQ ID NO: 5397846 - DNA, 25 bp, Homo sapien
ttaaggctcttgattgtcacacatc

SEQ ID NO: 5397847 - DNA, 25 bp, Homo sapien
tgttgttggtagatcaagtattttt

SEQ ID NO: 5397848 - DNA, 25 bp, Homo sapien
agtcttgctgcggatttttggaaca

SEQ ID NO: 5397849 - DNA, 25 bp, Homo sapien
cttttagacagtgccataacatttg

SEQ ID NO: 5397850 - DNA, 25 bp, Homo sapien
cttgctgcggatttttggaacattc

SEQ ID NO: 5397851 - DNA, 25 bp, Homo sapien
tgcttttagacagtgccataacatt

SEQ ID NO: 5397852 - DNA, 25 bp, Homo sapien
ggcattcatagatgaagtgacttgg

SEQ ID NO: 5397853 - DNA, 25 bp, Homo sapien
caccctagtgggtggcaaagcctgg

SEQ ID NO: 5397854 - DNA, 25 bp, Homo sapien
cttagagtcaccctagtgggtggca

SEQ ID NO: 5397855 - DNA, 25 bp, Homo sapien
tgattgaatggcttatttcagtaaa

SEQ ID NO: 5397856 - DNA, 25 bp, Homo sapien
tacccggaggtacatggctccagag

SEQ ID NO: 5397857 - DNA, 25 bp, Homo sapien
gaactggcttctcgctgtactgctg

SEQ ID NO: 5397858 - DNA, 25 bp, Homo sapien
taagtctgtaccagcataatgtctg

SEQ ID NO: 5397859 - DNA, 25 bp, Homo sapien
gctccagaggtattagagggtgcta

SEQ ID NO: 5397860 - DNA, 25 bp, Homo sapien
tctgaattgtaaggaatgggtacct

SEQ ID NO: 5397861 - DNA, 25 bp, Homo sapien
atacatgttgccatttgaggaggaa

SEQ ID NO: 5397862 - DNA, 25 bp, Homo sapien
gattgttccttatgtcctctgtgca

SEQ ID NO: 5397863 - DNA, 25 bp, Homo sapien
taaacagttgggaataggtgacaga

SEQ ID NO: 5397864 - DNA, 25 bp, Homo sapien
ttttgggcacaggttattgtactac

SEQ ID NO: 5397865 - DNA, 25 bp, Homo sapien
tcagatattcaaccagcagtacgtt

SEQ ID NO: 5397866 - DNA, 25 bp, Homo sapien
gcagtctcaacccatatcccatttg

SEQ ID NO: 5397867 - DNA, 25 bp, Homo sapien
tacctctcagaatattggtaagcag

SEQ ID NO: 5397868 - DNA, 25 bp, Homo sapien
tgaggatcagagtgcgaaccatggt

SEQ ID NO: 5397869 - DNA, 25 bp, Homo sapien
gaggcttacaccttgacaactgcaa

SEQ ID NO: 5397870 - DNA, 25 bp, Homo sapien
taaagtatgtgtgttggtcctgcca

SEQ ID NO: 5397871 - DNA, 25 bp, Homo sapien
cagaggcttgttggcattgtgtcac

SEQ ID NO: 5397872 - DNA, 25 bp, Homo sapien
attaggacattaacaggtattacgt

SEQ ID NO: 5397873 - DNA, 25 bp, Homo sapien
gatacagtaagtttggaccaaacag

SEQ ID NO: 5397874 - DNA, 25 bp, Homo sapien
tctgcaaaacgtgattcattaggac

SEQ ID NO: 5397875 - DNA, 25 bp, Homo sapien
gaccaaacaggtattcattccccag

SEQ ID NO: 5397876 - DNA, 25 bp, Homo sapien
ctttcacatgcacgagaatcagtca

SEQ ID NO: 5397877 - DNA, 25 bp, Homo sapien
catgcacgagaatcagtcattttaa

SEQ ID NO: 5397878 - DNA, 25 bp, Homo sapien
atgcacgagaatcagtcattttaac

SEQ ID NO: 5397879 - DNA, 25 bp, Homo sapien
tcacatgcacgagaatcagtcattt

SEQ ID NO: 5397880 - DNA, 25 bp, Homo sapien
tgcacaagcatagggacagtctgtc

SEQ ID NO: 5397881 - DNA, 25 bp, Homo sapien
ccaaaatgttacgtggtgccatgac

SEQ ID NO: 5397882 - DNA, 25 bp, Homo sapien
aaacctgggtctgggatagaatcca

SEQ ID NO: 5397883 - DNA, 25 bp, Homo sapien
cagaaatctctggtagtcacgtcac

SEQ ID NO: 5397884 - DNA, 25 bp, Homo sapien
gaaatgccaaagttgaagtcactgg

SEQ ID NO: 5397885 - DNA, 25 bp, Homo sapien
caagacacagccaagacagtagatg

SEQ ID NO: 5397886 - DNA, 25 bp, Homo sapien
aatagttttccgttctctacagaag

SEQ ID NO: 5397887 - DNA, 25 bp, Homo sapien
cttctgaacagctacttacaaagta

SEQ ID NO: 5397888 - DNA, 25 bp, Homo sapien
tcataaccagcttagtgaggatgtt

SEQ ID NO: 5397889 - DNA, 25 bp, Homo sapien
gcagtttcatcagctggtactctct

SEQ ID NO: 5397890 - DNA, 25 bp, Homo sapien
tattaattctaattgctgcaagtgt

SEQ ID NO: 5397891 - DNA, 25 bp, Homo sapien
taatttgagtattatccaaaagcag

SEQ ID NO: 5397892 - DNA, 25 bp, Homo sapien
acagttgggatatttctgcagagca

SEQ ID NO: 5397893 - DNA, 25 bp, Homo sapien
aacagttagcattttggtcagctgc

SEQ ID NO: 5397894 - DNA, 25 bp, Homo sapien
gtgtcagtgcacacttacttgtcca

SEQ ID NO: 5397895 - DNA, 25 bp, Homo sapien
tcagctgcagaacagagtactggga

SEQ ID NO: 5397896 - DNA, 25 bp, Homo sapien
tatattgttgaatgtaaacacggca

SEQ ID NO: 5397897 - DNA, 25 bp, Homo sapien
ttaagagctgaatagaactgtgcag

SEQ ID NO: 5397898 - DNA, 25 bp, Homo sapien
ttcagcaggctagtatggacatgga

SEQ ID NO: 5397899 - DNA, 25 bp, Homo sapien
ttcttctgatagagaaacagctcag

SEQ ID NO: 5397900 - DNA, 25 bp, Homo sapien
gatacactgaaatagattcctgagg

SEQ ID NO: 5397901 - DNA, 25 bp, Homo sapien
gagaatcgcttaacttgggaggcag

SEQ ID NO: 5397902 - DNA, 25 bp, Homo sapien
agaatcgcttaacttgggaggcaga

SEQ ID NO: 5397903 - DNA, 25 bp, Homo sapien
aattataaacggaatgtgctttcct

SEQ ID NO: 5397904 - DNA, 25 bp, Homo sapien
tataaacggaatgtgctttcctttg

SEQ ID NO: 5397905 - DNA, 25 bp, Homo sapien
taaacggaatgtgctttcctttgaa

SEQ ID NO: 5397906 - DNA, 25 bp, Homo sapien
acggaatgtgctttcctttgaacaa

SEQ ID NO: 5397907 - DNA, 25 bp, Homo sapien
tataagacagatttccaagactgat

SEQ ID NO: 5397908 - DNA, 25 bp, Homo sapien
agacagatttccaagactgatagac

SEQ ID NO: 5397909 - DNA, 25 bp, Homo sapien
ttataagacagatttccaagactga

SEQ ID NO: 5397910 - DNA, 25 bp, Homo sapien
taagacagatttccaagactgatag

SEQ ID NO: 5397911 - DNA, 25 bp, Homo sapien
ctttgcgtaggatttatctagagac

SEQ ID NO: 5397912 - DNA, 25 bp, Homo sapien
actttaaatcacacagggcctttgc

SEQ ID NO: 5397913 - DNA, 25 bp, Homo sapien
cacacagggcctttgcgtaggattt

SEQ ID NO: 5397914 - DNA, 25 bp, Homo sapien
agagacttcctaaactcctggaaat

SEQ ID NO: 5397915 - DNA, 25 bp, Homo sapien
gagtccatgctacacagttggcttg

SEQ ID NO: 5397916 - DNA, 25 bp, Homo sapien
ggcttgcttccattagatctacggc

SEQ ID NO: 5397917 - DNA, 25 bp, Homo sapien
gatctacggcagtcataaatgggtg

SEQ ID NO: 5397918 - DNA, 25 bp, Homo sapien
taaatgggtgcgatgctgttactcg

SEQ ID NO: 5397919 - DNA, 25 bp, Homo sapien
gtacttcttgcacacttctatcttc

SEQ ID NO: 5397920 - DNA, 25 bp, Homo sapien
gaccgcaggtttttgctgatattga

SEQ ID NO: 5397921 - DNA, 25 bp, Homo sapien
aatagcatgtgtaatgaccgcaggt

SEQ ID NO: 5397922 - DNA, 25 bp, Homo sapien
tgtaatgaccgcaggtttttgctga

SEQ ID NO: 5397923 - DNA, 25 bp, Homo sapien
aaataaaagctgaagttgctaatga

SEQ ID NO: 5397924 - DNA, 25 bp, Homo sapien
tatctaagactctcaagtctccagg

SEQ ID NO: 5397925 - DNA, 25 bp, Homo sapien
ttagataatataactggaggtgcca

SEQ ID NO: 5397926 - DNA, 25 bp, Homo sapien
tactgcctcttaaggcccaacaaaa

SEQ ID NO: 5397927 - DNA, 25 bp, Homo sapien
aactgtgatgttcttttgagataga

SEQ ID NO: 5397928 - DNA, 25 bp, Homo sapien
taaagcctcattaaagtttacttca

SEQ ID NO: 5397929 - DNA, 25 bp, Homo sapien
taaatcctaaagcttaactgtgatg

SEQ ID NO: 5397930 - DNA, 25 bp, Homo sapien
caaggaacatttagctttattgcct

SEQ ID NO: 5397931 - DNA, 25 bp, Homo sapien
ctctgcaggtagagataactgttct

SEQ ID NO: 5397932 - DNA, 25 bp, Homo sapien
ctggaaactctgcaggtagagataa

SEQ ID NO: 5397933 - DNA, 25 bp, Homo sapien
gcaaaaaccttgtctggaaactctg

SEQ ID NO: 5397934 - DNA, 25 bp, Homo sapien
tcagcaaaaaccttgtctggaaact

SEQ ID NO: 5397935 - DNA, 25 bp, Homo sapien
tatctgccggtgagaaaatcttgac

SEQ ID NO: 5397936 - DNA, 25 bp, Homo sapien
cattaagtgtatctgccggtgagaa

SEQ ID NO: 5397937 - DNA, 25 bp, Homo sapien
tgtatctgccggtgagaaaatcttg

SEQ ID NO: 5397938 - DNA, 25 bp, Homo sapien
gaattcattaagtgtatctgccggt

SEQ ID NO: 5397939 - DNA, 25 bp, Homo sapien
tatgagggatgtttatactaaagcc

SEQ ID NO: 5397940 - DNA, 25 bp, Homo sapien
ccatgtatcataagctctagagcac

SEQ ID NO: 5397941 - DNA, 25 bp, Homo sapien
gacagtcactctatagagaaacagc

SEQ ID NO: 5397942 - DNA, 25 bp, Homo sapien
tgcctgacacatctgccgagaatgg

SEQ ID NO: 5397943 - DNA, 25 bp, Homo sapien
tcattaatgggctaaggtaactact

SEQ ID NO: 5397944 - DNA, 25 bp, Homo sapien
gaagaagccactatctactgtcagt

SEQ ID NO: 5397945 - DNA, 25 bp, Homo sapien
tactgtcagtgcttggtagaatctt

SEQ ID NO: 5397946 - DNA, 25 bp, Homo sapien
aaatattggtgagatttaaccgcct

SEQ ID NO: 5397947 - DNA, 25 bp, Homo sapien
tctacatgtaagaccaataactgct

SEQ ID NO: 5397948 - DNA, 25 bp, Homo sapien
tgtcaaaaagattatagagaagtgt

SEQ ID NO: 5397949 - DNA, 25 bp, Homo sapien
cactgggcaactgctagttcggtca

SEQ ID NO: 5397950 - DNA, 25 bp, Homo sapien
caaattcatctaatatgaagatcac

SEQ ID NO: 5397951 - DNA, 25 bp, Homo sapien
gatgcatatacgttcattcaacaga

SEQ ID NO: 5397952 - DNA, 25 bp, Homo sapien
acagccccgactgctctcaagaagt

SEQ ID NO: 5397953 - DNA, 25 bp, Homo sapien
ctttgggtaggggatttactgatgc

SEQ ID NO: 5397954 - DNA, 25 bp, Homo sapien
cattctgatagcctactttgggtag

SEQ ID NO: 5397955 - DNA, 25 bp, Homo sapien
aatgaaaggttttcagcaaagcttc

SEQ ID NO: 5397956 - DNA, 25 bp, Homo sapien
gaaatgaaaggttttcagcaaagct

SEQ ID NO: 5397957 - DNA, 25 bp, Homo sapien
atgaaaggttttcagcaaagcttcc

SEQ ID NO: 5397958 - DNA, 25 bp, Homo sapien
aagaaatgaaaggttttcagcaaag

SEQ ID NO: 5397959 - DNA, 25 bp, Homo sapien
agtataggccactagcttcaacatc

SEQ ID NO: 5397960 - DNA, 25 bp, Homo sapien
taggccactagcttcaacatcacat

SEQ ID NO: 5397961 - DNA, 25 bp, Homo sapien
agccaaactgagcatacttaacaag

SEQ ID NO: 5397962 - DNA, 25 bp, Homo sapien
cagatcaactgggaaccaaaagcca

SEQ ID NO: 5397963 - DNA, 25 bp, Homo sapien
gatttcctttagggcgattttgtca

SEQ ID NO: 5397964 - DNA, 25 bp, Homo sapien
cctttagggcgattttgtcattgat

SEQ ID NO: 5397965 - DNA, 25 bp, Homo sapien
ccagatttaactgccttgtgatttc

SEQ ID NO: 5397966 - DNA, 25 bp, Homo sapien
actttatctccaactacattttcca

SEQ ID NO: 5397967 - DNA, 25 bp, Homo sapien
aacttagcaataaagacattcggta

SEQ ID NO: 5397968 - DNA, 25 bp, Homo sapien
caaaaaccagagtccttctgcgact

SEQ ID NO: 5397969 - DNA, 25 bp, Homo sapien
agacattcggtagaatcaaaaaaca

SEQ ID NO: 5397970 - DNA, 25 bp, Homo sapien
catatggtgtgctaagtaaaacatg

SEQ ID NO: 5397971 - DNA, 25 bp, Homo sapien
atttaagtgaacttgtaatacattt

SEQ ID NO: 5397972 - DNA, 25 bp, Homo sapien
catttaagtgaacttgtaatacatt

SEQ ID NO: 5397973 - DNA, 25 bp, Homo sapien
agttctttcaaagcatgatttatta

SEQ ID NO: 5397974 - DNA, 25 bp, Homo sapien
gttctttcaaagcatgatttattaa

SEQ ID NO: 5397975 - DNA, 25 bp, Homo sapien
gagttctttcaaagcatgatttatt

SEQ ID NO: 5397976 - DNA, 25 bp, Homo sapien
taaagcatagggaattccaggtcct

SEQ ID NO: 5397977 - DNA, 25 bp, Homo sapien
ggtttcaccaatatgcaactaggag

SEQ ID NO: 5397978 - DNA, 25 bp, Homo sapien
agctatgattgagccgctgggcgcc

SEQ ID NO: 5397979 - DNA, 25 bp, Homo sapien
tatgctttgcttggatcagcccact

SEQ ID NO: 5397980 - DNA, 25 bp, Homo sapien
tctaagggtcggtacagtgggtcac

SEQ ID NO: 5397981 - DNA, 25 bp, Homo sapien
tgcatgatatgatagttccctaacc

SEQ ID NO: 5397982 - DNA, 25 bp, Homo sapien
aaaaccctaccgtgcagtgttgatg

SEQ ID NO: 5397983 - DNA, 25 bp, Homo sapien
gtgagcatgcactgaaaaactgtgt

SEQ ID NO: 5397984 - DNA, 25 bp, Homo sapien
tgagaacagattttacacagactac

SEQ ID NO: 5397985 - DNA, 25 bp, Homo sapien
gggtccgataataaggacagagtta

SEQ ID NO: 5397986 - DNA, 25 bp, Homo sapien
tttcctgatcctcggggtccgataa

SEQ ID NO: 5397987 - DNA, 25 bp, Homo sapien
gtccgataataaggacagagttact

SEQ ID NO: 5397988 - DNA, 25 bp, Homo sapien
tcctcggggtccgataataaggaca

SEQ ID NO: 5397989 - DNA, 25 bp, Homo sapien
gagagcagttcttttcagcagctca

SEQ ID NO: 5397990 - DNA, 25 bp, Homo sapien
ggagagcagttcttttcagcagctc

SEQ ID NO: 5397991 - DNA, 25 bp, Homo sapien
tcttttcagcagctcacttaagtgt

SEQ ID NO: 5397992 - DNA, 25 bp, Homo sapien
agttcttttcagcagctcacttaag

SEQ ID NO: 5397993 - DNA, 25 bp, Homo sapien
ccaaataggttactatgtggactct

SEQ ID NO: 5397994 - DNA, 25 bp, Homo sapien
gcactccaaataggttactatgtgg

SEQ ID NO: 5397995 - DNA, 25 bp, Homo sapien
actatgtggactctgacgacaaaat

SEQ ID NO: 5397996 - DNA, 25 bp, Homo sapien
gactctgacgacaaaatctttcacg

SEQ ID NO: 5397997 - DNA, 25 bp, Homo sapien
actctgtgtgaattaagctgttact

SEQ ID NO: 5397998 - DNA, 25 bp, Homo sapien
ctctgtgtgaattaagctgttactc

SEQ ID NO: 5397999 - DNA, 25 bp, Homo sapien
ttactctttgatttacgactgctca

SEQ ID NO: 5398000 - DNA, 25 bp, Homo sapien
tactctttgatttacgactgctcat

SEQ ID NO: 5398001 - DNA, 25 bp, Homo sapien
aatatgtagtcgctcctcatcagca

SEQ ID NO: 5398002 - DNA, 25 bp, Homo sapien
ccaaaatatgtagtcgctcctcatc

SEQ ID NO: 5398003 - DNA, 25 bp, Homo sapien
tgtagtcgctcctcatcagcagatt

SEQ ID NO: 5398004 - DNA, 25 bp, Homo sapien
tatgtagtcgctcctcatcagcaga

SEQ ID NO: 5398005 - DNA, 25 bp, Homo sapien
tcttctctagaaatgttaacaggtc

SEQ ID NO: 5398006 - DNA, 25 bp, Homo sapien
cagacagcaagcaaatctgtgtcct

SEQ ID NO: 5398007 - DNA, 25 bp, Homo sapien
atgtgtaagccaggtagctaaggcc

SEQ ID NO: 5398008 - DNA, 25 bp, Homo sapien
gttaacaggtccttagctgagccag

SEQ ID NO: 5398009 - DNA, 25 bp, Homo sapien
tagagtcaacgaaacgatattctcc

SEQ ID NO: 5398010 - DNA, 25 bp, Homo sapien
gagacccttcagcttatgcaaaaag

SEQ ID NO: 5398011 - DNA, 25 bp, Homo sapien
taaactactgtagaaaggttgcagg

SEQ ID NO: 5398012 - DNA, 25 bp, Homo sapien
tatatggcttagaactttggtaccc

SEQ ID NO: 5398013 - DNA, 25 bp, Homo sapien
aaggtccgctgcttcactcccgaag

SEQ ID NO: 5398014 - DNA, 25 bp, Homo sapien
taaaagttggcatggaccaatcagc

SEQ ID NO: 5398015 - DNA, 25 bp, Homo sapien
ttcctcaagtgagcaagacacaaac

SEQ ID NO: 5398016 - DNA, 25 bp, Homo sapien
tcaagtgagcaagacacaaacccac

SEQ ID NO: 5398017 - DNA, 25 bp, Homo sapien
tccacctactgggttcaagcgattc

SEQ ID NO: 5398018 - DNA, 25 bp, Homo sapien
tgcccaggtgatctgcaacctccac

SEQ ID NO: 5398019 - DNA, 25 bp, Homo sapien
ggcttcaagagatctgcctgcctca

SEQ ID NO: 5398020 - DNA, 25 bp, Homo sapien
cctggcttcaagagatctgcctgcc

SEQ ID NO: 5398021 - DNA, 25 bp, Homo sapien
aagttagtaacagaagtcctagcca

SEQ ID NO: 5398022 - DNA, 25 bp, Homo sapien
gacagaaggatcatccctcaacatg

SEQ ID NO: 5398023 - DNA, 25 bp, Homo sapien
gataaagccatacacaacaaaccca

SEQ ID NO: 5398024 - DNA, 25 bp, Homo sapien
aaacccacagttagtatcagactga

SEQ ID NO: 5398025 - DNA, 25 bp, Homo sapien
aaatagcacgatagtggcataaaaa

SEQ ID NO: 5398026 - DNA, 25 bp, Homo sapien
aaaatagcacgatagtggcataaaa

SEQ ID NO: 5398027 - DNA, 25 bp, Homo sapien
aacagacatgtagaacaacagaaca

SEQ ID NO: 5398028 - DNA, 25 bp, Homo sapien
ccaaaatagcacgatagtggcataa

SEQ ID NO: 5398029 - DNA, 25 bp, Homo sapien
gaagatataacatgtagaatgggag

SEQ ID NO: 5398030 - DNA, 25 bp, Homo sapien
taagaatctcaaacgactcaatagg

SEQ ID NO: 5398031 - DNA, 25 bp, Homo sapien
cagtcacaacagagaacagtatgga

SEQ ID NO: 5398032 - DNA, 25 bp, Homo sapien
ttttatcgaaaaggcagtcaatatc

SEQ ID NO: 5398033 - DNA, 25 bp, Homo sapien
caaaccatacaccaagtaacttttg

SEQ ID NO: 5398034 - DNA, 25 bp, Homo sapien
accagaaacaaaccatacaccaagt

SEQ ID NO: 5398035 - DNA, 25 bp, Homo sapien
catacaccaagtaacttttgttctg

SEQ ID NO: 5398036 - DNA, 25 bp, Homo sapien
caccaagtaacttttgttctgagga

SEQ ID NO: 5398037 - DNA, 25 bp, Homo sapien
agttgctgaagaactcaacgtaaga

SEQ ID NO: 5398038 - DNA, 25 bp, Homo sapien
gcaatcattgaagcagattgatcct

SEQ ID NO: 5398039 - DNA, 25 bp, Homo sapien
tgcaaaagataccagagccttgagg

SEQ ID NO: 5398040 - DNA, 25 bp, Homo sapien
tacaattacatgagaagttgctgaa

SEQ ID NO: 5398041 - DNA, 25 bp, Homo sapien
ctctcgcataaaagcctgcatttac

SEQ ID NO: 5398042 - DNA, 25 bp, Homo sapien
ggaatcgcttcaccgaatcgcctgg

SEQ ID NO: 5398043 - DNA, 25 bp, Homo sapien
gggaaccaacgcctgcaggaatcgc

SEQ ID NO: 5398044 - DNA, 25 bp, Homo sapien
tgctagacttcacctgccgctgcgg

SEQ ID NO: 5398045 - DNA, 25 bp, Homo sapien
ctggccgcgtcctctgctagacttc

SEQ ID NO: 5398046 - DNA, 25 bp, Homo sapien
tgtcttccgggtcgctagcgcctcg

SEQ ID NO: 5398047 - DNA, 25 bp, Homo sapien
gctacaatgtcttccgggtcgctag

SEQ ID NO: 5398048 - DNA, 25 bp, Homo sapien
gctagcgcctcgacgccttctggga

SEQ ID NO: 5398049 - DNA, 25 bp, Homo sapien
ctagcgcctcgacgccttctgggaa

SEQ ID NO: 5398050 - DNA, 25 bp, Homo sapien
gacatctcactacacccaggagcag

SEQ ID NO: 5398051 - DNA, 25 bp, Homo sapien
gagacatctcactacacccaggagc

SEQ ID NO: 5398052 - DNA, 25 bp, Homo sapien
ctggagacatctcactacacccagg

SEQ ID NO: 5398053 - DNA, 25 bp, Homo sapien
ggagacatctcactacacccaggag

SEQ ID NO: 5398054 - DNA, 25 bp, Homo sapien
tgtattcaaaagagaatgtcctggg

SEQ ID NO: 5398055 - DNA, 25 bp, Homo sapien
caaatgatggtgagggacacattca

SEQ ID NO: 5398056 - DNA, 25 bp, Homo sapien
cttacttcaagtgcattaggctggt

SEQ ID NO: 5398057 - DNA, 25 bp, Homo sapien
ggaaaccagtcaacgtagtgtcata

SEQ ID NO: 5398058 - DNA, 25 bp, Homo sapien
gaatatcttagtgtgcatcacttgg

SEQ ID NO: 5398059 - DNA, 25 bp, Homo sapien
taagcctctttggacactagtttct

SEQ ID NO: 5398060 - DNA, 25 bp, Homo sapien
caaggaatgcccaaaatattaagag

SEQ ID NO: 5398061 - DNA, 25 bp, Homo sapien
gagagtgatttcatacagttagaag

SEQ ID NO: 5398062 - DNA, 25 bp, Homo sapien
ttttctcgcattctcaggtacagca

SEQ ID NO: 5398063 - DNA, 25 bp, Homo sapien
cacataacagttgatgaattctgcc

SEQ ID NO: 5398064 - DNA, 25 bp, Homo sapien
gatgaaggtacttcatcaggtgatc

SEQ ID NO: 5398065 - DNA, 25 bp, Homo sapien
tgccaatgcttgaagttgaaaattg

SEQ ID NO: 5398066 - DNA, 25 bp, Homo sapien
gctcttgaaggatcgttaaacacca

SEQ ID NO: 5398067 - DNA, 25 bp, Homo sapien
ggctgacgacactacagaatctgga

SEQ ID NO: 5398068 - DNA, 25 bp, Homo sapien
tggatcctcagcttcaattactgaa

SEQ ID NO: 5398069 - DNA, 25 bp, Homo sapien
aacaccagttcagcgggagttggag

SEQ ID NO: 5398070 - DNA, 25 bp, Homo sapien
caaataaagggatcgatctggtagc

SEQ ID NO: 5398071 - DNA, 25 bp, Homo sapien
gagttactacctgtacatctgaaaa

SEQ ID NO: 5398072 - DNA, 25 bp, Homo sapien
aaaaggacctaaccagtgttgctga

SEQ ID NO: 5398073 - DNA, 25 bp, Homo sapien
gatttagggcttcctgaggcaatgt

SEQ ID NO: 5398074 - DNA, 25 bp, Homo sapien
ggttagcagtataagtccctgaggt

SEQ ID NO: 5398075 - DNA, 25 bp, Homo sapien
tccccaagttagaaatatcatagtc

SEQ ID NO: 5398076 - DNA, 25 bp, Homo sapien
tcctaattcctaagtccgctcagtt

SEQ ID NO: 5398077 - DNA, 25 bp, Homo sapien
tagtcagcctatcaccaaatcgtat

SEQ ID NO: 5398078 - DNA, 25 bp, Homo sapien
gaccatgggtggcttaacatgccct

SEQ ID NO: 5398079 - DNA, 25 bp, Homo sapien
tgcgtattaaacatggcattccaga

SEQ ID NO: 5398080 - DNA, 25 bp, Homo sapien
tagtggccttatatgagcttggtca

SEQ ID NO: 5398081 - DNA, 25 bp, Homo sapien
gcattccagaagaacatagtggcct

SEQ ID NO: 5398082 - DNA, 25 bp, Homo sapien
ccctgttgaatctctagaagctttt

SEQ ID NO: 5398083 - DNA, 25 bp, Homo sapien
cgttgagccagaattcagtctaggt

SEQ ID NO: 5398084 - DNA, 25 bp, Homo sapien
gctgcaggatcgttttttagctctc

SEQ ID NO: 5398085 - DNA, 25 bp, Homo sapien
ttagagctagtgagacgttgagcca

SEQ ID NO: 5398086 - DNA, 25 bp, Homo sapien
cagggtggacgtgtaggttagttca

SEQ ID NO: 5398087 - DNA, 25 bp, Homo sapien
tggacgtgtaggttagttcaactct

SEQ ID NO: 5398088 - DNA, 25 bp, Homo sapien
ttcatgtaccagggtggacgtgtag

SEQ ID NO: 5398089 - DNA, 25 bp, Homo sapien
tgctttattgacacaattcctctcc

SEQ ID NO: 5398090 - DNA, 25 bp, Homo sapien
cagcatttgctgtatatggtaagtg

SEQ ID NO: 5398091 - DNA, 25 bp, Homo sapien
tccagcatttgctgtatatggtaag

SEQ ID NO: 5398092 - DNA, 25 bp, Homo sapien
ctgtatatggtaagtgttttctccc

SEQ ID NO: 5398093 - DNA, 25 bp, Homo sapien
tttgctgtatatggtaagtgttttc

SEQ ID NO: 5398094 - DNA, 25 bp, Homo sapien
tgactcctcatcaggggagacatgc

SEQ ID NO: 5398095 - DNA, 25 bp, Homo sapien
ttatgactcctcatcaggggagaca

SEQ ID NO: 5398096 - DNA, 25 bp, Homo sapien
gactcctcatcaggggagacatgcc

SEQ ID NO: 5398097 - DNA, 25 bp, Homo sapien
tcctcatcaggggagacatgcctgt

SEQ ID NO: 5398098 - DNA, 25 bp, Homo sapien
acaaaactggttatctgatgcttcc

SEQ ID NO: 5398099 - DNA, 25 bp, Homo sapien
ctgatgcttccttctggaattctgg

SEQ ID NO: 5398100 - DNA, 25 bp, Homo sapien
aagccacagcacctccaatctccag

SEQ ID NO: 5398101 - DNA, 25 bp, Homo sapien
gggaacaaaactggttatctgatgc

SEQ ID NO: 5398102 - DNA, 25 bp, Homo sapien
gaaaaatctttggtcatatagctgt

SEQ ID NO: 5398103 - DNA, 25 bp, Homo sapien
cagattgtgttgtgacagtggtctc

SEQ ID NO: 5398104 - DNA, 25 bp, Homo sapien
caaagatttcgaatctctttccaga

SEQ ID NO: 5398105 - DNA, 25 bp, Homo sapien
ttgttgtagccatcaccaaagattt

SEQ ID NO: 5398106 - DNA, 25 bp, Homo sapien
tgtctatactatcctttgcactgca

SEQ ID NO: 5398107 - DNA, 25 bp, Homo sapien
actctgctgctgtctatactatcct

SEQ ID NO: 5398108 - DNA, 25 bp, Homo sapien
gctgctgtctatactatcctttgca

SEQ ID NO: 5398109 - DNA, 25 bp, Homo sapien
ctccatccaaactgggccactctgc

SEQ ID NO: 5398110 - DNA, 25 bp, Homo sapien
cccttcttctggagcatcctcctct

SEQ ID NO: 5398111 - DNA, 25 bp, Homo sapien
ttcttcccttcttctggagcatcct

SEQ ID NO: 5398112 - DNA, 25 bp, Homo sapien
ttcccttcttctggagcatcctcct

SEQ ID NO: 5398113 - DNA, 25 bp, Homo sapien
tcttctggagcatcctcctcttcca

SEQ ID NO: 5398114 - DNA, 25 bp, Homo sapien
gtctgttattgctttataggaatgc

SEQ ID NO: 5398115 - DNA, 25 bp, Homo sapien
tgttattgctttataggaatgcttg

SEQ ID NO: 5398116 - DNA, 25 bp, Homo sapien
gttattgctttataggaatgcttgt

SEQ ID NO: 5398117 - DNA, 25 bp, Homo sapien
tttgtctgttattgctttataggaa

SEQ ID NO: 5398118 - DNA, 25 bp, Homo sapien
taacaactgttatgctacaggcacc

SEQ ID NO: 5398119 - DNA, 25 bp, Homo sapien
gtaatccacaaacagtcctactagg

SEQ ID NO: 5398120 - DNA, 25 bp, Homo sapien
tataactccaagctcaaagcttctg

SEQ ID NO: 5398121 - DNA, 25 bp, Homo sapien
tagaagggtccagtgatttatgcag

SEQ ID NO: 5398122 - DNA, 25 bp, Homo sapien
ctgtgtatttgcgttttctctgcct

SEQ ID NO: 5398123 - DNA, 25 bp, Homo sapien
tccttttcctacatcactgaggatg

SEQ ID NO: 5398124 - DNA, 25 bp, Homo sapien
tattttcacatgagggtacttctcc

SEQ ID NO: 5398125 - DNA, 25 bp, Homo sapien
ggatgataggatactgctgttcttc

SEQ ID NO: 5398126 - DNA, 25 bp, Homo sapien
gtcacataggctgaagtatgcatca

SEQ ID NO: 5398127 - DNA, 25 bp, Homo sapien
taatgtcataaatactggacagagc

SEQ ID NO: 5398128 - DNA, 25 bp, Homo sapien
cttgaggatttattaatgaggattc

SEQ ID NO: 5398129 - DNA, 25 bp, Homo sapien
ttaaagtcacataggctgaagtatg

SEQ ID NO: 5398130 - DNA, 25 bp, Homo sapien
aagaagactgtaagttctgattcag

SEQ ID NO: 5398131 - DNA, 25 bp, Homo sapien
tctaagaagactgtaagttctgatt

SEQ ID NO: 5398132 - DNA, 25 bp, Homo sapien
ctaagaagactgtaagttctgattc

SEQ ID NO: 5398133 - DNA, 25 bp, Homo sapien
gaagactgtaagttctgattcagtt

SEQ ID NO: 5398134 - DNA, 25 bp, Homo sapien
tttttaggatgaacctgaacagtga

SEQ ID NO: 5398135 - DNA, 25 bp, Homo sapien
ttatccagtaatttcatccatattt

SEQ ID NO: 5398136 - DNA, 25 bp, Homo sapien
tgaacagtgaaatcagcagtagttg

SEQ ID NO: 5398137 - DNA, 25 bp, Homo sapien
gaacctgaacagtgaaatcagcagt

SEQ ID NO: 5398138 - DNA, 25 bp, Homo sapien
atgtaggcaattcccgttggtagtc

SEQ ID NO: 5398139 - DNA, 25 bp, Homo sapien
gaaatgtaggcaattcccgttggta

SEQ ID NO: 5398140 - DNA, 25 bp, Homo sapien
ctggaaatgtaggcaattcccgttg

SEQ ID NO: 5398141 - DNA, 25 bp, Homo sapien
aaatgtaggcaattcccgttggtag

SEQ ID NO: 5398142 - DNA, 25 bp, Homo sapien
ctgtgtcagagaacttatcaatctt

SEQ ID NO: 5398143 - DNA, 25 bp, Homo sapien
aatctttgtactcgtctccttccag

SEQ ID NO: 5398144 - DNA, 25 bp, Homo sapien
ctttgaaagcaggaactgccgtttt

SEQ ID NO: 5398145 - DNA, 25 bp, Homo sapien
agccaccagccagtaagctctttga

SEQ ID NO: 5398146 - DNA, 25 bp, Homo sapien
gtggctggcaaagagttgtactcat

SEQ ID NO: 5398147 - DNA, 25 bp, Homo sapien
agtggctggcaaagagttgtactca

SEQ ID NO: 5398148 - DNA, 25 bp, Homo sapien
gggtgggtgggtgaagcgtatgcca

SEQ ID NO: 5398149 - DNA, 25 bp, Homo sapien
agcaatgggagggatcctctgcttt

SEQ ID NO: 5398150 - DNA, 25 bp, Homo sapien
tgggtgggtgaagcgtatgccagat

SEQ ID NO: 5398151 - DNA, 25 bp, Homo sapien
gggagggatcctctgctttagcatc

SEQ ID NO: 5398152 - DNA, 25 bp, Homo sapien
tgatgtctgggcatttaagggttag

SEQ ID NO: 5398153 - DNA, 25 bp, Homo sapien
cacacctgctattaatggactttga

SEQ ID NO: 5398154 - DNA, 25 bp, Homo sapien
tttattcagcttgatcacacctgct

SEQ ID NO: 5398155 - DNA, 25 bp, Homo sapien
ttactcgtagctgtccttcttggga

SEQ ID NO: 5398156 - DNA, 25 bp, Homo sapien
cattcgactcgagaaatactgtact

SEQ ID NO: 5398157 - DNA, 25 bp, Homo sapien
tctgccagagcaattattttataac

SEQ ID NO: 5398158 - DNA, 25 bp, Homo sapien
agaacagtgcaagaagtctgccaga

SEQ ID NO: 5398159 - DNA, 25 bp, Homo sapien
cacaattcagagtgcctagtatagt

SEQ ID NO: 5398160 - DNA, 25 bp, Homo sapien
ctgtgactcatcattcttatcatca

SEQ ID NO: 5398161 - DNA, 25 bp, Homo sapien
atcattcttatcatcaaaatacaac

SEQ ID NO: 5398162 - DNA, 25 bp, Homo sapien
cattcttatcatcaaaatacaacat

SEQ ID NO: 5398163 - DNA, 25 bp, Homo sapien
gtgactcatcattcttatcatcaaa

SEQ ID NO: 5398164 - DNA, 25 bp, Homo sapien
attggtcttcattttcataattttg

SEQ ID NO: 5398165 - DNA, 25 bp, Homo sapien
ttggtcttcattttcataattttgt

SEQ ID NO: 5398166 - DNA, 25 bp, Homo sapien
tggtcttcattttcataattttgtt

SEQ ID NO: 5398167 - DNA, 25 bp, Homo sapien
gattggtcttcattttcataatttt

SEQ ID NO: 5398168 - DNA, 25 bp, Homo sapien
ctcctcacgtggtgtggttgcataa

SEQ ID NO: 5398169 - DNA, 25 bp, Homo sapien
ggtcatcatctaatgctcctcacgt

SEQ ID NO: 5398170 - DNA, 25 bp, Homo sapien
gggtttagcctcaatgtcgacatct

SEQ ID NO: 5398171 - DNA, 25 bp, Homo sapien
gccaagcatgagctcacataggtca

SEQ ID NO: 5398172 - DNA, 25 bp, Homo sapien
taaacaaggaattgctgtatctctg

SEQ ID NO: 5398173 - DNA, 25 bp, Homo sapien
ctgggataaacaaggaattgctgta

SEQ ID NO: 5398174 - DNA, 25 bp, Homo sapien
gggataaacaaggaattgctgtatc

SEQ ID NO: 5398175 - DNA, 25 bp, Homo sapien
gataaacaaggaattgctgtatctc

SEQ ID NO: 5398176 - DNA, 25 bp, Homo sapien
tttggacactcaatgaagtttgctg

SEQ ID NO: 5398177 - DNA, 25 bp, Homo sapien
tgctgcctttggacactcaatgaag

SEQ ID NO: 5398178 - DNA, 25 bp, Homo sapien
ttaacatgccactgggttctgctgc

SEQ ID NO: 5398179 - DNA, 25 bp, Homo sapien
gtgactgcagcttccatgagtaacc

SEQ ID NO: 5398180 - DNA, 25 bp, Homo sapien
gtaaagctgtagtttcaccatattg

SEQ ID NO: 5398181 - DNA, 25 bp, Homo sapien
ttttgtaaagctgtagtttcaccat

SEQ ID NO: 5398182 - DNA, 25 bp, Homo sapien
tgatctcatctcactttgacctctg

SEQ ID NO: 5398183 - DNA, 25 bp, Homo sapien
gtcatgaactctgaggctcaaggga

SEQ ID NO: 5398184 - DNA, 25 bp, Homo sapien
cagtagattgtaatacatcacaata

SEQ ID NO: 5398185 - DNA, 25 bp, Homo sapien
ggttccttggaagtcttcttttgca

SEQ ID NO: 5398186 - DNA, 25 bp, Homo sapien
gcctatgtctagaacgatatttcca

SEQ ID NO: 5398187 - DNA, 25 bp, Homo sapien
agaacgatatttccaaggttattgg

SEQ ID NO: 5398188 - DNA, 25 bp, Homo sapien
ttattttaatattgagtcacatttc

SEQ ID NO: 5398189 - DNA, 25 bp, Homo sapien
aagtatatgccttatatgattgtga

SEQ ID NO: 5398190 - DNA, 25 bp, Homo sapien
aatgagcttggatatccatatataa

SEQ ID NO: 5398191 - DNA, 25 bp, Homo sapien
tggatcaaagactcagatatctaag

SEQ ID NO: 5398192 - DNA, 25 bp, Homo sapien
cagtttccacaactctagaacagaa

SEQ ID NO: 5398193 - DNA, 25 bp, Homo sapien
gcaagaagagaccatttccttctcc

SEQ ID NO: 5398194 - DNA, 25 bp, Homo sapien
caagagtcagcaaaggcaagaagag

SEQ ID NO: 5398195 - DNA, 25 bp, Homo sapien
ggacaagctgtctgtctaggcaaga

SEQ ID NO: 5398196 - DNA, 25 bp, Homo sapien
catgcaagaattggaatgaagagat

SEQ ID NO: 5398197 - DNA, 25 bp, Homo sapien
tacagcttcggaagtggtcggctcc

SEQ ID NO: 5398198 - DNA, 25 bp, Homo sapien
acctgggagcgccaagaatgtgctg

SEQ ID NO: 5398199 - DNA, 25 bp, Homo sapien
agataatgagctccgacttcctggg

SEQ ID NO: 5398200 - DNA, 25 bp, Homo sapien
aaggacttccaacggcggagggcat

SEQ ID NO: 5398201 - DNA, 25 bp, Homo sapien
agtcctagataggttgcttctttgg

SEQ ID NO: 5398202 - DNA, 25 bp, Homo sapien
tggcatcttggctgtttgagaaaga

SEQ ID NO: 5398203 - DNA, 25 bp, Homo sapien
gcagcaggtagtgacttaagccaga

SEQ ID NO: 5398204 - DNA, 25 bp, Homo sapien
ctgctgagagggacaaagagttcac

SEQ ID NO: 5398205 - DNA, 25 bp, Homo sapien
tcagaagaaaatgtcaaagggggtg

SEQ ID NO: 5398206 - DNA, 25 bp, Homo sapien
gaagaaaatgtcaaagggggtgaca

SEQ ID NO: 5398207 - DNA, 25 bp, Homo sapien
gagaagggtcagaagaaaatgtcaa

SEQ ID NO: 5398208 - DNA, 25 bp, Homo sapien
gaagggtcagaagaaaatgtcaaag

SEQ ID NO: 5398209 - DNA, 25 bp, Homo sapien
gggagggtccaaggacctccacagc

SEQ ID NO: 5398210 - DNA, 25 bp, Homo sapien
cagctgccgcagagataggttcagg

SEQ ID NO: 5398211 - DNA, 25 bp, Homo sapien
ttgaccctggcaatgacgagccccg

SEQ ID NO: 5398212 - DNA, 25 bp, Homo sapien
ctggcaatgacgagccccggatgaa

SEQ ID NO: 5398213 - DNA, 25 bp, Homo sapien
gaatgactgattgtaatccatggag

SEQ ID NO: 5398214 - DNA, 25 bp, Homo sapien
gatgggtagtgaatgactgattgta

SEQ ID NO: 5398215 - DNA, 25 bp, Homo sapien
ggtagtgaatgactgattgtaatcc

SEQ ID NO: 5398216 - DNA, 25 bp, Homo sapien
tgctgaggagatgggtagtgaatga

SEQ ID NO: 5398217 - DNA, 25 bp, Homo sapien
ggatgtttgcacttcaggtgttcat

SEQ ID NO: 5398218 - DNA, 25 bp, Homo sapien
tgacaacatgtgacaggtgtgtttc

SEQ ID NO: 5398219 - DNA, 25 bp, Homo sapien
atttggatgtttgcacttcaggtgt

SEQ ID NO: 5398220 - DNA, 25 bp, Homo sapien
gaagcttgcagtttgacaacatgtg

SEQ ID NO: 5398221 - DNA, 25 bp, Homo sapien
gcagcaggagtaggataagcactgc

SEQ ID NO: 5398222 - DNA, 25 bp, Homo sapien
agtaggataagcactgctctcagca

SEQ ID NO: 5398223 - DNA, 25 bp, Homo sapien
tgtggctaggatatgtggcttttcc

SEQ ID NO: 5398224 - DNA, 25 bp, Homo sapien
tcttcctgtggctaggatatgtggc

SEQ ID NO: 5398225 - DNA, 25 bp, Homo sapien
tggagtatgggaagaagttaccaac

SEQ ID NO: 5398226 - DNA, 25 bp, Homo sapien
gaagttaccaacagacacagtcaca

SEQ ID NO: 5398227 - DNA, 25 bp, Homo sapien
agctgagctctctgaagcttatagc

SEQ ID NO: 5398228 - DNA, 25 bp, Homo sapien
tgagctctctgaagcttatagcctt

SEQ ID NO: 5398229 - DNA, 25 bp, Homo sapien
ctaaaaagcgttcatattggcattc

SEQ ID NO: 5398230 - DNA, 25 bp, Homo sapien
tttatgatggtattgtgtgatcctg

SEQ ID NO: 5398231 - DNA, 25 bp, Homo sapien
ctttttcaagcaccaggtagtattt

SEQ ID NO: 5398232 - DNA, 25 bp, Homo sapien
tttcaagcaccaggtagtatttcct

SEQ ID NO: 5398233 - DNA, 25 bp, Homo sapien
ttttcaagcaccaggtagtatttcc

SEQ ID NO: 5398234 - DNA, 25 bp, Homo sapien
tttttcaagcaccaggtagtatttc

SEQ ID NO: 5398235 - DNA, 25 bp, Homo sapien
tttgcaaatccagttgcttctttaa

SEQ ID NO: 5398236 - DNA, 25 bp, Homo sapien
tgcaaatccagttgcttctttaaag

SEQ ID NO: 5398237 - DNA, 25 bp, Homo sapien
aatttgcaaatccagttgcttcttt

SEQ ID NO: 5398238 - DNA, 25 bp, Homo sapien
tcaaatttgcaaatccagttgcttc

SEQ ID NO: 5398239 - DNA, 25 bp, Homo sapien
ctctaatgagagtagcaggataatg

SEQ ID NO: 5398240 - DNA, 25 bp, Homo sapien
caccttccatcaaaaggatctgctc

SEQ ID NO: 5398241 - DNA, 25 bp, Homo sapien
tgctctaatgagagtagcaggataa

SEQ ID NO: 5398242 - DNA, 25 bp, Homo sapien
catcaaaaggatctgctctaatgag

SEQ ID NO: 5398243 - DNA, 25 bp, Homo sapien
gaaaatccacactcaacataagcag

SEQ ID NO: 5398244 - DNA, 25 bp, Homo sapien
gatgcaggaaaatccacactcaaca

SEQ ID NO: 5398245 - DNA, 25 bp, Homo sapien
caacataagcagtgtgctctttgtc

SEQ ID NO: 5398246 - DNA, 25 bp, Homo sapien
ggtgtggatgcaggaaaatccacac

SEQ ID NO: 5398247 - DNA, 25 bp, Homo sapien
taggctctttcgtattggcacttgg

SEQ ID NO: 5398248 - DNA, 25 bp, Homo sapien
ttaggctctttcgtattggcacttg

SEQ ID NO: 5398249 - DNA, 25 bp, Homo sapien
attaggctctttcgtattggcactt

SEQ ID NO: 5398250 - DNA, 25 bp, Homo sapien
cattaggctctttcgtattggcact

SEQ ID NO: 5398251 - DNA, 25 bp, Homo sapien
tccctatgtctcaaagatgcagagc

SEQ ID NO: 5398252 - DNA, 25 bp, Homo sapien
ttcccacggtggcaaatgcagaggt

SEQ ID NO: 5398253 - DNA, 25 bp, Homo sapien
gagatgcagttcacatactaaccca

SEQ ID NO: 5398254 - DNA, 25 bp, Homo sapien
caggagccaattagaaagaacgtga

SEQ ID NO: 5398255 - DNA, 25 bp, Homo sapien
cagctgtaccgaagtttgggtgaca

SEQ ID NO: 5398256 - DNA, 25 bp, Homo sapien
gcatctggcagcctcaaaccatgaa

SEQ ID NO: 5398257 - DNA, 25 bp, Homo sapien
catccactaaacagctgtaccgaag

SEQ ID NO: 5398258 - DNA, 25 bp, Homo sapien
cctaagttcacttgttgcatctggc

SEQ ID NO: 5398259 - DNA, 25 bp, Homo sapien
tcctccgaacggactgatgggactg

SEQ ID NO: 5398260 - DNA, 25 bp, Homo sapien
tggagagctctttcggacaggtacg

SEQ ID NO: 5398261 - DNA, 25 bp, Homo sapien
tgcgcctcggaggatgcgaattagc

SEQ ID NO: 5398262 - DNA, 25 bp, Homo sapien
gcgaattagcttgcgcacagggcgc

SEQ ID NO: 5398263 - DNA, 25 bp, Homo sapien
acacacgcgctgctcggcgcagccg

SEQ ID NO: 5398264 - DNA, 25 bp, Homo sapien
gcagccgtctttgcccggcgccttc

SEQ ID NO: 5398265 - DNA, 25 bp, Homo sapien
ttcccgctcccggacttctgcacac

SEQ ID NO: 5398266 - DNA, 25 bp, Homo sapien
gcgggcgaacttgcgcacctggcac

SEQ ID NO: 5398267 - DNA, 25 bp, Homo sapien
gctcgccgccgctgtggtaatgtcc

SEQ ID NO: 5398268 - DNA, 25 bp, Homo sapien
tcgccgccgctgtggtaatgtccgc

SEQ ID NO: 5398269 - DNA, 25 bp, Homo sapien
ccgccgctgtggtaatgtccgccat

SEQ ID NO: 5398270 - DNA, 25 bp, Homo sapien
gggggcgcgctctcgcgcgggctgc

SEQ ID NO: 5398271 - DNA, 25 bp, Homo sapien
cagcgctgcttacgctgccgtaagg

SEQ ID NO: 5398272 - DNA, 25 bp, Homo sapien
cagcaatgtaatcatcctggctccc

SEQ ID NO: 5398273 - DNA, 25 bp, Homo sapien
cgtggtattatttggctaggcaaga

SEQ ID NO: 5398274 - DNA, 25 bp, Homo sapien
gctggccgctcttggcgtacggtct

SEQ ID NO: 5398275 - DNA, 25 bp, Homo sapien
gcagaaccgcttcttacagggttaa

SEQ ID NO: 5398276 - DNA, 25 bp, Homo sapien
cagggttaacactgtggaggaagat

SEQ ID NO: 5398277 - DNA, 25 bp, Homo sapien
tcttacagggttaacactgtggagg

SEQ ID NO: 5398278 - DNA, 25 bp, Homo sapien
catgcagaaccgcttcttacagggt

SEQ ID NO: 5398279 - DNA, 25 bp, Homo sapien
tttaaatgggctaaggacgtgtctc

SEQ ID NO: 5398280 - DNA, 25 bp, Homo sapien
gctaatttggtgaagttgttggaac

SEQ ID NO: 5398281 - DNA, 25 bp, Homo sapien
tgatttaggttccaatcctggcctc

SEQ ID NO: 5398282 - DNA, 25 bp, Homo sapien
gccacttgccttatgggtgaggtaa

SEQ ID NO: 5398283 - DNA, 25 bp, Homo sapien
cttctacattccaccagatggtcag

SEQ ID NO: 5398284 - DNA, 25 bp, Homo sapien
tgttctcagtggaccccaggtatcc

SEQ ID NO: 5398285 - DNA, 25 bp, Homo sapien
caaagtataccagtccatcaggcag

SEQ ID NO: 5398286 - DNA, 25 bp, Homo sapien
tgcaggttctctggtgctacacaaa

SEQ ID NO: 5398287 - DNA, 25 bp, Homo sapien
caggaacatcatttacagcgagcaa

SEQ ID NO: 5398288 - DNA, 25 bp, Homo sapien
ggcatgacacgatttaccttccaaa

SEQ ID NO: 5398289 - DNA, 25 bp, Homo sapien
taaggtgttatcagtatgagccacg

SEQ ID NO: 5398290 - DNA, 25 bp, Homo sapien
gcagagagcaacgtcaactattaca

SEQ ID NO: 5398291 - DNA, 25 bp, Homo sapien
cctgtgtccagtgcgtactttcgtt

SEQ ID NO: 5398292 - DNA, 25 bp, Homo sapien
tgacgtctctcagcattgttcttgg

SEQ ID NO: 5398293 - DNA, 25 bp, Homo sapien
gcctttttctgacgtctctcagcat

SEQ ID NO: 5398294 - DNA, 25 bp, Homo sapien
tactttcgttgtggcactgaccacc

SEQ ID NO: 5398295 - DNA, 25 bp, Homo sapien
tgtataccactaggtttttcagcat

SEQ ID NO: 5398296 - DNA, 25 bp, Homo sapien
acataaagtggacctgtgtatacca

SEQ ID NO: 5398297 - DNA, 25 bp, Homo sapien
caacataaagtggacctgtgtatac

SEQ ID NO: 5398298 - DNA, 25 bp, Homo sapien
cctgtgtataccactaggtttttca

SEQ ID NO: 5398299 - DNA, 25 bp, Homo sapien
gctggcctgacatccaacttcagtc

SEQ ID NO: 5398300 - DNA, 25 bp, Homo sapien
ctggcctgacatccaacttcagtct

SEQ ID NO: 5398301 - DNA, 25 bp, Homo sapien
ggcctgacatccaacttcagtctca

SEQ ID NO: 5398302 - DNA, 25 bp, Homo sapien
gcctgacatccaacttcagtctcat

SEQ ID NO: 5398303 - DNA, 25 bp, Homo sapien
tttagcaggagaaagctatctgggt

SEQ ID NO: 5398304 - DNA, 25 bp, Homo sapien
tactgctcggttaacttcactacag

SEQ ID NO: 5398305 - DNA, 25 bp, Homo sapien
tggttgactgacctatgaaactaac

SEQ ID NO: 5398306 - DNA, 25 bp, Homo sapien
tgaaactaacccactatttgtaaga

SEQ ID NO: 5398307 - DNA, 25 bp, Homo sapien
tatagatggatttactttaggcgtt

SEQ ID NO: 5398308 - DNA, 25 bp, Homo sapien
tgaatctattggcttaaactatggt

SEQ ID NO: 5398309 - DNA, 25 bp, Homo sapien
acacttttaacacagttggtcgcag

SEQ ID NO: 5398310 - DNA, 25 bp, Homo sapien
ctacatctgaggatacatagtatct

SEQ ID NO: 5398311 - DNA, 25 bp, Homo sapien
tatcattgcactgggtggatcctgc

SEQ ID NO: 5398312 - DNA, 25 bp, Homo sapien
gaaaagatgtgctcctctacctcct

SEQ ID NO: 5398313 - DNA, 25 bp, Homo sapien
cagaaaagatgtgctcctctacctc

SEQ ID NO: 5398314 - DNA, 25 bp, Homo sapien
ttgcactgggtggatcctgcttcca

SEQ ID NO: 5398315 - DNA, 25 bp, Homo sapien
cagtggttgggtacaaagaatggat

SEQ ID NO: 5398316 - DNA, 25 bp, Homo sapien
cagagattttcagtggttgggtaca

SEQ ID NO: 5398317 - DNA, 25 bp, Homo sapien
ctgcttctgcctgaataattggaag

SEQ ID NO: 5398318 - DNA, 25 bp, Homo sapien
gatataagaaggtacttggctgtca

SEQ ID NO: 5398319 - DNA, 25 bp, Homo sapien
gagtagatggaacaagctcctattg

SEQ ID NO: 5398320 - DNA, 25 bp, Homo sapien
atatattatgcccaaatagaggaca

SEQ ID NO: 5398321 - DNA, 25 bp, Homo sapien
ggaacaagctcctattgtatctccc

SEQ ID NO: 5398322 - DNA, 25 bp, Homo sapien
ccaaatagaggacacatcagatatt

SEQ ID NO: 5398323 - DNA, 25 bp, Homo sapien
tcttaggtagttcactgctggatgg

SEQ ID NO: 5398324 - DNA, 25 bp, Homo sapien
agaaggcagctggtaaggacatgta

SEQ ID NO: 5398325 - DNA, 25 bp, Homo sapien
ttcacaagaaggcagctggtaagga

SEQ ID NO: 5398326 - DNA, 25 bp, Homo sapien
cagggtagaagctcgtcttaggtag

SEQ ID NO: 5398327 - DNA, 25 bp, Homo sapien
gccttttctggtcacggcagcacat

SEQ ID NO: 5398328 - DNA, 25 bp, Homo sapien
gctcccatcatgtgactgccttttc

SEQ ID NO: 5398329 - DNA, 25 bp, Homo sapien
gacagctcccatcatgtgactgcct

SEQ ID NO: 5398330 - DNA, 25 bp, Homo sapien
acattgggcatggttcttcatgacg

SEQ ID NO: 5398331 - DNA, 25 bp, Homo sapien
ggtgctcatgcaagtgaccctcact

SEQ ID NO: 5398332 - DNA, 25 bp, Homo sapien
acaggcgcgggaacaacaactactt

SEQ ID NO: 5398333 - DNA, 25 bp, Homo sapien
tgtctataacccgtgaaccctcagg

SEQ ID NO: 5398334 - DNA, 25 bp, Homo sapien
cgagtgtaaaatgacgcacattgcc

SEQ ID NO: 5398335 - DNA, 25 bp, Homo sapien
cagttttttgcaaagtgttcctcaa

SEQ ID NO: 5398336 - DNA, 25 bp, Homo sapien
gttttttgcaaagtgttcctcaagc

SEQ ID NO: 5398337 - DNA, 25 bp, Homo sapien
tggtcttgcagttttttgcaaagtg

SEQ ID NO: 5398338 - DNA, 25 bp, Homo sapien
tttttgcaaagtgttcctcaagcat

SEQ ID NO: 5398339 - DNA, 25 bp, Homo sapien
cagggaagatctaattgcaatgaac

SEQ ID NO: 5398340 - DNA, 25 bp, Homo sapien
gattattatgtgcttcagtgagtct

SEQ ID NO: 5398341 - DNA, 25 bp, Homo sapien
tcctatttggagttcgttaagcatc

SEQ ID NO: 5398342 - DNA, 25 bp, Homo sapien
gatatgggattcttaattgacaggc

SEQ ID NO: 5398343 - DNA, 25 bp, Homo sapien
gctcttggttggagttcatttgtcc

SEQ ID NO: 5398344 - DNA, 25 bp, Homo sapien
tgctgaacacgattttgctcttggt

SEQ ID NO: 5398345 - DNA, 25 bp, Homo sapien
tcatttgtccaacagcggcacctga

SEQ ID NO: 5398346 - DNA, 25 bp, Homo sapien
tgagaccatcggagtccagaagtaa

SEQ ID NO: 5398347 - DNA, 25 bp, Homo sapien
ccctcagatggaggaccaggtgcag

SEQ ID NO: 5398348 - DNA, 25 bp, Homo sapien
cagatggaggaccaggtgcagggct

SEQ ID NO: 5398349 - DNA, 25 bp, Homo sapien
cctcagatggaggaccaggtgcagg

SEQ ID NO: 5398350 - DNA, 25 bp, Homo sapien
atggaggaccaggtgcagggctgac

SEQ ID NO: 5398351 - DNA, 25 bp, Homo sapien
ggggggatgccctctttaacatgga

SEQ ID NO: 5398352 - DNA, 25 bp, Homo sapien
aatgttgtagtcacaaacagtgcag

SEQ ID NO: 5398353 - DNA, 25 bp, Homo sapien
agtgcagccatcttctaactgcttg

SEQ ID NO: 5398354 - DNA, 25 bp, Homo sapien
tggaggatgtcacttggctccacct

SEQ ID NO: 5398355 - DNA, 25 bp, Homo sapien
tggaatgcctccagacgctcgccat

SEQ ID NO: 5398356 - DNA, 25 bp, Homo sapien
gatcaccaatcacattcagccactg

SEQ ID NO: 5398357 - DNA, 25 bp, Homo sapien
gacgctcgccattcaacaaggccat

SEQ ID NO: 5398358 - DNA, 25 bp, Homo sapien
ctcttggaggatgcgaggaagctgc

SEQ ID NO: 5398359 - DNA, 25 bp, Homo sapien
ttaacaactggcgatcaatttatta

SEQ ID NO: 5398360 - DNA, 25 bp, Homo sapien
tttttaacaactggcgatcaattta

SEQ ID NO: 5398361 - DNA, 25 bp, Homo sapien
aacaactggcgatcaatttattaaa

SEQ ID NO: 5398362 - DNA, 25 bp, Homo sapien
ttttaacaactggcgatcaatttat

SEQ ID NO: 5398363 - DNA, 25 bp, Homo sapien
taagcatctccaatgatgacttcca

SEQ ID NO: 5398364 - DNA, 25 bp, Homo sapien
gggctgtgcaagtcaatgagttgct

SEQ ID NO: 5398365 - DNA, 25 bp, Homo sapien
tggctccatactgatggaagtaatc

SEQ ID NO: 5398366 - DNA, 25 bp, Homo sapien
tgcttaatctcagaagggctgtgca

SEQ ID NO: 5398367 - DNA, 25 bp, Homo sapien
gcgattctcgaagtcttagtaggca

SEQ ID NO: 5398368 - DNA, 25 bp, Homo sapien
tcttgtagcgattctcgaagtctta

SEQ ID NO: 5398369 - DNA, 25 bp, Homo sapien
tctcgaagtcttagtaggcatttga

SEQ ID NO: 5398370 - DNA, 25 bp, Homo sapien
gaagtcttagtaggcatttgaactg

SEQ ID NO: 5398371 - DNA, 25 bp, Homo sapien
ttccagtatctttaaaagccacagc

SEQ ID NO: 5398372 - DNA, 25 bp, Homo sapien
tggctcataaacagtgattcgaatt

SEQ ID NO: 5398373 - DNA, 25 bp, Homo sapien
ctgtggctcataaacagtgattcga

SEQ ID NO: 5398374 - DNA, 25 bp, Homo sapien
gccacagctgctgcgtggcttcctg

SEQ ID NO: 5398375 - DNA, 25 bp, Homo sapien
tctaaataccacaaataggagaaaa

SEQ ID NO: 5398376 - DNA, 25 bp, Homo sapien
gattctaaataccacaaataggaga

SEQ ID NO: 5398377 - DNA, 25 bp, Homo sapien
taggattctaaataccacaaatagg

SEQ ID NO: 5398378 - DNA, 25 bp, Homo sapien
ttcaaccttcataaagcgtaaagtg

SEQ ID NO: 5398379 - DNA, 25 bp, Homo sapien
cttcaggaacactgagagaatgtaa

SEQ ID NO: 5398380 - DNA, 25 bp, Homo sapien
tcttcaggaacactgagagaatgta

SEQ ID NO: 5398381 - DNA, 25 bp, Homo sapien
gaaactttagccaatgtgccaccat

SEQ ID NO: 5398382 - DNA, 25 bp, Homo sapien
gttttgtctttggaatccaatacat

SEQ ID NO: 5398383 - DNA, 25 bp, Homo sapien
aaagaaactttagccaatgtgccac

SEQ ID NO: 5398384 - DNA, 25 bp, Homo sapien
ttctccaaagaaactttagccaatg

SEQ ID NO: 5398385 - DNA, 25 bp, Homo sapien
cgggaggtctgagccgggcgaggct

SEQ ID NO: 5398386 - DNA, 25 bp, Homo sapien
ggcgggtctcaaggcggcagagcgc

SEQ ID NO: 5398387 - DNA, 25 bp, Homo sapien
gggcgggtctcaaggcggcagagcg

SEQ ID NO: 5398388 - DNA, 25 bp, Homo sapien
gagcgcgcaggagcccgggaggtct

SEQ ID NO: 5398389 - DNA, 25 bp, Homo sapien
caaacgctgtgtggatgggcgatca

SEQ ID NO: 5398390 - DNA, 25 bp, Homo sapien
tatttggtttacagctctcagccag

SEQ ID NO: 5398391 - DNA, 25 bp, Homo sapien
tgggcgatcattctgcgagctgacc

SEQ ID NO: 5398392 - DNA, 25 bp, Homo sapien
cgagctgacctatgagggcaggaaa

SEQ ID NO: 5398393 - DNA, 25 bp, Homo sapien
taaagatgagtgcttcctcctgagg

SEQ ID NO: 5398394 - DNA, 25 bp, Homo sapien
tatgcaatgagtagaatggtcccaa

SEQ ID NO: 5398395 - DNA, 25 bp, Homo sapien
cattagctgctaaaagtcctggtga

SEQ ID NO: 5398396 - DNA, 25 bp, Homo sapien
tcaattcagttggagccggctgaca

SEQ ID NO: 5398397 - DNA, 25 bp, Homo sapien
gcgctgattacctcctatgtctcct

SEQ ID NO: 5398398 - DNA, 25 bp, Homo sapien
tagctttggccccacaaattagtgc

SEQ ID NO: 5398399 - DNA, 25 bp, Homo sapien
gtgaccttcctcatgtcaacattag

SEQ ID NO: 5398400 - DNA, 25 bp, Homo sapien
gaaaatgctcaataggcgctgatta

SEQ ID NO: 5398401 - DNA, 25 bp, Homo sapien
ccagataaggcccagtagtgcttac

SEQ ID NO: 5398402 - DNA, 25 bp, Homo sapien
gaagattaggctgctcaatgcccat

SEQ ID NO: 5398403 - DNA, 25 bp, Homo sapien
tgcagacccttcagaggttcccctg

SEQ ID NO: 5398404 - DNA, 25 bp, Homo sapien
tctacactgttgtccggctgattaa

SEQ ID NO: 5398405 - DNA, 25 bp, Homo sapien
agaggccaagactgtagtcttagag

SEQ ID NO: 5398406 - DNA, 25 bp, Homo sapien
gaggccaagactgtagtcttagaga

SEQ ID NO: 5398407 - DNA, 25 bp, Homo sapien
aagactgtagtcttagagaaaaata

SEQ ID NO: 5398408 - DNA, 25 bp, Homo sapien
actgtagtcttagagaaaaatagga

SEQ ID NO: 5398409 - DNA, 25 bp, Homo sapien
cattgaatggcctgtgatatcttct

SEQ ID NO: 5398410 - DNA, 25 bp, Homo sapien
gctcacattgaatggcctgtgatat

SEQ ID NO: 5398411 - DNA, 25 bp, Homo sapien
tggcctgtgatatcttctgggcaat

SEQ ID NO: 5398412 - DNA, 25 bp, Homo sapien
cttggtgctcacattgaatggcctg

SEQ ID NO: 5398413 - DNA, 25 bp, Homo sapien
tgtgtctaggtgtattgcatattac

SEQ ID NO: 5398414 - DNA, 25 bp, Homo sapien
aagtgtgtctaggtgtattgcatat

SEQ ID NO: 5398415 - DNA, 25 bp, Homo sapien
gtgtgtctaggtgtattgcatatta

SEQ ID NO: 5398416 - DNA, 25 bp, Homo sapien
ttaagtgtgtctaggtgtattgcat

SEQ ID NO: 5398417 - DNA, 25 bp, Homo sapien
aacgctggaaaatacgtccacagag

SEQ ID NO: 5398418 - DNA, 25 bp, Homo sapien
ttttccgccagtgcatacccatcct

SEQ ID NO: 5398419 - DNA, 25 bp, Homo sapien
cagtgcatacccatccttgatgtga

SEQ ID NO: 5398420 - DNA, 25 bp, Homo sapien
ccttgatgtgaactgaacgctggaa

SEQ ID NO: 5398421 - DNA, 25 bp, Homo sapien
gtagggtctggtttcctgggatggc

SEQ ID NO: 5398422 - DNA, 25 bp, Homo sapien
tctgtgacaggctgacctctgtagg

SEQ ID NO: 5398423 - DNA, 25 bp, Homo sapien
tgaggggataagttcagctggctcc

SEQ ID NO: 5398424 - DNA, 25 bp, Homo sapien
gcaggatcccgagtgaggctgtcag

SEQ ID NO: 5398425 - DNA, 25 bp, Homo sapien
gaccccgcgggtccccgctgagcac

SEQ ID NO: 5398426 - DNA, 25 bp, Homo sapien
gctgagcaccgcagcaattaagtac

SEQ ID NO: 5398427 - DNA, 25 bp, Homo sapien
cccgctgagcaccgcagcaattaag

SEQ ID NO: 5398428 - DNA, 25 bp, Homo sapien
gcagcaagggctgcgaccccgcggg

SEQ ID NO: 5398429 - DNA, 25 bp, Homo sapien
tcaccattctgtcgctaacgctagg

SEQ ID NO: 5398430 - DNA, 25 bp, Homo sapien
ggaaaccgtctttgtcgctcacagg

SEQ ID NO: 5398431 - DNA, 25 bp, Homo sapien
gagcgacgccgtgatgcaaatctgc

SEQ ID NO: 5398432 - DNA, 25 bp, Homo sapien
ttccaatttccaggcgaggagcgac

SEQ ID NO: 5398433 - DNA, 25 bp, Homo sapien
gatccgtttcacttagatgatccgg

SEQ ID NO: 5398434 - DNA, 25 bp, Homo sapien
gatgatccggcactatgtttgactg

SEQ ID NO: 5398435 - DNA, 25 bp, Homo sapien
ggcactatgtttgactgcttctggt

SEQ ID NO: 5398436 - DNA, 25 bp, Homo sapien
tagcagcacccatggggatccgttt

SEQ ID NO: 5398437 - DNA, 25 bp, Homo sapien
tcttcatagagaatagctcatgaac

SEQ ID NO: 5398438 - DNA, 25 bp, Homo sapien
ggacttgtgttggaggattcttcat

SEQ ID NO: 5398439 - DNA, 25 bp, Homo sapien
tagctcatgaacattcgttgctgct

SEQ ID NO: 5398440 - DNA, 25 bp, Homo sapien
tgtgttggaggattcttcatagaga

SEQ ID NO: 5398441 - DNA, 25 bp, Homo sapien
ctgtcctgtgaagcttctttaatta

SEQ ID NO: 5398442 - DNA, 25 bp, Homo sapien
ctgttttggtccctctttgctgctg

SEQ ID NO: 5398443 - DNA, 25 bp, Homo sapien
tgctgtcctgtgaagcttctttaat

SEQ ID NO: 5398444 - DNA, 25 bp, Homo sapien
gtcctgtgaagcttctttaattaag

SEQ ID NO: 5398445 - DNA, 25 bp, Homo sapien
gccagcctttgtggccgaggtggcc

SEQ ID NO: 5398446 - DNA, 25 bp, Homo sapien
ggaggtgaggcgagagcatgtctga

SEQ ID NO: 5398447 - DNA, 25 bp, Homo sapien
agccagcctttgtggccgaggtggc

SEQ ID NO: 5398448 - DNA, 25 bp, Homo sapien
ggcgagagcatgtctgagtagctga

SEQ ID NO: 5398449 - DNA, 25 bp, Homo sapien
tctccactccctcagaatgaaagct

SEQ ID NO: 5398450 - DNA, 25 bp, Homo sapien
gacaaggaaacttgtggctcatccc

SEQ ID NO: 5398451 - DNA, 25 bp, Homo sapien
tacttggcacatggaggattctcag

SEQ ID NO: 5398452 - DNA, 25 bp, Homo sapien
tgaaagcttcgtaaagacaaggaaa

SEQ ID NO: 5398453 - DNA, 25 bp, Homo sapien
tgttccttctcaatacgtgaagtgg

SEQ ID NO: 5398454 - DNA, 25 bp, Homo sapien
gattcattcttgtgtgttgcctttg

SEQ ID NO: 5398455 - DNA, 25 bp, Homo sapien
gagcagccttggctttggccggaac

SEQ ID NO: 5398456 - DNA, 25 bp, Homo sapien
tgccttggcaactccattagaagcc

SEQ ID NO: 5398457 - DNA, 25 bp, Homo sapien
gcaattatcttttcgaggagtccca

SEQ ID NO: 5398458 - DNA, 25 bp, Homo sapien
tgtaacaagccttgctcttggatcc

SEQ ID NO: 5398459 - DNA, 25 bp, Homo sapien
aagagggtgagcatgattgcctcct

SEQ ID NO: 5398460 - DNA, 25 bp, Homo sapien
ccttgggtggttcctggtgtccaga

SEQ ID NO: 5398461 - DNA, 25 bp, Homo sapien
cttggctaactgtgccctgcatgaa

SEQ ID NO: 5398462 - DNA, 25 bp, Homo sapien
tgtgccctgcatgaattggctcctg

SEQ ID NO: 5398463 - DNA, 25 bp, Homo sapien
taactgtgccctgcatgaattggct

SEQ ID NO: 5398464 - DNA, 25 bp, Homo sapien
cctgcatgaattggctcctgatttt

SEQ ID NO: 5398465 - DNA, 25 bp, Homo sapien
caggttgaagcttgcattggcaggc

SEQ ID NO: 5398466 - DNA, 25 bp, Homo sapien
gaatgctgtggcaattgtgctttca

SEQ ID NO: 5398467 - DNA, 25 bp, Homo sapien
tgtgctttcaaatgtcttgatgctg

SEQ ID NO: 5398468 - DNA, 25 bp, Homo sapien
ggggggcatctcctgctactttgct

SEQ ID NO: 5398469 - DNA, 25 bp, Homo sapien
ggtacatctgttcgtttaattctga

SEQ ID NO: 5398470 - DNA, 25 bp, Homo sapien
tgaaaatcagctctgggtacatctg

SEQ ID NO: 5398471 - DNA, 25 bp, Homo sapien
gtttaattctgaccctggacacctg

SEQ ID NO: 5398472 - DNA, 25 bp, Homo sapien
tctgttcgtttaattctgaccctgg

SEQ ID NO: 5398473 - DNA, 25 bp, Homo sapien
tgagttcccgtatgccaagttatgg

SEQ ID NO: 5398474 - DNA, 25 bp, Homo sapien
attgtccccatgaaggccagccttg

SEQ ID NO: 5398475 - DNA, 25 bp, Homo sapien
cctgagcagaaagtcatccgggtat

SEQ ID NO: 5398476 - DNA, 25 bp, Homo sapien
gccttgaagcttggtcagtctccct

SEQ ID NO: 5398477 - DNA, 25 bp, Homo sapien
gaaatgtgagcttttgcagctctag

SEQ ID NO: 5398478 - DNA, 25 bp, Homo sapien
gagccttagagtgttctatcaaaca

SEQ ID NO: 5398479 - DNA, 25 bp, Homo sapien
tagtcttggatccagggctaccctg

SEQ ID NO: 5398480 - DNA, 25 bp, Homo sapien
taggatgccttagaggtctgtttcc

SEQ ID NO: 5398481 - DNA, 25 bp, Homo sapien
tctacagacaactggatgacaaggt

SEQ ID NO: 5398482 - DNA, 25 bp, Homo sapien
tcttcctggagggttgcatactcaa

SEQ ID NO: 5398483 - DNA, 25 bp, Homo sapien
tgaacagatcagtgccaaggaccag

SEQ ID NO: 5398484 - DNA, 25 bp, Homo sapien
gaacctggagccttgtgataacacc

SEQ ID NO: 5398485 - DNA, 25 bp, Homo sapien
tttgaagtggaaacattggctctcc

SEQ ID NO: 5398486 - DNA, 25 bp, Homo sapien
ttccaatcgagagggaggtcttcca

SEQ ID NO: 5398487 - DNA, 25 bp, Homo sapien
ttggctctccctgccgatctggtgg

SEQ ID NO: 5398488 - DNA, 25 bp, Homo sapien
catatgacagtgcagctaggtagaa

SEQ ID NO: 5398489 - DNA, 25 bp, Homo sapien
cagagacctttggttgggtgatcaa

SEQ ID NO: 5398490 - DNA, 25 bp, Homo sapien
aaacccctgatgttttgagattgag

SEQ ID NO: 5398491 - DNA, 25 bp, Homo sapien
cagtggctacagttcgttctggaag

SEQ ID NO: 5398492 - DNA, 25 bp, Homo sapien
ccaggaatttaattggcatagaagc

SEQ ID NO: 5398493 - DNA, 25 bp, Homo sapien
tcttagctatagtcgaggccttcca

SEQ ID NO: 5398494 - DNA, 25 bp, Homo sapien
gtcggcaagcccagacattcgcttt

SEQ ID NO: 5398495 - DNA, 25 bp, Homo sapien
caaagataatgagagcgtcggcaag

SEQ ID NO: 5398496 - DNA, 25 bp, Homo sapien
aaaggtgactgaccactgttgtata

SEQ ID NO: 5398497 - DNA, 25 bp, Homo sapien
ggatgaggtgaaagaagttctccag

SEQ ID NO: 5398498 - DNA, 25 bp, Homo sapien
tttatcgtctggaccatacagtggg

SEQ ID NO: 5398499 - DNA, 25 bp, Homo sapien
ttctttgagttaagggtatacagct

SEQ ID NO: 5398500 - DNA, 25 bp, Homo sapien
gcttttagcttccacaagaagagac

SEQ ID NO: 5398501 - DNA, 25 bp, Homo sapien
cgctgcaggagacagtggtggaaaa

SEQ ID NO: 5398502 - DNA, 25 bp, Homo sapien
gtgaatgcccgggaagcccgctgca

SEQ ID NO: 5398503 - DNA, 25 bp, Homo sapien
gtattccctccttgctggtcccacc

SEQ ID NO: 5398504 - DNA, 25 bp, Homo sapien
tgcgttgatgagacttgtattccct

SEQ ID NO: 5398505 - DNA, 25 bp, Homo sapien
tagacacctgattaaacatctgccc

SEQ ID NO: 5398506 - DNA, 25 bp, Homo sapien
gggacttgttcaaatgtctccacca

SEQ ID NO: 5398507 - DNA, 25 bp, Homo sapien
gttcaaatgtctccaccagatggcg

SEQ ID NO: 5398508 - DNA, 25 bp, Homo sapien
ccagatggcgccagtagggcattgc

SEQ ID NO: 5398509 - DNA, 25 bp, Homo sapien
ctaaactaagcaggtggggcctcct

SEQ ID NO: 5398510 - DNA, 25 bp, Homo sapien
tctgctggagttattgaggccgccc

SEQ ID NO: 5398511 - DNA, 25 bp, Homo sapien
tgtgtcaacacggtttggctgcaaa

SEQ ID NO: 5398512 - DNA, 25 bp, Homo sapien
acaatccaaggtatgtgctggcacc

SEQ ID NO: 5398513 - DNA, 25 bp, Homo sapien
tgcaaacattgcgtcaggccataat

SEQ ID NO: 5398514 - DNA, 25 bp, Homo sapien
tgtgtacagatgtgtgctcggactt

SEQ ID NO: 5398515 - DNA, 25 bp, Homo sapien
tgtagagtttctgtgtgtacagatg

SEQ ID NO: 5398516 - DNA, 25 bp, Homo sapien
atctgcagtacaccagtttcaggtc

SEQ ID NO: 5398517 - DNA, 25 bp, Homo sapien
gatgtgtgctcggacttttctcttt

SEQ ID NO: 5398518 - DNA, 25 bp, Homo sapien
gtcccatctgtacgccctaatgtgc

SEQ ID NO: 5398519 - DNA, 25 bp, Homo sapien
cactgtcccatctgtacgccctaat

SEQ ID NO: 5398520 - DNA, 25 bp, Homo sapien
agaaccattaccaccgactcggcct

SEQ ID NO: 5398521 - DNA, 25 bp, Homo sapien
tgtcccatctgtacgccctaatgtg

SEQ ID NO: 5398522 - DNA, 25 bp, Homo sapien
atcatggtctgcctcaactgtctgg

SEQ ID NO: 5398523 - DNA, 25 bp, Homo sapien
ccgtggaggcagatgatcatggtct

SEQ ID NO: 5398524 - DNA, 25 bp, Homo sapien
gaacatcgttctttcagaagtgctg

SEQ ID NO: 5398525 - DNA, 25 bp, Homo sapien
gaacctgcagcaactagtcttagcc

SEQ ID NO: 5398526 - DNA, 25 bp, Homo sapien
ctgatcgttctgaagcttgcattgg

SEQ ID NO: 5398527 - DNA, 25 bp, Homo sapien
tcctctctgatcgttctgaagcttg

SEQ ID NO: 5398528 - DNA, 25 bp, Homo sapien
tctctgatcgttctgaagcttgcat

SEQ ID NO: 5398529 - DNA, 25 bp, Homo sapien
ttcctctctgatcgttctgaagctt

SEQ ID NO: 5398530 - DNA, 25 bp, Homo sapien
cgtttacataaagaagctctagttc

SEQ ID NO: 5398531 - DNA, 25 bp, Homo sapien
tctttatctgcaggatggtggattg

SEQ ID NO: 5398532 - DNA, 25 bp, Homo sapien
tagacagaacaataacagtttcgcg

SEQ ID NO: 5398533 - DNA, 25 bp, Homo sapien
gaacagccagatggtttatatgaat

SEQ ID NO: 5398534 - DNA, 25 bp, Homo sapien
agctatatgacatactgggaaaggc

SEQ ID NO: 5398535 - DNA, 25 bp, Homo sapien
cattgtctagcccagaatcttgagc

SEQ ID NO: 5398536 - DNA, 25 bp, Homo sapien
gggtggagggaagatttcacttcat

SEQ ID NO: 5398537 - DNA, 25 bp, Homo sapien
ggactctagctatatgacatactgg

SEQ ID NO: 5398538 - DNA, 25 bp, Homo sapien
aataatggctggataactgccgaag

SEQ ID NO: 5398539 - DNA, 25 bp, Homo sapien
ttttaaaccaagcattgaataatgg

SEQ ID NO: 5398540 - DNA, 25 bp, Homo sapien
ataactgccgaagtaagcgccgctc

SEQ ID NO: 5398541 - DNA, 25 bp, Homo sapien
tggctggataactgccgaagtaagc

SEQ ID NO: 5398542 - DNA, 25 bp, Homo sapien
tggtggtttatatcaataacgatgc

SEQ ID NO: 5398543 - DNA, 25 bp, Homo sapien
tgtaaagtgtgtcctgtgtactgca

SEQ ID NO: 5398544 - DNA, 25 bp, Homo sapien
taacgatgctgtactatagtccatg

SEQ ID NO: 5398545 - DNA, 25 bp, Homo sapien
tgttctctgggctttatgtatctgt

SEQ ID NO: 5398546 - DNA, 25 bp, Homo sapien
cccagaacacagcagctctgcgatg

SEQ ID NO: 5398547 - DNA, 25 bp, Homo sapien
agatcccagaacacagcagctctgc

SEQ ID NO: 5398548 - DNA, 25 bp, Homo sapien
aatgggaaatgacccccacagatcc

SEQ ID NO: 5398549 - DNA, 25 bp, Homo sapien
tcaatgggaaatgacccccacagat

SEQ ID NO: 5398550 - DNA, 25 bp, Homo sapien
tggttcctgcaagactttcttgagg

SEQ ID NO: 5398551 - DNA, 25 bp, Homo sapien
gaggtttcttgtttccgcaagctct

SEQ ID NO: 5398552 - DNA, 25 bp, Homo sapien
tcagactgcgttgatgccagtgttc

SEQ ID NO: 5398553 - DNA, 25 bp, Homo sapien
ggtttcttgtttccgcaagctctga

SEQ ID NO: 5398554 - DNA, 25 bp, Homo sapien
aaaatcccataccaaccactgttgg

SEQ ID NO: 5398555 - DNA, 25 bp, Homo sapien
tgggctaacttgacaaaaggcatcc

SEQ ID NO: 5398556 - DNA, 25 bp, Homo sapien
ggtggttcttcgtccaatttgcaaa

SEQ ID NO: 5398557 - DNA, 25 bp, Homo sapien
catcctgagccatggaattttcact

SEQ ID NO: 5398558 - DNA, 25 bp, Homo sapien
caggaggccctctttgccgtcgagc

SEQ ID NO: 5398559 - DNA, 25 bp, Homo sapien
aggaggccctctttgccgtcgagca

SEQ ID NO: 5398560 - DNA, 25 bp, Homo sapien
ggaggccctctttgccgtcgagcac

SEQ ID NO: 5398561 - DNA, 25 bp, Homo sapien
aggccctctttgccgtcgagcacct

SEQ ID NO: 5398562 - DNA, 25 bp, Homo sapien
gctgcctgcctgcagaccgcaacct

SEQ ID NO: 5398563 - DNA, 25 bp, Homo sapien
cctctcctgtctgagggtgttctga

SEQ ID NO: 5398564 - DNA, 25 bp, Homo sapien
ggtgacacgatgctgactccatcag

SEQ ID NO: 5398565 - DNA, 25 bp, Homo sapien
tggcagatgtgtctaggtgacacga

SEQ ID NO: 5398566 - DNA, 25 bp, Homo sapien
cagcaaaatacctctggagtactgg

SEQ ID NO: 5398567 - DNA, 25 bp, Homo sapien
ctacatgcaacagcaaaatacctct

SEQ ID NO: 5398568 - DNA, 25 bp, Homo sapien
aacagcaaaatacctctggagtact

SEQ ID NO: 5398569 - DNA, 25 bp, Homo sapien
catgcaacagcaaaatacctctgga

SEQ ID NO: 5398570 - DNA, 25 bp, Homo sapien
tggctgtcccaaagtgcaggcccca

SEQ ID NO: 5398571 - DNA, 25 bp, Homo sapien
ggtgcaagtggctgtcccaaagtgc

SEQ ID NO: 5398572 - DNA, 25 bp, Homo sapien
ctgctggtgcaagtggctgtcccaa

SEQ ID NO: 5398573 - DNA, 25 bp, Homo sapien
tgcaagtggctgtcccaaagtgcag

SEQ ID NO: 5398574 - DNA, 25 bp, Homo sapien
tgtttttgcggttgtcaggggcctc

SEQ ID NO: 5398575 - DNA, 25 bp, Homo sapien
tgtcaggggcctcaataaatgcaag

SEQ ID NO: 5398576 - DNA, 25 bp, Homo sapien
gttgtcaggggcctcaataaatgca

SEQ ID NO: 5398577 - DNA, 25 bp, Homo sapien
ttgcggttgtcaggggcctcaataa

SEQ ID NO: 5398578 - DNA, 25 bp, Homo sapien
gcttcacgcgcgaccagcttgggtg

SEQ ID NO: 5398579 - DNA, 25 bp, Homo sapien
tctctaatcgtccagagccctgcgg

SEQ ID NO: 5398580 - DNA, 25 bp, Homo sapien
agcttgggtgccgccgcttcccttg

SEQ ID NO: 5398581 - DNA, 25 bp, Homo sapien
gagcgagcgtgccagctccagtgtt

SEQ ID NO: 5398582 - DNA, 25 bp, Homo sapien
cgggtctggaggctgctctgactcc

SEQ ID NO: 5398583 - DNA, 25 bp, Homo sapien
gggtctggaggctgctctgactcca

SEQ ID NO: 5398584 - DNA, 25 bp, Homo sapien
gcttgggttgtgaggcttcaggtct

SEQ ID NO: 5398585 - DNA, 25 bp, Homo sapien
gggggcttgggttgtgaggcttcag

SEQ ID NO: 5398586 - DNA, 25 bp, Homo sapien
ctgtggcgtttggggggagctggtg

SEQ ID NO: 5398587 - DNA, 25 bp, Homo sapien
tgggtggaggggtgctgtccacctc

SEQ ID NO: 5398588 - DNA, 25 bp, Homo sapien
ggaggggtgctgtccacctcccaag

SEQ ID NO: 5398589 - DNA, 25 bp, Homo sapien
gtgctgtccacctcccaaggccagg

SEQ ID NO: 5398590 - DNA, 25 bp, Homo sapien
tgacttgttcatggttaggcttcct

SEQ ID NO: 5398591 - DNA, 25 bp, Homo sapien
cctgacttgttcatggttaggcttc

SEQ ID NO: 5398592 - DNA, 25 bp, Homo sapien
acttgttcatggttaggcttcctcc

SEQ ID NO: 5398593 - DNA, 25 bp, Homo sapien
ttgttcatggttaggcttcctccag

SEQ ID NO: 5398594 - DNA, 25 bp, Homo sapien
acagaggccaagattagggctgcca

SEQ ID NO: 5398595 - DNA, 25 bp, Homo sapien
cacagaggccaagattagggctgcc

SEQ ID NO: 5398596 - DNA, 25 bp, Homo sapien
agcgcctaaaggtagtctgcagtag

SEQ ID NO: 5398597 - DNA, 25 bp, Homo sapien
gcgcctaaaggtagtctgcagtaga

SEQ ID NO: 5398598 - DNA, 25 bp, Homo sapien
aggtcttaggccatgctctcaaggg

SEQ ID NO: 5398599 - DNA, 25 bp, Homo sapien
gggctttcatcctactcagacaaga

SEQ ID NO: 5398600 - DNA, 25 bp, Homo sapien
tacggcgttgttccgttcacctgcc

SEQ ID NO: 5398601 - DNA, 25 bp, Homo sapien
cattctcactatgggagcaggcacc

SEQ ID NO: 5398602 - DNA, 25 bp, Homo sapien
aatcaggcactgagctatgcagggc

SEQ ID NO: 5398603 - DNA, 25 bp, Homo sapien
taaactgtaggctcagcatggtcgg

SEQ ID NO: 5398604 - DNA, 25 bp, Homo sapien
tcaggtcagatgttatccagagggc

SEQ ID NO: 5398605 - DNA, 25 bp, Homo sapien
gaagttacaagcaacagctccaggt

SEQ ID NO: 5398606 - DNA, 25 bp, Homo sapien
agtgaaaacgatggtgccaaatctt

SEQ ID NO: 5398607 - DNA, 25 bp, Homo sapien
agggacagaataacattgccaccca

SEQ ID NO: 5398608 - DNA, 25 bp, Homo sapien
aacgatggtgccaaatcttgaccaa

SEQ ID NO: 5398609 - DNA, 25 bp, Homo sapien
cagaataacattgccacccaagaag

SEQ ID NO: 5398610 - DNA, 25 bp, Homo sapien
aagaagcacattcaataccgctttt

SEQ ID NO: 5398611 - DNA, 25 bp, Homo sapien
ttatcaacagttttataggtagcat

SEQ ID NO: 5398612 - DNA, 25 bp, Homo sapien
cattcaataccgcttttatcaacag

SEQ ID NO: 5398613 - DNA, 25 bp, Homo sapien
caacagttttataggtagcatttgc

SEQ ID NO: 5398614 - DNA, 25 bp, Homo sapien
tttttctgattgtaggcattatata

SEQ ID NO: 5398615 - DNA, 25 bp, Homo sapien
tctgattgtaggcattatatattat

SEQ ID NO: 5398616 - DNA, 25 bp, Homo sapien
tttctgattgtaggcattatatatt

SEQ ID NO: 5398617 - DNA, 25 bp, Homo sapien
tgattgtaggcattatatattatcc

SEQ ID NO: 5398618 - DNA, 25 bp, Homo sapien
tctagagggtagaaaagcttttgct

SEQ ID NO: 5398619 - DNA, 25 bp, Homo sapien
ggtagcatgtattctgtattatatg

SEQ ID NO: 5398620 - DNA, 25 bp, Homo sapien
ttatatgtgaatcttctttgaccaa

SEQ ID NO: 5398621 - DNA, 25 bp, Homo sapien
tgctttggaagaatgcgtgaccacc

SEQ ID NO: 5398622 - DNA, 25 bp, Homo sapien
tacttcaagggatatcatgttagaa

SEQ ID NO: 5398623 - DNA, 25 bp, Homo sapien
agagagggaatgaaacaaaggctcg

SEQ ID NO: 5398624 - DNA, 25 bp, Homo sapien
gggaatgaaacaaaggctcgatcat

SEQ ID NO: 5398625 - DNA, 25 bp, Homo sapien
tctacttcaagggatatcatgttag

SEQ ID NO: 5398626 - DNA, 25 bp, Homo sapien
cccactgccgtgatgctgggaagca

SEQ ID NO: 5398627 - DNA, 25 bp, Homo sapien
cactgccgtgatgctgggaagcaat

SEQ ID NO: 5398628 - DNA, 25 bp, Homo sapien
aagcaatgttggttctggtctgtgt

SEQ ID NO: 5398629 - DNA, 25 bp, Homo sapien
ccattagctggcaggtagaaaacca

SEQ ID NO: 5398630 - DNA, 25 bp, Homo sapien
cttctataggtacctgctggaccat

SEQ ID NO: 5398631 - DNA, 25 bp, Homo sapien
tgtctccttggatgacagacttggg

SEQ ID NO: 5398632 - DNA, 25 bp, Homo sapien
gtgtctccttggatgacagacttgg

SEQ ID NO: 5398633 - DNA, 25 bp, Homo sapien
ctgcacttctataggtacctgctgg

SEQ ID NO: 5398634 - DNA, 25 bp, Homo sapien
actttgttaacgtgtctgtgtctga

SEQ ID NO: 5398635 - DNA, 25 bp, Homo sapien
agaaagtgagttggaatggcatcaa

SEQ ID NO: 5398636 - DNA, 25 bp, Homo sapien
tggcatcaagtcctgatggtgtagc

SEQ ID NO: 5398637 - DNA, 25 bp, Homo sapien
tgtagctttgggctgaagctgagtt

SEQ ID NO: 5398638 - DNA, 25 bp, Homo sapien
tggaagaagaatgatcacagactag

SEQ ID NO: 5398639 - DNA, 25 bp, Homo sapien
gctgatcagtgaggactgggattac

SEQ ID NO: 5398640 - DNA, 25 bp, Homo sapien
agaggatgggaaggcgccctttgct

SEQ ID NO: 5398641 - DNA, 25 bp, Homo sapien
aacttttctatcactaatatggaag

SEQ ID NO: 5398642 - DNA, 25 bp, Homo sapien
tccccagtcctcatcctgctcttcc

SEQ ID NO: 5398643 - DNA, 25 bp, Homo sapien
cccagtcctcatcctgctcttccag

SEQ ID NO: 5398644 - DNA, 25 bp, Homo sapien
ccagtcctcatcctgctcttccaga

SEQ ID NO: 5398645 - DNA, 25 bp, Homo sapien
ctccccagtcctcatcctgctcttc

SEQ ID NO: 5398646 - DNA, 25 bp, Homo sapien
ccattccacttttaatggtgtaggt

SEQ ID NO: 5398647 - DNA, 25 bp, Homo sapien
ggtgtaggtacacaataatttctgc

SEQ ID NO: 5398648 - DNA, 25 bp, Homo sapien
ccacttttaatggtgtaggtacaca

SEQ ID NO: 5398649 - DNA, 25 bp, Homo sapien
tgtaggtacacaataatttctgcac

SEQ ID NO: 5398650 - DNA, 25 bp, Homo sapien
ctaccacatgacagccctcctaaaa

SEQ ID NO: 5398651 - DNA, 25 bp, Homo sapien
cacatgacagccctcctaaaagttt

SEQ ID NO: 5398652 - DNA, 25 bp, Homo sapien
gacagccctcctaaaagtttatcac

SEQ ID NO: 5398653 - DNA, 25 bp, Homo sapien
cagccctcctaaaagtttatcacaa

SEQ ID NO: 5398654 - DNA, 25 bp, Homo sapien
aattatattccctttttggcaagtg

SEQ ID NO: 5398655 - DNA, 25 bp, Homo sapien
gaatggttccgatataattttcaac

SEQ ID NO: 5398656 - DNA, 25 bp, Homo sapien
tccctttttggcaagtggactgatt

SEQ ID NO: 5398657 - DNA, 25 bp, Homo sapien
ctgattttccaagaatggttccgat

SEQ ID NO: 5398658 - DNA, 25 bp, Homo sapien
gaaatgaacaggtcgtcgggagact

SEQ ID NO: 5398659 - DNA, 25 bp, Homo sapien
gcatttcctgtaagactgggattct

SEQ ID NO: 5398660 - DNA, 25 bp, Homo sapien
gccagggacatgatataatcttggg

SEQ ID NO: 5398661 - DNA, 25 bp, Homo sapien
ggtgcctgttagagcagtagagtaa

SEQ ID NO: 5398662 - DNA, 25 bp, Homo sapien
ggtctactgcccattcttagtgaaa

SEQ ID NO: 5398663 - DNA, 25 bp, Homo sapien
tgtttcctgatgtccaatgaccatt

SEQ ID NO: 5398664 - DNA, 25 bp, Homo sapien
taacaccctccatatataactgttg

SEQ ID NO: 5398665 - DNA, 25 bp, Homo sapien
taactgttgatgaactgaacttttg

SEQ ID NO: 5398666 - DNA, 25 bp, Homo sapien
agctttgctggtgtggcccattgga

SEQ ID NO: 5398667 - DNA, 25 bp, Homo sapien
caaaataaacaagctttgctggtgt

SEQ ID NO: 5398668 - DNA, 25 bp, Homo sapien
caagctttgctggtgtggcccattg

SEQ ID NO: 5398669 - DNA, 25 bp, Homo sapien
ataaacaagctttgctggtgtggcc

SEQ ID NO: 5398670 - DNA, 25 bp, Homo sapien
agtgtgtgccttcggcaaaagaggc

SEQ ID NO: 5398671 - DNA, 25 bp, Homo sapien
gatgttcaccagtgtgtgccttcgg

SEQ ID NO: 5398672 - DNA, 25 bp, Homo sapien
cttgactcgatgttcaccagtgtgt

SEQ ID NO: 5398673 - DNA, 25 bp, Homo sapien
tcaccagtgtgtgccttcggcaaaa

SEQ ID NO: 5398674 - DNA, 25 bp, Homo sapien
ggcttctgggaaattccataggcat

SEQ ID NO: 5398675 - DNA, 25 bp, Homo sapien
ctccctttaccaagggctactggct

SEQ ID NO: 5398676 - DNA, 25 bp, Homo sapien
tctccctttaccaagggctactggc

SEQ ID NO: 5398677 - DNA, 25 bp, Homo sapien
gcttctgggaaattccataggcatt

SEQ ID NO: 5398678 - DNA, 25 bp, Homo sapien
caaggtttcgattacctacggtcag

SEQ ID NO: 5398679 - DNA, 25 bp, Homo sapien
gaccaatatatcagtctcctcttat

SEQ ID NO: 5398680 - DNA, 25 bp, Homo sapien
ttcgattacctacggtcagcctcag

SEQ ID NO: 5398681 - DNA, 25 bp, Homo sapien
caagaaatagaccaatatatcagtc

SEQ ID NO: 5398682 - DNA, 25 bp, Homo sapien
atagcaggaccttgttgctcatctg

SEQ ID NO: 5398683 - DNA, 25 bp, Homo sapien
tttgtatagcaggaccttgttgctc

SEQ ID NO: 5398684 - DNA, 25 bp, Homo sapien
tcctttgtatagcaggaccttgttg

SEQ ID NO: 5398685 - DNA, 25 bp, Homo sapien
tgtatagcaggaccttgttgctcat

SEQ ID NO: 5398686 - DNA, 25 bp, Homo sapien
ctggcagttggtgttagcaaattgg

SEQ ID NO: 5398687 - DNA, 25 bp, Homo sapien
ggtgttagcaaattggtccttctcc

SEQ ID NO: 5398688 - DNA, 25 bp, Homo sapien
aggttgtagtcacgtctaggctagg

SEQ ID NO: 5398689 - DNA, 25 bp, Homo sapien
tagtcacgtctaggctagggctgtg

SEQ ID NO: 5398690 - DNA, 25 bp, Homo sapien
cgggcccgtaggcaccagcagcaag

SEQ ID NO: 5398691 - DNA, 25 bp, Homo sapien
cagttgacggtcttgagggtgaggg

SEQ ID NO: 5398692 - DNA, 25 bp, Homo sapien
gagggatgatatgtagccttcatta

SEQ ID NO: 5398693 - DNA, 25 bp, Homo sapien
gatatgtagccttcattacattgcc

SEQ ID NO: 5398694 - DNA, 25 bp, Homo sapien
tctagttaaggacccactcctgtgg

SEQ ID NO: 5398695 - DNA, 25 bp, Homo sapien
gtatgcttttctagttaaggaccca

SEQ ID NO: 5398696 - DNA, 25 bp, Homo sapien
ttctagttaaggacccactcctgtg

SEQ ID NO: 5398697 - DNA, 25 bp, Homo sapien
tgcttttctagttaaggacccactc

SEQ ID NO: 5398698 - DNA, 25 bp, Homo sapien
tgtggatcgatgtggtcagactgca

SEQ ID NO: 5398699 - DNA, 25 bp, Homo sapien
aaattgggttctcccagtcaaacag

SEQ ID NO: 5398700 - DNA, 25 bp, Homo sapien
ctaagaagcaagttggtgtggatcg

SEQ ID NO: 5398701 - DNA, 25 bp, Homo sapien
tgggttctcccagtcaaacagaaac

SEQ ID NO: 5398702 - DNA, 25 bp, Homo sapien
ctctagtgggtgtggggccaaagcc

SEQ ID NO: 5398703 - DNA, 25 bp, Homo sapien
ggcagctctagtgggtgtggggcca

SEQ ID NO: 5398704 - DNA, 25 bp, Homo sapien
cagctctagtgggtgtggggccaaa

SEQ ID NO: 5398705 - DNA, 25 bp, Homo sapien
gctctagtgggtgtggggccaaagc

SEQ ID NO: 5398706 - DNA, 25 bp, Homo sapien
gggtgcccgttcagcatggcaattg

SEQ ID NO: 5398707 - DNA, 25 bp, Homo sapien
ggagttagctagatccgactcacac

SEQ ID NO: 5398708 - DNA, 25 bp, Homo sapien
ccttgatcctcagggagttagctag

SEQ ID NO: 5398709 - DNA, 25 bp, Homo sapien
cccgttcagcatggcaattgaatcc

SEQ ID NO: 5398710 - DNA, 25 bp, Homo sapien
tgatcgtgacggcaggcatggaaaa

SEQ ID NO: 5398711 - DNA, 25 bp, Homo sapien
tccaagacaggtgatccaagctggg

SEQ ID NO: 5398712 - DNA, 25 bp, Homo sapien
gataacttttgcagggcacagctga

SEQ ID NO: 5398713 - DNA, 25 bp, Homo sapien
agaggacagacatgataacttttgc

SEQ ID NO: 5398714 - DNA, 25 bp, Homo sapien
tgcggctggaatgtgccctggacaa

SEQ ID NO: 5398715 - DNA, 25 bp, Homo sapien
caagtgtcagtattgccctgcggct

SEQ ID NO: 5398716 - DNA, 25 bp, Homo sapien
ctgctgaaacttggcaggtgcaagt

SEQ ID NO: 5398717 - DNA, 25 bp, Homo sapien
ctggacaagaactcccagcccatca

SEQ ID NO: 5398718 - DNA, 25 bp, Homo sapien
agagtgtccccgtgacctttccaga

SEQ ID NO: 5398719 - DNA, 25 bp, Homo sapien
cgtgacctttccagacttttccctg

SEQ ID NO: 5398720 - DNA, 25 bp, Homo sapien
gaatgaatgacagtgaggtccttga

SEQ ID NO: 5398721 - DNA, 25 bp, Homo sapien
ccttgagtaggtcacagagtgtccc

SEQ ID NO: 5398722 - DNA, 25 bp, Homo sapien
tcaagatcgttaaagcatatttggc

SEQ ID NO: 5398723 - DNA, 25 bp, Homo sapien
tcctgaccaccacctactgttgaca

SEQ ID NO: 5398724 - DNA, 25 bp, Homo sapien
gcatgaaggtagccaaaaaattcaa

SEQ ID NO: 5398725 - DNA, 25 bp, Homo sapien
gttgacactctagctatctcttctg

SEQ ID NO: 5398726 - DNA, 25 bp, Homo sapien
actgggttggaattgtggggtgcct

SEQ ID NO: 5398727 - DNA, 25 bp, Homo sapien
catatgtgatagctaatttctgttt

SEQ ID NO: 5398728 - DNA, 25 bp, Homo sapien
caactgggttggaattgtggggtgc

SEQ ID NO: 5398729 - DNA, 25 bp, Homo sapien
tgggttggaattgtggggtgcctgc

SEQ ID NO: 5398730 - DNA, 25 bp, Homo sapien
aaaacttctcaggacagctttcttg

SEQ ID NO: 5398731 - DNA, 25 bp, Homo sapien
cccacaccaaaaacttctcaggaca

SEQ ID NO: 5398732 - DNA, 25 bp, Homo sapien
caccaaaaacttctcaggacagctt

SEQ ID NO: 5398733 - DNA, 25 bp, Homo sapien
tctcaggacagctttcttgcttgtc

SEQ ID NO: 5398734 - DNA, 25 bp, Homo sapien
caggcaatgttagcaaaagccaaag

SEQ ID NO: 5398735 - DNA, 25 bp, Homo sapien
tgtctcttccccaaaacaggcaatg

SEQ ID NO: 5398736 - DNA, 25 bp, Homo sapien
catcacactcatgtccttctcttgg

SEQ ID NO: 5398737 - DNA, 25 bp, Homo sapien
ttctcttggacatgtctcttcccca

SEQ ID NO: 5398738 - DNA, 25 bp, Homo sapien
gaccagtcatcatgggcttcaaaac

SEQ ID NO: 5398739 - DNA, 25 bp, Homo sapien
aacctacccgaccacatgcgtggat

SEQ ID NO: 5398740 - DNA, 25 bp, Homo sapien
aaaacctacccgaccacatgcgtgg

SEQ ID NO: 5398741 - DNA, 25 bp, Homo sapien
tcatgggcttcaaaacctacccgac

SEQ ID NO: 5398742 - DNA, 25 bp, Homo sapien
cccgatggaatgagaggcggccatt

SEQ ID NO: 5398743 - DNA, 25 bp, Homo sapien
tcttgtcaataaatctgtcaaaggc

SEQ ID NO: 5398744 - DNA, 25 bp, Homo sapien
agccagtgggtcttgtcaataaatc

SEQ ID NO: 5398745 - DNA, 25 bp, Homo sapien
ggccagtctgcacaaacatgctctc

SEQ ID NO: 5398746 - DNA, 25 bp, Homo sapien
cactaatgtcactgccagcaaagtc

SEQ ID NO: 5398747 - DNA, 25 bp, Homo sapien
tgccactaatgtcactgccagcaaa

SEQ ID NO: 5398748 - DNA, 25 bp, Homo sapien
agtctcttgccactaatgtcactgc

SEQ ID NO: 5398749 - DNA, 25 bp, Homo sapien
tcttgccactaatgtcactgccagc

SEQ ID NO: 5398750 - DNA, 25 bp, Homo sapien
tgactttaggccatcaggtgccatg

SEQ ID NO: 5398751 - DNA, 25 bp, Homo sapien
gaagccctgcagtgatgtgacacta

SEQ ID NO: 5398752 - DNA, 25 bp, Homo sapien
aaagtccagtcgcttggcagcgtgg

SEQ ID NO: 5398753 - DNA, 25 bp, Homo sapien
tgccatgccagcccgtggacggaag

SEQ ID NO: 5398754 - DNA, 25 bp, Homo sapien
ctcagaatagcccagatcgaggaca

SEQ ID NO: 5398755 - DNA, 25 bp, Homo sapien
gcagcagaaagttgatagaccttgc

SEQ ID NO: 5398756 - DNA, 25 bp, Homo sapien
taactgacctggtaggctcattggt

SEQ ID NO: 5398757 - DNA, 25 bp, Homo sapien
gctcattggtatgcagtcttcctca

SEQ ID NO: 5398758 - DNA, 25 bp, Homo sapien
tggtcttagcccagaggtacacgtg

SEQ ID NO: 5398759 - DNA, 25 bp, Homo sapien
tccctggaccagcagagtattcaga

SEQ ID NO: 5398760 - DNA, 25 bp, Homo sapien
tgtcaatgaccaaagggttaatccc

SEQ ID NO: 5398761 - DNA, 25 bp, Homo sapien
tcttctgtaatctgtgagccacttg

SEQ ID NO: 5398762 - DNA, 25 bp, Homo sapien
accttcacaatacacctctagcaga

SEQ ID NO: 5398763 - DNA, 25 bp, Homo sapien
cattaacttgtatttccacaccttc

SEQ ID NO: 5398764 - DNA, 25 bp, Homo sapien
ctagcagaaatgcaactcttgctgg

SEQ ID NO: 5398765 - DNA, 25 bp, Homo sapien
cctctccaagtatgaaaatttgaga

SEQ ID NO: 5398766 - DNA, 25 bp, Homo sapien
ttttccaaatctcttctgattccag

SEQ ID NO: 5398767 - DNA, 25 bp, Homo sapien
tgctgtgtgactttttccaaatctc

SEQ ID NO: 5398768 - DNA, 25 bp, Homo sapien
ttgctgtgtgactttttccaaatct

SEQ ID NO: 5398769 - DNA, 25 bp, Homo sapien
tccaaatctcttctgattccagttt

SEQ ID NO: 5398770 - DNA, 25 bp, Homo sapien
aagagtcagcaaggatatggcctag

SEQ ID NO: 5398771 - DNA, 25 bp, Homo sapien
acctctggcataaaacactcaagag

SEQ ID NO: 5398772 - DNA, 25 bp, Homo sapien
aaaagtggacccttggcctgattca

SEQ ID NO: 5398773 - DNA, 25 bp, Homo sapien
ggcataaaacactcaagagcacttt

SEQ ID NO: 5398774 - DNA, 25 bp, Homo sapien
gaggcacatccattagcttcagaca

SEQ ID NO: 5398775 - DNA, 25 bp, Homo sapien
agctgctgagagtagacgaagtgga

SEQ ID NO: 5398776 - DNA, 25 bp, Homo sapien
agagtagacgaagtggaggcacatc

SEQ ID NO: 5398777 - DNA, 25 bp, Homo sapien
gtggaggcacatccattagcttcag

SEQ ID NO: 5398778 - DNA, 25 bp, Homo sapien
gaaaatagctccacttcaactgagt

SEQ ID NO: 5398779 - DNA, 25 bp, Homo sapien
gactgtatgcgatgctagttgtttg

SEQ ID NO: 5398780 - DNA, 25 bp, Homo sapien
gatccaagagtgtcaactaagccct

SEQ ID NO: 5398781 - DNA, 25 bp, Homo sapien
tgtatacccttaaaggcctgaggca

SEQ ID NO: 5398782 - DNA, 25 bp, Homo sapien
aacagggggactcccggaggctgtg

SEQ ID NO: 5398783 - DNA, 25 bp, Homo sapien
gggactcccggaggctgtggaggca

SEQ ID NO: 5398784 - DNA, 25 bp, Homo sapien
cagggggactcccggaggctgtgga

SEQ ID NO: 5398785 - DNA, 25 bp, Homo sapien
ccaacagggggactcccggaggctg

SEQ ID NO: 5398786 - DNA, 25 bp, Homo sapien
caggtccattggctgcccctccgct

SEQ ID NO: 5398787 - DNA, 25 bp, Homo sapien
aggtccattggctgcccctccgctc

SEQ ID NO: 5398788 - DNA, 25 bp, Homo sapien
tcaggtccattggctgcccctccgc

SEQ ID NO: 5398789 - DNA, 25 bp, Homo sapien
tgggaaagcgttcctagtgctcctg

SEQ ID NO: 5398790 - DNA, 25 bp, Homo sapien
ggtcctgggaaagcgttcctagtgc

SEQ ID NO: 5398791 - DNA, 25 bp, Homo sapien
tcctgggaaagcgttcctagtgctc

SEQ ID NO: 5398792 - DNA, 25 bp, Homo sapien
cctgggaaagcgttcctagtgctcc

SEQ ID NO: 5398793 - DNA, 25 bp, Homo sapien
tccagcttgggatgtactgccccta

SEQ ID NO: 5398794 - DNA, 25 bp, Homo sapien
tctgcatggtgctggctcggttcct

SEQ ID NO: 5398795 - DNA, 25 bp, Homo sapien
gacattgtggagtatagcagatcca

SEQ ID NO: 5398796 - DNA, 25 bp, Homo sapien
tcctgggagtcacacttcgtcttcg

SEQ ID NO: 5398797 - DNA, 25 bp, Homo sapien
tgtcctctggggcatgacgagggcg

SEQ ID NO: 5398798 - DNA, 25 bp, Homo sapien
gctgctgaggcgatgatagcagagg

SEQ ID NO: 5398799 - DNA, 25 bp, Homo sapien
atgacgagggcggaggggaccagga

SEQ ID NO: 5398800 - DNA, 25 bp, Homo sapien
aggcgatgatagcagaggggcccaa

SEQ ID NO: 5398801 - DNA, 25 bp, Homo sapien
taggctgcttgaagtgtcggaagct

SEQ ID NO: 5398802 - DNA, 25 bp, Homo sapien
gggaggcgacctcgggctcccttgc

SEQ ID NO: 5398803 - DNA, 25 bp, Homo sapien
tgctcctggcgagtgcacgagtgac

SEQ ID NO: 5398804 - DNA, 25 bp, Homo sapien
cacgagtgactgtggcagtcctgct

SEQ ID NO: 5398805 - DNA, 25 bp, Homo sapien
ctgctacagtcacgggcctgggacc

SEQ ID NO: 5398806 - DNA, 25 bp, Homo sapien
gctacactccccgactgctgtagcc

SEQ ID NO: 5398807 - DNA, 25 bp, Homo sapien
caaccgtcccggcagagcttctctt

SEQ ID NO: 5398808 - DNA, 25 bp, Homo sapien
ggctgggctattacaaccccttcta

SEQ ID NO: 5398809 - DNA, 25 bp, Homo sapien
agggtcatttcacactgccgggcct

SEQ ID NO: 5398810 - DNA, 25 bp, Homo sapien
gggcctgcagccacgcacgcagctg

SEQ ID NO: 5398811 - DNA, 25 bp, Homo sapien
ggagtgagatttggccagggtcatt

SEQ ID NO: 5398812 - DNA, 25 bp, Homo sapien
tgagctctgcggtccggcggatttc

SEQ ID NO: 5398813 - DNA, 25 bp, Homo sapien
aactccagccggagggagttcctgg

SEQ ID NO: 5398814 - DNA, 25 bp, Homo sapien
cccaacatgcgtccaccaggaactc

SEQ ID NO: 5398815 - DNA, 25 bp, Homo sapien
gaactccagccggagggagttcctg

SEQ ID NO: 5398816 - DNA, 25 bp, Homo sapien
ttccaggaactggacggtatacagg

SEQ ID NO: 5398817 - DNA, 25 bp, Homo sapien
tggacagatgcccacactacccttg

SEQ ID NO: 5398818 - DNA, 25 bp, Homo sapien
acatggcacccctgcttatttccag

SEQ ID NO: 5398819 - DNA, 25 bp, Homo sapien
cacagagtggacagatgcccacact

SEQ ID NO: 5398820 - DNA, 25 bp, Homo sapien
cctggttaaaatcacactccgggag

SEQ ID NO: 5398821 - DNA, 25 bp, Homo sapien
gtctctcggtggtcagtttttacac

SEQ ID NO: 5398822 - DNA, 25 bp, Homo sapien
ccagaaggatgttgctgttatggaa

SEQ ID NO: 5398823 - DNA, 25 bp, Homo sapien
ctccgggagcatggtaggtggtgca

SEQ ID NO: 5398824 - DNA, 25 bp, Homo sapien
aaactaaatggagcttatgtgccag

SEQ ID NO: 5398825 - DNA, 25 bp, Homo sapien
tgtggacattctgccactctcactt

SEQ ID NO: 5398826 - DNA, 25 bp, Homo sapien
gaatttgctgagaaaggtgtttaaa

SEQ ID NO: 5398827 - DNA, 25 bp, Homo sapien
tttgttggttgatatttctgtggac

SEQ ID NO: 5398828 - DNA, 25 bp, Homo sapien
tgggcctgtaacaaagatcacttgt

SEQ ID NO: 5398829 - DNA, 25 bp, Homo sapien
gatcacttgttaatgaggagccaca

SEQ ID NO: 5398830 - DNA, 25 bp, Homo sapien
ctgactctccagcttgtaaattaaa

SEQ ID NO: 5398831 - DNA, 25 bp, Homo sapien
gggctgaaacttcactcagaaaact

SEQ ID NO: 5398832 - DNA, 25 bp, Homo sapien
cttggaatgcaattaaccttataca

SEQ ID NO: 5398833 - DNA, 25 bp, Homo sapien
taagggggcttggaatgcaattaac

SEQ ID NO: 5398834 - DNA, 25 bp, Homo sapien
gggcttggaatgcaattaaccttat

SEQ ID NO: 5398835 - DNA, 25 bp, Homo sapien
cataagggggcttggaatgcaatta

SEQ ID NO: 5398836 - DNA, 25 bp, Homo sapien
atttacattcttcctaatgagaaaa

SEQ ID NO: 5398837 - DNA, 25 bp, Homo sapien
taatttacattcttcctaatgagaa

SEQ ID NO: 5398838 - DNA, 25 bp, Homo sapien
tttaatttacattcttcctaatgag

SEQ ID NO: 5398839 - DNA, 25 bp, Homo sapien
aatttaatttacattcttcctaatg

SEQ ID NO: 5398840 - DNA, 25 bp, Homo sapien
catttagacgggtaaggcataagta

SEQ ID NO: 5398841 - DNA, 25 bp, Homo sapien
gacgggtaaggcataagtatgcttc

SEQ ID NO: 5398842 - DNA, 25 bp, Homo sapien
ttagacgggtaaggcataagtatgc

SEQ ID NO: 5398843 - DNA, 25 bp, Homo sapien
tttagacgggtaaggcataagtatg

SEQ ID NO: 5398844 - DNA, 25 bp, Homo sapien
gctgaaggcaaagtattcttatcac

SEQ ID NO: 5398845 - DNA, 25 bp, Homo sapien
catttccatttatgacataagctga

SEQ ID NO: 5398846 - DNA, 25 bp, Homo sapien
tgtcagtgcctgtagaaaactcaaa

SEQ ID NO: 5398847 - DNA, 25 bp, Homo sapien
tcagtcgtatgcattgaggcagcag

SEQ ID NO: 5398848 - DNA, 25 bp, Homo sapien
gcctgtttgcatcctaaagccttca

SEQ ID NO: 5398849 - DNA, 25 bp, Homo sapien
gccgtgcatgtagacatattcccaa

SEQ ID NO: 5398850 - DNA, 25 bp, Homo sapien
gaaaccatgagagccgtgcatgtag

SEQ ID NO: 5398851 - DNA, 25 bp, Homo sapien
acagtaagcctgtttgcatcctaaa

SEQ ID NO: 5398852 - DNA, 25 bp, Homo sapien
cactgggctctgttgttgagcaaag

SEQ ID NO: 5398853 - DNA, 25 bp, Homo sapien
caagcacaagaaggtccttatgcaa

SEQ ID NO: 5398854 - DNA, 25 bp, Homo sapien
ttatgcaaagatggtgtgtcaggag

SEQ ID NO: 5398855 - DNA, 25 bp, Homo sapien
gctgaatctcaagcccttttgggtg

SEQ ID NO: 5398856 - DNA, 25 bp, Homo sapien
gcatggaaggtcaccaggattaaga

SEQ ID NO: 5398857 - DNA, 25 bp, Homo sapien
ggacgttttcatcacaatgcctgca

SEQ ID NO: 5398858 - DNA, 25 bp, Homo sapien
tgcatctgaatagcatggaaggtca

SEQ ID NO: 5398859 - DNA, 25 bp, Homo sapien
aatccagggacgttttcatcacaat

SEQ ID NO: 5398860 - DNA, 25 bp, Homo sapien
tttcaataagaggaagaggtgttgc

SEQ ID NO: 5398861 - DNA, 25 bp, Homo sapien
tttgaatcccaaggtgccagatgag

SEQ ID NO: 5398862 - DNA, 25 bp, Homo sapien
gcagtgacagggcgatttgctctcc

SEQ ID NO: 5398863 - DNA, 25 bp, Homo sapien
gaggtttgaatcccaaggtgccaga

SEQ ID NO: 5398864 - DNA, 25 bp, Homo sapien
ggtttgaatcccaaggtgccagatg

SEQ ID NO: 5398865 - DNA, 25 bp, Homo sapien
tgaacagcctagtttgtagatgtcc

SEQ ID NO: 5398866 - DNA, 25 bp, Homo sapien
caccatcaaccagtgttgaacagcc

SEQ ID NO: 5398867 - DNA, 25 bp, Homo sapien
tgtagatgtccacatttctatccat

SEQ ID NO: 5398868 - DNA, 25 bp, Homo sapien
ccagtgttgaacagcctagtttgta

SEQ ID NO: 5398869 - DNA, 25 bp, Homo sapien
caaacagctcgacctgaattgaact

SEQ ID NO: 5398870 - DNA, 25 bp, Homo sapien
ggacaggcagctagacctgctccag

SEQ ID NO: 5398871 - DNA, 25 bp, Homo sapien
agacctccacaaaggacaggcagct

SEQ ID NO: 5398872 - DNA, 25 bp, Homo sapien
tcctgttactgaggaggctagagtg

SEQ ID NO: 5398873 - DNA, 25 bp, Homo sapien
gctgatcgataggtcgcacatggct

SEQ ID NO: 5398874 - DNA, 25 bp, Homo sapien
ttatagggggtaatgaagacatgga

SEQ ID NO: 5398875 - DNA, 25 bp, Homo sapien
gatttgagaacccttgaattgtttc

SEQ ID NO: 5398876 - DNA, 25 bp, Homo sapien
tcctgctgatcgataggtcgcacat

SEQ ID NO: 5398877 - DNA, 25 bp, Homo sapien
caactctcgtccttagactggctgc

SEQ ID NO: 5398878 - DNA, 25 bp, Homo sapien
aactctcgtccttagactggctgcc

SEQ ID NO: 5398879 - DNA, 25 bp, Homo sapien
tcaactctcgtccttagactggctg

SEQ ID NO: 5398880 - DNA, 25 bp, Homo sapien
caaccagtgcaagctgcgattcgat

SEQ ID NO: 5398881 - DNA, 25 bp, Homo sapien
tggtccaaccagtgcaagctgcgat

SEQ ID NO: 5398882 - DNA, 25 bp, Homo sapien
ccagtgcaagctgcgattcgatcat

SEQ ID NO: 5398883 - DNA, 25 bp, Homo sapien
caagctgcgattcgatcatttcctt

SEQ ID NO: 5398884 - DNA, 25 bp, Homo sapien
gaccttgcgctatttctcagatacc

SEQ ID NO: 5398885 - DNA, 25 bp, Homo sapien
ctaattctctcgagaccttgcgcta

SEQ ID NO: 5398886 - DNA, 25 bp, Homo sapien
cacaattttcccattgactttaata

SEQ ID NO: 5398887 - DNA, 25 bp, Homo sapien
tctcagatacctgtccacaattttc

SEQ ID NO: 5398888 - DNA, 25 bp, Homo sapien
gcacagacaagctggcagaaagctt

SEQ ID NO: 5398889 - DNA, 25 bp, Homo sapien
agtgtatgttcgtccctggagaggc

SEQ ID NO: 5398890 - DNA, 25 bp, Homo sapien
tgtcataaaaatcgagtgtgcttgg

SEQ ID NO: 5398891 - DNA, 25 bp, Homo sapien
ttgttgtcataaaaatcgagtgtgc

SEQ ID NO: 5398892 - DNA, 25 bp, Homo sapien
aataggtgtgagtgtatgttcgtcc

SEQ ID NO: 5398893 - DNA, 25 bp, Homo sapien
gggactgctaagagccccttaactg

SEQ ID NO: 5398894 - DNA, 25 bp, Homo sapien
ggagacctggtggaatacatcgtac

SEQ ID NO: 5398895 - DNA, 25 bp, Homo sapien
tacatcgtactgtgattatgcggga

SEQ ID NO: 5398896 - DNA, 25 bp, Homo sapien
taactgagccgtgtggagaacttct

SEQ ID NO: 5398897 - DNA, 25 bp, Homo sapien
cacctgcccctcaggttgtgtgtca

SEQ ID NO: 5398898 - DNA, 25 bp, Homo sapien
agtccagggcattccacagctcgca

SEQ ID NO: 5398899 - DNA, 25 bp, Homo sapien
acctgcccctcaggttgtgtgtcat

SEQ ID NO: 5398900 - DNA, 25 bp, Homo sapien
gggagtccagggcattccacagctc

SEQ ID NO: 5398901 - DNA, 25 bp, Homo sapien
tctttatcgtactctggcagccatc

SEQ ID NO: 5398902 - DNA, 25 bp, Homo sapien
cattctcagggaaatgcttctgagc

SEQ ID NO: 5398903 - DNA, 25 bp, Homo sapien
cctgattaagactagatctgggctg

SEQ ID NO: 5398904 - DNA, 25 bp, Homo sapien
gtggagccttagcaacctgattaag

SEQ ID NO: 5398905 - DNA, 25 bp, Homo sapien
gtgggagagcttgttgcaactgcca

SEQ ID NO: 5398906 - DNA, 25 bp, Homo sapien
gaaaaagaagactgatgacatttac

SEQ ID NO: 5398907 - DNA, 25 bp, Homo sapien
gcttgttgcaactgccagcaggatg

SEQ ID NO: 5398908 - DNA, 25 bp, Homo sapien
aaagaagactgatgacatttaccat

SEQ ID NO: 5398909 - DNA, 25 bp, Homo sapien
cccatgtgcacagctctggtgacat

SEQ ID NO: 5398910 - DNA, 25 bp, Homo sapien
gctctggtgacatcctttgaaacct

SEQ ID NO: 5398911 - DNA, 25 bp, Homo sapien
tgatctcttcattgaaaagtctggt

SEQ ID NO: 5398912 - DNA, 25 bp, Homo sapien
acatcctttgaaacctggtttctgt

SEQ ID NO: 5398913 - DNA, 25 bp, Homo sapien
tcctttgccaagtggaagcactaac

SEQ ID NO: 5398914 - DNA, 25 bp, Homo sapien
tgccaagtggaagcactaacaaggg

SEQ ID NO: 5398915 - DNA, 25 bp, Homo sapien
ggaagcactaacaagggatgaccta

SEQ ID NO: 5398916 - DNA, 25 bp, Homo sapien
caagtggaagcactaacaagggatg

SEQ ID NO: 5398917 - DNA, 25 bp, Homo sapien
gattagcaggataatgggcattccc

SEQ ID NO: 5398918 - DNA, 25 bp, Homo sapien
tctttgggtggaagttctaggagcc

SEQ ID NO: 5398919 - DNA, 25 bp, Homo sapien
ccgcattcctggacttctttgggtg

SEQ ID NO: 5398920 - DNA, 25 bp, Homo sapien
tagaacacccttcaggtgggtgagt

SEQ ID NO: 5398921 - DNA, 25 bp, Homo sapien
ctccatgtgttctaggctccttctt

SEQ ID NO: 5398922 - DNA, 25 bp, Homo sapien
tgacgtgcctctgggctctaccaca

SEQ ID NO: 5398923 - DNA, 25 bp, Homo sapien
aggactcatcatgtctcaccttgtc

SEQ ID NO: 5398924 - DNA, 25 bp, Homo sapien
ttttcaaatagttcttcttcctgga

SEQ ID NO: 5398925 - DNA, 25 bp, Homo sapien
ttcttcaatgactcctccaatgctt

SEQ ID NO: 5398926 - DNA, 25 bp, Homo sapien
tgtgcttcctagcttctcaggtaag

SEQ ID NO: 5398927 - DNA, 25 bp, Homo sapien
tagcttctcaggtaagctgtaattc

SEQ ID NO: 5398928 - DNA, 25 bp, Homo sapien
tgtaattcttcaatgactcctccaa

SEQ ID NO: 5398929 - DNA, 25 bp, Homo sapien
gggtaagcactatcctgacttgtag

SEQ ID NO: 5398930 - DNA, 25 bp, Homo sapien
cataggatgtactactgcgtctggc

SEQ ID NO: 5398931 - DNA, 25 bp, Homo sapien
tgccaggtcctagggcacattgagc

SEQ ID NO: 5398932 - DNA, 25 bp, Homo sapien
cggttggtctatacctcagagtgaa

SEQ ID NO: 5398933 - DNA, 25 bp, Homo sapien
tactgagttttaggaccgaccagag

SEQ ID NO: 5398934 - DNA, 25 bp, Homo sapien
ggttctaaccctgaatgcacactga

SEQ ID NO: 5398935 - DNA, 25 bp, Homo sapien
caatagtgcagaagtggataaaccc

SEQ ID NO: 5398936 - DNA, 25 bp, Homo sapien
gataaaccctccttgtgacaacagt

SEQ ID NO: 5398937 - DNA, 25 bp, Homo sapien
gccagacactgaagcgaacacatta

SEQ ID NO: 5398938 - DNA, 25 bp, Homo sapien
tatatataaagcgtcaaaacaggca

SEQ ID NO: 5398939 - DNA, 25 bp, Homo sapien
cagtggttactcacggaaagggcaa

SEQ ID NO: 5398940 - DNA, 25 bp, Homo sapien
tatactgtacaaggaaacctggaca

SEQ ID NO: 5398941 - DNA, 25 bp, Homo sapien
cacatcctatacaatgtggatgtgt

SEQ ID NO: 5398942 - DNA, 25 bp, Homo sapien
tatacaatgtggatgtgttcaacgt

SEQ ID NO: 5398943 - DNA, 25 bp, Homo sapien
gatgtgttcaacgtgtattcaatga

SEQ ID NO: 5398944 - DNA, 25 bp, Homo sapien
caatgtggatgtgttcaacgtgtat

SEQ ID NO: 5398945 - DNA, 25 bp, Homo sapien
atactccctacaactacatgggtac

SEQ ID NO: 5398946 - DNA, 25 bp, Homo sapien
aagatactccctacaactacatggg

SEQ ID NO: 5398947 - DNA, 25 bp, Homo sapien
gatactccctacaactacatgggta

SEQ ID NO: 5398948 - DNA, 25 bp, Homo sapien
tgaagatactccctacaactacatg

SEQ ID NO: 5398949 - DNA, 25 bp, Homo sapien
gagaatcctaaatgtcggtagcgtt

SEQ ID NO: 5398950 - DNA, 25 bp, Homo sapien
cactttacagcatccaaggtcatca

SEQ ID NO: 5398951 - DNA, 25 bp, Homo sapien
cagagactatgacgaatcactttac

SEQ ID NO: 5398952 - DNA, 25 bp, Homo sapien
cggtagcgttcatcagtttcaaaaa

SEQ ID NO: 5398953 - DNA, 25 bp, Homo sapien
taaccctcagctcgaagagcatagc

SEQ ID NO: 5398954 - DNA, 25 bp, Homo sapien
agcccaataaccctcagctcgaaga

SEQ ID NO: 5398955 - DNA, 25 bp, Homo sapien
cctcagctcgaagagcatagcaaat

SEQ ID NO: 5398956 - DNA, 25 bp, Homo sapien
caataaccctcagctcgaagagcat

SEQ ID NO: 5398957 - DNA, 25 bp, Homo sapien
tatgcttaagatagcattactagag

SEQ ID NO: 5398958 - DNA, 25 bp, Homo sapien
cttaagatagcattactagagattg

SEQ ID NO: 5398959 - DNA, 25 bp, Homo sapien
tgcttaagatagcattactagagat

SEQ ID NO: 5398960 - DNA, 25 bp, Homo sapien
aatatgcttaagatagcattactag

SEQ ID NO: 5398961 - DNA, 25 bp, Homo sapien
cacagcactccggcctgggcgagag

SEQ ID NO: 5398962 - DNA, 25 bp, Homo sapien
cactccggcctgggcgagagagact

SEQ ID NO: 5398963 - DNA, 25 bp, Homo sapien
agcactccggcctgggcgagagaga

SEQ ID NO: 5398964 - DNA, 25 bp, Homo sapien
acagcactccggcctgggcgagaga

SEQ ID NO: 5398965 - DNA, 25 bp, Homo sapien
tctacagatgctttaacacaagggt

SEQ ID NO: 5398966 - DNA, 25 bp, Homo sapien
cataatgggcctagtttacctgagc

SEQ ID NO: 5398967 - DNA, 25 bp, Homo sapien
gccagcataagaaagccacctgtgt

SEQ ID NO: 5398968 - DNA, 25 bp, Homo sapien
ggtaccgcctaatcgaactgaattc

SEQ ID NO: 5398969 - DNA, 25 bp, Homo sapien
gaagcacgttgccattcaaactggt

SEQ ID NO: 5398970 - DNA, 25 bp, Homo sapien
gaaacttagaactatactggagtca

SEQ ID NO: 5398971 - DNA, 25 bp, Homo sapien
ggagtcagtatcaaattaggttcag

SEQ ID NO: 5398972 - DNA, 25 bp, Homo sapien
tatttacttggagagctaggtgtgg

SEQ ID NO: 5398973 - DNA, 25 bp, Homo sapien
atggtttaccctgtgatattaatac

SEQ ID NO: 5398974 - DNA, 25 bp, Homo sapien
gatggtaggtatcactttgtcgctc

SEQ ID NO: 5398975 - DNA, 25 bp, Homo sapien
ttgtaaaaagactgtcactgcttgt

SEQ ID NO: 5398976 - DNA, 25 bp, Homo sapien
gtgcgcaccactaaacctggataat

SEQ ID NO: 5398977 - DNA, 25 bp, Homo sapien
tacttcttcactccaaacagtcata

SEQ ID NO: 5398978 - DNA, 25 bp, Homo sapien
cttcttcactccaaacagtcatatc

SEQ ID NO: 5398979 - DNA, 25 bp, Homo sapien
tcttcactccaaacagtcatatcat

SEQ ID NO: 5398980 - DNA, 25 bp, Homo sapien
ttctacttcttcactccaaacagtc

SEQ ID NO: 5398981 - DNA, 25 bp, Homo sapien
atcattagtttgccattagctactt

SEQ ID NO: 5398982 - DNA, 25 bp, Homo sapien
aatcattagtttgccattagctact

SEQ ID NO: 5398983 - DNA, 25 bp, Homo sapien
gaatcattagtttgccattagctac

SEQ ID NO: 5398984 - DNA, 25 bp, Homo sapien
ggacatgtctgtattgcacactcta

SEQ ID NO: 5398985 - DNA, 25 bp, Homo sapien
ttttcgcagcaattctggacatgtc

SEQ ID NO: 5398986 - DNA, 25 bp, Homo sapien
catgtctgtattgcacactctactc

SEQ ID NO: 5398987 - DNA, 25 bp, Homo sapien
cgcagcaattctggacatgtctgta

SEQ ID NO: 5398988 - DNA, 25 bp, Homo sapien
cacatattgtgccatcacaaactca

SEQ ID NO: 5398989 - DNA, 25 bp, Homo sapien
tcatcaggccacactgttcgagagc

SEQ ID NO: 5398990 - DNA, 25 bp, Homo sapien
ttcatcaggccacactgttcgagag

SEQ ID NO: 5398991 - DNA, 25 bp, Homo sapien
acatattgtgccatcacaaactcat

SEQ ID NO: 5398992 - DNA, 25 bp, Homo sapien
catttctcaaacttacctaccacag

SEQ ID NO: 5398993 - DNA, 25 bp, Homo sapien
gaatatggcatgtagcatttctcaa

SEQ ID NO: 5398994 - DNA, 25 bp, Homo sapien
tatctttaggacacattaggttaag

SEQ ID NO: 5398995 - DNA, 25 bp, Homo sapien
aatattttagtgtgccttataagcc

SEQ ID NO: 5398996 - DNA, 25 bp, Homo sapien
cacatgagactcatccgaacctgat

SEQ ID NO: 5398997 - DNA, 25 bp, Homo sapien
agcagccacatgagactcatccgaa

SEQ ID NO: 5398998 - DNA, 25 bp, Homo sapien
aacctgatgatcctgcagtcgaaaa

SEQ ID NO: 5398999 - DNA, 25 bp, Homo sapien
tcatccgaacctgatgatcctgcag

SEQ ID NO: 5399000 - DNA, 25 bp, Homo sapien
cctgggagataggaaaccagtctgg

SEQ ID NO: 5399001 - DNA, 25 bp, Homo sapien
aagagcaaaatcctgggagatagga

SEQ ID NO: 5399002 - DNA, 25 bp, Homo sapien
tgggagataggaaaccagtctggct

SEQ ID NO: 5399003 - DNA, 25 bp, Homo sapien
gcaaaatcctgggagataggaaacc

SEQ ID NO: 5399004 - DNA, 25 bp, Homo sapien
ctataaattgcgctaattctctccc

SEQ ID NO: 5399005 - DNA, 25 bp, Homo sapien
aaattgcgctaattctctcccatac

SEQ ID NO: 5399006 - DNA, 25 bp, Homo sapien
actgctataaattgcgctaattctc

SEQ ID NO: 5399007 - DNA, 25 bp, Homo sapien
ttactgctataaattgcgctaattc

SEQ ID NO: 5399008 - DNA, 25 bp, Homo sapien
tcatggcaatgtctgcttttctcca

SEQ ID NO: 5399009 - DNA, 25 bp, Homo sapien
ggtttcatggcaatgtctgcttttc

SEQ ID NO: 5399010 - DNA, 25 bp, Homo sapien
tgtggtttcatggcaatgtctgctt

SEQ ID NO: 5399011 - DNA, 25 bp, Homo sapien
catggcaatgtctgcttttctccat

SEQ ID NO: 5399012 - DNA, 25 bp, Homo sapien
ggattacctgaggtctagcctggcc

SEQ ID NO: 5399013 - DNA, 25 bp, Homo sapien
gattacctgaggtctagcctggcca

SEQ ID NO: 5399014 - DNA, 25 bp, Homo sapien
ttcccaaacgagtttactatgctga

SEQ ID NO: 5399015 - DNA, 25 bp, Homo sapien
aaagaatgctaccatcttcaaagca

SEQ ID NO: 5399016 - DNA, 25 bp, Homo sapien
caatgccatcataattaaacccgtt

SEQ ID NO: 5399017 - DNA, 25 bp, Homo sapien
tatctaacactataccacccaatgc

SEQ ID NO: 5399018 - DNA, 25 bp, Homo sapien
atagttcgcaaaatagctttccttt

SEQ ID NO: 5399019 - DNA, 25 bp, Homo sapien
agaagatagttcgcaaaatagcttt

SEQ ID NO: 5399020 - DNA, 25 bp, Homo sapien
gatagttcgcaaaatagctttcctt

SEQ ID NO: 5399021 - DNA, 25 bp, Homo sapien
aagatagttcgcaaaatagctttcc

SEQ ID NO: 5399022 - DNA, 25 bp, Homo sapien
aactgaggtaacgtccactcttcga

SEQ ID NO: 5399023 - DNA, 25 bp, Homo sapien
cgtcaggaccaaagtccaagctctc

SEQ ID NO: 5399024 - DNA, 25 bp, Homo sapien
taaactctaacaacagacaactgag

SEQ ID NO: 5399025 - DNA, 25 bp, Homo sapien
cactcttcgaaggtgtgtcgtccac

SEQ ID NO: 5399026 - DNA, 25 bp, Homo sapien
ggctgggtggccaaaattcagtcca

SEQ ID NO: 5399027 - DNA, 25 bp, Homo sapien
taaagacagacggacaggatggctg

SEQ ID NO: 5399028 - DNA, 25 bp, Homo sapien
tcagtccagaggatcgaagcggctg

SEQ ID NO: 5399029 - DNA, 25 bp, Homo sapien
tacagccgcggaaaaacaactcgga

SEQ ID NO: 5399030 - DNA, 25 bp, Homo sapien
gggcaaatttggaggggctaacatg

SEQ ID NO: 5399031 - DNA, 25 bp, Homo sapien
ggcaaatttggaggggctaacatgg

SEQ ID NO: 5399032 - DNA, 25 bp, Homo sapien
gagggctgtaaccctaacacgggca

SEQ ID NO: 5399033 - DNA, 25 bp, Homo sapien
cgggcaaatttggaggggctaacat

SEQ ID NO: 5399034 - DNA, 25 bp, Homo sapien
tagcacctacgctggcggtgagcag

SEQ ID NO: 5399035 - DNA, 25 bp, Homo sapien
caaagtaggcctacgtggagccgac

SEQ ID NO: 5399036 - DNA, 25 bp, Homo sapien
tccgagcgcgtcgaaacgatgatgc

SEQ ID NO: 5399037 - DNA, 25 bp, Homo sapien
caaaggaagttgcttccgagcgcgt

SEQ ID NO: 5399038 - DNA, 25 bp, Homo sapien
aatctgctgacacattacagtggga

SEQ ID NO: 5399039 - DNA, 25 bp, Homo sapien
cagagcgacgttgcactgaggcgat

SEQ ID NO: 5399040 - DNA, 25 bp, Homo sapien
gaatatcccctggacgcatggaagg

SEQ ID NO: 5399041 - DNA, 25 bp, Homo sapien
aattagtctcatcaggcagccaaac

SEQ ID NO: 5399042 - DNA, 25 bp, Homo sapien
ttcttgcacatggacatgctgatct

SEQ ID NO: 5399043 - DNA, 25 bp, Homo sapien
tgtatagcgtgttcacagatttgca

SEQ ID NO: 5399044 - DNA, 25 bp, Homo sapien
gtatagcgtgttcacagatttgcat

SEQ ID NO: 5399045 - DNA, 25 bp, Homo sapien
attcttgcacatggacatgctgatc

SEQ ID NO: 5399046 - DNA, 25 bp, Homo sapien
tgtgccccactacaccaaaggtgag

SEQ ID NO: 5399047 - DNA, 25 bp, Homo sapien
gctttcccatatacgtgtgccagga

SEQ ID NO: 5399048 - DNA, 25 bp, Homo sapien
tgattgacttctcccactgtggcag

SEQ ID NO: 5399049 - DNA, 25 bp, Homo sapien
gctataggtagtagggtgtgcccca

SEQ ID NO: 5399050 - DNA, 25 bp, Homo sapien
tattgtctgataatgggaaccccct

SEQ ID NO: 5399051 - DNA, 25 bp, Homo sapien
tgataatgggaaccccctagctgct

SEQ ID NO: 5399052 - DNA, 25 bp, Homo sapien
tgggaaccccctagctgctcattgc

SEQ ID NO: 5399053 - DNA, 25 bp, Homo sapien
ttgtctgataatgggaaccccctag

SEQ ID NO: 5399054 - DNA, 25 bp, Homo sapien
agcccgtagccacaggtttctctct

SEQ ID NO: 5399055 - DNA, 25 bp, Homo sapien
tcagcccgtagccacaggtttctct

SEQ ID NO: 5399056 - DNA, 25 bp, Homo sapien
gcccgtagccacaggtttctctctg

SEQ ID NO: 5399057 - DNA, 25 bp, Homo sapien
ccgtagccacaggtttctctctggc

SEQ ID NO: 5399058 - DNA, 25 bp, Homo sapien
caaagttctgggtacaaaggacttg

SEQ ID NO: 5399059 - DNA, 25 bp, Homo sapien
tgggtacaaaggacttgtggagtct

SEQ ID NO: 5399060 - DNA, 25 bp, Homo sapien
acaaaggacttgtggagtctggaaa

SEQ ID NO: 5399061 - DNA, 25 bp, Homo sapien
agttctgggtacaaaggacttgtgg

SEQ ID NO: 5399062 - DNA, 25 bp, Homo sapien
ttggttggtgaactgaattttgttg

SEQ ID NO: 5399063 - DNA, 25 bp, Homo sapien
ataaatggccattgagggttggttg

SEQ ID NO: 5399064 - DNA, 25 bp, Homo sapien
aatggaataaatggccattgagggt

SEQ ID NO: 5399065 - DNA, 25 bp, Homo sapien
cattgagggttggttggtgaactga

SEQ ID NO: 5399066 - DNA, 25 bp, Homo sapien
atatcagcagacacactaaccagag

SEQ ID NO: 5399067 - DNA, 25 bp, Homo sapien
tgtgtggttgtgcaaaccggattcc

SEQ ID NO: 5399068 - DNA, 25 bp, Homo sapien
taaccagagtcacaaggagtgagtc

SEQ ID NO: 5399069 - DNA, 25 bp, Homo sapien
gctggagtacagctttcctaagaca

SEQ ID NO: 5399070 - DNA, 25 bp, Homo sapien
cagcagaatggtcgccgggagtttc

SEQ ID NO: 5399071 - DNA, 25 bp, Homo sapien
gcagaatggtcgccgggagtttcat

SEQ ID NO: 5399072 - DNA, 25 bp, Homo sapien
agcagaatggtcgccgggagtttca

SEQ ID NO: 5399073 - DNA, 25 bp, Homo sapien
tcagtagtggttcaccttctgtggg

SEQ ID NO: 5399074 - DNA, 25 bp, Homo sapien
cttctgtgggggcctaccctccagg

SEQ ID NO: 5399075 - DNA, 25 bp, Homo sapien
ggcaggctcaatctcgatgaggagc

SEQ ID NO: 5399076 - DNA, 25 bp, Homo sapien
gctcaatctcgatgaggagcaggtc

SEQ ID NO: 5399077 - DNA, 25 bp, Homo sapien
ccatatgtgttatatttagcttttg

SEQ ID NO: 5399078 - DNA, 25 bp, Homo sapien
ttccatatgtgttatatttagcttt

SEQ ID NO: 5399079 - DNA, 25 bp, Homo sapien
tgtgattagagatatcatttccata

SEQ ID NO: 5399080 - DNA, 25 bp, Homo sapien
atttccatatgtgttatatttagct

SEQ ID NO: 5399081 - DNA, 25 bp, Homo sapien
tgcagacttagaggcactcgggtcc

SEQ ID NO: 5399082 - DNA, 25 bp, Homo sapien
tcaatgcagacttagaggcactcgg

SEQ ID NO: 5399083 - DNA, 25 bp, Homo sapien
aatgcagacttagaggcactcgggt

SEQ ID NO: 5399084 - DNA, 25 bp, Homo sapien
caatgcagacttagaggcactcggg

SEQ ID NO: 5399085 - DNA, 25 bp, Homo sapien
cctgagccaagtaagcaggcttcaa

SEQ ID NO: 5399086 - DNA, 25 bp, Homo sapien
tcaaaagttggcaggacggtgtccc

SEQ ID NO: 5399087 - DNA, 25 bp, Homo sapien
aagtagggatggtttccgtgcagca

SEQ ID NO: 5399088 - DNA, 25 bp, Homo sapien
cagaattctttcctgaagtagggat

SEQ ID NO: 5399089 - DNA, 25 bp, Homo sapien
agtctgtgttgtattgtattactag

SEQ ID NO: 5399090 - DNA, 25 bp, Homo sapien
attactagacagtctagtgttttgc

SEQ ID NO: 5399091 - DNA, 25 bp, Homo sapien
cttccagcaaatatggcccagtctg

SEQ ID NO: 5399092 - DNA, 25 bp, Homo sapien
tccagcaaatatggcccagtctgtg

SEQ ID NO: 5399093 - DNA, 25 bp, Homo sapien
accaggaatccagtttcaaagatta

SEQ ID NO: 5399094 - DNA, 25 bp, Homo sapien
ttggtctccagagtgggtatgtgat

SEQ ID NO: 5399095 - DNA, 25 bp, Homo sapien
tattgtggatgatgcccaactcttg

SEQ ID NO: 5399096 - DNA, 25 bp, Homo sapien
tgatgttgtgctgggtgagaaccag

SEQ ID NO: 5399097 - DNA, 25 bp, Homo sapien
ttttgcttctatttgatagatcaag

SEQ ID NO: 5399098 - DNA, 25 bp, Homo sapien
tttgcttctatttgatagatcaagc

SEQ ID NO: 5399099 - DNA, 25 bp, Homo sapien
tcaaggctaagaatttcagcaacac

SEQ ID NO: 5399100 - DNA, 25 bp, Homo sapien
ggtcctgtgcattggacctcactca

SEQ ID NO: 5399101 - DNA, 25 bp, Homo sapien
tttgatttccctgacccattgacca

SEQ ID NO: 5399102 - DNA, 25 bp, Homo sapien
cttatccagagggagttcaaggcta

SEQ ID NO: 5399103 - DNA, 25 bp, Homo sapien
ttaagagcaagactggtctggttgg

SEQ ID NO: 5399104 - DNA, 25 bp, Homo sapien
cagccaaattaagagcaagactggt

SEQ ID NO: 5399105 - DNA, 25 bp, Homo sapien
ggtctggttggtgtctttgagattt

SEQ ID NO: 5399106 - DNA, 25 bp, Homo sapien
caaattaagagcaagactggtctgg

SEQ ID NO: 5399107 - DNA, 25 bp, Homo sapien
gctttcctgattttgggcccgcctg

SEQ ID NO: 5399108 - DNA, 25 bp, Homo sapien
aagacctgaggtggcatcataacca

SEQ ID NO: 5399109 - DNA, 25 bp, Homo sapien
ctgttggcagctggattgattcacc

SEQ ID NO: 5399110 - DNA, 25 bp, Homo sapien
agctggattgattcaccatcaagga

SEQ ID NO: 5399111 - DNA, 25 bp, Homo sapien
tagtcagtatgaatcagcgttttga

SEQ ID NO: 5399112 - DNA, 25 bp, Homo sapien
tatgaatcagcgttttgatgatgtc

SEQ ID NO: 5399113 - DNA, 25 bp, Homo sapien
cagaatttctgccttacgggtgata

SEQ ID NO: 5399114 - DNA, 25 bp, Homo sapien
tgatgatgtcttgtgaggataggat

SEQ ID NO: 5399115 - DNA, 25 bp, Homo sapien
ggtcctgcgggagaattcttccatc

SEQ ID NO: 5399116 - DNA, 25 bp, Homo sapien
agggcagcccatttcaggatcctcg

SEQ ID NO: 5399117 - DNA, 25 bp, Homo sapien
aacgcctattgccagggtcctgcgg

SEQ ID NO: 5399118 - DNA, 25 bp, Homo sapien
tgacacactggatcaagggcagccc

SEQ ID NO: 5399119 - DNA, 25 bp, Homo sapien
taatgtatgtcctcataagacctgc

SEQ ID NO: 5399120 - DNA, 25 bp, Homo sapien
gacatgctcagtgtacattagctgg

SEQ ID NO: 5399121 - DNA, 25 bp, Homo sapien
gaagcctggaactatatcttgggca

SEQ ID NO: 5399122 - DNA, 25 bp, Homo sapien
tggcatgtgtagaacaagacctgct

SEQ ID NO: 5399123 - DNA, 25 bp, Homo sapien
gaacaggataacatttgctcagcta

SEQ ID NO: 5399124 - DNA, 25 bp, Homo sapien
cacaagattttactataccctgcaa

SEQ ID NO: 5399125 - DNA, 25 bp, Homo sapien
taagaacagcagtatggtctatatg

SEQ ID NO: 5399126 - DNA, 25 bp, Homo sapien
gaaggtctgaggtgcataacctgca

SEQ ID NO: 5399127 - DNA, 25 bp, Homo sapien
tcctttaggtatctggcatgtgaca

SEQ ID NO: 5399128 - DNA, 25 bp, Homo sapien
tttcccaggacacgtgggagtggct

SEQ ID NO: 5399129 - DNA, 25 bp, Homo sapien
aagttcttactcactgatcccctgg

SEQ ID NO: 5399130 - DNA, 25 bp, Homo sapien
ttcagactttgttcccttgacaagt

SEQ ID NO: 5399131 - DNA, 25 bp, Homo sapien
cacttcagcccaggaatctgagatc

SEQ ID NO: 5399132 - DNA, 25 bp, Homo sapien
agatcagcctgggcaacatagaaag

SEQ ID NO: 5399133 - DNA, 25 bp, Homo sapien
tcagcctgggcaacatagaaagaat

SEQ ID NO: 5399134 - DNA, 25 bp, Homo sapien
tcacttcagcccaggaatctgagat

SEQ ID NO: 5399135 - DNA, 25 bp, Homo sapien
gatacagtctaaatgatcatagtct

SEQ ID NO: 5399136 - DNA, 25 bp, Homo sapien
tacagtctaaatgatcatagtctaa

SEQ ID NO: 5399137 - DNA, 25 bp, Homo sapien
aaagtgatacagtctaaatgatcat

SEQ ID NO: 5399138 - DNA, 25 bp, Homo sapien
gtctaaatgatcatagtctaaatga

SEQ ID NO: 5399139 - DNA, 25 bp, Homo sapien
agcacagctggatgtatcctgcttg

SEQ ID NO: 5399140 - DNA, 25 bp, Homo sapien
cacaggctcaattctagctacagca

SEQ ID NO: 5399141 - DNA, 25 bp, Homo sapien
cacatgtcagtagttcagtgtctgc

SEQ ID NO: 5399142 - DNA, 25 bp, Homo sapien
tgagtttgattatagaagagaggac

SEQ ID NO: 5399143 - DNA, 25 bp, Homo sapien
catgtgtacagagtcctggagttcc

SEQ ID NO: 5399144 - DNA, 25 bp, Homo sapien
tggccaaaactgatgcatgtgtaca

SEQ ID NO: 5399145 - DNA, 25 bp, Homo sapien
tccgatttggctttatacagagact

SEQ ID NO: 5399146 - DNA, 25 bp, Homo sapien
gacaactatgactaatcaaagccat

SEQ ID NO: 5399147 - DNA, 25 bp, Homo sapien
tatgccgtaaagacctgagatgctc

SEQ ID NO: 5399148 - DNA, 25 bp, Homo sapien
catgttaacacagctgagggcaagg

SEQ ID NO: 5399149 - DNA, 25 bp, Homo sapien
gggcaaggctatgccgtaaagacct

SEQ ID NO: 5399150 - DNA, 25 bp, Homo sapien
tctttcgatgaaaccaaaatctacc

SEQ ID NO: 5399151 - DNA, 25 bp, Homo sapien
gagaagaacgctgatttgttgtaac

SEQ ID NO: 5399152 - DNA, 25 bp, Homo sapien
caatctaccatcgaggttctcaaaa

SEQ ID NO: 5399153 - DNA, 25 bp, Homo sapien
tctaccatcgaggttctcaaaaaca

SEQ ID NO: 5399154 - DNA, 25 bp, Homo sapien
aatctaccatcgaggttctcaaaaa

SEQ ID NO: 5399155 - DNA, 25 bp, Homo sapien
tgtagatacacacagttggttctgg

SEQ ID NO: 5399156 - DNA, 25 bp, Homo sapien
tacacacagttggttctggaaccat

SEQ ID NO: 5399157 - DNA, 25 bp, Homo sapien
ttcatcctgtagatacacacagttg

SEQ ID NO: 5399158 - DNA, 25 bp, Homo sapien
gatacacacagttggttctggaacc

SEQ ID NO: 5399159 - DNA, 25 bp, Homo sapien
ggtggagaagtcactatggagctgg

SEQ ID NO: 5399160 - DNA, 25 bp, Homo sapien
gcttggtggagaagtcactatggag

SEQ ID NO: 5399161 - DNA, 25 bp, Homo sapien
cttggtggagaagtcactatggagc

SEQ ID NO: 5399162 - DNA, 25 bp, Homo sapien
ttggtggagaagtcactatggagct

SEQ ID NO: 5399163 - DNA, 25 bp, Homo sapien
gcaatgccaggaataaactcttaag

SEQ ID NO: 5399164 - DNA, 25 bp, Homo sapien
ctaatttctagatctcgagacctga

SEQ ID NO: 5399165 - DNA, 25 bp, Homo sapien
tatgacatcactaacactcccaggg

SEQ ID NO: 5399166 - DNA, 25 bp, Homo sapien
taacgtttaggactcttggccctgc

SEQ ID NO: 5399167 - DNA, 25 bp, Homo sapien
tagacagaggttccacagcatttag

SEQ ID NO: 5399168 - DNA, 25 bp, Homo sapien
tgccagaagtgtagctaggagactc

SEQ ID NO: 5399169 - DNA, 25 bp, Homo sapien
gaaggagcccaagtaacatgctaag

SEQ ID NO: 5399170 - DNA, 25 bp, Homo sapien
gactttattctgtgtccactaggga

SEQ ID NO: 5399171 - DNA, 25 bp, Homo sapien
tggttgacctaataacaggatttta

SEQ ID NO: 5399172 - DNA, 25 bp, Homo sapien
gctatgtatgctagctgtgtttcag

SEQ ID NO: 5399173 - DNA, 25 bp, Homo sapien
gcctttttgcctaagttattgctat

SEQ ID NO: 5399174 - DNA, 25 bp, Homo sapien
tgcttgagtgttgcctttttgccta

SEQ ID NO: 5399175 - DNA, 25 bp, Homo sapien
aagccagcatgtcctacatggctgg

SEQ ID NO: 5399176 - DNA, 25 bp, Homo sapien
caaggggaaagtccatccctgtgat

SEQ ID NO: 5399177 - DNA, 25 bp, Homo sapien
accaggtccccactccgacactggg

SEQ ID NO: 5399178 - DNA, 25 bp, Homo sapien
gacactggggattattatttcccac

SEQ ID NO: 5399179 - DNA, 25 bp, Homo sapien
tggagtggatggtaacaccctgaga

SEQ ID NO: 5399180 - DNA, 25 bp, Homo sapien
tccttatgcctttccggtgagggca

SEQ ID NO: 5399181 - DNA, 25 bp, Homo sapien
tgacccttgatttttaggcttggaa

SEQ ID NO: 5399182 - DNA, 25 bp, Homo sapien
gctctagagggaatagggatccagt

SEQ ID NO: 5399183 - DNA, 25 bp, Homo sapien
ctcagagcatcagtgtgccagcctt

SEQ ID NO: 5399184 - DNA, 25 bp, Homo sapien
tcgataagtcaacatgcccagtcag

SEQ ID NO: 5399185 - DNA, 25 bp, Homo sapien
tcagcttgaggatcggatcccatcc

SEQ ID NO: 5399186 - DNA, 25 bp, Homo sapien
tggcatgcactgtactgatgacctg

SEQ ID NO: 5399187 - DNA, 25 bp, Homo sapien
tgggataatgtagcagtcaaatgaa

SEQ ID NO: 5399188 - DNA, 25 bp, Homo sapien
ggataatgtagcagtcaaatgaatt

SEQ ID NO: 5399189 - DNA, 25 bp, Homo sapien
gaatgggataatgtagcagtcaaat

SEQ ID NO: 5399190 - DNA, 25 bp, Homo sapien
ggagaatgggataatgtagcagtca

SEQ ID NO: 5399191 - DNA, 25 bp, Homo sapien
tacagaataactcgtctaaaaagta

SEQ ID NO: 5399192 - DNA, 25 bp, Homo sapien
tcaattacagaataactcgtctaaa

SEQ ID NO: 5399193 - DNA, 25 bp, Homo sapien
attacagaataactcgtctaaaaag

SEQ ID NO: 5399194 - DNA, 25 bp, Homo sapien
cagaataactcgtctaaaaagtact

SEQ ID NO: 5399195 - DNA, 25 bp, Homo sapien
tcgtgtaactcttgccctctcagct

SEQ ID NO: 5399196 - DNA, 25 bp, Homo sapien
ttcagagtgagaggagtgtcacagc

SEQ ID NO: 5399197 - DNA, 25 bp, Homo sapien
gccagactagggtgtgtcacatcac

SEQ ID NO: 5399198 - DNA, 25 bp, Homo sapien
gcttggtgctggcatcgtgtaactc

SEQ ID NO: 5399199 - DNA, 25 bp, Homo sapien
ctgtggtgatttggaggcttgccca

SEQ ID NO: 5399200 - DNA, 25 bp, Homo sapien
tgtggtgatttggaggcttgcccat

SEQ ID NO: 5399201 - DNA, 25 bp, Homo sapien
cacacacatcttgacagcttggtcc

SEQ ID NO: 5399202 - DNA, 25 bp, Homo sapien
atggctgatagcagtgcactgccta

SEQ ID NO: 5399203 - DNA, 25 bp, Homo sapien
ctaccacacacatcttgacagcttg

SEQ ID NO: 5399204 - DNA, 25 bp, Homo sapien
gatagcagtgcactgcctaccacac

SEQ ID NO: 5399205 - DNA, 25 bp, Homo sapien
aatatccaaggtctacaaacaactt

SEQ ID NO: 5399206 - DNA, 25 bp, Homo sapien
tatccaaggtctacaaacaacttaa

SEQ ID NO: 5399207 - DNA, 25 bp, Homo sapien
taatatccaaggtctacaaacaact

SEQ ID NO: 5399208 - DNA, 25 bp, Homo sapien
ctaatatccaaggtctacaaacaac

SEQ ID NO: 5399209 - DNA, 25 bp, Homo sapien
tgggaaaacatttcccgatattcag

SEQ ID NO: 5399210 - DNA, 25 bp, Homo sapien
ggaacttttctattgttcgttgcaa

SEQ ID NO: 5399211 - DNA, 25 bp, Homo sapien
aaacatttcccgatattcaggaact

SEQ ID NO: 5399212 - DNA, 25 bp, Homo sapien
tgttcgttgcaactttccccagagg

SEQ ID NO: 5399213 - DNA, 25 bp, Homo sapien
tcttctgcataagttggtgtgcatt

SEQ ID NO: 5399214 - DNA, 25 bp, Homo sapien
aaactaatgatctgtacatcttctg

SEQ ID NO: 5399215 - DNA, 25 bp, Homo sapien
tctggctgtgcctgcaaaactaatg

SEQ ID NO: 5399216 - DNA, 25 bp, Homo sapien
ttggtgtgcattgtgaagagatagt

SEQ ID NO: 5399217 - DNA, 25 bp, Homo sapien
ctattgagaacttgggaagagtaag

SEQ ID NO: 5399218 - DNA, 25 bp, Homo sapien
gggcactgagaggttattatggcca

SEQ ID NO: 5399219 - DNA, 25 bp, Homo sapien
caccccgtggggcactgagaggtta

SEQ ID NO: 5399220 - DNA, 25 bp, Homo sapien
ccgtggggcactgagaggttattat

SEQ ID NO: 5399221 - DNA, 25 bp, Homo sapien
ggcactgagaggttattatggccat

SEQ ID NO: 5399222 - DNA, 25 bp, Homo sapien
caagagtgttctatgtatctgctgt

SEQ ID NO: 5399223 - DNA, 25 bp, Homo sapien
ggtgaccaagagtgttctatgtatc

SEQ ID NO: 5399224 - DNA, 25 bp, Homo sapien
catcatttctctggtgaccaagagt

SEQ ID NO: 5399225 - DNA, 25 bp, Homo sapien
gtgaccaagagtgttctatgtatct

SEQ ID NO: 5399226 - DNA, 25 bp, Homo sapien
gcatgtggtctaaatttgacccatc

SEQ ID NO: 5399227 - DNA, 25 bp, Homo sapien
ccaggaatttggcttcaggaccaac

SEQ ID NO: 5399228 - DNA, 25 bp, Homo sapien
ggaatttggcttcaggaccaaccat

SEQ ID NO: 5399229 - DNA, 25 bp, Homo sapien
catgtggtctaaatttgacccatct

SEQ ID NO: 5399230 - DNA, 25 bp, Homo sapien
cattaagaacgtttgaatcaaagtc

SEQ ID NO: 5399231 - DNA, 25 bp, Homo sapien
gctgccctctcattaagaacgtttg

SEQ ID NO: 5399232 - DNA, 25 bp, Homo sapien
aacaagggagatactcttgtccagc

SEQ ID NO: 5399233 - DNA, 25 bp, Homo sapien
tcaggtgtctactgctcgctcaata

SEQ ID NO: 5399234 - DNA, 25 bp, Homo sapien
ttgcacagctggctcggtaactgtg

SEQ ID NO: 5399235 - DNA, 25 bp, Homo sapien
gctggctcggtaactgtgatacact

SEQ ID NO: 5399236 - DNA, 25 bp, Homo sapien
gctcggtaactgtgatacactggga

SEQ ID NO: 5399237 - DNA, 25 bp, Homo sapien
cagctggctcggtaactgtgataca

SEQ ID NO: 5399238 - DNA, 25 bp, Homo sapien
gagccaatctgaatggactgatatt

SEQ ID NO: 5399239 - DNA, 25 bp, Homo sapien
caatctgaatggactgatattaatc

SEQ ID NO: 5399240 - DNA, 25 bp, Homo sapien
gaatggactgatattaatcttgacc

SEQ ID NO: 5399241 - DNA, 25 bp, Homo sapien
gggagccaatctgaatggactgata

SEQ ID NO: 5399242 - DNA, 25 bp, Homo sapien
ctctcctaagggcatatttggctcc

SEQ ID NO: 5399243 - DNA, 25 bp, Homo sapien
aagaagtcaaatatctctcctaagg

SEQ ID NO: 5399244 - DNA, 25 bp, Homo sapien
taagggcatatttggctccacaacc

SEQ ID NO: 5399245 - DNA, 25 bp, Homo sapien
gaagtcaaatatctctcctaagggc

SEQ ID NO: 5399246 - DNA, 25 bp, Homo sapien
atttctggcttacacagccaactaa

SEQ ID NO: 5399247 - DNA, 25 bp, Homo sapien
gcttacacagccaactaagagagag

SEQ ID NO: 5399248 - DNA, 25 bp, Homo sapien
tctggcttacacagccaactaagag

SEQ ID NO: 5399249 - DNA, 25 bp, Homo sapien
ggcttacacagccaactaagagaga

SEQ ID NO: 5399250 - DNA, 25 bp, Homo sapien
aaagggattggatttcaaggctaca

SEQ ID NO: 5399251 - DNA, 25 bp, Homo sapien
gaatcctcggaattatagtaaattg

SEQ ID NO: 5399252 - DNA, 25 bp, Homo sapien
gctacactgggagccctgatgaaag

SEQ ID NO: 5399253 - DNA, 25 bp, Homo sapien
ggccatttcactagtgagaaaggga

SEQ ID NO: 5399254 - DNA, 25 bp, Homo sapien
gagtcatcgtacgtcaccagaggct

SEQ ID NO: 5399255 - DNA, 25 bp, Homo sapien
cctgtattgttgaggaaatctctaa

SEQ ID NO: 5399256 - DNA, 25 bp, Homo sapien
ccagactgcaaaggtcagagtcttt

SEQ ID NO: 5399257 - DNA, 25 bp, Homo sapien
taagggtatctatcctgcagcgggt

SEQ ID NO: 5399258 - DNA, 25 bp, Homo sapien
gagaactacagtgtttcttatataa

SEQ ID NO: 5399259 - DNA, 25 bp, Homo sapien
gggagaactacagtgtttcttatat

SEQ ID NO: 5399260 - DNA, 25 bp, Homo sapien
gagggagaactacagtgtttcttat

SEQ ID NO: 5399261 - DNA, 25 bp, Homo sapien
gaactacagtgtttcttatataagt

SEQ ID NO: 5399262 - DNA, 25 bp, Homo sapien
gcatcagctagagaaacaccaaagt

SEQ ID NO: 5399263 - DNA, 25 bp, Homo sapien
tgtttcttcagttgcgctagcctca

SEQ ID NO: 5399264 - DNA, 25 bp, Homo sapien
ggtgtatcgattctagccccaaagt

SEQ ID NO: 5399265 - DNA, 25 bp, Homo sapien
tcaatagccacacgtgatgagtacc

SEQ ID NO: 5399266 - DNA, 25 bp, Homo sapien
cccatgtctcaaaaactggggccat

SEQ ID NO: 5399267 - DNA, 25 bp, Homo sapien
gggttttctggctgcactgtgcctt

SEQ ID NO: 5399268 - DNA, 25 bp, Homo sapien
tgcactgtgccttcccatgtctcaa

SEQ ID NO: 5399269 - DNA, 25 bp, Homo sapien
actgtgccttcccatgtctcaaaaa

SEQ ID NO: 5399270 - DNA, 25 bp, Homo sapien
tctacttgccgaaacattttctaag

SEQ ID NO: 5399271 - DNA, 25 bp, Homo sapien
gcttctgtgctctcactttgatgct

SEQ ID NO: 5399272 - DNA, 25 bp, Homo sapien
gctgtgtatcacctcctttatccaa

SEQ ID NO: 5399273 - DNA, 25 bp, Homo sapien
tgctcaacatcaaaggccttcctat

SEQ ID NO: 5399274 - DNA, 25 bp, Homo sapien
cagaacataaggctctccatcagtg

SEQ ID NO: 5399275 - DNA, 25 bp, Homo sapien
gaacataaggctctccatcagtgct

SEQ ID NO: 5399276 - DNA, 25 bp, Homo sapien
cataaggctctccatcagtgcttgc

SEQ ID NO: 5399277 - DNA, 25 bp, Homo sapien
gaacagaacataaggctctccatca

SEQ ID NO: 5399278 - DNA, 25 bp, Homo sapien
catcgaagggatgttgagtgtccca

SEQ ID NO: 5399279 - DNA, 25 bp, Homo sapien
tcatcgaagggatgttgagtgtccc

SEQ ID NO: 5399280 - DNA, 25 bp, Homo sapien
cattttgagaaccttcccagtggcg

SEQ ID NO: 5399281 - DNA, 25 bp, Homo sapien
tttgagaaccttcccagtggcgttc

SEQ ID NO: 5399282 - DNA, 25 bp, Homo sapien
gagaaccttcccagtggcgttcaaa

SEQ ID NO: 5399283 - DNA, 25 bp, Homo sapien
gaaccttcccagtggcgttcaaaca

SEQ ID NO: 5399284 - DNA, 25 bp, Homo sapien
gaaacctctcatcaaagccaatcag

SEQ ID NO: 5399285 - DNA, 25 bp, Homo sapien
aacctctcatcaaagccaatcagca

SEQ ID NO: 5399286 - DNA, 25 bp, Homo sapien
tcagaaacctctcatcaaagccaat

SEQ ID NO: 5399287 - DNA, 25 bp, Homo sapien
tcttttcagaaacctctcatcaaag

SEQ ID NO: 5399288 - DNA, 25 bp, Homo sapien
acgtcctcattgtttcgcactctcc

SEQ ID NO: 5399289 - DNA, 25 bp, Homo sapien
tcacacgtcctcattgtttcgcact

SEQ ID NO: 5399290 - DNA, 25 bp, Homo sapien
acacgtcctcattgtttcgcactct

SEQ ID NO: 5399291 - DNA, 25 bp, Homo sapien
cacacgtcctcattgtttcgcactc

SEQ ID NO: 5399292 - DNA, 25 bp, Homo sapien
tgctcgtgatagctggcctggattt

SEQ ID NO: 5399293 - DNA, 25 bp, Homo sapien
ctgctcgtgatagctggcctggatt

SEQ ID NO: 5399294 - DNA, 25 bp, Homo sapien
ttcccctgctgctcgtgatagctgg

SEQ ID NO: 5399295 - DNA, 25 bp, Homo sapien
gctgctcgtgatagctggcctggat

SEQ ID NO: 5399296 - DNA, 25 bp, Homo sapien
cagtgtcctgtctgctgtgttaagg

SEQ ID NO: 5399297 - DNA, 25 bp, Homo sapien
ttttctgtagcatcctgccgatgac

SEQ ID NO: 5399298 - DNA, 25 bp, Homo sapien
aggaagggcatcaatgtttattttc

SEQ ID NO: 5399299 - DNA, 25 bp, Homo sapien
tcttcagggtttgactgtttggcgg

SEQ ID NO: 5399300 - DNA, 25 bp, Homo sapien
ggcaacctagtctcactgtacccaa

SEQ ID NO: 5399301 - DNA, 25 bp, Homo sapien
tctagtctgagaacagatcacgcag

SEQ ID NO: 5399302 - DNA, 25 bp, Homo sapien
taatacagtcacctgaaccagcttc

SEQ ID NO: 5399303 - DNA, 25 bp, Homo sapien
tgactcattcggcttcctgacctag

SEQ ID NO: 5399304 - DNA, 25 bp, Homo sapien
ttttgcaagttttcgtctgctgcca

SEQ ID NO: 5399305 - DNA, 25 bp, Homo sapien
ttcggccaaagtccatttacaagac

SEQ ID NO: 5399306 - DNA, 25 bp, Homo sapien
caagttttcgtctgctgccaagcgg

SEQ ID NO: 5399307 - DNA, 25 bp, Homo sapien
ttgcaagttttcgtctgctgccaag

SEQ ID NO: 5399308 - DNA, 25 bp, Homo sapien
caactttggagtgtgccacagaaca

SEQ ID NO: 5399309 - DNA, 25 bp, Homo sapien
tacgtcattgggcaggcaactttgg

SEQ ID NO: 5399310 - DNA, 25 bp, Homo sapien
tgatgttgggttacgtcattgggca

SEQ ID NO: 5399311 - DNA, 25 bp, Homo sapien
ctacattgatgttgggttacgtcat

SEQ ID NO: 5399312 - DNA, 25 bp, Homo sapien
cagcaataggttttctagccaatct

SEQ ID NO: 5399313 - DNA, 25 bp, Homo sapien
gacataaggatgcaccactgatgct

SEQ ID NO: 5399314 - DNA, 25 bp, Homo sapien
tcaggcgtcttcaggacagataccg

SEQ ID NO: 5399315 - DNA, 25 bp, Homo sapien
ggatggtttcgctgcctttagttaa

SEQ ID NO: 5399316 - DNA, 25 bp, Homo sapien
tattcctgtgtaggaaggttgtttc

SEQ ID NO: 5399317 - DNA, 25 bp, Homo sapien
ttttgttgggattgcggaaatgtct

SEQ ID NO: 5399318 - DNA, 25 bp, Homo sapien
tttaccatgctcctctggtgctact

SEQ ID NO: 5399319 - DNA, 25 bp, Homo sapien
gctgatggttcatgttcagatgcca

SEQ ID NO: 5399320 - DNA, 25 bp, Homo sapien
tccacaggccttgcttaatgccgtc

SEQ ID NO: 5399321 - DNA, 25 bp, Homo sapien
gtcaatcaacttggaactgctacga

SEQ ID NO: 5399322 - DNA, 25 bp, Homo sapien
cttaatgccgtctgtccctggagca

SEQ ID NO: 5399323 - DNA, 25 bp, Homo sapien
ggaactgctacgacatctccacagg

SEQ ID NO: 5399324 - DNA, 25 bp, Homo sapien
cacctcatactcacaaaaaccaagg

SEQ ID NO: 5399325 - DNA, 25 bp, Homo sapien
ccacctcatactcacaaaaaccaag

SEQ ID NO: 5399326 - DNA, 25 bp, Homo sapien
ctgtttctatgatgcctgtctccat

SEQ ID NO: 5399327 - DNA, 25 bp, Homo sapien
gccatgatcagcattaagaatgtgg

SEQ ID NO: 5399328 - DNA, 25 bp, Homo sapien
ggtgctgaaacggtgtagagaagat

SEQ ID NO: 5399329 - DNA, 25 bp, Homo sapien
aattcccttcaaaatgtgacctagg

SEQ ID NO: 5399330 - DNA, 25 bp, Homo sapien
gatgccatagggaaacctaattccc

SEQ ID NO: 5399331 - DNA, 25 bp, Homo sapien
ttatcttactatgcctgagtgaatg

SEQ ID NO: 5399332 - DNA, 25 bp, Homo sapien
tttcttcactgaactctttagtagc

SEQ ID NO: 5399333 - DNA, 25 bp, Homo sapien
gagtgaatgattaggttttgctccc

SEQ ID NO: 5399334 - DNA, 25 bp, Homo sapien
tggacatggcactatgcattatcct

SEQ ID NO: 5399335 - DNA, 25 bp, Homo sapien
taacattttgtagtaaatcagttca

SEQ ID NO: 5399336 - DNA, 25 bp, Homo sapien
gagtcctgggttgaggccatctcca

SEQ ID NO: 5399337 - DNA, 25 bp, Homo sapien
cactgaattgacaggcaaggacgtc

SEQ ID NO: 5399338 - DNA, 25 bp, Homo sapien
taatgcaggagcttatgtgagcacg

SEQ ID NO: 5399339 - DNA, 25 bp, Homo sapien
ggatccaggtctgcttaatgcagga

SEQ ID NO: 5399340 - DNA, 25 bp, Homo sapien
gaagatgtgatgacagagaaaattg

SEQ ID NO: 5399341 - DNA, 25 bp, Homo sapien
agatgtgatgacagagaaaattgtg

SEQ ID NO: 5399342 - DNA, 25 bp, Homo sapien
tgtgatgacagagaaaattgtggca

SEQ ID NO: 5399343 - DNA, 25 bp, Homo sapien
gacagagaaaattgtggcaaaggct

SEQ ID NO: 5399344 - DNA, 25 bp, Homo sapien
ggccagtgattctttgccctacaat

SEQ ID NO: 5399345 - DNA, 25 bp, Homo sapien
aggaatgtcacaaggatctgccaag

SEQ ID NO: 5399346 - DNA, 25 bp, Homo sapien
tgccctacaattctgaaggtaagtc

SEQ ID NO: 5399347 - DNA, 25 bp, Homo sapien
gaaggtaagtctgccaagctctggc

SEQ ID NO: 5399348 - DNA, 25 bp, Homo sapien
tccacacctggcgttcccaacctgt

SEQ ID NO: 5399349 - DNA, 25 bp, Homo sapien
cttccacacctggcgttcccaacct

SEQ ID NO: 5399350 - DNA, 25 bp, Homo sapien
ccacacctggcgttcccaacctgtc

SEQ ID NO: 5399351 - DNA, 25 bp, Homo sapien
acacctggcgttcccaacctgtcca

SEQ ID NO: 5399352 - DNA, 25 bp, Homo sapien
agaatacaaatgtgtttcacaagtt

SEQ ID NO: 5399353 - DNA, 25 bp, Homo sapien
cagaatacaaatgtgtttcacaagt

SEQ ID NO: 5399354 - DNA, 25 bp, Homo sapien
cttgtttcctcaaggtattttgttg

SEQ ID NO: 5399355 - DNA, 25 bp, Homo sapien
ttgcaatgcaaagctgaatcaacca

SEQ ID NO: 5399356 - DNA, 25 bp, Homo sapien
tttgcaatgcaaagctgaatcaacc

SEQ ID NO: 5399357 - DNA, 25 bp, Homo sapien
aatttgcaatgcaaagctgaatcaa

SEQ ID NO: 5399358 - DNA, 25 bp, Homo sapien
tgcaatgcaaagctgaatcaaccat

SEQ ID NO: 5399359 - DNA, 25 bp, Homo sapien
gatggaatttgggaagtgtgtcctc

SEQ ID NO: 5399360 - DNA, 25 bp, Homo sapien
ggccacctgatggaatttgggaagt

SEQ ID NO: 5399361 - DNA, 25 bp, Homo sapien
aatggcttaggccacctgatggaat

SEQ ID NO: 5399362 - DNA, 25 bp, Homo sapien
aagtgtatgccaaatggcttaggcc

SEQ ID NO: 5399363 - DNA, 25 bp, Homo sapien
ctagcttctttaagactgacccttc

SEQ ID NO: 5399364 - DNA, 25 bp, Homo sapien
accacacttagcctgctggggtttt

SEQ ID NO: 5399365 - DNA, 25 bp, Homo sapien
cacacttagcctgctggggtttttt

SEQ ID NO: 5399366 - DNA, 25 bp, Homo sapien
ttttctagcttctttaagactgacc

SEQ ID NO: 5399367 - DNA, 25 bp, Homo sapien
tccttcctaacatagagggtctaga

SEQ ID NO: 5399368 - DNA, 25 bp, Homo sapien
aacttagattactcagactggtcac

SEQ ID NO: 5399369 - DNA, 25 bp, Homo sapien
tcttctaatgtctcaggctggtcac

SEQ ID NO: 5399370 - DNA, 25 bp, Homo sapien
tcttggccccagatatgatagtttg

SEQ ID NO: 5399371 - DNA, 25 bp, Homo sapien
gttattgggctgctcataatttcta

SEQ ID NO: 5399372 - DNA, 25 bp, Homo sapien
gaggtgtttatagtagtcccaaatg

SEQ ID NO: 5399373 - DNA, 25 bp, Homo sapien
aatttctatttcattcaagctagaa

SEQ ID NO: 5399374 - DNA, 25 bp, Homo sapien
tcttgattattctagctaatggtct

SEQ ID NO: 5399375 - DNA, 25 bp, Homo sapien
cctctcagtgccgcgtcgttctgcc

SEQ ID NO: 5399376 - DNA, 25 bp, Homo sapien
tcagtgccgcgtcgttctgccagct

SEQ ID NO: 5399377 - DNA, 25 bp, Homo sapien
tctcagtgccgcgtcgttctgccag

SEQ ID NO: 5399378 - DNA, 25 bp, Homo sapien
ctgcctctcagtgccgcgtcgttct

SEQ ID NO: 5399379 - DNA, 25 bp, Homo sapien
cagcaggtttgtagtgtggtaatca

SEQ ID NO: 5399380 - DNA, 25 bp, Homo sapien
taatcagtggcataaaggtggagtg

SEQ ID NO: 5399381 - DNA, 25 bp, Homo sapien
tagagcagtttccatcatcagcagg

SEQ ID NO: 5399382 - DNA, 25 bp, Homo sapien
caagagtggacatcaggaagtgtgt

SEQ ID NO: 5399383 - DNA, 25 bp, Homo sapien
ggcactgatattggcactgtctcca

SEQ ID NO: 5399384 - DNA, 25 bp, Homo sapien
gcaaaggaggaaccctctggggcac

SEQ ID NO: 5399385 - DNA, 25 bp, Homo sapien
aaggaggaaccctctggggcactga

SEQ ID NO: 5399386 - DNA, 25 bp, Homo sapien
tctggggcactgatattggcactgt

SEQ ID NO: 5399387 - DNA, 25 bp, Homo sapien
ctaacagcagggtttggggatgcag

SEQ ID NO: 5399388 - DNA, 25 bp, Homo sapien
cagggtttggggatgcagtggggtt

SEQ ID NO: 5399389 - DNA, 25 bp, Homo sapien
aacagcagggtttggggatgcagtg

SEQ ID NO: 5399390 - DNA, 25 bp, Homo sapien
cagcagggtttggggatgcagtggg

SEQ ID NO: 5399391 - DNA, 25 bp, Homo sapien
tttgacacacaattatggatatgcc

SEQ ID NO: 5399392 - DNA, 25 bp, Homo sapien
cttttgacacacaattatggatatg

SEQ ID NO: 5399393 - DNA, 25 bp, Homo sapien
tcttttgacacacaattatggatat

SEQ ID NO: 5399394 - DNA, 25 bp, Homo sapien
ttttgacacacaattatggatatgc

SEQ ID NO: 5399395 - DNA, 25 bp, Homo sapien
tctagaactcttacgtcatcccaaa

SEQ ID NO: 5399396 - DNA, 25 bp, Homo sapien
tattctaggtccctcatacaactag

SEQ ID NO: 5399397 - DNA, 25 bp, Homo sapien
ggttcacaatgttaggcaatcatca

SEQ ID NO: 5399398 - DNA, 25 bp, Homo sapien
cagcccttggtaatctttagtctac

SEQ ID NO: 5399399 - DNA, 25 bp, Homo sapien
gggtcatccccacaactgctgtgaa

SEQ ID NO: 5399400 - DNA, 25 bp, Homo sapien
gttgtgctgtgttatttatccttcc

SEQ ID NO: 5399401 - DNA, 25 bp, Homo sapien
tccttccacgaattgctgcaaaagc

SEQ ID NO: 5399402 - DNA, 25 bp, Homo sapien
tctcccagatcagtggggtaacttg

SEQ ID NO: 5399403 - DNA, 25 bp, Homo sapien
ataaatactgcggaaacattgacca

SEQ ID NO: 5399404 - DNA, 25 bp, Homo sapien
tactgcggaaacattgaccaaacaa

SEQ ID NO: 5399405 - DNA, 25 bp, Homo sapien
tttaataaatactgcggaaacattg

SEQ ID NO: 5399406 - DNA, 25 bp, Homo sapien
gcggaaacattgaccaaacaaacat

SEQ ID NO: 5399407 - DNA, 25 bp, Homo sapien
tctacatgccgaacctaaggtcagg

SEQ ID NO: 5399408 - DNA, 25 bp, Homo sapien
caagcgccaacaataaacaggtcag

SEQ ID NO: 5399409 - DNA, 25 bp, Homo sapien
ctaaatgctaaggtcacagtgccag

SEQ ID NO: 5399410 - DNA, 25 bp, Homo sapien
tttacgtaacaacagagaccaagtg

SEQ ID NO: 5399411 - DNA, 25 bp, Homo sapien
ccaaggtggcaacgtgaaaaatgtc

SEQ ID NO: 5399412 - DNA, 25 bp, Homo sapien
tttcgtaagtccgtagcaactgccg

SEQ ID NO: 5399413 - DNA, 25 bp, Homo sapien
tctgctaggcatgtgtgaaatccgc

SEQ ID NO: 5399414 - DNA, 25 bp, Homo sapien
tattttccgactgtaaagctgagca

SEQ ID NO: 5399415 - DNA, 25 bp, Homo sapien
gcagatcagacttgcagccgaccaa

SEQ ID NO: 5399416 - DNA, 25 bp, Homo sapien
tgcctgtgattggagagctctacta

SEQ ID NO: 5399417 - DNA, 25 bp, Homo sapien
tactaacatctgtccgcagatcaga

SEQ ID NO: 5399418 - DNA, 25 bp, Homo sapien
taggacactggcgtctgcctgtgat

SEQ ID NO: 5399419 - DNA, 25 bp, Homo sapien
ttggtatttggacaaaattcctgga

SEQ ID NO: 5399420 - DNA, 25 bp, Homo sapien
tttggacaaaattcctggatttcac

SEQ ID NO: 5399421 - DNA, 25 bp, Homo sapien
tatttggacaaaattcctggatttc

SEQ ID NO: 5399422 - DNA, 25 bp, Homo sapien
tggtatttggacaaaattcctggat

SEQ ID NO: 5399423 - DNA, 25 bp, Homo sapien
ggcagaggcaacactagcacaagta

SEQ ID NO: 5399424 - DNA, 25 bp, Homo sapien
catgccaccacgagctgaggctcta

SEQ ID NO: 5399425 - DNA, 25 bp, Homo sapien
ctccactggctgacattagaatgaa

SEQ ID NO: 5399426 - DNA, 25 bp, Homo sapien
gagtgtcccttgagatgaagaagca

SEQ ID NO: 5399427 - DNA, 25 bp, Homo sapien
ttcagcaatgcctggcttggaattc

SEQ ID NO: 5399428 - DNA, 25 bp, Homo sapien
aagcaagcagctttttgtggcttca

SEQ ID NO: 5399429 - DNA, 25 bp, Homo sapien
gtggcttcatttcctcaagcttgag

SEQ ID NO: 5399430 - DNA, 25 bp, Homo sapien
tgtcctctttaagaacaagcaagca

SEQ ID NO: 5399431 - DNA, 25 bp, Homo sapien
tcagcacagcatccgaatcagggta

SEQ ID NO: 5399432 - DNA, 25 bp, Homo sapien
tctactgatgtcaaagcaaatcagc

SEQ ID NO: 5399433 - DNA, 25 bp, Homo sapien
ggcggacattgtcatagtaaggaga

SEQ ID NO: 5399434 - DNA, 25 bp, Homo sapien
ggacactgtccagggtctctggtct

SEQ ID NO: 5399435 - DNA, 25 bp, Homo sapien
aatatatgatgaatgaagcctcaca

SEQ ID NO: 5399436 - DNA, 25 bp, Homo sapien
gcattaactctaccctttccggcta

SEQ ID NO: 5399437 - DNA, 25 bp, Homo sapien
ggctaagtcctttgactgtcacatc

SEQ ID NO: 5399438 - DNA, 25 bp, Homo sapien
tgtctgtcatgcattaactctaccc

SEQ ID NO: 5399439 - DNA, 25 bp, Homo sapien
tgttcatgaggcaatagcatagtta

SEQ ID NO: 5399440 - DNA, 25 bp, Homo sapien
tggccaattttgaagcacaagatat

SEQ ID NO: 5399441 - DNA, 25 bp, Homo sapien
catgacaagattcgaaagagtgttc

SEQ ID NO: 5399442 - DNA, 25 bp, Homo sapien
tacttctatgcttggcaaatgtggc

SEQ ID NO: 5399443 - DNA, 25 bp, Homo sapien
gatcccctaagactaagagctgaag

SEQ ID NO: 5399444 - DNA, 25 bp, Homo sapien
gcctgtccagcgtaataaagccaag

SEQ ID NO: 5399445 - DNA, 25 bp, Homo sapien
tacctgcacatacgaaggacagcct

SEQ ID NO: 5399446 - DNA, 25 bp, Homo sapien
taaagccaagaagtgtacagctggg

SEQ ID NO: 5399447 - DNA, 25 bp, Homo sapien
caaaactggccgtgtaattctcaaa

SEQ ID NO: 5399448 - DNA, 25 bp, Homo sapien
caactctattctttgtgtgtcgatt

SEQ ID NO: 5399449 - DNA, 25 bp, Homo sapien
tctcaaacactgtaggaacgtaatt

SEQ ID NO: 5399450 - DNA, 25 bp, Homo sapien
tgtgtgtcgatttcaaaactggccg

SEQ ID NO: 5399451 - DNA, 25 bp, Homo sapien
aagaggaaggaaagagggcaaagag

SEQ ID NO: 5399452 - DNA, 25 bp, Homo sapien
aatgggcaaaagaggaaggaaagag

SEQ ID NO: 5399453 - DNA, 25 bp, Homo sapien
ggcaaaagaggaaggaaagagggca

SEQ ID NO: 5399454 - DNA, 25 bp, Homo sapien
gcaaaagaggaaggaaagagggcaa

SEQ ID NO: 5399455 - DNA, 25 bp, Homo sapien
cctcgtggaagccgcggccggccac

SEQ ID NO: 5399456 - DNA, 25 bp, Homo sapien
tggaagccgcggccggccacactca

SEQ ID NO: 5399457 - DNA, 25 bp, Homo sapien
tggccgaccccctcgtggaagccgc

SEQ ID NO: 5399458 - DNA, 25 bp, Homo sapien
ctggccgaccccctcgtggaagccg

SEQ ID NO: 5399459 - DNA, 25 bp, Homo sapien
catttcacgttctgattaggatcca

SEQ ID NO: 5399460 - DNA, 25 bp, Homo sapien
gagcagcgcagtttttccacactga

SEQ ID NO: 5399461 - DNA, 25 bp, Homo sapien
tccttggcgaagacatggagcagcg

SEQ ID NO: 5399462 - DNA, 25 bp, Homo sapien
ttaggatccatgatagatttgctgg

SEQ ID NO: 5399463 - DNA, 25 bp, Homo sapien
ccttattttctcttggaacaggaat

SEQ ID NO: 5399464 - DNA, 25 bp, Homo sapien
tgccttattttctcttggaacagga

SEQ ID NO: 5399465 - DNA, 25 bp, Homo sapien
tgttgccttattttctcttggaaca

SEQ ID NO: 5399466 - DNA, 25 bp, Homo sapien
tgatgttgccttattttctcttgga

SEQ ID NO: 5399467 - DNA, 25 bp, Homo sapien
aaaataaatcacaaggctgatgggc

SEQ ID NO: 5399468 - DNA, 25 bp, Homo sapien
agaggagcaggctggttactcccct

SEQ ID NO: 5399469 - DNA, 25 bp, Homo sapien
tttaagcctgactcctcaccgcgcc

SEQ ID NO: 5399470 - DNA, 25 bp, Homo sapien
ctctgaaacgcggcgcagacgagga

SEQ ID NO: 5399471 - DNA, 25 bp, Homo sapien
aggctggttactcccctccaacaag

SEQ ID NO: 5399472 - DNA, 25 bp, Homo sapien
tgcctcctccccttttatggagcct

SEQ ID NO: 5399473 - DNA, 25 bp, Homo sapien
tcctccccttttatggagcctggga

SEQ ID NO: 5399474 - DNA, 25 bp, Homo sapien
ctcctccccttttatggagcctggg

SEQ ID NO: 5399475 - DNA, 25 bp, Homo sapien
gggagcgagcgctgttggcgttgca

SEQ ID NO: 5399476 - DNA, 25 bp, Homo sapien
tagaaactacataccctttgacaca

SEQ ID NO: 5399477 - DNA, 25 bp, Homo sapien
gaaatctcccctcccatagaaacta

SEQ ID NO: 5399478 - DNA, 25 bp, Homo sapien
tcccatagaaactacataccctttg

SEQ ID NO: 5399479 - DNA, 25 bp, Homo sapien
taccctttgacacaaaaagggctga

SEQ ID NO: 5399480 - DNA, 25 bp, Homo sapien
gatgcctgatgccatttgtttatac

SEQ ID NO: 5399481 - DNA, 25 bp, Homo sapien
tttgatgcctgatgccatttgttta

SEQ ID NO: 5399482 - DNA, 25 bp, Homo sapien
tttcagatctttgatgcctgatgcc

SEQ ID NO: 5399483 - DNA, 25 bp, Homo sapien
gatctttgatgcctgatgccatttg

SEQ ID NO: 5399484 - DNA, 25 bp, Homo sapien
catatacacaacagccctggagtcc

SEQ ID NO: 5399485 - DNA, 25 bp, Homo sapien
gttcactgttcccatatacacaaca

SEQ ID NO: 5399486 - DNA, 25 bp, Homo sapien
attccaggtccccgatgttcactgt

SEQ ID NO: 5399487 - DNA, 25 bp, Homo sapien
tgttcccatatacacaacagccctg

SEQ ID NO: 5399488 - DNA, 25 bp, Homo sapien
ggcattcatgttttaggcccagtta

SEQ ID NO: 5399489 - DNA, 25 bp, Homo sapien
gaaagcttggagtgaccacatggca

SEQ ID NO: 5399490 - DNA, 25 bp, Homo sapien
tgtccctatgcttactcactgtgag

SEQ ID NO: 5399491 - DNA, 25 bp, Homo sapien
tcctctgaatgagcactgtgggcga

SEQ ID NO: 5399492 - DNA, 25 bp, Homo sapien
tcaccttctgcagttactctctcat

SEQ ID NO: 5399493 - DNA, 25 bp, Homo sapien
cttcaccttctgcagttactctctc

SEQ ID NO: 5399494 - DNA, 25 bp, Homo sapien
tctctcatccactgccctcctctga

SEQ ID NO: 5399495 - DNA, 25 bp, Homo sapien
agttactctctcatccactgccctc

SEQ ID NO: 5399496 - DNA, 25 bp, Homo sapien
tctgtccctacaagcctgagctcta

SEQ ID NO: 5399497 - DNA, 25 bp, Homo sapien
tcagccttgcaagtgtgttctggaa

SEQ ID NO: 5399498 - DNA, 25 bp, Homo sapien
caaagcaatactcggggaactccag

SEQ ID NO: 5399499 - DNA, 25 bp, Homo sapien
gagacagcattaaggctaagctcag

SEQ ID NO: 5399500 - DNA, 25 bp, Homo sapien
gcagacattcattgctattgattca

SEQ ID NO: 5399501 - DNA, 25 bp, Homo sapien
tattgattcatctagataatcttcc

SEQ ID NO: 5399502 - DNA, 25 bp, Homo sapien
catgagctggagctactcgactttg

SEQ ID NO: 5399503 - DNA, 25 bp, Homo sapien
tttgggacccagatcctaggacctc

SEQ ID NO: 5399504 - DNA, 25 bp, Homo sapien
ggtggcccaaagcatgaggcccctg

SEQ ID NO: 5399505 - DNA, 25 bp, Homo sapien
tgaggcccctgccttacgttcccca

SEQ ID NO: 5399506 - DNA, 25 bp, Homo sapien
gtggcccaaagcatgaggcccctgc

SEQ ID NO: 5399507 - DNA, 25 bp, Homo sapien
aaggtggcccaaagcatgaggcccc

SEQ ID NO: 5399508 - DNA, 25 bp, Homo sapien
tatttgcactgaacaagcccctaag

SEQ ID NO: 5399509 - DNA, 25 bp, Homo sapien
tagtacctgtgaaaagtagaagggc

SEQ ID NO: 5399510 - DNA, 25 bp, Homo sapien
gacaccaggcatgtaaagacagcag

SEQ ID NO: 5399511 - DNA, 25 bp, Homo sapien
tatgagtttgagaccttagtacctg

SEQ ID NO: 5399512 - DNA, 25 bp, Homo sapien
tgtctttccaatgtgcctgcaggcc

SEQ ID NO: 5399513 - DNA, 25 bp, Homo sapien
cagtgggacttagactccttaggca

SEQ ID NO: 5399514 - DNA, 25 bp, Homo sapien
tgaatgacaattcaccagtgcggct

SEQ ID NO: 5399515 - DNA, 25 bp, Homo sapien
catgtttaggcaaaaccctggtgca

SEQ ID NO: 5399516 - DNA, 25 bp, Homo sapien
ggagcctggacccttcttacagctg

SEQ ID NO: 5399517 - DNA, 25 bp, Homo sapien
gagcctggacccttcttacagctga

SEQ ID NO: 5399518 - DNA, 25 bp, Homo sapien
ctggagcctggacccttcttacagc

SEQ ID NO: 5399519 - DNA, 25 bp, Homo sapien
agcctggacccttcttacagctgaa

SEQ ID NO: 5399520 - DNA, 25 bp, Homo sapien
tccctgcttctgtgtgctgtcttcc

SEQ ID NO: 5399521 - DNA, 25 bp, Homo sapien
tgaaggattcctgagctgcaactcc

SEQ ID NO: 5399522 - DNA, 25 bp, Homo sapien
tctccaacattctgaggtggtttcc

SEQ ID NO: 5399523 - DNA, 25 bp, Homo sapien
tttccctattatttccactgccagc

SEQ ID NO: 5399524 - DNA, 25 bp, Homo sapien
cacaggttgagttgacagtggcttc

SEQ ID NO: 5399525 - DNA, 25 bp, Homo sapien
cagtctatgtcccttggtacctggg

SEQ ID NO: 5399526 - DNA, 25 bp, Homo sapien
gaagggaaacttctgtctgctacag

SEQ ID NO: 5399527 - DNA, 25 bp, Homo sapien
gaaacgcatctaatgttgactccag

SEQ ID NO: 5399528 - DNA, 25 bp, Homo sapien
ttctgagcacttgaggacttagaat

SEQ ID NO: 5399529 - DNA, 25 bp, Homo sapien
cttcttaaagccagttccatgatgt

SEQ ID NO: 5399530 - DNA, 25 bp, Homo sapien
tgagcacttgaggacttagaattag

SEQ ID NO: 5399531 - DNA, 25 bp, Homo sapien
tcttaaagccagttccatgatgttt

SEQ ID NO: 5399532 - DNA, 25 bp, Homo sapien
ttgtctcaaatatcagttggtagaa

SEQ ID NO: 5399533 - DNA, 25 bp, Homo sapien
caaatatcagttggtagaattcaat

SEQ ID NO: 5399534 - DNA, 25 bp, Homo sapien
agagatgtttgagacactgaaccat

SEQ ID NO: 5399535 - DNA, 25 bp, Homo sapien
cagttggtagaattcaatagaaaag

SEQ ID NO: 5399536 - DNA, 25 bp, Homo sapien
tccttgacccttagataaaggtgac

SEQ ID NO: 5399537 - DNA, 25 bp, Homo sapien
tgacccttagataaaggtgacccta

SEQ ID NO: 5399538 - DNA, 25 bp, Homo sapien
atccttgacccttagataaaggtga

SEQ ID NO: 5399539 - DNA, 25 bp, Homo sapien
aatccttgacccttagataaaggtg

SEQ ID NO: 5399540 - DNA, 25 bp, Homo sapien
gatctgaagtactaacccactgagt

SEQ ID NO: 5399541 - DNA, 25 bp, Homo sapien
gcacagcagagagttgtccatcatt

SEQ ID NO: 5399542 - DNA, 25 bp, Homo sapien
agattcattcactgcccgtaactgg

SEQ ID NO: 5399543 - DNA, 25 bp, Homo sapien
aactgtagcttgatcaaaggcctgc

SEQ ID NO: 5399544 - DNA, 25 bp, Homo sapien
aagtatcatatgcaagtgagtcatt

SEQ ID NO: 5399545 - DNA, 25 bp, Homo sapien
ttttgcatgacctcagctgagaaga

SEQ ID NO: 5399546 - DNA, 25 bp, Homo sapien
gcaagtgagtcatttttgcatgacc

SEQ ID NO: 5399547 - DNA, 25 bp, Homo sapien
gagtcatttttgcatgacctcagct

SEQ ID NO: 5399548 - DNA, 25 bp, Homo sapien
taggtaatgaattattaagtgtatg

SEQ ID NO: 5399549 - DNA, 25 bp, Homo sapien
ggcctcataatcacggtggaaggcg

SEQ ID NO: 5399550 - DNA, 25 bp, Homo sapien
tcataatcacggtggaaggcgaaag

SEQ ID NO: 5399551 - DNA, 25 bp, Homo sapien
gcctcataatcacggtggaaggcga

SEQ ID NO: 5399552 - DNA, 25 bp, Homo sapien
ctcataatcacggtggaaggcgaaa

SEQ ID NO: 5399553 - DNA, 25 bp, Homo sapien
gcccaaaagtgcacgcacttagtaa

SEQ ID NO: 5399554 - DNA, 25 bp, Homo sapien
gatgtgaggcccaaaagtgcacgca

SEQ ID NO: 5399555 - DNA, 25 bp, Homo sapien
ctcatggtcagtatgtggcaaaggc

SEQ ID NO: 5399556 - DNA, 25 bp, Homo sapien
ccaagttctcatggtcagtatgtgg

SEQ ID NO: 5399557 - DNA, 25 bp, Homo sapien
taaggtcacgtaatgccatcagcaa

SEQ ID NO: 5399558 - DNA, 25 bp, Homo sapien
tgaaatgtcttcagcgtccatagcg

SEQ ID NO: 5399559 - DNA, 25 bp, Homo sapien
aactgctagcggtgaactctgtgcc

SEQ ID NO: 5399560 - DNA, 25 bp, Homo sapien
cttacactgtggatgagcgttgccc

SEQ ID NO: 5399561 - DNA, 25 bp, Homo sapien
gctggcgttcagtgctttctcagtc

SEQ ID NO: 5399562 - DNA, 25 bp, Homo sapien
ccagagaaggtaaggcgttttaatg

SEQ ID NO: 5399563 - DNA, 25 bp, Homo sapien
tcagctggcgttcagtgctttctca

SEQ ID NO: 5399564 - DNA, 25 bp, Homo sapien
cagaaattttcatgtgtaccctttg

SEQ ID NO: 5399565 - DNA, 25 bp, Homo sapien
tgctgcttcttagtgaggtcctgaa

SEQ ID NO: 5399566 - DNA, 25 bp, Homo sapien
catttttccggacacattctccaag

SEQ ID NO: 5399567 - DNA, 25 bp, Homo sapien
tctccaagagttttccaataaagca

SEQ ID NO: 5399568 - DNA, 25 bp, Homo sapien
attttaactgaatctcgggcataac

SEQ ID NO: 5399569 - DNA, 25 bp, Homo sapien
attatgtattttgaggtccaaagac

SEQ ID NO: 5399570 - DNA, 25 bp, Homo sapien
tgtattttgaggtccaaagactgaa

SEQ ID NO: 5399571 - DNA, 25 bp, Homo sapien
gaattatgtattttgaggtccaaag

SEQ ID NO: 5399572 - DNA, 25 bp, Homo sapien
ctgaattatgtattttgaggtccaa

SEQ ID NO: 5399573 - DNA, 25 bp, Homo sapien
gctgtctgtcctgacaaagccccat

SEQ ID NO: 5399574 - DNA, 25 bp, Homo sapien
tacagacaatgctgtctgtcctgac

SEQ ID NO: 5399575 - DNA, 25 bp, Homo sapien
tgctgtctgtcctgacaaagcccca

SEQ ID NO: 5399576 - DNA, 25 bp, Homo sapien
aggaaatacagacaatgctgtctgt

SEQ ID NO: 5399577 - DNA, 25 bp, Homo sapien
cccacatccgggaagggctacagtt

SEQ ID NO: 5399578 - DNA, 25 bp, Homo sapien
gagtagcacagttttcgcctccttg

SEQ ID NO: 5399579 - DNA, 25 bp, Homo sapien
gacactggagaatgtgcactttagc

SEQ ID NO: 5399580 - DNA, 25 bp, Homo sapien
gactgtcattgaaacttggctgcag

SEQ ID NO: 5399581 - DNA, 25 bp, Homo sapien
aagctgacattgctccccatacttg

SEQ ID NO: 5399582 - DNA, 25 bp, Homo sapien
catcctctttgctcaagctgacatt

SEQ ID NO: 5399583 - DNA, 25 bp, Homo sapien
atcctctttgctcaagctgacattg

SEQ ID NO: 5399584 - DNA, 25 bp, Homo sapien
gacattgctccccatacttgtcacc

SEQ ID NO: 5399585 - DNA, 25 bp, Homo sapien
aagatgaccataacattggcatagc

SEQ ID NO: 5399586 - DNA, 25 bp, Homo sapien
tagccaggcaccaagatgaccataa

SEQ ID NO: 5399587 - DNA, 25 bp, Homo sapien
ataacattggcatagccaagagtgc

SEQ ID NO: 5399588 - DNA, 25 bp, Homo sapien
ctgatagccaggcaccaagatgacc

SEQ ID NO: 5399589 - DNA, 25 bp, Homo sapien
ctggggatgtaatgacacacagtga

SEQ ID NO: 5399590 - DNA, 25 bp, Homo sapien
tagagcctcgtcctgcaactcagca

SEQ ID NO: 5399591 - DNA, 25 bp, Homo sapien
tcgtcctgcaactcagcatgtacag

SEQ ID NO: 5399592 - DNA, 25 bp, Homo sapien
tcacagacacctagagcctcgtcct

SEQ ID NO: 5399593 - DNA, 25 bp, Homo sapien
gcaactcagcatgtacagcacacat

SEQ ID NO: 5399594 - DNA, 25 bp, Homo sapien
gaatggttctctgcccagcgtcgat

SEQ ID NO: 5399595 - DNA, 25 bp, Homo sapien
cagcgtcgatcctggaagatgtagc

SEQ ID NO: 5399596 - DNA, 25 bp, Homo sapien
cgtctagaatggttctctgcccagc

SEQ ID NO: 5399597 - DNA, 25 bp, Homo sapien
tctctgcccagcgtcgatcctggaa

SEQ ID NO: 5399598 - DNA, 25 bp, Homo sapien
ggatggtgactgcctccaagggcaa

SEQ ID NO: 5399599 - DNA, 25 bp, Homo sapien
tacatgcatgtttgtggatggtgac

SEQ ID NO: 5399600 - DNA, 25 bp, Homo sapien
ttatctaagagtaatgtgccgttgc

SEQ ID NO: 5399601 - DNA, 25 bp, Homo sapien
tgggatgcatgagtatgagtttaca

SEQ ID NO: 5399602 - DNA, 25 bp, Homo sapien
gaatcaatattcagcagagtcattt

SEQ ID NO: 5399603 - DNA, 25 bp, Homo sapien
ggacagaatcaatattcagcagagt

SEQ ID NO: 5399604 - DNA, 25 bp, Homo sapien
gcaggacagaatcaatattcagcag

SEQ ID NO: 5399605 - DNA, 25 bp, Homo sapien
cagaatcaatattcagcagagtcat

SEQ ID NO: 5399606 - DNA, 25 bp, Homo sapien
tgaacacgctcaagggaaataattt

SEQ ID NO: 5399607 - DNA, 25 bp, Homo sapien
ctgaacacgctcaagggaaataatt

SEQ ID NO: 5399608 - DNA, 25 bp, Homo sapien
cagaaatggtgtccttttgtaacca

SEQ ID NO: 5399609 - DNA, 25 bp, Homo sapien
tgctgaggacatagccaatcctttc

SEQ ID NO: 5399610 - DNA, 25 bp, Homo sapien
tgtcagaacagcaataatggtgcag

SEQ ID NO: 5399611 - DNA, 25 bp, Homo sapien
ccagggtcccttagttgcaaaatat

SEQ ID NO: 5399612 - DNA, 25 bp, Homo sapien
ctacttgcttaagtgataggtggtt

SEQ ID NO: 5399613 - DNA, 25 bp, Homo sapien
gggttcctagttttgtctctggcaa

SEQ ID NO: 5399614 - DNA, 25 bp, Homo sapien
cttgcttaagtgataggtggttggg

SEQ ID NO: 5399615 - DNA, 25 bp, Homo sapien
ggttcctagttttgtctctggcaaa

SEQ ID NO: 5399616 - DNA, 25 bp, Homo sapien
gagccataggtattgattttgatct

SEQ ID NO: 5399617 - DNA, 25 bp, Homo sapien
tcagcagtttaatagagccataggt

SEQ ID NO: 5399618 - DNA, 25 bp, Homo sapien
cttgatttggatacatgggctcaga

SEQ ID NO: 5399619 - DNA, 25 bp, Homo sapien
gatttggatacatgggctcagatat

SEQ ID NO: 5399620 - DNA, 25 bp, Homo sapien
ctcccatggcagctgcttacccagc

SEQ ID NO: 5399621 - DNA, 25 bp, Homo sapien
tctcccatggcagctgcttacccag

SEQ ID NO: 5399622 - DNA, 25 bp, Homo sapien
tcccatggcagctgcttacccagcc

SEQ ID NO: 5399623 - DNA, 25 bp, Homo sapien
tctgaagttctcagatacctcaatg

SEQ ID NO: 5399624 - DNA, 25 bp, Homo sapien
tcactgggctatctctgaagttctc

SEQ ID NO: 5399625 - DNA, 25 bp, Homo sapien
caatgtcaaggagtactcaattttt

SEQ ID NO: 5399626 - DNA, 25 bp, Homo sapien
tctcagatacctcaatgtcaaggag

SEQ ID NO: 5399627 - DNA, 25 bp, Homo sapien
tgatttcactttgtcgttgtgtttc

SEQ ID NO: 5399628 - DNA, 25 bp, Homo sapien
tttgtcgttgtgtttctatttgacc

SEQ ID NO: 5399629 - DNA, 25 bp, Homo sapien
tcactttgtcgttgtgtttctattt

SEQ ID NO: 5399630 - DNA, 25 bp, Homo sapien
gatttcactttgtcgttgtgtttct

SEQ ID NO: 5399631 - DNA, 25 bp, Homo sapien
caatgtcagtatctatcactaaaag

SEQ ID NO: 5399632 - DNA, 25 bp, Homo sapien
ttttgactcaatgtcagtatctatc

SEQ ID NO: 5399633 - DNA, 25 bp, Homo sapien
gagttttcagagaaaacctatggat

SEQ ID NO: 5399634 - DNA, 25 bp, Homo sapien
cagagaaaacctatggatttttgac

SEQ ID NO: 5399635 - DNA, 25 bp, Homo sapien
gctttggttaatcagatgagccctt

SEQ ID NO: 5399636 - DNA, 25 bp, Homo sapien
ttagggcactgattacccatttgca

SEQ ID NO: 5399637 - DNA, 25 bp, Homo sapien
cctcttaagcatgggcagaacctgc

SEQ ID NO: 5399638 - DNA, 25 bp, Homo sapien
gagtgagtcacaagtagggtttcta

SEQ ID NO: 5399639 - DNA, 25 bp, Homo sapien
tatattttctgagcctctctcatta

SEQ ID NO: 5399640 - DNA, 25 bp, Homo sapien
atattttctgagcctctctcattac

SEQ ID NO: 5399641 - DNA, 25 bp, Homo sapien
ctatattttctgagcctctctcatt

SEQ ID NO: 5399642 - DNA, 25 bp, Homo sapien
ggggaattgtggagtatcaactgcc

SEQ ID NO: 5399643 - DNA, 25 bp, Homo sapien
agagaattatctaaatatggatctt

SEQ ID NO: 5399644 - DNA, 25 bp, Homo sapien
gacactcatggcttggggaattgtg

SEQ ID NO: 5399645 - DNA, 25 bp, Homo sapien
ttctgagtcctcattaagacactca

SEQ ID NO: 5399646 - DNA, 25 bp, Homo sapien
aatgctgctttctacaacaccacca

SEQ ID NO: 5399647 - DNA, 25 bp, Homo sapien
attgatttctctactggtgaaacaa

SEQ ID NO: 5399648 - DNA, 25 bp, Homo sapien
cgaggcgataatgtaattaagcagt

SEQ ID NO: 5399649 - DNA, 25 bp, Homo sapien
aacaccaccaagatcccggagacga

SEQ ID NO: 5399650 - DNA, 25 bp, Homo sapien
ttctgttgcctttcatttaagctgt

SEQ ID NO: 5399651 - DNA, 25 bp, Homo sapien
atttctgttgcctttcatttaagct

SEQ ID NO: 5399652 - DNA, 25 bp, Homo sapien
ctgacccctgtctttcaatgctgcc

SEQ ID NO: 5399653 - DNA, 25 bp, Homo sapien
gcctttgggttaacttcttctgaca

SEQ ID NO: 5399654 - DNA, 25 bp, Homo sapien
cacagagcggtgacagaacattcga

SEQ ID NO: 5399655 - DNA, 25 bp, Homo sapien
gcacagagcggtgacagaacattcg

SEQ ID NO: 5399656 - DNA, 25 bp, Homo sapien
acagagcggtgacagaacattcgag

SEQ ID NO: 5399657 - DNA, 25 bp, Homo sapien
tgagagttaaaaaggacctggtcgc

SEQ ID NO: 5399658 - DNA, 25 bp, Homo sapien
gcactgcttggaccacaaggctgcc

SEQ ID NO: 5399659 - DNA, 25 bp, Homo sapien
aaaggacctggtcgcactgcttgga

SEQ ID NO: 5399660 - DNA, 25 bp, Homo sapien
ggctgccatgcaaggaacatctgaa

SEQ ID NO: 5399661 - DNA, 25 bp, Homo sapien
cagatatctcagtttctggcaggtc

SEQ ID NO: 5399662 - DNA, 25 bp, Homo sapien
cctgatgtactactttggtctccat

SEQ ID NO: 5399663 - DNA, 25 bp, Homo sapien
tctctcctgatgtactactttggtc

SEQ ID NO: 5399664 - DNA, 25 bp, Homo sapien
acatctctcctgatgtactactttg

SEQ ID NO: 5399665 - DNA, 25 bp, Homo sapien
tctcctgatgtactactttggtctc

SEQ ID NO: 5399666 - DNA, 25 bp, Homo sapien
accagtactccagaaggatgaaacc

SEQ ID NO: 5399667 - DNA, 25 bp, Homo sapien
tcacatgaacaccagtactccagaa

SEQ ID NO: 5399668 - DNA, 25 bp, Homo sapien
catgaacaccagtactccagaagga

SEQ ID NO: 5399669 - DNA, 25 bp, Homo sapien
tgaacaccagtactccagaaggatg

SEQ ID NO: 5399670 - DNA, 25 bp, Homo sapien
agggataggcccgtaggaagtccag

SEQ ID NO: 5399671 - DNA, 25 bp, Homo sapien
ttttctgagcacatggactcaggcc

SEQ ID NO: 5399672 - DNA, 25 bp, Homo sapien
gccagtgagggataggcccgtagga

SEQ ID NO: 5399673 - DNA, 25 bp, Homo sapien
ggataggcccgtaggaagtccagca

SEQ ID NO: 5399674 - DNA, 25 bp, Homo sapien
gttgtaatcctgaccatgatctatg

SEQ ID NO: 5399675 - DNA, 25 bp, Homo sapien
ccacgttgtaatcctgaccatgatc

SEQ ID NO: 5399676 - DNA, 25 bp, Homo sapien
cacgttgtaatcctgaccatgatct

SEQ ID NO: 5399677 - DNA, 25 bp, Homo sapien
taatcctgaccatgatctatgtact

SEQ ID NO: 5399678 - DNA, 25 bp, Homo sapien
ttttctccaaaacactttctctcca

SEQ ID NO: 5399679 - DNA, 25 bp, Homo sapien
tttctccaaaacactttctctccat

SEQ ID NO: 5399680 - DNA, 25 bp, Homo sapien
cctaaagccttggactttcaggact

SEQ ID NO: 5399681 - DNA, 25 bp, Homo sapien
cataggacagttctggcctaaagcc

SEQ ID NO: 5399682 - DNA, 25 bp, Homo sapien
aaccaggacataggacagttctggc

SEQ ID NO: 5399683 - DNA, 25 bp, Homo sapien
ctttcaggacttccgggccagccgt

SEQ ID NO: 5399684 - DNA, 25 bp, Homo sapien
tatatgccgatagtttcccttgagc

SEQ ID NO: 5399685 - DNA, 25 bp, Homo sapien
gactgaggcagtttgcgtacatgca

SEQ ID NO: 5399686 - DNA, 25 bp, Homo sapien
ggagatcagtacttgggcaccagag

SEQ ID NO: 5399687 - DNA, 25 bp, Homo sapien
taaataccacatacagctgactgag

SEQ ID NO: 5399688 - DNA, 25 bp, Homo sapien
ttatggctctacatggacgacagcc

SEQ ID NO: 5399689 - DNA, 25 bp, Homo sapien
acagctcagactctctactaagact

SEQ ID NO: 5399690 - DNA, 25 bp, Homo sapien
tactaagactggtatctactgtttc

SEQ ID NO: 5399691 - DNA, 25 bp, Homo sapien
gtggggatctatttgctgccacagc

SEQ ID NO: 5399692 - DNA, 25 bp, Homo sapien
gactggtatctactgtttcagcagc

SEQ ID NO: 5399693 - DNA, 25 bp, Homo sapien
atcttttcctgaaaccactttatat

SEQ ID NO: 5399694 - DNA, 25 bp, Homo sapien
cacaattatttctggcattattccc

SEQ ID NO: 5399695 - DNA, 25 bp, Homo sapien
tcctgaaaccactttatatttcaca

SEQ ID NO: 5399696 - DNA, 25 bp, Homo sapien
ttctggcattattccctctttccca

SEQ ID NO: 5399697 - DNA, 25 bp, Homo sapien
gctattggtaatgggctctctggtc

SEQ ID NO: 5399698 - DNA, 25 bp, Homo sapien
atgaggccacggttccgggactgct

SEQ ID NO: 5399699 - DNA, 25 bp, Homo sapien
gccaccatttgcttattatgagaca

SEQ ID NO: 5399700 - DNA, 25 bp, Homo sapien
cttgttttgtgggatactcttcatc

SEQ ID NO: 5399701 - DNA, 25 bp, Homo sapien
tctgtgctcttttcctccccataac

SEQ ID NO: 5399702 - DNA, 25 bp, Homo sapien
cataacccaccagtgttatcaccat

SEQ ID NO: 5399703 - DNA, 25 bp, Homo sapien
tgtctgcctctcgaaactctgtgct

SEQ ID NO: 5399704 - DNA, 25 bp, Homo sapien
ccccataacccaccagtgttatcac

SEQ ID NO: 5399705 - DNA, 25 bp, Homo sapien
tcagtgatgtggagacattctatac

SEQ ID NO: 5399706 - DNA, 25 bp, Homo sapien
cagcaaagctagtgctaacgacatt

SEQ ID NO: 5399707 - DNA, 25 bp, Homo sapien
tgtatgacttctttaacaggaaaca

SEQ ID NO: 5399708 - DNA, 25 bp, Homo sapien
tatactgaagcacatggttctaaca

SEQ ID NO: 5399709 - DNA, 25 bp, Homo sapien
gactgtgttatatgacctattccca

SEQ ID NO: 5399710 - DNA, 25 bp, Homo sapien
tgagaggttcctgactgtgttatat

SEQ ID NO: 5399711 - DNA, 25 bp, Homo sapien
gttcctgactgtgttatatgaccta

SEQ ID NO: 5399712 - DNA, 25 bp, Homo sapien
tttaatttgttatgagaggttcctg

SEQ ID NO: 5399713 - DNA, 25 bp, Homo sapien
gagcgccaaaagagcatctgtctaa

SEQ ID NO: 5399714 - DNA, 25 bp, Homo sapien
ggaaaatgtcattcagagcgccaaa

SEQ ID NO: 5399715 - DNA, 25 bp, Homo sapien
gactttccgtgtgtattgccgccag

SEQ ID NO: 5399716 - DNA, 25 bp, Homo sapien
ggattgtgtacaacctgtgctagac

SEQ ID NO: 5399717 - DNA, 25 bp, Homo sapien
gcagattcaatactgggcactccct

SEQ ID NO: 5399718 - DNA, 25 bp, Homo sapien
gggatccagacatccagagtggcat

SEQ ID NO: 5399719 - DNA, 25 bp, Homo sapien
gaagcagattcaatactgggcactc

SEQ ID NO: 5399720 - DNA, 25 bp, Homo sapien
ccttttctccgtagagggatccaga

SEQ ID NO: 5399721 - DNA, 25 bp, Homo sapien
cctctgacagcaggaccaccgggct

SEQ ID NO: 5399722 - DNA, 25 bp, Homo sapien
tctgggggagccgtttcctggccat

SEQ ID NO: 5399723 - DNA, 25 bp, Homo sapien
acccagtgcagttaccaggccaaca

SEQ ID NO: 5399724 - DNA, 25 bp, Homo sapien
agttaccaggccaacatccatcacg

SEQ ID NO: 5399725 - DNA, 25 bp, Homo sapien
gcaggcaccatacaacgttcagaaa

SEQ ID NO: 5399726 - DNA, 25 bp, Homo sapien
tgaagctcagaagattgctgttaat

SEQ ID NO: 5399727 - DNA, 25 bp, Homo sapien
tccttaactggtacatgaagctcag

SEQ ID NO: 5399728 - DNA, 25 bp, Homo sapien
gccatgcacagcttttgatctaacg

SEQ ID NO: 5399729 - DNA, 25 bp, Homo sapien
gattgggcagctctatagcaaagag

SEQ ID NO: 5399730 - DNA, 25 bp, Homo sapien
caatctggtcgaacataatttcctg

SEQ ID NO: 5399731 - DNA, 25 bp, Homo sapien
gaaaaaattgtgaaacgtgctgctg

SEQ ID NO: 5399732 - DNA, 25 bp, Homo sapien
tctcgccccttattatagaaatggt

SEQ ID NO: 5399733 - DNA, 25 bp, Homo sapien
tctgtgaaatatccaccaacttgcc

SEQ ID NO: 5399734 - DNA, 25 bp, Homo sapien
ttacttctgtgaaatatccaccaac

SEQ ID NO: 5399735 - DNA, 25 bp, Homo sapien
tccaccaacttgccacagcttgatt

SEQ ID NO: 5399736 - DNA, 25 bp, Homo sapien
cttgccacagcttgatttactgcat

SEQ ID NO: 5399737 - DNA, 25 bp, Homo sapien
taataacttgaaagcgtgcaattgt

SEQ ID NO: 5399738 - DNA, 25 bp, Homo sapien
gcgtgcaattgtaaaatactctgta

SEQ ID NO: 5399739 - DNA, 25 bp, Homo sapien
tgtaagggccaattagatagagcca

SEQ ID NO: 5399740 - DNA, 25 bp, Homo sapien
tcttgaactatgaagcgggctggtc

SEQ ID NO: 5399741 - DNA, 25 bp, Homo sapien
tcacgctagtacaaattcttcaggg

SEQ ID NO: 5399742 - DNA, 25 bp, Homo sapien
tccccaagtcttacgataatatctg

SEQ ID NO: 5399743 - DNA, 25 bp, Homo sapien
tacgataatatctgacacacaccaa

SEQ ID NO: 5399744 - DNA, 25 bp, Homo sapien
ctattccagcaactcggtagagccc

SEQ ID NO: 5399745 - DNA, 25 bp, Homo sapien
tgacacacaccaactattccagcaa

SEQ ID NO: 5399746 - DNA, 25 bp, Homo sapien
ctggattccccttcctcattatttg

SEQ ID NO: 5399747 - DNA, 25 bp, Homo sapien
gattccccttcctcattatttgcca

SEQ ID NO: 5399748 - DNA, 25 bp, Homo sapien
tggattccccttcctcattatttgc

SEQ ID NO: 5399749 - DNA, 25 bp, Homo sapien
attccccttcctcattatttgccat

SEQ ID NO: 5399750 - DNA, 25 bp, Homo sapien
ggtgtctgtgaggctcccctgtggc

SEQ ID NO: 5399751 - DNA, 25 bp, Homo sapien
gtgtctgtgaggctcccctgtggct

SEQ ID NO: 5399752 - DNA, 25 bp, Homo sapien
tgttgaccctcttgagcctttaggg

SEQ ID NO: 5399753 - DNA, 25 bp, Homo sapien
ccaatggatgcctatcagactgcac

SEQ ID NO: 5399754 - DNA, 25 bp, Homo sapien
tctgtgcttcagtaggcccttgaag

SEQ ID NO: 5399755 - DNA, 25 bp, Homo sapien
aaagtctcttctagcccaatggatg

SEQ ID NO: 5399756 - DNA, 25 bp, Homo sapien
taggagctagaatctcgagtgtgct

SEQ ID NO: 5399757 - DNA, 25 bp, Homo sapien
tctcttggggtcctagaatcactgc

SEQ ID NO: 5399758 - DNA, 25 bp, Homo sapien
cagaattaggttatcaaccaaagag

SEQ ID NO: 5399759 - DNA, 25 bp, Homo sapien
gaatcactgctactattcccagaat

SEQ ID NO: 5399760 - DNA, 25 bp, Homo sapien
atgtctctaccatgtcttgacacag

SEQ ID NO: 5399761 - DNA, 25 bp, Homo sapien
atgtcttgacacagtacgtggccct

SEQ ID NO: 5399762 - DNA, 25 bp, Homo sapien
ccatgtcttgacacagtacgtggcc

SEQ ID NO: 5399763 - DNA, 25 bp, Homo sapien
tctaccatgtcttgacacagtacgt

SEQ ID NO: 5399764 - DNA, 25 bp, Homo sapien
ctgtctgaatgtaagcttcatcagg

SEQ ID NO: 5399765 - DNA, 25 bp, Homo sapien
ttgtctgtctgaatgtaagcttcat

SEQ ID NO: 5399766 - DNA, 25 bp, Homo sapien
gtctgaatgtaagcttcatcaggcc

SEQ ID NO: 5399767 - DNA, 25 bp, Homo sapien
gtctgtctgaatgtaagcttcatca

SEQ ID NO: 5399768 - DNA, 25 bp, Homo sapien
tcaggcaaccaaagcagattctgtc

SEQ ID NO: 5399769 - DNA, 25 bp, Homo sapien
ccaaagcagattctgtcatctctga

SEQ ID NO: 5399770 - DNA, 25 bp, Homo sapien
ggcttaagagctgctaagcagttac

SEQ ID NO: 5399771 - DNA, 25 bp, Homo sapien
ctgaaggcttaagagctgctaagca

SEQ ID NO: 5399772 - DNA, 25 bp, Homo sapien
tcctggtgtcaatcatcagctcttc

SEQ ID NO: 5399773 - DNA, 25 bp, Homo sapien
ttttcctggtgtcaatcatcagctc

SEQ ID NO: 5399774 - DNA, 25 bp, Homo sapien
aattttcctggtgtcaatcatcagc

SEQ ID NO: 5399775 - DNA, 25 bp, Homo sapien
tctgaattttcctggtgtcaatcat

SEQ ID NO: 5399776 - DNA, 25 bp, Homo sapien
aaatctaccccatggcttcccaata

SEQ ID NO: 5399777 - DNA, 25 bp, Homo sapien
catgaatcccatgaatgaacattcc

SEQ ID NO: 5399778 - DNA, 25 bp, Homo sapien
gaaccgctgccctacttgccttata

SEQ ID NO: 5399779 - DNA, 25 bp, Homo sapien
tattgttgaatacccaaagagttta

SEQ ID NO: 5399780 - DNA, 25 bp, Homo sapien
ttttcttgctctagtattgttggtt

SEQ ID NO: 5399781 - DNA, 25 bp, Homo sapien
attttcttgctctagtattgttggt

SEQ ID NO: 5399782 - DNA, 25 bp, Homo sapien
ttcttgctctagtattgttggtttc

SEQ ID NO: 5399783 - DNA, 25 bp, Homo sapien
cttgctctagtattgttggtttctc

SEQ ID NO: 5399784 - DNA, 25 bp, Homo sapien
ggcacttgactaagggccatgaggg

SEQ ID NO: 5399785 - DNA, 25 bp, Homo sapien
ccccagggcacttgactaagggcca

SEQ ID NO: 5399786 - DNA, 25 bp, Homo sapien
ccagggcacttgactaagggccatg

SEQ ID NO: 5399787 - DNA, 25 bp, Homo sapien
agggcacttgactaagggccatgag

SEQ ID NO: 5399788 - DNA, 25 bp, Homo sapien
tgagcagaattactcccaaagcact

SEQ ID NO: 5399789 - DNA, 25 bp, Homo sapien
tggtacaacaatccctctagtggct

SEQ ID NO: 5399790 - DNA, 25 bp, Homo sapien
tgcttctccatggtacaacaatccc

SEQ ID NO: 5399791 - DNA, 25 bp, Homo sapien
tgctctgagcagaattactcccaaa

SEQ ID NO: 5399792 - DNA, 25 bp, Homo sapien
ccatgagcctgctggagaagaccat

SEQ ID NO: 5399793 - DNA, 25 bp, Homo sapien
tccatgagcctgctggagaagacca

SEQ ID NO: 5399794 - DNA, 25 bp, Homo sapien
ttccatgagcctgctggagaagacc

SEQ ID NO: 5399795 - DNA, 25 bp, Homo sapien
tgctggctgatcatctctgaatgag

SEQ ID NO: 5399796 - DNA, 25 bp, Homo sapien
agacagcctccacgggcacacaaga

SEQ ID NO: 5399797 - DNA, 25 bp, Homo sapien
gaatgagatcttcccgactgcatcc

SEQ ID NO: 5399798 - DNA, 25 bp, Homo sapien
gtgataactgctggctgatcatctc

SEQ ID NO: 5399799 - DNA, 25 bp, Homo sapien
tgagaacagatgtaaagctgctact

SEQ ID NO: 5399800 - DNA, 25 bp, Homo sapien
aacagatgtaaagctgctactccca

SEQ ID NO: 5399801 - DNA, 25 bp, Homo sapien
cttgagaacagatgtaaagctgcta

SEQ ID NO: 5399802 - DNA, 25 bp, Homo sapien
cagatgtaaagctgctactcccaac

SEQ ID NO: 5399803 - DNA, 25 bp, Homo sapien
gcaaatcattctctacctctagaat

SEQ ID NO: 5399804 - DNA, 25 bp, Homo sapien
gctgcaaatcattctctacctctag

SEQ ID NO: 5399805 - DNA, 25 bp, Homo sapien
tggctgcaaatcattctctacctct

SEQ ID NO: 5399806 - DNA, 25 bp, Homo sapien
tatggctgcaaatcattctctacct

SEQ ID NO: 5399807 - DNA, 25 bp, Homo sapien
gaataatctcctagcatctcgtacc

SEQ ID NO: 5399808 - DNA, 25 bp, Homo sapien
tcactggaacgaataatctcctagc

SEQ ID NO: 5399809 - DNA, 25 bp, Homo sapien
taatctcctagcatctcgtaccctt

SEQ ID NO: 5399810 - DNA, 25 bp, Homo sapien
gaacgaataatctcctagcatctcg

SEQ ID NO: 5399811 - DNA, 25 bp, Homo sapien
gaactgatatagttcaagcgctgcc

SEQ ID NO: 5399812 - DNA, 25 bp, Homo sapien
ccagaaataatgtgaactgatatag

SEQ ID NO: 5399813 - DNA, 25 bp, Homo sapien
tgtgaactgatatagttcaagcgct

SEQ ID NO: 5399814 - DNA, 25 bp, Homo sapien
tgatatagttcaagcgctgcctcac

SEQ ID NO: 5399815 - DNA, 25 bp, Homo sapien
ttttctcacggaggcaagatcattt

SEQ ID NO: 5399816 - DNA, 25 bp, Homo sapien
taaggccatatgcattcttgttccc

SEQ ID NO: 5399817 - DNA, 25 bp, Homo sapien
gcagcaatataaggccatatgcatt

SEQ ID NO: 5399818 - DNA, 25 bp, Homo sapien
acttttctcacggaggcaagatcat

SEQ ID NO: 5399819 - DNA, 25 bp, Homo sapien
acccagattatcttgatggacccaa

SEQ ID NO: 5399820 - DNA, 25 bp, Homo sapien
gatcttgagacgaagaaattaccca

SEQ ID NO: 5399821 - DNA, 25 bp, Homo sapien
gaaatactctgggtgcataaggtta

SEQ ID NO: 5399822 - DNA, 25 bp, Homo sapien
caggtgcccaccaaggacatatgtt

SEQ ID NO: 5399823 - DNA, 25 bp, Homo sapien
gaaggaggctaattacaacactgga

SEQ ID NO: 5399824 - DNA, 25 bp, Homo sapien
gaatccctgttaaggcctcctcgga

SEQ ID NO: 5399825 - DNA, 25 bp, Homo sapien
tcctcggaaaacagggcagtagtgg

SEQ ID NO: 5399826 - DNA, 25 bp, Homo sapien
gaagccagttcagcatggaatccct

SEQ ID NO: 5399827 - DNA, 25 bp, Homo sapien
ctttaggcctgacaccctctgctga

SEQ ID NO: 5399828 - DNA, 25 bp, Homo sapien
tcagcatgatgacaaggactgcact

SEQ ID NO: 5399829 - DNA, 25 bp, Homo sapien
tggcaaactgggcaagtttaacagg

SEQ ID NO: 5399830 - DNA, 25 bp, Homo sapien
taaacaggatgggttcccgtggcaa

SEQ ID NO: 5399831 - DNA, 25 bp, Homo sapien
cagctcaaagtggtggtttccaggc

SEQ ID NO: 5399832 - DNA, 25 bp, Homo sapien
gctcaaagtggtggtttccaggcta

SEQ ID NO: 5399833 - DNA, 25 bp, Homo sapien
aaagtggtggtttccaggctatagg

SEQ ID NO: 5399834 - DNA, 25 bp, Homo sapien
aggacagctcaaagtggtggtttcc

SEQ ID NO: 5399835 - DNA, 25 bp, Homo sapien
cagtctaagcctcccagataccagg

SEQ ID NO: 5399836 - DNA, 25 bp, Homo sapien
taccaggaatcacttcagacacatg

SEQ ID NO: 5399837 - DNA, 25 bp, Homo sapien
tacagggtgaattaaggcccactta

SEQ ID NO: 5399838 - DNA, 25 bp, Homo sapien
gagctcattatgtaacccaggatcc

SEQ ID NO: 5399839 - DNA, 25 bp, Homo sapien
caccagcttttatgtagatacaaca

SEQ ID NO: 5399840 - DNA, 25 bp, Homo sapien
ggctgactacaccagcttttatgta

SEQ ID NO: 5399841 - DNA, 25 bp, Homo sapien
tatgtagatacaacattcaacataa

SEQ ID NO: 5399842 - DNA, 25 bp, Homo sapien
gactacaccagcttttatgtagata

SEQ ID NO: 5399843 - DNA, 25 bp, Homo sapien
ttaccagtaagaatgataagccttc

SEQ ID NO: 5399844 - DNA, 25 bp, Homo sapien
aaagtttcagccacctttgagacag

SEQ ID NO: 5399845 - DNA, 25 bp, Homo sapien
aaagccaagtaaatgcaagcactga

SEQ ID NO: 5399846 - DNA, 25 bp, Homo sapien
tctgagagttctgtccaagagatac

SEQ ID NO: 5399847 - DNA, 25 bp, Homo sapien
ggtacctcatgccataactccaaag

SEQ ID NO: 5399848 - DNA, 25 bp, Homo sapien
attctaggtgatctttagtatgtcc

SEQ ID NO: 5399849 - DNA, 25 bp, Homo sapien
aaggccaatgattctccatgaggtg

SEQ ID NO: 5399850 - DNA, 25 bp, Homo sapien
tgaggtgagtcagctttgtatccca

SEQ ID NO: 5399851 - DNA, 25 bp, Homo sapien
gatacggtgtgtaaagctagcctca

SEQ ID NO: 5399852 - DNA, 25 bp, Homo sapien
taatcagatagactgggctaagcca

SEQ ID NO: 5399853 - DNA, 25 bp, Homo sapien
aactggtctcaggttacagcaagca

SEQ ID NO: 5399854 - DNA, 25 bp, Homo sapien
aagctccaactggtgggcaatggcc

SEQ ID NO: 5399855 - DNA, 25 bp, Homo sapien
caaaggactgaagcttaaactcggg

SEQ ID NO: 5399856 - DNA, 25 bp, Homo sapien
taaggtcctgactgatgccaaagag

SEQ ID NO: 5399857 - DNA, 25 bp, Homo sapien
gaaatgatccttccacggagattct

SEQ ID NO: 5399858 - DNA, 25 bp, Homo sapien
taatcaggacttcaaggtatctcga

SEQ ID NO: 5399859 - DNA, 25 bp, Homo sapien
ttcagcatgtctagtcttccttgct

SEQ ID NO: 5399860 - DNA, 25 bp, Homo sapien
cactaatacggccaataattgatca

SEQ ID NO: 5399861 - DNA, 25 bp, Homo sapien
actacaaccgttctttcaggagctt

SEQ ID NO: 5399862 - DNA, 25 bp, Homo sapien
taaaaaggtcaactggaagaccagc

SEQ ID NO: 5399863 - DNA, 25 bp, Homo sapien
gcaactcccttggttcttgtcggat

SEQ ID NO: 5399864 - DNA, 25 bp, Homo sapien
tacgtgaatttcaggagcgcgcaat

SEQ ID NO: 5399865 - DNA, 25 bp, Homo sapien
tcagagcaggaattaaaggccttgc

SEQ ID NO: 5399866 - DNA, 25 bp, Homo sapien
catttccgggactctagcatttcag

SEQ ID NO: 5399867 - DNA, 25 bp, Homo sapien
tgagcctctggagcgggcctatact

SEQ ID NO: 5399868 - DNA, 25 bp, Homo sapien
cttggaggctacgaagaaaagggcg

SEQ ID NO: 5399869 - DNA, 25 bp, Homo sapien
acaaccagcggaacgcaggcgatgg

SEQ ID NO: 5399870 - DNA, 25 bp, Homo sapien
gacgcgccctcagcggccgcagaaa

SEQ ID NO: 5399871 - DNA, 25 bp, Homo sapien
ctcagcggccgcagaaagcccacaa

SEQ ID NO: 5399872 - DNA, 25 bp, Homo sapien
cagtgcacttattgtagttgaaaac

SEQ ID NO: 5399873 - DNA, 25 bp, Homo sapien
gtatctaaacataaatggatggtaa

SEQ ID NO: 5399874 - DNA, 25 bp, Homo sapien
ggttaaaaagctatagttttcatga

SEQ ID NO: 5399875 - DNA, 25 bp, Homo sapien
attacagtgcacttattgtagttga

SEQ ID NO: 5399876 - DNA, 25 bp, Homo sapien
tatgtgaggttgacctagagaacac

SEQ ID NO: 5399877 - DNA, 25 bp, Homo sapien
ctattcttcaaagtatgctatgtga

SEQ ID NO: 5399878 - DNA, 25 bp, Homo sapien
gaggttgacctagagaacacttgac

SEQ ID NO: 5399879 - DNA, 25 bp, Homo sapien
caaagtatgctatgtgaggttgacc

SEQ ID NO: 5399880 - DNA, 25 bp, Homo sapien
gccttccattcctgtcagaagcact

SEQ ID NO: 5399881 - DNA, 25 bp, Homo sapien
acctccattctttgcccgttgaaag

SEQ ID NO: 5399882 - DNA, 25 bp, Homo sapien
tcagaagcactgtcctcttagatgt

SEQ ID NO: 5399883 - DNA, 25 bp, Homo sapien
gcccgttgaaagtgaatgttaatta

SEQ ID NO: 5399884 - DNA, 25 bp, Homo sapien
aactctggtggcattatggaacaca

SEQ ID NO: 5399885 - DNA, 25 bp, Homo sapien
taccattggatacctgagaaggaag

SEQ ID NO: 5399886 - DNA, 25 bp, Homo sapien
ccaggtaaagaggtagtcagaagtg

SEQ ID NO: 5399887 - DNA, 25 bp, Homo sapien
gtggagctggcaagatttagtgacc

SEQ ID NO: 5399888 - DNA, 25 bp, Homo sapien
ttctgtgtatggagaaacagtaact

SEQ ID NO: 5399889 - DNA, 25 bp, Homo sapien
agtaactctatggcaggtttgattt

SEQ ID NO: 5399890 - DNA, 25 bp, Homo sapien
ctgtgtatggagaaacagtaactct

SEQ ID NO: 5399891 - DNA, 25 bp, Homo sapien
atttctgtgtatggagaaacagtaa

SEQ ID NO: 5399892 - DNA, 25 bp, Homo sapien
caccctgcctatttgtagcaatatt

SEQ ID NO: 5399893 - DNA, 25 bp, Homo sapien
ccactatgcctggtgatctcagctc

SEQ ID NO: 5399894 - DNA, 25 bp, Homo sapien
gtctgttaaccttctacacccttga

SEQ ID NO: 5399895 - DNA, 25 bp, Homo sapien
cctgcctatttgtagcaatattatc

SEQ ID NO: 5399896 - DNA, 25 bp, Homo sapien
aaacgtgatgactgcactcccggac

SEQ ID NO: 5399897 - DNA, 25 bp, Homo sapien
tgtctgtcatagtccacgcggtcca

SEQ ID NO: 5399898 - DNA, 25 bp, Homo sapien
aagctcagctctagtttgtctctca

SEQ ID NO: 5399899 - DNA, 25 bp, Homo sapien
tccatttcgggactttgaaaagctc

SEQ ID NO: 5399900 - DNA, 25 bp, Homo sapien
aaatatggatgagagaagtgcttgt

SEQ ID NO: 5399901 - DNA, 25 bp, Homo sapien
gatgagagaagtgcttgtgatgaac

SEQ ID NO: 5399902 - DNA, 25 bp, Homo sapien
tatggatgagagaagtgcttgtgat

SEQ ID NO: 5399903 - DNA, 25 bp, Homo sapien
atgagagaagtgcttgtgatgaaca

SEQ ID NO: 5399904 - DNA, 25 bp, Homo sapien
tcttttatctgtacatgatgtttac

SEQ ID NO: 5399905 - DNA, 25 bp, Homo sapien
ggcttggccgtaacctccagattta

SEQ ID NO: 5399906 - DNA, 25 bp, Homo sapien
catgatgtttactcatgcttaccac

SEQ ID NO: 5399907 - DNA, 25 bp, Homo sapien
ctgaatttaatggaactggcttggc

SEQ ID NO: 5399908 - DNA, 25 bp, Homo sapien
gctcagagccacgtcaagcgtagaa

SEQ ID NO: 5399909 - DNA, 25 bp, Homo sapien
tggattaagtcccacagtcatggct

SEQ ID NO: 5399910 - DNA, 25 bp, Homo sapien
tgaagcacctgtataaaaccctgag

SEQ ID NO: 5399911 - DNA, 25 bp, Homo sapien
cctaccgagagaaatattggcccag

SEQ ID NO: 5399912 - DNA, 25 bp, Homo sapien
atctcataaggaactttcgagctca

SEQ ID NO: 5399913 - DNA, 25 bp, Homo sapien
ctttttcaaaggtgataagtgcttg

SEQ ID NO: 5399914 - DNA, 25 bp, Homo sapien
tctttttcaaaggtgataagtgctt

SEQ ID NO: 5399915 - DNA, 25 bp, Homo sapien
ttttgtatctcataaggaactttcg

SEQ ID NO: 5399916 - DNA, 25 bp, Homo sapien
aaacgaacaggagatatttgacaac

SEQ ID NO: 5399917 - DNA, 25 bp, Homo sapien
tttcatctttgtttcaggaatatcc

SEQ ID NO: 5399918 - DNA, 25 bp, Homo sapien
ttctcaggagtttcaactgataaga

SEQ ID NO: 5399919 - DNA, 25 bp, Homo sapien
ggagatatttgacaactggctgtca

SEQ ID NO: 5399920 - DNA, 25 bp, Homo sapien
ggtagcctcttgtaactccgtttca

SEQ ID NO: 5399921 - DNA, 25 bp, Homo sapien
cttgtaactccgtttcaagcttttg

SEQ ID NO: 5399922 - DNA, 25 bp, Homo sapien
ctccgtttcaagcttttggatctcc

SEQ ID NO: 5399923 - DNA, 25 bp, Homo sapien
tagcctcttgtaactccgtttcaag

SEQ ID NO: 5399924 - DNA, 25 bp, Homo sapien
catctggcgaatgctccttaagaat

SEQ ID NO: 5399925 - DNA, 25 bp, Homo sapien
ctccttaagaatttgttgtgtgtca

SEQ ID NO: 5399926 - DNA, 25 bp, Homo sapien
ttataaattcatctggcgaatgctc

SEQ ID NO: 5399927 - DNA, 25 bp, Homo sapien
aattcatctggcgaatgctccttaa

SEQ ID NO: 5399928 - DNA, 25 bp, Homo sapien
catggttgtctccaatgattagtca

SEQ ID NO: 5399929 - DNA, 25 bp, Homo sapien
gaagtatacctgaagtttccgtaca

SEQ ID NO: 5399930 - DNA, 25 bp, Homo sapien
gcccgggttctcgaaactgtcgctg

SEQ ID NO: 5399931 - DNA, 25 bp, Homo sapien
cggaaaacagcagcgcctgaaacgc

SEQ ID NO: 5399932 - DNA, 25 bp, Homo sapien
gctttgaccctgactagctctgtga

SEQ ID NO: 5399933 - DNA, 25 bp, Homo sapien
ggtttgtcatggaaattgcaccacc

SEQ ID NO: 5399934 - DNA, 25 bp, Homo sapien
gaattggaatggaaacgttgttgcc

SEQ ID NO: 5399935 - DNA, 25 bp, Homo sapien
tggacaaacaacacctggtaggctg

SEQ ID NO: 5399936 - DNA, 25 bp, Homo sapien
agccaccgtgcctggccatttttgc

SEQ ID NO: 5399937 - DNA, 25 bp, Homo sapien
taggtggggctacaggcgcccacta

SEQ ID NO: 5399938 - DNA, 25 bp, Homo sapien
cactaccacactcggctaatttttt

SEQ ID NO: 5399939 - DNA, 25 bp, Homo sapien
tgagccaccgtgcctggccattttt

SEQ ID NO: 5399940 - DNA, 25 bp, Homo sapien
ttaacgaagcggaagaagaacagca

SEQ ID NO: 5399941 - DNA, 25 bp, Homo sapien
gaggtcagccacatcataataatag

SEQ ID NO: 5399942 - DNA, 25 bp, Homo sapien
tattcacctcacagccaatgttggg

SEQ ID NO: 5399943 - DNA, 25 bp, Homo sapien
atttgtcccacagaaaaaggcagcc

SEQ ID NO: 5399944 - DNA, 25 bp, Homo sapien
accagcccgcgctcagagcagagag

SEQ ID NO: 5399945 - DNA, 25 bp, Homo sapien
ttccctgacatcgaaagaaccagcc

SEQ ID NO: 5399946 - DNA, 25 bp, Homo sapien
catcctgctgtgcacctttttctga

SEQ ID NO: 5399947 - DNA, 25 bp, Homo sapien
tctcatttgagaagttccctgacat

SEQ ID NO: 5399948 - DNA, 25 bp, Homo sapien
catcattcattagttctgtttcaga

SEQ ID NO: 5399949 - DNA, 25 bp, Homo sapien
tgttgagttcggtgcttctctttca

SEQ ID NO: 5399950 - DNA, 25 bp, Homo sapien
ctgtctgttgagttcggtgcttctc

SEQ ID NO: 5399951 - DNA, 25 bp, Homo sapien
tttgatatataaattcagcttcctt

SEQ ID NO: 5399952 - DNA, 25 bp, Homo sapien
caagatgtaccttttatcacatagg

SEQ ID NO: 5399953 - DNA, 25 bp, Homo sapien
tatagctcgacatcccaagctcaag

SEQ ID NO: 5399954 - DNA, 25 bp, Homo sapien
cataggatcactctaaacgtaatgt

SEQ ID NO: 5399955 - DNA, 25 bp, Homo sapien
tctcaaatagttaggcacacaccac

SEQ ID NO: 5399956 - DNA, 25 bp, Homo sapien
ctccagcccgggctatagaccgaga

SEQ ID NO: 5399957 - DNA, 25 bp, Homo sapien
cccgggctatagaccgagactccat

SEQ ID NO: 5399958 - DNA, 25 bp, Homo sapien
ccagcccgggctatagaccgagact

SEQ ID NO: 5399959 - DNA, 25 bp, Homo sapien
agcccgggctatagaccgagactcc

SEQ ID NO: 5399960 - DNA, 25 bp, Homo sapien
tcttcagcttgagaatcgacctctg

SEQ ID NO: 5399961 - DNA, 25 bp, Homo sapien
tgttccatgcggcaatgaaaccaca

SEQ ID NO: 5399962 - DNA, 25 bp, Homo sapien
ttctcctatgagaatgaagagtctt

SEQ ID NO: 5399963 - DNA, 25 bp, Homo sapien
aattgtcagccaaatcaaaggagag

SEQ ID NO: 5399964 - DNA, 25 bp, Homo sapien
gactgctggactctatagggtttgg

SEQ ID NO: 5399965 - DNA, 25 bp, Homo sapien
tgttacctaagttgagcctgactgg

SEQ ID NO: 5399966 - DNA, 25 bp, Homo sapien
taaaggatgagactgctaccgagca

SEQ ID NO: 5399967 - DNA, 25 bp, Homo sapien
gaaaagctttagtgccagtcaactg

SEQ ID NO: 5399968 - DNA, 25 bp, Homo sapien
ccatgatggagagttccattgctgc

SEQ ID NO: 5399969 - DNA, 25 bp, Homo sapien
cacatgtgagtgagggctcaaatcc

SEQ ID NO: 5399970 - DNA, 25 bp, Homo sapien
gctgctgggcttcatgtgtctgatt

SEQ ID NO: 5399971 - DNA, 25 bp, Homo sapien
caaatcctgggccaggaacccatga

SEQ ID NO: 5399972 - DNA, 25 bp, Homo sapien
gggctgtttccatcggtcactggat

SEQ ID NO: 5399973 - DNA, 25 bp, Homo sapien
ctcttccggttcgggcctcagggtg

SEQ ID NO: 5399974 - DNA, 25 bp, Homo sapien
ctcagggtggccgacatgacggcca

SEQ ID NO: 5399975 - DNA, 25 bp, Homo sapien
ccctcgcgccgctgttggagacttt

SEQ ID NO: 5399976 - DNA, 25 bp, Homo sapien
agccacttgaaccagccagcaccaa

SEQ ID NO: 5399977 - DNA, 25 bp, Homo sapien
agactgggttttgccgtgctgctca

SEQ ID NO: 5399978 - DNA, 25 bp, Homo sapien
ttgaaccagccagcaccaaactctt

SEQ ID NO: 5399979 - DNA, 25 bp, Homo sapien
aaactcttctgtagcagctgcccca

SEQ ID NO: 5399980 - DNA, 25 bp, Homo sapien
aagacagttggaatcatggtaggga

SEQ ID NO: 5399981 - DNA, 25 bp, Homo sapien
ggctttttgagactgcaattccgtg

SEQ ID NO: 5399982 - DNA, 25 bp, Homo sapien
tttgagctggagactgtccgtgtcg

SEQ ID NO: 5399983 - DNA, 25 bp, Homo sapien
attccgtgtgaatttgacgatcgac

SEQ ID NO: 5399984 - DNA, 25 bp, Homo sapien
caagagctgctaagtaatgttgatt

SEQ ID NO: 5399985 - DNA, 25 bp, Homo sapien
gaatatttagcccaaaactgtgtta

SEQ ID NO: 5399986 - DNA, 25 bp, Homo sapien
tatgagtacttaactaggtggtagt

SEQ ID NO: 5399987 - DNA, 25 bp, Homo sapien
aacactgtatgtttacaagagctgc

SEQ ID NO: 5399988 - DNA, 25 bp, Homo sapien
taagcgcattgttgtggttagaaga

SEQ ID NO: 5399989 - DNA, 25 bp, Homo sapien
gattttagaaccagaatcttagcgc

SEQ ID NO: 5399990 - DNA, 25 bp, Homo sapien
cagtacattatgtgaggtgccttgc

SEQ ID NO: 5399991 - DNA, 25 bp, Homo sapien
tcgtgggcccctgtaataaccagct

SEQ ID NO: 5399992 - DNA, 25 bp, Homo sapien
tgtattcttggctgctatgcgtggt

SEQ ID NO: 5399993 - DNA, 25 bp, Homo sapien
ttagcaaatattcatgcagcagcag

SEQ ID NO: 5399994 - DNA, 25 bp, Homo sapien
tcttaaacccgtgcatattctggtg

SEQ ID NO: 5399995 - DNA, 25 bp, Homo sapien
caactttggacagctttcaagaaaa

SEQ ID NO: 5399996 - DNA, 25 bp, Homo sapien
gttaatttgtcattcagcctaggag

SEQ ID NO: 5399997 - DNA, 25 bp, Homo sapien
gaactgcgctggtagatgggcctaa

SEQ ID NO: 5399998 - DNA, 25 bp, Homo sapien
gcattgggccccgtgagtcttttta

SEQ ID NO: 5399999 - DNA, 25 bp, Homo sapien
taaacacagtcccaggtgattcatg

SEQ ID NO: 5400000 - DNA, 25 bp, Homo sapien
ttttattagttgctggtttgtattg

SEQ ID NO: 5400001 - DNA, 25 bp, Homo sapien
agttgctggtttgtattgattataa

SEQ ID NO: 5400002 - DNA, 25 bp, Homo sapien
gctggtttgtattgattataagttt

SEQ ID NO: 5400003 - DNA, 25 bp, Homo sapien
tattagttgctggtttgtattgatt

SEQ ID NO: 5400004 - DNA, 25 bp, Homo sapien
cattgacacagaaaaaccataggca

SEQ ID NO: 5400005 - DNA, 25 bp, Homo sapien
cataggcagcttgagaacttaggta

SEQ ID NO: 5400006 - DNA, 25 bp, Homo sapien
taggtaacagtggagagtctaaacc

SEQ ID NO: 5400007 - DNA, 25 bp, Homo sapien
tctaaaccgaaacattgactgcagg

SEQ ID NO: 5400008 - DNA, 25 bp, Homo sapien
aatagcttcaacgtagttggctggg

SEQ ID NO: 5400009 - DNA, 25 bp, Homo sapien
tgcacagtgccatacatccagcctt

SEQ ID NO: 5400010 - DNA, 25 bp, Homo sapien
gctgggagcattccggtcctgccag

SEQ ID NO: 5400011 - DNA, 25 bp, Homo sapien
tatagtcatacatggcacggaagat

SEQ ID NO: 5400012 - DNA, 25 bp, Homo sapien
catcctaccgtttatctttgggcaa

SEQ ID NO: 5400013 - DNA, 25 bp, Homo sapien
taaaagttttaggtcaaatggcatg

SEQ ID NO: 5400014 - DNA, 25 bp, Homo sapien
cccctttgcataagtggaacattac

SEQ ID NO: 5400015 - DNA, 25 bp, Homo sapien
tgtgagccactattcctgacctaat

SEQ ID NO: 5400016 - DNA, 25 bp, Homo sapien
tcaaattggccagacttttatactt

SEQ ID NO: 5400017 - DNA, 25 bp, Homo sapien
gatcaaattggccagacttttatac

SEQ ID NO: 5400018 - DNA, 25 bp, Homo sapien
atcaaattggccagacttttatact

SEQ ID NO: 5400019 - DNA, 25 bp, Homo sapien
gcttgagtccatgaagtcgagactg

SEQ ID NO: 5400020 - DNA, 25 bp, Homo sapien
ttgagtccatgaagtcgagactgca

SEQ ID NO: 5400021 - DNA, 25 bp, Homo sapien
cttgagtccatgaagtcgagactgc

SEQ ID NO: 5400022 - DNA, 25 bp, Homo sapien
ttgcttgagtccatgaagtcgagac

SEQ ID NO: 5400023 - DNA, 25 bp, Homo sapien
gatgggatggaagataccgttgtct

SEQ ID NO: 5400024 - DNA, 25 bp, Homo sapien
gaagataccgttgtctgttgggtag

SEQ ID NO: 5400025 - DNA, 25 bp, Homo sapien
aagatgatcgttgttgtgggagctc

SEQ ID NO: 5400026 - DNA, 25 bp, Homo sapien
tgtctgttgggtagcaactgaagat

SEQ ID NO: 5400027 - DNA, 25 bp, Homo sapien
tcgaaaggtggtggtctggtgcttc

SEQ ID NO: 5400028 - DNA, 25 bp, Homo sapien
cccactgatgcttagtgcactggca

SEQ ID NO: 5400029 - DNA, 25 bp, Homo sapien
ccccgtcgctgtaagtcgaaaggtg

SEQ ID NO: 5400030 - DNA, 25 bp, Homo sapien
ctgttgagactgcaaagacaccccc

SEQ ID NO: 5400031 - DNA, 25 bp, Homo sapien
taatgggagacatgcactgaggcag

SEQ ID NO: 5400032 - DNA, 25 bp, Homo sapien
gatgcaatagagctcaggaagttcc

SEQ ID NO: 5400033 - DNA, 25 bp, Homo sapien
gaaggaatgaagttgtgcagcctgc

SEQ ID NO: 5400034 - DNA, 25 bp, Homo sapien
aggtgtacaacaccactcgcggcta

SEQ ID NO: 5400035 - DNA, 25 bp, Homo sapien
ggattagtacgccagacacgtaaac

SEQ ID NO: 5400036 - DNA, 25 bp, Homo sapien
gatcatagtcaaaaaccgaaccagg

SEQ ID NO: 5400037 - DNA, 25 bp, Homo sapien
aaccgaaccaggattagtacgccag

SEQ ID NO: 5400038 - DNA, 25 bp, Homo sapien
tcatgtgtaagcttcgggactggat

SEQ ID NO: 5400039 - DNA, 25 bp, Homo sapien
cttgcacctctagaaaaacagattg

SEQ ID NO: 5400040 - DNA, 25 bp, Homo sapien
catgaattttaacaaccaccaaagg

SEQ ID NO: 5400041 - DNA, 25 bp, Homo sapien
gaacaaagataaggtagaaatcagc

SEQ ID NO: 5400042 - DNA, 25 bp, Homo sapien
tccagcttaggttctgggtcatgtc

SEQ ID NO: 5400043 - DNA, 25 bp, Homo sapien
tagtctcctgatcttggtcattccg

SEQ ID NO: 5400044 - DNA, 25 bp, Homo sapien
cgttcagtgataggatctgtcacca

SEQ ID NO: 5400045 - DNA, 25 bp, Homo sapien
aatacctcggtagttaatgtcactg

SEQ ID NO: 5400046 - DNA, 25 bp, Homo sapien
ccactggtgtgaagcaacccttgtg

SEQ ID NO: 5400047 - DNA, 25 bp, Homo sapien
tctccctcacccgtctcatctcggg

SEQ ID NO: 5400048 - DNA, 25 bp, Homo sapien
ttgtttccggaaactatcagaataa

SEQ ID NO: 5400049 - DNA, 25 bp, Homo sapien
agatgtgccgttgggtctccctcac

SEQ ID NO: 5400050 - DNA, 25 bp, Homo sapien
cccgtctcatctcgggggtatccaa

SEQ ID NO: 5400051 - DNA, 25 bp, Homo sapien
tgttttgacttcgaaaatgaaactc

SEQ ID NO: 5400052 - DNA, 25 bp, Homo sapien
ggtgctgtcctaaatctgaaacctc

SEQ ID NO: 5400053 - DNA, 25 bp, Homo sapien
agaccgtgaatgagtggtgctgtcc

SEQ ID NO: 5400054 - DNA, 25 bp, Homo sapien
caattttggaacaggctaatctggg

SEQ ID NO: 5400055 - DNA, 25 bp, Homo sapien
aacatattcgatggtatttggctct

SEQ ID NO: 5400056 - DNA, 25 bp, Homo sapien
tggtatttggctctaaatctgacat

SEQ ID NO: 5400057 - DNA, 25 bp, Homo sapien
attacagcatcaacatattcgatgg

SEQ ID NO: 5400058 - DNA, 25 bp, Homo sapien
aaatttgctaggaattacagcatca

SEQ ID NO: 5400059 - DNA, 25 bp, Homo sapien
tattttccttaggttgtgtccagac

SEQ ID NO: 5400060 - DNA, 25 bp, Homo sapien
cagagtattacccatgtcataaagt

SEQ ID NO: 5400061 - DNA, 25 bp, Homo sapien
cgtagaactacctcaaagtataggg

SEQ ID NO: 5400062 - DNA, 25 bp, Homo sapien
tatgctaatatagaaatcaaagtcc

SEQ ID NO: 5400063 - DNA, 25 bp, Homo sapien
ttttcttggttgcgcttagctctct

SEQ ID NO: 5400064 - DNA, 25 bp, Homo sapien
tttcttggttgcgcttagctctctc

SEQ ID NO: 5400065 - DNA, 25 bp, Homo sapien
gttttcttggttgcgcttagctctc

SEQ ID NO: 5400066 - DNA, 25 bp, Homo sapien
tctttccatctcaggagtaaagggt

SEQ ID NO: 5400067 - DNA, 25 bp, Homo sapien
ttgcggtggctttccccacattttc

SEQ ID NO: 5400068 - DNA, 25 bp, Homo sapien
ggagtgacaggggttgcggtggctt

SEQ ID NO: 5400069 - DNA, 25 bp, Homo sapien
tcaggagtgacaggggttgcggtgg

SEQ ID NO: 5400070 - DNA, 25 bp, Homo sapien
gtgacaggggttgcggtggctttcc

SEQ ID NO: 5400071 - DNA, 25 bp, Homo sapien
gctccatctcgggagtgacagctaa

SEQ ID NO: 5400072 - DNA, 25 bp, Homo sapien
tgtattatggaaatggtgttaggct

SEQ ID NO: 5400073 - DNA, 25 bp, Homo sapien
gtattatggaaatggtgttaggcta

SEQ ID NO: 5400074 - DNA, 25 bp, Homo sapien
tcttgattgtgtttgactctctcca

SEQ ID NO: 5400075 - DNA, 25 bp, Homo sapien
cccttgcccatgttttctttgtata

SEQ ID NO: 5400076 - DNA, 25 bp, Homo sapien
caggtagaggggttcccttgcccat

SEQ ID NO: 5400077 - DNA, 25 bp, Homo sapien
ctccatctcaggagtgacaggtaga

SEQ ID NO: 5400078 - DNA, 25 bp, Homo sapien
ccatgcctcctaaacaattatatga

SEQ ID NO: 5400079 - DNA, 25 bp, Homo sapien
tatatgaggatttgagacagttaga

SEQ ID NO: 5400080 - DNA, 25 bp, Homo sapien
tccttgttaagacaaaacacagttg

SEQ ID NO: 5400081 - DNA, 25 bp, Homo sapien
tgttaagacaaaacacagttgtcca

SEQ ID NO: 5400082 - DNA, 25 bp, Homo sapien
tttccatctcgggagtgacaggtaa

SEQ ID NO: 5400083 - DNA, 25 bp, Homo sapien
tgagactgttagaactcggtgttgt

SEQ ID NO: 5400084 - DNA, 25 bp, Homo sapien
tgcaccctctagagaagcagggact

SEQ ID NO: 5400085 - DNA, 25 bp, Homo sapien
tttagtggaagctgttgttgggata

SEQ ID NO: 5400086 - DNA, 25 bp, Homo sapien
ttatagaaatgggaaagtatatcct

SEQ ID NO: 5400087 - DNA, 25 bp, Homo sapien
gtgatggggattggaattcctgtcc

SEQ ID NO: 5400088 - DNA, 25 bp, Homo sapien
tgctttggagcagttgggagtggga

SEQ ID NO: 5400089 - DNA, 25 bp, Homo sapien
gctttggagcagttgggagtgggaa

SEQ ID NO: 5400090 - DNA, 25 bp, Homo sapien
ttgattgtgtttgactctctccatc

SEQ ID NO: 5400091 - DNA, 25 bp, Homo sapien
gtgatggggattggaatcccttttc

SEQ ID NO: 5400092 - DNA, 25 bp, Homo sapien
cgaactaaagttttcttgattgtgt

SEQ ID NO: 5400093 - DNA, 25 bp, Homo sapien
ctctccatctctggagtgatgggga

SEQ ID NO: 5400094 - DNA, 25 bp, Homo sapien
caatatggcaatttggtccttgtca

SEQ ID NO: 5400095 - DNA, 25 bp, Homo sapien
tctaataggcttatgcaccactggg

SEQ ID NO: 5400096 - DNA, 25 bp, Homo sapien
gaataataattacaacccacaggga

SEQ ID NO: 5400097 - DNA, 25 bp, Homo sapien
gtgggaccaaagaaagttactgatc

SEQ ID NO: 5400098 - DNA, 25 bp, Homo sapien
catcagataaaaagagttccaagta

SEQ ID NO: 5400099 - DNA, 25 bp, Homo sapien
catttctatatgtggcttcaagtcc

SEQ ID NO: 5400100 - DNA, 25 bp, Homo sapien
gacttcctagggttcagatgaacct

SEQ ID NO: 5400101 - DNA, 25 bp, Homo sapien
tgttcctaaggaagagccaccattt

SEQ ID NO: 5400102 - DNA, 25 bp, Homo sapien
caggagtgacaggtaggggagtccc

SEQ ID NO: 5400103 - DNA, 25 bp, Homo sapien
ggagtccccttgctcaagttctctt

SEQ ID NO: 5400104 - DNA, 25 bp, Homo sapien
cgagctaaagttttcttgattgagt

SEQ ID NO: 5400105 - DNA, 25 bp, Homo sapien
ttgagtttgactcgctccatctcag

SEQ ID NO: 5400106 - DNA, 25 bp, Homo sapien
taaaagctgcaaacataaagaatac

SEQ ID NO: 5400107 - DNA, 25 bp, Homo sapien
ttacaccagttagaaacacctactg

SEQ ID NO: 5400108 - DNA, 25 bp, Homo sapien
cacagttaaaatttcacaccagaac

SEQ ID NO: 5400109 - DNA, 25 bp, Homo sapien
tttacttttgactgtgttacaccag

SEQ ID NO: 5400110 - DNA, 25 bp, Homo sapien
tgataggtgttgggattcctttccc

SEQ ID NO: 5400111 - DNA, 25 bp, Homo sapien
gtgataggtgttgggattcctttcc

SEQ ID NO: 5400112 - DNA, 25 bp, Homo sapien
agtgataggtgttgggattcctttc

SEQ ID NO: 5400113 - DNA, 25 bp, Homo sapien
gatacaagaaagtacccagaggaca

SEQ ID NO: 5400114 - DNA, 25 bp, Homo sapien
gaactctacaatgctaattctggaa

SEQ ID NO: 5400115 - DNA, 25 bp, Homo sapien
tctagtcaagtcactgaaaatgttc

SEQ ID NO: 5400116 - DNA, 25 bp, Homo sapien
caagtataatcggaaatgtgagtca

SEQ ID NO: 5400117 - DNA, 25 bp, Homo sapien
ctcttgattgcgtttgactctctca

SEQ ID NO: 5400118 - DNA, 25 bp, Homo sapien
aatgcctgttcccaagttttctttg

SEQ ID NO: 5400119 - DNA, 25 bp, Homo sapien
cacagtggttggaatgcctgttccc

SEQ ID NO: 5400120 - DNA, 25 bp, Homo sapien
tctggagtcacagtggttggaatgc

SEQ ID NO: 5400121 - DNA, 25 bp, Homo sapien
ctgtagaaaataattagaataccca

SEQ ID NO: 5400122 - DNA, 25 bp, Homo sapien
tgtagaaaataattagaatacccag

SEQ ID NO: 5400123 - DNA, 25 bp, Homo sapien
tagaaaataattagaatacccagaa

SEQ ID NO: 5400124 - DNA, 25 bp, Homo sapien
tagaatacccagaaaggtaaaatga

SEQ ID NO: 5400125 - DNA, 25 bp, Homo sapien
atgagaaaagtggtttcttatctac

SEQ ID NO: 5400126 - DNA, 25 bp, Homo sapien
ttatgagaaaagtggtttcttatct

SEQ ID NO: 5400127 - DNA, 25 bp, Homo sapien
tatgagaaaagtggtttcttatcta

SEQ ID NO: 5400128 - DNA, 25 bp, Homo sapien
taagggagaattcacaacatcccca

SEQ ID NO: 5400129 - DNA, 25 bp, Homo sapien
ccatcaagactaagggagaattcac

SEQ ID NO: 5400130 - DNA, 25 bp, Homo sapien
tagtgaccccatcaagactaaggga

SEQ ID NO: 5400131 - DNA, 25 bp, Homo sapien
ttttgcaacctgtagtgaccccatc

SEQ ID NO: 5400132 - DNA, 25 bp, Homo sapien
ggtagcaattgagagatggccagtc

SEQ ID NO: 5400133 - DNA, 25 bp, Homo sapien
gcaattgagagatggccagtcacac

SEQ ID NO: 5400134 - DNA, 25 bp, Homo sapien
gagagatggccagtcacacaaatgg

SEQ ID NO: 5400135 - DNA, 25 bp, Homo sapien
cagggtagcaattgagagatggcca

SEQ ID NO: 5400136 - DNA, 25 bp, Homo sapien
cacacgtttcacttcaggcaggtca

SEQ ID NO: 5400137 - DNA, 25 bp, Homo sapien
ggattggagttccttgtcctattgc

SEQ ID NO: 5400138 - DNA, 25 bp, Homo sapien
ggtcagggattggagttccttgtcc

SEQ ID NO: 5400139 - DNA, 25 bp, Homo sapien
gtgcttctgcgtctccttcacacgt

SEQ ID NO: 5400140 - DNA, 25 bp, Homo sapien
tagccgttcctggtgagacatcctc

SEQ ID NO: 5400141 - DNA, 25 bp, Homo sapien
tcatctcaggtgtctttccgatagc

SEQ ID NO: 5400142 - DNA, 25 bp, Homo sapien
ggtgagacatcctctttatataaaa

SEQ ID NO: 5400143 - DNA, 25 bp, Homo sapien
cgagctaatgtggtcctgtgtttgt

SEQ ID NO: 5400144 - DNA, 25 bp, Homo sapien
tacacgcagtatttctggcgtgtct

SEQ ID NO: 5400145 - DNA, 25 bp, Homo sapien
tttctggcgtgtcttgaacaactgt

SEQ ID NO: 5400146 - DNA, 25 bp, Homo sapien
ggcgtgtcttgaacaactgtaattt

SEQ ID NO: 5400147 - DNA, 25 bp, Homo sapien
ttcttttacacgcagtatttctggc

SEQ ID NO: 5400148 - DNA, 25 bp, Homo sapien
ataatacgacatggacttctcagca

SEQ ID NO: 5400149 - DNA, 25 bp, Homo sapien
tctcccggactctctgtatctctgg

SEQ ID NO: 5400150 - DNA, 25 bp, Homo sapien
aaacagtctcataatacgacatgga

SEQ ID NO: 5400151 - DNA, 25 bp, Homo sapien
tcttttggttctcccggactctctg

SEQ ID NO: 5400152 - DNA, 25 bp, Homo sapien
catttctgctgattgcttatactta

SEQ ID NO: 5400153 - DNA, 25 bp, Homo sapien
gaaagattcttgacttgttgggcat

SEQ ID NO: 5400154 - DNA, 25 bp, Homo sapien
gggcatgaatgatctctggagtatc

SEQ ID NO: 5400155 - DNA, 25 bp, Homo sapien
tggagtatcaaccacagaagtgaaa

SEQ ID NO: 5400156 - DNA, 25 bp, Homo sapien
tcctggccctcataaaatccggagt

SEQ ID NO: 5400157 - DNA, 25 bp, Homo sapien
ccagttccaggtctcgcttatattc

SEQ ID NO: 5400158 - DNA, 25 bp, Homo sapien
caatatcagtagcattcctggccct

SEQ ID NO: 5400159 - DNA, 25 bp, Homo sapien
cggagtttcattggccatggcattc

SEQ ID NO: 5400160 - DNA, 25 bp, Homo sapien
ggatttgagtggcattctttgctct

SEQ ID NO: 5400161 - DNA, 25 bp, Homo sapien
tggcattctttgctcttagcatgtc

SEQ ID NO: 5400162 - DNA, 25 bp, Homo sapien
tgaggcccttcccacggatgctttc

SEQ ID NO: 5400163 - DNA, 25 bp, Homo sapien
tcagtgaggcccttcccacggatgc

SEQ ID NO: 5400164 - DNA, 25 bp, Homo sapien
tttgacatgtaacaaagctggcgtg

SEQ ID NO: 5400165 - DNA, 25 bp, Homo sapien
tatttgacatgtaacaaagctggcg

SEQ ID NO: 5400166 - DNA, 25 bp, Homo sapien
aaagctggcgtgacctccaggccag

SEQ ID NO: 5400167 - DNA, 25 bp, Homo sapien
aagctggcgtgacctccaggccagt

SEQ ID NO: 5400168 - DNA, 25 bp, Homo sapien
gatgtacgttggtgtttcaaagtcc

SEQ ID NO: 5400169 - DNA, 25 bp, Homo sapien
ctctttggcagtgatgtacgttggt

SEQ ID NO: 5400170 - DNA, 25 bp, Homo sapien
tctttggcagtgatgtacgttggtg

SEQ ID NO: 5400171 - DNA, 25 bp, Homo sapien
atgtacgttggtgtttcaaagtcca

SEQ ID NO: 5400172 - DNA, 25 bp, Homo sapien
ctggtgatagaaagccatgttagat

SEQ ID NO: 5400173 - DNA, 25 bp, Homo sapien
tagaaagccatgttagatatctctc

SEQ ID NO: 5400174 - DNA, 25 bp, Homo sapien
aaagccatgttagatatctctcctc

SEQ ID NO: 5400175 - DNA, 25 bp, Homo sapien
gatagaaagccatgttagatatctc

SEQ ID NO: 5400176 - DNA, 25 bp, Homo sapien
gcactgctcaatctccgagctcttg

SEQ ID NO: 5400177 - DNA, 25 bp, Homo sapien
tgatggcactgctcaatctccgagc

SEQ ID NO: 5400178 - DNA, 25 bp, Homo sapien
ctcaatctccgagctcttgggttgt

SEQ ID NO: 5400179 - DNA, 25 bp, Homo sapien
tgctcaatctccgagctcttgggtt

SEQ ID NO: 5400180 - DNA, 25 bp, Homo sapien
tctgtggcctcttttaggtgaagct

SEQ ID NO: 5400181 - DNA, 25 bp, Homo sapien
tatggtgtggtagtggcctttactc

SEQ ID NO: 5400182 - DNA, 25 bp, Homo sapien
gtgaagctgctccagattatcgggt

SEQ ID NO: 5400183 - DNA, 25 bp, Homo sapien
aattctgtggcctcttttaggtgaa

SEQ ID NO: 5400184 - DNA, 25 bp, Homo sapien
tgattcatgatcagagactccttca

SEQ ID NO: 5400185 - DNA, 25 bp, Homo sapien
ccttcatgtcagtcacgggtttgtg

SEQ ID NO: 5400186 - DNA, 25 bp, Homo sapien
cagtcacgggtttgtgaagtttctt

SEQ ID NO: 5400187 - DNA, 25 bp, Homo sapien
aactggcaagttggcttgtattcag

SEQ ID NO: 5400188 - DNA, 25 bp, Homo sapien
ctcacttgcaagattattagcatct

SEQ ID NO: 5400189 - DNA, 25 bp, Homo sapien
tcacttgcaagattattagcatctt

SEQ ID NO: 5400190 - DNA, 25 bp, Homo sapien
gtagagctggctgtcttttggattg

SEQ ID NO: 5400191 - DNA, 25 bp, Homo sapien
tgtattttggtgtcttgcccttttc

SEQ ID NO: 5400192 - DNA, 25 bp, Homo sapien
gatgcctcatcataggggtgtcata

SEQ ID NO: 5400193 - DNA, 25 bp, Homo sapien
tcctttggcctttgaggtattccgc

SEQ ID NO: 5400194 - DNA, 25 bp, Homo sapien
ctctcctttggcctttgaggtattc

SEQ ID NO: 5400195 - DNA, 25 bp, Homo sapien
atcataggggtgtcataagatgcag

SEQ ID NO: 5400196 - DNA, 25 bp, Homo sapien
tcttggccatttctatgtctgggcg

SEQ ID NO: 5400197 - DNA, 25 bp, Homo sapien
gaccgagcatgcttaagccatggct

SEQ ID NO: 5400198 - DNA, 25 bp, Homo sapien
gtctgggcgaccgagcatgcttaag

SEQ ID NO: 5400199 - DNA, 25 bp, Homo sapien
ctgccttccttgcggtgcttggctc

SEQ ID NO: 5400200 - DNA, 25 bp, Homo sapien
tgtaatgcaggttctctttggcatc

SEQ ID NO: 5400201 - DNA, 25 bp, Homo sapien
ggccacttccatagcatgtttcacc

SEQ ID NO: 5400202 - DNA, 25 bp, Homo sapien
gatggagtagttggattttcctttc

SEQ ID NO: 5400203 - DNA, 25 bp, Homo sapien
ttcttggccacttccatagcatgtt

SEQ ID NO: 5400204 - DNA, 25 bp, Homo sapien
tccagcatgatggagtagttggatt

SEQ ID NO: 5400205 - DNA, 25 bp, Homo sapien
cttggtcacttccttgacgtgaaca

SEQ ID NO: 5400206 - DNA, 25 bp, Homo sapien
ctggtagtgttgtgtatgagccctg

SEQ ID NO: 5400207 - DNA, 25 bp, Homo sapien
cctgtgccaagtgcttcttgacatg

SEQ ID NO: 5400208 - DNA, 25 bp, Homo sapien
cagtgtcccgggtctctggtagtgt

SEQ ID NO: 5400209 - DNA, 25 bp, Homo sapien
acagtcttcgccagcaggatctgag

SEQ ID NO: 5400210 - DNA, 25 bp, Homo sapien
atctgaggcgtgtcaggtacggcat

SEQ ID NO: 5400211 - DNA, 25 bp, Homo sapien
gcgtgtcaggtacggcatggcaggt

SEQ ID NO: 5400212 - DNA, 25 bp, Homo sapien
gttgctgacagtcttcgccagcagg

SEQ ID NO: 5400213 - DNA, 25 bp, Homo sapien
caggaaaaggggcatttctttagct

SEQ ID NO: 5400214 - DNA, 25 bp, Homo sapien
cagtagaacagcagcgttgacaata

SEQ ID NO: 5400215 - DNA, 25 bp, Homo sapien
tgcttgactgctggcgcccctcaca

SEQ ID NO: 5400216 - DNA, 25 bp, Homo sapien
ttgactgctggcgcccctcacagga

SEQ ID NO: 5400217 - DNA, 25 bp, Homo sapien
ctggatctaatggcccttgcactgc

SEQ ID NO: 5400218 - DNA, 25 bp, Homo sapien
atctaatggcccttgcactgctgct

SEQ ID NO: 5400219 - DNA, 25 bp, Homo sapien
catccttccctggtgtccctgggga

SEQ ID NO: 5400220 - DNA, 25 bp, Homo sapien
gctcttctccatccttccctggtgt

SEQ ID NO: 5400221 - DNA, 25 bp, Homo sapien
ctgagccctgatggaagcagctctt

SEQ ID NO: 5400222 - DNA, 25 bp, Homo sapien
gagccctgatggaagcagctcttct

SEQ ID NO: 5400223 - DNA, 25 bp, Homo sapien
actcccggtccagcttatattcaaa

SEQ ID NO: 5400224 - DNA, 25 bp, Homo sapien
ttctattaaagtattcctgagggcg

SEQ ID NO: 5400225 - DNA, 25 bp, Homo sapien
tgcaacccttgaggaactcccggtc

SEQ ID NO: 5400226 - DNA, 25 bp, Homo sapien
tcctgagggcgagcaccgtgttttt

SEQ ID NO: 5400227 - DNA, 25 bp, Homo sapien
tggcttcgtactgtttcttatagtc

SEQ ID NO: 5400228 - DNA, 25 bp, Homo sapien
ggctttgttggcttcgtactgtttc

SEQ ID NO: 5400229 - DNA, 25 bp, Homo sapien
gagtccacttccagtgggctttgtt

SEQ ID NO: 5400230 - DNA, 25 bp, Homo sapien
tggcagcctggaggaagtccggtcg

SEQ ID NO: 5400231 - DNA, 25 bp, Homo sapien
gactttgtaggcgtccttggctgct

SEQ ID NO: 5400232 - DNA, 25 bp, Homo sapien
attggtgttgactttgtaggcgtcc

SEQ ID NO: 5400233 - DNA, 25 bp, Homo sapien
tggatttatttctttggtatacttc

SEQ ID NO: 5400234 - DNA, 25 bp, Homo sapien
gcatctggctcaatggtgcagttgg

SEQ ID NO: 5400235 - DNA, 25 bp, Homo sapien
tgtcgtggattgtggtgtagcctct

SEQ ID NO: 5400236 - DNA, 25 bp, Homo sapien
ggccttgttgtattccaatttataa

SEQ ID NO: 5400237 - DNA, 25 bp, Homo sapien
catgggtgtgtcgtggattgtggtg

SEQ ID NO: 5400238 - DNA, 25 bp, Homo sapien
cctctgggtttggccttgttgtatt

SEQ ID NO: 5400239 - DNA, 25 bp, Homo sapien
tctggagtatccacaattgaggtaa

SEQ ID NO: 5400240 - DNA, 25 bp, Homo sapien
tagtacgcaggtgttctggagtatc

SEQ ID NO: 5400241 - DNA, 25 bp, Homo sapien
tccacaattgaggtaaatttgtcct

SEQ ID NO: 5400242 - DNA, 25 bp, Homo sapien
tgttgacttttgtagtacgcaggtg

SEQ ID NO: 5400243 - DNA, 25 bp, Homo sapien
caaatctcagagcaggactagaacc

SEQ ID NO: 5400244 - DNA, 25 bp, Homo sapien
taagcaggacagatacagagagcac

SEQ ID NO: 5400245 - DNA, 25 bp, Homo sapien
tgtcctcttgaaacaccagagtggg

SEQ ID NO: 5400246 - DNA, 25 bp, Homo sapien
ggttacgagactgacccaagggcac

SEQ ID NO: 5400247 - DNA, 25 bp, Homo sapien
catctccctgcaacagttgtagtga

SEQ ID NO: 5400248 - DNA, 25 bp, Homo sapien
tattcatagagctgcacggtaatcc

SEQ ID NO: 5400249 - DNA, 25 bp, Homo sapien
tcaaagtcaagaggcgccatgaata

SEQ ID NO: 5400250 - DNA, 25 bp, Homo sapien
tgtgctggaaagtgcatgcttcagt

SEQ ID NO: 5400251 - DNA, 25 bp, Homo sapien
tctggacgcagaatttcattacatc

SEQ ID NO: 5400252 - DNA, 25 bp, Homo sapien
cagaaacatcttggcactagattta

SEQ ID NO: 5400253 - DNA, 25 bp, Homo sapien
ccacatatgcgaattgtagagagca

SEQ ID NO: 5400254 - DNA, 25 bp, Homo sapien
gtcaacatatctggacgcagaattt

SEQ ID NO: 5400255 - DNA, 25 bp, Homo sapien
taggctcatcgactaccaggtggta

SEQ ID NO: 5400256 - DNA, 25 bp, Homo sapien
gcggtcttagccagcagatgtctag

SEQ ID NO: 5400257 - DNA, 25 bp, Homo sapien
tttccgctgctcataatcagctctg

SEQ ID NO: 5400258 - DNA, 25 bp, Homo sapien
ctgactgatctggtcgcctgcggtc

SEQ ID NO: 5400259 - DNA, 25 bp, Homo sapien
cattttggtgccttagtagaggata

SEQ ID NO: 5400260 - DNA, 25 bp, Homo sapien
tacctgcctggtattgtcacccgca

SEQ ID NO: 5400261 - DNA, 25 bp, Homo sapien
tgtgtaatatataagggagttccgc

SEQ ID NO: 5400262 - DNA, 25 bp, Homo sapien
gcagatggatacttctgtgcaccaa

SEQ ID NO: 5400263 - DNA, 25 bp, Homo sapien
catacttgaaatctgactttgtcct

SEQ ID NO: 5400264 - DNA, 25 bp, Homo sapien
gagtcggcaacatacttgaaatctg

SEQ ID NO: 5400265 - DNA, 25 bp, Homo sapien
aattgagttgcatacttgaaatgcc

SEQ ID NO: 5400266 - DNA, 25 bp, Homo sapien
tgaaatgcctattgatcggagagtc

SEQ ID NO: 5400267 - DNA, 25 bp, Homo sapien
aaatcaggggtatcataggcatagc

SEQ ID NO: 5400268 - DNA, 25 bp, Homo sapien
gccagagtgaaatcaggggtatcat

SEQ ID NO: 5400269 - DNA, 25 bp, Homo sapien
gccaagtcaagtcttctttatattt

SEQ ID NO: 5400270 - DNA, 25 bp, Homo sapien
gcatagcaaccaatgcctttaagcc

SEQ ID NO: 5400271 - DNA, 25 bp, Homo sapien
gaatggacctccagatacccaactg

SEQ ID NO: 5400272 - DNA, 25 bp, Homo sapien
ccaactggctcatgtagttctcctt

SEQ ID NO: 5400273 - DNA, 25 bp, Homo sapien
tggaaatgctctggacgatcaggaa

SEQ ID NO: 5400274 - DNA, 25 bp, Homo sapien
tgactgctcggtggtggaaatgctc

SEQ ID NO: 5400275 - DNA, 25 bp, Homo sapien
ctttgcgatgatagacaatgtctag

SEQ ID NO: 5400276 - DNA, 25 bp, Homo sapien
catctgtgactttgcgatgatagac

SEQ ID NO: 5400277 - DNA, 25 bp, Homo sapien
catctttcaccgtgtggtatttccc

SEQ ID NO: 5400278 - DNA, 25 bp, Homo sapien
caatgtctagggcatctttcaccgt

SEQ ID NO: 5400279 - DNA, 25 bp, Homo sapien
ctggcattccagtaagccctcttgg

SEQ ID NO: 5400280 - DNA, 25 bp, Homo sapien
ggaaccggagtgtacttgtctttca

SEQ ID NO: 5400281 - DNA, 25 bp, Homo sapien
ccctcttggctctgatgaggattgg

SEQ ID NO: 5400282 - DNA, 25 bp, Homo sapien
attggcgtatctggaaccggagtgt

SEQ ID NO: 5400283 - DNA, 25 bp, Homo sapien
tccagcgtgatgatggggtctctct

SEQ ID NO: 5400284 - DNA, 25 bp, Homo sapien
accatgtccttcacgtctttagcat

SEQ ID NO: 5400285 - DNA, 25 bp, Homo sapien
tgtccttcacgtctttagcatgctt

SEQ ID NO: 5400286 - DNA, 25 bp, Homo sapien
gtctggtttccagcgtgatgatggg

SEQ ID NO: 5400287 - DNA, 25 bp, Homo sapien
taaagaatgctaacagaagtatgag

SEQ ID NO: 5400288 - DNA, 25 bp, Homo sapien
cactgagtatgatccaagcaaagcc

SEQ ID NO: 5400289 - DNA, 25 bp, Homo sapien
cctcaacatattttcccctgatttt

SEQ ID NO: 5400290 - DNA, 25 bp, Homo sapien
cctgatttttgcgtgactgcatgaa

SEQ ID NO: 5400291 - DNA, 25 bp, Homo sapien
tgaagtaaagattgacttctgcttc

SEQ ID NO: 5400292 - DNA, 25 bp, Homo sapien
ccctcgcttggctcttaaaagatca

SEQ ID NO: 5400293 - DNA, 25 bp, Homo sapien
agcttctgccctcgcttggctctta

SEQ ID NO: 5400294 - DNA, 25 bp, Homo sapien
aagatcaggagtatcaggaactgaa

SEQ ID NO: 5400295 - DNA, 25 bp, Homo sapien
ccttatcagtgtataggtaattaga

SEQ ID NO: 5400296 - DNA, 25 bp, Homo sapien
tgtattctggagtgtcaagcaccac

SEQ ID NO: 5400297 - DNA, 25 bp, Homo sapien
gtcttcagttcttgcacttttctgt

SEQ ID NO: 5400298 - DNA, 25 bp, Homo sapien
gtatttgtctcgcatcttccttgcc

SEQ ID NO: 5400299 - DNA, 25 bp, Homo sapien
aagcagccaaatcccttcaggacct

SEQ ID NO: 5400300 - DNA, 25 bp, Homo sapien
cgcaggtgccgggagcggaccatgt

SEQ ID NO: 5400301 - DNA, 25 bp, Homo sapien
gacctgcaagtcctctttgtattta

SEQ ID NO: 5400302 - DNA, 25 bp, Homo sapien
atgtcaggagtgtcatacaggaagc

SEQ ID NO: 5400303 - DNA, 25 bp, Homo sapien
acatagcggcaatggatcacttggg

SEQ ID NO: 5400304 - DNA, 25 bp, Homo sapien
tcacttggggtgtgtatggcagaga

SEQ ID NO: 5400305 - DNA, 25 bp, Homo sapien
tgtctcccacatagcggcaatggat

SEQ ID NO: 5400306 - DNA, 25 bp, Homo sapien
cccacatagcggcaatggatcactt

SEQ ID NO: 5400307 - DNA, 25 bp, Homo sapien
gagttgtatggatcttgtctttcag

SEQ ID NO: 5400308 - DNA, 25 bp, Homo sapien
tatcgggagttgtatggatcttgtc

SEQ ID NO: 5400309 - DNA, 25 bp, Homo sapien
tgtggtacaattcccgatacagtct

SEQ ID NO: 5400310 - DNA, 25 bp, Homo sapien
tcttcttgacttggcggatctcagg

SEQ ID NO: 5400311 - DNA, 25 bp, Homo sapien
tgccttggtgtgttcataggcttct

SEQ ID NO: 5400312 - DNA, 25 bp, Homo sapien
ggtaacattgttgactctccggacg

SEQ ID NO: 5400313 - DNA, 25 bp, Homo sapien
cgtggacaaatggaacatctttggg

SEQ ID NO: 5400314 - DNA, 25 bp, Homo sapien
tctttggggccaagtgtatacccat

SEQ ID NO: 5400315 - DNA, 25 bp, Homo sapien
tcagacccatctcaatgaggaggag

SEQ ID NO: 5400316 - DNA, 25 bp, Homo sapien
cccatctcaatgaggaggagaccac

SEQ ID NO: 5400317 - DNA, 25 bp, Homo sapien
gacccatctcaatgaggaggagacc

SEQ ID NO: 5400318 - DNA, 25 bp, Homo sapien
cagacccatctcaatgaggaggaga

SEQ ID NO: 5400319 - DNA, 25 bp, Homo sapien
ttgaagtgaggagtgtcacctggaa

SEQ ID NO: 5400320 - DNA, 25 bp, Homo sapien
ataactgctcatgtaacgggtgtcc

SEQ ID NO: 5400321 - DNA, 25 bp, Homo sapien
aacgggtgtccttgatgtgtttgaa

SEQ ID NO: 5400322 - DNA, 25 bp, Homo sapien
tggaagtctatatccagtgggcagg

SEQ ID NO: 5400323 - DNA, 25 bp, Homo sapien
cggtccagatccacggttttggtag

SEQ ID NO: 5400324 - DNA, 25 bp, Homo sapien
cttgtatgcatgaagggcccggtcc

SEQ ID NO: 5400325 - DNA, 25 bp, Homo sapien
gcacatagtcatagtggtagacagc

SEQ ID NO: 5400326 - DNA, 25 bp, Homo sapien
tttggtagttggagccactttgcct

SEQ ID NO: 5400327 - DNA, 25 bp, Homo sapien
ccttgttttcaacatgtgagcttta

SEQ ID NO: 5400328 - DNA, 25 bp, Homo sapien
tgcacgtagactggtgtatctgtga

SEQ ID NO: 5400329 - DNA, 25 bp, Homo sapien
ttttgacagcctgcacgtagactgg

SEQ ID NO: 5400330 - DNA, 25 bp, Homo sapien
tttcaacatgtgagctttatacttg

SEQ ID NO: 5400331 - DNA, 25 bp, Homo sapien
tagatcataagcatgcttggcatgg

SEQ ID NO: 5400332 - DNA, 25 bp, Homo sapien
agtgtcccagacgtagcaaccaatg

SEQ ID NO: 5400333 - DNA, 25 bp, Homo sapien
tcatcacgtagatcataagcatgct

SEQ ID NO: 5400334 - DNA, 25 bp, Homo sapien
cagttgaggtcatccttgtatacaa

SEQ ID NO: 5400335 - DNA, 25 bp, Homo sapien
ggaatccttggcagtaaccatctct

SEQ ID NO: 5400336 - DNA, 25 bp, Homo sapien
aaatccattcgtggaggcgcaggcg

SEQ ID NO: 5400337 - DNA, 25 bp, Homo sapien
tctctaccatgtcgggcacgatgtg

SEQ ID NO: 5400338 - DNA, 25 bp, Homo sapien
ggcgcaggcggtaatcaatctcact

SEQ ID NO: 5400339 - DNA, 25 bp, Homo sapien
tcttggtaacgtataaagagctttg

SEQ ID NO: 5400340 - DNA, 25 bp, Homo sapien
gaggcaccgtgctgtgttcggatca

SEQ ID NO: 5400341 - DNA, 25 bp, Homo sapien
taagcttgccaactcggaggcaccg

SEQ ID NO: 5400342 - DNA, 25 bp, Homo sapien
tcggatcatcgtcaacacttcttgg

SEQ ID NO: 5400343 - DNA, 25 bp, Homo sapien
gatgcttctggttcttggcgtgtgt

SEQ ID NO: 5400344 - DNA, 25 bp, Homo sapien
tcttggcgtgtgtcagggacaaggt

SEQ ID NO: 5400345 - DNA, 25 bp, Homo sapien
tgtagctggtggctttcactctatc

SEQ ID NO: 5400346 - DNA, 25 bp, Homo sapien
ggtggctttcactctatcccaggcc

SEQ ID NO: 5400347 - DNA, 25 bp, Homo sapien
tctggttctgtcataatccactgtt

SEQ ID NO: 5400348 - DNA, 25 bp, Homo sapien
gtttctggttctgtcataatccact

SEQ ID NO: 5400349 - DNA, 25 bp, Homo sapien
cactgtttctagaactgttgtgtat

SEQ ID NO: 5400350 - DNA, 25 bp, Homo sapien
tggttctgtcataatccactgtttc

SEQ ID NO: 5400351 - DNA, 25 bp, Homo sapien
gtgtctgtgaccagattatagtttt

SEQ ID NO: 5400352 - DNA, 25 bp, Homo sapien
gaccagattatagttttgtagattt

SEQ ID NO: 5400353 - DNA, 25 bp, Homo sapien
cagcagtcacatagaggggcgtgtc

SEQ ID NO: 5400354 - DNA, 25 bp, Homo sapien
actggcattaatgccactctgaaca

SEQ ID NO: 5400355 - DNA, 25 bp, Homo sapien
tgtatcccaaacgtagcaaccaatg

SEQ ID NO: 5400356 - DNA, 25 bp, Homo sapien
ctgactctgaaggtcgtatgatttc

SEQ ID NO: 5400357 - DNA, 25 bp, Homo sapien
catggaggatttggggtgtatccca

SEQ ID NO: 5400358 - DNA, 25 bp, Homo sapien
ggtcgtatgatttcttggcatggag

SEQ ID NO: 5400359 - DNA, 25 bp, Homo sapien
tcttccagaagagacgtccactggt

SEQ ID NO: 5400360 - DNA, 25 bp, Homo sapien
tcaagatctcctgggcgtttcggac

SEQ ID NO: 5400361 - DNA, 25 bp, Homo sapien
ttcggacgcgtataacattgggttc

SEQ ID NO: 5400362 - DNA, 25 bp, Homo sapien
tgtcgatactccaggtcactgagga

SEQ ID NO: 5400363 - DNA, 25 bp, Homo sapien
gaattcaccgatcacttttccagcc

SEQ ID NO: 5400364 - DNA, 25 bp, Homo sapien
tgaaccacaccagggaattcaccga

SEQ ID NO: 5400365 - DNA, 25 bp, Homo sapien
ccagggaattcaccgatcacttttc

SEQ ID NO: 5400366 - DNA, 25 bp, Homo sapien
cacaccagggaattcaccgatcact

SEQ ID NO: 5400367 - DNA, 25 bp, Homo sapien
aacaatgggaatgtagcgctcatcc

SEQ ID NO: 5400368 - DNA, 25 bp, Homo sapien
catccagggtgtagccataggcctt

SEQ ID NO: 5400369 - DNA, 25 bp, Homo sapien
tcactgttcaccagatcagcatgct

SEQ ID NO: 5400370 - DNA, 25 bp, Homo sapien
cagatcagcatgcttggctccaaca

SEQ ID NO: 5400371 - DNA, 25 bp, Homo sapien
gtggtgtatctggtgaaaacgtata

SEQ ID NO: 5400372 - DNA, 25 bp, Homo sapien
tatctggtgaaaacgtatatttgcc

SEQ ID NO: 5400373 - DNA, 25 bp, Homo sapien
tgaaaacgtatatttgccctttgct

SEQ ID NO: 5400374 - DNA, 25 bp, Homo sapien
gagatatgtggtgtatctggtgaaa

SEQ ID NO: 5400375 - DNA, 25 bp, Homo sapien
tctctggaggatccaccacacttct

SEQ ID NO: 5400376 - DNA, 25 bp, Homo sapien
tcactttgattgacagaattaatct

SEQ ID NO: 5400377 - DNA, 25 bp, Homo sapien
taatcttggctaaaacaatctctgg

SEQ ID NO: 5400378 - DNA, 25 bp, Homo sapien
aagttaggatagttttcaagggcat

SEQ ID NO: 5400379 - DNA, 25 bp, Homo sapien
tggtccacagaatccagtgggatcc

SEQ ID NO: 5400380 - DNA, 25 bp, Homo sapien
ggatccagccaatgcctcggagcca

SEQ ID NO: 5400381 - DNA, 25 bp, Homo sapien
cctggttcttagtaacccttacatg

SEQ ID NO: 5400382 - DNA, 25 bp, Homo sapien
ttcttagtaacccttacatggtcca

SEQ ID NO: 5400383 - DNA, 25 bp, Homo sapien
ggatcatctctcatcgtcgggacac

SEQ ID NO: 5400384 - DNA, 25 bp, Homo sapien
gcttggcggccaagactgacaccat

SEQ ID NO: 5400385 - DNA, 25 bp, Homo sapien
cgttctggtcaggatgacacatcca

SEQ ID NO: 5400386 - DNA, 25 bp, Homo sapien
gtcgggacaccaacataatgacctt

SEQ ID NO: 5400387 - DNA, 25 bp, Homo sapien
tgatgggcatgaacaaatggcacag

SEQ ID NO: 5400388 - DNA, 25 bp, Homo sapien
tcactctgaacgtcattgcagtgat

SEQ ID NO: 5400389 - DNA, 25 bp, Homo sapien
gcatgaacaaatggcacagcatctg

SEQ ID NO: 5400390 - DNA, 25 bp, Homo sapien
tctgaacgtcattgcagtgatgggc

SEQ ID NO: 5400391 - DNA, 25 bp, Homo sapien
gcattccagtctttccggtatttaa

SEQ ID NO: 5400392 - DNA, 25 bp, Homo sapien
tctgtgagggtgtactttgatttgg

SEQ ID NO: 5400393 - DNA, 25 bp, Homo sapien
tggtccagtatcctagcagcctcct

SEQ ID NO: 5400394 - DNA, 25 bp, Homo sapien
gatttggtggcattccagtctttcc

SEQ ID NO: 5400395 - DNA, 25 bp, Homo sapien
ccacaggcgtaaagttgagagtttc

SEQ ID NO: 5400396 - DNA, 25 bp, Homo sapien
gtttcgctgtcacataatcaactct

SEQ ID NO: 5400397 - DNA, 25 bp, Homo sapien
tcatcgaggatctcgccactttgtt

SEQ ID NO: 5400398 - DNA, 25 bp, Homo sapien
actctgtcatccacaggcgtaaagt

SEQ ID NO: 5400399 - DNA, 25 bp, Homo sapien
ctcactgaagatgtccgcggcatgt

SEQ ID NO: 5400400 - DNA, 25 bp, Homo sapien
ttggcatgattgacggacacggagt

SEQ ID NO: 5400401 - DNA, 25 bp, Homo sapien
gacggacacggagtcatttggcatc

SEQ ID NO: 5400402 - DNA, 25 bp, Homo sapien
ttggcatccacccaattccacgcaa

SEQ ID NO: 5400403 - DNA, 25 bp, Homo sapien
gagggcccagcggatcttgttgtca

SEQ ID NO: 5400404 - DNA, 25 bp, Homo sapien
gagcttgtcagctatgagggcccag

SEQ ID NO: 5400405 - DNA, 25 bp, Homo sapien
tgaatcacatcgttctggtcgggca

SEQ ID NO: 5400406 - DNA, 25 bp, Homo sapien
tgtgagggtgcccacgtagtgtccc

SEQ ID NO: 5400407 - DNA, 25 bp, Homo sapien
ggatggcatccagccggacatcaca

SEQ ID NO: 5400408 - DNA, 25 bp, Homo sapien
acagcccgccttcatttcatcccag

SEQ ID NO: 5400409 - DNA, 25 bp, Homo sapien
tcacagcccgccttcatttcatccc

SEQ ID NO: 5400410 - DNA, 25 bp, Homo sapien
gccggacatcacagcccgccttcat

SEQ ID NO: 5400411 - DNA, 25 bp, Homo sapien
attgctcacattaagagcatttgct

SEQ ID NO: 5400412 - DNA, 25 bp, Homo sapien
gtattgaagttttatccttgtccca

SEQ ID NO: 5400413 - DNA, 25 bp, Homo sapien
gctctagcgagattaatttctggag

SEQ ID NO: 5400414 - DNA, 25 bp, Homo sapien
tgtcccaaacctctctgtactttgg

SEQ ID NO: 5400415 - DNA, 25 bp, Homo sapien
tattctgggcgtttttgactctcaa

SEQ ID NO: 5400416 - DNA, 25 bp, Homo sapien
tacttaaggttcaccacaggcgtcc

SEQ ID NO: 5400417 - DNA, 25 bp, Homo sapien
caggcgtccgatagacactgtcaca

SEQ ID NO: 5400418 - DNA, 25 bp, Homo sapien
tagcaaggaccacttcaggtgtgtc

SEQ ID NO: 5400419 - DNA, 25 bp, Homo sapien
gggacttgtttcctgggcgacacac

SEQ ID NO: 5400420 - DNA, 25 bp, Homo sapien
caatgggggacttgtttcctgggcg

SEQ ID NO: 5400421 - DNA, 25 bp, Homo sapien
ggggacttgtttcctgggcgacaca

SEQ ID NO: 5400422 - DNA, 25 bp, Homo sapien
tgggggacttgtttcctgggcgaca

SEQ ID NO: 5400423 - DNA, 25 bp, Homo sapien
tggtcgggaaagcaagaccagcggt

SEQ ID NO: 5400424 - DNA, 25 bp, Homo sapien
tcgggaaagcaagaccagcggtgca

SEQ ID NO: 5400425 - DNA, 25 bp, Homo sapien
ttctggtcgggaaagcaagaccagc

SEQ ID NO: 5400426 - DNA, 25 bp, Homo sapien
tctggtcgggaaagcaagaccagcg

SEQ ID NO: 5400427 - DNA, 25 bp, Homo sapien
gatcccaatggcatctgctcgcagg

SEQ ID NO: 5400428 - DNA, 25 bp, Homo sapien
gtcactggcaatatccctggaagcc

SEQ ID NO: 5400429 - DNA, 25 bp, Homo sapien
cataaccagtcatcttgacatcttc

SEQ ID NO: 5400430 - DNA, 25 bp, Homo sapien
agccttggcatgctggatcccaatg

SEQ ID NO: 5400431 - DNA, 25 bp, Homo sapien
cagggcattgattttggattgcagc

SEQ ID NO: 5400432 - DNA, 25 bp, Homo sapien
gggagtgtcagctggcacgttcaca

SEQ ID NO: 5400433 - DNA, 25 bp, Homo sapien
tctcccaggcatcgcgatacaatgg

SEQ ID NO: 5400434 - DNA, 25 bp, Homo sapien
agctggcacgttcacattagccttc

SEQ ID NO: 5400435 - DNA, 25 bp, Homo sapien
ttgagggcctcaggctttatacgat

SEQ ID NO: 5400436 - DNA, 25 bp, Homo sapien
gatctttgcctggattacttccggg

SEQ ID NO: 5400437 - DNA, 25 bp, Homo sapien
acttccggggtgtcaacaatgctgg

SEQ ID NO: 5400438 - DNA, 25 bp, Homo sapien
tttatacgatacagcctttcattca

SEQ ID NO: 5400439 - DNA, 25 bp, Homo sapien
tgacatcatgtccaacggtgtgttg

SEQ ID NO: 5400440 - DNA, 25 bp, Homo sapien
gataatcaatgtcgctaaccaggac

SEQ ID NO: 5400441 - DNA, 25 bp, Homo sapien
tcatcttgtagggtgcggaaaccca

SEQ ID NO: 5400442 - DNA, 25 bp, Homo sapien
tgatctggcagacacgtccactggt

SEQ ID NO: 5400443 - DNA, 25 bp, Homo sapien
cttggcgtgcttgatttcaatggca

SEQ ID NO: 5400444 - DNA, 25 bp, Homo sapien
atggcatctgcccttatgtcatagc

SEQ ID NO: 5400445 - DNA, 25 bp, Homo sapien
tgcccttatgtcatagcctttctgc

SEQ ID NO: 5400446 - DNA, 25 bp, Homo sapien
gcgtgcttgatttcaatggcatctg

SEQ ID NO: 5400447 - DNA, 25 bp, Homo sapien
tgcaaggcattgatgtgggcctgca

SEQ ID NO: 5400448 - DNA, 25 bp, Homo sapien
gctgatttgcaaggcattgatgtgg

SEQ ID NO: 5400449 - DNA, 25 bp, Homo sapien
gcatctccggagtatcagaaggaat

SEQ ID NO: 5400450 - DNA, 25 bp, Homo sapien
gcctgcagcatctccggagtatcag

SEQ ID NO: 5400451 - DNA, 25 bp, Homo sapien
caacttctggagtgtcgacaatgct

SEQ ID NO: 5400452 - DNA, 25 bp, Homo sapien
gaggtcttgagcaaccttcactctg

SEQ ID NO: 5400453 - DNA, 25 bp, Homo sapien
tgctggtgaatgacaaagcttctgg

SEQ ID NO: 5400454 - DNA, 25 bp, Homo sapien
tctggacgtgtcctatagagtcttt

SEQ ID NO: 5400455 - DNA, 25 bp, Homo sapien
aaagcaatgggggacttgtttcctg

SEQ ID NO: 5400456 - DNA, 25 bp, Homo sapien
aggcaaagcaatgggggacttgttt

SEQ ID NO: 5400457 - DNA, 25 bp, Homo sapien
tcaggcaaagcaatgggggacttgt

SEQ ID NO: 5400458 - DNA, 25 bp, Homo sapien
gcaaagcaatgggggacttgtttcc

SEQ ID NO: 5400459 - DNA, 25 bp, Homo sapien
tcgctctgtaggtcgtaggctttcc

SEQ ID NO: 5400460 - DNA, 25 bp, Homo sapien
tggatcacatcattctggtcgggaa

SEQ ID NO: 5400461 - DNA, 25 bp, Homo sapien
tcgggaaagcaagaccagtggtgca

SEQ ID NO: 5400462 - DNA, 25 bp, Homo sapien
taatggcgatagtccacatcacttg

SEQ ID NO: 5400463 - DNA, 25 bp, Homo sapien
gctgcgacagccaatgtaatggcct

SEQ ID NO: 5400464 - DNA, 25 bp, Homo sapien
tgtggtcgttgtaggcctttttgta

SEQ ID NO: 5400465 - DNA, 25 bp, Homo sapien
ccttctttggcagcgctgatggaca

SEQ ID NO: 5400466 - DNA, 25 bp, Homo sapien
tggagatcttggctttgtggtcgtt

SEQ ID NO: 5400467 - DNA, 25 bp, Homo sapien
gatcccaatggcatctgctcgcagg

SEQ ID NO: 5400468 - DNA, 25 bp, Homo sapien
tcactggcaatatccctggaagcct

SEQ ID NO: 5400469 - DNA, 25 bp, Homo sapien
cataaccagtcatcttgacatcttc

SEQ ID NO: 5400470 - DNA, 25 bp, Homo sapien
agccttggcatgctggatcccaatg

SEQ ID NO: 5400471 - DNA, 25 bp, Homo sapien
gggagtgtcagctggcacgttcaca

SEQ ID NO: 5400472 - DNA, 25 bp, Homo sapien
gcattgattttggattgcagcatca

SEQ ID NO: 5400473 - DNA, 25 bp, Homo sapien
agctggcacgttcacattagccttc

SEQ ID NO: 5400474 - DNA, 25 bp, Homo sapien
attgcagcatcaggggagtgtcagc

SEQ ID NO: 5400475 - DNA, 25 bp, Homo sapien
acttccggggtgtcaacaatgctgg

SEQ ID NO: 5400476 - DNA, 25 bp, Homo sapien
ttgagggcctcaggctttatacgat

SEQ ID NO: 5400477 - DNA, 25 bp, Homo sapien
gatctttgcctggattacttccggg

SEQ ID NO: 5400478 - DNA, 25 bp, Homo sapien
tttatacgatacagcctttcattca

SEQ ID NO: 5400479 - DNA, 25 bp, Homo sapien
tgatctggcagacacgtccactggt

SEQ ID NO: 5400480 - DNA, 25 bp, Homo sapien
tgacatcatgtccaacggtgtgttg

SEQ ID NO: 5400481 - DNA, 25 bp, Homo sapien
gataatcaatgtcgctaaccaggac

SEQ ID NO: 5400482 - DNA, 25 bp, Homo sapien
tcatcttgtagggtgcggaaaccca

SEQ ID NO: 5400483 - DNA, 25 bp, Homo sapien
tgcccttatgtcatagcctttctgc

SEQ ID NO: 5400484 - DNA, 25 bp, Homo sapien
atggcatctgcccttatgtcatagc

SEQ ID NO: 5400485 - DNA, 25 bp, Homo sapien
cttggcgtgcttgatttcaatggca

SEQ ID NO: 5400486 - DNA, 25 bp, Homo sapien
gcgtgcttgatttcaatggcatctg

SEQ ID NO: 5400487 - DNA, 25 bp, Homo sapien
tgcaaggcattgatgtgggcctgca

SEQ ID NO: 5400488 - DNA, 25 bp, Homo sapien
gcctgcagcatctccggagtatcag

SEQ ID NO: 5400489 - DNA, 25 bp, Homo sapien
gctgatttgcaaggcattgatgtgg

SEQ ID NO: 5400490 - DNA, 25 bp, Homo sapien
gcatctccggagtatcagaaggaat

SEQ ID NO: 5400491 - DNA, 25 bp, Homo sapien
caacttctggagtgtcgacaatgct

SEQ ID NO: 5400492 - DNA, 25 bp, Homo sapien
gaggtcttgagcaaccttcactctg

SEQ ID NO: 5400493 - DNA, 25 bp, Homo sapien
tgctggtgaatgacaaagcttctgg

SEQ ID NO: 5400494 - DNA, 25 bp, Homo sapien
tctggacgtgtcctatagagtcttt

SEQ ID NO: 5400495 - DNA, 25 bp, Homo sapien
tcaggcaaagcaatgggggacttgt

SEQ ID NO: 5400496 - DNA, 25 bp, Homo sapien
aggcaaagcaatgggggacttgttt

SEQ ID NO: 5400497 - DNA, 25 bp, Homo sapien
aaagcaatgggggacttgtttcctg

SEQ ID NO: 5400498 - DNA, 25 bp, Homo sapien
gcaaagcaatgggggacttgtttcc

SEQ ID NO: 5400499 - DNA, 25 bp, Homo sapien
tcgggaaagcaagaccagtggtgca

SEQ ID NO: 5400500 - DNA, 25 bp, Homo sapien
caggtaatggcgatagtccacatca

SEQ ID NO: 5400501 - DNA, 25 bp, Homo sapien
gatcacatcattctggtcgggaaag

SEQ ID NO: 5400502 - DNA, 25 bp, Homo sapien
tctttggcagcgctgatggacacca

SEQ ID NO: 5400503 - DNA, 25 bp, Homo sapien
agccttggcatgctggatcccaatg

SEQ ID NO: 5400504 - DNA, 25 bp, Homo sapien
gatcccaatggcatctgctcgcagg

SEQ ID NO: 5400505 - DNA, 25 bp, Homo sapien
cataaccagtcatcttgacatcttc

SEQ ID NO: 5400506 - DNA, 25 bp, Homo sapien
gtcactggcaatatccctggaagcc

SEQ ID NO: 5400507 - DNA, 25 bp, Homo sapien
cagggcattgattttggattgcagc

SEQ ID NO: 5400508 - DNA, 25 bp, Homo sapien
agctggcacgttcacattagccttc

SEQ ID NO: 5400509 - DNA, 25 bp, Homo sapien
tctcccaggcatcgcgatacaatgg

SEQ ID NO: 5400510 - DNA, 25 bp, Homo sapien
gggagtgtcagctggcacgttcaca

SEQ ID NO: 5400511 - DNA, 25 bp, Homo sapien
gatctttgcctggattacttccggg

SEQ ID NO: 5400512 - DNA, 25 bp, Homo sapien
tttatacgatacagcctttcattca

SEQ ID NO: 5400513 - DNA, 25 bp, Homo sapien
ttgagggcctcaggctttatacgat

SEQ ID NO: 5400514 - DNA, 25 bp, Homo sapien
acttccggggtgtcaacaatgctgg

SEQ ID NO: 5400515 - DNA, 25 bp, Homo sapien
gataatcaatgtcgctaaccaggac

SEQ ID NO: 5400516 - DNA, 25 bp, Homo sapien
tgatctggcagacacgtccactggt

SEQ ID NO: 5400517 - DNA, 25 bp, Homo sapien
tgacatcatgtccaacggtgtgttg

SEQ ID NO: 5400518 - DNA, 25 bp, Homo sapien
tcatcttgtagggtgcggaaaccca

SEQ ID NO: 5400519 - DNA, 25 bp, Homo sapien
cttggcgtgcttgatttcaatggca

SEQ ID NO: 5400520 - DNA, 25 bp, Homo sapien
atggcatctgcccttatgtcatagc

SEQ ID NO: 5400521 - DNA, 25 bp, Homo sapien
gcgtgcttgatttcaatggcatctg

SEQ ID NO: 5400522 - DNA, 25 bp, Homo sapien
tgcccttatgtcatagcctttctgc

SEQ ID NO: 5400523 - DNA, 25 bp, Homo sapien
tgcaaggcattgatgtgggcctgca

SEQ ID NO: 5400524 - DNA, 25 bp, Homo sapien
gctgatttgcaaggcattgatgtgg

SEQ ID NO: 5400525 - DNA, 25 bp, Homo sapien
gcatctccggagtatcagaaggaat

SEQ ID NO: 5400526 - DNA, 25 bp, Homo sapien
gcctgcagcatctccggagtatcag

SEQ ID NO: 5400527 - DNA, 25 bp, Homo sapien
tctggacgtgtcctatagagtcttt

SEQ ID NO: 5400528 - DNA, 25 bp, Homo sapien
caacttctggagtgtcgacaatgct

SEQ ID NO: 5400529 - DNA, 25 bp, Homo sapien
tgctggtgaatgacaaagcttctgg

SEQ ID NO: 5400530 - DNA, 25 bp, Homo sapien
gaggtcttgagcaaccttcactctg

SEQ ID NO: 5400531 - DNA, 25 bp, Homo sapien
gaacaaatctacatcttccccttcc

SEQ ID NO: 5400532 - DNA, 25 bp, Homo sapien
tgaacaaatctacatcttccccttc

SEQ ID NO: 5400533 - DNA, 25 bp, Homo sapien
gataatgtcgttttgatccggcatg

SEQ ID NO: 5400534 - DNA, 25 bp, Homo sapien
gatgcttaacatgtccactgggcta

SEQ ID NO: 5400535 - DNA, 25 bp, Homo sapien
tatggcacacataatcttgggatca

SEQ ID NO: 5400536 - DNA, 25 bp, Homo sapien
gatccggcatgcatgtccattcatg

SEQ ID NO: 5400537 - DNA, 25 bp, Homo sapien
agatcatagtccttcatctttgatt

SEQ ID NO: 5400538 - DNA, 25 bp, Homo sapien
gcgatgtccctggaggccttggcac

SEQ ID NO: 5400539 - DNA, 25 bp, Homo sapien
gatgtccctggaggccttggcactt

SEQ ID NO: 5400540 - DNA, 25 bp, Homo sapien
tcatagtccttcatctttgattcat

SEQ ID NO: 5400541 - DNA, 25 bp, Homo sapien
gatggaggttttgtcagcatcccaa

SEQ ID NO: 5400542 - DNA, 25 bp, Homo sapien
tactcttggccagcaggatatctgg

SEQ ID NO: 5400543 - DNA, 25 bp, Homo sapien
gatatctggggtgtctggcatcacg

SEQ ID NO: 5400544 - DNA, 25 bp, Homo sapien
ttggctgatattggcagaattactc

SEQ ID NO: 5400545 - DNA, 25 bp, Homo sapien
caaatctgtggaaggtatgattctg

SEQ ID NO: 5400546 - DNA, 25 bp, Homo sapien
tggaaggtatgattctggcaacaga

SEQ ID NO: 5400547 - DNA, 25 bp, Homo sapien
tgtggaaggtatgattctggcaaca

SEQ ID NO: 5400548 - DNA, 25 bp, Homo sapien
aggtatgattctggcaacagaaaac

SEQ ID NO: 5400549 - DNA, 25 bp, Homo sapien
ccggagtgtcggtaatgcatgtgaa

SEQ ID NO: 5400550 - DNA, 25 bp, Homo sapien
cttgctcattgtcagggcattattc

SEQ ID NO: 5400551 - DNA, 25 bp, Homo sapien
ggctggcgatacttcctgtcactca

SEQ ID NO: 5400552 - DNA, 25 bp, Homo sapien
tttgctaggacaatttccggagtgt

SEQ ID NO: 5400553 - DNA, 25 bp, Homo sapien
gatgtcacctagacggcctggtgcc

SEQ ID NO: 5400554 - DNA, 25 bp, Homo sapien
tatttatagatgtcacctagacggc

SEQ ID NO: 5400555 - DNA, 25 bp, Homo sapien
tatagatgtcacctagacggcctgg

SEQ ID NO: 5400556 - DNA, 25 bp, Homo sapien
aatatttatagatgtcacctagacg

SEQ ID NO: 5400557 - DNA, 25 bp, Homo sapien
ccttccgagcctgaatgacgtcatt

SEQ ID NO: 5400558 - DNA, 25 bp, Homo sapien
tcattctgatcaggcaggcaggtcc

SEQ ID NO: 5400559 - DNA, 25 bp, Homo sapien
gccaagctgtttgcggtagccttcc

SEQ ID NO: 5400560 - DNA, 25 bp, Homo sapien
catccttaatgttccgggccccaat

SEQ ID NO: 5400561 - DNA, 25 bp, Homo sapien
tatttgtcaacatctttgaataaga

SEQ ID NO: 5400562 - DNA, 25 bp, Homo sapien
aaagcttctatttgtcaacatcttt

SEQ ID NO: 5400563 - DNA, 25 bp, Homo sapien
gcttctatttgtcaacatctttgaa

SEQ ID NO: 5400564 - DNA, 25 bp, Homo sapien
tataggggtaactaaatttctagca

SEQ ID NO: 5400565 - DNA, 25 bp, Homo sapien
gaatggcatccagacgcaagtcata

SEQ ID NO: 5400566 - DNA, 25 bp, Homo sapien
gattggaatggcatccagacgcaag

SEQ ID NO: 5400567 - DNA, 25 bp, Homo sapien
gacgcaagtcatagccttccttctt

SEQ ID NO: 5400568 - DNA, 25 bp, Homo sapien
agccttggctgcttggattggaatg

SEQ ID NO: 5400569 - DNA, 25 bp, Homo sapien
tattcggttgagtttggctaacatg

SEQ ID NO: 5400570 - DNA, 25 bp, Homo sapien
cattgtcccaggcttcagtatataa

SEQ ID NO: 5400571 - DNA, 25 bp, Homo sapien
tgtatcaggcatgacatgaatagtt

SEQ ID NO: 5400572 - DNA, 25 bp, Homo sapien
ggctaacatgatttctggtgtatca

SEQ ID NO: 5400573 - DNA, 25 bp, Homo sapien
tcggtatctaacagtgaggattgaa

SEQ ID NO: 5400574 - DNA, 25 bp, Homo sapien
tggtaactttcggtatctaacagtg

SEQ ID NO: 5400575 - DNA, 25 bp, Homo sapien
tctaacagtgaggattgaagactca

SEQ ID NO: 5400576 - DNA, 25 bp, Homo sapien
taactttcggtatctaacagtgagg

SEQ ID NO: 5400577 - DNA, 25 bp, Homo sapien
gatagtatcactaagtaattctcca

SEQ ID NO: 5400578 - DNA, 25 bp, Homo sapien
agcgtttctggacgctgacggtaga

SEQ ID NO: 5400579 - DNA, 25 bp, Homo sapien
tccggagtgtccgttatactggtaa

SEQ ID NO: 5400580 - DNA, 25 bp, Homo sapien
ggaatcaatcggaacccagccaatg

SEQ ID NO: 5400581 - DNA, 25 bp, Homo sapien
taacatgcagagctaacatcaagga

SEQ ID NO: 5400582 - DNA, 25 bp, Homo sapien
ttaacatgcagagctaacatcaagg

SEQ ID NO: 5400583 - DNA, 25 bp, Homo sapien
catgcagagctaacatcaaggaaac

SEQ ID NO: 5400584 - DNA, 25 bp, Homo sapien
aacatgcagagctaacatcaaggaa

SEQ ID NO: 5400585 - DNA, 25 bp, Homo sapien
cataggctttccgtgcatgaatgat

SEQ ID NO: 5400586 - DNA, 25 bp, Homo sapien
ggtcgggcaggcagatccattcatg

SEQ ID NO: 5400587 - DNA, 25 bp, Homo sapien
aacgataccaagcatgtccactggg

SEQ ID NO: 5400588 - DNA, 25 bp, Homo sapien
tgctcgggcgccaatgtggtgaccc

SEQ ID NO: 5400589 - DNA, 25 bp, Homo sapien
atggcatcacttctcaagtcatagc

SEQ ID NO: 5400590 - DNA, 25 bp, Homo sapien
tcttccatggcctgacgatagaggc

SEQ ID NO: 5400591 - DNA, 25 bp, Homo sapien
ggcaatatcccgagaggccttggca

SEQ ID NO: 5400592 - DNA, 25 bp, Homo sapien
atcactggcaatatcccgagaggcc

SEQ ID NO: 5400593 - DNA, 25 bp, Homo sapien
tatgcaatgacaagtttagcaaggc

SEQ ID NO: 5400594 - DNA, 25 bp, Homo sapien
gagcaagacgctatttatgcagcag

SEQ ID NO: 5400595 - DNA, 25 bp, Homo sapien
tgttctcaggcaatttgaaatgggt

SEQ ID NO: 5400596 - DNA, 25 bp, Homo sapien
ttgactttggcaagaacaattgagc

SEQ ID NO: 5400597 - DNA, 25 bp, Homo sapien
tagggtaaatggcataaaaagccaa

SEQ ID NO: 5400598 - DNA, 25 bp, Homo sapien
gctaactggcttacatgaggattaa

SEQ ID NO: 5400599 - DNA, 25 bp, Homo sapien
gcaagtactaatttgatgaatagca

SEQ ID NO: 5400600 - DNA, 25 bp, Homo sapien
ctacatcggcaacaatcaatgtggc

SEQ ID NO: 5400601 - DNA, 25 bp, Homo sapien
caggcataatatggacttgggtctt

SEQ ID NO: 5400602 - DNA, 25 bp, Homo sapien
tatggacttgggtcttgtctttgtc

SEQ ID NO: 5400603 - DNA, 25 bp, Homo sapien
gatttcaggtgtatcaggcataata

SEQ ID NO: 5400604 - DNA, 25 bp, Homo sapien
tgtcttgccaacatgatttcaggtg

SEQ ID NO: 5400605 - DNA, 25 bp, Homo sapien
tgtaaacaggagttttcaattaaga

SEQ ID NO: 5400606 - DNA, 25 bp, Homo sapien
taaacaggagttttcaattaagaca

SEQ ID NO: 5400607 - DNA, 25 bp, Homo sapien
tttacaagacatttattgtaacaaa

SEQ ID NO: 5400608 - DNA, 25 bp, Homo sapien
ctgtctgttccatgtatgttaatat

SEQ ID NO: 5400609 - DNA, 25 bp, Homo sapien
tctgttccatgtatgttaatattct

SEQ ID NO: 5400610 - DNA, 25 bp, Homo sapien
gctgtctgttccatgtatgttaata

SEQ ID NO: 5400611 - DNA, 25 bp, Homo sapien
tattttcctacaaattgggggctca

SEQ ID NO: 5400612 - DNA, 25 bp, Homo sapien
aatttcagcttgtccggaggctggc

SEQ ID NO: 5400613 - DNA, 25 bp, Homo sapien
gaggctggcggtagatgttatcact

SEQ ID NO: 5400614 - DNA, 25 bp, Homo sapien
catagacccaatggggacccagcca

SEQ ID NO: 5400615 - DNA, 25 bp, Homo sapien
ggcggtagatgttatcactcagtat

SEQ ID NO: 5400616 - DNA, 25 bp, Homo sapien
gccgagctgcttgcggtaaccatct

SEQ ID NO: 5400617 - DNA, 25 bp, Homo sapien
gacatcattctggtcgggcaggcac

SEQ ID NO: 5400618 - DNA, 25 bp, Homo sapien
attctggtcgggcaggcacgtccac

SEQ ID NO: 5400619 - DNA, 25 bp, Homo sapien
actaaggtctggcacttcttggcta

SEQ ID NO: 5400620 - DNA, 25 bp, Homo sapien
aaatatctagggtgttgctactcac

SEQ ID NO: 5400621 - DNA, 25 bp, Homo sapien
taaatatctagggtgttgctactca

SEQ ID NO: 5400622 - DNA, 25 bp, Homo sapien
atgtaaatatctagggtgttgctac

SEQ ID NO: 5400623 - DNA, 25 bp, Homo sapien
tgtaaatatctagggtgttgctact

SEQ ID NO: 5400624 - DNA, 25 bp, Homo sapien
cacgatggggatggcgtcacttcgc

SEQ ID NO: 5400625 - DNA, 25 bp, Homo sapien
gccacgatggggatggcgtcacttc

SEQ ID NO: 5400626 - DNA, 25 bp, Homo sapien
acttcgcaagtcgtagcctttcttt

SEQ ID NO: 5400627 - DNA, 25 bp, Homo sapien
tcttcattggcaagtttgtatagag

SEQ ID NO: 5400628 - DNA, 25 bp, Homo sapien
tctgccttgccaacataatctctgg

SEQ ID NO: 5400629 - DNA, 25 bp, Homo sapien
tttgttctgccttgccaacataatc

SEQ ID NO: 5400630 - DNA, 25 bp, Homo sapien
ccttgccaacataatctctggtgta

SEQ ID NO: 5400631 - DNA, 25 bp, Homo sapien
tagttgattttgttctgccttgcca

SEQ ID NO: 5400632 - DNA, 25 bp, Homo sapien
taaagtataataacatcttctggca

SEQ ID NO: 5400633 - DNA, 25 bp, Homo sapien
gactccattagtcattaaagtataa

SEQ ID NO: 5400634 - DNA, 25 bp, Homo sapien
ttggagaagcttaaggcagctagga

SEQ ID NO: 5400635 - DNA, 25 bp, Homo sapien
tggcatcttggagaagcttaaggca

SEQ ID NO: 5400636 - DNA, 25 bp, Homo sapien
tattcatgttgagagcattgttctt

SEQ ID NO: 5400637 - DNA, 25 bp, Homo sapien
tcatgttgagagcattgttcttggc

SEQ ID NO: 5400638 - DNA, 25 bp, Homo sapien
cttattcatgttgagagcattgttc

SEQ ID NO: 5400639 - DNA, 25 bp, Homo sapien
ttcatgttgagagcattgttcttgg

SEQ ID NO: 5400640 - DNA, 25 bp, Homo sapien
tagatgttatcactcagtatttcgg

SEQ ID NO: 5400641 - DNA, 25 bp, Homo sapien
gtagatgttatcactcagtatttcg

SEQ ID NO: 5400642 - DNA, 25 bp, Homo sapien
cttaacttgagtaatggattgtata

SEQ ID NO: 5400643 - DNA, 25 bp, Homo sapien
gagtaatggattgtatataaaggat

SEQ ID NO: 5400644 - DNA, 25 bp, Homo sapien
ggaccaatcaatcttaacttgagta

SEQ ID NO: 5400645 - DNA, 25 bp, Homo sapien
attcatggaccaatcaatcttaact

SEQ ID NO: 5400646 - DNA, 25 bp, Homo sapien
ctctggaggtcataggcctgccgag

SEQ ID NO: 5400647 - DNA, 25 bp, Homo sapien
tgactaaggtctggcacttcttggc

SEQ ID NO: 5400648 - DNA, 25 bp, Homo sapien
gcctgccgagcatggatgacatcgc

SEQ ID NO: 5400649 - DNA, 25 bp, Homo sapien
ggaccacatcatcttggggtcatct

SEQ ID NO: 5400650 - DNA, 25 bp, Homo sapien
gcttcgcaagtcatagcctttcttc

SEQ ID NO: 5400651 - DNA, 25 bp, Homo sapien
gtcactgatgatgtccctggaggcc

SEQ ID NO: 5400652 - DNA, 25 bp, Homo sapien
tcttcattagcaagtttgtacagac

SEQ ID NO: 5400653 - DNA, 25 bp, Homo sapien
cacgatggggatggcgtcgcttcgc

SEQ ID NO: 5400654 - DNA, 25 bp, Homo sapien
tggtgtgtctggcattatgtggatc

SEQ ID NO: 5400655 - DNA, 25 bp, Homo sapien
ggtgtgtctggcattatgtggatct

SEQ ID NO: 5400656 - DNA, 25 bp, Homo sapien
ttcatagtgatggcattatttttgg

SEQ ID NO: 5400657 - DNA, 25 bp, Homo sapien
tgttcatagtgatggcattattttt

SEQ ID NO: 5400658 - DNA, 25 bp, Homo sapien
tcatagtgatggcattatttttggc

SEQ ID NO: 5400659 - DNA, 25 bp, Homo sapien
gttcatagtgatggcattatttttg

SEQ ID NO: 5400660 - DNA, 25 bp, Homo sapien
tttccacatccaaagagccaatgga

SEQ ID NO: 5400661 - DNA, 25 bp, Homo sapien
agagccaatggacacccagccaatg

SEQ ID NO: 5400662 - DNA, 25 bp, Homo sapien
ctggtaaatttgaatctgtctggag

SEQ ID NO: 5400663 - DNA, 25 bp, Homo sapien
tggaggctggcgatagattttatca

SEQ ID NO: 5400664 - DNA, 25 bp, Homo sapien
caatattcctctttggtctgaaggg

SEQ ID NO: 5400665 - DNA, 25 bp, Homo sapien
atattcctctttggtctgaagggtt

SEQ ID NO: 5400666 - DNA, 25 bp, Homo sapien
aatattcctctttggtctgaagggt

SEQ ID NO: 5400667 - DNA, 25 bp, Homo sapien
tattcctctttggtctgaagggtta

SEQ ID NO: 5400668 - DNA, 25 bp, Homo sapien
cacgttattatgactctcagtactc

SEQ ID NO: 5400669 - DNA, 25 bp, Homo sapien
cgttattatgactctcagtactcac

SEQ ID NO: 5400670 - DNA, 25 bp, Homo sapien
tgcacgttattatgactctcagtac

SEQ ID NO: 5400671 - DNA, 25 bp, Homo sapien
ctgcacgttattatgactctcagta

SEQ ID NO: 5400672 - DNA, 25 bp, Homo sapien
ataggcctgccgagcatggatgacg

SEQ ID NO: 5400673 - DNA, 25 bp, Homo sapien
tcacgtatagctcgggcaccaatgt

SEQ ID NO: 5400674 - DNA, 25 bp, Homo sapien
gggtcatcacgtatagctcgggcac

SEQ ID NO: 5400675 - DNA, 25 bp, Homo sapien
caatgtggtggccgagctgcttacg

SEQ ID NO: 5400676 - DNA, 25 bp, Homo sapien
cattatatggtatttaacccttctg

SEQ ID NO: 5400677 - DNA, 25 bp, Homo sapien
aatgacaggtaggtatttcattata

SEQ ID NO: 5400678 - DNA, 25 bp, Homo sapien
tttttaatgacaggtaggtatttca

SEQ ID NO: 5400679 - DNA, 25 bp, Homo sapien
ttatgattacttcccatattttgga

SEQ ID NO: 5400680 - DNA, 25 bp, Homo sapien
ttcatcgaaacaataaactgttagc

SEQ ID NO: 5400681 - DNA, 25 bp, Homo sapien
ttagcaacagctttaacctcatggc

SEQ ID NO: 5400682 - DNA, 25 bp, Homo sapien
gaaatgcatgttgctatggactcaa

SEQ ID NO: 5400683 - DNA, 25 bp, Homo sapien
ggcctttctgttgataactctatta

SEQ ID NO: 5400684 - DNA, 25 bp, Homo sapien
tggctgccttgataggaatggcatc

SEQ ID NO: 5400685 - DNA, 25 bp, Homo sapien
gaatggcatctacccgcatgtcata

SEQ ID NO: 5400686 - DNA, 25 bp, Homo sapien
tggcttcttctaggccaagcttata

SEQ ID NO: 5400687 - DNA, 25 bp, Homo sapien
gcatgtcataacctttcctcttggc

SEQ ID NO: 5400688 - DNA, 25 bp, Homo sapien
ggtatctggcataatgtggacagtg

SEQ ID NO: 5400689 - DNA, 25 bp, Homo sapien
aggggtatctggcataatgtggaca

SEQ ID NO: 5400690 - DNA, 25 bp, Homo sapien
cataatgtggacagtggttttatct

SEQ ID NO: 5400691 - DNA, 25 bp, Homo sapien
tctggcataatgtggacagtggttt

SEQ ID NO: 5400692 - DNA, 25 bp, Homo sapien
ctcaaaatctgggtggctcgtttat

SEQ ID NO: 5400693 - DNA, 25 bp, Homo sapien
tggtaatagcattgttttttgccaa

SEQ ID NO: 5400694 - DNA, 25 bp, Homo sapien
tctgggtgctgacggtaaacatggt

SEQ ID NO: 5400695 - DNA, 25 bp, Homo sapien
tcctcgagagaaccactagtcatcc

SEQ ID NO: 5400696 - DNA, 25 bp, Homo sapien
gtctggcacttcttggccaacacca

SEQ ID NO: 5400697 - DNA, 25 bp, Homo sapien
gccgagctgcttgcgaaagccttcc

SEQ ID NO: 5400698 - DNA, 25 bp, Homo sapien
taaggtctggcacttcttggccaac

SEQ ID NO: 5400699 - DNA, 25 bp, Homo sapien
ggtctggcacttcttggccaacacc

SEQ ID NO: 5400700 - DNA, 25 bp, Homo sapien
ttcactggcaatttcccgggaggct

SEQ ID NO: 5400701 - DNA, 25 bp, Homo sapien
gctgctttgattggtatggcatcaa

SEQ ID NO: 5400702 - DNA, 25 bp, Homo sapien
acaggaagatcgtaaccttttctct

SEQ ID NO: 5400703 - DNA, 25 bp, Homo sapien
cagctcctcataacccattcggtag

SEQ ID NO: 5400704 - DNA, 25 bp, Homo sapien
tcacttgtgttgattaagtttgctt

SEQ ID NO: 5400705 - DNA, 25 bp, Homo sapien
cttgtctttgtcccaagcttctcta

SEQ ID NO: 5400706 - DNA, 25 bp, Homo sapien
cagaacaatgtcaggtgtatcaggc

SEQ ID NO: 5400707 - DNA, 25 bp, Homo sapien
atcaggcatgatgtggatctgagtc

SEQ ID NO: 5400708 - DNA, 25 bp, Homo sapien
caggaatgctggtgaacttgtttct

SEQ ID NO: 5400709 - DNA, 25 bp, Homo sapien
ggctgacgatatttcttctcactga

SEQ ID NO: 5400710 - DNA, 25 bp, Homo sapien
tccgaagcccgcttgttcttttctg

SEQ ID NO: 5400711 - DNA, 25 bp, Homo sapien
ctgatgatttccgaagcccgcttgt

SEQ ID NO: 5400712 - DNA, 25 bp, Homo sapien
ctgtgaaaagacagagcaagccatc

SEQ ID NO: 5400713 - DNA, 25 bp, Homo sapien
aagccatcaaaatcccattctcacc

SEQ ID NO: 5400714 - DNA, 25 bp, Homo sapien
gcaagccatcaaaatcccattctca

SEQ ID NO: 5400715 - DNA, 25 bp, Homo sapien
agagcaagccatcaaaatcccattc

SEQ ID NO: 5400716 - DNA, 25 bp, Homo sapien
tggctacattcatggacaacacaag

SEQ ID NO: 5400717 - DNA, 25 bp, Homo sapien
gactccggaatccaacatggtggcc

SEQ ID NO: 5400718 - DNA, 25 bp, Homo sapien
gcacaacatcgttctgatcaggcag

SEQ ID NO: 5400719 - DNA, 25 bp, Homo sapien
tttgggtcatcttgcagactccgga

SEQ ID NO: 5400720 - DNA, 25 bp, Homo sapien
tatagccttatagaactcaaactag

SEQ ID NO: 5400721 - DNA, 25 bp, Homo sapien
gccttatagaactcaaactagtact

SEQ ID NO: 5400722 - DNA, 25 bp, Homo sapien
ttcagataaaaatatagccttatag

SEQ ID NO: 5400723 - DNA, 25 bp, Homo sapien
ttatagaactcaaactagtactcac

SEQ ID NO: 5400724 - DNA, 25 bp, Homo sapien
aatgtctcttgaagctttagctagc

SEQ ID NO: 5400725 - DNA, 25 bp, Homo sapien
gagatcatagcctttcttcaaagct

SEQ ID NO: 5400726 - DNA, 25 bp, Homo sapien
tgtctcttgaagctttagctagctg

SEQ ID NO: 5400727 - DNA, 25 bp, Homo sapien
cttgaagctttagctagctgtacag

SEQ ID NO: 5400728 - DNA, 25 bp, Homo sapien
attaaagatattcttcagcattatt

SEQ ID NO: 5400729 - DNA, 25 bp, Homo sapien
ctgaaaattaaagatattcttcagc

SEQ ID NO: 5400730 - DNA, 25 bp, Homo sapien
tgaaaattaaagatattcttcagca

SEQ ID NO: 5400731 - DNA, 25 bp, Homo sapien
aaattaaagatattcttcagcatta

SEQ ID NO: 5400732 - DNA, 25 bp, Homo sapien
tattccaatcaatggtgtataaatg

SEQ ID NO: 5400733 - DNA, 25 bp, Homo sapien
tcttggtcttatctttattccaatc

SEQ ID NO: 5400734 - DNA, 25 bp, Homo sapien
cttggtcttatctttattccaatca

SEQ ID NO: 5400735 - DNA, 25 bp, Homo sapien
agctgtgtggacggccactgttctc

SEQ ID NO: 5400736 - DNA, 25 bp, Homo sapien
gagctgtgtggacggccactgttct

SEQ ID NO: 5400737 - DNA, 25 bp, Homo sapien
gctgtgtggacggccactgttctct

SEQ ID NO: 5400738 - DNA, 25 bp, Homo sapien
gtatttctgatcactggcatattca

SEQ ID NO: 5400739 - DNA, 25 bp, Homo sapien
atggaatcagtcagcttcttaaact

SEQ ID NO: 5400740 - DNA, 25 bp, Homo sapien
cttgttcatggtatgtgcattctgc

SEQ ID NO: 5400741 - DNA, 25 bp, Homo sapien
taaactggaagttgctcgggtgctg

SEQ ID NO: 5400742 - DNA, 25 bp, Homo sapien
tgggatcatcctcgagactgcggaa

SEQ ID NO: 5400743 - DNA, 25 bp, Homo sapien
tgttggcttgggcatcctttgcagc

SEQ ID NO: 5400744 - DNA, 25 bp, Homo sapien
tcttagccacttgcatggaatggac

SEQ ID NO: 5400745 - DNA, 25 bp, Homo sapien
cctttgcagccgtgacactgagcat

SEQ ID NO: 5400746 - DNA, 25 bp, Homo sapien
aggtctgagatcatagcctttcttt

SEQ ID NO: 5400747 - DNA, 25 bp, Homo sapien
catcaggtctgagatcatagccttt

SEQ ID NO: 5400748 - DNA, 25 bp, Homo sapien
gcatcaggtctgagatcatagcctt

SEQ ID NO: 5400749 - DNA, 25 bp, Homo sapien
aagatgacaacagggggaactatac

SEQ ID NO: 5400750 - DNA, 25 bp, Homo sapien
agaaagatgacaacagggggaacta

SEQ ID NO: 5400751 - DNA, 25 bp, Homo sapien
tgacaacagggggaactatacttac

SEQ ID NO: 5400752 - DNA, 25 bp, Homo sapien
gatgacaacagggggaactatactt

SEQ ID NO: 5400753 - DNA, 25 bp, Homo sapien
agcctcccatgcttgtttgtagaga

SEQ ID NO: 5400754 - DNA, 25 bp, Homo sapien
ggatatcaggcatgatgtggacttt

SEQ ID NO: 5400755 - DNA, 25 bp, Homo sapien
atattaattgcatttgcctttgcca

SEQ ID NO: 5400756 - DNA, 25 bp, Homo sapien
gactttggttttgtcagcctcccat

SEQ ID NO: 5400757 - DNA, 25 bp, Homo sapien
aaaccatgttcatcgagtccatgag

SEQ ID NO: 5400758 - DNA, 25 bp, Homo sapien
tgtggaatacttcaaagtgtctggg

SEQ ID NO: 5400759 - DNA, 25 bp, Homo sapien
gagggagccatccaatgcccttcat

SEQ ID NO: 5400760 - DNA, 25 bp, Homo sapien
gaagtcagcatagtcagccttgtac

SEQ ID NO: 5400761 - DNA, 25 bp, Homo sapien
ttattatccagagtaaacgctctgc

SEQ ID NO: 5400762 - DNA, 25 bp, Homo sapien
tatccagagtaaacgctctgcaaat

SEQ ID NO: 5400763 - DNA, 25 bp, Homo sapien
agagtaaacgctctgcaaatgtggt

SEQ ID NO: 5400764 - DNA, 25 bp, Homo sapien
ccagagtaaacgctctgcaaatgtg

SEQ ID NO: 5400765 - DNA, 25 bp, Homo sapien
gatcacgttcctgtagttggcattg

SEQ ID NO: 5400766 - DNA, 25 bp, Homo sapien
catgttgtaggtatggatcacgttc

SEQ ID NO: 5400767 - DNA, 25 bp, Homo sapien
caggctccggaagccaatgtgtttc

SEQ ID NO: 5400768 - DNA, 25 bp, Homo sapien
ccggtctgactgcatcttggccact

SEQ ID NO: 5400769 - DNA, 25 bp, Homo sapien
tcaggcctcaggtcatatcctttct

SEQ ID NO: 5400770 - DNA, 25 bp, Homo sapien
atcactggcaatgtctctagaggct

SEQ ID NO: 5400771 - DNA, 25 bp, Homo sapien
aatgtctctagaggctcttgcagcc

SEQ ID NO: 5400772 - DNA, 25 bp, Homo sapien
catcaggcctcaggtcatatccttt

SEQ ID NO: 5400773 - DNA, 25 bp, Homo sapien
cagcttttgctgttgttaacctact

SEQ ID NO: 5400774 - DNA, 25 bp, Homo sapien
cccagcttttgctgttgttaaccta

SEQ ID NO: 5400775 - DNA, 25 bp, Homo sapien
tccccagcttttgctgttgttaacc

SEQ ID NO: 5400776 - DNA, 25 bp, Homo sapien
gcttttgctgttgttaacctactta

SEQ ID NO: 5400777 - DNA, 25 bp, Homo sapien
tgtgtcaggcatgacatgaatggtg

SEQ ID NO: 5400778 - DNA, 25 bp, Homo sapien
catgacatgaatggtggtcttgtcc

SEQ ID NO: 5400779 - DNA, 25 bp, Homo sapien
tctggagagtaaaatatccggtgtg

SEQ ID NO: 5400780 - DNA, 25 bp, Homo sapien
taaaatatccggtgtgtcaggcatg

SEQ ID NO: 5400781 - DNA, 25 bp, Homo sapien
tgcctgttccattgtgtccatggcg

SEQ ID NO: 5400782 - DNA, 25 bp, Homo sapien
cgtaagtgaacttcagcttctcggg

SEQ ID NO: 5400783 - DNA, 25 bp, Homo sapien
cagtttgttactcttgttaagtgcc

SEQ ID NO: 5400784 - DNA, 25 bp, Homo sapien
ggcgatacttcttctcactaagaat

SEQ ID NO: 5400785 - DNA, 25 bp, Homo sapien
gataacaacttggtaaccagtacat

SEQ ID NO: 5400786 - DNA, 25 bp, Homo sapien
taacaacttggtaaccagtacatac

SEQ ID NO: 5400787 - DNA, 25 bp, Homo sapien
tggataacaacttggtaaccagtac

SEQ ID NO: 5400788 - DNA, 25 bp, Homo sapien
aatggataacaacttggtaaccagt

SEQ ID NO: 5400789 - DNA, 25 bp, Homo sapien
tttttgtactcacgatcagactgga

SEQ ID NO: 5400790 - DNA, 25 bp, Homo sapien
gtgaaccagtttaggatcatcctga

SEQ ID NO: 5400791 - DNA, 25 bp, Homo sapien
gagaaatccaacttgcttgcctttg

SEQ ID NO: 5400792 - DNA, 25 bp, Homo sapien
tctgtagttggcgttggtggcaacc

SEQ ID NO: 5400793 - DNA, 25 bp, Homo sapien
atctggtctcaaatcatagcccttg

SEQ ID NO: 5400794 - DNA, 25 bp, Homo sapien
gcagcaacaattgggatggcatctg

SEQ ID NO: 5400795 - DNA, 25 bp, Homo sapien
atggcatctggtctcaaatcatagc

SEQ ID NO: 5400796 - DNA, 25 bp, Homo sapien
tcttccaatctgctttataatgagc

SEQ ID NO: 5400797 - DNA, 25 bp, Homo sapien
ttgacatcattaaaagaggaatgaa

SEQ ID NO: 5400798 - DNA, 25 bp, Homo sapien
gaggaatgaaacagaatgccaaaat

SEQ ID NO: 5400799 - DNA, 25 bp, Homo sapien
ggaatgaaacagaatgccaaaatgt

SEQ ID NO: 5400800 - DNA, 25 bp, Homo sapien
tattatttgacatcattaaaagagg

SEQ ID NO: 5400801 - DNA, 25 bp, Homo sapien
gcaatattagcactgggccaaatac

SEQ ID NO: 5400802 - DNA, 25 bp, Homo sapien
caatattagcactgggccaaatact

SEQ ID NO: 5400803 - DNA, 25 bp, Homo sapien
cactcatgttgagggcgttgacttt

SEQ ID NO: 5400804 - DNA, 25 bp, Homo sapien
tctctccctctaccttgtagttcaa

SEQ ID NO: 5400805 - DNA, 25 bp, Homo sapien
gggtcaatagtatacttgtgcttca

SEQ ID NO: 5400806 - DNA, 25 bp, Homo sapien
tggcttgaataaactgaggcaattc

SEQ ID NO: 5400807 - DNA, 25 bp, Homo sapien
gttatgctgagccaacaccatgccc

SEQ ID NO: 5400808 - DNA, 25 bp, Homo sapien
tccagggaaccaatagggatccatc

SEQ ID NO: 5400809 - DNA, 25 bp, Homo sapien
gatccatccgatgcccttcaagaag

SEQ ID NO: 5400810 - DNA, 25 bp, Homo sapien
tgaacttgacggtatctgggtgctg

SEQ ID NO: 5400811 - DNA, 25 bp, Homo sapien
atctctgggtctgttgttacacata

SEQ ID NO: 5400812 - DNA, 25 bp, Homo sapien
tctctgggtctgttgttacacatac

SEQ ID NO: 5400813 - DNA, 25 bp, Homo sapien
catctctgggtctgttgttacacat

SEQ ID NO: 5400814 - DNA, 25 bp, Homo sapien
tatagtggaccagcttgggatcatc

SEQ ID NO: 5400815 - DNA, 25 bp, Homo sapien
ttgacattggtagcgacatcctggg

SEQ ID NO: 5400816 - DNA, 25 bp, Homo sapien
tatgctcaagactcatggcgtcagg

SEQ ID NO: 5400817 - DNA, 25 bp, Homo sapien
tgtgatgctaaccatgtccccaggg

SEQ ID NO: 5400818 - DNA, 25 bp, Homo sapien
tggaggcagaattgggttagcaaag

SEQ ID NO: 5400819 - DNA, 25 bp, Homo sapien
cataccaatcccgtttataacagac

SEQ ID NO: 5400820 - DNA, 25 bp, Homo sapien
gcccttggctattaagtcataccaa

SEQ ID NO: 5400821 - DNA, 25 bp, Homo sapien
tgatgggaatagcatcgcccagcac

SEQ ID NO: 5400822 - DNA, 25 bp, Homo sapien
gtttctcgatgccttggctgcagtg

SEQ ID NO: 5400823 - DNA, 25 bp, Homo sapien
ggaagatcaggactcatggtgtatt

SEQ ID NO: 5400824 - DNA, 25 bp, Homo sapien
gatcaggactcatggtgtatttatg

SEQ ID NO: 5400825 - DNA, 25 bp, Homo sapien
gaaactgaggaagatcaggactcat

SEQ ID NO: 5400826 - DNA, 25 bp, Homo sapien
gactcatggtgtatttatgtttcac

SEQ ID NO: 5400827 - DNA, 25 bp, Homo sapien
cttctcctttagccttgtataagat

SEQ ID NO: 5400828 - DNA, 25 bp, Homo sapien
aagagttatttttagcacaatcacc

SEQ ID NO: 5400829 - DNA, 25 bp, Homo sapien
gagttatttttagcacaatcaccca

SEQ ID NO: 5400830 - DNA, 25 bp, Homo sapien
aatgcatttcacatagtgcaaaaag

SEQ ID NO: 5400831 - DNA, 25 bp, Homo sapien
gaaaatctattaattgtttgcttta

SEQ ID NO: 5400832 - DNA, 25 bp, Homo sapien
taactttttcgacgtcgagactgcc

SEQ ID NO: 5400833 - DNA, 25 bp, Homo sapien
gagactgccaataggaatccagcca

SEQ ID NO: 5400834 - DNA, 25 bp, Homo sapien
cattcagagcatcaccggccttttt

SEQ ID NO: 5400835 - DNA, 25 bp, Homo sapien
ccacaatgctggtaaatttgagggt

SEQ ID NO: 5400836 - DNA, 25 bp, Homo sapien
cccgatctgattgtatcttggccac

SEQ ID NO: 5400837 - DNA, 25 bp, Homo sapien
ctccaggtccatggcgtcaggcaag

SEQ ID NO: 5400838 - DNA, 25 bp, Homo sapien
catcatgttcttagacagctccagg

SEQ ID NO: 5400839 - DNA, 25 bp, Homo sapien
tagccgccacgacattgaacatatc

SEQ ID NO: 5400840 - DNA, 25 bp, Homo sapien
acaaagtgagggggactgagcttcc

SEQ ID NO: 5400841 - DNA, 25 bp, Homo sapien
gagacatgagggaaggttcgtggaa

SEQ ID NO: 5400842 - DNA, 25 bp, Homo sapien
tcctcagagatatgtggagggcact

SEQ ID NO: 5400843 - DNA, 25 bp, Homo sapien
tctggataacaaagtgagggggact

SEQ ID NO: 5400844 - DNA, 25 bp, Homo sapien
cattttctagttgcccatgtatgac

SEQ ID NO: 5400845 - DNA, 25 bp, Homo sapien
acattttctagttgcccatgtatga

SEQ ID NO: 5400846 - DNA, 25 bp, Homo sapien
ccacattttctagttgcccatgtat

SEQ ID NO: 5400847 - DNA, 25 bp, Homo sapien
cacattttctagttgcccatgtatg

SEQ ID NO: 5400848 - DNA, 25 bp, Homo sapien
gctctgatgggaatcgcatcagttc

SEQ ID NO: 5400849 - DNA, 25 bp, Homo sapien
tcagttctcaggtcatatcccttct

SEQ ID NO: 5400850 - DNA, 25 bp, Homo sapien
gggaatcgcatcagttctcaggtca

SEQ ID NO: 5400851 - DNA, 25 bp, Homo sapien
tcgcatcagttctcaggtcatatcc

SEQ ID NO: 5400852 - DNA, 25 bp, Homo sapien
aggtctggtggcaggttgtatttgt

SEQ ID NO: 5400853 - DNA, 25 bp, Homo sapien
ggtggcaggttgtatttgtgaataa

SEQ ID NO: 5400854 - DNA, 25 bp, Homo sapien
cattaactttagcctggatgaactg

SEQ ID NO: 5400855 - DNA, 25 bp, Homo sapien
ttaactttagcctggatgaactggg

SEQ ID NO: 5400856 - DNA, 25 bp, Homo sapien
aattttagactgtactgtaattgga

SEQ ID NO: 5400857 - DNA, 25 bp, Homo sapien
caatcgaggtaaacttgagggtgtc

SEQ ID NO: 5400858 - DNA, 25 bp, Homo sapien
tggagcatcttcaatcgaggtaaac

SEQ ID NO: 5400859 - DNA, 25 bp, Homo sapien
ctggttaattttagactgtactgta

SEQ ID NO: 5400860 - DNA, 25 bp, Homo sapien
ggacccaaaaggcacccagccacaa

SEQ ID NO: 5400861 - DNA, 25 bp, Homo sapien
tttcatccagctattgtagtcagct

SEQ ID NO: 5400862 - DNA, 25 bp, Homo sapien
tgaggatgtctgaagctcgctttgc

SEQ ID NO: 5400863 - DNA, 25 bp, Homo sapien
aaggcacccagccacaacctttcat

SEQ ID NO: 5400864 - DNA, 25 bp, Homo sapien
aatcaacgtcgctggcaattgcctg

SEQ ID NO: 5400865 - DNA, 25 bp, Homo sapien
gacttggagcatatcaagaggtgcc

SEQ ID NO: 5400866 - DNA, 25 bp, Homo sapien
tctgcagcgcatatgccttcttggc

SEQ ID NO: 5400867 - DNA, 25 bp, Homo sapien
caaggtccacattgatgctatcagg

SEQ ID NO: 5400868 - DNA, 25 bp, Homo sapien
cttcaaggagtgcagcatctttgga

SEQ ID NO: 5400869 - DNA, 25 bp, Homo sapien
aaggagtgcagcatctttggatcgt

SEQ ID NO: 5400870 - DNA, 25 bp, Homo sapien
gtcttcaaggagtgcagcatctttg

SEQ ID NO: 5400871 - DNA, 25 bp, Homo sapien
tcaaggagtgcagcatctttggatc

SEQ ID NO: 5400872 - DNA, 25 bp, Homo sapien
ccactcaccaggaaatgtccccaag

SEQ ID NO: 5400873 - DNA, 25 bp, Homo sapien
tcacacatgccagatcccactcacc

SEQ ID NO: 5400874 - DNA, 25 bp, Homo sapien
cacatgccagatcccactcaccagg

SEQ ID NO: 5400875 - DNA, 25 bp, Homo sapien
actcaccaggaaatgtccccaaggc

SEQ ID NO: 5400876 - DNA, 25 bp, Homo sapien
ccactttaatgtcaaacttcttggc

SEQ ID NO: 5400877 - DNA, 25 bp, Homo sapien
tccactttaatgtcaaacttcttgg

SEQ ID NO: 5400878 - DNA, 25 bp, Homo sapien
cactttaatgtcaaacttcttggct

SEQ ID NO: 5400879 - DNA, 25 bp, Homo sapien
gattataggcattgactctgtgttg

SEQ ID NO: 5400880 - DNA, 25 bp, Homo sapien
gagcatctgctggtatatggcactt

SEQ ID NO: 5400881 - DNA, 25 bp, Homo sapien
tctgtgttggataaactgtggagca

SEQ ID NO: 5400882 - DNA, 25 bp, Homo sapien
ctggtatatggcacttgaacttctc

SEQ ID NO: 5400883 - DNA, 25 bp, Homo sapien
gggtcacccacgcttgcataaatca

SEQ ID NO: 5400884 - DNA, 25 bp, Homo sapien
tggcacacgagctgaaatgacttct

SEQ ID NO: 5400885 - DNA, 25 bp, Homo sapien
tagaaagtcagaatatggagtcccc

SEQ ID NO: 5400886 - DNA, 25 bp, Homo sapien
gatcttggcatgactggaccacgcc

SEQ ID NO: 5400887 - DNA, 25 bp, Homo sapien
ctgccgtgaatttggtcttatctgg

SEQ ID NO: 5400888 - DNA, 25 bp, Homo sapien
agtacaggagaatcagtgactgccg

SEQ ID NO: 5400889 - DNA, 25 bp, Homo sapien
tgagctgggcttgcaacagtacagg

SEQ ID NO: 5400890 - DNA, 25 bp, Homo sapien
taagctgtttcgtgttgagctgggc

SEQ ID NO: 5400891 - DNA, 25 bp, Homo sapien
gattgcttcatattcttgtgttatt

SEQ ID NO: 5400892 - DNA, 25 bp, Homo sapien
tgtgtgatatgggtcctccatgctg

SEQ ID NO: 5400893 - DNA, 25 bp, Homo sapien
cataatgtcccaaaacatcctttac

SEQ ID NO: 5400894 - DNA, 25 bp, Homo sapien
tgtgtgtgatatgggtcctccatgc

SEQ ID NO: 5400895 - DNA, 25 bp, Homo sapien
catcctttacatataagtctttata

SEQ ID NO: 5400896 - DNA, 25 bp, Homo sapien
cacagtaattcatactctttgcctt

SEQ ID NO: 5400897 - DNA, 25 bp, Homo sapien
gaagttcttcagctgagtatcaagt

SEQ ID NO: 5400898 - DNA, 25 bp, Homo sapien
tcttcagctgagtatcaagttgata

SEQ ID NO: 5400899 - DNA, 25 bp, Homo sapien
ttttggggtctcacagtaattcata

SEQ ID NO: 5400900 - DNA, 25 bp, Homo sapien
cagcatcttgggatcgtcattaatg

SEQ ID NO: 5400901 - DNA, 25 bp, Homo sapien
ttttggccaccttcaaggagtgcag

SEQ ID NO: 5400902 - DNA, 25 bp, Homo sapien
tcgtcattaatgctgaggactccaa

SEQ ID NO: 5400903 - DNA, 25 bp, Homo sapien
tcttgggatcgtcattaatgctgag

SEQ ID NO: 5400904 - DNA, 25 bp, Homo sapien
gcaggggaatggcatccactttaat

SEQ ID NO: 5400905 - DNA, 25 bp, Homo sapien
tctcccagtcttgcttataaagatt

SEQ ID NO: 5400906 - DNA, 25 bp, Homo sapien
tcttctcccagtcttgcttataaag

SEQ ID NO: 5400907 - DNA, 25 bp, Homo sapien
gaatggcatccactttaatgtcaaa

SEQ ID NO: 5400908 - DNA, 25 bp, Homo sapien
atcaggggggatatggcacttgaac

SEQ ID NO: 5400909 - DNA, 25 bp, Homo sapien
caagttataggcattgactttgtgc

SEQ ID NO: 5400910 - DNA, 25 bp, Homo sapien
tgtgctggataaaagcaggagtatc

SEQ ID NO: 5400911 - DNA, 25 bp, Homo sapien
ttgactttgtgctggataaaagcag

SEQ ID NO: 5400912 - DNA, 25 bp, Homo sapien
ggaattgacttgggcttgtagcaga

SEQ ID NO: 5400913 - DNA, 25 bp, Homo sapien
cttgggtgaattttgtcttatctgg

SEQ ID NO: 5400914 - DNA, 25 bp, Homo sapien
gagagtctgtaacttgggtgaattt

SEQ ID NO: 5400915 - DNA, 25 bp, Homo sapien
cttgggcttgtagcagaacaggaga

SEQ ID NO: 5400916 - DNA, 25 bp, Homo sapien
agttatggtctgagggaagaagcct

SEQ ID NO: 5400917 - DNA, 25 bp, Homo sapien
cttcttcgtattctgctttgtagtt

SEQ ID NO: 5400918 - DNA, 25 bp, Homo sapien
tatggtctgagggaagaagcctttg

SEQ ID NO: 5400919 - DNA, 25 bp, Homo sapien
ttacactgatctagtttcttaattg

SEQ ID NO: 5400920 - DNA, 25 bp, Homo sapien
gagctgtgactttcatgcagtgtga

SEQ ID NO: 5400921 - DNA, 25 bp, Homo sapien
tggatcctcgaagctgcctacataa

SEQ ID NO: 5400922 - DNA, 25 bp, Homo sapien
gaatggtatggatcctcgaagctgc

SEQ ID NO: 5400923 - DNA, 25 bp, Homo sapien
catgcagtgtgaatggtatggatcc

SEQ ID NO: 5400924 - DNA, 25 bp, Homo sapien
gggtctcgcagtaatttatgctctt

SEQ ID NO: 5400925 - DNA, 25 bp, Homo sapien
ttgggggtctcgcagtaatttatgc

SEQ ID NO: 5400926 - DNA, 25 bp, Homo sapien
agttctgcagaacagtatcgagctt

SEQ ID NO: 5400927 - DNA, 25 bp, Homo sapien
tgcagaacagtatcgagcttgaatt

SEQ ID NO: 5400928 - DNA, 25 bp, Homo sapien
ttcagctgcctaagctgtgggttct

SEQ ID NO: 5400929 - DNA, 25 bp, Homo sapien
cttcagctgcctaagctgtgggttc

SEQ ID NO: 5400930 - DNA, 25 bp, Homo sapien
gccttcagctgcctaagctgtgggt

SEQ ID NO: 5400931 - DNA, 25 bp, Homo sapien
ccttcagctgcctaagctgtgggtt

SEQ ID NO: 5400932 - DNA, 25 bp, Homo sapien
tttattcttttcatagtcttctttg

SEQ ID NO: 5400933 - DNA, 25 bp, Homo sapien
ttcttttcatagtcttctttgtatt

SEQ ID NO: 5400934 - DNA, 25 bp, Homo sapien
tattcttttcatagtcttctttgta

SEQ ID NO: 5400935 - DNA, 25 bp, Homo sapien
tttcatagtcttctttgtattttac

SEQ ID NO: 5400936 - DNA, 25 bp, Homo sapien
tgtttcggtctgcatgaagtagatc

SEQ ID NO: 5400937 - DNA, 25 bp, Homo sapien
tttatactctggtgtttcggtctgc

SEQ ID NO: 5400938 - DNA, 25 bp, Homo sapien
ttgctagctgccacaccagcttttt

SEQ ID NO: 5400939 - DNA, 25 bp, Homo sapien
gaagtagatctggtctttcatgttt

SEQ ID NO: 5400940 - DNA, 25 bp, Homo sapien
ctgtaagacatcagacaagctgaag

SEQ ID NO: 5400941 - DNA, 25 bp, Homo sapien
gtaagacatcagacaagctgaagaa

SEQ ID NO: 5400942 - DNA, 25 bp, Homo sapien
tgtaagacatcagacaagctgaaga

SEQ ID NO: 5400943 - DNA, 25 bp, Homo sapien
gcaacttcaaagcaaggtgtctcac

SEQ ID NO: 5400944 - DNA, 25 bp, Homo sapien
ggcatttgcaacttcaaagcaaggt

SEQ ID NO: 5400945 - DNA, 25 bp, Homo sapien
ttcaaagcaaggtgtctcactccat

SEQ ID NO: 5400946 - DNA, 25 bp, Homo sapien
ttctggcatttgcaacttcaaagca

SEQ ID NO: 5400947 - DNA, 25 bp, Homo sapien
tcagccagaggcgtgaattgagctt

SEQ ID NO: 5400948 - DNA, 25 bp, Homo sapien
aattctatatctggaggatcagcca

SEQ ID NO: 5400949 - DNA, 25 bp, Homo sapien
ttgctcacttgattggttactttct

SEQ ID NO: 5400950 - DNA, 25 bp, Homo sapien
tcttggcaaattctatatctggagg

SEQ ID NO: 5400951 - DNA, 25 bp, Homo sapien
ctccatattcatccctgcgtctccc

SEQ ID NO: 5400952 - DNA, 25 bp, Homo sapien
atattcatccctgcgtctcccaccc

SEQ ID NO: 5400953 - DNA, 25 bp, Homo sapien
gtgaagaaacgctacacacttatct

SEQ ID NO: 5400954 - DNA, 25 bp, Homo sapien
cagcttcctctttcatagagtgaag

SEQ ID NO: 5400955 - DNA, 25 bp, Homo sapien
aactctcctcagttccgggctatca

SEQ ID NO: 5400956 - DNA, 25 bp, Homo sapien
ctcagttccgggctatcattatagg

SEQ ID NO: 5400957 - DNA, 25 bp, Homo sapien
ctgggcaactctcctcagttccggg

SEQ ID NO: 5400958 - DNA, 25 bp, Homo sapien
tcagttccgggctatcattataggg

SEQ ID NO: 5400959 - DNA, 25 bp, Homo sapien
caagtgctaacacaatgtaaggagc

SEQ ID NO: 5400960 - DNA, 25 bp, Homo sapien
tctaattagagtaatagccagggac

SEQ ID NO: 5400961 - DNA, 25 bp, Homo sapien
tgcagtctcacatgtctcaaggcta

SEQ ID NO: 5400962 - DNA, 25 bp, Homo sapien
ttttgccaagccctatccctgcagt

SEQ ID NO: 5400963 - DNA, 25 bp, Homo sapien
aggaggaagcaggtacttatccttg

SEQ ID NO: 5400964 - DNA, 25 bp, Homo sapien
cggtgttcttaacggcctggacaag

SEQ ID NO: 5400965 - DNA, 25 bp, Homo sapien
caggtacttatccttggtgtcttcc

SEQ ID NO: 5400966 - DNA, 25 bp, Homo sapien
cttgctgaacatggcggtgttctta

SEQ ID NO: 5400967 - DNA, 25 bp, Homo sapien
tcatctacgtgacatatagtcttag

SEQ ID NO: 5400968 - DNA, 25 bp, Homo sapien
cttactgacttgctgcgacactttc

SEQ ID NO: 5400969 - DNA, 25 bp, Homo sapien
catcaccatccattcgatacttaac

SEQ ID NO: 5400970 - DNA, 25 bp, Homo sapien
gctgcgacactttctttgcatgttc

SEQ ID NO: 5400971 - DNA, 25 bp, Homo sapien
aagttctggagtatctgttgtgctg

SEQ ID NO: 5400972 - DNA, 25 bp, Homo sapien
ctcactgagttgatcttgtactttt

SEQ ID NO: 5400973 - DNA, 25 bp, Homo sapien
tgtgctggcgtatggctgtcctttt

SEQ ID NO: 5400974 - DNA, 25 bp, Homo sapien
tatctgttgtgctggcgtatggctg

SEQ ID NO: 5400975 - DNA, 25 bp, Homo sapien
cctctccaccggctttgctgatgct

SEQ ID NO: 5400976 - DNA, 25 bp, Homo sapien
ggaagtttctgattgctcatagtca

SEQ ID NO: 5400977 - DNA, 25 bp, Homo sapien
ttttctgactgtgtgcaatgtaggg

SEQ ID NO: 5400978 - DNA, 25 bp, Homo sapien
gtgccagagctggtttggaagtttc

SEQ ID NO: 5400979 - DNA, 25 bp, Homo sapien
ttgttgtcgtagtctcataaatttt

SEQ ID NO: 5400980 - DNA, 25 bp, Homo sapien
cttgttgtcgtagtctcataaattt

SEQ ID NO: 5400981 - DNA, 25 bp, Homo sapien
gttgtcgtagtctcataaatttttg

SEQ ID NO: 5400982 - DNA, 25 bp, Homo sapien
tgttgtcgtagtctcataaattttt

SEQ ID NO: 5400983 - DNA, 25 bp, Homo sapien
acctcttcgtaaaccacttcttctg

SEQ ID NO: 5400984 - DNA, 25 bp, Homo sapien
cctcttcgtaaaccacttcttctgt

SEQ ID NO: 5400985 - DNA, 25 bp, Homo sapien
gcacctcttcgtaaaccacttcttc

SEQ ID NO: 5400986 - DNA, 25 bp, Homo sapien
cggcacctcttcgtaaaccacttct

SEQ ID NO: 5400987 - DNA, 25 bp, Homo sapien
tcctcatagtcttcgtcatctgcca

SEQ ID NO: 5400988 - DNA, 25 bp, Homo sapien
cctcatagtcttcgtcatctgccat

SEQ ID NO: 5400989 - DNA, 25 bp, Homo sapien
caccattggcttatacagacttttt

SEQ ID NO: 5400990 - DNA, 25 bp, Homo sapien
attttcttcccgaacaccattggct

SEQ ID NO: 5400991 - DNA, 25 bp, Homo sapien
acaccattggcttatacagactttt

SEQ ID NO: 5400992 - DNA, 25 bp, Homo sapien
tattttcttcccgaacaccattggc

SEQ ID NO: 5400993 - DNA, 25 bp, Homo sapien
caatctaccaaataaatttcctcag

SEQ ID NO: 5400994 - DNA, 25 bp, Homo sapien
cagcagcaaagcctctcccaactct

SEQ ID NO: 5400995 - DNA, 25 bp, Homo sapien
caactctcccctcctgagaacccca

SEQ ID NO: 5400996 - DNA, 25 bp, Homo sapien
cttcaatctaccaaataaatttcct

SEQ ID NO: 5400997 - DNA, 25 bp, Homo sapien
aagagtaactgctatccccatgact

SEQ ID NO: 5400998 - DNA, 25 bp, Homo sapien
catagaaaatactcgggttatgagt

SEQ ID NO: 5400999 - DNA, 25 bp, Homo sapien
ttgtctgacgtctttcctcatagaa

SEQ ID NO: 5401000 - DNA, 25 bp, Homo sapien
gtttccccatcgttgacactttaca

SEQ ID NO: 5401001 - DNA, 25 bp, Homo sapien
taacactgtccagagtggcaactcc

SEQ ID NO: 5401002 - DNA, 25 bp, Homo sapien
cagacctgccctggtctaaacccaa

SEQ ID NO: 5401003 - DNA, 25 bp, Homo sapien
acactgtccagagtggcaactccag

SEQ ID NO: 5401004 - DNA, 25 bp, Homo sapien
cttaacactgtccagagtggcaact

SEQ ID NO: 5401005 - DNA, 25 bp, Homo sapien
tcctgataatgttcctggtctgaac

SEQ ID NO: 5401006 - DNA, 25 bp, Homo sapien
gattacaggcatgtgccaccatacc

SEQ ID NO: 5401007 - DNA, 25 bp, Homo sapien
tgcctcccggcttcaagagtttctc

SEQ ID NO: 5401008 - DNA, 25 bp, Homo sapien
attacaggcatgtgccaccataccc

SEQ ID NO: 5401009 - DNA, 25 bp, Homo sapien
ctctgcctcccggcttcaagagttt

SEQ ID NO: 5401010 - DNA, 25 bp, Homo sapien
actgcttatgaaagtggaccagacg

SEQ ID NO: 5401011 - DNA, 25 bp, Homo sapien
tgtgaatggtatacaggtattcagg

SEQ ID NO: 5401012 - DNA, 25 bp, Homo sapien
aaagctgtgtgaatggtatacaggt

SEQ ID NO: 5401013 - DNA, 25 bp, Homo sapien
gaaaaggcctagtcactgaaagctg

SEQ ID NO: 5401014 - DNA, 25 bp, Homo sapien
cttcctcttgacacggtcttgtggg

SEQ ID NO: 5401015 - DNA, 25 bp, Homo sapien
cctcttgacacggtcttgtgggtat

SEQ ID NO: 5401016 - DNA, 25 bp, Homo sapien
acacggtcttgtgggtatttcacac

SEQ ID NO: 5401017 - DNA, 25 bp, Homo sapien
cttgacacggtcttgtgggtatttc

SEQ ID NO: 5401018 - DNA, 25 bp, Homo sapien
actccaggcttctagggaaggtgag

SEQ ID NO: 5401019 - DNA, 25 bp, Homo sapien
tccactccaggcttctagggaaggt

SEQ ID NO: 5401020 - DNA, 25 bp, Homo sapien
cctccactccaggcttctagggaag

SEQ ID NO: 5401021 - DNA, 25 bp, Homo sapien
cactccaggcttctagggaaggtga

SEQ ID NO: 5401022 - DNA, 25 bp, Homo sapien
acgggctgctaagagttgggactgc

SEQ ID NO: 5401023 - DNA, 25 bp, Homo sapien
gggcttgtttcatgctgtgaattag

SEQ ID NO: 5401024 - DNA, 25 bp, Homo sapien
tatctgggtgtgacctgacctctcc

SEQ ID NO: 5401025 - DNA, 25 bp, Homo sapien
cttccgttgtagagctgtctatctg

SEQ ID NO: 5401026 - DNA, 25 bp, Homo sapien
gaggtgtctgaaatgcgacagttgt

SEQ ID NO: 5401027 - DNA, 25 bp, Homo sapien
tcattggctaccaagctggctctga

SEQ ID NO: 5401028 - DNA, 25 bp, Homo sapien
ttggcgtccactaatgctggtttta

SEQ ID NO: 5401029 - DNA, 25 bp, Homo sapien
tggttttactcatgagtttggcttg

SEQ ID NO: 5401030 - DNA, 25 bp, Homo sapien
caggcagtttccagtagtctatagg

SEQ ID NO: 5401031 - DNA, 25 bp, Homo sapien
gtggctccaaggttcttactatgca

SEQ ID NO: 5401032 - DNA, 25 bp, Homo sapien
gttgtggctccaaggttcttactat

SEQ ID NO: 5401033 - DNA, 25 bp, Homo sapien
caatttgaagggtggggacttacag

SEQ ID NO: 5401034 - DNA, 25 bp, Homo sapien
tctgaatgtgaccttcccgtgctaa

SEQ ID NO: 5401035 - DNA, 25 bp, Homo sapien
tgctaatacaagtctaggcggtgct

SEQ ID NO: 5401036 - DNA, 25 bp, Homo sapien
ttttcccggtgatctcgctcaccct

SEQ ID NO: 5401037 - DNA, 25 bp, Homo sapien
tcgctcctgttccttgctctaaact

SEQ ID NO: 5401038 - DNA, 25 bp, Homo sapien
aggaagtagtaaagcttcactgaag

SEQ ID NO: 5401039 - DNA, 25 bp, Homo sapien
taaggaagtagtaaagcttcactga

SEQ ID NO: 5401040 - DNA, 25 bp, Homo sapien
ggaagtagtaaagcttcactgaaga

SEQ ID NO: 5401041 - DNA, 25 bp, Homo sapien
ctaaggaagtagtaaagcttcactg

SEQ ID NO: 5401042 - DNA, 25 bp, Homo sapien
cagacctatacggtgcttccttttt

SEQ ID NO: 5401043 - DNA, 25 bp, Homo sapien
tccgtttttaggagcagaagctacc

SEQ ID NO: 5401044 - DNA, 25 bp, Homo sapien
tctgaggtcagacctatacggtgct

SEQ ID NO: 5401045 - DNA, 25 bp, Homo sapien
ctttcctgcgtatccaacaggagac

SEQ ID NO: 5401046 - DNA, 25 bp, Homo sapien
aatacctagtaatgaaatggctggg

SEQ ID NO: 5401047 - DNA, 25 bp, Homo sapien
tgggtcatacaataggcacaggttg

SEQ ID NO: 5401048 - DNA, 25 bp, Homo sapien
gtgtacaagtctttgattgggcttt

SEQ ID NO: 5401049 - DNA, 25 bp, Homo sapien
gttgaactttttgagaagctactta

SEQ ID NO: 5401050 - DNA, 25 bp, Homo sapien
cgtgttatcttaagaacttttatag

SEQ ID NO: 5401051 - DNA, 25 bp, Homo sapien
caagatacagaacaaggttctttaa

SEQ ID NO: 5401052 - DNA, 25 bp, Homo sapien
tatacagctaacaaatctttgccta

SEQ ID NO: 5401053 - DNA, 25 bp, Homo sapien
tataatgttttctcaaggcgcttgg

SEQ ID NO: 5401054 - DNA, 25 bp, Homo sapien
tctgaacaatcacacaggcagcatg

SEQ ID NO: 5401055 - DNA, 25 bp, Homo sapien
catctgaacaatcacacaggcagca

SEQ ID NO: 5401056 - DNA, 25 bp, Homo sapien
ctttcagacatcatctgaacaatca

SEQ ID NO: 5401057 - DNA, 25 bp, Homo sapien
gacatcatctgaacaatcacacagg

SEQ ID NO: 5401058 - DNA, 25 bp, Homo sapien
tgatttttgccctgttgattggtcc

SEQ ID NO: 5401059 - DNA, 25 bp, Homo sapien
cattgaacgctgtatagttcacttg

SEQ ID NO: 5401060 - DNA, 25 bp, Homo sapien
gctgtatagttcacttgcgtttcca

SEQ ID NO: 5401061 - DNA, 25 bp, Homo sapien
attggtccattgaacgctgtatagt

SEQ ID NO: 5401062 - DNA, 25 bp, Homo sapien
aatatatgcttgtttacagcaacaa

SEQ ID NO: 5401063 - DNA, 25 bp, Homo sapien
cacacaggaggaactgaatatatgc

SEQ ID NO: 5401064 - DNA, 25 bp, Homo sapien
ttttgtactctatcagttggtaact

SEQ ID NO: 5401065 - DNA, 25 bp, Homo sapien
tactctatcagttggtaacttaaaa

SEQ ID NO: 5401066 - DNA, 25 bp, Homo sapien
tggtttcagaactacccctaggcaa

SEQ ID NO: 5401067 - DNA, 25 bp, Homo sapien
tgaaccgtcttccagatcaggccag

SEQ ID NO: 5401068 - DNA, 25 bp, Homo sapien
caacagagaaagacgtgctgaaccg

SEQ ID NO: 5401069 - DNA, 25 bp, Homo sapien
aaaatcccgcactatggcaacagag

SEQ ID NO: 5401070 - DNA, 25 bp, Homo sapien
gcttggatcatagaactagtttact

SEQ ID NO: 5401071 - DNA, 25 bp, Homo sapien
taagatttgtgtaactagagcaggg

SEQ ID NO: 5401072 - DNA, 25 bp, Homo sapien
cacttgccttcttacctcaaatgta

SEQ ID NO: 5401073 - DNA, 25 bp, Homo sapien
caacaacatgaattgagtcacaact

SEQ ID NO: 5401074 - DNA, 25 bp, Homo sapien
tcccctatctgaacatgataaccga

SEQ ID NO: 5401075 - DNA, 25 bp, Homo sapien
gaccaactgccccttaagctgacaa

SEQ ID NO: 5401076 - DNA, 25 bp, Homo sapien
gataaccgagtgtcgtttctgggta

SEQ ID NO: 5401077 - DNA, 25 bp, Homo sapien
ctccactgctatcactgcaaaaaca

SEQ ID NO: 5401078 - DNA, 25 bp, Homo sapien
catatctagttaccacaactcctct

SEQ ID NO: 5401079 - DNA, 25 bp, Homo sapien
tatctagttaccacaactcctcttc

SEQ ID NO: 5401080 - DNA, 25 bp, Homo sapien
atatctagttaccacaactcctctt

SEQ ID NO: 5401081 - DNA, 25 bp, Homo sapien
agcatgtcccattttggctgataac

SEQ ID NO: 5401082 - DNA, 25 bp, Homo sapien
tcaacccatcttttagaagttgcca

SEQ ID NO: 5401083 - DNA, 25 bp, Homo sapien
aatctatttatgatgttatccccag

SEQ ID NO: 5401084 - DNA, 25 bp, Homo sapien
cattttctttcaccagggataatat

SEQ ID NO: 5401085 - DNA, 25 bp, Homo sapien
catgttagatcttattagaagtact

SEQ ID NO: 5401086 - DNA, 25 bp, Homo sapien
aacaaatgcaaccacatgttagatc

SEQ ID NO: 5401087 - DNA, 25 bp, Homo sapien
tttataacaaatgcaaccacatgtt

SEQ ID NO: 5401088 - DNA, 25 bp, Homo sapien
cacatgttagatcttattagaagta

SEQ ID NO: 5401089 - DNA, 25 bp, Homo sapien
aaaggtaatctctttacatctgcaa

SEQ ID NO: 5401090 - DNA, 25 bp, Homo sapien
tctgtcaaaatcagacttgcactga

SEQ ID NO: 5401091 - DNA, 25 bp, Homo sapien
ggcataagctaaaaaggtaatctct

SEQ ID NO: 5401092 - DNA, 25 bp, Homo sapien
aaacacataatatcaaggcataagc

SEQ ID NO: 5401093 - DNA, 25 bp, Homo sapien
taatgcgctcaatatagaatatctg

SEQ ID NO: 5401094 - DNA, 25 bp, Homo sapien
ggagtgcaaacacagctcgccgcag

SEQ ID NO: 5401095 - DNA, 25 bp, Homo sapien
agagcttcatcccatttacttaata

SEQ ID NO: 5401096 - DNA, 25 bp, Homo sapien
tgttgccgcctacaactcctaatgt

SEQ ID NO: 5401097 - DNA, 25 bp, Homo sapien
tcctagaagcagaagactggccgtc

SEQ ID NO: 5401098 - DNA, 25 bp, Homo sapien
tggacataaatggatggacactggg

SEQ ID NO: 5401099 - DNA, 25 bp, Homo sapien
aaggtcagctgagagattgtataca

SEQ ID NO: 5401100 - DNA, 25 bp, Homo sapien
ctacacaggactggcatttagggct

SEQ ID NO: 5401101 - DNA, 25 bp, Homo sapien
ttcggaagacaattaggcaacaggc

SEQ ID NO: 5401102 - DNA, 25 bp, Homo sapien
tagagatggccgtgtatatgctgaa

SEQ ID NO: 5401103 - DNA, 25 bp, Homo sapien
aaggccatatgctttgacacagcga

SEQ ID NO: 5401104 - DNA, 25 bp, Homo sapien
catgtagcatgacctgaagatgccc

SEQ ID NO: 5401105 - DNA, 25 bp, Homo sapien
gagagcactctataaattgaccaag

SEQ ID NO: 5401106 - DNA, 25 bp, Homo sapien
taaacgaggcagtatgctgcaatca

SEQ ID NO: 5401107 - DNA, 25 bp, Homo sapien
aaatttgtatatatctgccactgca

SEQ ID NO: 5401108 - DNA, 25 bp, Homo sapien
tcagtatctgcagatgctgacaaca

SEQ ID NO: 5401109 - DNA, 25 bp, Homo sapien
tgactgcactgctttcaatggaaag

SEQ ID NO: 5401110 - DNA, 25 bp, Homo sapien
tgtgttgtcaaaaaggtcctgaagc

SEQ ID NO: 5401111 - DNA, 25 bp, Homo sapien
gacatagctgcctcctcaatgctgt

SEQ ID NO: 5401112 - DNA, 25 bp, Homo sapien
tctggtcacctgataaatgccttgc

SEQ ID NO: 5401113 - DNA, 25 bp, Homo sapien
caaaatggtgtgattcgtgcttcat

SEQ ID NO: 5401114 - DNA, 25 bp, Homo sapien
tagggttcagttttctagtctcggc

SEQ ID NO: 5401115 - DNA, 25 bp, Homo sapien
gaggctactcttatgcaagcaacaa

SEQ ID NO: 5401116 - DNA, 25 bp, Homo sapien
gaactaatgccagggacctatttga

SEQ ID NO: 5401117 - DNA, 25 bp, Homo sapien
caagccagtggtgagaagatagcaa

SEQ ID NO: 5401118 - DNA, 25 bp, Homo sapien
tgatgacaacatacaactgggcagt

SEQ ID NO: 5401119 - DNA, 25 bp, Homo sapien
gcctaactagtagctcacggaagtg

SEQ ID NO: 5401120 - DNA, 25 bp, Homo sapien
gctgaacacaatgactccacgagat

SEQ ID NO: 5401121 - DNA, 25 bp, Homo sapien
accagcttctccattttatttgaaa

SEQ ID NO: 5401122 - DNA, 25 bp, Homo sapien
ctccattttatttgaaaataatact

SEQ ID NO: 5401123 - DNA, 25 bp, Homo sapien
ccagcttctccattttatttgaaaa

SEQ ID NO: 5401124 - DNA, 25 bp, Homo sapien
gcagtaatccaagggactaagcaca

SEQ ID NO: 5401125 - DNA, 25 bp, Homo sapien
taccataggctacacaatgtcctga

SEQ ID NO: 5401126 - DNA, 25 bp, Homo sapien
cacataatatttgtctggcgaaacc

SEQ ID NO: 5401127 - DNA, 25 bp, Homo sapien
acaagcagctcagcgatttgggagg

SEQ ID NO: 5401128 - DNA, 25 bp, Homo sapien
tatctaaaccattaatttttgcagc

SEQ ID NO: 5401129 - DNA, 25 bp, Homo sapien
agctttcaggtaaagtccagcactt

SEQ ID NO: 5401130 - DNA, 25 bp, Homo sapien
atctatgagaagaggtcagtagaga

SEQ ID NO: 5401131 - DNA, 25 bp, Homo sapien
tatacaaaatctatgagaagaggtc

SEQ ID NO: 5401132 - DNA, 25 bp, Homo sapien
ctaatcttaagtcgtgacatcatcc

SEQ ID NO: 5401133 - DNA, 25 bp, Homo sapien
tcatccattcaagtccttggcacaa

SEQ ID NO: 5401134 - DNA, 25 bp, Homo sapien
catctaatcttaagtcgtgacatca

SEQ ID NO: 5401135 - DNA, 25 bp, Homo sapien
acatcatccattcaagtccttggca

SEQ ID NO: 5401136 - DNA, 25 bp, Homo sapien
agctatgagcagcaaactatgaaca

SEQ ID NO: 5401137 - DNA, 25 bp, Homo sapien
cagcaaactaaaagagagcattttt

SEQ ID NO: 5401138 - DNA, 25 bp, Homo sapien
aagctatgagcagcaaactatgaac

SEQ ID NO: 5401139 - DNA, 25 bp, Homo sapien
gaagctatgagcagcaaactatgaa

SEQ ID NO: 5401140 - DNA, 25 bp, Homo sapien
cctggatatgccactggtgatcttt

SEQ ID NO: 5401141 - DNA, 25 bp, Homo sapien
catgcattctttaacatcttgttta

SEQ ID NO: 5401142 - DNA, 25 bp, Homo sapien
agaagttagcttcaaaaactgggag

SEQ ID NO: 5401143 - DNA, 25 bp, Homo sapien
tgtttattagcaaaaatcagcaatc

SEQ ID NO: 5401144 - DNA, 25 bp, Homo sapien
ttggctcttcttgaccctactgagt

SEQ ID NO: 5401145 - DNA, 25 bp, Homo sapien
ctcttcttgaccctactgagtacct

SEQ ID NO: 5401146 - DNA, 25 bp, Homo sapien
caactaggccctacttaggtcttct

SEQ ID NO: 5401147 - DNA, 25 bp, Homo sapien
tctggtcatctcctcattcagtctc

SEQ ID NO: 5401148 - DNA, 25 bp, Homo sapien
cgatctactcgcctcagtctcacga

SEQ ID NO: 5401149 - DNA, 25 bp, Homo sapien
agtggcaagaacagctcactgtagc

SEQ ID NO: 5401150 - DNA, 25 bp, Homo sapien
aagcgatctactcgcctcagtctca

SEQ ID NO: 5401151 - DNA, 25 bp, Homo sapien
tcaagcgatctactcgcctcagtct

SEQ ID NO: 5401152 - DNA, 25 bp, Homo sapien
aaatcctctctctgtctgtactgtc

SEQ ID NO: 5401153 - DNA, 25 bp, Homo sapien
gtctgtactgtccacaacaactatt

SEQ ID NO: 5401154 - DNA, 25 bp, Homo sapien
tactgtccacaacaactattacaaa

SEQ ID NO: 5401155 - DNA, 25 bp, Homo sapien
catgcgctaacattttatagagttc

SEQ ID NO: 5401156 - DNA, 25 bp, Homo sapien
tcccacattaggaaacgtgtattat

SEQ ID NO: 5401157 - DNA, 25 bp, Homo sapien
ctattgtaggagatgtatgtacaac

SEQ ID NO: 5401158 - DNA, 25 bp, Homo sapien
tgttagtatagtaagtgttccagga

SEQ ID NO: 5401159 - DNA, 25 bp, Homo sapien
ctacattacttcctattgtaggaga

SEQ ID NO: 5401160 - DNA, 25 bp, Homo sapien
cagcccaacaatgataactttgtgc

SEQ ID NO: 5401161 - DNA, 25 bp, Homo sapien
ctgcattatccagcccaacaatgat

SEQ ID NO: 5401162 - DNA, 25 bp, Homo sapien
gtaaagaatggtagttttccctgca

SEQ ID NO: 5401163 - DNA, 25 bp, Homo sapien
gttttccctgcattatccagcccaa

SEQ ID NO: 5401164 - DNA, 25 bp, Homo sapien
ttagagcaaggccatgcctgcatga

SEQ ID NO: 5401165 - DNA, 25 bp, Homo sapien
tgcatgagggccaggtaatcgagtc

SEQ ID NO: 5401166 - DNA, 25 bp, Homo sapien
gacaaggtacctttgcacctagaaa

SEQ ID NO: 5401167 - DNA, 25 bp, Homo sapien
taatcgagtccttgggacaaggtac

SEQ ID NO: 5401168 - DNA, 25 bp, Homo sapien
taagtggtctccttacttcagccat

SEQ ID NO: 5401169 - DNA, 25 bp, Homo sapien
gtccttaggacttggttactatgtc

SEQ ID NO: 5401170 - DNA, 25 bp, Homo sapien
aactagctaggcaaaaactactgaa

SEQ ID NO: 5401171 - DNA, 25 bp, Homo sapien
gaataatagtaggacataccagtgg

SEQ ID NO: 5401172 - DNA, 25 bp, Homo sapien
cacctgcacgtgaatcatcagaagt

SEQ ID NO: 5401173 - DNA, 25 bp, Homo sapien
catcagaagtttactgtgcctggcc

SEQ ID NO: 5401174 - DNA, 25 bp, Homo sapien
accacctgcacgtgaatcatcagaa

SEQ ID NO: 5401175 - DNA, 25 bp, Homo sapien
aatcatcagaagtttactgtgcctg

SEQ ID NO: 5401176 - DNA, 25 bp, Homo sapien
gaatgatgaaccacccaacttgagt

SEQ ID NO: 5401177 - DNA, 25 bp, Homo sapien
aaaacctgagagttcaagtgactgc

SEQ ID NO: 5401178 - DNA, 25 bp, Homo sapien
cacaaactaagttcctgacagcgga

SEQ ID NO: 5401179 - DNA, 25 bp, Homo sapien
tggaaaactgggacgtgacaccatc

SEQ ID NO: 5401180 - DNA, 25 bp, Homo sapien
aagtccatctctattcaggaggcag

SEQ ID NO: 5401181 - DNA, 25 bp, Homo sapien
gaagaccccagcacttctatgtggt

SEQ ID NO: 5401182 - DNA, 25 bp, Homo sapien
cacacacaaagacgggtggcagtgg

SEQ ID NO: 5401183 - DNA, 25 bp, Homo sapien
tggacaagtcgagcgattcctcccg

SEQ ID NO: 5401184 - DNA, 25 bp, Homo sapien
tggtgattgaacagtctccatattc

SEQ ID NO: 5401185 - DNA, 25 bp, Homo sapien
ccagacacccgggccgcctggcttc

SEQ ID NO: 5401186 - DNA, 25 bp, Homo sapien
cagacacccgggccgcctggcttcc

SEQ ID NO: 5401187 - DNA, 25 bp, Homo sapien
tcaggctgagggggaggagagagac

SEQ ID NO: 5401188 - DNA, 25 bp, Homo sapien
tgctgctgctcccgcgctggtcgcg

SEQ ID NO: 5401189 - DNA, 25 bp, Homo sapien
tggtcgcgggcccgcttccagggaa

SEQ ID NO: 5401190 - DNA, 25 bp, Homo sapien
ccaggccgccctgccgcgcgcaagg

SEQ ID NO: 5401191 - DNA, 25 bp, Homo sapien
ctgctcccgcgctggtcgcgggccc

SEQ ID NO: 5401192 - DNA, 25 bp, Homo sapien
accgtcctcccccagctcctctcgg

SEQ ID NO: 5401193 - DNA, 25 bp, Homo sapien
ggccaccgtcctcccccagctcctc

SEQ ID NO: 5401194 - DNA, 25 bp, Homo sapien
tgcgacgagcctcgcgggccaccgt

SEQ ID NO: 5401195 - DNA, 25 bp, Homo sapien
ctgcgacgagcctcgcgggccaccg

SEQ ID NO: 5401196 - DNA, 25 bp, Homo sapien
tgtaaacatataattgagtacccca

SEQ ID NO: 5401197 - DNA, 25 bp, Homo sapien
tcgaattttctccactgcgccataa

SEQ ID NO: 5401198 - DNA, 25 bp, Homo sapien
tggcttccgactgcttgctgttgcg

SEQ ID NO: 5401199 - DNA, 25 bp, Homo sapien
tgcgtccccgagtatttatatttcc

SEQ ID NO: 5401200 - DNA, 25 bp, Homo sapien
taatataaaggagaggtataacgct

SEQ ID NO: 5401201 - DNA, 25 bp, Homo sapien
aagagtacctattgatttccagtat

SEQ ID NO: 5401202 - DNA, 25 bp, Homo sapien
ggagaggtataacgctggtttcagt

SEQ ID NO: 5401203 - DNA, 25 bp, Homo sapien
aatgaggatactctatgcatgcact

SEQ ID NO: 5401204 - DNA, 25 bp, Homo sapien
caatagcctgggatttcaacagccc

SEQ ID NO: 5401205 - DNA, 25 bp, Homo sapien
gatcattctgactcgaggctgtgaa

SEQ ID NO: 5401206 - DNA, 25 bp, Homo sapien
cacatgtccaaaattcagaggagcc

SEQ ID NO: 5401207 - DNA, 25 bp, Homo sapien
tatgactgccaaatttaacggtgga

SEQ ID NO: 5401208 - DNA, 25 bp, Homo sapien
cagcccttaggattatctgatgaga

SEQ ID NO: 5401209 - DNA, 25 bp, Homo sapien
tattgaaaagctagaggccagccac

SEQ ID NO: 5401210 - DNA, 25 bp, Homo sapien
aagtcaaagtggcatgcaagtaggg

SEQ ID NO: 5401211 - DNA, 25 bp, Homo sapien
gaagtatcagtgtattctcccaaac

SEQ ID NO: 5401212 - DNA, 25 bp, Homo sapien
taaccttgcctcatgataaactgtg

SEQ ID NO: 5401213 - DNA, 25 bp, Homo sapien
tgtgaatttgcaaaccagctgctct

SEQ ID NO: 5401214 - DNA, 25 bp, Homo sapien
gacacattcttaacggacatcctgg

SEQ ID NO: 5401215 - DNA, 25 bp, Homo sapien
gaatgctgtagttctgggtgcccat

SEQ ID NO: 5401216 - DNA, 25 bp, Homo sapien
cagaccctgcgtttgtgttaagtga

SEQ ID NO: 5401217 - DNA, 25 bp, Homo sapien
tgcactcgggaggattggtaccaca

SEQ ID NO: 5401218 - DNA, 25 bp, Homo sapien
tgaactggtgcatgctttgagtgcc

SEQ ID NO: 5401219 - DNA, 25 bp, Homo sapien
taatatccatctagactcaagggca

SEQ ID NO: 5401220 - DNA, 25 bp, Homo sapien
gacaagcggttcctactcttccgag

SEQ ID NO: 5401221 - DNA, 25 bp, Homo sapien
tggttgctgtgcctcattcgctgac

SEQ ID NO: 5401222 - DNA, 25 bp, Homo sapien
tcaaagcctatgtcgggagtcatgg

SEQ ID NO: 5401223 - DNA, 25 bp, Homo sapien
ccacaagagggtaatgatctcggct

SEQ ID NO: 5401224 - DNA, 25 bp, Homo sapien
gtggcacgccagtacgcctccaggt

SEQ ID NO: 5401225 - DNA, 25 bp, Homo sapien
gttcacatgcatcctcaagctgatt

SEQ ID NO: 5401226 - DNA, 25 bp, Homo sapien
tgagagtgccgtggagcccaaattc

SEQ ID NO: 5401227 - DNA, 25 bp, Homo sapien
ggtactcccctagatgttcacatgc

SEQ ID NO: 5401228 - DNA, 25 bp, Homo sapien
gtgcaagtttatcagctgccaccag

SEQ ID NO: 5401229 - DNA, 25 bp, Homo sapien
tggggggcattgtgcaagtttatca

SEQ ID NO: 5401230 - DNA, 25 bp, Homo sapien
gccaccagttgaacattcaagtgtt

SEQ ID NO: 5401231 - DNA, 25 bp, Homo sapien
tcaagtgtttactttgtgactttcc

SEQ ID NO: 5401232 - DNA, 25 bp, Homo sapien
caataattggtgctaaggaagtctt

SEQ ID NO: 5401233 - DNA, 25 bp, Homo sapien
tgcaaagatcttgccaactcaaaga

SEQ ID NO: 5401234 - DNA, 25 bp, Homo sapien
tcaagaacaaccagttgcaaagatc

SEQ ID NO: 5401235 - DNA, 25 bp, Homo sapien
tggagatgagacttttacatgaaca

SEQ ID NO: 5401236 - DNA, 25 bp, Homo sapien
ccaactggtaccccaggaaagacat

SEQ ID NO: 5401237 - DNA, 25 bp, Homo sapien
gaattttaggatgctttccaactgg

SEQ ID NO: 5401238 - DNA, 25 bp, Homo sapien
gatgctttccaactggtaccccagg

SEQ ID NO: 5401239 - DNA, 25 bp, Homo sapien
catggggaattttaggatgctttcc

SEQ ID NO: 5401240 - DNA, 25 bp, Homo sapien
gctgggattatttaggacagacctc

SEQ ID NO: 5401241 - DNA, 25 bp, Homo sapien
gctggaccgggtgttcgaacgttca

SEQ ID NO: 5401242 - DNA, 25 bp, Homo sapien
cgaacgttcaattattgctctcttg

SEQ ID NO: 5401243 - DNA, 25 bp, Homo sapien
cagctgtcactctcgttattgaaat

SEQ ID NO: 5401244 - DNA, 25 bp, Homo sapien
tgctggccagtaggtaaaagactaa

SEQ ID NO: 5401245 - DNA, 25 bp, Homo sapien
gactggatgtagcagcgaatgttcc

SEQ ID NO: 5401246 - DNA, 25 bp, Homo sapien
tatttccacgctggtaacgtaacag

SEQ ID NO: 5401247 - DNA, 25 bp, Homo sapien
aggagtttagttccccagcagactg

SEQ ID NO: 5401248 - DNA, 25 bp, Homo sapien
tctgaaggaactatgcacgtgcgac

SEQ ID NO: 5401249 - DNA, 25 bp, Homo sapien
gagtcagtgtgacgctaccagcgaa

SEQ ID NO: 5401250 - DNA, 25 bp, Homo sapien
catagcccatgaaacacagagtagg

SEQ ID NO: 5401251 - DNA, 25 bp, Homo sapien
gaagaaagcctcgtagccaacagat

SEQ ID NO: 5401252 - DNA, 25 bp, Homo sapien
gggttaaggccagagcatcagacag

SEQ ID NO: 5401253 - DNA, 25 bp, Homo sapien
gttaaggccagagcatcagacagca

SEQ ID NO: 5401254 - DNA, 25 bp, Homo sapien
ggccagagcatcagacagcaagacc

SEQ ID NO: 5401255 - DNA, 25 bp, Homo sapien
cagggacctgcatgagggttagggt

SEQ ID NO: 5401256 - DNA, 25 bp, Homo sapien
tccagtagatgaatgtgacgaaggc

SEQ ID NO: 5401257 - DNA, 25 bp, Homo sapien
tgaaatgtcagttgcgctacctcca

SEQ ID NO: 5401258 - DNA, 25 bp, Homo sapien
tgactagagacatcgtacctgggct

SEQ ID NO: 5401259 - DNA, 25 bp, Homo sapien
gctaagggccccaaatgacagaggg

SEQ ID NO: 5401260 - DNA, 25 bp, Homo sapien
tgcttcaggaaatcaaagagggctt

SEQ ID NO: 5401261 - DNA, 25 bp, Homo sapien
tcccatcaaacctgtgcttcaggaa

SEQ ID NO: 5401262 - DNA, 25 bp, Homo sapien
atcaaagagggctttctgcatcatg

SEQ ID NO: 5401263 - DNA, 25 bp, Homo sapien
ctcccatcaaacctgtgcttcagga

SEQ ID NO: 5401264 - DNA, 25 bp, Homo sapien
gggtatccttggcacgcctgagttg

SEQ ID NO: 5401265 - DNA, 25 bp, Homo sapien
gggaagggtactatgagccaagacc

SEQ ID NO: 5401266 - DNA, 25 bp, Homo sapien
ccagggtgttgaggaataaaccagc

SEQ ID NO: 5401267 - DNA, 25 bp, Homo sapien
tttgtacacaggtgccgggtatcct

SEQ ID NO: 5401268 - DNA, 25 bp, Homo sapien
tatgttggcggaaattctccatgcc

SEQ ID NO: 5401269 - DNA, 25 bp, Homo sapien
ctggatttttgtagaccactctcct

SEQ ID NO: 5401270 - DNA, 25 bp, Homo sapien
agtttgtgtatgttggcggaaattc

SEQ ID NO: 5401271 - DNA, 25 bp, Homo sapien
gcggaaattctccatgcccatggct

SEQ ID NO: 5401272 - DNA, 25 bp, Homo sapien
tcctagctcgatgggaatggtgccc

SEQ ID NO: 5401273 - DNA, 25 bp, Homo sapien
tttaatccaagctagcacaaagtca

SEQ ID NO: 5401274 - DNA, 25 bp, Homo sapien
gaggctgctcaccttcagagtttaa

SEQ ID NO: 5401275 - DNA, 25 bp, Homo sapien
tatgccatcatcttaaaaacccagc

SEQ ID NO: 5401276 - DNA, 25 bp, Homo sapien
gaaacagacccttgaggagcaagcg

SEQ ID NO: 5401277 - DNA, 25 bp, Homo sapien
ggaaacagacccttgaggagcaagc

SEQ ID NO: 5401278 - DNA, 25 bp, Homo sapien
gtggaaacagacccttgaggagcaa

SEQ ID NO: 5401279 - DNA, 25 bp, Homo sapien
tggaaacagacccttgaggagcaag

SEQ ID NO: 5401280 - DNA, 25 bp, Homo sapien
ctgggtgctcgatcaagaactgaag

SEQ ID NO: 5401281 - DNA, 25 bp, Homo sapien
gggtgctcgatcaagaactgaagag

SEQ ID NO: 5401282 - DNA, 25 bp, Homo sapien
tgggtgctcgatcaagaactgaaga

SEQ ID NO: 5401283 - DNA, 25 bp, Homo sapien
cctgggtgctcgatcaagaactgaa

SEQ ID NO: 5401284 - DNA, 25 bp, Homo sapien
tcgtaacctttcagtgacggcccca

SEQ ID NO: 5401285 - DNA, 25 bp, Homo sapien
gacgcattgacggtacaacatcgta

SEQ ID NO: 5401286 - DNA, 25 bp, Homo sapien
taacaccaccggacgcattgacggt

SEQ ID NO: 5401287 - DNA, 25 bp, Homo sapien
acatcgtaaggaggaatgtgctccg

SEQ ID NO: 5401288 - DNA, 25 bp, Homo sapien
aaaaagatgattcgacacgcgtgac

SEQ ID NO: 5401289 - DNA, 25 bp, Homo sapien
gattcgacacgcgtgacaaggtgag

SEQ ID NO: 5401290 - DNA, 25 bp, Homo sapien
ctgaaaaagatgattcgacacgcgt

SEQ ID NO: 5401291 - DNA, 25 bp, Homo sapien
gatgattcgacacgcgtgacaaggt

SEQ ID NO: 5401292 - DNA, 25 bp, Homo sapien
tgctcggaatgtcccagataccatt

SEQ ID NO: 5401293 - DNA, 25 bp, Homo sapien
agacttgaagaagaatttccacttg

SEQ ID NO: 5401294 - DNA, 25 bp, Homo sapien
ctgttgatgtgggagttgctcggaa

SEQ ID NO: 5401295 - DNA, 25 bp, Homo sapien
atgtgggagttgctcggaatgtccc

SEQ ID NO: 5401296 - DNA, 25 bp, Homo sapien
ggatccgtatgttctccaatctgag

SEQ ID NO: 5401297 - DNA, 25 bp, Homo sapien
gttcttgctggatccgtatgttctc

SEQ ID NO: 5401298 - DNA, 25 bp, Homo sapien
gccttcctatccaccaatcattgtt

SEQ ID NO: 5401299 - DNA, 25 bp, Homo sapien
aatctgagtggacttggaatgaagc

SEQ ID NO: 5401300 - DNA, 25 bp, Homo sapien
ttttccaaagttggatccatatatt

SEQ ID NO: 5401301 - DNA, 25 bp, Homo sapien
tgtgcttggaacaggcacatcctcg

SEQ ID NO: 5401302 - DNA, 25 bp, Homo sapien
tcacggcaaatgctacaggtttgga

SEQ ID NO: 5401303 - DNA, 25 bp, Homo sapien
tagctcacatttgtcttcacggcaa

SEQ ID NO: 5401304 - DNA, 25 bp, Homo sapien
ttagcatcaaaggagatagctgtgc

SEQ ID NO: 5401305 - DNA, 25 bp, Homo sapien
cctgcttgtgtaggaatccgctgaa

SEQ ID NO: 5401306 - DNA, 25 bp, Homo sapien
tccaaagagacatcggagtcagacg

SEQ ID NO: 5401307 - DNA, 25 bp, Homo sapien
tctctcctgtcgaattgcttcccgg

SEQ ID NO: 5401308 - DNA, 25 bp, Homo sapien
tttgctctctcaagctggatagctg

SEQ ID NO: 5401309 - DNA, 25 bp, Homo sapien
aggaggcccttcttctagctggtgt

SEQ ID NO: 5401310 - DNA, 25 bp, Homo sapien
caaagacaagggactacaagttggt

SEQ ID NO: 5401311 - DNA, 25 bp, Homo sapien
tatgctaccaactcccaaagacaag

SEQ ID NO: 5401312 - DNA, 25 bp, Homo sapien
tgaggatgacaggtagcattcagca

SEQ ID NO: 5401313 - DNA, 25 bp, Homo sapien
tgccttgtacatgaaagacactgga

SEQ ID NO: 5401314 - DNA, 25 bp, Homo sapien
agtgcactcagacttcacccatctt

SEQ ID NO: 5401315 - DNA, 25 bp, Homo sapien
ggaatgcctgcatgagaactctata

SEQ ID NO: 5401316 - DNA, 25 bp, Homo sapien
ctcacctaaacttttcaagctggga

SEQ ID NO: 5401317 - DNA, 25 bp, Homo sapien
aaatcatatctgtcttgacatattc

SEQ ID NO: 5401318 - DNA, 25 bp, Homo sapien
attctctatgaacaatgaggagcct

SEQ ID NO: 5401319 - DNA, 25 bp, Homo sapien
aaagggctcttcacgattattagaa

SEQ ID NO: 5401320 - DNA, 25 bp, Homo sapien
ggagcctatgattaattatattttg

SEQ ID NO: 5401321 - DNA, 25 bp, Homo sapien
tcccgatgtgcactcatctttcgaa

SEQ ID NO: 5401322 - DNA, 25 bp, Homo sapien
tgtgcactcatctttcgaactaaaa

SEQ ID NO: 5401323 - DNA, 25 bp, Homo sapien
aaaacacatcttcccgatgtgcact

SEQ ID NO: 5401324 - DNA, 25 bp, Homo sapien
actcatctttcgaactaaaaatcca

SEQ ID NO: 5401325 - DNA, 25 bp, Homo sapien
tgtgcctctatctccgtcaactctt

SEQ ID NO: 5401326 - DNA, 25 bp, Homo sapien
tatctccgtcaactcttctctgatc

SEQ ID NO: 5401327 - DNA, 25 bp, Homo sapien
cctctatctccgtcaactcttctct

SEQ ID NO: 5401328 - DNA, 25 bp, Homo sapien
gtgcctctatctccgtcaactcttc

SEQ ID NO: 5401329 - DNA, 25 bp, Homo sapien
gaaagttggctggaaaccccaatgc

SEQ ID NO: 5401330 - DNA, 25 bp, Homo sapien
tgcactgacaactaaaggaggtctt

SEQ ID NO: 5401331 - DNA, 25 bp, Homo sapien
ttaactccccctctcaatatggcag

SEQ ID NO: 5401332 - DNA, 25 bp, Homo sapien
gcactactagaaaggcattaaagag

SEQ ID NO: 5401333 - DNA, 25 bp, Homo sapien
aagtcagtttcataaaacattgagt

SEQ ID NO: 5401334 - DNA, 25 bp, Homo sapien
caagacagttgcagtttgtggactc

SEQ ID NO: 5401335 - DNA, 25 bp, Homo sapien
tcagtttcataaaacattgagttga

SEQ ID NO: 5401336 - DNA, 25 bp, Homo sapien
acagttgcagtttgtggactccagc

SEQ ID NO: 5401337 - DNA, 25 bp, Homo sapien
atgaccccgtgtagccccttgctga

SEQ ID NO: 5401338 - DNA, 25 bp, Homo sapien
aacacattgctgtctagacttgaac

SEQ ID NO: 5401339 - DNA, 25 bp, Homo sapien
tccatgctttgctccccagtcttgg

SEQ ID NO: 5401340 - DNA, 25 bp, Homo sapien
gctagcttggctttcaacacattgc

SEQ ID NO: 5401341 - DNA, 25 bp, Homo sapien
gatgtgatgttgagtcaggccttga

SEQ ID NO: 5401342 - DNA, 25 bp, Homo sapien
taaacagagtaagcatccctgccct

SEQ ID NO: 5401343 - DNA, 25 bp, Homo sapien
aaaaagtgccatcctgacctaagag

SEQ ID NO: 5401344 - DNA, 25 bp, Homo sapien
tagttcgtagccaaaagaagacaca

SEQ ID NO: 5401345 - DNA, 25 bp, Homo sapien
aataggtttcggtgtgctcctttga

SEQ ID NO: 5401346 - DNA, 25 bp, Homo sapien
gctgacattgactgaggaagccctc

SEQ ID NO: 5401347 - DNA, 25 bp, Homo sapien
cccagacgaccacattttccaattt

SEQ ID NO: 5401348 - DNA, 25 bp, Homo sapien
aaagatcagtgagaataggtttcgg

SEQ ID NO: 5401349 - DNA, 25 bp, Homo sapien
tgtgcccgtaccttgtttgctcctt

SEQ ID NO: 5401350 - DNA, 25 bp, Homo sapien
acggccatgtccgacaccagcaggt

SEQ ID NO: 5401351 - DNA, 25 bp, Homo sapien
caggtccccatccttactcgtgtgc

SEQ ID NO: 5401352 - DNA, 25 bp, Homo sapien
tccttactcgtgtgcccgtaccttg

SEQ ID NO: 5401353 - DNA, 25 bp, Homo sapien
tcacagagatttcggatatggccat

SEQ ID NO: 5401354 - DNA, 25 bp, Homo sapien
aagtcacagagatttcggatatggc

SEQ ID NO: 5401355 - DNA, 25 bp, Homo sapien
agagatttcggatatggccatcaca

SEQ ID NO: 5401356 - DNA, 25 bp, Homo sapien
acagagatttcggatatggccatca

SEQ ID NO: 5401357 - DNA, 25 bp, Homo sapien
ccttcccccaacctcctcaagacat

SEQ ID NO: 5401358 - DNA, 25 bp, Homo sapien
ttcccccaacctcctcaagacatct

SEQ ID NO: 5401359 - DNA, 25 bp, Homo sapien
ccccaacctcctcaagacatcttac

SEQ ID NO: 5401360 - DNA, 25 bp, Homo sapien
cccccaacctcctcaagacatctta

SEQ ID NO: 5401361 - DNA, 25 bp, Homo sapien
aaaactagtcactaagttagactca

SEQ ID NO: 5401362 - DNA, 25 bp, Homo sapien
ccacatttgagttggctgctggctg

SEQ ID NO: 5401363 - DNA, 25 bp, Homo sapien
tcaaatattccacatttgagttggc

SEQ ID NO: 5401364 - DNA, 25 bp, Homo sapien
gtcactaagttagactcaaatattc

SEQ ID NO: 5401365 - DNA, 25 bp, Homo sapien
gaaaagtgtgcccttggatcaataa

SEQ ID NO: 5401366 - DNA, 25 bp, Homo sapien
tacagaaaaataccgccattggcac

SEQ ID NO: 5401367 - DNA, 25 bp, Homo sapien
ccattggcactctaggaatatgcat

SEQ ID NO: 5401368 - DNA, 25 bp, Homo sapien
cactgaattgttaagaatggctacc

SEQ ID NO: 5401369 - DNA, 25 bp, Homo sapien
ccataaatgcattggcactgagaaa

SEQ ID NO: 5401370 - DNA, 25 bp, Homo sapien
atttaggcctagtcttctccattgg

SEQ ID NO: 5401371 - DNA, 25 bp, Homo sapien
cacttcaccaggtcagctatttagg

SEQ ID NO: 5401372 - DNA, 25 bp, Homo sapien
tgtggctttatgtgtcacttcacca

SEQ ID NO: 5401373 - DNA, 25 bp, Homo sapien
ctctcaactgaggattggccagatg

SEQ ID NO: 5401374 - DNA, 25 bp, Homo sapien
gaaagcctcccatactctcaactga

SEQ ID NO: 5401375 - DNA, 25 bp, Homo sapien
acagcccggaggatctcagcctgct

SEQ ID NO: 5401376 - DNA, 25 bp, Homo sapien
gatgcccaactccactcctcatgtt

SEQ ID NO: 5401377 - DNA, 25 bp, Homo sapien
gtcttcaattccatgcaggtacaaa

SEQ ID NO: 5401378 - DNA, 25 bp, Homo sapien
tcaattccatgcaggtacaaattgt

SEQ ID NO: 5401379 - DNA, 25 bp, Homo sapien
ccatgcaggtacaaattgtcataca

SEQ ID NO: 5401380 - DNA, 25 bp, Homo sapien
aattccatgcaggtacaaattgtca

SEQ ID NO: 5401381 - DNA, 25 bp, Homo sapien
tcccacagggtgaggttatccccag

SEQ ID NO: 5401382 - DNA, 25 bp, Homo sapien
tttgggagaactgcgcctgccttat

SEQ ID NO: 5401383 - DNA, 25 bp, Homo sapien
gaggcagtccagacctggcatttta

SEQ ID NO: 5401384 - DNA, 25 bp, Homo sapien
tgcagaaaccacagctacagcttaa

SEQ ID NO: 5401385 - DNA, 25 bp, Homo sapien
ccagctaaattcaggaggacaaaga

SEQ ID NO: 5401386 - DNA, 25 bp, Homo sapien
tgggagctcagcacaagagtaactg

SEQ ID NO: 5401387 - DNA, 25 bp, Homo sapien
actggctgcagttcatgggagctca

SEQ ID NO: 5401388 - DNA, 25 bp, Homo sapien
gaaacaggagagctttatggcccac

SEQ ID NO: 5401389 - DNA, 25 bp, Homo sapien
caccccactgaacgctgtgtgtttc

SEQ ID NO: 5401390 - DNA, 25 bp, Homo sapien
cactgaacgctgtgtgtttcctctg

SEQ ID NO: 5401391 - DNA, 25 bp, Homo sapien
tgaacgctgtgtgtttcctctgtac

SEQ ID NO: 5401392 - DNA, 25 bp, Homo sapien
agccaccccactgaacgctgtgtgt

SEQ ID NO: 5401393 - DNA, 25 bp, Homo sapien
caattgtctggaatcttgctccatc

SEQ ID NO: 5401394 - DNA, 25 bp, Homo sapien
ttgtctggaatcttgctccatcatc

SEQ ID NO: 5401395 - DNA, 25 bp, Homo sapien
aattgtctggaatcttgctccatca

SEQ ID NO: 5401396 - DNA, 25 bp, Homo sapien
attgtctggaatcttgctccatcat

SEQ ID NO: 5401397 - DNA, 25 bp, Homo sapien
gactggtccacactactggagagac

SEQ ID NO: 5401398 - DNA, 25 bp, Homo sapien
ctggagagactggaatgtgaagatc

SEQ ID NO: 5401399 - DNA, 25 bp, Homo sapien
tatcagtgctgatctaccaattaca

SEQ ID NO: 5401400 - DNA, 25 bp, Homo sapien
gatcaatgagaaatgatggcatctc

SEQ ID NO: 5401401 - DNA, 25 bp, Homo sapien
cagacagggatggcgtggcagcaac

SEQ ID NO: 5401402 - DNA, 25 bp, Homo sapien
gacagacagggatggcgtggcagca

SEQ ID NO: 5401403 - DNA, 25 bp, Homo sapien
acagacagggatggcgtggcagcaa

SEQ ID NO: 5401404 - DNA, 25 bp, Homo sapien
caaatattggttaaggaactgaaca

SEQ ID NO: 5401405 - DNA, 25 bp, Homo sapien
cattccatagaagatcctcaacaaa

SEQ ID NO: 5401406 - DNA, 25 bp, Homo sapien
tgtcgttgcctccatcataatgcat

SEQ ID NO: 5401407 - DNA, 25 bp, Homo sapien
cactgtgagccttgatgtcgttgcc

SEQ ID NO: 5401408 - DNA, 25 bp, Homo sapien
gttaataggataaagaagcttctgc

SEQ ID NO: 5401409 - DNA, 25 bp, Homo sapien
taataggataaagaagcttctgcat

SEQ ID NO: 5401410 - DNA, 25 bp, Homo sapien
ttaataggataaagaagcttctgca

SEQ ID NO: 5401411 - DNA, 25 bp, Homo sapien
aagttaataggataaagaagcttct

SEQ ID NO: 5401412 - DNA, 25 bp, Homo sapien
atcaccggtataagaagttcagcag

SEQ ID NO: 5401413 - DNA, 25 bp, Homo sapien
gggagtcacacattgaattgttaca

SEQ ID NO: 5401414 - DNA, 25 bp, Homo sapien
tctcctaccaccatacagagaccct

SEQ ID NO: 5401415 - DNA, 25 bp, Homo sapien
ccctctcaggtgctcaaagtggtca

SEQ ID NO: 5401416 - DNA, 25 bp, Homo sapien
gccaaagcaaggatgaaacacacag

SEQ ID NO: 5401417 - DNA, 25 bp, Homo sapien
aactggacgagaaggtacacagggc

SEQ ID NO: 5401418 - DNA, 25 bp, Homo sapien
ttttgtttgacccaagaagcccaga

SEQ ID NO: 5401419 - DNA, 25 bp, Homo sapien
tacacagggcaaagtgccaaagcaa

SEQ ID NO: 5401420 - DNA, 25 bp, Homo sapien
cctttccatgattaaagaaggcaga

SEQ ID NO: 5401421 - DNA, 25 bp, Homo sapien
tctgggctgagtaaacctgccattc

SEQ ID NO: 5401422 - DNA, 25 bp, Homo sapien
taccagtttctaaaatcctagtgtc

SEQ ID NO: 5401423 - DNA, 25 bp, Homo sapien
ggctgagtaaacctgccattccttt

SEQ ID NO: 5401424 - DNA, 25 bp, Homo sapien
gagcttggtgagcttcaccctcacg

SEQ ID NO: 5401425 - DNA, 25 bp, Homo sapien
ccttggtgccaatgtagggactcac

SEQ ID NO: 5401426 - DNA, 25 bp, Homo sapien
caaagtgtgaaaagctttcccctgg

SEQ ID NO: 5401427 - DNA, 25 bp, Homo sapien
cgaagatgcaaaagtaccttctgct

SEQ ID NO: 5401428 - DNA, 25 bp, Homo sapien
cacaagagtgttaatcaaaggaatt

SEQ ID NO: 5401429 - DNA, 25 bp, Homo sapien
ttgaaagccatctgagcaaactttg

SEQ ID NO: 5401430 - DNA, 25 bp, Homo sapien
gaatttgaaagccatctgagcaaac

SEQ ID NO: 5401431 - DNA, 25 bp, Homo sapien
ctcacaagagtgttaatcaaaggaa

SEQ ID NO: 5401432 - DNA, 25 bp, Homo sapien
gcctggccctatatctcttactctg

SEQ ID NO: 5401433 - DNA, 25 bp, Homo sapien
ttactctgggattgaaagcctttca

SEQ ID NO: 5401434 - DNA, 25 bp, Homo sapien
cattcatacgaaccctacataccaa

SEQ ID NO: 5401435 - DNA, 25 bp, Homo sapien
tatctgccctggtagtcacgtttca

SEQ ID NO: 5401436 - DNA, 25 bp, Homo sapien
tttagacctgctggagcccattagc

SEQ ID NO: 5401437 - DNA, 25 bp, Homo sapien
tacggaatgtcatcaagcagcaggt

SEQ ID NO: 5401438 - DNA, 25 bp, Homo sapien
ggtacacagaaatgcccatgacaga

SEQ ID NO: 5401439 - DNA, 25 bp, Homo sapien
tgtgtccttgtgagtcccatgatgg

SEQ ID NO: 5401440 - DNA, 25 bp, Homo sapien
aggggatacgcagggggccaaattg

SEQ ID NO: 5401441 - DNA, 25 bp, Homo sapien
tgcagaggggatacgcagggggcca

SEQ ID NO: 5401442 - DNA, 25 bp, Homo sapien
gcagaggggatacgcagggggccaa

SEQ ID NO: 5401443 - DNA, 25 bp, Homo sapien
gatacgcagggggccaaattgagca

SEQ ID NO: 5401444 - DNA, 25 bp, Homo sapien
cacaaatgtggctaggaggatatct

SEQ ID NO: 5401445 - DNA, 25 bp, Homo sapien
gtctacgtttgcacgctcaggcaca

SEQ ID NO: 5401446 - DNA, 25 bp, Homo sapien
aataactgtgcttcggataagccac

SEQ ID NO: 5401447 - DNA, 25 bp, Homo sapien
aggatatctttatgtagagccacaa

SEQ ID NO: 5401448 - DNA, 25 bp, Homo sapien
gcttggtggtgtagacgggctgcca

SEQ ID NO: 5401449 - DNA, 25 bp, Homo sapien
aaatccccgcttggtggtgtagacg

SEQ ID NO: 5401450 - DNA, 25 bp, Homo sapien
attaaatccccgcttggtggtgtag

SEQ ID NO: 5401451 - DNA, 25 bp, Homo sapien
gcttccattaaatccccgcttggtg

SEQ ID NO: 5401452 - DNA, 25 bp, Homo sapien
cagagctagcactttgttggccacc

SEQ ID NO: 5401453 - DNA, 25 bp, Homo sapien
tctcctgacgatgagagaagttggc

SEQ ID NO: 5401454 - DNA, 25 bp, Homo sapien
gaagttggcagagctagcactttgt

SEQ ID NO: 5401455 - DNA, 25 bp, Homo sapien
ccaataaggatttacccaggatgtg

SEQ ID NO: 5401456 - DNA, 25 bp, Homo sapien
aagaaggaagtaggtcaccagccac

SEQ ID NO: 5401457 - DNA, 25 bp, Homo sapien
ggcgacaagctaacttcctctttta

SEQ ID NO: 5401458 - DNA, 25 bp, Homo sapien
gagcagcaagggcttacacaggtgc

SEQ ID NO: 5401459 - DNA, 25 bp, Homo sapien
gattctgtctccctataatatccga

SEQ ID NO: 5401460 - DNA, 25 bp, Homo sapien
cagattagctttagggtgtgggcca

SEQ ID NO: 5401461 - DNA, 25 bp, Homo sapien
gccagacatccacgcagaggaggat

SEQ ID NO: 5401462 - DNA, 25 bp, Homo sapien
cctttgccaatgacagacgggaagc

SEQ ID NO: 5401463 - DNA, 25 bp, Homo sapien
aagaaaatgccccttgggactcaga

SEQ ID NO: 5401464 - DNA, 25 bp, Homo sapien
tggcaataatcaggcccacataggc

SEQ ID NO: 5401465 - DNA, 25 bp, Homo sapien
cagatgccggtgaataaatgcttcc

SEQ ID NO: 5401466 - DNA, 25 bp, Homo sapien
ccacaaagaggtgccggatgcttgg

SEQ ID NO: 5401467 - DNA, 25 bp, Homo sapien
taggtagtatgagggagctaacccc

SEQ ID NO: 5401468 - DNA, 25 bp, Homo sapien
cagggagcaatatatcacaaatggc

SEQ ID NO: 5401469 - DNA, 25 bp, Homo sapien
gacggaagtcagctatcagcaaact

SEQ ID NO: 5401470 - DNA, 25 bp, Homo sapien
gaccttgaacttacgcttttgctga

SEQ ID NO: 5401471 - DNA, 25 bp, Homo sapien
tttctactaccagaatttagggcca

SEQ ID NO: 5401472 - DNA, 25 bp, Homo sapien
tccaaagtccttctgcgaggaacaa

SEQ ID NO: 5401473 - DNA, 25 bp, Homo sapien
tgcgaggaacaatattctgggagga

SEQ ID NO: 5401474 - DNA, 25 bp, Homo sapien
gattttcatagagccctcagggtcc

SEQ ID NO: 5401475 - DNA, 25 bp, Homo sapien
atccatgattttcatagagccctca

SEQ ID NO: 5401476 - DNA, 25 bp, Homo sapien
gactaccaaagacaacatccacaat

SEQ ID NO: 5401477 - DNA, 25 bp, Homo sapien
agcatctccaaatatgtcgactacc

SEQ ID NO: 5401478 - DNA, 25 bp, Homo sapien
aatgcttctacgtgaaaaccaaact

SEQ ID NO: 5401479 - DNA, 25 bp, Homo sapien
aggaaatgcttctacgtgaaaacca

SEQ ID NO: 5401480 - DNA, 25 bp, Homo sapien
tattctgctggaactattgtaagga

SEQ ID NO: 5401481 - DNA, 25 bp, Homo sapien
cacaataacgggtgctaaactgagg

SEQ ID NO: 5401482 - DNA, 25 bp, Homo sapien
gataaatgggagatcctgaatcact

SEQ ID NO: 5401483 - DNA, 25 bp, Homo sapien
cctaactggacaggatcgtggataa

SEQ ID NO: 5401484 - DNA, 25 bp, Homo sapien
gtctctaggtgagaaatgtgagcca

SEQ ID NO: 5401485 - DNA, 25 bp, Homo sapien
gttaagacacttactggactcagaa

SEQ ID NO: 5401486 - DNA, 25 bp, Homo sapien
gagttgcgaaagtctggaacacagg

SEQ ID NO: 5401487 - DNA, 25 bp, Homo sapien
tgtgagccagcaatatatggactat

SEQ ID NO: 5401488 - DNA, 25 bp, Homo sapien
aaacccacacttgggtgtggcactc

SEQ ID NO: 5401489 - DNA, 25 bp, Homo sapien
cacacttgggtgtggcactccaagg

SEQ ID NO: 5401490 - DNA, 25 bp, Homo sapien
agggtcccggctggtctccacagct

SEQ ID NO: 5401491 - DNA, 25 bp, Homo sapien
caccatgagggtcccggctggtctc

SEQ ID NO: 5401492 - DNA, 25 bp, Homo sapien
ccgggacgcgaagacgtcaagagcc

SEQ ID NO: 5401493 - DNA, 25 bp, Homo sapien
gggacgcgaagacgtcaagagccca

SEQ ID NO: 5401494 - DNA, 25 bp, Homo sapien
gacgcgaagacgtcaagagcccagg

SEQ ID NO: 5401495 - DNA, 25 bp, Homo sapien
gggcggtgcggagacgccgggacgc

SEQ ID NO: 5401496 - DNA, 25 bp, Homo sapien
tgaggatgaagctggtcgaagtggt

SEQ ID NO: 5401497 - DNA, 25 bp, Homo sapien
tgctcctccgggttgtggtgcctcg

SEQ ID NO: 5401498 - DNA, 25 bp, Homo sapien
gccatcggatcttttcaacctgctc

SEQ ID NO: 5401499 - DNA, 25 bp, Homo sapien
tcgaagtggtgctgccatcggatct

SEQ ID NO: 5401500 - DNA, 25 bp, Homo sapien
cggtgaggaccgcagcgcagagcgg

SEQ ID NO: 5401501 - DNA, 25 bp, Homo sapien
agccggtgaggaccgcagcgcagag

SEQ ID NO: 5401502 - DNA, 25 bp, Homo sapien
gagagaagccggtgaggaccgcagc

SEQ ID NO: 5401503 - DNA, 25 bp, Homo sapien
agaagccggtgaggaccgcagcgca

SEQ ID NO: 5401504 - DNA, 25 bp, Homo sapien
tccattaacaaagactctcagggtg

SEQ ID NO: 5401505 - DNA, 25 bp, Homo sapien
acatccattaacaaagactctcagg

SEQ ID NO: 5401506 - DNA, 25 bp, Homo sapien
cattaacaaagactctcagggtgcg

SEQ ID NO: 5401507 - DNA, 25 bp, Homo sapien
ttaacaaagactctcagggtgcggg

SEQ ID NO: 5401508 - DNA, 25 bp, Homo sapien
ttcttggcgtaggaggaggaggaca

SEQ ID NO: 5401509 - DNA, 25 bp, Homo sapien
ctgcgaggtgggggagtgcggcccg

SEQ ID NO: 5401510 - DNA, 25 bp, Homo sapien
gttcttggcgtaggaggaggaggac

SEQ ID NO: 5401511 - DNA, 25 bp, Homo sapien
gcgaggtgggggagtgcggcccgtc

SEQ ID NO: 5401512 - DNA, 25 bp, Homo sapien
gagccgccgcatggccagcccgtgt

SEQ ID NO: 5401513 - DNA, 25 bp, Homo sapien
catggccagcccgtgtgcggtgggc

SEQ ID NO: 5401514 - DNA, 25 bp, Homo sapien
gccgcatggccagcccgtgtgcggt

SEQ ID NO: 5401515 - DNA, 25 bp, Homo sapien
cgttcagagccgccgcatggccagc

SEQ ID NO: 5401516 - DNA, 25 bp, Homo sapien
gcggacggagggggagggcgcagga

SEQ ID NO: 5401517 - DNA, 25 bp, Homo sapien
ctgcggacggagggggagggcgcag

SEQ ID NO: 5401518 - DNA, 25 bp, Homo sapien
tgcggacggagggggagggcgcagg

SEQ ID NO: 5401519 - DNA, 25 bp, Homo sapien
tgcccgcacttcggagagcgcggca

SEQ ID NO: 5401520 - DNA, 25 bp, Homo sapien
gagcgcggcaccttaaagggaccga

SEQ ID NO: 5401521 - DNA, 25 bp, Homo sapien
gcacttcggagagcgcggcacctta

SEQ ID NO: 5401522 - DNA, 25 bp, Homo sapien
gctccctgcccgcacttcggagagc

SEQ ID NO: 5401523 - DNA, 25 bp, Homo sapien
aactccttgaatttagctctcttct

SEQ ID NO: 5401524 - DNA, 25 bp, Homo sapien
caactccttgaatttagctctcttc

SEQ ID NO: 5401525 - DNA, 25 bp, Homo sapien
actccttgaatttagctctcttctg

SEQ ID NO: 5401526 - DNA, 25 bp, Homo sapien
gagggacactattcactatatcaca

SEQ ID NO: 5401527 - DNA, 25 bp, Homo sapien
cacattgtgacattccaggtgtaca

SEQ ID NO: 5401528 - DNA, 25 bp, Homo sapien
gtaccttccgatagaaataaagcat

SEQ ID NO: 5401529 - DNA, 25 bp, Homo sapien
cataatgcctcttttgacacagtaa

SEQ ID NO: 5401530 - DNA, 25 bp, Homo sapien
tatattggctcaaagacatgctgaa

SEQ ID NO: 5401531 - DNA, 25 bp, Homo sapien
catttttatctctcgacagcctgca

SEQ ID NO: 5401532 - DNA, 25 bp, Homo sapien
aataagccctctcctagaactcagg

SEQ ID NO: 5401533 - DNA, 25 bp, Homo sapien
gaagttagacaattccctttggcag

SEQ ID NO: 5401534 - DNA, 25 bp, Homo sapien
aacacaaccgcaatttaaggagcca

SEQ ID NO: 5401535 - DNA, 25 bp, Homo sapien
tgggacattccttcacagttggcat

SEQ ID NO: 5401536 - DNA, 25 bp, Homo sapien
gactattatcgagagcagctttgga

SEQ ID NO: 5401537 - DNA, 25 bp, Homo sapien
gattgacttcaaacaaactggactg

SEQ ID NO: 5401538 - DNA, 25 bp, Homo sapien
ctttatttattcatggtccttttga

SEQ ID NO: 5401539 - DNA, 25 bp, Homo sapien
tggtatcacaaggactgaataatac

SEQ ID NO: 5401540 - DNA, 25 bp, Homo sapien
tatcacaaggactgaataatacact

SEQ ID NO: 5401541 - DNA, 25 bp, Homo sapien
tattttcaggttggtatcacaagga

SEQ ID NO: 5401542 - DNA, 25 bp, Homo sapien
gaataatacacttatgaaggctttc

SEQ ID NO: 5401543 - DNA, 25 bp, Homo sapien
tgagctggaactgtcaccggaaagc

SEQ ID NO: 5401544 - DNA, 25 bp, Homo sapien
ctgctgtgcaactggatgagctgga

SEQ ID NO: 5401545 - DNA, 25 bp, Homo sapien
cggaaagcctgccagttgaggcaaa

SEQ ID NO: 5401546 - DNA, 25 bp, Homo sapien
ctgctgatggtaatttgtgtgctgc

SEQ ID NO: 5401547 - DNA, 25 bp, Homo sapien
ctgctgttctgattacaatttaatc

SEQ ID NO: 5401548 - DNA, 25 bp, Homo sapien
tatataaggttagagatcaatcatc

SEQ ID NO: 5401549 - DNA, 25 bp, Homo sapien
tcattccagccattgaatactgtta

SEQ ID NO: 5401550 - DNA, 25 bp, Homo sapien
taagcttacgtagctctgctgttct

SEQ ID NO: 5401551 - DNA, 25 bp, Homo sapien
aatatgaagtttgagcaggctgtgc

SEQ ID NO: 5401552 - DNA, 25 bp, Homo sapien
tctcagtggaccaatttgatcgggt

SEQ ID NO: 5401553 - DNA, 25 bp, Homo sapien
gatcgggtcctaggctatagctttg

SEQ ID NO: 5401554 - DNA, 25 bp, Homo sapien
gacccatatagtttccaccatgtga

SEQ ID NO: 5401555 - DNA, 25 bp, Homo sapien
agaaaactatacactcccttgaagg

SEQ ID NO: 5401556 - DNA, 25 bp, Homo sapien
aatggtataagggtgccagggcttc

SEQ ID NO: 5401557 - DNA, 25 bp, Homo sapien
ggcaaaagacatgtatcctcaggaa

SEQ ID NO: 5401558 - DNA, 25 bp, Homo sapien
caggacaacagctccttaaggacag

SEQ ID NO: 5401559 - DNA, 25 bp, Homo sapien
ggtgcttcattcaccaatttgttat

SEQ ID NO: 5401560 - DNA, 25 bp, Homo sapien
tgaatagactgagtacactggtgct

SEQ ID NO: 5401561 - DNA, 25 bp, Homo sapien
ggtggagctttgaatagactgagta

SEQ ID NO: 5401562 - DNA, 25 bp, Homo sapien
gcattggaaccccagatgatgcagg

SEQ ID NO: 5401563 - DNA, 25 bp, Homo sapien
gcacggcatgcagaaaatactagag

SEQ ID NO: 5401564 - DNA, 25 bp, Homo sapien
tactagagagtaggcacactggcta

SEQ ID NO: 5401565 - DNA, 25 bp, Homo sapien
ggctatcactgatccaggcagttct

SEQ ID NO: 5401566 - DNA, 25 bp, Homo sapien
aatagagtgctatacaatgttggcc

SEQ ID NO: 5401567 - DNA, 25 bp, Homo sapien
tgctataaatttgttaaaagcctgg

SEQ ID NO: 5401568 - DNA, 25 bp, Homo sapien
ttaataaaacttgtcagagcttgtt

SEQ ID NO: 5401569 - DNA, 25 bp, Homo sapien
tactttactgtttgccaaaacacaa

SEQ ID NO: 5401570 - DNA, 25 bp, Homo sapien
aactatactttttattcctgcacga

SEQ ID NO: 5401571 - DNA, 25 bp, Homo sapien
tttcatctatcattggacccatctg

SEQ ID NO: 5401572 - DNA, 25 bp, Homo sapien
tatcattggacccatctgttggcag

SEQ ID NO: 5401573 - DNA, 25 bp, Homo sapien
tcattggacccatctgttggcagat

SEQ ID NO: 5401574 - DNA, 25 bp, Homo sapien
catctatcattggacccatctgttg

SEQ ID NO: 5401575 - DNA, 25 bp, Homo sapien
gagttatcccaaagtcttaaagaca

SEQ ID NO: 5401576 - DNA, 25 bp, Homo sapien
taaactatgtaacctttgcccatca

SEQ ID NO: 5401577 - DNA, 25 bp, Homo sapien
tgtatttcccaatgtgaacactgac

SEQ ID NO: 5401578 - DNA, 25 bp, Homo sapien
tattaactaagttgacagactgtga

SEQ ID NO: 5401579 - DNA, 25 bp, Homo sapien
tggttttgaatctgttggatctata

SEQ ID NO: 5401580 - DNA, 25 bp, Homo sapien
ttttgaatctgttggatctatactc

SEQ ID NO: 5401581 - DNA, 25 bp, Homo sapien
tttgaatctgttggatctatactct

SEQ ID NO: 5401582 - DNA, 25 bp, Homo sapien
ggttttgaatctgttggatctatac

SEQ ID NO: 5401583 - DNA, 25 bp, Homo sapien
ataaacaggctcaggctctgatttc

SEQ ID NO: 5401584 - DNA, 25 bp, Homo sapien
ctcatctatataaacaggctcaggc

SEQ ID NO: 5401585 - DNA, 25 bp, Homo sapien
tatataaacaggctcaggctctgat

SEQ ID NO: 5401586 - DNA, 25 bp, Homo sapien
tctatataaacaggctcaggctctg

SEQ ID NO: 5401587 - DNA, 25 bp, Homo sapien
caaaattggatgggaaaagtcctat

SEQ ID NO: 5401588 - DNA, 25 bp, Homo sapien
gaaaagtcctattcctctgtgattt

SEQ ID NO: 5401589 - DNA, 25 bp, Homo sapien
tcagtctctatgtttaaattagttg

SEQ ID NO: 5401590 - DNA, 25 bp, Homo sapien
ttggatgggaaaagtcctattcctc

SEQ ID NO: 5401591 - DNA, 25 bp, Homo sapien
cagcaactataaaagtagggtgtcc

SEQ ID NO: 5401592 - DNA, 25 bp, Homo sapien
gacaatattttacccataagcatgc

SEQ ID NO: 5401593 - DNA, 25 bp, Homo sapien
gcgattaccaatcacctaaaatgac

SEQ ID NO: 5401594 - DNA, 25 bp, Homo sapien
tagggtgtcctatcgtcaaaatgac

SEQ ID NO: 5401595 - DNA, 25 bp, Homo sapien
aaaacaaggtatgaaatggttctat

SEQ ID NO: 5401596 - DNA, 25 bp, Homo sapien
gcattacactttaaaccttcccata

SEQ ID NO: 5401597 - DNA, 25 bp, Homo sapien
gattctaaattaagggcattacact

SEQ ID NO: 5401598 - DNA, 25 bp, Homo sapien
tctggattctaaattaagggcatta

SEQ ID NO: 5401599 - DNA, 25 bp, Homo sapien
ttcattgtcctcaacagcttcaaaa

SEQ ID NO: 5401600 - DNA, 25 bp, Homo sapien
cgtgcaaccttattatttaactgaa

SEQ ID NO: 5401601 - DNA, 25 bp, Homo sapien
tctgaagatggatataaggattttg

SEQ ID NO: 5401602 - DNA, 25 bp, Homo sapien
aagctctcactttccgtgcaacctt

SEQ ID NO: 5401603 - DNA, 25 bp, Homo sapien
tctttgtttttgttcgatgacgtac

SEQ ID NO: 5401604 - DNA, 25 bp, Homo sapien
tttgtttttgttcgatgacgtacca

SEQ ID NO: 5401605 - DNA, 25 bp, Homo sapien
tttgttcgatgacgtaccattcttg

SEQ ID NO: 5401606 - DNA, 25 bp, Homo sapien
cgatgacgtaccattcttggcagca

SEQ ID NO: 5401607 - DNA, 25 bp, Homo sapien
gaacctgctggaggaaaagtaattc

SEQ ID NO: 5401608 - DNA, 25 bp, Homo sapien
tctttcatagatttaatagttgcag

SEQ ID NO: 5401609 - DNA, 25 bp, Homo sapien
ttgcagatatcagactaaactgagg

SEQ ID NO: 5401610 - DNA, 25 bp, Homo sapien
taaactgagggtccttctgaaattc

SEQ ID NO: 5401611 - DNA, 25 bp, Homo sapien
tatttttaatcacagcacgtacttc

SEQ ID NO: 5401612 - DNA, 25 bp, Homo sapien
tttaatcacagcacgtacttctgtt

SEQ ID NO: 5401613 - DNA, 25 bp, Homo sapien
agtttgccacacaagccccaagaag

SEQ ID NO: 5401614 - DNA, 25 bp, Homo sapien
tttttaatcacagcacgtacttctg

SEQ ID NO: 5401615 - DNA, 25 bp, Homo sapien
aacatgtggaaccttatgatttacc

SEQ ID NO: 5401616 - DNA, 25 bp, Homo sapien
agttagtgcttgcagagcaacatgt

SEQ ID NO: 5401617 - DNA, 25 bp, Homo sapien
gcaacatgtggaaccttatgattta

SEQ ID NO: 5401618 - DNA, 25 bp, Homo sapien
tagtgcttgcagagcaacatgtgga

SEQ ID NO: 5401619 - DNA, 25 bp, Homo sapien
ggagtacttccaactttgtcacata

SEQ ID NO: 5401620 - DNA, 25 bp, Homo sapien
ttaggagtacttccaactttgtcac

SEQ ID NO: 5401621 - DNA, 25 bp, Homo sapien
tacttccaactttgtcacatatgtc

SEQ ID NO: 5401622 - DNA, 25 bp, Homo sapien
ccattaggagtacttccaactttgt

SEQ ID NO: 5401623 - DNA, 25 bp, Homo sapien
ccaatcttctgtagtgttgtactca

SEQ ID NO: 5401624 - DNA, 25 bp, Homo sapien
tgtagtgttgtactcattcgtggct

SEQ ID NO: 5401625 - DNA, 25 bp, Homo sapien
gtgttgtactcattcgtggcttttt

SEQ ID NO: 5401626 - DNA, 25 bp, Homo sapien
tcttctgtagtgttgtactcattcg

SEQ ID NO: 5401627 - DNA, 25 bp, Homo sapien
gagagaccagcgctttatgactgca

SEQ ID NO: 5401628 - DNA, 25 bp, Homo sapien
gagccttaagagtgatgtttcccag

SEQ ID NO: 5401629 - DNA, 25 bp, Homo sapien
gaggaattctagtcgcacctgggca

SEQ ID NO: 5401630 - DNA, 25 bp, Homo sapien
aatcccaacgtcgaaggagcgggcg

SEQ ID NO: 5401631 - DNA, 25 bp, Homo sapien
gctcgaaggggttggcggtgaacaa

SEQ ID NO: 5401632 - DNA, 25 bp, Homo sapien
gtcttgctcgaaggggttggcggtg

SEQ ID NO: 5401633 - DNA, 25 bp, Homo sapien
cttgctcgaaggggttggcggtgaa

SEQ ID NO: 5401634 - DNA, 25 bp, Homo sapien
aggggttggcggtgaacaaaggcat

SEQ ID NO: 5401635 - DNA, 25 bp, Homo sapien
ccgagccctagtcgctgctgtctag

SEQ ID NO: 5401636 - DNA, 25 bp, Homo sapien
tgggcgtcctcccaaggcctttgtc

SEQ ID NO: 5401637 - DNA, 25 bp, Homo sapien
tgtctagctgacactcagcaactgc

SEQ ID NO: 5401638 - DNA, 25 bp, Homo sapien
ggcgagatccctccgaccatgggcg

SEQ ID NO: 5401639 - DNA, 25 bp, Homo sapien
tcactcccagaatcgactgaacggc

SEQ ID NO: 5401640 - DNA, 25 bp, Homo sapien
aaactctattattactctctgttca

SEQ ID NO: 5401641 - DNA, 25 bp, Homo sapien
catcattaccgcactcttcacagta

SEQ ID NO: 5401642 - DNA, 25 bp, Homo sapien
tgtcatcatcattaccgcactcttc

SEQ ID NO: 5401643 - DNA, 25 bp, Homo sapien
cttcagtcataagattccatattcc

SEQ ID NO: 5401644 - DNA, 25 bp, Homo sapien
ttcagtcataagattccatattcca

SEQ ID NO: 5401645 - DNA, 25 bp, Homo sapien
ctccacacccaaatatggcctgagt

SEQ ID NO: 5401646 - DNA, 25 bp, Homo sapien
gaataaactaacttcattacggctg

SEQ ID NO: 5401647 - DNA, 25 bp, Homo sapien
tacggctgttgtctggccaactctt

SEQ ID NO: 5401648 - DNA, 25 bp, Homo sapien
aatatggcctgagtcctgattcaca

SEQ ID NO: 5401649 - DNA, 25 bp, Homo sapien
ccttgcttgttcttgtggtgatgag

SEQ ID NO: 5401650 - DNA, 25 bp, Homo sapien
ctgccgatggtaacaaaaaagacaa

SEQ ID NO: 5401651 - DNA, 25 bp, Homo sapien
tataatactttaccgtttcagattg

SEQ ID NO: 5401652 - DNA, 25 bp, Homo sapien
aatatagttctataatactttaccg

SEQ ID NO: 5401653 - DNA, 25 bp, Homo sapien
tatctccctagttgagctctgtcac

SEQ ID NO: 5401654 - DNA, 25 bp, Homo sapien
cagggtgcccggcacccctaaatat

SEQ ID NO: 5401655 - DNA, 25 bp, Homo sapien
tgttaccatcactcaccattgtaat

SEQ ID NO: 5401656 - DNA, 25 bp, Homo sapien
tctccactgctacccaactaagtca

SEQ ID NO: 5401657 - DNA, 25 bp, Homo sapien
ctgaatggtgcttacttctagtgga

SEQ ID NO: 5401658 - DNA, 25 bp, Homo sapien
catctgcagaacatcattgtttact

SEQ ID NO: 5401659 - DNA, 25 bp, Homo sapien
gtgcttacttctagtggagcaggag

SEQ ID NO: 5401660 - DNA, 25 bp, Homo sapien
gcttacttctagtggagcaggagaa

SEQ ID NO: 5401661 - DNA, 25 bp, Homo sapien
ccatgagtacaaagccatagggccg

SEQ ID NO: 5401662 - DNA, 25 bp, Homo sapien
tatggtcataagaaatagagatctc

SEQ ID NO: 5401663 - DNA, 25 bp, Homo sapien
gggacttgggcataaggcatgcaca

SEQ ID NO: 5401664 - DNA, 25 bp, Homo sapien
aaggcatgcacaatcatggttgtac

SEQ ID NO: 5401665 - DNA, 25 bp, Homo sapien
agcaggtaggctctctaagtgaacc

SEQ ID NO: 5401666 - DNA, 25 bp, Homo sapien
ggtaggctctctaagtgaaccctgg

SEQ ID NO: 5401667 - DNA, 25 bp, Homo sapien
gaaccctggcaacccatagagtcat

SEQ ID NO: 5401668 - DNA, 25 bp, Homo sapien
gctctctaagtgaaccctggcaacc

SEQ ID NO: 5401669 - DNA, 25 bp, Homo sapien
cccagtaattacctctatttgccta

SEQ ID NO: 5401670 - DNA, 25 bp, Homo sapien
tatttgcctatcaataatgagggcc

SEQ ID NO: 5401671 - DNA, 25 bp, Homo sapien
tattgccgatggaactggagtttat

SEQ ID NO: 5401672 - DNA, 25 bp, Homo sapien
tctgtttatattgccgatggaactg

SEQ ID NO: 5401673 - DNA, 25 bp, Homo sapien
gaggatgaatagtattctgatatga

SEQ ID NO: 5401674 - DNA, 25 bp, Homo sapien
tctgatatgacagtctctaaaatcc

SEQ ID NO: 5401675 - DNA, 25 bp, Homo sapien
agtattctgatatgacagtctctaa

SEQ ID NO: 5401676 - DNA, 25 bp, Homo sapien
gaatagtattctgatatgacagtct

SEQ ID NO: 5401677 - DNA, 25 bp, Homo sapien
taaactcagctaaggaactgaaaga

SEQ ID NO: 5401678 - DNA, 25 bp, Homo sapien
ccctgcttgcagactacataatatt

SEQ ID NO: 5401679 - DNA, 25 bp, Homo sapien
acagtgcttggcctagttcttttca

SEQ ID NO: 5401680 - DNA, 25 bp, Homo sapien
tttgcccgatacgaaatcaacatag

SEQ ID NO: 5401681 - DNA, 25 bp, Homo sapien
gagcttaatctgtaactgaaagcga

SEQ ID NO: 5401682 - DNA, 25 bp, Homo sapien
aggagcttaatctgtaactgaaagc

SEQ ID NO: 5401683 - DNA, 25 bp, Homo sapien
gcttaatctgtaactgaaagcgaac

SEQ ID NO: 5401684 - DNA, 25 bp, Homo sapien
cttaatctgtaactgaaagcgaaca

SEQ ID NO: 5401685 - DNA, 25 bp, Homo sapien
agttcgctctttggccaactgttcc

SEQ ID NO: 5401686 - DNA, 25 bp, Homo sapien
ctgcttgtggaaatgagcagagatt

SEQ ID NO: 5401687 - DNA, 25 bp, Homo sapien
agtcgaattacctcccgcccagagg

SEQ ID NO: 5401688 - DNA, 25 bp, Homo sapien
gggctcctctcattaattgaaaagt

SEQ ID NO: 5401689 - DNA, 25 bp, Homo sapien
taaagcatgaacttagggagtctct

SEQ ID NO: 5401690 - DNA, 25 bp, Homo sapien
taggtctgccaaagattctagctca

SEQ ID NO: 5401691 - DNA, 25 bp, Homo sapien
gaaggtccattatctaccacagaga

SEQ ID NO: 5401692 - DNA, 25 bp, Homo sapien
ccacagagataagggaagcaatatc

SEQ ID NO: 5401693 - DNA, 25 bp, Homo sapien
ccattctgtaaaagtactactgaag

SEQ ID NO: 5401694 - DNA, 25 bp, Homo sapien
aaattgccattctgtaaaagtacta

SEQ ID NO: 5401695 - DNA, 25 bp, Homo sapien
ttgccattctgtaaaagtactactg

SEQ ID NO: 5401696 - DNA, 25 bp, Homo sapien
aagtactactgaagaataggactct

SEQ ID NO: 5401697 - DNA, 25 bp, Homo sapien
gtcattccataactaccagagggca

SEQ ID NO: 5401698 - DNA, 25 bp, Homo sapien
gattggtttagacaagcagtcaggc

SEQ ID NO: 5401699 - DNA, 25 bp, Homo sapien
gcagtcaggccttgttatataataa

SEQ ID NO: 5401700 - DNA, 25 bp, Homo sapien
tccaacacattactctgatcgctgt

SEQ ID NO: 5401701 - DNA, 25 bp, Homo sapien
cacaacgtgcctttgaagctgccga

SEQ ID NO: 5401702 - DNA, 25 bp, Homo sapien
caacgcagggagcatggattcgcag

SEQ ID NO: 5401703 - DNA, 25 bp, Homo sapien
gttctgatttccgacgcgcacgcta

SEQ ID NO: 5401704 - DNA, 25 bp, Homo sapien
agcagaccgatttcagggcgcacaa

SEQ ID NO: 5401705 - DNA, 25 bp, Homo sapien
ggaaatagctggagaatactccgaa

SEQ ID NO: 5401706 - DNA, 25 bp, Homo sapien
gctggagaatactccgaataaggct

SEQ ID NO: 5401707 - DNA, 25 bp, Homo sapien
tgagtggaaatagctggagaatact

SEQ ID NO: 5401708 - DNA, 25 bp, Homo sapien
gaatactccgaataaggctgaaaaa

SEQ ID NO: 5401709 - DNA, 25 bp, Homo sapien
ttagactagagttgttgggcccggc

SEQ ID NO: 5401710 - DNA, 25 bp, Homo sapien
agagagcacaggactagagcgcaga

SEQ ID NO: 5401711 - DNA, 25 bp, Homo sapien
agacctcaggacgtggatccgagcc

SEQ ID NO: 5401712 - DNA, 25 bp, Homo sapien
taatcgcatttacgaggactccgcc

SEQ ID NO: 5401713 - DNA, 25 bp, Homo sapien
gagctgccagtcgccatatctcttc

SEQ ID NO: 5401714 - DNA, 25 bp, Homo sapien
aacttaaggagagctaagagtggga

SEQ ID NO: 5401715 - DNA, 25 bp, Homo sapien
gacagatggatcctccaggcttcct

SEQ ID NO: 5401716 - DNA, 25 bp, Homo sapien
gggaacttaaggagagctaagagtg

SEQ ID NO: 5401717 - DNA, 25 bp, Homo sapien
gtaaaggcacatccgtattctgaca

SEQ ID NO: 5401718 - DNA, 25 bp, Homo sapien
cctgtctccggaaagaatggttggt

SEQ ID NO: 5401719 - DNA, 25 bp, Homo sapien
gaatggttggtaaaggcacatccgt

SEQ ID NO: 5401720 - DNA, 25 bp, Homo sapien
ggaaagaatggttggtaaaggcaca

SEQ ID NO: 5401721 - DNA, 25 bp, Homo sapien
tatctgccccattgagtctgttggc

SEQ ID NO: 5401722 - DNA, 25 bp, Homo sapien
tcgtcttaattagaagcaaacctct

SEQ ID NO: 5401723 - DNA, 25 bp, Homo sapien
gtacaatttcatggcctgggtcagg

SEQ ID NO: 5401724 - DNA, 25 bp, Homo sapien
gctgctgtaccaagccctctttctg

SEQ ID NO: 5401725 - DNA, 25 bp, Homo sapien
gatctgtgaatggatgcccttctgc

SEQ ID NO: 5401726 - DNA, 25 bp, Homo sapien
ccataaggtagcatagacgttcaaa

SEQ ID NO: 5401727 - DNA, 25 bp, Homo sapien
gaacttgtgcttgaagtctccggat

SEQ ID NO: 5401728 - DNA, 25 bp, Homo sapien
caggaaatagtctagggcattgcaa

SEQ ID NO: 5401729 - DNA, 25 bp, Homo sapien
tctcattccaaaaattgccagatag

SEQ ID NO: 5401730 - DNA, 25 bp, Homo sapien
ggtcatcccaactgattaatgtgga

SEQ ID NO: 5401731 - DNA, 25 bp, Homo sapien
caactgattaatgtggagatctgca

SEQ ID NO: 5401732 - DNA, 25 bp, Homo sapien
gatagatgcagcactgagctgcctc

SEQ ID NO: 5401733 - DNA, 25 bp, Homo sapien
tcatgatgccccgtgatcatcattg

SEQ ID NO: 5401734 - DNA, 25 bp, Homo sapien
tgatgccccgtgatcatcattgtca

SEQ ID NO: 5401735 - DNA, 25 bp, Homo sapien
catgatgccccgtgatcatcattgt

SEQ ID NO: 5401736 - DNA, 25 bp, Homo sapien
atgatgccccgtgatcatcattgtc

SEQ ID NO: 5401737 - DNA, 25 bp, Homo sapien
aaacatgctttgatggacttttgct

SEQ ID NO: 5401738 - DNA, 25 bp, Homo sapien
tagccctgggtctcagatgccttag

SEQ ID NO: 5401739 - DNA, 25 bp, Homo sapien
tccatcctggtggtctgcatggcat

SEQ ID NO: 5401740 - DNA, 25 bp, Homo sapien
ggtatcatagggagcaaaacatgct

SEQ ID NO: 5401741 - DNA, 25 bp, Homo sapien
tctggaatgatctgtgggaggaact

SEQ ID NO: 5401742 - DNA, 25 bp, Homo sapien
aaggtctgaaaagcctggtctggaa

SEQ ID NO: 5401743 - DNA, 25 bp, Homo sapien
tggtgaaggtctgaaaagcctggtc

SEQ ID NO: 5401744 - DNA, 25 bp, Homo sapien
ccttggtgaaggtctgaaaagcctg

SEQ ID NO: 5401745 - DNA, 25 bp, Homo sapien
tagatgggattagctaggaaggtag

SEQ ID NO: 5401746 - DNA, 25 bp, Homo sapien
tctaccactttgggaaccatcagtt

SEQ ID NO: 5401747 - DNA, 25 bp, Homo sapien
gttaacccattggagtagatgggat

SEQ ID NO: 5401748 - DNA, 25 bp, Homo sapien
gggaaccatcagtttgggattgata

SEQ ID NO: 5401749 - DNA, 25 bp, Homo sapien
ggttgacaagcagcctagtacctcc

SEQ ID NO: 5401750 - DNA, 25 bp, Homo sapien
ggaaattccagccttgaacagactt

SEQ ID NO: 5401751 - DNA, 25 bp, Homo sapien
gaaattagaccatgtgtgtggcgca

SEQ ID NO: 5401752 - DNA, 25 bp, Homo sapien
cattacagctcatctttaagggtga

SEQ ID NO: 5401753 - DNA, 25 bp, Homo sapien
cttctccagtagtcgggattatagg

SEQ ID NO: 5401754 - DNA, 25 bp, Homo sapien
tcttcagctagatggtaattgaagt

SEQ ID NO: 5401755 - DNA, 25 bp, Homo sapien
ggtagagtggtgagataatagctca

SEQ ID NO: 5401756 - DNA, 25 bp, Homo sapien
ttttacagtatgtaaccgagaccca

SEQ ID NO: 5401757 - DNA, 25 bp, Homo sapien
tggcagtataggtttttgcacctag

SEQ ID NO: 5401758 - DNA, 25 bp, Homo sapien
cagtataggtttttgcacctagcat

SEQ ID NO: 5401759 - DNA, 25 bp, Homo sapien
cttaaagattttggcagtataggtt

SEQ ID NO: 5401760 - DNA, 25 bp, Homo sapien
gattttggcagtataggtttttgca

SEQ ID NO: 5401761 - DNA, 25 bp, Homo sapien
ccttaaaatcattgacggttgtcat

SEQ ID NO: 5401762 - DNA, 25 bp, Homo sapien
ctgtccactcgttccttaaaatcat

SEQ ID NO: 5401763 - DNA, 25 bp, Homo sapien
cgttccttaaaatcattgacggttg

SEQ ID NO: 5401764 - DNA, 25 bp, Homo sapien
cactcgttccttaaaatcattgacg

SEQ ID NO: 5401765 - DNA, 25 bp, Homo sapien
tgattctcagggcattcctggagga

SEQ ID NO: 5401766 - DNA, 25 bp, Homo sapien
aagcttgcatcagtgctgcgtcagg

SEQ ID NO: 5401767 - DNA, 25 bp, Homo sapien
tgctgcgtcagggtgggaaaagccc

SEQ ID NO: 5401768 - DNA, 25 bp, Homo sapien
ctggaggagctccagatactgaggg

SEQ ID NO: 5401769 - DNA, 25 bp, Homo sapien
aagtttcagtgcaatgtatgtcttg

SEQ ID NO: 5401770 - DNA, 25 bp, Homo sapien
cagtgcaatgtatgtcttgactaat

SEQ ID NO: 5401771 - DNA, 25 bp, Homo sapien
gcaatgtatgtcttgactaatgcat

SEQ ID NO: 5401772 - DNA, 25 bp, Homo sapien
tgtatgtcttgactaatgcatttga

SEQ ID NO: 5401773 - DNA, 25 bp, Homo sapien
taaacatcgacgttcctggaaatct

SEQ ID NO: 5401774 - DNA, 25 bp, Homo sapien
tacagcatcattctcgggcagagtc

SEQ ID NO: 5401775 - DNA, 25 bp, Homo sapien
tctgggaggacttgagttgactgct

SEQ ID NO: 5401776 - DNA, 25 bp, Homo sapien
tctttgaaaatcgtaagtgtacagc

SEQ ID NO: 5401777 - DNA, 25 bp, Homo sapien
tttcatggaaaccgtcaacaaggaa

SEQ ID NO: 5401778 - DNA, 25 bp, Homo sapien
cctaacactgcccaacatgaagcca

SEQ ID NO: 5401779 - DNA, 25 bp, Homo sapien
ctaacactgcccaacatgaagccaa

SEQ ID NO: 5401780 - DNA, 25 bp, Homo sapien
catggaaaccgtcaacaaggaagta

SEQ ID NO: 5401781 - DNA, 25 bp, Homo sapien
tctgcagtgctggttagggcagagt

SEQ ID NO: 5401782 - DNA, 25 bp, Homo sapien
ggtatgataaacgagggtcacccaa

SEQ ID NO: 5401783 - DNA, 25 bp, Homo sapien
catccaccccaggaatgtctgcagt

SEQ ID NO: 5401784 - DNA, 25 bp, Homo sapien
ctctggaagacggtatgataaacga

SEQ ID NO: 5401785 - DNA, 25 bp, Homo sapien
tcactattaggttggcaatagtaat

SEQ ID NO: 5401786 - DNA, 25 bp, Homo sapien
gaagaaggtagatgttccctgggca

SEQ ID NO: 5401787 - DNA, 25 bp, Homo sapien
gctctgtggttgactgatcttcctg

SEQ ID NO: 5401788 - DNA, 25 bp, Homo sapien
tccgggcaagtgatagttggtgctc

SEQ ID NO: 5401789 - DNA, 25 bp, Homo sapien
cagtgttgagggtagatgttttccg

SEQ ID NO: 5401790 - DNA, 25 bp, Homo sapien
taaaacgtgcatgaaatctgtaagg

SEQ ID NO: 5401791 - DNA, 25 bp, Homo sapien
tggcttattattacaggttatcaac

SEQ ID NO: 5401792 - DNA, 25 bp, Homo sapien
tgtaaggtacagagcctaattcgtc

SEQ ID NO: 5401793 - DNA, 25 bp, Homo sapien
cagtagctttggcagctagatgtgc

SEQ ID NO: 5401794 - DNA, 25 bp, Homo sapien
cattggataaaaagtgtacacatgt

SEQ ID NO: 5401795 - DNA, 25 bp, Homo sapien
aatatgccagagaactttccctctc

SEQ ID NO: 5401796 - DNA, 25 bp, Homo sapien
tgtgtatctgtccatgttctgagta

SEQ ID NO: 5401797 - DNA, 25 bp, Homo sapien
tggcaaccaatacggtcacatttgg

SEQ ID NO: 5401798 - DNA, 25 bp, Homo sapien
catgatgctcggcctatctggagct

SEQ ID NO: 5401799 - DNA, 25 bp, Homo sapien
gataatgactaaatttgacacttgc

SEQ ID NO: 5401800 - DNA, 25 bp, Homo sapien
cagcttgtttggctgagcagaattc

SEQ ID NO: 5401801 - DNA, 25 bp, Homo sapien
caaccacgtacaaatagataatgac

SEQ ID NO: 5401802 - DNA, 25 bp, Homo sapien
tggtgatccccatcataagattgaa

SEQ ID NO: 5401803 - DNA, 25 bp, Homo sapien
gaatccaggttcagtaatcgtttcc

SEQ ID NO: 5401804 - DNA, 25 bp, Homo sapien
ccaagcttgagtatagaatccaggt

SEQ ID NO: 5401805 - DNA, 25 bp, Homo sapien
aggctgtaacctgggccaagcttga

SEQ ID NO: 5401806 - DNA, 25 bp, Homo sapien
tcatttgatttgaagaccccttgaa

SEQ ID NO: 5401807 - DNA, 25 bp, Homo sapien
catttgatttgaagaccccttgaag

SEQ ID NO: 5401808 - DNA, 25 bp, Homo sapien
ttcctagatatttctttggccgatg

SEQ ID NO: 5401809 - DNA, 25 bp, Homo sapien
gtgtgatgcacagctctttgccttc

SEQ ID NO: 5401810 - DNA, 25 bp, Homo sapien
gtttattctgtgtgatgcacagctc

SEQ ID NO: 5401811 - DNA, 25 bp, Homo sapien
tctgtgtgatgcacagctctttgcc

SEQ ID NO: 5401812 - DNA, 25 bp, Homo sapien
ctcctggtttattctgtgtgatgca

SEQ ID NO: 5401813 - DNA, 25 bp, Homo sapien
tactgcggcagtatgataatgagaa

SEQ ID NO: 5401814 - DNA, 25 bp, Homo sapien
tcctgacaaagccaggttactgcgg

SEQ ID NO: 5401815 - DNA, 25 bp, Homo sapien
ctacctcctgacaaagccaggttac

SEQ ID NO: 5401816 - DNA, 25 bp, Homo sapien
caaagccaggttactgcggcagtat

SEQ ID NO: 5401817 - DNA, 25 bp, Homo sapien
ggcctgagccacaaatttggtataa

SEQ ID NO: 5401818 - DNA, 25 bp, Homo sapien
gacatgtgttttaccaacctcatcc

SEQ ID NO: 5401819 - DNA, 25 bp, Homo sapien
tggtgaatcatggaactggtcattg

SEQ ID NO: 5401820 - DNA, 25 bp, Homo sapien
tttataccaactacacagtacttca

SEQ ID NO: 5401821 - DNA, 25 bp, Homo sapien
cagaagaagatgacagggtaacagg

SEQ ID NO: 5401822 - DNA, 25 bp, Homo sapien
gagccgtgcttcaggccttcatggg

SEQ ID NO: 5401823 - DNA, 25 bp, Homo sapien
cattctggaatccttacttccatcc

SEQ ID NO: 5401824 - DNA, 25 bp, Homo sapien
agagaggtcctttatatcctgagcc

SEQ ID NO: 5401825 - DNA, 25 bp, Homo sapien
tgcccaccatctatgtgaggaactc

SEQ ID NO: 5401826 - DNA, 25 bp, Homo sapien
cccaccatctatgtgaggaactctg

SEQ ID NO: 5401827 - DNA, 25 bp, Homo sapien
caccatctatgtgaggaactctgaa

SEQ ID NO: 5401828 - DNA, 25 bp, Homo sapien
cccttgcccaccatctatgtgagga

SEQ ID NO: 5401829 - DNA, 25 bp, Homo sapien
aaccacacaaccagattgtgaccat

SEQ ID NO: 5401830 - DNA, 25 bp, Homo sapien
aaaaccacacaaccagattgtgacc

SEQ ID NO: 5401831 - DNA, 25 bp, Homo sapien
aaaccacacaaccagattgtgacca

SEQ ID NO: 5401832 - DNA, 25 bp, Homo sapien
ctatgaacatgtatctggcaagaga

SEQ ID NO: 5401833 - DNA, 25 bp, Homo sapien
ctgcttctccggattttctttgctg

SEQ ID NO: 5401834 - DNA, 25 bp, Homo sapien
gagagctgcttctccggattttctt

SEQ ID NO: 5401835 - DNA, 25 bp, Homo sapien
gcaagagaaattcctgatctgtggt

SEQ ID NO: 5401836 - DNA, 25 bp, Homo sapien
ggtttcgcttgctggttggagctca

SEQ ID NO: 5401837 - DNA, 25 bp, Homo sapien
caggtttcgcttgctggttggagct

SEQ ID NO: 5401838 - DNA, 25 bp, Homo sapien
tcaggtttcgcttgctggttggagc

SEQ ID NO: 5401839 - DNA, 25 bp, Homo sapien
actcaggtttcgcttgctggttgga

SEQ ID NO: 5401840 - DNA, 25 bp, Homo sapien
caaatgtgcttcatcgggtagatca

SEQ ID NO: 5401841 - DNA, 25 bp, Homo sapien
gatatttggttcttcagtcctgtgt

SEQ ID NO: 5401842 - DNA, 25 bp, Homo sapien
tcatcgggtagatcaggaccagctc

SEQ ID NO: 5401843 - DNA, 25 bp, Homo sapien
gagggatttggtctcatcacagaaa

SEQ ID NO: 5401844 - DNA, 25 bp, Homo sapien
tggtaaagtggctaatatcttgtaa

SEQ ID NO: 5401845 - DNA, 25 bp, Homo sapien
taatatcttgtaaatcctcattctg

SEQ ID NO: 5401846 - DNA, 25 bp, Homo sapien
taggtgttcttgttgtggtaaagtg

SEQ ID NO: 5401847 - DNA, 25 bp, Homo sapien
gttgtggtaaagtggctaatatctt

SEQ ID NO: 5401848 - DNA, 25 bp, Homo sapien
gctgctgttgcaggtagtaatgaaa

SEQ ID NO: 5401849 - DNA, 25 bp, Homo sapien
caattattgacagttgggctcagtg

SEQ ID NO: 5401850 - DNA, 25 bp, Homo sapien
gaaacaactctagaacaccaggaat

SEQ ID NO: 5401851 - DNA, 25 bp, Homo sapien
caaagggttatatggcaaacaggca

SEQ ID NO: 5401852 - DNA, 25 bp, Homo sapien
tactaacgcaatatggaaccagatg

SEQ ID NO: 5401853 - DNA, 25 bp, Homo sapien
aaatgtggctatactctggctctgc

SEQ ID NO: 5401854 - DNA, 25 bp, Homo sapien
gataggtcagaagagcctcaaccga

SEQ ID NO: 5401855 - DNA, 25 bp, Homo sapien
tgaagacaaggtagcaacatgcccc

SEQ ID NO: 5401856 - DNA, 25 bp, Homo sapien
tgctggtgcactcagtagatggtaa

SEQ ID NO: 5401857 - DNA, 25 bp, Homo sapien
ccccgagaagggtcgtctaatcagt

SEQ ID NO: 5401858 - DNA, 25 bp, Homo sapien
tcatatagccctcagactgctggtg

SEQ ID NO: 5401859 - DNA, 25 bp, Homo sapien
tgtgcctctaaaacggtgccttcct

SEQ ID NO: 5401860 - DNA, 25 bp, Homo sapien
tgtgtggttccaagaggatcagctt

SEQ ID NO: 5401861 - DNA, 25 bp, Homo sapien
gatgattgctctcagttggccattg

SEQ ID NO: 5401862 - DNA, 25 bp, Homo sapien
ccaatgctagctacaggcgttgctg

SEQ ID NO: 5401863 - DNA, 25 bp, Homo sapien
tgttgtcgtggagaactggaccctt

SEQ ID NO: 5401864 - DNA, 25 bp, Homo sapien
tggtgaggccccgaaaagaaatgag

SEQ ID NO: 5401865 - DNA, 25 bp, Homo sapien
gatgaattgaatctcagctcccagc

SEQ ID NO: 5401866 - DNA, 25 bp, Homo sapien
gagatgtgacaggtagcgaagccca

SEQ ID NO: 5401867 - DNA, 25 bp, Homo sapien
gttcaaacagggagcgatcatcagg

SEQ ID NO: 5401868 - DNA, 25 bp, Homo sapien
ccattgactcctgtgctgagattga

SEQ ID NO: 5401869 - DNA, 25 bp, Homo sapien
ggaaacacatactctaattggacgt

SEQ ID NO: 5401870 - DNA, 25 bp, Homo sapien
tagagtgtcattgcctgctctgcag

SEQ ID NO: 5401871 - DNA, 25 bp, Homo sapien
gatggcaccagaaatactaacagca

SEQ ID NO: 5401872 - DNA, 25 bp, Homo sapien
cattaccagtgtgggctaggaagca

SEQ ID NO: 5401873 - DNA, 25 bp, Homo sapien
tccaaatgttcactcgagggtaagg

SEQ ID NO: 5401874 - DNA, 25 bp, Homo sapien
ggatttcttctagcacaccggtggt

SEQ ID NO: 5401875 - DNA, 25 bp, Homo sapien
tctgaagcgactgaaagcaggtcct

SEQ ID NO: 5401876 - DNA, 25 bp, Homo sapien
gacttttctacacaagctgctttga

SEQ ID NO: 5401877 - DNA, 25 bp, Homo sapien
aaccatacagacgagccgatgcggt

SEQ ID NO: 5401878 - DNA, 25 bp, Homo sapien
gacacatgctattaaaggttgctat

SEQ ID NO: 5401879 - DNA, 25 bp, Homo sapien
aatgctcagtgagtttgaagggccc

SEQ ID NO: 5401880 - DNA, 25 bp, Homo sapien
tcagaacttgcgttctgttaatggt

SEQ ID NO: 5401881 - DNA, 25 bp, Homo sapien
taatggtgccgaaataacaatgtga

SEQ ID NO: 5401882 - DNA, 25 bp, Homo sapien
gcgttctgttaatggtgccgaaata

SEQ ID NO: 5401883 - DNA, 25 bp, Homo sapien
gccgaaataacaatgtgaacctgag

SEQ ID NO: 5401884 - DNA, 25 bp, Homo sapien
tgttgtaaataacatcaatgcatct

SEQ ID NO: 5401885 - DNA, 25 bp, Homo sapien
tgtgattgtcccatcatggcccacc

SEQ ID NO: 5401886 - DNA, 25 bp, Homo sapien
gattgtcccatcatggcccacctgg

SEQ ID NO: 5401887 - DNA, 25 bp, Homo sapien
tttgctgagatgtcttcgaaggaat

SEQ ID NO: 5401888 - DNA, 25 bp, Homo sapien
actttgtattttacttgcaatttgg

SEQ ID NO: 5401889 - DNA, 25 bp, Homo sapien
atccatcaactttgtattttacttg

SEQ ID NO: 5401890 - DNA, 25 bp, Homo sapien
ttgtattttacttgcaatttggaag

SEQ ID NO: 5401891 - DNA, 25 bp, Homo sapien
tccatcaactttgtattttacttgc

SEQ ID NO: 5401892 - DNA, 25 bp, Homo sapien
ctgagaacagaaattggtgccttgc

SEQ ID NO: 5401893 - DNA, 25 bp, Homo sapien
cagtggcacaaaggtcactcaatcc

SEQ ID NO: 5401894 - DNA, 25 bp, Homo sapien
gcattagcatttctgaggaccatta

SEQ ID NO: 5401895 - DNA, 25 bp, Homo sapien
tacttctgcgctagagaacgatgct

SEQ ID NO: 5401896 - DNA, 25 bp, Homo sapien
gaaagattaaactgccacctgcggg

SEQ ID NO: 5401897 - DNA, 25 bp, Homo sapien
tacgtaatgggactagatggcccac

SEQ ID NO: 5401898 - DNA, 25 bp, Homo sapien
ggcagggcacttgatccattccaaa

SEQ ID NO: 5401899 - DNA, 25 bp, Homo sapien
cacttggcatcgtgtatcgaggcta

SEQ ID NO: 5401900 - DNA, 25 bp, Homo sapien
cagcaactctcacagcatagagctt

SEQ ID NO: 5401901 - DNA, 25 bp, Homo sapien
cagcatagagcttgctgcctgagtg

SEQ ID NO: 5401902 - DNA, 25 bp, Homo sapien
gagaaaacataacgtgggcctccag

SEQ ID NO: 5401903 - DNA, 25 bp, Homo sapien
tgcctgagtggtgcttaaaggaaaa

SEQ ID NO: 5401904 - DNA, 25 bp, Homo sapien
taaaagctaaggtacagtcactgga

SEQ ID NO: 5401905 - DNA, 25 bp, Homo sapien
taccaatcactagcactgagatggc

SEQ ID NO: 5401906 - DNA, 25 bp, Homo sapien
caacacctaccgaagtttgcaggca

SEQ ID NO: 5401907 - DNA, 25 bp, Homo sapien
tcacctttcagaacaagtccttggc

SEQ ID NO: 5401908 - DNA, 25 bp, Homo sapien
ttatagttgtacgaagtgaggccca

SEQ ID NO: 5401909 - DNA, 25 bp, Homo sapien
caaaaatacgagtggctgcatagcc

SEQ ID NO: 5401910 - DNA, 25 bp, Homo sapien
caccgaggaacttacatgaccacca

SEQ ID NO: 5401911 - DNA, 25 bp, Homo sapien
cagataaatccctgccaccgaggaa

SEQ ID NO: 5401912 - DNA, 25 bp, Homo sapien
gaaagagacattctggtcaggccca

SEQ ID NO: 5401913 - DNA, 25 bp, Homo sapien
cactttcaaaactcactaggatggg

SEQ ID NO: 5401914 - DNA, 25 bp, Homo sapien
aatctagggacctcaaatgcactga

SEQ ID NO: 5401915 - DNA, 25 bp, Homo sapien
taaagatttgccactgacttccatg

SEQ ID NO: 5401916 - DNA, 25 bp, Homo sapien
tggtggcacattctttagtaggtcc

SEQ ID NO: 5401917 - DNA, 25 bp, Homo sapien
ccactataattaagggtctaccaag

SEQ ID NO: 5401918 - DNA, 25 bp, Homo sapien
gctttaaccagttgggtagcgcaca

SEQ ID NO: 5401919 - DNA, 25 bp, Homo sapien
ctatcacttaaagtctggtggcaca

SEQ ID NO: 5401920 - DNA, 25 bp, Homo sapien
tcttgatacagaatcaaaagttact

SEQ ID NO: 5401921 - DNA, 25 bp, Homo sapien
tcagttgaacttaaaatagagtccc

SEQ ID NO: 5401922 - DNA, 25 bp, Homo sapien
tgcttttataaagtccacgataaca

SEQ ID NO: 5401923 - DNA, 25 bp, Homo sapien
aagacagttatgactgtatgaaaat

SEQ ID NO: 5401924 - DNA, 25 bp, Homo sapien
ccttcactcagttcgctgccagaag

SEQ ID NO: 5401925 - DNA, 25 bp, Homo sapien
aagggttcttctgcgcttttccaat

SEQ ID NO: 5401926 - DNA, 25 bp, Homo sapien
catccagttgctccaaaagggttct

SEQ ID NO: 5401927 - DNA, 25 bp, Homo sapien
cgctgccagaagtatcccaattacc

SEQ ID NO: 5401928 - DNA, 25 bp, Homo sapien
tagttgacatcagtactcagaggtt

SEQ ID NO: 5401929 - DNA, 25 bp, Homo sapien
ttatagttgacatcagtactcagag

SEQ ID NO: 5401930 - DNA, 25 bp, Homo sapien
tactcagaggtttacgggctgagcc

SEQ ID NO: 5401931 - DNA, 25 bp, Homo sapien
cgggctgagcctttgaaaaaagaat

SEQ ID NO: 5401932 - DNA, 25 bp, Homo sapien
gtccagtggcacttcttagtgacca

SEQ ID NO: 5401933 - DNA, 25 bp, Homo sapien
taaaatctaggatcatgcatgacca

SEQ ID NO: 5401934 - DNA, 25 bp, Homo sapien
agtgaccatatcctttcttagtgag

SEQ ID NO: 5401935 - DNA, 25 bp, Homo sapien
ttttcttcaatggtagcacacctgg

SEQ ID NO: 5401936 - DNA, 25 bp, Homo sapien
gctcagcatcggattctggagagtc

SEQ ID NO: 5401937 - DNA, 25 bp, Homo sapien
ttttatccttctctcgctcagcatc

SEQ ID NO: 5401938 - DNA, 25 bp, Homo sapien
cagtctttttcttaggcgatttgtg

SEQ ID NO: 5401939 - DNA, 25 bp, Homo sapien
tccagtctttttcttaggcgatttg

SEQ ID NO: 5401940 - DNA, 25 bp, Homo sapien
gataaaataccactcatgagactta

SEQ ID NO: 5401941 - DNA, 25 bp, Homo sapien
cacataaggcagacagctgtattaa

SEQ ID NO: 5401942 - DNA, 25 bp, Homo sapien
aacaggttatgtgctcttagagaga

SEQ ID NO: 5401943 - DNA, 25 bp, Homo sapien
gatactacatttctcaccaactcaa

SEQ ID NO: 5401944 - DNA, 25 bp, Homo sapien
tcttatgcttttttgactttttata

SEQ ID NO: 5401945 - DNA, 25 bp, Homo sapien
gatttatgtctcctcttcttacttt

SEQ ID NO: 5401946 - DNA, 25 bp, Homo sapien
tacttttcttcttatgcttttttga

SEQ ID NO: 5401947 - DNA, 25 bp, Homo sapien
agatttatgtctcctcttcttactt

SEQ ID NO: 5401948 - DNA, 25 bp, Homo sapien
gaacgagactctgatcgctgtcttt

SEQ ID NO: 5401949 - DNA, 25 bp, Homo sapien
cgagactctgatcgctgtctttttt

SEQ ID NO: 5401950 - DNA, 25 bp, Homo sapien
cagaacgagactctgatcgctgtct

SEQ ID NO: 5401951 - DNA, 25 bp, Homo sapien
aacgagactctgatcgctgtctttt

SEQ ID NO: 5401952 - DNA, 25 bp, Homo sapien
gtttcttgttctttgaatgatgatg

SEQ ID NO: 5401953 - DNA, 25 bp, Homo sapien
gatcgagagcgggaacgtttcctat

SEQ ID NO: 5401954 - DNA, 25 bp, Homo sapien
tgttctttgaatgatgatgctgaca

SEQ ID NO: 5401955 - DNA, 25 bp, Homo sapien
gagcgggaacgtttcctatgatgtt

SEQ ID NO: 5401956 - DNA, 25 bp, Homo sapien
tcaatccatgtggctgccaaactgc

SEQ ID NO: 5401957 - DNA, 25 bp, Homo sapien
caatccatgtggctgccaaactgct

SEQ ID NO: 5401958 - DNA, 25 bp, Homo sapien
tggctcttttacaaatctctcacgg

SEQ ID NO: 5401959 - DNA, 25 bp, Homo sapien
ggctcttttacaaatctctcacgga

SEQ ID NO: 5401960 - DNA, 25 bp, Homo sapien
tgctggctcttttacaaatctctca

SEQ ID NO: 5401961 - DNA, 25 bp, Homo sapien
aatgctggctcttttacaaatctct

SEQ ID NO: 5401962 - DNA, 25 bp, Homo sapien
catccaattctatcggaggagcagc

SEQ ID NO: 5401963 - DNA, 25 bp, Homo sapien
cagcatccaattctatcggaggagc

SEQ ID NO: 5401964 - DNA, 25 bp, Homo sapien
aattctatcggaggagcagcttgtt

SEQ ID NO: 5401965 - DNA, 25 bp, Homo sapien
cccagacagcatccaattctatcgg

SEQ ID NO: 5401966 - DNA, 25 bp, Homo sapien
ctctttcacgttcacgggcttctgc

SEQ ID NO: 5401967 - DNA, 25 bp, Homo sapien
tttctctttcacgttcacgggcttc

SEQ ID NO: 5401968 - DNA, 25 bp, Homo sapien
ttctctttcacgttcacgggcttct

SEQ ID NO: 5401969 - DNA, 25 bp, Homo sapien
tctctttcacgttcacgggcttctg

SEQ ID NO: 5401970 - DNA, 25 bp, Homo sapien
ttttagttgaactgattatcgccac

SEQ ID NO: 5401971 - DNA, 25 bp, Homo sapien
tagtgtttacttcaactacaaatcc

SEQ ID NO: 5401972 - DNA, 25 bp, Homo sapien
actgattatcgccacaaaatcttca

SEQ ID NO: 5401973 - DNA, 25 bp, Homo sapien
gcatctaatgtagttgatcttttag

SEQ ID NO: 5401974 - DNA, 25 bp, Homo sapien
taagatcctcaacataaaacttgaa

SEQ ID NO: 5401975 - DNA, 25 bp, Homo sapien
tctcgtcatgataacgtgctttaag

SEQ ID NO: 5401976 - DNA, 25 bp, Homo sapien
cttgaaaagatcaagtgcagttgat

SEQ ID NO: 5401977 - DNA, 25 bp, Homo sapien
tttattatcttcttctcgtcatgat

SEQ ID NO: 5401978 - DNA, 25 bp, Homo sapien
caggctgaccaagcatattagtgaa

SEQ ID NO: 5401979 - DNA, 25 bp, Homo sapien
tggatacaattccatccaagatgac

SEQ ID NO: 5401980 - DNA, 25 bp, Homo sapien
acatagaatgcagttgtccatgttc

SEQ ID NO: 5401981 - DNA, 25 bp, Homo sapien
tctaatatcagaactaatagttgga

SEQ ID NO: 5401982 - DNA, 25 bp, Homo sapien
gatgttgtttaatgagactcaccct

SEQ ID NO: 5401983 - DNA, 25 bp, Homo sapien
catattgttaggtcccatttccaga

SEQ ID NO: 5401984 - DNA, 25 bp, Homo sapien
tgagcaccactgtcttagatccaaa

SEQ ID NO: 5401985 - DNA, 25 bp, Homo sapien
tgtttgagccctgtacattgcagga

SEQ ID NO: 5401986 - DNA, 25 bp, Homo sapien
ggaaccgtaacagccttcacatcaa

SEQ ID NO: 5401987 - DNA, 25 bp, Homo sapien
agatcatagtttccttgtcacagac

SEQ ID NO: 5401988 - DNA, 25 bp, Homo sapien
tggcttctgagacactatacattcc

SEQ ID NO: 5401989 - DNA, 25 bp, Homo sapien
gtaatcagaaactatgccagacaca

SEQ ID NO: 5401990 - DNA, 25 bp, Homo sapien
ctaaagcccgaatgtgttcttcaaa

SEQ ID NO: 5401991 - DNA, 25 bp, Homo sapien
gattccctattttttcgctgtcgtc

SEQ ID NO: 5401992 - DNA, 25 bp, Homo sapien
tttcgctgtcgtctcctttctctca

SEQ ID NO: 5401993 - DNA, 25 bp, Homo sapien
agcaaattaatgcatcttctttgtc

SEQ ID NO: 5401994 - DNA, 25 bp, Homo sapien
caagttacatacaaacggctaagca

SEQ ID NO: 5401995 - DNA, 25 bp, Homo sapien
tcagaaagagtacttagggaagcct

SEQ ID NO: 5401996 - DNA, 25 bp, Homo sapien
gctgctggaggacgctgtttaaaac

SEQ ID NO: 5401997 - DNA, 25 bp, Homo sapien
taaaacaaaggacgtgcatatggca

SEQ ID NO: 5401998 - DNA, 25 bp, Homo sapien
tggtagagtatgttacattagccat

SEQ ID NO: 5401999 - DNA, 25 bp, Homo sapien
cagaccaagtggtagagtatgttac

SEQ ID NO: 5402000 - DNA, 25 bp, Homo sapien
gatactgctgggcttcagaccaagt

SEQ ID NO: 5402001 - DNA, 25 bp, Homo sapien
aaaagttggattatccatcagatac

SEQ ID NO: 5402002 - DNA, 25 bp, Homo sapien
cccaatttctctttcgcaactgctt

SEQ ID NO: 5402003 - DNA, 25 bp, Homo sapien
tctctttcgcaactgctttgcttgt

SEQ ID NO: 5402004 - DNA, 25 bp, Homo sapien
atttctctttcgcaactgctttgct

SEQ ID NO: 5402005 - DNA, 25 bp, Homo sapien
caatttctctttcgcaactgctttg

SEQ ID NO: 5402006 - DNA, 25 bp, Homo sapien
gctctttcctaagcgcttggctttg

SEQ ID NO: 5402007 - DNA, 25 bp, Homo sapien
taaattgcaattagtgacggcttct

SEQ ID NO: 5402008 - DNA, 25 bp, Homo sapien
tattctaacggatgaccaaattgca

SEQ ID NO: 5402009 - DNA, 25 bp, Homo sapien
tgcaaaggttaagtcaaacttcaag

SEQ ID NO: 5402010 - DNA, 25 bp, Homo sapien
tcttcatagatttcaagacgatcac

SEQ ID NO: 5402011 - DNA, 25 bp, Homo sapien
tctctccaaacatttgctctgcttt

SEQ ID NO: 5402012 - DNA, 25 bp, Homo sapien
aagacgatcacgttctgatattgca

SEQ ID NO: 5402013 - DNA, 25 bp, Homo sapien
tcacgttctgatattgcattccaaa

SEQ ID NO: 5402014 - DNA, 25 bp, Homo sapien
acgtctggcctccaacttgattatt

SEQ ID NO: 5402015 - DNA, 25 bp, Homo sapien
tctggactttataggcattaaaggc

SEQ ID NO: 5402016 - DNA, 25 bp, Homo sapien
tagcctctttgtactttgatcttgc

SEQ ID NO: 5402017 - DNA, 25 bp, Homo sapien
ttctgtctggactttataggcatta

SEQ ID NO: 5402018 - DNA, 25 bp, Homo sapien
tcaagaaaacgctgaaaggattcct

SEQ ID NO: 5402019 - DNA, 25 bp, Homo sapien
gcctgctcccatgaagcattcgatg

SEQ ID NO: 5402020 - DNA, 25 bp, Homo sapien
ctgtatcgtggatcattaataatca

SEQ ID NO: 5402021 - DNA, 25 bp, Homo sapien
gtatcgtggatcattaataatcatt

SEQ ID NO: 5402022 - DNA, 25 bp, Homo sapien
cccatgaagcattcgatggtacccg

SEQ ID NO: 5402023 - DNA, 25 bp, Homo sapien
tctttaaaagcttgctttgcctctt

SEQ ID NO: 5402024 - DNA, 25 bp, Homo sapien
ttctttaaaagcttgctttgcctct

SEQ ID NO: 5402025 - DNA, 25 bp, Homo sapien
cacaaaccgtgaactctgacagata

SEQ ID NO: 5402026 - DNA, 25 bp, Homo sapien
gactacagggtatgcaagtacacac

SEQ ID NO: 5402027 - DNA, 25 bp, Homo sapien
tatctattgatagaggagcacttcc

SEQ ID NO: 5402028 - DNA, 25 bp, Homo sapien
ggtgaactattcaggccacccttaa

SEQ ID NO: 5402029 - DNA, 25 bp, Homo sapien
tagttactgtattctcattatctac

SEQ ID NO: 5402030 - DNA, 25 bp, Homo sapien
tgttcctcagttgaaatagttactg

SEQ ID NO: 5402031 - DNA, 25 bp, Homo sapien
tctacaacagtagcaacaatggaag

SEQ ID NO: 5402032 - DNA, 25 bp, Homo sapien
ctccagtattactggatacttccac

SEQ ID NO: 5402033 - DNA, 25 bp, Homo sapien
gccatggtgctcattgtggtcggaa

SEQ ID NO: 5402034 - DNA, 25 bp, Homo sapien
tggtcggaatttctgttgtagggac

SEQ ID NO: 5402035 - DNA, 25 bp, Homo sapien
agaagtggaagcattagcattggct

SEQ ID NO: 5402036 - DNA, 25 bp, Homo sapien
ggaagcattagcattggctgcagct

SEQ ID NO: 5402037 - DNA, 25 bp, Homo sapien
ctgctttcttcagctttgatcattg

SEQ ID NO: 5402038 - DNA, 25 bp, Homo sapien
cttccagcaacaatggtattctggt

SEQ ID NO: 5402039 - DNA, 25 bp, Homo sapien
ttccagcaacaatggtattctggta

SEQ ID NO: 5402040 - DNA, 25 bp, Homo sapien
ttgtaataagacttccagcaacaat

SEQ ID NO: 5402041 - DNA, 25 bp, Homo sapien
ccagcaacaatggtattctggtatc

SEQ ID NO: 5402042 - DNA, 25 bp, Homo sapien
caagttctttaggtttggcccagcg

SEQ ID NO: 5402043 - DNA, 25 bp, Homo sapien
tggcccagcgagattcttttgtttg

SEQ ID NO: 5402044 - DNA, 25 bp, Homo sapien
aatctgatttgtattccttccaggg

SEQ ID NO: 5402045 - DNA, 25 bp, Homo sapien
tgagaattataatagtaaggctttc

SEQ ID NO: 5402046 - DNA, 25 bp, Homo sapien
agtgttgtagtagtaagtccttcca

SEQ ID NO: 5402047 - DNA, 25 bp, Homo sapien
tgttgtagtagtaagtccttccatc

SEQ ID NO: 5402048 - DNA, 25 bp, Homo sapien
gtgttgtagtagtaagtccttccat

SEQ ID NO: 5402049 - DNA, 25 bp, Homo sapien
gctgtttactcatgcacaactgcta

SEQ ID NO: 5402050 - DNA, 25 bp, Homo sapien
tcctagctcctaagggagtgccatt

SEQ ID NO: 5402051 - DNA, 25 bp, Homo sapien
acaacggaggtcacagacactatgg

SEQ ID NO: 5402052 - DNA, 25 bp, Homo sapien
acaactgctaccctgacaacggagg

SEQ ID NO: 5402053 - DNA, 25 bp, Homo sapien
aagcaggtacttatagtagaataat

SEQ ID NO: 5402054 - DNA, 25 bp, Homo sapien
cagataagatattaatggtggttcc

SEQ ID NO: 5402055 - DNA, 25 bp, Homo sapien
ccctcatggtcaaaaaattaaggat

SEQ ID NO: 5402056 - DNA, 25 bp, Homo sapien
tgagcctgcattacttaaataagaa

SEQ ID NO: 5402057 - DNA, 25 bp, Homo sapien
tgtccaaatgaggtctaacacatac

SEQ ID NO: 5402058 - DNA, 25 bp, Homo sapien
actcctcataatagggctgctactg

SEQ ID NO: 5402059 - DNA, 25 bp, Homo sapien
tagggctgctactgtccaaatgagg

SEQ ID NO: 5402060 - DNA, 25 bp, Homo sapien
cctgcttttactcctcataataggg

SEQ ID NO: 5402061 - DNA, 25 bp, Homo sapien
tgctacatccatactatttactcct

SEQ ID NO: 5402062 - DNA, 25 bp, Homo sapien
ctgctacatccatactatttactcc

SEQ ID NO: 5402063 - DNA, 25 bp, Homo sapien
ctacatccatactatttactcctgg

SEQ ID NO: 5402064 - DNA, 25 bp, Homo sapien
gctacatccatactatttactcctg

SEQ ID NO: 5402065 - DNA, 25 bp, Homo sapien
cctcataaagcacagtgaaatcagt

SEQ ID NO: 5402066 - DNA, 25 bp, Homo sapien
tcctcataaagcacagtgaaatcag

SEQ ID NO: 5402067 - DNA, 25 bp, Homo sapien
gttcctcataaagcacagtgaaatc

SEQ ID NO: 5402068 - DNA, 25 bp, Homo sapien
taagttcctcataaagcacagtgaa

SEQ ID NO: 5402069 - DNA, 25 bp, Homo sapien
ctatgtataatcctcaagcctctga

SEQ ID NO: 5402070 - DNA, 25 bp, Homo sapien
aagagatcagcaaccgagactacgg

SEQ ID NO: 5402071 - DNA, 25 bp, Homo sapien
tggtcaccaagtgtacacaaggtcc

SEQ ID NO: 5402072 - DNA, 25 bp, Homo sapien
gcaaaacctgccctacatgaacatg

SEQ ID NO: 5402073 - DNA, 25 bp, Homo sapien
ggaccccacaggaaatgtttacata

SEQ ID NO: 5402074 - DNA, 25 bp, Homo sapien
tattatatgcaatgtgttactttcc

SEQ ID NO: 5402075 - DNA, 25 bp, Homo sapien
attaacattattaagttagacagca

SEQ ID NO: 5402076 - DNA, 25 bp, Homo sapien
cattattaagttagacagcattgcc

SEQ ID NO: 5402077 - DNA, 25 bp, Homo sapien
ttacagtactacagaggcacttcaa

SEQ ID NO: 5402078 - DNA, 25 bp, Homo sapien
acagctaacatgattgcctataaaa

SEQ ID NO: 5402079 - DNA, 25 bp, Homo sapien
gctaacatgattgcctataaaatac

SEQ ID NO: 5402080 - DNA, 25 bp, Homo sapien
tacagaggcacttcaacagctaaca

SEQ ID NO: 5402081 - DNA, 25 bp, Homo sapien
cattactgacgacatcattccaggc

SEQ ID NO: 5402082 - DNA, 25 bp, Homo sapien
ggcattactgacgacatcattccag

SEQ ID NO: 5402083 - DNA, 25 bp, Homo sapien
gcattactgacgacatcattccagg

SEQ ID NO: 5402084 - DNA, 25 bp, Homo sapien
tgtgcgccaccatgtcccgctaatt

SEQ ID NO: 5402085 - DNA, 25 bp, Homo sapien
gtgtgcgccaccatgtcccgctaat

SEQ ID NO: 5402086 - DNA, 25 bp, Homo sapien
tgttataggcactgaaagtactgga

SEQ ID NO: 5402087 - DNA, 25 bp, Homo sapien
ggagtgtaaagacatgcagccttga

SEQ ID NO: 5402088 - DNA, 25 bp, Homo sapien
taatataatcactcaagacaccgtg

SEQ ID NO: 5402089 - DNA, 25 bp, Homo sapien
caggagggtaagaagaacagcctaa

SEQ ID NO: 5402090 - DNA, 25 bp, Homo sapien
tgttgaataacctaggcatgggaga

SEQ ID NO: 5402091 - DNA, 25 bp, Homo sapien
aaaactgttgaataacctaggcatg

SEQ ID NO: 5402092 - DNA, 25 bp, Homo sapien
catgggagagtgacgacttgggctc

SEQ ID NO: 5402093 - DNA, 25 bp, Homo sapien
acgacttgggctcatgtggtagcag

SEQ ID NO: 5402094 - DNA, 25 bp, Homo sapien
cttgattggcccaatggaaacagaa

SEQ ID NO: 5402095 - DNA, 25 bp, Homo sapien
ttgattggcccaatggaaacagaag

SEQ ID NO: 5402096 - DNA, 25 bp, Homo sapien
tccatgaggtacaggaggcatattc

SEQ ID NO: 5402097 - DNA, 25 bp, Homo sapien
tattcgctctctgacccatagggtg

SEQ ID NO: 5402098 - DNA, 25 bp, Homo sapien
tcatctgcggcatcattccatgagg

SEQ ID NO: 5402099 - DNA, 25 bp, Homo sapien
ttgtcccattggtggccctcccata

SEQ ID NO: 5402100 - DNA, 25 bp, Homo sapien
gcagaggcttgagccggacaatctc

SEQ ID NO: 5402101 - DNA, 25 bp, Homo sapien
aggaagccgtcagcagagacccaag

SEQ ID NO: 5402102 - DNA, 25 bp, Homo sapien
agcagaggcttgagccggacaatct

SEQ ID NO: 5402103 - DNA, 25 bp, Homo sapien
cagagacccaagagccggagcagag

SEQ ID NO: 5402104 - DNA, 25 bp, Homo sapien
catgaggcctccacgctcagctccc

SEQ ID NO: 5402105 - DNA, 25 bp, Homo sapien
gctcagctcccgtccccggcctcat

SEQ ID NO: 5402106 - DNA, 25 bp, Homo sapien
atgaggcctccacgctcagctcccg

SEQ ID NO: 5402107 - DNA, 25 bp, Homo sapien
aggcctccacgctcagctcccgtcc

SEQ ID NO: 5402108 - DNA, 25 bp, Homo sapien
gggcttccccgctgtccaatcagaa

SEQ ID NO: 5402109 - DNA, 25 bp, Homo sapien
caacaagaagcgatctgagtggctg

SEQ ID NO: 5402110 - DNA, 25 bp, Homo sapien
tgccgctacacataccaacaagaag

SEQ ID NO: 5402111 - DNA, 25 bp, Homo sapien
aaaggttaaaggctgccctgcgcta

SEQ ID NO: 5402112 - DNA, 25 bp, Homo sapien
cgggtttcgttgtgtttcgcgccat

SEQ ID NO: 5402113 - DNA, 25 bp, Homo sapien
cttgctctccgtggtttacccctgg

SEQ ID NO: 5402114 - DNA, 25 bp, Homo sapien
gtggctcggccatcgtattcctcct

SEQ ID NO: 5402115 - DNA, 25 bp, Homo sapien
tcgcgccatgtcgtttgctgagagc

SEQ ID NO: 5402116 - DNA, 25 bp, Homo sapien
agaaagcgctcggtgctcccgccgg

SEQ ID NO: 5402117 - DNA, 25 bp, Homo sapien
cagaaagcgctcggtgctcccgccg

SEQ ID NO: 5402118 - DNA, 25 bp, Homo sapien
gaaagcgctcggtgctcccgccgga

SEQ ID NO: 5402119 - DNA, 25 bp, Homo sapien
aaagcgctcggtgctcccgccggac

SEQ ID NO: 5402120 - DNA, 25 bp, Homo sapien
tcgttaaaggtattgaagccgacgc

SEQ ID NO: 5402121 - DNA, 25 bp, Homo sapien
cgcaatggtatctttcccgcggccg

SEQ ID NO: 5402122 - DNA, 25 bp, Homo sapien
cgttctgcccgataagcgcaatggt

SEQ ID NO: 5402123 - DNA, 25 bp, Homo sapien
ggtcctctctattctctgctcgctg

SEQ ID NO: 5402124 - DNA, 25 bp, Homo sapien
ccatgatcaggagacgtatttttaa

SEQ ID NO: 5402125 - DNA, 25 bp, Homo sapien
gccttttctaagtggagcgtcctga

SEQ ID NO: 5402126 - DNA, 25 bp, Homo sapien
gttcaatggccttcatccacaaata

SEQ ID NO: 5402127 - DNA, 25 bp, Homo sapien
taaagatgtgctgtccaccaattcc

SEQ ID NO: 5402128 - DNA, 25 bp, Homo sapien
ggtatagtaacatgccgcacaggtc

SEQ ID NO: 5402129 - DNA, 25 bp, Homo sapien
aagtacgctcttgtgatgtacaaac

SEQ ID NO: 5402130 - DNA, 25 bp, Homo sapien
gcacaggtctgtagcattggaataa

SEQ ID NO: 5402131 - DNA, 25 bp, Homo sapien
tgttgtattacagtcgcgtgcagta

SEQ ID NO: 5402132 - DNA, 25 bp, Homo sapien
tatctgatcaagtttcccacgtttg

SEQ ID NO: 5402133 - DNA, 25 bp, Homo sapien
gatgttgccatgaaaccgtgggatt

SEQ ID NO: 5402134 - DNA, 25 bp, Homo sapien
catggagagaatgtcagcaacttag

SEQ ID NO: 5402135 - DNA, 25 bp, Homo sapien
taacctgtcacattcgtatatgcaa

SEQ ID NO: 5402136 - DNA, 25 bp, Homo sapien
aaaaagcacattgacctaagttgaa

SEQ ID NO: 5402137 - DNA, 25 bp, Homo sapien
tgtatgtgagaatgattgaactagt

SEQ ID NO: 5402138 - DNA, 25 bp, Homo sapien
aaaattgttacatctagacaactgt

SEQ ID NO: 5402139 - DNA, 25 bp, Homo sapien
ttagctagtgcaaacctagtacctg

SEQ ID NO: 5402140 - DNA, 25 bp, Homo sapien
caatcattttcagtctgattgtctt

SEQ ID NO: 5402141 - DNA, 25 bp, Homo sapien
ccaagtgtaatcttggtaactgcat

SEQ ID NO: 5402142 - DNA, 25 bp, Homo sapien
tcatcaatcattttcagtctgattg

SEQ ID NO: 5402143 - DNA, 25 bp, Homo sapien
tacccaagtgtaatcttggtaactg

SEQ ID NO: 5402144 - DNA, 25 bp, Homo sapien
gaaatggttgcttcgttgggcccag

SEQ ID NO: 5402145 - DNA, 25 bp, Homo sapien
tcagaaatggttgcttcgttgggcc

SEQ ID NO: 5402146 - DNA, 25 bp, Homo sapien
aatggttgcttcgttgggcccagta

SEQ ID NO: 5402147 - DNA, 25 bp, Homo sapien
ggttgcttcgttgggcccagtatct

SEQ ID NO: 5402148 - DNA, 25 bp, Homo sapien
cagctgttggcattcgaattgtgcc

SEQ ID NO: 5402149 - DNA, 25 bp, Homo sapien
caaatgaaggagtgatgacagtgcc

SEQ ID NO: 5402150 - DNA, 25 bp, Homo sapien
tcatggcaacatcgccctgctggtg

SEQ ID NO: 5402151 - DNA, 25 bp, Homo sapien
tgtgcctgaaaaggaggttctctgt

SEQ ID NO: 5402152 - DNA, 25 bp, Homo sapien
tcagaggttcctggacatgcaaagc

SEQ ID NO: 5402153 - DNA, 25 bp, Homo sapien
cagtgtcagctcagaggttcctgga

SEQ ID NO: 5402154 - DNA, 25 bp, Homo sapien
ggacatgcaaagctgctattaatac

SEQ ID NO: 5402155 - DNA, 25 bp, Homo sapien
cagctcagaggttcctggacatgca

SEQ ID NO: 5402156 - DNA, 25 bp, Homo sapien
ggcaacatctacctcctatgacatg

SEQ ID NO: 5402157 - DNA, 25 bp, Homo sapien
tctttttggagactgcagtacagga

SEQ ID NO: 5402158 - DNA, 25 bp, Homo sapien
gtctattccatagttgccacggcaa

SEQ ID NO: 5402159 - DNA, 25 bp, Homo sapien
aggtcatgttggtgggctgtttaaa

SEQ ID NO: 5402160 - DNA, 25 bp, Homo sapien
agagctaaaccactgatagtcctca

SEQ ID NO: 5402161 - DNA, 25 bp, Homo sapien
ctcacgctccttgccgtgcaagtgt

SEQ ID NO: 5402162 - DNA, 25 bp, Homo sapien
ctccgtattcatttaatgtcttcac

SEQ ID NO: 5402163 - DNA, 25 bp, Homo sapien
tctagagagctaaaccactgatagt

SEQ ID NO: 5402164 - DNA, 25 bp, Homo sapien
tcaagctaggagactgcttgtttct

SEQ ID NO: 5402165 - DNA, 25 bp, Homo sapien
caagctaggagactgcttgtttctt

SEQ ID NO: 5402166 - DNA, 25 bp, Homo sapien
aagctaggagactgcttgtttcttc

SEQ ID NO: 5402167 - DNA, 25 bp, Homo sapien
caaaccgcagcatagctaactgact

SEQ ID NO: 5402168 - DNA, 25 bp, Homo sapien
gcatagctaactgactaactcccaa

SEQ ID NO: 5402169 - DNA, 25 bp, Homo sapien
ccgcagcatagctaactgactaact

SEQ ID NO: 5402170 - DNA, 25 bp, Homo sapien
tcattcaaaccgcagcatagctaac

SEQ ID NO: 5402171 - DNA, 25 bp, Homo sapien
ctgctgtgtaaggattgtagctgcc

SEQ ID NO: 5402172 - DNA, 25 bp, Homo sapien
cttggacagtgcctcagacagtgcc

SEQ ID NO: 5402173 - DNA, 25 bp, Homo sapien
ttgttgttgaattaacagatctgta

SEQ ID NO: 5402174 - DNA, 25 bp, Homo sapien
cagatctgtatttcaaactttgtgg

SEQ ID NO: 5402175 - DNA, 25 bp, Homo sapien
gcctccaatgtggttgattctcttg

SEQ ID NO: 5402176 - DNA, 25 bp, Homo sapien
tacttatacatgtagatttgaataa

SEQ ID NO: 5402177 - DNA, 25 bp, Homo sapien
tcctgtcccttgcattattgctgtc

SEQ ID NO: 5402178 - DNA, 25 bp, Homo sapien
gatttgaataagttgttgatactat

SEQ ID NO: 5402179 - DNA, 25 bp, Homo sapien
taactctatacaacttcacaggtag

SEQ ID NO: 5402180 - DNA, 25 bp, Homo sapien
gcaagagtctttgctggcattttcc

SEQ ID NO: 5402181 - DNA, 25 bp, Homo sapien
tagtcccttgcccaatgcccatttt

SEQ ID NO: 5402182 - DNA, 25 bp, Homo sapien
caggggcttagtatagtcccttgcc

SEQ ID NO: 5402183 - DNA, 25 bp, Homo sapien
gactggtgccttcacgtggacagca

SEQ ID NO: 5402184 - DNA, 25 bp, Homo sapien
tcttaccaatacacagaggtgccag

SEQ ID NO: 5402185 - DNA, 25 bp, Homo sapien
tcagctcacttaataggcagttaca

SEQ ID NO: 5402186 - DNA, 25 bp, Homo sapien
cacagtctgctcgaagggtaaggaa

SEQ ID NO: 5402187 - DNA, 25 bp, Homo sapien
cagaatgaaggtggtgtgctcatac

SEQ ID NO: 5402188 - DNA, 25 bp, Homo sapien
tgtgttcaccagtggcaactctgcg

SEQ ID NO: 5402189 - DNA, 25 bp, Homo sapien
agttttggccaaagtactccatgta

SEQ ID NO: 5402190 - DNA, 25 bp, Homo sapien
tgtaccaccctctgcgtgtgtgctg

SEQ ID NO: 5402191 - DNA, 25 bp, Homo sapien
tagcctcatcccagattagagaagt

SEQ ID NO: 5402192 - DNA, 25 bp, Homo sapien
ctgtcccggtaaccactgtcatctg

SEQ ID NO: 5402193 - DNA, 25 bp, Homo sapien
tgtcttcctgctgtcccggtaacca

SEQ ID NO: 5402194 - DNA, 25 bp, Homo sapien
tcatcctgtttttaccccagtgcct

SEQ ID NO: 5402195 - DNA, 25 bp, Homo sapien
cccagtgcctgtggctgtcttcctg

SEQ ID NO: 5402196 - DNA, 25 bp, Homo sapien
attgcattgggagagtggaggagcc

SEQ ID NO: 5402197 - DNA, 25 bp, Homo sapien
attgggagagtggaggagcctgtaa

SEQ ID NO: 5402198 - DNA, 25 bp, Homo sapien
ttaattgcattgggagagtggagga

SEQ ID NO: 5402199 - DNA, 25 bp, Homo sapien
gcattgggagagtggaggagcctgt

SEQ ID NO: 5402200 - DNA, 25 bp, Homo sapien
tactgaggcacagatccacctttaa

SEQ ID NO: 5402201 - DNA, 25 bp, Homo sapien
taaaagttccttggagagtcctaga

SEQ ID NO: 5402202 - DNA, 25 bp, Homo sapien
ctttaacactccataccagtagtgg

SEQ ID NO: 5402203 - DNA, 25 bp, Homo sapien
tcctgaatggagaacctgatggaag

SEQ ID NO: 5402204 - DNA, 25 bp, Homo sapien
ccagggtaacagggtttgccaacag

SEQ ID NO: 5402205 - DNA, 25 bp, Homo sapien
ctgtcccagcttgaatcttactggg

SEQ ID NO: 5402206 - DNA, 25 bp, Homo sapien
tgctgtcccagcttgaatcttactg

SEQ ID NO: 5402207 - DNA, 25 bp, Homo sapien
gctgtcccagcttgaatcttactgg

SEQ ID NO: 5402208 - DNA, 25 bp, Homo sapien
tgtcccagcttgaatcttactgggg

SEQ ID NO: 5402209 - DNA, 25 bp, Homo sapien
gattatagtgcgtagccttctgcat

SEQ ID NO: 5402210 - DNA, 25 bp, Homo sapien
tggtaaaagattatagtgcgtagcc

SEQ ID NO: 5402211 - DNA, 25 bp, Homo sapien
ttgaatcagagcttccatatggtaa

SEQ ID NO: 5402212 - DNA, 25 bp, Homo sapien
tgaatcagagcttccatatggtaaa

SEQ ID NO: 5402213 - DNA, 25 bp, Homo sapien
tggatttgctaagcccttgatttgc

SEQ ID NO: 5402214 - DNA, 25 bp, Homo sapien
gcctgaacagtttgttgtccctttg

SEQ ID NO: 5402215 - DNA, 25 bp, Homo sapien
gtaggtaatgtcctgccttctcctc

SEQ ID NO: 5402216 - DNA, 25 bp, Homo sapien
tggtgcctgttgagtgctgtcctgg

SEQ ID NO: 5402217 - DNA, 25 bp, Homo sapien
gtgggagagggatgatgaaagggtt

SEQ ID NO: 5402218 - DNA, 25 bp, Homo sapien
gttggagtacatccaataacatcag

SEQ ID NO: 5402219 - DNA, 25 bp, Homo sapien
aagggttggagtacatccaataaca

SEQ ID NO: 5402220 - DNA, 25 bp, Homo sapien
tgaaagggttggagtacatccaata

SEQ ID NO: 5402221 - DNA, 25 bp, Homo sapien
taccgctaagcagtgtgggaccgga

SEQ ID NO: 5402222 - DNA, 25 bp, Homo sapien
aaggagggcctaagagccctgacca

SEQ ID NO: 5402223 - DNA, 25 bp, Homo sapien
gaggagcacagcgtggtgtgcctct

SEQ ID NO: 5402224 - DNA, 25 bp, Homo sapien
agcaggattcaccatgtgaggagca

SEQ ID NO: 5402225 - DNA, 25 bp, Homo sapien
gataaaatccatcttgtgtgtgtac

SEQ ID NO: 5402226 - DNA, 25 bp, Homo sapien
tgtcctgaaagtaaatctccctagg

SEQ ID NO: 5402227 - DNA, 25 bp, Homo sapien
tcactgtgtgtaggcttattcagac

SEQ ID NO: 5402228 - DNA, 25 bp, Homo sapien
tctccctaggattgagcaactaaat

SEQ ID NO: 5402229 - DNA, 25 bp, Homo sapien
ggatattcctgggtcatcactcttt

SEQ ID NO: 5402230 - DNA, 25 bp, Homo sapien
tgtttggatattcctgggtcatcac

SEQ ID NO: 5402231 - DNA, 25 bp, Homo sapien
tattcctgggtcatcactcttttca

SEQ ID NO: 5402232 - DNA, 25 bp, Homo sapien
tcatatgtttggatattcctgggtc

SEQ ID NO: 5402233 - DNA, 25 bp, Homo sapien
cagatgtgaggagtgctaaggcggc

SEQ ID NO: 5402234 - DNA, 25 bp, Homo sapien
ccataatttttcgttggctggctgg

SEQ ID NO: 5402235 - DNA, 25 bp, Homo sapien
gtgctaaggcggctgagagaaggta

SEQ ID NO: 5402236 - DNA, 25 bp, Homo sapien
cagtccataggataggccccataat

SEQ ID NO: 5402237 - DNA, 25 bp, Homo sapien
actgtttagcctgcatagtcatttc

SEQ ID NO: 5402238 - DNA, 25 bp, Homo sapien
ggaatccacgaatactggctttgat

SEQ ID NO: 5402239 - DNA, 25 bp, Homo sapien
tgttgggaatccacgaatactggct

SEQ ID NO: 5402240 - DNA, 25 bp, Homo sapien
ttgattccttctggacactgtttag

SEQ ID NO: 5402241 - DNA, 25 bp, Homo sapien
aagtcccaacccaaggcaagctaga

SEQ ID NO: 5402242 - DNA, 25 bp, Homo sapien
taataagaaccaattaggctgggcg

SEQ ID NO: 5402243 - DNA, 25 bp, Homo sapien
ccagtaggcaaaaggaggtcaatca

SEQ ID NO: 5402244 - DNA, 25 bp, Homo sapien
tactttttacagattcaggcctgaa

SEQ ID NO: 5402245 - DNA, 25 bp, Homo sapien
ctttgtcatttccggaagtgaattt

SEQ ID NO: 5402246 - DNA, 25 bp, Homo sapien
tgtcatttccggaagtgaattttct

SEQ ID NO: 5402247 - DNA, 25 bp, Homo sapien
aatatgattgcggatgtggactgca

SEQ ID NO: 5402248 - DNA, 25 bp, Homo sapien
ggactgcagctattcctagaaggag

SEQ ID NO: 5402249 - DNA, 25 bp, Homo sapien
cagatttggtcagctatgactggga

SEQ ID NO: 5402250 - DNA, 25 bp, Homo sapien
gacttggaggtgcaaaagggcttat

SEQ ID NO: 5402251 - DNA, 25 bp, Homo sapien
tccactcattaacgatatgtcaagc

SEQ ID NO: 5402252 - DNA, 25 bp, Homo sapien
caagcataaggcaggtcgaatgtac

SEQ ID NO: 5402253 - DNA, 25 bp, Homo sapien
aggctcccagcccaagactcttgtt

SEQ ID NO: 5402254 - DNA, 25 bp, Homo sapien
cacaccaacaaggaaggtacctgga

SEQ ID NO: 5402255 - DNA, 25 bp, Homo sapien
ttgactcaggcatctgttctttctg

SEQ ID NO: 5402256 - DNA, 25 bp, Homo sapien
gaggcttgtatcagggtttccttca

SEQ ID NO: 5402257 - DNA, 25 bp, Homo sapien
gccagtcttcttgaatcagagaggc

SEQ ID NO: 5402258 - DNA, 25 bp, Homo sapien
ggatgcttgactcaggcatctgttc

SEQ ID NO: 5402259 - DNA, 25 bp, Homo sapien
gtagtgaggaggagtatcgacaatt

SEQ ID NO: 5402260 - DNA, 25 bp, Homo sapien
aggatgctctaaaggaggcaaacag

SEQ ID NO: 5402261 - DNA, 25 bp, Homo sapien
cttgtttggatgagtataaggatgc

SEQ ID NO: 5402262 - DNA, 25 bp, Homo sapien
aatttctggtgatttgtcacctcgc

SEQ ID NO: 5402263 - DNA, 25 bp, Homo sapien
ccattctagtgcaggacatttggga

SEQ ID NO: 5402264 - DNA, 25 bp, Homo sapien
ggcagagatgagaagtgaaccactt

SEQ ID NO: 5402265 - DNA, 25 bp, Homo sapien
gggagcataccattctagtgcagga

SEQ ID NO: 5402266 - DNA, 25 bp, Homo sapien
gaaccacttcggattgactgaagtc

SEQ ID NO: 5402267 - DNA, 25 bp, Homo sapien
tagcttgggcagaagactggttacc

SEQ ID NO: 5402268 - DNA, 25 bp, Homo sapien
ctggttaccctgaggtgagttgtga

SEQ ID NO: 5402269 - DNA, 25 bp, Homo sapien
cagagatcagaggaatggtcacccc

SEQ ID NO: 5402270 - DNA, 25 bp, Homo sapien
gaatggtcacccctgggatgctctg

SEQ ID NO: 5402271 - DNA, 25 bp, Homo sapien
accaaaagagtaaaatctccactag

SEQ ID NO: 5402272 - DNA, 25 bp, Homo sapien
agtttcaggatctgaggaggcaatg

SEQ ID NO: 5402273 - DNA, 25 bp, Homo sapien
aagagtaaaatctccactagtttca

SEQ ID NO: 5402274 - DNA, 25 bp, Homo sapien
ctagtttcaggatctgaggaggcaa

SEQ ID NO: 5402275 - DNA, 25 bp, Homo sapien
ttctttgaatagctgctacattttc

SEQ ID NO: 5402276 - DNA, 25 bp, Homo sapien
ttttgttctatgaatcatgcaggtg

SEQ ID NO: 5402277 - DNA, 25 bp, Homo sapien
tttgttctatgaatcatgcaggtgt

SEQ ID NO: 5402278 - DNA, 25 bp, Homo sapien
attttgttctatgaatcatgcaggt

SEQ ID NO: 5402279 - DNA, 25 bp, Homo sapien
aaattccccggtttctctgattctg

SEQ ID NO: 5402280 - DNA, 25 bp, Homo sapien
ctgattctgttgataagacagaatc

SEQ ID NO: 5402281 - DNA, 25 bp, Homo sapien
gacagaatcacacaactccatctgg

SEQ ID NO: 5402282 - DNA, 25 bp, Homo sapien
cagaatcacacaactccatctggtc

SEQ ID NO: 5402283 - DNA, 25 bp, Homo sapien
gctccagatcttcgtctctataccc

SEQ ID NO: 5402284 - DNA, 25 bp, Homo sapien
cagatcttcgtctctataccctttc

SEQ ID NO: 5402285 - DNA, 25 bp, Homo sapien
gatcttcgtctctataccctttcat

SEQ ID NO: 5402286 - DNA, 25 bp, Homo sapien
tccagatcttcgtctctataccctt

SEQ ID NO: 5402287 - DNA, 25 bp, Homo sapien
ttcggtgtctccttgttatgcacca

SEQ ID NO: 5402288 - DNA, 25 bp, Homo sapien
tcggtgtctccttgttatgcaccat

SEQ ID NO: 5402289 - DNA, 25 bp, Homo sapien
ctcccaggaaccctagaatacatct

SEQ ID NO: 5402290 - DNA, 25 bp, Homo sapien
gaatacatcttgttagaatctcttg

SEQ ID NO: 5402291 - DNA, 25 bp, Homo sapien
ccaggaaccctagaatacatcttgt

SEQ ID NO: 5402292 - DNA, 25 bp, Homo sapien
gttagaatctcttggttcttccttc

SEQ ID NO: 5402293 - DNA, 25 bp, Homo sapien
tggaatgtcttaatgccaggtcttg

SEQ ID NO: 5402294 - DNA, 25 bp, Homo sapien
gaatgtcttaatgccaggtcttggt

SEQ ID NO: 5402295 - DNA, 25 bp, Homo sapien
tcttaatgccaggtcttggtatggg

SEQ ID NO: 5402296 - DNA, 25 bp, Homo sapien
tgccaggtcttggtatgggttcttc

SEQ ID NO: 5402297 - DNA, 25 bp, Homo sapien
catctaacataaaatcgaaggtgag

SEQ ID NO: 5402298 - DNA, 25 bp, Homo sapien
tcaacccctaaagaagtagtcactg

SEQ ID NO: 5402299 - DNA, 25 bp, Homo sapien
taattagtttcctgtcatccgccag

SEQ ID NO: 5402300 - DNA, 25 bp, Homo sapien
caacttacttgatcgtggatgaaac

SEQ ID NO: 5402301 - DNA, 25 bp, Homo sapien
ttctattccaccttttgacactggc

SEQ ID NO: 5402302 - DNA, 25 bp, Homo sapien
atcctttcagcaagtttactggccg

SEQ ID NO: 5402303 - DNA, 25 bp, Homo sapien
tcagcaagtttactggccgctttca

SEQ ID NO: 5402304 - DNA, 25 bp, Homo sapien
tactggccgctttcatgtcctcttt

SEQ ID NO: 5402305 - DNA, 25 bp, Homo sapien
gatatcgattaatgctcctccacta

SEQ ID NO: 5402306 - DNA, 25 bp, Homo sapien
tcttttagatttggacatgggtgag

SEQ ID NO: 5402307 - DNA, 25 bp, Homo sapien
ttatctgaggaaagccccagctttt

SEQ ID NO: 5402308 - DNA, 25 bp, Homo sapien
gattgtcttaaccagtggctgactg

SEQ ID NO: 5402309 - DNA, 25 bp, Homo sapien
caaaatgactcttgggtgagtcaaa

SEQ ID NO: 5402310 - DNA, 25 bp, Homo sapien
tgacactgctgtatatgctgacttc

SEQ ID NO: 5402311 - DNA, 25 bp, Homo sapien
tatatcttggaactgtgaatacaaa

SEQ ID NO: 5402312 - DNA, 25 bp, Homo sapien
tatagcagactctgcatttggagtc

SEQ ID NO: 5402313 - DNA, 25 bp, Homo sapien
cagatggtttttgtgtgagggtcct

SEQ ID NO: 5402314 - DNA, 25 bp, Homo sapien
agatggtttttgtgtgagggtcctt

SEQ ID NO: 5402315 - DNA, 25 bp, Homo sapien
gcagccaggtaatgagatcaaatca

SEQ ID NO: 5402316 - DNA, 25 bp, Homo sapien
ctctgtgataaaaacaccctcacca

SEQ ID NO: 5402317 - DNA, 25 bp, Homo sapien
gagatcaaatcattccccttaaact

SEQ ID NO: 5402318 - DNA, 25 bp, Homo sapien
gtgataaaaacaccctcaccatctg

SEQ ID NO: 5402319 - DNA, 25 bp, Homo sapien
gaaccagttggttgccctgattttg

SEQ ID NO: 5402320 - DNA, 25 bp, Homo sapien
gaatgtcttgcctgagggtctggtt

SEQ ID NO: 5402321 - DNA, 25 bp, Homo sapien
gagtttgcctgtagagtatccttaa

SEQ ID NO: 5402322 - DNA, 25 bp, Homo sapien
gagaacctagaactccaggaaccag

SEQ ID NO: 5402323 - DNA, 25 bp, Homo sapien
caaatcttctatagccttctttttc

SEQ ID NO: 5402324 - DNA, 25 bp, Homo sapien
tttctttatcctctcctccactgtt

SEQ ID NO: 5402325 - DNA, 25 bp, Homo sapien
ctttatcctctcctccactgttcat

SEQ ID NO: 5402326 - DNA, 25 bp, Homo sapien
tttttctttatcctctcctccactg

SEQ ID NO: 5402327 - DNA, 25 bp, Homo sapien
tactcggtggatgcagggcgtttct

SEQ ID NO: 5402328 - DNA, 25 bp, Homo sapien
cacacaaagaaaaccgagtaagtct

SEQ ID NO: 5402329 - DNA, 25 bp, Homo sapien
ccgagtaagtcttgtcaaagaagta

SEQ ID NO: 5402330 - DNA, 25 bp, Homo sapien
ggctcaaatcccatgcaaaccatct

SEQ ID NO: 5402331 - DNA, 25 bp, Homo sapien
ttttccttgaccatagagttggcca

SEQ ID NO: 5402332 - DNA, 25 bp, Homo sapien
caacacaattgggattattaaaact

SEQ ID NO: 5402333 - DNA, 25 bp, Homo sapien
gactatgatgctttggatatagcca

SEQ ID NO: 5402334 - DNA, 25 bp, Homo sapien
caggctgtggaaaagttctatgaca

SEQ ID NO: 5402335 - DNA, 25 bp, Homo sapien
ttaagggctggtagaagtggcatcc

SEQ ID NO: 5402336 - DNA, 25 bp, Homo sapien
catcctcttgagtgcccaaatggag

SEQ ID NO: 5402337 - DNA, 25 bp, Homo sapien
gatgtcattaaccagacagagggag

SEQ ID NO: 5402338 - DNA, 25 bp, Homo sapien
gaaccaggaatattggcgaacatca

SEQ ID NO: 5402339 - DNA, 25 bp, Homo sapien
gaatcatcaggtagcccatgggagg

SEQ ID NO: 5402340 - DNA, 25 bp, Homo sapien
gagaaataacacatggtacagtagt

SEQ ID NO: 5402341 - DNA, 25 bp, Homo sapien
aaccactgaatttgctgccctggag

SEQ ID NO: 5402342 - DNA, 25 bp, Homo sapien
catgtgttgatagcagtgtctaagg

SEQ ID NO: 5402343 - DNA, 25 bp, Homo sapien
cgtatttggaattaggtatgagaga

SEQ ID NO: 5402344 - DNA, 25 bp, Homo sapien
tgcatccgtatttggaattaggtat

SEQ ID NO: 5402345 - DNA, 25 bp, Homo sapien
tccgtatttggaattaggtatgaga

SEQ ID NO: 5402346 - DNA, 25 bp, Homo sapien
agtcttgcatccgtatttggaatta

SEQ ID NO: 5402347 - DNA, 25 bp, Homo sapien
ggcatacaactacatccatatccat

SEQ ID NO: 5402348 - DNA, 25 bp, Homo sapien
cctgagcaaaacacccttgccttgt

SEQ ID NO: 5402349 - DNA, 25 bp, Homo sapien
gctgtatgtttgtccttaagcggca

SEQ ID NO: 5402350 - DNA, 25 bp, Homo sapien
tccaccatggagaagctgtatgttt

SEQ ID NO: 5402351 - DNA, 25 bp, Homo sapien
tgtttcagaccagtcagggagcaga

SEQ ID NO: 5402352 - DNA, 25 bp, Homo sapien
tccagaagacgtcagaaagactgct

SEQ ID NO: 5402353 - DNA, 25 bp, Homo sapien
tatcttccaggtgctacaaaagcca

SEQ ID NO: 5402354 - DNA, 25 bp, Homo sapien
caatttggccttcccataagagtag

SEQ ID NO: 5402355 - DNA, 25 bp, Homo sapien
gaaatctgtactcaagaattaaagc

SEQ ID NO: 5402356 - DNA, 25 bp, Homo sapien
cactggaccttatgcttaaaaatgg

SEQ ID NO: 5402357 - DNA, 25 bp, Homo sapien
taataaaaggagcaattcaccagtc

SEQ ID NO: 5402358 - DNA, 25 bp, Homo sapien
tgaagccaaagcattattgggaaaa

SEQ ID NO: 5402359 - DNA, 25 bp, Homo sapien
ccacggtgtaataggcagtaagcca

SEQ ID NO: 5402360 - DNA, 25 bp, Homo sapien
taactcaagtcagacttgtggccca

SEQ ID NO: 5402361 - DNA, 25 bp, Homo sapien
caaaggaacagttggcataactcaa

SEQ ID NO: 5402362 - DNA, 25 bp, Homo sapien
tgcacgcagctctctttatgttggc

SEQ ID NO: 5402363 - DNA, 25 bp, Homo sapien
tcagataggagcactgattatttca

SEQ ID NO: 5402364 - DNA, 25 bp, Homo sapien
cagataggagcactgattatttcat

SEQ ID NO: 5402365 - DNA, 25 bp, Homo sapien
agataggagcactgattatttcatg

SEQ ID NO: 5402366 - DNA, 25 bp, Homo sapien
tacttgagagcgaaatggacactta

SEQ ID NO: 5402367 - DNA, 25 bp, Homo sapien
tccctttgaaacatgcaggcagcag

SEQ ID NO: 5402368 - DNA, 25 bp, Homo sapien
gcagcagattaactcggtgccacag

SEQ ID NO: 5402369 - DNA, 25 bp, Homo sapien
tgtcctgtcggttagcaaaagtaga

SEQ ID NO: 5402370 - DNA, 25 bp, Homo sapien
aacggtgtcacggatgtcaagagca

SEQ ID NO: 5402371 - DNA, 25 bp, Homo sapien
caagagcacttttgtggcgtaaacc

SEQ ID NO: 5402372 - DNA, 25 bp, Homo sapien
taaaccgtgcagtcacgagctacga

SEQ ID NO: 5402373 - DNA, 25 bp, Homo sapien
gacacggatttgtgagaccccatga

SEQ ID NO: 5402374 - DNA, 25 bp, Homo sapien
gtcactcttccggtcacaaggcgat

SEQ ID NO: 5402375 - DNA, 25 bp, Homo sapien
tcttccggtcacaaggcgatcagtg

SEQ ID NO: 5402376 - DNA, 25 bp, Homo sapien
ttaacaggtcactcttccggtcaca

SEQ ID NO: 5402377 - DNA, 25 bp, Homo sapien
aaggcgatcagtgccgctgggtctc

SEQ ID NO: 5402378 - DNA, 25 bp, Homo sapien
tgagttcagagtctgggcgctctcc

SEQ ID NO: 5402379 - DNA, 25 bp, Homo sapien
gagaagggccttcgcaccgtcggtc

SEQ ID NO: 5402380 - DNA, 25 bp, Homo sapien
agtaagtagcagcttccaaagttct

SEQ ID NO: 5402381 - DNA, 25 bp, Homo sapien
cggtctccccgcattccaagtaagt

SEQ ID NO: 5402382 - DNA, 25 bp, Homo sapien
ccaggcatgaggactttcagagggc

SEQ ID NO: 5402383 - DNA, 25 bp, Homo sapien
gactccgacaggtttgcttcgccca

SEQ ID NO: 5402384 - DNA, 25 bp, Homo sapien
ccgaaaggccgaagtcgagagaaat

SEQ ID NO: 5402385 - DNA, 25 bp, Homo sapien
gcttcgcccagtctctgatagtgag

SEQ ID NO: 5402386 - DNA, 25 bp, Homo sapien
tagggccccacgaccaccgcctcca

SEQ ID NO: 5402387 - DNA, 25 bp, Homo sapien
cagtagggccccacgaccaccgcct

SEQ ID NO: 5402388 - DNA, 25 bp, Homo sapien
tcagtagggccccacgaccaccgcc

SEQ ID NO: 5402389 - DNA, 25 bp, Homo sapien
ttatgtacaggctacgctcgtccgg

SEQ ID NO: 5402390 - DNA, 25 bp, Homo sapien
gaagatgccgaagaccacggtgagt

SEQ ID NO: 5402391 - DNA, 25 bp, Homo sapien
gaggaagttgatcatgccctcggac

SEQ ID NO: 5402392 - DNA, 25 bp, Homo sapien
gtgagagcacgcacatgaccgcgat

SEQ ID NO: 5402393 - DNA, 25 bp, Homo sapien
gagggctcctcgctctgctttcgaa

SEQ ID NO: 5402394 - DNA, 25 bp, Homo sapien
ggctgagcgctcactcgcagactag

SEQ ID NO: 5402395 - DNA, 25 bp, Homo sapien
taggctcttctaaagccgtccgctc

SEQ ID NO: 5402396 - DNA, 25 bp, Homo sapien
tgctttcgaaagtccctgggccgtg

SEQ ID NO: 5402397 - DNA, 25 bp, Homo sapien
aggcacttccgcctggggagcctca

SEQ ID NO: 5402398 - DNA, 25 bp, Homo sapien
cagaacatgaatatccttgttttag

SEQ ID NO: 5402399 - DNA, 25 bp, Homo sapien
tgtgctggacaccttaaaagaggac

SEQ ID NO: 5402400 - DNA, 25 bp, Homo sapien
tcaccatggcaaacctgactgaaat

SEQ ID NO: 5402401 - DNA, 25 bp, Homo sapien
tacaagaccagtgtagtatcagcat

SEQ ID NO: 5402402 - DNA, 25 bp, Homo sapien
ctacaagaccagtgtagtatcagca

SEQ ID NO: 5402403 - DNA, 25 bp, Homo sapien
gccaagaatggtaaccttgagggaa

SEQ ID NO: 5402404 - DNA, 25 bp, Homo sapien
ttttgccaagaatggtaaccttgag

SEQ ID NO: 5402405 - DNA, 25 bp, Homo sapien
cactttttgccaagaatggtaacct

SEQ ID NO: 5402406 - DNA, 25 bp, Homo sapien
gataaaagcctgggccctgatttct

SEQ ID NO: 5402407 - DNA, 25 bp, Homo sapien
ctcttcattatccaggtgctaccat

SEQ ID NO: 5402408 - DNA, 25 bp, Homo sapien
cctcttcattatccaggtgctacca

SEQ ID NO: 5402409 - DNA, 25 bp, Homo sapien
gaaacgaaagccagatcaaacttgg

SEQ ID NO: 5402410 - DNA, 25 bp, Homo sapien
tgagcagtgcagtcctgttacagtg

SEQ ID NO: 5402411 - DNA, 25 bp, Homo sapien
ttcctacaagcctgatcaccatggg

SEQ ID NO: 5402412 - DNA, 25 bp, Homo sapien
ccaaaagtcagatgagcactcacag

SEQ ID NO: 5402413 - DNA, 25 bp, Homo sapien
gataagcccatttctgttattgtgt

SEQ ID NO: 5402414 - DNA, 25 bp, Homo sapien
atctattggtatttcatcaagctca

SEQ ID NO: 5402415 - DNA, 25 bp, Homo sapien
actgataagcccatttctgttattg

SEQ ID NO: 5402416 - DNA, 25 bp, Homo sapien
taggtagtatctattggtatttcat

SEQ ID NO: 5402417 - DNA, 25 bp, Homo sapien
ggacctttcctgtgctccacataaa

SEQ ID NO: 5402418 - DNA, 25 bp, Homo sapien
cccttcagattccaactgggagcac

SEQ ID NO: 5402419 - DNA, 25 bp, Homo sapien
gcacacgtcatcagctgagctaata

SEQ ID NO: 5402420 - DNA, 25 bp, Homo sapien
tcagctgagctaatagctcacagca

SEQ ID NO: 5402421 - DNA, 25 bp, Homo sapien
gtggttcggcacatgccctctgagt

SEQ ID NO: 5402422 - DNA, 25 bp, Homo sapien
gctgaccttggaagatactctcttc

SEQ ID NO: 5402423 - DNA, 25 bp, Homo sapien
tgtggttcggcacatgccctctgag

SEQ ID NO: 5402424 - DNA, 25 bp, Homo sapien
tgagtattccaagctgaccttggaa

SEQ ID NO: 5402425 - DNA, 25 bp, Homo sapien
caagacgcagagatgaaaaagatcc

SEQ ID NO: 5402426 - DNA, 25 bp, Homo sapien
ccaggttgagatggtcaagacgcag

SEQ ID NO: 5402427 - DNA, 25 bp, Homo sapien
tcatcttgcgccatcctgagcatga

SEQ ID NO: 5402428 - DNA, 25 bp, Homo sapien
tcctgagcatgactgagaccaaaaa

SEQ ID NO: 5402429 - DNA, 25 bp, Homo sapien
cattagcattggtagaagtccaggt

SEQ ID NO: 5402430 - DNA, 25 bp, Homo sapien
cattggtagaagtccaggtaaggac

SEQ ID NO: 5402431 - DNA, 25 bp, Homo sapien
aagccattagcattggtagaagtcc

SEQ ID NO: 5402432 - DNA, 25 bp, Homo sapien
gttggaaagccattagcattggtag

SEQ ID NO: 5402433 - DNA, 25 bp, Homo sapien
gccctttacccagttccaatgttgc

SEQ ID NO: 5402434 - DNA, 25 bp, Homo sapien
catgtaacaagtctttagggagttc

SEQ ID NO: 5402435 - DNA, 25 bp, Homo sapien
gcagcattctggtcaaagccatgta

SEQ ID NO: 5402436 - DNA, 25 bp, Homo sapien
gctgagagacgcctcacaatcatgg

SEQ ID NO: 5402437 - DNA, 25 bp, Homo sapien
tgatggtacaatcttatgtctagaa

SEQ ID NO: 5402438 - DNA, 25 bp, Homo sapien
gccaatataacactgaatggagaaa

SEQ ID NO: 5402439 - DNA, 25 bp, Homo sapien
agaaggtcagattattcttgtttgc

SEQ ID NO: 5402440 - DNA, 25 bp, Homo sapien
tgagataaggatgctaattttcacc

SEQ ID NO: 5402441 - DNA, 25 bp, Homo sapien
ggccactggaaggatcaagaatttt

SEQ ID NO: 5402442 - DNA, 25 bp, Homo sapien
caaatgccaaaactggccactggaa

SEQ ID NO: 5402443 - DNA, 25 bp, Homo sapien
tttttctgaataagcatcagggact

SEQ ID NO: 5402444 - DNA, 25 bp, Homo sapien
aatttttctgaataagcatcaggga

SEQ ID NO: 5402445 - DNA, 25 bp, Homo sapien
tttgcagcagaggtgtcagactctg

SEQ ID NO: 5402446 - DNA, 25 bp, Homo sapien
ttaatctgaaatgtttgcagcagag

SEQ ID NO: 5402447 - DNA, 25 bp, Homo sapien
tgaaagccttccagattgttctttg

SEQ ID NO: 5402448 - DNA, 25 bp, Homo sapien
tccagattgttctttgtcagtgaca

SEQ ID NO: 5402449 - DNA, 25 bp, Homo sapien
tctgtgttcagaatgaggagatgtt

SEQ ID NO: 5402450 - DNA, 25 bp, Homo sapien
tgttggagggctggtcagacccata

SEQ ID NO: 5402451 - DNA, 25 bp, Homo sapien
gggctggtcagacccatatcagcca

SEQ ID NO: 5402452 - DNA, 25 bp, Homo sapien
gggatcgttcttcattcttcagtct

SEQ ID NO: 5402453 - DNA, 25 bp, Homo sapien
cattcagtttactccctttcaccat

SEQ ID NO: 5402454 - DNA, 25 bp, Homo sapien
ccattcagtttactccctttcacca

SEQ ID NO: 5402455 - DNA, 25 bp, Homo sapien
tcccattcagtttactccctttcac

SEQ ID NO: 5402456 - DNA, 25 bp, Homo sapien
ttcccattcagtttactccctttca

SEQ ID NO: 5402457 - DNA, 25 bp, Homo sapien
ctgttgtagtttaccagcttgttcc

SEQ ID NO: 5402458 - DNA, 25 bp, Homo sapien
gtttaccagcttgttcctctttgcc

SEQ ID NO: 5402459 - DNA, 25 bp, Homo sapien
ttgtagtttaccagcttgttcctct

SEQ ID NO: 5402460 - DNA, 25 bp, Homo sapien
ttaccagcttgttcctctttgccat

SEQ ID NO: 5402461 - DNA, 25 bp, Homo sapien
tgaatgagcgtatctatatgatgta

SEQ ID NO: 5402462 - DNA, 25 bp, Homo sapien
gatcgaatcttatgaatgagcgtat

SEQ ID NO: 5402463 - DNA, 25 bp, Homo sapien
ctaaaatgatcgaatcttatgaatg

SEQ ID NO: 5402464 - DNA, 25 bp, Homo sapien
attgcctcatttcaattgaattgaa

SEQ ID NO: 5402465 - DNA, 25 bp, Homo sapien
tcctttagagccttagacacagtct

SEQ ID NO: 5402466 - DNA, 25 bp, Homo sapien
gcaagcctgggctcttattatccct

SEQ ID NO: 5402467 - DNA, 25 bp, Homo sapien
tattatcccttccatgtgtgtcctt

SEQ ID NO: 5402468 - DNA, 25 bp, Homo sapien
gggtattgattccattttgctgcca

SEQ ID NO: 5402469 - DNA, 25 bp, Homo sapien
gccaagtcggccaaattccctaatg

SEQ ID NO: 5402470 - DNA, 25 bp, Homo sapien
tcctccaacaaaatggtgccaagtc

SEQ ID NO: 5402471 - DNA, 25 bp, Homo sapien
tgacacctgcacactgcaataattc

SEQ ID NO: 5402472 - DNA, 25 bp, Homo sapien
gacaaggttatagagaagtcctcca

SEQ ID NO: 5402473 - DNA, 25 bp, Homo sapien
gatcgagaactaagagaaatacaac

SEQ ID NO: 5402474 - DNA, 25 bp, Homo sapien
aatgataaacgtttcattggtaaca

SEQ ID NO: 5402475 - DNA, 25 bp, Homo sapien
aacaaaagtttgaggatcgagaact

SEQ ID NO: 5402476 - DNA, 25 bp, Homo sapien
tgaaagggtaatgataaacgtttca

SEQ ID NO: 5402477 - DNA, 25 bp, Homo sapien
cagcagaccgtccttttaaaacatc

SEQ ID NO: 5402478 - DNA, 25 bp, Homo sapien
gattgctgaattcgtcttagagcca

SEQ ID NO: 5402479 - DNA, 25 bp, Homo sapien
aaacatctaaatcccctctgctatg

SEQ ID NO: 5402480 - DNA, 25 bp, Homo sapien
tagtggattttccagcagaccgtcc

SEQ ID NO: 5402481 - DNA, 25 bp, Homo sapien
cattggtgaaatcatcatgtcaggt

SEQ ID NO: 5402482 - DNA, 25 bp, Homo sapien
tgccctaaggtcagaagccatgttc

SEQ ID NO: 5402483 - DNA, 25 bp, Homo sapien
gaacactcaaaggtgcttgtttttc

SEQ ID NO: 5402484 - DNA, 25 bp, Homo sapien
tggcccccgtgaacactcaaaggtg

SEQ ID NO: 5402485 - DNA, 25 bp, Homo sapien
gtgacaactccttcaacacctgtag

SEQ ID NO: 5402486 - DNA, 25 bp, Homo sapien
tccttcaacacctgtagcttcctgg

SEQ ID NO: 5402487 - DNA, 25 bp, Homo sapien
ctgagtacctgacaacgtagccttg

SEQ ID NO: 5402488 - DNA, 25 bp, Homo sapien
caacgtagccttgaaccgtgacaac

SEQ ID NO: 5402489 - DNA, 25 bp, Homo sapien
gacaaagtgaaagaaccactgcttg

SEQ ID NO: 5402490 - DNA, 25 bp, Homo sapien
ctatgcagaattgcttctgcctttc

SEQ ID NO: 5402491 - DNA, 25 bp, Homo sapien
gcagaattgcttctgcctttcccac

SEQ ID NO: 5402492 - DNA, 25 bp, Homo sapien
tgcagaattgcttctgcctttccca

SEQ ID NO: 5402493 - DNA, 25 bp, Homo sapien
tatgcagaattgcttctgcctttcc

SEQ ID NO: 5402494 - DNA, 25 bp, Homo sapien
gggatccaatattctatgttgttct

SEQ ID NO: 5402495 - DNA, 25 bp, Homo sapien
catcactcttctgggagggcagtcc

SEQ ID NO: 5402496 - DNA, 25 bp, Homo sapien
ttgttctatcatcgggctggcacac

SEQ ID NO: 5402497 - DNA, 25 bp, Homo sapien
tctgcaagcccacttgggatccaat

SEQ ID NO: 5402498 - DNA, 25 bp, Homo sapien
tggtccgtttatgaagtttggcagt

SEQ ID NO: 5402499 - DNA, 25 bp, Homo sapien
gtttatcatcctcacatgtttctcc

SEQ ID NO: 5402500 - DNA, 25 bp, Homo sapien
gatgatgtttatcatcctcacatgt

SEQ ID NO: 5402501 - DNA, 25 bp, Homo sapien
agtttggcagtgaacaccacctctg

SEQ ID NO: 5402502 - DNA, 25 bp, Homo sapien
gattaggtgatgcttttcatatggt

SEQ ID NO: 5402503 - DNA, 25 bp, Homo sapien
aaaactggcatgacttcatttagca

SEQ ID NO: 5402504 - DNA, 25 bp, Homo sapien
gatatctccatatttgacaatgtga

SEQ ID NO: 5402505 - DNA, 25 bp, Homo sapien
ttcatatggtctatgaaaaactggc

SEQ ID NO: 5402506 - DNA, 25 bp, Homo sapien
ctgatatagttgtaggaagaatggc

SEQ ID NO: 5402507 - DNA, 25 bp, Homo sapien
atatctgatatagttgtaggaagaa

SEQ ID NO: 5402508 - DNA, 25 bp, Homo sapien
tatactttaataagaatatctgata

SEQ ID NO: 5402509 - DNA, 25 bp, Homo sapien
atatagttgtaggaagaatggcatc

SEQ ID NO: 5402510 - DNA, 25 bp, Homo sapien
atttctattgagggcaaaatcccaa

SEQ ID NO: 5402511 - DNA, 25 bp, Homo sapien
tctattgagggcaaaatcccaagtt

SEQ ID NO: 5402512 - DNA, 25 bp, Homo sapien
tattgagggcaaaatcccaagttat

SEQ ID NO: 5402513 - DNA, 25 bp, Homo sapien
ttctattgagggcaaaatcccaagt

SEQ ID NO: 5402514 - DNA, 25 bp, Homo sapien
caatggtaccatatttctttcaggc

SEQ ID NO: 5402515 - DNA, 25 bp, Homo sapien
aatggtaccatatttctttcaggct

SEQ ID NO: 5402516 - DNA, 25 bp, Homo sapien
tcaatggtaccatatttctttcagg

SEQ ID NO: 5402517 - DNA, 25 bp, Homo sapien
ccaggtcagagagttaaagcgttca

SEQ ID NO: 5402518 - DNA, 25 bp, Homo sapien
ctgcaccctgtagagtgttcttagt

SEQ ID NO: 5402519 - DNA, 25 bp, Homo sapien
gagttaaagcgttcacttctacttc

SEQ ID NO: 5402520 - DNA, 25 bp, Homo sapien
gtcagagagttaaagcgttcacttc

SEQ ID NO: 5402521 - DNA, 25 bp, Homo sapien
ttttgtgttcttgctaaatgtaaaa

SEQ ID NO: 5402522 - DNA, 25 bp, Homo sapien
tttcatccctcgaacatttaacctg

SEQ ID NO: 5402523 - DNA, 25 bp, Homo sapien
tccctcgaacatttaacctgctgct

SEQ ID NO: 5402524 - DNA, 25 bp, Homo sapien
catccctcgaacatttaacctgctg

SEQ ID NO: 5402525 - DNA, 25 bp, Homo sapien
ccctcgaacatttaacctgctgctg

SEQ ID NO: 5402526 - DNA, 25 bp, Homo sapien
tacttctacgtcctgattgggttca

SEQ ID NO: 5402527 - DNA, 25 bp, Homo sapien
ttgagtcacccagttggcagcttcc

SEQ ID NO: 5402528 - DNA, 25 bp, Homo sapien
taactgcgtccgttggtgctatctc

SEQ ID NO: 5402529 - DNA, 25 bp, Homo sapien
gctttcctgagtggactctcgctaa

SEQ ID NO: 5402530 - DNA, 25 bp, Homo sapien
taagaggctccctggtgcattgggc

SEQ ID NO: 5402531 - DNA, 25 bp, Homo sapien
tactcttacagtgcgttcggtggca

SEQ ID NO: 5402532 - DNA, 25 bp, Homo sapien
tagatactgtaaccaacaagaggcc

SEQ ID NO: 5402533 - DNA, 25 bp, Homo sapien
aagtatcgcgggacttgcgcacatc

SEQ ID NO: 5402534 - DNA, 25 bp, Homo sapien
gctcggtgcgcaccgccccagcccg

SEQ ID NO: 5402535 - DNA, 25 bp, Homo sapien
agcgcgctcggtgcgcaccgcccca

SEQ ID NO: 5402536 - DNA, 25 bp, Homo sapien
ctggagcgcgctcggtgcgcaccgc

SEQ ID NO: 5402537 - DNA, 25 bp, Homo sapien
gcgctcggtgcgcaccgccccagcc

SEQ ID NO: 5402538 - DNA, 25 bp, Homo sapien
gcgggcgtttctactcgacccgaca

SEQ ID NO: 5402539 - DNA, 25 bp, Homo sapien
gtatagtgccccctttgcctcgctt

SEQ ID NO: 5402540 - DNA, 25 bp, Homo sapien
ttgggtgtcttcctcgacggttgcc

SEQ ID NO: 5402541 - DNA, 25 bp, Homo sapien
tcgacggttgccttcgtatagtgcc

SEQ ID NO: 5402542 - DNA, 25 bp, Homo sapien
ctctctgccccgtcttcccgaacac

SEQ ID NO: 5402543 - DNA, 25 bp, Homo sapien
tcatctctctgccccgtcttcccga

SEQ ID NO: 5402544 - DNA, 25 bp, Homo sapien
tctctctgccccgtcttcccgaaca

SEQ ID NO: 5402545 - DNA, 25 bp, Homo sapien
atctctctgccccgtcttcccgaac

SEQ ID NO: 5402546 - DNA, 25 bp, Homo sapien
tctggacagcgaaagctgcgcaagc

SEQ ID NO: 5402547 - DNA, 25 bp, Homo sapien
taatgggtatctccaggtgcagaga

SEQ ID NO: 5402548 - DNA, 25 bp, Homo sapien
caagccctggcgcatctaatgggta

SEQ ID NO: 5402549 - DNA, 25 bp, Homo sapien
gcactgaggctgctactctggacag

SEQ ID NO: 5402550 - DNA, 25 bp, Homo sapien
aaagggtgggagctttcttcaggca

SEQ ID NO: 5402551 - DNA, 25 bp, Homo sapien
cagtgagcaggcaaacatagatgct

SEQ ID NO: 5402552 - DNA, 25 bp, Homo sapien
cagaagaacggacagtgagcaggca

SEQ ID NO: 5402553 - DNA, 25 bp, Homo sapien
tcgaaagggtgggagctttcttcag

SEQ ID NO: 5402554 - DNA, 25 bp, Homo sapien
gggataattctccttgtattacacg

SEQ ID NO: 5402555 - DNA, 25 bp, Homo sapien
cttccgggataattctccttgtatt

SEQ ID NO: 5402556 - DNA, 25 bp, Homo sapien
gataattctccttgtattacacgca

SEQ ID NO: 5402557 - DNA, 25 bp, Homo sapien
ccgggataattctccttgtattaca

SEQ ID NO: 5402558 - DNA, 25 bp, Homo sapien
ccttttcctcaaagaatgacttttg

SEQ ID NO: 5402559 - DNA, 25 bp, Homo sapien
cttttcctcaaagaatgacttttgc

SEQ ID NO: 5402560 - DNA, 25 bp, Homo sapien
ctttccttttcctcaaagaatgact

SEQ ID NO: 5402561 - DNA, 25 bp, Homo sapien
tttcctcaaagaatgacttttgcat

SEQ ID NO: 5402562 - DNA, 25 bp, Homo sapien
tatcccattccagggcttaaggtac

SEQ ID NO: 5402563 - DNA, 25 bp, Homo sapien
gggcactgtgtctcggatccgcttt

SEQ ID NO: 5402564 - DNA, 25 bp, Homo sapien
taaaggaattatagggtactgctgg

SEQ ID NO: 5402565 - DNA, 25 bp, Homo sapien
tactgctggtatagattaattccag

SEQ ID NO: 5402566 - DNA, 25 bp, Homo sapien
gcttgttgacacattggtgaacgta

SEQ ID NO: 5402567 - DNA, 25 bp, Homo sapien
tgttgacacattggtgaacgtaatg

SEQ ID NO: 5402568 - DNA, 25 bp, Homo sapien
ttggtgaacgtaatgcatgtggtga

SEQ ID NO: 5402569 - DNA, 25 bp, Homo sapien
gacacattggtgaacgtaatgcatg

SEQ ID NO: 5402570 - DNA, 25 bp, Homo sapien
tttagtattctttttctttgctcca

SEQ ID NO: 5402571 - DNA, 25 bp, Homo sapien
tctttgctccatatcttgttctttg

SEQ ID NO: 5402572 - DNA, 25 bp, Homo sapien
ttttctttgctccatatcttgttct

SEQ ID NO: 5402573 - DNA, 25 bp, Homo sapien
tctttttctttgctccatatcttgt

SEQ ID NO: 5402574 - DNA, 25 bp, Homo sapien
tacttttagagttgtgtgcttgggc

SEQ ID NO: 5402575 - DNA, 25 bp, Homo sapien
ttaaatcactttctcctcataatca

SEQ ID NO: 5402576 - DNA, 25 bp, Homo sapien
ttctcctcataatcacattgatatt

SEQ ID NO: 5402577 - DNA, 25 bp, Homo sapien
taaatcactttctcctcataatcac

SEQ ID NO: 5402578 - DNA, 25 bp, Homo sapien
actttctcctcataatcacattgat

SEQ ID NO: 5402579 - DNA, 25 bp, Homo sapien
tttgcatatagttgggaatacttct

SEQ ID NO: 5402580 - DNA, 25 bp, Homo sapien
aatatttgcatatagttgggaatac

SEQ ID NO: 5402581 - DNA, 25 bp, Homo sapien
tatttgcatatagttgggaatactt

SEQ ID NO: 5402582 - DNA, 25 bp, Homo sapien
gaatatttgcatatagttgggaata

SEQ ID NO: 5402583 - DNA, 25 bp, Homo sapien
taaagaggggttagtcgttcatagc

SEQ ID NO: 5402584 - DNA, 25 bp, Homo sapien
agaattcatgtaagctattttcaaa

SEQ ID NO: 5402585 - DNA, 25 bp, Homo sapien
atttaattcttctatgtaaagaggg

SEQ ID NO: 5402586 - DNA, 25 bp, Homo sapien
ctgaaaattctcaatgacatagaat

SEQ ID NO: 5402587 - DNA, 25 bp, Homo sapien
tccttctggagaaaatactgtgctt

SEQ ID NO: 5402588 - DNA, 25 bp, Homo sapien
ccttctggagaaaatactgtgcttc

SEQ ID NO: 5402589 - DNA, 25 bp, Homo sapien
ttctggagaaaatactgtgcttctt

SEQ ID NO: 5402590 - DNA, 25 bp, Homo sapien
cttccttctggagaaaatactgtgc

SEQ ID NO: 5402591 - DNA, 25 bp, Homo sapien
gggacctgaagataagcctgaatag

SEQ ID NO: 5402592 - DNA, 25 bp, Homo sapien
cgaaggattgaggattcagggacct

SEQ ID NO: 5402593 - DNA, 25 bp, Homo sapien
ctggtcaaatcgaaggattgaggat

SEQ ID NO: 5402594 - DNA, 25 bp, Homo sapien
tcagggacctgaagataagcctgaa

SEQ ID NO: 5402595 - DNA, 25 bp, Homo sapien
taaatattttgaacggcactgacct

SEQ ID NO: 5402596 - DNA, 25 bp, Homo sapien
tgagatttgagcttctagtgtaccc

SEQ ID NO: 5402597 - DNA, 25 bp, Homo sapien
tagtgtacccatctacaatagtgag

SEQ ID NO: 5402598 - DNA, 25 bp, Homo sapien
gacctgccattaccatatgatgatg

SEQ ID NO: 5402599 - DNA, 25 bp, Homo sapien
tcatggactcaggtttgcagacatc

SEQ ID NO: 5402600 - DNA, 25 bp, Homo sapien
cagattcctggcctgatcagtgaca

SEQ ID NO: 5402601 - DNA, 25 bp, Homo sapien
tgtttcctgaagaaccgtgaccatg

SEQ ID NO: 5402602 - DNA, 25 bp, Homo sapien
tgacagaggctgatgaaacacacca

SEQ ID NO: 5402603 - DNA, 25 bp, Homo sapien
gaaactcttgattcagtgctgcacc

SEQ ID NO: 5402604 - DNA, 25 bp, Homo sapien
caagaaactcttgattcagtgctgc

SEQ ID NO: 5402605 - DNA, 25 bp, Homo sapien
ccaagaaactcttgattcagtgctg

SEQ ID NO: 5402606 - DNA, 25 bp, Homo sapien
gtcccaagaaactcttgattcagtg

SEQ ID NO: 5402607 - DNA, 25 bp, Homo sapien
tgaatactgtcttatacctattagc

SEQ ID NO: 5402608 - DNA, 25 bp, Homo sapien
tactgtcttatacctattagcaatc

SEQ ID NO: 5402609 - DNA, 25 bp, Homo sapien
gcattgaatactgtcttatacctat

SEQ ID NO: 5402610 - DNA, 25 bp, Homo sapien
tggcattgaatactgtcttatacct

SEQ ID NO: 5402611 - DNA, 25 bp, Homo sapien
cgcccggcctgaaatacgttgatta

SEQ ID NO: 5402612 - DNA, 25 bp, Homo sapien
tacccaagtccaatagcagctcttt

SEQ ID NO: 5402613 - DNA, 25 bp, Homo sapien
taagctaaatgttatctgaagggtc

SEQ ID NO: 5402614 - DNA, 25 bp, Homo sapien
ggttgtctcttactgctacccaagt

SEQ ID NO: 5402615 - DNA, 25 bp, Homo sapien
ttttaaactgggacatggcactagg

SEQ ID NO: 5402616 - DNA, 25 bp, Homo sapien
gacaagaggcttgctcacagagact

SEQ ID NO: 5402617 - DNA, 25 bp, Homo sapien
cactcactaaagaggtgcatcttcc

SEQ ID NO: 5402618 - DNA, 25 bp, Homo sapien
gcactaggagcaagagccaaaagta

SEQ ID NO: 5402619 - DNA, 25 bp, Homo sapien
tgtttgggaactgagaccagtcaaa

SEQ ID NO: 5402620 - DNA, 25 bp, Homo sapien
cgagtccaggaaatccattcgttag

SEQ ID NO: 5402621 - DNA, 25 bp, Homo sapien
aacgagagaaccacaaaggcaatga

SEQ ID NO: 5402622 - DNA, 25 bp, Homo sapien
cgttagtataacaccctcaatgaat

SEQ ID NO: 5402623 - DNA, 25 bp, Homo sapien
tggcccttgactgccatacttgatt

SEQ ID NO: 5402624 - DNA, 25 bp, Homo sapien
tcttggtaaaagatcctgctactac

SEQ ID NO: 5402625 - DNA, 25 bp, Homo sapien
catacttgatttagtttgcccacag

SEQ ID NO: 5402626 - DNA, 25 bp, Homo sapien
cccagtcccatggaatcagctctaa

SEQ ID NO: 5402627 - DNA, 25 bp, Homo sapien
gaaagagatgtaaccactagcctgg

SEQ ID NO: 5402628 - DNA, 25 bp, Homo sapien
caaggaacgataatggacggaaaga

SEQ ID NO: 5402629 - DNA, 25 bp, Homo sapien
tcattgggcgcttgcttccaaggaa

SEQ ID NO: 5402630 - DNA, 25 bp, Homo sapien
aaccactagcctgggaaatttatca

SEQ ID NO: 5402631 - DNA, 25 bp, Homo sapien
tttgtgccggcaatgcataacctgg

SEQ ID NO: 5402632 - DNA, 25 bp, Homo sapien
ttagcaaatccgactgcatgtatgc

SEQ ID NO: 5402633 - DNA, 25 bp, Homo sapien
aataaagactatgagaatccacatg

SEQ ID NO: 5402634 - DNA, 25 bp, Homo sapien
tctgatacgctcttaggagagggac

SEQ ID NO: 5402635 - DNA, 25 bp, Homo sapien
attattcaaatgagacttcgctaaa

SEQ ID NO: 5402636 - DNA, 25 bp, Homo sapien
tattcaaatgagacttcgctaaagc

SEQ ID NO: 5402637 - DNA, 25 bp, Homo sapien
aattattcaaatgagacttcgctaa

SEQ ID NO: 5402638 - DNA, 25 bp, Homo sapien
ttattcaaatgagacttcgctaaag

SEQ ID NO: 5402639 - DNA, 25 bp, Homo sapien
aagttccctgtctggagaacgaaca

SEQ ID NO: 5402640 - DNA, 25 bp, Homo sapien
aacgaacacagagaacgccaattct

SEQ ID NO: 5402641 - DNA, 25 bp, Homo sapien
gagaacgaacacagagaacgccaat

SEQ ID NO: 5402642 - DNA, 25 bp, Homo sapien
tggagaacgaacacagagaacgcca

SEQ ID NO: 5402643 - DNA, 25 bp, Homo sapien
tattaggaaacgcttgagctctagg

SEQ ID NO: 5402644 - DNA, 25 bp, Homo sapien
aatatatttcaaaaccattatccat

SEQ ID NO: 5402645 - DNA, 25 bp, Homo sapien
ttgagctctaggaaatatatttcaa

SEQ ID NO: 5402646 - DNA, 25 bp, Homo sapien
cacctcctgctattaggaaacgctt

SEQ ID NO: 5402647 - DNA, 25 bp, Homo sapien
aatttgagccttgattgcctcagac

SEQ ID NO: 5402648 - DNA, 25 bp, Homo sapien
cactacaaactggacctaagccctg

SEQ ID NO: 5402649 - DNA, 25 bp, Homo sapien
agtcaggtgtcaacaaagtcttagg

SEQ ID NO: 5402650 - DNA, 25 bp, Homo sapien
aagttgtaccatatcctgggcttgc

SEQ ID NO: 5402651 - DNA, 25 bp, Homo sapien
tccttttaagcggttggcagaagag

SEQ ID NO: 5402652 - DNA, 25 bp, Homo sapien
tcaagggatatatggtagactgctc

SEQ ID NO: 5402653 - DNA, 25 bp, Homo sapien
gactaactcgttcagcttacggagc

SEQ ID NO: 5402654 - DNA, 25 bp, Homo sapien
gcagtaagcccagattacgccagtg

SEQ ID NO: 5402655 - DNA, 25 bp, Homo sapien
cccaagggcaggcacggagcttcaa

SEQ ID NO: 5402656 - DNA, 25 bp, Homo sapien
taggtggccatagtctgtggctttc

SEQ ID NO: 5402657 - DNA, 25 bp, Homo sapien
gcaggcacggagcttcaagatgtag

SEQ ID NO: 5402658 - DNA, 25 bp, Homo sapien
caagatgtaggtggccatagtctgt

SEQ ID NO: 5402659 - DNA, 25 bp, Homo sapien
gtatgtcactcacagcaaacttgga

SEQ ID NO: 5402660 - DNA, 25 bp, Homo sapien
ggaagaatctacaacctggagcatt

SEQ ID NO: 5402661 - DNA, 25 bp, Homo sapien
cattgaggcctcatgtaaaattccc

SEQ ID NO: 5402662 - DNA, 25 bp, Homo sapien
tgagctctctgtgaatccgtgaatt

SEQ ID NO: 5402663 - DNA, 25 bp, Homo sapien
acaccactgcacttcagcctcaaga

SEQ ID NO: 5402664 - DNA, 25 bp, Homo sapien
tgggaggctgatgtgagagaattgc

SEQ ID NO: 5402665 - DNA, 25 bp, Homo sapien
gtgagccaggatcacaccactgcac

SEQ ID NO: 5402666 - DNA, 25 bp, Homo sapien
ttgaacctgggaggcagaggctgca

SEQ ID NO: 5402667 - DNA, 25 bp, Homo sapien
aatcctaagacagtgtgtcagggtg

SEQ ID NO: 5402668 - DNA, 25 bp, Homo sapien
cttctgagactggaatcctaagaca

SEQ ID NO: 5402669 - DNA, 25 bp, Homo sapien
tctgagactggaatcctaagacagt

SEQ ID NO: 5402670 - DNA, 25 bp, Homo sapien
gactggaatcctaagacagtgtgtc

SEQ ID NO: 5402671 - DNA, 25 bp, Homo sapien
tcagcacctggtagaaacagaatgt

SEQ ID NO: 5402672 - DNA, 25 bp, Homo sapien
ttcagcacctggtagaaacagaatg

SEQ ID NO: 5402673 - DNA, 25 bp, Homo sapien
aattctgttttcagctaaacccctg

SEQ ID NO: 5402674 - DNA, 25 bp, Homo sapien
ctgagagtaaggcttcaaggagctg

SEQ ID NO: 5402675 - DNA, 25 bp, Homo sapien
ttttcagctaaacccctgacttctg

SEQ ID NO: 5402676 - DNA, 25 bp, Homo sapien
ccctaggtttcacggcagaggcata

SEQ ID NO: 5402677 - DNA, 25 bp, Homo sapien
tcccatgtccagtcgttaaagtcag

SEQ ID NO: 5402678 - DNA, 25 bp, Homo sapien
tagaatgactcaatagaggccgcag

SEQ ID NO: 5402679 - DNA, 25 bp, Homo sapien
tcaaggtgcttacccaggtcatagg

SEQ ID NO: 5402680 - DNA, 25 bp, Homo sapien
gcaaggaagcatcacccatcaaggt

SEQ ID NO: 5402681 - DNA, 25 bp, Homo sapien
gaggtgctgagataccactgccagt

SEQ ID NO: 5402682 - DNA, 25 bp, Homo sapien
cagaattacactcagacctgtgtgg

SEQ ID NO: 5402683 - DNA, 25 bp, Homo sapien
cattgtggtggatctgcatagtgca

SEQ ID NO: 5402684 - DNA, 25 bp, Homo sapien
tagcaggctcacatagcttaactgg

SEQ ID NO: 5402685 - DNA, 25 bp, Homo sapien
tggaggttgcggtgacccgtgattg

SEQ ID NO: 5402686 - DNA, 25 bp, Homo sapien
cggtgacccgtgattgtgccattgt

SEQ ID NO: 5402687 - DNA, 25 bp, Homo sapien
ggtggaggttgcggtgacccgtgat

SEQ ID NO: 5402688 - DNA, 25 bp, Homo sapien
ttgcggtgacccgtgattgtgccat

SEQ ID NO: 5402689 - DNA, 25 bp, Homo sapien
gcaatgggcacaatgggccgagtgg

SEQ ID NO: 5402690 - DNA, 25 bp, Homo sapien
gggaaccacgctcagcgctcctggg

SEQ ID NO: 5402691 - DNA, 25 bp, Homo sapien
ccgagtgggaaccacgctcagcgct

SEQ ID NO: 5402692 - DNA, 25 bp, Homo sapien
gcacaatgggccgagtgggaaccac

SEQ ID NO: 5402693 - DNA, 25 bp, Homo sapien
ctgtcacctcttagggatttcgtgc

SEQ ID NO: 5402694 - DNA, 25 bp, Homo sapien
gatttcgtgcttggtccccagtcaa

SEQ ID NO: 5402695 - DNA, 25 bp, Homo sapien
caaggtcgggtatcttgctctaagt

SEQ ID NO: 5402696 - DNA, 25 bp, Homo sapien
cacttaacgtttcagacttctctct

SEQ ID NO: 5402697 - DNA, 25 bp, Homo sapien
tatactgttaacaaatgactaggaa

SEQ ID NO: 5402698 - DNA, 25 bp, Homo sapien
agagaatgtaacttattttagagaa

SEQ ID NO: 5402699 - DNA, 25 bp, Homo sapien
gaatactcaatacacaatcctataa

SEQ ID NO: 5402700 - DNA, 25 bp, Homo sapien
taagagatatactgttaacaaatga

SEQ ID NO: 5402701 - DNA, 25 bp, Homo sapien
aaggctcaacccttgatcataaagc

SEQ ID NO: 5402702 - DNA, 25 bp, Homo sapien
cactgccaaatccaactctttgtaa

SEQ ID NO: 5402703 - DNA, 25 bp, Homo sapien
tagaatagcaggtttctcgtattag

SEQ ID NO: 5402704 - DNA, 25 bp, Homo sapien
ttccaacttgattgcatccccactg

SEQ ID NO: 5402705 - DNA, 25 bp, Homo sapien
tagataaaggagatttgtgataaca

SEQ ID NO: 5402706 - DNA, 25 bp, Homo sapien
ggagctcggtagataaaggagattt

SEQ ID NO: 5402707 - DNA, 25 bp, Homo sapien
tcggtagataaaggagatttgtgat

SEQ ID NO: 5402708 - DNA, 25 bp, Homo sapien
ctgggagctcggtagataaaggaga

SEQ ID NO: 5402709 - DNA, 25 bp, Homo sapien
ttggtccttgttcaactgcccttcc

SEQ ID NO: 5402710 - DNA, 25 bp, Homo sapien
atattggtccttgttcaactgccct

SEQ ID NO: 5402711 - DNA, 25 bp, Homo sapien
caggaatttgaactgggcattggca

SEQ ID NO: 5402712 - DNA, 25 bp, Homo sapien
tccttgttcaactgcccttccagtg

SEQ ID NO: 5402713 - DNA, 25 bp, Homo sapien
ggtatcaagaaataggaatatggaa

SEQ ID NO: 5402714 - DNA, 25 bp, Homo sapien
cgtgactctcgggtaggtatcaaga

SEQ ID NO: 5402715 - DNA, 25 bp, Homo sapien
ctcgggtaggtatcaagaaatagga

SEQ ID NO: 5402716 - DNA, 25 bp, Homo sapien
tgactctcgggtaggtatcaagaaa

SEQ ID NO: 5402717 - DNA, 25 bp, Homo sapien
aggggccaagataggctcctctggc

SEQ ID NO: 5402718 - DNA, 25 bp, Homo sapien
aggaggggccaagataggctcctct

SEQ ID NO: 5402719 - DNA, 25 bp, Homo sapien
ttgcaaattcaggctgggaacatga

SEQ ID NO: 5402720 - DNA, 25 bp, Homo sapien
caaattcaggctgggaacatgaagg

SEQ ID NO: 5402721 - DNA, 25 bp, Homo sapien
cccagttattgctcatgatgtgcct

SEQ ID NO: 5402722 - DNA, 25 bp, Homo sapien
aggctgcttcgggtggaatgcattt

SEQ ID NO: 5402723 - DNA, 25 bp, Homo sapien
tgcctgtcagttggtcccacacatc

SEQ ID NO: 5402724 - DNA, 25 bp, Homo sapien
tgtgttgtaattcctgtttcccagt

SEQ ID NO: 5402725 - DNA, 25 bp, Homo sapien
gtctttggttgccatccaccaattg

SEQ ID NO: 5402726 - DNA, 25 bp, Homo sapien
tttggttgccatccaccaattgttt

SEQ ID NO: 5402727 - DNA, 25 bp, Homo sapien
gccatccaccaattgtttatctgta

SEQ ID NO: 5402728 - DNA, 25 bp, Homo sapien
ggttgccatccaccaattgtttatc

SEQ ID NO: 5402729 - DNA, 25 bp, Homo sapien
ctcggagaggcactgttgataattt

SEQ ID NO: 5402730 - DNA, 25 bp, Homo sapien
tagatgagtggttaaagggtccata

SEQ ID NO: 5402731 - DNA, 25 bp, Homo sapien
tgttgggaaactcaacaattctcgg

SEQ ID NO: 5402732 - DNA, 25 bp, Homo sapien
caccaagccataagagaatgttgat

SEQ ID NO: 5402733 - DNA, 25 bp, Homo sapien
ggctttgcctcgtatcagggtgaat

SEQ ID NO: 5402734 - DNA, 25 bp, Homo sapien
atcatgagacagtttagctttgtga

SEQ ID NO: 5402735 - DNA, 25 bp, Homo sapien
tgtgaagtctaggtaattcattggc

SEQ ID NO: 5402736 - DNA, 25 bp, Homo sapien
gctgttgtacctataaatactgcct

SEQ ID NO: 5402737 - DNA, 25 bp, Homo sapien
gctgtgtttggagaatagactttcc

SEQ ID NO: 5402738 - DNA, 25 bp, Homo sapien
gaataccaagatgtttctagagtca

SEQ ID NO: 5402739 - DNA, 25 bp, Homo sapien
tatgtgaggacattctatcagcagc

SEQ ID NO: 5402740 - DNA, 25 bp, Homo sapien
gaatgtgcactttactgataactgg

SEQ ID NO: 5402741 - DNA, 25 bp, Homo sapien
ggagaaagatcctcccatgaacaaa

SEQ ID NO: 5402742 - DNA, 25 bp, Homo sapien
cagtcactgtgcagtgtgtcctgct

SEQ ID NO: 5402743 - DNA, 25 bp, Homo sapien
tatatccacacgttggactcttgcg

SEQ ID NO: 5402744 - DNA, 25 bp, Homo sapien
catttatgagccttacaattcagca

SEQ ID NO: 5402745 - DNA, 25 bp, Homo sapien
tccccacaccgttcagttacataat

SEQ ID NO: 5402746 - DNA, 25 bp, Homo sapien
tttccaggcagaataaatatgtagc

SEQ ID NO: 5402747 - DNA, 25 bp, Homo sapien
ggcagaataaatatgtagcttgctc

SEQ ID NO: 5402748 - DNA, 25 bp, Homo sapien
cataataggataagtgcatgtagaa

SEQ ID NO: 5402749 - DNA, 25 bp, Homo sapien
tcctggcctctgcacaacggggctg

SEQ ID NO: 5402750 - DNA, 25 bp, Homo sapien
cctggcctctgcacaacggggctgg

SEQ ID NO: 5402751 - DNA, 25 bp, Homo sapien
gacatgcactttcctgcagttggtt

SEQ ID NO: 5402752 - DNA, 25 bp, Homo sapien
ccttttatcagcgaactggcaggag

SEQ ID NO: 5402753 - DNA, 25 bp, Homo sapien
tgagagtcccctgcttatggctgac

SEQ ID NO: 5402754 - DNA, 25 bp, Homo sapien
tatggctgacaacctgacatgcact

SEQ ID NO: 5402755 - DNA, 25 bp, Homo sapien
cgaaccccgtccagcagcaccgctg

SEQ ID NO: 5402756 - DNA, 25 bp, Homo sapien
agggcacagcgccaaggaacccacg

SEQ ID NO: 5402757 - DNA, 25 bp, Homo sapien
ctgaaagtctgaccggcagcccaag

SEQ ID NO: 5402758 - DNA, 25 bp, Homo sapien
gagcccccgctcgagtcattctgtg

SEQ ID NO: 5402759 - DNA, 25 bp, Homo sapien
cacgcttatgttccgggtgggcaac

SEQ ID NO: 5402760 - DNA, 25 bp, Homo sapien
tcttcttcatcgagacggaggccac

SEQ ID NO: 5402761 - DNA, 25 bp, Homo sapien
cacgcggtgatctccatgagggacg

SEQ ID NO: 5402762 - DNA, 25 bp, Homo sapien
gagaccctcatgttcagcgagcacg

SEQ ID NO: 5402763 - DNA, 25 bp, Homo sapien
tcttcactaagggtttactttctga

SEQ ID NO: 5402764 - DNA, 25 bp, Homo sapien
cagaaatggcttcaatccttctgta

SEQ ID NO: 5402765 - DNA, 25 bp, Homo sapien
cactaagggtttactttctgactca

SEQ ID NO: 5402766 - DNA, 25 bp, Homo sapien
gcagttccccagaaatggcttcaat

SEQ ID NO: 5402767 - DNA, 25 bp, Homo sapien
gaaaaaattcaatatccacaatatc

SEQ ID NO: 5402768 - DNA, 25 bp, Homo sapien
tatccacaatatccacagtctgaat

SEQ ID NO: 5402769 - DNA, 25 bp, Homo sapien
atatccacaatatccacagtctgaa

SEQ ID NO: 5402770 - DNA, 25 bp, Homo sapien
ccacaatatccacagtctgaatttc

SEQ ID NO: 5402771 - DNA, 25 bp, Homo sapien
ttttcaaataggtgataggtgaaca

SEQ ID NO: 5402772 - DNA, 25 bp, Homo sapien
ttcaaataggtgataggtgaacaga

SEQ ID NO: 5402773 - DNA, 25 bp, Homo sapien
tcaaataggtgataggtgaacagat

SEQ ID NO: 5402774 - DNA, 25 bp, Homo sapien
tttcaaataggtgataggtgaacag

SEQ ID NO: 5402775 - DNA, 25 bp, Homo sapien
tttgcgttgttttgctaactgccta

SEQ ID NO: 5402776 - DNA, 25 bp, Homo sapien
gtagttcactagctgctcatttcta

SEQ ID NO: 5402777 - DNA, 25 bp, Homo sapien
tagctttgggcctgctgtaaacaat

SEQ ID NO: 5402778 - DNA, 25 bp, Homo sapien
gagttgacatcccaagtagttcact

SEQ ID NO: 5402779 - DNA, 25 bp, Homo sapien
ctggcaagatatcattcaaaatcat

SEQ ID NO: 5402780 - DNA, 25 bp, Homo sapien
ctgacactgtgacactggactctgc

SEQ ID NO: 5402781 - DNA, 25 bp, Homo sapien
gcttgtggcccccgatttgacttat

SEQ ID NO: 5402782 - DNA, 25 bp, Homo sapien
cttgtggcccccgatttgacttatg

SEQ ID NO: 5402783 - DNA, 25 bp, Homo sapien
tccaactcaacatttagcaggcatg

SEQ ID NO: 5402784 - DNA, 25 bp, Homo sapien
caggcatgttgtgggcaaatgagca

SEQ ID NO: 5402785 - DNA, 25 bp, Homo sapien
gttcctgcaggtagtcagtttgcca

SEQ ID NO: 5402786 - DNA, 25 bp, Homo sapien
gaatatgtagcccatgtcagagggc

SEQ ID NO: 5402787 - DNA, 25 bp, Homo sapien
gaagctgttcagtgagtagagggtg

SEQ ID NO: 5402788 - DNA, 25 bp, Homo sapien
gtaaagtaagactttcttcttatca

SEQ ID NO: 5402789 - DNA, 25 bp, Homo sapien
cttatcatcgcatttgtcctccttc

SEQ ID NO: 5402790 - DNA, 25 bp, Homo sapien
tttcttcttatcatcgcatttgtcc

SEQ ID NO: 5402791 - DNA, 25 bp, Homo sapien
gggcattactcagttgaggatcctg

SEQ ID NO: 5402792 - DNA, 25 bp, Homo sapien
taaatgaagcgataccttttgggca

SEQ ID NO: 5402793 - DNA, 25 bp, Homo sapien
ttgggcattactcagttgaggatcc

SEQ ID NO: 5402794 - DNA, 25 bp, Homo sapien
aagcgataccttttgggcattactc

SEQ ID NO: 5402795 - DNA, 25 bp, Homo sapien
gacttagcatacaggtccctcttcc

SEQ ID NO: 5402796 - DNA, 25 bp, Homo sapien
tatagccactatctccagacttagc

SEQ ID NO: 5402797 - DNA, 25 bp, Homo sapien
tatctccagacttagcatacaggtc

SEQ ID NO: 5402798 - DNA, 25 bp, Homo sapien
agcctcaatctatagccactatctc

SEQ ID NO: 5402799 - DNA, 25 bp, Homo sapien
catttcctttaaagccatatctcta

SEQ ID NO: 5402800 - DNA, 25 bp, Homo sapien
gagccttctcaacttcttcaatatg

SEQ ID NO: 5402801 - DNA, 25 bp, Homo sapien
ttctccttaaggaagagagccttct

SEQ ID NO: 5402802 - DNA, 25 bp, Homo sapien
cctttaaagccatatctctatagaa

SEQ ID NO: 5402803 - DNA, 25 bp, Homo sapien
gggaataacatagccttcctcaatt

SEQ ID NO: 5402804 - DNA, 25 bp, Homo sapien
catatgtaaccttggactcctctag

SEQ ID NO: 5402805 - DNA, 25 bp, Homo sapien
tctgaaattcttcgaagtatgggtc

SEQ ID NO: 5402806 - DNA, 25 bp, Homo sapien
tatgggtcttggattggagttaaca

SEQ ID NO: 5402807 - DNA, 25 bp, Homo sapien
acatgcaagggccatcagggaaggg

SEQ ID NO: 5402808 - DNA, 25 bp, Homo sapien
ccacatgcaagggccatcagggaag

SEQ ID NO: 5402809 - DNA, 25 bp, Homo sapien
ctcccacatgcaagggccatcaggg

SEQ ID NO: 5402810 - DNA, 25 bp, Homo sapien
catcagggaagggaagcgtggaagt

SEQ ID NO: 5402811 - DNA, 25 bp, Homo sapien
acttacaaactgtgaggccttaagc

SEQ ID NO: 5402812 - DNA, 25 bp, Homo sapien
tatgcatcacggtatgtaggtcctt

SEQ ID NO: 5402813 - DNA, 25 bp, Homo sapien
cctttatggcatagtgaaatggctg

SEQ ID NO: 5402814 - DNA, 25 bp, Homo sapien
cagcctttgtggaatagttaactta

SEQ ID NO: 5402815 - DNA, 25 bp, Homo sapien
gcctgtcagtgggaaccaatctgct

SEQ ID NO: 5402816 - DNA, 25 bp, Homo sapien
cagtcacctgaagcttaaagtctcc

SEQ ID NO: 5402817 - DNA, 25 bp, Homo sapien
gacagatggccctcagaaccatgtg

SEQ ID NO: 5402818 - DNA, 25 bp, Homo sapien
taaagtctcctagaggagtatggcc

SEQ ID NO: 5402819 - DNA, 25 bp, Homo sapien
gacactttggaaattaatcatcatg

SEQ ID NO: 5402820 - DNA, 25 bp, Homo sapien
tatgtatgttccactaagtcttacc

SEQ ID NO: 5402821 - DNA, 25 bp, Homo sapien
ggtccattggacatctctaattctg

SEQ ID NO: 5402822 - DNA, 25 bp, Homo sapien
ctgtcaagttaataggtaagagtcc

SEQ ID NO: 5402823 - DNA, 25 bp, Homo sapien
gaaaaggtatatcttcctaggaagc

SEQ ID NO: 5402824 - DNA, 25 bp, Homo sapien
gaatttttagatctgggtacactct

SEQ ID NO: 5402825 - DNA, 25 bp, Homo sapien
tagattctatagctaaagatactgc

SEQ ID NO: 5402826 - DNA, 25 bp, Homo sapien
caccagtcataggtgtatgctttga

SEQ ID NO: 5402827 - DNA, 25 bp, Homo sapien
aaattaatgtattggctcacctggg

SEQ ID NO: 5402828 - DNA, 25 bp, Homo sapien
tctaagctgttccatgttgtttgca

SEQ ID NO: 5402829 - DNA, 25 bp, Homo sapien
tcacattaagttctgtaggacagaa

SEQ ID NO: 5402830 - DNA, 25 bp, Homo sapien
gggagcctctctcagcacttaatgc

SEQ ID NO: 5402831 - DNA, 25 bp, Homo sapien
caaggcaatcgctcttcataagaag

SEQ ID NO: 5402832 - DNA, 25 bp, Homo sapien
tccactctgggaaatactccagctt

SEQ ID NO: 5402833 - DNA, 25 bp, Homo sapien
tctggatcatgacctctggcgaagc

SEQ ID NO: 5402834 - DNA, 25 bp, Homo sapien
cattctaagtagtcttctggttccc

SEQ ID NO: 5402835 - DNA, 25 bp, Homo sapien
caccacaaattcttcagtctctgcc

SEQ ID NO: 5402836 - DNA, 25 bp, Homo sapien
cttccaccacaaattcttcagtctc

SEQ ID NO: 5402837 - DNA, 25 bp, Homo sapien
accacaaattcttcagtctctgcct

SEQ ID NO: 5402838 - DNA, 25 bp, Homo sapien
ctacttccaccacaaattcttcagt

SEQ ID NO: 5402839 - DNA, 25 bp, Homo sapien
tgaatttattatccatctcaagtga

SEQ ID NO: 5402840 - DNA, 25 bp, Homo sapien
tttcacctaatatgaatttattatc

SEQ ID NO: 5402841 - DNA, 25 bp, Homo sapien
atgaatttattatccatctcaagtg

SEQ ID NO: 5402842 - DNA, 25 bp, Homo sapien
gattccaacaataagtaccaatgtg

SEQ ID NO: 5402843 - DNA, 25 bp, Homo sapien
taagccttgtcattgatgccaaatc

SEQ ID NO: 5402844 - DNA, 25 bp, Homo sapien
aaagcagcataaagtgtcatttgca

SEQ ID NO: 5402845 - DNA, 25 bp, Homo sapien
tgagccaactcatacatagattctg

SEQ ID NO: 5402846 - DNA, 25 bp, Homo sapien
tcctaattgaatacgctgtgtttct

SEQ ID NO: 5402847 - DNA, 25 bp, Homo sapien
ttcctaattgaatacgctgtgtttc

SEQ ID NO: 5402848 - DNA, 25 bp, Homo sapien
aattgaatacgctgtgtttctttct

SEQ ID NO: 5402849 - DNA, 25 bp, Homo sapien
agagcatgtcgcgtttctgtttttt

SEQ ID NO: 5402850 - DNA, 25 bp, Homo sapien
tttttgagacagtccaggggttctc

SEQ ID NO: 5402851 - DNA, 25 bp, Homo sapien
tttttagagcatgtcgcgtttctgt

SEQ ID NO: 5402852 - DNA, 25 bp, Homo sapien
tcctttttagagcatgtcgcgtttc

SEQ ID NO: 5402853 - DNA, 25 bp, Homo sapien
tgaagcactgtattaaagcccaaga

SEQ ID NO: 5402854 - DNA, 25 bp, Homo sapien
ggtacctcaacaagcaccttccgag

SEQ ID NO: 5402855 - DNA, 25 bp, Homo sapien
ccgagagccaaaaggaatctgtttc

SEQ ID NO: 5402856 - DNA, 25 bp, Homo sapien
gagccgaaaatagcaaagcccacat

SEQ ID NO: 5402857 - DNA, 25 bp, Homo sapien
tgctgaacatatttctaaatccgtc

SEQ ID NO: 5402858 - DNA, 25 bp, Homo sapien
ggtaacctccagtgatttactgcat

SEQ ID NO: 5402859 - DNA, 25 bp, Homo sapien
tagattctcctgtactattcactgg

SEQ ID NO: 5402860 - DNA, 25 bp, Homo sapien
taaatccgtctttgttcaaggctgc

SEQ ID NO: 5402861 - DNA, 25 bp, Homo sapien
aaggctgatggtgaataaagcataa

SEQ ID NO: 5402862 - DNA, 25 bp, Homo sapien
tttgtgccatgaaggctgatggtga

SEQ ID NO: 5402863 - DNA, 25 bp, Homo sapien
ctttgtgccatgaaggctgatggtg

SEQ ID NO: 5402864 - DNA, 25 bp, Homo sapien
acagcttgatggacattctattaac

SEQ ID NO: 5402865 - DNA, 25 bp, Homo sapien
gcttgatggacattctattaaccat

SEQ ID NO: 5402866 - DNA, 25 bp, Homo sapien
cagcttgatggacattctattaacc

SEQ ID NO: 5402867 - DNA, 25 bp, Homo sapien
taaacagcttgatggacattctatt

SEQ ID NO: 5402868 - DNA, 25 bp, Homo sapien
ttgttgcagatcagctagcttatac

SEQ ID NO: 5402869 - DNA, 25 bp, Homo sapien
gcagatcagctagcttataccacat

SEQ ID NO: 5402870 - DNA, 25 bp, Homo sapien
tagcttataccacatcgtattgctt

SEQ ID NO: 5402871 - DNA, 25 bp, Homo sapien
ttataccacatcgtattgctttctg

SEQ ID NO: 5402872 - DNA, 25 bp, Homo sapien
gaaaacaatctctatgtgccacagt

SEQ ID NO: 5402873 - DNA, 25 bp, Homo sapien
tctgcgctgcatgcaaaacctcaaa

SEQ ID NO: 5402874 - DNA, 25 bp, Homo sapien
tgttcactctacactaagctctagg

SEQ ID NO: 5402875 - DNA, 25 bp, Homo sapien
tagcctagtggtgggatgagtaatc

SEQ ID NO: 5402876 - DNA, 25 bp, Homo sapien
ccactcccagcatcatcagggacaa

SEQ ID NO: 5402877 - DNA, 25 bp, Homo sapien
ttactctttacaactgactccactc

SEQ ID NO: 5402878 - DNA, 25 bp, Homo sapien
ttacaactgactccactcccagcat

SEQ ID NO: 5402879 - DNA, 25 bp, Homo sapien
ctccactcccagcatcatcagggac

SEQ ID NO: 5402880 - DNA, 25 bp, Homo sapien
cttgaatgcattggacatggacaga

SEQ ID NO: 5402881 - DNA, 25 bp, Homo sapien
ttgaatgcattggacatggacagaa

SEQ ID NO: 5402882 - DNA, 25 bp, Homo sapien
gaatgcattggacatggacagaaac

SEQ ID NO: 5402883 - DNA, 25 bp, Homo sapien
tgaatgcattggacatggacagaaa

SEQ ID NO: 5402884 - DNA, 25 bp, Homo sapien
gttgaaccctcttgccttctaccaa

SEQ ID NO: 5402885 - DNA, 25 bp, Homo sapien
ttgaaccctcttgccttctaccaaa

SEQ ID NO: 5402886 - DNA, 25 bp, Homo sapien
agttgaaccctcttgccttctacca

SEQ ID NO: 5402887 - DNA, 25 bp, Homo sapien
attttgcccctcagacccagtgact

SEQ ID NO: 5402888 - DNA, 25 bp, Homo sapien
aaattttgcccctcagacccagtga

SEQ ID NO: 5402889 - DNA, 25 bp, Homo sapien
caaattttgcccctcagacccagtg

SEQ ID NO: 5402890 - DNA, 25 bp, Homo sapien
ttttgcccctcagacccagtgactg

SEQ ID NO: 5402891 - DNA, 25 bp, Homo sapien
gcacgttatgccctcaatagctgga

SEQ ID NO: 5402892 - DNA, 25 bp, Homo sapien
tcacttaaagaatcttgcagactct

SEQ ID NO: 5402893 - DNA, 25 bp, Homo sapien
tatgccctcaatagctggactgtga

SEQ ID NO: 5402894 - DNA, 25 bp, Homo sapien
ggccccattgaaagttatagatcat

SEQ ID NO: 5402895 - DNA, 25 bp, Homo sapien
agtacatgcattgctaaagtgagga

SEQ ID NO: 5402896 - DNA, 25 bp, Homo sapien
ctgtattacaccaatttcagtacat

SEQ ID NO: 5402897 - DNA, 25 bp, Homo sapien
tattacaccaatttcagtacatgca

SEQ ID NO: 5402898 - DNA, 25 bp, Homo sapien
tcagtacatgcattgctaaagtgag

SEQ ID NO: 5402899 - DNA, 25 bp, Homo sapien
catctgaacattgatctgagataac

SEQ ID NO: 5402900 - DNA, 25 bp, Homo sapien
cattgatctgagataactggtagat

SEQ ID NO: 5402901 - DNA, 25 bp, Homo sapien
cataaattacttcttttacgccaga

SEQ ID NO: 5402902 - DNA, 25 bp, Homo sapien
ttacgccagagcatctgaacatctg

SEQ ID NO: 5402903 - DNA, 25 bp, Homo sapien
ttcctgtccaaaatcagcttttctg

SEQ ID NO: 5402904 - DNA, 25 bp, Homo sapien
actgattccgtgactcagagaagta

SEQ ID NO: 5402905 - DNA, 25 bp, Homo sapien
gtccaaaatcagcttttctgaagtg

SEQ ID NO: 5402906 - DNA, 25 bp, Homo sapien
ctactgattccgtgactcagagaag

SEQ ID NO: 5402907 - DNA, 25 bp, Homo sapien
catggtcaaacatcccgtgaactag

SEQ ID NO: 5402908 - DNA, 25 bp, Homo sapien
tttcatggtcaaacatcccgtgaac

SEQ ID NO: 5402909 - DNA, 25 bp, Homo sapien
ttcatggtcaaacatcccgtgaact

SEQ ID NO: 5402910 - DNA, 25 bp, Homo sapien
tcatggtcaaacatcccgtgaacta

SEQ ID NO: 5402911 - DNA, 25 bp, Homo sapien
tttgaaatgagctcttttcccacaa

SEQ ID NO: 5402912 - DNA, 25 bp, Homo sapien
gatagagagctgcaggggtccccat

SEQ ID NO: 5402913 - DNA, 25 bp, Homo sapien
tccacagaaggagatagagagctgc

SEQ ID NO: 5402914 - DNA, 25 bp, Homo sapien
agatagagagctgcaggggtcccca

SEQ ID NO: 5402915 - DNA, 25 bp, Homo sapien
tctccttgctccacagaaggagata

SEQ ID NO: 5402916 - DNA, 25 bp, Homo sapien
ctatggattcgaataacaacagaac

SEQ ID NO: 5402917 - DNA, 25 bp, Homo sapien
gaactatggattcgaataacaacag

SEQ ID NO: 5402918 - DNA, 25 bp, Homo sapien
cttcaaagaactatggattcgaata

SEQ ID NO: 5402919 - DNA, 25 bp, Homo sapien
tcaaagaactatggattcgaataac

SEQ ID NO: 5402920 - DNA, 25 bp, Homo sapien
gaaaatggatatctgtacttgaact

SEQ ID NO: 5402921 - DNA, 25 bp, Homo sapien
cgtgaaaatggatatctgtacttga

SEQ ID NO: 5402922 - DNA, 25 bp, Homo sapien
tttgttcgtgaaaatggatatctgt

SEQ ID NO: 5402923 - DNA, 25 bp, Homo sapien
aagcggatttttgttcgtgaaaatg

SEQ ID NO: 5402924 - DNA, 25 bp, Homo sapien
tgagaatgagaatccggtaccacca

SEQ ID NO: 5402925 - DNA, 25 bp, Homo sapien
ccagaaactggtctgtatgctatac

SEQ ID NO: 5402926 - DNA, 25 bp, Homo sapien
gctatactgtagaggacaaagttgg

SEQ ID NO: 5402927 - DNA, 25 bp, Homo sapien
tgtgcaatgtatatggtccctggtg

SEQ ID NO: 5402928 - DNA, 25 bp, Homo sapien
tctggctcatgttaatgcggattcc

SEQ ID NO: 5402929 - DNA, 25 bp, Homo sapien
cctctggctcatgttaatgcggatt

SEQ ID NO: 5402930 - DNA, 25 bp, Homo sapien
ttaatgcggattcctaattttccac

SEQ ID NO: 5402931 - DNA, 25 bp, Homo sapien
ccctctggctcatgttaatgcggat

SEQ ID NO: 5402932 - DNA, 25 bp, Homo sapien
cgaagcttgtatatcagcaggtggc

SEQ ID NO: 5402933 - DNA, 25 bp, Homo sapien
gcgatggtaagaatcgaagcttgta

SEQ ID NO: 5402934 - DNA, 25 bp, Homo sapien
tctaattttgcgatggtaagaatcg

SEQ ID NO: 5402935 - DNA, 25 bp, Homo sapien
ttagcattctaattttgcgatggta

SEQ ID NO: 5402936 - DNA, 25 bp, Homo sapien
ttctatgcatatatttgacatatgc

SEQ ID NO: 5402937 - DNA, 25 bp, Homo sapien
ctatgcatatatttgacatatgcat

SEQ ID NO: 5402938 - DNA, 25 bp, Homo sapien
tttctatgcatatatttgacatatg

SEQ ID NO: 5402939 - DNA, 25 bp, Homo sapien
tctatgcatatatttgacatatgca

SEQ ID NO: 5402940 - DNA, 25 bp, Homo sapien
attatttacttactgagggctttga

SEQ ID NO: 5402941 - DNA, 25 bp, Homo sapien
aagtattatttacttactgagggct

SEQ ID NO: 5402942 - DNA, 25 bp, Homo sapien
gctttgaaggctctttgtcttgttt

SEQ ID NO: 5402943 - DNA, 25 bp, Homo sapien
aattaagtattatttacttactgag

SEQ ID NO: 5402944 - DNA, 25 bp, Homo sapien
taaattggagcccagcaaggttaca

SEQ ID NO: 5402945 - DNA, 25 bp, Homo sapien
cttgtctcgtgttgtcagccagcac

SEQ ID NO: 5402946 - DNA, 25 bp, Homo sapien
catattcgttatgtacagaagtcac

SEQ ID NO: 5402947 - DNA, 25 bp, Homo sapien
tgaaaagtaaaggttccataatggc

SEQ ID NO: 5402948 - DNA, 25 bp, Homo sapien
ccaagattcaacacgatgccacagt

SEQ ID NO: 5402949 - DNA, 25 bp, Homo sapien
aacccacaaaagctctaccaagatt

SEQ ID NO: 5402950 - DNA, 25 bp, Homo sapien
caggcctccacaaagaggagaagat

SEQ ID NO: 5402951 - DNA, 25 bp, Homo sapien
agcaccaccaacaattagccccagg

SEQ ID NO: 5402952 - DNA, 25 bp, Homo sapien
ctataaccaaaagaatactcaataa

SEQ ID NO: 5402953 - DNA, 25 bp, Homo sapien
tactcaataaaaataaagcataagc

SEQ ID NO: 5402954 - DNA, 25 bp, Homo sapien
tataaccaaaagaatactcaataaa

SEQ ID NO: 5402955 - DNA, 25 bp, Homo sapien
tcaataaaaataaagcataagccat

SEQ ID NO: 5402956 - DNA, 25 bp, Homo sapien
ctgcttgatattgcttcttagatct

SEQ ID NO: 5402957 - DNA, 25 bp, Homo sapien
gatattgcttcttagatcttaacat

SEQ ID NO: 5402958 - DNA, 25 bp, Homo sapien
tactgcttgatattgcttcttagat

SEQ ID NO: 5402959 - DNA, 25 bp, Homo sapien
gcttgatattgcttcttagatctta

SEQ ID NO: 5402960 - DNA, 25 bp, Homo sapien
gtgcagatgcttctgctcacaacat

SEQ ID NO: 5402961 - DNA, 25 bp, Homo sapien
ctgtgcagatgcttctgctcacaac

SEQ ID NO: 5402962 - DNA, 25 bp, Homo sapien
tgcttctgctcacaacataccattc

SEQ ID NO: 5402963 - DNA, 25 bp, Homo sapien
tgctcacaacataccattcaccaag

SEQ ID NO: 5402964 - DNA, 25 bp, Homo sapien
gaacattcatgaaattgcaggtagt

SEQ ID NO: 5402965 - DNA, 25 bp, Homo sapien
cattcatgaaattgcaggtagtggg

SEQ ID NO: 5402966 - DNA, 25 bp, Homo sapien
gtcgtgaagtaagaacattcatgaa

SEQ ID NO: 5402967 - DNA, 25 bp, Homo sapien
aagaaaagtcgtgaagtaagaacat

SEQ ID NO: 5402968 - DNA, 25 bp, Homo sapien
ctttgatgataaatgaaagatgtgc

SEQ ID NO: 5402969 - DNA, 25 bp, Homo sapien
actttgatgataaatgaaagatgtg

SEQ ID NO: 5402970 - DNA, 25 bp, Homo sapien
atgtgcaacagcaatctgagaatgc

SEQ ID NO: 5402971 - DNA, 25 bp, Homo sapien
tggtggtggggactgtcttgatcat

SEQ ID NO: 5402972 - DNA, 25 bp, Homo sapien
tctgtcctgtggcaatggtggtggg

SEQ ID NO: 5402973 - DNA, 25 bp, Homo sapien
caatggtggtggggactgtcttgat

SEQ ID NO: 5402974 - DNA, 25 bp, Homo sapien
ctctgtcctgtggcaatggtggtgg

SEQ ID NO: 5402975 - DNA, 25 bp, Homo sapien
cagagaggaggatatatgctggtct

SEQ ID NO: 5402976 - DNA, 25 bp, Homo sapien
gcagcacgatcactctctacgtttc

SEQ ID NO: 5402977 - DNA, 25 bp, Homo sapien
aactgcattgttctgattgtattgg

SEQ ID NO: 5402978 - DNA, 25 bp, Homo sapien
ttggtgttgagatagaccaggtaga

SEQ ID NO: 5402979 - DNA, 25 bp, Homo sapien
tccagtcctccatgtatcggagaga

SEQ ID NO: 5402980 - DNA, 25 bp, Homo sapien
cttattcttgtttatccagtcctcc

SEQ ID NO: 5402981 - DNA, 25 bp, Homo sapien
taagtaagatgtaagctttcaaggg

SEQ ID NO: 5402982 - DNA, 25 bp, Homo sapien
tcggagagagttataagtaagatgt

SEQ ID NO: 5402983 - DNA, 25 bp, Homo sapien
catcttgatagtcaaaagaggtccc

SEQ ID NO: 5402984 - DNA, 25 bp, Homo sapien
ctgagacaacgacggacttgcccat

SEQ ID NO: 5402985 - DNA, 25 bp, Homo sapien
aagaggtcccgctctgtgcttctga

SEQ ID NO: 5402986 - DNA, 25 bp, Homo sapien
tctgtgcttctgagacaacgacgga

SEQ ID NO: 5402987 - DNA, 25 bp, Homo sapien
caggaatatcaaaacaacgagcatt

SEQ ID NO: 5402988 - DNA, 25 bp, Homo sapien
aaattgaggagaagtgctgctaccg

SEQ ID NO: 5402989 - DNA, 25 bp, Homo sapien
ggcgaaatgatcagaggtaggaaat

SEQ ID NO: 5402990 - DNA, 25 bp, Homo sapien
tcctgcaatcagagatgtagctggt

SEQ ID NO: 5402991 - DNA, 25 bp, Homo sapien
acacctaactcgctgggaccgcttt

SEQ ID NO: 5402992 - DNA, 25 bp, Homo sapien
gaaccaagatgatttgccaataaca

SEQ ID NO: 5402993 - DNA, 25 bp, Homo sapien
ctgggaccgcttttatgaaccaaga

SEQ ID NO: 5402994 - DNA, 25 bp, Homo sapien
tatttcctacacctaactcgctggg

SEQ ID NO: 5402995 - DNA, 25 bp, Homo sapien
tccattacagaaatctgggagtaca

SEQ ID NO: 5402996 - DNA, 25 bp, Homo sapien
gttgagatcttccattacagaaatc

SEQ ID NO: 5402997 - DNA, 25 bp, Homo sapien
gtacagttgagatcttccattacag

SEQ ID NO: 5402998 - DNA, 25 bp, Homo sapien
tatgttggtacagttgagatcttcc

SEQ ID NO: 5402999 - DNA, 25 bp, Homo sapien
cattcttacgtcaggtggtgatgag

SEQ ID NO: 5403000 - DNA, 25 bp, Homo sapien
gagggctgtggatcataaagaaata

SEQ ID NO: 5403001 - DNA, 25 bp, Homo sapien
tttattgaggaggtaagatttgaca

SEQ ID NO: 5403002 - DNA, 25 bp, Homo sapien
tagaactaagaatattatggtgaac

SEQ ID NO: 5403003 - DNA, 25 bp, Homo sapien
cacatatagtggcatttcttaagtg

SEQ ID NO: 5403004 - DNA, 25 bp, Homo sapien
ttcacatatagtggcatttcttaag

SEQ ID NO: 5403005 - DNA, 25 bp, Homo sapien
tgtttcacatatagtggcatttctt

SEQ ID NO: 5403006 - DNA, 25 bp, Homo sapien
gtttcacatatagtggcatttctta

SEQ ID NO: 5403007 - DNA, 25 bp, Homo sapien
agcaggtgaattccaaattaccaag

SEQ ID NO: 5403008 - DNA, 25 bp, Homo sapien
ctatgggcttggctagacttcaggc

SEQ ID NO: 5403009 - DNA, 25 bp, Homo sapien
tttaagcagcagtgacaaatagtca

SEQ ID NO: 5403010 - DNA, 25 bp, Homo sapien
ccaaattaccaagccattgctctca

SEQ ID NO: 5403011 - DNA, 25 bp, Homo sapien
tgtaccagtggcaaaatgatgatga

SEQ ID NO: 5403012 - DNA, 25 bp, Homo sapien
atgatgatgagaacagaatctagcc

SEQ ID NO: 5403013 - DNA, 25 bp, Homo sapien
agaacagaatctagccgggatggtc

SEQ ID NO: 5403014 - DNA, 25 bp, Homo sapien
tgatgagaacagaatctagccggga

SEQ ID NO: 5403015 - DNA, 25 bp, Homo sapien
ttatcaatgcatcttcagataactt

SEQ ID NO: 5403016 - DNA, 25 bp, Homo sapien
tctctaactttatcaatgcatcttc

SEQ ID NO: 5403017 - DNA, 25 bp, Homo sapien
tgtgcctcttctctaactttatcaa

SEQ ID NO: 5403018 - DNA, 25 bp, Homo sapien
taactttatcaatgcatcttcagat

SEQ ID NO: 5403019 - DNA, 25 bp, Homo sapien
gggcagcagtggcacggcatatggg

SEQ ID NO: 5403020 - DNA, 25 bp, Homo sapien
cacaagcaggagttgctccaatggg

SEQ ID NO: 5403021 - DNA, 25 bp, Homo sapien
gggtgtcacaagcaggagttgctcc

SEQ ID NO: 5403022 - DNA, 25 bp, Homo sapien
ggcacggcatatgggaggcactcca

SEQ ID NO: 5403023 - DNA, 25 bp, Homo sapien
tgctctggtgtaggggcacttgggc

SEQ ID NO: 5403024 - DNA, 25 bp, Homo sapien
tgaaagcaagaggtgctctggtgta

SEQ ID NO: 5403025 - DNA, 25 bp, Homo sapien
gtgctctggtgtaggggcacttggg

SEQ ID NO: 5403026 - DNA, 25 bp, Homo sapien
tgctgaaagcaagaggtgctctggt

SEQ ID NO: 5403027 - DNA, 25 bp, Homo sapien
gacctttacaaccttagcaaatatg

SEQ ID NO: 5403028 - DNA, 25 bp, Homo sapien
agaccttaggacttgagtgcttgaa

SEQ ID NO: 5403029 - DNA, 25 bp, Homo sapien
taaagctgcaggcatagaccttagg

SEQ ID NO: 5403030 - DNA, 25 bp, Homo sapien
ccttgcaaatagatggtagaccttt

SEQ ID NO: 5403031 - DNA, 25 bp, Homo sapien
ttctgaatccggttactagtggcct

SEQ ID NO: 5403032 - DNA, 25 bp, Homo sapien
agcttttgagagcttaacatttccc

SEQ ID NO: 5403033 - DNA, 25 bp, Homo sapien
aaaatcttgtattctccatgtccct

SEQ ID NO: 5403034 - DNA, 25 bp, Homo sapien
tgcctcctacagcaaatccaggctt

SEQ ID NO: 5403035 - DNA, 25 bp, Homo sapien
agcccttctaaaaatgagacgagga

SEQ ID NO: 5403036 - DNA, 25 bp, Homo sapien
aagattaagacatatattggattca

SEQ ID NO: 5403037 - DNA, 25 bp, Homo sapien
gagccgcaggcttcaagagcataga

SEQ ID NO: 5403038 - DNA, 25 bp, Homo sapien
tattaggttcaggagtcaaaggact

SEQ ID NO: 5403039 - DNA, 25 bp, Homo sapien
cacacggtgccagagttgagtagaa

SEQ ID NO: 5403040 - DNA, 25 bp, Homo sapien
taatgaaaacgcagcacataactct

SEQ ID NO: 5403041 - DNA, 25 bp, Homo sapien
taactcttagtttgttggctgccag

SEQ ID NO: 5403042 - DNA, 25 bp, Homo sapien
caatttacaaaagtgggagtgcgag

SEQ ID NO: 5403043 - DNA, 25 bp, Homo sapien
cttctctagtgatcagcactgatct

SEQ ID NO: 5403044 - DNA, 25 bp, Homo sapien
ttctctagtgatcagcactgatctt

SEQ ID NO: 5403045 - DNA, 25 bp, Homo sapien
gaaactcaactgtacttgccaaaag

SEQ ID NO: 5403046 - DNA, 25 bp, Homo sapien
caacagaagtactgcaacatggtaa

SEQ ID NO: 5403047 - DNA, 25 bp, Homo sapien
ctgtgaccacggaatagcctcccaa

SEQ ID NO: 5403048 - DNA, 25 bp, Homo sapien
gctgtagccacaatcaccgaaatca

SEQ ID NO: 5403049 - DNA, 25 bp, Homo sapien
tccacatgacttagcagttttctcc

SEQ ID NO: 5403050 - DNA, 25 bp, Homo sapien
aatccacatgacttagcagttttct

SEQ ID NO: 5403051 - DNA, 25 bp, Homo sapien
atccacatgacttagcagttttctc

SEQ ID NO: 5403052 - DNA, 25 bp, Homo sapien
gaatccacatgacttagcagttttc

SEQ ID NO: 5403053 - DNA, 25 bp, Homo sapien
tgttcctttgaagaacctcctattg

SEQ ID NO: 5403054 - DNA, 25 bp, Homo sapien
gtatttcactttcttaacatgttcc

SEQ ID NO: 5403055 - DNA, 25 bp, Homo sapien
gaagaacctcctattgttattatgg

SEQ ID NO: 5403056 - DNA, 25 bp, Homo sapien
gttattatggacactactaccttca

SEQ ID NO: 5403057 - DNA, 25 bp, Homo sapien
tctcttatacggaccaccatatttc

SEQ ID NO: 5403058 - DNA, 25 bp, Homo sapien
tcttatacggaccaccatatttcat

SEQ ID NO: 5403059 - DNA, 25 bp, Homo sapien
gcctctcttatacggaccaccatat

SEQ ID NO: 5403060 - DNA, 25 bp, Homo sapien
aaagcctctcttatacggaccacca

SEQ ID NO: 5403061 - DNA, 25 bp, Homo sapien
catacatcttgagtcttctgtttaa

SEQ ID NO: 5403062 - DNA, 25 bp, Homo sapien
tacatcttgagtcttctgtttaata

SEQ ID NO: 5403063 - DNA, 25 bp, Homo sapien
acatcttgagtcttctgtttaataa

SEQ ID NO: 5403064 - DNA, 25 bp, Homo sapien
tcatacatcttgagtcttctgttta

SEQ ID NO: 5403065 - DNA, 25 bp, Homo sapien
gatagacataaacagagtaacaaac

SEQ ID NO: 5403066 - DNA, 25 bp, Homo sapien
cagttactaaacattcaattccatg

SEQ ID NO: 5403067 - DNA, 25 bp, Homo sapien
gttactaaacattcaattccatgca

SEQ ID NO: 5403068 - DNA, 25 bp, Homo sapien
tgtctttaaagccaggagatagaca

SEQ ID NO: 5403069 - DNA, 25 bp, Homo sapien
aagccagaagcaacgtgaaggatgc

SEQ ID NO: 5403070 - DNA, 25 bp, Homo sapien
tcctccatgacaatgtattttttct

SEQ ID NO: 5403071 - DNA, 25 bp, Homo sapien
tggccccataagagctgcgctcaga

SEQ ID NO: 5403072 - DNA, 25 bp, Homo sapien
gctcagatatggctttttacacggg

SEQ ID NO: 5403073 - DNA, 25 bp, Homo sapien
caccactaaggggcaatacagcagc

SEQ ID NO: 5403074 - DNA, 25 bp, Homo sapien
ctctgtcattcccctcaccactaag

SEQ ID NO: 5403075 - DNA, 25 bp, Homo sapien
tctgtcattcccctcaccactaagg

SEQ ID NO: 5403076 - DNA, 25 bp, Homo sapien
ctcaccactaaggggcaatacagca

SEQ ID NO: 5403077 - DNA, 25 bp, Homo sapien
tcacatcattgacgtgtaatgtgcc

SEQ ID NO: 5403078 - DNA, 25 bp, Homo sapien
gtaatgtgccgttaaatgatgtcaa

SEQ ID NO: 5403079 - DNA, 25 bp, Homo sapien
tacatggtccttcaagtgaaaattc

SEQ ID NO: 5403080 - DNA, 25 bp, Homo sapien
catttaaagatacatggtccttcaa

SEQ ID NO: 5403081 - DNA, 25 bp, Homo sapien
ggttaggcctatttcaatttccaca

SEQ ID NO: 5403082 - DNA, 25 bp, Homo sapien
ctatttcaatttccacattctccat

SEQ ID NO: 5403083 - DNA, 25 bp, Homo sapien
gcctatttcaatttccacattctcc

SEQ ID NO: 5403084 - DNA, 25 bp, Homo sapien
ttaggcctatttcaatttccacatt

SEQ ID NO: 5403085 - DNA, 25 bp, Homo sapien
gcacaaattgacttcgcagtaaatc

SEQ ID NO: 5403086 - DNA, 25 bp, Homo sapien
gacttcgcagtaaatctaaagtaaa

SEQ ID NO: 5403087 - DNA, 25 bp, Homo sapien
attgattctccatgaaactgctggg

SEQ ID NO: 5403088 - DNA, 25 bp, Homo sapien
tttccactctaattgattctccatg

SEQ ID NO: 5403089 - DNA, 25 bp, Homo sapien
ttcacaccctaatactcctttcttc

SEQ ID NO: 5403090 - DNA, 25 bp, Homo sapien
ctttcacaccctaatactcctttct

SEQ ID NO: 5403091 - DNA, 25 bp, Homo sapien
aatcttagacgccattttacatgag

SEQ ID NO: 5403092 - DNA, 25 bp, Homo sapien
cagcacctttcttgaatcttagacg

SEQ ID NO: 5403093 - DNA, 25 bp, Homo sapien
tcttgaatcttagacgccattttac

SEQ ID NO: 5403094 - DNA, 25 bp, Homo sapien
tagacgccattttacatgaggacaa

SEQ ID NO: 5403095 - DNA, 25 bp, Homo sapien
cttgtctagtgctattccatttaat

SEQ ID NO: 5403096 - DNA, 25 bp, Homo sapien
tattaactgcctgaacatatgccat

SEQ ID NO: 5403097 - DNA, 25 bp, Homo sapien
ttattaactgcctgaacatatgcca

SEQ ID NO: 5403098 - DNA, 25 bp, Homo sapien
gtctagtgctattccatttaatttt

SEQ ID NO: 5403099 - DNA, 25 bp, Homo sapien
tagtccctgtctctgccgatccaat

SEQ ID NO: 5403100 - DNA, 25 bp, Homo sapien
gatccaatttcatcgtgctctgcaa

SEQ ID NO: 5403101 - DNA, 25 bp, Homo sapien
tagaggatgtatgcacaggactccg

SEQ ID NO: 5403102 - DNA, 25 bp, Homo sapien
taaaattagcagaagcttgtcaggg

SEQ ID NO: 5403103 - DNA, 25 bp, Homo sapien
aaaggcataaagaagtgtctaatat

SEQ ID NO: 5403104 - DNA, 25 bp, Homo sapien
taatagcctgaaccaaataatttct

SEQ ID NO: 5403105 - DNA, 25 bp, Homo sapien
cataaagaagtgtctaatatcttca

SEQ ID NO: 5403106 - DNA, 25 bp, Homo sapien
ttaatagcctgaaccaaataatttc

SEQ ID NO: 5403107 - DNA, 25 bp, Homo sapien
ttgtcagaaaccagttgcctgcctg

SEQ ID NO: 5403108 - DNA, 25 bp, Homo sapien
gcctgcctgcaattgtgcgctgctg

SEQ ID NO: 5403109 - DNA, 25 bp, Homo sapien
ggacagtattgatctcttgtcagaa

SEQ ID NO: 5403110 - DNA, 25 bp, Homo sapien
cagcttgactccagcgtttggaagg

SEQ ID NO: 5403111 - DNA, 25 bp, Homo sapien
gatgatcttacttgatgaaaaggcc

SEQ ID NO: 5403112 - DNA, 25 bp, Homo sapien
aaaaggccactgcaattagtgcatg

SEQ ID NO: 5403113 - DNA, 25 bp, Homo sapien
caaagggtatctgctaaatgctcta

SEQ ID NO: 5403114 - DNA, 25 bp, Homo sapien
tgacagtccaatcatactcaaggag

SEQ ID NO: 5403115 - DNA, 25 bp, Homo sapien
cattcctactaacaagtttattgta

SEQ ID NO: 5403116 - DNA, 25 bp, Homo sapien
acagaagtggatattgcataacagc

SEQ ID NO: 5403117 - DNA, 25 bp, Homo sapien
cttatgcactaacactaacagaagt

SEQ ID NO: 5403118 - DNA, 25 bp, Homo sapien
catgatggtgccaatatgttgctta

SEQ ID NO: 5403119 - DNA, 25 bp, Homo sapien
tccaaacagcagtctcttctcgatg

SEQ ID NO: 5403120 - DNA, 25 bp, Homo sapien
cagcagtctcttctcgatgctttcc

SEQ ID NO: 5403121 - DNA, 25 bp, Homo sapien
gcagtctcttctcgatgctttccat

SEQ ID NO: 5403122 - DNA, 25 bp, Homo sapien
aacagcagtctcttctcgatgcttt

SEQ ID NO: 5403123 - DNA, 25 bp, Homo sapien
tcagtaggcaaatggtccagaaggt

SEQ ID NO: 5403124 - DNA, 25 bp, Homo sapien
taggaagtatcaaacctggaaggta

SEQ ID NO: 5403125 - DNA, 25 bp, Homo sapien
ggtagatagagtttgatatactcct

SEQ ID NO: 5403126 - DNA, 25 bp, Homo sapien
tatactccttaaaaggtgatacttc

SEQ ID NO: 5403127 - DNA, 25 bp, Homo sapien
tttgtggctgagaaggatcctgaag

SEQ ID NO: 5403128 - DNA, 25 bp, Homo sapien
cctttgtggctgagaaggatcctga

SEQ ID NO: 5403129 - DNA, 25 bp, Homo sapien
ctttgtggctgagaaggatcctgaa

SEQ ID NO: 5403130 - DNA, 25 bp, Homo sapien
tgttttggagtcaaatgcatcttca

SEQ ID NO: 5403131 - DNA, 25 bp, Homo sapien
gctctctaaatgttttggagtcaaa

SEQ ID NO: 5403132 - DNA, 25 bp, Homo sapien
ccttttttgcatgtccctctgacag

SEQ ID NO: 5403133 - DNA, 25 bp, Homo sapien
atgtccctctgacagctgatgcaag

SEQ ID NO: 5403134 - DNA, 25 bp, Homo sapien
cctcacttgaggcatcatcaaataa

SEQ ID NO: 5403135 - DNA, 25 bp, Homo sapien
catctcagataaggaaaagatctat

SEQ ID NO: 5403136 - DNA, 25 bp, Homo sapien
gacaattgttcagtaatgatgccca

SEQ ID NO: 5403137 - DNA, 25 bp, Homo sapien
tttccaatcagacagccaaccatca

SEQ ID NO: 5403138 - DNA, 25 bp, Homo sapien
tgtttacagtaatatcccagggcat

SEQ ID NO: 5403139 - DNA, 25 bp, Homo sapien
aattgctggctcattgctctactgt

SEQ ID NO: 5403140 - DNA, 25 bp, Homo sapien
tctccttaccacaccagatgttaag

SEQ ID NO: 5403141 - DNA, 25 bp, Homo sapien
cttgaaggtgtagttccaaaggtca

SEQ ID NO: 5403142 - DNA, 25 bp, Homo sapien
taaatgacaccccagttgaagagct

SEQ ID NO: 5403143 - DNA, 25 bp, Homo sapien
tcagtggataagaagagggcagcat

SEQ ID NO: 5403144 - DNA, 25 bp, Homo sapien
taacccagtgtttggcgttgggaca

SEQ ID NO: 5403145 - DNA, 25 bp, Homo sapien
gacagggaaaatggcgagcttcttt

SEQ ID NO: 5403146 - DNA, 25 bp, Homo sapien
cattagaggatatagcatcgagttg

SEQ ID NO: 5403147 - DNA, 25 bp, Homo sapien
tagcatcgagttgtattgcctctac

SEQ ID NO: 5403148 - DNA, 25 bp, Homo sapien
gtaaacattagaggatatagcatcg

SEQ ID NO: 5403149 - DNA, 25 bp, Homo sapien
atctgtaaacattagaggatatagc

SEQ ID NO: 5403150 - DNA, 25 bp, Homo sapien
acattagaagccgacactcttagca

SEQ ID NO: 5403151 - DNA, 25 bp, Homo sapien
caggactctaagccgtaaacttgta

SEQ ID NO: 5403152 - DNA, 25 bp, Homo sapien
aacttgtaagtacattagaagccga

SEQ ID NO: 5403153 - DNA, 25 bp, Homo sapien
tttgctgaattgctggcagcatcaa

SEQ ID NO: 5403154 - DNA, 25 bp, Homo sapien
gactagtacatctgttctgtgaaga

SEQ ID NO: 5403155 - DNA, 25 bp, Homo sapien
tcaccagccaagctgactagtacat

SEQ ID NO: 5403156 - DNA, 25 bp, Homo sapien
caagctgactagtacatctgttctg

SEQ ID NO: 5403157 - DNA, 25 bp, Homo sapien
ccagccaagctgactagtacatctg

SEQ ID NO: 5403158 - DNA, 25 bp, Homo sapien
gcacctctgaggttggaggcaagga

SEQ ID NO: 5403159 - DNA, 25 bp, Homo sapien
catttggaggtatccctggttttct

SEQ ID NO: 5403160 - DNA, 25 bp, Homo sapien
aggagctgcacgtccatttggaggt

SEQ ID NO: 5403161 - DNA, 25 bp, Homo sapien
tctgaggttggaggcaaggaggaca

SEQ ID NO: 5403162 - DNA, 25 bp, Homo sapien
ccacatgggaggacttcacagaggg

SEQ ID NO: 5403163 - DNA, 25 bp, Homo sapien
cctggattccttcaaccctggtggt

SEQ ID NO: 5403164 - DNA, 25 bp, Homo sapien
cttcaaccctggtggttctccacat

SEQ ID NO: 5403165 - DNA, 25 bp, Homo sapien
ctgccacatgggaggacttcacaga

SEQ ID NO: 5403166 - DNA, 25 bp, Homo sapien
gacgcctgattcctgcttaacatcc

SEQ ID NO: 5403167 - DNA, 25 bp, Homo sapien
cagatctgacgcctgattcctgctt

SEQ ID NO: 5403168 - DNA, 25 bp, Homo sapien
aaatgcagatctgacgcctgattcc

SEQ ID NO: 5403169 - DNA, 25 bp, Homo sapien
tctgacgcctgattcctgcttaaca

SEQ ID NO: 5403170 - DNA, 25 bp, Homo sapien
ccaaaagaatatggccacatttcag

SEQ ID NO: 5403171 - DNA, 25 bp, Homo sapien
atgacaagtgttgatatcactaaaa

SEQ ID NO: 5403172 - DNA, 25 bp, Homo sapien
gttccaaaagaatatggccacattt

SEQ ID NO: 5403173 - DNA, 25 bp, Homo sapien
ttccaaaagaatatggccacatttc

SEQ ID NO: 5403174 - DNA, 25 bp, Homo sapien
taactgaaaattcacattttactac

SEQ ID NO: 5403175 - DNA, 25 bp, Homo sapien
ttcatgatgccatatttaataactg

SEQ ID NO: 5403176 - DNA, 25 bp, Homo sapien
tttactacaattgcatttgtcactg

SEQ ID NO: 5403177 - DNA, 25 bp, Homo sapien
attcatgatgccatatttaataact

SEQ ID NO: 5403178 - DNA, 25 bp, Homo sapien
agtggctttcactaacactagcaaa

SEQ ID NO: 5403179 - DNA, 25 bp, Homo sapien
cttgcttcacacagccatgggcaat

SEQ ID NO: 5403180 - DNA, 25 bp, Homo sapien
ttgcttcacacagccatgggcaatg

SEQ ID NO: 5403181 - DNA, 25 bp, Homo sapien
ggctttcactaacactagcaaaagc

SEQ ID NO: 5403182 - DNA, 25 bp, Homo sapien
tttcagacccgctaccaccaaatgt

SEQ ID NO: 5403183 - DNA, 25 bp, Homo sapien
ccgctaccaccaaatgtcccattct

SEQ ID NO: 5403184 - DNA, 25 bp, Homo sapien
tgcttccagcttattggtttgcccc

SEQ ID NO: 5403185 - DNA, 25 bp, Homo sapien
agttgattttcagacccgctaccac

SEQ ID NO: 5403186 - DNA, 25 bp, Homo sapien
cagcaggtgccatggaatagcttgt

SEQ ID NO: 5403187 - DNA, 25 bp, Homo sapien
ctgtgaagttgactgcagcacagca

SEQ ID NO: 5403188 - DNA, 25 bp, Homo sapien
gcatgttcaatgttcaaggagttaa

SEQ ID NO: 5403189 - DNA, 25 bp, Homo sapien
gagtagatcaaaagagggtttggaa

SEQ ID NO: 5403190 - DNA, 25 bp, Homo sapien
ccttcttggcgtgcacacccggagg

SEQ ID NO: 5403191 - DNA, 25 bp, Homo sapien
ttggcgtgcacacccggaggagcat

SEQ ID NO: 5403192 - DNA, 25 bp, Homo sapien
gcacacccggaggagcataattata

SEQ ID NO: 5403193 - DNA, 25 bp, Homo sapien
acccggaggagcataattataggca

SEQ ID NO: 5403194 - DNA, 25 bp, Homo sapien
catcaaatgtgtgtcagtaagatcc

SEQ ID NO: 5403195 - DNA, 25 bp, Homo sapien
cagctgaggcaaaataactcataca

SEQ ID NO: 5403196 - DNA, 25 bp, Homo sapien
gatcacaatagcatagtgtctctag

SEQ ID NO: 5403197 - DNA, 25 bp, Homo sapien
taacatagtgtcaatagagtaacag

SEQ ID NO: 5403198 - DNA, 25 bp, Homo sapien
tagtcttttatgtttgcgatcccaa

SEQ ID NO: 5403199 - DNA, 25 bp, Homo sapien
ccaaggttcctccttagtgattaca

SEQ ID NO: 5403200 - DNA, 25 bp, Homo sapien
tacatttagtaactccctttcgctg

SEQ ID NO: 5403201 - DNA, 25 bp, Homo sapien
tctgaaagcacaggcagtttttcca

SEQ ID NO: 5403202 - DNA, 25 bp, Homo sapien
gaaaagttggtctcatagtgcaaac

SEQ ID NO: 5403203 - DNA, 25 bp, Homo sapien
aatcaatgccagaatggtcaacagc

SEQ ID NO: 5403204 - DNA, 25 bp, Homo sapien
tgggcagaatcaatgccagaatggt

SEQ ID NO: 5403205 - DNA, 25 bp, Homo sapien
catagtgcaaacaatacttcttggt

SEQ ID NO: 5403206 - DNA, 25 bp, Homo sapien
ttttcaaagatcttatggccaaaga

SEQ ID NO: 5403207 - DNA, 25 bp, Homo sapien
ttcaaagatcttatggccaaagata

SEQ ID NO: 5403208 - DNA, 25 bp, Homo sapien
caaagatcttatggccaaagataaa

SEQ ID NO: 5403209 - DNA, 25 bp, Homo sapien
ataaattgcaatctgaaatccataa

SEQ ID NO: 5403210 - DNA, 25 bp, Homo sapien
gcagatgttgaacttgcaggaatca

SEQ ID NO: 5403211 - DNA, 25 bp, Homo sapien
gcaacagttgaacagagggaccatt

SEQ ID NO: 5403212 - DNA, 25 bp, Homo sapien
cagcagggcctactaacgtggagaa

SEQ ID NO: 5403213 - DNA, 25 bp, Homo sapien
aatgagtttagcatacactgaggag

SEQ ID NO: 5403214 - DNA, 25 bp, Homo sapien
agcgctcctctgcctttcgaagacg

SEQ ID NO: 5403215 - DNA, 25 bp, Homo sapien
gctcctctgcctttcgaagacgact

SEQ ID NO: 5403216 - DNA, 25 bp, Homo sapien
ctctgcctttcgaagacgactccgg

SEQ ID NO: 5403217 - DNA, 25 bp, Homo sapien
tcctctgcctttcgaagacgactcc

SEQ ID NO: 5403218 - DNA, 25 bp, Homo sapien
tcaaggtcttggtagagagattgag

SEQ ID NO: 5403219 - DNA, 25 bp, Homo sapien
cacatcagagatcaaggtcttggta

SEQ ID NO: 5403220 - DNA, 25 bp, Homo sapien
tttgacaaagttccacatcagagat

SEQ ID NO: 5403221 - DNA, 25 bp, Homo sapien
catttgacaaagttccacatcagag

SEQ ID NO: 5403222 - DNA, 25 bp, Homo sapien
tagaataatgccaaattcttcaata

SEQ ID NO: 5403223 - DNA, 25 bp, Homo sapien
aatatgtacaggcagcttgtaaaca

SEQ ID NO: 5403224 - DNA, 25 bp, Homo sapien
cttcaatatgtacaggcagcttgta

SEQ ID NO: 5403225 - DNA, 25 bp, Homo sapien
atgtacaggcagcttgtaaacactg

SEQ ID NO: 5403226 - DNA, 25 bp, Homo sapien
tctgtagccctcatcgcatctctaa

SEQ ID NO: 5403227 - DNA, 25 bp, Homo sapien
catctctaattacttgctttcccag

SEQ ID NO: 5403228 - DNA, 25 bp, Homo sapien
tgactgcaagcaattgtttccactt

SEQ ID NO: 5403229 - DNA, 25 bp, Homo sapien
tacatggagagaattccgtgtttaa

SEQ ID NO: 5403230 - DNA, 25 bp, Homo sapien
ccaggtcaatgtctcgggactgaga

SEQ ID NO: 5403231 - DNA, 25 bp, Homo sapien
gagaacatgcagctgagggaagaca

SEQ ID NO: 5403232 - DNA, 25 bp, Homo sapien
ttaaaagtaagcctgttgtcctgtc

SEQ ID NO: 5403233 - DNA, 25 bp, Homo sapien
ggaagacagggcatagctatctgca

SEQ ID NO: 5403234 - DNA, 25 bp, Homo sapien
agctctctgcaagggtgtagctgga

SEQ ID NO: 5403235 - DNA, 25 bp, Homo sapien
tcggagacatcaggaaccatagggc

SEQ ID NO: 5403236 - DNA, 25 bp, Homo sapien
gaagagaagctttagtgagtcatag

SEQ ID NO: 5403237 - DNA, 25 bp, Homo sapien
tggctatcaccagggaatgcattga

SEQ ID NO: 5403238 - DNA, 25 bp, Homo sapien
caagataggagcaggcactaacagt

SEQ ID NO: 5403239 - DNA, 25 bp, Homo sapien
cactaacagtgaggagaaaccaggc

SEQ ID NO: 5403240 - DNA, 25 bp, Homo sapien
caggtcccaaagagtacagagatgc

SEQ ID NO: 5403241 - DNA, 25 bp, Homo sapien
taggtccacagcactgacttgggca

SEQ ID NO: 5403242 - DNA, 25 bp, Homo sapien
tgagtgaccacgtgcagagccacct

SEQ ID NO: 5403243 - DNA, 25 bp, Homo sapien
cacctccagaggcatagaaacccag

SEQ ID NO: 5403244 - DNA, 25 bp, Homo sapien
atgagtgaccacgtgcagagccacc

SEQ ID NO: 5403245 - DNA, 25 bp, Homo sapien
taaatgcaatcaccctctgtgtgta

SEQ ID NO: 5403246 - DNA, 25 bp, Homo sapien
agttaactattcctaaaccatgagg

SEQ ID NO: 5403247 - DNA, 25 bp, Homo sapien
gaggtctgctgtcatctattgtgct

SEQ ID NO: 5403248 - DNA, 25 bp, Homo sapien
tataagctatggacttaatgctcag

SEQ ID NO: 5403249 - DNA, 25 bp, Homo sapien
ccaatatgtacttgattctttaaga

SEQ ID NO: 5403250 - DNA, 25 bp, Homo sapien
tatccttcgttagagtaaaaatggc

SEQ ID NO: 5403251 - DNA, 25 bp, Homo sapien
catagaattgacacaaactccgtcc

SEQ ID NO: 5403252 - DNA, 25 bp, Homo sapien
gacacagccaaactacatcatgtac

SEQ ID NO: 5403253 - DNA, 25 bp, Homo sapien
aacccattaaatggctttgggcctg

SEQ ID NO: 5403254 - DNA, 25 bp, Homo sapien
gtgtctcctgcagtcagtttaccca

SEQ ID NO: 5403255 - DNA, 25 bp, Homo sapien
tgtgctgaccactaaagagctgagt

SEQ ID NO: 5403256 - DNA, 25 bp, Homo sapien
tgagtctcctcttcaaccttcaagt

SEQ ID NO: 5403257 - DNA, 25 bp, Homo sapien
gacaaggaccgcatttttaggtgaa

SEQ ID NO: 5403258 - DNA, 25 bp, Homo sapien
atggctgtgtgacaaggaccgcatt

SEQ ID NO: 5403259 - DNA, 25 bp, Homo sapien
tcaagagtgctgatcagttgggtcg

SEQ ID NO: 5403260 - DNA, 25 bp, Homo sapien
tcccacaacagatgggggaaggcca

SEQ ID NO: 5403261 - DNA, 25 bp, Homo sapien
cttgattgccaggatcaccggtcat

SEQ ID NO: 5403262 - DNA, 25 bp, Homo sapien
cagcttagtttactgaaagcattac

SEQ ID NO: 5403263 - DNA, 25 bp, Homo sapien
tggtcagcttagtttactgaaagca

SEQ ID NO: 5403264 - DNA, 25 bp, Homo sapien
gattgccaggatcaccggtcatgtc

SEQ ID NO: 5403265 - DNA, 25 bp, Homo sapien
caatgttgaacagctctcttgacct

SEQ ID NO: 5403266 - DNA, 25 bp, Homo sapien
tacaaaattgttctcatatggctgg

SEQ ID NO: 5403267 - DNA, 25 bp, Homo sapien
cagaaattagcacatttggagtcca

SEQ ID NO: 5403268 - DNA, 25 bp, Homo sapien
gagtccacgtgaccatggtcacaat

SEQ ID NO: 5403269 - DNA, 25 bp, Homo sapien
ctgataccaaattgagggcaacctg

SEQ ID NO: 5403270 - DNA, 25 bp, Homo sapien
tctgttcattaagcagtaagcctgg

SEQ ID NO: 5403271 - DNA, 25 bp, Homo sapien
tataggaacccaagaagaagaactg

SEQ ID NO: 5403272 - DNA, 25 bp, Homo sapien
cagcaactctgatttactgagggta

SEQ ID NO: 5403273 - DNA, 25 bp, Homo sapien
tggcacggatttctgtgcaagagag

SEQ ID NO: 5403274 - DNA, 25 bp, Homo sapien
gcacggatttctgtgcaagagagca

SEQ ID NO: 5403275 - DNA, 25 bp, Homo sapien
cacggatttctgtgcaagagagcac

SEQ ID NO: 5403276 - DNA, 25 bp, Homo sapien
tgctggcacggatttctgtgcaaga

SEQ ID NO: 5403277 - DNA, 25 bp, Homo sapien
gcctgttaattcacaagtcactgga

SEQ ID NO: 5403278 - DNA, 25 bp, Homo sapien
gcatgctgatctccaaaggaactga

SEQ ID NO: 5403279 - DNA, 25 bp, Homo sapien
ccttgtactggctaaagtgcaaacc

SEQ ID NO: 5403280 - DNA, 25 bp, Homo sapien
tgagattgggaacccttctccagaa

SEQ ID NO: 5403281 - DNA, 25 bp, Homo sapien
agccaaaggctatcaccagcttcat

SEQ ID NO: 5403282 - DNA, 25 bp, Homo sapien
ccccagagtgtgacacgtgggaggg

SEQ ID NO: 5403283 - DNA, 25 bp, Homo sapien
gtggaatgatcaccaaagatacctg

SEQ ID NO: 5403284 - DNA, 25 bp, Homo sapien
ccaaagatacctgatccaagaggca

SEQ ID NO: 5403285 - DNA, 25 bp, Homo sapien
gtgcttctcagaatctttgtgctta

SEQ ID NO: 5403286 - DNA, 25 bp, Homo sapien
catccgtcataaggaacatgcttgt

SEQ ID NO: 5403287 - DNA, 25 bp, Homo sapien
tgtattatgtgttctgacccaggca

SEQ ID NO: 5403288 - DNA, 25 bp, Homo sapien
ttttaagagactccaacttactctg

SEQ ID NO: 5403289 - DNA, 25 bp, Homo sapien
caatctccgctagatgccagcaaga

SEQ ID NO: 5403290 - DNA, 25 bp, Homo sapien
cttggaccttatgatgaaaatcttc

SEQ ID NO: 5403291 - DNA, 25 bp, Homo sapien
ttggaccttatgatgaaaatcttcc

SEQ ID NO: 5403292 - DNA, 25 bp, Homo sapien
tgcattatgtaagaagaccattctt

SEQ ID NO: 5403293 - DNA, 25 bp, Homo sapien
tatgtaagaagaccattcttattca

SEQ ID NO: 5403294 - DNA, 25 bp, Homo sapien
cattatgtaagaagaccattcttat

SEQ ID NO: 5403295 - DNA, 25 bp, Homo sapien
ctgcattatgtaagaagaccattct

SEQ ID NO: 5403296 - DNA, 25 bp, Homo sapien
tctattaagcaatttgaaaggactg

SEQ ID NO: 5403297 - DNA, 25 bp, Homo sapien
gtgtagcctgcagtgtaataaacct

SEQ ID NO: 5403298 - DNA, 25 bp, Homo sapien
gactggtgtagcctgcagtgtaata

SEQ ID NO: 5403299 - DNA, 25 bp, Homo sapien
tgaaaggactggtgtagcctgcagt

SEQ ID NO: 5403300 - DNA, 25 bp, Homo sapien
ctggatggctgaacccctgttcata

SEQ ID NO: 5403301 - DNA, 25 bp, Homo sapien
tgacccacttaactgtccacactgt

SEQ ID NO: 5403302 - DNA, 25 bp, Homo sapien
tgtccacactgtcagatcccatgac

SEQ ID NO: 5403303 - DNA, 25 bp, Homo sapien
tgttcatagactcaacagaagtgct

SEQ ID NO: 5403304 - DNA, 25 bp, Homo sapien
gatgttcccaaaaactcccatggct

SEQ ID NO: 5403305 - DNA, 25 bp, Homo sapien
aatcggacttctgccccttactagg

SEQ ID NO: 5403306 - DNA, 25 bp, Homo sapien
tcacattggagaggcaccatagcac

SEQ ID NO: 5403307 - DNA, 25 bp, Homo sapien
cccttagaggagtaaattgctgcac

SEQ ID NO: 5403308 - DNA, 25 bp, Homo sapien
taggtcagggtgaagctccaccaaa

SEQ ID NO: 5403309 - DNA, 25 bp, Homo sapien
gcctgcccaagtgctaggaattgca

SEQ ID NO: 5403310 - DNA, 25 bp, Homo sapien
cctaaagcaatacttgtgtcgagag

SEQ ID NO: 5403311 - DNA, 25 bp, Homo sapien
tgagctcctgggtataagctatcct

SEQ ID NO: 5403312 - DNA, 25 bp, Homo sapien
cataagcctctactattctgtggga

SEQ ID NO: 5403313 - DNA, 25 bp, Homo sapien
caatgcagcatggaaacacaagggt

SEQ ID NO: 5403314 - DNA, 25 bp, Homo sapien
gtactttaatacagctgcctggcaa

SEQ ID NO: 5403315 - DNA, 25 bp, Homo sapien
tttattgaacagcagggctccgggc

SEQ ID NO: 5403316 - DNA, 25 bp, Homo sapien
tacatcgccactaaattgattgtct

SEQ ID NO: 5403317 - DNA, 25 bp, Homo sapien
agcaagattgaaagcctccattaat

SEQ ID NO: 5403318 - DNA, 25 bp, Homo sapien
tgtgatagagtccacataactgtgc

SEQ ID NO: 5403319 - DNA, 25 bp, Homo sapien
taaagtagcagtgccagcaagattg

SEQ ID NO: 5403320 - DNA, 25 bp, Homo sapien
taggcctcaaacagaaccaagcttg

SEQ ID NO: 5403321 - DNA, 25 bp, Homo sapien
tgcagtctgacatgggtgttctccc

SEQ ID NO: 5403322 - DNA, 25 bp, Homo sapien
aaagagcaacgatttcacagggagc

SEQ ID NO: 5403323 - DNA, 25 bp, Homo sapien
cacagggagcgattctgacctaaac

SEQ ID NO: 5403324 - DNA, 25 bp, Homo sapien
acatcctgttgctctgcatgaatct

SEQ ID NO: 5403325 - DNA, 25 bp, Homo sapien
gaatctgtaagtgccaagttacgcc

SEQ ID NO: 5403326 - DNA, 25 bp, Homo sapien
catgaatctgtaagtgccaagttac

SEQ ID NO: 5403327 - DNA, 25 bp, Homo sapien
catcctgttgctctgcatgaatctg

SEQ ID NO: 5403328 - DNA, 25 bp, Homo sapien
aaatgcagtagttaaaactcgacat

SEQ ID NO: 5403329 - DNA, 25 bp, Homo sapien
taaaaatgcagtagttaaaactcga

SEQ ID NO: 5403330 - DNA, 25 bp, Homo sapien
aaaatgcagtagttaaaactcgaca

SEQ ID NO: 5403331 - DNA, 25 bp, Homo sapien
catgttcaagtcaggtaactcctat

SEQ ID NO: 5403332 - DNA, 25 bp, Homo sapien
ggtgcaagtctaggctttcacttag

SEQ ID NO: 5403333 - DNA, 25 bp, Homo sapien
gaccttctcatagctaagagttgaa

SEQ ID NO: 5403334 - DNA, 25 bp, Homo sapien
agagttgaaagtcctggattcccac

SEQ ID NO: 5403335 - DNA, 25 bp, Homo sapien
ctactcacagggagtctcgctgatt

SEQ ID NO: 5403336 - DNA, 25 bp, Homo sapien
accacgagattataagccgcacctg

SEQ ID NO: 5403337 - DNA, 25 bp, Homo sapien
caccacgagattataagccgcacct

SEQ ID NO: 5403338 - DNA, 25 bp, Homo sapien
ctcggagggtcctactcacagggag

SEQ ID NO: 5403339 - DNA, 25 bp, Homo sapien
ccagctgggccactggtgtgatgtg

SEQ ID NO: 5403340 - DNA, 25 bp, Homo sapien
gtctccccgagatctcctgacttct

SEQ ID NO: 5403341 - DNA, 25 bp, Homo sapien
ataggggttgtggcagttctgaata

SEQ ID NO: 5403342 - DNA, 25 bp, Homo sapien
gatgtggggcctgactggtgaggga

SEQ ID NO: 5403343 - DNA, 25 bp, Homo sapien
caatgctgtcaatcagagtttgagc

SEQ ID NO: 5403344 - DNA, 25 bp, Homo sapien
gagctcctgctccagatatgattaa

SEQ ID NO: 5403345 - DNA, 25 bp, Homo sapien
ccagatatgattaacctgattgtca

SEQ ID NO: 5403346 - DNA, 25 bp, Homo sapien
tatgtgacctcagtgcaatgctgtc

SEQ ID NO: 5403347 - DNA, 25 bp, Homo sapien
tctggttgtgtaaggaatccacagc

SEQ ID NO: 5403348 - DNA, 25 bp, Homo sapien
cagccatggctcgctggttgcaaag

SEQ ID NO: 5403349 - DNA, 25 bp, Homo sapien
aggaggctccgccagctgtctggtt

SEQ ID NO: 5403350 - DNA, 25 bp, Homo sapien
cagctgtctggttgtgtaaggaatc

SEQ ID NO: 5403351 - DNA, 25 bp, Homo sapien
tggatgctctctgtctgcaataact

SEQ ID NO: 5403352 - DNA, 25 bp, Homo sapien
tctgcaataacttgttttcagtccc

SEQ ID NO: 5403353 - DNA, 25 bp, Homo sapien
tttggatgctctctgtctgcaataa

SEQ ID NO: 5403354 - DNA, 25 bp, Homo sapien
tgtctgcaataacttgttttcagtc

SEQ ID NO: 5403355 - DNA, 25 bp, Homo sapien
taaattcgcaaatagttacagcaga

SEQ ID NO: 5403356 - DNA, 25 bp, Homo sapien
taaatatctgggctgaagagtttgc

SEQ ID NO: 5403357 - DNA, 25 bp, Homo sapien
gacagtaacacaagtaaagcagttt

SEQ ID NO: 5403358 - DNA, 25 bp, Homo sapien
gtttgcttacagcatagtctacctg

SEQ ID NO: 5403359 - DNA, 25 bp, Homo sapien
gttcattttatttacggtctctcaa

SEQ ID NO: 5403360 - DNA, 25 bp, Homo sapien
tcattttatttacggtctctcaacc

SEQ ID NO: 5403361 - DNA, 25 bp, Homo sapien
acagttcattttatttacggtctct

SEQ ID NO: 5403362 - DNA, 25 bp, Homo sapien
tccttttagtcaccggttttgatca

SEQ ID NO: 5403363 - DNA, 25 bp, Homo sapien
cactgtggtttcaggtcaatgctcc

SEQ ID NO: 5403364 - DNA, 25 bp, Homo sapien
ctcagcaggtgagaaaatctttagt

SEQ ID NO: 5403365 - DNA, 25 bp, Homo sapien
gacaggcagtgctaaagcaaggcac

SEQ ID NO: 5403366 - DNA, 25 bp, Homo sapien
ggcacttgtaagttcatatcctggc

SEQ ID NO: 5403367 - DNA, 25 bp, Homo sapien
taactgaaatgcttaagaggacgcg

SEQ ID NO: 5403368 - DNA, 25 bp, Homo sapien
gcttttggcaatgcagcgtgtctgc

SEQ ID NO: 5403369 - DNA, 25 bp, Homo sapien
gtaatgcaacgtctggcttttggca

SEQ ID NO: 5403370 - DNA, 25 bp, Homo sapien
tgctggaacgatacacaataactga

SEQ ID NO: 5403371 - DNA, 25 bp, Homo sapien
gatgtgtaatacttgtgcccaccta

SEQ ID NO: 5403372 - DNA, 25 bp, Homo sapien
gcagtgactcatatcatgtgccata

SEQ ID NO: 5403373 - DNA, 25 bp, Homo sapien
tagacattactgaagtagcaagtgc

SEQ ID NO: 5403374 - DNA, 25 bp, Homo sapien
tacaaacaaggaatgttggacggtg

SEQ ID NO: 5403375 - DNA, 25 bp, Homo sapien
tgtgggtccccttaagatgtgtctc

SEQ ID NO: 5403376 - DNA, 25 bp, Homo sapien
tctgcctgcaggttaggaaatagca

SEQ ID NO: 5403377 - DNA, 25 bp, Homo sapien
atgccccggagccaaaatgcccttt

SEQ ID NO: 5403378 - DNA, 25 bp, Homo sapien
tgtagtccatgttctaaatccagga

SEQ ID NO: 5403379 - DNA, 25 bp, Homo sapien
gaaagtcacgtggtctttgagacaa

SEQ ID NO: 5403380 - DNA, 25 bp, Homo sapien
caaagggtacgaagttctgggagct

SEQ ID NO: 5403381 - DNA, 25 bp, Homo sapien
ttgtcaattattgctggcggtggca

SEQ ID NO: 5403382 - DNA, 25 bp, Homo sapien
caggtagaaaatgcgctgtagcccc

SEQ ID NO: 5403383 - DNA, 25 bp, Homo sapien
caggagaaggcagaaatgtcgatgt

SEQ ID NO: 5403384 - DNA, 25 bp, Homo sapien
ctgtgaccatagccagggcagcaat

SEQ ID NO: 5403385 - DNA, 25 bp, Homo sapien
ccatagccagggcagcaatgcagga

SEQ ID NO: 5403386 - DNA, 25 bp, Homo sapien
cagcaatgcaggagaaggcagaaat

SEQ ID NO: 5403387 - DNA, 25 bp, Homo sapien
cattccccaaagccacgaacgcatt

SEQ ID NO: 5403388 - DNA, 25 bp, Homo sapien
cccaaagccacgaacgcattgcaac

SEQ ID NO: 5403389 - DNA, 25 bp, Homo sapien
ctgcaagttggaggagaattcaaca

SEQ ID NO: 5403390 - DNA, 25 bp, Homo sapien
tccccaaagccacgaacgcattgca

SEQ ID NO: 5403391 - DNA, 25 bp, Homo sapien
aaaagatgagtttaccctccactgg

SEQ ID NO: 5403392 - DNA, 25 bp, Homo sapien
caaaagatgagtttaccctccactg

SEQ ID NO: 5403393 - DNA, 25 bp, Homo sapien
taagagtcacctaattactgaagag

SEQ ID NO: 5403394 - DNA, 25 bp, Homo sapien
taaaatgtagaccagtggaccttga

SEQ ID NO: 5403395 - DNA, 25 bp, Homo sapien
ggcttctgggctcgcttcttctcgt

SEQ ID NO: 5403396 - DNA, 25 bp, Homo sapien
cttgaagagcaataaatgagggatt

SEQ ID NO: 5403397 - DNA, 25 bp, Homo sapien
tatgctaatcgaaggacaaacagtt

SEQ ID NO: 5403398 - DNA, 25 bp, Homo sapien
gcaggtctgcgaagccagggatctt

SEQ ID NO: 5403399 - DNA, 25 bp, Homo sapien
tctccactcatttgatagtcagggt

SEQ ID NO: 5403400 - DNA, 25 bp, Homo sapien
ttgctggatatgctgggtgtcatct

SEQ ID NO: 5403401 - DNA, 25 bp, Homo sapien
tacgaggtcgctgctttaaatatgt

SEQ ID NO: 5403402 - DNA, 25 bp, Homo sapien
tatataacccgtgaaattgctaacc

SEQ ID NO: 5403403 - DNA, 25 bp, Homo sapien
cagactaaatacagtgccatccagc

SEQ ID NO: 5403404 - DNA, 25 bp, Homo sapien
caattagggatggtgctacgaggtc

SEQ ID NO: 5403405 - DNA, 25 bp, Homo sapien
catctatctctatggaggactggga

SEQ ID NO: 5403406 - DNA, 25 bp, Homo sapien
taataaaattgcagtccctaccagg

SEQ ID NO: 5403407 - DNA, 25 bp, Homo sapien
ctcgagctgagacgcccttttgcaa

SEQ ID NO: 5403408 - DNA, 25 bp, Homo sapien
cacagcccctggatttcatggtaga

SEQ ID NO: 5403409 - DNA, 25 bp, Homo sapien
catgggccctgacgagggcactgat

SEQ ID NO: 5403410 - DNA, 25 bp, Homo sapien
tcatagccgggttggagtcgacatg

SEQ ID NO: 5403411 - DNA, 25 bp, Homo sapien
gaatagtccaggctggtcatagccg

SEQ ID NO: 5403412 - DNA, 25 bp, Homo sapien
tgacgagggcactgatcagactcac

SEQ ID NO: 5403413 - DNA, 25 bp, Homo sapien
gtgggctcttcggtttcgagggcaa

SEQ ID NO: 5403414 - DNA, 25 bp, Homo sapien
ttcgagggcaaacgacctctccggc

SEQ ID NO: 5403415 - DNA, 25 bp, Homo sapien
gctcttcggtttcgagggcaaacga

SEQ ID NO: 5403416 - DNA, 25 bp, Homo sapien
ctcctgtgggctcttcggtttcgag

SEQ ID NO: 5403417 - DNA, 25 bp, Homo sapien
cccagtgcttgtaaagccttcactg

SEQ ID NO: 5403418 - DNA, 25 bp, Homo sapien
ccagtgcttgtaaagccttcactga

SEQ ID NO: 5403419 - DNA, 25 bp, Homo sapien
agcgattccggcgacgcttgtccac

SEQ ID NO: 5403420 - DNA, 25 bp, Homo sapien
tatttgctaaacacacgtattttgc

SEQ ID NO: 5403421 - DNA, 25 bp, Homo sapien
gcgacgcttgtccactgggcagttt

SEQ ID NO: 5403422 - DNA, 25 bp, Homo sapien
gcagtactgacagcgattccggcga

SEQ ID NO: 5403423 - DNA, 25 bp, Homo sapien
tcagtaaatacaaatccgtgggcat

SEQ ID NO: 5403424 - DNA, 25 bp, Homo sapien
taacatttgagctaaccttgccgct

SEQ ID NO: 5403425 - DNA, 25 bp, Homo sapien
ggttagctcagacacggttctctgt

SEQ ID NO: 5403426 - DNA, 25 bp, Homo sapien
ggaattctgttccacttggttagct

SEQ ID NO: 5403427 - DNA, 25 bp, Homo sapien
ccgtcgaagcgcatctggcaactag

SEQ ID NO: 5403428 - DNA, 25 bp, Homo sapien
tctgctcgatcatgtgcgtagtggc

SEQ ID NO: 5403429 - DNA, 25 bp, Homo sapien
tcacaggtgcgcacgccgtagtgtt

SEQ ID NO: 5403430 - DNA, 25 bp, Homo sapien
ttgtggagagatcccgggtcgtccc

SEQ ID NO: 5403431 - DNA, 25 bp, Homo sapien
tacaagcaaggtggcttgacgtcgt

SEQ ID NO: 5403432 - DNA, 25 bp, Homo sapien
ggcttgacgtcgtagcctgtgctgt

SEQ ID NO: 5403433 - DNA, 25 bp, Homo sapien
taatggaggactgctgtccggacag

SEQ ID NO: 5403434 - DNA, 25 bp, Homo sapien
cggacaggggcatttggtacaagca

SEQ ID NO: 5403435 - DNA, 25 bp, Homo sapien
tggtgaggtccatgctaaacttgac

SEQ ID NO: 5403436 - DNA, 25 bp, Homo sapien
tcccgaagagtggtaactgtagctc

SEQ ID NO: 5403437 - DNA, 25 bp, Homo sapien
tctggagttaagaaatcggagctgt

SEQ ID NO: 5403438 - DNA, 25 bp, Homo sapien
tccttgaggcgaggacccatactgc

SEQ ID NO: 5403439 - DNA, 25 bp, Homo sapien
gctactgagggtctacactcctggg

SEQ ID NO: 5403440 - DNA, 25 bp, Homo sapien
ccgggctcgggtacacctggagcta

SEQ ID NO: 5403441 - DNA, 25 bp, Homo sapien
gaaacagggtgataacacactcagc

SEQ ID NO: 5403442 - DNA, 25 bp, Homo sapien
aactgaacactttctcccgggctcg

SEQ ID NO: 5403443 - DNA, 25 bp, Homo sapien
cccactcatcccactcagatgagcc

SEQ ID NO: 5403444 - DNA, 25 bp, Homo sapien
actcagatgagcctcttctctgaag

SEQ ID NO: 5403445 - DNA, 25 bp, Homo sapien
ccactcagatgagcctcttctctga

SEQ ID NO: 5403446 - DNA, 25 bp, Homo sapien
catcccactcagatgagcctcttct

SEQ ID NO: 5403447 - DNA, 25 bp, Homo sapien
agttacagggtttgccttgtcctgt

SEQ ID NO: 5403448 - DNA, 25 bp, Homo sapien
tcccgaaggcgatgggtcgggcaaa

SEQ ID NO: 5403449 - DNA, 25 bp, Homo sapien
cgaaggcgatgggtcgggcaaacct

SEQ ID NO: 5403450 - DNA, 25 bp, Homo sapien
atgagaaagttgttcccgaaggcga

SEQ ID NO: 5403451 - DNA, 25 bp, Homo sapien
cttcagccgagttacaggcgttttc

SEQ ID NO: 5403452 - DNA, 25 bp, Homo sapien
cagccgagttacaggcgttttcgag

SEQ ID NO: 5403453 - DNA, 25 bp, Homo sapien
acagtgtcgtaattcaatgaaggac

SEQ ID NO: 5403454 - DNA, 25 bp, Homo sapien
tcgaggaaattaaaggtggacagtg

SEQ ID NO: 5403455 - DNA, 25 bp, Homo sapien
ttcagctgggcatatgtagactcac

SEQ ID NO: 5403456 - DNA, 25 bp, Homo sapien
ggtttcttcccgacagagattcagc

SEQ ID NO: 5403457 - DNA, 25 bp, Homo sapien
gggtttcttcccgacagagattcag

SEQ ID NO: 5403458 - DNA, 25 bp, Homo sapien
acagagattcagctgggcatatgta

SEQ ID NO: 5403459 - DNA, 25 bp, Homo sapien
ttccctgtttgtctcattggaaatg

SEQ ID NO: 5403460 - DNA, 25 bp, Homo sapien
gccttccctgtttgtctcattggaa

SEQ ID NO: 5403461 - DNA, 25 bp, Homo sapien
gaaatgagtgggaagcctttaccaa

SEQ ID NO: 5403462 - DNA, 25 bp, Homo sapien
tcattggaaatgagtgggaagcctt

SEQ ID NO: 5403463 - DNA, 25 bp, Homo sapien
gatacattcgcaaacccaaggacag

SEQ ID NO: 5403464 - DNA, 25 bp, Homo sapien
tactcaacaatacccgggaaacatc

SEQ ID NO: 5403465 - DNA, 25 bp, Homo sapien
gagtctccgtgttcacaggccacaa

SEQ ID NO: 5403466 - DNA, 25 bp, Homo sapien
tagtaacaggacacgctaccaacac

SEQ ID NO: 5403467 - DNA, 25 bp, Homo sapien
attttaaggtgggaaccgctctgcg

SEQ ID NO: 5403468 - DNA, 25 bp, Homo sapien
cgttcaccttggtagccagcttggg

SEQ ID NO: 5403469 - DNA, 25 bp, Homo sapien
tatatttccgacctgacgtcacgag

SEQ ID NO: 5403470 - DNA, 25 bp, Homo sapien
aacatgcacctaaagtctccgcgcg

SEQ ID NO: 5403471 - DNA, 25 bp, Homo sapien
catgacacgagacgctcagagggct

SEQ ID NO: 5403472 - DNA, 25 bp, Homo sapien
tagcggaagagcgtacagatgtccc

SEQ ID NO: 5403473 - DNA, 25 bp, Homo sapien
cacgcagttcgggtgggatttccct

SEQ ID NO: 5403474 - DNA, 25 bp, Homo sapien
tgggatgtgccttgcagcgccctaa

SEQ ID NO: 5403475 - DNA, 25 bp, Homo sapien
tgccattgggcagtaagtcacatta

SEQ ID NO: 5403476 - DNA, 25 bp, Homo sapien
cagaatagaccttacaatgcagata

SEQ ID NO: 5403477 - DNA, 25 bp, Homo sapien
gcatggctaggcagattatacttaa

SEQ ID NO: 5403478 - DNA, 25 bp, Homo sapien
tacctgttatgctttacgagttgag

SEQ ID NO: 5403479 - DNA, 25 bp, Homo sapien
tattgcagaatcactccactaggag

SEQ ID NO: 5403480 - DNA, 25 bp, Homo sapien
gaaagcggctaggattacatcacag

SEQ ID NO: 5403481 - DNA, 25 bp, Homo sapien
taacttgaggaacagcaaatcgtgc

SEQ ID NO: 5403482 - DNA, 25 bp, Homo sapien
cactgggcctgacaagactgcaata

SEQ ID NO: 5403483 - DNA, 25 bp, Homo sapien
cagagagtcattaagttcctcccag

SEQ ID NO: 5403484 - DNA, 25 bp, Homo sapien
tgtgattgatatccctggaggtgaa

SEQ ID NO: 5403485 - DNA, 25 bp, Homo sapien
tgttataacgtatcaggtcaaggga

SEQ ID NO: 5403486 - DNA, 25 bp, Homo sapien
accacagaaattgcgagatgctatc

SEQ ID NO: 5403487 - DNA, 25 bp, Homo sapien
ttacggaaatccagctgcgccgacg

SEQ ID NO: 5403488 - DNA, 25 bp, Homo sapien
cttacggaaatccagctgcgccgac

SEQ ID NO: 5403489 - DNA, 25 bp, Homo sapien
ggaaatccagctgcgccgacgacgg

SEQ ID NO: 5403490 - DNA, 25 bp, Homo sapien
acggaaatccagctgcgccgacgac

SEQ ID NO: 5403491 - DNA, 25 bp, Homo sapien
caggacggatggaagctttcacaat

SEQ ID NO: 5403492 - DNA, 25 bp, Homo sapien
gagacttagagtctatctaccagga

SEQ ID NO: 5403493 - DNA, 25 bp, Homo sapien
tttcacaattagacgagacgacacg

SEQ ID NO: 5403494 - DNA, 25 bp, Homo sapien
tagcgccattaacttgagacttaga

SEQ ID NO: 5403495 - DNA, 25 bp, Homo sapien
gtgcgagacgctccacagcgagctt

SEQ ID NO: 5403496 - DNA, 25 bp, Homo sapien
tcgattgcaatttcctagaaggtgc

SEQ ID NO: 5403497 - DNA, 25 bp, Homo sapien
tagcgaaagtgcattacaaatcgat

SEQ ID NO: 5403498 - DNA, 25 bp, Homo sapien
gggatggttcagagccgatctccgc

SEQ ID NO: 5403499 - DNA, 25 bp, Homo sapien
tagtcagtcacgcagaagtttctct

SEQ ID NO: 5403500 - DNA, 25 bp, Homo sapien
cctctattatctcggcttctcggga

SEQ ID NO: 5403501 - DNA, 25 bp, Homo sapien
ccgactctaggtccaggatacgtta

SEQ ID NO: 5403502 - DNA, 25 bp, Homo sapien
tcgcgctacacacccagattggctt

SEQ ID NO: 5403503 - DNA, 25 bp, Homo sapien
gcggctgggtagatgcccctctctg

SEQ ID NO: 5403504 - DNA, 25 bp, Homo sapien
gggctcacaaagtggtcgcccctgg

SEQ ID NO: 5403505 - DNA, 25 bp, Homo sapien
tgggcgcgcctggtacgggtcccgc

SEQ ID NO: 5403506 - DNA, 25 bp, Homo sapien
tcacaaagtggtcgcccctggctgg

SEQ ID NO: 5403507 - DNA, 25 bp, Homo sapien
gaagtgaaagcggaggctgggacaa

SEQ ID NO: 5403508 - DNA, 25 bp, Homo sapien
acacagaagcccattgtcgccggcg

SEQ ID NO: 5403509 - DNA, 25 bp, Homo sapien
tcgcggccgaccaagaagggagccg

SEQ ID NO: 5403510 - DNA, 25 bp, Homo sapien
acaaggggaacttactgataaaatg

SEQ ID NO: 5403511 - DNA, 25 bp, Homo sapien
gaaactccaagtgtttgtaccttgc

SEQ ID NO: 5403512 - DNA, 25 bp, Homo sapien
gccctttccctcttagttgtagtca

SEQ ID NO: 5403513 - DNA, 25 bp, Homo sapien
cttagttgtagtcaactgattggag

SEQ ID NO: 5403514 - DNA, 25 bp, Homo sapien
tcaacaatacgagcatcctgggaaa

SEQ ID NO: 5403515 - DNA, 25 bp, Homo sapien
gatttttggctctcataatgtgagg

SEQ ID NO: 5403516 - DNA, 25 bp, Homo sapien
cagaaataatgtagaccaagaaaca

SEQ ID NO: 5403517 - DNA, 25 bp, Homo sapien
gccaattgcaatcatgtgacaggat

SEQ ID NO: 5403518 - DNA, 25 bp, Homo sapien
caaactttcttggtaagacttgcca

SEQ ID NO: 5403519 - DNA, 25 bp, Homo sapien
tgaccttggatggttcaccaaaatc

SEQ ID NO: 5403520 - DNA, 25 bp, Homo sapien
caaaatcaccatcactagttcctga

SEQ ID NO: 5403521 - DNA, 25 bp, Homo sapien
ccatcactagttcctgattttaaaa

SEQ ID NO: 5403522 - DNA, 25 bp, Homo sapien
ttgctaggtctatgaccttggatgg

SEQ ID NO: 5403523 - DNA, 25 bp, Homo sapien
gcaaggggttatctggctgtaaccc

SEQ ID NO: 5403524 - DNA, 25 bp, Homo sapien
atctgcaaggggttatctggctgta

SEQ ID NO: 5403525 - DNA, 25 bp, Homo sapien
tgcaaggggttatctggctgtaacc

SEQ ID NO: 5403526 - DNA, 25 bp, Homo sapien
ctgcaaggggttatctggctgtaac

SEQ ID NO: 5403527 - DNA, 25 bp, Homo sapien
tttctgctccatgaaccagtctcca

SEQ ID NO: 5403528 - DNA, 25 bp, Homo sapien
gcgctgcctgcgcaataagcctggg

SEQ ID NO: 5403529 - DNA, 25 bp, Homo sapien
cattttcgtgtgcaaagagaaggtc

SEQ ID NO: 5403530 - DNA, 25 bp, Homo sapien
gaagtgctctggagtgaggcttcat

SEQ ID NO: 5403531 - DNA, 25 bp, Homo sapien
tcgttgccagctcgttgcgcgaggt

SEQ ID NO: 5403532 - DNA, 25 bp, Homo sapien
tggtcccaggtgagcgtttcgttgc

SEQ ID NO: 5403533 - DNA, 25 bp, Homo sapien
tgagcgtttcgttgccagctcgttg

SEQ ID NO: 5403534 - DNA, 25 bp, Homo sapien
ccaggtgagcgtttcgttgccagct

SEQ ID NO: 5403535 - DNA, 25 bp, Homo sapien
cgaacccgggcctcccgcgtggcag

SEQ ID NO: 5403536 - DNA, 25 bp, Homo sapien
gaattctaccactgaaccaccaatg

SEQ ID NO: 5403537 - DNA, 25 bp, Homo sapien
cgcgtggcaggcgagaattctacca

SEQ ID NO: 5403538 - DNA, 25 bp, Homo sapien
tcgaacccgggcctcccgcgtggca

SEQ ID NO: 5403539 - DNA, 25 bp, Homo sapien
gtttaagggcagcacgtctcacaca

SEQ ID NO: 5403540 - DNA, 25 bp, Homo sapien
ttcaggctagcagtgtgtgacacca

SEQ ID NO: 5403541 - DNA, 25 bp, Homo sapien
acacatgcgggtgaatactcagtca

SEQ ID NO: 5403542 - DNA, 25 bp, Homo sapien
taacaaagtttaagggcagcacgtc

SEQ ID NO: 5403543 - DNA, 25 bp, Homo sapien
gttgagtttgcatttacaagtagag

SEQ ID NO: 5403544 - DNA, 25 bp, Homo sapien
ttgcatttacaagtagaggagattg

SEQ ID NO: 5403545 - DNA, 25 bp, Homo sapien
aacaagaacaagattgaagagacag

SEQ ID NO: 5403546 - DNA, 25 bp, Homo sapien
tcaacaagaacaagattgaagagac

SEQ ID NO: 5403547 - DNA, 25 bp, Homo sapien
tgtgccaattgaccccactctcatg

SEQ ID NO: 5403548 - DNA, 25 bp, Homo sapien
caaatttggcaagaggaatcacgtc

SEQ ID NO: 5403549 - DNA, 25 bp, Homo sapien
tgggaactatagagcagaggtgcac

SEQ ID NO: 5403550 - DNA, 25 bp, Homo sapien
tgtcctttggttgttctgggcccca

SEQ ID NO: 5403551 - DNA, 25 bp, Homo sapien
caaaagtgagtaactgatggtccca

SEQ ID NO: 5403552 - DNA, 25 bp, Homo sapien
tgagaaggaaatccaggactggcac

SEQ ID NO: 5403553 - DNA, 25 bp, Homo sapien
caagcactgaactgatctgggataa

SEQ ID NO: 5403554 - DNA, 25 bp, Homo sapien
gattggaccagatcgctcacctaag

SEQ ID NO: 5403555 - DNA, 25 bp, Homo sapien
gacacgtctgtaggcctagggaagc

SEQ ID NO: 5403556 - DNA, 25 bp, Homo sapien
gttattagtacagcacccagaggtc

SEQ ID NO: 5403557 - DNA, 25 bp, Homo sapien
cccagaggtcttcggagcaaagctg

SEQ ID NO: 5403558 - DNA, 25 bp, Homo sapien
cgagaagtcgtcaggtaagccagcc

SEQ ID NO: 5403559 - DNA, 25 bp, Homo sapien
gcgtgtggcgctgcgcgaccccacc

SEQ ID NO: 5403560 - DNA, 25 bp, Homo sapien
gggcgagggcccttgcgtgtggcgc

SEQ ID NO: 5403561 - DNA, 25 bp, Homo sapien
ggcccttgcgtgtggcgctgcgcga

SEQ ID NO: 5403562 - DNA, 25 bp, Homo sapien
agccaggggcgagggcccttgcgtg

SEQ ID NO: 5403563 - DNA, 25 bp, Homo sapien
gtgaggatctatctcaggtgtgtgc

SEQ ID NO: 5403564 - DNA, 25 bp, Homo sapien
gcctgggcccgaggtatccgggcag

SEQ ID NO: 5403565 - DNA, 25 bp, Homo sapien
ctcgctgggagcacccgggccgagg

SEQ ID NO: 5403566 - DNA, 25 bp, Homo sapien
ccctggtcaggcctccgggagggag

SEQ ID NO: 5403567 - DNA, 25 bp, Homo sapien
caaacttttagcttgtagatgcggc

SEQ ID NO: 5403568 - DNA, 25 bp, Homo sapien
gatggattcgctcttctctagggtt

SEQ ID NO: 5403569 - DNA, 25 bp, Homo sapien
tccgaagcaagagtgagaacgagtc

SEQ ID NO: 5403570 - DNA, 25 bp, Homo sapien
ttggtaccccattgaaagttcatgc

SEQ ID NO: 5403571 - DNA, 25 bp, Homo sapien
ttttcagatcagtatctaatttctc

SEQ ID NO: 5403572 - DNA, 25 bp, Homo sapien
catgttgtgcatgaattatccgtac

SEQ ID NO: 5403573 - DNA, 25 bp, Homo sapien
tagctatggttattagagaagggaa

SEQ ID NO: 5403574 - DNA, 25 bp, Homo sapien
ggcaaagaattcttgcatgttgtgc

SEQ ID NO: 5403575 - DNA, 25 bp, Homo sapien
agaccaacataagacctcgtacaat

SEQ ID NO: 5403576 - DNA, 25 bp, Homo sapien
taacaaggtaaaacatagatggaaa

SEQ ID NO: 5403577 - DNA, 25 bp, Homo sapien
tgtttaacaaggtaaaacatagatg

SEQ ID NO: 5403578 - DNA, 25 bp, Homo sapien
ccaacataagacctcgtacaatcat

SEQ ID NO: 5403579 - DNA, 25 bp, Homo sapien
cttgtcccccttatcaaaggcgttg

SEQ ID NO: 5403580 - DNA, 25 bp, Homo sapien
tgtcccccttatcaaaggcgttgga

SEQ ID NO: 5403581 - DNA, 25 bp, Homo sapien
ccaggtatagcattcacatctagag

SEQ ID NO: 5403582 - DNA, 25 bp, Homo sapien
tatagcattcacatctagaggctgc

SEQ ID NO: 5403583 - DNA, 25 bp, Homo sapien
agcattcacatctagaggctgccac

SEQ ID NO: 5403584 - DNA, 25 bp, Homo sapien
cagcctctccaggtatagcattcac

SEQ ID NO: 5403585 - DNA, 25 bp, Homo sapien
agtctcctgactgccctgaatccag

SEQ ID NO: 5403586 - DNA, 25 bp, Homo sapien
tgctgtcccctctgtaatgactgtg

SEQ ID NO: 5403587 - DNA, 25 bp, Homo sapien
tgactgtggttgtcttagtatggac

SEQ ID NO: 5403588 - DNA, 25 bp, Homo sapien
tatggactctcaggagttgcgtcca

SEQ ID NO: 5403589 - DNA, 25 bp, Homo sapien
tgtaatctctgcagagcacttggct

SEQ ID NO: 5403590 - DNA, 25 bp, Homo sapien
ggcagctgccagacgaatgactgaa

SEQ ID NO: 5403591 - DNA, 25 bp, Homo sapien
gactgaaggagtaagctcaagtgca

SEQ ID NO: 5403592 - DNA, 25 bp, Homo sapien
cttggctgccacatagtataatctg

SEQ ID NO: 5403593 - DNA, 25 bp, Homo sapien
cctctgagttgtgccttccatgggt

SEQ ID NO: 5403594 - DNA, 25 bp, Homo sapien
gacagtgtgacacgactcaaaatag

SEQ ID NO: 5403595 - DNA, 25 bp, Homo sapien
ctcaaaatagttgaaggagtgggtt

SEQ ID NO: 5403596 - DNA, 25 bp, Homo sapien
cactggatttgtatgcgagtgtgag

SEQ ID NO: 5403597 - DNA, 25 bp, Homo sapien
ttggagattaacccaaatgccaagg

SEQ ID NO: 5403598 - DNA, 25 bp, Homo sapien
ggcagaagattactagtagatactt

SEQ ID NO: 5403599 - DNA, 25 bp, Homo sapien
ccaagggactgaacatttgggtgac

SEQ ID NO: 5403600 - DNA, 25 bp, Homo sapien
tgggtgactttgagaatagggcctt

SEQ ID NO: 5403601 - DNA, 25 bp, Homo sapien
ttgaaatgctggcaaccaccgtagt

SEQ ID NO: 5403602 - DNA, 25 bp, Homo sapien
ccaccgtagtagttagtatcagtct

SEQ ID NO: 5403603 - DNA, 25 bp, Homo sapien
tgtcattaggacattttgtgatact

SEQ ID NO: 5403604 - DNA, 25 bp, Homo sapien
catagttcaaactgatgcccggaaa

SEQ ID NO: 5403605 - DNA, 25 bp, Homo sapien
aacaatttgtaactgagtgattcat

SEQ ID NO: 5403606 - DNA, 25 bp, Homo sapien
gaatttggcaaacaatttgtaactg

SEQ ID NO: 5403607 - DNA, 25 bp, Homo sapien
ttctttctcaaagatgaaggtgaag

SEQ ID NO: 5403608 - DNA, 25 bp, Homo sapien
aagatgaaggtgaaggaatttggca

SEQ ID NO: 5403609 - DNA, 25 bp, Homo sapien
aatcagagccattgtaggtgggaga

SEQ ID NO: 5403610 - DNA, 25 bp, Homo sapien
cagagccattgtaggtgggagaata

SEQ ID NO: 5403611 - DNA, 25 bp, Homo sapien
taggtgggagaatagaggcctccat

SEQ ID NO: 5403612 - DNA, 25 bp, Homo sapien
ctgaatcagagccattgtaggtggg

SEQ ID NO: 5403613 - DNA, 25 bp, Homo sapien
aactttgtaagtcaattcaggctac

SEQ ID NO: 5403614 - DNA, 25 bp, Homo sapien
caggctactagactttcttgttctc

SEQ ID NO: 5403615 - DNA, 25 bp, Homo sapien
tgtaagtcaattcaggctactagac

SEQ ID NO: 5403616 - DNA, 25 bp, Homo sapien
caattcaggctactagactttcttg

SEQ ID NO: 5403617 - DNA, 25 bp, Homo sapien
gatctgggttcctgaatggtggaac

SEQ ID NO: 5403618 - DNA, 25 bp, Homo sapien
aattttgggcagtagagtgactcac

SEQ ID NO: 5403619 - DNA, 25 bp, Homo sapien
caggtgagtgaacaatcatttgtgc

SEQ ID NO: 5403620 - DNA, 25 bp, Homo sapien
gacatccaaatggaggtctcaagta

SEQ ID NO: 5403621 - DNA, 25 bp, Homo sapien
gaggtaaaaatgcactgaagtgagg

SEQ ID NO: 5403622 - DNA, 25 bp, Homo sapien
gtaaaaatgcactgaagtgaggaaa

SEQ ID NO: 5403623 - DNA, 25 bp, Homo sapien
tctgcagcaggatataatgatccaa

SEQ ID NO: 5403624 - DNA, 25 bp, Homo sapien
ggaggtaaaaatgcactgaagtgag

SEQ ID NO: 5403625 - DNA, 25 bp, Homo sapien
gcttcctgatgatgagatagagcaa

SEQ ID NO: 5403626 - DNA, 25 bp, Homo sapien
tgatgagatagagcaaaatagcccc

SEQ ID NO: 5403627 - DNA, 25 bp, Homo sapien
tgaagtttgacatgtacccctaaga

SEQ ID NO: 5403628 - DNA, 25 bp, Homo sapien
tgtatctggataccagctaatgcta

SEQ ID NO: 5403629 - DNA, 25 bp, Homo sapien
tatcaactatctgcctaccttaagg

SEQ ID NO: 5403630 - DNA, 25 bp, Homo sapien
gatgtaaatttccatcacaagtctg

SEQ ID NO: 5403631 - DNA, 25 bp, Homo sapien
tttggtgactagcaacaaaaaggct

SEQ ID NO: 5403632 - DNA, 25 bp, Homo sapien
acagcatttcattagaggttaaggg

SEQ ID NO: 5403633 - DNA, 25 bp, Homo sapien
gcagttggcccctgagcccttttga

SEQ ID NO: 5403634 - DNA, 25 bp, Homo sapien
taacacttgactccctcatgtggaa

SEQ ID NO: 5403635 - DNA, 25 bp, Homo sapien
tgtttgctatgacaagatactccgg

SEQ ID NO: 5403636 - DNA, 25 bp, Homo sapien
ggaagcttgtcaacataaactcatg

SEQ ID NO: 5403637 - DNA, 25 bp, Homo sapien
gatacctttagcatgacaatgacct

SEQ ID NO: 5403638 - DNA, 25 bp, Homo sapien
cactagggagtggtaagcttatcaa

SEQ ID NO: 5403639 - DNA, 25 bp, Homo sapien
taactaatcccttgggccagtcttc

SEQ ID NO: 5403640 - DNA, 25 bp, Homo sapien
tcctgatgggatactatgtgcacta

SEQ ID NO: 5403641 - DNA, 25 bp, Homo sapien
ggtcatgaaattctgatccagcccc

SEQ ID NO: 5403642 - DNA, 25 bp, Homo sapien
gagtccatctctaataagcaatagc

SEQ ID NO: 5403643 - DNA, 25 bp, Homo sapien
gacacttttgcatgtaggagtccat

SEQ ID NO: 5403644 - DNA, 25 bp, Homo sapien
caacgtgtctctataggctaaaagc

SEQ ID NO: 5403645 - DNA, 25 bp, Homo sapien
aatccctatgctcataattgcaaag

SEQ ID NO: 5403646 - DNA, 25 bp, Homo sapien
ttccagattaaaggcctttgcccgc

SEQ ID NO: 5403647 - DNA, 25 bp, Homo sapien
gaattagctaaaatctgggctgtag

SEQ ID NO: 5403648 - DNA, 25 bp, Homo sapien
tttgcccgctgcctgcatgtaattt

SEQ ID NO: 5403649 - DNA, 25 bp, Homo sapien
gtttagatctggttactggagcaag

SEQ ID NO: 5403650 - DNA, 25 bp, Homo sapien
catttgctgggagttacagtgatag

SEQ ID NO: 5403651 - DNA, 25 bp, Homo sapien
tatatctagagcatgactggctaac

SEQ ID NO: 5403652 - DNA, 25 bp, Homo sapien
actattatagttgccaggaagatcc

SEQ ID NO: 5403653 - DNA, 25 bp, Homo sapien
ggtgtagcacagctcgtactaattg

SEQ ID NO: 5403654 - DNA, 25 bp, Homo sapien
actgttggaaattgttatctgacca

SEQ ID NO: 5403655 - DNA, 25 bp, Homo sapien
cctgcatcatcccattactgttgga

SEQ ID NO: 5403656 - DNA, 25 bp, Homo sapien
actaattgtgcggagtcaccctggc

SEQ ID NO: 5403657 - DNA, 25 bp, Homo sapien
tgggaagtagagggacagcgatgcc

SEQ ID NO: 5403658 - DNA, 25 bp, Homo sapien
ttgtgcactgtcgaactttcctttt

SEQ ID NO: 5403659 - DNA, 25 bp, Homo sapien
tgcactgtcgaactttccttttttc

SEQ ID NO: 5403660 - DNA, 25 bp, Homo sapien
gggaagtagagggacagcgatgcca

SEQ ID NO: 5403661 - DNA, 25 bp, Homo sapien
tcagcacttttcacatgctgctttc

SEQ ID NO: 5403662 - DNA, 25 bp, Homo sapien
cagcacttttcacatgctgctttct

SEQ ID NO: 5403663 - DNA, 25 bp, Homo sapien
tgcttcagtgcttaagcatttttcc

SEQ ID NO: 5403664 - DNA, 25 bp, Homo sapien
tcctgtttacaagctttcgtggcaa

SEQ ID NO: 5403665 - DNA, 25 bp, Homo sapien
tctgaggtaactgatggaggctcct

SEQ ID NO: 5403666 - DNA, 25 bp, Homo sapien
catttttccataaacactcttgtta

SEQ ID NO: 5403667 - DNA, 25 bp, Homo sapien
tgcaaatgacttataacaataggtt

SEQ ID NO: 5403668 - DNA, 25 bp, Homo sapien
aatctgtcttcgatatttaatacta

SEQ ID NO: 5403669 - DNA, 25 bp, Homo sapien
tgtgcaaatgacttataacaatagg

SEQ ID NO: 5403670 - DNA, 25 bp, Homo sapien
cagatggatagacaaatctgtcttc

SEQ ID NO: 5403671 - DNA, 25 bp, Homo sapien
ctttggcaggcggttctcgcctttt

SEQ ID NO: 5403672 - DNA, 25 bp, Homo sapien
tggcaggcggttctcgccttttttc

SEQ ID NO: 5403673 - DNA, 25 bp, Homo sapien
tgtcacatgatcctgatgtcatctg

SEQ ID NO: 5403674 - DNA, 25 bp, Homo sapien
gggttctgctaaagccactctgaag

SEQ ID NO: 5403675 - DNA, 25 bp, Homo sapien
tgacctgtggccttgacactgcttt

SEQ ID NO: 5403676 - DNA, 25 bp, Homo sapien
tgaagccaaagccacatatcacctt

SEQ ID NO: 5403677 - DNA, 25 bp, Homo sapien
cagtcagtcgttgtgtttcttgttg

SEQ ID NO: 5403678 - DNA, 25 bp, Homo sapien
tgtaatttgattcagtcagtcgttg

SEQ ID NO: 5403679 - DNA, 25 bp, Homo sapien
tacccaatatgaagctcactgtaat

SEQ ID NO: 5403680 - DNA, 25 bp, Homo sapien
ctacccaatatgaagctcactgtaa

SEQ ID NO: 5403681 - DNA, 25 bp, Homo sapien
tgtacccatccaactgcacagtgct

SEQ ID NO: 5403682 - DNA, 25 bp, Homo sapien
caactgcacagtgctctaaaaccat

SEQ ID NO: 5403683 - DNA, 25 bp, Homo sapien
cacaaatgtacccatccaactgcac

SEQ ID NO: 5403684 - DNA, 25 bp, Homo sapien
tccacccacaaatgtacccatccaa

SEQ ID NO: 5403685 - DNA, 25 bp, Homo sapien
ggtcacgttttgcattctcaagcat

SEQ ID NO: 5403686 - DNA, 25 bp, Homo sapien
tgggtcacgttttgcattctcaagc

SEQ ID NO: 5403687 - DNA, 25 bp, Homo sapien
gggtcacgttttgcattctcaagca

SEQ ID NO: 5403688 - DNA, 25 bp, Homo sapien
ctgggtcacgttttgcattctcaag

SEQ ID NO: 5403689 - DNA, 25 bp, Homo sapien
tcctgcttgtggttccataagtgat

SEQ ID NO: 5403690 - DNA, 25 bp, Homo sapien
gcagttgtactgatattggtgggaa

SEQ ID NO: 5403691 - DNA, 25 bp, Homo sapien
ctgcttgtggttccataagtgatac

SEQ ID NO: 5403692 - DNA, 25 bp, Homo sapien
ttctgtgggatgcagttgtactgat

SEQ ID NO: 5403693 - DNA, 25 bp, Homo sapien
attccaaatctccagtaccaattcc

SEQ ID NO: 5403694 - DNA, 25 bp, Homo sapien
ccaattcccacttcaacttggctga

SEQ ID NO: 5403695 - DNA, 25 bp, Homo sapien
tgctggctttttggcccttgctgtc

SEQ ID NO: 5403696 - DNA, 25 bp, Homo sapien
ggatcatagactgaactgagagcca

SEQ ID NO: 5403697 - DNA, 25 bp, Homo sapien
caagcatgccttcaacatgactcat

SEQ ID NO: 5403698 - DNA, 25 bp, Homo sapien
tcaagcatgccttcaacatgactca

SEQ ID NO: 5403699 - DNA, 25 bp, Homo sapien
caggaatttatacatgggttcagat

SEQ ID NO: 5403700 - DNA, 25 bp, Homo sapien
gagttggtgctacttccccatttct

SEQ ID NO: 5403701 - DNA, 25 bp, Homo sapien
ggctttaacctttagactgctgaag

SEQ ID NO: 5403702 - DNA, 25 bp, Homo sapien
gcctccatgatatataaagtttgca

SEQ ID NO: 5403703 - DNA, 25 bp, Homo sapien
aacggtacacgttaaatggtgagtg

SEQ ID NO: 5403704 - DNA, 25 bp, Homo sapien
gggtagatatctgtcttgtactcat

SEQ ID NO: 5403705 - DNA, 25 bp, Homo sapien
gccatgccatctgcatgttcagtag

SEQ ID NO: 5403706 - DNA, 25 bp, Homo sapien
aatgaaatctgggaccgccatgcca

SEQ ID NO: 5403707 - DNA, 25 bp, Homo sapien
tgacacttgatatctggaaaattca

SEQ ID NO: 5403708 - DNA, 25 bp, Homo sapien
actgacacttgatatctggaaaatt

SEQ ID NO: 5403709 - DNA, 25 bp, Homo sapien
ggactgacacttgatatctggaaaa

SEQ ID NO: 5403710 - DNA, 25 bp, Homo sapien
gactgacacttgatatctggaaaat

SEQ ID NO: 5403711 - DNA, 25 bp, Homo sapien
gaatcccgttgtaaagccttgctta

SEQ ID NO: 5403712 - DNA, 25 bp, Homo sapien
tctggtgttccaggaatcccgttgt

SEQ ID NO: 5403713 - DNA, 25 bp, Homo sapien
aagccttgcttatgaccacaaatgt

SEQ ID NO: 5403714 - DNA, 25 bp, Homo sapien
catagaactcctacttcacttaaaa

SEQ ID NO: 5403715 - DNA, 25 bp, Homo sapien
ttgtaccaaatccctttatgccatt

SEQ ID NO: 5403716 - DNA, 25 bp, Homo sapien
ccttgtaccaaatccctttatgcca

SEQ ID NO: 5403717 - DNA, 25 bp, Homo sapien
cttgtaccaaatccctttatgccat

SEQ ID NO: 5403718 - DNA, 25 bp, Homo sapien
gagcctgaaacacgaaagcttcttt

SEQ ID NO: 5403719 - DNA, 25 bp, Homo sapien
tgtgagcctgaaacacgaaagcttc

SEQ ID NO: 5403720 - DNA, 25 bp, Homo sapien
ttgtgagcctgaaacacgaaagctt

SEQ ID NO: 5403721 - DNA, 25 bp, Homo sapien
tgagcctgaaacacgaaagcttctt

SEQ ID NO: 5403722 - DNA, 25 bp, Homo sapien
gagcagctgcccaagttgaaatggc

SEQ ID NO: 5403723 - DNA, 25 bp, Homo sapien
cagctgcccaagttgaaatggccat

SEQ ID NO: 5403724 - DNA, 25 bp, Homo sapien
ctctgagcagctgcccaagttgaaa

SEQ ID NO: 5403725 - DNA, 25 bp, Homo sapien
ctgagcagctgcccaagttgaaatg

SEQ ID NO: 5403726 - DNA, 25 bp, Homo sapien
cagtttcctctgtgatggcaaggac

SEQ ID NO: 5403727 - DNA, 25 bp, Homo sapien
tgcagtttcctctgtgatggcaagg

SEQ ID NO: 5403728 - DNA, 25 bp, Homo sapien
cctccaggaagtgagaatgcagttt

SEQ ID NO: 5403729 - DNA, 25 bp, Homo sapien
gcaaacactggcaacattgtggaca

SEQ ID NO: 5403730 - DNA, 25 bp, Homo sapien
gattccaatagtgaccctggagatt

SEQ ID NO: 5403731 - DNA, 25 bp, Homo sapien
cactctcttgatgatcagtccaaag

SEQ ID NO: 5403732 - DNA, 25 bp, Homo sapien
cactgaggattccaatagtgaccct

SEQ ID NO: 5403733 - DNA, 25 bp, Homo sapien
gctgctgttgttaaacactctcttg

SEQ ID NO: 5403734 - DNA, 25 bp, Homo sapien
cagtgacttcaggtggagcaatggc

SEQ ID NO: 5403735 - DNA, 25 bp, Homo sapien
gtgacttcaggtggagcaatggcac

SEQ ID NO: 5403736 - DNA, 25 bp, Homo sapien
aaatgacttcttgggacccagacta

SEQ ID NO: 5403737 - DNA, 25 bp, Homo sapien
tgggacccagactagtgttctgggc

SEQ ID NO: 5403738 - DNA, 25 bp, Homo sapien
ccagcagtatgtccctaatctcagt

SEQ ID NO: 5403739 - DNA, 25 bp, Homo sapien
ggccagcagtatgtccctaatctca

SEQ ID NO: 5403740 - DNA, 25 bp, Homo sapien
gcagtatgtccctaatctcagtgaa

SEQ ID NO: 5403741 - DNA, 25 bp, Homo sapien
ttggccagcagtatgtccctaatct

SEQ ID NO: 5403742 - DNA, 25 bp, Homo sapien
gcctcagatggtcttgtgcattata

SEQ ID NO: 5403743 - DNA, 25 bp, Homo sapien
ttccctcagaagtatatgtggatct

SEQ ID NO: 5403744 - DNA, 25 bp, Homo sapien
cctcagaagtatatgtggatctgta

SEQ ID NO: 5403745 - DNA, 25 bp, Homo sapien
ttatagtgttcttgtccatcagctc

SEQ ID NO: 5403746 - DNA, 25 bp, Homo sapien
ctttggatcttatccctcccagagg

SEQ ID NO: 5403747 - DNA, 25 bp, Homo sapien
cccagaggagataaagaaatccatc

SEQ ID NO: 5403748 - DNA, 25 bp, Homo sapien
tttggatcttatccctcccagagga

SEQ ID NO: 5403749 - DNA, 25 bp, Homo sapien
aagaaatccatccaccagtgcgcac

SEQ ID NO: 5403750 - DNA, 25 bp, Homo sapien
tgagtctactctccgatacactgtt

SEQ ID NO: 5403751 - DNA, 25 bp, Homo sapien
tctccgatacactgttgtgttaggc

SEQ ID NO: 5403752 - DNA, 25 bp, Homo sapien
tctactctccgatacactgttgtgt

SEQ ID NO: 5403753 - DNA, 25 bp, Homo sapien
cactgagtctactctccgatacact

SEQ ID NO: 5403754 - DNA, 25 bp, Homo sapien
caggcatcaacggttttacccacag

SEQ ID NO: 5403755 - DNA, 25 bp, Homo sapien
tctcagggccgctccagtattccag

SEQ ID NO: 5403756 - DNA, 25 bp, Homo sapien
catcaacggttttacccacagcaaa

SEQ ID NO: 5403757 - DNA, 25 bp, Homo sapien
agtattccaggcatcaacggtttta

SEQ ID NO: 5403758 - DNA, 25 bp, Homo sapien
gaaaaatgaaaccacgtaaagatca

SEQ ID NO: 5403759 - DNA, 25 bp, Homo sapien
atagtaaaggtttccagcactttca

SEQ ID NO: 5403760 - DNA, 25 bp, Homo sapien
caaatgtcgtcctctgccatgtaaa

SEQ ID NO: 5403761 - DNA, 25 bp, Homo sapien
tacaggatttatagtcggcagaaaa

SEQ ID NO: 5403762 - DNA, 25 bp, Homo sapien
gtcagaattgagcagcccgacagga

SEQ ID NO: 5403763 - DNA, 25 bp, Homo sapien
gacccccagcaaacagcggtaagag

SEQ ID NO: 5403764 - DNA, 25 bp, Homo sapien
cagcaaacagcggtaagagggattt

SEQ ID NO: 5403765 - DNA, 25 bp, Homo sapien
ctggtcagaattgagcagcccgaca

SEQ ID NO: 5403766 - DNA, 25 bp, Homo sapien
tacttaggccagtgttctctagcag

SEQ ID NO: 5403767 - DNA, 25 bp, Homo sapien
gtaacaccatactcagaactccctt

SEQ ID NO: 5403768 - DNA, 25 bp, Homo sapien
ttcttccgcacatcagaacataaga

SEQ ID NO: 5403769 - DNA, 25 bp, Homo sapien
gaacataagaacttcctgtgtattc

SEQ ID NO: 5403770 - DNA, 25 bp, Homo sapien
cagattgggcacacttggtatcttc

SEQ ID NO: 5403771 - DNA, 25 bp, Homo sapien
ctgcagattgggcacacttggtatc

SEQ ID NO: 5403772 - DNA, 25 bp, Homo sapien
gatagatgttgacacctgcagattg

SEQ ID NO: 5403773 - DNA, 25 bp, Homo sapien
gagatgattttagatagatgttgac

SEQ ID NO: 5403774 - DNA, 25 bp, Homo sapien
tcatagacgattttcctgcctgaga

SEQ ID NO: 5403775 - DNA, 25 bp, Homo sapien
tagttgtagcctcagcagccatttc

SEQ ID NO: 5403776 - DNA, 25 bp, Homo sapien
cacactctttgattcttggtcctat

SEQ ID NO: 5403777 - DNA, 25 bp, Homo sapien
tctctaggctctggtctttccatga

SEQ ID NO: 5403778 - DNA, 25 bp, Homo sapien
gatgttaaccttacaaggtctctgt

SEQ ID NO: 5403779 - DNA, 25 bp, Homo sapien
atgatgttaaccttacaaggtctct

SEQ ID NO: 5403780 - DNA, 25 bp, Homo sapien
tttgttcttgatgtatgatgttaac

SEQ ID NO: 5403781 - DNA, 25 bp, Homo sapien
tgttcttgatgtatgatgttaacct

SEQ ID NO: 5403782 - DNA, 25 bp, Homo sapien
tctttaaattatcaagaggagacca

SEQ ID NO: 5403783 - DNA, 25 bp, Homo sapien
aaaagggcacattcatctttatctt

SEQ ID NO: 5403784 - DNA, 25 bp, Homo sapien
gagaccacaagatgaggaatacttc

SEQ ID NO: 5403785 - DNA, 25 bp, Homo sapien
tcagccacatggaccttaccatctt

SEQ ID NO: 5403786 - DNA, 25 bp, Homo sapien
ccaaagggttgtctgaatgaataaa

SEQ ID NO: 5403787 - DNA, 25 bp, Homo sapien
taaagagaagggttcctccagaaga

SEQ ID NO: 5403788 - DNA, 25 bp, Homo sapien
tagtcttacagtacctgacagcaga

SEQ ID NO: 5403789 - DNA, 25 bp, Homo sapien
tagctggctctgtttaatccaaagg

SEQ ID NO: 5403790 - DNA, 25 bp, Homo sapien
gatgtctctcccacatccagtggca

SEQ ID NO: 5403791 - DNA, 25 bp, Homo sapien
ctaatcttccaatggcaggattcga

SEQ ID NO: 5403792 - DNA, 25 bp, Homo sapien
cctgaagaaaaggaagctaatcttc

SEQ ID NO: 5403793 - DNA, 25 bp, Homo sapien
tccagtggcacctctctaagttgta

SEQ ID NO: 5403794 - DNA, 25 bp, Homo sapien
gccagttccctatagccatctatgt

SEQ ID NO: 5403795 - DNA, 25 bp, Homo sapien
gaaaatgtccttgtgcaaatttctc

SEQ ID NO: 5403796 - DNA, 25 bp, Homo sapien
tccctatagccatctatgtctttct

SEQ ID NO: 5403797 - DNA, 25 bp, Homo sapien
aagaaaatgtccttgtgcaaatttc

SEQ ID NO: 5403798 - DNA, 25 bp, Homo sapien
caaaatgatactgatatgacaataa

SEQ ID NO: 5403799 - DNA, 25 bp, Homo sapien
ggacctggagtaaaagtcacacttg

SEQ ID NO: 5403800 - DNA, 25 bp, Homo sapien
tagagacatactgaatggctctgac

SEQ ID NO: 5403801 - DNA, 25 bp, Homo sapien
caggctggggttgtctcaggtagag

SEQ ID NO: 5403802 - DNA, 25 bp, Homo sapien
atcctgaaatatcaaggacttcttg

SEQ ID NO: 5403803 - DNA, 25 bp, Homo sapien
ctaatcttgagtcaagaagtgtttc

SEQ ID NO: 5403804 - DNA, 25 bp, Homo sapien
tatcaaggacttcttgattccctcg

SEQ ID NO: 5403805 - DNA, 25 bp, Homo sapien
gattccctcgaactctactcctctc

SEQ ID NO: 5403806 - DNA, 25 bp, Homo sapien
aacaccaaatgcatgatttaacagg

SEQ ID NO: 5403807 - DNA, 25 bp, Homo sapien
agtgtttctgagtgtaccatatggc

SEQ ID NO: 5403808 - DNA, 25 bp, Homo sapien
catgcaaagatggaatagaggcttt

SEQ ID NO: 5403809 - DNA, 25 bp, Homo sapien
ccatatggcaccagttagttttgaa

SEQ ID NO: 5403810 - DNA, 25 bp, Homo sapien
tcattgactgatcaggcctttgaag

SEQ ID NO: 5403811 - DNA, 25 bp, Homo sapien
caaacaagagtctatggaatattca

SEQ ID NO: 5403812 - DNA, 25 bp, Homo sapien
ttgaagcacgctttcacagtcaatg

SEQ ID NO: 5403813 - DNA, 25 bp, Homo sapien
agatgaaagccagacagcttctgac

SEQ ID NO: 5403814 - DNA, 25 bp, Homo sapien
tatgtccaccccacatagcgcgtag

SEQ ID NO: 5403815 - DNA, 25 bp, Homo sapien
tccataggcccaagaactaggagca

SEQ ID NO: 5403816 - DNA, 25 bp, Homo sapien
cagtattttgcctgtgccctagaga

SEQ ID NO: 5403817 - DNA, 25 bp, Homo sapien
gatggatatccaagctcaagcaaag

SEQ ID NO: 5403818 - DNA, 25 bp, Homo sapien
taagatgggagaagatttgctctgc

SEQ ID NO: 5403819 - DNA, 25 bp, Homo sapien
gcaggaactgaagcaattagaccaa

SEQ ID NO: 5403820 - DNA, 25 bp, Homo sapien
tttgctctgccgtgtaagaattggg

SEQ ID NO: 5403821 - DNA, 25 bp, Homo sapien
aagctaaactagaactgaagtaata

SEQ ID NO: 5403822 - DNA, 25 bp, Homo sapien
ctagagagggtcatggcgatttccc

SEQ ID NO: 5403823 - DNA, 25 bp, Homo sapien
aacacatatggtccaaagtccaacc

SEQ ID NO: 5403824 - DNA, 25 bp, Homo sapien
catatggtccaaagtccaacctcat

SEQ ID NO: 5403825 - DNA, 25 bp, Homo sapien
gggtcatggcgatttcccatatttc

SEQ ID NO: 5403826 - DNA, 25 bp, Homo sapien
tcctggtactatacagtgctgacag

SEQ ID NO: 5403827 - DNA, 25 bp, Homo sapien
tatgtctctatttgggaactgtgaa

SEQ ID NO: 5403828 - DNA, 25 bp, Homo sapien
tagggactattatggctcaacagaa

SEQ ID NO: 5403829 - DNA, 25 bp, Homo sapien
agaatatggcatccccaattaggga

SEQ ID NO: 5403830 - DNA, 25 bp, Homo sapien
tttcctcagtaggtaataccactcc

SEQ ID NO: 5403831 - DNA, 25 bp, Homo sapien
taagaaatgctagattacgatagtc

SEQ ID NO: 5403832 - DNA, 25 bp, Homo sapien
ccaccattgtcatgtagctttcaaa

SEQ ID NO: 5403833 - DNA, 25 bp, Homo sapien
ccactcctaccgtaagtatatgtaa

SEQ ID NO: 5403834 - DNA, 25 bp, Homo sapien
gcaacagctctgcatacaaaggtct

SEQ ID NO: 5403835 - DNA, 25 bp, Homo sapien
tatcttgagtcactggaacacattc

SEQ ID NO: 5403836 - DNA, 25 bp, Homo sapien
tcagggagatccaaacagagctgtt

SEQ ID NO: 5403837 - DNA, 25 bp, Homo sapien
ccaaagtgacttctattgtgccata

SEQ ID NO: 5403838 - DNA, 25 bp, Homo sapien
gaactctgccagcaaaactgtgcat

SEQ ID NO: 5403839 - DNA, 25 bp, Homo sapien
aagatttgtatgccacatcatttgg

SEQ ID NO: 5403840 - DNA, 25 bp, Homo sapien
agaactctgccagcaaaactgtgca

SEQ ID NO: 5403841 - DNA, 25 bp, Homo sapien
cagaactctgccagcaaaactgtgc

SEQ ID NO: 5403842 - DNA, 25 bp, Homo sapien
aattcaggccttttgtatggccaaa

SEQ ID NO: 5403843 - DNA, 25 bp, Homo sapien
cttttgtatggccaaatcggtaggg

SEQ ID NO: 5403844 - DNA, 25 bp, Homo sapien
tgacggctgtgttgggtgaaacccc

SEQ ID NO: 5403845 - DNA, 25 bp, Homo sapien
tctggaattgtgatttgacggctgt

SEQ ID NO: 5403846 - DNA, 25 bp, Homo sapien
tgtgagatgtacacaaacaatatgc

SEQ ID NO: 5403847 - DNA, 25 bp, Homo sapien
ttaatcatttgacatacaagcagcc

SEQ ID NO: 5403848 - DNA, 25 bp, Homo sapien
gggcattcgtagctggcattttctt

SEQ ID NO: 5403849 - DNA, 25 bp, Homo sapien
gaagtaccattgataacgacccctc

SEQ ID NO: 5403850 - DNA, 25 bp, Homo sapien
tggtatcccacacagtacatgtgag

SEQ ID NO: 5403851 - DNA, 25 bp, Homo sapien
taaaaggagtttctcggcaccaggc

SEQ ID NO: 5403852 - DNA, 25 bp, Homo sapien
gattaggtgacgatgctcaacctca

SEQ ID NO: 5403853 - DNA, 25 bp, Homo sapien
tacagactccatcaaaaggcctatt

SEQ ID NO: 5403854 - DNA, 25 bp, Homo sapien
agatttgtacagatatatagttgga

SEQ ID NO: 5403855 - DNA, 25 bp, Homo sapien
taattatcctggaagaatccttata

SEQ ID NO: 5403856 - DNA, 25 bp, Homo sapien
cagtattaagagagcaaacaactca

SEQ ID NO: 5403857 - DNA, 25 bp, Homo sapien
ttctgtatgattcccatctctgtaa

SEQ ID NO: 5403858 - DNA, 25 bp, Homo sapien
gttgagtacttgagttgattctctt

SEQ ID NO: 5403859 - DNA, 25 bp, Homo sapien
gttttggacaccctccaataccaca

SEQ ID NO: 5403860 - DNA, 25 bp, Homo sapien
tctgagttttggacaccctccaata

SEQ ID NO: 5403861 - DNA, 25 bp, Homo sapien
tccaataccacatctcatccatatg

SEQ ID NO: 5403862 - DNA, 25 bp, Homo sapien
aatctgagttttggacaccctccaa

SEQ ID NO: 5403863 - DNA, 25 bp, Homo sapien
tattaggcaagcagagaacatgacg

SEQ ID NO: 5403864 - DNA, 25 bp, Homo sapien
caagcagagaacatgacggtgtccc

SEQ ID NO: 5403865 - DNA, 25 bp, Homo sapien
aacatgacggtgtcccctttttgag

SEQ ID NO: 5403866 - DNA, 25 bp, Homo sapien
aatcagaaagccctctattaggcaa

SEQ ID NO: 5403867 - DNA, 25 bp, Homo sapien
ttcagctccggtgtcaaaatgggga

SEQ ID NO: 5403868 - DNA, 25 bp, Homo sapien
tcagctccggtgtcaaaatggggaa

SEQ ID NO: 5403869 - DNA, 25 bp, Homo sapien
cagctccggtgtcaaaatggggaaa

SEQ ID NO: 5403870 - DNA, 25 bp, Homo sapien
aacctcaattttgctagcttctcac

SEQ ID NO: 5403871 - DNA, 25 bp, Homo sapien
cagaacctcaattttgctagcttct

SEQ ID NO: 5403872 - DNA, 25 bp, Homo sapien
agaacctcaattttgctagcttctc

SEQ ID NO: 5403873 - DNA, 25 bp, Homo sapien
gaacctcaattttgctagcttctca

SEQ ID NO: 5403874 - DNA, 25 bp, Homo sapien
agttgcagagttgggtcctggttca

SEQ ID NO: 5403875 - DNA, 25 bp, Homo sapien
cctatcatgatagggaagttgagtt

SEQ ID NO: 5403876 - DNA, 25 bp, Homo sapien
cagagttgggtcctggttcatccac

SEQ ID NO: 5403877 - DNA, 25 bp, Homo sapien
tctcctacaggtttagggacaggga

SEQ ID NO: 5403878 - DNA, 25 bp, Homo sapien
caacatatggactgctagcttttct

SEQ ID NO: 5403879 - DNA, 25 bp, Homo sapien
aacatatggactgctagcttttctc

SEQ ID NO: 5403880 - DNA, 25 bp, Homo sapien
acatatggactgctagcttttctca

SEQ ID NO: 5403881 - DNA, 25 bp, Homo sapien
catatggactgctagcttttctcac

SEQ ID NO: 5403882 - DNA, 25 bp, Homo sapien
agctgggcaccctgcgtagcaaagc

SEQ ID NO: 5403883 - DNA, 25 bp, Homo sapien
accctgcgtagcaaagcaggtgaca

SEQ ID NO: 5403884 - DNA, 25 bp, Homo sapien
gaaagatgggttaagctgggcaccc

SEQ ID NO: 5403885 - DNA, 25 bp, Homo sapien
aggtgacagctctcccgtcctccat

SEQ ID NO: 5403886 - DNA, 25 bp, Homo sapien
cacagcatttacttaatgtttacta

SEQ ID NO: 5403887 - DNA, 25 bp, Homo sapien
gaatatttacaaattcacttccaca

SEQ ID NO: 5403888 - DNA, 25 bp, Homo sapien
ccttcagtagtaaaatgttgtccag

SEQ ID NO: 5403889 - DNA, 25 bp, Homo sapien
gcctttttgactatttccttcagta

SEQ ID NO: 5403890 - DNA, 25 bp, Homo sapien
tttttgtcgccaaagcaggatttga

SEQ ID NO: 5403891 - DNA, 25 bp, Homo sapien
cctttttgtcgccaaagcaggattt

SEQ ID NO: 5403892 - DNA, 25 bp, Homo sapien
ttttgtcgccaaagcaggatttgat

SEQ ID NO: 5403893 - DNA, 25 bp, Homo sapien
ttgtcgccaaagcaggatttgattg

SEQ ID NO: 5403894 - DNA, 25 bp, Homo sapien
agatgtgatgccatgggattccagg

SEQ ID NO: 5403895 - DNA, 25 bp, Homo sapien
gttggtgtgcccaaatattcttgtt

SEQ ID NO: 5403896 - DNA, 25 bp, Homo sapien
ttggtgtgcccaaatattcttgtta

SEQ ID NO: 5403897 - DNA, 25 bp, Homo sapien
gtttataccatttttagcttctgat

SEQ ID NO: 5403898 - DNA, 25 bp, Homo sapien
taatattagacttacatccaaaagc

SEQ ID NO: 5403899 - DNA, 25 bp, Homo sapien
accacctggttgcaacctgatatgt

SEQ ID NO: 5403900 - DNA, 25 bp, Homo sapien
tcttaaggctgttctgtttatacca

SEQ ID NO: 5403901 - DNA, 25 bp, Homo sapien
ctgtggcctctttctaaatttagca

SEQ ID NO: 5403902 - DNA, 25 bp, Homo sapien
cctctctgagcgtggatgtctaaag

SEQ ID NO: 5403903 - DNA, 25 bp, Homo sapien
ccttctcatggtattccttgtgtct

SEQ ID NO: 5403904 - DNA, 25 bp, Homo sapien
tgtctaaagttctcagccgctcagc

SEQ ID NO: 5403905 - DNA, 25 bp, Homo sapien
ttttctcagcaaaatgatggattgg

SEQ ID NO: 5403906 - DNA, 25 bp, Homo sapien
ttcttaagcaatacattcccacagg

SEQ ID NO: 5403907 - DNA, 25 bp, Homo sapien
ttttcatccattttgctcggctttc

SEQ ID NO: 5403908 - DNA, 25 bp, Homo sapien
tggatatatctcaaccatcatcact

SEQ ID NO: 5403909 - DNA, 25 bp, Homo sapien
tactcttgttctgaggtagcacatt

SEQ ID NO: 5403910 - DNA, 25 bp, Homo sapien
gctgattccaaactttaccaagtgc

SEQ ID NO: 5403911 - DNA, 25 bp, Homo sapien
gccttctttgttctactgtcactca

SEQ ID NO: 5403912 - DNA, 25 bp, Homo sapien
aaatgccagcaggactctcgaagct

SEQ ID NO: 5403913 - DNA, 25 bp, Homo sapien
tttctagggtgtacaattgaataca

SEQ ID NO: 5403914 - DNA, 25 bp, Homo sapien
tgaagacagtagacacacctccatc

SEQ ID NO: 5403915 - DNA, 25 bp, Homo sapien
tatatacacaataaagtgcacattt

SEQ ID NO: 5403916 - DNA, 25 bp, Homo sapien
gatattgtgtccatacctatgaaag

SEQ ID NO: 5403917 - DNA, 25 bp, Homo sapien
tgttgagttacagcgtgcagacgga

SEQ ID NO: 5403918 - DNA, 25 bp, Homo sapien
gaagtgaggatataccaggcccctt

SEQ ID NO: 5403919 - DNA, 25 bp, Homo sapien
ggaacacatgccctccaagttagat

SEQ ID NO: 5403920 - DNA, 25 bp, Homo sapien
tcaggcagagcattggcacctggct

SEQ ID NO: 5403921 - DNA, 25 bp, Homo sapien
tcatagcagcaaaaggaactcaggt

SEQ ID NO: 5403922 - DNA, 25 bp, Homo sapien
caggagccccggaagagtcatagtc

SEQ ID NO: 5403923 - DNA, 25 bp, Homo sapien
caggcagtagcaaacgagagggcac

SEQ ID NO: 5403924 - DNA, 25 bp, Homo sapien
ttagtactgatagaccaaagcagcg

SEQ ID NO: 5403925 - DNA, 25 bp, Homo sapien
ttcagcctggctcaaaaagcgtttg

SEQ ID NO: 5403926 - DNA, 25 bp, Homo sapien
gaggacatggttagaggatcccttg

SEQ ID NO: 5403927 - DNA, 25 bp, Homo sapien
ccattaagaagtagaggacaggcat

SEQ ID NO: 5403928 - DNA, 25 bp, Homo sapien
tgtaagaatacaggagggctagctt

SEQ ID NO: 5403929 - DNA, 25 bp, Homo sapien
catcagagcatggtcattgacttca

SEQ ID NO: 5403930 - DNA, 25 bp, Homo sapien
gcaaaatgtgatgccgaaacacagg

SEQ ID NO: 5403931 - DNA, 25 bp, Homo sapien
tactgcaaagtatggcatcagagca

SEQ ID NO: 5403932 - DNA, 25 bp, Homo sapien
ttcaaggcgtatacagcaaaatgtg

SEQ ID NO: 5403933 - DNA, 25 bp, Homo sapien
gctggctaagaactttggagtagaa

SEQ ID NO: 5403934 - DNA, 25 bp, Homo sapien
gtgatgagtgtgacttaaattttct

SEQ ID NO: 5403935 - DNA, 25 bp, Homo sapien
ggctaagaactttggagtagaagtg

SEQ ID NO: 5403936 - DNA, 25 bp, Homo sapien
tctgaatcagtagccaggtgatttt

SEQ ID NO: 5403937 - DNA, 25 bp, Homo sapien
gaaagcagccccaacaattctaagg

SEQ ID NO: 5403938 - DNA, 25 bp, Homo sapien
aaagcagccccaacaattctaaggt

SEQ ID NO: 5403939 - DNA, 25 bp, Homo sapien
tctttagcttcagagtttctgccat

SEQ ID NO: 5403940 - DNA, 25 bp, Homo sapien
tagcttcagagtttctgccataatc

SEQ ID NO: 5403941 - DNA, 25 bp, Homo sapien
tttctttagcttcagagtttctgcc

SEQ ID NO: 5403942 - DNA, 25 bp, Homo sapien
tttagcttcagagtttctgccataa

SEQ ID NO: 5403943 - DNA, 25 bp, Homo sapien
aggtgtctactgtccttgggaaagt

SEQ ID NO: 5403944 - DNA, 25 bp, Homo sapien
aaggtgtctactgtccttgggaaag

SEQ ID NO: 5403945 - DNA, 25 bp, Homo sapien
ctccgtgttgccaattcctgagcgc

SEQ ID NO: 5403946 - DNA, 25 bp, Homo sapien
tgttgccaattcctgagcgcttgct

SEQ ID NO: 5403947 - DNA, 25 bp, Homo sapien
gccaattcctgagcgcttgcttgga

SEQ ID NO: 5403948 - DNA, 25 bp, Homo sapien
aattcctgagcgcttgcttggaggt

SEQ ID NO: 5403949 - DNA, 25 bp, Homo sapien
tatccgaaaatagtttccacaaaga

SEQ ID NO: 5403950 - DNA, 25 bp, Homo sapien
gtttccacaaagaagtcaactctgt

SEQ ID NO: 5403951 - DNA, 25 bp, Homo sapien
tttccacaaagaagtcaactctgtt

SEQ ID NO: 5403952 - DNA, 25 bp, Homo sapien
atagtttccacaaagaagtcaactc

SEQ ID NO: 5403953 - DNA, 25 bp, Homo sapien
tcaacagttacccagcgcttctgcc

SEQ ID NO: 5403954 - DNA, 25 bp, Homo sapien
aagctgacacagttgttgttggtac

SEQ ID NO: 5403955 - DNA, 25 bp, Homo sapien
tgccctactctcttgtaagctgaca

SEQ ID NO: 5403956 - DNA, 25 bp, Homo sapien
caagccatctaagtgcttctgagac

SEQ ID NO: 5403957 - DNA, 25 bp, Homo sapien
cagcgttagcatatattagagtccc

SEQ ID NO: 5403958 - DNA, 25 bp, Homo sapien
ttgccgtgccacataaccataggtc

SEQ ID NO: 5403959 - DNA, 25 bp, Homo sapien
ctaggttacaaagactcaaatggcc

SEQ ID NO: 5403960 - DNA, 25 bp, Homo sapien
tcattcattgtctggtgagagcaca

SEQ ID NO: 5403961 - DNA, 25 bp, Homo sapien
ggaaggcttattgccagagtctgca

SEQ ID NO: 5403962 - DNA, 25 bp, Homo sapien
gcatcttgatttgggctgaggtcca

SEQ ID NO: 5403963 - DNA, 25 bp, Homo sapien
tggtaacacctaggaaggagggcta

SEQ ID NO: 5403964 - DNA, 25 bp, Homo sapien
tctgtagatgccaaggaaagccact

SEQ ID NO: 5403965 - DNA, 25 bp, Homo sapien
tccacattattctacagtgaaaaag

SEQ ID NO: 5403966 - DNA, 25 bp, Homo sapien
taaggcatagaaatatgcaccctgg

SEQ ID NO: 5403967 - DNA, 25 bp, Homo sapien
tttatctagggttatttccacatta

SEQ ID NO: 5403968 - DNA, 25 bp, Homo sapien
ctccaagtgataactcaaataaggc

SEQ ID NO: 5403969 - DNA, 25 bp, Homo sapien
gaataagcatttctggagatatcac

SEQ ID NO: 5403970 - DNA, 25 bp, Homo sapien
catcaggtgtcacagcttgggaact

SEQ ID NO: 5403971 - DNA, 25 bp, Homo sapien
tcttccctaaggttggctgctcatc

SEQ ID NO: 5403972 - DNA, 25 bp, Homo sapien
taaatgcatcatagactcgaattca

SEQ ID NO: 5403973 - DNA, 25 bp, Homo sapien
ttaaattgagaaacctcttcatgtt

SEQ ID NO: 5403974 - DNA, 25 bp, Homo sapien
aattgagaaacctcttcatgttttt

SEQ ID NO: 5403975 - DNA, 25 bp, Homo sapien
ctctttaaattgagaaacctcttca

SEQ ID NO: 5403976 - DNA, 25 bp, Homo sapien
tttttcttaaattctatcactcgaa

SEQ ID NO: 5403977 - DNA, 25 bp, Homo sapien
catcatcaatttcttcatcccaaac

SEQ ID NO: 5403978 - DNA, 25 bp, Homo sapien
catcttcatcattattgcaattatc

SEQ ID NO: 5403979 - DNA, 25 bp, Homo sapien
ttcatcattattgcaattatcatca

SEQ ID NO: 5403980 - DNA, 25 bp, Homo sapien
tcattattgcaattatcatcatcat

SEQ ID NO: 5403981 - DNA, 25 bp, Homo sapien
gaatgtaacatgtcagcttggctag

SEQ ID NO: 5403982 - DNA, 25 bp, Homo sapien
agccattcaatttcagctgcctggt

SEQ ID NO: 5403983 - DNA, 25 bp, Homo sapien
tctgctcctcatcatgtttagaatg

SEQ ID NO: 5403984 - DNA, 25 bp, Homo sapien
gcttggctaggttttcgaaatccca

SEQ ID NO: 5403985 - DNA, 25 bp, Homo sapien
tcctctttgagaggctgctcagtaa

SEQ ID NO: 5403986 - DNA, 25 bp, Homo sapien
tgccactcagaggaatcttctccca

SEQ ID NO: 5403987 - DNA, 25 bp, Homo sapien
gagaggctgctcagtaatcctctcc

SEQ ID NO: 5403988 - DNA, 25 bp, Homo sapien
cttcttatttcctggttactgccac

SEQ ID NO: 5403989 - DNA, 25 bp, Homo sapien
tatcaggtcgctagtgtcccgtcaa

SEQ ID NO: 5403990 - DNA, 25 bp, Homo sapien
ggttacaccccttgtcaggcctgag

SEQ ID NO: 5403991 - DNA, 25 bp, Homo sapien
tagaagtaaagatgggtgatcaccc

SEQ ID NO: 5403992 - DNA, 25 bp, Homo sapien
cagtctgtggtgtacacaactcaga

SEQ ID NO: 5403993 - DNA, 25 bp, Homo sapien
agaaagatctgtgatagccttatga

SEQ ID NO: 5403994 - DNA, 25 bp, Homo sapien
tcagcactagtttcttggagagaaa

SEQ ID NO: 5403995 - DNA, 25 bp, Homo sapien
gaatgtcatttcatcagcactagtt

SEQ ID NO: 5403996 - DNA, 25 bp, Homo sapien
tctgtgatagccttatgaacaataa

SEQ ID NO: 5403997 - DNA, 25 bp, Homo sapien
tcaggtggtttatccccattacact

SEQ ID NO: 5403998 - DNA, 25 bp, Homo sapien
gagttgagcagcatgttcccttgta

SEQ ID NO: 5403999 - DNA, 25 bp, Homo sapien
tccagactgggttctaccctgtagt

SEQ ID NO: 5404000 - DNA, 25 bp, Homo sapien
actcagcctgggtaaatgtagccgg

SEQ ID NO: 5404001 - DNA, 25 bp, Homo sapien
gagtagatccttgataagatacctg

SEQ ID NO: 5404002 - DNA, 25 bp, Homo sapien
ttttcctaaaagtatccagacagag

SEQ ID NO: 5404003 - DNA, 25 bp, Homo sapien
ttgccttcaagtcctatagttccaa

SEQ ID NO: 5404004 - DNA, 25 bp, Homo sapien
tagttccaactcctactctaagagc

SEQ ID NO: 5404005 - DNA, 25 bp, Homo sapien
gtagagagggactttcagcttgtca

SEQ ID NO: 5404006 - DNA, 25 bp, Homo sapien
cctggcagagttaaaggcatccttt

SEQ ID NO: 5404007 - DNA, 25 bp, Homo sapien
caggcttttgtgttggcatgtagag

SEQ ID NO: 5404008 - DNA, 25 bp, Homo sapien
aaacaatctgaagcaatcaggcttt

SEQ ID NO: 5404009 - DNA, 25 bp, Homo sapien
ccacagctttaatccagagagaatg

SEQ ID NO: 5404010 - DNA, 25 bp, Homo sapien
taattttccctgtaacaggagccac

SEQ ID NO: 5404011 - DNA, 25 bp, Homo sapien
aatggcccattgtaattttccctgt

SEQ ID NO: 5404012 - DNA, 25 bp, Homo sapien
taacaggagccacaattgtcccaca

SEQ ID NO: 5404013 - DNA, 25 bp, Homo sapien
aactacactatctctaaccgccagg

SEQ ID NO: 5404014 - DNA, 25 bp, Homo sapien
ttgtaactaaataagcaactgcaca

SEQ ID NO: 5404015 - DNA, 25 bp, Homo sapien
caaactaagtttcatctggcgaggg

SEQ ID NO: 5404016 - DNA, 25 bp, Homo sapien
taggacaggactctgttacacattg

SEQ ID NO: 5404017 - DNA, 25 bp, Homo sapien
gagagtttgcagcacagatgaagct

SEQ ID NO: 5404018 - DNA, 25 bp, Homo sapien
gaggtaggtgctgttgttatctcca

SEQ ID NO: 5404019 - DNA, 25 bp, Homo sapien
cagagccagcaagcctactgatgag

SEQ ID NO: 5404020 - DNA, 25 bp, Homo sapien
tgcagagagattaaggagttcagct

SEQ ID NO: 5404021 - DNA, 25 bp, Homo sapien
cagcttcagagcctatgctcctaaa

SEQ ID NO: 5404022 - DNA, 25 bp, Homo sapien
tctatatagaaagggacaaagccag

SEQ ID NO: 5404023 - DNA, 25 bp, Homo sapien
tatgtcaagcattggtcaaagagct

SEQ ID NO: 5404024 - DNA, 25 bp, Homo sapien
aagtttaagctccttgcctaagtca

SEQ ID NO: 5404025 - DNA, 25 bp, Homo sapien
taaccaattttaaggagtgacttgc

SEQ ID NO: 5404026 - DNA, 25 bp, Homo sapien
cagtatctaaagaggaacccaaagt

SEQ ID NO: 5404027 - DNA, 25 bp, Homo sapien
tacagtatctaaagaggaacccaaa

SEQ ID NO: 5404028 - DNA, 25 bp, Homo sapien
ttacagtatctaaagaggaacccaa

SEQ ID NO: 5404029 - DNA, 25 bp, Homo sapien
cattacagtatctaaagaggaaccc

SEQ ID NO: 5404030 - DNA, 25 bp, Homo sapien
ccttatgagacaaatattatcccca

SEQ ID NO: 5404031 - DNA, 25 bp, Homo sapien
ggaggctatgattcaggaagattca

SEQ ID NO: 5404032 - DNA, 25 bp, Homo sapien
taaaaatgaagacgtacatgagcat

SEQ ID NO: 5404033 - DNA, 25 bp, Homo sapien
tggctcaaacactaaaagaggtact

SEQ ID NO: 5404034 - DNA, 25 bp, Homo sapien
gattctggcaataagacacagcata

SEQ ID NO: 5404035 - DNA, 25 bp, Homo sapien
ccaggcttgccactcaacttgttat

SEQ ID NO: 5404036 - DNA, 25 bp, Homo sapien
tcttaaccactagtacgactgcagt

SEQ ID NO: 5404037 - DNA, 25 bp, Homo sapien
gttggtttatccttagacgcttcta

SEQ ID NO: 5404038 - DNA, 25 bp, Homo sapien
atctgagtggctactgaatagtcca

SEQ ID NO: 5404039 - DNA, 25 bp, Homo sapien
catctgagtggctactgaatagtcc

SEQ ID NO: 5404040 - DNA, 25 bp, Homo sapien
gcatctgagtggctactgaatagtc

SEQ ID NO: 5404041 - DNA, 25 bp, Homo sapien
ggcatctgagtggctactgaatagt

SEQ ID NO: 5404042 - DNA, 25 bp, Homo sapien
ggacttgaactagcagccttctttt

SEQ ID NO: 5404043 - DNA, 25 bp, Homo sapien
gacttgaactagcagccttcttttt

SEQ ID NO: 5404044 - DNA, 25 bp, Homo sapien
gtcaggacttgaactagcagccttc

SEQ ID NO: 5404045 - DNA, 25 bp, Homo sapien
caggacttgaactagcagccttctt

SEQ ID NO: 5404046 - DNA, 25 bp, Homo sapien
gactcagatgataaaggtttatctt

SEQ ID NO: 5404047 - DNA, 25 bp, Homo sapien
ttatcttcagaatacatctttctct

SEQ ID NO: 5404048 - DNA, 25 bp, Homo sapien
aaggactcagatgataaaggtttat

SEQ ID NO: 5404049 - DNA, 25 bp, Homo sapien
tcagatgataaaggtttatcttcag

SEQ ID NO: 5404050 - DNA, 25 bp, Homo sapien
tcagttccatcttttgacttctttt

SEQ ID NO: 5404051 - DNA, 25 bp, Homo sapien
ttctcagttccatcttttgacttct

SEQ ID NO: 5404052 - DNA, 25 bp, Homo sapien
ctttaatatgcttttctttctcagt

SEQ ID NO: 5404053 - DNA, 25 bp, Homo sapien
tctttctcagttccatcttttgact

SEQ ID NO: 5404054 - DNA, 25 bp, Homo sapien
ttgtttcttatcctcatcttcagaa

SEQ ID NO: 5404055 - DNA, 25 bp, Homo sapien
cagtttctgacatggagctttcaga

SEQ ID NO: 5404056 - DNA, 25 bp, Homo sapien
atcagaagaactgctggaagaatca

SEQ ID NO: 5404057 - DNA, 25 bp, Homo sapien
gctttcagaagatttatgtgaacgg

SEQ ID NO: 5404058 - DNA, 25 bp, Homo sapien
ccttgatctcgccattgctattggg

SEQ ID NO: 5404059 - DNA, 25 bp, Homo sapien
cccaggtaggccttggtcgattcag

SEQ ID NO: 5404060 - DNA, 25 bp, Homo sapien
gataatcctgtattgttggccctga

SEQ ID NO: 5404061 - DNA, 25 bp, Homo sapien
tcagccaaagccttggagcctttct

SEQ ID NO: 5404062 - DNA, 25 bp, Homo sapien
gccacccgattgtcccgcttcccca

SEQ ID NO: 5404063 - DNA, 25 bp, Homo sapien
ataggccacccgattgtcccgcttc

SEQ ID NO: 5404064 - DNA, 25 bp, Homo sapien
ccacccgattgtcccgcttccccat

SEQ ID NO: 5404065 - DNA, 25 bp, Homo sapien
taggccacccgattgtcccgcttcc

SEQ ID NO: 5404066 - DNA, 25 bp, Homo sapien
accgggccagagagactgccgaaga

SEQ ID NO: 5404067 - DNA, 25 bp, Homo sapien
gggaaaccgggccagagagactgcc

SEQ ID NO: 5404068 - DNA, 25 bp, Homo sapien
ccgaagagggcctgccgcaggtcct

SEQ ID NO: 5404069 - DNA, 25 bp, Homo sapien
ctggatcgagcgcacagtagcacgc

SEQ ID NO: 5404070 - DNA, 25 bp, Homo sapien
cccatgcctgttctctctgatggta

SEQ ID NO: 5404071 - DNA, 25 bp, Homo sapien
agggtttttatggttctctctctct

SEQ ID NO: 5404072 - DNA, 25 bp, Homo sapien
acatgcccgaccagaagccacaagt

SEQ ID NO: 5404073 - DNA, 25 bp, Homo sapien
gttaagacagagttgtgacttccaa

SEQ ID NO: 5404074 - DNA, 25 bp, Homo sapien
tttacttgctgttaagacagagttg

SEQ ID NO: 5404075 - DNA, 25 bp, Homo sapien
tgtgacttccaacttcgttacatgc

SEQ ID NO: 5404076 - DNA, 25 bp, Homo sapien
tacaatatcgcacagaagagtttca

SEQ ID NO: 5404077 - DNA, 25 bp, Homo sapien
gtatacatatgtagcactgtcagag

SEQ ID NO: 5404078 - DNA, 25 bp, Homo sapien
gcaaatgcagagtcatgtatccaag

SEQ ID NO: 5404079 - DNA, 25 bp, Homo sapien
caatcatttccagagctacttagct

SEQ ID NO: 5404080 - DNA, 25 bp, Homo sapien
gatctatggtctgctttcccgtatg

SEQ ID NO: 5404081 - DNA, 25 bp, Homo sapien
ttgatctattcagcgcaaactggga

SEQ ID NO: 5404082 - DNA, 25 bp, Homo sapien
tgaggtctactgtcatacagcagtg

SEQ ID NO: 5404083 - DNA, 25 bp, Homo sapien
gaatgaatcactatgcaccagaagt

SEQ ID NO: 5404084 - DNA, 25 bp, Homo sapien
tagcagctctacttaaattgaagtg

SEQ ID NO: 5404085 - DNA, 25 bp, Homo sapien
cgtaaagtgtctttagccaactagg

SEQ ID NO: 5404086 - DNA, 25 bp, Homo sapien
aagagttaatagaaggcaagtccca

SEQ ID NO: 5404087 - DNA, 25 bp, Homo sapien
catcttagatgcttccttaccctac

SEQ ID NO: 5404088 - DNA, 25 bp, Homo sapien
gaatagctgtgccaccagaacagag

SEQ ID NO: 5404089 - DNA, 25 bp, Homo sapien
tgtgatactaacataaccaataggc

SEQ ID NO: 5404090 - DNA, 25 bp, Homo sapien
tacaaagctgtaggattcggagagt

SEQ ID NO: 5404091 - DNA, 25 bp, Homo sapien
caaaagactgctgaggtgatagcta

SEQ ID NO: 5404092 - DNA, 25 bp, Homo sapien
aaattgcctattattaagcctccgc

SEQ ID NO: 5404093 - DNA, 25 bp, Homo sapien
taacccagcaattatcctatagaaa

SEQ ID NO: 5404094 - DNA, 25 bp, Homo sapien
ccacatctttccatggttctcatga

SEQ ID NO: 5404095 - DNA, 25 bp, Homo sapien
tgatggtcatctttgtttacaagcc

SEQ ID NO: 5404096 - DNA, 25 bp, Homo sapien
tctgggtgagtctagagatatttgt

SEQ ID NO: 5404097 - DNA, 25 bp, Homo sapien
aaatgggatgtcagttttgcaattc

SEQ ID NO: 5404098 - DNA, 25 bp, Homo sapien
tacttgactccaaaaagttctcaat

SEQ ID NO: 5404099 - DNA, 25 bp, Homo sapien
tcctgtctgcttagaaattggctgt

SEQ ID NO: 5404100 - DNA, 25 bp, Homo sapien
ttccacagcacgatgaaggccaggg

SEQ ID NO: 5404101 - DNA, 25 bp, Homo sapien
taatcgattccggtccacaagggct

SEQ ID NO: 5404102 - DNA, 25 bp, Homo sapien
ggcagggtcccaaacatgcttgata

SEQ ID NO: 5404103 - DNA, 25 bp, Homo sapien
caagggagacatggatccgctgctg

SEQ ID NO: 5404104 - DNA, 25 bp, Homo sapien
ctgcagagatctgtactccacccat

SEQ ID NO: 5404105 - DNA, 25 bp, Homo sapien
gaagcagacgatgttcctgtaactg

SEQ ID NO: 5404106 - DNA, 25 bp, Homo sapien
actgcagagatctgtactccaccca

SEQ ID NO: 5404107 - DNA, 25 bp, Homo sapien
aagcagacgatgttcctgtaactgc

SEQ ID NO: 5404108 - DNA, 25 bp, Homo sapien
gggagtctccttaatctgaaagata

SEQ ID NO: 5404109 - DNA, 25 bp, Homo sapien
cttcgtatagaagggagtctcctta

SEQ ID NO: 5404110 - DNA, 25 bp, Homo sapien
ccttaatctgaaagatagctcattc

SEQ ID NO: 5404111 - DNA, 25 bp, Homo sapien
taccagcaaacttcgtatagaaggg

SEQ ID NO: 5404112 - DNA, 25 bp, Homo sapien
tacagtatattgatgatcctagcca

SEQ ID NO: 5404113 - DNA, 25 bp, Homo sapien
tacaatatgaaccactgtttacccc

SEQ ID NO: 5404114 - DNA, 25 bp, Homo sapien
aaaatcattagcaataagtggctga

SEQ ID NO: 5404115 - DNA, 25 bp, Homo sapien
tacccctcataaaaatgtagcaaca

SEQ ID NO: 5404116 - DNA, 25 bp, Homo sapien
tttagaactatgactcagatgcatg

SEQ ID NO: 5404117 - DNA, 25 bp, Homo sapien
caaagcacagagataagcacagtgg

SEQ ID NO: 5404118 - DNA, 25 bp, Homo sapien
ataaagccaaagtaagcaacctgct

SEQ ID NO: 5404119 - DNA, 25 bp, Homo sapien
gcattatttactatctcttggacgc

SEQ ID NO: 5404120 - DNA, 25 bp, Homo sapien
cattgttccattaagagtctctatc

SEQ ID NO: 5404121 - DNA, 25 bp, Homo sapien
agctttgcttcaagctccgttcttt

SEQ ID NO: 5404122 - DNA, 25 bp, Homo sapien
tttgcttcaagctccgttcttttca

SEQ ID NO: 5404123 - DNA, 25 bp, Homo sapien
ttgcttcaagctccgttcttttcag

SEQ ID NO: 5404124 - DNA, 25 bp, Homo sapien
tacagagtactacactttgagcaca

SEQ ID NO: 5404125 - DNA, 25 bp, Homo sapien
aggtggctaaaagaaaggatcctag

SEQ ID NO: 5404126 - DNA, 25 bp, Homo sapien
tagctggaccaaagccaaatcttct

SEQ ID NO: 5404127 - DNA, 25 bp, Homo sapien
tcatggcacttcgagtagctggacc

SEQ ID NO: 5404128 - DNA, 25 bp, Homo sapien
gttagcaggtttccggacgatctga

SEQ ID NO: 5404129 - DNA, 25 bp, Homo sapien
gatctgatcaggtcaacgacttgtt

SEQ ID NO: 5404130 - DNA, 25 bp, Homo sapien
caggtcaacgacttgtttgtaggta

SEQ ID NO: 5404131 - DNA, 25 bp, Homo sapien
tccggacgatctgatcaggtcaacg

SEQ ID NO: 5404132 - DNA, 25 bp, Homo sapien
ttccgaggagcaggcattctgattc

SEQ ID NO: 5404133 - DNA, 25 bp, Homo sapien
gaacatttccgaggagcaggcattc

SEQ ID NO: 5404134 - DNA, 25 bp, Homo sapien
catttccgaggagcaggcattctga

SEQ ID NO: 5404135 - DNA, 25 bp, Homo sapien
aaagtgaacatttccgaggagcagg

SEQ ID NO: 5404136 - DNA, 25 bp, Homo sapien
caacgatggccaagtgcaatgagaa

SEQ ID NO: 5404137 - DNA, 25 bp, Homo sapien
tacacatgcagcaaggagacatgcc

SEQ ID NO: 5404138 - DNA, 25 bp, Homo sapien
caccctctggtatgcctgtcctgaa

SEQ ID NO: 5404139 - DNA, 25 bp, Homo sapien
ttcccaatgggataaaacaacgatg

SEQ ID NO: 5404140 - DNA, 25 bp, Homo sapien
ggatcagtgacacaatgatcacctg

SEQ ID NO: 5404141 - DNA, 25 bp, Homo sapien
caaatccaaatgtttcattatcctg

SEQ ID NO: 5404142 - DNA, 25 bp, Homo sapien
aaatgtttcattatcctgcttctcc

SEQ ID NO: 5404143 - DNA, 25 bp, Homo sapien
cctgcttctccacagtaacaagctt

SEQ ID NO: 5404144 - DNA, 25 bp, Homo sapien
tatcctgcttctccacagtaacaag

SEQ ID NO: 5404145 - DNA, 25 bp, Homo sapien
cacttaaagaacttgatctggtcaa

SEQ ID NO: 5404146 - DNA, 25 bp, Homo sapien
caggaaaagtcacttaaagaacttg

SEQ ID NO: 5404147 - DNA, 25 bp, Homo sapien
taaagaacttgatctggtcaaagca

SEQ ID NO: 5404148 - DNA, 25 bp, Homo sapien
aagtcacttaaagaacttgatctgg

SEQ ID NO: 5404149 - DNA, 25 bp, Homo sapien
aatcagtgcatctattaggaacttc

SEQ ID NO: 5404150 - DNA, 25 bp, Homo sapien
gaacttcaagatttcatccaatcgg

SEQ ID NO: 5404151 - DNA, 25 bp, Homo sapien
cagtgcatctattaggaacttcaag

SEQ ID NO: 5404152 - DNA, 25 bp, Homo sapien
catccaatcggtcttttgaatcaaa

SEQ ID NO: 5404153 - DNA, 25 bp, Homo sapien
tcaaattctctgacacgtgccacgt

SEQ ID NO: 5404154 - DNA, 25 bp, Homo sapien
ttttgatccgggctgtcagactcag

SEQ ID NO: 5404155 - DNA, 25 bp, Homo sapien
tctgacacgtgccacgtcttgacac

SEQ ID NO: 5404156 - DNA, 25 bp, Homo sapien
caggcgatgtggaaaggaatgttcc

SEQ ID NO: 5404157 - DNA, 25 bp, Homo sapien
ttcgtccccgaggcagagtagccac

SEQ ID NO: 5404158 - DNA, 25 bp, Homo sapien
gcagagtagccaccgtgtctgctag

SEQ ID NO: 5404159 - DNA, 25 bp, Homo sapien
agccaccgtgtctgctagcatttga

SEQ ID NO: 5404160 - DNA, 25 bp, Homo sapien
gagtagccaccgtgtctgctagcat

SEQ ID NO: 5404161 - DNA, 25 bp, Homo sapien
gaagtccgccaaattgccattgctg

SEQ ID NO: 5404162 - DNA, 25 bp, Homo sapien
tggagtaagagctatacgctggccc

SEQ ID NO: 5404163 - DNA, 25 bp, Homo sapien
gtaagagctatacgctggcccagcg

SEQ ID NO: 5404164 - DNA, 25 bp, Homo sapien
tggcccagcgcagaagtccgccaaa

SEQ ID NO: 5404165 - DNA, 25 bp, Homo sapien
ccagctagcacatggttgagtggcc

SEQ ID NO: 5404166 - DNA, 25 bp, Homo sapien
agctagcacatggttgagtggcctt

SEQ ID NO: 5404167 - DNA, 25 bp, Homo sapien
ctccagctagcacatggttgagtgg

SEQ ID NO: 5404168 - DNA, 25 bp, Homo sapien
cactccagctagcacatggttgagt

SEQ ID NO: 5404169 - DNA, 25 bp, Homo sapien
ctcagtgtggatcactggaattatg

SEQ ID NO: 5404170 - DNA, 25 bp, Homo sapien
gaattatgaacactactccccagag

SEQ ID NO: 5404171 - DNA, 25 bp, Homo sapien
gatgtcctcatccaactcagtgtgg

SEQ ID NO: 5404172 - DNA, 25 bp, Homo sapien
tggagctgggtagacagatgtcctc

SEQ ID NO: 5404173 - DNA, 25 bp, Homo sapien
caactttatctatttcaggtttagg

SEQ ID NO: 5404174 - DNA, 25 bp, Homo sapien
ctttgagcatgttgggcatatggca

SEQ ID NO: 5404175 - DNA, 25 bp, Homo sapien
gcatatggcagagatggcttcatgt

SEQ ID NO: 5404176 - DNA, 25 bp, Homo sapien
ggcttcatgttgaagggtccatgct

SEQ ID NO: 5404177 - DNA, 25 bp, Homo sapien
taagtggatcggcagagaaaggcca

SEQ ID NO: 5404178 - DNA, 25 bp, Homo sapien
ctggattcgctctgccccctatagg

SEQ ID NO: 5404179 - DNA, 25 bp, Homo sapien
gggacttgtctttgagaatggtaag

SEQ ID NO: 5404180 - DNA, 25 bp, Homo sapien
tctggagctgcctggattcgctctg

SEQ ID NO: 5404181 - DNA, 25 bp, Homo sapien
ggactgtcccttccagatccttaaa

SEQ ID NO: 5404182 - DNA, 25 bp, Homo sapien
tcagcacgaggactggcctgtgaag

SEQ ID NO: 5404183 - DNA, 25 bp, Homo sapien
tctggaatggtcaggtcagcacgag

SEQ ID NO: 5404184 - DNA, 25 bp, Homo sapien
tcgttaaaacgtctctggactgtcc

SEQ ID NO: 5404185 - DNA, 25 bp, Homo sapien
cctcttctcataaacgtaccatgtg

SEQ ID NO: 5404186 - DNA, 25 bp, Homo sapien
ttctcataaacgtaccatgtgatag

SEQ ID NO: 5404187 - DNA, 25 bp, Homo sapien
acgtaccatgtgatagagctcactt

SEQ ID NO: 5404188 - DNA, 25 bp, Homo sapien
gaaggaaacattgctggttcctctt

SEQ ID NO: 5404189 - DNA, 25 bp, Homo sapien
caagaagacccttttcttgccttga

SEQ ID NO: 5404190 - DNA, 25 bp, Homo sapien
tcaagaagacccttttcttgccttg

SEQ ID NO: 5404191 - DNA, 25 bp, Homo sapien
tgcaataaccgtcaaagccacaggg

SEQ ID NO: 5404192 - DNA, 25 bp, Homo sapien
tttcctgaatcaagggtacttgtgc

SEQ ID NO: 5404193 - DNA, 25 bp, Homo sapien
aagcatggcggcacaggtttcctga

SEQ ID NO: 5404194 - DNA, 25 bp, Homo sapien
ccagtggtccccgtaacaggaagca

SEQ ID NO: 5404195 - DNA, 25 bp, Homo sapien
attgactgctttgtcaccctggaac

SEQ ID NO: 5404196 - DNA, 25 bp, Homo sapien
gactgctttgtcaccctggaactcc

SEQ ID NO: 5404197 - DNA, 25 bp, Homo sapien
ctggaatcccagtgtatcctttggg

SEQ ID NO: 5404198 - DNA, 25 bp, Homo sapien
aagcttggtttggatgattgactgc

SEQ ID NO: 5404199 - DNA, 25 bp, Homo sapien
gaggcattaaactcagtgctgttgt

SEQ ID NO: 5404200 - DNA, 25 bp, Homo sapien
gctaagttctcatcaatcccagtgg

SEQ ID NO: 5404201 - DNA, 25 bp, Homo sapien
tcccagtggtaagaacttgagttcc

SEQ ID NO: 5404202 - DNA, 25 bp, Homo sapien
ggaaaaccagtccaaacttagctga

SEQ ID NO: 5404203 - DNA, 25 bp, Homo sapien
ctgctgctctaaatcatcaccccaa

SEQ ID NO: 5404204 - DNA, 25 bp, Homo sapien
gaagacacaaccaggtaaaggctct

SEQ ID NO: 5404205 - DNA, 25 bp, Homo sapien
gctgctctaaatcatcaccccaaac

SEQ ID NO: 5404206 - DNA, 25 bp, Homo sapien
tgctgctctaaatcatcaccccaaa

SEQ ID NO: 5404207 - DNA, 25 bp, Homo sapien
tgagaaccactcttaaagcctggaa

SEQ ID NO: 5404208 - DNA, 25 bp, Homo sapien
cactgaaccaacttcggggctgcca

SEQ ID NO: 5404209 - DNA, 25 bp, Homo sapien
tttctagctttgacatctgcacctg

SEQ ID NO: 5404210 - DNA, 25 bp, Homo sapien
tggccttgccaatcaagccactgta

SEQ ID NO: 5404211 - DNA, 25 bp, Homo sapien
gaccagacaagtatttgactcatga

SEQ ID NO: 5404212 - DNA, 25 bp, Homo sapien
tggttcaataccacctaacattgca

SEQ ID NO: 5404213 - DNA, 25 bp, Homo sapien
taacattgcactgaatgaccagaca

SEQ ID NO: 5404214 - DNA, 25 bp, Homo sapien
gatttgtgatccctgtatcccctcc

SEQ ID NO: 5404215 - DNA, 25 bp, Homo sapien
ataggaggtttcgtctactctgctc

SEQ ID NO: 5404216 - DNA, 25 bp, Homo sapien
catagaggtctggttggcaaatctc

SEQ ID NO: 5404217 - DNA, 25 bp, Homo sapien
cagtcagtgattcctcctggttccc

SEQ ID NO: 5404218 - DNA, 25 bp, Homo sapien
ggtttcgtctactctgctctaaatg

SEQ ID NO: 5404219 - DNA, 25 bp, Homo sapien
gccttgctcttggttaacttcatgt

SEQ ID NO: 5404220 - DNA, 25 bp, Homo sapien
tcatgtggttcaactaaagtcagac

SEQ ID NO: 5404221 - DNA, 25 bp, Homo sapien
taagccttgctcttggttaacttca

SEQ ID NO: 5404222 - DNA, 25 bp, Homo sapien
gtggttcaactaaagtcagacttac

SEQ ID NO: 5404223 - DNA, 25 bp, Homo sapien
ttttccacgtgacatttaattccaa

SEQ ID NO: 5404224 - DNA, 25 bp, Homo sapien
taggttgtctatcttcttaacagaa

SEQ ID NO: 5404225 - DNA, 25 bp, Homo sapien
caggatagacgtcacttaggttgtc

SEQ ID NO: 5404226 - DNA, 25 bp, Homo sapien
tttgtctttgaagcaggatagacgt

SEQ ID NO: 5404227 - DNA, 25 bp, Homo sapien
tagagagagcgaatttgccacacat

SEQ ID NO: 5404228 - DNA, 25 bp, Homo sapien
attttgttgcccgttactagccaag

SEQ ID NO: 5404229 - DNA, 25 bp, Homo sapien
agaactccgttatttgccatcatca

SEQ ID NO: 5404230 - DNA, 25 bp, Homo sapien
gaaactattgcagtcttggctaacc

SEQ ID NO: 5404231 - DNA, 25 bp, Homo sapien
tgcctatatgacacttctatctccc

SEQ ID NO: 5404232 - DNA, 25 bp, Homo sapien
ccccgtttgcctatatgacacttct

SEQ ID NO: 5404233 - DNA, 25 bp, Homo sapien
tatgacacttctatctccccttcag

SEQ ID NO: 5404234 - DNA, 25 bp, Homo sapien
gacacttctatctccccttcaggat

SEQ ID NO: 5404235 - DNA, 25 bp, Homo sapien
caccaatccctgtaagaatcattag

SEQ ID NO: 5404236 - DNA, 25 bp, Homo sapien
caatagctacttccacgggtggcca

SEQ ID NO: 5404237 - DNA, 25 bp, Homo sapien
ctcctcggtggccttaaagaaatct

SEQ ID NO: 5404238 - DNA, 25 bp, Homo sapien
gtatcgacccaagtttcatttctcc

SEQ ID NO: 5404239 - DNA, 25 bp, Homo sapien
tggagagaggcagtaaaggccgtga

SEQ ID NO: 5404240 - DNA, 25 bp, Homo sapien
gggagatattgaccctgcacagagc

SEQ ID NO: 5404241 - DNA, 25 bp, Homo sapien
agaggcagtaaaggccgtgaggctg

SEQ ID NO: 5404242 - DNA, 25 bp, Homo sapien
gagagaggcagtaaaggccgtgagg

SEQ ID NO: 5404243 - DNA, 25 bp, Homo sapien
ctggaggtccttgaaccagtggtca

SEQ ID NO: 5404244 - DNA, 25 bp, Homo sapien
tggaggtccttgaaccagtggtcat

SEQ ID NO: 5404245 - DNA, 25 bp, Homo sapien
gctggaggtccttgaaccagtggtc

SEQ ID NO: 5404246 - DNA, 25 bp, Homo sapien
taaaatagagttctatatgcttcac

SEQ ID NO: 5404247 - DNA, 25 bp, Homo sapien
tggtataaaggctatcactgagttt

SEQ ID NO: 5404248 - DNA, 25 bp, Homo sapien
ctctttggagtttgaaattctcttc

SEQ ID NO: 5404249 - DNA, 25 bp, Homo sapien
gacttgctgttggtaaagttaaaca

SEQ ID NO: 5404250 - DNA, 25 bp, Homo sapien
aacaggcctgactggatgtgatggc

SEQ ID NO: 5404251 - DNA, 25 bp, Homo sapien
agttggattttagcccgcacctgcc

SEQ ID NO: 5404252 - DNA, 25 bp, Homo sapien
caaagtcagtaattagctccatgca

SEQ ID NO: 5404253 - DNA, 25 bp, Homo sapien
taagggtaatctcctaaggcactca

SEQ ID NO: 5404254 - DNA, 25 bp, Homo sapien
cattaacgagtatggaagtacacgc

SEQ ID NO: 5404255 - DNA, 25 bp, Homo sapien
ataaaagggttccaccacgatcagg

SEQ ID NO: 5404256 - DNA, 25 bp, Homo sapien
tgtacccgatattgtggcaagcaag

SEQ ID NO: 5404257 - DNA, 25 bp, Homo sapien
tagactttaaaatccctgagggcag

SEQ ID NO: 5404258 - DNA, 25 bp, Homo sapien
caagtttagtggttcagggactgct

SEQ ID NO: 5404259 - DNA, 25 bp, Homo sapien
taggaagctagctaaccttacggtg

SEQ ID NO: 5404260 - DNA, 25 bp, Homo sapien
gattggatgaagtcaactcctgccc

SEQ ID NO: 5404261 - DNA, 25 bp, Homo sapien
tcacaagatttggacctagtgccag

SEQ ID NO: 5404262 - DNA, 25 bp, Homo sapien
ggcataccaacactcacgcattatt

SEQ ID NO: 5404263 - DNA, 25 bp, Homo sapien
gacacaaagttgagatatagtcttc

SEQ ID NO: 5404264 - DNA, 25 bp, Homo sapien
tagtcttcttaatacgaagagcagt

SEQ ID NO: 5404265 - DNA, 25 bp, Homo sapien
ttaggcgggccgctccgttggcata

SEQ ID NO: 5404266 - DNA, 25 bp, Homo sapien
taagaaaaatatagataaaaacatg

SEQ ID NO: 5404267 - DNA, 25 bp, Homo sapien
aaaatatagataaaaacatggcctt

SEQ ID NO: 5404268 - DNA, 25 bp, Homo sapien
aatatagataaaaacatggccttac

SEQ ID NO: 5404269 - DNA, 25 bp, Homo sapien
gaaaaatatagataaaaacatggcc

SEQ ID NO: 5404270 - DNA, 25 bp, Homo sapien
caactttgccactggtttgggatac

SEQ ID NO: 5404271 - DNA, 25 bp, Homo sapien
ttcctctatcgagggatctgaaggc

SEQ ID NO: 5404272 - DNA, 25 bp, Homo sapien
gatacttggtcgaaacttctggtca

SEQ ID NO: 5404273 - DNA, 25 bp, Homo sapien
gaaggcaccatgtcataataaggca

SEQ ID NO: 5404274 - DNA, 25 bp, Homo sapien
catcaagcatttcaggagccatata

SEQ ID NO: 5404275 - DNA, 25 bp, Homo sapien
gactgaacacctccgggctatttcc

SEQ ID NO: 5404276 - DNA, 25 bp, Homo sapien
gtcagctcgtttgaaggactcaaag

SEQ ID NO: 5404277 - DNA, 25 bp, Homo sapien
tcccagtaaaccagaccaacagaat

SEQ ID NO: 5404278 - DNA, 25 bp, Homo sapien
tccgctatggcacaagtttcacact

SEQ ID NO: 5404279 - DNA, 25 bp, Homo sapien
tcttggttcccactttaggattctg

SEQ ID NO: 5404280 - DNA, 25 bp, Homo sapien
taggattctgaggtatgtcgatagt

SEQ ID NO: 5404281 - DNA, 25 bp, Homo sapien
tttatgtctcgatgagcaatagcag

SEQ ID NO: 5404282 - DNA, 25 bp, Homo sapien
tccatatgaaggtgtgccagaccac

SEQ ID NO: 5404283 - DNA, 25 bp, Homo sapien
tcaaatagtcatataaggagccctg

SEQ ID NO: 5404284 - DNA, 25 bp, Homo sapien
gaccactagcaattgagagcgccag

SEQ ID NO: 5404285 - DNA, 25 bp, Homo sapien
gatcattccagccacggtcactata

SEQ ID NO: 5404286 - DNA, 25 bp, Homo sapien
aatacctgctggcaatagtaaccac

SEQ ID NO: 5404287 - DNA, 25 bp, Homo sapien
gcttcagtggtaatgcttacagtcc

SEQ ID NO: 5404288 - DNA, 25 bp, Homo sapien
ggaacttgttatatgtgcccaccat

SEQ ID NO: 5404289 - DNA, 25 bp, Homo sapien
caaaagcttatagtaagagccaaac

SEQ ID NO: 5404290 - DNA, 25 bp, Homo sapien
aaccaaggatgttttcatgtcgcag

SEQ ID NO: 5404291 - DNA, 25 bp, Homo sapien
ggatgttttcatgtcgcagcatgac

SEQ ID NO: 5404292 - DNA, 25 bp, Homo sapien
aatgaaaccaaggatgttttcatgt

SEQ ID NO: 5404293 - DNA, 25 bp, Homo sapien
ctttgttgtcagcagcaatgaaacc

SEQ ID NO: 5404294 - DNA, 25 bp, Homo sapien
tctaccttttcctactatttcctga

SEQ ID NO: 5404295 - DNA, 25 bp, Homo sapien
tgtcctttgaaccaacagaggtaga

SEQ ID NO: 5404296 - DNA, 25 bp, Homo sapien
tctgcctcacgaaaccaagatcttt

SEQ ID NO: 5404297 - DNA, 25 bp, Homo sapien
gcacaatcgtccttgcaattgtcct

SEQ ID NO: 5404298 - DNA, 25 bp, Homo sapien
catttaccagattgcactcagagag

SEQ ID NO: 5404299 - DNA, 25 bp, Homo sapien
ccagaggcggtcacatcataaatca

SEQ ID NO: 5404300 - DNA, 25 bp, Homo sapien
cgcagctatggacaggaggcaaaca

SEQ ID NO: 5404301 - DNA, 25 bp, Homo sapien
gtaggagcactgtcgaccctggcat

SEQ ID NO: 5404302 - DNA, 25 bp, Homo sapien
gtccaagttttggggcatttggtga

SEQ ID NO: 5404303 - DNA, 25 bp, Homo sapien
ccaagttttggggcatttggtgatg

SEQ ID NO: 5404304 - DNA, 25 bp, Homo sapien
tccaagttttggggcatttggtgat

SEQ ID NO: 5404305 - DNA, 25 bp, Homo sapien
aattcgcttagatccctccaacatg

SEQ ID NO: 5404306 - DNA, 25 bp, Homo sapien
tcaccaagaatcatccaattacaag

SEQ ID NO: 5404307 - DNA, 25 bp, Homo sapien
cttcgtagtgaccattgtaaatttc

SEQ ID NO: 5404308 - DNA, 25 bp, Homo sapien
tacaagttaattcgcttagatccct

SEQ ID NO: 5404309 - DNA, 25 bp, Homo sapien
agcatgcacatgtcaccttttcctg

SEQ ID NO: 5404310 - DNA, 25 bp, Homo sapien
ccttttcctgactagagcaatgaat

SEQ ID NO: 5404311 - DNA, 25 bp, Homo sapien
tcgtgtgatggcagaacaattccac

SEQ ID NO: 5404312 - DNA, 25 bp, Homo sapien
gcctgtctggcacacctgtcaggtg

SEQ ID NO: 5404313 - DNA, 25 bp, Homo sapien
gaagacttgagcattcagttctgga

SEQ ID NO: 5404314 - DNA, 25 bp, Homo sapien
gcagcattcggttttggtaacattg

SEQ ID NO: 5404315 - DNA, 25 bp, Homo sapien
cattgttggaactatgacagaagac

SEQ ID NO: 5404316 - DNA, 25 bp, Homo sapien
tgttatgttgttgcaaaaatctgtg

SEQ ID NO: 5404317 - DNA, 25 bp, Homo sapien
tgcccaacatgctccttctgtttgg

SEQ ID NO: 5404318 - DNA, 25 bp, Homo sapien
gatgcccaacatgctccttctgttt

SEQ ID NO: 5404319 - DNA, 25 bp, Homo sapien
ctgatgcccaacatgctccttctgt

SEQ ID NO: 5404320 - DNA, 25 bp, Homo sapien
ccaacatgctccttctgtttggcag

SEQ ID NO: 5404321 - DNA, 25 bp, Homo sapien
cctgatggaactccattcccggtcc

SEQ ID NO: 5404322 - DNA, 25 bp, Homo sapien
ttgtcaacgggtttggtaacactca

SEQ ID NO: 5404323 - DNA, 25 bp, Homo sapien
ggtttggtaacactcactgccctga

SEQ ID NO: 5404324 - DNA, 25 bp, Homo sapien
caacgggtttggtaacactcactgc

SEQ ID NO: 5404325 - DNA, 25 bp, Homo sapien
tttgcgaagggacaccctgcggtcg

SEQ ID NO: 5404326 - DNA, 25 bp, Homo sapien
cttggcgcagtgaattcggccccga

SEQ ID NO: 5404327 - DNA, 25 bp, Homo sapien
ctccccttcgcctgatgaatttgcg

SEQ ID NO: 5404328 - DNA, 25 bp, Homo sapien
agctttccgctggaccttggcgcag

SEQ ID NO: 5404329 - DNA, 25 bp, Homo sapien
cagggagtagctaaacatatcacaa

SEQ ID NO: 5404330 - DNA, 25 bp, Homo sapien
caaagacatcttcagtcagcttttc

SEQ ID NO: 5404331 - DNA, 25 bp, Homo sapien
catttcttgttccgtcaaagtattt

SEQ ID NO: 5404332 - DNA, 25 bp, Homo sapien
tcaaagtatttagttcacagggagt

SEQ ID NO: 5404333 - DNA, 25 bp, Homo sapien
cagtgactatccctgactggagaag

SEQ ID NO: 5404334 - DNA, 25 bp, Homo sapien
gacacagtgactatccctgactgga

SEQ ID NO: 5404335 - DNA, 25 bp, Homo sapien
gacagggttacaacagacacagtga

SEQ ID NO: 5404336 - DNA, 25 bp, Homo sapien
gactatccctgactggagaagataa

SEQ ID NO: 5404337 - DNA, 25 bp, Homo sapien
tttactggatccctaagtaggagga

SEQ ID NO: 5404338 - DNA, 25 bp, Homo sapien
gctttagggatccagctttcaaaga

SEQ ID NO: 5404339 - DNA, 25 bp, Homo sapien
tagtgatttgtattgttcgggtttc

SEQ ID NO: 5404340 - DNA, 25 bp, Homo sapien
tcagggaaccaagtggcccacatgc

SEQ ID NO: 5404341 - DNA, 25 bp, Homo sapien
ttcaaaactgagctcctgtgatctg

SEQ ID NO: 5404342 - DNA, 25 bp, Homo sapien
tcaatctaacaaggtattctctgcc

SEQ ID NO: 5404343 - DNA, 25 bp, Homo sapien
ctctaagcatagtttctcctgggcc

SEQ ID NO: 5404344 - DNA, 25 bp, Homo sapien
aaagttatcagtaaatgcccttggc

SEQ ID NO: 5404345 - DNA, 25 bp, Homo sapien
tgcgttgcaaaccacacagatttaa

SEQ ID NO: 5404346 - DNA, 25 bp, Homo sapien
gaaacgtctggcttctagattgggt

SEQ ID NO: 5404347 - DNA, 25 bp, Homo sapien
tcgtacctcgaaagcaatgtgcgtt

SEQ ID NO: 5404348 - DNA, 25 bp, Homo sapien
aactctgagtaaagatcgtacctcg

SEQ ID NO: 5404349 - DNA, 25 bp, Homo sapien
tggcggagcgctgagcagagcgccc

SEQ ID NO: 5404350 - DNA, 25 bp, Homo sapien
ctggcggagcgctgagcagagcgcc

SEQ ID NO: 5404351 - DNA, 25 bp, Homo sapien
gcgctgagcagagcgcccgggtcat

SEQ ID NO: 5404352 - DNA, 25 bp, Homo sapien
gcggagcgctgagcagagcgcccgg

SEQ ID NO: 5404353 - DNA, 25 bp, Homo sapien
agcacggcccgctttgaagttcccg

SEQ ID NO: 5404354 - DNA, 25 bp, Homo sapien
tggctctagtcagtgtgggcgcccc

SEQ ID NO: 5404355 - DNA, 25 bp, Homo sapien
aagtgcgcggttggctctagtcagt

SEQ ID NO: 5404356 - DNA, 25 bp, Homo sapien
cgcggcaccgacacccttttgaagt

SEQ ID NO: 5404357 - DNA, 25 bp, Homo sapien
aatgttaatctccttgcacgtctcc

SEQ ID NO: 5404358 - DNA, 25 bp, Homo sapien
caggtacattgtcaagcagtagtaa

SEQ ID NO: 5404359 - DNA, 25 bp, Homo sapien
cctaataagagaattggtcagtcct

SEQ ID NO: 5404360 - DNA, 25 bp, Homo sapien
taatctatgggctgtagaacggatg

SEQ ID NO: 5404361 - DNA, 25 bp, Homo sapien
catggcccactcatttagaacatac

SEQ ID NO: 5404362 - DNA, 25 bp, Homo sapien
tcttgaggccacaggctagtaatca

SEQ ID NO: 5404363 - DNA, 25 bp, Homo sapien
ggtagaatgttgcaaactgatgaag

SEQ ID NO: 5404364 - DNA, 25 bp, Homo sapien
caataatcctagaaggtaggtacta

SEQ ID NO: 5404365 - DNA, 25 bp, Homo sapien
gtcgacatgcacctcatacagggga

SEQ ID NO: 5404366 - DNA, 25 bp, Homo sapien
gacatgcacctcatacaggggagct

SEQ ID NO: 5404367 - DNA, 25 bp, Homo sapien
catgcacctcatacaggggagctct

SEQ ID NO: 5404368 - DNA, 25 bp, Homo sapien
tcccaccaggggtcgacatgcacct

SEQ ID NO: 5404369 - DNA, 25 bp, Homo sapien
ttaaaccaacagagatcaacaaaga

SEQ ID NO: 5404370 - DNA, 25 bp, Homo sapien
acaaagacatagaagggcattacat

SEQ ID NO: 5404371 - DNA, 25 bp, Homo sapien
aaccaacagagatcaacaaagacat

SEQ ID NO: 5404372 - DNA, 25 bp, Homo sapien
actttaaaccaacagagatcaacaa

SEQ ID NO: 5404373 - DNA, 25 bp, Homo sapien
catctccttctcgttttgcaacttc

SEQ ID NO: 5404374 - DNA, 25 bp, Homo sapien
ttcttcccaagccaattgtacattt

SEQ ID NO: 5404375 - DNA, 25 bp, Homo sapien
tctccttctcgttttgcaacttctt

SEQ ID NO: 5404376 - DNA, 25 bp, Homo sapien
tttcttcccaagccaattgtacatt

SEQ ID NO: 5404377 - DNA, 25 bp, Homo sapien
tacaggcttggctcttagtagatca

SEQ ID NO: 5404378 - DNA, 25 bp, Homo sapien
tgcactgacaccttagccttgggag

SEQ ID NO: 5404379 - DNA, 25 bp, Homo sapien
ttgccaaagcaataaagagcccctg

SEQ ID NO: 5404380 - DNA, 25 bp, Homo sapien
gaatgaggacagttcaatctgcact

SEQ ID NO: 5404381 - DNA, 25 bp, Homo sapien
tgcaacagctggaagtgaagctaga

SEQ ID NO: 5404382 - DNA, 25 bp, Homo sapien
ggatttaggaagcaagcacattcac

SEQ ID NO: 5404383 - DNA, 25 bp, Homo sapien
gagtatctcatgaccttgaccaccc

SEQ ID NO: 5404384 - DNA, 25 bp, Homo sapien
cagtggcaaggacagaacagatttc

SEQ ID NO: 5404385 - DNA, 25 bp, Homo sapien
catgaggtgcttagagtaaccaaac

SEQ ID NO: 5404386 - DNA, 25 bp, Homo sapien
gtcattctaatatataccctccaag

SEQ ID NO: 5404387 - DNA, 25 bp, Homo sapien
ggtgatagtagcacaaggtgaatgc

SEQ ID NO: 5404388 - DNA, 25 bp, Homo sapien
cagtttcacgtgagttctgtggata

SEQ ID NO: 5404389 - DNA, 25 bp, Homo sapien
tggaagacattccggcatgttcaca

SEQ ID NO: 5404390 - DNA, 25 bp, Homo sapien
attccggcatgttcacacctcttct

SEQ ID NO: 5404391 - DNA, 25 bp, Homo sapien
ggcatgttcacacctcttctcttat

SEQ ID NO: 5404392 - DNA, 25 bp, Homo sapien
gacattccggcatgttcacacctct

SEQ ID NO: 5404393 - DNA, 25 bp, Homo sapien
tgtgcttctattgctcccataagaa

SEQ ID NO: 5404394 - DNA, 25 bp, Homo sapien
cttataccaaattcaagctgtaaga

SEQ ID NO: 5404395 - DNA, 25 bp, Homo sapien
gacatccttatgatgtcttacataa

SEQ ID NO: 5404396 - DNA, 25 bp, Homo sapien
agttcatgagtagatttaaaaagca

SEQ ID NO: 5404397 - DNA, 25 bp, Homo sapien
tgcattttccccgtagcgttcagga

SEQ ID NO: 5404398 - DNA, 25 bp, Homo sapien
gtggagtacgcagccaacattttgg

SEQ ID NO: 5404399 - DNA, 25 bp, Homo sapien
cagtaatatattcggtggtgtcacg

SEQ ID NO: 5404400 - DNA, 25 bp, Homo sapien
tccaaagacagaccagtggagtacg

SEQ ID NO: 5404401 - DNA, 25 bp, Homo sapien
tgaacagttcgtgaaatgcccagtt

SEQ ID NO: 5404402 - DNA, 25 bp, Homo sapien
caacagtgtctgtccaacattagtc

SEQ ID NO: 5404403 - DNA, 25 bp, Homo sapien
tgcccagttcacagtcatcgagcga

SEQ ID NO: 5404404 - DNA, 25 bp, Homo sapien
caacacatggctgggtacgacgtct

SEQ ID NO: 5404405 - DNA, 25 bp, Homo sapien
gacaatgacaacaacgtcaaatctt

SEQ ID NO: 5404406 - DNA, 25 bp, Homo sapien
ccagcattaggtcccagctggacaa

SEQ ID NO: 5404407 - DNA, 25 bp, Homo sapien
gacaacaacgtcaaatcttccttct

SEQ ID NO: 5404408 - DNA, 25 bp, Homo sapien
gacaaccagtcaggccagcattagg

SEQ ID NO: 5404409 - DNA, 25 bp, Homo sapien
cagtcagttttcaatttgtcgaggg

SEQ ID NO: 5404410 - DNA, 25 bp, Homo sapien
ttagcttggccagagaggttaatgt

SEQ ID NO: 5404411 - DNA, 25 bp, Homo sapien
gatacgcagtgctgtgagtcttgcg

SEQ ID NO: 5404412 - DNA, 25 bp, Homo sapien
cggatggattttgataccagcattc

SEQ ID NO: 5404413 - DNA, 25 bp, Homo sapien
cattgggaaccacatcgtagaacgg

SEQ ID NO: 5404414 - DNA, 25 bp, Homo sapien
cgggtctgagaaccatctgttgggt

SEQ ID NO: 5404415 - DNA, 25 bp, Homo sapien
gtagaacggtggcttgtaatcctcc

SEQ ID NO: 5404416 - DNA, 25 bp, Homo sapien
ggcctttgttgatccacacagacta

SEQ ID NO: 5404417 - DNA, 25 bp, Homo sapien
gcagtcctggaagctagaggtaggt

SEQ ID NO: 5404418 - DNA, 25 bp, Homo sapien
cagtcctggaagctagaggtaggtc

SEQ ID NO: 5404419 - DNA, 25 bp, Homo sapien
ggcagtcctggaagctagaggtagg

SEQ ID NO: 5404420 - DNA, 25 bp, Homo sapien
gggattgttccccacatcaagctga

SEQ ID NO: 5404421 - DNA, 25 bp, Homo sapien
ggatggtttcatctagaacttcggg

SEQ ID NO: 5404422 - DNA, 25 bp, Homo sapien
gaatcgaaacaatccacctggatgg

SEQ ID NO: 5404423 - DNA, 25 bp, Homo sapien
ggtgctctgggaatgcatgactgcc

SEQ ID NO: 5404424 - DNA, 25 bp, Homo sapien
cattgaaacaaaaataaaactggtg

SEQ ID NO: 5404425 - DNA, 25 bp, Homo sapien
taagctgaagatagtcgtacaacga

SEQ ID NO: 5404426 - DNA, 25 bp, Homo sapien
gggtcccaaatatctctatgtgcaa

SEQ ID NO: 5404427 - DNA, 25 bp, Homo sapien
tatggacagcactattcgaaggcag

SEQ ID NO: 5404428 - DNA, 25 bp, Homo sapien
gaaggcagctaactgtatccagagt

SEQ ID NO: 5404429 - DNA, 25 bp, Homo sapien
aattaatatacatgaggattccaca

SEQ ID NO: 5404430 - DNA, 25 bp, Homo sapien
attaatatacatgaggattccacat

SEQ ID NO: 5404431 - DNA, 25 bp, Homo sapien
attacaggggcccaccatcacgccg

SEQ ID NO: 5404432 - DNA, 25 bp, Homo sapien
ttacaggggcccaccatcacgccgg

SEQ ID NO: 5404433 - DNA, 25 bp, Homo sapien
tatgaaccacgctggtagacagtga

SEQ ID NO: 5404434 - DNA, 25 bp, Homo sapien
tgaaccacgctggtagacagtgaag

SEQ ID NO: 5404435 - DNA, 25 bp, Homo sapien
aaccacgctggtagacagtgaagtt

SEQ ID NO: 5404436 - DNA, 25 bp, Homo sapien
atatatgaaccacgctggtagacag

SEQ ID NO: 5404437 - DNA, 25 bp, Homo sapien
ttccctgaaccatgacttctcatca

SEQ ID NO: 5404438 - DNA, 25 bp, Homo sapien
ggagaagatcttcacggcaacattc

SEQ ID NO: 5404439 - DNA, 25 bp, Homo sapien
gaaccatgacttctcatcacgggag

SEQ ID NO: 5404440 - DNA, 25 bp, Homo sapien
gtgttgtacaattccgtttccctga

SEQ ID NO: 5404441 - DNA, 25 bp, Homo sapien
ctagttagtacaagaggacaactct

SEQ ID NO: 5404442 - DNA, 25 bp, Homo sapien
aatcaaataagatactagttagtac

SEQ ID NO: 5404443 - DNA, 25 bp, Homo sapien
gaggacaactctggttgaaattaat

SEQ ID NO: 5404444 - DNA, 25 bp, Homo sapien
aattaatgagcacatttggggcttt

SEQ ID NO: 5404445 - DNA, 25 bp, Homo sapien
gaggagaagcgagaagcagcaaaca

SEQ ID NO: 5404446 - DNA, 25 bp, Homo sapien
ctgccgtggaggagaagcgagaagc

SEQ ID NO: 5404447 - DNA, 25 bp, Homo sapien
cgagaagcagcaaacagtgacaata

SEQ ID NO: 5404448 - DNA, 25 bp, Homo sapien
gcaaacagtgacaatagccgtagac

SEQ ID NO: 5404449 - DNA, 25 bp, Homo sapien
actccaacagtgtaatctggcgagc

SEQ ID NO: 5404450 - DNA, 25 bp, Homo sapien
tccaacagtgtaatctggcgagcca

SEQ ID NO: 5404451 - DNA, 25 bp, Homo sapien
tctggcgagccactgttctttgtac

SEQ ID NO: 5404452 - DNA, 25 bp, Homo sapien
caacagtgtaatctggcgagccact

SEQ ID NO: 5404453 - DNA, 25 bp, Homo sapien
gatgtacacgaatgatccaataaat

SEQ ID NO: 5404454 - DNA, 25 bp, Homo sapien
tcctgatgtacacgaatgatccaat

SEQ ID NO: 5404455 - DNA, 25 bp, Homo sapien
gccacttcctgatgtacacgaatga

SEQ ID NO: 5404456 - DNA, 25 bp, Homo sapien
agagccacttcctgatgtacacgaa

SEQ ID NO: 5404457 - DNA, 25 bp, Homo sapien
gggaaaagaaacgattgagcaatat

SEQ ID NO: 5404458 - DNA, 25 bp, Homo sapien
gagcaatatagctcccactttggag

SEQ ID NO: 5404459 - DNA, 25 bp, Homo sapien
ttagcatgcatgacattgtaactca

SEQ ID NO: 5404460 - DNA, 25 bp, Homo sapien
tagctcccactttggagtattagca

SEQ ID NO: 5404461 - DNA, 25 bp, Homo sapien
atgaagggcagcaatccgggacacg

SEQ ID NO: 5404462 - DNA, 25 bp, Homo sapien
cgtggcctgttagtgtacatgtaaa

SEQ ID NO: 5404463 - DNA, 25 bp, Homo sapien
tgaagggcagcaatccgggacacgt

SEQ ID NO: 5404464 - DNA, 25 bp, Homo sapien
ctgttagtgtacatgtaaagctcct

SEQ ID NO: 5404465 - DNA, 25 bp, Homo sapien
gttgatcggcaaaattaccaaaagc

SEQ ID NO: 5404466 - DNA, 25 bp, Homo sapien
gagcatccaacggaagaaatttaga

SEQ ID NO: 5404467 - DNA, 25 bp, Homo sapien
tacattgatttgtgtgaatttcatc

SEQ ID NO: 5404468 - DNA, 25 bp, Homo sapien
cactgtgaagtactgttgatcggca

SEQ ID NO: 5404469 - DNA, 25 bp, Homo sapien
tctccaacattggtggtgatgagcc

SEQ ID NO: 5404470 - DNA, 25 bp, Homo sapien
tacagagagaataatgaggccaacc

SEQ ID NO: 5404471 - DNA, 25 bp, Homo sapien
gatagtgccatactccacgtctcgg

SEQ ID NO: 5404472 - DNA, 25 bp, Homo sapien
gacatactgcgaacactacagagag

SEQ ID NO: 5404473 - DNA, 25 bp, Homo sapien
tagaaatagaaaagtccatgggaac

SEQ ID NO: 5404474 - DNA, 25 bp, Homo sapien
gcactccacggcttggccaggggac

SEQ ID NO: 5404475 - DNA, 25 bp, Homo sapien
tgttcctgttacaccagtccccttg

SEQ ID NO: 5404476 - DNA, 25 bp, Homo sapien
ggcagcactccacggcttggccagg

SEQ ID NO: 5404477 - DNA, 25 bp, Homo sapien
gatgttcctgttacaccagtcccct

SEQ ID NO: 5404478 - DNA, 25 bp, Homo sapien
cctggaagcagcctttctggtagac

SEQ ID NO: 5404479 - DNA, 25 bp, Homo sapien
tctggtagacgtggaagccatcgtt

SEQ ID NO: 5404480 - DNA, 25 bp, Homo sapien
tcattaccgcaggagagaccttcac

SEQ ID NO: 5404481 - DNA, 25 bp, Homo sapien
gccatcgttgatgctcagtgaggaa

SEQ ID NO: 5404482 - DNA, 25 bp, Homo sapien
aattgacttgctagttcctttgaaa

SEQ ID NO: 5404483 - DNA, 25 bp, Homo sapien
cagccttctatttataattgacttg

SEQ ID NO: 5404484 - DNA, 25 bp, Homo sapien
tgaaaaccacaaggggctcatccaa

SEQ ID NO: 5404485 - DNA, 25 bp, Homo sapien
tgctagttcctttgaaaaccacaag

SEQ ID NO: 5404486 - DNA, 25 bp, Homo sapien
tccgagtctaatgccggactagcag

SEQ ID NO: 5404487 - DNA, 25 bp, Homo sapien
gagagaggcagaccaaagaacatcg

SEQ ID NO: 5404488 - DNA, 25 bp, Homo sapien
gaccaaagaacatcgtggactttta

SEQ ID NO: 5404489 - DNA, 25 bp, Homo sapien
aaactgtccacaatttggtataatc

SEQ ID NO: 5404490 - DNA, 25 bp, Homo sapien
aaaatggagtatgtgtgcctgcctg

SEQ ID NO: 5404491 - DNA, 25 bp, Homo sapien
tccgtttcgaactctgggcagccaa

SEQ ID NO: 5404492 - DNA, 25 bp, Homo sapien
taacagttctacgttcgcactaagg

SEQ ID NO: 5404493 - DNA, 25 bp, Homo sapien
cctcggctggtctaatggctactta

SEQ ID NO: 5404494 - DNA, 25 bp, Homo sapien
cacagagaggcgaaggagaatatac

SEQ ID NO: 5404495 - DNA, 25 bp, Homo sapien
aatttgaagcatatgaactgggacg

SEQ ID NO: 5404496 - DNA, 25 bp, Homo sapien
tattgtttccatcgtaccaggtggc

SEQ ID NO: 5404497 - DNA, 25 bp, Homo sapien
gaaaggcttgattcctatgcatggc

SEQ ID NO: 5404498 - DNA, 25 bp, Homo sapien
gagcaatcatgataagcacaggaag

SEQ ID NO: 5404499 - DNA, 25 bp, Homo sapien
gagagcaatcatgataagcacagga

SEQ ID NO: 5404500 - DNA, 25 bp, Homo sapien
agagcaatcatgataagcacaggaa

SEQ ID NO: 5404501 - DNA, 25 bp, Homo sapien
agcaatcatgataagcacaggaaga

SEQ ID NO: 5404502 - DNA, 25 bp, Homo sapien
cacaaagagtcggcgaatacccaag

SEQ ID NO: 5404503 - DNA, 25 bp, Homo sapien
caaagagtcggcgaatacccaagaa

SEQ ID NO: 5404504 - DNA, 25 bp, Homo sapien
tcacaaagagtcggcgaatacccaa

SEQ ID NO: 5404505 - DNA, 25 bp, Homo sapien
aagagtcggcgaatacccaagaagg

SEQ ID NO: 5404506 - DNA, 25 bp, Homo sapien
catgtaatttgatctttcatgatag

SEQ ID NO: 5404507 - DNA, 25 bp, Homo sapien
cttggacaagtcctatagaactgaa

SEQ ID NO: 5404508 - DNA, 25 bp, Homo sapien
tatttttaacaccacactctgtcgg

SEQ ID NO: 5404509 - DNA, 25 bp, Homo sapien
catgatagatgaatacaaatagctt

SEQ ID NO: 5404510 - DNA, 25 bp, Homo sapien
tcaaggccagagaggtacatttctc

SEQ ID NO: 5404511 - DNA, 25 bp, Homo sapien
tagaagcactgctcatctgacacag

SEQ ID NO: 5404512 - DNA, 25 bp, Homo sapien
tcatttctagctgtgcctgacctga

SEQ ID NO: 5404513 - DNA, 25 bp, Homo sapien
taagatgaaaggaatgtcaaggcca

SEQ ID NO: 5404514 - DNA, 25 bp, Homo sapien
ccaaacaaaaagacggctggcagac

SEQ ID NO: 5404515 - DNA, 25 bp, Homo sapien
tcaagggtgtcatccaagagaggca

SEQ ID NO: 5404516 - DNA, 25 bp, Homo sapien
taagttttatatagcctagcaagga

SEQ ID NO: 5404517 - DNA, 25 bp, Homo sapien
ccagtttaatatagtagcaagcaga

SEQ ID NO: 5404518 - DNA, 25 bp, Homo sapien
gttgcagacaccagctgataggccc

SEQ ID NO: 5404519 - DNA, 25 bp, Homo sapien
ccagttggaagggattgcttggatc

SEQ ID NO: 5404520 - DNA, 25 bp, Homo sapien
ttgggtgtaccagacaactccctgg

SEQ ID NO: 5404521 - DNA, 25 bp, Homo sapien
gacagcgtctgtctcttgaatatac

SEQ ID NO: 5404522 - DNA, 25 bp, Homo sapien
atccttcccatttataggcaatctc

SEQ ID NO: 5404523 - DNA, 25 bp, Homo sapien
tccttcccatttataggcaatctct

SEQ ID NO: 5404524 - DNA, 25 bp, Homo sapien
tcccatttataggcaatctctctta

SEQ ID NO: 5404525 - DNA, 25 bp, Homo sapien
cttcccatttataggcaatctctct

SEQ ID NO: 5404526 - DNA, 25 bp, Homo sapien
atcatcataagcaacaatttcaact

SEQ ID NO: 5404527 - DNA, 25 bp, Homo sapien
ggtctccaatatccaccctcttcat

SEQ ID NO: 5404528 - DNA, 25 bp, Homo sapien
catcataagcaacaatttcaactac

SEQ ID NO: 5404529 - DNA, 25 bp, Homo sapien
agccccaaggtctccaatatccacc

SEQ ID NO: 5404530 - DNA, 25 bp, Homo sapien
tcctgggtaaagcttactcagctac

SEQ ID NO: 5404531 - DNA, 25 bp, Homo sapien
tggcaatgccgttctgagagctcct

SEQ ID NO: 5404532 - DNA, 25 bp, Homo sapien
ctgccaaagagtattaaaagaagtg

SEQ ID NO: 5404533 - DNA, 25 bp, Homo sapien
gaagtgatttgttgaagtggctgca

SEQ ID NO: 5404534 - DNA, 25 bp, Homo sapien
cttaatgcaggctcttggtcacatc

SEQ ID NO: 5404535 - DNA, 25 bp, Homo sapien
gctcttggtcacatctgcccacagt

SEQ ID NO: 5404536 - DNA, 25 bp, Homo sapien
tgcaggctcttggtcacatctgccc

SEQ ID NO: 5404537 - DNA, 25 bp, Homo sapien
taatgcaggctcttggtcacatctg

SEQ ID NO: 5404538 - DNA, 25 bp, Homo sapien
tactcggagagtagaagaggcgttc

SEQ ID NO: 5404539 - DNA, 25 bp, Homo sapien
cactctggtcactggggtactcgga

SEQ ID NO: 5404540 - DNA, 25 bp, Homo sapien
tgggattatgagttctccagcagct

SEQ ID NO: 5404541 - DNA, 25 bp, Homo sapien
gtgccctcgttcagagcttctctca

SEQ ID NO: 5404542 - DNA, 25 bp, Homo sapien
tttggcagtgtgacgcttaccaatg

SEQ ID NO: 5404543 - DNA, 25 bp, Homo sapien
ggcagtgtgacgcttaccaatgctc

SEQ ID NO: 5404544 - DNA, 25 bp, Homo sapien
ttggcagtgtgacgcttaccaatgc

SEQ ID NO: 5404545 - DNA, 25 bp, Homo sapien
gcagtgtgacgcttaccaatgctcc

SEQ ID NO: 5404546 - DNA, 25 bp, Homo sapien
tcccctctgccaaagtctaaccgca

SEQ ID NO: 5404547 - DNA, 25 bp, Homo sapien
ccgcaaacccttgagtttcagaaca

SEQ ID NO: 5404548 - DNA, 25 bp, Homo sapien
ttcccctctgccaaagtctaaccgc

SEQ ID NO: 5404549 - DNA, 25 bp, Homo sapien
cccctctgccaaagtctaaccgcat

SEQ ID NO: 5404550 - DNA, 25 bp, Homo sapien
ggaggccagtgttcagctgtcctgc

SEQ ID NO: 5404551 - DNA, 25 bp, Homo sapien
agaggaggccagtgttcagctgtcc

SEQ ID NO: 5404552 - DNA, 25 bp, Homo sapien
tttaagaggaggccagtgttcagct

SEQ ID NO: 5404553 - DNA, 25 bp, Homo sapien
ttaagaggaggccagtgttcagctg

SEQ ID NO: 5404554 - DNA, 25 bp, Homo sapien
ggtcacagcactgcattacagactg

SEQ ID NO: 5404555 - DNA, 25 bp, Homo sapien
atatctctgaaacgctattcgcttc

SEQ ID NO: 5404556 - DNA, 25 bp, Homo sapien
cttgagccgcccaatatctctgaaa

SEQ ID NO: 5404557 - DNA, 25 bp, Homo sapien
tctgaaacgctattcgcttcaaaaa

SEQ ID NO: 5404558 - DNA, 25 bp, Homo sapien
caatatctctgaaacgctattcgct

SEQ ID NO: 5404559 - DNA, 25 bp, Homo sapien
ttctagtccatataccttaatgtga

SEQ ID NO: 5404560 - DNA, 25 bp, Homo sapien
cttctagtccatataccttaatgtg

SEQ ID NO: 5404561 - DNA, 25 bp, Homo sapien
tccttctagtccatataccttaatg

SEQ ID NO: 5404562 - DNA, 25 bp, Homo sapien
tctagtccatataccttaatgtgag

SEQ ID NO: 5404563 - DNA, 25 bp, Homo sapien
gcctactcacttaaggttccaggga

SEQ ID NO: 5404564 - DNA, 25 bp, Homo sapien
cctccagaggcctttctcagcttgg

SEQ ID NO: 5404565 - DNA, 25 bp, Homo sapien
gctgcctactcacttaaggttccag

SEQ ID NO: 5404566 - DNA, 25 bp, Homo sapien
gctctgctgcctactcacttaaggt

SEQ ID NO: 5404567 - DNA, 25 bp, Homo sapien
caaagagtttataatctaccaagaa

SEQ ID NO: 5404568 - DNA, 25 bp, Homo sapien
agagtttataatctaccaagaaaga

SEQ ID NO: 5404569 - DNA, 25 bp, Homo sapien
cttcaaagagtttataatctaccaa

SEQ ID NO: 5404570 - DNA, 25 bp, Homo sapien
tcaaagagtttataatctaccaaga

SEQ ID NO: 5404571 - DNA, 25 bp, Homo sapien
caaaggcagagtgggctcctagtag

SEQ ID NO: 5404572 - DNA, 25 bp, Homo sapien
tgtagaatttcagtgaaggctgagg

SEQ ID NO: 5404573 - DNA, 25 bp, Homo sapien
tcagagggtaaaatgcagagcaact

SEQ ID NO: 5404574 - DNA, 25 bp, Homo sapien
tagatatcgcatcccctaactttgt

SEQ ID NO: 5404575 - DNA, 25 bp, Homo sapien
tatgtggtaaactgccaggaagggt

SEQ ID NO: 5404576 - DNA, 25 bp, Homo sapien
ggtgcttccaatgcagacaagtttg

SEQ ID NO: 5404577 - DNA, 25 bp, Homo sapien
gaacatgtacaactggtggtcgcct

SEQ ID NO: 5404578 - DNA, 25 bp, Homo sapien
cacaggctcaggtctagaaactccc

SEQ ID NO: 5404579 - DNA, 25 bp, Homo sapien
caggctagcatttgagtcttaaggg

SEQ ID NO: 5404580 - DNA, 25 bp, Homo sapien
ggtttacaccagacaacaggctagc

SEQ ID NO: 5404581 - DNA, 25 bp, Homo sapien
taagggtcatcctctcgttatcacc

SEQ ID NO: 5404582 - DNA, 25 bp, Homo sapien
tagaaataactaagcctgtgccctt

SEQ ID NO: 5404583 - DNA, 25 bp, Homo sapien
tctgagacagattcaccgcacttgg

SEQ ID NO: 5404584 - DNA, 25 bp, Homo sapien
caataagacttttagggatcaaaag

SEQ ID NO: 5404585 - DNA, 25 bp, Homo sapien
ggagacaagcctctatgagaacaaa

SEQ ID NO: 5404586 - DNA, 25 bp, Homo sapien
caataagttggagggaatcctaagc

SEQ ID NO: 5404587 - DNA, 25 bp, Homo sapien
taataaggctcagtgaaataggcac

SEQ ID NO: 5404588 - DNA, 25 bp, Homo sapien
taacaccgagcctcagtgtctggga

SEQ ID NO: 5404589 - DNA, 25 bp, Homo sapien
gggtcaatccagttagcctacagga

SEQ ID NO: 5404590 - DNA, 25 bp, Homo sapien
taacagaaggctatgtgccaaggcc

SEQ ID NO: 5404591 - DNA, 25 bp, Homo sapien
caacctctgctctggtgcactgatg

SEQ ID NO: 5404592 - DNA, 25 bp, Homo sapien
tctaagcttgctcctatggtgctca

SEQ ID NO: 5404593 - DNA, 25 bp, Homo sapien
tacagagtcaagtcacatcacaaag

SEQ ID NO: 5404594 - DNA, 25 bp, Homo sapien
ccagcctgtcattcaaagtaagcca

SEQ ID NO: 5404595 - DNA, 25 bp, Homo sapien
ctccaaaagatcaaagaaggtattt

SEQ ID NO: 5404596 - DNA, 25 bp, Homo sapien
tttccaggaataaagccacagtgcc

SEQ ID NO: 5404597 - DNA, 25 bp, Homo sapien
tcaaagaaggtattttgtaccagga

SEQ ID NO: 5404598 - DNA, 25 bp, Homo sapien
caggaaacccaattccaaatcctca

SEQ ID NO: 5404599 - DNA, 25 bp, Homo sapien
gggagactatctggcacaaactgga

SEQ ID NO: 5404600 - DNA, 25 bp, Homo sapien
ggaagttactgaatccagcggcccc

SEQ ID NO: 5404601 - DNA, 25 bp, Homo sapien
gcaagcagcgttcaaatctccaggg

SEQ ID NO: 5404602 - DNA, 25 bp, Homo sapien
tggacagagccgagccagtctagaa

SEQ ID NO: 5404603 - DNA, 25 bp, Homo sapien
caaagtaccgtgcaacatctgtaac

SEQ ID NO: 5404604 - DNA, 25 bp, Homo sapien
agtaccgtgcaacatctgtaaccac

SEQ ID NO: 5404605 - DNA, 25 bp, Homo sapien
cttggcaaagtaccgtgcaacatct

SEQ ID NO: 5404606 - DNA, 25 bp, Homo sapien
tttaaacttggcaaagtaccgtgca

SEQ ID NO: 5404607 - DNA, 25 bp, Homo sapien
tgccttctggggatcggaagatgaa

SEQ ID NO: 5404608 - DNA, 25 bp, Homo sapien
ccttctggggatcggaagatgaatc

SEQ ID NO: 5404609 - DNA, 25 bp, Homo sapien
ttctggggatcggaagatgaatccc

SEQ ID NO: 5404610 - DNA, 25 bp, Homo sapien
ttgccttctggggatcggaagatga

SEQ ID NO: 5404611 - DNA, 25 bp, Homo sapien
gagttgagcagagtttattggctgt

SEQ ID NO: 5404612 - DNA, 25 bp, Homo sapien
ggctgtctctccagcagaaaattcc

SEQ ID NO: 5404613 - DNA, 25 bp, Homo sapien
gagggagttgagcagagtttattgg

SEQ ID NO: 5404614 - DNA, 25 bp, Homo sapien
ttgagcagagtttattggctgtctc

SEQ ID NO: 5404615 - DNA, 25 bp, Homo sapien
ctgagacccccgctccacgcctctg

SEQ ID NO: 5404616 - DNA, 25 bp, Homo sapien
tgagacccccgctccacgcctctgc

SEQ ID NO: 5404617 - DNA, 25 bp, Homo sapien
gagacccccgctccacgcctctgcc

SEQ ID NO: 5404618 - DNA, 25 bp, Homo sapien
gcgacctgcgctcacctcgggtccc

SEQ ID NO: 5404619 - DNA, 25 bp, Homo sapien
tgcctcttctcccgctaggctacct

SEQ ID NO: 5404620 - DNA, 25 bp, Homo sapien
tcttctcccgctaggctacctcctc

SEQ ID NO: 5404621 - DNA, 25 bp, Homo sapien
ctgcgctcacctcgggtcccgccgc

SEQ ID NO: 5404622 - DNA, 25 bp, Homo sapien
cagaataaacttcccgaggcgcaga

SEQ ID NO: 5404623 - DNA, 25 bp, Homo sapien
agccggcgagggagcccggaactct

SEQ ID NO: 5404624 - DNA, 25 bp, Homo sapien
ggctgggagcacgaccgcgggcggg

SEQ ID NO: 5404625 - DNA, 25 bp, Homo sapien
gcgggcagaataaacttcccgaggc

SEQ ID NO: 5404626 - DNA, 25 bp, Homo sapien
caaggtctagggttatgacagagct

SEQ ID NO: 5404627 - DNA, 25 bp, Homo sapien
ttcgcctttggcttccttagtaaca

SEQ ID NO: 5404628 - DNA, 25 bp, Homo sapien
tttccttgcaaggtctagggttatg

SEQ ID NO: 5404629 - DNA, 25 bp, Homo sapien
tatgacagagcttgccatgttcgcc

SEQ ID NO: 5404630 - DNA, 25 bp, Homo sapien
gcttctgcagtgatctagccctgtc

SEQ ID NO: 5404631 - DNA, 25 bp, Homo sapien
gggcttctgcagtgatctagccctg

SEQ ID NO: 5404632 - DNA, 25 bp, Homo sapien
tgatctagccctgtcctaggcgcca

SEQ ID NO: 5404633 - DNA, 25 bp, Homo sapien
tgcagtgatctagccctgtcctagg

SEQ ID NO: 5404634 - DNA, 25 bp, Homo sapien
gcctgctgcattgtgaattggcatc

SEQ ID NO: 5404635 - DNA, 25 bp, Homo sapien
ctcctttacgcccagatcaacatgt

SEQ ID NO: 5404636 - DNA, 25 bp, Homo sapien
tatcctcctcctttacgcccagatc

SEQ ID NO: 5404637 - DNA, 25 bp, Homo sapien
tgctgcattgtgaattggcatctct

SEQ ID NO: 5404638 - DNA, 25 bp, Homo sapien
actgtgagagttatacacagagtcc

SEQ ID NO: 5404639 - DNA, 25 bp, Homo sapien
gagttatacacagagtcctcaagct

SEQ ID NO: 5404640 - DNA, 25 bp, Homo sapien
tctgggaactgtgagagttatacac

SEQ ID NO: 5404641 - DNA, 25 bp, Homo sapien
tattctgggaactgtgagagttata

SEQ ID NO: 5404642 - DNA, 25 bp, Homo sapien
ctcttagcattaggcttttgttccc

SEQ ID NO: 5404643 - DNA, 25 bp, Homo sapien
ttgttccccagtattgaatatgtca

SEQ ID NO: 5404644 - DNA, 25 bp, Homo sapien
cttgttaatgtcctcttagcattag

SEQ ID NO: 5404645 - DNA, 25 bp, Homo sapien
gtcctcttagcattaggcttttgtt

SEQ ID NO: 5404646 - DNA, 25 bp, Homo sapien
catgttgaggtttttagggatgata

SEQ ID NO: 5404647 - DNA, 25 bp, Homo sapien
ttttctgatggctgcacaaggtctc

SEQ ID NO: 5404648 - DNA, 25 bp, Homo sapien
gatgtatggcagcagaaagtcttga

SEQ ID NO: 5404649 - DNA, 25 bp, Homo sapien
tagattctggtttgctctgaagagc

SEQ ID NO: 5404650 - DNA, 25 bp, Homo sapien
tatttgaggtctgcctgctgcctta

SEQ ID NO: 5404651 - DNA, 25 bp, Homo sapien
ctatttgaggtctgcctgctgcctt

SEQ ID NO: 5404652 - DNA, 25 bp, Homo sapien
tcctccacgtaggaaacaatctgct

SEQ ID NO: 5404653 - DNA, 25 bp, Homo sapien
tcttcgtcaagccatatgcaactgg

SEQ ID NO: 5404654 - DNA, 25 bp, Homo sapien
tggcagccggcacgcttctctctgt

SEQ ID NO: 5404655 - DNA, 25 bp, Homo sapien
tctctgtgggaagaggatcatcaga

SEQ ID NO: 5404656 - DNA, 25 bp, Homo sapien
ccaacctaatccctgagaatcttta

SEQ ID NO: 5404657 - DNA, 25 bp, Homo sapien
gagaatctttatacagccccaacac

SEQ ID NO: 5404658 - DNA, 25 bp, Homo sapien
ctgagaatctttatacagccccaac

SEQ ID NO: 5404659 - DNA, 25 bp, Homo sapien
ctgtccaacctaatccctgagaatc

SEQ ID NO: 5404660 - DNA, 25 bp, Homo sapien
ttcacttgtgttgcttgctttgaaa

SEQ ID NO: 5404661 - DNA, 25 bp, Homo sapien
ttctcttcacttgtgttgcttgctt

SEQ ID NO: 5404662 - DNA, 25 bp, Homo sapien
ctcttcacttgtgttgcttgctttg

SEQ ID NO: 5404663 - DNA, 25 bp, Homo sapien
tcttcacttgtgttgcttgctttga

SEQ ID NO: 5404664 - DNA, 25 bp, Homo sapien
cagcttacttacaacagcctctgaa

SEQ ID NO: 5404665 - DNA, 25 bp, Homo sapien
caactctgaacatagtggcaggcca

SEQ ID NO: 5404666 - DNA, 25 bp, Homo sapien
cagaggttgtgtcaggcatgtacac

SEQ ID NO: 5404667 - DNA, 25 bp, Homo sapien
tctcacttgacttagggaattcttc

SEQ ID NO: 5404668 - DNA, 25 bp, Homo sapien
tgtacccaggttcatatgcctctca

SEQ ID NO: 5404669 - DNA, 25 bp, Homo sapien
tccttctgcaatgtacccaggttca

SEQ ID NO: 5404670 - DNA, 25 bp, Homo sapien
aggttcatatgcctctcatgtggtt

SEQ ID NO: 5404671 - DNA, 25 bp, Homo sapien
catccttctgcaatgtacccaggtt

SEQ ID NO: 5404672 - DNA, 25 bp, Homo sapien
tcagtggagacttgaactttctctc

SEQ ID NO: 5404673 - DNA, 25 bp, Homo sapien
cagtggagacttgaactttctctcc

SEQ ID NO: 5404674 - DNA, 25 bp, Homo sapien
tccccacaaccctaggctctgaagg

SEQ ID NO: 5404675 - DNA, 25 bp, Homo sapien
caaccctaggctctgaagggttagg

SEQ ID NO: 5404676 - DNA, 25 bp, Homo sapien
ggaaacagtccatatcatcaaagct

SEQ ID NO: 5404677 - DNA, 25 bp, Homo sapien
gatccccggtagaatcagctctgtc

SEQ ID NO: 5404678 - DNA, 25 bp, Homo sapien
atcatcaaagctctgttggatcccc

SEQ ID NO: 5404679 - DNA, 25 bp, Homo sapien
ggcaaaacaggaaacagtccatatc

SEQ ID NO: 5404680 - DNA, 25 bp, Homo sapien
tgtattgatagcatgaaagaaggtg

SEQ ID NO: 5404681 - DNA, 25 bp, Homo sapien
gaggctgaccattcttccaatttat

SEQ ID NO: 5404682 - DNA, 25 bp, Homo sapien
acagcttctgcaagtggtactgaga

SEQ ID NO: 5404683 - DNA, 25 bp, Homo sapien
tagctatgtctacgcaatgtattga

SEQ ID NO: 5404684 - DNA, 25 bp, Homo sapien
tctgggacatctacttgatatctag

SEQ ID NO: 5404685 - DNA, 25 bp, Homo sapien
tttctgggacatctacttgatatct

SEQ ID NO: 5404686 - DNA, 25 bp, Homo sapien
tgggacatctacttgatatctaggt

SEQ ID NO: 5404687 - DNA, 25 bp, Homo sapien
gggacatctacttgatatctaggtc

SEQ ID NO: 5404688 - DNA, 25 bp, Homo sapien
cagcccccgctcctgttcaccggga

SEQ ID NO: 5404689 - DNA, 25 bp, Homo sapien
ctactgcagcctcacggggaaggtg

SEQ ID NO: 5404690 - DNA, 25 bp, Homo sapien
actactgcagcctcacggggaaggt

SEQ ID NO: 5404691 - DNA, 25 bp, Homo sapien
caaatcttaagtcatccttgcacaa

SEQ ID NO: 5404692 - DNA, 25 bp, Homo sapien
gactggagggagtaggcggaatcca

SEQ ID NO: 5404693 - DNA, 25 bp, Homo sapien
ggctgttctcctgtcacaaactgta

SEQ ID NO: 5404694 - DNA, 25 bp, Homo sapien
aaactgtaatgcatctgttccctgg

SEQ ID NO: 5404695 - DNA, 25 bp, Homo sapien
cgtgagcagcgagagtaagatgttc

SEQ ID NO: 5404696 - DNA, 25 bp, Homo sapien
ttccaggtaactgggttcccgatca

SEQ ID NO: 5404697 - DNA, 25 bp, Homo sapien
ggttcccgatcatttgccattgcca

SEQ ID NO: 5404698 - DNA, 25 bp, Homo sapien
ggtaactgggttcccgatcatttgc

SEQ ID NO: 5404699 - DNA, 25 bp, Homo sapien
aactgggttcccgatcatttgccat

SEQ ID NO: 5404700 - DNA, 25 bp, Homo sapien
tggacatttgcaacctggtaacagg

SEQ ID NO: 5404701 - DNA, 25 bp, Homo sapien
tttgttctttagttgtatcccatga

SEQ ID NO: 5404702 - DNA, 25 bp, Homo sapien
ccatgattggatcttagatcaagcc

SEQ ID NO: 5404703 - DNA, 25 bp, Homo sapien
tccttgaagcggacagcttttctgg

SEQ ID NO: 5404704 - DNA, 25 bp, Homo sapien
gtagttgctaatgaagtccattttc

SEQ ID NO: 5404705 - DNA, 25 bp, Homo sapien
tttgtagttgctaatgaagtccatt

SEQ ID NO: 5404706 - DNA, 25 bp, Homo sapien
tcaataattttgtagttgctaatga

SEQ ID NO: 5404707 - DNA, 25 bp, Homo sapien
aattttgtagttgctaatgaagtcc

SEQ ID NO: 5404708 - DNA, 25 bp, Homo sapien
atgggcattctcctgcgggctgcct

SEQ ID NO: 5404709 - DNA, 25 bp, Homo sapien
tgggcattctcctgcgggctgcctt

SEQ ID NO: 5404710 - DNA, 25 bp, Homo sapien
caaagggctatgcagggttactttc

SEQ ID NO: 5404711 - DNA, 25 bp, Homo sapien
atgctgtagtctctcgtaaggcaaa

SEQ ID NO: 5404712 - DNA, 25 bp, Homo sapien
ctgtagtctctcgtaaggcaaaggg

SEQ ID NO: 5404713 - DNA, 25 bp, Homo sapien
tctcgtaaggcaaagggctatgcag

SEQ ID NO: 5404714 - DNA, 25 bp, Homo sapien
ctaaaatgcaggtctgtgttctcct

SEQ ID NO: 5404715 - DNA, 25 bp, Homo sapien
taaaatgcaggtctgtgttctcctt

SEQ ID NO: 5404716 - DNA, 25 bp, Homo sapien
actgctcctgttcttcgactgtcca

SEQ ID NO: 5404717 - DNA, 25 bp, Homo sapien
ctgttcttcgactgtccatggtcct

SEQ ID NO: 5404718 - DNA, 25 bp, Homo sapien
gctcctgttcttcgactgtccatgg

SEQ ID NO: 5404719 - DNA, 25 bp, Homo sapien
cctttgcaaagtggcgttagttcca

SEQ ID NO: 5404720 - DNA, 25 bp, Homo sapien
gcggacatgatgatgatcagctcca

SEQ ID NO: 5404721 - DNA, 25 bp, Homo sapien
tatgcaggacaagtgcggacatgat

SEQ ID NO: 5404722 - DNA, 25 bp, Homo sapien
agctctgttaactgcactatgcagg

SEQ ID NO: 5404723 - DNA, 25 bp, Homo sapien
taactgcactatgcaggacaagtgc

SEQ ID NO: 5404724 - DNA, 25 bp, Homo sapien
cagggcatgcaccagcattgttcgt

SEQ ID NO: 5404725 - DNA, 25 bp, Homo sapien
cacagatgacaaccattctgactgg

SEQ ID NO: 5404726 - DNA, 25 bp, Homo sapien
ggaagaaggacagatgcaacatgga

SEQ ID NO: 5404727 - DNA, 25 bp, Homo sapien
agctagagaagcctgctgaagcagg

SEQ ID NO: 5404728 - DNA, 25 bp, Homo sapien
cgagccagctctattctaacaagga

SEQ ID NO: 5404729 - DNA, 25 bp, Homo sapien
tctccaggaccgctgaggttccgag

SEQ ID NO: 5404730 - DNA, 25 bp, Homo sapien
cctgagctgttggaacatctccagg

SEQ ID NO: 5404731 - DNA, 25 bp, Homo sapien
cagccagtgtcggtttggaaggcca

SEQ ID NO: 5404732 - DNA, 25 bp, Homo sapien
tgttccttcctgcatgcatttttac

SEQ ID NO: 5404733 - DNA, 25 bp, Homo sapien
ggtacctcagtttaagaggatcaga

SEQ ID NO: 5404734 - DNA, 25 bp, Homo sapien
gcccggccaaggatcagaatattga

SEQ ID NO: 5404735 - DNA, 25 bp, Homo sapien
gagccactgtagcttgcattagagc

SEQ ID NO: 5404736 - DNA, 25 bp, Homo sapien
gcattagagccccatttctggcctg

SEQ ID NO: 5404737 - DNA, 25 bp, Homo sapien
attctctgattgttctaaagcctag

SEQ ID NO: 5404738 - DNA, 25 bp, Homo sapien
cttctgaggcctccgagggagagtc

SEQ ID NO: 5404739 - DNA, 25 bp, Homo sapien
ggacaccagtcacatagcataaagg

SEQ ID NO: 5404740 - DNA, 25 bp, Homo sapien
ggatccaccctactcaagtatgacc

SEQ ID NO: 5404741 - DNA, 25 bp, Homo sapien
gctagtgttatgcagagagtagaca

SEQ ID NO: 5404742 - DNA, 25 bp, Homo sapien
agagtagacaataggttccatcggg

SEQ ID NO: 5404743 - DNA, 25 bp, Homo sapien
gtttgtgctactcttcacccttgag

SEQ ID NO: 5404744 - DNA, 25 bp, Homo sapien
tggaacagcctgtggctaatgccca

SEQ ID NO: 5404745 - DNA, 25 bp, Homo sapien
caattaaatcaattatctgggtaat

SEQ ID NO: 5404746 - DNA, 25 bp, Homo sapien
ggttgcactgagatactccctgttc

SEQ ID NO: 5404747 - DNA, 25 bp, Homo sapien
aatccactttggctggttgcactga

SEQ ID NO: 5404748 - DNA, 25 bp, Homo sapien
ctgaggagatctaatccactttggc

SEQ ID NO: 5404749 - DNA, 25 bp, Homo sapien
ctttggcggtcagcaccttagccat

SEQ ID NO: 5404750 - DNA, 25 bp, Homo sapien
cagaatctgaataagcctcaaatgt

SEQ ID NO: 5404751 - DNA, 25 bp, Homo sapien
gaagtgcagcactcaaacttaacag

SEQ ID NO: 5404752 - DNA, 25 bp, Homo sapien
gcactcaaacttaacagaatctgaa

SEQ ID NO: 5404753 - DNA, 25 bp, Homo sapien
aagagaggaagtgcagcactcaaac

SEQ ID NO: 5404754 - DNA, 25 bp, Homo sapien
tgaagagcaatgtgtaagtctcggg

SEQ ID NO: 5404755 - DNA, 25 bp, Homo sapien
gggtgaagagcaatgtgtaagtctc

SEQ ID NO: 5404756 - DNA, 25 bp, Homo sapien
ggtgaagagcaatgtgtaagtctcg

SEQ ID NO: 5404757 - DNA, 25 bp, Homo sapien
gagggtgaagagcaatgtgtaagtc

SEQ ID NO: 5404758 - DNA, 25 bp, Homo sapien
agtaccagtggggccagccatgagc

SEQ ID NO: 5404759 - DNA, 25 bp, Homo sapien
agccatgagcagctgttcaaggtca

SEQ ID NO: 5404760 - DNA, 25 bp, Homo sapien
gccatgagcagctgttcaaggtcat

SEQ ID NO: 5404761 - DNA, 25 bp, Homo sapien
gcattgccagtgaaaactctttgag

SEQ ID NO: 5404762 - DNA, 25 bp, Homo sapien
tcttatcaagggtacacagtgtcaa

SEQ ID NO: 5404763 - DNA, 25 bp, Homo sapien
tgttactggcaggaaggtcacagag

SEQ ID NO: 5404764 - DNA, 25 bp, Homo sapien
atgcacagcccgcacctaaggagtg

SEQ ID NO: 5404765 - DNA, 25 bp, Homo sapien
tgtgcagagcatgtgggatatgccc

SEQ ID NO: 5404766 - DNA, 25 bp, Homo sapien
tttgtgctgttatgaaaagcctcca

SEQ ID NO: 5404767 - DNA, 25 bp, Homo sapien
gaaaggccttacagttcatttaatg

SEQ ID NO: 5404768 - DNA, 25 bp, Homo sapien
tgaggtgcaacttcacaggcaggga

SEQ ID NO: 5404769 - DNA, 25 bp, Homo sapien
tgaaaatggcatagatttcccattc

SEQ ID NO: 5404770 - DNA, 25 bp, Homo sapien
cctcatctgttggaaagtaatggct

SEQ ID NO: 5404771 - DNA, 25 bp, Homo sapien
gtgatagaaatctctacaacctcat

SEQ ID NO: 5404772 - DNA, 25 bp, Homo sapien
tcccattctggtgaagtgatagaaa

SEQ ID NO: 5404773 - DNA, 25 bp, Homo sapien
tcattcagataggacatctctaccc

SEQ ID NO: 5404774 - DNA, 25 bp, Homo sapien
gtcattcagataggacatctctacc

SEQ ID NO: 5404775 - DNA, 25 bp, Homo sapien
catttatgggtgtcaagtggtgtac

SEQ ID NO: 5404776 - DNA, 25 bp, Homo sapien
ccaatttgcttagggtgattcacag

SEQ ID NO: 5404777 - DNA, 25 bp, Homo sapien
tggtgtaccacacattacagagact

SEQ ID NO: 5404778 - DNA, 25 bp, Homo sapien
cagttgcactaatggagaatcgcgc

SEQ ID NO: 5404779 - DNA, 25 bp, Homo sapien
cattagagttgaaactgacccgtgg

SEQ ID NO: 5404780 - DNA, 25 bp, Homo sapien
taaaccatgacatctacacgtgttc

SEQ ID NO: 5404781 - DNA, 25 bp, Homo sapien
tcccagttactatggcaggcccttg

SEQ ID NO: 5404782 - DNA, 25 bp, Homo sapien
tgacccgtggttcttatcccagtta

SEQ ID NO: 5404783 - DNA, 25 bp, Homo sapien
cctgaaacctgctcaaatgggagag

SEQ ID NO: 5404784 - DNA, 25 bp, Homo sapien
tgggcactgcaaccctcaaaagagg

SEQ ID NO: 5404785 - DNA, 25 bp, Homo sapien
gctgtaagtggctcctaccataggg

SEQ ID NO: 5404786 - DNA, 25 bp, Homo sapien
cattagaaggaagctgaatatccac

SEQ ID NO: 5404787 - DNA, 25 bp, Homo sapien
tgaacaattcaaggagccacttact

SEQ ID NO: 5404788 - DNA, 25 bp, Homo sapien
cccatggatggtggcaaattaaccc

SEQ ID NO: 5404789 - DNA, 25 bp, Homo sapien
gacctttgagaaaccttaaccatga

SEQ ID NO: 5404790 - DNA, 25 bp, Homo sapien
tgggcaaggtgctccaatgatcatc

SEQ ID NO: 5404791 - DNA, 25 bp, Homo sapien
tgagcaactcagactttgtagccat

SEQ ID NO: 5404792 - DNA, 25 bp, Homo sapien
taagtaagcccaagtcccttgagca

SEQ ID NO: 5404793 - DNA, 25 bp, Homo sapien
tgtagccatggaaggtcagccaaga

SEQ ID NO: 5404794 - DNA, 25 bp, Homo sapien
cctgatttacatgaagtcggcgaga

SEQ ID NO: 5404795 - DNA, 25 bp, Homo sapien
gctgctgggcatcacatgtatgata

SEQ ID NO: 5404796 - DNA, 25 bp, Homo sapien
aaagacagattaatggcctctactg

SEQ ID NO: 5404797 - DNA, 25 bp, Homo sapien
tacatactgagtttcataaagccac

SEQ ID NO: 5404798 - DNA, 25 bp, Homo sapien
caagctacaagtcctgtcatcctgt

SEQ ID NO: 5404799 - DNA, 25 bp, Homo sapien
attcagctggaatttgagtgtgatc

SEQ ID NO: 5404800 - DNA, 25 bp, Homo sapien
aaaggggatactattcagctggaat

SEQ ID NO: 5404801 - DNA, 25 bp, Homo sapien
ctagtctgactgttgggaaaacgta

SEQ ID NO: 5404802 - DNA, 25 bp, Homo sapien
cctctggacatcagtgtggatgttg

SEQ ID NO: 5404803 - DNA, 25 bp, Homo sapien
cagatattcccatgcttgaaatgct

SEQ ID NO: 5404804 - DNA, 25 bp, Homo sapien
tagagaaaggttgagtctcctctta

SEQ ID NO: 5404805 - DNA, 25 bp, Homo sapien
gaaatgaacattagcaggtagcagc

SEQ ID NO: 5404806 - DNA, 25 bp, Homo sapien
cagtaaacatggtgtaccaaattgg

SEQ ID NO: 5404807 - DNA, 25 bp, Homo sapien
taatagatgctatgatttctatgtc

SEQ ID NO: 5404808 - DNA, 25 bp, Homo sapien
ctttacatatagaatttgaggatga

SEQ ID NO: 5404809 - DNA, 25 bp, Homo sapien
ttgttttaatagatgctatgatttc

SEQ ID NO: 5404810 - DNA, 25 bp, Homo sapien
gatttctatgtctgatatttcaaac

SEQ ID NO: 5404811 - DNA, 25 bp, Homo sapien
taatttttggtaatatctctttagc

SEQ ID NO: 5404812 - DNA, 25 bp, Homo sapien
ctcgaagcgaagtctagggtcagaa

SEQ ID NO: 5404813 - DNA, 25 bp, Homo sapien
gaagtgctaactcgaagcgaagtct

SEQ ID NO: 5404814 - DNA, 25 bp, Homo sapien
gcttctcgaagtgctaactcgaagc

SEQ ID NO: 5404815 - DNA, 25 bp, Homo sapien
ttcatcagtcatgctaatttccata

SEQ ID NO: 5404816 - DNA, 25 bp, Homo sapien
atcagtcatgctaatttccataatt

SEQ ID NO: 5404817 - DNA, 25 bp, Homo sapien
catcatcatggctttttcatcagtc

SEQ ID NO: 5404818 - DNA, 25 bp, Homo sapien
cagtcatgctaatttccataattac

SEQ ID NO: 5404819 - DNA, 25 bp, Homo sapien
attctaacaggatcaaattgagcaa

SEQ ID NO: 5404820 - DNA, 25 bp, Homo sapien
cttttgatgccattgtatctgacat

SEQ ID NO: 5404821 - DNA, 25 bp, Homo sapien
cttcaatttcaatgcccattctagc

SEQ ID NO: 5404822 - DNA, 25 bp, Homo sapien
gtatgtattcaatgtgaagagtggc

SEQ ID NO: 5404823 - DNA, 25 bp, Homo sapien
taagggcttctagccgccgtgctct

SEQ ID NO: 5404824 - DNA, 25 bp, Homo sapien
caaacgcctttccaataattcttgt

SEQ ID NO: 5404825 - DNA, 25 bp, Homo sapien
ctgtttcctaagggcttctagccgc

SEQ ID NO: 5404826 - DNA, 25 bp, Homo sapien
tccatcaaacgcctttccaataatt

SEQ ID NO: 5404827 - DNA, 25 bp, Homo sapien
ttacagatgctatggtttaaactca

SEQ ID NO: 5404828 - DNA, 25 bp, Homo sapien
tggtgcttcttctactctggataga

SEQ ID NO: 5404829 - DNA, 25 bp, Homo sapien
cagatgctatggtttaaactcaata

SEQ ID NO: 5404830 - DNA, 25 bp, Homo sapien
tctactctggatagaaaattttctt

SEQ ID NO: 5404831 - DNA, 25 bp, Homo sapien
aacacagtaaagtcaatcatttgga

SEQ ID NO: 5404832 - DNA, 25 bp, Homo sapien
gcaacacagtaaagtcaatcatttg

SEQ ID NO: 5404833 - DNA, 25 bp, Homo sapien
aaaatagcaacacagtaaagtcaat

SEQ ID NO: 5404834 - DNA, 25 bp, Homo sapien
tagcaacacagtaaagtcaatcatt

SEQ ID NO: 5404835 - DNA, 25 bp, Homo sapien
ttagcagtttccgttttgtctcaga

SEQ ID NO: 5404836 - DNA, 25 bp, Homo sapien
cagcttttggaattgagctccggaa

SEQ ID NO: 5404837 - DNA, 25 bp, Homo sapien
cagtttccgttttgtctcagaattc

SEQ ID NO: 5404838 - DNA, 25 bp, Homo sapien
tgagctccggaatcactgttccttt

SEQ ID NO: 5404839 - DNA, 25 bp, Homo sapien
actgatatttagtattaaacacagg

SEQ ID NO: 5404840 - DNA, 25 bp, Homo sapien
ccctcctgtttccaagcaagatttg

SEQ ID NO: 5404841 - DNA, 25 bp, Homo sapien
caagtaaaaggagtagatatttcca

SEQ ID NO: 5404842 - DNA, 25 bp, Homo sapien
gttaattgtcacagttgggccatga

SEQ ID NO: 5404843 - DNA, 25 bp, Homo sapien
ttacgataatacttcctgctccttc

SEQ ID NO: 5404844 - DNA, 25 bp, Homo sapien
cagtcatatacttgggaattcatca

SEQ ID NO: 5404845 - DNA, 25 bp, Homo sapien
tcatcgtttaacattcatttacccc

SEQ ID NO: 5404846 - DNA, 25 bp, Homo sapien
aatttacgataatacttcctgctcc

SEQ ID NO: 5404847 - DNA, 25 bp, Homo sapien
cacaggcataagcttgcttgttcat

SEQ ID NO: 5404848 - DNA, 25 bp, Homo sapien
atcaaaattgctatatattgctttg

SEQ ID NO: 5404849 - DNA, 25 bp, Homo sapien
gcccacaggcataagcttgcttgtt

SEQ ID NO: 5404850 - DNA, 25 bp, Homo sapien
tttgcccacaggcataagcttgctt

SEQ ID NO: 5404851 - DNA, 25 bp, Homo sapien
cagcctccgtcacagtaaatgggtc

SEQ ID NO: 5404852 - DNA, 25 bp, Homo sapien
tccacagtaaggtgtgaatcccaac

SEQ ID NO: 5404853 - DNA, 25 bp, Homo sapien
gaatcccaaccgtggagagggctcc

SEQ ID NO: 5404854 - DNA, 25 bp, Homo sapien
tcaagagatagttacagcagcagcc

SEQ ID NO: 5404855 - DNA, 25 bp, Homo sapien
tcttcagttcttctagacgctgaag

SEQ ID NO: 5404856 - DNA, 25 bp, Homo sapien
tcagttcttctagacgctgaagatc

SEQ ID NO: 5404857 - DNA, 25 bp, Homo sapien
tctctgtcttttagtgactgttcag

SEQ ID NO: 5404858 - DNA, 25 bp, Homo sapien
gactgttcagcgattaatttcttca

SEQ ID NO: 5404859 - DNA, 25 bp, Homo sapien
cttgccacttctgttttttcttggc

SEQ ID NO: 5404860 - DNA, 25 bp, Homo sapien
cttctgttttttcttggcccagtat

SEQ ID NO: 5404861 - DNA, 25 bp, Homo sapien
ttcttgccacttctgttttttcttg

SEQ ID NO: 5404862 - DNA, 25 bp, Homo sapien
ccacttctgttttttcttggcccag

SEQ ID NO: 5404863 - DNA, 25 bp, Homo sapien
tcttctctgctctttgcaacaattc

SEQ ID NO: 5404864 - DNA, 25 bp, Homo sapien
ctcttcttctggcagaaatttccat

SEQ ID NO: 5404865 - DNA, 25 bp, Homo sapien
tctgctctttgcaacaattccttct

SEQ ID NO: 5404866 - DNA, 25 bp, Homo sapien
tgctctttgcaacaattccttcttc

SEQ ID NO: 5404867 - DNA, 25 bp, Homo sapien
tcttcttggtgggctcgccattgac

SEQ ID NO: 5404868 - DNA, 25 bp, Homo sapien
cacccggcacctgatagatgctcaa

SEQ ID NO: 5404869 - DNA, 25 bp, Homo sapien
gactaatcaatgtacctccagtgct

SEQ ID NO: 5404870 - DNA, 25 bp, Homo sapien
cactcgactgtgatctccatgagaa

SEQ ID NO: 5404871 - DNA, 25 bp, Homo sapien
gaacagggaccataactgattgact

SEQ ID NO: 5404872 - DNA, 25 bp, Homo sapien
cgataaatccagtcatcttgaattt

SEQ ID NO: 5404873 - DNA, 25 bp, Homo sapien
aagacgataaatccagtcatcttga

SEQ ID NO: 5404874 - DNA, 25 bp, Homo sapien
gataaatccagtcatcttgaatttt

SEQ ID NO: 5404875 - DNA, 25 bp, Homo sapien
gacgataaatccagtcatcttgaat

SEQ ID NO: 5404876 - DNA, 25 bp, Homo sapien
cttgggctccactttaggtgctatc

SEQ ID NO: 5404877 - DNA, 25 bp, Homo sapien
ttgggctccactttaggtgctatcc

SEQ ID NO: 5404878 - DNA, 25 bp, Homo sapien
gcctatggcacagacggaactgcaa

SEQ ID NO: 5404879 - DNA, 25 bp, Homo sapien
gatttagagacacttgcctatggca

SEQ ID NO: 5404880 - DNA, 25 bp, Homo sapien
tatgggtctgagtattagaggcaaa

SEQ ID NO: 5404881 - DNA, 25 bp, Homo sapien
gcttacaataaaaggtactgggaca

SEQ ID NO: 5404882 - DNA, 25 bp, Homo sapien
gtctgcaggatgatgacccttttct

SEQ ID NO: 5404883 - DNA, 25 bp, Homo sapien
taaacattacatagaggctgccagg

SEQ ID NO: 5404884 - DNA, 25 bp, Homo sapien
atcttctggaacctaggaagaggtt

SEQ ID NO: 5404885 - DNA, 25 bp, Homo sapien
agggactctatgtggcagcttcaac

SEQ ID NO: 5404886 - DNA, 25 bp, Homo sapien
ttgaatactgcagatatcaaaacag

SEQ ID NO: 5404887 - DNA, 25 bp, Homo sapien
gtacttgaatactgcagatatcaaa

SEQ ID NO: 5404888 - DNA, 25 bp, Homo sapien
acttgaatactgcagatatcaaaac

SEQ ID NO: 5404889 - DNA, 25 bp, Homo sapien
gaatactgcagatatcaaaacagag

SEQ ID NO: 5404890 - DNA, 25 bp, Homo sapien
tgtatagacgaaatgccatctgctg

SEQ ID NO: 5404891 - DNA, 25 bp, Homo sapien
ttgtatccatggttaaccacaggga

SEQ ID NO: 5404892 - DNA, 25 bp, Homo sapien
tgccaagagccacagatagtgcaat

SEQ ID NO: 5404893 - DNA, 25 bp, Homo sapien
tccataaatgctcccaactgccgtg

SEQ ID NO: 5404894 - DNA, 25 bp, Homo sapien
tcagcttggaccaggagaatgatga

SEQ ID NO: 5404895 - DNA, 25 bp, Homo sapien
gcttggaccaggagaatgatgaatc

SEQ ID NO: 5404896 - DNA, 25 bp, Homo sapien
gatgaatcattactgattctgtctg

SEQ ID NO: 5404897 - DNA, 25 bp, Homo sapien
ttggaccaggagaatgatgaatcat

SEQ ID NO: 5404898 - DNA, 25 bp, Homo sapien
caagcctcagtgagtgtcagcacag

SEQ ID NO: 5404899 - DNA, 25 bp, Homo sapien
catttcatgtgttgcacaagcctca

SEQ ID NO: 5404900 - DNA, 25 bp, Homo sapien
tgtccttagccaacatgctctccat

SEQ ID NO: 5404901 - DNA, 25 bp, Homo sapien
gctctatagcaaagcgatattggtc

SEQ ID NO: 5404902 - DNA, 25 bp, Homo sapien
ggtactgatccaaaatagcctggta

SEQ ID NO: 5404903 - DNA, 25 bp, Homo sapien
aatcatgcctagatttgtgaggaaa

SEQ ID NO: 5404904 - DNA, 25 bp, Homo sapien
ccaaagagatctccagggtactgat

SEQ ID NO: 5404905 - DNA, 25 bp, Homo sapien
ttgtaacatgtccagatacagagtc

SEQ ID NO: 5404906 - DNA, 25 bp, Homo sapien
cttgttgaattcaactgctttgctg

SEQ ID NO: 5404907 - DNA, 25 bp, Homo sapien
aactgctttgctggtgattctaatg

SEQ ID NO: 5404908 - DNA, 25 bp, Homo sapien
tgaattcaactgctttgctggtgat

SEQ ID NO: 5404909 - DNA, 25 bp, Homo sapien
ctggtgattctaatgacagaactag

SEQ ID NO: 5404910 - DNA, 25 bp, Homo sapien
tggctctaccagtctggctacttag

SEQ ID NO: 5404911 - DNA, 25 bp, Homo sapien
cagacccatttctgaccaacagaat

SEQ ID NO: 5404912 - DNA, 25 bp, Homo sapien
caaacacccaatctaatcagcctgg

SEQ ID NO: 5404913 - DNA, 25 bp, Homo sapien
ggtatgcatcttctattcctcagag

SEQ ID NO: 5404914 - DNA, 25 bp, Homo sapien
cagctgatactggtactcaacctga

SEQ ID NO: 5404915 - DNA, 25 bp, Homo sapien
ggtactcaacctgatttaccagcat

SEQ ID NO: 5404916 - DNA, 25 bp, Homo sapien
tactggtactcaacctgatttacca

SEQ ID NO: 5404917 - DNA, 25 bp, Homo sapien
gctgatactggtactcaacctgatt

SEQ ID NO: 5404918 - DNA, 25 bp, Homo sapien
attcatccaaggattttggattgtc

SEQ ID NO: 5404919 - DNA, 25 bp, Homo sapien
tccaaggattttggattgtctgagc

SEQ ID NO: 5404920 - DNA, 25 bp, Homo sapien
ccaaggattttggattgtctgagcc

SEQ ID NO: 5404921 - DNA, 25 bp, Homo sapien
catccaaggattttggattgtctga

SEQ ID NO: 5404922 - DNA, 25 bp, Homo sapien
caagtttacaatcagctagccagtc

SEQ ID NO: 5404923 - DNA, 25 bp, Homo sapien
tggagtgcctcctatgactgggtcc

SEQ ID NO: 5404924 - DNA, 25 bp, Homo sapien
tagctcattactggttcctgcagag

SEQ ID NO: 5404925 - DNA, 25 bp, Homo sapien
gaacttgatatagctcctggagtaa

SEQ ID NO: 5404926 - DNA, 25 bp, Homo sapien
ttccagttacatagtaactatacag

SEQ ID NO: 5404927 - DNA, 25 bp, Homo sapien
taactatacagtaagttggaagtat

SEQ ID NO: 5404928 - DNA, 25 bp, Homo sapien
catttattgattgtattccagttac

SEQ ID NO: 5404929 - DNA, 25 bp, Homo sapien
tggaagtatagtgatcccaaacaaa

SEQ ID NO: 5404930 - DNA, 25 bp, Homo sapien
gggcattccaaactttctaattcaa

SEQ ID NO: 5404931 - DNA, 25 bp, Homo sapien
tatgtcttccaactgcagattaaag

SEQ ID NO: 5404932 - DNA, 25 bp, Homo sapien
gcagttcactaagcgggttagtctt

SEQ ID NO: 5404933 - DNA, 25 bp, Homo sapien
ttcaaatcagggtatgggcattcca

SEQ ID NO: 5404934 - DNA, 25 bp, Homo sapien
ctttatactccagtctgaaagatca

SEQ ID NO: 5404935 - DNA, 25 bp, Homo sapien
cagcctaagtctttcaaagacagtt

SEQ ID NO: 5404936 - DNA, 25 bp, Homo sapien
tgttgctccagcctaagtctttcaa

SEQ ID NO: 5404937 - DNA, 25 bp, Homo sapien
ttatactccagtctgaaagatcatt

SEQ ID NO: 5404938 - DNA, 25 bp, Homo sapien
gctgcaaagtgtgatgctgtctgta

SEQ ID NO: 5404939 - DNA, 25 bp, Homo sapien
caatactttcatggagttaaactca

SEQ ID NO: 5404940 - DNA, 25 bp, Homo sapien
tctgtattttagatctgctctcagc

SEQ ID NO: 5404941 - DNA, 25 bp, Homo sapien
tctcagctgctgaataggatttatt

SEQ ID NO: 5404942 - DNA, 25 bp, Homo sapien
caaaatttgtaaggtcacaaagaca

SEQ ID NO: 5404943 - DNA, 25 bp, Homo sapien
ctaagccaatttacatgggacaagg

SEQ ID NO: 5404944 - DNA, 25 bp, Homo sapien
caatttacatgggacaaggttttgg

SEQ ID NO: 5404945 - DNA, 25 bp, Homo sapien
taagccaatttacatgggacaaggt

SEQ ID NO: 5404946 - DNA, 25 bp, Homo sapien
agccaatttacatgggacaaggttt

SEQ ID NO: 5404947 - DNA, 25 bp, Homo sapien
ctctggtattcctgccaccacactt

SEQ ID NO: 5404948 - DNA, 25 bp, Homo sapien
ctgacttcattcagcctctggtatt

SEQ ID NO: 5404949 - DNA, 25 bp, Homo sapien
caccacacttgcttgtgttgtttta

SEQ ID NO: 5404950 - DNA, 25 bp, Homo sapien
acttgcttgtgttgttttattagtg

SEQ ID NO: 5404951 - DNA, 25 bp, Homo sapien
ggataactttgaagtcaacattgct

SEQ ID NO: 5404952 - DNA, 25 bp, Homo sapien
gataactttgaagtcaacattgctt

SEQ ID NO: 5404953 - DNA, 25 bp, Homo sapien
tggataactttgaagtcaacattgc

SEQ ID NO: 5404954 - DNA, 25 bp, Homo sapien
tttggataactttgaagtcaacatt

SEQ ID NO: 5404955 - DNA, 25 bp, Homo sapien
gatagtctactggtttgtacttgat

SEQ ID NO: 5404956 - DNA, 25 bp, Homo sapien
cacgcaattgttgatagtctactgg

SEQ ID NO: 5404957 - DNA, 25 bp, Homo sapien
ttcagttaatgcacgcaattgttga

SEQ ID NO: 5404958 - DNA, 25 bp, Homo sapien
actggtttgtacttgatgtttctca

SEQ ID NO: 5404959 - DNA, 25 bp, Homo sapien
ttgtcatgaatggttggtctctttg

SEQ ID NO: 5404960 - DNA, 25 bp, Homo sapien
tcatgaatggttggtctctttgatt

SEQ ID NO: 5404961 - DNA, 25 bp, Homo sapien
tgtcatgaatggttggtctctttga

SEQ ID NO: 5404962 - DNA, 25 bp, Homo sapien
gtcatgaatggttggtctctttgat

SEQ ID NO: 5404963 - DNA, 25 bp, Homo sapien
tgggtagggttttcagggagaggca

SEQ ID NO: 5404964 - DNA, 25 bp, Homo sapien
atcaggccgcccttacacataaatg

SEQ ID NO: 5404965 - DNA, 25 bp, Homo sapien
cacataaatgtggtccttacccgca

SEQ ID NO: 5404966 - DNA, 25 bp, Homo sapien
tgacacccatatcaggccgccctta

SEQ ID NO: 5404967 - DNA, 25 bp, Homo sapien
cttgcttgtgctctgacacccatat

SEQ ID NO: 5404968 - DNA, 25 bp, Homo sapien
ggccaaataggccaggaagagagtt

SEQ ID NO: 5404969 - DNA, 25 bp, Homo sapien
tccaagtttggaattaaggaaatga

SEQ ID NO: 5404970 - DNA, 25 bp, Homo sapien
tgggccaagagtccaagtttggaat

SEQ ID NO: 5404971 - DNA, 25 bp, Homo sapien
agtgagaaagactgggccaagagtc

SEQ ID NO: 5404972 - DNA, 25 bp, Homo sapien
aaatcaataaaaataggtcgaatgc

SEQ ID NO: 5404973 - DNA, 25 bp, Homo sapien
taggtcgaatgctgcctggatcatc

SEQ ID NO: 5404974 - DNA, 25 bp, Homo sapien
ttgtactctacatgaaggaactctg

SEQ ID NO: 5404975 - DNA, 25 bp, Homo sapien
tcatcttgtactctacatgaaggaa

SEQ ID NO: 5404976 - DNA, 25 bp, Homo sapien
aattctaccagcggtacaaggagag

SEQ ID NO: 5404977 - DNA, 25 bp, Homo sapien
aggcatcttccttcttgaattgcat

SEQ ID NO: 5404978 - DNA, 25 bp, Homo sapien
cttcccccaggcatcttccttcttg

SEQ ID NO: 5404979 - DNA, 25 bp, Homo sapien
ccaggcatcttccttcttgaattgc

SEQ ID NO: 5404980 - DNA, 25 bp, Homo sapien
ccccaggcatcttccttcttgaatt

SEQ ID NO: 5404981 - DNA, 25 bp, Homo sapien
tatgtctgggttcatagaagcctgg

SEQ ID NO: 5404982 - DNA, 25 bp, Homo sapien
gaccttaaactggtccatggctgga

SEQ ID NO: 5404983 - DNA, 25 bp, Homo sapien
aaattttggcagtacagcatccggc

SEQ ID NO: 5404984 - DNA, 25 bp, Homo sapien
acttctcagagggaatctgtgaccc

SEQ ID NO: 5404985 - DNA, 25 bp, Homo sapien
catattgctgtacgttagatctcca

SEQ ID NO: 5404986 - DNA, 25 bp, Homo sapien
tgtgtaccacaatctaattaacgta

SEQ ID NO: 5404987 - DNA, 25 bp, Homo sapien
tctgctttattggagtatagttgac

SEQ ID NO: 5404988 - DNA, 25 bp, Homo sapien
tggcaagcaacattctacattctaa

SEQ ID NO: 5404989 - DNA, 25 bp, Homo sapien
tgatgcataacagtacagacacctg

SEQ ID NO: 5404990 - DNA, 25 bp, Homo sapien
tctacattgcatagacgggcgtgca

SEQ ID NO: 5404991 - DNA, 25 bp, Homo sapien
gaagctgggtctacatgcatgcaac

SEQ ID NO: 5404992 - DNA, 25 bp, Homo sapien
ggtatcgatatgtgcaatcccacta

SEQ ID NO: 5404993 - DNA, 25 bp, Homo sapien
taaagggccaggcatcacggctgaa

SEQ ID NO: 5404994 - DNA, 25 bp, Homo sapien
tctacctctacgaagcagacaaaga

SEQ ID NO: 5404995 - DNA, 25 bp, Homo sapien
caaccccagggatgtacagaaaaca

SEQ ID NO: 5404996 - DNA, 25 bp, Homo sapien
caacagccctctactgtggtgatca

SEQ ID NO: 5404997 - DNA, 25 bp, Homo sapien
cctggtagtagagaggcagacaact

SEQ ID NO: 5404998 - DNA, 25 bp, Homo sapien
tatgcataagcgtcctcaagagata

SEQ ID NO: 5404999 - DNA, 25 bp, Homo sapien
gacctataccatcgtaacagaagtg

SEQ ID NO: 5405000 - DNA, 25 bp, Homo sapien
tggatggcaaggaacagggactcac

SEQ ID NO: 5405001 - DNA, 25 bp, Homo sapien
gatcctcaggctaggtaacagtggt

SEQ ID NO: 5405002 - DNA, 25 bp, Homo sapien
taggagcataagtggagtatgagcc

SEQ ID NO: 5405003 - DNA, 25 bp, Homo sapien
ggcaacaaagtagaaacctcaagaa

SEQ ID NO: 5405004 - DNA, 25 bp, Homo sapien
atcatttcagtggtattcaagggcc

SEQ ID NO: 5405005 - DNA, 25 bp, Homo sapien
ttaataaatatctgcccacagggag

SEQ ID NO: 5405006 - DNA, 25 bp, Homo sapien
caagctcatagtgcgggatgtacac

SEQ ID NO: 5405007 - DNA, 25 bp, Homo sapien
taacaagcctgtaacctctcaagtg

SEQ ID NO: 5405008 - DNA, 25 bp, Homo sapien
ttgagaatcagggaacaggctagct

SEQ ID NO: 5405009 - DNA, 25 bp, Homo sapien
ctggagaagcagaagctgcacacat

SEQ ID NO: 5405010 - DNA, 25 bp, Homo sapien
aggaaaagtgaaacgcccactcctg

SEQ ID NO: 5405011 - DNA, 25 bp, Homo sapien
aaagtgaaacgcccactcctgggct

SEQ ID NO: 5405012 - DNA, 25 bp, Homo sapien
gactccccaaacgcaggaaaagtga

SEQ ID NO: 5405013 - DNA, 25 bp, Homo sapien
tcctacctttgacgccagggacaaa

SEQ ID NO: 5405014 - DNA, 25 bp, Homo sapien
agggacaaaccctaccaggcacagt

SEQ ID NO: 5405015 - DNA, 25 bp, Homo sapien
gggaatctccctgtcctctccgcca

SEQ ID NO: 5405016 - DNA, 25 bp, Homo sapien
gcccgagacctgagacaccttctct

SEQ ID NO: 5405017 - DNA, 25 bp, Homo sapien
gccgatgactgtgtagccaaggtta

SEQ ID NO: 5405018 - DNA, 25 bp, Homo sapien
agaggtcaccggagcatcttcggag

SEQ ID NO: 5405019 - DNA, 25 bp, Homo sapien
tagcttccctccatgcggcagaggg

SEQ ID NO: 5405020 - DNA, 25 bp, Homo sapien
tgttagagtaatgagcttgcagcca

SEQ ID NO: 5405021 - DNA, 25 bp, Homo sapien
agattcagtaatgggagtctcggtc

SEQ ID NO: 5405022 - DNA, 25 bp, Homo sapien
gttagattcagtaatgggagtctcg

SEQ ID NO: 5405023 - DNA, 25 bp, Homo sapien
cagtaatgggagtctcggtctttaa

SEQ ID NO: 5405024 - DNA, 25 bp, Homo sapien
ggagtctcggtctttaaggaatcca

SEQ ID NO: 5405025 - DNA, 25 bp, Homo sapien
tcttggcctgttctagaaccttgac

SEQ ID NO: 5405026 - DNA, 25 bp, Homo sapien
ccagtgcctgcattaggtgggttgt

SEQ ID NO: 5405027 - DNA, 25 bp, Homo sapien
tggagataggttgatagggcaaaca

SEQ ID NO: 5405028 - DNA, 25 bp, Homo sapien
tgttcatataatactgttgacccag

SEQ ID NO: 5405029 - DNA, 25 bp, Homo sapien
gtggccacagaagagaacagaactc

SEQ ID NO: 5405030 - DNA, 25 bp, Homo sapien
cacagaagagaacagaactcctgtg

SEQ ID NO: 5405031 - DNA, 25 bp, Homo sapien
ggccacagaagagaacagaactcct

SEQ ID NO: 5405032 - DNA, 25 bp, Homo sapien
cagaagagaacagaactcctgtgct

SEQ ID NO: 5405033 - DNA, 25 bp, Homo sapien
tctcttctgtactcatgtagctttc

SEQ ID NO: 5405034 - DNA, 25 bp, Homo sapien
taaaccagtgaacaaagtctcttct

SEQ ID NO: 5405035 - DNA, 25 bp, Homo sapien
tcttctgtactcatgtagctttctc

SEQ ID NO: 5405036 - DNA, 25 bp, Homo sapien
gtgaacaaagtctcttctgtactca

SEQ ID NO: 5405037 - DNA, 25 bp, Homo sapien
cactgtacacttgtgaatcaacatg

SEQ ID NO: 5405038 - DNA, 25 bp, Homo sapien
acacttgtgaatcaacatgtaactg

SEQ ID NO: 5405039 - DNA, 25 bp, Homo sapien
gtcccactgtacacttgtgaatcaa

SEQ ID NO: 5405040 - DNA, 25 bp, Homo sapien
tgtgaatcaacatgtaactgttttc

SEQ ID NO: 5405041 - DNA, 25 bp, Homo sapien
gctggaagttgtccgtggagcacac

SEQ ID NO: 5405042 - DNA, 25 bp, Homo sapien
gatctgacccacatgtaaagtctga

SEQ ID NO: 5405043 - DNA, 25 bp, Homo sapien
gaacagccccgtgtaaatcccaaga

SEQ ID NO: 5405044 - DNA, 25 bp, Homo sapien
tctaggttatgattggccgaacagc

SEQ ID NO: 5405045 - DNA, 25 bp, Homo sapien
taaatttgtgtaacgtccttgacgc

SEQ ID NO: 5405046 - DNA, 25 bp, Homo sapien
gactggcatgtagagccgctccagg

SEQ ID NO: 5405047 - DNA, 25 bp, Homo sapien
taaggacaatctcgatggtgatcgg

SEQ ID NO: 5405048 - DNA, 25 bp, Homo sapien
ccaggtgccagtcagaatcggaaca

SEQ ID NO: 5405049 - DNA, 25 bp, Homo sapien
ctgtgtaaagcatagttctcagtgc

SEQ ID NO: 5405050 - DNA, 25 bp, Homo sapien
gtgtaaagcatagttctcagtgctg

SEQ ID NO: 5405051 - DNA, 25 bp, Homo sapien
tgtgtaaagcatagttctcagtgct

SEQ ID NO: 5405052 - DNA, 25 bp, Homo sapien
tctgaagcccaactgtgtcctattg

SEQ ID NO: 5405053 - DNA, 25 bp, Homo sapien
tcttgtgctgtaagtacaatgcctg

SEQ ID NO: 5405054 - DNA, 25 bp, Homo sapien
gcaaaatgcccagaagtgaacaaat

SEQ ID NO: 5405055 - DNA, 25 bp, Homo sapien
tctttttactctggtgaggtctcaa

SEQ ID NO: 5405056 - DNA, 25 bp, Homo sapien
cacaaggcagttgggtattcctttt

SEQ ID NO: 5405057 - DNA, 25 bp, Homo sapien
ttttttgagccactgggcacaaggc

SEQ ID NO: 5405058 - DNA, 25 bp, Homo sapien
cactgggcacaaggcagttgggtat

SEQ ID NO: 5405059 - DNA, 25 bp, Homo sapien
ttccttttgattagcttttgttagc

SEQ ID NO: 5405060 - DNA, 25 bp, Homo sapien
tctgtaatcccaccagcagcagtgt

SEQ ID NO: 5405061 - DNA, 25 bp, Homo sapien
ctgtactcccttctttgacaaaggt

SEQ ID NO: 5405062 - DNA, 25 bp, Homo sapien
cctctgtactcccttctttgacaaa

SEQ ID NO: 5405063 - DNA, 25 bp, Homo sapien
tccctctgtactcccttctttgaca

SEQ ID NO: 5405064 - DNA, 25 bp, Homo sapien
gggattcagacaattaactgcctgt

SEQ ID NO: 5405065 - DNA, 25 bp, Homo sapien
tactgaaataacataaggagcctgt

SEQ ID NO: 5405066 - DNA, 25 bp, Homo sapien
aactgcctgtggagtactctgtaca

SEQ ID NO: 5405067 - DNA, 25 bp, Homo sapien
gccaagaaagtgatggatcccctgt

SEQ ID NO: 5405068 - DNA, 25 bp, Homo sapien
gcaaagagctgtcctctatccagag

SEQ ID NO: 5405069 - DNA, 25 bp, Homo sapien
tcaaatgcccctgctactacatcag

SEQ ID NO: 5405070 - DNA, 25 bp, Homo sapien
tcttgcgatgaaccagttcaccccg

SEQ ID NO: 5405071 - DNA, 25 bp, Homo sapien
tactacatcaggttgcagcagcaaa

SEQ ID NO: 5405072 - DNA, 25 bp, Homo sapien
gaagaagcagagacttggcctgggc

SEQ ID NO: 5405073 - DNA, 25 bp, Homo sapien
aagcagagacttggcctgggctgag

SEQ ID NO: 5405074 - DNA, 25 bp, Homo sapien
aagaaagctgccagcaaagggaaca

SEQ ID NO: 5405075 - DNA, 25 bp, Homo sapien
cagagacttggcctgggctgagaag

SEQ ID NO: 5405076 - DNA, 25 bp, Homo sapien
tgctattccacacactaagggctgc

SEQ ID NO: 5405077 - DNA, 25 bp, Homo sapien
ttgctattccacacactaagggctg

SEQ ID NO: 5405078 - DNA, 25 bp, Homo sapien
tagactgtgttgtcctttctttcca

SEQ ID NO: 5405079 - DNA, 25 bp, Homo sapien
ccagtcttctaaccctgttaacaca

SEQ ID NO: 5405080 - DNA, 25 bp, Homo sapien
tcttctaaccctgttaacacacatg

SEQ ID NO: 5405081 - DNA, 25 bp, Homo sapien
ggttgtgggtctcggtggtagactg

SEQ ID NO: 5405082 - DNA, 25 bp, Homo sapien
tgttgccttgttgaaccaatgggga

SEQ ID NO: 5405083 - DNA, 25 bp, Homo sapien
gccttgttgaaccaatggggaatgg

SEQ ID NO: 5405084 - DNA, 25 bp, Homo sapien
gggaatggatgccaagccctgtggt

SEQ ID NO: 5405085 - DNA, 25 bp, Homo sapien
aatggatgccaagccctgtggtctc

SEQ ID NO: 5405086 - DNA, 25 bp, Homo sapien
taaacctttgtgtcgagggcagact

SEQ ID NO: 5405087 - DNA, 25 bp, Homo sapien
tagcgccaggttcccaacaagcgtt

SEQ ID NO: 5405088 - DNA, 25 bp, Homo sapien
gacccagtgattcgaggccaactga

SEQ ID NO: 5405089 - DNA, 25 bp, Homo sapien
gctgctccactacatacgaaatcca

SEQ ID NO: 5405090 - DNA, 25 bp, Homo sapien
cggtattctgacttagaggtgttta

SEQ ID NO: 5405091 - DNA, 25 bp, Homo sapien
tgggcggtattctgacttagaggtg

SEQ ID NO: 5405092 - DNA, 25 bp, Homo sapien
acttagaggtgtttagtcataatcc

SEQ ID NO: 5405093 - DNA, 25 bp, Homo sapien
tctgacttagaggtgtttagtcata

SEQ ID NO: 5405094 - DNA, 25 bp, Homo sapien
tgtacacctgaatctaacatgaggc

SEQ ID NO: 5405095 - DNA, 25 bp, Homo sapien
taaatgtctcgtgcatgttatcctc

SEQ ID NO: 5405096 - DNA, 25 bp, Homo sapien
tgtaccgaggcatctgtgagagtcc

SEQ ID NO: 5405097 - DNA, 25 bp, Homo sapien
caaacacatgctatctaggtaaaag

SEQ ID NO: 5405098 - DNA, 25 bp, Homo sapien
tcacaccagtggttgggtttggagt

SEQ ID NO: 5405099 - DNA, 25 bp, Homo sapien
gatggattgacgcagagcctcactg

SEQ ID NO: 5405100 - DNA, 25 bp, Homo sapien
ttccatgaggtatcaggtctgcctt

SEQ ID NO: 5405101 - DNA, 25 bp, Homo sapien
gcctcactggtggaaggcaactcaa

SEQ ID NO: 5405102 - DNA, 25 bp, Homo sapien
gtggtcctggaatgtgaactactgc

SEQ ID NO: 5405103 - DNA, 25 bp, Homo sapien
cttgcaattcgttcagtggtcctgg

SEQ ID NO: 5405104 - DNA, 25 bp, Homo sapien
ggtcctggaatgtgaactactgcac

SEQ ID NO: 5405105 - DNA, 25 bp, Homo sapien
accctgcttgcaattcgttcagtgg

SEQ ID NO: 5405106 - DNA, 25 bp, Homo sapien
gcagaggagatggtcctgcagcctt

SEQ ID NO: 5405107 - DNA, 25 bp, Homo sapien
gaaataatatgtggttaactgccaa

SEQ ID NO: 5405108 - DNA, 25 bp, Homo sapien
aagtggacagcccacatctgagatg

SEQ ID NO: 5405109 - DNA, 25 bp, Homo sapien
ccttgggcttgatgggcggctctgg

SEQ ID NO: 5405110 - DNA, 25 bp, Homo sapien
gagggatacccactgacataattag

SEQ ID NO: 5405111 - DNA, 25 bp, Homo sapien
taattgcaggaagatatgtacacag

SEQ ID NO: 5405112 - DNA, 25 bp, Homo sapien
ccctcttgtgaagtagattttccag

SEQ ID NO: 5405113 - DNA, 25 bp, Homo sapien
ttccagtgttattacaatccacagg

SEQ ID NO: 5405114 - DNA, 25 bp, Homo sapien
tttgtagatagtcaacagaacttgc

SEQ ID NO: 5405115 - DNA, 25 bp, Homo sapien
catgtaggaaactgttagactcttc

SEQ ID NO: 5405116 - DNA, 25 bp, Homo sapien
gtaggaaactgttagactcttctgg

SEQ ID NO: 5405117 - DNA, 25 bp, Homo sapien
gatagtcaacagaacttgctgatgg

SEQ ID NO: 5405118 - DNA, 25 bp, Homo sapien
cgtctgtataaatgtgactatgtca

SEQ ID NO: 5405119 - DNA, 25 bp, Homo sapien
gatagtgggtaatctgcatgacacc

SEQ ID NO: 5405120 - DNA, 25 bp, Homo sapien
gcatgacacccatctttttgtattc

SEQ ID NO: 5405121 - DNA, 25 bp, Homo sapien
ttccttggccactagagttatcgtc

SEQ ID NO: 5405122 - DNA, 25 bp, Homo sapien
ctctgtgaagaggaaggaggaaaat

SEQ ID NO: 5405123 - DNA, 25 bp, Homo sapien
ctgtgaagaggaaggaggaaaatgg

SEQ ID NO: 5405124 - DNA, 25 bp, Homo sapien
tgaagaggaaggaggaaaatgggac

SEQ ID NO: 5405125 - DNA, 25 bp, Homo sapien
aagaggaaggaggaaaatgggactg

SEQ ID NO: 5405126 - DNA, 25 bp, Homo sapien
cgtcctacaaatgcaagaaaggtgg

SEQ ID NO: 5405127 - DNA, 25 bp, Homo sapien
tgccagcaccagacaactgggttga

SEQ ID NO: 5405128 - DNA, 25 bp, Homo sapien
cagctggaggcacctttgtctctaa

SEQ ID NO: 5405129 - DNA, 25 bp, Homo sapien
tatgatgctctatagcttgcagctg

SEQ ID NO: 5405130 - DNA, 25 bp, Homo sapien
aaattctcactacaggcacttccct

SEQ ID NO: 5405131 - DNA, 25 bp, Homo sapien
tccaaattctcactacaggcacttc

SEQ ID NO: 5405132 - DNA, 25 bp, Homo sapien
tgtgacaccaccctcagtttgcatc

SEQ ID NO: 5405133 - DNA, 25 bp, Homo sapien
accctcagtttgcatctggctccaa

SEQ ID NO: 5405134 - DNA, 25 bp, Homo sapien
gagtcaggatcccagaatgcaggcc

SEQ ID NO: 5405135 - DNA, 25 bp, Homo sapien
cacgtcatgagagagatacagtcca

SEQ ID NO: 5405136 - DNA, 25 bp, Homo sapien
taaagcctctttcgagtgtgcacag

SEQ ID NO: 5405137 - DNA, 25 bp, Homo sapien
cagaaatgagcttgcagccgtagcc

SEQ ID NO: 5405138 - DNA, 25 bp, Homo sapien
tcttctgaggcaagggatttttcca

SEQ ID NO: 5405139 - DNA, 25 bp, Homo sapien
tctttgacaggtttctgaactcgaa

SEQ ID NO: 5405140 - DNA, 25 bp, Homo sapien
gaactcgaaatattgttgcagggaa

SEQ ID NO: 5405141 - DNA, 25 bp, Homo sapien
gttctcctttcatgtgtgctgatgg

SEQ ID NO: 5405142 - DNA, 25 bp, Homo sapien
tcagtggtcaaggtggactcagccc

SEQ ID NO: 5405143 - DNA, 25 bp, Homo sapien
acgtcgattgacttcccagagctgg

SEQ ID NO: 5405144 - DNA, 25 bp, Homo sapien
aaagcatttccacggtagcctcacg

SEQ ID NO: 5405145 - DNA, 25 bp, Homo sapien
gcggttataacacacccaggctttg

SEQ ID NO: 5405146 - DNA, 25 bp, Homo sapien
tttcctaaaacaagactgtatcctg

SEQ ID NO: 5405147 - DNA, 25 bp, Homo sapien
gataaggatgtgttctaagacctct

SEQ ID NO: 5405148 - DNA, 25 bp, Homo sapien
ttggaccatctggtctctcctcttc

SEQ ID NO: 5405149 - DNA, 25 bp, Homo sapien
taagacctctccttctcgtcatctt

SEQ ID NO: 5405150 - DNA, 25 bp, Homo sapien
gaaatgccacattggttaagtgcca

SEQ ID NO: 5405151 - DNA, 25 bp, Homo sapien
tcattcataggacacttcactgcca

SEQ ID NO: 5405152 - DNA, 25 bp, Homo sapien
tttggaagcacaacgtccaggctgg

SEQ ID NO: 5405153 - DNA, 25 bp, Homo sapien
gagcaattaaaagcaaaccgcgaca

SEQ ID NO: 5405154 - DNA, 25 bp, Homo sapien
gaatacccttattcaggacaatcct

SEQ ID NO: 5405155 - DNA, 25 bp, Homo sapien
taactctctgtccttatgaataccc

SEQ ID NO: 5405156 - DNA, 25 bp, Homo sapien
cgtaatggcttgacttaactctctg

SEQ ID NO: 5405157 - DNA, 25 bp, Homo sapien
tcctcgtgatagcagtttgctgtgc

SEQ ID NO: 5405158 - DNA, 25 bp, Homo sapien
ttgtgtctgttttagtgcctttccc

SEQ ID NO: 5405159 - DNA, 25 bp, Homo sapien
ttggattgtgtctgttttagtgcct

SEQ ID NO: 5405160 - DNA, 25 bp, Homo sapien
ttttcatgtcagcagctttgctgga

SEQ ID NO: 5405161 - DNA, 25 bp, Homo sapien
gtcagcagctttgctggaagcagct

SEQ ID NO: 5405162 - DNA, 25 bp, Homo sapien
taatctggggctgacacgtctgcca

SEQ ID NO: 5405163 - DNA, 25 bp, Homo sapien
gtatgtctgtggcaatcttccttca

SEQ ID NO: 5405164 - DNA, 25 bp, Homo sapien
tgtctgtggcaatcttccttcaatg

SEQ ID NO: 5405165 - DNA, 25 bp, Homo sapien
tccttcaatgttctgggcactgtgg

SEQ ID NO: 5405166 - DNA, 25 bp, Homo sapien
tcacaaggcccgctcagatttaagg

SEQ ID NO: 5405167 - DNA, 25 bp, Homo sapien
cagagttcttacagggagaagagca

SEQ ID NO: 5405168 - DNA, 25 bp, Homo sapien
cacaatcatgggcaaggacacttaa

SEQ ID NO: 5405169 - DNA, 25 bp, Homo sapien
taggcactgcttctacttatggagg

SEQ ID NO: 5405170 - DNA, 25 bp, Homo sapien
ggataattccccatttgtcctccac

SEQ ID NO: 5405171 - DNA, 25 bp, Homo sapien
ccaacttgagtctcgatgggcttca

SEQ ID NO: 5405172 - DNA, 25 bp, Homo sapien
acttgagtctcgatgggcttcaagg

SEQ ID NO: 5405173 - DNA, 25 bp, Homo sapien
tgttccgctgctcggagcctctcac

SEQ ID NO: 5405174 - DNA, 25 bp, Homo sapien
tgacaagatccaagctccccaagga

SEQ ID NO: 5405175 - DNA, 25 bp, Homo sapien
ctatcactggcttccgcttctctcc

SEQ ID NO: 5405176 - DNA, 25 bp, Homo sapien
actggcttccgcttctctccccagc

SEQ ID NO: 5405177 - DNA, 25 bp, Homo sapien
tgtgacaagatccaagctccccaag

SEQ ID NO: 5405178 - DNA, 25 bp, Homo sapien
gactgctaacaacaagtcccattcc

SEQ ID NO: 5405179 - DNA, 25 bp, Homo sapien
gggcggtgactgctaacaacaagtc

SEQ ID NO: 5405180 - DNA, 25 bp, Homo sapien
agaaccatccgacatctcccatatg

SEQ ID NO: 5405181 - DNA, 25 bp, Homo sapien
tgtttgaacagaaccatccgacatc

SEQ ID NO: 5405182 - DNA, 25 bp, Homo sapien
gagcatgctcgtgagttatggagat

SEQ ID NO: 5405183 - DNA, 25 bp, Homo sapien
caggtggctttcctcacagtgagag

SEQ ID NO: 5405184 - DNA, 25 bp, Homo sapien
tcacagtgagagcatgctcgtgagt

SEQ ID NO: 5405185 - DNA, 25 bp, Homo sapien
gctttcctcacagtgagagcatgct

SEQ ID NO: 5405186 - DNA, 25 bp, Homo sapien
ttggctatgtgttgcacctgatgac

SEQ ID NO: 5405187 - DNA, 25 bp, Homo sapien
tgccttgctccccaagtggtgacaa

SEQ ID NO: 5405188 - DNA, 25 bp, Homo sapien
tcggctgtcatagggacaaattatg

SEQ ID NO: 5405189 - DNA, 25 bp, Homo sapien
tatgtgttgcacctgatgacatcag

SEQ ID NO: 5405190 - DNA, 25 bp, Homo sapien
cagaggcagctgaacttcacggtcc

SEQ ID NO: 5405191 - DNA, 25 bp, Homo sapien
caacaaagccgtccccagtggagct

SEQ ID NO: 5405192 - DNA, 25 bp, Homo sapien
gaacttcacggtccagaccaacaaa

SEQ ID NO: 5405193 - DNA, 25 bp, Homo sapien
accaacaaagccgtccccagtggag

SEQ ID NO: 5405194 - DNA, 25 bp, Homo sapien
gggccaacggacaatgaggactgaa

SEQ ID NO: 5405195 - DNA, 25 bp, Homo sapien
caccagtttctaaggctggggaaca

SEQ ID NO: 5405196 - DNA, 25 bp, Homo sapien
gacaatgaggactgaacatctgtga

SEQ ID NO: 5405197 - DNA, 25 bp, Homo sapien
gctggggaacatctgttgccattgt

SEQ ID NO: 5405198 - DNA, 25 bp, Homo sapien
tcccttggatggaaactgtatctcc

SEQ ID NO: 5405199 - DNA, 25 bp, Homo sapien
ggtgctatcgtttcaccatcattag

SEQ ID NO: 5405200 - DNA, 25 bp, Homo sapien
gtttcatcaatgtttccgtgtggtg

SEQ ID NO: 5405201 - DNA, 25 bp, Homo sapien
tcaatgtttccgtgtggtgctatcg

SEQ ID NO: 5405202 - DNA, 25 bp, Homo sapien
agctgcccccgtgtacagtcaacag

SEQ ID NO: 5405203 - DNA, 25 bp, Homo sapien
tcaatacgtaagtcctggagctgcc

SEQ ID NO: 5405204 - DNA, 25 bp, Homo sapien
ccaaatccctcaatacgtaagtcct

SEQ ID NO: 5405205 - DNA, 25 bp, Homo sapien
tccctcaatacgtaagtcctggagc

SEQ ID NO: 5405206 - DNA, 25 bp, Homo sapien
gagacgtaatgacgccttggatggc

SEQ ID NO: 5405207 - DNA, 25 bp, Homo sapien
gagcagcatgtctggcatcaggcag

SEQ ID NO: 5405208 - DNA, 25 bp, Homo sapien
taagctccatgcaagcgcagaggat

SEQ ID NO: 5405209 - DNA, 25 bp, Homo sapien
gaggatctcgacagaagctcttctg

SEQ ID NO: 5405210 - DNA, 25 bp, Homo sapien
tggaaaacaagtccaggtgaaaggc

SEQ ID NO: 5405211 - DNA, 25 bp, Homo sapien
actgtgtggagcctctatagccagg

SEQ ID NO: 5405212 - DNA, 25 bp, Homo sapien
caagtccaggtgaaaggctggctca

SEQ ID NO: 5405213 - DNA, 25 bp, Homo sapien
tctatagccaggtggaaaacaagtc

SEQ ID NO: 5405214 - DNA, 25 bp, Homo sapien
gcctacgtgtcctccaagaggctgc

SEQ ID NO: 5405215 - DNA, 25 bp, Homo sapien
ctcggcctacgtgtcctccaagagg

SEQ ID NO: 5405216 - DNA, 25 bp, Homo sapien
actcctcggcctacgtgtcctccaa

SEQ ID NO: 5405217 - DNA, 25 bp, Homo sapien
cccccgcaacgagcaagggctctgt

SEQ ID NO: 5405218 - DNA, 25 bp, Homo sapien
ggccctctggcgacagattatttga

SEQ ID NO: 5405219 - DNA, 25 bp, Homo sapien
gcctgaagcctggattggccctctg

SEQ ID NO: 5405220 - DNA, 25 bp, Homo sapien
tgaaggtcttcagtgggctgcctcc

SEQ ID NO: 5405221 - DNA, 25 bp, Homo sapien
tggcagctcctccatacacactgga

SEQ ID NO: 5405222 - DNA, 25 bp, Homo sapien
gatgatgcaggctagacgcaggaaa

SEQ ID NO: 5405223 - DNA, 25 bp, Homo sapien
tagacgcaggaaataggaactgctc

SEQ ID NO: 5405224 - DNA, 25 bp, Homo sapien
aataggaactgctctggaaaccagg

SEQ ID NO: 5405225 - DNA, 25 bp, Homo sapien
caggctagacgcaggaaataggaac

SEQ ID NO: 5405226 - DNA, 25 bp, Homo sapien
ccttatgaggagttttagatctgca

SEQ ID NO: 5405227 - DNA, 25 bp, Homo sapien
atccccttggataaagtccaacgag

SEQ ID NO: 5405228 - DNA, 25 bp, Homo sapien
tagatctgcagtgactaaatcccct

SEQ ID NO: 5405229 - DNA, 25 bp, Homo sapien
tccaacgaggtcttcttgttccaaa

SEQ ID NO: 5405230 - DNA, 25 bp, Homo sapien
gattcaacacgagtcctcttgcaca

SEQ ID NO: 5405231 - DNA, 25 bp, Homo sapien
cattctctccctcatgcacataaga

SEQ ID NO: 5405232 - DNA, 25 bp, Homo sapien
taagaattgctttatagtgggagat

SEQ ID NO: 5405233 - DNA, 25 bp, Homo sapien
attgtgtttgcagggtggaagctct

SEQ ID NO: 5405234 - DNA, 25 bp, Homo sapien
gcaatggattgccgcactctccagg

SEQ ID NO: 5405235 - DNA, 25 bp, Homo sapien
aatggattgccgcactctccaggcc

SEQ ID NO: 5405236 - DNA, 25 bp, Homo sapien
tgcagcaatggattgccgcactctc

SEQ ID NO: 5405237 - DNA, 25 bp, Homo sapien
cagcaatggattgccgcactctcca

SEQ ID NO: 5405238 - DNA, 25 bp, Homo sapien
taggccttttcttctccgagcactg

SEQ ID NO: 5405239 - DNA, 25 bp, Homo sapien
atggctccgcggcatcctcagggag

SEQ ID NO: 5405240 - DNA, 25 bp, Homo sapien
gaatgtttccattggcgcacttcac

SEQ ID NO: 5405241 - DNA, 25 bp, Homo sapien
cctggcgggaaaggccacagctgat

SEQ ID NO: 5405242 - DNA, 25 bp, Homo sapien
gatttgcgtgtctggatataacctc

SEQ ID NO: 5405243 - DNA, 25 bp, Homo sapien
cgtggaagtttctggatttgcgtgt

SEQ ID NO: 5405244 - DNA, 25 bp, Homo sapien
tctgagtgtctggacgtgtcggcgt

SEQ ID NO: 5405245 - DNA, 25 bp, Homo sapien
tcttcctgcatttgacagagaactg

SEQ ID NO: 5405246 - DNA, 25 bp, Homo sapien
catgggtacctgataagatgccaca

SEQ ID NO: 5405247 - DNA, 25 bp, Homo sapien
tgggccaccaacaaatcataagctg

SEQ ID NO: 5405248 - DNA, 25 bp, Homo sapien
cattcataaggagaaatggcatcag

SEQ ID NO: 5405249 - DNA, 25 bp, Homo sapien
tctgccaaacccagggtaactactg

SEQ ID NO: 5405250 - DNA, 25 bp, Homo sapien
ggcagtagagaaggcattgtcatcc

SEQ ID NO: 5405251 - DNA, 25 bp, Homo sapien
agagaaggcattgtcatcctcctcc

SEQ ID NO: 5405252 - DNA, 25 bp, Homo sapien
tagagaaggcattgtcatcctcctc

SEQ ID NO: 5405253 - DNA, 25 bp, Homo sapien
cagtagagaaggcattgtcatcctc

SEQ ID NO: 5405254 - DNA, 25 bp, Homo sapien
ctcatttggcaaagatgcccagaca

SEQ ID NO: 5405255 - DNA, 25 bp, Homo sapien
tccagagaggttgtaggcaaggaaa

SEQ ID NO: 5405256 - DNA, 25 bp, Homo sapien
ttcagatgtacccaactcatttggc

SEQ ID NO: 5405257 - DNA, 25 bp, Homo sapien
gacaaataaattcatgagaaggctg

SEQ ID NO: 5405258 - DNA, 25 bp, Homo sapien
acaggcctgggcttttcatgacgaa

SEQ ID NO: 5405259 - DNA, 25 bp, Homo sapien
gctgccctgtgctcctaagcacaca

SEQ ID NO: 5405260 - DNA, 25 bp, Homo sapien
catgacgaacataaagagaaggcaa

SEQ ID NO: 5405261 - DNA, 25 bp, Homo sapien
gagacagagttgggaccctgggcct

SEQ ID NO: 5405262 - DNA, 25 bp, Homo sapien
tcggaaagggggacatcctcctgca

SEQ ID NO: 5405263 - DNA, 25 bp, Homo sapien
agacctgctctcccctcggaaaggg

SEQ ID NO: 5405264 - DNA, 25 bp, Homo sapien
ggcactggcacacgctatggcaaat

SEQ ID NO: 5405265 - DNA, 25 bp, Homo sapien
cctttataaagccggtgcggtggtg

SEQ ID NO: 5405266 - DNA, 25 bp, Homo sapien
ccatgggccaccgtttcgtacaagc

SEQ ID NO: 5405267 - DNA, 25 bp, Homo sapien
acaaccgtcctacgttcctgatgac

SEQ ID NO: 5405268 - DNA, 25 bp, Homo sapien
tgcacaaccgtcctacgttcctgat

SEQ ID NO: 5405269 - DNA, 25 bp, Homo sapien
aagattttcacaccgagcctgcaca

SEQ ID NO: 5405270 - DNA, 25 bp, Homo sapien
agggatgtaagggcagggcttgcct

SEQ ID NO: 5405271 - DNA, 25 bp, Homo sapien
gggatgtaagggcagggcttgcctc

SEQ ID NO: 5405272 - DNA, 25 bp, Homo sapien
gagggatgtaagggcagggcttgcc

SEQ ID NO: 5405273 - DNA, 25 bp, Homo sapien
tccaacaggaacaagttcagctggg

SEQ ID NO: 5405274 - DNA, 25 bp, Homo sapien
acaggaacaagttcagctgggagtg

SEQ ID NO: 5405275 - DNA, 25 bp, Homo sapien
tctccaacaggaacaagttcagctg

SEQ ID NO: 5405276 - DNA, 25 bp, Homo sapien
caacaggaacaagttcagctgggag

SEQ ID NO: 5405277 - DNA, 25 bp, Homo sapien
aacgggcctgcgtttttggctgcct

SEQ ID NO: 5405278 - DNA, 25 bp, Homo sapien
ggagcagatgaatcggactatcaaa

SEQ ID NO: 5405279 - DNA, 25 bp, Homo sapien
tcagagttccagaaaggtggagcag

SEQ ID NO: 5405280 - DNA, 25 bp, Homo sapien
gattcctagatttcgactggcctta

SEQ ID NO: 5405281 - DNA, 25 bp, Homo sapien
cagaactgctgccggtcctcgcttt

SEQ ID NO: 5405282 - DNA, 25 bp, Homo sapien
gatccagaactgctgccggtcctcg

SEQ ID NO: 5405283 - DNA, 25 bp, Homo sapien
actgctgccggtcctcgctttgctg

SEQ ID NO: 5405284 - DNA, 25 bp, Homo sapien
gaactgctgccggtcctcgctttgc

SEQ ID NO: 5405285 - DNA, 25 bp, Homo sapien
gacatgcagtcgcatagcagagtca

SEQ ID NO: 5405286 - DNA, 25 bp, Homo sapien
catcggtttcacctcgcccacggtt

SEQ ID NO: 5405287 - DNA, 25 bp, Homo sapien
acctgtgctgggctgacatcggttt

SEQ ID NO: 5405288 - DNA, 25 bp, Homo sapien
gcccacggttcccaagatgattgtg

SEQ ID NO: 5405289 - DNA, 25 bp, Homo sapien
catgcgggctgcctggcacagatgt

SEQ ID NO: 5405290 - DNA, 25 bp, Homo sapien
ctctcatgcgggctgcctggcacag

SEQ ID NO: 5405291 - DNA, 25 bp, Homo sapien
tgcgggctgcctggcacagatgtct

SEQ ID NO: 5405292 - DNA, 25 bp, Homo sapien
ctcatgcgggctgcctggcacagat

SEQ ID NO: 5405293 - DNA, 25 bp, Homo sapien
cggaggctgagcctcccatgtgcac

SEQ ID NO: 5405294 - DNA, 25 bp, Homo sapien
gctgagcctcccatgtgcaccacgc

SEQ ID NO: 5405295 - DNA, 25 bp, Homo sapien
gaggctgagcctcccatgtgcacca

SEQ ID NO: 5405296 - DNA, 25 bp, Homo sapien
gctcatgtctcggcctgtcttcttg

SEQ ID NO: 5405297 - DNA, 25 bp, Homo sapien
agtgagtgctgagggacggttggga

SEQ ID NO: 5405298 - DNA, 25 bp, Homo sapien
ctgagggacggttgggagccttgtt

SEQ ID NO: 5405299 - DNA, 25 bp, Homo sapien
ttcagtgagtgctgagggacggttg

SEQ ID NO: 5405300 - DNA, 25 bp, Homo sapien
gagtgctgagggacggttgggagcc

SEQ ID NO: 5405301 - DNA, 25 bp, Homo sapien
cctatgcaggctgcctgactcagat

SEQ ID NO: 5405302 - DNA, 25 bp, Homo sapien
tggacatccagtctcacagcagagt

SEQ ID NO: 5405303 - DNA, 25 bp, Homo sapien
ttgtggacatccagtctcacagcag

SEQ ID NO: 5405304 - DNA, 25 bp, Homo sapien
gacatccagtctcacagcagagtca

SEQ ID NO: 5405305 - DNA, 25 bp, Homo sapien
cttctcaaggtgtccaagacacacg

SEQ ID NO: 5405306 - DNA, 25 bp, Homo sapien
cacggagccacggaatctcacaggt

SEQ ID NO: 5405307 - DNA, 25 bp, Homo sapien
ggagccacggaatctcacaggtgtc

SEQ ID NO: 5405308 - DNA, 25 bp, Homo sapien
tctcaaggtgtccaagacacacgga

SEQ ID NO: 5405309 - DNA, 25 bp, Homo sapien
cctgtccatgtccatgtatctggtc

SEQ ID NO: 5405310 - DNA, 25 bp, Homo sapien
tgtccatgtccatgtatctggtcac

SEQ ID NO: 5405311 - DNA, 25 bp, Homo sapien
gtccctgtccatgtccatgtatctg

SEQ ID NO: 5405312 - DNA, 25 bp, Homo sapien
ccctgtccctgtccatgtccatgta

SEQ ID NO: 5405313 - DNA, 25 bp, Homo sapien
catggttcccaagatgatcatggac

SEQ ID NO: 5405314 - DNA, 25 bp, Homo sapien
tggttcccaagatgatcatggacat

SEQ ID NO: 5405315 - DNA, 25 bp, Homo sapien
tcgcccatggttcccaagatgatca

SEQ ID NO: 5405316 - DNA, 25 bp, Homo sapien
gcccatggttcccaagatgatcatg

SEQ ID NO: 5405317 - DNA, 25 bp, Homo sapien
cccaggaatggtgtggcggcgtcag

SEQ ID NO: 5405318 - DNA, 25 bp, Homo sapien
aggaatggtgtggcggcgtcagtga

SEQ ID NO: 5405319 - DNA, 25 bp, Homo sapien
tggtgtggcggcgtcagtgatgtac

SEQ ID NO: 5405320 - DNA, 25 bp, Homo sapien
atggtgtggcggcgtcagtgatgta

SEQ ID NO: 5405321 - DNA, 25 bp, Homo sapien
cctgcagaggctgagtagcagaaca

SEQ ID NO: 5405322 - DNA, 25 bp, Homo sapien
gagtagcagaacagtggaatctcat

SEQ ID NO: 5405323 - DNA, 25 bp, Homo sapien
ccctgcagaggctgagtagcagaac

SEQ ID NO: 5405324 - DNA, 25 bp, Homo sapien
ggctgagtagcagaacagtggaatc

SEQ ID NO: 5405325 - DNA, 25 bp, Homo sapien
gctgcggtggcgagagtgccaaatc

SEQ ID NO: 5405326 - DNA, 25 bp, Homo sapien
gaccgggaattgaacgcaggctgcg

SEQ ID NO: 5405327 - DNA, 25 bp, Homo sapien
gaattgaacgcaggctgcggtggcg

SEQ ID NO: 5405328 - DNA, 25 bp, Homo sapien
acgcaggctgcggtggcgagagtgc

SEQ ID NO: 5405329 - DNA, 25 bp, Homo sapien
tcgcttataacatctagaggtgcct

SEQ ID NO: 5405330 - DNA, 25 bp, Homo sapien
tgcctttgttagaactccatttctg

SEQ ID NO: 5405331 - DNA, 25 bp, Homo sapien
cactgtcctcgcttataacatctag

SEQ ID NO: 5405332 - DNA, 25 bp, Homo sapien
tccagtctgtatggccagggtggca

SEQ ID NO: 5405333 - DNA, 25 bp, Homo sapien
gttcctgagtcattgtgatgaccat

SEQ ID NO: 5405334 - DNA, 25 bp, Homo sapien
gtggttgagcccttgaaggttcctg

SEQ ID NO: 5405335 - DNA, 25 bp, Homo sapien
ggttcctgagtcattgtgatgacca

SEQ ID NO: 5405336 - DNA, 25 bp, Homo sapien
aggttcctgagtcattgtgatgacc

SEQ ID NO: 5405337 - DNA, 25 bp, Homo sapien
ttgcagtcatgggagaccttgggta

SEQ ID NO: 5405338 - DNA, 25 bp, Homo sapien
caaacaaggttttggtgtgcgttgc

SEQ ID NO: 5405339 - DNA, 25 bp, Homo sapien
tgtgcgttgcagtcatgggagacct

SEQ ID NO: 5405340 - DNA, 25 bp, Homo sapien
ccttgggtagagagcaggttgtgac

SEQ ID NO: 5405341 - DNA, 25 bp, Homo sapien
cctgactgctagaggtaggtgccac

SEQ ID NO: 5405342 - DNA, 25 bp, Homo sapien
cagtatcagaggcagttcgtttcca

SEQ ID NO: 5405343 - DNA, 25 bp, Homo sapien
taaagtgacattcctggttcacctc

SEQ ID NO: 5405344 - DNA, 25 bp, Homo sapien
cagtttctcctgctatgctcagtat

SEQ ID NO: 5405345 - DNA, 25 bp, Homo sapien
aaaggagtcctcattagtggacagc

SEQ ID NO: 5405346 - DNA, 25 bp, Homo sapien
aaaaggagtcctcattagtggacag

SEQ ID NO: 5405347 - DNA, 25 bp, Homo sapien
gcctatcatcgaatttttctatcaa

SEQ ID NO: 5405348 - DNA, 25 bp, Homo sapien
attaaatagcctatcatcgaatttt

SEQ ID NO: 5405349 - DNA, 25 bp, Homo sapien
gacggtccgatttacatcctcctat

SEQ ID NO: 5405350 - DNA, 25 bp, Homo sapien
gatggtttggcactgacggtccgat

SEQ ID NO: 5405351 - DNA, 25 bp, Homo sapien
caaggatggtttggcactgacggtc

SEQ ID NO: 5405352 - DNA, 25 bp, Homo sapien
tggcactgacggtccgatttacatc

SEQ ID NO: 5405353 - DNA, 25 bp, Homo sapien
gatttgtcccccagacaaagcaggc

SEQ ID NO: 5405354 - DNA, 25 bp, Homo sapien
ccaaactggctgcaagaatgatttg

SEQ ID NO: 5405355 - DNA, 25 bp, Homo sapien
tatttgaacacaaccctcattgact

SEQ ID NO: 5405356 - DNA, 25 bp, Homo sapien
caaccctcattgacttaaaagtgac

SEQ ID NO: 5405357 - DNA, 25 bp, Homo sapien
cagaattcctataaatttcagggcc

SEQ ID NO: 5405358 - DNA, 25 bp, Homo sapien
cccttaggtcagaattcctataaat

SEQ ID NO: 5405359 - DNA, 25 bp, Homo sapien
aattcctataaatttcagggcctgc

SEQ ID NO: 5405360 - DNA, 25 bp, Homo sapien
ggtcagaattcctataaatttcagg

SEQ ID NO: 5405361 - DNA, 25 bp, Homo sapien
aaaataacttgtgcaggagaggtga

SEQ ID NO: 5405362 - DNA, 25 bp, Homo sapien
agagccccctggcttcactttcgca

SEQ ID NO: 5405363 - DNA, 25 bp, Homo sapien
taacttgtgcaggagaggtgaacca

SEQ ID NO: 5405364 - DNA, 25 bp, Homo sapien
gatggttcccatgtctctttaaata

SEQ ID NO: 5405365 - DNA, 25 bp, Homo sapien
tctttgaaaagagcacttcatggga

SEQ ID NO: 5405366 - DNA, 25 bp, Homo sapien
ttcatgggacccttgggagctgtca

SEQ ID NO: 5405367 - DNA, 25 bp, Homo sapien
tcaaatttatgtgattgagaatttc

SEQ ID NO: 5405368 - DNA, 25 bp, Homo sapien
tgcccgggggcagaagattaactgc

SEQ ID NO: 5405369 - DNA, 25 bp, Homo sapien
ggcgatgtaacaggcagtgcctctc

SEQ ID NO: 5405370 - DNA, 25 bp, Homo sapien
ttcagagtttgtggctcagaactag

SEQ ID NO: 5405371 - DNA, 25 bp, Homo sapien
gggacttcagagtttgtggctcaga

SEQ ID NO: 5405372 - DNA, 25 bp, Homo sapien
tctctgcaggcgactgggggacttc

SEQ ID NO: 5405373 - DNA, 25 bp, Homo sapien
atacacggagctagttggggagaca

SEQ ID NO: 5405374 - DNA, 25 bp, Homo sapien
atcctgaatatacacggagctagtt

SEQ ID NO: 5405375 - DNA, 25 bp, Homo sapien
cctgaatatacacggagctagttgg

SEQ ID NO: 5405376 - DNA, 25 bp, Homo sapien
tcattcaccaggatcctgaatatac

SEQ ID NO: 5405377 - DNA, 25 bp, Homo sapien
caagatcaggtttacagctgctggt

SEQ ID NO: 5405378 - DNA, 25 bp, Homo sapien
gaggaacttgcaaaggaaagatgca

SEQ ID NO: 5405379 - DNA, 25 bp, Homo sapien
tcccctctaagagccatggccagag

SEQ ID NO: 5405380 - DNA, 25 bp, Homo sapien
ttgtggctggcggtttatgtcccct

SEQ ID NO: 5405381 - DNA, 25 bp, Homo sapien
gggagctatatctgctcttgcatac

SEQ ID NO: 5405382 - DNA, 25 bp, Homo sapien
cagagaggaccaccctaggtttgga

SEQ ID NO: 5405383 - DNA, 25 bp, Homo sapien
tgagaggcacggtcattttacttga

SEQ ID NO: 5405384 - DNA, 25 bp, Homo sapien
ctgccagtccagcaagggcaaggat

SEQ ID NO: 5405385 - DNA, 25 bp, Homo sapien
gaacttagagaccacatttgatgct

SEQ ID NO: 5405386 - DNA, 25 bp, Homo sapien
catggagaggatagagcaagctccc

SEQ ID NO: 5405387 - DNA, 25 bp, Homo sapien
gcaattacatgctgaggcatggaga

SEQ ID NO: 5405388 - DNA, 25 bp, Homo sapien
taatttaattccctgaacttagaga

SEQ ID NO: 5405389 - DNA, 25 bp, Homo sapien
cacttggcagctaggtaggtagccc

SEQ ID NO: 5405390 - DNA, 25 bp, Homo sapien
ggtaactgactcaagggcagccaag

SEQ ID NO: 5405391 - DNA, 25 bp, Homo sapien
tattccacagctgattttgccagag

SEQ ID NO: 5405392 - DNA, 25 bp, Homo sapien
ggtagccctgaatggtcctcggaca

SEQ ID NO: 5405393 - DNA, 25 bp, Homo sapien
catcatccacaatatcaacattcct

SEQ ID NO: 5405394 - DNA, 25 bp, Homo sapien
tttcttcatcatccacaatatcaac

SEQ ID NO: 5405395 - DNA, 25 bp, Homo sapien
tcatccacaatatcaacattcctca

SEQ ID NO: 5405396 - DNA, 25 bp, Homo sapien
tcttcatcatccacaatatcaacat

SEQ ID NO: 5405397 - DNA, 25 bp, Homo sapien
tgcgcgggtcgcgaagttgccgaga

SEQ ID NO: 5405398 - DNA, 25 bp, Homo sapien
cggagtgttggggtgcgcgggtcgc

SEQ ID NO: 5405399 - DNA, 25 bp, Homo sapien
gcgggtcgcgaagttgccgagagaa

SEQ ID NO: 5405400 - DNA, 25 bp, Homo sapien
gggtgcgcgggtcgcgaagttgccg

SEQ ID NO: 5405401 - DNA, 25 bp, Homo sapien
cagcagctgttcatacctctccatg

SEQ ID NO: 5405402 - DNA, 25 bp, Homo sapien
cagctgttcatacctctccatgtgt

SEQ ID NO: 5405403 - DNA, 25 bp, Homo sapien
ttataaaacatcaaccagcagctgt

SEQ ID NO: 5405404 - DNA, 25 bp, Homo sapien
caaccagcagctgttcatacctctc

SEQ ID NO: 5405405 - DNA, 25 bp, Homo sapien
tacattctctgccaaggttgttgtg

SEQ ID NO: 5405406 - DNA, 25 bp, Homo sapien
cattctctgccaaggttgttgtgca

SEQ ID NO: 5405407 - DNA, 25 bp, Homo sapien
gccaaggttgttgtgcagcacctac

SEQ ID NO: 5405408 - DNA, 25 bp, Homo sapien
tctgccaaggttgttgtgcagcacc

SEQ ID NO: 5405409 - DNA, 25 bp, Homo sapien
tgtgccctgttgagcctcgaggcgt

SEQ ID NO: 5405410 - DNA, 25 bp, Homo sapien
gccacagcacagttgacgctatgtg

SEQ ID NO: 5405411 - DNA, 25 bp, Homo sapien
catgctccgaggtgagcacagatgt

SEQ ID NO: 5405412 - DNA, 25 bp, Homo sapien
tgtaggtgatgtaggcatgctccga

SEQ ID NO: 5405413 - DNA, 25 bp, Homo sapien
gcctatagtgcaagctactgaggct

SEQ ID NO: 5405414 - DNA, 25 bp, Homo sapien
cagcacttagaaccatgtaagtgct

SEQ ID NO: 5405415 - DNA, 25 bp, Homo sapien
acttagaacagtgtacagcacttag

SEQ ID NO: 5405416 - DNA, 25 bp, Homo sapien
aatttctgtatctattaatgctagt

SEQ ID NO: 5405417 - DNA, 25 bp, Homo sapien
gaaactgcccctctctattgtggcg

SEQ ID NO: 5405418 - DNA, 25 bp, Homo sapien
gaggctactctttcggtgttccaaa

SEQ ID NO: 5405419 - DNA, 25 bp, Homo sapien
aattccacagtagagacagcctgcc

SEQ ID NO: 5405420 - DNA, 25 bp, Homo sapien
gaaacaggctgacatattgaaggca

SEQ ID NO: 5405421 - DNA, 25 bp, Homo sapien
tgctaatcttctctgtatcagtcca

SEQ ID NO: 5405422 - DNA, 25 bp, Homo sapien
tttgcgtgttatccttgtgcaggga

SEQ ID NO: 5405423 - DNA, 25 bp, Homo sapien
gcgtgttatccttgtgcagggacca

SEQ ID NO: 5405424 - DNA, 25 bp, Homo sapien
cttctctgtatcagtccagttttag

SEQ ID NO: 5405425 - DNA, 25 bp, Homo sapien
gaagtggttgataagaagctctctg

SEQ ID NO: 5405426 - DNA, 25 bp, Homo sapien
tagctttgaagtggttgataagaag

SEQ ID NO: 5405427 - DNA, 25 bp, Homo sapien
attctcctctattcagagaagacac

SEQ ID NO: 5405428 - DNA, 25 bp, Homo sapien
gattttcctcagttttcgccttaga

SEQ ID NO: 5405429 - DNA, 25 bp, Homo sapien
ttcaatgctgcagaaccctttacag

SEQ ID NO: 5405430 - DNA, 25 bp, Homo sapien
ctgagtggtctttgtcacgttgttt

SEQ ID NO: 5405431 - DNA, 25 bp, Homo sapien
gggcctcacattgtagtcaaagcag

SEQ ID NO: 5405432 - DNA, 25 bp, Homo sapien
tctttgtcacgttgtttagcctctc

SEQ ID NO: 5405433 - DNA, 25 bp, Homo sapien
tcctccggacagagggtctgagagc

SEQ ID NO: 5405434 - DNA, 25 bp, Homo sapien
gggtgcacacgcatctgtgggtcct

SEQ ID NO: 5405435 - DNA, 25 bp, Homo sapien
catctgtgggtcctccggacagagg

SEQ ID NO: 5405436 - DNA, 25 bp, Homo sapien
agatttaattttaagggtgcacacg

SEQ ID NO: 5405437 - DNA, 25 bp, Homo sapien
tcttggttttgccaatccccggtca

SEQ ID NO: 5405438 - DNA, 25 bp, Homo sapien
tcttcttgggaggaacttacgggca

SEQ ID NO: 5405439 - DNA, 25 bp, Homo sapien
aaactctgtgcctctcgtctcatag

SEQ ID NO: 5405440 - DNA, 25 bp, Homo sapien
gcttggatagtgagcatctgaggaa

SEQ ID NO: 5405441 - DNA, 25 bp, Homo sapien
ggaccatccctggatggttcttggg

SEQ ID NO: 5405442 - DNA, 25 bp, Homo sapien
tctggaccatccctggatggttctt

SEQ ID NO: 5405443 - DNA, 25 bp, Homo sapien
tctctggaccatccctggatggttc

SEQ ID NO: 5405444 - DNA, 25 bp, Homo sapien
gatcagatcctgcattctctggacc

SEQ ID NO: 5405445 - DNA, 25 bp, Homo sapien
ggacgtcatagatgggaaaatccac

SEQ ID NO: 5405446 - DNA, 25 bp, Homo sapien
tttgatccaggacgtcatagatggg

SEQ ID NO: 5405447 - DNA, 25 bp, Homo sapien
gatccaggacgtcatagatgggaaa

SEQ ID NO: 5405448 - DNA, 25 bp, Homo sapien
gcacttttgatccaggacgtcatag

SEQ ID NO: 5405449 - DNA, 25 bp, Homo sapien
taggagtttcctggcatgtgtacca

SEQ ID NO: 5405450 - DNA, 25 bp, Homo sapien
tcctggcatgtgtaccatttctcct

SEQ ID NO: 5405451 - DNA, 25 bp, Homo sapien
ggagtttcctggcatgtgtaccatt

SEQ ID NO: 5405452 - DNA, 25 bp, Homo sapien
gtttcctggcatgtgtaccatttct

SEQ ID NO: 5405453 - DNA, 25 bp, Homo sapien
ccttgtagacaaaatggaggcatga

SEQ ID NO: 5405454 - DNA, 25 bp, Homo sapien
cacagggtagcaacgtacagatgta

SEQ ID NO: 5405455 - DNA, 25 bp, Homo sapien
tcagttgtacttgcctttgtgtccc

SEQ ID NO: 5405456 - DNA, 25 bp, Homo sapien
gatgtatgtcgaatgaaaacctgca

SEQ ID NO: 5405457 - DNA, 25 bp, Homo sapien
aggcatctgcaagtgtgcccacacc

SEQ ID NO: 5405458 - DNA, 25 bp, Homo sapien
atctgcaagtgtgcccacacccaac

SEQ ID NO: 5405459 - DNA, 25 bp, Homo sapien
gcaggcatctgcaagtgtgcccaca

SEQ ID NO: 5405460 - DNA, 25 bp, Homo sapien
gcatctgcaagtgtgcccacaccca

SEQ ID NO: 5405461 - DNA, 25 bp, Homo sapien
ttagagcctgagctgaccggttgtg

SEQ ID NO: 5405462 - DNA, 25 bp, Homo sapien
tctagctgtgatccctgttcctcag

SEQ ID NO: 5405463 - DNA, 25 bp, Homo sapien
tgttcctcagggttaccttccaggc

SEQ ID NO: 5405464 - DNA, 25 bp, Homo sapien
taaagctcttaaacgtgtgaagtgg

SEQ ID NO: 5405465 - DNA, 25 bp, Homo sapien
tgctataagactggcccctgtggtt

SEQ ID NO: 5405466 - DNA, 25 bp, Homo sapien
aagcctcgaggtggtttctcaaaga

SEQ ID NO: 5405467 - DNA, 25 bp, Homo sapien
caagtttgtcgggtcagagggcatc

SEQ ID NO: 5405468 - DNA, 25 bp, Homo sapien
tgggaaaactcgtgacctggccgaa

SEQ ID NO: 5405469 - DNA, 25 bp, Homo sapien
gatactgccctactccttgtatgga

SEQ ID NO: 5405470 - DNA, 25 bp, Homo sapien
ctgtgatggagtaagacagcagatg

SEQ ID NO: 5405471 - DNA, 25 bp, Homo sapien
cacttccgcttctgccgattccagt

SEQ ID NO: 5405472 - DNA, 25 bp, Homo sapien
cagtggacatagctgatgtagcagt

SEQ ID NO: 5405473 - DNA, 25 bp, Homo sapien
ttcttggagggtgaagaataacaca

SEQ ID NO: 5405474 - DNA, 25 bp, Homo sapien
atggatccatgaggctgcttcttgg

SEQ ID NO: 5405475 - DNA, 25 bp, Homo sapien
gaataacacaggacatgcacagccc

SEQ ID NO: 5405476 - DNA, 25 bp, Homo sapien
gggtgaagaataacacaggacatgc

SEQ ID NO: 5405477 - DNA, 25 bp, Homo sapien
ttcaactgggtttgtcagtagccac

SEQ ID NO: 5405478 - DNA, 25 bp, Homo sapien
ccatatccagagaaaagtgacgctt

SEQ ID NO: 5405479 - DNA, 25 bp, Homo sapien
tcttagggcttttctgtccaggcgc

SEQ ID NO: 5405480 - DNA, 25 bp, Homo sapien
cgctgagcaaaagggagtgtgtctt

SEQ ID NO: 5405481 - DNA, 25 bp, Homo sapien
tgatggcacagccgttgttctgcca

SEQ ID NO: 5405482 - DNA, 25 bp, Homo sapien
cttgatggcacagccgttgttctgc

SEQ ID NO: 5405483 - DNA, 25 bp, Homo sapien
tcttgatggcacagccgttgttctg

SEQ ID NO: 5405484 - DNA, 25 bp, Homo sapien
gatggcacagccgttgttctgccat

SEQ ID NO: 5405485 - DNA, 25 bp, Homo sapien
tttaaggttgtgaagtttaagcaga

SEQ ID NO: 5405486 - DNA, 25 bp, Homo sapien
aaggttgtgaagtttaagcagattt

SEQ ID NO: 5405487 - DNA, 25 bp, Homo sapien
tgggctcctgggtgtaagcagtcct

SEQ ID NO: 5405488 - DNA, 25 bp, Homo sapien
taaggttgtgaagtttaagcagatt

SEQ ID NO: 5405489 - DNA, 25 bp, Homo sapien
tatgacctgtggttgacctgattga

SEQ ID NO: 5405490 - DNA, 25 bp, Homo sapien
tgtggagccagttatgattaacagc

SEQ ID NO: 5405491 - DNA, 25 bp, Homo sapien
gattaacagctgtctgcatcctgga

SEQ ID NO: 5405492 - DNA, 25 bp, Homo sapien
ccactcttcagaaccagtggaggtg

SEQ ID NO: 5405493 - DNA, 25 bp, Homo sapien
ctctgttttgtcctgaatgctgaac

SEQ ID NO: 5405494 - DNA, 25 bp, Homo sapien
taaaaattcgacatcaacctgagct

SEQ ID NO: 5405495 - DNA, 25 bp, Homo sapien
gactgtagttgctttaaccaataaa

SEQ ID NO: 5405496 - DNA, 25 bp, Homo sapien
tttagagtaaggtaagcaatgactg

SEQ ID NO: 5405497 - DNA, 25 bp, Homo sapien
gtgggattgttagaggccccttgca

SEQ ID NO: 5405498 - DNA, 25 bp, Homo sapien
cctgttgtgggattgttagaggccc

SEQ ID NO: 5405499 - DNA, 25 bp, Homo sapien
agaggccccttgcatgtggtctgac

SEQ ID NO: 5405500 - DNA, 25 bp, Homo sapien
cttgcatgtggtctgacatgccagc

SEQ ID NO: 5405501 - DNA, 25 bp, Homo sapien
ggacaaggacgtaggtgacaatagt

SEQ ID NO: 5405502 - DNA, 25 bp, Homo sapien
ttgtacagatgccagagatgccaga

SEQ ID NO: 5405503 - DNA, 25 bp, Homo sapien
gacgtaggtgacaatagtgtatgtg

SEQ ID NO: 5405504 - DNA, 25 bp, Homo sapien
gacatggacaaggacgtaggtgaca

SEQ ID NO: 5405505 - DNA, 25 bp, Homo sapien
ggctgggatagtcttgacctggtca

SEQ ID NO: 5405506 - DNA, 25 bp, Homo sapien
gatcttggcccatgagtgcaggtag

SEQ ID NO: 5405507 - DNA, 25 bp, Homo sapien
tgtatgcagatgcatgccagagcag

SEQ ID NO: 5405508 - DNA, 25 bp, Homo sapien
caggtgctcccttccgatggtgatt

SEQ ID NO: 5405509 - DNA, 25 bp, Homo sapien
tcccagtggatcttcgcaaacaagg

SEQ ID NO: 5405510 - DNA, 25 bp, Homo sapien
gtctttggattaggatgaggtccca

SEQ ID NO: 5405511 - DNA, 25 bp, Homo sapien
cgttgcaccaatgaataaaggctgt

SEQ ID NO: 5405512 - DNA, 25 bp, Homo sapien
gaggtcccagtagtagtgactcaaa

SEQ ID NO: 5405513 - DNA, 25 bp, Homo sapien
tgtgatggctcctgactgtgtggcc

SEQ ID NO: 5405514 - DNA, 25 bp, Homo sapien
tcccttgtgccagtatccttttgtg

SEQ ID NO: 5405515 - DNA, 25 bp, Homo sapien
tcatgtgtgattggcgcttggtgac

SEQ ID NO: 5405516 - DNA, 25 bp, Homo sapien
tgttccgtatagatggcacagcgat

SEQ ID NO: 5405517 - DNA, 25 bp, Homo sapien
aggggtaaagttggatcctagcact

SEQ ID NO: 5405518 - DNA, 25 bp, Homo sapien
caaggggtaaagttggatcctagca

SEQ ID NO: 5405519 - DNA, 25 bp, Homo sapien
ttaggaggccaaggtgggtggattg

SEQ ID NO: 5405520 - DNA, 25 bp, Homo sapien
ggtaaagttggatcctagcacttta

SEQ ID NO: 5405521 - DNA, 25 bp, Homo sapien
ggtgatatgagtcttactgacttgg

SEQ ID NO: 5405522 - DNA, 25 bp, Homo sapien
tgcaccctgctctttaatgctttat

SEQ ID NO: 5405523 - DNA, 25 bp, Homo sapien
taacaaatacttaggtgatatgagt

SEQ ID NO: 5405524 - DNA, 25 bp, Homo sapien
tggtcagaggtaaacataacttatt

SEQ ID NO: 5405525 - DNA, 25 bp, Homo sapien
cttttagtgttctcggtgctgtgga

SEQ ID NO: 5405526 - DNA, 25 bp, Homo sapien
ttctcggtgctgtggaattgtacac

SEQ ID NO: 5405527 - DNA, 25 bp, Homo sapien
gaattgtacacatagaatctgccca

SEQ ID NO: 5405528 - DNA, 25 bp, Homo sapien
ctattactactgagccaacttttag

SEQ ID NO: 5405529 - DNA, 25 bp, Homo sapien
ttgtttcaattcttggactaggcca

SEQ ID NO: 5405530 - DNA, 25 bp, Homo sapien
ttcaattcttggactaggccaggcg

SEQ ID NO: 5405531 - DNA, 25 bp, Homo sapien
tagtttaacactcattaggtgttta

SEQ ID NO: 5405532 - DNA, 25 bp, Homo sapien
caattcttggactaggccaggcgcg

SEQ ID NO: 5405533 - DNA, 25 bp, Homo sapien
gagcttgatacctggaagctttgga

SEQ ID NO: 5405534 - DNA, 25 bp, Homo sapien
cacaggattgtgcaggtaaatgaga

SEQ ID NO: 5405535 - DNA, 25 bp, Homo sapien
tctgcatctggcatagagtaagagc

SEQ ID NO: 5405536 - DNA, 25 bp, Homo sapien
gggtcatagtacttagtcacaggat

SEQ ID NO: 5405537 - DNA, 25 bp, Homo sapien
tgagggtaaaactcagcctcgtggg

SEQ ID NO: 5405538 - DNA, 25 bp, Homo sapien
aatcaaaggcggctcagcacagaag

SEQ ID NO: 5405539 - DNA, 25 bp, Homo sapien
gcttattagatagctcaccctaggg

SEQ ID NO: 5405540 - DNA, 25 bp, Homo sapien
taccgtacgaatgcaagctatcggg

SEQ ID NO: 5405541 - DNA, 25 bp, Homo sapien
agtgtctgttccgtagtttctcggc

SEQ ID NO: 5405542 - DNA, 25 bp, Homo sapien
tcagtgtctgttccgtagtttctcg

SEQ ID NO: 5405543 - DNA, 25 bp, Homo sapien
gtcagtgtctgttccgtagtttctc

SEQ ID NO: 5405544 - DNA, 25 bp, Homo sapien
gtctgttccgtagtttctcggcagc

SEQ ID NO: 5405545 - DNA, 25 bp, Homo sapien
cacgatggggagtaagccagtaccc

SEQ ID NO: 5405546 - DNA, 25 bp, Homo sapien
ccagtaccctcaagggtgcgtggga

SEQ ID NO: 5405547 - DNA, 25 bp, Homo sapien
tatcctcggcaaagcaacacgatgg

SEQ ID NO: 5405548 - DNA, 25 bp, Homo sapien
tcagtcagaactatcctcggcaaag

SEQ ID NO: 5405549 - DNA, 25 bp, Homo sapien
tgatgtgggtgggttccggagacca

SEQ ID NO: 5405550 - DNA, 25 bp, Homo sapien
ctgatgtgggtgggttccggagacc

SEQ ID NO: 5405551 - DNA, 25 bp, Homo sapien
cacagacccctgggttttgcccctg

SEQ ID NO: 5405552 - DNA, 25 bp, Homo sapien
agacccctgggttttgcccctgatg

SEQ ID NO: 5405553 - DNA, 25 bp, Homo sapien
cagatttggattctgccctgtattc

SEQ ID NO: 5405554 - DNA, 25 bp, Homo sapien
cccagatttggattctgccctgtat

SEQ ID NO: 5405555 - DNA, 25 bp, Homo sapien
gatttggattctgccctgtattcac

SEQ ID NO: 5405556 - DNA, 25 bp, Homo sapien
ttacccagatttggattctgccctg

SEQ ID NO: 5405557 - DNA, 25 bp, Homo sapien
catgtctgtcggcagagggagccac

SEQ ID NO: 5405558 - DNA, 25 bp, Homo sapien
caggccccatcatggccattgggag

SEQ ID NO: 5405559 - DNA, 25 bp, Homo sapien
tagatagctcggtgaaaatgggttc

SEQ ID NO: 5405560 - DNA, 25 bp, Homo sapien
gatgcctgttgccttataacacaga

SEQ ID NO: 5405561 - DNA, 25 bp, Homo sapien
ttgtctcccagtgcaagtacagttt

SEQ ID NO: 5405562 - DNA, 25 bp, Homo sapien
cagtgcaagtacagttttctggaag

SEQ ID NO: 5405563 - DNA, 25 bp, Homo sapien
cagtgttggaggcttgtcccagaca

SEQ ID NO: 5405564 - DNA, 25 bp, Homo sapien
ttggaggcttgtcccagacaccaag

SEQ ID NO: 5405565 - DNA, 25 bp, Homo sapien
tcttgtgttcgtaagtccctgtggc

SEQ ID NO: 5405566 - DNA, 25 bp, Homo sapien
tccctgtggctgctaaaacttgaga

SEQ ID NO: 5405567 - DNA, 25 bp, Homo sapien
tgcattaaccctcactggagcctgg

SEQ ID NO: 5405568 - DNA, 25 bp, Homo sapien
cattggccagaaggcaaggtactgc

SEQ ID NO: 5405569 - DNA, 25 bp, Homo sapien
catcatggataagactgcgaggttc

SEQ ID NO: 5405570 - DNA, 25 bp, Homo sapien
aaggttgtaacccacgttcagagcg

SEQ ID NO: 5405571 - DNA, 25 bp, Homo sapien
aacacgccgttcatgggcatcatgg

SEQ ID NO: 5405572 - DNA, 25 bp, Homo sapien
gaaagcaagtgccaaattccagtcc

SEQ ID NO: 5405573 - DNA, 25 bp, Homo sapien
taacaatggtagtgctcctggaaca

SEQ ID NO: 5405574 - DNA, 25 bp, Homo sapien
tggtggtcaagtggattcaagctaa

SEQ ID NO: 5405575 - DNA, 25 bp, Homo sapien
taagaccagcattcttagtggcgct

SEQ ID NO: 5405576 - DNA, 25 bp, Homo sapien
catttggagtcatgattggtggtca

SEQ ID NO: 5405577 - DNA, 25 bp, Homo sapien
taccagtaacagcactttatctcat

SEQ ID NO: 5405578 - DNA, 25 bp, Homo sapien
gatgtcattcttcaacgtttgttcc

SEQ ID NO: 5405579 - DNA, 25 bp, Homo sapien
gttttgctgtaactactatggctta

SEQ ID NO: 5405580 - DNA, 25 bp, Homo sapien
cctttgaggtgctacttaagtccaa

SEQ ID NO: 5405581 - DNA, 25 bp, Homo sapien
tttacctataaatcattcaaatgag

SEQ ID NO: 5405582 - DNA, 25 bp, Homo sapien
aaaaggcttttatagtaagtccatg

SEQ ID NO: 5405583 - DNA, 25 bp, Homo sapien
gcttttatagtaagtccatgtgttt

SEQ ID NO: 5405584 - DNA, 25 bp, Homo sapien
tatttctatatagctgaagattctt

SEQ ID NO: 5405585 - DNA, 25 bp, Homo sapien
tgtaagtaccgctgaaggaagaaca

SEQ ID NO: 5405586 - DNA, 25 bp, Homo sapien
ggacttgtacgtttctttttgctga

SEQ ID NO: 5405587 - DNA, 25 bp, Homo sapien
gaaggaagaacaagatttgtcatgg

SEQ ID NO: 5405588 - DNA, 25 bp, Homo sapien
tggccattttcagagtcctatttgg

SEQ ID NO: 5405589 - DNA, 25 bp, Homo sapien
tactcccctaaggatttgacagcga

SEQ ID NO: 5405590 - DNA, 25 bp, Homo sapien
taaacactttgaacagtaccactga

SEQ ID NO: 5405591 - DNA, 25 bp, Homo sapien
gggagtgaggataaactgcccatca

SEQ ID NO: 5405592 - DNA, 25 bp, Homo sapien
gactgggaccctgtcaaattcagac

SEQ ID NO: 5405593 - DNA, 25 bp, Homo sapien
gtaacatctcataggaccagcaacc

SEQ ID NO: 5405594 - DNA, 25 bp, Homo sapien
gattcccagagagcgaagttttccc

SEQ ID NO: 5405595 - DNA, 25 bp, Homo sapien
ccacagggtggtcttattgtcaaaa

SEQ ID NO: 5405596 - DNA, 25 bp, Homo sapien
tccttacatcagcttccggaatagc

SEQ ID NO: 5405597 - DNA, 25 bp, Homo sapien
tgattggcattaatgacactgaccg

SEQ ID NO: 5405598 - DNA, 25 bp, Homo sapien
acctttgggctactaataatgctgc

SEQ ID NO: 5405599 - DNA, 25 bp, Homo sapien
ccagggtcacacaggtagggagcaa

SEQ ID NO: 5405600 - DNA, 25 bp, Homo sapien
tagggagcaactgacctgggattta

SEQ ID NO: 5405601 - DNA, 25 bp, Homo sapien
gaagtcagagtataaccaagtataa

SEQ ID NO: 5405602 - DNA, 25 bp, Homo sapien
gagtataaccaagtataacccaaca

SEQ ID NO: 5405603 - DNA, 25 bp, Homo sapien
ccaagtataacccaacacggtgaag

SEQ ID NO: 5405604 - DNA, 25 bp, Homo sapien
agtataacccaacacggtgaaggct

SEQ ID NO: 5405605 - DNA, 25 bp, Homo sapien
cgatgaccggatctttcataagttc

SEQ ID NO: 5405606 - DNA, 25 bp, Homo sapien
ctgatgcgatgaccggatctttcat

SEQ ID NO: 5405607 - DNA, 25 bp, Homo sapien
tcataagttctctagttattggaca

SEQ ID NO: 5405608 - DNA, 25 bp, Homo sapien
ttcctcagcactttactacgcagtc

SEQ ID NO: 5405609 - DNA, 25 bp, Homo sapien
tgtaagtaccgatgccacagcagcc

SEQ ID NO: 5405610 - DNA, 25 bp, Homo sapien
tactctcccaactttgtcctgtaag

SEQ ID NO: 5405611 - DNA, 25 bp, Homo sapien
gaggccagttaccaagacagcacga

SEQ ID NO: 5405612 - DNA, 25 bp, Homo sapien
ccagttaccaagacagcacgagagc

SEQ ID NO: 5405613 - DNA, 25 bp, Homo sapien
caaaacccgaggatactaagacagg

SEQ ID NO: 5405614 - DNA, 25 bp, Homo sapien
ggcaacaagtgaaatctacataacg

SEQ ID NO: 5405615 - DNA, 25 bp, Homo sapien
tacttaacaataaatgcagttacat

SEQ ID NO: 5405616 - DNA, 25 bp, Homo sapien
ctacataacgaattaataagaaccg

SEQ ID NO: 5405617 - DNA, 25 bp, Homo sapien
tgtaagattcaacagttcttttcca

SEQ ID NO: 5405618 - DNA, 25 bp, Homo sapien
caaagccatgttgagacatcctcct

SEQ ID NO: 5405619 - DNA, 25 bp, Homo sapien
caattttcaaatcatcagccagact

SEQ ID NO: 5405620 - DNA, 25 bp, Homo sapien
gatcttttaaatcttgtgcacaaag

SEQ ID NO: 5405621 - DNA, 25 bp, Homo sapien
ttcagctgatgttctgtgcgccttg

SEQ ID NO: 5405622 - DNA, 25 bp, Homo sapien
ccaatcttcggtaaattgcttcagc

SEQ ID NO: 5405623 - DNA, 25 bp, Homo sapien
ctgaccaatcttcggtaaattgctt

SEQ ID NO: 5405624 - DNA, 25 bp, Homo sapien
tcttcggtaaattgcttcagctgat

SEQ ID NO: 5405625 - DNA, 25 bp, Homo sapien
gtttccaggtcaaattgccagatgt

SEQ ID NO: 5405626 - DNA, 25 bp, Homo sapien
tttccaggtcaaattgccagatgtt

SEQ ID NO: 5405627 - DNA, 25 bp, Homo sapien
tgcaaaagcacaagttgtgacatac

SEQ ID NO: 5405628 - DNA, 25 bp, Homo sapien
ccagtagcaagtaaaagggtattag

SEQ ID NO: 5405629 - DNA, 25 bp, Homo sapien
gcaagtaaaagggtattaggtgcaa

SEQ ID NO: 5405630 - DNA, 25 bp, Homo sapien
ttaggtgcaaaagcacaagttgtga

SEQ ID NO: 5405631 - DNA, 25 bp, Homo sapien
gtcaatgtgtgaagtatattctcag

SEQ ID NO: 5405632 - DNA, 25 bp, Homo sapien
atgtgtgaagtatattctcagtatt

SEQ ID NO: 5405633 - DNA, 25 bp, Homo sapien
caatgtgtgaagtatattctcagta

SEQ ID NO: 5405634 - DNA, 25 bp, Homo sapien
ctggtgtgctgagtcaatgtgtgaa

SEQ ID NO: 5405635 - DNA, 25 bp, Homo sapien
tattgtctgctagccacctccttag

SEQ ID NO: 5405636 - DNA, 25 bp, Homo sapien
tgagtagaaattagtcccttggccg

SEQ ID NO: 5405637 - DNA, 25 bp, Homo sapien
tagtacagtagacccttggcatttg

SEQ ID NO: 5405638 - DNA, 25 bp, Homo sapien
cttgtatacattgcaggaccagtga

SEQ ID NO: 5405639 - DNA, 25 bp, Homo sapien
ctaaatccagccaggactctaagaa

SEQ ID NO: 5405640 - DNA, 25 bp, Homo sapien
tttccaagtccatgataacctatcc

SEQ ID NO: 5405641 - DNA, 25 bp, Homo sapien
gaatggtaggtcactttcaaccata

SEQ ID NO: 5405642 - DNA, 25 bp, Homo sapien
cccacacatggatcagtaaaaaact

SEQ ID NO: 5405643 - DNA, 25 bp, Homo sapien
tactatgacagacttatccactgac

SEQ ID NO: 5405644 - DNA, 25 bp, Homo sapien
agtatcatatactatgacagactta

SEQ ID NO: 5405645 - DNA, 25 bp, Homo sapien
tatcatatactatgacagacttatc

SEQ ID NO: 5405646 - DNA, 25 bp, Homo sapien
catatactatgacagacttatccac

SEQ ID NO: 5405647 - DNA, 25 bp, Homo sapien
tactatttacgctacatgaccatga

SEQ ID NO: 5405648 - DNA, 25 bp, Homo sapien
ggaaacaggcttttatgccagaaca

SEQ ID NO: 5405649 - DNA, 25 bp, Homo sapien
tctttaccattgataaggcgtgcct

SEQ ID NO: 5405650 - DNA, 25 bp, Homo sapien
gagctgatcacagtctgaccacagg

SEQ ID NO: 5405651 - DNA, 25 bp, Homo sapien
aaatcagtgcgacaggcaagagtcc

SEQ ID NO: 5405652 - DNA, 25 bp, Homo sapien
ggttaattgacctagagcccagttc

SEQ ID NO: 5405653 - DNA, 25 bp, Homo sapien
cacatatgggaacggcaagcagtaa

SEQ ID NO: 5405654 - DNA, 25 bp, Homo sapien
tttcatctggagctggctagagccc

SEQ ID NO: 5405655 - DNA, 25 bp, Homo sapien
ggcaggtattcaaccttttgatact

SEQ ID NO: 5405656 - DNA, 25 bp, Homo sapien
agtttcctcatgaggcaggtattca

SEQ ID NO: 5405657 - DNA, 25 bp, Homo sapien
gaggcaggtattcaaccttttgata

SEQ ID NO: 5405658 - DNA, 25 bp, Homo sapien
ggtattcaaccttttgatactccat

SEQ ID NO: 5405659 - DNA, 25 bp, Homo sapien
gtgatagatgtaacccatataagca

SEQ ID NO: 5405660 - DNA, 25 bp, Homo sapien
gaatattctcgattgtattttctag

SEQ ID NO: 5405661 - DNA, 25 bp, Homo sapien
ataaatagtgatagatgtaacccat

SEQ ID NO: 5405662 - DNA, 25 bp, Homo sapien
tcagaatattctcgattgtattttc

SEQ ID NO: 5405663 - DNA, 25 bp, Homo sapien
agctcaagtgataggcctgcctctg

SEQ ID NO: 5405664 - DNA, 25 bp, Homo sapien
gctcaagtgataggcctgcctctgc

SEQ ID NO: 5405665 - DNA, 25 bp, Homo sapien
gagctcaagtgataggcctgcctct

SEQ ID NO: 5405666 - DNA, 25 bp, Homo sapien
tgagctcaagtgataggcctgcctc

SEQ ID NO: 5405667 - DNA, 25 bp, Homo sapien
taaggcaacactacacactcatcag

SEQ ID NO: 5405668 - DNA, 25 bp, Homo sapien
cgtattctatgactcagcaaggcca

SEQ ID NO: 5405669 - DNA, 25 bp, Homo sapien
gaaaaggcaaatctagaggctggga

SEQ ID NO: 5405670 - DNA, 25 bp, Homo sapien
tacaggctaggatacaaaacaacac

SEQ ID NO: 5405671 - DNA, 25 bp, Homo sapien
cctgagactagcatctgcccatcat

SEQ ID NO: 5405672 - DNA, 25 bp, Homo sapien
cagtgcccactcagtgtacttttat

SEQ ID NO: 5405673 - DNA, 25 bp, Homo sapien
aaaagcacaagccagaacaggagca

SEQ ID NO: 5405674 - DNA, 25 bp, Homo sapien
tgcccatcatgggaaaaagcacaag

SEQ ID NO: 5405675 - DNA, 25 bp, Homo sapien
attttgacttggcaatcctgaccac

SEQ ID NO: 5405676 - DNA, 25 bp, Homo sapien
gcaatcctgaccacatgatgccagt

SEQ ID NO: 5405677 - DNA, 25 bp, Homo sapien
catgatgccagtcgaaaaaactgaa

SEQ ID NO: 5405678 - DNA, 25 bp, Homo sapien
caatccaaattttgacttggcaatc

SEQ ID NO: 5405679 - DNA, 25 bp, Homo sapien
catgccgccaaggagccatctttaa

SEQ ID NO: 5405680 - DNA, 25 bp, Homo sapien
cattaggagaaaatgcacatgccgc

SEQ ID NO: 5405681 - DNA, 25 bp, Homo sapien
gcagcaggtaattccaagatcatgt

SEQ ID NO: 5405682 - DNA, 25 bp, Homo sapien
gctttttcactatgcggacacctca

SEQ ID NO: 5405683 - DNA, 25 bp, Homo sapien
acaggaaggatttaaatatccatac

SEQ ID NO: 5405684 - DNA, 25 bp, Homo sapien
ctagtcaacaggattaaaacaggaa

SEQ ID NO: 5405685 - DNA, 25 bp, Homo sapien
aaacaggaaggatttaaatatccat

SEQ ID NO: 5405686 - DNA, 25 bp, Homo sapien
agtcaacaggattaaaacaggaagg

SEQ ID NO: 5405687 - DNA, 25 bp, Homo sapien
taccatctgttgaacacgatgccaa

SEQ ID NO: 5405688 - DNA, 25 bp, Homo sapien
ataggacagtggtaccatctgttga

SEQ ID NO: 5405689 - DNA, 25 bp, Homo sapien
atgccaaacacgtggagtctgggga

SEQ ID NO: 5405690 - DNA, 25 bp, Homo sapien
tgttgaacacgatgccaaaatatgt

SEQ ID NO: 5405691 - DNA, 25 bp, Homo sapien
tacaggcgaattgttttgtccaagg

SEQ ID NO: 5405692 - DNA, 25 bp, Homo sapien
gaaggcacagcagttgacatcgtca

SEQ ID NO: 5405693 - DNA, 25 bp, Homo sapien
tgtccaaggagcaagtagccaagag

SEQ ID NO: 5405694 - DNA, 25 bp, Homo sapien
taaagtcacgtaacgagtacaggcg

SEQ ID NO: 5405695 - DNA, 25 bp, Homo sapien
ggcttccttccacccgacgccgaca

SEQ ID NO: 5405696 - DNA, 25 bp, Homo sapien
ccgacgccgacacgcccgccctagc

SEQ ID NO: 5405697 - DNA, 25 bp, Homo sapien
ttccttccacccgacgccgacacgc

SEQ ID NO: 5405698 - DNA, 25 bp, Homo sapien
cacccgacgccgacacgcccgccct

SEQ ID NO: 5405699 - DNA, 25 bp, Homo sapien
ttgggccctgctgcgcggttagaac

SEQ ID NO: 5405700 - DNA, 25 bp, Homo sapien
tcgccgcactcaaggtcccggttgg

SEQ ID NO: 5405701 - DNA, 25 bp, Homo sapien
ttagaaccgggaaatggagggctca

SEQ ID NO: 5405702 - DNA, 25 bp, Homo sapien
aatggagggctcagacgccccgcgc

SEQ ID NO: 5405703 - DNA, 25 bp, Homo sapien
tcacgtgccgcgcaggtgaggctgg

SEQ ID NO: 5405704 - DNA, 25 bp, Homo sapien
cgggcggtgcgggtcacgtgccgcg

SEQ ID NO: 5405705 - DNA, 25 bp, Homo sapien
gggcgccggcggagacccagagcag

SEQ ID NO: 5405706 - DNA, 25 bp, Homo sapien
gcgggatccgccttcaaggtgccca

SEQ ID NO: 5405707 - DNA, 25 bp, Homo sapien
ggcttggaaagggacttccgtcgca

SEQ ID NO: 5405708 - DNA, 25 bp, Homo sapien
cctagtgatcgcctgaaacgtcgtt

SEQ ID NO: 5405709 - DNA, 25 bp, Homo sapien
ggcgttgcatggaatgttcggccat

SEQ ID NO: 5405710 - DNA, 25 bp, Homo sapien
ttttgctaaagctgcggtcgcaagg

SEQ ID NO: 5405711 - DNA, 25 bp, Homo sapien
aagattaaccccgacacaatgtgga

SEQ ID NO: 5405712 - DNA, 25 bp, Homo sapien
catagggctgggctgctaaagcatc

SEQ ID NO: 5405713 - DNA, 25 bp, Homo sapien
taacttgggctaaaggatccacttc

SEQ ID NO: 5405714 - DNA, 25 bp, Homo sapien
cataatggctggttttgccgagaac

SEQ ID NO: 5405715 - DNA, 25 bp, Homo sapien
gaataagcccaaccaagggcactgg

SEQ ID NO: 5405716 - DNA, 25 bp, Homo sapien
ttcttatttatgagcccctgaggca

SEQ ID NO: 5405717 - DNA, 25 bp, Homo sapien
gaagacaccagtccgaagtagccag

SEQ ID NO: 5405718 - DNA, 25 bp, Homo sapien
tatccttggttggtcaccacttgag

SEQ ID NO: 5405719 - DNA, 25 bp, Homo sapien
tgaagaatccccatggagcatcagg

SEQ ID NO: 5405720 - DNA, 25 bp, Homo sapien
aagaatccccatggagcatcaggca

SEQ ID NO: 5405721 - DNA, 25 bp, Homo sapien
tcatgaagaatccccatggagcatc

SEQ ID NO: 5405722 - DNA, 25 bp, Homo sapien
aatccccatggagcatcaggcagtt

SEQ ID NO: 5405723 - DNA, 25 bp, Homo sapien
gagaagttcgcagaccagagaggtt

SEQ ID NO: 5405724 - DNA, 25 bp, Homo sapien
tacgccaatgattctccggagtctg

SEQ ID NO: 5405725 - DNA, 25 bp, Homo sapien
gagttatttggctacccatagaggc

SEQ ID NO: 5405726 - DNA, 25 bp, Homo sapien
aaagcagtggacattatctaaggcc

SEQ ID NO: 5405727 - DNA, 25 bp, Homo sapien
tttattgtatccgtgccacacatag

SEQ ID NO: 5405728 - DNA, 25 bp, Homo sapien
ttgtatccgtgccacacatagtgaa

SEQ ID NO: 5405729 - DNA, 25 bp, Homo sapien
aaatctgatctatttgcctccaaca

SEQ ID NO: 5405730 - DNA, 25 bp, Homo sapien
tcaagtactcttacgtaggtacaaa

SEQ ID NO: 5405731 - DNA, 25 bp, Homo sapien
gacgccacagtgttggtagaggata

SEQ ID NO: 5405732 - DNA, 25 bp, Homo sapien
tactgtgtgcgtaggaaattgtcac

SEQ ID NO: 5405733 - DNA, 25 bp, Homo sapien
ggccctggtggcttaaaattatata

SEQ ID NO: 5405734 - DNA, 25 bp, Homo sapien
taccaagattaaggagacgccacag

SEQ ID NO: 5405735 - DNA, 25 bp, Homo sapien
aatacagttcacattgctggtctca

SEQ ID NO: 5405736 - DNA, 25 bp, Homo sapien
cacaaaccaataaccgagggccttg

SEQ ID NO: 5405737 - DNA, 25 bp, Homo sapien
catttcccacattagagctctggtg

SEQ ID NO: 5405738 - DNA, 25 bp, Homo sapien
gctattgcactataacaccctttcc

SEQ ID NO: 5405739 - DNA, 25 bp, Homo sapien
gacatctagagcaaaggtttcaagg

SEQ ID NO: 5405740 - DNA, 25 bp, Homo sapien
cacagttgtcaaaaacaagcctgac

SEQ ID NO: 5405741 - DNA, 25 bp, Homo sapien
gtttcacagttgtcaaaaacaagcc

SEQ ID NO: 5405742 - DNA, 25 bp, Homo sapien
aaatacttcctcatattgtggccag

SEQ ID NO: 5405743 - DNA, 25 bp, Homo sapien
ccaagatatggtgctctgcgttgtc

SEQ ID NO: 5405744 - DNA, 25 bp, Homo sapien
tatgtcaatgctccccatgcaatga

SEQ ID NO: 5405745 - DNA, 25 bp, Homo sapien
tagagattgcgttcatagagtggat

SEQ ID NO: 5405746 - DNA, 25 bp, Homo sapien
tagagtatgatgaacccaaacaagc

SEQ ID NO: 5405747 - DNA, 25 bp, Homo sapien
tctggcgggataagcccaattctct

SEQ ID NO: 5405748 - DNA, 25 bp, Homo sapien
ttctgtgcttttctggcgggataag

SEQ ID NO: 5405749 - DNA, 25 bp, Homo sapien
tctactagaggtaacattatgaggg

SEQ ID NO: 5405750 - DNA, 25 bp, Homo sapien
tatgagggtctgtctttcaacaaga

SEQ ID NO: 5405751 - DNA, 25 bp, Homo sapien
ggtgaatgaatctgcataagcttat

SEQ ID NO: 5405752 - DNA, 25 bp, Homo sapien
ctcaagccagttcaatacattttaa

SEQ ID NO: 5405753 - DNA, 25 bp, Homo sapien
gcttattagtaagaagggaatggtc

SEQ ID NO: 5405754 - DNA, 25 bp, Homo sapien
tagtaagaagggaatggtcatttca

SEQ ID NO: 5405755 - DNA, 25 bp, Homo sapien
tgtgacagcacaacaaggagactat

SEQ ID NO: 5405756 - DNA, 25 bp, Homo sapien
tacttaaacacaatggcgcaccatt

SEQ ID NO: 5405757 - DNA, 25 bp, Homo sapien
aacaacgtggatcaaactggaggtc

SEQ ID NO: 5405758 - DNA, 25 bp, Homo sapien
gcatgcctgtatctcatgtagtcca

SEQ ID NO: 5405759 - DNA, 25 bp, Homo sapien
gaaataccctatgaggcactgacgc

SEQ ID NO: 5405760 - DNA, 25 bp, Homo sapien
tgctcacagagttaagtcagccctt

SEQ ID NO: 5405761 - DNA, 25 bp, Homo sapien
tctctatgcgtaatgtgctcacaga

SEQ ID NO: 5405762 - DNA, 25 bp, Homo sapien
gagagttcgaggagcttgaatccac

SEQ ID NO: 5405763 - DNA, 25 bp, Homo sapien
tcatggaagttaaaatcaagagtta

SEQ ID NO: 5405764 - DNA, 25 bp, Homo sapien
tttatccaggaattggaagatcatg

SEQ ID NO: 5405765 - DNA, 25 bp, Homo sapien
cctggcccatatgattttgtagcat

SEQ ID NO: 5405766 - DNA, 25 bp, Homo sapien
atatttctaagcctatttgttttag

SEQ ID NO: 5405767 - DNA, 25 bp, Homo sapien
tctctctaattgtggaaaaatccat

SEQ ID NO: 5405768 - DNA, 25 bp, Homo sapien
agaaaaggccatgcatcctcatgag

SEQ ID NO: 5405769 - DNA, 25 bp, Homo sapien
gccatgcatcctcatgagtttccat

SEQ ID NO: 5405770 - DNA, 25 bp, Homo sapien
taggcttcttaataactttcttata

SEQ ID NO: 5405771 - DNA, 25 bp, Homo sapien
cagtatctcctgttaaagttacctt

SEQ ID NO: 5405772 - DNA, 25 bp, Homo sapien
tacttgtagatgcagagtcttcatc

SEQ ID NO: 5405773 - DNA, 25 bp, Homo sapien
tagtgaactacttgtagatgcagag

SEQ ID NO: 5405774 - DNA, 25 bp, Homo sapien
tgcctttctttgactcattagtctt

SEQ ID NO: 5405775 - DNA, 25 bp, Homo sapien
tgtttcaaagaggagagagcgttca

SEQ ID NO: 5405776 - DNA, 25 bp, Homo sapien
tcaagactgcaataaactgtgatag

SEQ ID NO: 5405777 - DNA, 25 bp, Homo sapien
ttttacaaatgataacctcgaggca

SEQ ID NO: 5405778 - DNA, 25 bp, Homo sapien
tgagttcaagagtgaatcagggcca

SEQ ID NO: 5405779 - DNA, 25 bp, Homo sapien
ctccctttcgacagatttggcagta

SEQ ID NO: 5405780 - DNA, 25 bp, Homo sapien
tgggtctatggcagtaggtatgaca

SEQ ID NO: 5405781 - DNA, 25 bp, Homo sapien
tgggattgttgtaatcttgggtcta

SEQ ID NO: 5405782 - DNA, 25 bp, Homo sapien
aggtatgacagcctttgtcacagcc

SEQ ID NO: 5405783 - DNA, 25 bp, Homo sapien
catttaaaattaacgctctgccatg

SEQ ID NO: 5405784 - DNA, 25 bp, Homo sapien
tatggaccacatgacgggtgagcag

SEQ ID NO: 5405785 - DNA, 25 bp, Homo sapien
gaatgccttgcacacacttcagaag

SEQ ID NO: 5405786 - DNA, 25 bp, Homo sapien
ctttcgttacacagatatggaccac

SEQ ID NO: 5405787 - DNA, 25 bp, Homo sapien
tgtacacatattctgtacggtaagt

SEQ ID NO: 5405788 - DNA, 25 bp, Homo sapien
acaaaatagcttaactgttccaact

SEQ ID NO: 5405789 - DNA, 25 bp, Homo sapien
taaaagacagtaagcattaacactg

SEQ ID NO: 5405790 - DNA, 25 bp, Homo sapien
tagttcatactccagtcacaaaaaa

SEQ ID NO: 5405791 - DNA, 25 bp, Homo sapien
gaaagggtgacagatatcaaactca

SEQ ID NO: 5405792 - DNA, 25 bp, Homo sapien
cagtaaaaaatagtggatgctgcct

SEQ ID NO: 5405793 - DNA, 25 bp, Homo sapien
ggcaaattatgacaactccctcttt

SEQ ID NO: 5405794 - DNA, 25 bp, Homo sapien
gggtatttctaaagatatcgagcac

SEQ ID NO: 5405795 - DNA, 25 bp, Homo sapien
agtggctgttctcaagtgtaatcac

SEQ ID NO: 5405796 - DNA, 25 bp, Homo sapien
cagtggctgttctcaagtgtaatca

SEQ ID NO: 5405797 - DNA, 25 bp, Homo sapien
ctgttctcaagtgtaatcacagcac

SEQ ID NO: 5405798 - DNA, 25 bp, Homo sapien
tggctgttctcaagtgtaatcacag

SEQ ID NO: 5405799 - DNA, 25 bp, Homo sapien
taagcataaaggtaaagacgaaaga

SEQ ID NO: 5405800 - DNA, 25 bp, Homo sapien
tccaatctgaattgagaaagaccct

SEQ ID NO: 5405801 - DNA, 25 bp, Homo sapien
tattccagcacattatgaaactgca

SEQ ID NO: 5405802 - DNA, 25 bp, Homo sapien
tgtgtggaattaataaggccttgag

SEQ ID NO: 5405803 - DNA, 25 bp, Homo sapien
atttttcccatgctattgatttctg

SEQ ID NO: 5405804 - DNA, 25 bp, Homo sapien
ctgcgagcttctgataatgcccttc

SEQ ID NO: 5405805 - DNA, 25 bp, Homo sapien
gataatgcccttctccataccctga

SEQ ID NO: 5405806 - DNA, 25 bp, Homo sapien
tgataatgcccttctccataccctg

SEQ ID NO: 5405807 - DNA, 25 bp, Homo sapien
agcactgcgagcttctgataatgcc

SEQ ID NO: 5405808 - DNA, 25 bp, Homo sapien
cacttacgattacggaatgtgaaac

SEQ ID NO: 5405809 - DNA, 25 bp, Homo sapien
ggtcatgtccacacttacgattacg

SEQ ID NO: 5405810 - DNA, 25 bp, Homo sapien
tgacaaaaacatgtaacagccaata

SEQ ID NO: 5405811 - DNA, 25 bp, Homo sapien
tacggaatgtgaaacaatcatcaca

SEQ ID NO: 5405812 - DNA, 25 bp, Homo sapien
gaaaataggctccaattagcaaaga

SEQ ID NO: 5405813 - DNA, 25 bp, Homo sapien
tagtcacaaccaggtagatgtaaga

SEQ ID NO: 5405814 - DNA, 25 bp, Homo sapien
tgcaggattatcaacgcacataaca

SEQ ID NO: 5405815 - DNA, 25 bp, Homo sapien
tgcaaatagcatgatccgtatggat

SEQ ID NO: 5405816 - DNA, 25 bp, Homo sapien
cgtcaccatcaccactaacggatgg

SEQ ID NO: 5405817 - DNA, 25 bp, Homo sapien
tgatctgaatggtggtacttaaggg

SEQ ID NO: 5405818 - DNA, 25 bp, Homo sapien
ccactaacggatggtgcaggagcag

SEQ ID NO: 5405819 - DNA, 25 bp, Homo sapien
tgcccacattatccagtttgatctg

SEQ ID NO: 5405820 - DNA, 25 bp, Homo sapien
ttcaatgttccgctccaaatcagcc

SEQ ID NO: 5405821 - DNA, 25 bp, Homo sapien
tgcatgtgcactgctttcgtcttcg

SEQ ID NO: 5405822 - DNA, 25 bp, Homo sapien
agcctggttacagctatatctaggg

SEQ ID NO: 5405823 - DNA, 25 bp, Homo sapien
actcttccgttctagtgcatgtgca

SEQ ID NO: 5405824 - DNA, 25 bp, Homo sapien
gcaaacttgctgatgcaactctcct

SEQ ID NO: 5405825 - DNA, 25 bp, Homo sapien
tctactgaccagttctccacaatat

SEQ ID NO: 5405826 - DNA, 25 bp, Homo sapien
agatcttctacctgttgaaggacac

SEQ ID NO: 5405827 - DNA, 25 bp, Homo sapien
caatatctcgagttacttggttttc

SEQ ID NO: 5405828 - DNA, 25 bp, Homo sapien
cttttaggtcctctgggtcaataat

SEQ ID NO: 5405829 - DNA, 25 bp, Homo sapien
tgagatgcagcactttgagcaaagc

SEQ ID NO: 5405830 - DNA, 25 bp, Homo sapien
aggtcctctgggtcaataattctcc

SEQ ID NO: 5405831 - DNA, 25 bp, Homo sapien
gagatgcagcactttgagcaaagct

SEQ ID NO: 5405832 - DNA, 25 bp, Homo sapien
tattagaagtaaccacaccagtggg

SEQ ID NO: 5405833 - DNA, 25 bp, Homo sapien
ctgcaggttgagctgaagtggcctt

SEQ ID NO: 5405834 - DNA, 25 bp, Homo sapien
gccttttcattctgtggtactggag

SEQ ID NO: 5405835 - DNA, 25 bp, Homo sapien
tgataaccctaaccccgatcctaga

SEQ ID NO: 5405836 - DNA, 25 bp, Homo sapien
gaggactgtagaacttccctggacc

SEQ ID NO: 5405837 - DNA, 25 bp, Homo sapien
ttgctgttgactgaacgctgcccag

SEQ ID NO: 5405838 - DNA, 25 bp, Homo sapien
tgaggagtcaccaaagaagcagttg

SEQ ID NO: 5405839 - DNA, 25 bp, Homo sapien
tgttctgataagacaacgtgcaccc

SEQ ID NO: 5405840 - DNA, 25 bp, Homo sapien
tatttgtatctaatattgagctgat

SEQ ID NO: 5405841 - DNA, 25 bp, Homo sapien
gactagaagatgacttatttgtatc

SEQ ID NO: 5405842 - DNA, 25 bp, Homo sapien
gtatctaatattgagctgatggtaa

SEQ ID NO: 5405843 - DNA, 25 bp, Homo sapien
agtttgagactagaagatgacttat

SEQ ID NO: 5405844 - DNA, 25 bp, Homo sapien
ttaagctggtaagttatttcagcag

SEQ ID NO: 5405845 - DNA, 25 bp, Homo sapien
tccttaagctggtaagttatttcag

SEQ ID NO: 5405846 - DNA, 25 bp, Homo sapien
ctccttaagctggtaagttatttca

SEQ ID NO: 5405847 - DNA, 25 bp, Homo sapien
ccttaagctggtaagttatttcagc

SEQ ID NO: 5405848 - DNA, 25 bp, Homo sapien
agatgttgtgtgacactatacttac

SEQ ID NO: 5405849 - DNA, 25 bp, Homo sapien
tcggcagatgttgtgtgacactata

SEQ ID NO: 5405850 - DNA, 25 bp, Homo sapien
ggcagatgttgtgtgacactatact

SEQ ID NO: 5405851 - DNA, 25 bp, Homo sapien
ggtcggcagatgttgtgtgacacta

SEQ ID NO: 5405852 - DNA, 25 bp, Homo sapien
gcagacgttgtgtgacagtgttgca

SEQ ID NO: 5405853 - DNA, 25 bp, Homo sapien
tcggcagacgttgtgtgacagtgtt

SEQ ID NO: 5405854 - DNA, 25 bp, Homo sapien
ggtcggcagacgttgtgtgacagtg

SEQ ID NO: 5405855 - DNA, 25 bp, Homo sapien
gacgttgtgtgacagtgttgcacac

SEQ ID NO: 5405856 - DNA, 25 bp, Homo sapien
ctggtattaaccagagttctcattt

SEQ ID NO: 5405857 - DNA, 25 bp, Homo sapien
taaccagagttctcatttgccctgg

SEQ ID NO: 5405858 - DNA, 25 bp, Homo sapien
gcgtctgtaacgatcttggccaaac

SEQ ID NO: 5405859 - DNA, 25 bp, Homo sapien
gaagaatccagtaccggcgtctgta

SEQ ID NO: 5405860 - DNA, 25 bp, Homo sapien
ccaaacatcactgaacgcaatgagt

SEQ ID NO: 5405861 - DNA, 25 bp, Homo sapien
gagacgcatcaaagagcttccttct

SEQ ID NO: 5405862 - DNA, 25 bp, Homo sapien
aacacttgctgcttggtcaccttca

SEQ ID NO: 5405863 - DNA, 25 bp, Homo sapien
ataggaaattgatgtgtctgccagt

SEQ ID NO: 5405864 - DNA, 25 bp, Homo sapien
taggaaattgatgtgtctgccagtt

SEQ ID NO: 5405865 - DNA, 25 bp, Homo sapien
cctgccataagtaacaacatgggtg

SEQ ID NO: 5405866 - DNA, 25 bp, Homo sapien
tcatgcccatagttaccaacagtgt

SEQ ID NO: 5405867 - DNA, 25 bp, Homo sapien
aagctgttgtacaacctcatgccca

SEQ ID NO: 5405868 - DNA, 25 bp, Homo sapien
tggaaatggagaatttatgacaaca

SEQ ID NO: 5405869 - DNA, 25 bp, Homo sapien
cacagatatcagtcttttttccttt

SEQ ID NO: 5405870 - DNA, 25 bp, Homo sapien
ctcatcttcacagatatcagtcttt

SEQ ID NO: 5405871 - DNA, 25 bp, Homo sapien
catcttcacagatatcagtcttttt

SEQ ID NO: 5405872 - DNA, 25 bp, Homo sapien
ttcacagatatcagtcttttttcct

SEQ ID NO: 5405873 - DNA, 25 bp, Homo sapien
gctcttctcccagatcaatgccacc

SEQ ID NO: 5405874 - DNA, 25 bp, Homo sapien
ttctcccagatcaatgccacctgaa

SEQ ID NO: 5405875 - DNA, 25 bp, Homo sapien
ttcttcgcttgcgtcctggagtggg

SEQ ID NO: 5405876 - DNA, 25 bp, Homo sapien
tcttctcccagatcaatgccacctg

SEQ ID NO: 5405877 - DNA, 25 bp, Homo sapien
cttaacataggagtaatttctgcct

SEQ ID NO: 5405878 - DNA, 25 bp, Homo sapien
ctcttaacataggagtaatttctgc

SEQ ID NO: 5405879 - DNA, 25 bp, Homo sapien
tcttaacataggagtaatttctgcc

SEQ ID NO: 5405880 - DNA, 25 bp, Homo sapien
ttaacataggagtaatttctgcctg

SEQ ID NO: 5405881 - DNA, 25 bp, Homo sapien
tataatcaatgttcttgtcgatttc

SEQ ID NO: 5405882 - DNA, 25 bp, Homo sapien
gacatataatcaatgttcttgtcga

SEQ ID NO: 5405883 - DNA, 25 bp, Homo sapien
cccatttatctctcctcaagtttga

SEQ ID NO: 5405884 - DNA, 25 bp, Homo sapien
cctcaagtttgacatataatcaatg

SEQ ID NO: 5405885 - DNA, 25 bp, Homo sapien
gcatgccagttcattgatcaggaaa

SEQ ID NO: 5405886 - DNA, 25 bp, Homo sapien
agctttctgtgctggagtgtgagcc

SEQ ID NO: 5405887 - DNA, 25 bp, Homo sapien
agtgtgagcctgaaaagctttggtc

SEQ ID NO: 5405888 - DNA, 25 bp, Homo sapien
gactttcagtaagctcagtttgtcc

SEQ ID NO: 5405889 - DNA, 25 bp, Homo sapien
aaattacctatcaagccttccatga

SEQ ID NO: 5405890 - DNA, 25 bp, Homo sapien
catgactataaaagcgacaccaacc

SEQ ID NO: 5405891 - DNA, 25 bp, Homo sapien
tccttggttccaagtcaggcaggga

SEQ ID NO: 5405892 - DNA, 25 bp, Homo sapien
tatgcaaattcatgggtagcagaag

SEQ ID NO: 5405893 - DNA, 25 bp, Homo sapien
cttgtatcctgttattagacctgga

SEQ ID NO: 5405894 - DNA, 25 bp, Homo sapien
gcaagtcttgtacttcacccatgct

SEQ ID NO: 5405895 - DNA, 25 bp, Homo sapien
gagaggagcctcacaagcaagtctt

SEQ ID NO: 5405896 - DNA, 25 bp, Homo sapien
cacccatgctgtcccctatatttag

SEQ ID NO: 5405897 - DNA, 25 bp, Homo sapien
ggaatacgaggcaactctggcaaag

SEQ ID NO: 5405898 - DNA, 25 bp, Homo sapien
aaaatgtacttccagagagaacaag

SEQ ID NO: 5405899 - DNA, 25 bp, Homo sapien
atgtacttccagagagaacaagtcc

SEQ ID NO: 5405900 - DNA, 25 bp, Homo sapien
gagaacaagtcctggaatacgaggc

SEQ ID NO: 5405901 - DNA, 25 bp, Homo sapien
ttaaaagccatgatttcgtatcttc

SEQ ID NO: 5405902 - DNA, 25 bp, Homo sapien
tgtattgtaccagtagcttcctttg

SEQ ID NO: 5405903 - DNA, 25 bp, Homo sapien
ctaagcatagtgtcttgaagtatct

SEQ ID NO: 5405904 - DNA, 25 bp, Homo sapien
ttctgtaacccccatggaactaagc

SEQ ID NO: 5405905 - DNA, 25 bp, Homo sapien
cgctgctctagtttacgctctttat

SEQ ID NO: 5405906 - DNA, 25 bp, Homo sapien
taatcttcgctgctctagtttacgc

SEQ ID NO: 5405907 - DNA, 25 bp, Homo sapien
tttctaattctaatcttcgctgctc

SEQ ID NO: 5405908 - DNA, 25 bp, Homo sapien
atcttttctcatcacgtttttcttg

SEQ ID NO: 5405909 - DNA, 25 bp, Homo sapien
caaattttagtgtggctccagcaag

SEQ ID NO: 5405910 - DNA, 25 bp, Homo sapien
gacctagactattttgttattcaaa

SEQ ID NO: 5405911 - DNA, 25 bp, Homo sapien
tacaagcaggtacataaaatgaaca

SEQ ID NO: 5405912 - DNA, 25 bp, Homo sapien
catgggcaactacatatcttattaa

SEQ ID NO: 5405913 - DNA, 25 bp, Homo sapien
ttcataagcatcatgtgttgtcgcc

SEQ ID NO: 5405914 - DNA, 25 bp, Homo sapien
tttttacgagcttccatagctttca

SEQ ID NO: 5405915 - DNA, 25 bp, Homo sapien
tctgcttttttacgagcttccatag

SEQ ID NO: 5405916 - DNA, 25 bp, Homo sapien
tgtgttgtcgccttcgctctcgttc

SEQ ID NO: 5405917 - DNA, 25 bp, Homo sapien
tatctagtctatgcctctccaactc

SEQ ID NO: 5405918 - DNA, 25 bp, Homo sapien
atatctagtctatgcctctccaact

SEQ ID NO: 5405919 - DNA, 25 bp, Homo sapien
catatctagtctatgcctctccaac

SEQ ID NO: 5405920 - DNA, 25 bp, Homo sapien
aagaacagcttgttgtcttctcatt

SEQ ID NO: 5405921 - DNA, 25 bp, Homo sapien
tcagaagaacagcttgttgtcttct

SEQ ID NO: 5405922 - DNA, 25 bp, Homo sapien
gaagaacagcttgttgtcttctcat

SEQ ID NO: 5405923 - DNA, 25 bp, Homo sapien
cagaagaacagcttgttgtcttctc

SEQ ID NO: 5405924 - DNA, 25 bp, Homo sapien
tttattcgtttctcggcctccaata

SEQ ID NO: 5405925 - DNA, 25 bp, Homo sapien
ctccaataatttggcatttgccgct

SEQ ID NO: 5405926 - DNA, 25 bp, Homo sapien
taatttggcatttgccgcttcttcc

SEQ ID NO: 5405927 - DNA, 25 bp, Homo sapien
ctttattcgtttctcggcctccaat

SEQ ID NO: 5405928 - DNA, 25 bp, Homo sapien
aaaacaggtctcaaagtcatgcaac

SEQ ID NO: 5405929 - DNA, 25 bp, Homo sapien
caggtctcaaagtcatgcaacagca

SEQ ID NO: 5405930 - DNA, 25 bp, Homo sapien
gcaaaacaggtctcaaagtcatgca

SEQ ID NO: 5405931 - DNA, 25 bp, Homo sapien
gtctcaaagtcatgcaacagcacca

SEQ ID NO: 5405932 - DNA, 25 bp, Homo sapien
cttgcagggaagagggatatgctag

SEQ ID NO: 5405933 - DNA, 25 bp, Homo sapien
cattttagcgcatgaactttatgac

SEQ ID NO: 5405934 - DNA, 25 bp, Homo sapien
tgctgttgccaacagatgtcctcta

SEQ ID NO: 5405935 - DNA, 25 bp, Homo sapien
gtaaatatcagactataagccctaa

SEQ ID NO: 5405936 - DNA, 25 bp, Homo sapien
gaatttgctgagctcgaagttcttt

SEQ ID NO: 5405937 - DNA, 25 bp, Homo sapien
gctgagctcgaagttctttttccat

SEQ ID NO: 5405938 - DNA, 25 bp, Homo sapien
atttgctgagctcgaagttcttttt

SEQ ID NO: 5405939 - DNA, 25 bp, Homo sapien
agaatttgctgagctcgaagttctt

SEQ ID NO: 5405940 - DNA, 25 bp, Homo sapien
tgcacagacaggcagggaatcttgg

SEQ ID NO: 5405941 - DNA, 25 bp, Homo sapien
tagagtcctcgtcagatcccaatgc

SEQ ID NO: 5405942 - DNA, 25 bp, Homo sapien
taaggtgctatgttttcaagccagc

SEQ ID NO: 5405943 - DNA, 25 bp, Homo sapien
ccatgtggattcaggttgtagctac

SEQ ID NO: 5405944 - DNA, 25 bp, Homo sapien
taatgtacattactaacaaatcctc

SEQ ID NO: 5405945 - DNA, 25 bp, Homo sapien
tgcagtggcaacttttaagtaatcc

SEQ ID NO: 5405946 - DNA, 25 bp, Homo sapien
aacacttggaagtagaagactttat

SEQ ID NO: 5405947 - DNA, 25 bp, Homo sapien
cattcgagcaatatacttcattgac

SEQ ID NO: 5405948 - DNA, 25 bp, Homo sapien
tgttctttttgcttccgcttctcct

SEQ ID NO: 5405949 - DNA, 25 bp, Homo sapien
tatctgttctttttgcttccgcttc

SEQ ID NO: 5405950 - DNA, 25 bp, Homo sapien
tctgttctttttgcttccgcttctc

SEQ ID NO: 5405951 - DNA, 25 bp, Homo sapien
ttatctgttctttttgcttccgctt

SEQ ID NO: 5405952 - DNA, 25 bp, Homo sapien
tttagcaacccgagcctgttcctgc

SEQ ID NO: 5405953 - DNA, 25 bp, Homo sapien
gcttctttagcaacccgagcctgtt

SEQ ID NO: 5405954 - DNA, 25 bp, Homo sapien
ttggcttctttagcaacccgagcct

SEQ ID NO: 5405955 - DNA, 25 bp, Homo sapien
cttctttagcaacccgagcctgttc

SEQ ID NO: 5405956 - DNA, 25 bp, Homo sapien
gacctttccgacgtctcatcctgga

SEQ ID NO: 5405957 - DNA, 25 bp, Homo sapien
cattgccaacatttggaggtcgacc

SEQ ID NO: 5405958 - DNA, 25 bp, Homo sapien
ggattcctctcttgctcgttgtcta

SEQ ID NO: 5405959 - DNA, 25 bp, Homo sapien
catctgcgttatctaggaattcagc

SEQ ID NO: 5405960 - DNA, 25 bp, Homo sapien
tgccctgatacgaggaatgacatcc

SEQ ID NO: 5405961 - DNA, 25 bp, Homo sapien
gccctgatacgaggaatgacatcct

SEQ ID NO: 5405962 - DNA, 25 bp, Homo sapien
aatttccggacttatagatttctgg

SEQ ID NO: 5405963 - DNA, 25 bp, Homo sapien
tatagatttctggtactgatctttc

SEQ ID NO: 5405964 - DNA, 25 bp, Homo sapien
tagtgacataaatttccggacttat

SEQ ID NO: 5405965 - DNA, 25 bp, Homo sapien
tagatttctggtactgatctttcat

SEQ ID NO: 5405966 - DNA, 25 bp, Homo sapien
aaattgtcccttgagatatccatta

SEQ ID NO: 5405967 - DNA, 25 bp, Homo sapien
cacccactcttatttttgcactgaa

SEQ ID NO: 5405968 - DNA, 25 bp, Homo sapien
cttcatagaagtcacccactcttat

SEQ ID NO: 5405969 - DNA, 25 bp, Homo sapien
gtcccttgagatatccattattcca

SEQ ID NO: 5405970 - DNA, 25 bp, Homo sapien
tgaaggcgccctccaaagtttctta

SEQ ID NO: 5405971 - DNA, 25 bp, Homo sapien
gcataatatgctacttctccttgaa

SEQ ID NO: 5405972 - DNA, 25 bp, Homo sapien
tacttcagggtactgcctaagtttc

SEQ ID NO: 5405973 - DNA, 25 bp, Homo sapien
ctttattacttcagggtactgccta

SEQ ID NO: 5405974 - DNA, 25 bp, Homo sapien
ggttcacgtacatccagtctaaaag

SEQ ID NO: 5405975 - DNA, 25 bp, Homo sapien
agtctcatgtactcctgccctttgc

SEQ ID NO: 5405976 - DNA, 25 bp, Homo sapien
tctgatataccaaattccttgccct

SEQ ID NO: 5405977 - DNA, 25 bp, Homo sapien
gagtccctcaattttgaccaaagtg

SEQ ID NO: 5405978 - DNA, 25 bp, Homo sapien
tacgcagttcacgttcatctgttac

SEQ ID NO: 5405979 - DNA, 25 bp, Homo sapien
agttcacgttcatctgttactcttc

SEQ ID NO: 5405980 - DNA, 25 bp, Homo sapien
ccatattccaatggaatacgcagtt

SEQ ID NO: 5405981 - DNA, 25 bp, Homo sapien
caatggaatacgcagttcacgttca

SEQ ID NO: 5405982 - DNA, 25 bp, Homo sapien
ttggttaatataaaacattcattaa

SEQ ID NO: 5405983 - DNA, 25 bp, Homo sapien
aattcaattggttaatataaaacat

SEQ ID NO: 5405984 - DNA, 25 bp, Homo sapien
ggttaatataaaacattcattaata

SEQ ID NO: 5405985 - DNA, 25 bp, Homo sapien
aattggttaatataaaacattcatt

SEQ ID NO: 5405986 - DNA, 25 bp, Homo sapien
gacatggcacgttaatggaataaga

SEQ ID NO: 5405987 - DNA, 25 bp, Homo sapien
tagcatcttaagtaaccaagtgagc

SEQ ID NO: 5405988 - DNA, 25 bp, Homo sapien
gaataagaatgctactctctaatag

SEQ ID NO: 5405989 - DNA, 25 bp, Homo sapien
tcttagacattgaatgagaactgag

SEQ ID NO: 5405990 - DNA, 25 bp, Homo sapien
gaccaggtaatgagtcatatccttt

SEQ ID NO: 5405991 - DNA, 25 bp, Homo sapien
gttcaaaaccaaaggaactatcatc

SEQ ID NO: 5405992 - DNA, 25 bp, Homo sapien
catcaatcagatccttaaactggaa

SEQ ID NO: 5405993 - DNA, 25 bp, Homo sapien
gaaaatacaggctcaccttccttag

SEQ ID NO: 5405994 - DNA, 25 bp, Homo sapien
aggtgactgggattcagaacataag

SEQ ID NO: 5405995 - DNA, 25 bp, Homo sapien
ggattcagaacataaggcagcagga

SEQ ID NO: 5405996 - DNA, 25 bp, Homo sapien
ggcttttgctatgtggaggttacga

SEQ ID NO: 5405997 - DNA, 25 bp, Homo sapien
tggaggttacgaggtgttgagtgac

SEQ ID NO: 5405998 - DNA, 25 bp, Homo sapien
ctgtgagactcatggaagggctttt

SEQ ID NO: 5405999 - DNA, 25 bp, Homo sapien
ttgacagaggaagttgttttattca

SEQ ID NO: 5406000 - DNA, 25 bp, Homo sapien
ttctctccttcagtatcactatctg

SEQ ID NO: 5406001 - DNA, 25 bp, Homo sapien
cttcttctgatccttctgtatctga

SEQ ID NO: 5406002 - DNA, 25 bp, Homo sapien
cttcatcctcatttgaatcttcaga

SEQ ID NO: 5406003 - DNA, 25 bp, Homo sapien
tgattggctgtcatcagattcatca

SEQ ID NO: 5406004 - DNA, 25 bp, Homo sapien
catcctcatttgaatcttcagaatc

SEQ ID NO: 5406005 - DNA, 25 bp, Homo sapien
ctgtcatcagattcatcatcttcat

SEQ ID NO: 5406006 - DNA, 25 bp, Homo sapien
gttcctctgaattgttccactaaag

SEQ ID NO: 5406007 - DNA, 25 bp, Homo sapien
cctctgaattgttccactaaagatt

SEQ ID NO: 5406008 - DNA, 25 bp, Homo sapien
tctgttcctctgaattgttccacta

SEQ ID NO: 5406009 - DNA, 25 bp, Homo sapien
gaatctgttcctctgaattgttcca

SEQ ID NO: 5406010 - DNA, 25 bp, Homo sapien
gcagagggcattacaggtgtctgat

SEQ ID NO: 5406011 - DNA, 25 bp, Homo sapien
gagggcattacaggtgtctgattgc

SEQ ID NO: 5406012 - DNA, 25 bp, Homo sapien
ttttccttcccttgactatgcagga

SEQ ID NO: 5406013 - DNA, 25 bp, Homo sapien
agaggcagagggcattacaggtgtc

SEQ ID NO: 5406014 - DNA, 25 bp, Homo sapien
ttgtactcagatttacaggtgagga

SEQ ID NO: 5406015 - DNA, 25 bp, Homo sapien
tagttttggtagtaagtgctagagg

SEQ ID NO: 5406016 - DNA, 25 bp, Homo sapien
actttgaataactccatttggttgg

SEQ ID NO: 5406017 - DNA, 25 bp, Homo sapien
gcattttagttttggtagtaagtgc

SEQ ID NO: 5406018 - DNA, 25 bp, Homo sapien
gaatgacactttgaataactccatt

SEQ ID NO: 5406019 - DNA, 25 bp, Homo sapien
taactgtgatgggaatgcctgttta

SEQ ID NO: 5406020 - DNA, 25 bp, Homo sapien
cttcaggctcttcgatgactcttgt

SEQ ID NO: 5406021 - DNA, 25 bp, Homo sapien
ttttggatttgacaaagctgcaata

SEQ ID NO: 5406022 - DNA, 25 bp, Homo sapien
tgtgctggtgaactagaggttgctt

SEQ ID NO: 5406023 - DNA, 25 bp, Homo sapien
taagacattgctcagaaccctgtgc

SEQ ID NO: 5406024 - DNA, 25 bp, Homo sapien
gtgttgtcagcatcagacctgggct

SEQ ID NO: 5406025 - DNA, 25 bp, Homo sapien
gcctttgcacagtaatattcccgag

SEQ ID NO: 5406026 - DNA, 25 bp, Homo sapien
gatactaagctggtggaaatggaca

SEQ ID NO: 5406027 - DNA, 25 bp, Homo sapien
ctggtgtcgtgacgcatgccagtag

SEQ ID NO: 5406028 - DNA, 25 bp, Homo sapien
gtctggccagaaaagtgattcttta

SEQ ID NO: 5406029 - DNA, 25 bp, Homo sapien
tgtgtacattctaggactacagagg

SEQ ID NO: 5406030 - DNA, 25 bp, Homo sapien
cacctactaggaagtctgagacagc

SEQ ID NO: 5406031 - DNA, 25 bp, Homo sapien
aaatacattaaacagatacatatat

SEQ ID NO: 5406032 - DNA, 25 bp, Homo sapien
tcctggagactaagaaagtataaaa

SEQ ID NO: 5406033 - DNA, 25 bp, Homo sapien
tttctctaatagtaaaattcttgta

SEQ ID NO: 5406034 - DNA, 25 bp, Homo sapien
cttaaacttgtgtattgtaagacaa

SEQ ID NO: 5406035 - DNA, 25 bp, Homo sapien
cattggacaccaatcccgtagactg

SEQ ID NO: 5406036 - DNA, 25 bp, Homo sapien
catcaggagaaggaactatgagttt

SEQ ID NO: 5406037 - DNA, 25 bp, Homo sapien
cgtttggatctcaattcactggtca

SEQ ID NO: 5406038 - DNA, 25 bp, Homo sapien
ccgtagactgtattacactggtgtg

SEQ ID NO: 5406039 - DNA, 25 bp, Homo sapien
taaatggaagctgctgtgacaaaac

SEQ ID NO: 5406040 - DNA, 25 bp, Homo sapien
tcagacgcaagaggtaatggctggt

SEQ ID NO: 5406041 - DNA, 25 bp, Homo sapien
ggattcagacgcaagaggtaatggc

SEQ ID NO: 5406042 - DNA, 25 bp, Homo sapien
tctgggattcagacgcaagaggtaa

SEQ ID NO: 5406043 - DNA, 25 bp, Homo sapien
gagtgagtctgggattcagacgcaa

SEQ ID NO: 5406044 - DNA, 25 bp, Homo sapien
ctagatataaaaatgaaaaggtaag

SEQ ID NO: 5406045 - DNA, 25 bp, Homo sapien
gttacttttatgttgtgcttcactc

SEQ ID NO: 5406046 - DNA, 25 bp, Homo sapien
taatgccttcacttgaggtgtctga

SEQ ID NO: 5406047 - DNA, 25 bp, Homo sapien
catctgaatcactgctactaatgcc

SEQ ID NO: 5406048 - DNA, 25 bp, Homo sapien
gatgatgtgcctgaatcactatcac

SEQ ID NO: 5406049 - DNA, 25 bp, Homo sapien
taacgacaaggtagttggcaagact

SEQ ID NO: 5406050 - DNA, 25 bp, Homo sapien
gaaacttactagtgctggtgatagg

SEQ ID NO: 5406051 - DNA, 25 bp, Homo sapien
ttttgcagacagtgagtcagtagcc

SEQ ID NO: 5406052 - DNA, 25 bp, Homo sapien
tgggtatgtccaagactgagtcctt

SEQ ID NO: 5406053 - DNA, 25 bp, Homo sapien
attttgtcaactctagcatccaaag

SEQ ID NO: 5406054 - DNA, 25 bp, Homo sapien
caactctagcatccaaaggctggtt

SEQ ID NO: 5406055 - DNA, 25 bp, Homo sapien
tgattttgtcaactctagcatccaa

SEQ ID NO: 5406056 - DNA, 25 bp, Homo sapien
actctagcatccaaaggctggtttt

SEQ ID NO: 5406057 - DNA, 25 bp, Homo sapien
caattacagatgatgtattacttcc

SEQ ID NO: 5406058 - DNA, 25 bp, Homo sapien
cttgaagcagtagtggatagtacag

SEQ ID NO: 5406059 - DNA, 25 bp, Homo sapien
gatagtacagatgtgttgataccaa

SEQ ID NO: 5406060 - DNA, 25 bp, Homo sapien
ggaacttgaagcagtagtggatagt

SEQ ID NO: 5406061 - DNA, 25 bp, Homo sapien
gagcaaatagtggtggaattcccag

SEQ ID NO: 5406062 - DNA, 25 bp, Homo sapien
gaattcccagtaatggtggaaagaa

SEQ ID NO: 5406063 - DNA, 25 bp, Homo sapien
tcccgaagtccttgaatggaatgaa

SEQ ID NO: 5406064 - DNA, 25 bp, Homo sapien
gaaagaaggttgctcctgtacgagt

SEQ ID NO: 5406065 - DNA, 25 bp, Homo sapien
ggatgtgcggctaaggctgtgggtg

SEQ ID NO: 5406066 - DNA, 25 bp, Homo sapien
ctggaaaagatgctagttggggatg

SEQ ID NO: 5406067 - DNA, 25 bp, Homo sapien
atgtgcggctaaggctgtgggtgta

SEQ ID NO: 5406068 - DNA, 25 bp, Homo sapien
aagatgctagttggggatgtgcggc

SEQ ID NO: 5406069 - DNA, 25 bp, Homo sapien
ctgaatgtagaccaaagactgggtg

SEQ ID NO: 5406070 - DNA, 25 bp, Homo sapien
caaaccaccaaattctgaatgccct

SEQ ID NO: 5406071 - DNA, 25 bp, Homo sapien
aaaccaccaaattctgaatgccctg

SEQ ID NO: 5406072 - DNA, 25 bp, Homo sapien
tggctgaatgtagaccaaagactgg

SEQ ID NO: 5406073 - DNA, 25 bp, Homo sapien
aggttaaacggttgatccccagctg

SEQ ID NO: 5406074 - DNA, 25 bp, Homo sapien
cattgggaaggcactcgacactgtg

SEQ ID NO: 5406075 - DNA, 25 bp, Homo sapien
gggaaggcactcgacactgtggaca

SEQ ID NO: 5406076 - DNA, 25 bp, Homo sapien
cactgtggacaggttaaacggttga

SEQ ID NO: 5406077 - DNA, 25 bp, Homo sapien
ctttgtagtctcacaagcagaaaac

SEQ ID NO: 5406078 - DNA, 25 bp, Homo sapien
cattcttagatgcatagttacagca

SEQ ID NO: 5406079 - DNA, 25 bp, Homo sapien
tcttgtggcaacaatgaagaaccaa

SEQ ID NO: 5406080 - DNA, 25 bp, Homo sapien
gatgggagttcagatcaaggctact

SEQ ID NO: 5406081 - DNA, 25 bp, Homo sapien
taagtaactggcctacaaggatgag

SEQ ID NO: 5406082 - DNA, 25 bp, Homo sapien
catcaggtgctatgcttaagtaact

SEQ ID NO: 5406083 - DNA, 25 bp, Homo sapien
ctgacctcaaggaactcatgttttg

SEQ ID NO: 5406084 - DNA, 25 bp, Homo sapien
tatacaggactcagtaatacaaccc

SEQ ID NO: 5406085 - DNA, 25 bp, Homo sapien
tataaaagttatgaaggaaacagcc

SEQ ID NO: 5406086 - DNA, 25 bp, Homo sapien
taagatctaggtcgtggaaccctct

SEQ ID NO: 5406087 - DNA, 25 bp, Homo sapien
gaatctccagacagttatatttggg

SEQ ID NO: 5406088 - DNA, 25 bp, Homo sapien
gagaacctccaaagcctatataaca

SEQ ID NO: 5406089 - DNA, 25 bp, Homo sapien
taatgccttgactctaaactaccag

SEQ ID NO: 5406090 - DNA, 25 bp, Homo sapien
taaaatcagtacacaaatgctggtg

SEQ ID NO: 5406091 - DNA, 25 bp, Homo sapien
tgtgtcagtaacaaggcatggtaac

SEQ ID NO: 5406092 - DNA, 25 bp, Homo sapien
gcaaaagtcactcacaaggttagta

SEQ ID NO: 5406093 - DNA, 25 bp, Homo sapien
tgctttgagccagttaacctttata

SEQ ID NO: 5406094 - DNA, 25 bp, Homo sapien
gaaagcaaacgtgttcaagtgcagg

SEQ ID NO: 5406095 - DNA, 25 bp, Homo sapien
tgccttccacttagctatagactgt

SEQ ID NO: 5406096 - DNA, 25 bp, Homo sapien
aatcagacaatgctataggttcaac

SEQ ID NO: 5406097 - DNA, 25 bp, Homo sapien
taatgttgtagctgagtaatcttgt

SEQ ID NO: 5406098 - DNA, 25 bp, Homo sapien
aatgttgtagctgagtaatcttgtt

SEQ ID NO: 5406099 - DNA, 25 bp, Homo sapien
ctaatgttgtagctgagtaatcttg

SEQ ID NO: 5406100 - DNA, 25 bp, Homo sapien
agtttttaggctgacactcatggct

SEQ ID NO: 5406101 - DNA, 25 bp, Homo sapien
aagtttttaggctgacactcatggc

SEQ ID NO: 5406102 - DNA, 25 bp, Homo sapien
tgcccatcgatagtttttagcataa

SEQ ID NO: 5406103 - DNA, 25 bp, Homo sapien
ccatcgatagtttttagcataaaca

SEQ ID NO: 5406104 - DNA, 25 bp, Homo sapien
gcccatcgatagtttttagcataaa

SEQ ID NO: 5406105 - DNA, 25 bp, Homo sapien
tgttgcccatcgatagtttttagca

SEQ ID NO: 5406106 - DNA, 25 bp, Homo sapien
gtcccccatgctctgtaattatgac

SEQ ID NO: 5406107 - DNA, 25 bp, Homo sapien
gctattacccaggtcccccatgctc

SEQ ID NO: 5406108 - DNA, 25 bp, Homo sapien
gcaaatgcacgtgctgccctttccc

SEQ ID NO: 5406109 - DNA, 25 bp, Homo sapien
tgtcattattacatagtagccgaat

SEQ ID NO: 5406110 - DNA, 25 bp, Homo sapien
catagtagccgaatatcactgaata

SEQ ID NO: 5406111 - DNA, 25 bp, Homo sapien
aacacacaatcattgaagttggcca

SEQ ID NO: 5406112 - DNA, 25 bp, Homo sapien
gaaatgatgcaccaatactcaggca

SEQ ID NO: 5406113 - DNA, 25 bp, Homo sapien
agaaaacaagtcactgggagccgcg

SEQ ID NO: 5406114 - DNA, 25 bp, Homo sapien
tcagagcaatttatctagggcccat

SEQ ID NO: 5406115 - DNA, 25 bp, Homo sapien
tgggtaaatcccacaaacaggatgg

SEQ ID NO: 5406116 - DNA, 25 bp, Homo sapien
aggtgtctgtcactgccgctaggag

SEQ ID NO: 5406117 - DNA, 25 bp, Homo sapien
ttttgaagctatgcccacagccgca

SEQ ID NO: 5406118 - DNA, 25 bp, Homo sapien
aacatggactacaacactgtgaaag

SEQ ID NO: 5406119 - DNA, 25 bp, Homo sapien
taatctgtcccttagcaaagctcga

SEQ ID NO: 5406120 - DNA, 25 bp, Homo sapien
ttctaatgttattcagcaactcggc

SEQ ID NO: 5406121 - DNA, 25 bp, Homo sapien
tgttattcagcaactcggcatactc

SEQ ID NO: 5406122 - DNA, 25 bp, Homo sapien
tattcagcaactcggcatactccat

SEQ ID NO: 5406123 - DNA, 25 bp, Homo sapien
aatgttattcagcaactcggcatac

SEQ ID NO: 5406124 - DNA, 25 bp, Homo sapien
ccttttgaaactactgaagccacag

SEQ ID NO: 5406125 - DNA, 25 bp, Homo sapien
gatggtaaccgttctccagactcca

SEQ ID NO: 5406126 - DNA, 25 bp, Homo sapien
cacatgggttgattgtagagctaag

SEQ ID NO: 5406127 - DNA, 25 bp, Homo sapien
ccacagaaggtgtcgaagatgaagt

SEQ ID NO: 5406128 - DNA, 25 bp, Homo sapien
actagattactatgcaggtgttcaa

SEQ ID NO: 5406129 - DNA, 25 bp, Homo sapien
tataaagagcaaggtggtggagact

SEQ ID NO: 5406130 - DNA, 25 bp, Homo sapien
gaaagaggtagacctatactagcta

SEQ ID NO: 5406131 - DNA, 25 bp, Homo sapien
actgtatttacttctaggcaatggg

SEQ ID NO: 5406132 - DNA, 25 bp, Homo sapien
caaatccttaattccaactgcatcc

SEQ ID NO: 5406133 - DNA, 25 bp, Homo sapien
ctggttcttgcaccatactttccca

SEQ ID NO: 5406134 - DNA, 25 bp, Homo sapien
aatccttaattccaactgcatccct

SEQ ID NO: 5406135 - DNA, 25 bp, Homo sapien
gcaccatactttcccaaatccttaa

SEQ ID NO: 5406136 - DNA, 25 bp, Homo sapien
cgggcatggtgaggcatgactgtaa

SEQ ID NO: 5406137 - DNA, 25 bp, Homo sapien
agccgggcatggtgaggcatgactg

SEQ ID NO: 5406138 - DNA, 25 bp, Homo sapien
cccaactactcaggaaggctgaggc

SEQ ID NO: 5406139 - DNA, 25 bp, Homo sapien
aatcccaactactcaggaaggctga

SEQ ID NO: 5406140 - DNA, 25 bp, Homo sapien
caagccagtgaaataatccctgcct

SEQ ID NO: 5406141 - DNA, 25 bp, Homo sapien
gaaaaataccctgtatgtgctgaag

SEQ ID NO: 5406142 - DNA, 25 bp, Homo sapien
tataacattgttcctagggactaag

SEQ ID NO: 5406143 - DNA, 25 bp, Homo sapien
tggtccctcactgatctatgaaaag

SEQ ID NO: 5406144 - DNA, 25 bp, Homo sapien
ctaaaatgctatgcagtttatttat

SEQ ID NO: 5406145 - DNA, 25 bp, Homo sapien
tttattattattaatctccactcct

SEQ ID NO: 5406146 - DNA, 25 bp, Homo sapien
tattattattaatctccactcctac

SEQ ID NO: 5406147 - DNA, 25 bp, Homo sapien
ttctaaaatgctatgcagtttattt

SEQ ID NO: 5406148 - DNA, 25 bp, Homo sapien
tccaaatcaagtgtgtaagcacctt

SEQ ID NO: 5406149 - DNA, 25 bp, Homo sapien
gtacctagaacaccacacaaatatg

SEQ ID NO: 5406150 - DNA, 25 bp, Homo sapien
cacaatggttaagggtatgacactg

SEQ ID NO: 5406151 - DNA, 25 bp, Homo sapien
tgcaggctccttgagacaagggatt

SEQ ID NO: 5406152 - DNA, 25 bp, Homo sapien
taatcaacatacctaatactacagt

SEQ ID NO: 5406153 - DNA, 25 bp, Homo sapien
gaaggagtctatttacattatccca

SEQ ID NO: 5406154 - DNA, 25 bp, Homo sapien
atagatcacctgcacttatatgtcc

SEQ ID NO: 5406155 - DNA, 25 bp, Homo sapien
taggttctataacattcttcagtaa

SEQ ID NO: 5406156 - DNA, 25 bp, Homo sapien
tttaagtatatttgtcactctttac

SEQ ID NO: 5406157 - DNA, 25 bp, Homo sapien
tatttgtcactctttactaaatcac

SEQ ID NO: 5406158 - DNA, 25 bp, Homo sapien
cactctttactaaatcacctttaag

SEQ ID NO: 5406159 - DNA, 25 bp, Homo sapien
tactaaatcacctttaagctttcta

SEQ ID NO: 5406160 - DNA, 25 bp, Homo sapien
tattaaagattgagcaaaactaaga

SEQ ID NO: 5406161 - DNA, 25 bp, Homo sapien
gcaaaactaagagttctgttccaaa

SEQ ID NO: 5406162 - DNA, 25 bp, Homo sapien
taaagattgagcaaaactaagagtt

SEQ ID NO: 5406163 - DNA, 25 bp, Homo sapien
gattgagcaaaactaagagttctgt

SEQ ID NO: 5406164 - DNA, 25 bp, Homo sapien
agtagacaagacaactgaggtaagc

SEQ ID NO: 5406165 - DNA, 25 bp, Homo sapien
ccacagatggagtgacggccagatt

SEQ ID NO: 5406166 - DNA, 25 bp, Homo sapien
tttagagtggcaagaaagtggcagc

SEQ ID NO: 5406167 - DNA, 25 bp, Homo sapien
aaatgattgtcccaagaccacagat

SEQ ID NO: 5406168 - DNA, 25 bp, Homo sapien
tcctttcgattcagagcagtgacag

SEQ ID NO: 5406169 - DNA, 25 bp, Homo sapien
tgtgccaagggtatagaatctcaga

SEQ ID NO: 5406170 - DNA, 25 bp, Homo sapien
ggagcacttagatcaccagcaaacg

SEQ ID NO: 5406171 - DNA, 25 bp, Homo sapien
taatgagatactgtcggagagggtc

SEQ ID NO: 5406172 - DNA, 25 bp, Homo sapien
tgtcaaacgacatgctaccatggta

SEQ ID NO: 5406173 - DNA, 25 bp, Homo sapien
cagctgggagtccaatctatgatga

SEQ ID NO: 5406174 - DNA, 25 bp, Homo sapien
caaaactgatacaaaggaaatgtcc

SEQ ID NO: 5406175 - DNA, 25 bp, Homo sapien
tgatcctgcccattacaacagctgg

SEQ ID NO: 5406176 - DNA, 25 bp, Homo sapien
attgcaacataatagatacacacag

SEQ ID NO: 5406177 - DNA, 25 bp, Homo sapien
gacattgcataacaatgagatttgc

SEQ ID NO: 5406178 - DNA, 25 bp, Homo sapien
gaggctgtgagaatacaatattcat

SEQ ID NO: 5406179 - DNA, 25 bp, Homo sapien
tggaaagagtaagccaaagacagat

SEQ ID NO: 5406180 - DNA, 25 bp, Homo sapien
aactctgaaagttgtcactgacgtc

SEQ ID NO: 5406181 - DNA, 25 bp, Homo sapien
gaatgacttgaagctacaaaccaca

SEQ ID NO: 5406182 - DNA, 25 bp, Homo sapien
ttaacaggctaatctctggcataca

SEQ ID NO: 5406183 - DNA, 25 bp, Homo sapien
gctatctgtgctattggttatccat

SEQ ID NO: 5406184 - DNA, 25 bp, Homo sapien
tgtagaatgctaactaccaagaact

SEQ ID NO: 5406185 - DNA, 25 bp, Homo sapien
aaacaagtgaaacccatttacatag

SEQ ID NO: 5406186 - DNA, 25 bp, Homo sapien
aatccttggctataatatccgtaca

SEQ ID NO: 5406187 - DNA, 25 bp, Homo sapien
gaattaaggcctattatgtgcaaaa

SEQ ID NO: 5406188 - DNA, 25 bp, Homo sapien
taggtgtaaacaccagggctctcag

SEQ ID NO: 5406189 - DNA, 25 bp, Homo sapien
tgatgaccgtacaccaatgtgattg

SEQ ID NO: 5406190 - DNA, 25 bp, Homo sapien
tcacgatagtgaagaggcaaaagca

SEQ ID NO: 5406191 - DNA, 25 bp, Homo sapien
tgattgaactgtacatccccaaagg

SEQ ID NO: 5406192 - DNA, 25 bp, Homo sapien
taaaacgaaaggacattctggcaca

SEQ ID NO: 5406193 - DNA, 25 bp, Homo sapien
tgtttgtttgaatctggactcaaat

SEQ ID NO: 5406194 - DNA, 25 bp, Homo sapien
ggatctggctgatatgactcaagtc

SEQ ID NO: 5406195 - DNA, 25 bp, Homo sapien
aaaatccatatattggatctggctg

SEQ ID NO: 5406196 - DNA, 25 bp, Homo sapien
tctttcatatcaaacactcagtcga

SEQ ID NO: 5406197 - DNA, 25 bp, Homo sapien
cactgtaactttaggcaatagccca

SEQ ID NO: 5406198 - DNA, 25 bp, Homo sapien
taaaaggaatgttgtctaggcactg

SEQ ID NO: 5406199 - DNA, 25 bp, Homo sapien
tagcccaaaggtggaagatgttatc

SEQ ID NO: 5406200 - DNA, 25 bp, Homo sapien
gggacaaggctacatttaaatggct

SEQ ID NO: 5406201 - DNA, 25 bp, Homo sapien
ctaaggactctgtaacgtttctgaa

SEQ ID NO: 5406202 - DNA, 25 bp, Homo sapien
cactgtaagtgatcaaaatcctagg

SEQ ID NO: 5406203 - DNA, 25 bp, Homo sapien
taatcatcacgtaaggatctaagga

SEQ ID NO: 5406204 - DNA, 25 bp, Homo sapien
gatatttactgggtcactactagga

SEQ ID NO: 5406205 - DNA, 25 bp, Homo sapien
tatagtagatttcacgcccattggt

SEQ ID NO: 5406206 - DNA, 25 bp, Homo sapien
gaagtcacatcgctagtacacagtg

SEQ ID NO: 5406207 - DNA, 25 bp, Homo sapien
taaaattctatcacgaagagggagg

SEQ ID NO: 5406208 - DNA, 25 bp, Homo sapien
cacaaagaggctgacttgctagaag

SEQ ID NO: 5406209 - DNA, 25 bp, Homo sapien
tagcatgaatgtaagtgtggagcca

SEQ ID NO: 5406210 - DNA, 25 bp, Homo sapien
ccacattaggtagagtgtacagttc

SEQ ID NO: 5406211 - DNA, 25 bp, Homo sapien
gcctgggcacagttgttcactccta

SEQ ID NO: 5406212 - DNA, 25 bp, Homo sapien
gccaaaatgtgtatccaaggtaggg

SEQ ID NO: 5406213 - DNA, 25 bp, Homo sapien
caattctcattctcagagaaaacca

SEQ ID NO: 5406214 - DNA, 25 bp, Homo sapien
tcaaaaaagatgacgttcagaattt

SEQ ID NO: 5406215 - DNA, 25 bp, Homo sapien
taactagctagaagtataagatatg

SEQ ID NO: 5406216 - DNA, 25 bp, Homo sapien
tgtggaatcaccttaacctttctgt

SEQ ID NO: 5406217 - DNA, 25 bp, Homo sapien
tgtgatcaatgtggtcaatcttgtg

SEQ ID NO: 5406218 - DNA, 25 bp, Homo sapien
gtgatcaatgtggtcaatcttgtga

SEQ ID NO: 5406219 - DNA, 25 bp, Homo sapien
tgtttataatcaccaacaccctagg

SEQ ID NO: 5406220 - DNA, 25 bp, Homo sapien
taacctacggtatcagggtccatat

SEQ ID NO: 5406221 - DNA, 25 bp, Homo sapien
caccctagggtgaacataacatatt

SEQ ID NO: 5406222 - DNA, 25 bp, Homo sapien
caagaattagcaatcagctgaagca

SEQ ID NO: 5406223 - DNA, 25 bp, Homo sapien
cagaaggtagctacataggccaggc

SEQ ID NO: 5406224 - DNA, 25 bp, Homo sapien
taagtcactgcaagaagcatttggg

SEQ ID NO: 5406225 - DNA, 25 bp, Homo sapien
taacaaacgccacctccttagagag

SEQ ID NO: 5406226 - DNA, 25 bp, Homo sapien
ttcaatcgggtctcataacaaacgc

SEQ ID NO: 5406227 - DNA, 25 bp, Homo sapien
gtccttctaagctatatacatgcag

SEQ ID NO: 5406228 - DNA, 25 bp, Homo sapien
catgcagttgcatagtgtaaaaacg

SEQ ID NO: 5406229 - DNA, 25 bp, Homo sapien
tcttatgatgtgacagcaatgtcct

SEQ ID NO: 5406230 - DNA, 25 bp, Homo sapien
catgtacagcctttgatttgattaa

SEQ ID NO: 5406231 - DNA, 25 bp, Homo sapien
tgatctttacccctagttactggta

SEQ ID NO: 5406232 - DNA, 25 bp, Homo sapien
tgtgtgggaagcttagccatgaatc

SEQ ID NO: 5406233 - DNA, 25 bp, Homo sapien
gccatgaatctaggatgtgtagata

SEQ ID NO: 5406234 - DNA, 25 bp, Homo sapien
tgtctcttatgctaaacagatgatt

SEQ ID NO: 5406235 - DNA, 25 bp, Homo sapien
gattattttggccaggattgccaaa

SEQ ID NO: 5406236 - DNA, 25 bp, Homo sapien
aaaagaaatattatgagggcaaaat

SEQ ID NO: 5406237 - DNA, 25 bp, Homo sapien
attgggccaaagattataagtgacc

SEQ ID NO: 5406238 - DNA, 25 bp, Homo sapien
ggaccagaaagtgggaaacgagata

SEQ ID NO: 5406239 - DNA, 25 bp, Homo sapien
acatggcaaaatcccttacctacaa

SEQ ID NO: 5406240 - DNA, 25 bp, Homo sapien
tgtatatcatatatctgaagacagt

SEQ ID NO: 5406241 - DNA, 25 bp, Homo sapien
aaaacacttataactactcaataat

SEQ ID NO: 5406242 - DNA, 25 bp, Homo sapien
ctgaagacagttgtatccaaaatat

SEQ ID NO: 5406243 - DNA, 25 bp, Homo sapien
ggacagcaggccagcactacaacgt

SEQ ID NO: 5406244 - DNA, 25 bp, Homo sapien
cactgggcctggatgttcatattat

SEQ ID NO: 5406245 - DNA, 25 bp, Homo sapien
ggccagcactacaacgtctaaataa

SEQ ID NO: 5406246 - DNA, 25 bp, Homo sapien
tgggcctggatgttcatattattta

SEQ ID NO: 5406247 - DNA, 25 bp, Homo sapien
cctgctgtcatgattgggagcttcc

SEQ ID NO: 5406248 - DNA, 25 bp, Homo sapien
taatagactcttgggagtaggagca

SEQ ID NO: 5406249 - DNA, 25 bp, Homo sapien
ggagcagaagccctagaaggctact

SEQ ID NO: 5406250 - DNA, 25 bp, Homo sapien
gaaggctactacaaatatccaagaa

SEQ ID NO: 5406251 - DNA, 25 bp, Homo sapien
taatgggacatggtaactacaggtg

SEQ ID NO: 5406252 - DNA, 25 bp, Homo sapien
ggcaaatgaacaactctgaagcaaa

SEQ ID NO: 5406253 - DNA, 25 bp, Homo sapien
cagtgggctgacatgaaataatatc

SEQ ID NO: 5406254 - DNA, 25 bp, Homo sapien
tgatcaacaggcttccattacacac

SEQ ID NO: 5406255 - DNA, 25 bp, Homo sapien
ttaggcaggtgtgatggcaggtgcc

SEQ ID NO: 5406256 - DNA, 25 bp, Homo sapien
tgggcgacaggagcgaaactctgtc

SEQ ID NO: 5406257 - DNA, 25 bp, Homo sapien
tgtaattccagctactcgggaggct

SEQ ID NO: 5406258 - DNA, 25 bp, Homo sapien
aaattaggcaggtgtgatggcaggt

SEQ ID NO: 5406259 - DNA, 25 bp, Homo sapien
ggtgcttcctatgtcatcacaatgg

SEQ ID NO: 5406260 - DNA, 25 bp, Homo sapien
tcagcatgctgcactaacaacccag

SEQ ID NO: 5406261 - DNA, 25 bp, Homo sapien
cattttgtgacttatacacggctcc

SEQ ID NO: 5406262 - DNA, 25 bp, Homo sapien
caaagatcagaagcatgtttcaaca

SEQ ID NO: 5406263 - DNA, 25 bp, Homo sapien
tcatccgaaggaactaaaagaagta

SEQ ID NO: 5406264 - DNA, 25 bp, Homo sapien
tccttatggatatgcccgttactgg

SEQ ID NO: 5406265 - DNA, 25 bp, Homo sapien
tttttgagccagagccatcatcatg

SEQ ID NO: 5406266 - DNA, 25 bp, Homo sapien
cccgttactggcagtccagcagtct

SEQ ID NO: 5406267 - DNA, 25 bp, Homo sapien
ccgtctttgattaatgagtgcatgt

SEQ ID NO: 5406268 - DNA, 25 bp, Homo sapien
tgagtgcatgtttgtggaaaagtgt

SEQ ID NO: 5406269 - DNA, 25 bp, Homo sapien
ttgtggaaaagtgttaagaggagaa

SEQ ID NO: 5406270 - DNA, 25 bp, Homo sapien
cagcaggagtgcaccgtctttgatt

SEQ ID NO: 5406271 - DNA, 25 bp, Homo sapien
tagctttagtcagtaatgtacaacc

SEQ ID NO: 5406272 - DNA, 25 bp, Homo sapien
gagtcatagtcaaaggtaacagaat

SEQ ID NO: 5406273 - DNA, 25 bp, Homo sapien
tatggctactatgtaaaaagggttg

SEQ ID NO: 5406274 - DNA, 25 bp, Homo sapien
gataaactaagcatcaggagtcctt

SEQ ID NO: 5406275 - DNA, 25 bp, Homo sapien
tgttaccaaaacatacaatacgcag

SEQ ID NO: 5406276 - DNA, 25 bp, Homo sapien
ccataagggagagtggagcaaataa

SEQ ID NO: 5406277 - DNA, 25 bp, Homo sapien
taaagtttacatgacgtcactgggc

SEQ ID NO: 5406278 - DNA, 25 bp, Homo sapien
aaattgcccaagatggcgaaacgct

SEQ ID NO: 5406279 - DNA, 25 bp, Homo sapien
caatgctcctcaaaccttctgcgtg

SEQ ID NO: 5406280 - DNA, 25 bp, Homo sapien
gacatagaccttcccaggtatccag

SEQ ID NO: 5406281 - DNA, 25 bp, Homo sapien
aaaccttctgcgtgctgacatagac

SEQ ID NO: 5406282 - DNA, 25 bp, Homo sapien
cttactgtatgagaagcaatgctcc

SEQ ID NO: 5406283 - DNA, 25 bp, Homo sapien
cggggcgagcgcctccacgcagcaa

SEQ ID NO: 5406284 - DNA, 25 bp, Homo sapien
accggcgaggataaacagcggcgga

SEQ ID NO: 5406285 - DNA, 25 bp, Homo sapien
gcgaggataaacagcggcggagggc

SEQ ID NO: 5406286 - DNA, 25 bp, Homo sapien
cgaccggcgaggataaacagcggcg

SEQ ID NO: 5406287 - DNA, 25 bp, Homo sapien
gagatttgtgatcgggaaagccttc

SEQ ID NO: 5406288 - DNA, 25 bp, Homo sapien
agtgacgtcaaccaacaaggcttct

SEQ ID NO: 5406289 - DNA, 25 bp, Homo sapien
gcttcacttctaggcgaaggcttca

SEQ ID NO: 5406290 - DNA, 25 bp, Homo sapien
ctgattagttcctatccagcagcag

SEQ ID NO: 5406291 - DNA, 25 bp, Homo sapien
atccttggaatttagatcattccct

SEQ ID NO: 5406292 - DNA, 25 bp, Homo sapien
atcattccctcaattcaggagtcct

SEQ ID NO: 5406293 - DNA, 25 bp, Homo sapien
ccttggaatttagatcattccctca

SEQ ID NO: 5406294 - DNA, 25 bp, Homo sapien
tccctcaattcaggagtcctgaagc

SEQ ID NO: 5406295 - DNA, 25 bp, Homo sapien
ggctcttatccatgaccaccaagga

SEQ ID NO: 5406296 - DNA, 25 bp, Homo sapien
acaaaagtctctgcgtggtaatcaa

SEQ ID NO: 5406297 - DNA, 25 bp, Homo sapien
tcaagaacgacaggcacaaacaagc

SEQ ID NO: 5406298 - DNA, 25 bp, Homo sapien
cccagacggtggagactataataaa

SEQ ID NO: 5406299 - DNA, 25 bp, Homo sapien
tctagtctggtaggtggcaaaaggc

SEQ ID NO: 5406300 - DNA, 25 bp, Homo sapien
cccaatgccccataaatagtgaggt

SEQ ID NO: 5406301 - DNA, 25 bp, Homo sapien
cacaggaccatttaagtttagggct

SEQ ID NO: 5406302 - DNA, 25 bp, Homo sapien
aaggattccacactattgatgcaag

SEQ ID NO: 5406303 - DNA, 25 bp, Homo sapien
ttctgaagatccaagttttctgtta

SEQ ID NO: 5406304 - DNA, 25 bp, Homo sapien
tttctgttaatatcatttcttgctc

SEQ ID NO: 5406305 - DNA, 25 bp, Homo sapien
cagtggcttttccagtactactacc

SEQ ID NO: 5406306 - DNA, 25 bp, Homo sapien
cccagtggcttttccagtactacta

SEQ ID NO: 5406307 - DNA, 25 bp, Homo sapien
tccccagtggcttttccagtactac

SEQ ID NO: 5406308 - DNA, 25 bp, Homo sapien
tactactaccttcaccatgaagctc

SEQ ID NO: 5406309 - DNA, 25 bp, Homo sapien
ttctaacaaagaaatcatggagacg

SEQ ID NO: 5406310 - DNA, 25 bp, Homo sapien
caaagaaatcatggagacgataaat

SEQ ID NO: 5406311 - DNA, 25 bp, Homo sapien
taacaaagaaatcatggagacgata

SEQ ID NO: 5406312 - DNA, 25 bp, Homo sapien
aaagaaatcatggagacgataaata

SEQ ID NO: 5406313 - DNA, 25 bp, Homo sapien
gatttggcagaattgctggtactga

SEQ ID NO: 5406314 - DNA, 25 bp, Homo sapien
tttggcagaattgctggtactgagc

SEQ ID NO: 5406315 - DNA, 25 bp, Homo sapien
tggcagaattgctggtactgagcat

SEQ ID NO: 5406316 - DNA, 25 bp, Homo sapien
cagatttggcagaattgctggtact

SEQ ID NO: 5406317 - DNA, 25 bp, Homo sapien
ggaagttgggcagtttttgccctga

SEQ ID NO: 5406318 - DNA, 25 bp, Homo sapien
gacatggaagttgggcagtttttgc

SEQ ID NO: 5406319 - DNA, 25 bp, Homo sapien
gttgggcagtttttgccctgaatgt

SEQ ID NO: 5406320 - DNA, 25 bp, Homo sapien
aagttgggcagtttttgccctgaat

SEQ ID NO: 5406321 - DNA, 25 bp, Homo sapien
aatagatcagccactttcgtcttgg

SEQ ID NO: 5406322 - DNA, 25 bp, Homo sapien
gatgacagaggcaatacaaaaccaa

SEQ ID NO: 5406323 - DNA, 25 bp, Homo sapien
taaggcgctcattctcgccaactgc

SEQ ID NO: 5406324 - DNA, 25 bp, Homo sapien
tgcagaagtccgcacactgtatctt

SEQ ID NO: 5406325 - DNA, 25 bp, Homo sapien
gaggaggttaggacacagacaacac

SEQ ID NO: 5406326 - DNA, 25 bp, Homo sapien
cagcaccagtttacggagcattgag

SEQ ID NO: 5406327 - DNA, 25 bp, Homo sapien
caactaaattcacgtgtggaagtcc

SEQ ID NO: 5406328 - DNA, 25 bp, Homo sapien
acagggaagttagccatctacaagc

SEQ ID NO: 5406329 - DNA, 25 bp, Homo sapien
aacctggaaaatgtaggatactgcc

SEQ ID NO: 5406330 - DNA, 25 bp, Homo sapien
cacctggctatctattgagaagaca

SEQ ID NO: 5406331 - DNA, 25 bp, Homo sapien
cactgtgaaagcagcagagtgataa

SEQ ID NO: 5406332 - DNA, 25 bp, Homo sapien
tgagaataattaagcacaacctgga

SEQ ID NO: 5406333 - DNA, 25 bp, Homo sapien
aatatatcccttagaagtaggagtc

SEQ ID NO: 5406334 - DNA, 25 bp, Homo sapien
ccttagaagtaggagtcctcatgac

SEQ ID NO: 5406335 - DNA, 25 bp, Homo sapien
taagtaatatatcccttagaagtag

SEQ ID NO: 5406336 - DNA, 25 bp, Homo sapien
gaagtaggagtcctcatgacatttt

SEQ ID NO: 5406337 - DNA, 25 bp, Homo sapien
gggacaaagccataatctgccaaaa

SEQ ID NO: 5406338 - DNA, 25 bp, Homo sapien
tagagtagttaccactgccaggtct

SEQ ID NO: 5406339 - DNA, 25 bp, Homo sapien
ccaggtttgggagttctgtagagta

SEQ ID NO: 5406340 - DNA, 25 bp, Homo sapien
caaaatctgcaccatccttgccagg

SEQ ID NO: 5406341 - DNA, 25 bp, Homo sapien
tgcagttagatcacacagggcgggc

SEQ ID NO: 5406342 - DNA, 25 bp, Homo sapien
tttactgcaaaatcgatggctacgc

SEQ ID NO: 5406343 - DNA, 25 bp, Homo sapien
attcactgcgccacttaccaagagc

SEQ ID NO: 5406344 - DNA, 25 bp, Homo sapien
caactcttaagggaaagggcttgca

SEQ ID NO: 5406345 - DNA, 25 bp, Homo sapien
agtcagagcaccaccccgcggtggg

SEQ ID NO: 5406346 - DNA, 25 bp, Homo sapien
gaagccaggaagtccgcgaagtggg

SEQ ID NO: 5406347 - DNA, 25 bp, Homo sapien
tcttcaacggttcccgcagtcagag

SEQ ID NO: 5406348 - DNA, 25 bp, Homo sapien
cgccactctcgcgagaagccaggaa

SEQ ID NO: 5406349 - DNA, 25 bp, Homo sapien
gggcgggcgccattgtgcttcgctg

SEQ ID NO: 5406350 - DNA, 25 bp, Homo sapien
gggcgccattgtgcttcgctgccga

SEQ ID NO: 5406351 - DNA, 25 bp, Homo sapien
gttctgcgccggatccgggagaggg

SEQ ID NO: 5406352 - DNA, 25 bp, Homo sapien
tggtggctggttctgcgccggatcc

SEQ ID NO: 5406353 - DNA, 25 bp, Homo sapien
tgagaatctacaagccagtatgtgt

SEQ ID NO: 5406354 - DNA, 25 bp, Homo sapien
tatattaagcagtacacaatggcct

SEQ ID NO: 5406355 - DNA, 25 bp, Homo sapien
tagaggacgtaggttaatggaatct

SEQ ID NO: 5406356 - DNA, 25 bp, Homo sapien
ttcattttcaatcagagggttgctg

SEQ ID NO: 5406357 - DNA, 25 bp, Homo sapien
ggtcagaaaccttgcattaaaataa

SEQ ID NO: 5406358 - DNA, 25 bp, Homo sapien
tccccatagctgtaagttttttgag

SEQ ID NO: 5406359 - DNA, 25 bp, Homo sapien
tgttccaaaatagggatgccaacct

SEQ ID NO: 5406360 - DNA, 25 bp, Homo sapien
gatacagtttagaatgaagagctca

SEQ ID NO: 5406361 - DNA, 25 bp, Homo sapien
gcccctttaaattgtcaggttcaga

SEQ ID NO: 5406362 - DNA, 25 bp, Homo sapien
tctcccttgagctaaatacgccact

SEQ ID NO: 5406363 - DNA, 25 bp, Homo sapien
gggcctctagactaactagtgccaa

SEQ ID NO: 5406364 - DNA, 25 bp, Homo sapien
gatgaaccagttgcccaattcagtt

SEQ ID NO: 5406365 - DNA, 25 bp, Homo sapien
gaaaatatgggacaaggagtcctaa

SEQ ID NO: 5406366 - DNA, 25 bp, Homo sapien
tattgttgatcaccttgatttcagg

SEQ ID NO: 5406367 - DNA, 25 bp, Homo sapien
tattcctgggcttacctatgattcc

SEQ ID NO: 5406368 - DNA, 25 bp, Homo sapien
cctgttactcaggtttgttagatca

SEQ ID NO: 5406369 - DNA, 25 bp, Homo sapien
taagatcacattccagcatcaggat

SEQ ID NO: 5406370 - DNA, 25 bp, Homo sapien
ttaataggtagccagctctgccaac

SEQ ID NO: 5406371 - DNA, 25 bp, Homo sapien
tagaaattgaagattaccccaccca

SEQ ID NO: 5406372 - DNA, 25 bp, Homo sapien
cagtgtgcttcataccatgtgggca

SEQ ID NO: 5406373 - DNA, 25 bp, Homo sapien
tgtgagagcacttgccttaagttga

SEQ ID NO: 5406374 - DNA, 25 bp, Homo sapien
ccagattttactcaggtgtgtgaga

SEQ ID NO: 5406375 - DNA, 25 bp, Homo sapien
catgcagcggtaataagccagattt

SEQ ID NO: 5406376 - DNA, 25 bp, Homo sapien
tcttttcattctcatcggatgcacc

SEQ ID NO: 5406377 - DNA, 25 bp, Homo sapien
acaatatactaaattgggatttttg

SEQ ID NO: 5406378 - DNA, 25 bp, Homo sapien
cctgtcatacaacttatcattttga

SEQ ID NO: 5406379 - DNA, 25 bp, Homo sapien
caatatactaaattgggatttttgt

SEQ ID NO: 5406380 - DNA, 25 bp, Homo sapien
tgtcatacaacttatcattttgatc

SEQ ID NO: 5406381 - DNA, 25 bp, Homo sapien
caccttaaggtctgatgttatggca

SEQ ID NO: 5406382 - DNA, 25 bp, Homo sapien
tcttctgtcagtacccttaggatac

SEQ ID NO: 5406383 - DNA, 25 bp, Homo sapien
tcaaaagtgattgaacagtttgccc

SEQ ID NO: 5406384 - DNA, 25 bp, Homo sapien
catgaatggatctatactgtgtggt

SEQ ID NO: 5406385 - DNA, 25 bp, Homo sapien
tgctcacctcttgccagttaccttt

SEQ ID NO: 5406386 - DNA, 25 bp, Homo sapien
ttgctcacctcttgccagttacctt

SEQ ID NO: 5406387 - DNA, 25 bp, Homo sapien
atttgctcacctcttgccagttacc

SEQ ID NO: 5406388 - DNA, 25 bp, Homo sapien
tttgctcacctcttgccagttacct

SEQ ID NO: 5406389 - DNA, 25 bp, Homo sapien
agggtggtagttttaatatattctg

SEQ ID NO: 5406390 - DNA, 25 bp, Homo sapien
agttttaatatattctgtgggtcct

SEQ ID NO: 5406391 - DNA, 25 bp, Homo sapien
gttttaatatattctgtgggtccta

SEQ ID NO: 5406392 - DNA, 25 bp, Homo sapien
tcctaagggatgctttgaatttgaa

SEQ ID NO: 5406393 - DNA, 25 bp, Homo sapien
tatatagcacttcattaccagaggc

SEQ ID NO: 5406394 - DNA, 25 bp, Homo sapien
tgtaacagctggtgtaatgcctgca

SEQ ID NO: 5406395 - DNA, 25 bp, Homo sapien
gatacagcaggcaagacaaataggc

SEQ ID NO: 5406396 - DNA, 25 bp, Homo sapien
gacaaaataggctctaccatctggg

SEQ ID NO: 5406397 - DNA, 25 bp, Homo sapien
aatgaacctaaagacttttcacagc

SEQ ID NO: 5406398 - DNA, 25 bp, Homo sapien
ctgccagggcattttgttgatgtct

SEQ ID NO: 5406399 - DNA, 25 bp, Homo sapien
tttcccaagttatctctgccagggc

SEQ ID NO: 5406400 - DNA, 25 bp, Homo sapien
gatgtcttagtgcaagattaccaaa

SEQ ID NO: 5406401 - DNA, 25 bp, Homo sapien
ttagtcaaattgaacaggatattca

SEQ ID NO: 5406402 - DNA, 25 bp, Homo sapien
aactgtcaaaattaccgtgctagca

SEQ ID NO: 5406403 - DNA, 25 bp, Homo sapien
caccaatgctgatattaaaatgtgg

SEQ ID NO: 5406404 - DNA, 25 bp, Homo sapien
tgaaaaaactgtggtgaaacgagaa

SEQ ID NO: 5406405 - DNA, 25 bp, Homo sapien
caaatgattgctcccaaaactgtca

SEQ ID NO: 5406406 - DNA, 25 bp, Homo sapien
acaaacatacttttgggcaggtact

SEQ ID NO: 5406407 - DNA, 25 bp, Homo sapien
taagattagtgagagaaatttggcc

SEQ ID NO: 5406408 - DNA, 25 bp, Homo sapien
ccctaaatttctgtaagtatgcaca

SEQ ID NO: 5406409 - DNA, 25 bp, Homo sapien
tattgaggtttaatggttcacctgg

SEQ ID NO: 5406410 - DNA, 25 bp, Homo sapien
tgatgctatgaacatagatacacaa

SEQ ID NO: 5406411 - DNA, 25 bp, Homo sapien
ttgtttagcctaatgtccttcaggt

SEQ ID NO: 5406412 - DNA, 25 bp, Homo sapien
cacaaatatcaaacagatgggtgta

SEQ ID NO: 5406413 - DNA, 25 bp, Homo sapien
tatcccttcatcagtggacacttgg

SEQ ID NO: 5406414 - DNA, 25 bp, Homo sapien
tcttattactaagagacctttctac

SEQ ID NO: 5406415 - DNA, 25 bp, Homo sapien
aaaatgttgagtcttattactaaga

SEQ ID NO: 5406416 - DNA, 25 bp, Homo sapien
tgttgagtcttattactaagagacc

SEQ ID NO: 5406417 - DNA, 25 bp, Homo sapien
agagacctttctacattcttataaa

SEQ ID NO: 5406418 - DNA, 25 bp, Homo sapien
gataaatatttccttttgtatggga

SEQ ID NO: 5406419 - DNA, 25 bp, Homo sapien
tgataaatatttccttttgtatggg

SEQ ID NO: 5406420 - DNA, 25 bp, Homo sapien
ctgataaatatttccttttgtatgg

SEQ ID NO: 5406421 - DNA, 25 bp, Homo sapien
aaaagaggattctggttggagagtc

SEQ ID NO: 5406422 - DNA, 25 bp, Homo sapien
catgcattagcttggttggtggaaa

SEQ ID NO: 5406423 - DNA, 25 bp, Homo sapien
actaccttagtatggatgtactcac

SEQ ID NO: 5406424 - DNA, 25 bp, Homo sapien
acaactgtgaccctaactaccttag

SEQ ID NO: 5406425 - DNA, 25 bp, Homo sapien
tcttgatgtgcagaaaagcacaggt

SEQ ID NO: 5406426 - DNA, 25 bp, Homo sapien
gcacaggtgtcaactaaatcctcat

SEQ ID NO: 5406427 - DNA, 25 bp, Homo sapien
tttgaattatcaaaccacttgaaac

SEQ ID NO: 5406428 - DNA, 25 bp, Homo sapien
tggtctgtccacttatcaaatgtca

SEQ ID NO: 5406429 - DNA, 25 bp, Homo sapien
catctgtgtcataaaacatgcctag

SEQ ID NO: 5406430 - DNA, 25 bp, Homo sapien
tgtgtcataaaacatgcctagtagg

SEQ ID NO: 5406431 - DNA, 25 bp, Homo sapien
aaaacatgcctagtaggatatcatc

SEQ ID NO: 5406432 - DNA, 25 bp, Homo sapien
cctagtaggatatcatctgggcctt

SEQ ID NO: 5406433 - DNA, 25 bp, Homo sapien
tcttggaactgaatccaagtagatg

SEQ ID NO: 5406434 - DNA, 25 bp, Homo sapien
ctgatttctgacatcctctatgctt

SEQ ID NO: 5406435 - DNA, 25 bp, Homo sapien
gctttctactttgatggcttcttgg

SEQ ID NO: 5406436 - DNA, 25 bp, Homo sapien
catggtcagtacactgatttctgac

SEQ ID NO: 5406437 - DNA, 25 bp, Homo sapien
taccttgggtttaactctggcagga

SEQ ID NO: 5406438 - DNA, 25 bp, Homo sapien
gaattacacatatgactaccttggg

SEQ ID NO: 5406439 - DNA, 25 bp, Homo sapien
gatacggttgttttgcaacaagcag

SEQ ID NO: 5406440 - DNA, 25 bp, Homo sapien
tctggcaggaatctagaactctccc

SEQ ID NO: 5406441 - DNA, 25 bp, Homo sapien
catacccatataattatcagaggaa

SEQ ID NO: 5406442 - DNA, 25 bp, Homo sapien
gtaaacatacccatataattatcag

SEQ ID NO: 5406443 - DNA, 25 bp, Homo sapien
tccaaaggtcatctctaacctaact

SEQ ID NO: 5406444 - DNA, 25 bp, Homo sapien
aatgaggaacagaacattaacccct

SEQ ID NO: 5406445 - DNA, 25 bp, Homo sapien
gggccatcgagtatgcatgtgccca

SEQ ID NO: 5406446 - DNA, 25 bp, Homo sapien
atgtgcccagctttcacagatactg

SEQ ID NO: 5406447 - DNA, 25 bp, Homo sapien
tacttcttgtgagtacctttgtaga

SEQ ID NO: 5406448 - DNA, 25 bp, Homo sapien
ctatgcatacttcttgtgagtacct

SEQ ID NO: 5406449 - DNA, 25 bp, Homo sapien
tacaggttccgcaagttactgcaga

SEQ ID NO: 5406450 - DNA, 25 bp, Homo sapien
taagatgtacatagtcatgcaccat

SEQ ID NO: 5406451 - DNA, 25 bp, Homo sapien
gatagactatatatggcagggttcc

SEQ ID NO: 5406452 - DNA, 25 bp, Homo sapien
cagggttcccatgaggttataatac

SEQ ID NO: 5406453 - DNA, 25 bp, Homo sapien
gatccgtagggattgccagttgaaa

SEQ ID NO: 5406454 - DNA, 25 bp, Homo sapien
gaaagcctggatattaactagagcc

SEQ ID NO: 5406455 - DNA, 25 bp, Homo sapien
cactatgagattgccaaaaactctg

SEQ ID NO: 5406456 - DNA, 25 bp, Homo sapien
aagaggtgttctagactttgtagac

SEQ ID NO: 5406457 - DNA, 25 bp, Homo sapien
tttctagtcaaaactacagatagtg

SEQ ID NO: 5406458 - DNA, 25 bp, Homo sapien
tataatcaacactcaagtcaagcac

SEQ ID NO: 5406459 - DNA, 25 bp, Homo sapien
ttaaaaaagtgaaatggaactgcat

SEQ ID NO: 5406460 - DNA, 25 bp, Homo sapien
ttggcaattattgaaccacaggttc

SEQ ID NO: 5406461 - DNA, 25 bp, Homo sapien
agtcacataacttccgcaagggcaa

SEQ ID NO: 5406462 - DNA, 25 bp, Homo sapien
aataataagacctttgctcctctcc

SEQ ID NO: 5406463 - DNA, 25 bp, Homo sapien
ccattaagatatgagttgtagtcac

SEQ ID NO: 5406464 - DNA, 25 bp, Homo sapien
gctcctctcccattaagatatgagt

SEQ ID NO: 5406465 - DNA, 25 bp, Homo sapien
catcataagagcttttctattaaga

SEQ ID NO: 5406466 - DNA, 25 bp, Homo sapien
tcatacgttttctggttgcaacaat

SEQ ID NO: 5406467 - DNA, 25 bp, Homo sapien
catatgaatgtgttcagtaaccata

SEQ ID NO: 5406468 - DNA, 25 bp, Homo sapien
gtttttcagccctataacattagca

SEQ ID NO: 5406469 - DNA, 25 bp, Homo sapien
gaaaagcctattgatccacactgga

SEQ ID NO: 5406470 - DNA, 25 bp, Homo sapien
gaaatttgccctctattgctggtca

SEQ ID NO: 5406471 - DNA, 25 bp, Homo sapien
gcctcgcagagggtggtttacatga

SEQ ID NO: 5406472 - DNA, 25 bp, Homo sapien
gatgaaccacgcctgtaatagggac

SEQ ID NO: 5406473 - DNA, 25 bp, Homo sapien
accttgggtttgtatccaagttctg

SEQ ID NO: 5406474 - DNA, 25 bp, Homo sapien
tcataaatgcaggtccacagaagtt

SEQ ID NO: 5406475 - DNA, 25 bp, Homo sapien
gggtttgtatccaagttctgagctg

SEQ ID NO: 5406476 - DNA, 25 bp, Homo sapien
caacactgaggtccactgaaatatt

SEQ ID NO: 5406477 - DNA, 25 bp, Homo sapien
tgtcagtagacttcgagcaggcagt

SEQ ID NO: 5406478 - DNA, 25 bp, Homo sapien
cgctgcttgcaaaagagggcctact

SEQ ID NO: 5406479 - DNA, 25 bp, Homo sapien
aaccaactagacaaacagcgctgct

SEQ ID NO: 5406480 - DNA, 25 bp, Homo sapien
tcagcccgaaattgccctgaaacgg

SEQ ID NO: 5406481 - DNA, 25 bp, Homo sapien
cggcgaggcccagcaacggcagcag

SEQ ID NO: 5406482 - DNA, 25 bp, Homo sapien
agcggcgaggcccagcaacggcagc

SEQ ID NO: 5406483 - DNA, 25 bp, Homo sapien
cagcagcggcgaggcccagcaacgg

SEQ ID NO: 5406484 - DNA, 25 bp, Homo sapien
gcgaggcccagcaacggcagcagga

SEQ ID NO: 5406485 - DNA, 25 bp, Homo sapien
gctggcgcgcggccttctggaactt

SEQ ID NO: 5406486 - DNA, 25 bp, Homo sapien
taggactttcgaaaatgttgcaaaa

SEQ ID NO: 5406487 - DNA, 25 bp, Homo sapien
ggtgcttctcgcgtgcgagtttaat

SEQ ID NO: 5406488 - DNA, 25 bp, Homo sapien
agagatttccgtaacccttcagcca

SEQ ID NO: 5406489 - DNA, 25 bp, Homo sapien
ggccaactcggaatctgtggtctcc

SEQ ID NO: 5406490 - DNA, 25 bp, Homo sapien
ccaactcggaatctgtggtctccgc

SEQ ID NO: 5406491 - DNA, 25 bp, Homo sapien
ctggccaactcggaatctgtggtct

SEQ ID NO: 5406492 - DNA, 25 bp, Homo sapien
tggccaactcggaatctgtggtctc

SEQ ID NO: 5406493 - DNA, 25 bp, Homo sapien
gcctcgctttacaataggtggtcaa

SEQ ID NO: 5406494 - DNA, 25 bp, Homo sapien
gcaaatgcctcgctttacaataggt

SEQ ID NO: 5406495 - DNA, 25 bp, Homo sapien
cgctttacaataggtggtcaattta

SEQ ID NO: 5406496 - DNA, 25 bp, Homo sapien
cttagcaaatgcctcgctttacaat

SEQ ID NO: 5406497 - DNA, 25 bp, Homo sapien
tgtggataccagcacatgcctaaga

SEQ ID NO: 5406498 - DNA, 25 bp, Homo sapien
catcacaaggtttagagttccactg

SEQ ID NO: 5406499 - DNA, 25 bp, Homo sapien
tagcagggaattaactgtggatacc

SEQ ID NO: 5406500 - DNA, 25 bp, Homo sapien
tagacatgtcacctagtaatatgcc

SEQ ID NO: 5406501 - DNA, 25 bp, Homo sapien
tccgcccatgagaactaagatactt

SEQ ID NO: 5406502 - DNA, 25 bp, Homo sapien
cactccttgtgcatatcgaactgat

SEQ ID NO: 5406503 - DNA, 25 bp, Homo sapien
gaggaaccaaatcagtccgcccatg

SEQ ID NO: 5406504 - DNA, 25 bp, Homo sapien
agaaacccgccaggtgcaaacggtg

SEQ ID NO: 5406505 - DNA, 25 bp, Homo sapien
gctatcaacatgctacatcttccaa

SEQ ID NO: 5406506 - DNA, 25 bp, Homo sapien
cagaggcactttgcagacaactctt

SEQ ID NO: 5406507 - DNA, 25 bp, Homo sapien
tgtcacttctgatccatctaaccaa

SEQ ID NO: 5406508 - DNA, 25 bp, Homo sapien
caagtttcatttgaagctatcaaca

SEQ ID NO: 5406509 - DNA, 25 bp, Homo sapien
caagttcacctaaaccctgtatcta

SEQ ID NO: 5406510 - DNA, 25 bp, Homo sapien
tctgcaattttataggttggcgcaa

SEQ ID NO: 5406511 - DNA, 25 bp, Homo sapien
ccatgcggtgacaggcactagaact

SEQ ID NO: 5406512 - DNA, 25 bp, Homo sapien
tgaataacgaagttataagctgcaa

SEQ ID NO: 5406513 - DNA, 25 bp, Homo sapien
cagaatgttgagataatccaagcca

SEQ ID NO: 5406514 - DNA, 25 bp, Homo sapien
tcttttatggaaacgatagttgcag

SEQ ID NO: 5406515 - DNA, 25 bp, Homo sapien
tcagtctgctcacaaatttattctc

SEQ ID NO: 5406516 - DNA, 25 bp, Homo sapien
aaactctcatggtaatgttattatt

SEQ ID NO: 5406517 - DNA, 25 bp, Homo sapien
ttgaacacaattttttggcctctga

SEQ ID NO: 5406518 - DNA, 25 bp, Homo sapien
aaaactgtgcaatgcctgatcagac

SEQ ID NO: 5406519 - DNA, 25 bp, Homo sapien
cctgatcagacttgtaacagtgacc

SEQ ID NO: 5406520 - DNA, 25 bp, Homo sapien
tgtgcaatgcctgatcagacttgta

SEQ ID NO: 5406521 - DNA, 25 bp, Homo sapien
tatgtaagacgggacagctttttag

SEQ ID NO: 5406522 - DNA, 25 bp, Homo sapien
gatgaatatgtaagacgggacagct

SEQ ID NO: 5406523 - DNA, 25 bp, Homo sapien
gaatatgtaagacgggacagctttt

SEQ ID NO: 5406524 - DNA, 25 bp, Homo sapien
tgaatatgtaagacgggacagcttt

SEQ ID NO: 5406525 - DNA, 25 bp, Homo sapien
tagggcccaccattatccaatatgt

SEQ ID NO: 5406526 - DNA, 25 bp, Homo sapien
cattggaggctgtattggagaatct

SEQ ID NO: 5406527 - DNA, 25 bp, Homo sapien
gagaatctgtctcgtgcctccctct

SEQ ID NO: 5406528 - DNA, 25 bp, Homo sapien
tcttctggtggttgccgacagtcct

SEQ ID NO: 5406529 - DNA, 25 bp, Homo sapien
gaattcacaaattctagggtagaat

SEQ ID NO: 5406530 - DNA, 25 bp, Homo sapien
caaatttatatgttgtgggaccctt

SEQ ID NO: 5406531 - DNA, 25 bp, Homo sapien
atgaaagtcattgggaataaattcc

SEQ ID NO: 5406532 - DNA, 25 bp, Homo sapien
ttaatacggtaaatcacatgaggtg

SEQ ID NO: 5406533 - DNA, 25 bp, Homo sapien
taacaaatagcaccatccttaacag

SEQ ID NO: 5406534 - DNA, 25 bp, Homo sapien
catccttaacagagttgcatttttc

SEQ ID NO: 5406535 - DNA, 25 bp, Homo sapien
aatagcaccatccttaacagagttg

SEQ ID NO: 5406536 - DNA, 25 bp, Homo sapien
gtttataacaaatagcaccatcctt

SEQ ID NO: 5406537 - DNA, 25 bp, Homo sapien
tagtcaaatgtactaccatcagacc

SEQ ID NO: 5406538 - DNA, 25 bp, Homo sapien
tggcataaactgtggcagtgtagta

SEQ ID NO: 5406539 - DNA, 25 bp, Homo sapien
tacaatatcttccagaaagagctgg

SEQ ID NO: 5406540 - DNA, 25 bp, Homo sapien
cattttggttgtgaacgcttgccaa

SEQ ID NO: 5406541 - DNA, 25 bp, Homo sapien
caacccatagtggaaatccatcacg

SEQ ID NO: 5406542 - DNA, 25 bp, Homo sapien
gaatatcccagaagccgtcagtact

SEQ ID NO: 5406543 - DNA, 25 bp, Homo sapien
cattttttatagttggtcttcctgc

SEQ ID NO: 5406544 - DNA, 25 bp, Homo sapien
tatgacagtggggtcttatcaaacc

SEQ ID NO: 5406545 - DNA, 25 bp, Homo sapien
agaagccgtcagtacttaaaccagc

SEQ ID NO: 5406546 - DNA, 25 bp, Homo sapien
gggactcctccttcactcattttat

SEQ ID NO: 5406547 - DNA, 25 bp, Homo sapien
aagagggactcctccttcactcatt

SEQ ID NO: 5406548 - DNA, 25 bp, Homo sapien
aaaagagggactcctccttcactca

SEQ ID NO: 5406549 - DNA, 25 bp, Homo sapien
ctcctccttcactcattttatgagg

SEQ ID NO: 5406550 - DNA, 25 bp, Homo sapien
aagacccctaaacatctgcctgcag

SEQ ID NO: 5406551 - DNA, 25 bp, Homo sapien
tgattaccatctcccaaggcaagac

SEQ ID NO: 5406552 - DNA, 25 bp, Homo sapien
gcactgcacacacgatttggttctt

SEQ ID NO: 5406553 - DNA, 25 bp, Homo sapien
caatgacacattagaagcactgcac

SEQ ID NO: 5406554 - DNA, 25 bp, Homo sapien
ttatactttcacgtattgatagaca

SEQ ID NO: 5406555 - DNA, 25 bp, Homo sapien
gaagaactatggcttgataattatg

SEQ ID NO: 5406556 - DNA, 25 bp, Homo sapien
tgatagacatgtactttgaagaact

SEQ ID NO: 5406557 - DNA, 25 bp, Homo sapien
gagaaagttggcagatttacaactt

SEQ ID NO: 5406558 - DNA, 25 bp, Homo sapien
taagttattcctaacatgacccatg

SEQ ID NO: 5406559 - DNA, 25 bp, Homo sapien
gaagccatataattgaagtacagca

SEQ ID NO: 5406560 - DNA, 25 bp, Homo sapien
cagcagttgctcaagaacaaagtta

SEQ ID NO: 5406561 - DNA, 25 bp, Homo sapien
tttcatctcgaatactcagaatatg

SEQ ID NO: 5406562 - DNA, 25 bp, Homo sapien
ggtatccacggagtatttagaacag

SEQ ID NO: 5406563 - DNA, 25 bp, Homo sapien
caacagttctgaaatggtatccacg

SEQ ID NO: 5406564 - DNA, 25 bp, Homo sapien
taacactgtcaactggtttgacctc

SEQ ID NO: 5406565 - DNA, 25 bp, Homo sapien
tcatcctgtgttgttgccatatgcc

SEQ ID NO: 5406566 - DNA, 25 bp, Homo sapien
ttcagcccagcgactaaaatgaaga

SEQ ID NO: 5406567 - DNA, 25 bp, Homo sapien
ttccagaatccatcagtgtctaata

SEQ ID NO: 5406568 - DNA, 25 bp, Homo sapien
gtctaatactacacagtcttcgagt

SEQ ID NO: 5406569 - DNA, 25 bp, Homo sapien
tgattgtcattgcaatcaactgttt

SEQ ID NO: 5406570 - DNA, 25 bp, Homo sapien
aatgcctgctggtaagggtccgtga

SEQ ID NO: 5406571 - DNA, 25 bp, Homo sapien
ctcaccagctgcatgttacttttca

SEQ ID NO: 5406572 - DNA, 25 bp, Homo sapien
gaagagtccgatccataaggaagag

SEQ ID NO: 5406573 - DNA, 25 bp, Homo sapien
tacttttcagacactcccttttagc

SEQ ID NO: 5406574 - DNA, 25 bp, Homo sapien
ctgcaacgtctgtctgcttttaact

SEQ ID NO: 5406575 - DNA, 25 bp, Homo sapien
tgcaacgtctgtctgcttttaactt

SEQ ID NO: 5406576 - DNA, 25 bp, Homo sapien
gagacacaaagtggcgttcactgca

SEQ ID NO: 5406577 - DNA, 25 bp, Homo sapien
agtggcgttcactgcaggatgtaaa

SEQ ID NO: 5406578 - DNA, 25 bp, Homo sapien
ttagggcacagtggtagcgagactc

SEQ ID NO: 5406579 - DNA, 25 bp, Homo sapien
gatgtaaaattccacgtcccagtaa

SEQ ID NO: 5406580 - DNA, 25 bp, Homo sapien
ctggtattctcagcctcccactaac

SEQ ID NO: 5406581 - DNA, 25 bp, Homo sapien
tttctggtattctcagcctcccact

SEQ ID NO: 5406582 - DNA, 25 bp, Homo sapien
tctggtattctcagcctcccactaa

SEQ ID NO: 5406583 - DNA, 25 bp, Homo sapien
attttctggtattctcagcctccca

SEQ ID NO: 5406584 - DNA, 25 bp, Homo sapien
tcataggcagtccagcgcaaaccaa

SEQ ID NO: 5406585 - DNA, 25 bp, Homo sapien
tgggtgaaagttactgtacgtcagc

SEQ ID NO: 5406586 - DNA, 25 bp, Homo sapien
tccatatccggaagcaaggatgtaa

SEQ ID NO: 5406587 - DNA, 25 bp, Homo sapien
tccataaagtagcttccatatccgg

SEQ ID NO: 5406588 - DNA, 25 bp, Homo sapien
aacatgtttcccaaataattccagt

SEQ ID NO: 5406589 - DNA, 25 bp, Homo sapien
catgtttcccaaataattccagtac

SEQ ID NO: 5406590 - DNA, 25 bp, Homo sapien
ctggccccagatcagaataaaacat

SEQ ID NO: 5406591 - DNA, 25 bp, Homo sapien
ggccccagatcagaataaaacatgt

SEQ ID NO: 5406592 - DNA, 25 bp, Homo sapien
aaatgtgagagacacgggtttgatc

SEQ ID NO: 5406593 - DNA, 25 bp, Homo sapien
tgttcaatctggctcaacactgaag

SEQ ID NO: 5406594 - DNA, 25 bp, Homo sapien
taggagtgacaggtatcgcttgctt

SEQ ID NO: 5406595 - DNA, 25 bp, Homo sapien
ctgaaggaagggtgccaccatagga

SEQ ID NO: 5406596 - DNA, 25 bp, Homo sapien
aagggcaacttggtactacagtctg

SEQ ID NO: 5406597 - DNA, 25 bp, Homo sapien
gctgtatttctctaacgaagaaaca

SEQ ID NO: 5406598 - DNA, 25 bp, Homo sapien
gaaaaggaatccattgctcagaaca

SEQ ID NO: 5406599 - DNA, 25 bp, Homo sapien
tcagaacattgcactttagctgcag

SEQ ID NO: 5406600 - DNA, 25 bp, Homo sapien
tgtcacaggaaagcggtgccatgga

SEQ ID NO: 5406601 - DNA, 25 bp, Homo sapien
caggaaagcggtgccatggatatcg

SEQ ID NO: 5406602 - DNA, 25 bp, Homo sapien
aatgtcacaggaaagcggtgccatg

SEQ ID NO: 5406603 - DNA, 25 bp, Homo sapien
aaagcggtgccatggatatcgtgag

SEQ ID NO: 5406604 - DNA, 25 bp, Homo sapien
tgatcatctattggccactcgctaa

SEQ ID NO: 5406605 - DNA, 25 bp, Homo sapien
actcgctaattcttatccaccactt

SEQ ID NO: 5406606 - DNA, 25 bp, Homo sapien
attggccactcgctaattcttatcc

SEQ ID NO: 5406607 - DNA, 25 bp, Homo sapien
taaaatgatcatctattggccactc

SEQ ID NO: 5406608 - DNA, 25 bp, Homo sapien
ttgtttttgatggcttttagtccca

SEQ ID NO: 5406609 - DNA, 25 bp, Homo sapien
ctattttgtttttgatggcttttag

SEQ ID NO: 5406610 - DNA, 25 bp, Homo sapien
atttgctattttgtttttgatggct

SEQ ID NO: 5406611 - DNA, 25 bp, Homo sapien
tgtttttgatggcttttagtcccac

SEQ ID NO: 5406612 - DNA, 25 bp, Homo sapien
tgattgctggcacagtacaggacgg

SEQ ID NO: 5406613 - DNA, 25 bp, Homo sapien
tgttatagttgcaagaaagctgtga

SEQ ID NO: 5406614 - DNA, 25 bp, Homo sapien
catagtttaggtgaagatcagcaac

SEQ ID NO: 5406615 - DNA, 25 bp, Homo sapien
ccttcaattataagtggaggtccat

SEQ ID NO: 5406616 - DNA, 25 bp, Homo sapien
taccagtctggtgtttttggagtac

SEQ ID NO: 5406617 - DNA, 25 bp, Homo sapien
ctggattgtaccagtctggtgtttt

SEQ ID NO: 5406618 - DNA, 25 bp, Homo sapien
tggattgtaccagtctggtgttttt

SEQ ID NO: 5406619 - DNA, 25 bp, Homo sapien
cagtctggtgtttttggagtacggc

SEQ ID NO: 5406620 - DNA, 25 bp, Homo sapien
gaaaggacttgcagtattgttgagt

SEQ ID NO: 5406621 - DNA, 25 bp, Homo sapien
cctttaatgtagctcgaaaggactt

SEQ ID NO: 5406622 - DNA, 25 bp, Homo sapien
tatactataagtacggcctttaatg

SEQ ID NO: 5406623 - DNA, 25 bp, Homo sapien
tgacagatcagggtatactataagt

SEQ ID NO: 5406624 - DNA, 25 bp, Homo sapien
cctcttcgccatggcctatgaaata

SEQ ID NO: 5406625 - DNA, 25 bp, Homo sapien
ttggaatttggcacacccattcaag

SEQ ID NO: 5406626 - DNA, 25 bp, Homo sapien
cagcctcttcgccatggcctatgaa

SEQ ID NO: 5406627 - DNA, 25 bp, Homo sapien
ccattcaagttttgtatcacaagca

SEQ ID NO: 5406628 - DNA, 25 bp, Homo sapien
ttccctagaacacagtttattgtac

SEQ ID NO: 5406629 - DNA, 25 bp, Homo sapien
gtttattgtaccagtgttctcaaca

SEQ ID NO: 5406630 - DNA, 25 bp, Homo sapien
tagaacacagtttattgtaccagtg

SEQ ID NO: 5406631 - DNA, 25 bp, Homo sapien
tatttccctagaacacagtttattg

SEQ ID NO: 5406632 - DNA, 25 bp, Homo sapien
cagcacagtctctgatgtcataatc

SEQ ID NO: 5406633 - DNA, 25 bp, Homo sapien
gcagcacagtctctgatgtcataat

SEQ ID NO: 5406634 - DNA, 25 bp, Homo sapien
tcatttggcatgataatagtagaca

SEQ ID NO: 5406635 - DNA, 25 bp, Homo sapien
ctcatttggcatgataatagtagac

SEQ ID NO: 5406636 - DNA, 25 bp, Homo sapien
catttggcatgataatagtagacac

SEQ ID NO: 5406637 - DNA, 25 bp, Homo sapien
gtgtacgatcactccattgccagga

SEQ ID NO: 5406638 - DNA, 25 bp, Homo sapien
tacgatcactccattgccaggatcc

SEQ ID NO: 5406639 - DNA, 25 bp, Homo sapien
tggtgtacgatcactccattgccag

SEQ ID NO: 5406640 - DNA, 25 bp, Homo sapien
gatcactccattgccaggatccttg

SEQ ID NO: 5406641 - DNA, 25 bp, Homo sapien
ttttccaacagagagtgagggtaag

SEQ ID NO: 5406642 - DNA, 25 bp, Homo sapien
gagtgcttaatgttccatgactgct

SEQ ID NO: 5406643 - DNA, 25 bp, Homo sapien
ttagattcctcatagtgtctgcaca

SEQ ID NO: 5406644 - DNA, 25 bp, Homo sapien
tgactgctaagcaccaaatgacctt

SEQ ID NO: 5406645 - DNA, 25 bp, Homo sapien
caagggcttggcagaatcgttcagc

SEQ ID NO: 5406646 - DNA, 25 bp, Homo sapien
gcagaatcgttcagcttcttcccag

SEQ ID NO: 5406647 - DNA, 25 bp, Homo sapien
tgctccaagggcttggcagaatcgt

SEQ ID NO: 5406648 - DNA, 25 bp, Homo sapien
gcttggcagaatcgttcagcttctt

SEQ ID NO: 5406649 - DNA, 25 bp, Homo sapien
ttcttgcaaattgaaagtgctttga

SEQ ID NO: 5406650 - DNA, 25 bp, Homo sapien
tcaggcttaggggatgcttcttcag

SEQ ID NO: 5406651 - DNA, 25 bp, Homo sapien
cggggaaactctgccagccttcagg

SEQ ID NO: 5406652 - DNA, 25 bp, Homo sapien
gaagcttctgcagtccttcacctcc

SEQ ID NO: 5406653 - DNA, 25 bp, Homo sapien
ctacatctctcaggccagtccagaa

SEQ ID NO: 5406654 - DNA, 25 bp, Homo sapien
caaatcatttaggtattcttgctca

SEQ ID NO: 5406655 - DNA, 25 bp, Homo sapien
aacagttgcccagttatactctcca

SEQ ID NO: 5406656 - DNA, 25 bp, Homo sapien
tactctccacaagaatctacatctc

SEQ ID NO: 5406657 - DNA, 25 bp, Homo sapien
cataaatcttgtaacaggtttctcc

SEQ ID NO: 5406658 - DNA, 25 bp, Homo sapien
tcatcctcataaatcttgtaacagg

SEQ ID NO: 5406659 - DNA, 25 bp, Homo sapien
tagtcagattgcagtttgttccaaa

SEQ ID NO: 5406660 - DNA, 25 bp, Homo sapien
ctgctagtgatagtcagattgcagt

SEQ ID NO: 5406661 - DNA, 25 bp, Homo sapien
cagaacttgcgtcattcagtttttc

SEQ ID NO: 5406662 - DNA, 25 bp, Homo sapien
ggacacatcttatcagaacttgcgt

SEQ ID NO: 5406663 - DNA, 25 bp, Homo sapien
tcttatcagaacttgcgtcattcag

SEQ ID NO: 5406664 - DNA, 25 bp, Homo sapien
catctggaggacacatcttatcaga

SEQ ID NO: 5406665 - DNA, 25 bp, Homo sapien
aattatttaccgcatattcagaact

SEQ ID NO: 5406666 - DNA, 25 bp, Homo sapien
attatttaccgcatattcagaactg

SEQ ID NO: 5406667 - DNA, 25 bp, Homo sapien
aggaaattatttaccgcatattcag

SEQ ID NO: 5406668 - DNA, 25 bp, Homo sapien
gaaattatttaccgcatattcagaa

SEQ ID NO: 5406669 - DNA, 25 bp, Homo sapien
ttccagcttatacgcaaacttccca

SEQ ID NO: 5406670 - DNA, 25 bp, Homo sapien
ccaaagaagtcttaatattatcatt

SEQ ID NO: 5406671 - DNA, 25 bp, Homo sapien
tttattttccagcttatacgcaaac

SEQ ID NO: 5406672 - DNA, 25 bp, Homo sapien
gcttatacgcaaacttcccaaccaa

SEQ ID NO: 5406673 - DNA, 25 bp, Homo sapien
tgttcttaaggcctatccacacttc

SEQ ID NO: 5406674 - DNA, 25 bp, Homo sapien
cgtcttattgtagggaacatttggc

SEQ ID NO: 5406675 - DNA, 25 bp, Homo sapien
tctcatcccaatatgttagagtaac

SEQ ID NO: 5406676 - DNA, 25 bp, Homo sapien
acttcagtaccatctgaccactgaa

SEQ ID NO: 5406677 - DNA, 25 bp, Homo sapien
aaatccattatttggcagccagcct

SEQ ID NO: 5406678 - DNA, 25 bp, Homo sapien
taggtcactactgaaggctttgcat

SEQ ID NO: 5406679 - DNA, 25 bp, Homo sapien
tttaccagcagatagcaaaatccat

SEQ ID NO: 5406680 - DNA, 25 bp, Homo sapien
ctcattatggagttttgtgacaacc

SEQ ID NO: 5406681 - DNA, 25 bp, Homo sapien
cagacatagggcagttgagcttcac

SEQ ID NO: 5406682 - DNA, 25 bp, Homo sapien
aaagctctgccacagaccagactca

SEQ ID NO: 5406683 - DNA, 25 bp, Homo sapien
attatttaatggtttcctgcagaca

SEQ ID NO: 5406684 - DNA, 25 bp, Homo sapien
cctatagtaggtgcactgggcctgt

SEQ ID NO: 5406685 - DNA, 25 bp, Homo sapien
taatggtttgtggtctgaccattcc

SEQ ID NO: 5406686 - DNA, 25 bp, Homo sapien
agtttaatggtttgtggtctgacca

SEQ ID NO: 5406687 - DNA, 25 bp, Homo sapien
gcagagtatagctgatttaaaccaa

SEQ ID NO: 5406688 - DNA, 25 bp, Homo sapien
tcccagcctctagcagagtatagct

SEQ ID NO: 5406689 - DNA, 25 bp, Homo sapien
aagcttctttccaagaaagagccgt

SEQ ID NO: 5406690 - DNA, 25 bp, Homo sapien
tagcaacttccaaactgctcgttct

SEQ ID NO: 5406691 - DNA, 25 bp, Homo sapien
caagaaagagccgtctgagtattaa

SEQ ID NO: 5406692 - DNA, 25 bp, Homo sapien
gagtattaaattggtagcaacttcc

SEQ ID NO: 5406693 - DNA, 25 bp, Homo sapien
tcaagaatgcaatcatgatgccagg

SEQ ID NO: 5406694 - DNA, 25 bp, Homo sapien
caccatggcccactatgatcttcat

SEQ ID NO: 5406695 - DNA, 25 bp, Homo sapien
caggctttaagcagatgccccactt

SEQ ID NO: 5406696 - DNA, 25 bp, Homo sapien
gccccactttcggtcatattcataa

SEQ ID NO: 5406697 - DNA, 25 bp, Homo sapien
cacttgcccgtatttccatggacga

SEQ ID NO: 5406698 - DNA, 25 bp, Homo sapien
tgcaaatgaaagagccgatgctggg

SEQ ID NO: 5406699 - DNA, 25 bp, Homo sapien
taccgggcagctccgtacagagagt

SEQ ID NO: 5406700 - DNA, 25 bp, Homo sapien
tacagagagtggtgctcacatttcc

SEQ ID NO: 5406701 - DNA, 25 bp, Homo sapien
tatgtggttgaagcgccttgctccc

SEQ ID NO: 5406702 - DNA, 25 bp, Homo sapien
aatggacagacagattgtagattat

SEQ ID NO: 5406703 - DNA, 25 bp, Homo sapien
gacagacagattgtagattatgtgg

SEQ ID NO: 5406704 - DNA, 25 bp, Homo sapien
cagacagattgtagattatgtggtt

SEQ ID NO: 5406705 - DNA, 25 bp, Homo sapien
agagttcagcagaaagacctgtaaa

SEQ ID NO: 5406706 - DNA, 25 bp, Homo sapien
gcaatcactgtcagtgaaccagagt

SEQ ID NO: 5406707 - DNA, 25 bp, Homo sapien
tttagacaagcttaagcaatcactg

SEQ ID NO: 5406708 - DNA, 25 bp, Homo sapien
cctgagtttgtggaataagattcac

SEQ ID NO: 5406709 - DNA, 25 bp, Homo sapien
gtttcactaacaccagatgcttttc

SEQ ID NO: 5406710 - DNA, 25 bp, Homo sapien
taaaattaagtctcactgcagcttg

SEQ ID NO: 5406711 - DNA, 25 bp, Homo sapien
aaaattcccataccagggactggtg

SEQ ID NO: 5406712 - DNA, 25 bp, Homo sapien
gatgcttttcctagtaataattcaa

SEQ ID NO: 5406713 - DNA, 25 bp, Homo sapien
gctggatcccaaacaggtgaactgg

SEQ ID NO: 5406714 - DNA, 25 bp, Homo sapien
tcctttgcagtttgcagttctggat

SEQ ID NO: 5406715 - DNA, 25 bp, Homo sapien
agaatccaatggattagctacattt

SEQ ID NO: 5406716 - DNA, 25 bp, Homo sapien
tgctttgtgtgctggatcccaaaca

SEQ ID NO: 5406717 - DNA, 25 bp, Homo sapien
tttatcaatagctttctactgggtt

SEQ ID NO: 5406718 - DNA, 25 bp, Homo sapien
caatagctttctactgggttttgtt

SEQ ID NO: 5406719 - DNA, 25 bp, Homo sapien
tcactttacaactttataccagtcc

SEQ ID NO: 5406720 - DNA, 25 bp, Homo sapien
ccagtcctcaatggagttttaatat

SEQ ID NO: 5406721 - DNA, 25 bp, Homo sapien
ctccaagtacaatattggggcaaat

SEQ ID NO: 5406722 - DNA, 25 bp, Homo sapien
tcagtgtttgggtaatagaggccac

SEQ ID NO: 5406723 - DNA, 25 bp, Homo sapien
tgttggctggtgaaaacctcaggag

SEQ ID NO: 5406724 - DNA, 25 bp, Homo sapien
cagaaagtcttcacgcacgattggg

SEQ ID NO: 5406725 - DNA, 25 bp, Homo sapien
caatgtccagggagtcagaaagtct

SEQ ID NO: 5406726 - DNA, 25 bp, Homo sapien
tgcacaagcctagccgtgcacatgt

SEQ ID NO: 5406727 - DNA, 25 bp, Homo sapien
tgccaaacaattgacccaaatggct

SEQ ID NO: 5406728 - DNA, 25 bp, Homo sapien
tagccgtgcacatgtgacgaggtgc

SEQ ID NO: 5406729 - DNA, 25 bp, Homo sapien
tgaagcggacactcttgccaaacaa

SEQ ID NO: 5406730 - DNA, 25 bp, Homo sapien
ccttgctgtagataggatgatgcca

SEQ ID NO: 5406731 - DNA, 25 bp, Homo sapien
aagcagatgtcgatgggaaccaaga

SEQ ID NO: 5406732 - DNA, 25 bp, Homo sapien
gattcttttggtagttcctagcaca

SEQ ID NO: 5406733 - DNA, 25 bp, Homo sapien
gaaaatcgatcagagtagctgctag

SEQ ID NO: 5406734 - DNA, 25 bp, Homo sapien
ttggtcactttcggaggagatggtt

SEQ ID NO: 5406735 - DNA, 25 bp, Homo sapien
tcactttcggaggagatggtttatt

SEQ ID NO: 5406736 - DNA, 25 bp, Homo sapien
gtcactttcggaggagatggtttat

SEQ ID NO: 5406737 - DNA, 25 bp, Homo sapien
tgacttccttcctgatgcgcaccgt

SEQ ID NO: 5406738 - DNA, 25 bp, Homo sapien
gcgcagtgaaatccgggaatcgtgg

SEQ ID NO: 5406739 - DNA, 25 bp, Homo sapien
aatcgtggggaatccttggcgctgt

SEQ ID NO: 5406740 - DNA, 25 bp, Homo sapien
gatgcgcaccgtaggcgcagtgaaa

SEQ ID NO: 5406741 - DNA, 25 bp, Homo sapien
agcaaagcagccgtgacctgcccca

SEQ ID NO: 5406742 - DNA, 25 bp, Homo sapien
caaagcagccgtgacctgccccagg

SEQ ID NO: 5406743 - DNA, 25 bp, Homo sapien
acagcaaagcagccgtgacctgccc

SEQ ID NO: 5406744 - DNA, 25 bp, Homo sapien
aacagcaaagcagccgtgacctgcc

SEQ ID NO: 5406745 - DNA, 25 bp, Homo sapien
gctccgcgagatcgaagaaccagaa

SEQ ID NO: 5406746 - DNA, 25 bp, Homo sapien
agggctccgcgagatcgaagaacca

SEQ ID NO: 5406747 - DNA, 25 bp, Homo sapien
ccgcgagatcgaagaaccagaagag

SEQ ID NO: 5406748 - DNA, 25 bp, Homo sapien
tgcgcggccagagggctccgcgaga

SEQ ID NO: 5406749 - DNA, 25 bp, Homo sapien
gctggcgcaagccttccggccgggt

SEQ ID NO: 5406750 - DNA, 25 bp, Homo sapien
ctgagctggcgcaagccttccggcc

SEQ ID NO: 5406751 - DNA, 25 bp, Homo sapien
tggcgcaagccttccggccgggtcc

SEQ ID NO: 5406752 - DNA, 25 bp, Homo sapien
cggccgggtcctcgggcgcacgcgg

SEQ ID NO: 5406753 - DNA, 25 bp, Homo sapien
tataggcccagtatgagaggttgct

SEQ ID NO: 5406754 - DNA, 25 bp, Homo sapien
cagggactaccgtgattattggaac

SEQ ID NO: 5406755 - DNA, 25 bp, Homo sapien
gcagcatctaggagcacgaagaagc

SEQ ID NO: 5406756 - DNA, 25 bp, Homo sapien
cacaccggaagggaagtacacaaag

SEQ ID NO: 5406757 - DNA, 25 bp, Homo sapien
ggcctccgcatcctagcctgtttgg

SEQ ID NO: 5406758 - DNA, 25 bp, Homo sapien
cgcatcctagcctgtttgggaaaat

SEQ ID NO: 5406759 - DNA, 25 bp, Homo sapien
catcctagcctgtttgggaaaatca

SEQ ID NO: 5406760 - DNA, 25 bp, Homo sapien
ctccgcatcctagcctgtttgggaa

SEQ ID NO: 5406761 - DNA, 25 bp, Homo sapien
ctggaaagccggcatgtgacctgcg

SEQ ID NO: 5406762 - DNA, 25 bp, Homo sapien
ttccctgctggaaagccggcatgtg

SEQ ID NO: 5406763 - DNA, 25 bp, Homo sapien
ggaaagccggcatgtgacctgcgcc

SEQ ID NO: 5406764 - DNA, 25 bp, Homo sapien
ccctgctggaaagccggcatgtgac

SEQ ID NO: 5406765 - DNA, 25 bp, Homo sapien
tgtgattgcatgtgaggcccacctg

SEQ ID NO: 5406766 - DNA, 25 bp, Homo sapien
caaaatcaggtatcattgggttgaa

SEQ ID NO: 5406767 - DNA, 25 bp, Homo sapien
tgcatgcatgttgaatctccctctg

SEQ ID NO: 5406768 - DNA, 25 bp, Homo sapien
gctgcataagcagaatcttcaggtc

SEQ ID NO: 5406769 - DNA, 25 bp, Homo sapien
tcaggttggatgcaaatcactagct

SEQ ID NO: 5406770 - DNA, 25 bp, Homo sapien
tcctattccacagacctatttgggt

SEQ ID NO: 5406771 - DNA, 25 bp, Homo sapien
tcttgctactatctagggccatagg

SEQ ID NO: 5406772 - DNA, 25 bp, Homo sapien
tttgggttccagtgcataaatgcaa

SEQ ID NO: 5406773 - DNA, 25 bp, Homo sapien
tccctggtctacgatgacccacatt

SEQ ID NO: 5406774 - DNA, 25 bp, Homo sapien
ggtctacgatgacccacattcctct

SEQ ID NO: 5406775 - DNA, 25 bp, Homo sapien
tctctgattttatggtctgatagca

SEQ ID NO: 5406776 - DNA, 25 bp, Homo sapien
tagcatagactctttcattatccct

SEQ ID NO: 5406777 - DNA, 25 bp, Homo sapien
gcacctcctacagcaatgttccaga

SEQ ID NO: 5406778 - DNA, 25 bp, Homo sapien
gaaagcatacatgacacaaacgaat

SEQ ID NO: 5406779 - DNA, 25 bp, Homo sapien
aatcatacatgagactgaggaggac

SEQ ID NO: 5406780 - DNA, 25 bp, Homo sapien
tctggtgagactgcccacacctatg

SEQ ID NO: 5406781 - DNA, 25 bp, Homo sapien
gaatgacattgtccctacaccaaaa

SEQ ID NO: 5406782 - DNA, 25 bp, Homo sapien
gcaatgcataaacaagtgggccttc

SEQ ID NO: 5406783 - DNA, 25 bp, Homo sapien
ccttcacttcacttgggacgtttag

SEQ ID NO: 5406784 - DNA, 25 bp, Homo sapien
taagttgcagtagcaatcgcaggga

SEQ ID NO: 5406785 - DNA, 25 bp, Homo sapien
ttgagcaccagtttcaccaagctct

SEQ ID NO: 5406786 - DNA, 25 bp, Homo sapien
gagggtctgcttcgttcacgcactg

SEQ ID NO: 5406787 - DNA, 25 bp, Homo sapien
ggtcaggagggtctgcttcgttcac

SEQ ID NO: 5406788 - DNA, 25 bp, Homo sapien
cgttcacgcactgtctgtttggtag

SEQ ID NO: 5406789 - DNA, 25 bp, Homo sapien
gctaagaactccaaagcccttggtg

SEQ ID NO: 5406790 - DNA, 25 bp, Homo sapien
cttgtctgatcagaggagcccttgc

SEQ ID NO: 5406791 - DNA, 25 bp, Homo sapien
agcccttgcttaaggactgcccgag

SEQ ID NO: 5406792 - DNA, 25 bp, Homo sapien
gcacatcgattaaggcatgctctgt

SEQ ID NO: 5406793 - DNA, 25 bp, Homo sapien
acatgtcctgttacgtttccattcc

SEQ ID NO: 5406794 - DNA, 25 bp, Homo sapien
gcaacatgtcctgttacgtttccat

SEQ ID NO: 5406795 - DNA, 25 bp, Homo sapien
aggcaacatgtcctgttacgtttcc

SEQ ID NO: 5406796 - DNA, 25 bp, Homo sapien
aacatgtcctgttacgtttccattc

SEQ ID NO: 5406797 - DNA, 25 bp, Homo sapien
tctgatgtccacagggacaagaacc

SEQ ID NO: 5406798 - DNA, 25 bp, Homo sapien
agtcgggtttccagctcctaccaag

SEQ ID NO: 5406799 - DNA, 25 bp, Homo sapien
tctgccttctggttctctatctctc

SEQ ID NO: 5406800 - DNA, 25 bp, Homo sapien
aagaacccactgtttcctaaatctg

SEQ ID NO: 5406801 - DNA, 25 bp, Homo sapien
ttagaagtaggaactcaaggagctc

SEQ ID NO: 5406802 - DNA, 25 bp, Homo sapien
catcatgcttacttcatggtgtgaa

SEQ ID NO: 5406803 - DNA, 25 bp, Homo sapien
aatttccattaatagaagcacagga

SEQ ID NO: 5406804 - DNA, 25 bp, Homo sapien
gaaaatagcatagatcatgatgtct

SEQ ID NO: 5406805 - DNA, 25 bp, Homo sapien
aggtcaccggtatacatagggttca

SEQ ID NO: 5406806 - DNA, 25 bp, Homo sapien
gcaggccattcggtctctgttgcaa

SEQ ID NO: 5406807 - DNA, 25 bp, Homo sapien
tactgacaagtcagggaagtgacac

SEQ ID NO: 5406808 - DNA, 25 bp, Homo sapien
gcaaacttcctgtaagggtccagaa

SEQ ID NO: 5406809 - DNA, 25 bp, Homo sapien
taagaagtccctgtgaacataggct

SEQ ID NO: 5406810 - DNA, 25 bp, Homo sapien
gaagcctaagttcctttgactggag

SEQ ID NO: 5406811 - DNA, 25 bp, Homo sapien
tcctgtagccttcagacatgtgcca

SEQ ID NO: 5406812 - DNA, 25 bp, Homo sapien
gataccaaagaagtcatgtgccctt

SEQ ID NO: 5406813 - DNA, 25 bp, Homo sapien
cctttctggacgaaaagagtagcta

SEQ ID NO: 5406814 - DNA, 25 bp, Homo sapien
tgtgttaatccaccaagactgtggg

SEQ ID NO: 5406815 - DNA, 25 bp, Homo sapien
gggtgctctcaggtaaatcagtttt

SEQ ID NO: 5406816 - DNA, 25 bp, Homo sapien
gtattccttaggcatgtgtccccag

SEQ ID NO: 5406817 - DNA, 25 bp, Homo sapien
ctgtccatgggtccagattatctgg

SEQ ID NO: 5406818 - DNA, 25 bp, Homo sapien
taaacatcaaagtatggagcactga

SEQ ID NO: 5406819 - DNA, 25 bp, Homo sapien
tgtgactatataccttgactggaag

SEQ ID NO: 5406820 - DNA, 25 bp, Homo sapien
caagaagtgtgtgatctgtccatgg

SEQ ID NO: 5406821 - DNA, 25 bp, Homo sapien
gtttctagaacagcacttttttgag

SEQ ID NO: 5406822 - DNA, 25 bp, Homo sapien
tgtttctagaacagcacttttttga

SEQ ID NO: 5406823 - DNA, 25 bp, Homo sapien
ctgtttctagaacagcacttttttg

SEQ ID NO: 5406824 - DNA, 25 bp, Homo sapien
taccccttttaagaatggatcacag

SEQ ID NO: 5406825 - DNA, 25 bp, Homo sapien
gagcccagaacctgtgacccttaag

SEQ ID NO: 5406826 - DNA, 25 bp, Homo sapien
tctttcttaatggtacgagtgcagg

SEQ ID NO: 5406827 - DNA, 25 bp, Homo sapien
gaaacaactaagaatcctctcagaa

SEQ ID NO: 5406828 - DNA, 25 bp, Homo sapien
tctgtggcattctctgacctcatta

SEQ ID NO: 5406829 - DNA, 25 bp, Homo sapien
ggtgtctgtggcattctctgacctc

SEQ ID NO: 5406830 - DNA, 25 bp, Homo sapien
tgtctgtggcattctctgacctcat

SEQ ID NO: 5406831 - DNA, 25 bp, Homo sapien
cctggtgtctgtggcattctctgac

SEQ ID NO: 5406832 - DNA, 25 bp, Homo sapien
taaggattccgaaaccctgcaagtc

SEQ ID NO: 5406833 - DNA, 25 bp, Homo sapien
cagtgtcagtacaaccgcaagagga

SEQ ID NO: 5406834 - DNA, 25 bp, Homo sapien
aatggccacaatgactatcagtgtc

SEQ ID NO: 5406835 - DNA, 25 bp, Homo sapien
tattggtcactcttctcaagatcag

SEQ ID NO: 5406836 - DNA, 25 bp, Homo sapien
tggcagcgcctctgcagtgtgaata

SEQ ID NO: 5406837 - DNA, 25 bp, Homo sapien
tctggcagcgcctctgcagtgtgaa

SEQ ID NO: 5406838 - DNA, 25 bp, Homo sapien
ttttctggcagcgcctctgcagtgt

SEQ ID NO: 5406839 - DNA, 25 bp, Homo sapien
ggcagcgcctctgcagtgtgaatat

SEQ ID NO: 5406840 - DNA, 25 bp, Homo sapien
tagtgtacttgggataaccatcact

SEQ ID NO: 5406841 - DNA, 25 bp, Homo sapien
taacgttgcattaaactgtcgaaaa

SEQ ID NO: 5406842 - DNA, 25 bp, Homo sapien
gcacaggcacttttcccgtctgtaa

SEQ ID NO: 5406843 - DNA, 25 bp, Homo sapien
tgttctcaggatagaagcagtgggc

SEQ ID NO: 5406844 - DNA, 25 bp, Homo sapien
ctggcttccgaatgccccagtttga

SEQ ID NO: 5406845 - DNA, 25 bp, Homo sapien
tgacacggggatagctgccataatc

SEQ ID NO: 5406846 - DNA, 25 bp, Homo sapien
ggatcctcaaggcaacacaatgatg

SEQ ID NO: 5406847 - DNA, 25 bp, Homo sapien
ctgtgtctggcttccgaatgcccca

SEQ ID NO: 5406848 - DNA, 25 bp, Homo sapien
tgtgggagttccatcaaaccacttt

SEQ ID NO: 5406849 - DNA, 25 bp, Homo sapien
agttccatcaaaccactttatggtt

SEQ ID NO: 5406850 - DNA, 25 bp, Homo sapien
ctgtgggagttccatcaaaccactt

SEQ ID NO: 5406851 - DNA, 25 bp, Homo sapien
ccatcaaaccactttatggtttcat

SEQ ID NO: 5406852 - DNA, 25 bp, Homo sapien
ggcggtaggagagtccatcccatgt

SEQ ID NO: 5406853 - DNA, 25 bp, Homo sapien
gcaaataagaatcctaacagcacag

SEQ ID NO: 5406854 - DNA, 25 bp, Homo sapien
tactcctcctcgaaagggtaggctc

SEQ ID NO: 5406855 - DNA, 25 bp, Homo sapien
caagcatcttcctgctaagggtaaa

SEQ ID NO: 5406856 - DNA, 25 bp, Homo sapien
accaaaccatctggacagaagaacc

SEQ ID NO: 5406857 - DNA, 25 bp, Homo sapien
taccatcaaattgagcattcaacca

SEQ ID NO: 5406858 - DNA, 25 bp, Homo sapien
gcctcatccttgattgttaaaagat

SEQ ID NO: 5406859 - DNA, 25 bp, Homo sapien
ttcaaccaaaccatctggacagaag

SEQ ID NO: 5406860 - DNA, 25 bp, Homo sapien
gatgtttctgagcacaactctgggt

SEQ ID NO: 5406861 - DNA, 25 bp, Homo sapien
cagcctcaaaactcatactgtctag

SEQ ID NO: 5406862 - DNA, 25 bp, Homo sapien
catactgtctaggactgtagaaaaa

SEQ ID NO: 5406863 - DNA, 25 bp, Homo sapien
tttctgagcacaactctgggtgttc

SEQ ID NO: 5406864 - DNA, 25 bp, Homo sapien
catcattattgtagctctggaatcc

SEQ ID NO: 5406865 - DNA, 25 bp, Homo sapien
gaggccagcttgtgttagtgaattc

SEQ ID NO: 5406866 - DNA, 25 bp, Homo sapien
caacatcggctttgtcttacgtaag

SEQ ID NO: 5406867 - DNA, 25 bp, Homo sapien
gcttgaagcccatgtttctcatcta

SEQ ID NO: 5406868 - DNA, 25 bp, Homo sapien
aaatgactcgcaggctgtgctatgc

SEQ ID NO: 5406869 - DNA, 25 bp, Homo sapien
ggcaaaaacgcagtcaccaaggagg

SEQ ID NO: 5406870 - DNA, 25 bp, Homo sapien
cagcgtccgttgctgtcggcaaaaa

SEQ ID NO: 5406871 - DNA, 25 bp, Homo sapien
catgacaaatggcaccttgcagaaa

SEQ ID NO: 5406872 - DNA, 25 bp, Homo sapien
cagaccagtcaaaattaagaccatt

SEQ ID NO: 5406873 - DNA, 25 bp, Homo sapien
aatcggcgtgaaattggaccagtac

SEQ ID NO: 5406874 - DNA, 25 bp, Homo sapien
tttcagtgctaatttcagtggccag

SEQ ID NO: 5406875 - DNA, 25 bp, Homo sapien
cattaggcaagtggatgtttaccct

SEQ ID NO: 5406876 - DNA, 25 bp, Homo sapien
tgtttaccctaaagaggtgtgcact

SEQ ID NO: 5406877 - DNA, 25 bp, Homo sapien
tactggtctgtgatgctgaccagtt

SEQ ID NO: 5406878 - DNA, 25 bp, Homo sapien
tgtgctttgtgcatcaggcaggttt

SEQ ID NO: 5406879 - DNA, 25 bp, Homo sapien
cctagccggttgaggacaacagtga

SEQ ID NO: 5406880 - DNA, 25 bp, Homo sapien
tgaacagtccaatccagtgggcata

SEQ ID NO: 5406881 - DNA, 25 bp, Homo sapien
gatgtatttacaccgtgtccagaag

SEQ ID NO: 5406882 - DNA, 25 bp, Homo sapien
tcagatgtatttacaccgtgtccag

SEQ ID NO: 5406883 - DNA, 25 bp, Homo sapien
taaggtattgggcattggatacata

SEQ ID NO: 5406884 - DNA, 25 bp, Homo sapien
tattgggcattggatacatatcaga

SEQ ID NO: 5406885 - DNA, 25 bp, Homo sapien
caaggttttcccacacgttgtcaag

SEQ ID NO: 5406886 - DNA, 25 bp, Homo sapien
tgatcatgtgaaaaccaagcctgtg

SEQ ID NO: 5406887 - DNA, 25 bp, Homo sapien
tattcctggccctaactggctaaga

SEQ ID NO: 5406888 - DNA, 25 bp, Homo sapien
caaggcacacactattgtatggaga

SEQ ID NO: 5406889 - DNA, 25 bp, Homo sapien
ttaggattacttgagagtaaggcac

SEQ ID NO: 5406890 - DNA, 25 bp, Homo sapien
gattacttgagagtaaggcacagag

SEQ ID NO: 5406891 - DNA, 25 bp, Homo sapien
ttcacaaacaaacccatagccttcc

SEQ ID NO: 5406892 - DNA, 25 bp, Homo sapien
tgaaaattaggattacttgagagta

SEQ ID NO: 5406893 - DNA, 25 bp, Homo sapien
ggagaccagttagaatataccacag

SEQ ID NO: 5406894 - DNA, 25 bp, Homo sapien
cacacactggtggtctggccaaaaa

SEQ ID NO: 5406895 - DNA, 25 bp, Homo sapien
tcattttgtaaacctatccacacac

SEQ ID NO: 5406896 - DNA, 25 bp, Homo sapien
taccacaggctttccatttagccat

SEQ ID NO: 5406897 - DNA, 25 bp, Homo sapien
tcactttcaatggcgaccagggtcc

SEQ ID NO: 5406898 - DNA, 25 bp, Homo sapien
agaaatgttgagcatgcgtccagtt

SEQ ID NO: 5406899 - DNA, 25 bp, Homo sapien
cactttcaatggcgaccagggtccc

SEQ ID NO: 5406900 - DNA, 25 bp, Homo sapien
ctcactttcaatggcgaccagggtc

SEQ ID NO: 5406901 - DNA, 25 bp, Homo sapien
ctttggggatattcagcagaaggca

SEQ ID NO: 5406902 - DNA, 25 bp, Homo sapien
ttgtttcaagatgttgatgacagat

SEQ ID NO: 5406903 - DNA, 25 bp, Homo sapien
tgtttcaagatgttgatgacagatg

SEQ ID NO: 5406904 - DNA, 25 bp, Homo sapien
tgacagatgaggcaatctcaaaaat

SEQ ID NO: 5406905 - DNA, 25 bp, Homo sapien
gatgaggcaatctcaaaaatatttc

SEQ ID NO: 5406906 - DNA, 25 bp, Homo sapien
tcaaaagccactttcactttttgaa

SEQ ID NO: 5406907 - DNA, 25 bp, Homo sapien
aagccactttcactttttgaacact

SEQ ID NO: 5406908 - DNA, 25 bp, Homo sapien
agctttcaaaagccactttcacttt

SEQ ID NO: 5406909 - DNA, 25 bp, Homo sapien
agccactttcactttttgaacactt

SEQ ID NO: 5406910 - DNA, 25 bp, Homo sapien
catgttgttttggtgtatctttctt

SEQ ID NO: 5406911 - DNA, 25 bp, Homo sapien
cttttttcgcttacagatactaggc

SEQ ID NO: 5406912 - DNA, 25 bp, Homo sapien
aaatatagccatcctttgggacacg

SEQ ID NO: 5406913 - DNA, 25 bp, Homo sapien
tcgcttacagatactaggcatagaa

SEQ ID NO: 5406914 - DNA, 25 bp, Homo sapien
atatcactggtgttccatctctcca

SEQ ID NO: 5406915 - DNA, 25 bp, Homo sapien
gtcccagttctggtatatcactggt

SEQ ID NO: 5406916 - DNA, 25 bp, Homo sapien
gctctgattattcacagttctttct

SEQ ID NO: 5406917 - DNA, 25 bp, Homo sapien
cacatctctggctctgattattcac

SEQ ID NO: 5406918 - DNA, 25 bp, Homo sapien
agtccaatccaccaacttgcaccat

SEQ ID NO: 5406919 - DNA, 25 bp, Homo sapien
tgaagtccaatccaccaacttgcac

SEQ ID NO: 5406920 - DNA, 25 bp, Homo sapien
gaagtccaatccaccaacttgcacc

SEQ ID NO: 5406921 - DNA, 25 bp, Homo sapien
ttgaagtccaatccaccaacttgca

SEQ ID NO: 5406922 - DNA, 25 bp, Homo sapien
tgagaagatcactgtgcagccagct

SEQ ID NO: 5406923 - DNA, 25 bp, Homo sapien
ccattctgaggcaaaggtatgaaaa

SEQ ID NO: 5406924 - DNA, 25 bp, Homo sapien
cagctacagacaaactcaaagttca

SEQ ID NO: 5406925 - DNA, 25 bp, Homo sapien
tattctgcatcctgataaaagagcc

SEQ ID NO: 5406926 - DNA, 25 bp, Homo sapien
tactggtaccagaacggaatcttgg

SEQ ID NO: 5406927 - DNA, 25 bp, Homo sapien
ctggtaccagaacggaatcttgggt

SEQ ID NO: 5406928 - DNA, 25 bp, Homo sapien
actggtaccagaacggaatcttggg

SEQ ID NO: 5406929 - DNA, 25 bp, Homo sapien
cgtactggtaccagaacggaatctt

SEQ ID NO: 5406930 - DNA, 25 bp, Homo sapien
ttagttcccaatgaactaacttggc

SEQ ID NO: 5406931 - DNA, 25 bp, Homo sapien
cttagttcccaatgaactaacttgg

SEQ ID NO: 5406932 - DNA, 25 bp, Homo sapien
cattggtgtcgccttttcccatttc

SEQ ID NO: 5406933 - DNA, 25 bp, Homo sapien
tcctgcattggtgtcgccttttccc

SEQ ID NO: 5406934 - DNA, 25 bp, Homo sapien
tgtaagggcagcaatgttttgtttg

SEQ ID NO: 5406935 - DNA, 25 bp, Homo sapien
gcatcttctccaaaataagtgttgt

SEQ ID NO: 5406936 - DNA, 25 bp, Homo sapien
ttttgtttgccttataaacagcaca

SEQ ID NO: 5406937 - DNA, 25 bp, Homo sapien
tccattcacgtttggaaccacagtg

SEQ ID NO: 5406938 - DNA, 25 bp, Homo sapien
gacaacctgtgtgcaaatcctggct

SEQ ID NO: 5406939 - DNA, 25 bp, Homo sapien
ccatggcactgagttattgtaagga

SEQ ID NO: 5406940 - DNA, 25 bp, Homo sapien
catgagatattataacattgtgact

SEQ ID NO: 5406941 - DNA, 25 bp, Homo sapien
tatattttaggcaagccacttaatc

SEQ ID NO: 5406942 - DNA, 25 bp, Homo sapien
ctcactgcaggctcttaggagtctc

SEQ ID NO: 5406943 - DNA, 25 bp, Homo sapien
tcactgcaggctcttaggagtctcc

SEQ ID NO: 5406944 - DNA, 25 bp, Homo sapien
tggctagcaaagatttctcaggacc

SEQ ID NO: 5406945 - DNA, 25 bp, Homo sapien
tcattatgacatggacaaggttccc

SEQ ID NO: 5406946 - DNA, 25 bp, Homo sapien
gaaattgtacaatggcctcagaaca

SEQ ID NO: 5406947 - DNA, 25 bp, Homo sapien
cagttttgtcatgggagctctggcc

SEQ ID NO: 5406948 - DNA, 25 bp, Homo sapien
aatccatcccttttctccagtttga

SEQ ID NO: 5406949 - DNA, 25 bp, Homo sapien
gaatccatcccttttctccagtttg

SEQ ID NO: 5406950 - DNA, 25 bp, Homo sapien
ttgaatccatcccttttctccagtt

SEQ ID NO: 5406951 - DNA, 25 bp, Homo sapien
tgaatccatcccttttctccagttt

SEQ ID NO: 5406952 - DNA, 25 bp, Homo sapien
tattaaatccaatccagaactgcct

SEQ ID NO: 5406953 - DNA, 25 bp, Homo sapien
actcccatgagccggcattcagtgg

SEQ ID NO: 5406954 - DNA, 25 bp, Homo sapien
ttaaatccaatccagaactgccttt

SEQ ID NO: 5406955 - DNA, 25 bp, Homo sapien
cagaccactcccatgagccggcatt

SEQ ID NO: 5406956 - DNA, 25 bp, Homo sapien
cccctcagaagccattactgggaga

SEQ ID NO: 5406957 - DNA, 25 bp, Homo sapien
ttaaacaactacttgggatactcac

SEQ ID NO: 5406958 - DNA, 25 bp, Homo sapien
ggctttgggcataatacaaatatgg

SEQ ID NO: 5406959 - DNA, 25 bp, Homo sapien
tgggcataatacaaatatgggaatt

SEQ ID NO: 5406960 - DNA, 25 bp, Homo sapien
ttttgaatgtaagagctcattcaca

SEQ ID NO: 5406961 - DNA, 25 bp, Homo sapien
aaattctcttcctcaatatgggcaa

SEQ ID NO: 5406962 - DNA, 25 bp, Homo sapien
tgggcaaagcttgcaagatgagctc

SEQ ID NO: 5406963 - DNA, 25 bp, Homo sapien
catcagaactttttcactatgaaat

SEQ ID NO: 5406964 - DNA, 25 bp, Homo sapien
gattgatcattactctggctgaccc

SEQ ID NO: 5406965 - DNA, 25 bp, Homo sapien
gacctacaataccttgcttccagag

SEQ ID NO: 5406966 - DNA, 25 bp, Homo sapien
gaaatgagaaattagacctgggacc

SEQ ID NO: 5406967 - DNA, 25 bp, Homo sapien
gatcttagttgaactggcagtgcag

SEQ ID NO: 5406968 - DNA, 25 bp, Homo sapien
ccttaaagtgccgacagtgcttcac

SEQ ID NO: 5406969 - DNA, 25 bp, Homo sapien
tgcttgcacaaggacattgccttaa

SEQ ID NO: 5406970 - DNA, 25 bp, Homo sapien
ttcccagcgaccaagtggatgcctt

SEQ ID NO: 5406971 - DNA, 25 bp, Homo sapien
tggatgccttcctcgcatggcaaca

SEQ ID NO: 5406972 - DNA, 25 bp, Homo sapien
tagatgctataagatattcgactca

SEQ ID NO: 5406973 - DNA, 25 bp, Homo sapien
tatgaagatgaaaagtgctgcagaa

SEQ ID NO: 5406974 - DNA, 25 bp, Homo sapien
tgtggcataagttctgcctgcatat

SEQ ID NO: 5406975 - DNA, 25 bp, Homo sapien
tatgaagagctaaaaatacccctgc

SEQ ID NO: 5406976 - DNA, 25 bp, Homo sapien
tgccttacccccaccccactcactc

SEQ ID NO: 5406977 - DNA, 25 bp, Homo sapien
ttacccccaccccactcactctctc

SEQ ID NO: 5406978 - DNA, 25 bp, Homo sapien
cttacccccaccccactcactctct

SEQ ID NO: 5406979 - DNA, 25 bp, Homo sapien
ctgccttacccccaccccactcact

SEQ ID NO: 5406980 - DNA, 25 bp, Homo sapien
tgcttacaggatccagctgttcttg

SEQ ID NO: 5406981 - DNA, 25 bp, Homo sapien
tgtgcccagtctactataaggtcag

SEQ ID NO: 5406982 - DNA, 25 bp, Homo sapien
aatttcaacattcctgtcatagctg

SEQ ID NO: 5406983 - DNA, 25 bp, Homo sapien
tgtatcatcatatactcaagctcag

SEQ ID NO: 5406984 - DNA, 25 bp, Homo sapien
tcccagggtgctcacattggtggct

SEQ ID NO: 5406985 - DNA, 25 bp, Homo sapien
tctgtagctttaggtaaaatcctgc

SEQ ID NO: 5406986 - DNA, 25 bp, Homo sapien
gctggtccagcacagaataggtcct

SEQ ID NO: 5406987 - DNA, 25 bp, Homo sapien
ccctaataggttagcaatgtcacta

SEQ ID NO: 5406988 - DNA, 25 bp, Homo sapien
atttgtataaagagctccgggcctt

SEQ ID NO: 5406989 - DNA, 25 bp, Homo sapien
tacaaacttagtaactctttgctgt

SEQ ID NO: 5406990 - DNA, 25 bp, Homo sapien
aagccatttcctctagatacaaact

SEQ ID NO: 5406991 - DNA, 25 bp, Homo sapien
gctctgaggatggaatagaccaatt

SEQ ID NO: 5406992 - DNA, 25 bp, Homo sapien
gggtttctgccctactggcttccaa

SEQ ID NO: 5406993 - DNA, 25 bp, Homo sapien
tttaccacactactgatcaaactgg

SEQ ID NO: 5406994 - DNA, 25 bp, Homo sapien
tggcttccaagtgtattctcccgta

SEQ ID NO: 5406995 - DNA, 25 bp, Homo sapien
tgtgtgtactgcaccggctcgggtt

SEQ ID NO: 5406996 - DNA, 25 bp, Homo sapien
gtaatggttacaagtgcaggaggac

SEQ ID NO: 5406997 - DNA, 25 bp, Homo sapien
cagtaataaccgctggaagcttggt

SEQ ID NO: 5406998 - DNA, 25 bp, Homo sapien
gcttcgaaggactgtgtcaattttg

SEQ ID NO: 5406999 - DNA, 25 bp, Homo sapien
gaagcttggtcaaagcttcgaagga

SEQ ID NO: 5407000 - DNA, 25 bp, Homo sapien
ctatgccaattcttgccagcttttg

SEQ ID NO: 5407001 - DNA, 25 bp, Homo sapien
cattaactgaggtaggaagcacagg

SEQ ID NO: 5407002 - DNA, 25 bp, Homo sapien
gatcagctgtgttagttcaaacata

SEQ ID NO: 5407003 - DNA, 25 bp, Homo sapien
caaacatatcattaactgaggtagg

SEQ ID NO: 5407004 - DNA, 25 bp, Homo sapien
tgacctttccgataatgtattcttc

SEQ ID NO: 5407005 - DNA, 25 bp, Homo sapien
tggcaatttgacctttccgataatg

SEQ ID NO: 5407006 - DNA, 25 bp, Homo sapien
gctcctgtacttggaaggacaggga

SEQ ID NO: 5407007 - DNA, 25 bp, Homo sapien
gtaggagcagggatattagactgct

SEQ ID NO: 5407008 - DNA, 25 bp, Homo sapien
gacatcctgattcagcatcagagag

SEQ ID NO: 5407009 - DNA, 25 bp, Homo sapien
ttgacatcctgattcagcatcagag

SEQ ID NO: 5407010 - DNA, 25 bp, Homo sapien
acatcctgattcagcatcagagagg

SEQ ID NO: 5407011 - DNA, 25 bp, Homo sapien
tcttgacatcctgattcagcatcag

SEQ ID NO: 5407012 - DNA, 25 bp, Homo sapien
aagagtcattagaccattcaaagga

SEQ ID NO: 5407013 - DNA, 25 bp, Homo sapien
gctcaaaccaatccatgtttctgat

SEQ ID NO: 5407014 - DNA, 25 bp, Homo sapien
tattgctgctcaaaccaatccatgt

SEQ ID NO: 5407015 - DNA, 25 bp, Homo sapien
gagtcattagaccattcaaaggaaa

SEQ ID NO: 5407016 - DNA, 25 bp, Homo sapien
tcacagtgggtagcataatatttcc

SEQ ID NO: 5407017 - DNA, 25 bp, Homo sapien
tatcagcctgacaagaacgcagagc

SEQ ID NO: 5407018 - DNA, 25 bp, Homo sapien
catctccaaggagggttacaagaaa

SEQ ID NO: 5407019 - DNA, 25 bp, Homo sapien
gtttgtagcaattacgattgtaggg

SEQ ID NO: 5407020 - DNA, 25 bp, Homo sapien
ggaattctagatcttcagagttgag

SEQ ID NO: 5407021 - DNA, 25 bp, Homo sapien
tagatctaggatcaaatgaacctca

SEQ ID NO: 5407022 - DNA, 25 bp, Homo sapien
tttccggatgagctagtgaaggtac

SEQ ID NO: 5407023 - DNA, 25 bp, Homo sapien
gagaagggtctaatctatgatctag

SEQ ID NO: 5407024 - DNA, 25 bp, Homo sapien
acatatatatggcaaggtggactca

SEQ ID NO: 5407025 - DNA, 25 bp, Homo sapien
aaggtggactcacaatcccgactcc

SEQ ID NO: 5407026 - DNA, 25 bp, Homo sapien
tatatatggcaaggtggactcacaa

SEQ ID NO: 5407027 - DNA, 25 bp, Homo sapien
tatggcaaggtggactcacaatccc

SEQ ID NO: 5407028 - DNA, 25 bp, Homo sapien
tcagatagttgagcggcgttccatc

SEQ ID NO: 5407029 - DNA, 25 bp, Homo sapien
ctgggctccaattcagatagttgag

SEQ ID NO: 5407030 - DNA, 25 bp, Homo sapien
tccaattcagatagttgagcggcgt

SEQ ID NO: 5407031 - DNA, 25 bp, Homo sapien
ttgagcggcgttccatcagaccact

SEQ ID NO: 5407032 - DNA, 25 bp, Homo sapien
ctgattgaggcccatccacacctcc

SEQ ID NO: 5407033 - DNA, 25 bp, Homo sapien
gcaaatgtgtgaattgaggtccttc

SEQ ID NO: 5407034 - DNA, 25 bp, Homo sapien
ggcatgaagaatgtgcctcactcca

SEQ ID NO: 5407035 - DNA, 25 bp, Homo sapien
taacagcgtacctccttgcatctgg

SEQ ID NO: 5407036 - DNA, 25 bp, Homo sapien
gtatcacaacctacttctgcagagg

SEQ ID NO: 5407037 - DNA, 25 bp, Homo sapien
catttagattcaaatagagaaggct

SEQ ID NO: 5407038 - DNA, 25 bp, Homo sapien
ggtgtagagatcacatgcatacaca

SEQ ID NO: 5407039 - DNA, 25 bp, Homo sapien
ttaataatgacctctattggggatg

SEQ ID NO: 5407040 - DNA, 25 bp, Homo sapien
taatatgacatctgtttcaggagtc

SEQ ID NO: 5407041 - DNA, 25 bp, Homo sapien
gtaagtcatcttcccgaccttcacg

SEQ ID NO: 5407042 - DNA, 25 bp, Homo sapien
tcccgaccttcacgggtacattcat

SEQ ID NO: 5407043 - DNA, 25 bp, Homo sapien
tctctttcataacggcttgtcgtgg

SEQ ID NO: 5407044 - DNA, 25 bp, Homo sapien
gcttgtcgtggcacaccacagtaag

SEQ ID NO: 5407045 - DNA, 25 bp, Homo sapien
gatgccactgatggttatactggaa

SEQ ID NO: 5407046 - DNA, 25 bp, Homo sapien
actggaagggaaacatacacggcat

SEQ ID NO: 5407047 - DNA, 25 bp, Homo sapien
gttatactggaagggaaacatacac

SEQ ID NO: 5407048 - DNA, 25 bp, Homo sapien
atgccactgatggttatactggaag

SEQ ID NO: 5407049 - DNA, 25 bp, Homo sapien
ccgtgggtgttccctttgattgtat

SEQ ID NO: 5407050 - DNA, 25 bp, Homo sapien
gtgggtgttccctttgattgtatgc

SEQ ID NO: 5407051 - DNA, 25 bp, Homo sapien
tgggtgttccctttgattgtatgca

SEQ ID NO: 5407052 - DNA, 25 bp, Homo sapien
ggtgttccctttgattgtatgcaaa

SEQ ID NO: 5407053 - DNA, 25 bp, Homo sapien
tggtgagctgtcacagtaacattca

SEQ ID NO: 5407054 - DNA, 25 bp, Homo sapien
ggtgagctgtcacagtaacattcat

SEQ ID NO: 5407055 - DNA, 25 bp, Homo sapien
taccataagcaaggaagcaactaaa

SEQ ID NO: 5407056 - DNA, 25 bp, Homo sapien
tctttagcagaatgtagtatgtcca

SEQ ID NO: 5407057 - DNA, 25 bp, Homo sapien
attaatcacatgaatgccagccagc

SEQ ID NO: 5407058 - DNA, 25 bp, Homo sapien
catgcttggcacacaccaaataacc

SEQ ID NO: 5407059 - DNA, 25 bp, Homo sapien
taaaaaaacaccattccctgagtgc

SEQ ID NO: 5407060 - DNA, 25 bp, Homo sapien
tccctgagtgcttctttaaattatt

SEQ ID NO: 5407061 - DNA, 25 bp, Homo sapien
cattccctgagtgcttctttaaatt

SEQ ID NO: 5407062 - DNA, 25 bp, Homo sapien
aaaaaacaccattccctgagtgctt

SEQ ID NO: 5407063 - DNA, 25 bp, Homo sapien
tccacttatgaatatacttccgtga

SEQ ID NO: 5407064 - DNA, 25 bp, Homo sapien
tgtgtagatattcacaaatgtctcc

SEQ ID NO: 5407065 - DNA, 25 bp, Homo sapien
atatacttccgtgaggccaccactg

SEQ ID NO: 5407066 - DNA, 25 bp, Homo sapien
tccaccacctgacccataagaaatc

SEQ ID NO: 5407067 - DNA, 25 bp, Homo sapien
agtactgcagcgggcctgtgatcat

SEQ ID NO: 5407068 - DNA, 25 bp, Homo sapien
cttcctgttacagcgccaccgtaag

SEQ ID NO: 5407069 - DNA, 25 bp, Homo sapien
ggtggagtcacattcatataagctt

SEQ ID NO: 5407070 - DNA, 25 bp, Homo sapien
agggtggagtcacattcatataagc

SEQ ID NO: 5407071 - DNA, 25 bp, Homo sapien
cagcgccaccgtaaggaaacgaggg

SEQ ID NO: 5407072 - DNA, 25 bp, Homo sapien
taaagaggccatggtttgaaaccca

SEQ ID NO: 5407073 - DNA, 25 bp, Homo sapien
tgagactctcactttggataacaaa

SEQ ID NO: 5407074 - DNA, 25 bp, Homo sapien
tacctgcttgaatgcatttcttgag

SEQ ID NO: 5407075 - DNA, 25 bp, Homo sapien
ccagggtcagaaccgatttacctgc

SEQ ID NO: 5407076 - DNA, 25 bp, Homo sapien
aggtggacaagacccctcagtgtca

SEQ ID NO: 5407077 - DNA, 25 bp, Homo sapien
cagtgtcaccagactctgagcgggg

SEQ ID NO: 5407078 - DNA, 25 bp, Homo sapien
tcaccagactctgagcggggagtgt

SEQ ID NO: 5407079 - DNA, 25 bp, Homo sapien
gtgaggtggacaagacccctcagtg

SEQ ID NO: 5407080 - DNA, 25 bp, Homo sapien
gaaacagaagctatgcaggaaatct

SEQ ID NO: 5407081 - DNA, 25 bp, Homo sapien
tctcatcgccctctttcagaaggtg

SEQ ID NO: 5407082 - DNA, 25 bp, Homo sapien
ccccactgccgcctccaggtagtgg

SEQ ID NO: 5407083 - DNA, 25 bp, Homo sapien
tatgcaggaaatctcagggctacag

SEQ ID NO: 5407084 - DNA, 25 bp, Homo sapien
ggagccgctcgggggtaagcgccgc

SEQ ID NO: 5407085 - DNA, 25 bp, Homo sapien
gggtaagcgccgccgccacaccctc

SEQ ID NO: 5407086 - DNA, 25 bp, Homo sapien
agccgctcgggggtaagcgccgccg

SEQ ID NO: 5407087 - DNA, 25 bp, Homo sapien
aagcgccgccgccacaccctcggcg

SEQ ID NO: 5407088 - DNA, 25 bp, Homo sapien
ggaagcggatccgtagcctcctccg

SEQ ID NO: 5407089 - DNA, 25 bp, Homo sapien
gctgggatgcgggaaagtcgcggag

SEQ ID NO: 5407090 - DNA, 25 bp, Homo sapien
tctccacagtgaaccgacactcggg

SEQ ID NO: 5407091 - DNA, 25 bp, Homo sapien
ccgccgcgcggaagcggatccgtag

SEQ ID NO: 5407092 - DNA, 25 bp, Homo sapien
tctgcttcctgtatataaccttgtt

SEQ ID NO: 5407093 - DNA, 25 bp, Homo sapien
ttctgcttcctgtatataaccttgt

SEQ ID NO: 5407094 - DNA, 25 bp, Homo sapien
ccttctgcttcctgtatataacctt

SEQ ID NO: 5407095 - DNA, 25 bp, Homo sapien
ctgcttcctgtatataaccttgttg

SEQ ID NO: 5407096 - DNA, 25 bp, Homo sapien
gggttggatactttgtcaagcttta

SEQ ID NO: 5407097 - DNA, 25 bp, Homo sapien
tagtggagataatagggatttggca

SEQ ID NO: 5407098 - DNA, 25 bp, Homo sapien
tcaagctttatttctaggcaattca

SEQ ID NO: 5407099 - DNA, 25 bp, Homo sapien
gatttggcatgagatgatcacggga

SEQ ID NO: 5407100 - DNA, 25 bp, Homo sapien
gaccgtacagtagaaaatatcatca

SEQ ID NO: 5407101 - DNA, 25 bp, Homo sapien
ggaaatcacatctcaaccccattct

SEQ ID NO: 5407102 - DNA, 25 bp, Homo sapien
tcaaagatggtctcttgggttgttt

SEQ ID NO: 5407103 - DNA, 25 bp, Homo sapien
aagctccatgaaggcctttgctttc

SEQ ID NO: 5407104 - DNA, 25 bp, Homo sapien
ctcacactcacctctagtatctggg

SEQ ID NO: 5407105 - DNA, 25 bp, Homo sapien
tatctggggatactcagggggcacc

SEQ ID NO: 5407106 - DNA, 25 bp, Homo sapien
gggccccttccagtgctcacactca

SEQ ID NO: 5407107 - DNA, 25 bp, Homo sapien
cagtccctggaagatttgaggggcc

SEQ ID NO: 5407108 - DNA, 25 bp, Homo sapien
tgcgcatcagtcaggaacataaagg

SEQ ID NO: 5407109 - DNA, 25 bp, Homo sapien
caacagtaagtccacgtagaggaga

SEQ ID NO: 5407110 - DNA, 25 bp, Homo sapien
cagtctgtcaccttcatgtagagga

SEQ ID NO: 5407111 - DNA, 25 bp, Homo sapien
aaaagagtctccaagtgatcaaagg

SEQ ID NO: 5407112 - DNA, 25 bp, Homo sapien
aacagacttttttcatgcataaagt

SEQ ID NO: 5407113 - DNA, 25 bp, Homo sapien
catttcatatcagtgaaacagactt

SEQ ID NO: 5407114 - DNA, 25 bp, Homo sapien
aaatagtgcattaacatttcatatc

SEQ ID NO: 5407115 - DNA, 25 bp, Homo sapien
ctcattttgaagcaacaaagagaaa

SEQ ID NO: 5407116 - DNA, 25 bp, Homo sapien
aagtacttgtggatcctctgtagag

SEQ ID NO: 5407117 - DNA, 25 bp, Homo sapien
aaaagtacttgtggatcctctgtag

SEQ ID NO: 5407118 - DNA, 25 bp, Homo sapien
ttaaaagtacttgtggatcctctgt

SEQ ID NO: 5407119 - DNA, 25 bp, Homo sapien
gtacttgtggatcctctgtagagtg

SEQ ID NO: 5407120 - DNA, 25 bp, Homo sapien
tctctagttgttccaggccggagga

SEQ ID NO: 5407121 - DNA, 25 bp, Homo sapien
tccagaaggatcaagcctctctagt

SEQ ID NO: 5407122 - DNA, 25 bp, Homo sapien
tagcagtggtgctgtagccaaaagg

SEQ ID NO: 5407123 - DNA, 25 bp, Homo sapien
tgtgcctccaggtgccaatagcagt

SEQ ID NO: 5407124 - DNA, 25 bp, Homo sapien
tatgagtccagtgcagtcctatggc

SEQ ID NO: 5407125 - DNA, 25 bp, Homo sapien
tgactgtccctattgtctctggagg

SEQ ID NO: 5407126 - DNA, 25 bp, Homo sapien
taagccctgtcactttatgagtcca

SEQ ID NO: 5407127 - DNA, 25 bp, Homo sapien
tctgtttaatgcatgttcgggtcgc

SEQ ID NO: 5407128 - DNA, 25 bp, Homo sapien
catcacataattgcccaagtgcgtg

SEQ ID NO: 5407129 - DNA, 25 bp, Homo sapien
ggagggtcaaccaaaggctgtgctt

SEQ ID NO: 5407130 - DNA, 25 bp, Homo sapien
aagtgcgtgtttgtggaacacctgc

SEQ ID NO: 5407131 - DNA, 25 bp, Homo sapien
taggcttcagcttaaccatgcacca

SEQ ID NO: 5407132 - DNA, 25 bp, Homo sapien
gaaatgtttagatatagcacccgtg

SEQ ID NO: 5407133 - DNA, 25 bp, Homo sapien
aatgtccctaagcagctgtctcagg

SEQ ID NO: 5407134 - DNA, 25 bp, Homo sapien
tgtgacatttgaactcccagagcag

SEQ ID NO: 5407135 - DNA, 25 bp, Homo sapien
catgagacccttcatcgtggtggaa

SEQ ID NO: 5407136 - DNA, 25 bp, Homo sapien
tccagatgcacagtaggacaacccc

SEQ ID NO: 5407137 - DNA, 25 bp, Homo sapien
gaaatgacaccagtagcttccagat

SEQ ID NO: 5407138 - DNA, 25 bp, Homo sapien
ggacaaccccgatgagaagaatagc

SEQ ID NO: 5407139 - DNA, 25 bp, Homo sapien
gatcgttctgcttcaaatttggcaa

SEQ ID NO: 5407140 - DNA, 25 bp, Homo sapien
ggctcttatgctctggaagtccctc

SEQ ID NO: 5407141 - DNA, 25 bp, Homo sapien
cttatgctctggaagtccctccgga

SEQ ID NO: 5407142 - DNA, 25 bp, Homo sapien
cccgcctatcattccttgactctgt

SEQ ID NO: 5407143 - DNA, 25 bp, Homo sapien
agccttcccgcctatcattccttga

SEQ ID NO: 5407144 - DNA, 25 bp, Homo sapien
cattgatgctgtgaatgatggtttt

SEQ ID NO: 5407145 - DNA, 25 bp, Homo sapien
tagttattaggaatgtaataagaca

SEQ ID NO: 5407146 - DNA, 25 bp, Homo sapien
attatctgtagttattaggaatgta

SEQ ID NO: 5407147 - DNA, 25 bp, Homo sapien
ctttttcattgatgctgtgaatgat

SEQ ID NO: 5407148 - DNA, 25 bp, Homo sapien
tgacaggtggcactcaatgcagctc

SEQ ID NO: 5407149 - DNA, 25 bp, Homo sapien
tccacacattcttctcgggcttggc

SEQ ID NO: 5407150 - DNA, 25 bp, Homo sapien
agtttgcacttgtccacacattctt

SEQ ID NO: 5407151 - DNA, 25 bp, Homo sapien
ctgacaggtggcactcaatgcagct

SEQ ID NO: 5407152 - DNA, 25 bp, Homo sapien
cacaggtaggacatcgttcacaggt

SEQ ID NO: 5407153 - DNA, 25 bp, Homo sapien
gggtttgtgcaaacacacttgccac

SEQ ID NO: 5407154 - DNA, 25 bp, Homo sapien
tcttcagagacgcaggagtccgtgc

SEQ ID NO: 5407155 - DNA, 25 bp, Homo sapien
ttcacaggttggtcctgaggctcca

SEQ ID NO: 5407156 - DNA, 25 bp, Homo sapien
ctctatgcttctcacagccccaaaa

SEQ ID NO: 5407157 - DNA, 25 bp, Homo sapien
ccccaaaacacttgcagatttgagg

SEQ ID NO: 5407158 - DNA, 25 bp, Homo sapien
cccaaaacacttgcagatttgaggg

SEQ ID NO: 5407159 - DNA, 25 bp, Homo sapien
ttctcacagccccaaaacacttgca

SEQ ID NO: 5407160 - DNA, 25 bp, Homo sapien
tgtcaccttcagattgtgccccatc

SEQ ID NO: 5407161 - DNA, 25 bp, Homo sapien
cccatctgcatcatgtgaaaagagg

SEQ ID NO: 5407162 - DNA, 25 bp, Homo sapien
ctctctgtgatgtggtgacggcctt

SEQ ID NO: 5407163 - DNA, 25 bp, Homo sapien
gactgatgtgggtttggaaacacac

SEQ ID NO: 5407164 - DNA, 25 bp, Homo sapien
gtatatatacgtaacaaacctgcac

SEQ ID NO: 5407165 - DNA, 25 bp, Homo sapien
gatatacctaatgttaaatgatgag

SEQ ID NO: 5407166 - DNA, 25 bp, Homo sapien
cacatgtatatatacgtaacaaacc

SEQ ID NO: 5407167 - DNA, 25 bp, Homo sapien
atggcacatgtatatatacgtaaca

SEQ ID NO: 5407168 - DNA, 25 bp, Homo sapien
tcagacacagctgcttggtccagaa

SEQ ID NO: 5407169 - DNA, 25 bp, Homo sapien
gacacagctgcttggtccagaaaaa

SEQ ID NO: 5407170 - DNA, 25 bp, Homo sapien
cagacacagctgcttggtccagaaa

SEQ ID NO: 5407171 - DNA, 25 bp, Homo sapien
acacagctgcttggtccagaaaaac

SEQ ID NO: 5407172 - DNA, 25 bp, Homo sapien
cttttgtagagtctgggtgtcaacc

SEQ ID NO: 5407173 - DNA, 25 bp, Homo sapien
tcaccccaagtgaatgttagagcca

SEQ ID NO: 5407174 - DNA, 25 bp, Homo sapien
taatggagttcatataacaggcact

SEQ ID NO: 5407175 - DNA, 25 bp, Homo sapien
agagaagattcagttaccctaggtc

SEQ ID NO: 5407176 - DNA, 25 bp, Homo sapien
tgtcacactggcaataaggcccata

SEQ ID NO: 5407177 - DNA, 25 bp, Homo sapien
tgacagtcgcagttgcattctgggc

SEQ ID NO: 5407178 - DNA, 25 bp, Homo sapien
gcagccctttgtgtctcacgcagga

SEQ ID NO: 5407179 - DNA, 25 bp, Homo sapien
cccgtggtgacatttggagctgttc

SEQ ID NO: 5407180 - DNA, 25 bp, Homo sapien
taaatgacaagttgagtccttcagt

SEQ ID NO: 5407181 - DNA, 25 bp, Homo sapien
cccactttcatgtgagagcatttct

SEQ ID NO: 5407182 - DNA, 25 bp, Homo sapien
tacttccagttccacctcagaccgc

SEQ ID NO: 5407183 - DNA, 25 bp, Homo sapien
tggaagagggtaccgttgttacaga

SEQ ID NO: 5407184 - DNA, 25 bp, Homo sapien
caaagacgtctgtgagaggataggc

SEQ ID NO: 5407185 - DNA, 25 bp, Homo sapien
tccgtgttgattctgatacgtcgtt

SEQ ID NO: 5407186 - DNA, 25 bp, Homo sapien
aagtacttgagagggaatatcttgc

SEQ ID NO: 5407187 - DNA, 25 bp, Homo sapien
tgttggcgtatattacagatgggcc

SEQ ID NO: 5407188 - DNA, 25 bp, Homo sapien
acaagtaactaacatttaactgcct

SEQ ID NO: 5407189 - DNA, 25 bp, Homo sapien
aagcactctctctaccaacaagtaa

SEQ ID NO: 5407190 - DNA, 25 bp, Homo sapien
taactaacatttaactgcctaaatc

SEQ ID NO: 5407191 - DNA, 25 bp, Homo sapien
tctctctaccaacaagtaactaaca

SEQ ID NO: 5407192 - DNA, 25 bp, Homo sapien
agctggagaatgtttccggagtcct

SEQ ID NO: 5407193 - DNA, 25 bp, Homo sapien
tctgaagtagacctactgtagctcc

SEQ ID NO: 5407194 - DNA, 25 bp, Homo sapien
gaatgtttccggagtccttctgaag

SEQ ID NO: 5407195 - DNA, 25 bp, Homo sapien
tccggagtccttctgaagtagacct

SEQ ID NO: 5407196 - DNA, 25 bp, Homo sapien
ttttctcctgaaactgtagccttta

SEQ ID NO: 5407197 - DNA, 25 bp, Homo sapien
aactgtagcctttactttgtgctgc

SEQ ID NO: 5407198 - DNA, 25 bp, Homo sapien
tcctgaaactgtagcctttactttg

SEQ ID NO: 5407199 - DNA, 25 bp, Homo sapien
tgaaactgtagcctttactttgtgc

SEQ ID NO: 5407200 - DNA, 25 bp, Homo sapien
tcaggtcgctctgtaagtcattcag

SEQ ID NO: 5407201 - DNA, 25 bp, Homo sapien
tggtaatgagctccctttcaggatg

SEQ ID NO: 5407202 - DNA, 25 bp, Homo sapien
tattggatgcttgcactgagctctc

SEQ ID NO: 5407203 - DNA, 25 bp, Homo sapien
ccaaggtttggtgcacatgggcaat

SEQ ID NO: 5407204 - DNA, 25 bp, Homo sapien
tcccacattgctgcctgatgatgga

SEQ ID NO: 5407205 - DNA, 25 bp, Homo sapien
tgatgatggaggacccccttttgtt

SEQ ID NO: 5407206 - DNA, 25 bp, Homo sapien
ttgtgtcccacattgctgcctgatg

SEQ ID NO: 5407207 - DNA, 25 bp, Homo sapien
ttgctgcctgatgatggaggacccc

SEQ ID NO: 5407208 - DNA, 25 bp, Homo sapien
tcaaataaacatatgtcacaaaggg

SEQ ID NO: 5407209 - DNA, 25 bp, Homo sapien
cttttcaaataaacatatgtcacaa

SEQ ID NO: 5407210 - DNA, 25 bp, Homo sapien
tttcaaataaacatatgtcacaaag

SEQ ID NO: 5407211 - DNA, 25 bp, Homo sapien
ttcaaataaacatatgtcacaaagg

SEQ ID NO: 5407212 - DNA, 25 bp, Homo sapien
cattaatcgctgacttccactagag

SEQ ID NO: 5407213 - DNA, 25 bp, Homo sapien
tgacgatataaaagcgttggcagcc

SEQ ID NO: 5407214 - DNA, 25 bp, Homo sapien
gacttccactagagtgacgatataa

SEQ ID NO: 5407215 - DNA, 25 bp, Homo sapien
cagtagcagtaaccagtggttaaca

SEQ ID NO: 5407216 - DNA, 25 bp, Homo sapien
ctgtcaggtgtgcactcctgcttgg

SEQ ID NO: 5407217 - DNA, 25 bp, Homo sapien
cagtttggtgcctctcagtgtctgg

SEQ ID NO: 5407218 - DNA, 25 bp, Homo sapien
cagctgtcaggtgtgcactcctgct

SEQ ID NO: 5407219 - DNA, 25 bp, Homo sapien
agtttggtgcctctcagtgtctggc

SEQ ID NO: 5407220 - DNA, 25 bp, Homo sapien
gagcctctctggctttggtgatatc

SEQ ID NO: 5407221 - DNA, 25 bp, Homo sapien
cctctctggctttggtgatatcctg

SEQ ID NO: 5407222 - DNA, 25 bp, Homo sapien
ggctttggtgatatcctggctttct

SEQ ID NO: 5407223 - DNA, 25 bp, Homo sapien
ctctggctttggtgatatcctggct

SEQ ID NO: 5407224 - DNA, 25 bp, Homo sapien
gggcagctcctgatgttacccccat

SEQ ID NO: 5407225 - DNA, 25 bp, Homo sapien
aaggggcagctcctgatgttacccc

SEQ ID NO: 5407226 - DNA, 25 bp, Homo sapien
ggggcagctcctgatgttaccccca

SEQ ID NO: 5407227 - DNA, 25 bp, Homo sapien
gaaggggcagctcctgatgttaccc

SEQ ID NO: 5407228 - DNA, 25 bp, Homo sapien
ggggttttattctgctggttctcac

SEQ ID NO: 5407229 - DNA, 25 bp, Homo sapien
tatgcaaaagtttacccccaggctc

SEQ ID NO: 5407230 - DNA, 25 bp, Homo sapien
atgcaaaagtttacccccaggctca

SEQ ID NO: 5407231 - DNA, 25 bp, Homo sapien
tgcaaaagtttacccccaggctcaa

SEQ ID NO: 5407232 - DNA, 25 bp, Homo sapien
gccttcaggctttcgattgtcagca

SEQ ID NO: 5407233 - DNA, 25 bp, Homo sapien
ttcctggcacaagggtagcatgaat

SEQ ID NO: 5407234 - DNA, 25 bp, Homo sapien
tctgtctctgggttgcatgatatct

SEQ ID NO: 5407235 - DNA, 25 bp, Homo sapien
caagggtagcatgaatgtctgtctc

SEQ ID NO: 5407236 - DNA, 25 bp, Homo sapien
tgtcggcatcggaacttttgagcac

SEQ ID NO: 5407237 - DNA, 25 bp, Homo sapien
gccccagcaatgactaggttgtcgg

SEQ ID NO: 5407238 - DNA, 25 bp, Homo sapien
tgtgctaattagatcaggtgcttga

SEQ ID NO: 5407239 - DNA, 25 bp, Homo sapien
tcggaacttttgagcactacctgtc

SEQ ID NO: 5407240 - DNA, 25 bp, Homo sapien
aggccagagagataaagagatttcc

SEQ ID NO: 5407241 - DNA, 25 bp, Homo sapien
cagaagtggtcgttttactcctaga

SEQ ID NO: 5407242 - DNA, 25 bp, Homo sapien
cattgactgttgaggctgaaatctt

SEQ ID NO: 5407243 - DNA, 25 bp, Homo sapien
gaacaggctaacaaatagcaaaggg

SEQ ID NO: 5407244 - DNA, 25 bp, Homo sapien
cctcctcccacttctaaactggagc

SEQ ID NO: 5407245 - DNA, 25 bp, Homo sapien
ggtagtctatgttcacgatcatcaa

SEQ ID NO: 5407246 - DNA, 25 bp, Homo sapien
aaaagttctgtgcaactcctcctcc

SEQ ID NO: 5407247 - DNA, 25 bp, Homo sapien
gatcatcaatcgcattccccagact

SEQ ID NO: 5407248 - DNA, 25 bp, Homo sapien
gcaagatagcatctcctgctggatc

SEQ ID NO: 5407249 - DNA, 25 bp, Homo sapien
tagtgagtggcatttaatcaaagcc

SEQ ID NO: 5407250 - DNA, 25 bp, Homo sapien
tgctggatcctttctacagaacctg

SEQ ID NO: 5407251 - DNA, 25 bp, Homo sapien
gggctgtaccgtccttagtagtgag

SEQ ID NO: 5407252 - DNA, 25 bp, Homo sapien
tgagttgtccaattgttggatattc

SEQ ID NO: 5407253 - DNA, 25 bp, Homo sapien
caatgagttgtccaattgttggata

SEQ ID NO: 5407254 - DNA, 25 bp, Homo sapien
ttatcaatgagttgtccaattgttg

SEQ ID NO: 5407255 - DNA, 25 bp, Homo sapien
ccagtttatcaatgagttgtccaat

SEQ ID NO: 5407256 - DNA, 25 bp, Homo sapien
tgacattcccgtactaatccttggg

SEQ ID NO: 5407257 - DNA, 25 bp, Homo sapien
caagttggttgcatggaatcgtgca

SEQ ID NO: 5407258 - DNA, 25 bp, Homo sapien
gctaggaattcctcagtcgagggag

SEQ ID NO: 5407259 - DNA, 25 bp, Homo sapien
taagtgacacttaccagcaggctag

SEQ ID NO: 5407260 - DNA, 25 bp, Homo sapien
tgtattacactagttgttgcttcgt

SEQ ID NO: 5407261 - DNA, 25 bp, Homo sapien
ttacactagttgttgcttcgttctc

SEQ ID NO: 5407262 - DNA, 25 bp, Homo sapien
tattacactagttgttgcttcgttc

SEQ ID NO: 5407263 - DNA, 25 bp, Homo sapien
attacactagttgttgcttcgttct

SEQ ID NO: 5407264 - DNA, 25 bp, Homo sapien
gaaaacagtacagagtgcaggttac

SEQ ID NO: 5407265 - DNA, 25 bp, Homo sapien
aacagtacagagtgcaggttacaca

SEQ ID NO: 5407266 - DNA, 25 bp, Homo sapien
aaacagtacagagtgcaggttacac

SEQ ID NO: 5407267 - DNA, 25 bp, Homo sapien
ctgaaaacagtacagagtgcaggtt

SEQ ID NO: 5407268 - DNA, 25 bp, Homo sapien
tcttgctgtccaagtgacagagccc

SEQ ID NO: 5407269 - DNA, 25 bp, Homo sapien
ccgtcattaggaatgacgatgcctg

SEQ ID NO: 5407270 - DNA, 25 bp, Homo sapien
caagacagttgacatggagtattca

SEQ ID NO: 5407271 - DNA, 25 bp, Homo sapien
gcctgctagtttgctgtccattcca

SEQ ID NO: 5407272 - DNA, 25 bp, Homo sapien
gcttgaatccaaatgtaggtaaaca

SEQ ID NO: 5407273 - DNA, 25 bp, Homo sapien
tcatttgtcaatggcaaaatgtgct

SEQ ID NO: 5407274 - DNA, 25 bp, Homo sapien
ccttcgggtgtgtcaatattagcag

SEQ ID NO: 5407275 - DNA, 25 bp, Homo sapien
taattgcatcaaatccaccttcggg

SEQ ID NO: 5407276 - DNA, 25 bp, Homo sapien
aatccaccgggtagtcctcagtctg

SEQ ID NO: 5407277 - DNA, 25 bp, Homo sapien
tgttgaggtcgtcatccatggaggc

SEQ ID NO: 5407278 - DNA, 25 bp, Homo sapien
gatccgaagcccagtctaaagttgc

SEQ ID NO: 5407279 - DNA, 25 bp, Homo sapien
gacatgcacctgcagagtctgcgca

SEQ ID NO: 5407280 - DNA, 25 bp, Homo sapien
catcctttagctaaaaggtttgctg

SEQ ID NO: 5407281 - DNA, 25 bp, Homo sapien
acttaaggatcaagctttgaggcgc

SEQ ID NO: 5407282 - DNA, 25 bp, Homo sapien
tttgaggcgcaatctgaacaatgtc

SEQ ID NO: 5407283 - DNA, 25 bp, Homo sapien
ttcgatgaagtttaattgacatcct

SEQ ID NO: 5407284 - DNA, 25 bp, Homo sapien
ctttcgccaactccagatggatgag

SEQ ID NO: 5407285 - DNA, 25 bp, Homo sapien
tcgccaactccagatggatgagtaa

SEQ ID NO: 5407286 - DNA, 25 bp, Homo sapien
gccaactccagatggatgagtaaaa

SEQ ID NO: 5407287 - DNA, 25 bp, Homo sapien
caactccagatggatgagtaaaatt

SEQ ID NO: 5407288 - DNA, 25 bp, Homo sapien
tgaggtccaataagcaggcagtctt

SEQ ID NO: 5407289 - DNA, 25 bp, Homo sapien
gtccaataagcaggcagtcttcaca

SEQ ID NO: 5407290 - DNA, 25 bp, Homo sapien
ataagcaggcagtcttcacaggttt

SEQ ID NO: 5407291 - DNA, 25 bp, Homo sapien
cactgaggtccaataagcaggcagt

SEQ ID NO: 5407292 - DNA, 25 bp, Homo sapien
ctagaaatagaaagaacaggcaaag

SEQ ID NO: 5407293 - DNA, 25 bp, Homo sapien
aagaacaggcaaagcagttcaatcc

SEQ ID NO: 5407294 - DNA, 25 bp, Homo sapien
gaacaggcaaagcagttcaatcccc

SEQ ID NO: 5407295 - DNA, 25 bp, Homo sapien
acaggcaaagcagttcaatccccat

SEQ ID NO: 5407296 - DNA, 25 bp, Homo sapien
aaaatgaattaccttcagcgttaca

SEQ ID NO: 5407297 - DNA, 25 bp, Homo sapien
cagaggctacctggacaggtaaagc

SEQ ID NO: 5407298 - DNA, 25 bp, Homo sapien
gctgtgcagaccgattaaaaaatga

SEQ ID NO: 5407299 - DNA, 25 bp, Homo sapien
gttacaagaccaacgctgaatatcg

SEQ ID NO: 5407300 - DNA, 25 bp, Homo sapien
gagcattcctgggtaagcatgtgaa

SEQ ID NO: 5407301 - DNA, 25 bp, Homo sapien
aacctctagctcatgatttggcaca

SEQ ID NO: 5407302 - DNA, 25 bp, Homo sapien
cctcaggctagggaccaagttctct

SEQ ID NO: 5407303 - DNA, 25 bp, Homo sapien
gaggagattatcttttcaaggagca

SEQ ID NO: 5407304 - DNA, 25 bp, Homo sapien
caggtcttgagttgcctgtctgccc

SEQ ID NO: 5407305 - DNA, 25 bp, Homo sapien
tgtctgcccatagacctccctggca

SEQ ID NO: 5407306 - DNA, 25 bp, Homo sapien
tctggatatgccaatccctggaaac

SEQ ID NO: 5407307 - DNA, 25 bp, Homo sapien
cagccgctagcaggcactctagagg

SEQ ID NO: 5407308 - DNA, 25 bp, Homo sapien
ctgcttcatctgaagtaccggtgac

SEQ ID NO: 5407309 - DNA, 25 bp, Homo sapien
ccaggtgtctttctgtgaaaacgtt

SEQ ID NO: 5407310 - DNA, 25 bp, Homo sapien
gaagtaccggtgacaagtcttccac

SEQ ID NO: 5407311 - DNA, 25 bp, Homo sapien
tgtgaaaacgtttcattgcgagtag

SEQ ID NO: 5407312 - DNA, 25 bp, Homo sapien
gagctgtccgtgtggtttccagtga

SEQ ID NO: 5407313 - DNA, 25 bp, Homo sapien
cacaccgttgttgagtagatgcact

SEQ ID NO: 5407314 - DNA, 25 bp, Homo sapien
gccagggtcttgatgaatgaatccc

SEQ ID NO: 5407315 - DNA, 25 bp, Homo sapien
cacagagtgtccaaatgttagagca

SEQ ID NO: 5407316 - DNA, 25 bp, Homo sapien
tgccatcactgggcgaccgctctgg

SEQ ID NO: 5407317 - DNA, 25 bp, Homo sapien
gggtgcatgctatagatggcatcat

SEQ ID NO: 5407318 - DNA, 25 bp, Homo sapien
tgcatgctatagatggcatcattgc

SEQ ID NO: 5407319 - DNA, 25 bp, Homo sapien
atcactgggcgaccgctctggagca

SEQ ID NO: 5407320 - DNA, 25 bp, Homo sapien
tccatggtgtcatgagtttaggact

SEQ ID NO: 5407321 - DNA, 25 bp, Homo sapien
gagtttaggacttggcaccccagga

SEQ ID NO: 5407322 - DNA, 25 bp, Homo sapien
cctgctgggaactcctcggtgtttg

SEQ ID NO: 5407323 - DNA, 25 bp, Homo sapien
ggacctcctttgcagcccttgactg

SEQ ID NO: 5407324 - DNA, 25 bp, Homo sapien
cctcctgcctactccccctggctct

SEQ ID NO: 5407325 - DNA, 25 bp, Homo sapien
gccagggatgatccagctgacacct

SEQ ID NO: 5407326 - DNA, 25 bp, Homo sapien
tgggccagggatgatccagctgaca

SEQ ID NO: 5407327 - DNA, 25 bp, Homo sapien
tcctcctgcctactccccctggctc

SEQ ID NO: 5407328 - DNA, 25 bp, Homo sapien
ccttgctgttgatttctgtgtatct

SEQ ID NO: 5407329 - DNA, 25 bp, Homo sapien
atacatacataaaagttcttgtccc

SEQ ID NO: 5407330 - DNA, 25 bp, Homo sapien
catacataaaagttcttgtcccctt

SEQ ID NO: 5407331 - DNA, 25 bp, Homo sapien
tatctgttggtatttgtacataata

SEQ ID NO: 5407332 - DNA, 25 bp, Homo sapien
tcccaactgggtaggtctgaacctg

SEQ ID NO: 5407333 - DNA, 25 bp, Homo sapien
gcaggtatgtaaccaaatgtcccca

SEQ ID NO: 5407334 - DNA, 25 bp, Homo sapien
tccctcttggcattggttcctaatt

SEQ ID NO: 5407335 - DNA, 25 bp, Homo sapien
agcctccttggcaggtatgtaacca

SEQ ID NO: 5407336 - DNA, 25 bp, Homo sapien
ttcggtatcctgtgtctcaattccc

SEQ ID NO: 5407337 - DNA, 25 bp, Homo sapien
aaactgcccctctttcggtatcctg

SEQ ID NO: 5407338 - DNA, 25 bp, Homo sapien
taagtttgcagctcttggatgttcg

SEQ ID NO: 5407339 - DNA, 25 bp, Homo sapien
ccacagaatgtatcaagtaggcaga

SEQ ID NO: 5407340 - DNA, 25 bp, Homo sapien
acccatgagctttcaggtgcccaag

SEQ ID NO: 5407341 - DNA, 25 bp, Homo sapien
tgcccaagctatgcagaactccctg

SEQ ID NO: 5407342 - DNA, 25 bp, Homo sapien
ggctgcgactatggcacagctcaaa

SEQ ID NO: 5407343 - DNA, 25 bp, Homo sapien
gatgttgttcagtgggctgcgacta

SEQ ID NO: 5407344 - DNA, 25 bp, Homo sapien
gaaactctttcctgtgaggcttctt

SEQ ID NO: 5407345 - DNA, 25 bp, Homo sapien
gctttgccaacattcactgtcccgg

SEQ ID NO: 5407346 - DNA, 25 bp, Homo sapien
tcactgtcccggtgtttgctgactt

SEQ ID NO: 5407347 - DNA, 25 bp, Homo sapien
ttgctgacttcacaaacagaacttg

SEQ ID NO: 5407348 - DNA, 25 bp, Homo sapien
cagaccccaaaggaatgttctgctt

SEQ ID NO: 5407349 - DNA, 25 bp, Homo sapien
cttgaagggcattaagagtttatcc

SEQ ID NO: 5407350 - DNA, 25 bp, Homo sapien
ggctgctgtacattttgtgctgctt

SEQ ID NO: 5407351 - DNA, 25 bp, Homo sapien
ctgctgtacattttgtgctgctttg

SEQ ID NO: 5407352 - DNA, 25 bp, Homo sapien
gctgctgtacattttgtgctgcttt

SEQ ID NO: 5407353 - DNA, 25 bp, Homo sapien
tccttgcgcttttgttgttggacat

SEQ ID NO: 5407354 - DNA, 25 bp, Homo sapien
gtagcttttgtccttcccacgcaag

SEQ ID NO: 5407355 - DNA, 25 bp, Homo sapien
tgtcgtcaactcacagcaatgtagc

SEQ ID NO: 5407356 - DNA, 25 bp, Homo sapien
ttcccacgcaagttctgccaagttc

SEQ ID NO: 5407357 - DNA, 25 bp, Homo sapien
gctcagaagtgctactgggacccat

SEQ ID NO: 5407358 - DNA, 25 bp, Homo sapien
tctcccagggactgcttgtaagcac

SEQ ID NO: 5407359 - DNA, 25 bp, Homo sapien
tccatttgtgaaaaggctcagaagt

SEQ ID NO: 5407360 - DNA, 25 bp, Homo sapien
tagggtttccttatggcggcggctc

SEQ ID NO: 5407361 - DNA, 25 bp, Homo sapien
cacttaacacaccttatactttcct

SEQ ID NO: 5407362 - DNA, 25 bp, Homo sapien
ctagagcgtaagcaccacaaaaaca

SEQ ID NO: 5407363 - DNA, 25 bp, Homo sapien
atcttccactagagcgtaagcacca

SEQ ID NO: 5407364 - DNA, 25 bp, Homo sapien
tgaccactccatgtaaaatagaaac

SEQ ID NO: 5407365 - DNA, 25 bp, Homo sapien
tagaggatgttcagaggtcagagat

SEQ ID NO: 5407366 - DNA, 25 bp, Homo sapien
tgcccttgagatcagaatgatactc

SEQ ID NO: 5407367 - DNA, 25 bp, Homo sapien
gattattactatagtggtctcgcaa

SEQ ID NO: 5407368 - DNA, 25 bp, Homo sapien
cacacaggtactaaggctagtgacc

SEQ ID NO: 5407369 - DNA, 25 bp, Homo sapien
gcagtctccaggacattcctgctga

SEQ ID NO: 5407370 - DNA, 25 bp, Homo sapien
ctggagcagtctccaggacattcct

SEQ ID NO: 5407371 - DNA, 25 bp, Homo sapien
ctgctgatttacaactgcaatcttg

SEQ ID NO: 5407372 - DNA, 25 bp, Homo sapien
tccaggacattcctgctgatttaca

SEQ ID NO: 5407373 - DNA, 25 bp, Homo sapien
gattttacacaaagtgcaggatgcc

SEQ ID NO: 5407374 - DNA, 25 bp, Homo sapien
caagtattcgttcgtcaagagtgga

SEQ ID NO: 5407375 - DNA, 25 bp, Homo sapien
gctgtccctggttaagacgcaatga

SEQ ID NO: 5407376 - DNA, 25 bp, Homo sapien
gaataaagacgactaggcaggaggc

SEQ ID NO: 5407377 - DNA, 25 bp, Homo sapien
tgccttagactacaatccaacttgg

SEQ ID NO: 5407378 - DNA, 25 bp, Homo sapien
ttcctcaagtgcagatattgtgcct

SEQ ID NO: 5407379 - DNA, 25 bp, Homo sapien
ccaacttggaacctggtaagtcaag

SEQ ID NO: 5407380 - DNA, 25 bp, Homo sapien
tgaaagacataagtaaaggcaggaa

SEQ ID NO: 5407381 - DNA, 25 bp, Homo sapien
cacatgggtgtagaatactatggag

SEQ ID NO: 5407382 - DNA, 25 bp, Homo sapien
tgcacccgttatcaaaagtctttgg

SEQ ID NO: 5407383 - DNA, 25 bp, Homo sapien
gaaagtgctggcatgcattactgca

SEQ ID NO: 5407384 - DNA, 25 bp, Homo sapien
tgtcaccatccctgaaaaagcacat

SEQ ID NO: 5407385 - DNA, 25 bp, Homo sapien
gtatgtggggagcaatgtttcagaa

SEQ ID NO: 5407386 - DNA, 25 bp, Homo sapien
atgacatgggccatgctgtatgtgg

SEQ ID NO: 5407387 - DNA, 25 bp, Homo sapien
gacaatggctaaatccaagcttttg

SEQ ID NO: 5407388 - DNA, 25 bp, Homo sapien
tgcattcttgaagatcaaatgacat

SEQ ID NO: 5407389 - DNA, 25 bp, Homo sapien
tcagatatatatgagtaactccagt

SEQ ID NO: 5407390 - DNA, 25 bp, Homo sapien
taactccagttggaagttgttcatg

SEQ ID NO: 5407391 - DNA, 25 bp, Homo sapien
ctaaattcagatatatatgagtaac

SEQ ID NO: 5407392 - DNA, 25 bp, Homo sapien
ttatttaatggtggcttggtgttgg

SEQ ID NO: 5407393 - DNA, 25 bp, Homo sapien
caagggcggctggtttcttcaagca

SEQ ID NO: 5407394 - DNA, 25 bp, Homo sapien
tcacagggcaacgaaactgctttgg

SEQ ID NO: 5407395 - DNA, 25 bp, Homo sapien
gaagtgaacatctctctaggtccct

SEQ ID NO: 5407396 - DNA, 25 bp, Homo sapien
gatttggattcaccctgccttaaag

SEQ ID NO: 5407397 - DNA, 25 bp, Homo sapien
tgatgttgtgcctgctatagtctgc

SEQ ID NO: 5407398 - DNA, 25 bp, Homo sapien
tttccagcccctagcaggaacaact

SEQ ID NO: 5407399 - DNA, 25 bp, Homo sapien
cctgctatagtctgcaaactgccag

SEQ ID NO: 5407400 - DNA, 25 bp, Homo sapien
gcccctagcaggaacaacttgagga

SEQ ID NO: 5407401 - DNA, 25 bp, Homo sapien
gaacagactgcagcttacggtgaga

SEQ ID NO: 5407402 - DNA, 25 bp, Homo sapien
taaatcattcaagcaccttgtgctg

SEQ ID NO: 5407403 - DNA, 25 bp, Homo sapien
gggcgccattcacgtagtcattgta

SEQ ID NO: 5407404 - DNA, 25 bp, Homo sapien
tccttgttagcacttctgggaaccc

SEQ ID NO: 5407405 - DNA, 25 bp, Homo sapien
tctgagagacccatgatagccactg

SEQ ID NO: 5407406 - DNA, 25 bp, Homo sapien
gtgagcacgtggcaggccccggagc

SEQ ID NO: 5407407 - DNA, 25 bp, Homo sapien
ggccccggagcagcatggttggttc

SEQ ID NO: 5407408 - DNA, 25 bp, Homo sapien
ggctcgaagggccaagactctgaga

SEQ ID NO: 5407409 - DNA, 25 bp, Homo sapien
ttaggtataacatgaagtgctcagt

SEQ ID NO: 5407410 - DNA, 25 bp, Homo sapien
tgtggaaataaaaggaggatacgga

SEQ ID NO: 5407411 - DNA, 25 bp, Homo sapien
tccttcagagtcatagcaaagggct

SEQ ID NO: 5407412 - DNA, 25 bp, Homo sapien
tgtgaagggccaaatgtggaaataa

SEQ ID NO: 5407413 - DNA, 25 bp, Homo sapien
caacaacgctcacaatgagggcgct

SEQ ID NO: 5407414 - DNA, 25 bp, Homo sapien
gctccagtcttacgaggaaccccaa

SEQ ID NO: 5407415 - DNA, 25 bp, Homo sapien
tcccgatgtcggctgcagcgggtct

SEQ ID NO: 5407416 - DNA, 25 bp, Homo sapien
aattcaagacccctgtgacccaggc

SEQ ID NO: 5407417 - DNA, 25 bp, Homo sapien
tcccaatggcgctggctcttttcct

SEQ ID NO: 5407418 - DNA, 25 bp, Homo sapien
cagggcgattgagaggtcggtgacc

SEQ ID NO: 5407419 - DNA, 25 bp, Homo sapien
gacctttgtcccaatggcgctggct

SEQ ID NO: 5407420 - DNA, 25 bp, Homo sapien
acatctcaggctttttgtggaaggg

SEQ ID NO: 5407421 - DNA, 25 bp, Homo sapien
ttatatgggagcggtaactgtgaac

SEQ ID NO: 5407422 - DNA, 25 bp, Homo sapien
atatgggagcggtaactgtgaacca

SEQ ID NO: 5407423 - DNA, 25 bp, Homo sapien
tatgggagcggtaactgtgaaccac

SEQ ID NO: 5407424 - DNA, 25 bp, Homo sapien
tatatgggagcggtaactgtgaacc

SEQ ID NO: 5407425 - DNA, 25 bp, Homo sapien
cccttttccgtggattggtgctcct

SEQ ID NO: 5407426 - DNA, 25 bp, Homo sapien
atcgctggcttgatcctcccttttc

SEQ ID NO: 5407427 - DNA, 25 bp, Homo sapien
gattggtgctcctgagtatgtttac

SEQ ID NO: 5407428 - DNA, 25 bp, Homo sapien
cgtggattggtgctcctgagtatgt

SEQ ID NO: 5407429 - DNA, 25 bp, Homo sapien
tcagtacataacacagccagataga

SEQ ID NO: 5407430 - DNA, 25 bp, Homo sapien
cacagccagatagagggccgcggac

SEQ ID NO: 5407431 - DNA, 25 bp, Homo sapien
cggtttcagtacataacacagccag

SEQ ID NO: 5407432 - DNA, 25 bp, Homo sapien
agagggccgcggacttcagcggcga

SEQ ID NO: 5407433 - DNA, 25 bp, Homo sapien
tcatagaaaggagcacttaggtgtt

SEQ ID NO: 5407434 - DNA, 25 bp, Homo sapien
ctttggtcatagaaaggagcactta

SEQ ID NO: 5407435 - DNA, 25 bp, Homo sapien
tggtcatagaaaggagcacttaggt

SEQ ID NO: 5407436 - DNA, 25 bp, Homo sapien
ttggtcatagaaaggagcacttagg

SEQ ID NO: 5407437 - DNA, 25 bp, Homo sapien
gaccagagcttacattcttagcagc

SEQ ID NO: 5407438 - DNA, 25 bp, Homo sapien
gcctgggtttgtctcgagaggccat

SEQ ID NO: 5407439 - DNA, 25 bp, Homo sapien
gtttgtctcgagaggccatgcttct

SEQ ID NO: 5407440 - DNA, 25 bp, Homo sapien
aagtgagaccagagcttacattctt

SEQ ID NO: 5407441 - DNA, 25 bp, Homo sapien
ttccttgcccactctttttatcacc

SEQ ID NO: 5407442 - DNA, 25 bp, Homo sapien
taaatactgaaccaccacactaaaa

SEQ ID NO: 5407443 - DNA, 25 bp, Homo sapien
gacgcagccagaaatggagcggact

SEQ ID NO: 5407444 - DNA, 25 bp, Homo sapien
ttttccttgcccactctttttatca

SEQ ID NO: 5407445 - DNA, 25 bp, Homo sapien
ttgggcagaaggagcctattttgca

SEQ ID NO: 5407446 - DNA, 25 bp, Homo sapien
cagaaggagcctattttgcatatta

SEQ ID NO: 5407447 - DNA, 25 bp, Homo sapien
tgggcagaaggagcctattttgcat

SEQ ID NO: 5407448 - DNA, 25 bp, Homo sapien
ggcagaaggagcctattttgcatat

SEQ ID NO: 5407449 - DNA, 25 bp, Homo sapien
tagttgaggcgtagcagcaagaaag

SEQ ID NO: 5407450 - DNA, 25 bp, Homo sapien
ccttgctgagcattgacaagcaatg

SEQ ID NO: 5407451 - DNA, 25 bp, Homo sapien
gctgttaggctgtcttccttgctga

SEQ ID NO: 5407452 - DNA, 25 bp, Homo sapien
ttggtctttaagaacagaccactag

SEQ ID NO: 5407453 - DNA, 25 bp, Homo sapien
taatattccagggagcatagaacca

SEQ ID NO: 5407454 - DNA, 25 bp, Homo sapien
aatatcaagtagtgagagacccagg

SEQ ID NO: 5407455 - DNA, 25 bp, Homo sapien
taactgatcatacacagctgaccag

SEQ ID NO: 5407456 - DNA, 25 bp, Homo sapien
caaatcttacccagacgagtatggc

SEQ ID NO: 5407457 - DNA, 25 bp, Homo sapien
gatgtaaagtgtggcactgcttgga

SEQ ID NO: 5407458 - DNA, 25 bp, Homo sapien
gtagaaataactgtgtatttatgaa

SEQ ID NO: 5407459 - DNA, 25 bp, Homo sapien
cacttgaacacttgtagtgatgatg

SEQ ID NO: 5407460 - DNA, 25 bp, Homo sapien
tatcttatatgtactaaagtagaaa

SEQ ID NO: 5407461 - DNA, 25 bp, Homo sapien
tataaaacctaaatgcaaaggtaca

SEQ ID NO: 5407462 - DNA, 25 bp, Homo sapien
aatgcaaaggtacaaaaaaggcaca

SEQ ID NO: 5407463 - DNA, 25 bp, Homo sapien
tacaaaaaaggcacattctcctaac

SEQ ID NO: 5407464 - DNA, 25 bp, Homo sapien
taaatgcaaaggtacaaaaaaggca

SEQ ID NO: 5407465 - DNA, 25 bp, Homo sapien
actggtccggcaaaaataaagagca

SEQ ID NO: 5407466 - DNA, 25 bp, Homo sapien
gctcttcggtctttggtgaagttac

SEQ ID NO: 5407467 - DNA, 25 bp, Homo sapien
gctgagacaagttggagctactggt

SEQ ID NO: 5407468 - DNA, 25 bp, Homo sapien
tggttactggctcttcggtctttgg

SEQ ID NO: 5407469 - DNA, 25 bp, Homo sapien
agagctagtagccaatcgttttgct

SEQ ID NO: 5407470 - DNA, 25 bp, Homo sapien
ctatcagaggaaactgttggcgtac

SEQ ID NO: 5407471 - DNA, 25 bp, Homo sapien
atagcaacatttttcggtttgccag

SEQ ID NO: 5407472 - DNA, 25 bp, Homo sapien
ctatcattagtataaaggaaggaca

SEQ ID NO: 5407473 - DNA, 25 bp, Homo sapien
gaattacagcaacactcgcactgca

SEQ ID NO: 5407474 - DNA, 25 bp, Homo sapien
aaagagacactgacggcaacactga

SEQ ID NO: 5407475 - DNA, 25 bp, Homo sapien
ggataagacacttcacactacgttg

SEQ ID NO: 5407476 - DNA, 25 bp, Homo sapien
acaaaaatccggtcatgcacttgga

SEQ ID NO: 5407477 - DNA, 25 bp, Homo sapien
gaacagctactagatgaatttaagg

SEQ ID NO: 5407478 - DNA, 25 bp, Homo sapien
ttttatgcaccttatagaacttata

SEQ ID NO: 5407479 - DNA, 25 bp, Homo sapien
tgttcgggggaacagctactagatg

SEQ ID NO: 5407480 - DNA, 25 bp, Homo sapien
tatgcaccttatagaacttatagca

SEQ ID NO: 5407481 - DNA, 25 bp, Homo sapien
atccatgattgttcagccttcacac

SEQ ID NO: 5407482 - DNA, 25 bp, Homo sapien
ccttcttcatgtaagaacacctttc

SEQ ID NO: 5407483 - DNA, 25 bp, Homo sapien
ttcttcatgtaagaacacctttctg

SEQ ID NO: 5407484 - DNA, 25 bp, Homo sapien
cttcttcatgtaagaacacctttct

SEQ ID NO: 5407485 - DNA, 25 bp, Homo sapien
caaggtattctatatcaccagggca

SEQ ID NO: 5407486 - DNA, 25 bp, Homo sapien
gatggttactttcaatgcctgtcac

SEQ ID NO: 5407487 - DNA, 25 bp, Homo sapien
cactgatggtagactgataaatgca

SEQ ID NO: 5407488 - DNA, 25 bp, Homo sapien
tgcagactctggaactgatggttac

SEQ ID NO: 5407489 - DNA, 25 bp, Homo sapien
tgccttggccacgattaaagcagta

SEQ ID NO: 5407490 - DNA, 25 bp, Homo sapien
taaaatccgagttatcccaatcacc

SEQ ID NO: 5407491 - DNA, 25 bp, Homo sapien
tatagattgtgcttgatttgagccc

SEQ ID NO: 5407492 - DNA, 25 bp, Homo sapien
ttcaacaagactagatgccttggcc

SEQ ID NO: 5407493 - DNA, 25 bp, Homo sapien
tatggagaatggtcattagacgtct

SEQ ID NO: 5407494 - DNA, 25 bp, Homo sapien
attagacgtctcgacagccacctgc

SEQ ID NO: 5407495 - DNA, 25 bp, Homo sapien
attaggttgaaaggtatatggagaa

SEQ ID NO: 5407496 - DNA, 25 bp, Homo sapien
gttgaaaggtatatggagaatggtc

SEQ ID NO: 5407497 - DNA, 25 bp, Homo sapien
ctcagctctgctacttaggcctgac

SEQ ID NO: 5407498 - DNA, 25 bp, Homo sapien
cagaatggatgagacatgttagtga

SEQ ID NO: 5407499 - DNA, 25 bp, Homo sapien
gcctgactgaatccaacagtgcctt

SEQ ID NO: 5407500 - DNA, 25 bp, Homo sapien
gagacatgttagtgaaaaaacctca

SEQ ID NO: 5407501 - DNA, 25 bp, Homo sapien
cacatctggctaaacgcaattcttt

SEQ ID NO: 5407502 - DNA, 25 bp, Homo sapien
gcaaatatttgacgtctggtagatt

SEQ ID NO: 5407503 - DNA, 25 bp, Homo sapien
ggctaaacgcaattctttatgcaaa

SEQ ID NO: 5407504 - DNA, 25 bp, Homo sapien
ttatgcaaatatttgacgtctggta

SEQ ID NO: 5407505 - DNA, 25 bp, Homo sapien
gccagaatggtcactggatggtctc

SEQ ID NO: 5407506 - DNA, 25 bp, Homo sapien
gaaactacttatagccagaatggtc

SEQ ID NO: 5407507 - DNA, 25 bp, Homo sapien
catttctgaaactacttatagccag

SEQ ID NO: 5407508 - DNA, 25 bp, Homo sapien
tacttatagccagaatggtcactgg

SEQ ID NO: 5407509 - DNA, 25 bp, Homo sapien
ctgtggcaagtaggctccttgcata

SEQ ID NO: 5407510 - DNA, 25 bp, Homo sapien
tggcaagtaggctccttgcatagct

SEQ ID NO: 5407511 - DNA, 25 bp, Homo sapien
tactgtggcaagtaggctccttgca

SEQ ID NO: 5407512 - DNA, 25 bp, Homo sapien
catactgtggcaagtaggctccttg

SEQ ID NO: 5407513 - DNA, 25 bp, Homo sapien
tggcttagccttcacaagaaacagc

SEQ ID NO: 5407514 - DNA, 25 bp, Homo sapien
tattgtttctacaggtagagcccac

SEQ ID NO: 5407515 - DNA, 25 bp, Homo sapien
aacaggtcactgcagattaggcagc

SEQ ID NO: 5407516 - DNA, 25 bp, Homo sapien
tttaaatgggctacacctcaaagct

SEQ ID NO: 5407517 - DNA, 25 bp, Homo sapien
tcattacccaaaggagtcccctgga

SEQ ID NO: 5407518 - DNA, 25 bp, Homo sapien
tctggtgccagctcaacctcattac

SEQ ID NO: 5407519 - DNA, 25 bp, Homo sapien
taagcatcaaatctggaagctgatc

SEQ ID NO: 5407520 - DNA, 25 bp, Homo sapien
aaatgctaagcatcaaatctggaag

SEQ ID NO: 5407521 - DNA, 25 bp, Homo sapien
gatagggaagatacaggctgcatta

SEQ ID NO: 5407522 - DNA, 25 bp, Homo sapien
tcataaaaggctagatgtggtcacg

SEQ ID NO: 5407523 - DNA, 25 bp, Homo sapien
cacgtgtgggtgctatattctcgta

SEQ ID NO: 5407524 - DNA, 25 bp, Homo sapien
ttcgcttcatgacactgccacaggg

SEQ ID NO: 5407525 - DNA, 25 bp, Homo sapien
ggctgtagtgacatggtgtgctcca

SEQ ID NO: 5407526 - DNA, 25 bp, Homo sapien
tgtgctccattgagggagttaacac

SEQ ID NO: 5407527 - DNA, 25 bp, Homo sapien
gccagagggctgatcattgatgcgg

SEQ ID NO: 5407528 - DNA, 25 bp, Homo sapien
cattgatgcgggctgtagtgacatg

SEQ ID NO: 5407529 - DNA, 25 bp, Homo sapien
ttagcaatgtcagggtactactgcc

SEQ ID NO: 5407530 - DNA, 25 bp, Homo sapien
tatacatatatcagagcgcgcctct

SEQ ID NO: 5407531 - DNA, 25 bp, Homo sapien
tgactcagaagcctagaagatggtg

SEQ ID NO: 5407532 - DNA, 25 bp, Homo sapien
gatgttaagctcagatacgtgcagt

SEQ ID NO: 5407533 - DNA, 25 bp, Homo sapien
ccaagttgttttataaggatgagaa

SEQ ID NO: 5407534 - DNA, 25 bp, Homo sapien
agaaaatggtgccctgcctcaaata

SEQ ID NO: 5407535 - DNA, 25 bp, Homo sapien
gagagcggttttatcccaagtacta

SEQ ID NO: 5407536 - DNA, 25 bp, Homo sapien
cagaatgtaaaaaatgagagcggtt

SEQ ID NO: 5407537 - DNA, 25 bp, Homo sapien
taaaacacaaagtcattaagataaa

SEQ ID NO: 5407538 - DNA, 25 bp, Homo sapien
tatatggttgaggttgcatccacga

SEQ ID NO: 5407539 - DNA, 25 bp, Homo sapien
ggttgcatccacgaaggactttgca

SEQ ID NO: 5407540 - DNA, 25 bp, Homo sapien
agggtgctgtagaatatatggttga

SEQ ID NO: 5407541 - DNA, 25 bp, Homo sapien
ttgaggttgcatccacgaaggactt

SEQ ID NO: 5407542 - DNA, 25 bp, Homo sapien
gaaatattgattttcattgtaaagc

SEQ ID NO: 5407543 - DNA, 25 bp, Homo sapien
agggaggattttgaaagaaatattg

SEQ ID NO: 5407544 - DNA, 25 bp, Homo sapien
tattgattttcattgtaaagcttac

SEQ ID NO: 5407545 - DNA, 25 bp, Homo sapien
ggaggattttgaaagaaatattgat

SEQ ID NO: 5407546 - DNA, 25 bp, Homo sapien
ttctttagaactctttttaatcatg

SEQ ID NO: 5407547 - DNA, 25 bp, Homo sapien
tagaactctttttaatcatgttaaa

SEQ ID NO: 5407548 - DNA, 25 bp, Homo sapien
ctttagaactctttttaatcatgtt

SEQ ID NO: 5407549 - DNA, 25 bp, Homo sapien
ttagaactctttttaatcatgttaa

SEQ ID NO: 5407550 - DNA, 25 bp, Homo sapien
tagaattcttggcaaactggtcact

SEQ ID NO: 5407551 - DNA, 25 bp, Homo sapien
cacagtagaccctctgaattgagaa

SEQ ID NO: 5407552 - DNA, 25 bp, Homo sapien
cagtcaaatgggcatccacacagta

SEQ ID NO: 5407553 - DNA, 25 bp, Homo sapien
gagaaaaaggcgaaacagactgggc

SEQ ID NO: 5407554 - DNA, 25 bp, Homo sapien
ttgatagcagagccccgatacttgt

SEQ ID NO: 5407555 - DNA, 25 bp, Homo sapien
tagcagagccccgatacttgttttc

SEQ ID NO: 5407556 - DNA, 25 bp, Homo sapien
gcagagccccgatacttgttttctc

SEQ ID NO: 5407557 - DNA, 25 bp, Homo sapien
gatagcagagccccgatacttgttt

SEQ ID NO: 5407558 - DNA, 25 bp, Homo sapien
caccgagtgtcaggcaatgcaatga

SEQ ID NO: 5407559 - DNA, 25 bp, Homo sapien
tctttgaggctatggcaccgagtgt

SEQ ID NO: 5407560 - DNA, 25 bp, Homo sapien
tataaggttcctatctgggtccagg

SEQ ID NO: 5407561 - DNA, 25 bp, Homo sapien
tacactactgggttcatggcggaca

SEQ ID NO: 5407562 - DNA, 25 bp, Homo sapien
ggttatactgctgacgaatcctaaa

SEQ ID NO: 5407563 - DNA, 25 bp, Homo sapien
agagattcatggtccgcaagtggtt

SEQ ID NO: 5407564 - DNA, 25 bp, Homo sapien
tcataaacgctcaaaattttaagac

SEQ ID NO: 5407565 - DNA, 25 bp, Homo sapien
catggtccgcaagtggttatactgc

SEQ ID NO: 5407566 - DNA, 25 bp, Homo sapien
caatatagggtgtaatagaagtttg

SEQ ID NO: 5407567 - DNA, 25 bp, Homo sapien
aatagaagtttgagtgatcattcgg

SEQ ID NO: 5407568 - DNA, 25 bp, Homo sapien
gatcattcggtttgtagcaatactg

SEQ ID NO: 5407569 - DNA, 25 bp, Homo sapien
tgagtgatcattcggtttgtagcaa

SEQ ID NO: 5407570 - DNA, 25 bp, Homo sapien
gcagctgtagttgggtcgtaagtaa

SEQ ID NO: 5407571 - DNA, 25 bp, Homo sapien
tgggtcgtaagtaagtgtcattcca

SEQ ID NO: 5407572 - DNA, 25 bp, Homo sapien
tgtatagcagctgtagttgggtcgt

SEQ ID NO: 5407573 - DNA, 25 bp, Homo sapien
tgtagttgggtcgtaagtaagtgtc

SEQ ID NO: 5407574 - DNA, 25 bp, Homo sapien
ccttctctatgccatggtcttccat

SEQ ID NO: 5407575 - DNA, 25 bp, Homo sapien
tctatgccatggtcttccattaggg

SEQ ID NO: 5407576 - DNA, 25 bp, Homo sapien
tgccatggtcttccattagggatgt

SEQ ID NO: 5407577 - DNA, 25 bp, Homo sapien
tccattagggatgtatttgtttggg

SEQ ID NO: 5407578 - DNA, 25 bp, Homo sapien
caaaaataggaatagtgttcacgct

SEQ ID NO: 5407579 - DNA, 25 bp, Homo sapien
ccttctaggctatacgccccatggg

SEQ ID NO: 5407580 - DNA, 25 bp, Homo sapien
tacagacagcacaatagggcaccag

SEQ ID NO: 5407581 - DNA, 25 bp, Homo sapien
tacagaatccatgaggccaaaacag

SEQ ID NO: 5407582 - DNA, 25 bp, Homo sapien
tctactgtagaaccatgattactac

SEQ ID NO: 5407583 - DNA, 25 bp, Homo sapien
tgtcctttgtctactgtagaaccat

SEQ ID NO: 5407584 - DNA, 25 bp, Homo sapien
tagaaccatgattactactttcaag

SEQ ID NO: 5407585 - DNA, 25 bp, Homo sapien
cctttgtctactgtagaaccatgat

SEQ ID NO: 5407586 - DNA, 25 bp, Homo sapien
tggtgagactatcagcaagccttgg

SEQ ID NO: 5407587 - DNA, 25 bp, Homo sapien
ttctagaagttcagtgcaggccacc

SEQ ID NO: 5407588 - DNA, 25 bp, Homo sapien
tatgtgccaagtacacaagagctgg

SEQ ID NO: 5407589 - DNA, 25 bp, Homo sapien
tggtagataaaacagggtccttgcc

SEQ ID NO: 5407590 - DNA, 25 bp, Homo sapien
aacactgatctaatattttccggca

SEQ ID NO: 5407591 - DNA, 25 bp, Homo sapien
acactgatctaatattttccggcat

SEQ ID NO: 5407592 - DNA, 25 bp, Homo sapien
tagaagcttccctatccactgtgga

SEQ ID NO: 5407593 - DNA, 25 bp, Homo sapien
tcaaccactaggaagagctacagct

SEQ ID NO: 5407594 - DNA, 25 bp, Homo sapien
gggatggtctcttacacaagcttga

SEQ ID NO: 5407595 - DNA, 25 bp, Homo sapien
gctccatggataaggctcaggctga

SEQ ID NO: 5407596 - DNA, 25 bp, Homo sapien
gactggcagagcaatgtctcaatga

SEQ ID NO: 5407597 - DNA, 25 bp, Homo sapien
tcaatgagacggcacctcaaggaca

SEQ ID NO: 5407598 - DNA, 25 bp, Homo sapien
gaagtcatccacttgagattaggga

SEQ ID NO: 5407599 - DNA, 25 bp, Homo sapien
gacagcttcgaaacccttgtacatg

SEQ ID NO: 5407600 - DNA, 25 bp, Homo sapien
ctcctggtggtgtcttaataaattt

SEQ ID NO: 5407601 - DNA, 25 bp, Homo sapien
attaaaatgaccaataacagcttca

SEQ ID NO: 5407602 - DNA, 25 bp, Homo sapien
tttccattaaaatgaccaataacag

SEQ ID NO: 5407603 - DNA, 25 bp, Homo sapien
aaatgaccaataacagcttcacatt

SEQ ID NO: 5407604 - DNA, 25 bp, Homo sapien
tatagtaaaatgacaactgataaca

SEQ ID NO: 5407605 - DNA, 25 bp, Homo sapien
gacaactgataacaatagagtatat

SEQ ID NO: 5407606 - DNA, 25 bp, Homo sapien
tgtacttctatagtaaaatgacaac

SEQ ID NO: 5407607 - DNA, 25 bp, Homo sapien
cttttgtacttctatagtaaaatga

SEQ ID NO: 5407608 - DNA, 25 bp, Homo sapien
cgccacgccggccaggtaggtttcg

SEQ ID NO: 5407609 - DNA, 25 bp, Homo sapien
gccaggtaggtttcgaactctgccc

SEQ ID NO: 5407610 - DNA, 25 bp, Homo sapien
aggtttcgaactctgcccgcctggc

SEQ ID NO: 5407611 - DNA, 25 bp, Homo sapien
gccacgccggccaggtaggtttcga

SEQ ID NO: 5407612 - DNA, 25 bp, Homo sapien
tccataaggacccaaatatttagtg

SEQ ID NO: 5407613 - DNA, 25 bp, Homo sapien
agaacttttgctcatgtgatagttc

SEQ ID NO: 5407614 - DNA, 25 bp, Homo sapien
cttttgctcatgtgatagttccttt

SEQ ID NO: 5407615 - DNA, 25 bp, Homo sapien
aacttttgctcatgtgatagttcct

SEQ ID NO: 5407616 - DNA, 25 bp, Homo sapien
cacgtagtatccttgtagaaataac

SEQ ID NO: 5407617 - DNA, 25 bp, Homo sapien
tccaaatggtttgagcatattttct

SEQ ID NO: 5407618 - DNA, 25 bp, Homo sapien
aaagccaacaccacgacttgtacca

SEQ ID NO: 5407619 - DNA, 25 bp, Homo sapien
ctagcaaagccaacaccacgacttg

SEQ ID NO: 5407620 - DNA, 25 bp, Homo sapien
taagtaacaccgacactccaggaag

SEQ ID NO: 5407621 - DNA, 25 bp, Homo sapien
gatgaaaacttcctatcacctggta

SEQ ID NO: 5407622 - DNA, 25 bp, Homo sapien
tgtgatattacgcacatgagctgca

SEQ ID NO: 5407623 - DNA, 25 bp, Homo sapien
catttcagttaatggcggatggcat

SEQ ID NO: 5407624 - DNA, 25 bp, Homo sapien
taatgcatgtgataactggtggtgg

SEQ ID NO: 5407625 - DNA, 25 bp, Homo sapien
ttggccgtcagagtgataaacagct

SEQ ID NO: 5407626 - DNA, 25 bp, Homo sapien
gaaaactagatctcacattggccgt

SEQ ID NO: 5407627 - DNA, 25 bp, Homo sapien
tcctttgtccctaggcatggaaggg

SEQ ID NO: 5407628 - DNA, 25 bp, Homo sapien
aaaacctccccgtgcgtgtggaatg

SEQ ID NO: 5407629 - DNA, 25 bp, Homo sapien
tcacgtgagtagaaaagccaggatc

SEQ ID NO: 5407630 - DNA, 25 bp, Homo sapien
cagtcatcatccgaaagaaattaac

SEQ ID NO: 5407631 - DNA, 25 bp, Homo sapien
gaagtcctgcacagcgtaaagcact

SEQ ID NO: 5407632 - DNA, 25 bp, Homo sapien
aaaaccaaccactggtctctaatgc

SEQ ID NO: 5407633 - DNA, 25 bp, Homo sapien
ttctcaatatctgcccaagcttgga

SEQ ID NO: 5407634 - DNA, 25 bp, Homo sapien
ggtaccagacaaagcgctgaaaatt

SEQ ID NO: 5407635 - DNA, 25 bp, Homo sapien
taagtttcatcagtgtacttgatgg

SEQ ID NO: 5407636 - DNA, 25 bp, Homo sapien
ccttttccagcacaccatccctgga

SEQ ID NO: 5407637 - DNA, 25 bp, Homo sapien
atccttttccagcacaccatccctg

SEQ ID NO: 5407638 - DNA, 25 bp, Homo sapien
ccctggaggggttaaatgaagccat

SEQ ID NO: 5407639 - DNA, 25 bp, Homo sapien
caccatccctggaggggttaaatga

SEQ ID NO: 5407640 - DNA, 25 bp, Homo sapien
gactggctgatcaactccatttaca

SEQ ID NO: 5407641 - DNA, 25 bp, Homo sapien
tattaagcatgaaacatggtctccc

SEQ ID NO: 5407642 - DNA, 25 bp, Homo sapien
aaatagcatctgtagcccacatgtg

SEQ ID NO: 5407643 - DNA, 25 bp, Homo sapien
tataatcccctaacattcaagcaag

SEQ ID NO: 5407644 - DNA, 25 bp, Homo sapien
agggcagacacagctttttgagctg

SEQ ID NO: 5407645 - DNA, 25 bp, Homo sapien
gctgcagggctgtcaaagtcgacaa

SEQ ID NO: 5407646 - DNA, 25 bp, Homo sapien
tgagcttgaaccccactggccttca

SEQ ID NO: 5407647 - DNA, 25 bp, Homo sapien
gccatttgagcttgaaccccactgg

SEQ ID NO: 5407648 - DNA, 25 bp, Homo sapien
gaatgatactcaactaccaggttag

SEQ ID NO: 5407649 - DNA, 25 bp, Homo sapien
ggtcataaatgagaacccagctaca

SEQ ID NO: 5407650 - DNA, 25 bp, Homo sapien
tggtaataacttaaagctgcctgct

SEQ ID NO: 5407651 - DNA, 25 bp, Homo sapien
gctaacacgcaacaaagctctgtgg

SEQ ID NO: 5407652 - DNA, 25 bp, Homo sapien
ccttttgttggctaaactttgagag

SEQ ID NO: 5407653 - DNA, 25 bp, Homo sapien
aaatgttctgtaaccctctaagatc

SEQ ID NO: 5407654 - DNA, 25 bp, Homo sapien
tatcaatcagtcatctatatgccta

SEQ ID NO: 5407655 - DNA, 25 bp, Homo sapien
tctatctacctatcacgtcaagtta

SEQ ID NO: 5407656 - DNA, 25 bp, Homo sapien
ttaagggtttgtattgtgacaacat

SEQ ID NO: 5407657 - DNA, 25 bp, Homo sapien
gttaagggtttgtattgtgacaaca

SEQ ID NO: 5407658 - DNA, 25 bp, Homo sapien
tgttaagggtttgtattgtgacaac

SEQ ID NO: 5407659 - DNA, 25 bp, Homo sapien
agtaagcagctctaatctcctcagg

SEQ ID NO: 5407660 - DNA, 25 bp, Homo sapien
cagtccaatggtcttcagtaagcag

SEQ ID NO: 5407661 - DNA, 25 bp, Homo sapien
gtcagaaccacagagcatcagtgct

SEQ ID NO: 5407662 - DNA, 25 bp, Homo sapien
gatgagctcatcctaattacatgga

SEQ ID NO: 5407663 - DNA, 25 bp, Homo sapien
atccaaaattgcctttgtggagact

SEQ ID NO: 5407664 - DNA, 25 bp, Homo sapien
gcctttgtggagactattttcccat

SEQ ID NO: 5407665 - DNA, 25 bp, Homo sapien
ctttgcatttgttcgttgtcttatc

SEQ ID NO: 5407666 - DNA, 25 bp, Homo sapien
catttgttcgttgtcttatccaaaa

SEQ ID NO: 5407667 - DNA, 25 bp, Homo sapien
ggcatgagtccgctctgccagtgca

SEQ ID NO: 5407668 - DNA, 25 bp, Homo sapien
gcttgtttgctacatctggcatgag

SEQ ID NO: 5407669 - DNA, 25 bp, Homo sapien
tacatctggcatgagtccgctctgc

SEQ ID NO: 5407670 - DNA, 25 bp, Homo sapien
tctctcagcttgtttgctacatctg

SEQ ID NO: 5407671 - DNA, 25 bp, Homo sapien
ctcattccatctttcacagccctct

SEQ ID NO: 5407672 - DNA, 25 bp, Homo sapien
tcattccatctttcacagccctctt

SEQ ID NO: 5407673 - DNA, 25 bp, Homo sapien
cctctttcaggggttctttgcccat

SEQ ID NO: 5407674 - DNA, 25 bp, Homo sapien
cacagccctctttcaggggttcttt

SEQ ID NO: 5407675 - DNA, 25 bp, Homo sapien
attcctggtgtatgtagctggaatt

SEQ ID NO: 5407676 - DNA, 25 bp, Homo sapien
gattcctggtgtatgtagctggaat

SEQ ID NO: 5407677 - DNA, 25 bp, Homo sapien
ctaggtgggctctgtaggacaataa

SEQ ID NO: 5407678 - DNA, 25 bp, Homo sapien
cagtatgccctttcaaggcctgtga

SEQ ID NO: 5407679 - DNA, 25 bp, Homo sapien
cacctaccattaaggaggacagtcc

SEQ ID NO: 5407680 - DNA, 25 bp, Homo sapien
gactggaggatttggaactgtagaa

SEQ ID NO: 5407681 - DNA, 25 bp, Homo sapien
agaaatttctcttgattctgataca

SEQ ID NO: 5407682 - DNA, 25 bp, Homo sapien
aaatttctcttgattctgatacaag

SEQ ID NO: 5407683 - DNA, 25 bp, Homo sapien
ctagaaatttctcttgattctgata

SEQ ID NO: 5407684 - DNA, 25 bp, Homo sapien
gaaatttctcttgattctgatacaa

SEQ ID NO: 5407685 - DNA, 25 bp, Homo sapien
gaaagacactatgctcttgggcctt

SEQ ID NO: 5407686 - DNA, 25 bp, Homo sapien
tatgtggaagtcctatgccccaaga

SEQ ID NO: 5407687 - DNA, 25 bp, Homo sapien
gaagaggtaacgaagcatgttcccc

SEQ ID NO: 5407688 - DNA, 25 bp, Homo sapien
taagatgagtctctcagggtaggcc

SEQ ID NO: 5407689 - DNA, 25 bp, Homo sapien
tcccaactcttagggctttgaatga

SEQ ID NO: 5407690 - DNA, 25 bp, Homo sapien
cagcagaacatcctacaattcttcc

SEQ ID NO: 5407691 - DNA, 25 bp, Homo sapien
tggtataaattaagtcttgtggcac

SEQ ID NO: 5407692 - DNA, 25 bp, Homo sapien
tgtacttggtaagactaataaatgg

SEQ ID NO: 5407693 - DNA, 25 bp, Homo sapien
tgaagctgattacttggtaccactg

SEQ ID NO: 5407694 - DNA, 25 bp, Homo sapien
gctgattacttggtaccactgtcaa

SEQ ID NO: 5407695 - DNA, 25 bp, Homo sapien
gacactgaagctgattacttggtac

SEQ ID NO: 5407696 - DNA, 25 bp, Homo sapien
tacttggtaccactgtcaatgacag

SEQ ID NO: 5407697 - DNA, 25 bp, Homo sapien
ttcagggcccagaaaggaatcagaa

SEQ ID NO: 5407698 - DNA, 25 bp, Homo sapien
gagaattcagaattcagggcccaga

SEQ ID NO: 5407699 - DNA, 25 bp, Homo sapien
aattcagaattcagggcccagaaag

SEQ ID NO: 5407700 - DNA, 25 bp, Homo sapien
gggagaattcagaattcagggccca

SEQ ID NO: 5407701 - DNA, 25 bp, Homo sapien
tagggactcctagaaatgggtgttc

SEQ ID NO: 5407702 - DNA, 25 bp, Homo sapien
tgaacctgggcaagacctaaggttg

SEQ ID NO: 5407703 - DNA, 25 bp, Homo sapien
cataaatagggaggcaatagggcag

SEQ ID NO: 5407704 - DNA, 25 bp, Homo sapien
gacagtatctcaaggacattgtccc

SEQ ID NO: 5407705 - DNA, 25 bp, Homo sapien
taaggtaatggttataacaccatac

SEQ ID NO: 5407706 - DNA, 25 bp, Homo sapien
aagctgtattctattgcctctgtag

SEQ ID NO: 5407707 - DNA, 25 bp, Homo sapien
gcctctgtagatgtacgaattcaaa

SEQ ID NO: 5407708 - DNA, 25 bp, Homo sapien
tgccaaaacacaagattctcaaaca

SEQ ID NO: 5407709 - DNA, 25 bp, Homo sapien
caatccactcttcctacttttgtca

SEQ ID NO: 5407710 - DNA, 25 bp, Homo sapien
ctccaatccactcttcctacttttg

SEQ ID NO: 5407711 - DNA, 25 bp, Homo sapien
tccaatccactcttcctacttttgt

SEQ ID NO: 5407712 - DNA, 25 bp, Homo sapien
tccactcttcctacttttgtcaaaa

SEQ ID NO: 5407713 - DNA, 25 bp, Homo sapien
caacgcttttgtagtctgggtgaca

SEQ ID NO: 5407714 - DNA, 25 bp, Homo sapien
caattgtgttgtaggctctggacca

SEQ ID NO: 5407715 - DNA, 25 bp, Homo sapien
gagaattcagaacttgcctagcact

SEQ ID NO: 5407716 - DNA, 25 bp, Homo sapien
tgttagcattaagctacttccctgg

SEQ ID NO: 5407717 - DNA, 25 bp, Homo sapien
aacttagtgacaaagggacaaagag

SEQ ID NO: 5407718 - DNA, 25 bp, Homo sapien
gaaggagctgctgactcctaaagct

SEQ ID NO: 5407719 - DNA, 25 bp, Homo sapien
gacagtgttgagagaaaggatattt

SEQ ID NO: 5407720 - DNA, 25 bp, Homo sapien
gctttcctaaagcttcatgtttaag

SEQ ID NO: 5407721 - DNA, 25 bp, Homo sapien
gaaaatggacacaacatgagccctc

SEQ ID NO: 5407722 - DNA, 25 bp, Homo sapien
cacacagataagcacggtcaagcag

SEQ ID NO: 5407723 - DNA, 25 bp, Homo sapien
taaacagtctgcctgagaagtctca

SEQ ID NO: 5407724 - DNA, 25 bp, Homo sapien
gagtggagaataaccctatcagagg

SEQ ID NO: 5407725 - DNA, 25 bp, Homo sapien
aaatctctaattatgtccagtggtt

SEQ ID NO: 5407726 - DNA, 25 bp, Homo sapien
tggaaacaattaagttcagaacagg

SEQ ID NO: 5407727 - DNA, 25 bp, Homo sapien
taagctctagcatgagtcccttcct

SEQ ID NO: 5407728 - DNA, 25 bp, Homo sapien
tgtcacttctatgtcaccaactagc

SEQ ID NO: 5407729 - DNA, 25 bp, Homo sapien
caccaggtcctggtcggtggtgtgg

SEQ ID NO: 5407730 - DNA, 25 bp, Homo sapien
ggttcgttttgctgagctgatccca

SEQ ID NO: 5407731 - DNA, 25 bp, Homo sapien
gatatagaggttcgttttgctgagc

SEQ ID NO: 5407732 - DNA, 25 bp, Homo sapien
aggcagtcctcggatatagaggttc

SEQ ID NO: 5407733 - DNA, 25 bp, Homo sapien
ctactgttgttattactgctggtgg

SEQ ID NO: 5407734 - DNA, 25 bp, Homo sapien
tgctactgttgttattactgctggt

SEQ ID NO: 5407735 - DNA, 25 bp, Homo sapien
gttgttattactgctggtggtgctg

SEQ ID NO: 5407736 - DNA, 25 bp, Homo sapien
ctgttgttattactgctggtggtgc

SEQ ID NO: 5407737 - DNA, 25 bp, Homo sapien
caagcctttgattgacgcagagaac

SEQ ID NO: 5407738 - DNA, 25 bp, Homo sapien
taggacccagtatgtttagcgtagc

SEQ ID NO: 5407739 - DNA, 25 bp, Homo sapien
gacacaagccacactgttttcacag

SEQ ID NO: 5407740 - DNA, 25 bp, Homo sapien
tagcgtagctgttgggcgatgaaat

SEQ ID NO: 5407741 - DNA, 25 bp, Homo sapien
catagaacaagtctagtctcccctt

SEQ ID NO: 5407742 - DNA, 25 bp, Homo sapien
tctttatggcatagaattttaccta

SEQ ID NO: 5407743 - DNA, 25 bp, Homo sapien
cctatagcatagagatttggggtgg

SEQ ID NO: 5407744 - DNA, 25 bp, Homo sapien
cagcagatgtcccaatttatttcta

SEQ ID NO: 5407745 - DNA, 25 bp, Homo sapien
gaggcaagtgagattacattacagt

SEQ ID NO: 5407746 - DNA, 25 bp, Homo sapien
gcagtcttcccttaggagggatgaa

SEQ ID NO: 5407747 - DNA, 25 bp, Homo sapien
tttagggatggtgcctgaacaagca

SEQ ID NO: 5407748 - DNA, 25 bp, Homo sapien
tgggtgcctctctgattagacagct

SEQ ID NO: 5407749 - DNA, 25 bp, Homo sapien
gaaactatttccagtgtcctagagg

SEQ ID NO: 5407750 - DNA, 25 bp, Homo sapien
acagggttccaactaacatgtgctg

SEQ ID NO: 5407751 - DNA, 25 bp, Homo sapien
gaatggctctcatgcatcagtccag

SEQ ID NO: 5407752 - DNA, 25 bp, Homo sapien
tgaacccagaggtttatgcctggcc

SEQ ID NO: 5407753 - DNA, 25 bp, Homo sapien
ccagcaggaaaaggcgtctcctggt

SEQ ID NO: 5407754 - DNA, 25 bp, Homo sapien
tcagctgagccaagcaatttccggt

SEQ ID NO: 5407755 - DNA, 25 bp, Homo sapien
acttgacttgtcactccccagcagg

SEQ ID NO: 5407756 - DNA, 25 bp, Homo sapien
tgaactgacacttctaaccaaccct

SEQ ID NO: 5407757 - DNA, 25 bp, Homo sapien
gataggacgctgtagttctgtggcc

SEQ ID NO: 5407758 - DNA, 25 bp, Homo sapien
taccttaatgggtagtggtgcaacc

SEQ ID NO: 5407759 - DNA, 25 bp, Homo sapien
gaggcccctctaataaaacatatgt

SEQ ID NO: 5407760 - DNA, 25 bp, Homo sapien
gaagggctcaagactgatggctcat

SEQ ID NO: 5407761 - DNA, 25 bp, Homo sapien
cgagccttctccacagtagggttgt

SEQ ID NO: 5407762 - DNA, 25 bp, Homo sapien
gaacttacacctagaaaccacagag

SEQ ID NO: 5407763 - DNA, 25 bp, Homo sapien
tcttctatacaggaacttacaccta

SEQ ID NO: 5407764 - DNA, 25 bp, Homo sapien
agacgagccttctccacagtagggt

SEQ ID NO: 5407765 - DNA, 25 bp, Homo sapien
ctgcgcatgcacgtggcactctctg

SEQ ID NO: 5407766 - DNA, 25 bp, Homo sapien
atgcacgtggcactctctgaccgag

SEQ ID NO: 5407767 - DNA, 25 bp, Homo sapien
acgtggcactctctgaccgaggtcc

SEQ ID NO: 5407768 - DNA, 25 bp, Homo sapien
tggcactctctgaccgaggtccggg

SEQ ID NO: 5407769 - DNA, 25 bp, Homo sapien
taggcggaaggatcttatcagaatc

SEQ ID NO: 5407770 - DNA, 25 bp, Homo sapien
ctaggcggaaggatcttatcagaat

SEQ ID NO: 5407771 - DNA, 25 bp, Homo sapien
cactgtcttagaattggtctgatac

SEQ ID NO: 5407772 - DNA, 25 bp, Homo sapien
gaaaatgctggacgataggaccgat

SEQ ID NO: 5407773 - DNA, 25 bp, Homo sapien
gatttataggcagttctccaaagag

SEQ ID NO: 5407774 - DNA, 25 bp, Homo sapien
ttgggttgatcacaaatggtcttcc

SEQ ID NO: 5407775 - DNA, 25 bp, Homo sapien
ctatgtatgggtagattttaaaata

SEQ ID NO: 5407776 - DNA, 25 bp, Homo sapien
tatcatcatcatgactcatagatcc

SEQ ID NO: 5407777 - DNA, 25 bp, Homo sapien
tttaaaatatcatcatcatgactca

SEQ ID NO: 5407778 - DNA, 25 bp, Homo sapien
aaatatcatcatcatgactcataga

SEQ ID NO: 5407779 - DNA, 25 bp, Homo sapien
actaaacctccaatctctgtagctt

SEQ ID NO: 5407780 - DNA, 25 bp, Homo sapien
ctccactaaacctccaatctctgta

SEQ ID NO: 5407781 - DNA, 25 bp, Homo sapien
tgctactctccactaaacctccaat

SEQ ID NO: 5407782 - DNA, 25 bp, Homo sapien
tccactaaacctccaatctctgtag

SEQ ID NO: 5407783 - DNA, 25 bp, Homo sapien
catagcatctacatagtatcaggta

SEQ ID NO: 5407784 - DNA, 25 bp, Homo sapien
gaatacgagaagatgtacataggtt

SEQ ID NO: 5407785 - DNA, 25 bp, Homo sapien
actacgcaattttatatcaggacct

SEQ ID NO: 5407786 - DNA, 25 bp, Homo sapien
tggaaccaatcttcctcggatgctg

SEQ ID NO: 5407787 - DNA, 25 bp, Homo sapien
gtgaatggctaaatactaacaaaag

SEQ ID NO: 5407788 - DNA, 25 bp, Homo sapien
gcgctggaagtgtgctttcccagtg

SEQ ID NO: 5407789 - DNA, 25 bp, Homo sapien
gggtcttgtgtctgtataatgccta

SEQ ID NO: 5407790 - DNA, 25 bp, Homo sapien
caggtccccgcgctggaagtgtgct

SEQ ID NO: 5407791 - DNA, 25 bp, Homo sapien
cagtcagcccttttagtctttgaat

SEQ ID NO: 5407792 - DNA, 25 bp, Homo sapien
tcagtcagcccttttagtctttgaa

SEQ ID NO: 5407793 - DNA, 25 bp, Homo sapien
gcgatagggcgtccggcagttgctg

SEQ ID NO: 5407794 - DNA, 25 bp, Homo sapien
ctgcttgcgatagggcgtccggcag

SEQ ID NO: 5407795 - DNA, 25 bp, Homo sapien
tagggcgtccggcagttgctgctgc

SEQ ID NO: 5407796 - DNA, 25 bp, Homo sapien
cttgcgatagggcgtccggcagttg

SEQ ID NO: 5407797 - DNA, 25 bp, Homo sapien
gggagggcgcaaggaggtggccggc

SEQ ID NO: 5407798 - DNA, 25 bp, Homo sapien
cgccctgcgtgccatggacgggagt

SEQ ID NO: 5407799 - DNA, 25 bp, Homo sapien
gtcgccgactctcccggcggcagcg

SEQ ID NO: 5407800 - DNA, 25 bp, Homo sapien
ggcagcgggcgagactcgagcagct

SEQ ID NO: 5407801 - DNA, 25 bp, Homo sapien
ctaaaagtacggcgcggcagcgggc

SEQ ID NO: 5407802 - DNA, 25 bp, Homo sapien
ctgagagcgcgccggccgggggcgg

SEQ ID NO: 5407803 - DNA, 25 bp, Homo sapien
gggcggggaggcggcagcgcaccgc

SEQ ID NO: 5407804 - DNA, 25 bp, Homo sapien
gggggcggggaggcggcagcgcacc

SEQ ID NO: 5407805 - DNA, 25 bp, Homo sapien
ccgggggcggggaggcggcagcgca

SEQ ID NO: 5407806 - DNA, 25 bp, Homo sapien
tttccgtggacgtatgaagccccga

SEQ ID NO: 5407807 - DNA, 25 bp, Homo sapien
gagcctgcggtctctggataagcca

SEQ ID NO: 5407808 - DNA, 25 bp, Homo sapien
acagcagcccggactgacagagcct

SEQ ID NO: 5407809 - DNA, 25 bp, Homo sapien
agccccgaacctgtgcagtgcagaa

SEQ ID NO: 5407810 - DNA, 25 bp, Homo sapien
tcaagagtggtctcttaggaaacca

SEQ ID NO: 5407811 - DNA, 25 bp, Homo sapien
gagaacttactgctcaacaccccag

SEQ ID NO: 5407812 - DNA, 25 bp, Homo sapien
tttctatggctgtactctaaggtca

SEQ ID NO: 5407813 - DNA, 25 bp, Homo sapien
tgctgtgcaatccagaatgctaaaa

SEQ ID NO: 5407814 - DNA, 25 bp, Homo sapien
gataagatagattgtctaccctcaa

SEQ ID NO: 5407815 - DNA, 25 bp, Homo sapien
gagagactgcaagttatcatggtaa

SEQ ID NO: 5407816 - DNA, 25 bp, Homo sapien
gatcctggtgaggttcatctgaaaa

SEQ ID NO: 5407817 - DNA, 25 bp, Homo sapien
taagagtgattacagggacagatcc

SEQ ID NO: 5407818 - DNA, 25 bp, Homo sapien
gggccagcaactataagagtgccag

SEQ ID NO: 5407819 - DNA, 25 bp, Homo sapien
tagagttgaggccacaacaagccaa

SEQ ID NO: 5407820 - DNA, 25 bp, Homo sapien
gcaagccaaggttatgaggaagcag

SEQ ID NO: 5407821 - DNA, 25 bp, Homo sapien
aacaggaagcttactggcagcgggc

SEQ ID NO: 5407822 - DNA, 25 bp, Homo sapien
gaacatcaaagaacaggagcaaggg

SEQ ID NO: 5407823 - DNA, 25 bp, Homo sapien
ttgaatgaattggaagactgtgagc

SEQ ID NO: 5407824 - DNA, 25 bp, Homo sapien
tcaagagcctaggtgcactgaagtt

SEQ ID NO: 5407825 - DNA, 25 bp, Homo sapien
aagcacaagcaaatttaggcaaggg

SEQ ID NO: 5407826 - DNA, 25 bp, Homo sapien
gacaatgtgactgatcatgacatca

SEQ ID NO: 5407827 - DNA, 25 bp, Homo sapien
ggaaattccgatgttgccatgacaa

SEQ ID NO: 5407828 - DNA, 25 bp, Homo sapien
catgacatcagtgattcctaattcc

SEQ ID NO: 5407829 - DNA, 25 bp, Homo sapien
gatactccccaagtgaagagaaggc

SEQ ID NO: 5407830 - DNA, 25 bp, Homo sapien
tatacctgtgccctgctagtgtgcg

SEQ ID NO: 5407831 - DNA, 25 bp, Homo sapien
acctgtgccctgctagtgtgcggca

SEQ ID NO: 5407832 - DNA, 25 bp, Homo sapien
catatatatacctgtgccctgctag

SEQ ID NO: 5407833 - DNA, 25 bp, Homo sapien
tatatatacctgtgccctgctagtg

SEQ ID NO: 5407834 - DNA, 25 bp, Homo sapien
tctggttttcactcagaaagccttc

SEQ ID NO: 5407835 - DNA, 25 bp, Homo sapien
ccttcagaatctgagaagcacgttt

SEQ ID NO: 5407836 - DNA, 25 bp, Homo sapien
gatgtctcatacttattagcactct

SEQ ID NO: 5407837 - DNA, 25 bp, Homo sapien
aattaagaatttaagccagaggtga

SEQ ID NO: 5407838 - DNA, 25 bp, Homo sapien
aaatagtattttgggacctgtgcct

SEQ ID NO: 5407839 - DNA, 25 bp, Homo sapien
actgatagctaagtgttcttgcggg

SEQ ID NO: 5407840 - DNA, 25 bp, Homo sapien
catgacggtcccagcaagagaaaga

SEQ ID NO: 5407841 - DNA, 25 bp, Homo sapien
tatgactgatatggacatgacggtc

SEQ ID NO: 5407842 - DNA, 25 bp, Homo sapien
ttatcaccagtgttttgtatagtac

SEQ ID NO: 5407843 - DNA, 25 bp, Homo sapien
gttttatcaccagtgttttgtatag

SEQ ID NO: 5407844 - DNA, 25 bp, Homo sapien
caccagtgttttgtatagtacagaa

SEQ ID NO: 5407845 - DNA, 25 bp, Homo sapien
tcaccagtgttttgtatagtacaga

SEQ ID NO: 5407846 - DNA, 25 bp, Homo sapien
tctgaaagcgcctctaagaacaggg

SEQ ID NO: 5407847 - DNA, 25 bp, Homo sapien
taggaagctttgtggaggagaatct

SEQ ID NO: 5407848 - DNA, 25 bp, Homo sapien
gaaagcgcctctaagaacagggaag

SEQ ID NO: 5407849 - DNA, 25 bp, Homo sapien
ggggattgactctaaatggtgacca

SEQ ID NO: 5407850 - DNA, 25 bp, Homo sapien
cagtgtttgccatcccactaacatt

SEQ ID NO: 5407851 - DNA, 25 bp, Homo sapien
ccttttcacttggtattcccgaatg

SEQ ID NO: 5407852 - DNA, 25 bp, Homo sapien
ttcacttggtattcccgaatgcctt

SEQ ID NO: 5407853 - DNA, 25 bp, Homo sapien
cacagtgtttgccatcccactaaca

SEQ ID NO: 5407854 - DNA, 25 bp, Homo sapien
gacttcctggtcaaagatggccaga

SEQ ID NO: 5407855 - DNA, 25 bp, Homo sapien
ggccagaaatggtaagaatcccagg

SEQ ID NO: 5407856 - DNA, 25 bp, Homo sapien
tttagccagggcagttcaacatgac

SEQ ID NO: 5407857 - DNA, 25 bp, Homo sapien
tactggatatacactctgttgagac

SEQ ID NO: 5407858 - DNA, 25 bp, Homo sapien
caagtattcactacacagaatcttc

SEQ ID NO: 5407859 - DNA, 25 bp, Homo sapien
agtattcactacacagaatcttcat

SEQ ID NO: 5407860 - DNA, 25 bp, Homo sapien
aatcaagtattcactacacagaatc

SEQ ID NO: 5407861 - DNA, 25 bp, Homo sapien
ccaatcaagtattcactacacagaa

SEQ ID NO: 5407862 - DNA, 25 bp, Homo sapien
caagaacaattctgacacctaaaac

SEQ ID NO: 5407863 - DNA, 25 bp, Homo sapien
gaagcctgaccacatgaacttcatc

SEQ ID NO: 5407864 - DNA, 25 bp, Homo sapien
agcctgaccacatgaacttcatctc

SEQ ID NO: 5407865 - DNA, 25 bp, Homo sapien
agaacaattctgacacctaaaacga

SEQ ID NO: 5407866 - DNA, 25 bp, Homo sapien
cttagtaggttgttgactcgaggtc

SEQ ID NO: 5407867 - DNA, 25 bp, Homo sapien
gacgtatttgtgcacattggaggca

SEQ ID NO: 5407868 - DNA, 25 bp, Homo sapien
taaaatggcctctccggtgatgtcc

SEQ ID NO: 5407869 - DNA, 25 bp, Homo sapien
ggtgatgtccctagatctgctggca

SEQ ID NO: 5407870 - DNA, 25 bp, Homo sapien
ccttgacttacacagaaagagagca

SEQ ID NO: 5407871 - DNA, 25 bp, Homo sapien
aaaaccttgacttacacagaaagag

SEQ ID NO: 5407872 - DNA, 25 bp, Homo sapien
aaccctgcctgccaaattaaaatga

SEQ ID NO: 5407873 - DNA, 25 bp, Homo sapien
acatggttaaatcccatcttaatta

SEQ ID NO: 5407874 - DNA, 25 bp, Homo sapien
ttctgtcacgagtcaaagctcccta

SEQ ID NO: 5407875 - DNA, 25 bp, Homo sapien
tagcacagtgtgctttctgtcacat

SEQ ID NO: 5407876 - DNA, 25 bp, Homo sapien
aatattggtcaatgaattaggccac

SEQ ID NO: 5407877 - DNA, 25 bp, Homo sapien
taggccactctactttacttgtaga

SEQ ID NO: 5407878 - DNA, 25 bp, Homo sapien
tcttgtcatgaatactgccctctac

SEQ ID NO: 5407879 - DNA, 25 bp, Homo sapien
tactccccattcctcggactgctgt

SEQ ID NO: 5407880 - DNA, 25 bp, Homo sapien
tcccacaaaacgttccacatgcttg

SEQ ID NO: 5407881 - DNA, 25 bp, Homo sapien
ctgtcccctccggttgacagggctt

SEQ ID NO: 5407882 - DNA, 25 bp, Homo sapien
gttctccaccaacaccaccttgcac

SEQ ID NO: 5407883 - DNA, 25 bp, Homo sapien
tcttgccacctcatgttgttctcca

SEQ ID NO: 5407884 - DNA, 25 bp, Homo sapien
ccagactactgattggcgcctgaaa

SEQ ID NO: 5407885 - DNA, 25 bp, Homo sapien
ctggccacaccagactactgattgg

SEQ ID NO: 5407886 - DNA, 25 bp, Homo sapien
gcagcatacacccttcaccctgctg

SEQ ID NO: 5407887 - DNA, 25 bp, Homo sapien
caccaaccataccagcacttgctgc

SEQ ID NO: 5407888 - DNA, 25 bp, Homo sapien
ccactctgcagcatacacccttcac

SEQ ID NO: 5407889 - DNA, 25 bp, Homo sapien
acaccaaccataccagcacttgctg

SEQ ID NO: 5407890 - DNA, 25 bp, Homo sapien
cttttacaggtcagtgcaacaggct

SEQ ID NO: 5407891 - DNA, 25 bp, Homo sapien
caagtgcttgtaccacgtaatcaca

SEQ ID NO: 5407892 - DNA, 25 bp, Homo sapien
tacgagaatggtaatcaacagtgtc

SEQ ID NO: 5407893 - DNA, 25 bp, Homo sapien
gaacaagacagacgtactacctgct

SEQ ID NO: 5407894 - DNA, 25 bp, Homo sapien
gcaaggacctacaggcaatgtgaaa

SEQ ID NO: 5407895 - DNA, 25 bp, Homo sapien
caaggacctacaggcaatgtgaaaa

SEQ ID NO: 5407896 - DNA, 25 bp, Homo sapien
agagcaaggacctacaggcaatgtg

SEQ ID NO: 5407897 - DNA, 25 bp, Homo sapien
gagcaaggacctacaggcaatgtga

SEQ ID NO: 5407898 - DNA, 25 bp, Homo sapien
cactgccggctgaattccaatcagt

SEQ ID NO: 5407899 - DNA, 25 bp, Homo sapien
gctaaaaggtgtacgtgaagtcatc

SEQ ID NO: 5407900 - DNA, 25 bp, Homo sapien
aagtcatctggcacttttgcaaagg

SEQ ID NO: 5407901 - DNA, 25 bp, Homo sapien
tgctgttcaatccaatgtcaggaag

SEQ ID NO: 5407902 - DNA, 25 bp, Homo sapien
agcaaggcaatcaaggtgaatgccc

SEQ ID NO: 5407903 - DNA, 25 bp, Homo sapien
gaatgccctgattctggtcataact

SEQ ID NO: 5407904 - DNA, 25 bp, Homo sapien
gaatagggagttgagggcattcaat

SEQ ID NO: 5407905 - DNA, 25 bp, Homo sapien
gtcataactttgaagaggcatctgc

SEQ ID NO: 5407906 - DNA, 25 bp, Homo sapien
aaagctgcggttggctggtccagct

SEQ ID NO: 5407907 - DNA, 25 bp, Homo sapien
gtccagcttcgggagcgctataggc

SEQ ID NO: 5407908 - DNA, 25 bp, Homo sapien
ctgcagaagataccccagctgggct

SEQ ID NO: 5407909 - DNA, 25 bp, Homo sapien
tataggccaagcatgtgtgcaggcc

SEQ ID NO: 5407910 - DNA, 25 bp, Homo sapien
ctatgatgccatcgtttgctgtatc

SEQ ID NO: 5407911 - DNA, 25 bp, Homo sapien
tgatgccatcgtttgctgtatctgc

SEQ ID NO: 5407912 - DNA, 25 bp, Homo sapien
tacagttttgatctttattgtggat

SEQ ID NO: 5407913 - DNA, 25 bp, Homo sapien
tatgatgccatcgtttgctgtatct

SEQ ID NO: 5407914 - DNA, 25 bp, Homo sapien
taggtttccttacagatagcacgat

SEQ ID NO: 5407915 - DNA, 25 bp, Homo sapien
aaagctaccgctatgttttcggaga

SEQ ID NO: 5407916 - DNA, 25 bp, Homo sapien
cttctagtcctagcgggccaattgc

SEQ ID NO: 5407917 - DNA, 25 bp, Homo sapien
tggagacctccttgactatgacact

SEQ ID NO: 5407918 - DNA, 25 bp, Homo sapien
gtcctgtgaggttatgcccagaccc

SEQ ID NO: 5407919 - DNA, 25 bp, Homo sapien
tgcaggccatggattgaccagtcct

SEQ ID NO: 5407920 - DNA, 25 bp, Homo sapien
tgcttctgtctctacactctgggta

SEQ ID NO: 5407921 - DNA, 25 bp, Homo sapien
aaagcacaaaagtctggccggccct

SEQ ID NO: 5407922 - DNA, 25 bp, Homo sapien
tctttaggtagattaggcaacactt

SEQ ID NO: 5407923 - DNA, 25 bp, Homo sapien
tcaaaatgactctgcctagcaaaca

SEQ ID NO: 5407924 - DNA, 25 bp, Homo sapien
tttcggaaggttaaagcacacacag

SEQ ID NO: 5407925 - DNA, 25 bp, Homo sapien
tgctccaatatagcccaacggatgg

SEQ ID NO: 5407926 - DNA, 25 bp, Homo sapien
tgaggcccgggattgctaggacatt

SEQ ID NO: 5407927 - DNA, 25 bp, Homo sapien
tcttttgtgatctagaagggcaccc

SEQ ID NO: 5407928 - DNA, 25 bp, Homo sapien
taagtacatgaaaacgtggaccaca

SEQ ID NO: 5407929 - DNA, 25 bp, Homo sapien
gttgttacccaagagtgtgccgagg

SEQ ID NO: 5407930 - DNA, 25 bp, Homo sapien
gcccattgtccctcctttgcaaaac

SEQ ID NO: 5407931 - DNA, 25 bp, Homo sapien
ctgcccattgtccctcctttgcaaa

SEQ ID NO: 5407932 - DNA, 25 bp, Homo sapien
ccattgtccctcctttgcaaaacct

SEQ ID NO: 5407933 - DNA, 25 bp, Homo sapien
accaaatacgaagtcacttctttct

SEQ ID NO: 5407934 - DNA, 25 bp, Homo sapien
caatgaacgcgagtgaactttggcc

SEQ ID NO: 5407935 - DNA, 25 bp, Homo sapien
ggacatcaatgaacgcgagtgaact

SEQ ID NO: 5407936 - DNA, 25 bp, Homo sapien
gattagaagggacatcaatgaacgc

SEQ ID NO: 5407937 - DNA, 25 bp, Homo sapien
tgaacgcgagtgaactttggccact

SEQ ID NO: 5407938 - DNA, 25 bp, Homo sapien
agccccagtcatcgcgtgcgcggga

SEQ ID NO: 5407939 - DNA, 25 bp, Homo sapien
agaaatcagtaaccaggtgaagtgc

SEQ ID NO: 5407940 - DNA, 25 bp, Homo sapien
gtgaagtgccacaccgcacaaagat

SEQ ID NO: 5407941 - DNA, 25 bp, Homo sapien
agttacagcttacagggcgaggccc

SEQ ID NO: 5407942 - DNA, 25 bp, Homo sapien
gctcccagggaagccgccgccccgc

SEQ ID NO: 5407943 - DNA, 25 bp, Homo sapien
gggtaatagtaggtggcgtactgag

SEQ ID NO: 5407944 - DNA, 25 bp, Homo sapien
tactgagggtacatctgctgtttcc

SEQ ID NO: 5407945 - DNA, 25 bp, Homo sapien
taggtggcgtactgagggtacatct

SEQ ID NO: 5407946 - DNA, 25 bp, Homo sapien
cttggcttgcagatactgggggtaa

SEQ ID NO: 5407947 - DNA, 25 bp, Homo sapien
ctggaagggagcctgccgtgcaggg

SEQ ID NO: 5407948 - DNA, 25 bp, Homo sapien
gagcctgccgtgcagggtcgcggac

SEQ ID NO: 5407949 - DNA, 25 bp, Homo sapien
agggagcctgccgtgcagggtcgcg

SEQ ID NO: 5407950 - DNA, 25 bp, Homo sapien
ggaagggagcctgccgtgcagggtc

SEQ ID NO: 5407951 - DNA, 25 bp, Homo sapien
tggggtttccaagtctcgggctctc

SEQ ID NO: 5407952 - DNA, 25 bp, Homo sapien
ggtttccaagtctcgggctctcctg

SEQ ID NO: 5407953 - DNA, 25 bp, Homo sapien
ctcccagccgggaccagacgtcctc

SEQ ID NO: 5407954 - DNA, 25 bp, Homo sapien
actgctccggggctgccaagggctg

SEQ ID NO: 5407955 - DNA, 25 bp, Homo sapien
tgcagagcgcagagggcaccccgga

SEQ ID NO: 5407956 - DNA, 25 bp, Homo sapien
acagggcgctcccaaggagtttcct

SEQ ID NO: 5407957 - DNA, 25 bp, Homo sapien
ccggctgcgcggggctgagaggtga

SEQ ID NO: 5407958 - DNA, 25 bp, Homo sapien
ggcgagccggctgcgcggggctgag

SEQ ID NO: 5407959 - DNA, 25 bp, Homo sapien
ctcgggcgagccggctgcgcggggc

SEQ ID NO: 5407960 - DNA, 25 bp, Homo sapien
cgggcgagccggctgcgcggggctg

SEQ ID NO: 5407961 - DNA, 25 bp, Homo sapien
ggctgcgcttggtgccaggcggcat

SEQ ID NO: 5407962 - DNA, 25 bp, Homo sapien
tctggggtgggtgcgcccgatgtgg

SEQ ID NO: 5407963 - DNA, 25 bp, Homo sapien
gtgggtgcgcccgatgtggagagag

SEQ ID NO: 5407964 - DNA, 25 bp, Homo sapien
cgcttggtgccaggcggcatctggg

SEQ ID NO: 5407965 - DNA, 25 bp, Homo sapien
ccatagtgtaattgcttttctttgt

SEQ ID NO: 5407966 - DNA, 25 bp, Homo sapien
tcattggctgcagaattccatttct

SEQ ID NO: 5407967 - DNA, 25 bp, Homo sapien
ccttttcattggctgcagaattcca

SEQ ID NO: 5407968 - DNA, 25 bp, Homo sapien
gaattccatttcttattaccgttca

SEQ ID NO: 5407969 - DNA, 25 bp, Homo sapien
ccaatgatgaatctagaagttcatg

SEQ ID NO: 5407970 - DNA, 25 bp, Homo sapien
ccatctcatcactgcggttgtgcag

SEQ ID NO: 5407971 - DNA, 25 bp, Homo sapien
agccagaagaattccgtggtgcccc

SEQ ID NO: 5407972 - DNA, 25 bp, Homo sapien
gcagggccaaatcgtgaaagtcaca

SEQ ID NO: 5407973 - DNA, 25 bp, Homo sapien
gaagcaatggactgccgtgttcatc

SEQ ID NO: 5407974 - DNA, 25 bp, Homo sapien
tcaagatctggaaccactacagctg

SEQ ID NO: 5407975 - DNA, 25 bp, Homo sapien
tgcaaagtagaaggacactggatcc

SEQ ID NO: 5407976 - DNA, 25 bp, Homo sapien
cagagctgccacactaggtcaagat

SEQ ID NO: 5407977 - DNA, 25 bp, Homo sapien
ggtttatccgtcctttgcgtgagca

SEQ ID NO: 5407978 - DNA, 25 bp, Homo sapien
gagagcagaccacaagagcaactag

SEQ ID NO: 5407979 - DNA, 25 bp, Homo sapien
tcagaatgttttagggagagcccag

SEQ ID NO: 5407980 - DNA, 25 bp, Homo sapien
tattgctctacccacaagagaggac

SEQ ID NO: 5407981 - DNA, 25 bp, Homo sapien
aggtgatctgatcggtgggctgtta

SEQ ID NO: 5407982 - DNA, 25 bp, Homo sapien
tgatctgatcggtgggctgttagac

SEQ ID NO: 5407983 - DNA, 25 bp, Homo sapien
tgaggtgatctgatcggtgggctgt

SEQ ID NO: 5407984 - DNA, 25 bp, Homo sapien
gctgaggtgatctgatcggtgggct

SEQ ID NO: 5407985 - DNA, 25 bp, Homo sapien
ctggaacagcctacaggaccgaggt

SEQ ID NO: 5407986 - DNA, 25 bp, Homo sapien
aacagcctacaggaccgaggtcctg

SEQ ID NO: 5407987 - DNA, 25 bp, Homo sapien
tggaacagcctacaggaccgaggtc

SEQ ID NO: 5407988 - DNA, 25 bp, Homo sapien
gaacagcctacaggaccgaggtcct

SEQ ID NO: 5407989 - DNA, 25 bp, Homo sapien
gagcctcattttgcagcgtggccct

SEQ ID NO: 5407990 - DNA, 25 bp, Homo sapien
gagccttagggataagaaccgtgga

SEQ ID NO: 5407991 - DNA, 25 bp, Homo sapien
aagagctttaagtgctggagcctta

SEQ ID NO: 5407992 - DNA, 25 bp, Homo sapien
gagaagatggccatcattagctcca

SEQ ID NO: 5407993 - DNA, 25 bp, Homo sapien
tatccaaacctacatctagcatctg

SEQ ID NO: 5407994 - DNA, 25 bp, Homo sapien
catctagcatctgagtatcattctc

SEQ ID NO: 5407995 - DNA, 25 bp, Homo sapien
tctagcatctgagtatcattctcag

SEQ ID NO: 5407996 - DNA, 25 bp, Homo sapien
tgtatccaaacctacatctagcatc

SEQ ID NO: 5407997 - DNA, 25 bp, Homo sapien
tcccattcctcgcagaggcattgtt

SEQ ID NO: 5407998 - DNA, 25 bp, Homo sapien
attcctcgcagaggcattgttccca

SEQ ID NO: 5407999 - DNA, 25 bp, Homo sapien
agtcccattcctcgcagaggcattg

SEQ ID NO: 5408000 - DNA, 25 bp, Homo sapien
ctagtcccattcctcgcagaggcat

SEQ ID NO: 5408001 - DNA, 25 bp, Homo sapien
ccctcaggcccactgcgtggatgcc

SEQ ID NO: 5408002 - DNA, 25 bp, Homo sapien
aaggaagtcctgggtcatgaccttc

SEQ ID NO: 5408003 - DNA, 25 bp, Homo sapien
cctcaggcccactgcgtggatgcct

SEQ ID NO: 5408004 - DNA, 25 bp, Homo sapien
ggaagtcctgggtcatgaccttcat

SEQ ID NO: 5408005 - DNA, 25 bp, Homo sapien
tggagcttgtagacctcagtcagag

SEQ ID NO: 5408006 - DNA, 25 bp, Homo sapien
gctgcttctagtgcatggagcttgt

SEQ ID NO: 5408007 - DNA, 25 bp, Homo sapien
ttctagtgcatggagcttgtagacc

SEQ ID NO: 5408008 - DNA, 25 bp, Homo sapien
gggtcccctgctgttctttccaggc

SEQ ID NO: 5408009 - DNA, 25 bp, Homo sapien
acagcccatcatgggatccagttag

SEQ ID NO: 5408010 - DNA, 25 bp, Homo sapien
gcccatcatgggatccagttagttc

SEQ ID NO: 5408011 - DNA, 25 bp, Homo sapien
ccatcatgggatccagttagttctg

SEQ ID NO: 5408012 - DNA, 25 bp, Homo sapien
atcatgggatccagttagttctgtc

SEQ ID NO: 5408013 - DNA, 25 bp, Homo sapien
ggacagctccgttctttctggagca

SEQ ID NO: 5408014 - DNA, 25 bp, Homo sapien
ggaaggacagctccgttctttctgg

SEQ ID NO: 5408015 - DNA, 25 bp, Homo sapien
gtgatattgtatcattcctacaagg

SEQ ID NO: 5408016 - DNA, 25 bp, Homo sapien
ccatcagccctaacgggtgatattg

SEQ ID NO: 5408017 - DNA, 25 bp, Homo sapien
caacaacggaagatgggtggcaaac

SEQ ID NO: 5408018 - DNA, 25 bp, Homo sapien
tcatctgacttaggagactctttgc

SEQ ID NO: 5408019 - DNA, 25 bp, Homo sapien
gccaaggtactgaagagcaattcct

SEQ ID NO: 5408020 - DNA, 25 bp, Homo sapien
gacagatagagatgcccctgaggtg

SEQ ID NO: 5408021 - DNA, 25 bp, Homo sapien
agcttgatggagatagaattgaacc

SEQ ID NO: 5408022 - DNA, 25 bp, Homo sapien
gattgccctggccaatactatgttg

SEQ ID NO: 5408023 - DNA, 25 bp, Homo sapien
tggagatagaattgaacctataaat

SEQ ID NO: 5408024 - DNA, 25 bp, Homo sapien
attgccctggccaatactatgttga

SEQ ID NO: 5408025 - DNA, 25 bp, Homo sapien
ttcagttgagacagactgccacctc

SEQ ID NO: 5408026 - DNA, 25 bp, Homo sapien
caaacgtctgtgaaatgtctgcctc

SEQ ID NO: 5408027 - DNA, 25 bp, Homo sapien
ggtagaatcagccacctcctctgaa

SEQ ID NO: 5408028 - DNA, 25 bp, Homo sapien
tctgccgtgagatttgccaagtggt

SEQ ID NO: 5408029 - DNA, 25 bp, Homo sapien
gcttgccccaaggttcttcaccagc

SEQ ID NO: 5408030 - DNA, 25 bp, Homo sapien
tcagcttgccccaaggttcttcacc

SEQ ID NO: 5408031 - DNA, 25 bp, Homo sapien
agcttgccccaaggttcttcaccag

SEQ ID NO: 5408032 - DNA, 25 bp, Homo sapien
cagcttgccccaaggttcttcacca

SEQ ID NO: 5408033 - DNA, 25 bp, Homo sapien
ccaaagccggtgaatctctggagaa

SEQ ID NO: 5408034 - DNA, 25 bp, Homo sapien
gcaccaaagccggtgaatctctgga

SEQ ID NO: 5408035 - DNA, 25 bp, Homo sapien
cacaggttctggcacagtcagagca

SEQ ID NO: 5408036 - DNA, 25 bp, Homo sapien
tgtcactgagctcacaggttctggc

SEQ ID NO: 5408037 - DNA, 25 bp, Homo sapien
ggagaaattacacttatcaagaccc

SEQ ID NO: 5408038 - DNA, 25 bp, Homo sapien
ctgaagcatgagatgtaactcatta

SEQ ID NO: 5408039 - DNA, 25 bp, Homo sapien
taactcattaggagaaattacactt

SEQ ID NO: 5408040 - DNA, 25 bp, Homo sapien
gcatgagatgtaactcattaggaga

SEQ ID NO: 5408041 - DNA, 25 bp, Homo sapien
catgccctcctgataggagtagaaa

SEQ ID NO: 5408042 - DNA, 25 bp, Homo sapien
cctgataggagtagaaagagtagga

SEQ ID NO: 5408043 - DNA, 25 bp, Homo sapien
ccctcctgataggagtagaaagagt

SEQ ID NO: 5408044 - DNA, 25 bp, Homo sapien
ggaattattttctaagctaaagcaa

SEQ ID NO: 5408045 - DNA, 25 bp, Homo sapien
taataggtcaaagacccaatgctgt

SEQ ID NO: 5408046 - DNA, 25 bp, Homo sapien
gacaaaacatttgaatcacgctcat

SEQ ID NO: 5408047 - DNA, 25 bp, Homo sapien
ttggttgctggctagaactccagct

SEQ ID NO: 5408048 - DNA, 25 bp, Homo sapien
ccttccttcctgaaagtactgagca

SEQ ID NO: 5408049 - DNA, 25 bp, Homo sapien
cagatttcagattgttctacacaga

SEQ ID NO: 5408050 - DNA, 25 bp, Homo sapien
tctggcaaagagattggcctaatcc

SEQ ID NO: 5408051 - DNA, 25 bp, Homo sapien
tgattatggcatgataaagctggcc

SEQ ID NO: 5408052 - DNA, 25 bp, Homo sapien
ggaaatttaaagatcacatgacagc

SEQ ID NO: 5408053 - DNA, 25 bp, Homo sapien
gaggcactggcatcattgaggagtt

SEQ ID NO: 5408054 - DNA, 25 bp, Homo sapien
tcattgaggagttcagtggttgctg

SEQ ID NO: 5408055 - DNA, 25 bp, Homo sapien
ccagggccagccaatcgtagaagat

SEQ ID NO: 5408056 - DNA, 25 bp, Homo sapien
tgctgctttatgttgaccagggcca

SEQ ID NO: 5408057 - DNA, 25 bp, Homo sapien
gaaggcaaatgtcctgactggtcac

SEQ ID NO: 5408058 - DNA, 25 bp, Homo sapien
cacttaggccacattgttgcaacaa

SEQ ID NO: 5408059 - DNA, 25 bp, Homo sapien
tgactggtcacttaggccacattgt

SEQ ID NO: 5408060 - DNA, 25 bp, Homo sapien
cttgataggtggaaggcaaatgtcc

SEQ ID NO: 5408061 - DNA, 25 bp, Homo sapien
cagtcatacctatgggccagcatgg

SEQ ID NO: 5408062 - DNA, 25 bp, Homo sapien
ccaggaagtagtagagggcatatac

SEQ ID NO: 5408063 - DNA, 25 bp, Homo sapien
gcatggcaacttgtccctgcatcaa

SEQ ID NO: 5408064 - DNA, 25 bp, Homo sapien
tgtagctttggctggtataccacaa

SEQ ID NO: 5408065 - DNA, 25 bp, Homo sapien
gctagctcagaactcacggactgaa

SEQ ID NO: 5408066 - DNA, 25 bp, Homo sapien
gagtctgatatggagggaatctcag

SEQ ID NO: 5408067 - DNA, 25 bp, Homo sapien
gactgaaagtcaaccagccgttcca

SEQ ID NO: 5408068 - DNA, 25 bp, Homo sapien
tccacatcagatttcgctagctcag

SEQ ID NO: 5408069 - DNA, 25 bp, Homo sapien
taaacatgcgtggtgaggagttcag

SEQ ID NO: 5408070 - DNA, 25 bp, Homo sapien
gaaagaaggcttggtatcagggcat

SEQ ID NO: 5408071 - DNA, 25 bp, Homo sapien
cattggtaagtcaggagaagtccgc

SEQ ID NO: 5408072 - DNA, 25 bp, Homo sapien
gaattggacttgactacatctgtgg

SEQ ID NO: 5408073 - DNA, 25 bp, Homo sapien
ttcttgttgggccttattctctcaa

SEQ ID NO: 5408074 - DNA, 25 bp, Homo sapien
tggcttcaggggtacggtcacttcc

SEQ ID NO: 5408075 - DNA, 25 bp, Homo sapien
tgttggttacgctctcctccaactt

SEQ ID NO: 5408076 - DNA, 25 bp, Homo sapien
gacagagtgggcttggaaatggctt

SEQ ID NO: 5408077 - DNA, 25 bp, Homo sapien
ggcttgcagtcatctaataagcggg

SEQ ID NO: 5408078 - DNA, 25 bp, Homo sapien
taagcgggcaaactcactgggatta

SEQ ID NO: 5408079 - DNA, 25 bp, Homo sapien
ggagagtcatactggaaactccaca

SEQ ID NO: 5408080 - DNA, 25 bp, Homo sapien
tcactgggattaggagagtcatact

SEQ ID NO: 5408081 - DNA, 25 bp, Homo sapien
cagagctctgcatttgtgactaagg

SEQ ID NO: 5408082 - DNA, 25 bp, Homo sapien
catctttccatctgcagacattcag

SEQ ID NO: 5408083 - DNA, 25 bp, Homo sapien
catgtgaactggcagctttgctgtt

SEQ ID NO: 5408084 - DNA, 25 bp, Homo sapien
gtcagtgcagaaagaccgccatctt

SEQ ID NO: 5408085 - DNA, 25 bp, Homo sapien
cccaccagttctgctgtgcgaattt

SEQ ID NO: 5408086 - DNA, 25 bp, Homo sapien
tctgctgtgcgaatttgttcttttc

SEQ ID NO: 5408087 - DNA, 25 bp, Homo sapien
ggttttgagcttcccaccagttctg

SEQ ID NO: 5408088 - DNA, 25 bp, Homo sapien
tggtttctccaggttttgagcttcc

SEQ ID NO: 5408089 - DNA, 25 bp, Homo sapien
gccttagacgaccttccagaagact

SEQ ID NO: 5408090 - DNA, 25 bp, Homo sapien
gtatcacaggtctcacaggctccta

SEQ ID NO: 5408091 - DNA, 25 bp, Homo sapien
ggcagagcagttggtatcacaggtc

SEQ ID NO: 5408092 - DNA, 25 bp, Homo sapien
cagaagactttttgctaccctccct

SEQ ID NO: 5408093 - DNA, 25 bp, Homo sapien
ggcagcacccccccaacgataccag

SEQ ID NO: 5408094 - DNA, 25 bp, Homo sapien
ctgtctacacgggcagcaccccccc

SEQ ID NO: 5408095 - DNA, 25 bp, Homo sapien
cagcacccccccaacgataccaggt

SEQ ID NO: 5408096 - DNA, 25 bp, Homo sapien
cctgtctacacgggcagcacccccc

SEQ ID NO: 5408097 - DNA, 25 bp, Homo sapien
cctaatttggacaatcgaatgacaa

SEQ ID NO: 5408098 - DNA, 25 bp, Homo sapien
gtatgacctaatttggacaatcgaa

SEQ ID NO: 5408099 - DNA, 25 bp, Homo sapien
cgcatgtatgacctaatttggacaa

SEQ ID NO: 5408100 - DNA, 25 bp, Homo sapien
aatgtttcgcatgtatgacctaatt

SEQ ID NO: 5408101 - DNA, 25 bp, Homo sapien
taacggtaattctcgtgcagggatc

SEQ ID NO: 5408102 - DNA, 25 bp, Homo sapien
ggtaattctcgtgcagggatcctgc

SEQ ID NO: 5408103 - DNA, 25 bp, Homo sapien
tctaacggtaattctcgtgcaggga

SEQ ID NO: 5408104 - DNA, 25 bp, Homo sapien
ttggtctaacggtaattctcgtgca

SEQ ID NO: 5408105 - DNA, 25 bp, Homo sapien
gatcagacagcccacattcattatc

SEQ ID NO: 5408106 - DNA, 25 bp, Homo sapien
agttttcctatgatcagacagccca

SEQ ID NO: 5408107 - DNA, 25 bp, Homo sapien
cccaagagacatgcagttttcctat

SEQ ID NO: 5408108 - DNA, 25 bp, Homo sapien
tcctatgatcagacagcccacattc

SEQ ID NO: 5408109 - DNA, 25 bp, Homo sapien
ctgccctgccatctgccttcttcat

SEQ ID NO: 5408110 - DNA, 25 bp, Homo sapien
catttcaattagcatgatgaaacaa

SEQ ID NO: 5408111 - DNA, 25 bp, Homo sapien
tttcaattagcatgatgaaacaaac

SEQ ID NO: 5408112 - DNA, 25 bp, Homo sapien
ttcatttcaattagcatgatgaaac

SEQ ID NO: 5408113 - DNA, 25 bp, Homo sapien
tcaattagcatgatgaaacaaactg

SEQ ID NO: 5408114 - DNA, 25 bp, Homo sapien
gctgcccacaaacaacccacatttt

SEQ ID NO: 5408115 - DNA, 25 bp, Homo sapien
tcctgccaccttgtctgaaccagag

SEQ ID NO: 5408116 - DNA, 25 bp, Homo sapien
tcctctttgatgctgtctggacctg

SEQ ID NO: 5408117 - DNA, 25 bp, Homo sapien
tctggacctggctgcccacaaacaa

SEQ ID NO: 5408118 - DNA, 25 bp, Homo sapien
actgaatcaaatatccggaccttcc

SEQ ID NO: 5408119 - DNA, 25 bp, Homo sapien
ttctctggcattccagaagacctcc

SEQ ID NO: 5408120 - DNA, 25 bp, Homo sapien
ctgaatcaaatatccggaccttccc

SEQ ID NO: 5408121 - DNA, 25 bp, Homo sapien
tttctctggcattccagaagacctc

SEQ ID NO: 5408122 - DNA, 25 bp, Homo sapien
gctcgagagtggaaggcgggaggcc

SEQ ID NO: 5408123 - DNA, 25 bp, Homo sapien
tgccttttatccacttaggcccaca

SEQ ID NO: 5408124 - DNA, 25 bp, Homo sapien
tgtaatggctccagcctaagttgcc

SEQ ID NO: 5408125 - DNA, 25 bp, Homo sapien
agaggtaagagtgagcccaacaagg

SEQ ID NO: 5408126 - DNA, 25 bp, Homo sapien
ttcagcgtggctgcgtgcagatgta

SEQ ID NO: 5408127 - DNA, 25 bp, Homo sapien
agcgtggctgcgtgcagatgtaatc

SEQ ID NO: 5408128 - DNA, 25 bp, Homo sapien
tggctgcgtgcagatgtaatcggac

SEQ ID NO: 5408129 - DNA, 25 bp, Homo sapien
tcttcagcgtggctgcgtgcagatg

SEQ ID NO: 5408130 - DNA, 25 bp, Homo sapien
ggccattcctaagcaggcagtggtc

SEQ ID NO: 5408131 - DNA, 25 bp, Homo sapien
ctgctctgggtcgtcctaattgcaa

SEQ ID NO: 5408132 - DNA, 25 bp, Homo sapien
tctgcggccattcctaagcaggcag

SEQ ID NO: 5408133 - DNA, 25 bp, Homo sapien
gggtcgtcctaattgcaaacacatt

SEQ ID NO: 5408134 - DNA, 25 bp, Homo sapien
cctccctcagccagcccctcatcat

SEQ ID NO: 5408135 - DNA, 25 bp, Homo sapien
gcctccctcagccagcccctcatca

SEQ ID NO: 5408136 - DNA, 25 bp, Homo sapien
ggtggcctccctcagccagcccctc

SEQ ID NO: 5408137 - DNA, 25 bp, Homo sapien
cgtggtggcctccctcagccagccc

SEQ ID NO: 5408138 - DNA, 25 bp, Homo sapien
ctgcttcacaatttgccaaaaccaa

SEQ ID NO: 5408139 - DNA, 25 bp, Homo sapien
tttccacatcccatcaacacccaca

SEQ ID NO: 5408140 - DNA, 25 bp, Homo sapien
tgcctttgattcctctttccacatc

SEQ ID NO: 5408141 - DNA, 25 bp, Homo sapien
ctctttccacatcccatcaacaccc

SEQ ID NO: 5408142 - DNA, 25 bp, Homo sapien
ctctgcctgcctttgattcctcttt

SEQ ID NO: 5408143 - DNA, 25 bp, Homo sapien
ggatcttgattacagtactgtgtaa

SEQ ID NO: 5408144 - DNA, 25 bp, Homo sapien
gttatttggatcttgattacagtac

SEQ ID NO: 5408145 - DNA, 25 bp, Homo sapien
gttgccacatcaagttatttggatc

SEQ ID NO: 5408146 - DNA, 25 bp, Homo sapien
tgttgttgccacatcaagttatttg

SEQ ID NO: 5408147 - DNA, 25 bp, Homo sapien
actttagatacagtagctgcaccag

SEQ ID NO: 5408148 - DNA, 25 bp, Homo sapien
agctgttcattaggtagcatgtcaa

SEQ ID NO: 5408149 - DNA, 25 bp, Homo sapien
tgtctcactatcaactcagagcaat

SEQ ID NO: 5408150 - DNA, 25 bp, Homo sapien
ctgagaattctttgacctaatgagg

SEQ ID NO: 5408151 - DNA, 25 bp, Homo sapien
aggagaccgttatcctggctcgcca

SEQ ID NO: 5408152 - DNA, 25 bp, Homo sapien
agctctgtttctagcgctctgttgc

SEQ ID NO: 5408153 - DNA, 25 bp, Homo sapien
tgcaagattattcccaatagctctg

SEQ ID NO: 5408154 - DNA, 25 bp, Homo sapien
ggcattccctgctaattagctccaa

SEQ ID NO: 5408155 - DNA, 25 bp, Homo sapien
tggctccttttggaaggaacaggca

SEQ ID NO: 5408156 - DNA, 25 bp, Homo sapien
agggcttggcccagaaatgtgactg

SEQ ID NO: 5408157 - DNA, 25 bp, Homo sapien
cagaggtggcgcagctgaatcacca

SEQ ID NO: 5408158 - DNA, 25 bp, Homo sapien
cagagctgcgaggagactctgctgt

SEQ ID NO: 5408159 - DNA, 25 bp, Homo sapien
aatgttcgtgctccttcagataatt

SEQ ID NO: 5408160 - DNA, 25 bp, Homo sapien
aagcagaaatgttcgtgctccttca

SEQ ID NO: 5408161 - DNA, 25 bp, Homo sapien
atgttcgtgctccttcagataattc

SEQ ID NO: 5408162 - DNA, 25 bp, Homo sapien
cagttgtagtggcattagttccgat

SEQ ID NO: 5408163 - DNA, 25 bp, Homo sapien
cattagttccgatagtggccaaagt

SEQ ID NO: 5408164 - DNA, 25 bp, Homo sapien
ggcattagttccgatagtggccaaa

SEQ ID NO: 5408165 - DNA, 25 bp, Homo sapien
tagtggcattagttccgatagtggc

SEQ ID NO: 5408166 - DNA, 25 bp, Homo sapien
tacagatccacagtacaacgcaatc

SEQ ID NO: 5408167 - DNA, 25 bp, Homo sapien
tcatgaagtgatagagaggaagtcg

SEQ ID NO: 5408168 - DNA, 25 bp, Homo sapien
ccctggtgtgggtatgacctagtcc

SEQ ID NO: 5408169 - DNA, 25 bp, Homo sapien
tcctccttaactgaagggattccca

SEQ ID NO: 5408170 - DNA, 25 bp, Homo sapien
tccattccacctgttccaagctcat

SEQ ID NO: 5408171 - DNA, 25 bp, Homo sapien
ccattccacctgttccaagctcatt

SEQ ID NO: 5408172 - DNA, 25 bp, Homo sapien
cattccacctgttccaagctcattg

SEQ ID NO: 5408173 - DNA, 25 bp, Homo sapien
ttccattccacctgttccaagctca

SEQ ID NO: 5408174 - DNA, 25 bp, Homo sapien
ctaaggattcttagcatcttgcctg

SEQ ID NO: 5408175 - DNA, 25 bp, Homo sapien
ggccatgtctgaccatcttatctgg

SEQ ID NO: 5408176 - DNA, 25 bp, Homo sapien
cattctcacccaagtggccatgtct

SEQ ID NO: 5408177 - DNA, 25 bp, Homo sapien
tcatggaccactactccagtacagc

SEQ ID NO: 5408178 - DNA, 25 bp, Homo sapien
tttccatcaaaattaatggttgctt

SEQ ID NO: 5408179 - DNA, 25 bp, Homo sapien
ccaatctgaaagctgttctcttttc

SEQ ID NO: 5408180 - DNA, 25 bp, Homo sapien
atggttgcttttataacttccctct

SEQ ID NO: 5408181 - DNA, 25 bp, Homo sapien
ggtaccaatctgaaagctgttctct

SEQ ID NO: 5408182 - DNA, 25 bp, Homo sapien
cctgttttgtcaatagagattttag

SEQ ID NO: 5408183 - DNA, 25 bp, Homo sapien
tcagtttgagaaggtctcaagccca

SEQ ID NO: 5408184 - DNA, 25 bp, Homo sapien
agctggtgtagatgttccccaatca

SEQ ID NO: 5408185 - DNA, 25 bp, Homo sapien
gggttctcttcagtactagaatttg

SEQ ID NO: 5408186 - DNA, 25 bp, Homo sapien
tactgaacaatccagccaggaatat

SEQ ID NO: 5408187 - DNA, 25 bp, Homo sapien
tcgtttaggtccctggctattgtcc

SEQ ID NO: 5408188 - DNA, 25 bp, Homo sapien
ccccgacgatgaacatattccttag

SEQ ID NO: 5408189 - DNA, 25 bp, Homo sapien
caaggcatgccctctttcgtttagg

SEQ ID NO: 5408190 - DNA, 25 bp, Homo sapien
aaatgtaattctacacgtaattttg

SEQ ID NO: 5408191 - DNA, 25 bp, Homo sapien
atgtaattctacacgtaattttgct

SEQ ID NO: 5408192 - DNA, 25 bp, Homo sapien
aatgtaattctacacgtaattttgc

SEQ ID NO: 5408193 - DNA, 25 bp, Homo sapien
tatccccgcttgagactatccactg

SEQ ID NO: 5408194 - DNA, 25 bp, Homo sapien
gctgaggtaggcaagtcaatgtagt

SEQ ID NO: 5408195 - DNA, 25 bp, Homo sapien
tggtattttatggacctacaggatg

SEQ ID NO: 5408196 - DNA, 25 bp, Homo sapien
tcctttttcagagggacgaacaaca

SEQ ID NO: 5408197 - DNA, 25 bp, Homo sapien
tgctgatcccatttgcaagcttctg

SEQ ID NO: 5408198 - DNA, 25 bp, Homo sapien
gcagaattctgcatacagcccagga

SEQ ID NO: 5408199 - DNA, 25 bp, Homo sapien
ttaagaacaccaagagtctcaggac

SEQ ID NO: 5408200 - DNA, 25 bp, Homo sapien
gacaagctgtttaattagtgagaga

SEQ ID NO: 5408201 - DNA, 25 bp, Homo sapien
tccattttgagcctctgataggctc

SEQ ID NO: 5408202 - DNA, 25 bp, Homo sapien
cattttgagcctctgataggctcac

SEQ ID NO: 5408203 - DNA, 25 bp, Homo sapien
tttccattttgagcctctgataggc

SEQ ID NO: 5408204 - DNA, 25 bp, Homo sapien
atttccattttgagcctctgatagg

SEQ ID NO: 5408205 - DNA, 25 bp, Homo sapien
gcagcaccactgtatgggtcctcca

SEQ ID NO: 5408206 - DNA, 25 bp, Homo sapien
cacaggagtgtcatccgtaggtaag

SEQ ID NO: 5408207 - DNA, 25 bp, Homo sapien
agcagcaccactgtatgggtcctcc

SEQ ID NO: 5408208 - DNA, 25 bp, Homo sapien
gtgtcatccgtaggtaagatgtgtt

SEQ ID NO: 5408209 - DNA, 25 bp, Homo sapien
aaacttgctttatggacctcatata

SEQ ID NO: 5408210 - DNA, 25 bp, Homo sapien
tgcatggcactgaacaaacttgctt

SEQ ID NO: 5408211 - DNA, 25 bp, Homo sapien
caaacttgctttatggacctcatat

SEQ ID NO: 5408212 - DNA, 25 bp, Homo sapien
aggtagcaagttgtaaaatatccat

SEQ ID NO: 5408213 - DNA, 25 bp, Homo sapien
gaaaggtagcaagttgtaaaatatc

SEQ ID NO: 5408214 - DNA, 25 bp, Homo sapien
ctgaaaggtagcaagttgtaaaata

SEQ ID NO: 5408215 - DNA, 25 bp, Homo sapien
aaggtagcaagttgtaaaatatcca

SEQ ID NO: 5408216 - DNA, 25 bp, Homo sapien
cttgtcattttgtgctgcaagcatc

SEQ ID NO: 5408217 - DNA, 25 bp, Homo sapien
gcatcccaaacctgatattcctggg

SEQ ID NO: 5408218 - DNA, 25 bp, Homo sapien
tgtcattttgtgctgcaagcatccc

SEQ ID NO: 5408219 - DNA, 25 bp, Homo sapien
gcaagcatcccaaacctgatattcc

SEQ ID NO: 5408220 - DNA, 25 bp, Homo sapien
ctctttgtagaccctttgggctttg

SEQ ID NO: 5408221 - DNA, 25 bp, Homo sapien
catttatcaagtaggtttttcctct

SEQ ID NO: 5408222 - DNA, 25 bp, Homo sapien
gctacccgcggatccccgcttttca

SEQ ID NO: 5408223 - DNA, 25 bp, Homo sapien
acaccaaacacgctacccgcggatc

SEQ ID NO: 5408224 - DNA, 25 bp, Homo sapien
cttcctccacaccaaacacgctacc

SEQ ID NO: 5408225 - DNA, 25 bp, Homo sapien
ggatccccgcttttcaaacacaggc

SEQ ID NO: 5408226 - DNA, 25 bp, Homo sapien
tcaacatcatgatttggtgaggagg

SEQ ID NO: 5408227 - DNA, 25 bp, Homo sapien
gactggtgtacaccttcgtgagaaa

SEQ ID NO: 5408228 - DNA, 25 bp, Homo sapien
ggatactgacattccggatgactgg

SEQ ID NO: 5408229 - DNA, 25 bp, Homo sapien
tcgtgagaaacagcccgaattgact

SEQ ID NO: 5408230 - DNA, 25 bp, Homo sapien
gacggaagaaccattattaaggaaa

SEQ ID NO: 5408231 - DNA, 25 bp, Homo sapien
tttccttaataatggttcttccgtc

SEQ ID NO: 5408232 - DNA, 25 bp, Homo sapien
caccatatcttgtgtcaggaacatc

SEQ ID NO: 5408233 - DNA, 25 bp, Homo sapien
cagctcaggcaagaggttgaggacc

SEQ ID NO: 5408234 - DNA, 25 bp, Homo sapien
ggttgaggaccagccaacgttcagc

SEQ ID NO: 5408235 - DNA, 25 bp, Homo sapien
tcaggaggtgcactacacagcagct

SEQ ID NO: 5408236 - DNA, 25 bp, Homo sapien
tttccatgctctctgcagtagacac

SEQ ID NO: 5408237 - DNA, 25 bp, Homo sapien
tccaggtttatcatcctttccatgc

SEQ ID NO: 5408238 - DNA, 25 bp, Homo sapien
tctctgcagtagacacgagctgttc

SEQ ID NO: 5408239 - DNA, 25 bp, Homo sapien
agtagacacgagctgttcctagaag

SEQ ID NO: 5408240 - DNA, 25 bp, Homo sapien
tcaaactgaaatatacaagggactt

SEQ ID NO: 5408241 - DNA, 25 bp, Homo sapien
atattatctcaaactaagccaggtg

SEQ ID NO: 5408242 - DNA, 25 bp, Homo sapien
tctcactgtcattgggtcttagacg

SEQ ID NO: 5408243 - DNA, 25 bp, Homo sapien
taatctgcagtatggtacccaaatg

SEQ ID NO: 5408244 - DNA, 25 bp, Homo sapien
gattgaggccagcataccctggagt

SEQ ID NO: 5408245 - DNA, 25 bp, Homo sapien
gcttctctaactgtagcttctctgt

SEQ ID NO: 5408246 - DNA, 25 bp, Homo sapien
caaacaatgccccaccagattgagg

SEQ ID NO: 5408247 - DNA, 25 bp, Homo sapien
cagccaagctcaaatgccaaagtaa

SEQ ID NO: 5408248 - DNA, 25 bp, Homo sapien
cttcatttcagtatcgtgccatgat

SEQ ID NO: 5408249 - DNA, 25 bp, Homo sapien
tatcgtgccatgattggctgttgct

SEQ ID NO: 5408250 - DNA, 25 bp, Homo sapien
gagagctctggacagtttgagcagc

SEQ ID NO: 5408251 - DNA, 25 bp, Homo sapien
aagttcccacttcaacataagggag

SEQ ID NO: 5408252 - DNA, 25 bp, Homo sapien
taagttcttcagcatagatgttgaa

SEQ ID NO: 5408253 - DNA, 25 bp, Homo sapien
ttctcttgaattactcgttccaagc

SEQ ID NO: 5408254 - DNA, 25 bp, Homo sapien
ccaagccttgtgtcaaccttactac

SEQ ID NO: 5408255 - DNA, 25 bp, Homo sapien
gtgtcaaccttactacctgaatgtg

SEQ ID NO: 5408256 - DNA, 25 bp, Homo sapien
ttttagttggagagtctgcaatata

SEQ ID NO: 5408257 - DNA, 25 bp, Homo sapien
tagttggagagtctgcaatataatc

SEQ ID NO: 5408258 - DNA, 25 bp, Homo sapien
tgccttccaaggccattgtgagttc

SEQ ID NO: 5408259 - DNA, 25 bp, Homo sapien
aatataatcagccagtccagatgtc

SEQ ID NO: 5408260 - DNA, 25 bp, Homo sapien
atgatccagcaatcatactacttgg

SEQ ID NO: 5408261 - DNA, 25 bp, Homo sapien
catactacttggtatttatccaaag

SEQ ID NO: 5408262 - DNA, 25 bp, Homo sapien
ggagatgaaaacttatgtccgcaca

SEQ ID NO: 5408263 - DNA, 25 bp, Homo sapien
tatttatccaaaggagatgaaaact

SEQ ID NO: 5408264 - DNA, 25 bp, Homo sapien
gactcacaagtgacctttacacttg

SEQ ID NO: 5408265 - DNA, 25 bp, Homo sapien
tcacaagtgacctttacacttgaca

SEQ ID NO: 5408266 - DNA, 25 bp, Homo sapien
aagtgacctttacacttgacatagg

SEQ ID NO: 5408267 - DNA, 25 bp, Homo sapien
cctttacacttgacataggattctc

SEQ ID NO: 5408268 - DNA, 25 bp, Homo sapien
gacttgctataagggacagaagtta

SEQ ID NO: 5408269 - DNA, 25 bp, Homo sapien
ttaagtcattgcagtaaggaattac

SEQ ID NO: 5408270 - DNA, 25 bp, Homo sapien
gaacagcgaaacaacccaatcaggt

SEQ ID NO: 5408271 - DNA, 25 bp, Homo sapien
ttgatggttacttagcaagttgaac

SEQ ID NO: 5408272 - DNA, 25 bp, Homo sapien
gatgtcttttctagcactgttgtcc

SEQ ID NO: 5408273 - DNA, 25 bp, Homo sapien
gtgttttgaaaaccagtggctggtg

SEQ ID NO: 5408274 - DNA, 25 bp, Homo sapien
caaggatgtactagtatcaggagac

SEQ ID NO: 5408275 - DNA, 25 bp, Homo sapien
gtggctggtgaaccatctgcaacaa

SEQ ID NO: 5408276 - DNA, 25 bp, Homo sapien
gaagtagcgcactaatctcaaatac

SEQ ID NO: 5408277 - DNA, 25 bp, Homo sapien
tttccattgttatgcctaggccctc

SEQ ID NO: 5408278 - DNA, 25 bp, Homo sapien
aatttcagatacatggaagtagcgc

SEQ ID NO: 5408279 - DNA, 25 bp, Homo sapien
gaacctctagtcttaaaacatggct

SEQ ID NO: 5408280 - DNA, 25 bp, Homo sapien
gcacacaattattcttgacaaagac

SEQ ID NO: 5408281 - DNA, 25 bp, Homo sapien
taaaagcaacacaggtattgtagat

SEQ ID NO: 5408282 - DNA, 25 bp, Homo sapien
tattgatgaaacgtaagggaactta

SEQ ID NO: 5408283 - DNA, 25 bp, Homo sapien
tagattgtggtgtacagaagaggat

SEQ ID NO: 5408284 - DNA, 25 bp, Homo sapien
cccctttaaggatatagtctggttg

SEQ ID NO: 5408285 - DNA, 25 bp, Homo sapien
gccaagccttgctagtcattaacag

SEQ ID NO: 5408286 - DNA, 25 bp, Homo sapien
tgtgctgtacctgacaacttcaagt

SEQ ID NO: 5408287 - DNA, 25 bp, Homo sapien
tggagacctacagcaattagcaagc

SEQ ID NO: 5408288 - DNA, 25 bp, Homo sapien
taaagacagatatccactggtttgg

SEQ ID NO: 5408289 - DNA, 25 bp, Homo sapien
taagctttagaaagtacacaacact

SEQ ID NO: 5408290 - DNA, 25 bp, Homo sapien
cacaacactttctaggtatgatgta

SEQ ID NO: 5408291 - DNA, 25 bp, Homo sapien
tgaagtacttcagtgataagacaca

SEQ ID NO: 5408292 - DNA, 25 bp, Homo sapien
accagtgtaagccacagggtgggag

SEQ ID NO: 5408293 - DNA, 25 bp, Homo sapien
aggcaagaacttgtgttgaagcagc

SEQ ID NO: 5408294 - DNA, 25 bp, Homo sapien
tgttgaattataaggagctgtagct

SEQ ID NO: 5408295 - DNA, 25 bp, Homo sapien
aatacataattgcaccatctttata

SEQ ID NO: 5408296 - DNA, 25 bp, Homo sapien
aatatggtgtcaggatgacaagtgc

SEQ ID NO: 5408297 - DNA, 25 bp, Homo sapien
tatggtgtcaggatgacaagtgctt

SEQ ID NO: 5408298 - DNA, 25 bp, Homo sapien
atgtttctcaatatggtgtcaggat

SEQ ID NO: 5408299 - DNA, 25 bp, Homo sapien
tctcaatatggtgtcaggatgacaa

SEQ ID NO: 5408300 - DNA, 25 bp, Homo sapien
gatttccttcggcatcttaattcac

SEQ ID NO: 5408301 - DNA, 25 bp, Homo sapien
cacacttcaatggagagacttaaga

SEQ ID NO: 5408302 - DNA, 25 bp, Homo sapien
gaaaatctagtttcacagctatttg

SEQ ID NO: 5408303 - DNA, 25 bp, Homo sapien
agacatatcaagttctatgtgatga

SEQ ID NO: 5408304 - DNA, 25 bp, Homo sapien
gccgggtaagaacagctcccaggta

SEQ ID NO: 5408305 - DNA, 25 bp, Homo sapien
tgtctcatgactgagtcgtgcaggg

SEQ ID NO: 5408306 - DNA, 25 bp, Homo sapien
taaaggtggagtgggcacccgccag

SEQ ID NO: 5408307 - DNA, 25 bp, Homo sapien
catctgctaagcgtggccgggtaag

SEQ ID NO: 5408308 - DNA, 25 bp, Homo sapien
acccccgccgaggcgaggcagttgt

SEQ ID NO: 5408309 - DNA, 25 bp, Homo sapien
ccgccgaggcgaggcagttgtgagc

SEQ ID NO: 5408310 - DNA, 25 bp, Homo sapien
cgaggcgaggcagttgtgagcggga

SEQ ID NO: 5408311 - DNA, 25 bp, Homo sapien
ccccgccgaggcgaggcagttgtga

SEQ ID NO: 5408312 - DNA, 25 bp, Homo sapien
caataagcgtgtccgctggctcgca

SEQ ID NO: 5408313 - DNA, 25 bp, Homo sapien
gggaaaacacgcttctgacagcaga

SEQ ID NO: 5408314 - DNA, 25 bp, Homo sapien
ttaggagaagcgagttctctcggcg

SEQ ID NO: 5408315 - DNA, 25 bp, Homo sapien
taaagcattaattgaggtctcccca

SEQ ID NO: 5408316 - DNA, 25 bp, Homo sapien
cgcgagcgctgctgcatgctaatca

SEQ ID NO: 5408317 - DNA, 25 bp, Homo sapien
cctgctgaacggtgacagattggcg

SEQ ID NO: 5408318 - DNA, 25 bp, Homo sapien
tgttaaaacaatggagccgggcgcg

SEQ ID NO: 5408319 - DNA, 25 bp, Homo sapien
atttgaggcagcagcgttcgcctgc

SEQ ID NO: 5408320 - DNA, 25 bp, Homo sapien
gcttcctgctccctcgctttcccgc

SEQ ID NO: 5408321 - DNA, 25 bp, Homo sapien
ctccctcgctttcccgcgcgtcctt

SEQ ID NO: 5408322 - DNA, 25 bp, Homo sapien
cctgctccctcgctttcccgcgcgt

SEQ ID NO: 5408323 - DNA, 25 bp, Homo sapien
acccgcttcctgctccctcgctttc

SEQ ID NO: 5408324 - DNA, 25 bp, Homo sapien
ggagtccaggcgaattcagaaaggg

SEQ ID NO: 5408325 - DNA, 25 bp, Homo sapien
actcgctgtctggtgaatcgaccgc

SEQ ID NO: 5408326 - DNA, 25 bp, Homo sapien
cagcgagcgcgactgggagtccagg

SEQ ID NO: 5408327 - DNA, 25 bp, Homo sapien
aagcggccgaagagcctgcgttctc

SEQ ID NO: 5408328 - DNA, 25 bp, Homo sapien
tctatgttgacggaagaaccattat

SEQ ID NO: 5408329 - DNA, 25 bp, Homo sapien
ataatggttcttccgtcaacataga

SEQ ID NO: 5408330 - DNA, 25 bp, Homo sapien
aatgtagtttggcaaagaggccctt

SEQ ID NO: 5408331 - DNA, 25 bp, Homo sapien
aatcagagaaatggaggattctaac

SEQ ID NO: 5408332 - DNA, 25 bp, Homo sapien
ttgataatgacgtaaataagtgatg

SEQ ID NO: 5408333 - DNA, 25 bp, Homo sapien
taaatcaagttattattagtgcccc

SEQ ID NO: 5408334 - DNA, 25 bp, Homo sapien
gatagacgatcagctgttctgtaga

SEQ ID NO: 5408335 - DNA, 25 bp, Homo sapien
gcttatcggattgagttcagagcca

SEQ ID NO: 5408336 - DNA, 25 bp, Homo sapien
taattgtaattcacgccatcagggt

SEQ ID NO: 5408337 - DNA, 25 bp, Homo sapien
agtgctctgcgatacctccagcaag

SEQ ID NO: 5408338 - DNA, 25 bp, Homo sapien
agaccatttggcatagtttgaagtc

SEQ ID NO: 5408339 - DNA, 25 bp, Homo sapien
cagaccatttggcatagtttgaagt

SEQ ID NO: 5408340 - DNA, 25 bp, Homo sapien
atcagaccatttggcatagtttgaa

SEQ ID NO: 5408341 - DNA, 25 bp, Homo sapien
tcagaccatttggcatagtttgaag

SEQ ID NO: 5408342 - DNA, 25 bp, Homo sapien
cctggtttcacatggagactgcata

SEQ ID NO: 5408343 - DNA, 25 bp, Homo sapien
gtttacgtgtcattcagattgttcc

SEQ ID NO: 5408344 - DNA, 25 bp, Homo sapien
catactgcctgtcaaattagttgta

SEQ ID NO: 5408345 - DNA, 25 bp, Homo sapien
ttaaaaaggcatctaggttacagga

SEQ ID NO: 5408346 - DNA, 25 bp, Homo sapien
caaatactgcataattccactcatc

SEQ ID NO: 5408347 - DNA, 25 bp, Homo sapien
atactgcataattccactcatctga

SEQ ID NO: 5408348 - DNA, 25 bp, Homo sapien
aatactgcataattccactcatctg

SEQ ID NO: 5408349 - DNA, 25 bp, Homo sapien
gacaaatactgcataattccactca

SEQ ID NO: 5408350 - DNA, 25 bp, Homo sapien
tctttcgtgggtatctgggtcagct

SEQ ID NO: 5408351 - DNA, 25 bp, Homo sapien
cacgtacactgcattggtctgaaga

SEQ ID NO: 5408352 - DNA, 25 bp, Homo sapien
tggtaagagtacaagaaggctggct

SEQ ID NO: 5408353 - DNA, 25 bp, Homo sapien
tgctccaagctacaggtcagatttg

SEQ ID NO: 5408354 - DNA, 25 bp, Homo sapien
cactagatttcagctacaggttttg

SEQ ID NO: 5408355 - DNA, 25 bp, Homo sapien
gacatatattgagaaattgccttcc

SEQ ID NO: 5408356 - DNA, 25 bp, Homo sapien
gcataacttagtcttaacagaggtc

SEQ ID NO: 5408357 - DNA, 25 bp, Homo sapien
aacttacttgttcactctcactaga

SEQ ID NO: 5408358 - DNA, 25 bp, Homo sapien
gcaggcctgtactcagatcttcgca

SEQ ID NO: 5408359 - DNA, 25 bp, Homo sapien
caggcctgtactcagatcttcgcag

SEQ ID NO: 5408360 - DNA, 25 bp, Homo sapien
aggcctgtactcagatcttcgcaga

SEQ ID NO: 5408361 - DNA, 25 bp, Homo sapien
gtactcagatcttcgcagagcggag

SEQ ID NO: 5408362 - DNA, 25 bp, Homo sapien
tctgtcatcaccagtatcccacaag

SEQ ID NO: 5408363 - DNA, 25 bp, Homo sapien
catttccctgtcctctccgtgatgg

SEQ ID NO: 5408364 - DNA, 25 bp, Homo sapien
tgtcatcaccagtatcccacaagct

SEQ ID NO: 5408365 - DNA, 25 bp, Homo sapien
ctgtcctctccgtgatgggcaatca

SEQ ID NO: 5408366 - DNA, 25 bp, Homo sapien
gagcccatgctggcactacactcca

SEQ ID NO: 5408367 - DNA, 25 bp, Homo sapien
ctatgcagcgggaccctcctgctgg

SEQ ID NO: 5408368 - DNA, 25 bp, Homo sapien
cagagcccatgctggcactacactc

SEQ ID NO: 5408369 - DNA, 25 bp, Homo sapien
tgctggcccacgtggctgccagagc

SEQ ID NO: 5408370 - DNA, 25 bp, Homo sapien
tgcttctgtagtgcctcaaggtcac

SEQ ID NO: 5408371 - DNA, 25 bp, Homo sapien
tctggccttagtttaccgagtagct

SEQ ID NO: 5408372 - DNA, 25 bp, Homo sapien
ggtcacccagaggttagagctcagg

SEQ ID NO: 5408373 - DNA, 25 bp, Homo sapien
gaatatgttagcgtttttcaaagcc

SEQ ID NO: 5408374 - DNA, 25 bp, Homo sapien
agaccgaaggcggaaagatcaaaga

SEQ ID NO: 5408375 - DNA, 25 bp, Homo sapien
attaaaaggaatcagaccgaaggcg

SEQ ID NO: 5408376 - DNA, 25 bp, Homo sapien
catatagcacaaaaatttttaccag

SEQ ID NO: 5408377 - DNA, 25 bp, Homo sapien
ggagcatgactacatatagcacaaa

SEQ ID NO: 5408378 - DNA, 25 bp, Homo sapien
gaacggaagccgaagcaaactagtg

SEQ ID NO: 5408379 - DNA, 25 bp, Homo sapien
gattcatcgccggtttgcagacaga

SEQ ID NO: 5408380 - DNA, 25 bp, Homo sapien
gaggcccgggcaactcttttgaatg

SEQ ID NO: 5408381 - DNA, 25 bp, Homo sapien
caagacaagggtccatatcgcggca

SEQ ID NO: 5408382 - DNA, 25 bp, Homo sapien
taacaggaagtctgatgttgtgttg

SEQ ID NO: 5408383 - DNA, 25 bp, Homo sapien
tatatagatagcaattgaataaaca

SEQ ID NO: 5408384 - DNA, 25 bp, Homo sapien
tcttagacttggaggaggtatgcct

SEQ ID NO: 5408385 - DNA, 25 bp, Homo sapien
aggtgaattatatagatagcaattg

SEQ ID NO: 5408386 - DNA, 25 bp, Homo sapien
tggccagacttctgggttaccagtc

SEQ ID NO: 5408387 - DNA, 25 bp, Homo sapien
ttagatgttagagtctctgagtgac

SEQ ID NO: 5408388 - DNA, 25 bp, Homo sapien
gtctgtgtggggtcaaattcatggc

SEQ ID NO: 5408389 - DNA, 25 bp, Homo sapien
agacttctgggttaccagtctgtgt

SEQ ID NO: 5408390 - DNA, 25 bp, Homo sapien
tctactaggagggagtcaacgacct

SEQ ID NO: 5408391 - DNA, 25 bp, Homo sapien
tcctgctagccaagggacaagtcct

SEQ ID NO: 5408392 - DNA, 25 bp, Homo sapien
gaatacagagatccaagccatgagg

SEQ ID NO: 5408393 - DNA, 25 bp, Homo sapien
tgcctataagccagggtcggaaact

SEQ ID NO: 5408394 - DNA, 25 bp, Homo sapien
tggtcatcatcttctcgtactggtt

SEQ ID NO: 5408395 - DNA, 25 bp, Homo sapien
tctcgtactggtttcccctcagctt

SEQ ID NO: 5408396 - DNA, 25 bp, Homo sapien
catcatcttctcgtactggtttccc

SEQ ID NO: 5408397 - DNA, 25 bp, Homo sapien
ctctttggtcatcatcttctcgtac

SEQ ID NO: 5408398 - DNA, 25 bp, Homo sapien
cccttctcaccatccaagtcctgct

SEQ ID NO: 5408399 - DNA, 25 bp, Homo sapien
cccggtcccgcaggctccccgagct

SEQ ID NO: 5408400 - DNA, 25 bp, Homo sapien
gcgccgccgcgggatcccctggccc

SEQ ID NO: 5408401 - DNA, 25 bp, Homo sapien
caggcccttccgatgatggcccctt

SEQ ID NO: 5408402 - DNA, 25 bp, Homo sapien
ggccagcgcggtggccagcgcaggc

SEQ ID NO: 5408403 - DNA, 25 bp, Homo sapien
cagtagccaggcgagcagaagggcc

SEQ ID NO: 5408404 - DNA, 25 bp, Homo sapien
aggcgagcagaagggccagcgcggt

SEQ ID NO: 5408405 - DNA, 25 bp, Homo sapien
gccaggcgagcagaagggccagcgc

SEQ ID NO: 5408406 - DNA, 25 bp, Homo sapien
agtgccggccagctgcgaccccgag

SEQ ID NO: 5408407 - DNA, 25 bp, Homo sapien
gcggccgccgagtgccggccagctg

SEQ ID NO: 5408408 - DNA, 25 bp, Homo sapien
ggccagctgcgaccccgagggatcc

SEQ ID NO: 5408409 - DNA, 25 bp, Homo sapien
ccgagtgccggccagctgcgacccc

SEQ ID NO: 5408410 - DNA, 25 bp, Homo sapien
gaaatggtcacaaaccccagcagta

SEQ ID NO: 5408411 - DNA, 25 bp, Homo sapien
caacctaagcagttgataacaggtc

SEQ ID NO: 5408412 - DNA, 25 bp, Homo sapien
tgctgtgggcttacaagagacataa

SEQ ID NO: 5408413 - DNA, 25 bp, Homo sapien
ttatagatgtctggcagtgcatggc

SEQ ID NO: 5408414 - DNA, 25 bp, Homo sapien
tgttaattacaaaacagacaaggtc

SEQ ID NO: 5408415 - DNA, 25 bp, Homo sapien
gtatattcacagcaatcacttccaa

SEQ ID NO: 5408416 - DNA, 25 bp, Homo sapien
gatctgtgagttgcgcatagaccaa

SEQ ID NO: 5408417 - DNA, 25 bp, Homo sapien
tctgataacagaaagtggtgtgtga

SEQ ID NO: 5408418 - DNA, 25 bp, Homo sapien
gacagactctggaacttttacaggg

SEQ ID NO: 5408419 - DNA, 25 bp, Homo sapien
gaaaagtctcctagcatcgtcgaat

SEQ ID NO: 5408420 - DNA, 25 bp, Homo sapien
tggctcattcagatccgaaaagtct

SEQ ID NO: 5408421 - DNA, 25 bp, Homo sapien
ccggctcgcgctttgtatactttgc

SEQ ID NO: 5408422 - DNA, 25 bp, Homo sapien
tctttcatgattactgcgtgcgcgg

SEQ ID NO: 5408423 - DNA, 25 bp, Homo sapien
tccagaacacgggtgaaggccagtc

SEQ ID NO: 5408424 - DNA, 25 bp, Homo sapien
ggcttccagcagcaaacctcgggtt

SEQ ID NO: 5408425 - DNA, 25 bp, Homo sapien
gacactaagtactttggaggcttcc

SEQ ID NO: 5408426 - DNA, 25 bp, Homo sapien
taaactgaccgcagaggaaaggccc

SEQ ID NO: 5408427 - DNA, 25 bp, Homo sapien
ccagtacacttgacgagagagagca

SEQ ID NO: 5408428 - DNA, 25 bp, Homo sapien
ggtaaatctgccttaatgtgcacac

SEQ ID NO: 5408429 - DNA, 25 bp, Homo sapien
gcaaagagcatcttactccctaggt

SEQ ID NO: 5408430 - DNA, 25 bp, Homo sapien
gatctacaccggctgtgacatggac

SEQ ID NO: 5408431 - DNA, 25 bp, Homo sapien
ctgcaggaccagttcgtgagcaact

SEQ ID NO: 5408432 - DNA, 25 bp, Homo sapien
ccatggccggctctttcctgcagga

SEQ ID NO: 5408433 - DNA, 25 bp, Homo sapien
gttcgtgagcaactacgccaaggcc

SEQ ID NO: 5408434 - DNA, 25 bp, Homo sapien
aaggacctgtccgattccagctgga

SEQ ID NO: 5408435 - DNA, 25 bp, Homo sapien
cattttatttgaccctcgatggccg

SEQ ID NO: 5408436 - DNA, 25 bp, Homo sapien
gctactatggcttctactcgcacag

SEQ ID NO: 5408437 - DNA, 25 bp, Homo sapien
cgatggccgtctgcagcgaataagt

SEQ ID NO: 5408438 - DNA, 25 bp, Homo sapien
cagggtctaaacgtgtgtatatttt

SEQ ID NO: 5408439 - DNA, 25 bp, Homo sapien
tttcctaataggaattcagggtcta

SEQ ID NO: 5408440 - DNA, 25 bp, Homo sapien
tttcgttttgtctgtgaactgaata

SEQ ID NO: 5408441 - DNA, 25 bp, Homo sapien
caatattcaatctagattccagtcc

SEQ ID NO: 5408442 - DNA, 25 bp, Homo sapien
taatttatgctttctttctgctttg

SEQ ID NO: 5408443 - DNA, 25 bp, Homo sapien
tttatgctttctttctgctttgttc

SEQ ID NO: 5408444 - DNA, 25 bp, Homo sapien
ttaatttatgctttctttctgcttt

SEQ ID NO: 5408445 - DNA, 25 bp, Homo sapien
aatttatgctttctttctgctttgt

SEQ ID NO: 5408446 - DNA, 25 bp, Homo sapien
tgtgaggcactgcatttatccctgc

SEQ ID NO: 5408447 - DNA, 25 bp, Homo sapien
cttttgttgtacttaggacccatgt

SEQ ID NO: 5408448 - DNA, 25 bp, Homo sapien
gctttctcatttgcacggacattac

SEQ ID NO: 5408449 - DNA, 25 bp, Homo sapien
ttcttactaagttcaccagtgtcct

SEQ ID NO: 5408450 - DNA, 25 bp, Homo sapien
tctgctgttagttccaaggccttcc

SEQ ID NO: 5408451 - DNA, 25 bp, Homo sapien
ttcctgatagacctccaagctgacc

SEQ ID NO: 5408452 - DNA, 25 bp, Homo sapien
aagctcaggatttctctgctgttag

SEQ ID NO: 5408453 - DNA, 25 bp, Homo sapien
gaactaagataggaatacctgaacc

SEQ ID NO: 5408454 - DNA, 25 bp, Homo sapien
catttgtgtttatcatccccaagaa

SEQ ID NO: 5408455 - DNA, 25 bp, Homo sapien
atttgtgtttatcatccccaagaag

SEQ ID NO: 5408456 - DNA, 25 bp, Homo sapien
tcatttgtgtttatcatccccaaga

SEQ ID NO: 5408457 - DNA, 25 bp, Homo sapien
ttcagcattttctttttctataggc

SEQ ID NO: 5408458 - DNA, 25 bp, Homo sapien
tcagcattttctttttctataggca

SEQ ID NO: 5408459 - DNA, 25 bp, Homo sapien
cttcagcattttctttttctatagg

SEQ ID NO: 5408460 - DNA, 25 bp, Homo sapien
cagcattttctttttctataggcat

SEQ ID NO: 5408461 - DNA, 25 bp, Homo sapien
tattcaccaaattgcgttggtttaa

SEQ ID NO: 5408462 - DNA, 25 bp, Homo sapien
catgtttattgtgctacttgcgcaa

SEQ ID NO: 5408463 - DNA, 25 bp, Homo sapien
tgttgtagcaacacattttaatgag

SEQ ID NO: 5408464 - DNA, 25 bp, Homo sapien
taaataagttcaatattccataaat

SEQ ID NO: 5408465 - DNA, 25 bp, Homo sapien
cactgtcaacacttggcgtaggcat

SEQ ID NO: 5408466 - DNA, 25 bp, Homo sapien
ctgactaaaaggccgcactcgcact

SEQ ID NO: 5408467 - DNA, 25 bp, Homo sapien
gcactgctactttcacactgtcaac

SEQ ID NO: 5408468 - DNA, 25 bp, Homo sapien
actcgcactgctactttcacactgt

SEQ ID NO: 5408469 - DNA, 25 bp, Homo sapien
ccacgaaagcagttcgtttctagat

SEQ ID NO: 5408470 - DNA, 25 bp, Homo sapien
cacactgcatatgcttcacattaaa

SEQ ID NO: 5408471 - DNA, 25 bp, Homo sapien
tattaatagtccattcattacacac

SEQ ID NO: 5408472 - DNA, 25 bp, Homo sapien
tttattgatgagtgttagagcctac

SEQ ID NO: 5408473 - DNA, 25 bp, Homo sapien
ccccattttaagactggtctagtat

SEQ ID NO: 5408474 - DNA, 25 bp, Homo sapien
ctatttaaacagatatcccctccct

SEQ ID NO: 5408475 - DNA, 25 bp, Homo sapien
gagaaaatgagaccaatgagcatat

SEQ ID NO: 5408476 - DNA, 25 bp, Homo sapien
taagcttgccgaataagagatgcca

SEQ ID NO: 5408477 - DNA, 25 bp, Homo sapien
gaaaaattgcctggactgaaacaat

SEQ ID NO: 5408478 - DNA, 25 bp, Homo sapien
ctgatgactttacaaataggtgtac

SEQ ID NO: 5408479 - DNA, 25 bp, Homo sapien
tggagttactttacttattgaagac

SEQ ID NO: 5408480 - DNA, 25 bp, Homo sapien
cagcatttttctgcgtaaaatttgc

SEQ ID NO: 5408481 - DNA, 25 bp, Homo sapien
ctttctttttctgtgtttttgcttg

SEQ ID NO: 5408482 - DNA, 25 bp, Homo sapien
caagcttgttcttattggatgtgtt

SEQ ID NO: 5408483 - DNA, 25 bp, Homo sapien
gtttctactgattgtgcatcatctt

SEQ ID NO: 5408484 - DNA, 25 bp, Homo sapien
atcttcaagcttgttcttattggat

SEQ ID NO: 5408485 - DNA, 25 bp, Homo sapien
ttcaagcttgttcttattggatgtg

SEQ ID NO: 5408486 - DNA, 25 bp, Homo sapien
aatccgaaactaattctttcagctg

SEQ ID NO: 5408487 - DNA, 25 bp, Homo sapien
gataaatccgaaactaattctttca

SEQ ID NO: 5408488 - DNA, 25 bp, Homo sapien
gagaagataaatccgaaactaattc

SEQ ID NO: 5408489 - DNA, 25 bp, Homo sapien
ctgagaagataaatccgaaactaat

SEQ ID NO: 5408490 - DNA, 25 bp, Homo sapien
gctttcttggaacttctgccgctgg

SEQ ID NO: 5408491 - DNA, 25 bp, Homo sapien
ctttcttggaacttctgccgctgga

SEQ ID NO: 5408492 - DNA, 25 bp, Homo sapien
tgcaatgaacgtttttgactttgac

SEQ ID NO: 5408493 - DNA, 25 bp, Homo sapien
gtgcaatgaacgtttttgactttga

SEQ ID NO: 5408494 - DNA, 25 bp, Homo sapien
gagtgcaatgaacgtttttgacttt

SEQ ID NO: 5408495 - DNA, 25 bp, Homo sapien
ctgagtgcaatgaacgtttttgact

SEQ ID NO: 5408496 - DNA, 25 bp, Homo sapien
ccacgttttctaggtatggcagaca

SEQ ID NO: 5408497 - DNA, 25 bp, Homo sapien
ggttttccaacatcaacattttcac

SEQ ID NO: 5408498 - DNA, 25 bp, Homo sapien
ctaaaatggattttcctaaagctgg

SEQ ID NO: 5408499 - DNA, 25 bp, Homo sapien
catcgaaagttcctcgtttggcact

SEQ ID NO: 5408500 - DNA, 25 bp, Homo sapien
tcctgattttctacagatcttttaa

SEQ ID NO: 5408501 - DNA, 25 bp, Homo sapien
tgtaacagatgaaaccttaacttct

SEQ ID NO: 5408502 - DNA, 25 bp, Homo sapien
tgttaccgtactaacttttagatca

SEQ ID NO: 5408503 - DNA, 25 bp, Homo sapien
gctggttccaacagctgagatgatt

SEQ ID NO: 5408504 - DNA, 25 bp, Homo sapien
tctcctaggcgtaacagaattttga

SEQ ID NO: 5408505 - DNA, 25 bp, Homo sapien
tgccctggcatcttaggagtagcaa

SEQ ID NO: 5408506 - DNA, 25 bp, Homo sapien
gacctctcgtacgagttttggagga

SEQ ID NO: 5408507 - DNA, 25 bp, Homo sapien
ggaggaaaccacgtcatcaacctgg

SEQ ID NO: 5408508 - DNA, 25 bp, Homo sapien
cagttgctgtgttagctgctttagg

SEQ ID NO: 5408509 - DNA, 25 bp, Homo sapien
tgcaaaatcacctggctcaacttct

SEQ ID NO: 5408510 - DNA, 25 bp, Homo sapien
taggttcaggcacatatggtaaagt

SEQ ID NO: 5408511 - DNA, 25 bp, Homo sapien
tctgcaattgctactttaataggtt

SEQ ID NO: 5408512 - DNA, 25 bp, Homo sapien
taagtgttccagagggatataactc

SEQ ID NO: 5408513 - DNA, 25 bp, Homo sapien
tgcgctcagagacaataggaccttc

SEQ ID NO: 5408514 - DNA, 25 bp, Homo sapien
taagttcagcgctacttcctggtta

SEQ ID NO: 5408515 - DNA, 25 bp, Homo sapien
tttcttgagtatcaggagggctgtc

SEQ ID NO: 5408516 - DNA, 25 bp, Homo sapien
caacagatgttaatccttcatccaa

SEQ ID NO: 5408517 - DNA, 25 bp, Homo sapien
ttgtcatttgctctaattgcagagg

SEQ ID NO: 5408518 - DNA, 25 bp, Homo sapien
tcatccaacactggtaccttggact

SEQ ID NO: 5408519 - DNA, 25 bp, Homo sapien
taattgcagaggtgtaggtttcaac

SEQ ID NO: 5408520 - DNA, 25 bp, Homo sapien
ttcaattctgaaaatgcctctgctg

SEQ ID NO: 5408521 - DNA, 25 bp, Homo sapien
gatggtgcacaaagagaagcttcag

SEQ ID NO: 5408522 - DNA, 25 bp, Homo sapien
gaagcttcagttccttgaactgggc

SEQ ID NO: 5408523 - DNA, 25 bp, Homo sapien
tttcccttcatagactgatggtgca

SEQ ID NO: 5408524 - DNA, 25 bp, Homo sapien
gtttctgtaggtctgaaggagttac

SEQ ID NO: 5408525 - DNA, 25 bp, Homo sapien
catttgtttctgtaggtctgaagga

SEQ ID NO: 5408526 - DNA, 25 bp, Homo sapien
ctaagagatccttgtttctgcatct

SEQ ID NO: 5408527 - DNA, 25 bp, Homo sapien
atcttctaaattgcccatttgtttc

SEQ ID NO: 5408528 - DNA, 25 bp, Homo sapien
gcttagaggccgtgaaaacagtctc

SEQ ID NO: 5408529 - DNA, 25 bp, Homo sapien
cttgagggcagtgaacgggatacta

SEQ ID NO: 5408530 - DNA, 25 bp, Homo sapien
taagtcgttgaggagaccttccagg

SEQ ID NO: 5408531 - DNA, 25 bp, Homo sapien
tgttgatcgaagagtagacctcagg

SEQ ID NO: 5408532 - DNA, 25 bp, Homo sapien
tgaaaacagatcttgtcaacacagt

SEQ ID NO: 5408533 - DNA, 25 bp, Homo sapien
tggtgttccaaaaaatgcctcaggc

SEQ ID NO: 5408534 - DNA, 25 bp, Homo sapien
ctctggagctgggagcgaatacact

SEQ ID NO: 5408535 - DNA, 25 bp, Homo sapien
gagctttgctgaataaactccgaac

SEQ ID NO: 5408536 - DNA, 25 bp, Homo sapien
tcccgcaaacgaggatcacgatcat

SEQ ID NO: 5408537 - DNA, 25 bp, Homo sapien
gaatttcgagccagtgatctctccc

SEQ ID NO: 5408538 - DNA, 25 bp, Homo sapien
caatggctaattttcgatggactct

SEQ ID NO: 5408539 - DNA, 25 bp, Homo sapien
gctgcaaatggtgcactaaaaggaa

SEQ ID NO: 5408540 - DNA, 25 bp, Homo sapien
taaatggtaacttcagtaaatcttc

SEQ ID NO: 5408541 - DNA, 25 bp, Homo sapien
ctcagtgtctgtaaatggtaacttc

SEQ ID NO: 5408542 - DNA, 25 bp, Homo sapien
tgtctgtaaatggtaacttcagtaa

SEQ ID NO: 5408543 - DNA, 25 bp, Homo sapien
ctgtaaatggtaacttcagtaaatc

SEQ ID NO: 5408544 - DNA, 25 bp, Homo sapien
tatattcaacctattgcaatgttgc

SEQ ID NO: 5408545 - DNA, 25 bp, Homo sapien
cctattgcaatgttgccgcaaaaaa

SEQ ID NO: 5408546 - DNA, 25 bp, Homo sapien
caatgttgccgcaaaaaattccagg

SEQ ID NO: 5408547 - DNA, 25 bp, Homo sapien
ttcagtaactcctctatattcaacc

SEQ ID NO: 5408548 - DNA, 25 bp, Homo sapien
aacagtgaggtgaaggataacatcg

SEQ ID NO: 5408549 - DNA, 25 bp, Homo sapien
ggcttgtctgtgctcgccctgactc

SEQ ID NO: 5408550 - DNA, 25 bp, Homo sapien
gaatatatctgagggcttgtctgtg

SEQ ID NO: 5408551 - DNA, 25 bp, Homo sapien
ctgaatatatctgagggcttgtctg

SEQ ID NO: 5408552 - DNA, 25 bp, Homo sapien
tttgcagtagctggatgaaacaaaa

SEQ ID NO: 5408553 - DNA, 25 bp, Homo sapien
tagctggatgaaacaaaagatccaa

SEQ ID NO: 5408554 - DNA, 25 bp, Homo sapien
tgcagtagctggatgaaacaaaaga

SEQ ID NO: 5408555 - DNA, 25 bp, Homo sapien
cagtagctggatgaaacaaaagatc

SEQ ID NO: 5408556 - DNA, 25 bp, Homo sapien
tgggaaagattcaatgggagtgtct

SEQ ID NO: 5408557 - DNA, 25 bp, Homo sapien
atacagttgggaaagattcaatggg

SEQ ID NO: 5408558 - DNA, 25 bp, Homo sapien
tgttttgttgggaaaggaatacata

SEQ ID NO: 5408559 - DNA, 25 bp, Homo sapien
tacataatatcaagtagcaaataaa

SEQ ID NO: 5408560 - DNA, 25 bp, Homo sapien
gcaggaggatattttcctgtgcctc

SEQ ID NO: 5408561 - DNA, 25 bp, Homo sapien
caggaggatattttcctgtgcctcc

SEQ ID NO: 5408562 - DNA, 25 bp, Homo sapien
agaaaccagtccatcaatcatcaag

SEQ ID NO: 5408563 - DNA, 25 bp, Homo sapien
tcaattcgctctcctaactgagaaa

SEQ ID NO: 5408564 - DNA, 25 bp, Homo sapien
tcatcaagcaatcgggattccactt

SEQ ID NO: 5408565 - DNA, 25 bp, Homo sapien
acaacttctcaattcgctctcctaa

SEQ ID NO: 5408566 - DNA, 25 bp, Homo sapien
tgtcgacgactggtgtagtagttct

SEQ ID NO: 5408567 - DNA, 25 bp, Homo sapien
ctgtcgacgactggtgtagtagttc

SEQ ID NO: 5408568 - DNA, 25 bp, Homo sapien
gaacaaagcgcaaattagtggcaga

SEQ ID NO: 5408569 - DNA, 25 bp, Homo sapien
gatctctcgggcttctgatgcaaaa

SEQ ID NO: 5408570 - DNA, 25 bp, Homo sapien
tgtggatccatgaaatgacacgaac

SEQ ID NO: 5408571 - DNA, 25 bp, Homo sapien
aaagtcccagggaactagtctgaat

SEQ ID NO: 5408572 - DNA, 25 bp, Homo sapien
taaaaaactgctcgggaggtggata

SEQ ID NO: 5408573 - DNA, 25 bp, Homo sapien
tatgaaggagggactcctctattta

SEQ ID NO: 5408574 - DNA, 25 bp, Homo sapien
tcccgagtttaacaaacaagtggca

SEQ ID NO: 5408575 - DNA, 25 bp, Homo sapien
gtactaatatatccaagatgccatg

SEQ ID NO: 5408576 - DNA, 25 bp, Homo sapien
ctccaatgaccacagtgcaaaataa

SEQ ID NO: 5408577 - DNA, 25 bp, Homo sapien
ggcatttgtgcatgataccaacgat

SEQ ID NO: 5408578 - DNA, 25 bp, Homo sapien
ggctttccctgtccatatatattca

SEQ ID NO: 5408579 - DNA, 25 bp, Homo sapien
atcaaaaagccccaaatatacagaa

SEQ ID NO: 5408580 - DNA, 25 bp, Homo sapien
taccaacgatttatatcaaaaagcc

SEQ ID NO: 5408581 - DNA, 25 bp, Homo sapien
tatactctggcatcccaacaatttg

SEQ ID NO: 5408582 - DNA, 25 bp, Homo sapien
gaaacactagtgtcaggcgatagag

SEQ ID NO: 5408583 - DNA, 25 bp, Homo sapien
gtattactcgtctgtcccctcaaag

SEQ ID NO: 5408584 - DNA, 25 bp, Homo sapien
ccctcaaagggaacatgccacctgt

SEQ ID NO: 5408585 - DNA, 25 bp, Homo sapien
ctcatataagatttgtcctgatgcc

SEQ ID NO: 5408586 - DNA, 25 bp, Homo sapien
tctaatgtgtggtacttcagctggg

SEQ ID NO: 5408587 - DNA, 25 bp, Homo sapien
tccaaagtgctagatagccatcaga

SEQ ID NO: 5408588 - DNA, 25 bp, Homo sapien
gaaaagtgacagcatatacaggaac

SEQ ID NO: 5408589 - DNA, 25 bp, Homo sapien
taactggaaacacagatggcgccct

SEQ ID NO: 5408590 - DNA, 25 bp, Homo sapien
gccaagcaagcaagtccatttttcc

SEQ ID NO: 5408591 - DNA, 25 bp, Homo sapien
tactacctcaagttgtggaccacaa

SEQ ID NO: 5408592 - DNA, 25 bp, Homo sapien
aggatctgtccaacatcagtgacca

SEQ ID NO: 5408593 - DNA, 25 bp, Homo sapien
tgccactccaaaaagccatcgcaga

SEQ ID NO: 5408594 - DNA, 25 bp, Homo sapien
accactagtcacttgagctcttaag

SEQ ID NO: 5408595 - DNA, 25 bp, Homo sapien
agctcttaagtctcgcatacttcca

SEQ ID NO: 5408596 - DNA, 25 bp, Homo sapien
tggcaggagaccactagtcacttga

SEQ ID NO: 5408597 - DNA, 25 bp, Homo sapien
cttgagctcttaagtctcgcatact

SEQ ID NO: 5408598 - DNA, 25 bp, Homo sapien
tacttagtctgtatacattgagaac

SEQ ID NO: 5408599 - DNA, 25 bp, Homo sapien
ctcaagaggagaagggtaatctatt

SEQ ID NO: 5408600 - DNA, 25 bp, Homo sapien
tatagtcgctctaaatacttagtct

SEQ ID NO: 5408601 - DNA, 25 bp, Homo sapien
ccagttcatgtacagtgtagatacc

SEQ ID NO: 5408602 - DNA, 25 bp, Homo sapien
tccccagcataagtgaagtaccagc

SEQ ID NO: 5408603 - DNA, 25 bp, Homo sapien
ggattgccacacaagaaatgaggcg

SEQ ID NO: 5408604 - DNA, 25 bp, Homo sapien
tttagataagtgcataggtccaggg

SEQ ID NO: 5408605 - DNA, 25 bp, Homo sapien
tgggcattattttgtcagactcagc

SEQ ID NO: 5408606 - DNA, 25 bp, Homo sapien
gaatcacggagatagttttccccat

SEQ ID NO: 5408607 - DNA, 25 bp, Homo sapien
ctgcagaagctcacaagctctcttg

SEQ ID NO: 5408608 - DNA, 25 bp, Homo sapien
taattcagataccactggactgaaa

SEQ ID NO: 5408609 - DNA, 25 bp, Homo sapien
gataccactggactgaaaccaagat

SEQ ID NO: 5408610 - DNA, 25 bp, Homo sapien
ttttcttactataaactgaaggctg

SEQ ID NO: 5408611 - DNA, 25 bp, Homo sapien
tcaaggtctctaacattattcacac

SEQ ID NO: 5408612 - DNA, 25 bp, Homo sapien
gagattataggattgaggttcccat

SEQ ID NO: 5408613 - DNA, 25 bp, Homo sapien
ttgggtccaccaagaaaatccaaga

SEQ ID NO: 5408614 - DNA, 25 bp, Homo sapien
caaattttcatatggtgctagttca

SEQ ID NO: 5408615 - DNA, 25 bp, Homo sapien
ctatttgtcgatttcatataaggca

SEQ ID NO: 5408616 - DNA, 25 bp, Homo sapien
ccaccaaattttcatatggtgctag

SEQ ID NO: 5408617 - DNA, 25 bp, Homo sapien
tatttgtcgatttcatataaggcac

SEQ ID NO: 5408618 - DNA, 25 bp, Homo sapien
cacacagagttcatcaatatccagc

SEQ ID NO: 5408619 - DNA, 25 bp, Homo sapien
cagggatccaataagaaagagccac

SEQ ID NO: 5408620 - DNA, 25 bp, Homo sapien
gataacaacagggatccaataagaa

SEQ ID NO: 5408621 - DNA, 25 bp, Homo sapien
ttatcacaacaagccaggacaaagg

SEQ ID NO: 5408622 - DNA, 25 bp, Homo sapien
caatatcagtggagactcttgaggg

SEQ ID NO: 5408623 - DNA, 25 bp, Homo sapien
tctccaatatcagtggagactcttg

SEQ ID NO: 5408624 - DNA, 25 bp, Homo sapien
tcagtgtctccaatatcagtggaga

SEQ ID NO: 5408625 - DNA, 25 bp, Homo sapien
aagtctcagtgtctccaatatcagt

SEQ ID NO: 5408626 - DNA, 25 bp, Homo sapien
gcacatcattaagtatggctgagaa

SEQ ID NO: 5408627 - DNA, 25 bp, Homo sapien
cattgagctaaccagcaaaggtgct

SEQ ID NO: 5408628 - DNA, 25 bp, Homo sapien
ggaacaatgttctctgatgcataaa

SEQ ID NO: 5408629 - DNA, 25 bp, Homo sapien
gaaagtagtctttggctcagtactt

SEQ ID NO: 5408630 - DNA, 25 bp, Homo sapien
tggctcgcagactttggagatcttc

SEQ ID NO: 5408631 - DNA, 25 bp, Homo sapien
ggatttgcctatcctctccacaatc

SEQ ID NO: 5408632 - DNA, 25 bp, Homo sapien
ctgtctggctcgcagactttggaga

SEQ ID NO: 5408633 - DNA, 25 bp, Homo sapien
ctctctgtctggctcgcagactttg

SEQ ID NO: 5408634 - DNA, 25 bp, Homo sapien
ttgcgcggaagggactggcggtgag

SEQ ID NO: 5408635 - DNA, 25 bp, Homo sapien
ggactggcggtgagctgtccatttc

SEQ ID NO: 5408636 - DNA, 25 bp, Homo sapien
aagggactggcggtgagctgtccat

SEQ ID NO: 5408637 - DNA, 25 bp, Homo sapien
gcggaagggactggcggtgagctgt

SEQ ID NO: 5408638 - DNA, 25 bp, Homo sapien
cagtacaatgttactttaggaagag

SEQ ID NO: 5408639 - DNA, 25 bp, Homo sapien
gtatatcctgaaatcacgtggtcct

SEQ ID NO: 5408640 - DNA, 25 bp, Homo sapien
ggagggcaagaggtatatcctgaaa

SEQ ID NO: 5408641 - DNA, 25 bp, Homo sapien
taggaagaggtaataggtcacaggg

SEQ ID NO: 5408642 - DNA, 25 bp, Homo sapien
gggactttctaccacagaatgagca

SEQ ID NO: 5408643 - DNA, 25 bp, Homo sapien
gatgttcggaacaaaatacctatac

SEQ ID NO: 5408644 - DNA, 25 bp, Homo sapien
tcatccagtgcatgtcaaagacagg

SEQ ID NO: 5408645 - DNA, 25 bp, Homo sapien
tacctatacgtttcatccagctgca

SEQ ID NO: 5408646 - DNA, 25 bp, Homo sapien
agatccctaaaatccagccaaattc

SEQ ID NO: 5408647 - DNA, 25 bp, Homo sapien
gatccctaaaatccagccaaattct

SEQ ID NO: 5408648 - DNA, 25 bp, Homo sapien
ttcatttggcaccatattctcttga

SEQ ID NO: 5408649 - DNA, 25 bp, Homo sapien
aaatgaatgcatttgcaacattcat

SEQ ID NO: 5408650 - DNA, 25 bp, Homo sapien
acattcatttggcaccatattctct

SEQ ID NO: 5408651 - DNA, 25 bp, Homo sapien
taaatgaatgcatttgcaacattca

SEQ ID NO: 5408652 - DNA, 25 bp, Homo sapien
tcacgaagcgggaactcagctggtt

SEQ ID NO: 5408653 - DNA, 25 bp, Homo sapien
gatggacttgttgttcacgaagcgg

SEQ ID NO: 5408654 - DNA, 25 bp, Homo sapien
tacaggcaaatctacacctctcgtt

SEQ ID NO: 5408655 - DNA, 25 bp, Homo sapien
tgttagccctggtatttgtaagaaa

SEQ ID NO: 5408656 - DNA, 25 bp, Homo sapien
gaagctccggcacttcttacctgat

SEQ ID NO: 5408657 - DNA, 25 bp, Homo sapien
ctgacctgtaagtagtatgtgctga

SEQ ID NO: 5408658 - DNA, 25 bp, Homo sapien
tggcaggcacaaacccgggcgccat

SEQ ID NO: 5408659 - DNA, 25 bp, Homo sapien
tcagagctggcagcgtgccacagat

SEQ ID NO: 5408660 - DNA, 25 bp, Homo sapien
cctcttgtgattaaactaatgggag

SEQ ID NO: 5408661 - DNA, 25 bp, Homo sapien
ttataataattcagagccctgtggc

SEQ ID NO: 5408662 - DNA, 25 bp, Homo sapien
cccctttttatggaacatgagccta

SEQ ID NO: 5408663 - DNA, 25 bp, Homo sapien
gccctgtggcttttacacaccgtta

SEQ ID NO: 5408664 - DNA, 25 bp, Homo sapien
tatccatagaagagatgtaagccat

SEQ ID NO: 5408665 - DNA, 25 bp, Homo sapien
tatgcagaatgtcacgaagcccagt

SEQ ID NO: 5408666 - DNA, 25 bp, Homo sapien
ggaaaacttgtcctatgagggtcaa

SEQ ID NO: 5408667 - DNA, 25 bp, Homo sapien
catcttagtggtatgactggttcct

SEQ ID NO: 5408668 - DNA, 25 bp, Homo sapien
gcaaagattgatccagctactcaca

SEQ ID NO: 5408669 - DNA, 25 bp, Homo sapien
ttatgctgtagctcaccctgtctgg

SEQ ID NO: 5408670 - DNA, 25 bp, Homo sapien
gaagagtcctacagattggaaggtc

SEQ ID NO: 5408671 - DNA, 25 bp, Homo sapien
ggcatgctctgaagctgtagttgaa

SEQ ID NO: 5408672 - DNA, 25 bp, Homo sapien
tattcgttcttatataagcctcatc

SEQ ID NO: 5408673 - DNA, 25 bp, Homo sapien
agcctcatcatagttccctggaata

SEQ ID NO: 5408674 - DNA, 25 bp, Homo sapien
taaattgtgtatgatataagtaact

SEQ ID NO: 5408675 - DNA, 25 bp, Homo sapien
ttatataagcctcatcatagttccc

SEQ ID NO: 5408676 - DNA, 25 bp, Homo sapien
gagcctttctagataaatgtgtcca

SEQ ID NO: 5408677 - DNA, 25 bp, Homo sapien
ttaccaaagctgaactctttccatg

SEQ ID NO: 5408678 - DNA, 25 bp, Homo sapien
tgtccatatgccagtgcggtttagg

SEQ ID NO: 5408679 - DNA, 25 bp, Homo sapien
ttccatgtttacaaggtagtctggg

SEQ ID NO: 5408680 - DNA, 25 bp, Homo sapien
cagggcaagctgatgtgttcacatc

SEQ ID NO: 5408681 - DNA, 25 bp, Homo sapien
tcctgctcagggaatctatgcaaag

SEQ ID NO: 5408682 - DNA, 25 bp, Homo sapien
tatgcttggacttgggttcccagcc

SEQ ID NO: 5408683 - DNA, 25 bp, Homo sapien
tgtagcacctatagccataactggc

SEQ ID NO: 5408684 - DNA, 25 bp, Homo sapien
gaaacattgttttatgaagtggctc

SEQ ID NO: 5408685 - DNA, 25 bp, Homo sapien
ttccatggtcttcatcagtatacca

SEQ ID NO: 5408686 - DNA, 25 bp, Homo sapien
tggtgtgctgtgctgctagctattc

SEQ ID NO: 5408687 - DNA, 25 bp, Homo sapien
gaagtggctcatgtgggtatatata

SEQ ID NO: 5408688 - DNA, 25 bp, Homo sapien
ctccaacatcgaccagggctttgga

SEQ ID NO: 5408689 - DNA, 25 bp, Homo sapien
aaatccactccaacatcgaccaggg

SEQ ID NO: 5408690 - DNA, 25 bp, Homo sapien
ccactccaacatcgaccagggcttt

SEQ ID NO: 5408691 - DNA, 25 bp, Homo sapien
gaaatccactccaacatcgaccagg

SEQ ID NO: 5408692 - DNA, 25 bp, Homo sapien
agtagtgaaattgcaaacctgtctg

SEQ ID NO: 5408693 - DNA, 25 bp, Homo sapien
cctgtctgtgatactaaaaagtcta

SEQ ID NO: 5408694 - DNA, 25 bp, Homo sapien
aattgcaaacctgtctgtgatacta

SEQ ID NO: 5408695 - DNA, 25 bp, Homo sapien
caaacctgtctgtgatactaaaaag

SEQ ID NO: 5408696 - DNA, 25 bp, Homo sapien
tccatgaataaggaggtactcaact

SEQ ID NO: 5408697 - DNA, 25 bp, Homo sapien
tgaataaggaggtactcaacttgtt

SEQ ID NO: 5408698 - DNA, 25 bp, Homo sapien
catgaataaggaggtactcaacttg

SEQ ID NO: 5408699 - DNA, 25 bp, Homo sapien
ttccatgaataaggaggtactcaac

SEQ ID NO: 5408700 - DNA, 25 bp, Homo sapien
tttgggagggggtgagctagagtct

SEQ ID NO: 5408701 - DNA, 25 bp, Homo sapien
taaaatactgtagtgcctttgggag

SEQ ID NO: 5408702 - DNA, 25 bp, Homo sapien
tgggagggggtgagctagagtctac

SEQ ID NO: 5408703 - DNA, 25 bp, Homo sapien
aaatactgtagtgcctttgggaggg

SEQ ID NO: 5408704 - DNA, 25 bp, Homo sapien
gcagcatctccatgggtttaaaagc

SEQ ID NO: 5408705 - DNA, 25 bp, Homo sapien
cagcatctccatgggtttaaaagca

SEQ ID NO: 5408706 - DNA, 25 bp, Homo sapien
tcctgttatgtgttgggcaggaaag

SEQ ID NO: 5408707 - DNA, 25 bp, Homo sapien
tggtcctgttatgtgttgggcagga

SEQ ID NO: 5408708 - DNA, 25 bp, Homo sapien
cctgcaactgcaagataagtgtgcc

SEQ ID NO: 5408709 - DNA, 25 bp, Homo sapien
tgagagacatacacccactttaagg

SEQ ID NO: 5408710 - DNA, 25 bp, Homo sapien
caactgtgcaccctggcttctcaat

SEQ ID NO: 5408711 - DNA, 25 bp, Homo sapien
aaaacaaaagcttcccctgcaactg

SEQ ID NO: 5408712 - DNA, 25 bp, Homo sapien
tgccgactccacagcatctctgagg

SEQ ID NO: 5408713 - DNA, 25 bp, Homo sapien
gatcggtccagtggcagtgccgact

SEQ ID NO: 5408714 - DNA, 25 bp, Homo sapien
tagaaacttccggagagccccgctg

SEQ ID NO: 5408715 - DNA, 25 bp, Homo sapien
ccaagaagaaccatctgtagctgct

SEQ ID NO: 5408716 - DNA, 25 bp, Homo sapien
taggagcccactccacaaggtgtgg

SEQ ID NO: 5408717 - DNA, 25 bp, Homo sapien
tctgctgggactgagacatattgca

SEQ ID NO: 5408718 - DNA, 25 bp, Homo sapien
tttagctcagatttgtcacccctcc

SEQ ID NO: 5408719 - DNA, 25 bp, Homo sapien
gcccatttagagcttccggtatcag

SEQ ID NO: 5408720 - DNA, 25 bp, Homo sapien
cttgcctcttgccagtagttggatg

SEQ ID NO: 5408721 - DNA, 25 bp, Homo sapien
ctttgaggtctggatatcctttaaa

SEQ ID NO: 5408722 - DNA, 25 bp, Homo sapien
cctcttgccagtagttggatgatta

SEQ ID NO: 5408723 - DNA, 25 bp, Homo sapien
tgcctcttgccagtagttggatgat

SEQ ID NO: 5408724 - DNA, 25 bp, Homo sapien
cgactcctggcgtggaaggattaaa

SEQ ID NO: 5408725 - DNA, 25 bp, Homo sapien
tgtgccaagaaaacccgactcctgg

SEQ ID NO: 5408726 - DNA, 25 bp, Homo sapien
taacacattgggaacctttagctcc

SEQ ID NO: 5408727 - DNA, 25 bp, Homo sapien
ggattaaacagtcctcgggtgccat

SEQ ID NO: 5408728 - DNA, 25 bp, Homo sapien
ctactacaggaagggtgccgaacac

SEQ ID NO: 5408729 - DNA, 25 bp, Homo sapien
gagagggctgtgtaagtttctgaat

SEQ ID NO: 5408730 - DNA, 25 bp, Homo sapien
ctgtgtaagtttctgaatgggtgga

SEQ ID NO: 5408731 - DNA, 25 bp, Homo sapien
tccaaaggggatgctactccactga

SEQ ID NO: 5408732 - DNA, 25 bp, Homo sapien
tataaaataggtataggtcctcatc

SEQ ID NO: 5408733 - DNA, 25 bp, Homo sapien
aaaataggtataggtcctcatctct

SEQ ID NO: 5408734 - DNA, 25 bp, Homo sapien
gttataaaataggtataggtcctca

SEQ ID NO: 5408735 - DNA, 25 bp, Homo sapien
ataggtataggtcctcatctcttac

SEQ ID NO: 5408736 - DNA, 25 bp, Homo sapien
tctgtaatggtcaaggttgtcttct

SEQ ID NO: 5408737 - DNA, 25 bp, Homo sapien
gagacccatgtaacgttctgtgtac

SEQ ID NO: 5408738 - DNA, 25 bp, Homo sapien
agttgggagacccatgtaacgttct

SEQ ID NO: 5408739 - DNA, 25 bp, Homo sapien
catgtaacgttctgtgtacactgag

SEQ ID NO: 5408740 - DNA, 25 bp, Homo sapien
gattacattaatatctgtctgctga

SEQ ID NO: 5408741 - DNA, 25 bp, Homo sapien
ttttggagatcagactgggattcac

SEQ ID NO: 5408742 - DNA, 25 bp, Homo sapien
tcagctactccatcatgatgcaagt

SEQ ID NO: 5408743 - DNA, 25 bp, Homo sapien
tgtatatccccatattggctcagct

SEQ ID NO: 5408744 - DNA, 25 bp, Homo sapien
gcgccacggctattccacacttgaa

SEQ ID NO: 5408745 - DNA, 25 bp, Homo sapien
catagtactcccaccgggatacagg

SEQ ID NO: 5408746 - DNA, 25 bp, Homo sapien
acttcccgatcccaggaccattgag

SEQ ID NO: 5408747 - DNA, 25 bp, Homo sapien
ttgaggttacgtaccctccatatga

SEQ ID NO: 5408748 - DNA, 25 bp, Homo sapien
aattgcaattcgtttgttgtccaca

SEQ ID NO: 5408749 - DNA, 25 bp, Homo sapien
attcgtttgttgtccacaaatccca

SEQ ID NO: 5408750 - DNA, 25 bp, Homo sapien
cccaaattgcaattcgtttgttgtc

SEQ ID NO: 5408751 - DNA, 25 bp, Homo sapien
tgcaattcgtttgttgtccacaaat

SEQ ID NO: 5408752 - DNA, 25 bp, Homo sapien
tctgtgcttgcaaggtaagtggccc

SEQ ID NO: 5408753 - DNA, 25 bp, Homo sapien
tgccatcaaagctagctactataat

SEQ ID NO: 5408754 - DNA, 25 bp, Homo sapien
tgctttttgactacatgggcctgca

SEQ ID NO: 5408755 - DNA, 25 bp, Homo sapien
cccagtcttctgttgattgcatgca

SEQ ID NO: 5408756 - DNA, 25 bp, Homo sapien
gatttatcaaaatgaggaggcaaga

SEQ ID NO: 5408757 - DNA, 25 bp, Homo sapien
ggaggcaagatcatctgataccaaa

SEQ ID NO: 5408758 - DNA, 25 bp, Homo sapien
acatctaatagtagaggatatttct

SEQ ID NO: 5408759 - DNA, 25 bp, Homo sapien
ctaatagtagaggatatttcttgga

SEQ ID NO: 5408760 - DNA, 25 bp, Homo sapien
tatccaaagctgaattgtcttccag

SEQ ID NO: 5408761 - DNA, 25 bp, Homo sapien
ttatccaaagctgaattgtcttcca

SEQ ID NO: 5408762 - DNA, 25 bp, Homo sapien
agagtatagaggggcagaccaggac

SEQ ID NO: 5408763 - DNA, 25 bp, Homo sapien
tatcattcacgctgctgtgtagagt

SEQ ID NO: 5408764 - DNA, 25 bp, Homo sapien
cattcacgctgctgtgtagagtata

SEQ ID NO: 5408765 - DNA, 25 bp, Homo sapien
ctttatcattcacgctgctgtgtag

SEQ ID NO: 5408766 - DNA, 25 bp, Homo sapien
aggcacagggctcagtagaatgaag

SEQ ID NO: 5408767 - DNA, 25 bp, Homo sapien
aaaggcacagggctcagtagaatga

SEQ ID NO: 5408768 - DNA, 25 bp, Homo sapien
gaagtaggaaatgaatctgtgccct

SEQ ID NO: 5408769 - DNA, 25 bp, Homo sapien
aggaaatgaatctgtgccctgctgg

SEQ ID NO: 5408770 - DNA, 25 bp, Homo sapien
caactgaggcatgtcacttttgtat

SEQ ID NO: 5408771 - DNA, 25 bp, Homo sapien
gaatagtactgacacctttccggat

SEQ ID NO: 5408772 - DNA, 25 bp, Homo sapien
ttccggattcagctcacaactgagg

SEQ ID NO: 5408773 - DNA, 25 bp, Homo sapien
taatacttcgcctctttactgaatg

SEQ ID NO: 5408774 - DNA, 25 bp, Homo sapien
ttataaagattccttcctcctggca

SEQ ID NO: 5408775 - DNA, 25 bp, Homo sapien
taaagattccttcctcctggcattc

SEQ ID NO: 5408776 - DNA, 25 bp, Homo sapien
ccttcctcctggcattcctttatat

SEQ ID NO: 5408777 - DNA, 25 bp, Homo sapien
ttcctcctggcattcctttatattc

SEQ ID NO: 5408778 - DNA, 25 bp, Homo sapien
ccatcgcttccgtgtccctcacccc

SEQ ID NO: 5408779 - DNA, 25 bp, Homo sapien
tccgtgtccctcacccccgagaagc

SEQ ID NO: 5408780 - DNA, 25 bp, Homo sapien
gcttccgtgtccctcacccccgaga

SEQ ID NO: 5408781 - DNA, 25 bp, Homo sapien
tccgccatcgcttccgtgtccctca

SEQ ID NO: 5408782 - DNA, 25 bp, Homo sapien
tttcttccttaattagagtgacaag

SEQ ID NO: 5408783 - DNA, 25 bp, Homo sapien
tcttccttaattagagtgacaagta

SEQ ID NO: 5408784 - DNA, 25 bp, Homo sapien
ttcttccttaattagagtgacaagt

SEQ ID NO: 5408785 - DNA, 25 bp, Homo sapien
tcactggttagagcttctatcccga

SEQ ID NO: 5408786 - DNA, 25 bp, Homo sapien
tagagcttctatcccgatgacttcc

SEQ ID NO: 5408787 - DNA, 25 bp, Homo sapien
agataatcactggttagagcttcta

SEQ ID NO: 5408788 - DNA, 25 bp, Homo sapien
ggttagagcttctatcccgatgact

SEQ ID NO: 5408789 - DNA, 25 bp, Homo sapien
tatttggaaatagcaaatgtgtctg

SEQ ID NO: 5408790 - DNA, 25 bp, Homo sapien
tttatctatttggaaatagcaaatg

SEQ ID NO: 5408791 - DNA, 25 bp, Homo sapien
ttttttatctatttggaaatagcaa

SEQ ID NO: 5408792 - DNA, 25 bp, Homo sapien
tatctatttggaaatagcaaatgtg

SEQ ID NO: 5408793 - DNA, 25 bp, Homo sapien
ttgtagaagctattaccatcaaggg

SEQ ID NO: 5408794 - DNA, 25 bp, Homo sapien
gatcttgtagaagctattaccatca

SEQ ID NO: 5408795 - DNA, 25 bp, Homo sapien
gctattaccatcaagggtaaaatga

SEQ ID NO: 5408796 - DNA, 25 bp, Homo sapien
tagaagctattaccatcaagggtaa

SEQ ID NO: 5408797 - DNA, 25 bp, Homo sapien
tcttccaacccagccagtagtactc

SEQ ID NO: 5408798 - DNA, 25 bp, Homo sapien
gccagtagtactcatttcaatgtgt

SEQ ID NO: 5408799 - DNA, 25 bp, Homo sapien
tactcatttcaatgtgttgccgtgc

SEQ ID NO: 5408800 - DNA, 25 bp, Homo sapien
ccaacccagccagtagtactcattt

SEQ ID NO: 5408801 - DNA, 25 bp, Homo sapien
gaagcagaacatccccattcagtct

SEQ ID NO: 5408802 - DNA, 25 bp, Homo sapien
atgttgctctagaagcagaacatcc

SEQ ID NO: 5408803 - DNA, 25 bp, Homo sapien
agaagcagaacatccccattcagtc

SEQ ID NO: 5408804 - DNA, 25 bp, Homo sapien
gcagaacatccccattcagtctcac

SEQ ID NO: 5408805 - DNA, 25 bp, Homo sapien
catcttccactggattcatcatagt

SEQ ID NO: 5408806 - DNA, 25 bp, Homo sapien
gattcatcatagtcacaaatatcca

SEQ ID NO: 5408807 - DNA, 25 bp, Homo sapien
cactggattcatcatagtcacaaat

SEQ ID NO: 5408808 - DNA, 25 bp, Homo sapien
tccactggattcatcatagtcacaa

SEQ ID NO: 5408809 - DNA, 25 bp, Homo sapien
accgaatagttctgaatcctcctga

SEQ ID NO: 5408810 - DNA, 25 bp, Homo sapien
tgtcacatcacacaagtagtgatcc

SEQ ID NO: 5408811 - DNA, 25 bp, Homo sapien
gaccgaatagttctgaatcctcctg

SEQ ID NO: 5408812 - DNA, 25 bp, Homo sapien
cccatgtcacatcacacaagtagtg

SEQ ID NO: 5408813 - DNA, 25 bp, Homo sapien
tttagcctgaagtggctgccaagct

SEQ ID NO: 5408814 - DNA, 25 bp, Homo sapien
tcttgctctttagcctgaagtggct

SEQ ID NO: 5408815 - DNA, 25 bp, Homo sapien
tgctctttagcctgaagtggctgcc

SEQ ID NO: 5408816 - DNA, 25 bp, Homo sapien
tctttagcctgaagtggctgccaag

SEQ ID NO: 5408817 - DNA, 25 bp, Homo sapien
gaaacagagacatctcatccagtct

SEQ ID NO: 5408818 - DNA, 25 bp, Homo sapien
gcaactgccactttccatgccggga

SEQ ID NO: 5408819 - DNA, 25 bp, Homo sapien
taaatgtcccctcatccacgatgtc

SEQ ID NO: 5408820 - DNA, 25 bp, Homo sapien
attgcactcatcacaaaccgccagg

SEQ ID NO: 5408821 - DNA, 25 bp, Homo sapien
caatgcaggggagctaaatgagaac

SEQ ID NO: 5408822 - DNA, 25 bp, Homo sapien
tgcccaatgcaggggagctaaatga

SEQ ID NO: 5408823 - DNA, 25 bp, Homo sapien
cccaatgcaggggagctaaatgaga

SEQ ID NO: 5408824 - DNA, 25 bp, Homo sapien
ctgcccaatgcaggggagctaaatg

SEQ ID NO: 5408825 - DNA, 25 bp, Homo sapien
tggaaaggtgaatacactttaccca

SEQ ID NO: 5408826 - DNA, 25 bp, Homo sapien
tgaatacactttacccaagaaaggc

SEQ ID NO: 5408827 - DNA, 25 bp, Homo sapien
tacactttacccaagaaaggcaata

SEQ ID NO: 5408828 - DNA, 25 bp, Homo sapien
gaatacactttacccaagaaaggca

SEQ ID NO: 5408829 - DNA, 25 bp, Homo sapien
tgtgatggtgccttcaggaatctga

SEQ ID NO: 5408830 - DNA, 25 bp, Homo sapien
gatgcttccgtactgctgtgatggt

SEQ ID NO: 5408831 - DNA, 25 bp, Homo sapien
agaaaatggatgcttccgtactgct

SEQ ID NO: 5408832 - DNA, 25 bp, Homo sapien
aaatggatgcttccgtactgctgtg

SEQ ID NO: 5408833 - DNA, 25 bp, Homo sapien
caaagaactttacagttggattcac

SEQ ID NO: 5408834 - DNA, 25 bp, Homo sapien
gatttgtatggaagttgcattggtg

SEQ ID NO: 5408835 - DNA, 25 bp, Homo sapien
gaagttgcattggtgactgagctga

SEQ ID NO: 5408836 - DNA, 25 bp, Homo sapien
ctatcaacatagaagcaggagcagt

SEQ ID NO: 5408837 - DNA, 25 bp, Homo sapien
gaaccactgtacaaacaggagcaca

SEQ ID NO: 5408838 - DNA, 25 bp, Homo sapien
gggattaaatgaaaccattctcttc

SEQ ID NO: 5408839 - DNA, 25 bp, Homo sapien
tctcttcccatcaaatcatggaacc

SEQ ID NO: 5408840 - DNA, 25 bp, Homo sapien
ttttcattagcaagaagggattaaa

SEQ ID NO: 5408841 - DNA, 25 bp, Homo sapien
tacagtctttgggtactgcagtgac

SEQ ID NO: 5408842 - DNA, 25 bp, Homo sapien
ctttggatatggaacccgtacagtc

SEQ ID NO: 5408843 - DNA, 25 bp, Homo sapien
caataagtgggacttctgtgtcgtt

SEQ ID NO: 5408844 - DNA, 25 bp, Homo sapien
gaaggagtattcaataagtgggact

SEQ ID NO: 5408845 - DNA, 25 bp, Homo sapien
accaccacagagcagagtaggcact

SEQ ID NO: 5408846 - DNA, 25 bp, Homo sapien
ccaccacagagcagagtaggcactg

SEQ ID NO: 5408847 - DNA, 25 bp, Homo sapien
acccagtcagttattccattatata

SEQ ID NO: 5408848 - DNA, 25 bp, Homo sapien
tcttctttccccgtccatgtgattc

SEQ ID NO: 5408849 - DNA, 25 bp, Homo sapien
taaacccagtcagttattccattat

SEQ ID NO: 5408850 - DNA, 25 bp, Homo sapien
cccgtccatgtgattctgtaacttg

SEQ ID NO: 5408851 - DNA, 25 bp, Homo sapien
tgacccactggtgaccatgtgaccc

SEQ ID NO: 5408852 - DNA, 25 bp, Homo sapien
tgtttggaatcctctcttctgtaat

SEQ ID NO: 5408853 - DNA, 25 bp, Homo sapien
caatttatgacccactggtgaccat

SEQ ID NO: 5408854 - DNA, 25 bp, Homo sapien
gtgtgttgtttggaatcctctcttc

SEQ ID NO: 5408855 - DNA, 25 bp, Homo sapien
tcatatgaagctgtgtaggaatgcc

SEQ ID NO: 5408856 - DNA, 25 bp, Homo sapien
taaatgtcatatgaagctgtgtagg

SEQ ID NO: 5408857 - DNA, 25 bp, Homo sapien
aagctgtgtaggaatgcctccattg

SEQ ID NO: 5408858 - DNA, 25 bp, Homo sapien
tatgaagctgtgtaggaatgcctcc

SEQ ID NO: 5408859 - DNA, 25 bp, Homo sapien
caggctttcactgtgtaacatgaag

SEQ ID NO: 5408860 - DNA, 25 bp, Homo sapien
ctttcactgtgtaacatgaagcaag

SEQ ID NO: 5408861 - DNA, 25 bp, Homo sapien
ggattcaggctttcactgtgtaaca

SEQ ID NO: 5408862 - DNA, 25 bp, Homo sapien
ctgtgtaacatgaagcaagtttctt

SEQ ID NO: 5408863 - DNA, 25 bp, Homo sapien
gaataatcattgatagaatgtccaa

SEQ ID NO: 5408864 - DNA, 25 bp, Homo sapien
aataatcattgatagaatgtccaaa

SEQ ID NO: 5408865 - DNA, 25 bp, Homo sapien
attgaataatcattgatagaatgtc

SEQ ID NO: 5408866 - DNA, 25 bp, Homo sapien
tgaataatcattgatagaatgtcca

SEQ ID NO: 5408867 - DNA, 25 bp, Homo sapien
ggagagaaagatccactttgccata

SEQ ID NO: 5408868 - DNA, 25 bp, Homo sapien
agagaaagatccactttgccatatg

SEQ ID NO: 5408869 - DNA, 25 bp, Homo sapien
gaagaggaatcgtcaaaggagacta

SEQ ID NO: 5408870 - DNA, 25 bp, Homo sapien
aagaggaatcgtcaaaggagactaa

SEQ ID NO: 5408871 - DNA, 25 bp, Homo sapien
tattcagcattgaataccaagatat

SEQ ID NO: 5408872 - DNA, 25 bp, Homo sapien
tccatattcagcattgaataccaag

SEQ ID NO: 5408873 - DNA, 25 bp, Homo sapien
ctgagctgtttccatattcagcatt

SEQ ID NO: 5408874 - DNA, 25 bp, Homo sapien
gagctgtttccatattcagcattga

SEQ ID NO: 5408875 - DNA, 25 bp, Homo sapien
tttgcgactgtcagctgtagcatca

SEQ ID NO: 5408876 - DNA, 25 bp, Homo sapien
tcagttagagtgtaagttttgcgac

SEQ ID NO: 5408877 - DNA, 25 bp, Homo sapien
ggagtataacttcagtctataagta

SEQ ID NO: 5408878 - DNA, 25 bp, Homo sapien
tgaaatccatcttaaggagtataac

SEQ ID NO: 5408879 - DNA, 25 bp, Homo sapien
gatgaaggtctttggctgcttgcat

SEQ ID NO: 5408880 - DNA, 25 bp, Homo sapien
cagatgaaggtctttggctgcttgc

SEQ ID NO: 5408881 - DNA, 25 bp, Homo sapien
agcagatgaaggtctttggctgctt

SEQ ID NO: 5408882 - DNA, 25 bp, Homo sapien
agatgaaggtctttggctgcttgca

SEQ ID NO: 5408883 - DNA, 25 bp, Homo sapien
tgaatgtcccttcatcctgtggcta

SEQ ID NO: 5408884 - DNA, 25 bp, Homo sapien
gttccacgggatatccttgctttga

SEQ ID NO: 5408885 - DNA, 25 bp, Homo sapien
taagagagtagtatagttccacggg

SEQ ID NO: 5408886 - DNA, 25 bp, Homo sapien
tgctcgttacggcacataactgtgg

SEQ ID NO: 5408887 - DNA, 25 bp, Homo sapien
tatggcgccaaagcctgtggttaca

SEQ ID NO: 5408888 - DNA, 25 bp, Homo sapien
ttactatactacctgcgtctggagc

SEQ ID NO: 5408889 - DNA, 25 bp, Homo sapien
tgactaaatgactcactggcccgtg

SEQ ID NO: 5408890 - DNA, 25 bp, Homo sapien
cattaggccgtgaaatccgaggtga

SEQ ID NO: 5408891 - DNA, 25 bp, Homo sapien
tggcttcctagaaggtaacttccta

SEQ ID NO: 5408892 - DNA, 25 bp, Homo sapien
tccatgggaatacccaataactttc

SEQ ID NO: 5408893 - DNA, 25 bp, Homo sapien
tagaattttccctctggacagtaag

SEQ ID NO: 5408894 - DNA, 25 bp, Homo sapien
taagaaggatggcaactctgtggct

SEQ ID NO: 5408895 - DNA, 25 bp, Homo sapien
gacaaacttctcaaataaacagtct

SEQ ID NO: 5408896 - DNA, 25 bp, Homo sapien
atccccaagccatctggacaaactt

SEQ ID NO: 5408897 - DNA, 25 bp, Homo sapien
taaacagtctacattcatggccttc

SEQ ID NO: 5408898 - DNA, 25 bp, Homo sapien
tggccttcattttcccactattcct

SEQ ID NO: 5408899 - DNA, 25 bp, Homo sapien
gctccaactgtcctatctttttcaa

SEQ ID NO: 5408900 - DNA, 25 bp, Homo sapien
gtcctatctttttcaaatgtttcaa

SEQ ID NO: 5408901 - DNA, 25 bp, Homo sapien
tgtcctatctttttcaaatgtttca

SEQ ID NO: 5408902 - DNA, 25 bp, Homo sapien
tgagctccaactgtcctatcttttt

SEQ ID NO: 5408903 - DNA, 25 bp, Homo sapien
cagaaccacgggcacggtgatgatg

SEQ ID NO: 5408904 - DNA, 25 bp, Homo sapien
atgatggtgacaagcgcagcagcac

SEQ ID NO: 5408905 - DNA, 25 bp, Homo sapien
gatgatggtgacaagcgcagcagca

SEQ ID NO: 5408906 - DNA, 25 bp, Homo sapien
tttgttcagcagaaccacgggcacg

SEQ ID NO: 5408907 - DNA, 25 bp, Homo sapien
gatcaagtccaattagagggaagcg

SEQ ID NO: 5408908 - DNA, 25 bp, Homo sapien
aagcgtgtggccccagtttccgtag

SEQ ID NO: 5408909 - DNA, 25 bp, Homo sapien
ctgcaagccgagcagatcaagtcca

SEQ ID NO: 5408910 - DNA, 25 bp, Homo sapien
caattagagggaagcgtgtggcccc

SEQ ID NO: 5408911 - DNA, 25 bp, Homo sapien
agctcgacgccagggtcctagcaga

SEQ ID NO: 5408912 - DNA, 25 bp, Homo sapien
ccagggtccgaaagctaagcgagag

SEQ ID NO: 5408913 - DNA, 25 bp, Homo sapien
tctgtgagtggctctccgggacatt

SEQ ID NO: 5408914 - DNA, 25 bp, Homo sapien
tagcagaagccagggtccgaaagct

SEQ ID NO: 5408915 - DNA, 25 bp, Homo sapien
ggagtttggcgaagaggtccccaca

SEQ ID NO: 5408916 - DNA, 25 bp, Homo sapien
ccagcttttgggccatttggggagt

SEQ ID NO: 5408917 - DNA, 25 bp, Homo sapien
gagtccctggtccggtttcgccagc

SEQ ID NO: 5408918 - DNA, 25 bp, Homo sapien
gggacgtacgtggcgcggcactcac

SEQ ID NO: 5408919 - DNA, 25 bp, Homo sapien
ttagctaaaaatgacgtcggcgttc

SEQ ID NO: 5408920 - DNA, 25 bp, Homo sapien
cgtctcctcggaagtgagcgttcag

SEQ ID NO: 5408921 - DNA, 25 bp, Homo sapien
cgagcccgctgggtataaaggcgcc

SEQ ID NO: 5408922 - DNA, 25 bp, Homo sapien
ttaaacattagtgagcgccgagccc

SEQ ID NO: 5408923 - DNA, 25 bp, Homo sapien
taagaattatgttcactggctagat

SEQ ID NO: 5408924 - DNA, 25 bp, Homo sapien
ggcatgcacctctacctgaaactgc

SEQ ID NO: 5408925 - DNA, 25 bp, Homo sapien
ccttgtggcagtctagtaataagaa

SEQ ID NO: 5408926 - DNA, 25 bp, Homo sapien
gaattttttgtaccctgatatacag

SEQ ID NO: 5408927 - DNA, 25 bp, Homo sapien
gaagcagttaatggggctttgagaa

SEQ ID NO: 5408928 - DNA, 25 bp, Homo sapien
tacagtaatatgcatctaaatagag

SEQ ID NO: 5408929 - DNA, 25 bp, Homo sapien
aaacatatgacccttaagcttcaca

SEQ ID NO: 5408930 - DNA, 25 bp, Homo sapien
ctcatagctgtttcttcaatcatcc

SEQ ID NO: 5408931 - DNA, 25 bp, Homo sapien
cccgactgtccaactttggcccagg

SEQ ID NO: 5408932 - DNA, 25 bp, Homo sapien
tcagcccgactgtccaactttggcc

SEQ ID NO: 5408933 - DNA, 25 bp, Homo sapien
cctcagcccgactgtccaactttgg

SEQ ID NO: 5408934 - DNA, 25 bp, Homo sapien
ggcccaggcttgtccatgcacttct

SEQ ID NO: 5408935 - DNA, 25 bp, Homo sapien
atccatcccaggacaaccatgcttg

SEQ ID NO: 5408936 - DNA, 25 bp, Homo sapien
aatccatcccaggacaaccatgctt

SEQ ID NO: 5408937 - DNA, 25 bp, Homo sapien
tgaaactggatcctgacaacaaagt

SEQ ID NO: 5408938 - DNA, 25 bp, Homo sapien
taacttagaagcatctccaaaggca

SEQ ID NO: 5408939 - DNA, 25 bp, Homo sapien
caaagttcaagaattattgtcggct

SEQ ID NO: 5408940 - DNA, 25 bp, Homo sapien
tgtcggcttctctgcataacttaga

SEQ ID NO: 5408941 - DNA, 25 bp, Homo sapien
ttgaaggcaacagagagtagggata

SEQ ID NO: 5408942 - DNA, 25 bp, Homo sapien
tcatgcagttcatagagcctgccaa

SEQ ID NO: 5408943 - DNA, 25 bp, Homo sapien
catgtgaaatgaaggatcagctcgc

SEQ ID NO: 5408944 - DNA, 25 bp, Homo sapien
ctctgtatggcaagtcttgagggat

SEQ ID NO: 5408945 - DNA, 25 bp, Homo sapien
taattaagaccgaaagctgaggaca

SEQ ID NO: 5408946 - DNA, 25 bp, Homo sapien
acatgaccaaggtggcactctgcca

SEQ ID NO: 5408947 - DNA, 25 bp, Homo sapien
tctgcatggagaaacataccgtgct

SEQ ID NO: 5408948 - DNA, 25 bp, Homo sapien
cagttaaaagggctcatcattaggc

SEQ ID NO: 5408949 - DNA, 25 bp, Homo sapien
cactggactgactgggtcaataaac

SEQ ID NO: 5408950 - DNA, 25 bp, Homo sapien
tacaaacacagtagagccaaatgtc

SEQ ID NO: 5408951 - DNA, 25 bp, Homo sapien
gaaggtccagtgcagagcgaagtct

SEQ ID NO: 5408952 - DNA, 25 bp, Homo sapien
gatgatctaggcaatgtgttacagg

SEQ ID NO: 5408953 - DNA, 25 bp, Homo sapien
tgtggaggaccatgaaggttcgata

SEQ ID NO: 5408954 - DNA, 25 bp, Homo sapien
tggaaaaggtgtctaaggcagcagc

SEQ ID NO: 5408955 - DNA, 25 bp, Homo sapien
tactggaaaaggtgtctaaggcagc

SEQ ID NO: 5408956 - DNA, 25 bp, Homo sapien
catgaaggttcgatactggaaaagg

SEQ ID NO: 5408957 - DNA, 25 bp, Homo sapien
ataggatgcattaacccaggacagg

SEQ ID NO: 5408958 - DNA, 25 bp, Homo sapien
tggaaagcccgaagccagtacaaga

SEQ ID NO: 5408959 - DNA, 25 bp, Homo sapien
tacaggatgcccgtgaaagtgccca

SEQ ID NO: 5408960 - DNA, 25 bp, Homo sapien
cttgggccacccataataggatgca

SEQ ID NO: 5408961 - DNA, 25 bp, Homo sapien
ctgcacatcaagtgcaaattcttta

SEQ ID NO: 5408962 - DNA, 25 bp, Homo sapien
ttctttagcatggcttttgaggcct

SEQ ID NO: 5408963 - DNA, 25 bp, Homo sapien
gcacatcaagtgcaaattctttagc

SEQ ID NO: 5408964 - DNA, 25 bp, Homo sapien
aattctttagcatggcttttgaggc

SEQ ID NO: 5408965 - DNA, 25 bp, Homo sapien
gcttccatctgctggttatctcaca

SEQ ID NO: 5408966 - DNA, 25 bp, Homo sapien
tgctggttatctcacaaaatgtaga

SEQ ID NO: 5408967 - DNA, 25 bp, Homo sapien
gggccctaccagtgtgaggaaccat

SEQ ID NO: 5408968 - DNA, 25 bp, Homo sapien
gaaccatgattttggtatgatgttg

SEQ ID NO: 5408969 - DNA, 25 bp, Homo sapien
cttcagttgaattctgttgcctaca

SEQ ID NO: 5408970 - DNA, 25 bp, Homo sapien
tctgttgcctacataatttgacatg

SEQ ID NO: 5408971 - DNA, 25 bp, Homo sapien
taatttgacatgtgagacaaggagg

SEQ ID NO: 5408972 - DNA, 25 bp, Homo sapien
catgtgagacaaggagggatgctat

SEQ ID NO: 5408973 - DNA, 25 bp, Homo sapien
ggcttggcaatcactatcagactgt

SEQ ID NO: 5408974 - DNA, 25 bp, Homo sapien
aaggagaacggctacaaggcatgat

SEQ ID NO: 5408975 - DNA, 25 bp, Homo sapien
ctacaaggcatgatgggcaaactca

SEQ ID NO: 5408976 - DNA, 25 bp, Homo sapien
tcccaaggtattggccattgcagga

SEQ ID NO: 5408977 - DNA, 25 bp, Homo sapien
cctattattataatgcagatatgtc

SEQ ID NO: 5408978 - DNA, 25 bp, Homo sapien
tcagatcggaataatttacatttac

SEQ ID NO: 5408979 - DNA, 25 bp, Homo sapien
gatacattgaaagctgagtattttt

SEQ ID NO: 5408980 - DNA, 25 bp, Homo sapien
tccaatttcaccactgtggctacca

SEQ ID NO: 5408981 - DNA, 25 bp, Homo sapien
ctagcaggtgatgttgtgaagatga

SEQ ID NO: 5408982 - DNA, 25 bp, Homo sapien
ttttggctacacaacactaaaagaa

SEQ ID NO: 5408983 - DNA, 25 bp, Homo sapien
catttcaaacatcccacgtggctag

SEQ ID NO: 5408984 - DNA, 25 bp, Homo sapien
tattggcatgcaaagcaatgtggcc

SEQ ID NO: 5408985 - DNA, 25 bp, Homo sapien
ataagatgatatcattaacttatcc

SEQ ID NO: 5408986 - DNA, 25 bp, Homo sapien
tataataagatgatatcattaactt

SEQ ID NO: 5408987 - DNA, 25 bp, Homo sapien
acataattataataagatgatatca

SEQ ID NO: 5408988 - DNA, 25 bp, Homo sapien
cataattataataagatgatatcat

SEQ ID NO: 5408989 - DNA, 25 bp, Homo sapien
tctgcggccaagttcttcaacaatg

SEQ ID NO: 5408990 - DNA, 25 bp, Homo sapien
aacaatggcgacctcttctgggaaa

SEQ ID NO: 5408991 - DNA, 25 bp, Homo sapien
agtccctggcggcaagattatcaag

SEQ ID NO: 5408992 - DNA, 25 bp, Homo sapien
ccatcagcatgtctgcggccaagtt

SEQ ID NO: 5408993 - DNA, 25 bp, Homo sapien
gatcacagattgtctaccactggta

SEQ ID NO: 5408994 - DNA, 25 bp, Homo sapien
tatcctataaaaccagagcttgcag

SEQ ID NO: 5408995 - DNA, 25 bp, Homo sapien
tacctgataaaaacccatgtggacc

SEQ ID NO: 5408996 - DNA, 25 bp, Homo sapien
gctgggatctaataccaagcctgca

SEQ ID NO: 5408997 - DNA, 25 bp, Homo sapien
gatacaaatgtaacctgtttggctc

SEQ ID NO: 5408998 - DNA, 25 bp, Homo sapien
cctatttactctcagaggtggcctg

SEQ ID NO: 5408999 - DNA, 25 bp, Homo sapien
tagctcccctagaacagtcctagtt

SEQ ID NO: 5409000 - DNA, 25 bp, Homo sapien
tagtagatatctatatgacagcccc

SEQ ID NO: 5409001 - DNA, 25 bp, Homo sapien
aatgaattccttggcagcttggcct

SEQ ID NO: 5409002 - DNA, 25 bp, Homo sapien
gccttcctcggcctttcaccagcca

SEQ ID NO: 5409003 - DNA, 25 bp, Homo sapien
gccaagcaatgaattccttggcagc

SEQ ID NO: 5409004 - DNA, 25 bp, Homo sapien
caccagccaagcaatgaattccttg

SEQ ID NO: 5409005 - DNA, 25 bp, Homo sapien
tctctcaaattcatcgtgacgtttg

SEQ ID NO: 5409006 - DNA, 25 bp, Homo sapien
tcatcgtgacgtttggcaatgttat

SEQ ID NO: 5409007 - DNA, 25 bp, Homo sapien
atcactggtaaaggtcccttcagca

SEQ ID NO: 5409008 - DNA, 25 bp, Homo sapien
ggtcccttcagcatgtctctcaaat

SEQ ID NO: 5409009 - DNA, 25 bp, Homo sapien
ggttctcacctataagcagtggcaa

SEQ ID NO: 5409010 - DNA, 25 bp, Homo sapien
tcacctataagcagtggcaactttg

SEQ ID NO: 5409011 - DNA, 25 bp, Homo sapien
aatatggttctcacctataagcagt

SEQ ID NO: 5409012 - DNA, 25 bp, Homo sapien
cctataagcagtggcaactttgggt

SEQ ID NO: 5409013 - DNA, 25 bp, Homo sapien
gagtccagatacttgctgtagtcac

SEQ ID NO: 5409014 - DNA, 25 bp, Homo sapien
gcttgtcctcgttcatctgatcagg

SEQ ID NO: 5409015 - DNA, 25 bp, Homo sapien
tgtgccctgtgaatggcgcttgtcc

SEQ ID NO: 5409016 - DNA, 25 bp, Homo sapien
tgtagtcactggtgaatgtgccctg

SEQ ID NO: 5409017 - DNA, 25 bp, Homo sapien
tacaaataatccagccacaaagtaa

SEQ ID NO: 5409018 - DNA, 25 bp, Homo sapien
tctgtgtcttgaagggaacgttgcc

SEQ ID NO: 5409019 - DNA, 25 bp, Homo sapien
ctgtgtcttgaagggaacgttgcca

SEQ ID NO: 5409020 - DNA, 25 bp, Homo sapien
gctgccttgtaccagcattacaaat

SEQ ID NO: 5409021 - DNA, 25 bp, Homo sapien
cctcactatcagtctggctttcaat

SEQ ID NO: 5409022 - DNA, 25 bp, Homo sapien
atgccacccccctcactatcagtct

SEQ ID NO: 5409023 - DNA, 25 bp, Homo sapien
ggctttcaattaatagtccttcact

SEQ ID NO: 5409024 - DNA, 25 bp, Homo sapien
tcaattaatagtccttcacttccaa

SEQ ID NO: 5409025 - DNA, 25 bp, Homo sapien
gctctgtgtcctaagctctgtactt

SEQ ID NO: 5409026 - DNA, 25 bp, Homo sapien
tgctctgtgtcctaagctctgtact

SEQ ID NO: 5409027 - DNA, 25 bp, Homo sapien
ccaaggcgcactgcttttatatact

SEQ ID NO: 5409028 - DNA, 25 bp, Homo sapien
cagatattacgctgacaatataaat

SEQ ID NO: 5409029 - DNA, 25 bp, Homo sapien
gtttagcctcacagatattacgctg

SEQ ID NO: 5409030 - DNA, 25 bp, Homo sapien
tgcaccaaggcgcactgcttttata

SEQ ID NO: 5409031 - DNA, 25 bp, Homo sapien
tcttgatctgagacctgcttcttgg

SEQ ID NO: 5409032 - DNA, 25 bp, Homo sapien
ggtgtcttgatctgagacctgcttc

SEQ ID NO: 5409033 - DNA, 25 bp, Homo sapien
tgtcttgatctgagacctgcttctt

SEQ ID NO: 5409034 - DNA, 25 bp, Homo sapien
ctggtgtcttgatctgagacctgct

SEQ ID NO: 5409035 - DNA, 25 bp, Homo sapien
ccatctgtagttccacggtcatggt

SEQ ID NO: 5409036 - DNA, 25 bp, Homo sapien
tgatatcttgcaagtgtcccccacc

SEQ ID NO: 5409037 - DNA, 25 bp, Homo sapien
gacattggtgagaagacatcaagaa

SEQ ID NO: 5409038 - DNA, 25 bp, Homo sapien
ttccacggtcatggtgtggaagctg

SEQ ID NO: 5409039 - DNA, 25 bp, Homo sapien
atgtgtgaggtggagctatgtggcc

SEQ ID NO: 5409040 - DNA, 25 bp, Homo sapien
accacagaacatcccttcctgatgt

SEQ ID NO: 5409041 - DNA, 25 bp, Homo sapien
agttaggggcaatggtttcagaaag

SEQ ID NO: 5409042 - DNA, 25 bp, Homo sapien
ctatgtggcctgagttaggggcaat

SEQ ID NO: 5409043 - DNA, 25 bp, Homo sapien
aacaatatttagcttgaacttctga

SEQ ID NO: 5409044 - DNA, 25 bp, Homo sapien
aaaataagcaaactgtctgaggggt

SEQ ID NO: 5409045 - DNA, 25 bp, Homo sapien
aatatttagcttgaacttctgagtc

SEQ ID NO: 5409046 - DNA, 25 bp, Homo sapien
taagcaaactgtctgaggggtttat

SEQ ID NO: 5409047 - DNA, 25 bp, Homo sapien
tcatgtgggtgtataagtggttcgt

SEQ ID NO: 5409048 - DNA, 25 bp, Homo sapien
tgctttaggaagtgggtcatgtggg

SEQ ID NO: 5409049 - DNA, 25 bp, Homo sapien
aagccgtggttctggtcagagtacc

SEQ ID NO: 5409050 - DNA, 25 bp, Homo sapien
gacaggccggataagccgtggttct

SEQ ID NO: 5409051 - DNA, 25 bp, Homo sapien
aaatccacttgtgcattaaccagag

SEQ ID NO: 5409052 - DNA, 25 bp, Homo sapien
tccacttgtgcattaaccagagctt

SEQ ID NO: 5409053 - DNA, 25 bp, Homo sapien
tgcattaaccagagctttagcaatc

SEQ ID NO: 5409054 - DNA, 25 bp, Homo sapien
cttgtgcattaaccagagctttagc

SEQ ID NO: 5409055 - DNA, 25 bp, Homo sapien
atctgctgttccgtggatgagaaga

SEQ ID NO: 5409056 - DNA, 25 bp, Homo sapien
tgctcaagattatcatcctttgttg

SEQ ID NO: 5409057 - DNA, 25 bp, Homo sapien
tagtgctcaagattatcatcctttg

SEQ ID NO: 5409058 - DNA, 25 bp, Homo sapien
cttatagtgctcaagattatcatcc

SEQ ID NO: 5409059 - DNA, 25 bp, Homo sapien
tcaagattatcatcctttgttggga

SEQ ID NO: 5409060 - DNA, 25 bp, Homo sapien
agatgcaagggccagtgatgaaacg

SEQ ID NO: 5409061 - DNA, 25 bp, Homo sapien
caagggccagtgatgaaacgtatcc

SEQ ID NO: 5409062 - DNA, 25 bp, Homo sapien
gtgatgaaacgtatcctccatagga

SEQ ID NO: 5409063 - DNA, 25 bp, Homo sapien
gccagtgatgaaacgtatcctccat

SEQ ID NO: 5409064 - DNA, 25 bp, Homo sapien
tctactcacaatccggactgaaggg

SEQ ID NO: 5409065 - DNA, 25 bp, Homo sapien
tcctgggaacgtggactaagcagtt

SEQ ID NO: 5409066 - DNA, 25 bp, Homo sapien
tgccctgatgcaagaacgtccctaa

SEQ ID NO: 5409067 - DNA, 25 bp, Homo sapien
tgcatcctcggcagcaagcttcaga

SEQ ID NO: 5409068 - DNA, 25 bp, Homo sapien
ggctatggagtcagtaagcagcaga

SEQ ID NO: 5409069 - DNA, 25 bp, Homo sapien
tgtcaatgaatgtagcccagcactg

SEQ ID NO: 5409070 - DNA, 25 bp, Homo sapien
ggacacttgtctcagcaacccatgc

SEQ ID NO: 5409071 - DNA, 25 bp, Homo sapien
tactttgtgcaatcctcacggtgtc

SEQ ID NO: 5409072 - DNA, 25 bp, Homo sapien
aatctcctggtactagtgggacaca

SEQ ID NO: 5409073 - DNA, 25 bp, Homo sapien
caaaacatgggaacaaggaagcaca

SEQ ID NO: 5409074 - DNA, 25 bp, Homo sapien
caattctagctttgggctcagaaac

SEQ ID NO: 5409075 - DNA, 25 bp, Homo sapien
gagaaatgcaaagagctactggagc

SEQ ID NO: 5409076 - DNA, 25 bp, Homo sapien
aatgaaacccatttctatgaatttt

SEQ ID NO: 5409077 - DNA, 25 bp, Homo sapien
ccagccccatatggctattcttttt

SEQ ID NO: 5409078 - DNA, 25 bp, Homo sapien
cttttttcatcaatgaaacccattt

SEQ ID NO: 5409079 - DNA, 25 bp, Homo sapien
tcaatgaaacccatttctatgaatt

SEQ ID NO: 5409080 - DNA, 25 bp, Homo sapien
ttttagaatgttaagtgtatacaca

SEQ ID NO: 5409081 - DNA, 25 bp, Homo sapien
cgacactgattctgaaggacactga

SEQ ID NO: 5409082 - DNA, 25 bp, Homo sapien
ccgacactgattctgaaggacactg

SEQ ID NO: 5409083 - DNA, 25 bp, Homo sapien
caaataacaggtgatacatgggaac

SEQ ID NO: 5409084 - DNA, 25 bp, Homo sapien
gatacatgggaacaggaaactctta

SEQ ID NO: 5409085 - DNA, 25 bp, Homo sapien
gggtaaagagcaaataacaggtgat

SEQ ID NO: 5409086 - DNA, 25 bp, Homo sapien
taacagctctcttcctaggtttatt

SEQ ID NO: 5409087 - DNA, 25 bp, Homo sapien
gaggagtttgtcaccttggaaagct

SEQ ID NO: 5409088 - DNA, 25 bp, Homo sapien
cacccagctttcgatacactgcata

SEQ ID NO: 5409089 - DNA, 25 bp, Homo sapien
ttcgatacactgcatagaggagttt

SEQ ID NO: 5409090 - DNA, 25 bp, Homo sapien
ttggaaagctgttcctcgaccatcc

SEQ ID NO: 5409091 - DNA, 25 bp, Homo sapien
tccttacttgcaagataagatatcc

SEQ ID NO: 5409092 - DNA, 25 bp, Homo sapien
cagcaaatacagaccttacactctg

SEQ ID NO: 5409093 - DNA, 25 bp, Homo sapien
agaccttacactctgactgcaggga

SEQ ID NO: 5409094 - DNA, 25 bp, Homo sapien
cttacttgcaagataagatatccaa

SEQ ID NO: 5409095 - DNA, 25 bp, Homo sapien
tagcaagggatacttctttgatctg

SEQ ID NO: 5409096 - DNA, 25 bp, Homo sapien
agggatacttctttgatctgtcaaa

SEQ ID NO: 5409097 - DNA, 25 bp, Homo sapien
cttgaattagcaagggatacttctt

SEQ ID NO: 5409098 - DNA, 25 bp, Homo sapien
ttctttgatctgtcaaattgaggag

SEQ ID NO: 5409099 - DNA, 25 bp, Homo sapien
cctgtaatattaatagatcgcagaa

SEQ ID NO: 5409100 - DNA, 25 bp, Homo sapien
aaggtataagatcaaccatgttcac

SEQ ID NO: 5409101 - DNA, 25 bp, Homo sapien
cattccacagcactagtagcatcat

SEQ ID NO: 5409102 - DNA, 25 bp, Homo sapien
gatcgcagaatttgcactgtaacat

SEQ ID NO: 5409103 - DNA, 25 bp, Homo sapien
cctctttaggcagctggatattttt

SEQ ID NO: 5409104 - DNA, 25 bp, Homo sapien
ttcctctttaggcagctggatattt

SEQ ID NO: 5409105 - DNA, 25 bp, Homo sapien
tctttaggcagctggatatttttca

SEQ ID NO: 5409106 - DNA, 25 bp, Homo sapien
ctttaggcagctggatatttttcaa

SEQ ID NO: 5409107 - DNA, 25 bp, Homo sapien
ctgtctctgatcttcatcctctctc

SEQ ID NO: 5409108 - DNA, 25 bp, Homo sapien
cttcatcctctctcaacttcttagg

SEQ ID NO: 5409109 - DNA, 25 bp, Homo sapien
atcctctctcaacttcttagggacc

SEQ ID NO: 5409110 - DNA, 25 bp, Homo sapien
tcatcctctctcaacttcttaggga

SEQ ID NO: 5409111 - DNA, 25 bp, Homo sapien
tagatacttggacaactctgctgcg

SEQ ID NO: 5409112 - DNA, 25 bp, Homo sapien
tcagggcgttcatacgtggcaacaa

SEQ ID NO: 5409113 - DNA, 25 bp, Homo sapien
tctgctgcgagcaaaactggtcgtc

SEQ ID NO: 5409114 - DNA, 25 bp, Homo sapien
tccagggacaatcgcaggcatgagt

SEQ ID NO: 5409115 - DNA, 25 bp, Homo sapien
aaagctggtgtgacagtcaccctct

SEQ ID NO: 5409116 - DNA, 25 bp, Homo sapien
aagctggtgtgacagtcaccctctg

SEQ ID NO: 5409117 - DNA, 25 bp, Homo sapien
ggtgtgacagtcaccctctgctctg

SEQ ID NO: 5409118 - DNA, 25 bp, Homo sapien
agctggtgtgacagtcaccctctgc

SEQ ID NO: 5409119 - DNA, 25 bp, Homo sapien
tgtgataacaggattccatcgcagt

SEQ ID NO: 5409120 - DNA, 25 bp, Homo sapien
tccatcgcagttccccttggtggtg

SEQ ID NO: 5409121 - DNA, 25 bp, Homo sapien
cccaaataatatccaaatctgtgca

SEQ ID NO: 5409122 - DNA, 25 bp, Homo sapien
aatttcataggatcatatttgaccc

SEQ ID NO: 5409123 - DNA, 25 bp, Homo sapien
cttgatcagtgcgtccatcatgaag

SEQ ID NO: 5409124 - DNA, 25 bp, Homo sapien
tcagtgcgtccatcatgaagggtgg

SEQ ID NO: 5409125 - DNA, 25 bp, Homo sapien
cagtgcgtccatcatgaagggtgga

SEQ ID NO: 5409126 - DNA, 25 bp, Homo sapien
gatcagtgcgtccatcatgaagggt

SEQ ID NO: 5409127 - DNA, 25 bp, Homo sapien
gccctgtcatacctatatttgtgta

SEQ ID NO: 5409128 - DNA, 25 bp, Homo sapien
ctgccctgtcatacctatatttgtg

SEQ ID NO: 5409129 - DNA, 25 bp, Homo sapien
cctgtcatacctatatttgtgtaag

SEQ ID NO: 5409130 - DNA, 25 bp, Homo sapien
catacctatatttgtgtaagtataa

SEQ ID NO: 5409131 - DNA, 25 bp, Homo sapien
ggaaattaccatactgccgaggaag

SEQ ID NO: 5409132 - DNA, 25 bp, Homo sapien
gacttactaaccatccctcgggaga

SEQ ID NO: 5409133 - DNA, 25 bp, Homo sapien
gaaggtgtgatcctagtggcctaaa

SEQ ID NO: 5409134 - DNA, 25 bp, Homo sapien
gattaaaagaatgtagcccctgcct

SEQ ID NO: 5409135 - DNA, 25 bp, Homo sapien
gaagtggcatgttagggtagccttc

SEQ ID NO: 5409136 - DNA, 25 bp, Homo sapien
ttgtgctatcttcaagggagaattt

SEQ ID NO: 5409137 - DNA, 25 bp, Homo sapien
gtccacgtagtcaaatgagctgcag

SEQ ID NO: 5409138 - DNA, 25 bp, Homo sapien
cttcattctggttccctttatgaga

SEQ ID NO: 5409139 - DNA, 25 bp, Homo sapien
cgacgtgggcatctcgggtttccaa

SEQ ID NO: 5409140 - DNA, 25 bp, Homo sapien
gacaaaggttcatcttctatcccca

SEQ ID NO: 5409141 - DNA, 25 bp, Homo sapien
gaaactacagtttgaggaatgattg

SEQ ID NO: 5409142 - DNA, 25 bp, Homo sapien
ggaatgattgacctccgacgtgggc

SEQ ID NO: 5409143 - DNA, 25 bp, Homo sapien
ctggatgtgagagtttgatatttct

SEQ ID NO: 5409144 - DNA, 25 bp, Homo sapien
gtgaggaggatgacaaccatgcctg

SEQ ID NO: 5409145 - DNA, 25 bp, Homo sapien
aggaggatgacaaccatgcctgtgg

SEQ ID NO: 5409146 - DNA, 25 bp, Homo sapien
tgctcattaactgtagctacgaatt

SEQ ID NO: 5409147 - DNA, 25 bp, Homo sapien
ctgtagctacgaattgatcagatag

SEQ ID NO: 5409148 - DNA, 25 bp, Homo sapien
cgtagtcgctgaaacttgctgtgta

SEQ ID NO: 5409149 - DNA, 25 bp, Homo sapien
cacacttcttgcttggaggatagct

SEQ ID NO: 5409150 - DNA, 25 bp, Homo sapien
tagcagacaagtgcatagtacttgg

SEQ ID NO: 5409151 - DNA, 25 bp, Homo sapien
ctgtgtaatattggcacctttcttt

SEQ ID NO: 5409152 - DNA, 25 bp, Homo sapien
tgctgtccctgactttgccttgggc

SEQ ID NO: 5409153 - DNA, 25 bp, Homo sapien
ctgctgtccctgactttgccttggg

SEQ ID NO: 5409154 - DNA, 25 bp, Homo sapien
ttcttccagggtattcttcaaattc

SEQ ID NO: 5409155 - DNA, 25 bp, Homo sapien
cttccagggtattcttcaaattcat

SEQ ID NO: 5409156 - DNA, 25 bp, Homo sapien
cttcttccagggtattcttcaaatt

SEQ ID NO: 5409157 - DNA, 25 bp, Homo sapien
tcttccagggtattcttcaaattca

SEQ ID NO: 5409158 - DNA, 25 bp, Homo sapien
tatgtccatcggtgccaattaaaac

SEQ ID NO: 5409159 - DNA, 25 bp, Homo sapien
gcatcgtgcttcgtgcaatacttac

SEQ ID NO: 5409160 - DNA, 25 bp, Homo sapien
gaatggtgcatcgtgcttcgtgcaa

SEQ ID NO: 5409161 - DNA, 25 bp, Homo sapien
attaaaacctgaatggtgcatcgtg

SEQ ID NO: 5409162 - DNA, 25 bp, Homo sapien
agtgaatcctgtgttactctgaata

SEQ ID NO: 5409163 - DNA, 25 bp, Homo sapien
tcccacttgccacttgtaatttgaa

SEQ ID NO: 5409164 - DNA, 25 bp, Homo sapien
aatatatttatggcctcccacttgc

SEQ ID NO: 5409165 - DNA, 25 bp, Homo sapien
tcctgtgttactctgaatatattta

SEQ ID NO: 5409166 - DNA, 25 bp, Homo sapien
caaacattatgttgtgtgaaactga

SEQ ID NO: 5409167 - DNA, 25 bp, Homo sapien
gaatgatctttgaggagataaatct

SEQ ID NO: 5409168 - DNA, 25 bp, Homo sapien
tgagcaacctcaagtgaatgatctt

SEQ ID NO: 5409169 - DNA, 25 bp, Homo sapien
tgaaactgagcgttatttgagcaac

SEQ ID NO: 5409170 - DNA, 25 bp, Homo sapien
taaatattttgtagtacgaaatggc

SEQ ID NO: 5409171 - DNA, 25 bp, Homo sapien
tgtagtacgaaatggcatcatagct

SEQ ID NO: 5409172 - DNA, 25 bp, Homo sapien
agtacgaaatggcatcatagctgaa

SEQ ID NO: 5409173 - DNA, 25 bp, Homo sapien
tattttgtagtacgaaatggcatca

SEQ ID NO: 5409174 - DNA, 25 bp, Homo sapien
aacaggtaaccccatgcagaacttg

SEQ ID NO: 5409175 - DNA, 25 bp, Homo sapien
aaagatcatggcttgctagccacag

SEQ ID NO: 5409176 - DNA, 25 bp, Homo sapien
gactgcagactgacctcaatgccct

SEQ ID NO: 5409177 - DNA, 25 bp, Homo sapien
caatgccctggtttgacctctaaca

SEQ ID NO: 5409178 - DNA, 25 bp, Homo sapien
gttctacattgccttaatcactaaa

SEQ ID NO: 5409179 - DNA, 25 bp, Homo sapien
caagctgcagtcagttagataaggg

SEQ ID NO: 5409180 - DNA, 25 bp, Homo sapien
ctggagtgcaaatagcgtggtcttg

SEQ ID NO: 5409181 - DNA, 25 bp, Homo sapien
tgtgaaacacaaaaattggttctac

SEQ ID NO: 5409182 - DNA, 25 bp, Homo sapien
catctctatatgaagtgcaaagcca

SEQ ID NO: 5409183 - DNA, 25 bp, Homo sapien
taatgaggcccttacactggtttct

SEQ ID NO: 5409184 - DNA, 25 bp, Homo sapien
tagataagcacccacaccaagttgt

SEQ ID NO: 5409185 - DNA, 25 bp, Homo sapien
gtcacacctggaccctagataagca

SEQ ID NO: 5409186 - DNA, 25 bp, Homo sapien
gtgacattatttaccgccatgtaat

SEQ ID NO: 5409187 - DNA, 25 bp, Homo sapien
ttatttaccgccatgtaatatcttg

SEQ ID NO: 5409188 - DNA, 25 bp, Homo sapien
ttaccgccatgtaatatcttgccat

SEQ ID NO: 5409189 - DNA, 25 bp, Homo sapien
tgacattatttaccgccatgtaata

SEQ ID NO: 5409190 - DNA, 25 bp, Homo sapien
gcacattcggtcaaaagcacaagct

SEQ ID NO: 5409191 - DNA, 25 bp, Homo sapien
tttgccagccgcctaaagacggtgt

SEQ ID NO: 5409192 - DNA, 25 bp, Homo sapien
tgttaaatgacctaaagcggatgcc

SEQ ID NO: 5409193 - DNA, 25 bp, Homo sapien
gcggatgccctaaactgagtgcaca

SEQ ID NO: 5409194 - DNA, 25 bp, Homo sapien
tgtccggcacaaaatcactcaagag

SEQ ID NO: 5409195 - DNA, 25 bp, Homo sapien
gcatgtaagccaaaatcaactggat

SEQ ID NO: 5409196 - DNA, 25 bp, Homo sapien
tagtgccagtttgggtacattgcaa

SEQ ID NO: 5409197 - DNA, 25 bp, Homo sapien
gatcatgggctaatgtgttaaacca

SEQ ID NO: 5409198 - DNA, 25 bp, Homo sapien
tgctttcttctatatgctcctgggt

SEQ ID NO: 5409199 - DNA, 25 bp, Homo sapien
ccaccagcccatccagttctgcttt

SEQ ID NO: 5409200 - DNA, 25 bp, Homo sapien
caccagcccatccagttctgctttc

SEQ ID NO: 5409201 - DNA, 25 bp, Homo sapien
gttctgctttcttctatatgctcct

SEQ ID NO: 5409202 - DNA, 25 bp, Homo sapien
catatagacaggaccgaaacattct

SEQ ID NO: 5409203 - DNA, 25 bp, Homo sapien
tcatcagtaacccacgtgagccaac

SEQ ID NO: 5409204 - DNA, 25 bp, Homo sapien
ggactctttttagccactgcaaaca

SEQ ID NO: 5409205 - DNA, 25 bp, Homo sapien
tcttccctgaagtcacatatagaca

SEQ ID NO: 5409206 - DNA, 25 bp, Homo sapien
gaacaacgggattcttagctccagc

SEQ ID NO: 5409207 - DNA, 25 bp, Homo sapien
cattgctggaacaggcacttcctgg

SEQ ID NO: 5409208 - DNA, 25 bp, Homo sapien
cgataataaatatccgaacaacggg

SEQ ID NO: 5409209 - DNA, 25 bp, Homo sapien
gggacctacatacgcagggtaagtg

SEQ ID NO: 5409210 - DNA, 25 bp, Homo sapien
tgttcatcgccataataggaatagg

SEQ ID NO: 5409211 - DNA, 25 bp, Homo sapien
ggcaataactggtatatccgtatca

SEQ ID NO: 5409212 - DNA, 25 bp, Homo sapien
gtatcattaaattccgcatatgcca

SEQ ID NO: 5409213 - DNA, 25 bp, Homo sapien
gaccaccagagagcatattttgtag

SEQ ID NO: 5409214 - DNA, 25 bp, Homo sapien
cccagtctgggattccattaaatat

SEQ ID NO: 5409215 - DNA, 25 bp, Homo sapien
ttgaaaaggtggatctcctggtctt

SEQ ID NO: 5409216 - DNA, 25 bp, Homo sapien
tcttccattaaatgttatttgaaaa

SEQ ID NO: 5409217 - DNA, 25 bp, Homo sapien
cctggtctttgtttcaaatagatat

SEQ ID NO: 5409218 - DNA, 25 bp, Homo sapien
aatcaaatggctcctcttttattta

SEQ ID NO: 5409219 - DNA, 25 bp, Homo sapien
aaatcaaatggctcctcttttattt

SEQ ID NO: 5409220 - DNA, 25 bp, Homo sapien
atcaaatggctcctcttttatttac

SEQ ID NO: 5409221 - DNA, 25 bp, Homo sapien
taatttactcccaacaggcgaccag

SEQ ID NO: 5409222 - DNA, 25 bp, Homo sapien
caggcgaccagcataaatactgaat

SEQ ID NO: 5409223 - DNA, 25 bp, Homo sapien
aatactgaattggacgaggaagctc

SEQ ID NO: 5409224 - DNA, 25 bp, Homo sapien
ggacgaggaagctcatttcctctta

SEQ ID NO: 5409225 - DNA, 25 bp, Homo sapien
aaacaacaaaccttgctgtttaatg

SEQ ID NO: 5409226 - DNA, 25 bp, Homo sapien
caacaaaccttgctgtttaatgcaa

SEQ ID NO: 5409227 - DNA, 25 bp, Homo sapien
acaaaccttgctgtttaatgcaaaa

SEQ ID NO: 5409228 - DNA, 25 bp, Homo sapien
acaacaaaccttgctgtttaatgca

SEQ ID NO: 5409229 - DNA, 25 bp, Homo sapien
tgtaatatgttgctgtgtaagagta

SEQ ID NO: 5409230 - DNA, 25 bp, Homo sapien
catagatgtaatatgttgctgtgta

SEQ ID NO: 5409231 - DNA, 25 bp, Homo sapien
taaggtcatagatgtaatatgttgc

SEQ ID NO: 5409232 - DNA, 25 bp, Homo sapien
gctaaggtcatagatgtaatatgtt

SEQ ID NO: 5409233 - DNA, 25 bp, Homo sapien
tttctagatatacaaattgccgatc

SEQ ID NO: 5409234 - DNA, 25 bp, Homo sapien
tagatatacaaattgccgatcaggt

SEQ ID NO: 5409235 - DNA, 25 bp, Homo sapien
attgccgatcaggtgataagccgta

SEQ ID NO: 5409236 - DNA, 25 bp, Homo sapien
gatcaggtgataagccgtaatttga

SEQ ID NO: 5409237 - DNA, 25 bp, Homo sapien
ggttctattactcaaaatggtatat

SEQ ID NO: 5409238 - DNA, 25 bp, Homo sapien
agtactatattgttatctgcagatt

SEQ ID NO: 5409239 - DNA, 25 bp, Homo sapien
atattgttatctgcagattgatgaa

SEQ ID NO: 5409240 - DNA, 25 bp, Homo sapien
tcaaaatggtatatgattgtcctgt

SEQ ID NO: 5409241 - DNA, 25 bp, Homo sapien
tatggcgcaaatccagtatgaatgg

SEQ ID NO: 5409242 - DNA, 25 bp, Homo sapien
tacatttcaactgatacggcttcag

SEQ ID NO: 5409243 - DNA, 25 bp, Homo sapien
ttttttgagcacttgaatcattcag

SEQ ID NO: 5409244 - DNA, 25 bp, Homo sapien
ttgtcaaaagcgcttttttgagcac

SEQ ID NO: 5409245 - DNA, 25 bp, Homo sapien
ctgaaatccagtttggaaaaaatgt

SEQ ID NO: 5409246 - DNA, 25 bp, Homo sapien
atgttccatttaaaatatccttcag

SEQ ID NO: 5409247 - DNA, 25 bp, Homo sapien
aatgttttataagaaaatgttccat

SEQ ID NO: 5409248 - DNA, 25 bp, Homo sapien
tatccttcagtgtgagtgctctcat

SEQ ID NO: 5409249 - DNA, 25 bp, Homo sapien
tgggctaaatcccaatttgtcatgg

SEQ ID NO: 5409250 - DNA, 25 bp, Homo sapien
gcgggtaataccttatagaatgagt

SEQ ID NO: 5409251 - DNA, 25 bp, Homo sapien
ggtgttatagcaccactcatgtttt

SEQ ID NO: 5409252 - DNA, 25 bp, Homo sapien
tggcatgctggtattttgtgggaaa

SEQ ID NO: 5409253 - DNA, 25 bp, Homo sapien
ctcttgaagggcgtaagacaatgca

SEQ ID NO: 5409254 - DNA, 25 bp, Homo sapien
catcaccaataaggcaagcacagca

SEQ ID NO: 5409255 - DNA, 25 bp, Homo sapien
gaggtggcaactccaaatacgattt

SEQ ID NO: 5409256 - DNA, 25 bp, Homo sapien
gacaatgcacatcaccaataaggca

SEQ ID NO: 5409257 - DNA, 25 bp, Homo sapien
caagtctgtctttgtagttggaagc

SEQ ID NO: 5409258 - DNA, 25 bp, Homo sapien
gatctgtgaaaaccgttgaaaagga

SEQ ID NO: 5409259 - DNA, 25 bp, Homo sapien
ttttgaaagttagctaattctgtct

SEQ ID NO: 5409260 - DNA, 25 bp, Homo sapien
ttctgtcttcagagcgtgggtcact

SEQ ID NO: 5409261 - DNA, 25 bp, Homo sapien
tacaagagtggtatttttgctttcc

SEQ ID NO: 5409262 - DNA, 25 bp, Homo sapien
ttacaagagtggtatttttgctttc

SEQ ID NO: 5409263 - DNA, 25 bp, Homo sapien
tcattaggcacttactggcagagaa

SEQ ID NO: 5409264 - DNA, 25 bp, Homo sapien
gcacttactggcagagaactgtatt

SEQ ID NO: 5409265 - DNA, 25 bp, Homo sapien
aattccagccttatgaaaattctgt

SEQ ID NO: 5409266 - DNA, 25 bp, Homo sapien
ggacagtggcttgtgaacttccttt

SEQ ID NO: 5409267 - DNA, 25 bp, Homo sapien
tgtaggtatctccaagtgattgtga

SEQ ID NO: 5409268 - DNA, 25 bp, Homo sapien
tcagatctcagataaaagccagcag

SEQ ID NO: 5409269 - DNA, 25 bp, Homo sapien
tctcagaagttctgccctagcctgc

SEQ ID NO: 5409270 - DNA, 25 bp, Homo sapien
gagtacacaggcactttttagtggg

SEQ ID NO: 5409271 - DNA, 25 bp, Homo sapien
cagaaagcaactctgggtctattaa

SEQ ID NO: 5409272 - DNA, 25 bp, Homo sapien
aagcaactctgggtctattaaaatg

SEQ ID NO: 5409273 - DNA, 25 bp, Homo sapien
tttgttagtactgagacttttctca

SEQ ID NO: 5409274 - DNA, 25 bp, Homo sapien
ctttgttagtactgagacttttctc

SEQ ID NO: 5409275 - DNA, 25 bp, Homo sapien
catgtatgggagtcagtgcatcaaa

SEQ ID NO: 5409276 - DNA, 25 bp, Homo sapien
tgcatcaaagtcaatccagtcctcc

SEQ ID NO: 5409277 - DNA, 25 bp, Homo sapien
ctaagcatttatcctaggagcatgt

SEQ ID NO: 5409278 - DNA, 25 bp, Homo sapien
catttatcctaggagcatgtatggg

SEQ ID NO: 5409279 - DNA, 25 bp, Homo sapien
ccaccaactgtataccgggatctct

SEQ ID NO: 5409280 - DNA, 25 bp, Homo sapien
aactgtataccgggatctctccagt

SEQ ID NO: 5409281 - DNA, 25 bp, Homo sapien
ctgtataccgggatctctccagtct

SEQ ID NO: 5409282 - DNA, 25 bp, Homo sapien
accaactgtataccgggatctctcc

SEQ ID NO: 5409283 - DNA, 25 bp, Homo sapien
tttcttatgtgtctggtagaaggca

SEQ ID NO: 5409284 - DNA, 25 bp, Homo sapien
atgtttcttatgtgtctggtagaag

SEQ ID NO: 5409285 - DNA, 25 bp, Homo sapien
gtttcttatgtgtctggtagaaggc

SEQ ID NO: 5409286 - DNA, 25 bp, Homo sapien
ataatgtttcttatgtgtctggtag

SEQ ID NO: 5409287 - DNA, 25 bp, Homo sapien
tgctaagctgatgtagacaaggagt

SEQ ID NO: 5409288 - DNA, 25 bp, Homo sapien
tgatgcagcaagttctccctttcat

SEQ ID NO: 5409289 - DNA, 25 bp, Homo sapien
cctccaattggcacaaactctgatg

SEQ ID NO: 5409290 - DNA, 25 bp, Homo sapien
aggctgctgagggattgcgctttcc

SEQ ID NO: 5409291 - DNA, 25 bp, Homo sapien
gtggcttctgtctgaatcatgcggc

SEQ ID NO: 5409292 - DNA, 25 bp, Homo sapien
cggctcttccttgtcaaaagaggct

SEQ ID NO: 5409293 - DNA, 25 bp, Homo sapien
tactgggagaattgtccgtagtgtt

SEQ ID NO: 5409294 - DNA, 25 bp, Homo sapien
gaatcatgcggctcttccttgtcaa

SEQ ID NO: 5409295 - DNA, 25 bp, Homo sapien
gatggataatgcataatatattgtg

SEQ ID NO: 5409296 - DNA, 25 bp, Homo sapien
taatatattgtgttcttaaaaagag

SEQ ID NO: 5409297 - DNA, 25 bp, Homo sapien
aatgcataatatattgtgttcttaa

SEQ ID NO: 5409298 - DNA, 25 bp, Homo sapien
agatggataatgcataatatattgt

SEQ ID NO: 5409299 - DNA, 25 bp, Homo sapien
cagttctgtagcataatgaatacat

SEQ ID NO: 5409300 - DNA, 25 bp, Homo sapien
ctgtagcataatgaatacattaatc

SEQ ID NO: 5409301 - DNA, 25 bp, Homo sapien
ttatgtcagttctgtagcataatga

SEQ ID NO: 5409302 - DNA, 25 bp, Homo sapien
tgtcagttctgtagcataatgaata

SEQ ID NO: 5409303 - DNA, 25 bp, Homo sapien
ggaaatgtgataggtaattctaccc

SEQ ID NO: 5409304 - DNA, 25 bp, Homo sapien
ctgaatagtcaagattgggaaatgt

SEQ ID NO: 5409305 - DNA, 25 bp, Homo sapien
taatcctcatcactaaataaacagc

SEQ ID NO: 5409306 - DNA, 25 bp, Homo sapien
aaatctaagcctttgtgcaccatca

SEQ ID NO: 5409307 - DNA, 25 bp, Homo sapien
ttatttgatagtcggcacacttctt

SEQ ID NO: 5409308 - DNA, 25 bp, Homo sapien
atttatttgatagtcggcacacttc

SEQ ID NO: 5409309 - DNA, 25 bp, Homo sapien
gatagtcggcacacttcttttgcag

SEQ ID NO: 5409310 - DNA, 25 bp, Homo sapien
tttgatagtcggcacacttcttttg

SEQ ID NO: 5409311 - DNA, 25 bp, Homo sapien
tgatgagcatacaaaaatacgtgcc

SEQ ID NO: 5409312 - DNA, 25 bp, Homo sapien
ggagctcatccgcatgcctgcggta

SEQ ID NO: 5409313 - DNA, 25 bp, Homo sapien
tcatgggttattggacctggagctc

SEQ ID NO: 5409314 - DNA, 25 bp, Homo sapien
tcccaggcttgttattgcaactaag

SEQ ID NO: 5409315 - DNA, 25 bp, Homo sapien
agttattagtgatgggttattcttg

SEQ ID NO: 5409316 - DNA, 25 bp, Homo sapien
gggttattcttgtaatgcttggcaa

SEQ ID NO: 5409317 - DNA, 25 bp, Homo sapien
tcaattacatggatatcttccccag

SEQ ID NO: 5409318 - DNA, 25 bp, Homo sapien
catattgacgtgatgcattttctca

SEQ ID NO: 5409319 - DNA, 25 bp, Homo sapien
tgtgcagaaacctggtcaggaaacc

SEQ ID NO: 5409320 - DNA, 25 bp, Homo sapien
gaatttgacccttaaactccagaga

SEQ ID NO: 5409321 - DNA, 25 bp, Homo sapien
tgggaggcagtaactttccagtggc

SEQ ID NO: 5409322 - DNA, 25 bp, Homo sapien
cagagattgtcctagtgttgacccc

SEQ ID NO: 5409323 - DNA, 25 bp, Homo sapien
tctctcggaaatcattaactgtctc

SEQ ID NO: 5409324 - DNA, 25 bp, Homo sapien
ggacgtaggtgctctcatcagctct

SEQ ID NO: 5409325 - DNA, 25 bp, Homo sapien
tcgataactcctgaaccactgtgag

SEQ ID NO: 5409326 - DNA, 25 bp, Homo sapien
cactgtgagcaaccaggacgtaggt

SEQ ID NO: 5409327 - DNA, 25 bp, Homo sapien
accataacggataacaatgttacat

SEQ ID NO: 5409328 - DNA, 25 bp, Homo sapien
gaccataacggataacaatgttaca

SEQ ID NO: 5409329 - DNA, 25 bp, Homo sapien
cgagaccataacggataacaatgtt

SEQ ID NO: 5409330 - DNA, 25 bp, Homo sapien
agatttatttttccagtgcgaaatt

SEQ ID NO: 5409331 - DNA, 25 bp, Homo sapien
cttggattttagcagaagatgcctg

SEQ ID NO: 5409332 - DNA, 25 bp, Homo sapien
gattattcctcgtgctgattcctca

SEQ ID NO: 5409333 - DNA, 25 bp, Homo sapien
tccactgggaaagcgcatatgcact

SEQ ID NO: 5409334 - DNA, 25 bp, Homo sapien
gctgtgtccagctccaatcagatgg

SEQ ID NO: 5409335 - DNA, 25 bp, Homo sapien
tcatgggtttgaactcactgctgtg

SEQ ID NO: 5409336 - DNA, 25 bp, Homo sapien
tcatattctgggttttcagccagcc

SEQ ID NO: 5409337 - DNA, 25 bp, Homo sapien
ttcttaatttggtcagcttttcatt

SEQ ID NO: 5409338 - DNA, 25 bp, Homo sapien
tatttcttaatttggtcagcttttc

SEQ ID NO: 5409339 - DNA, 25 bp, Homo sapien
ttttcatattctgggttttcagcca

SEQ ID NO: 5409340 - DNA, 25 bp, Homo sapien
ctgtttcatccagtttcaaaggttt

SEQ ID NO: 5409341 - DNA, 25 bp, Homo sapien
ttcatcaccatcacaatactcatca

SEQ ID NO: 5409342 - DNA, 25 bp, Homo sapien
atcaccatcacaatactcatcatca

SEQ ID NO: 5409343 - DNA, 25 bp, Homo sapien
caccatcacaatactcatcatcacc

SEQ ID NO: 5409344 - DNA, 25 bp, Homo sapien
catcacaatactcatcatcaccacc

SEQ ID NO: 5409345 - DNA, 25 bp, Homo sapien
cgcatctatcattcgaattgtgtca

SEQ ID NO: 5409346 - DNA, 25 bp, Homo sapien
tgtgtcattaatttgtagggcctca

SEQ ID NO: 5409347 - DNA, 25 bp, Homo sapien
gaaagtttcaagatgagtatacgca

SEQ ID NO: 5409348 - DNA, 25 bp, Homo sapien
tcaaatgttctgcacaaacacgttc

SEQ ID NO: 5409349 - DNA, 25 bp, Homo sapien
aagtttgaatccttgtcattatttc

SEQ ID NO: 5409350 - DNA, 25 bp, Homo sapien
ttgaatggcccattgttcatagggt

SEQ ID NO: 5409351 - DNA, 25 bp, Homo sapien
tccaaaatctgacattggactcatt

SEQ ID NO: 5409352 - DNA, 25 bp, Homo sapien
aatctgacattggactcatttgaca

SEQ ID NO: 5409353 - DNA, 25 bp, Homo sapien
taatagtaaatgcatcaagattggc

SEQ ID NO: 5409354 - DNA, 25 bp, Homo sapien
taaatgcatcaagattggcacatag

SEQ ID NO: 5409355 - DNA, 25 bp, Homo sapien
caatggcaaacttcttgcatggctc

SEQ ID NO: 5409356 - DNA, 25 bp, Homo sapien
ttctctggttgcatctgcaatggca

SEQ ID NO: 5409357 - DNA, 25 bp, Homo sapien
gaagctgttagtcccagtatctgag

SEQ ID NO: 5409358 - DNA, 25 bp, Homo sapien
catgatgttattatacactgcttct

SEQ ID NO: 5409359 - DNA, 25 bp, Homo sapien
tgcatcaaataatgcctcatgatgt

SEQ ID NO: 5409360 - DNA, 25 bp, Homo sapien
tttggcttgcttcgtggcccctcca

SEQ ID NO: 5409361 - DNA, 25 bp, Homo sapien
gatattttcagttgggtatcaccac

SEQ ID NO: 5409362 - DNA, 25 bp, Homo sapien
aaatggttggaactccttgcggaag

SEQ ID NO: 5409363 - DNA, 25 bp, Homo sapien
cttgcggaagagctgttcaactagc

SEQ ID NO: 5409364 - DNA, 25 bp, Homo sapien
tgacaattgaacaccagcatcttct

SEQ ID NO: 5409365 - DNA, 25 bp, Homo sapien
caacttccatttggtaaggcctgag

SEQ ID NO: 5409366 - DNA, 25 bp, Homo sapien
tcttcttgtctaagtgatccttggc

SEQ ID NO: 5409367 - DNA, 25 bp, Homo sapien
tggcaatgtaaacagccactctggt

SEQ ID NO: 5409368 - DNA, 25 bp, Homo sapien
gacaagaactataacttttccaggc

SEQ ID NO: 5409369 - DNA, 25 bp, Homo sapien
ttctggctccggggatgctcttgct

SEQ ID NO: 5409370 - DNA, 25 bp, Homo sapien
tctggctccggggatgctcttgctg

SEQ ID NO: 5409371 - DNA, 25 bp, Homo sapien
tgaatcacttcccatggtgcctgaa

SEQ ID NO: 5409372 - DNA, 25 bp, Homo sapien
tttcatctaagcagctgacacttcc

SEQ ID NO: 5409373 - DNA, 25 bp, Homo sapien
atggtgcctgaatcactgcccatgt

SEQ ID NO: 5409374 - DNA, 25 bp, Homo sapien
tgcccatgttgctgttatgtccaag

SEQ ID NO: 5409375 - DNA, 25 bp, Homo sapien
gatgattctgatgagttattctcca

SEQ ID NO: 5409376 - DNA, 25 bp, Homo sapien
ccacttgaggaccatcaacttgtga

SEQ ID NO: 5409377 - DNA, 25 bp, Homo sapien
cttctccagatttggctgaactgtg

SEQ ID NO: 5409378 - DNA, 25 bp, Homo sapien
ggttgaaagaagttgctcttccact

SEQ ID NO: 5409379 - DNA, 25 bp, Homo sapien
tctgaccgtcatgtttaggaagtaa

SEQ ID NO: 5409380 - DNA, 25 bp, Homo sapien
taatatggacacaacgagtagttct

SEQ ID NO: 5409381 - DNA, 25 bp, Homo sapien
tgttctgcacgagacgtacatctgc

SEQ ID NO: 5409382 - DNA, 25 bp, Homo sapien
cagagaagactgatgccataaggaa

SEQ ID NO: 5409383 - DNA, 25 bp, Homo sapien
ctcatcttaaagaacccagtgaaaa

SEQ ID NO: 5409384 - DNA, 25 bp, Homo sapien
tgtgccccactttgtatggaaaatt

SEQ ID NO: 5409385 - DNA, 25 bp, Homo sapien
taaagaacccagtgaaaatgtgccc

SEQ ID NO: 5409386 - DNA, 25 bp, Homo sapien
gaaaacttggcaatgtttgcagtta

SEQ ID NO: 5409387 - DNA, 25 bp, Homo sapien
catagagaagtcgagaacctggcca

SEQ ID NO: 5409388 - DNA, 25 bp, Homo sapien
cacggaatggcaggttctagggctc

SEQ ID NO: 5409389 - DNA, 25 bp, Homo sapien
gcttctgagacactaggcagggtca

SEQ ID NO: 5409390 - DNA, 25 bp, Homo sapien
tcacacattcaaggaaggagcctgg

SEQ ID NO: 5409391 - DNA, 25 bp, Homo sapien
taaaatctcacattaggtaaggttg

SEQ ID NO: 5409392 - DNA, 25 bp, Homo sapien
gatgatctatcacatatgttccact

SEQ ID NO: 5409393 - DNA, 25 bp, Homo sapien
aaatcttggtgtttagcattgtgtc

SEQ ID NO: 5409394 - DNA, 25 bp, Homo sapien
ttggaaacataggatgcatactacg

SEQ ID NO: 5409395 - DNA, 25 bp, Homo sapien
gaatttgaagaatcttcctcagtaa

SEQ ID NO: 5409396 - DNA, 25 bp, Homo sapien
agaatttgaagaatcttcctcagta

SEQ ID NO: 5409397 - DNA, 25 bp, Homo sapien
atttgaagaatcttcctcagtaaaa

SEQ ID NO: 5409398 - DNA, 25 bp, Homo sapien
aatttgaagaatcttcctcagtaaa

SEQ ID NO: 5409399 - DNA, 25 bp, Homo sapien
gcctgttaactcttggacaagttca

SEQ ID NO: 5409400 - DNA, 25 bp, Homo sapien
gacgaagaacattcagaaatgcaga

SEQ ID NO: 5409401 - DNA, 25 bp, Homo sapien
cctttttagtagctctcttacacct

SEQ ID NO: 5409402 - DNA, 25 bp, Homo sapien
attgtttcctgtttgacgaagaaca

SEQ ID NO: 5409403 - DNA, 25 bp, Homo sapien
aaatctgcctaaaaggctagctcca

SEQ ID NO: 5409404 - DNA, 25 bp, Homo sapien
gcctaaaaggctagctccatctgaa

SEQ ID NO: 5409405 - DNA, 25 bp, Homo sapien
gaaaggggcaaacgcacaaggaagc

SEQ ID NO: 5409406 - DNA, 25 bp, Homo sapien
aagcctgctttgcaaaatctgccta

SEQ ID NO: 5409407 - DNA, 25 bp, Homo sapien
tcaaacgatggagagggcaagtccg

SEQ ID NO: 5409408 - DNA, 25 bp, Homo sapien
gaattcccgagtccaaccaaggtgc

SEQ ID NO: 5409409 - DNA, 25 bp, Homo sapien
atgttcccggaggtggcgactgtcc

SEQ ID NO: 5409410 - DNA, 25 bp, Homo sapien
ggcaagtccgtgagctcagggttca

SEQ ID NO: 5409411 - DNA, 25 bp, Homo sapien
ctgcaggcagaaaggtcaggtagtc

SEQ ID NO: 5409412 - DNA, 25 bp, Homo sapien
tgcaggcagaaaggtcaggtagtcc

SEQ ID NO: 5409413 - DNA, 25 bp, Homo sapien
gcaggcagaaaggtcaggtagtcca

SEQ ID NO: 5409414 - DNA, 25 bp, Homo sapien
cgtctgtggaatacccattcgacat

SEQ ID NO: 5409415 - DNA, 25 bp, Homo sapien
gcacgagatgagatagcggaaattc

SEQ ID NO: 5409416 - DNA, 25 bp, Homo sapien
cctggccctgaagcacgagatgaga

SEQ ID NO: 5409417 - DNA, 25 bp, Homo sapien
gatagcggaaattctcgtctgtgga

SEQ ID NO: 5409418 - DNA, 25 bp, Homo sapien
tagagaagcagggtctaccgctctg

SEQ ID NO: 5409419 - DNA, 25 bp, Homo sapien
tgaaatgtgcgtgccgctgtccgct

SEQ ID NO: 5409420 - DNA, 25 bp, Homo sapien
gagggttctcccaagcagatggtgc

SEQ ID NO: 5409421 - DNA, 25 bp, Homo sapien
tgtccgctgcccacttagagaagca

SEQ ID NO: 5409422 - DNA, 25 bp, Homo sapien
tcagggagacgccaccttttggtcg

SEQ ID NO: 5409423 - DNA, 25 bp, Homo sapien
cactttggactctgcggtgtgcgcc

SEQ ID NO: 5409424 - DNA, 25 bp, Homo sapien
ttgtaaacgtaatctgcctggcggg

SEQ ID NO: 5409425 - DNA, 25 bp, Homo sapien
caatgacgaggttgtccacagggct

SEQ ID NO: 5409426 - DNA, 25 bp, Homo sapien
aactggtgggctcttgatgacatct

SEQ ID NO: 5409427 - DNA, 25 bp, Homo sapien
actggtgggctcttgatgacatctc

SEQ ID NO: 5409428 - DNA, 25 bp, Homo sapien
cactgcgactcacagatgatgtttc

SEQ ID NO: 5409429 - DNA, 25 bp, Homo sapien
cgtcttatccatgcctttctcagaa

SEQ ID NO: 5409430 - DNA, 25 bp, Homo sapien
agcagcccaggccaaatcctagaca

SEQ ID NO: 5409431 - DNA, 25 bp, Homo sapien
ccttgtggggctttaactgtgagat

SEQ ID NO: 5409432 - DNA, 25 bp, Homo sapien
ttcccactagggaggtaaaatcatg

SEQ ID NO: 5409433 - DNA, 25 bp, Homo sapien
gagataatctatatttcccactagg

SEQ ID NO: 5409434 - DNA, 25 bp, Homo sapien
cccactagggaggtaaaatcatggc

SEQ ID NO: 5409435 - DNA, 25 bp, Homo sapien
agggagataatctatatttcccact

SEQ ID NO: 5409436 - DNA, 25 bp, Homo sapien
ttaaaattaagctgctcagggccca

SEQ ID NO: 5409437 - DNA, 25 bp, Homo sapien
gctacagaatcagggaaaagggtat

SEQ ID NO: 5409438 - DNA, 25 bp, Homo sapien
agggcccaagatacttctgctacag

SEQ ID NO: 5409439 - DNA, 25 bp, Homo sapien
tctactgctaatgttctctccaatc

SEQ ID NO: 5409440 - DNA, 25 bp, Homo sapien
gatctagacctatgcttttcctgag

SEQ ID NO: 5409441 - DNA, 25 bp, Homo sapien
tatggcatcctgagctaacctctag

SEQ ID NO: 5409442 - DNA, 25 bp, Homo sapien
tcaatagtagtgtagagcttggcac

SEQ ID NO: 5409443 - DNA, 25 bp, Homo sapien
tagggatcgttttcatgactgtgcc

SEQ ID NO: 5409444 - DNA, 25 bp, Homo sapien
aacagatactcagctctgcaaggct

SEQ ID NO: 5409445 - DNA, 25 bp, Homo sapien
caagagtagctaggacatcggcaat

SEQ ID NO: 5409446 - DNA, 25 bp, Homo sapien
gacactttcccaagagtagctagga

SEQ ID NO: 5409447 - DNA, 25 bp, Homo sapien
cctcttctgtagcatagctgaacaa

SEQ ID NO: 5409448 - DNA, 25 bp, Homo sapien
caggacaccgtctatattatcagtg

SEQ ID NO: 5409449 - DNA, 25 bp, Homo sapien
tccagctcaaaagcgtggagggctg

SEQ ID NO: 5409450 - DNA, 25 bp, Homo sapien
ttttggcgcagaagcactcctcctg

SEQ ID NO: 5409451 - DNA, 25 bp, Homo sapien
aataacctgttcgtccaatgtggcc

SEQ ID NO: 5409452 - DNA, 25 bp, Homo sapien
gaggagttgaaggcttgtagaagac

SEQ ID NO: 5409453 - DNA, 25 bp, Homo sapien
ttgaggagttgaaggcttgtagaag

SEQ ID NO: 5409454 - DNA, 25 bp, Homo sapien
tgaggagttgaaggcttgtagaaga

SEQ ID NO: 5409455 - DNA, 25 bp, Homo sapien
tgcagctgagttggctccaaagtgt

SEQ ID NO: 5409456 - DNA, 25 bp, Homo sapien
gcagccaaggcttcttcgggattta

SEQ ID NO: 5409457 - DNA, 25 bp, Homo sapien
gggaattccgttgcagcagccaagg

SEQ ID NO: 5409458 - DNA, 25 bp, Homo sapien
gtgtgggactcagccaatcggaacc

SEQ ID NO: 5409459 - DNA, 25 bp, Homo sapien
gagccgcaggttttctggtcgttga

SEQ ID NO: 5409460 - DNA, 25 bp, Homo sapien
tcgttgaggaccctcgaggagcgtc

SEQ ID NO: 5409461 - DNA, 25 bp, Homo sapien
cagggcctgggcgagcattgatcct

SEQ ID NO: 5409462 - DNA, 25 bp, Homo sapien
tcgtcatggcctacccgggatacgg

SEQ ID NO: 5409463 - DNA, 25 bp, Homo sapien
ggagcccaaacctttagtatcgatg

SEQ ID NO: 5409464 - DNA, 25 bp, Homo sapien
ttactgttatacgaagggcaatctg

SEQ ID NO: 5409465 - DNA, 25 bp, Homo sapien
ttaacagtagtttgatccattgcgg

SEQ ID NO: 5409466 - DNA, 25 bp, Homo sapien
gcaagttataatcgtagagtcctgg

SEQ ID NO: 5409467 - DNA, 25 bp, Homo sapien
ctgtgaattcagtatatggtagagg

SEQ ID NO: 5409468 - DNA, 25 bp, Homo sapien
gtatatggtagaggtagcatttcat

SEQ ID NO: 5409469 - DNA, 25 bp, Homo sapien
ttcagtatatggtagaggtagcatt

SEQ ID NO: 5409470 - DNA, 25 bp, Homo sapien
gaattcagtatatggtagaggtagc

SEQ ID NO: 5409471 - DNA, 25 bp, Homo sapien
aaatgaaagcctggattttgtgcca

SEQ ID NO: 5409472 - DNA, 25 bp, Homo sapien
tatctccctagttcaatctgtagtg

SEQ ID NO: 5409473 - DNA, 25 bp, Homo sapien
caagatagattgtataagaagccaa

SEQ ID NO: 5409474 - DNA, 25 bp, Homo sapien
ttgagggttggctagaaatgaaagc

SEQ ID NO: 5409475 - DNA, 25 bp, Homo sapien
ggcatttaccctagaagaaagtaga

SEQ ID NO: 5409476 - DNA, 25 bp, Homo sapien
gacctatttacacatgcatccagaa

SEQ ID NO: 5409477 - DNA, 25 bp, Homo sapien
tcttatggcattactaaactggaca

SEQ ID NO: 5409478 - DNA, 25 bp, Homo sapien
gaatagtgagtagacattggcaaca

SEQ ID NO: 5409479 - DNA, 25 bp, Homo sapien
gaagagtgctagtatgaatatccca

SEQ ID NO: 5409480 - DNA, 25 bp, Homo sapien
tgaaggttgggaaatctaagccact

SEQ ID NO: 5409481 - DNA, 25 bp, Homo sapien
ctgacatattgtgagaggtacccca

SEQ ID NO: 5409482 - DNA, 25 bp, Homo sapien
agctatctatttgtggtaccctcag

SEQ ID NO: 5409483 - DNA, 25 bp, Homo sapien
tgagcccctgagtcaagtagagagg

SEQ ID NO: 5409484 - DNA, 25 bp, Homo sapien
taaaagcagtaaataggagtctcca

SEQ ID NO: 5409485 - DNA, 25 bp, Homo sapien
tataatggtaccttgtgagcccctg

SEQ ID NO: 5409486 - DNA, 25 bp, Homo sapien
taaaaaataaggtgccgtgagatgc

SEQ ID NO: 5409487 - DNA, 25 bp, Homo sapien
cctggaagaccaggatcagaaacat

SEQ ID NO: 5409488 - DNA, 25 bp, Homo sapien
gaccaggatcagaaacatgcctatg

SEQ ID NO: 5409489 - DNA, 25 bp, Homo sapien
gatcagaaacatgcctatgaagacc

SEQ ID NO: 5409490 - DNA, 25 bp, Homo sapien
cagaaacatgcctatgaagacccac

SEQ ID NO: 5409491 - DNA, 25 bp, Homo sapien
cagtgcttagggatgaatctggcaa

SEQ ID NO: 5409492 - DNA, 25 bp, Homo sapien
tctttgccgcaggtgaagctctaaa

SEQ ID NO: 5409493 - DNA, 25 bp, Homo sapien
ggatgcctaattggatgaacgtaag

SEQ ID NO: 5409494 - DNA, 25 bp, Homo sapien
tgtgttcagatgcaccccacttgaa

SEQ ID NO: 5409495 - DNA, 25 bp, Homo sapien
tgctgttaccatactgtaggctggg

SEQ ID NO: 5409496 - DNA, 25 bp, Homo sapien
cggttgactggttctcatcagctgg

SEQ ID NO: 5409497 - DNA, 25 bp, Homo sapien
gatgggtctctgatattctgatcct

SEQ ID NO: 5409498 - DNA, 25 bp, Homo sapien
aacttcggtcagttttgatggatgc

SEQ ID NO: 5409499 - DNA, 25 bp, Homo sapien
tcgttcccagcttcgcatgtcagtg

SEQ ID NO: 5409500 - DNA, 25 bp, Homo sapien
ccaggcagctcgctgaagtgcagat

SEQ ID NO: 5409501 - DNA, 25 bp, Homo sapien
cacttccccgtaggtgaggtcgctt

SEQ ID NO: 5409502 - DNA, 25 bp, Homo sapien
gctttcggtttcagagataccccag

SEQ ID NO: 5409503 - DNA, 25 bp, Homo sapien
tatccgtttccatgtgaacaaaaac

SEQ ID NO: 5409504 - DNA, 25 bp, Homo sapien
caaaaacatgtagcaggtcctgagt

SEQ ID NO: 5409505 - DNA, 25 bp, Homo sapien
ctcccatatccgtttccatgtgaac

SEQ ID NO: 5409506 - DNA, 25 bp, Homo sapien
acaaaaacatgtagcaggtcctgag

SEQ ID NO: 5409507 - DNA, 25 bp, Homo sapien
aacttgtgacttccatgatacaacc

SEQ ID NO: 5409508 - DNA, 25 bp, Homo sapien
gatagcagagatggttcagcaagct

SEQ ID NO: 5409509 - DNA, 25 bp, Homo sapien
cagagatggttcagcaagctcttca

SEQ ID NO: 5409510 - DNA, 25 bp, Homo sapien
gacttccatgatacaacctgtttct

SEQ ID NO: 5409511 - DNA, 25 bp, Homo sapien
tatgtgcattcttcctgaggtgggc

SEQ ID NO: 5409512 - DNA, 25 bp, Homo sapien
ctatgtgcattcttcctgaggtggg

SEQ ID NO: 5409513 - DNA, 25 bp, Homo sapien
tgtttcttcaaaatcgagcccagat

SEQ ID NO: 5409514 - DNA, 25 bp, Homo sapien
cagatgctttccctattcctggaga

SEQ ID NO: 5409515 - DNA, 25 bp, Homo sapien
gaaagatgaggatctgctttttttc

SEQ ID NO: 5409516 - DNA, 25 bp, Homo sapien
tgagaagagcggcttttgttcatca

SEQ ID NO: 5409517 - DNA, 25 bp, Homo sapien
gataatgtcttatggtatctgcaga

SEQ ID NO: 5409518 - DNA, 25 bp, Homo sapien
tgtcttatggtatctgcagagtctt

SEQ ID NO: 5409519 - DNA, 25 bp, Homo sapien
cttcactttcaaatgacaatttcct

SEQ ID NO: 5409520 - DNA, 25 bp, Homo sapien
tccttcttcttagtttacagttgtc

SEQ ID NO: 5409521 - DNA, 25 bp, Homo sapien
cttcttcttagtttacagttgtctc

SEQ ID NO: 5409522 - DNA, 25 bp, Homo sapien
tctccttcactttcaaatgacaatt

SEQ ID NO: 5409523 - DNA, 25 bp, Homo sapien
tcatggattgtgatcgtaggagatc

SEQ ID NO: 5409524 - DNA, 25 bp, Homo sapien
tgaatcattcatggattgtgatcgt

SEQ ID NO: 5409525 - DNA, 25 bp, Homo sapien
tggattgtgatcgtaggagatcagc

SEQ ID NO: 5409526 - DNA, 25 bp, Homo sapien
tcattcatggattgtgatcgtagga

SEQ ID NO: 5409527 - DNA, 25 bp, Homo sapien
tatgcaagtcacagtatgtgagggc

SEQ ID NO: 5409528 - DNA, 25 bp, Homo sapien
tttgcgctctcatgccttaggttga

SEQ ID NO: 5409529 - DNA, 25 bp, Homo sapien
tgagggctcttacatctgcattaga

SEQ ID NO: 5409530 - DNA, 25 bp, Homo sapien
cattagactttccaggtttggcata

SEQ ID NO: 5409531 - DNA, 25 bp, Homo sapien
cctagttaaggactgtatgattcca

SEQ ID NO: 5409532 - DNA, 25 bp, Homo sapien
cagtgtgtgtacatggcctaaattt

SEQ ID NO: 5409533 - DNA, 25 bp, Homo sapien
aaaccagttgaagttatgactaatt

SEQ ID NO: 5409534 - DNA, 25 bp, Homo sapien
cactggttgttaagtttataggtct

SEQ ID NO: 5409535 - DNA, 25 bp, Homo sapien
tccccacagtgaacgagggtgtctc

SEQ ID NO: 5409536 - DNA, 25 bp, Homo sapien
aataaagtgcagtgaggacatcccc

SEQ ID NO: 5409537 - DNA, 25 bp, Homo sapien
gaacttcattgccaaagctctaagg

SEQ ID NO: 5409538 - DNA, 25 bp, Homo sapien
tgcttgtaagcattctgggaaaccc

SEQ ID NO: 5409539 - DNA, 25 bp, Homo sapien
gaataattctaagtagccccatgca

SEQ ID NO: 5409540 - DNA, 25 bp, Homo sapien
tgaataattctaagtagccccatgc

SEQ ID NO: 5409541 - DNA, 25 bp, Homo sapien
cagatcctaccactgaagaactcac

SEQ ID NO: 5409542 - DNA, 25 bp, Homo sapien
tcagatcctaccactgaagaactca

SEQ ID NO: 5409543 - DNA, 25 bp, Homo sapien
ctccttgatgatggttggagaccag

SEQ ID NO: 5409544 - DNA, 25 bp, Homo sapien
tgcatagaagcagcatcattccaac

SEQ ID NO: 5409545 - DNA, 25 bp, Homo sapien
gtcctccttgatgatggttggagac

SEQ ID NO: 5409546 - DNA, 25 bp, Homo sapien
cattccaactgtaaataagtcctcc

SEQ ID NO: 5409547 - DNA, 25 bp, Homo sapien
cttgtgcaagatgaacatgtaccat

SEQ ID NO: 5409548 - DNA, 25 bp, Homo sapien
tgcaagatgaacatgtaccatttgt

SEQ ID NO: 5409549 - DNA, 25 bp, Homo sapien
cacttgtgcaagatgaacatgtacc

SEQ ID NO: 5409550 - DNA, 25 bp, Homo sapien
aagatgaacatgtaccatttgtgac

SEQ ID NO: 5409551 - DNA, 25 bp, Homo sapien
gctatcactataatgcctgcggcac

SEQ ID NO: 5409552 - DNA, 25 bp, Homo sapien
cactataatgcctgcggcactttca

SEQ ID NO: 5409553 - DNA, 25 bp, Homo sapien
tgcctgcggcactttcattttggaa

SEQ ID NO: 5409554 - DNA, 25 bp, Homo sapien
ttttggctatcactataatgcctgc

SEQ ID NO: 5409555 - DNA, 25 bp, Homo sapien
tgcatgtggtacctggcagttcccg

SEQ ID NO: 5409556 - DNA, 25 bp, Homo sapien
tgaactcttttactcgcagcatctg

SEQ ID NO: 5409557 - DNA, 25 bp, Homo sapien
ccattggtgtaagtccatgcgtgct

SEQ ID NO: 5409558 - DNA, 25 bp, Homo sapien
tcttcaagacgttgcctcagagggt

SEQ ID NO: 5409559 - DNA, 25 bp, Homo sapien
gatgtgcaccagtgtattttattca

SEQ ID NO: 5409560 - DNA, 25 bp, Homo sapien
acacagattcctatgttgagagatt

SEQ ID NO: 5409561 - DNA, 25 bp, Homo sapien
catacttaacttgtttgggattcac

SEQ ID NO: 5409562 - DNA, 25 bp, Homo sapien
tcactggacttcttggatatgtggt

SEQ ID NO: 5409563 - DNA, 25 bp, Homo sapien
ttaagagcattagaacagcagcgcc

SEQ ID NO: 5409564 - DNA, 25 bp, Homo sapien
gaggagtcgggcagtcttcaaaaga

SEQ ID NO: 5409565 - DNA, 25 bp, Homo sapien
cgattttgtcagtcaggtaaggcct

SEQ ID NO: 5409566 - DNA, 25 bp, Homo sapien
tggatggtccagaacttgagtcact

SEQ ID NO: 5409567 - DNA, 25 bp, Homo sapien
tgcaaccatgtcaatcaggaaccag

SEQ ID NO: 5409568 - DNA, 25 bp, Homo sapien
tattttggcgggatcacttaccact

SEQ ID NO: 5409569 - DNA, 25 bp, Homo sapien
tagcagtgtatatgaccaacagcag

SEQ ID NO: 5409570 - DNA, 25 bp, Homo sapien
caagtcaaaaggaattgctgcaacc

SEQ ID NO: 5409571 - DNA, 25 bp, Homo sapien
cagtttgtattcaggtaggacatct

SEQ ID NO: 5409572 - DNA, 25 bp, Homo sapien
ctgcagtttgtattcaggtaggaca

SEQ ID NO: 5409573 - DNA, 25 bp, Homo sapien
taggtgacaaacttccgatactaac

SEQ ID NO: 5409574 - DNA, 25 bp, Homo sapien
gacaggtatatttgtgtgagtttgc

SEQ ID NO: 5409575 - DNA, 25 bp, Homo sapien
ggcgtgtagtcaatcaaagaggaaa

SEQ ID NO: 5409576 - DNA, 25 bp, Homo sapien
ttttcataaaaaaggcgtgtagtca

SEQ ID NO: 5409577 - DNA, 25 bp, Homo sapien
agcagaagtatgaattagaatgcaa

SEQ ID NO: 5409578 - DNA, 25 bp, Homo sapien
ttagcagaagtatgaattagaatgc

SEQ ID NO: 5409579 - DNA, 25 bp, Homo sapien
tttagcagaagtatgaattagaatg

SEQ ID NO: 5409580 - DNA, 25 bp, Homo sapien
cttttagcagaagtatgaattagaa

SEQ ID NO: 5409581 - DNA, 25 bp, Homo sapien
gaactgagactgaataggagtcaga

SEQ ID NO: 5409582 - DNA, 25 bp, Homo sapien
taggtgggtagtcttcacagaggat

SEQ ID NO: 5409583 - DNA, 25 bp, Homo sapien
cagaggatttttgggaaaagatggc

SEQ ID NO: 5409584 - DNA, 25 bp, Homo sapien
ttcagatgaccactgtgctaagagc

SEQ ID NO: 5409585 - DNA, 25 bp, Homo sapien
cccagggcagcaatcaatgggtgag

SEQ ID NO: 5409586 - DNA, 25 bp, Homo sapien
gacgtttgttagtttgtatgaacac

SEQ ID NO: 5409587 - DNA, 25 bp, Homo sapien
tgcttatctggtggacgtttgttag

SEQ ID NO: 5409588 - DNA, 25 bp, Homo sapien
tgggcattgctggtgcttatctggt

SEQ ID NO: 5409589 - DNA, 25 bp, Homo sapien
agcacaagagtcaaagccaagaccc

SEQ ID NO: 5409590 - DNA, 25 bp, Homo sapien
gggagcacaagagtcaaagccaaga

SEQ ID NO: 5409591 - DNA, 25 bp, Homo sapien
cagggagcacaagagtcaaagccaa

SEQ ID NO: 5409592 - DNA, 25 bp, Homo sapien
cagagctcaactgccaaggggcagg

SEQ ID NO: 5409593 - DNA, 25 bp, Homo sapien
aggctgtttgactgaacccctaact

SEQ ID NO: 5409594 - DNA, 25 bp, Homo sapien
ctgtttgactgaacccctaactcct

SEQ ID NO: 5409595 - DNA, 25 bp, Homo sapien
gctgtttgactgaacccctaactcc

SEQ ID NO: 5409596 - DNA, 25 bp, Homo sapien
ggctgtttgactgaacccctaactc

SEQ ID NO: 5409597 - DNA, 25 bp, Homo sapien
acatgggtgaaaagttgcattggca

SEQ ID NO: 5409598 - DNA, 25 bp, Homo sapien
gggcaaaagttcttaccagtcagac

SEQ ID NO: 5409599 - DNA, 25 bp, Homo sapien
cacgtaccccaggtatttgctagga

SEQ ID NO: 5409600 - DNA, 25 bp, Homo sapien
accctgccgaggttgccaggactcg

SEQ ID NO: 5409601 - DNA, 25 bp, Homo sapien
aggacatttggtgtcacagtcaaat

SEQ ID NO: 5409602 - DNA, 25 bp, Homo sapien
gtatgtccaactgccacagtaactc

SEQ ID NO: 5409603 - DNA, 25 bp, Homo sapien
atttggtgtcacagtcaaatgttac

SEQ ID NO: 5409604 - DNA, 25 bp, Homo sapien
aaatgttacaagtatgtccaactgc

SEQ ID NO: 5409605 - DNA, 25 bp, Homo sapien
tcgccagctcagaaaaccacttgtt

SEQ ID NO: 5409606 - DNA, 25 bp, Homo sapien
cattctgccaggtgttctactaagg

SEQ ID NO: 5409607 - DNA, 25 bp, Homo sapien
ccctcgtgatgtagggataaagaga

SEQ ID NO: 5409608 - DNA, 25 bp, Homo sapien
attttccagactagcctctcgccag

SEQ ID NO: 5409609 - DNA, 25 bp, Homo sapien
acagtggatctgctgaacacggcag

SEQ ID NO: 5409610 - DNA, 25 bp, Homo sapien
gctgaacacggcagcatagggtggc

SEQ ID NO: 5409611 - DNA, 25 bp, Homo sapien
ctgaacacggcagcatagggtggcc

SEQ ID NO: 5409612 - DNA, 25 bp, Homo sapien
tgaacacggcagcatagggtggcct

SEQ ID NO: 5409613 - DNA, 25 bp, Homo sapien
tctgaagaaggaggtgatgaattct

SEQ ID NO: 5409614 - DNA, 25 bp, Homo sapien
cagagtgagctgtggaatcttgtta

SEQ ID NO: 5409615 - DNA, 25 bp, Homo sapien
cacattgtgtgttcgatctttaacc

SEQ ID NO: 5409616 - DNA, 25 bp, Homo sapien
tgatgtggatcccaggaggcttgac

SEQ ID NO: 5409617 - DNA, 25 bp, Homo sapien
tatcatggaccgaagatgctctccg

SEQ ID NO: 5409618 - DNA, 25 bp, Homo sapien
cagcatgtcagggtagagtcggtcc

SEQ ID NO: 5409619 - DNA, 25 bp, Homo sapien
tcgctggcatgtcggtctctaaata

SEQ ID NO: 5409620 - DNA, 25 bp, Homo sapien
caagaggtccggatatattcaccaa

SEQ ID NO: 5409621 - DNA, 25 bp, Homo sapien
ccaatttgggcattcattaacatcc

SEQ ID NO: 5409622 - DNA, 25 bp, Homo sapien
gggctctctggtgtggttataccaa

SEQ ID NO: 5409623 - DNA, 25 bp, Homo sapien
gctctctggtgtggttataccaatt

SEQ ID NO: 5409624 - DNA, 25 bp, Homo sapien
aatttgggcattcattaacatccat

SEQ ID NO: 5409625 - DNA, 25 bp, Homo sapien
gcccaagaacttgcacttcaaacac

SEQ ID NO: 5409626 - DNA, 25 bp, Homo sapien
tcagttgttctggtgtagggcccaa

SEQ ID NO: 5409627 - DNA, 25 bp, Homo sapien
ggtctcacacttgaagaaccattgg

SEQ ID NO: 5409628 - DNA, 25 bp, Homo sapien
caaacacattgcaaggtgatgctga

SEQ ID NO: 5409629 - DNA, 25 bp, Homo sapien
tgggccacttcaaataagataaaga

SEQ ID NO: 5409630 - DNA, 25 bp, Homo sapien
gggccacttcaaataagataaagat

SEQ ID NO: 5409631 - DNA, 25 bp, Homo sapien
cacttcaaataagataaagatgttc

SEQ ID NO: 5409632 - DNA, 25 bp, Homo sapien
gccacttcaaataagataaagatgt

SEQ ID NO: 5409633 - DNA, 25 bp, Homo sapien
tctcaagagcaggtctgtaacatga

SEQ ID NO: 5409634 - DNA, 25 bp, Homo sapien
aagagcaggtctgtaacatgagcac

SEQ ID NO: 5409635 - DNA, 25 bp, Homo sapien
atctcaagagcaggtctgtaacatg

SEQ ID NO: 5409636 - DNA, 25 bp, Homo sapien
tcaagagcaggtctgtaacatgagc

SEQ ID NO: 5409637 - DNA, 25 bp, Homo sapien
taatgatgaacatcatagccacgcc

SEQ ID NO: 5409638 - DNA, 25 bp, Homo sapien
tcattatccgtcacatattcaaaat

SEQ ID NO: 5409639 - DNA, 25 bp, Homo sapien
gggtggcagcgttttcattatccgt

SEQ ID NO: 5409640 - DNA, 25 bp, Homo sapien
ttttcactggaattatgtgagtgtt

SEQ ID NO: 5409641 - DNA, 25 bp, Homo sapien
tgagcttactcagaatatgagcaaa

SEQ ID NO: 5409642 - DNA, 25 bp, Homo sapien
catttgttcggtcaaattgctttaa

SEQ ID NO: 5409643 - DNA, 25 bp, Homo sapien
caacactgaactgactgagcttact

SEQ ID NO: 5409644 - DNA, 25 bp, Homo sapien
actaaactgccatttgttcggtcaa

SEQ ID NO: 5409645 - DNA, 25 bp, Homo sapien
taacaaccacagtgggcattcgtat

SEQ ID NO: 5409646 - DNA, 25 bp, Homo sapien
gcattcgtattagttttccaaaata

SEQ ID NO: 5409647 - DNA, 25 bp, Homo sapien
cagtgggcattcgtattagttttcc

SEQ ID NO: 5409648 - DNA, 25 bp, Homo sapien
ttagaaactaacaaccacagtgggc

SEQ ID NO: 5409649 - DNA, 25 bp, Homo sapien
ttcgaaaagtagagaggatgccaac

SEQ ID NO: 5409650 - DNA, 25 bp, Homo sapien
gaacatcatgttcccagaattcaat

SEQ ID NO: 5409651 - DNA, 25 bp, Homo sapien
tcttgcgtggcaactagccagaaca

SEQ ID NO: 5409652 - DNA, 25 bp, Homo sapien
tatgtttgtctgtgatgaagctgtc

SEQ ID NO: 5409653 - DNA, 25 bp, Homo sapien
tgggcttgacggctccttctgtctg

SEQ ID NO: 5409654 - DNA, 25 bp, Homo sapien
cactgtgcagatccctaatatggag

SEQ ID NO: 5409655 - DNA, 25 bp, Homo sapien
ttagttgtaaggatgtgggcttgac

SEQ ID NO: 5409656 - DNA, 25 bp, Homo sapien
ctgttctgaactagttgcaccgtgg

SEQ ID NO: 5409657 - DNA, 25 bp, Homo sapien
ctgggcttaacatcttttataaaat

SEQ ID NO: 5409658 - DNA, 25 bp, Homo sapien
taaaatctgtttttgtgtaaagcat

SEQ ID NO: 5409659 - DNA, 25 bp, Homo sapien
tgggcttaacatcttttataaaatc

SEQ ID NO: 5409660 - DNA, 25 bp, Homo sapien
catcttttataaaatctgtttttgt

SEQ ID NO: 5409661 - DNA, 25 bp, Homo sapien
ggcagcaataagaatcgccacttct

SEQ ID NO: 5409662 - DNA, 25 bp, Homo sapien
tgctttcaggtcaaatcttcagtct

SEQ ID NO: 5409663 - DNA, 25 bp, Homo sapien
gaagctggaatagtgtaggcagcaa

SEQ ID NO: 5409664 - DNA, 25 bp, Homo sapien
caaatcttagcaaaaatgtgaccca

SEQ ID NO: 5409665 - DNA, 25 bp, Homo sapien
gaactatagatattgctggtacaac

SEQ ID NO: 5409666 - DNA, 25 bp, Homo sapien
tacgagttggagattgagttttggc

SEQ ID NO: 5409667 - DNA, 25 bp, Homo sapien
ttggactagtccagcatcatactga

SEQ ID NO: 5409668 - DNA, 25 bp, Homo sapien
gtttggaatcacagcagggactaca

SEQ ID NO: 5409669 - DNA, 25 bp, Homo sapien
tggccagattttcaatacggttcaa

SEQ ID NO: 5409670 - DNA, 25 bp, Homo sapien
cctaattatggctgttggcttcatt

SEQ ID NO: 5409671 - DNA, 25 bp, Homo sapien
tacacatggttaagttgctttggtg

SEQ ID NO: 5409672 - DNA, 25 bp, Homo sapien
caataatggattgttgaggagttct

SEQ ID NO: 5409673 - DNA, 25 bp, Homo sapien
agatcttgaattacacaggccttat

SEQ ID NO: 5409674 - DNA, 25 bp, Homo sapien
caggccttattcattatcgaagagt

SEQ ID NO: 5409675 - DNA, 25 bp, Homo sapien
tcttgaattacacaggccttattca

SEQ ID NO: 5409676 - DNA, 25 bp, Homo sapien
acaggccttattcattatcgaagag

SEQ ID NO: 5409677 - DNA, 25 bp, Homo sapien
ctgctctccgatactcagatgccat

SEQ ID NO: 5409678 - DNA, 25 bp, Homo sapien
gagatacactctgctctccgatact

SEQ ID NO: 5409679 - DNA, 25 bp, Homo sapien
actctgctctccgatactcagatgc

SEQ ID NO: 5409680 - DNA, 25 bp, Homo sapien
tacactctgctctccgatactcaga

SEQ ID NO: 5409681 - DNA, 25 bp, Homo sapien
gcaaagattgacagaaccacaggaa

SEQ ID NO: 5409682 - DNA, 25 bp, Homo sapien
gaaataacagacgttggcaactcca

SEQ ID NO: 5409683 - DNA, 25 bp, Homo sapien
tctctatttgggttgtgggtacact

SEQ ID NO: 5409684 - DNA, 25 bp, Homo sapien
gcatgacatgcacaactgtagctcc

SEQ ID NO: 5409685 - DNA, 25 bp, Homo sapien
ccatgttcagtatgggacagttatt

SEQ ID NO: 5409686 - DNA, 25 bp, Homo sapien
caaagaggagttgtggctgctaaca

SEQ ID NO: 5409687 - DNA, 25 bp, Homo sapien
gatccccagtaaagcccatgttcag

SEQ ID NO: 5409688 - DNA, 25 bp, Homo sapien
ttttctgttcgtctgaatactccag

SEQ ID NO: 5409689 - DNA, 25 bp, Homo sapien
tcacaaccttgacgatttgcgttgc

SEQ ID NO: 5409690 - DNA, 25 bp, Homo sapien
cctcacattcacaaccttgacgatt

SEQ ID NO: 5409691 - DNA, 25 bp, Homo sapien
caaccttgacgatttgcgttgccat

SEQ ID NO: 5409692 - DNA, 25 bp, Homo sapien
cattcacaaccttgacgatttgcgt

SEQ ID NO: 5409693 - DNA, 25 bp, Homo sapien
gctgctacagtgcaaaaagccaata

SEQ ID NO: 5409694 - DNA, 25 bp, Homo sapien
caggtgggtgtatggtcttgtctcc

SEQ ID NO: 5409695 - DNA, 25 bp, Homo sapien
tcccatgatactaaaggctgaagac

SEQ ID NO: 5409696 - DNA, 25 bp, Homo sapien
taatgttccccaattgcccaagtca

SEQ ID NO: 5409697 - DNA, 25 bp, Homo sapien
ggatggttttgcctggtataatggt

SEQ ID NO: 5409698 - DNA, 25 bp, Homo sapien
gatccaagccagatatatcttcaaa

SEQ ID NO: 5409699 - DNA, 25 bp, Homo sapien
agcagcggtttaggccctgtagctc

SEQ ID NO: 5409700 - DNA, 25 bp, Homo sapien
atggtgagtggagcaagagatccaa

SEQ ID NO: 5409701 - DNA, 25 bp, Homo sapien
gcttcacacagtaaacgttttcttg

SEQ ID NO: 5409702 - DNA, 25 bp, Homo sapien
gttgacaaccagagtaagttctgaa

SEQ ID NO: 5409703 - DNA, 25 bp, Homo sapien
tctgaatgcttcacacagtaaacgt

SEQ ID NO: 5409704 - DNA, 25 bp, Homo sapien
agttctgaatgcttcacacagtaaa

SEQ ID NO: 5409705 - DNA, 25 bp, Homo sapien
tttcatgaataaatagctgactttc

SEQ ID NO: 5409706 - DNA, 25 bp, Homo sapien
catagcctttagtgaaacaaggctc

SEQ ID NO: 5409707 - DNA, 25 bp, Homo sapien
caaagttctgattggtcatagcctt

SEQ ID NO: 5409708 - DNA, 25 bp, Homo sapien
gtgaaacaaggctctcgtagttcat

SEQ ID NO: 5409709 - DNA, 25 bp, Homo sapien
cctttagtgaaacaaggctctcgta

SEQ ID NO: 5409710 - DNA, 25 bp, Homo sapien
catgaactagtcttttacaggagaa

SEQ ID NO: 5409711 - DNA, 25 bp, Homo sapien
tacattgccaattgaagggatatcc

SEQ ID NO: 5409712 - DNA, 25 bp, Homo sapien
gaatgtaccacccaatgatgaaggc

SEQ ID NO: 5409713 - DNA, 25 bp, Homo sapien
tgccacacatgacaaccaggataaa

SEQ ID NO: 5409714 - DNA, 25 bp, Homo sapien
tctttctccctgagtccactggcaa

SEQ ID NO: 5409715 - DNA, 25 bp, Homo sapien
ctaggtctttctccctgagtccact

SEQ ID NO: 5409716 - DNA, 25 bp, Homo sapien
aggtctttctccctgagtccactgg

SEQ ID NO: 5409717 - DNA, 25 bp, Homo sapien
tttctccctgagtccactggcaaac

SEQ ID NO: 5409718 - DNA, 25 bp, Homo sapien
gctggttttgcacctctactaactg

SEQ ID NO: 5409719 - DNA, 25 bp, Homo sapien
tctactaactgcttccatatccaca

SEQ ID NO: 5409720 - DNA, 25 bp, Homo sapien
ggttttgcacctctactaactgctt

SEQ ID NO: 5409721 - DNA, 25 bp, Homo sapien
tgcacctctactaactgcttccata

SEQ ID NO: 5409722 - DNA, 25 bp, Homo sapien
ctgagctgttgctggcctctggaat

SEQ ID NO: 5409723 - DNA, 25 bp, Homo sapien
tgagctgttgctggcctctggaata

SEQ ID NO: 5409724 - DNA, 25 bp, Homo sapien
agttttatcatatcccactgacctg

SEQ ID NO: 5409725 - DNA, 25 bp, Homo sapien
aataggacaattacccatgtcttag

SEQ ID NO: 5409726 - DNA, 25 bp, Homo sapien
tctgctaaaatggtacccacatcat

SEQ ID NO: 5409727 - DNA, 25 bp, Homo sapien
gcataaataagtgggccgttttctc

SEQ ID NO: 5409728 - DNA, 25 bp, Homo sapien
tcataggatttagccaggagcaagt

SEQ ID NO: 5409729 - DNA, 25 bp, Homo sapien
atgcaggctgtagtgtttactctgg

SEQ ID NO: 5409730 - DNA, 25 bp, Homo sapien
ccttttcataggatttagccaggag

SEQ ID NO: 5409731 - DNA, 25 bp, Homo sapien
cccatgtcgaatcgccaagtatcat

SEQ ID NO: 5409732 - DNA, 25 bp, Homo sapien
ctggcgcaggaaaggaaaggaagga

SEQ ID NO: 5409733 - DNA, 25 bp, Homo sapien
tggcgcaggaaaggaaaggaaggag

SEQ ID NO: 5409734 - DNA, 25 bp, Homo sapien
ggaccctgggaatgcgactttttga

SEQ ID NO: 5409735 - DNA, 25 bp, Homo sapien
tagtgaaccccagtatcaggccttc

SEQ ID NO: 5409736 - DNA, 25 bp, Homo sapien
taaaactagtagtatgggctgggcg

SEQ ID NO: 5409737 - DNA, 25 bp, Homo sapien
gattacagcacttgagcgaagcacg

SEQ ID NO: 5409738 - DNA, 25 bp, Homo sapien
cctaaggactccagcagcaaggtta

SEQ ID NO: 5409739 - DNA, 25 bp, Homo sapien
tatgtaaagagtagaggaggaccct

SEQ ID NO: 5409740 - DNA, 25 bp, Homo sapien
gctacaagagaacaccactacctga

SEQ ID NO: 5409741 - DNA, 25 bp, Homo sapien
gaaaatccatgaactgtgtggcaat

SEQ ID NO: 5409742 - DNA, 25 bp, Homo sapien
cattgactcctagcagctcttgagc

SEQ ID NO: 5409743 - DNA, 25 bp, Homo sapien
gatagtcactgacaattagctttga

SEQ ID NO: 5409744 - DNA, 25 bp, Homo sapien
gttaaagtatggtgaagtctgtcct

SEQ ID NO: 5409745 - DNA, 25 bp, Homo sapien
tcaggatccgtactttgatagtcac

SEQ ID NO: 5409746 - DNA, 25 bp, Homo sapien
gtgcccttaggagggctgtaagcca

SEQ ID NO: 5409747 - DNA, 25 bp, Homo sapien
ggtgcccttaggagggctgtaagcc

SEQ ID NO: 5409748 - DNA, 25 bp, Homo sapien
atacaatgacctcaacattcaaggg

SEQ ID NO: 5409749 - DNA, 25 bp, Homo sapien
gagtataccagctatatcactttcc

SEQ ID NO: 5409750 - DNA, 25 bp, Homo sapien
tcttggattgtaactctgcaaaagc

SEQ ID NO: 5409751 - DNA, 25 bp, Homo sapien
agggtacaccataagtcaacaggaa

SEQ ID NO: 5409752 - DNA, 25 bp, Homo sapien
taactaagaatttctctctcaagct

SEQ ID NO: 5409753 - DNA, 25 bp, Homo sapien
tctctctcaagctggcagacaacat

SEQ ID NO: 5409754 - DNA, 25 bp, Homo sapien
agcaccttgggtgtgaaaataacta

SEQ ID NO: 5409755 - DNA, 25 bp, Homo sapien
ctgttctcaagcaccttgggtgtga

SEQ ID NO: 5409756 - DNA, 25 bp, Homo sapien
gagattacagtacccttattcaaag

SEQ ID NO: 5409757 - DNA, 25 bp, Homo sapien
gaatacccatatatgttggatccca

SEQ ID NO: 5409758 - DNA, 25 bp, Homo sapien
gctaaagagccaagagacataactg

SEQ ID NO: 5409759 - DNA, 25 bp, Homo sapien
gaatatgcacaggttaactggatca

SEQ ID NO: 5409760 - DNA, 25 bp, Homo sapien
caatatcatgcctcttggtctcggg

SEQ ID NO: 5409761 - DNA, 25 bp, Homo sapien
tctcgggtccatggagaaagtcgca

SEQ ID NO: 5409762 - DNA, 25 bp, Homo sapien
cagaacccatcgttgcaataaatga

SEQ ID NO: 5409763 - DNA, 25 bp, Homo sapien
caatttgggcaatatcatgcctctt

SEQ ID NO: 5409764 - DNA, 25 bp, Homo sapien
ttccgaatgatggtccccagaaatg

SEQ ID NO: 5409765 - DNA, 25 bp, Homo sapien
ccacatgccccctgcgcacaggcat

SEQ ID NO: 5409766 - DNA, 25 bp, Homo sapien
ttggccccggtcttccgaggagcgc

SEQ ID NO: 5409767 - DNA, 25 bp, Homo sapien
tggccccggtcttccgaggagcgct

SEQ ID NO: 5409768 - DNA, 25 bp, Homo sapien
ccggagctctggagttctcccggga

SEQ ID NO: 5409769 - DNA, 25 bp, Homo sapien
gagttctcccgggatctctcctcgg

SEQ ID NO: 5409770 - DNA, 25 bp, Homo sapien
ccagcgcgcgagccgctctttgtgg

SEQ ID NO: 5409771 - DNA, 25 bp, Homo sapien
cattagcaccacttctagacacccg

SEQ ID NO: 5409772 - DNA, 25 bp, Homo sapien
tagcaccacttctagacacccgctt

SEQ ID NO: 5409773 - DNA, 25 bp, Homo sapien
gccgctctttgtggcagagcatcct

SEQ ID NO: 5409774 - DNA, 25 bp, Homo sapien
ctgccgcgggtgagagggtttgggg

SEQ ID NO: 5409775 - DNA, 25 bp, Homo sapien
caaacagcgccaatttcccagtgca

SEQ ID NO: 5409776 - DNA, 25 bp, Homo sapien
gcggttgcccagagcagtaaggaat

SEQ ID NO: 5409777 - DNA, 25 bp, Homo sapien
tgcaaatgggcttaacctggcggtt

SEQ ID NO: 5409778 - DNA, 25 bp, Homo sapien
cacaagggcaatcgatctgtttctc

SEQ ID NO: 5409779 - DNA, 25 bp, Homo sapien
cgatgccactcatctccggaacaca

SEQ ID NO: 5409780 - DNA, 25 bp, Homo sapien
tggctgtgacctccgatgccactca

SEQ ID NO: 5409781 - DNA, 25 bp, Homo sapien
catctccggaacacactagccacat

SEQ ID NO: 5409782 - DNA, 25 bp, Homo sapien
ttggctgtgacctccgatgccactc

SEQ ID NO: 5409783 - DNA, 25 bp, Homo sapien
tcagcagttggcaactcttctctgc

SEQ ID NO: 5409784 - DNA, 25 bp, Homo sapien
gcttgggagacgacaagagtttctc

SEQ ID NO: 5409785 - DNA, 25 bp, Homo sapien
gagctatccatggttctgaatccga

SEQ ID NO: 5409786 - DNA, 25 bp, Homo sapien
ctctcccaggtgctgaacgtgtgga

SEQ ID NO: 5409787 - DNA, 25 bp, Homo sapien
gagaaccatcagaaggcttctcctt

SEQ ID NO: 5409788 - DNA, 25 bp, Homo sapien
gcatctgctccctgcgagcttcatg

SEQ ID NO: 5409789 - DNA, 25 bp, Homo sapien
gagttttgccatgctcatgcaccac

SEQ ID NO: 5409790 - DNA, 25 bp, Homo sapien
gctccctgcgagcttcatggagttt

SEQ ID NO: 5409791 - DNA, 25 bp, Homo sapien
gctttaatttccactggaggattca

SEQ ID NO: 5409792 - DNA, 25 bp, Homo sapien
caggccatgactcagctgactcttt

SEQ ID NO: 5409793 - DNA, 25 bp, Homo sapien
aaatgaaattgcgtttatgatcaca

SEQ ID NO: 5409794 - DNA, 25 bp, Homo sapien
gatcacatttgagatgttgcttgaa

SEQ ID NO: 5409795 - DNA, 25 bp, Homo sapien
ctgatataaattccatctattttca

SEQ ID NO: 5409796 - DNA, 25 bp, Homo sapien
tcttcactgatataaattccatcta

SEQ ID NO: 5409797 - DNA, 25 bp, Homo sapien
gaaacatattctcccatcttcactg

SEQ ID NO: 5409798 - DNA, 25 bp, Homo sapien
tcccatcttcactgatataaattcc

SEQ ID NO: 5409799 - DNA, 25 bp, Homo sapien
ttcttctcaatgcttgtggctccat

SEQ ID NO: 5409800 - DNA, 25 bp, Homo sapien
gttcttctcaatgcttgtggctcca

SEQ ID NO: 5409801 - DNA, 25 bp, Homo sapien
ggttcttctcaatgcttgtggctcc

SEQ ID NO: 5409802 - DNA, 25 bp, Homo sapien
tgtgccaagtttgcataagggacca

SEQ ID NO: 5409803 - DNA, 25 bp, Homo sapien
tattcaattcataccacttggtggt

SEQ ID NO: 5409804 - DNA, 25 bp, Homo sapien
ggttatgtgctatgctctccagcca

SEQ ID NO: 5409805 - DNA, 25 bp, Homo sapien
gcaatgcagtcgtctgtgccttagg

SEQ ID NO: 5409806 - DNA, 25 bp, Homo sapien
ctgagtgagggcatttgtcctgaga

SEQ ID NO: 5409807 - DNA, 25 bp, Homo sapien
gtgttacataaagtcataagggtgg

SEQ ID NO: 5409808 - DNA, 25 bp, Homo sapien
cttgggacacagtgaatgtagtttg

SEQ ID NO: 5409809 - DNA, 25 bp, Homo sapien
ttgaagtcttaacctgtgaatgtga

SEQ ID NO: 5409810 - DNA, 25 bp, Homo sapien
tgtgtatacttgtgcacactaagaa

SEQ ID NO: 5409811 - DNA, 25 bp, Homo sapien
tgatctttgactctagcaaccttaa

SEQ ID NO: 5409812 - DNA, 25 bp, Homo sapien
tggctgtttgatcaatagtcattac

SEQ ID NO: 5409813 - DNA, 25 bp, Homo sapien
cagtctaagtagattaatgcaggag

SEQ ID NO: 5409814 - DNA, 25 bp, Homo sapien
caggagcatttatcaacagggagaa

SEQ ID NO: 5409815 - DNA, 25 bp, Homo sapien
catactctgctatatacccttgtga

SEQ ID NO: 5409816 - DNA, 25 bp, Homo sapien
gactcaggtctgactatacagctca

SEQ ID NO: 5409817 - DNA, 25 bp, Homo sapien
gagtcctgagggcaaaacatgctgt

SEQ ID NO: 5409818 - DNA, 25 bp, Homo sapien
tgtgacccaatcagaggagagtcct

SEQ ID NO: 5409819 - DNA, 25 bp, Homo sapien
tcacagccctggaaggaaagttgcc

SEQ ID NO: 5409820 - DNA, 25 bp, Homo sapien
tcaatgtagttgggagtcacagccc

SEQ ID NO: 5409821 - DNA, 25 bp, Homo sapien
caatgtagttgggagtcacagccct

SEQ ID NO: 5409822 - DNA, 25 bp, Homo sapien
ctggaaggaaagttgccttaaggct

SEQ ID NO: 5409823 - DNA, 25 bp, Homo sapien
ctaatagagacctcttttctcaact

SEQ ID NO: 5409824 - DNA, 25 bp, Homo sapien
cttttctcaactccaattgactcac

SEQ ID NO: 5409825 - DNA, 25 bp, Homo sapien
acctcttttctcaactccaattgac

SEQ ID NO: 5409826 - DNA, 25 bp, Homo sapien
tcttttctcaactccaattgactca

SEQ ID NO: 5409827 - DNA, 25 bp, Homo sapien
acccctgagactgcttctcaagctg

SEQ ID NO: 5409828 - DNA, 25 bp, Homo sapien
ttgacattacagttaccacccctga

SEQ ID NO: 5409829 - DNA, 25 bp, Homo sapien
gctggaaataaaagtgtcgctgtgc

SEQ ID NO: 5409830 - DNA, 25 bp, Homo sapien
aaagtgtcgctgtgctgtttgtcag

SEQ ID NO: 5409831 - DNA, 25 bp, Homo sapien
cctgatgaagcaaaatggaaccact

SEQ ID NO: 5409832 - DNA, 25 bp, Homo sapien
tgatgaagcaaaatggaaccactct

SEQ ID NO: 5409833 - DNA, 25 bp, Homo sapien
tcccctgatgaagcaaaatggaacc

SEQ ID NO: 5409834 - DNA, 25 bp, Homo sapien
tgaagcaaaatggaaccactcttac

SEQ ID NO: 5409835 - DNA, 25 bp, Homo sapien
cgctcatagtttactggtccttcag

SEQ ID NO: 5409836 - DNA, 25 bp, Homo sapien
cttcaggacccaaattgagtggaat

SEQ ID NO: 5409837 - DNA, 25 bp, Homo sapien
ccagagctcataccccacaactgca

SEQ ID NO: 5409838 - DNA, 25 bp, Homo sapien
gttttctcccttgtatatacgctca

SEQ ID NO: 5409839 - DNA, 25 bp, Homo sapien
aggctttctggttgcaggctatgaa

SEQ ID NO: 5409840 - DNA, 25 bp, Homo sapien
gagactgctccttatacctcttgtc

SEQ ID NO: 5409841 - DNA, 25 bp, Homo sapien
ctgctgctctgatgtaagagactgc

SEQ ID NO: 5409842 - DNA, 25 bp, Homo sapien
tctggttgcaggctatgaagctgct

SEQ ID NO: 5409843 - DNA, 25 bp, Homo sapien
taagagtggcaaaagttgatcccat

SEQ ID NO: 5409844 - DNA, 25 bp, Homo sapien
tccctggtgcaaggtggcctctctt

SEQ ID NO: 5409845 - DNA, 25 bp, Homo sapien
ctaaatctggaatggcgcaggacca

SEQ ID NO: 5409846 - DNA, 25 bp, Homo sapien
gactctggcaattgtgtagaccaaa

SEQ ID NO: 5409847 - DNA, 25 bp, Homo sapien
ggcctctcttgcaataggactaata

SEQ ID NO: 5409848 - DNA, 25 bp, Homo sapien
tctgtgtggaatttcccagtaggag

SEQ ID NO: 5409849 - DNA, 25 bp, Homo sapien
gtaatccttgtgtatgccttcgtat

SEQ ID NO: 5409850 - DNA, 25 bp, Homo sapien
agagttagcagaaggcagtaaagca

SEQ ID NO: 5409851 - DNA, 25 bp, Homo sapien
ggcagtaaagcaatcttgccgtaat

SEQ ID NO: 5409852 - DNA, 25 bp, Homo sapien
gcaatcttgccgtaatccttgtgta

SEQ ID NO: 5409853 - DNA, 25 bp, Homo sapien
gcacaagtaatcactgcctttttaa

SEQ ID NO: 5409854 - DNA, 25 bp, Homo sapien
tcacagaatttccagttttcgttgc

SEQ ID NO: 5409855 - DNA, 25 bp, Homo sapien
ttaatgtcagcacaagtaatcactg

SEQ ID NO: 5409856 - DNA, 25 bp, Homo sapien
cacagaatttccagttttcgttgct

SEQ ID NO: 5409857 - DNA, 25 bp, Homo sapien
ctctgtactgcgtcaaataatctgc

SEQ ID NO: 5409858 - DNA, 25 bp, Homo sapien
tactgcgtcaaataatctgctcttg

SEQ ID NO: 5409859 - DNA, 25 bp, Homo sapien
tttattggctgcagctgatcggccc

SEQ ID NO: 5409860 - DNA, 25 bp, Homo sapien
attttgactctgtactgcgtcaaat

SEQ ID NO: 5409861 - DNA, 25 bp, Homo sapien
ttattttgtcagtgtctcaattcct

SEQ ID NO: 5409862 - DNA, 25 bp, Homo sapien
tattccacaacagtttgtattttgt

SEQ ID NO: 5409863 - DNA, 25 bp, Homo sapien
gggacccaaattttcatattccaca

SEQ ID NO: 5409864 - DNA, 25 bp, Homo sapien
aagggcacagaaatactttagtaag

SEQ ID NO: 5409865 - DNA, 25 bp, Homo sapien
gcacagaaatactttagtaagggac

SEQ ID NO: 5409866 - DNA, 25 bp, Homo sapien
ttaccctgtagagccatatcccaat

SEQ ID NO: 5409867 - DNA, 25 bp, Homo sapien
ttagcattctttcaacacttgccac

SEQ ID NO: 5409868 - DNA, 25 bp, Homo sapien
cagctcttctatagcgatctttacc

SEQ ID NO: 5409869 - DNA, 25 bp, Homo sapien
caatatggcatatttagtggtggta

SEQ ID NO: 5409870 - DNA, 25 bp, Homo sapien
tttccctgctatgctttgctgatat

SEQ ID NO: 5409871 - DNA, 25 bp, Homo sapien
tccctgctatgctttgctgatattt

SEQ ID NO: 5409872 - DNA, 25 bp, Homo sapien
ttccctgctatgctttgctgatatt

SEQ ID NO: 5409873 - DNA, 25 bp, Homo sapien
tttattaaccctcatgcagaagaat

SEQ ID NO: 5409874 - DNA, 25 bp, Homo sapien
gactgctgccaacgggaggccatag

SEQ ID NO: 5409875 - DNA, 25 bp, Homo sapien
ccaacgggaggccatagactgagac

SEQ ID NO: 5409876 - DNA, 25 bp, Homo sapien
acgggaggccatagactgagaccat

SEQ ID NO: 5409877 - DNA, 25 bp, Homo sapien
tgctgccaacgggaggccatagact

SEQ ID NO: 5409878 - DNA, 25 bp, Homo sapien
tgagtgcccagcatgccggaagtcc

SEQ ID NO: 5409879 - DNA, 25 bp, Homo sapien
ccagcatgccggaagtcctcgtaaa

SEQ ID NO: 5409880 - DNA, 25 bp, Homo sapien
gcatgccggaagtcctcgtaaatca

SEQ ID NO: 5409881 - DNA, 25 bp, Homo sapien
cggaagtcctcgtaaatcatttatc

SEQ ID NO: 5409882 - DNA, 25 bp, Homo sapien
gaagatgatgccaagagatcgagca

SEQ ID NO: 5409883 - DNA, 25 bp, Homo sapien
tgaagatgatgccaagagatcgagc

SEQ ID NO: 5409884 - DNA, 25 bp, Homo sapien
atgaagatgatgccaagagatcgag

SEQ ID NO: 5409885 - DNA, 25 bp, Homo sapien
aataaccatccttgtagataagttc

SEQ ID NO: 5409886 - DNA, 25 bp, Homo sapien
tgcaataaccatccttgtagataag

SEQ ID NO: 5409887 - DNA, 25 bp, Homo sapien
gcaataaccatccttgtagataagt

SEQ ID NO: 5409888 - DNA, 25 bp, Homo sapien
tttgcaataaccatccttgtagata

SEQ ID NO: 5409889 - DNA, 25 bp, Homo sapien
catgtaatatatggtcctacaatcc

SEQ ID NO: 5409890 - DNA, 25 bp, Homo sapien
cccccatgtaatatatggtcctaca

SEQ ID NO: 5409891 - DNA, 25 bp, Homo sapien
tatggtcctacaatcctcagaatgt

SEQ ID NO: 5409892 - DNA, 25 bp, Homo sapien
cctacaatcctcagaatgttaaacg

SEQ ID NO: 5409893 - DNA, 25 bp, Homo sapien
ctcacatcactgatacctccgatcc

SEQ ID NO: 5409894 - DNA, 25 bp, Homo sapien
catcactgatacctccgatcctgat

SEQ ID NO: 5409895 - DNA, 25 bp, Homo sapien
ttgggctcacatcactgatacctcc

SEQ ID NO: 5409896 - DNA, 25 bp, Homo sapien
ggctcacatcactgatacctccgat

SEQ ID NO: 5409897 - DNA, 25 bp, Homo sapien
cagctctacgaaatcccattgcttt

SEQ ID NO: 5409898 - DNA, 25 bp, Homo sapien
tacctatcgaatttctgtgctgtac

SEQ ID NO: 5409899 - DNA, 25 bp, Homo sapien
tttcttgccatcctacctatcgaat

SEQ ID NO: 5409900 - DNA, 25 bp, Homo sapien
tcagctctacgaaatcccattgctt

SEQ ID NO: 5409901 - DNA, 25 bp, Homo sapien
caggatttgccaatattgtgagggt

SEQ ID NO: 5409902 - DNA, 25 bp, Homo sapien
ccaatattgtgagggtatgtcactg

SEQ ID NO: 5409903 - DNA, 25 bp, Homo sapien
tgtgtcatcaggaactaccacagca

SEQ ID NO: 5409904 - DNA, 25 bp, Homo sapien
cctttgtccctctgaagtattattt

SEQ ID NO: 5409905 - DNA, 25 bp, Homo sapien
ccgggcttggctcgtgtgggactgt

SEQ ID NO: 5409906 - DNA, 25 bp, Homo sapien
ggagaggagtgacatatttgcatat

SEQ ID NO: 5409907 - DNA, 25 bp, Homo sapien
ttaggcacatagagcataccttttc

SEQ ID NO: 5409908 - DNA, 25 bp, Homo sapien
tgtctccataggagcagttttaggc

SEQ ID NO: 5409909 - DNA, 25 bp, Homo sapien
ttcactgctgagtcgcttaattgtc

SEQ ID NO: 5409910 - DNA, 25 bp, Homo sapien
cactgctgagtcgcttaattgtcca

SEQ ID NO: 5409911 - DNA, 25 bp, Homo sapien
caaaccctgagagcggctggcaggc

SEQ ID NO: 5409912 - DNA, 25 bp, Homo sapien
tccaaaccctgagagcggctggcag

SEQ ID NO: 5409913 - DNA, 25 bp, Homo sapien
tctcttccccaatacctcttttcat

SEQ ID NO: 5409914 - DNA, 25 bp, Homo sapien
ccttagattcagtacagaatccatc

SEQ ID NO: 5409915 - DNA, 25 bp, Homo sapien
tacagaatccatctcttccccaata

SEQ ID NO: 5409916 - DNA, 25 bp, Homo sapien
tagattcagtacagaatccatctct

SEQ ID NO: 5409917 - DNA, 25 bp, Homo sapien
aagcagtgacagtaatgctgttgga

SEQ ID NO: 5409918 - DNA, 25 bp, Homo sapien
gcagtgacagtaatgctgttggatt

SEQ ID NO: 5409919 - DNA, 25 bp, Homo sapien
caggtctcacattcagagcctcttt

SEQ ID NO: 5409920 - DNA, 25 bp, Homo sapien
acttttgccaggtctcacattcaga

SEQ ID NO: 5409921 - DNA, 25 bp, Homo sapien
gaatgtcccattcaaacctcacaaa

SEQ ID NO: 5409922 - DNA, 25 bp, Homo sapien
acctcacaaaggagacgaaaatttg

SEQ ID NO: 5409923 - DNA, 25 bp, Homo sapien
tctcagcaactttacccccttattg

SEQ ID NO: 5409924 - DNA, 25 bp, Homo sapien
gattgggtctgccagtctcatccat

SEQ ID NO: 5409925 - DNA, 25 bp, Homo sapien
gaatattaagctctttatattgtga

SEQ ID NO: 5409926 - DNA, 25 bp, Homo sapien
tattgtgaagcttgcaaattatcag

SEQ ID NO: 5409927 - DNA, 25 bp, Homo sapien
caacttcagtaaccatataatccaa

SEQ ID NO: 5409928 - DNA, 25 bp, Homo sapien
ttacagagctagtgaccctgagcca

SEQ ID NO: 5409929 - DNA, 25 bp, Homo sapien
tgagctgtggaaaataggagccccg

SEQ ID NO: 5409930 - DNA, 25 bp, Homo sapien
catggcatgtggtatcaactggaga

SEQ ID NO: 5409931 - DNA, 25 bp, Homo sapien
ttatctccccagttgccacggagtc

SEQ ID NO: 5409932 - DNA, 25 bp, Homo sapien
tctgcgatttcccatggcatgtggt

SEQ ID NO: 5409933 - DNA, 25 bp, Homo sapien
agaaaagctactaccgagtgtctta

SEQ ID NO: 5409934 - DNA, 25 bp, Homo sapien
gaaaagctactaccgagtgtcttac

SEQ ID NO: 5409935 - DNA, 25 bp, Homo sapien
aagaaaagctactaccgagtgtctt

SEQ ID NO: 5409936 - DNA, 25 bp, Homo sapien
cgctcattagcagctcccagtctag

SEQ ID NO: 5409937 - DNA, 25 bp, Homo sapien
gtctccagcctgcattggtttggac

SEQ ID NO: 5409938 - DNA, 25 bp, Homo sapien
ctcattagcagctcccagtctaggc

SEQ ID NO: 5409939 - DNA, 25 bp, Homo sapien
tctccagcctgcattggtttggaca

SEQ ID NO: 5409940 - DNA, 25 bp, Homo sapien
cttttctggcagctcattagtaggt

SEQ ID NO: 5409941 - DNA, 25 bp, Homo sapien
gcactgatgcataagagacagtcat

SEQ ID NO: 5409942 - DNA, 25 bp, Homo sapien
gctcattagtaggtgcactgatgca

SEQ ID NO: 5409943 - DNA, 25 bp, Homo sapien
cataagagacagtcattagaagtgt

SEQ ID NO: 5409944 - DNA, 25 bp, Homo sapien
agagattctgttgctatattgagaa

SEQ ID NO: 5409945 - DNA, 25 bp, Homo sapien
gagattctgttgctatattgagaat

SEQ ID NO: 5409946 - DNA, 25 bp, Homo sapien
attctgttgctatattgagaatgac

SEQ ID NO: 5409947 - DNA, 25 bp, Homo sapien
gattctgttgctatattgagaatga

SEQ ID NO: 5409948 - DNA, 25 bp, Homo sapien
ttgcctgttttgcctgggcagtgat

SEQ ID NO: 5409949 - DNA, 25 bp, Homo sapien
cagtgatgaatctgttggcaagaga

SEQ ID NO: 5409950 - DNA, 25 bp, Homo sapien
catgacactaatgtattttgcctgt

SEQ ID NO: 5409951 - DNA, 25 bp, Homo sapien
caaataagttttgttgctgagagac

SEQ ID NO: 5409952 - DNA, 25 bp, Homo sapien
taagctgtagattatggtttgaaag

SEQ ID NO: 5409953 - DNA, 25 bp, Homo sapien
aaggtatagtcaatgtaatgaatcc

SEQ ID NO: 5409954 - DNA, 25 bp, Homo sapien
gtttgaaaggtatagtcaatgtaat

SEQ ID NO: 5409955 - DNA, 25 bp, Homo sapien
aatttataactgcaaggcttaatta

SEQ ID NO: 5409956 - DNA, 25 bp, Homo sapien
tttaaccccaattggcctggcctca

SEQ ID NO: 5409957 - DNA, 25 bp, Homo sapien
gctggcccttgatcactcttaatga

SEQ ID NO: 5409958 - DNA, 25 bp, Homo sapien
tgctggcccttgatcactcttaatg

SEQ ID NO: 5409959 - DNA, 25 bp, Homo sapien
tccctgcctgctttaaccccaattg

SEQ ID NO: 5409960 - DNA, 25 bp, Homo sapien
ttctcagttgtgcatatgagtttgc

SEQ ID NO: 5409961 - DNA, 25 bp, Homo sapien
agttgtgcatatgagtttgctttca

SEQ ID NO: 5409962 - DNA, 25 bp, Homo sapien
tctcagttgtgcatatgagtttgct

SEQ ID NO: 5409963 - DNA, 25 bp, Homo sapien
tcagttgtgcatatgagtttgcttt

SEQ ID NO: 5409964 - DNA, 25 bp, Homo sapien
tttcctgatcaataatacccttctt

SEQ ID NO: 5409965 - DNA, 25 bp, Homo sapien
ccttttttatgctttggaacagcaa

SEQ ID NO: 5409966 - DNA, 25 bp, Homo sapien
tctccattccccttcatgtaaagtt

SEQ ID NO: 5409967 - DNA, 25 bp, Homo sapien
ttttatgctttggaacagcaatcat

SEQ ID NO: 5409968 - DNA, 25 bp, Homo sapien
tgaacactaaggacactctgcaggg

SEQ ID NO: 5409969 - DNA, 25 bp, Homo sapien
tcagagcagtgtaatagcgattccg

SEQ ID NO: 5409970 - DNA, 25 bp, Homo sapien
tccttcctggagctaaagggcagag

SEQ ID NO: 5409971 - DNA, 25 bp, Homo sapien
tctgcaaagcaagtcactgggcaca

SEQ ID NO: 5409972 - DNA, 25 bp, Homo sapien
gctttatgaatgtagaaacctagta

SEQ ID NO: 5409973 - DNA, 25 bp, Homo sapien
gagggagccatggtgaaaacaattc

SEQ ID NO: 5409974 - DNA, 25 bp, Homo sapien
gaacttggtgaagtacaatcaggaa

SEQ ID NO: 5409975 - DNA, 25 bp, Homo sapien
atctggtacctcgtggtcctaaaat

SEQ ID NO: 5409976 - DNA, 25 bp, Homo sapien
tatttcataacagtactgcgtttgt

SEQ ID NO: 5409977 - DNA, 25 bp, Homo sapien
tttcataacagtactgcgtttgttc

SEQ ID NO: 5409978 - DNA, 25 bp, Homo sapien
atttcataacagtactgcgtttgtt

SEQ ID NO: 5409979 - DNA, 25 bp, Homo sapien
ccactcgagagtagcacaagatggg

SEQ ID NO: 5409980 - DNA, 25 bp, Homo sapien
caaatgtgactgatgcaatctaaca

SEQ ID NO: 5409981 - DNA, 25 bp, Homo sapien
tactatatttatccagcctgaagag

SEQ ID NO: 5409982 - DNA, 25 bp, Homo sapien
aagaaatctggcagaccatgaatcc

SEQ ID NO: 5409983 - DNA, 25 bp, Homo sapien
cttcatattcgaaatgacatagagg

SEQ ID NO: 5409984 - DNA, 25 bp, Homo sapien
aacaggattgggcataaaaacatta

SEQ ID NO: 5409985 - DNA, 25 bp, Homo sapien
gacatagaggtatgtacatttcata

SEQ ID NO: 5409986 - DNA, 25 bp, Homo sapien
caaagccagattctgaatcactgat

SEQ ID NO: 5409987 - DNA, 25 bp, Homo sapien
ttattgatgttcatattttcatcaa

SEQ ID NO: 5409988 - DNA, 25 bp, Homo sapien
ttgatgttcatattttcatcaatca

SEQ ID NO: 5409989 - DNA, 25 bp, Homo sapien
tgatgttcatattttcatcaatcat

SEQ ID NO: 5409990 - DNA, 25 bp, Homo sapien
attattgatgttcatattttcatca

SEQ ID NO: 5409991 - DNA, 25 bp, Homo sapien
tagttaaatgcccttcttcctcaca

SEQ ID NO: 5409992 - DNA, 25 bp, Homo sapien
atgttgagtgctagttaaatgccct

SEQ ID NO: 5409993 - DNA, 25 bp, Homo sapien
caaagttcatagtcaaccagaggaa

SEQ ID NO: 5409994 - DNA, 25 bp, Homo sapien
ttaatgttgagtgctagttaaatgc

SEQ ID NO: 5409995 - DNA, 25 bp, Homo sapien
tcaggaaacgcactcctgaagccgc

SEQ ID NO: 5409996 - DNA, 25 bp, Homo sapien
aggaaacgcactcctgaagccgcag

SEQ ID NO: 5409997 - DNA, 25 bp, Homo sapien
caggaaacgcactcctgaagccgca

SEQ ID NO: 5409998 - DNA, 25 bp, Homo sapien
aacaaccccgggtgtcattcgcgtg

SEQ ID NO: 5409999 - DNA, 25 bp, Homo sapien
tagggactccctactctgactcctg

SEQ ID NO: 5410000 - DNA, 25 bp, Homo sapien
cagctgttgccactcgggctgtcgc

SEQ ID NO: 5410001 - DNA, 25 bp, Homo sapien
gccaatccccgaagcaagggaggga

SEQ ID NO: 5410002 - DNA, 25 bp, Homo sapien
cacagtctgcagttcactaactagc

SEQ ID NO: 5410003 - DNA, 25 bp, Homo sapien
acgcacacacacagtctgcagttca

SEQ ID NO: 5410004 - DNA, 25 bp, Homo sapien
taactagctctattttcactaaaca

SEQ ID NO: 5410005 - DNA, 25 bp, Homo sapien
ttcactaaacagatggccgcgttgc

SEQ ID NO: 5410006 - DNA, 25 bp, Homo sapien
ccttgcctttgtgcggtgaaagccc

SEQ ID NO: 5410007 - DNA, 25 bp, Homo sapien
aataatttttccttgcctttgtgcg

SEQ ID NO: 5410008 - DNA, 25 bp, Homo sapien
atttttccttgcctttgtgcggtga

SEQ ID NO: 5410009 - DNA, 25 bp, Homo sapien
tgcctttgtgcggtgaaagccccat

SEQ ID NO: 5410010 - DNA, 25 bp, Homo sapien
catacatagagggaaaaggcaggct

SEQ ID NO: 5410011 - DNA, 25 bp, Homo sapien
gctaatttcactttaccaaaacagc

SEQ ID NO: 5410012 - DNA, 25 bp, Homo sapien
gaaaaggcaggctaatttcacttta

SEQ ID NO: 5410013 - DNA, 25 bp, Homo sapien
tgaaggttggagatactatatagca

SEQ ID NO: 5410014 - DNA, 25 bp, Homo sapien
cccatgcatttgattatgccttcct

SEQ ID NO: 5410015 - DNA, 25 bp, Homo sapien
ggtgaattatttgccaacacttcta

SEQ ID NO: 5410016 - DNA, 25 bp, Homo sapien
tatcattaccattgggttcccatgc

SEQ ID NO: 5410017 - DNA, 25 bp, Homo sapien
cctgtcccatttatagagaccagaa

SEQ ID NO: 5410018 - DNA, 25 bp, Homo sapien
ctggcttaagtccaacttgggtaat

SEQ ID NO: 5410019 - DNA, 25 bp, Homo sapien
ttctggcttaagtccaacttgggta

SEQ ID NO: 5410020 - DNA, 25 bp, Homo sapien
tctggcttaagtccaacttgggtaa

SEQ ID NO: 5410021 - DNA, 25 bp, Homo sapien
agtccaacttgggtaattacattct

SEQ ID NO: 5410022 - DNA, 25 bp, Homo sapien
agctaaatagatgccacatttaacc

SEQ ID NO: 5410023 - DNA, 25 bp, Homo sapien
gatcttctttgggcccaaagacatt

SEQ ID NO: 5410024 - DNA, 25 bp, Homo sapien
tgtgatattgctgcacatagctaaa

SEQ ID NO: 5410025 - DNA, 25 bp, Homo sapien
tgctgcacatagctaaatagatgcc

SEQ ID NO: 5410026 - DNA, 25 bp, Homo sapien
gatggtggcatctctgtggtgaaac

SEQ ID NO: 5410027 - DNA, 25 bp, Homo sapien
catctctgtggtgaaaccttgatcc

SEQ ID NO: 5410028 - DNA, 25 bp, Homo sapien
tctctgtggtgaaaccttgatcctt

SEQ ID NO: 5410029 - DNA, 25 bp, Homo sapien
ggcatctctgtggtgaaaccttgat

SEQ ID NO: 5410030 - DNA, 25 bp, Homo sapien
tctgtttcagctagatttggaaaat

SEQ ID NO: 5410031 - DNA, 25 bp, Homo sapien
gcataatggctctaacacaatttta

SEQ ID NO: 5410032 - DNA, 25 bp, Homo sapien
tttggaaaatgtatgcctaagttgc

SEQ ID NO: 5410033 - DNA, 25 bp, Homo sapien
tatgcctaagttgcataatggctct

SEQ ID NO: 5410034 - DNA, 25 bp, Homo sapien
gcccaccccactacaaccaggtaga

SEQ ID NO: 5410035 - DNA, 25 bp, Homo sapien
ctgcccaccccactacaaccaggta

SEQ ID NO: 5410036 - DNA, 25 bp, Homo sapien
ccaccccactacaaccaggtagaat

SEQ ID NO: 5410037 - DNA, 25 bp, Homo sapien
caccccactacaaccaggtagaata

SEQ ID NO: 5410038 - DNA, 25 bp, Homo sapien
aacggaatttgttataacaatagtg

SEQ ID NO: 5410039 - DNA, 25 bp, Homo sapien
gaggcagactgcagaaccaattgag

SEQ ID NO: 5410040 - DNA, 25 bp, Homo sapien
tgtctgatggcaatcctttctcctc

SEQ ID NO: 5410041 - DNA, 25 bp, Homo sapien
gactgcagaaccaattgagaaaata

SEQ ID NO: 5410042 - DNA, 25 bp, Homo sapien
tcttataacgtcaaactgatttttc

SEQ ID NO: 5410043 - DNA, 25 bp, Homo sapien
ctggtttctgccatagcttctcttt

SEQ ID NO: 5410044 - DNA, 25 bp, Homo sapien
tggtttctgccatagcttctctttt

SEQ ID NO: 5410045 - DNA, 25 bp, Homo sapien
cttgttttcttataacgtcaaactg

SEQ ID NO: 5410046 - DNA, 25 bp, Homo sapien
cttaaaggggtcattcatgtgggca

SEQ ID NO: 5410047 - DNA, 25 bp, Homo sapien
tgggcagactccactgcggcttttg

SEQ ID NO: 5410048 - DNA, 25 bp, Homo sapien
caaatggcatcactcaggtttaaag

SEQ ID NO: 5410049 - DNA, 25 bp, Homo sapien
taaatctgaacactcccaaatggca

SEQ ID NO: 5410050 - DNA, 25 bp, Homo sapien
aactgacactaattgtatgtgtctg

SEQ ID NO: 5410051 - DNA, 25 bp, Homo sapien
tgtaactgacactaattgtatgtgt

SEQ ID NO: 5410052 - DNA, 25 bp, Homo sapien
gacactaattgtatgtgtctgtatt

SEQ ID NO: 5410053 - DNA, 25 bp, Homo sapien
ccttcagtccctaaatgttcagtta

SEQ ID NO: 5410054 - DNA, 25 bp, Homo sapien
tgcaactaaaggagggactaccctc

SEQ ID NO: 5410055 - DNA, 25 bp, Homo sapien
cctcgtatgcatgtgggcatgggca

SEQ ID NO: 5410056 - DNA, 25 bp, Homo sapien
gcaagaggtcagtaggcataaatcc

SEQ ID NO: 5410057 - DNA, 25 bp, Homo sapien
tgattataaactgttcctttctaca

SEQ ID NO: 5410058 - DNA, 25 bp, Homo sapien
tcagaaaatcttatgtttcaagttt

SEQ ID NO: 5410059 - DNA, 25 bp, Homo sapien
cagaaaatcttatgtttcaagtttt

SEQ ID NO: 5410060 - DNA, 25 bp, Homo sapien
ttccatgatcccattgccaaattat

SEQ ID NO: 5410061 - DNA, 25 bp, Homo sapien
taaattgcatctattaaatcaagaa

SEQ ID NO: 5410062 - DNA, 25 bp, Homo sapien
aaaattttccatgatcccattgcca

SEQ ID NO: 5410063 - DNA, 25 bp, Homo sapien
gatcccattgccaaattatactgtg

SEQ ID NO: 5410064 - DNA, 25 bp, Homo sapien
catgtgcgaattgggactctcctgg

SEQ ID NO: 5410065 - DNA, 25 bp, Homo sapien
tgaactgagggtcatgtgcgaattg

SEQ ID NO: 5410066 - DNA, 25 bp, Homo sapien
tgtttgtgaactgagggtcatgtgc

SEQ ID NO: 5410067 - DNA, 25 bp, Homo sapien
aaactctatgatgaggtggtgtttg

SEQ ID NO: 5410068 - DNA, 25 bp, Homo sapien
tttcttgtgtgtagacatagagctg

SEQ ID NO: 5410069 - DNA, 25 bp, Homo sapien
tgtgtgtagacatagagctgggaat

SEQ ID NO: 5410070 - DNA, 25 bp, Homo sapien
taaggggaaagagatgaactgcatt

SEQ ID NO: 5410071 - DNA, 25 bp, Homo sapien
aaagagatgaactgcatttaggaaa

SEQ ID NO: 5410072 - DNA, 25 bp, Homo sapien
caatctagtttcaccacccctatta

SEQ ID NO: 5410073 - DNA, 25 bp, Homo sapien
tctagtttcaccacccctattagct

SEQ ID NO: 5410074 - DNA, 25 bp, Homo sapien
caggggcaatgcttgcaaaaaccaa

SEQ ID NO: 5410075 - DNA, 25 bp, Homo sapien
aaaattgtagagtattgtcaggggc

SEQ ID NO: 5410076 - DNA, 25 bp, Homo sapien
tctgttgaagtaagcttgtctaggc

SEQ ID NO: 5410077 - DNA, 25 bp, Homo sapien
gctttaagctgtgaggctagttgac

SEQ ID NO: 5410078 - DNA, 25 bp, Homo sapien
tgtctaggcagaatagctttaagct

SEQ ID NO: 5410079 - DNA, 25 bp, Homo sapien
tctactccatatgggtccaatctgg

SEQ ID NO: 5410080 - DNA, 25 bp, Homo sapien
acagtgagagcaattggctaggagt

SEQ ID NO: 5410081 - DNA, 25 bp, Homo sapien
agagcaattggctaggagtgaaata

SEQ ID NO: 5410082 - DNA, 25 bp, Homo sapien
tcacagtgagagcaattggctagga

SEQ ID NO: 5410083 - DNA, 25 bp, Homo sapien
tgagagcaattggctaggagtgaaa

SEQ ID NO: 5410084 - DNA, 25 bp, Homo sapien
gtccttaataacacaagggattcca

SEQ ID NO: 5410085 - DNA, 25 bp, Homo sapien
taacagttgtatagtcttggaacac

SEQ ID NO: 5410086 - DNA, 25 bp, Homo sapien
catctttgctaaggattctgtaaca

SEQ ID NO: 5410087 - DNA, 25 bp, Homo sapien
cacatgctgattcatacacatcttt

SEQ ID NO: 5410088 - DNA, 25 bp, Homo sapien
tataaccttggcattgaaatttgtc

SEQ ID NO: 5410089 - DNA, 25 bp, Homo sapien
caaactctgtatctcagagaagtgt

SEQ ID NO: 5410090 - DNA, 25 bp, Homo sapien
gctgccaatataaccttggcattga

SEQ ID NO: 5410091 - DNA, 25 bp, Homo sapien
ttgtcagactacagtctttgcaaac

SEQ ID NO: 5410092 - DNA, 25 bp, Homo sapien
tgactacttctaccaatccaaaagg

SEQ ID NO: 5410093 - DNA, 25 bp, Homo sapien
cagcctcatggtaattgttgatgca

SEQ ID NO: 5410094 - DNA, 25 bp, Homo sapien
tataaaaaagcctgtgagcgacgag

SEQ ID NO: 5410095 - DNA, 25 bp, Homo sapien
tcaacatgtcttccgaataggaaca

SEQ ID NO: 5410096 - DNA, 25 bp, Homo sapien
tgttgttttacattactataggaaa

SEQ ID NO: 5410097 - DNA, 25 bp, Homo sapien
gataattgctcttttatcaatatcg

SEQ ID NO: 5410098 - DNA, 25 bp, Homo sapien
gtttaacaacataccctaacacaga

SEQ ID NO: 5410099 - DNA, 25 bp, Homo sapien
tcgataacagagtacaaatttcatg

SEQ ID NO: 5410100 - DNA, 25 bp, Homo sapien
caaggtcacattggatgtagatttc

SEQ ID NO: 5410101 - DNA, 25 bp, Homo sapien
gatttcatttgacctattcagtgaa

SEQ ID NO: 5410102 - DNA, 25 bp, Homo sapien
agtgaatgaacatggaagcatctac

SEQ ID NO: 5410103 - DNA, 25 bp, Homo sapien
gaagcatctacttattgggtgaaaa

SEQ ID NO: 5410104 - DNA, 25 bp, Homo sapien
tctaaaacttcctatcatattttta

SEQ ID NO: 5410105 - DNA, 25 bp, Homo sapien
aaaatatctaaaacttcctatcata

SEQ ID NO: 5410106 - DNA, 25 bp, Homo sapien
gaaaatatctaaaacttcctatcat

SEQ ID NO: 5410107 - DNA, 25 bp, Homo sapien
taaggagtaacaaccccgaatgtca

SEQ ID NO: 5410108 - DNA, 25 bp, Homo sapien
ccccgaatgtcataggaggtggtaa

SEQ ID NO: 5410109 - DNA, 25 bp, Homo sapien
gagtaatgcttaagatctaatgtaa

SEQ ID NO: 5410110 - DNA, 25 bp, Homo sapien
ggtaactgcatttgagtaatgctta

SEQ ID NO: 5410111 - DNA, 25 bp, Homo sapien
gtactgtaaagactttcctttgatc

SEQ ID NO: 5410112 - DNA, 25 bp, Homo sapien
caaattccaaagtactgtaaagact

SEQ ID NO: 5410113 - DNA, 25 bp, Homo sapien
actgtaaagactttcctttgatctt

SEQ ID NO: 5410114 - DNA, 25 bp, Homo sapien
agtactgtaaagactttcctttgat

SEQ ID NO: 5410115 - DNA, 25 bp, Homo sapien
aaagaatgctagaaagagataaatc

SEQ ID NO: 5410116 - DNA, 25 bp, Homo sapien
taggactatttttgggtaactgcat

SEQ ID NO: 5410117 - DNA, 25 bp, Homo sapien
taatacatcttttagcagattgcaa

SEQ ID NO: 5410118 - DNA, 25 bp, Homo sapien
gattgcaaacaggtgcactcatttt

SEQ ID NO: 5410119 - DNA, 25 bp, Homo sapien
ttttcctgtacatgctgactgcaaa

SEQ ID NO: 5410120 - DNA, 25 bp, Homo sapien
ctttgtggagattagcatgacatct

SEQ ID NO: 5410121 - DNA, 25 bp, Homo sapien
tgtctttattacctcctttgtggag

SEQ ID NO: 5410122 - DNA, 25 bp, Homo sapien
ggagattagcatgacatctgctaag

SEQ ID NO: 5410123 - DNA, 25 bp, Homo sapien
tctgatactatcctgctggaaacta

SEQ ID NO: 5410124 - DNA, 25 bp, Homo sapien
tgaggactgatcttgtgaaatttac

SEQ ID NO: 5410125 - DNA, 25 bp, Homo sapien
gctctaaagtactcacagggctttg

SEQ ID NO: 5410126 - DNA, 25 bp, Homo sapien
tgagttttactagcattgcccatgg

SEQ ID NO: 5410127 - DNA, 25 bp, Homo sapien
atgtgtaacctgtgaggcatatttg

SEQ ID NO: 5410128 - DNA, 25 bp, Homo sapien
aaggatcatctggaatgtgtaacct

SEQ ID NO: 5410129 - DNA, 25 bp, Homo sapien
tttgatgtcattagccaatgtgaaa

SEQ ID NO: 5410130 - DNA, 25 bp, Homo sapien
gcatatttgatgtcattagccaatg

SEQ ID NO: 5410131 - DNA, 25 bp, Homo sapien
tttgcctatgtctctctcatgttcc

SEQ ID NO: 5410132 - DNA, 25 bp, Homo sapien
ctttacacaatgtttgtgataccag

SEQ ID NO: 5410133 - DNA, 25 bp, Homo sapien
acacaatgtttgtgataccagatac

SEQ ID NO: 5410134 - DNA, 25 bp, Homo sapien
aaagctttgatctagctgtatgaga

SEQ ID NO: 5410135 - DNA, 25 bp, Homo sapien
gatctagctgtatgagagtatttac

SEQ ID NO: 5410136 - DNA, 25 bp, Homo sapien
ccttgttgcatgaatgtatcatctg

SEQ ID NO: 5410137 - DNA, 25 bp, Homo sapien
ctggtggtaccttgttgcatgaatg

SEQ ID NO: 5410138 - DNA, 25 bp, Homo sapien
gataattcagggctctggtggtacc

SEQ ID NO: 5410139 - DNA, 25 bp, Homo sapien
tttgataattcagggctctggtggt

SEQ ID NO: 5410140 - DNA, 25 bp, Homo sapien
tcttcagttatctccacaaatcgtg

SEQ ID NO: 5410141 - DNA, 25 bp, Homo sapien
ttttcttgccagctataagcgtggt

SEQ ID NO: 5410142 - DNA, 25 bp, Homo sapien
caggaaggatagtgctcctaaacaa

SEQ ID NO: 5410143 - DNA, 25 bp, Homo sapien
cccgcaaagttaatcccagtggagt

SEQ ID NO: 5410144 - DNA, 25 bp, Homo sapien
taaatgactttcaaaagatgcaccc

SEQ ID NO: 5410145 - DNA, 25 bp, Homo sapien
gatatacatacccttgccaattgac

SEQ ID NO: 5410146 - DNA, 25 bp, Homo sapien
tttgccatctaatacacctctgagc

SEQ ID NO: 5410147 - DNA, 25 bp, Homo sapien
gccaattgacagaatgccacctaag

SEQ ID NO: 5410148 - DNA, 25 bp, Homo sapien
gcgcagttgtgcataatggaaaaca

SEQ ID NO: 5410149 - DNA, 25 bp, Homo sapien
tttgctcctgaagtgcatcaccatt

SEQ ID NO: 5410150 - DNA, 25 bp, Homo sapien
ttgatgggaagctctgtaaacctat

SEQ ID NO: 5410151 - DNA, 25 bp, Homo sapien
cagatatcctcatcacgtgcgcagt

SEQ ID NO: 5410152 - DNA, 25 bp, Homo sapien
accctgaagtcggtgcagctagaat

SEQ ID NO: 5410153 - DNA, 25 bp, Homo sapien
ctgaagtcggtgcagctagaatgaa

SEQ ID NO: 5410154 - DNA, 25 bp, Homo sapien
ccgtaactaaaatctctgtacctgc

SEQ ID NO: 5410155 - DNA, 25 bp, Homo sapien
aacacagtattcttggtaaagagtt

SEQ ID NO: 5410156 - DNA, 25 bp, Homo sapien
ttttaatctttgtaggcatcagagt

SEQ ID NO: 5410157 - DNA, 25 bp, Homo sapien
ttaatctttgtaggcatcagagttg

SEQ ID NO: 5410158 - DNA, 25 bp, Homo sapien
ccacatatttacaattatctttttt

SEQ ID NO: 5410159 - DNA, 25 bp, Homo sapien
aatctttgtaggcatcagagttggc

SEQ ID NO: 5410160 - DNA, 25 bp, Homo sapien
ccctggaatttgtagccacgaccga

SEQ ID NO: 5410161 - DNA, 25 bp, Homo sapien
gttgtatacagttggcagccctgga

SEQ ID NO: 5410162 - DNA, 25 bp, Homo sapien
tgaattaaagtccatagaggttagc

SEQ ID NO: 5410163 - DNA, 25 bp, Homo sapien
ggaaaatcctctatgttgatcaaga

SEQ ID NO: 5410164 - DNA, 25 bp, Homo sapien
acatccatgttccactcatcaacca

SEQ ID NO: 5410165 - DNA, 25 bp, Homo sapien
cttccatgccgagttttttattctg

SEQ ID NO: 5410166 - DNA, 25 bp, Homo sapien
aaatcccagtcagcttccatgccga

SEQ ID NO: 5410167 - DNA, 25 bp, Homo sapien
tcatcaaccactgctttagaaagct

SEQ ID NO: 5410168 - DNA, 25 bp, Homo sapien
ctgtcactatggctcccagcatttt

SEQ ID NO: 5410169 - DNA, 25 bp, Homo sapien
ccagcatttttctcccttaatgtct

SEQ ID NO: 5410170 - DNA, 25 bp, Homo sapien
taatgtcttttttagctgtaggaag

SEQ ID NO: 5410171 - DNA, 25 bp, Homo sapien
ttctctttaaagattcagtgctttc

SEQ ID NO: 5410172 - DNA, 25 bp, Homo sapien
cccaaagtaattggggaaatcagtg

SEQ ID NO: 5410173 - DNA, 25 bp, Homo sapien
agtgaactgtggtgtgtgtcgcttc

SEQ ID NO: 5410174 - DNA, 25 bp, Homo sapien
gaactgtggtgtgtgtcgcttctca

SEQ ID NO: 5410175 - DNA, 25 bp, Homo sapien
ggtgtgtgtcgcttctcaaacacca

SEQ ID NO: 5410176 - DNA, 25 bp, Homo sapien
gctaggtgatacagcaagtcttctg

SEQ ID NO: 5410177 - DNA, 25 bp, Homo sapien
acagcaagtcttctgtaattaattg

SEQ ID NO: 5410178 - DNA, 25 bp, Homo sapien
tgacagctaggtgatacagcaagtc

SEQ ID NO: 5410179 - DNA, 25 bp, Homo sapien
tcattgacagctaggtgatacagca

SEQ ID NO: 5410180 - DNA, 25 bp, Homo sapien
ccataggcagaatacagcagacttc

SEQ ID NO: 5410181 - DNA, 25 bp, Homo sapien
tgccttcttctaccatatgcacagt

SEQ ID NO: 5410182 - DNA, 25 bp, Homo sapien
tgtgcctaaactcccctgctaaaac

SEQ ID NO: 5410183 - DNA, 25 bp, Homo sapien
gtaaaatggctggtacatcacttcc

SEQ ID NO: 5410184 - DNA, 25 bp, Homo sapien
tacaatacaatatacctcaagcaaa

SEQ ID NO: 5410185 - DNA, 25 bp, Homo sapien
ttcttagtgatctccctccaaaaga

SEQ ID NO: 5410186 - DNA, 25 bp, Homo sapien
gcaaaattgccatcatgctgagaag

SEQ ID NO: 5410187 - DNA, 25 bp, Homo sapien
aatttcaacttctactttgtagctc

SEQ ID NO: 5410188 - DNA, 25 bp, Homo sapien
cacgcagcacgggatgtttgatgag

SEQ ID NO: 5410189 - DNA, 25 bp, Homo sapien
gtgcacgccccatcgtacagagaga

SEQ ID NO: 5410190 - DNA, 25 bp, Homo sapien
tctatcagactcacggactggctgc

SEQ ID NO: 5410191 - DNA, 25 bp, Homo sapien
taacctcatggtcggagcctgctgg

SEQ ID NO: 5410192 - DNA, 25 bp, Homo sapien
ctcattctatttaggtataggacaa

SEQ ID NO: 5410193 - DNA, 25 bp, Homo sapien
tgatctcattctatttaggtatagg

SEQ ID NO: 5410194 - DNA, 25 bp, Homo sapien
ggagtaataaggtgacaatagaata

SEQ ID NO: 5410195 - DNA, 25 bp, Homo sapien
taataaggtgacaatagaatagcat

SEQ ID NO: 5410196 - DNA, 25 bp, Homo sapien
tgccagtcctgccactcagcagaat

SEQ ID NO: 5410197 - DNA, 25 bp, Homo sapien
caaatattgctgctaatctgctccc

SEQ ID NO: 5410198 - DNA, 25 bp, Homo sapien
tcaaatattgctgctaatctgctcc

SEQ ID NO: 5410199 - DNA, 25 bp, Homo sapien
cctgccactcagcagaattcgaggg

SEQ ID NO: 5410200 - DNA, 25 bp, Homo sapien
tcaggaatgctatgccagacggatt

SEQ ID NO: 5410201 - DNA, 25 bp, Homo sapien
cagacggatttagcagtggcttgac

SEQ ID NO: 5410202 - DNA, 25 bp, Homo sapien
gcttgacacgtccagactctaaagg

SEQ ID NO: 5410203 - DNA, 25 bp, Homo sapien
tagtgaaggcaaactccaagacagt

SEQ ID NO: 5410204 - DNA, 25 bp, Homo sapien
agatattccaccgtaaatttgtata

SEQ ID NO: 5410205 - DNA, 25 bp, Homo sapien
catagatttctagaaaccgcttttg

SEQ ID NO: 5410206 - DNA, 25 bp, Homo sapien
aatttgtatataatgcatagatttc

SEQ ID NO: 5410207 - DNA, 25 bp, Homo sapien
ctaagctcacaagatattccaccgt

SEQ ID NO: 5410208 - DNA, 25 bp, Homo sapien
ttttagtagatagaaacatagtcag

SEQ ID NO: 5410209 - DNA, 25 bp, Homo sapien
tagtcagaaaataggtagatgggca

SEQ ID NO: 5410210 - DNA, 25 bp, Homo sapien
tgggcattggtagagatataggtat

SEQ ID NO: 5410211 - DNA, 25 bp, Homo sapien
taatgactgtagttgttataaggca

SEQ ID NO: 5410212 - DNA, 25 bp, Homo sapien
tttgcaattacccactctggccttt

SEQ ID NO: 5410213 - DNA, 25 bp, Homo sapien
ctttgcaattacccactctggcctt

SEQ ID NO: 5410214 - DNA, 25 bp, Homo sapien
taacatacagtatctagcagggtgg

SEQ ID NO: 5410215 - DNA, 25 bp, Homo sapien
ggtatcgagcaaacagaccatccaa

SEQ ID NO: 5410216 - DNA, 25 bp, Homo sapien
gaaatttccatgtcagtagcaacta

SEQ ID NO: 5410217 - DNA, 25 bp, Homo sapien
gtagcaactatatcctcaacacctt

SEQ ID NO: 5410218 - DNA, 25 bp, Homo sapien
actgtttccctacaataaacaccag

SEQ ID NO: 5410219 - DNA, 25 bp, Homo sapien
tgtttccctacaataaacaccagga

SEQ ID NO: 5410220 - DNA, 25 bp, Homo sapien
ctgtttccctacaataaacaccagg

SEQ ID NO: 5410221 - DNA, 25 bp, Homo sapien
agcacacgatcagaaaagagaaggc

SEQ ID NO: 5410222 - DNA, 25 bp, Homo sapien
agggggaagcacacgatcagaaaag

SEQ ID NO: 5410223 - DNA, 25 bp, Homo sapien
caaatgcattttgattgtatggagg

SEQ ID NO: 5410224 - DNA, 25 bp, Homo sapien
gtcaaatgcattttgattgtatgga

SEQ ID NO: 5410225 - DNA, 25 bp, Homo sapien
aataatcaccctttgttcattatgg

SEQ ID NO: 5410226 - DNA, 25 bp, Homo sapien
gagcaactggcaaatcatgtgagta

SEQ ID NO: 5410227 - DNA, 25 bp, Homo sapien
attatggagcaactggcaaatcatg

SEQ ID NO: 5410228 - DNA, 25 bp, Homo sapien
caactggcaaatcatgtgagtaaac

SEQ ID NO: 5410229 - DNA, 25 bp, Homo sapien
ttccctgtatacttcaggctcatgc

SEQ ID NO: 5410230 - DNA, 25 bp, Homo sapien
tccctgtatacttcaggctcatgca

SEQ ID NO: 5410231 - DNA, 25 bp, Homo sapien
ccctgtatacttcaggctcatgcat

SEQ ID NO: 5410232 - DNA, 25 bp, Homo sapien
tctgagaatttgggaacctttctaa

SEQ ID NO: 5410233 - DNA, 25 bp, Homo sapien
tccataactacactgatgcccatct

SEQ ID NO: 5410234 - DNA, 25 bp, Homo sapien
atctccataactacactgatgccca

SEQ ID NO: 5410235 - DNA, 25 bp, Homo sapien
tctggggcacggatgctccattctc

SEQ ID NO: 5410236 - DNA, 25 bp, Homo sapien
aatttttccaaggtcatctatccag

SEQ ID NO: 5410237 - DNA, 25 bp, Homo sapien
cttgtcacagtcacatcagatgaaa

SEQ ID NO: 5410238 - DNA, 25 bp, Homo sapien
aagaaaaacgagttaacagtcagca

SEQ ID NO: 5410239 - DNA, 25 bp, Homo sapien
gaccactatcacagataatttcact

SEQ ID NO: 5410240 - DNA, 25 bp, Homo sapien
gtccacacggatagaagtaccactt

SEQ ID NO: 5410241 - DNA, 25 bp, Homo sapien
ccttggtgctattgaatctgcaatg

SEQ ID NO: 5410242 - DNA, 25 bp, Homo sapien
ctctgcagttgggatctgttatcct

SEQ ID NO: 5410243 - DNA, 25 bp, Homo sapien
acagtatggtactggaaggtagcca

SEQ ID NO: 5410244 - DNA, 25 bp, Homo sapien
atagcaagtatacttgaggaaggag

SEQ ID NO: 5410245 - DNA, 25 bp, Homo sapien
tagtatggatctttttgagccaatg

SEQ ID NO: 5410246 - DNA, 25 bp, Homo sapien
gccaatgtttcaggtcaacatggca

SEQ ID NO: 5410247 - DNA, 25 bp, Homo sapien
gaacaaatagcaagtatacttgagg

SEQ ID NO: 5410248 - DNA, 25 bp, Homo sapien
aagttactacatcaactggctgccc

SEQ ID NO: 5410249 - DNA, 25 bp, Homo sapien
gttactacatcaactggctgcccct

SEQ ID NO: 5410250 - DNA, 25 bp, Homo sapien
agttactacatcaactggctgcccc

SEQ ID NO: 5410251 - DNA, 25 bp, Homo sapien
ttactacatcaactggctgcccctc

SEQ ID NO: 5410252 - DNA, 25 bp, Homo sapien
tcagaaggccggaatttgtacaacc

SEQ ID NO: 5410253 - DNA, 25 bp, Homo sapien
gatcttaatggaggacttgggtctt

SEQ ID NO: 5410254 - DNA, 25 bp, Homo sapien
gatggtatggccagaagctgtatac

SEQ ID NO: 5410255 - DNA, 25 bp, Homo sapien
gaaattacgtttgtgggatcatcca

SEQ ID NO: 5410256 - DNA, 25 bp, Homo sapien
aggacatgttgattacgttttgttt

SEQ ID NO: 5410257 - DNA, 25 bp, Homo sapien
agaggacatgttgattacgttttgt

SEQ ID NO: 5410258 - DNA, 25 bp, Homo sapien
agtaccagtgcaaggcactgaaaag

SEQ ID NO: 5410259 - DNA, 25 bp, Homo sapien
aagaggacatgttgattacgttttg

SEQ ID NO: 5410260 - DNA, 25 bp, Homo sapien
ttccccgcatctcggtagatgtcct

SEQ ID NO: 5410261 - DNA, 25 bp, Homo sapien
tgtgagaatcacagaggaaaggcaa

SEQ ID NO: 5410262 - DNA, 25 bp, Homo sapien
gagagtcagacccactgcaagtggt

SEQ ID NO: 5410263 - DNA, 25 bp, Homo sapien
tcggtagatgtcctacagctgcctg

SEQ ID NO: 5410264 - DNA, 25 bp, Homo sapien
ctctgagggtataagtggagcgtta

SEQ ID NO: 5410265 - DNA, 25 bp, Homo sapien
agtggagcgttattttgaggtttag

SEQ ID NO: 5410266 - DNA, 25 bp, Homo sapien
agaaaaaccactctctagctttcgg

SEQ ID NO: 5410267 - DNA, 25 bp, Homo sapien
tttcgggtcccttcactgtagtgca

SEQ ID NO: 5410268 - DNA, 25 bp, Homo sapien
gcagagcactattgtgacgagatgg

SEQ ID NO: 5410269 - DNA, 25 bp, Homo sapien
tgggtcacatgcctctgttagcttg

SEQ ID NO: 5410270 - DNA, 25 bp, Homo sapien
gagcccttccatagagcaggttcct

SEQ ID NO: 5410271 - DNA, 25 bp, Homo sapien
tactagtaactggacttggctgaag

SEQ ID NO: 5410272 - DNA, 25 bp, Homo sapien
agggagtcacatttagccaaaatta

SEQ ID NO: 5410273 - DNA, 25 bp, Homo sapien
gggagtcacatttagccaaaattat

SEQ ID NO: 5410274 - DNA, 25 bp, Homo sapien
tgagtcagtactgaactgatgcccc

SEQ ID NO: 5410275 - DNA, 25 bp, Homo sapien
tgatgccccagcatggtatgaaggg

SEQ ID NO: 5410276 - DNA, 25 bp, Homo sapien
aactctaaaagccaggacactctga

SEQ ID NO: 5410277 - DNA, 25 bp, Homo sapien
actgctggaggtgtcgtctaatgga

SEQ ID NO: 5410278 - DNA, 25 bp, Homo sapien
actctgtattaaccctgtcttcact

SEQ ID NO: 5410279 - DNA, 25 bp, Homo sapien
aaactctgtattaaccctgtcttca

SEQ ID NO: 5410280 - DNA, 25 bp, Homo sapien
tctgtattaaccctgtcttcactct

SEQ ID NO: 5410281 - DNA, 25 bp, Homo sapien
ctgtattaaccctgtcttcactctt

SEQ ID NO: 5410282 - DNA, 25 bp, Homo sapien
catccgtggatcttaaagggcttta

SEQ ID NO: 5410283 - DNA, 25 bp, Homo sapien
tgggttcataacatactgggtgtct

SEQ ID NO: 5410284 - DNA, 25 bp, Homo sapien
tttgaagcagtaaccctgtaagtgc

SEQ ID NO: 5410285 - DNA, 25 bp, Homo sapien
tgatcacctttggacatctatggca

SEQ ID NO: 5410286 - DNA, 25 bp, Homo sapien
cctgttcggcaaagcagtcagctgg

SEQ ID NO: 5410287 - DNA, 25 bp, Homo sapien
tgttcggcaaagcagtcagctggaa

SEQ ID NO: 5410288 - DNA, 25 bp, Homo sapien
tttcctgttcggcaaagcagtcagc

SEQ ID NO: 5410289 - DNA, 25 bp, Homo sapien
tcctgttcggcaaagcagtcagctg

SEQ ID NO: 5410290 - DNA, 25 bp, Homo sapien
ctaaagtacagtggggcctatagag

SEQ ID NO: 5410291 - DNA, 25 bp, Homo sapien
agtacagtggggcctatagagccag

SEQ ID NO: 5410292 - DNA, 25 bp, Homo sapien
acagtggggcctatagagccagccc

SEQ ID NO: 5410293 - DNA, 25 bp, Homo sapien
tggggcctatagagccagcccacag

SEQ ID NO: 5410294 - DNA, 25 bp, Homo sapien
tcttaagtagccagattgccagtgt

SEQ ID NO: 5410295 - DNA, 25 bp, Homo sapien
gatgggcacataggaataaagctct

SEQ ID NO: 5410296 - DNA, 25 bp, Homo sapien
gaatagattgtcaggcataccggag

SEQ ID NO: 5410297 - DNA, 25 bp, Homo sapien
caaatgggacctcgatgaagaccta

SEQ ID NO: 5410298 - DNA, 25 bp, Homo sapien
ctgttcagtgtaaagacagtctttc

SEQ ID NO: 5410299 - DNA, 25 bp, Homo sapien
taatccacagtggaaactcatacac

SEQ ID NO: 5410300 - DNA, 25 bp, Homo sapien
tttaggttgctaatactgttcagtg

SEQ ID NO: 5410301 - DNA, 25 bp, Homo sapien
cacacttcactaatgcgtcttatca

SEQ ID NO: 5410302 - DNA, 25 bp, Homo sapien
gaatgaatgtgctcccaaccttggt

SEQ ID NO: 5410303 - DNA, 25 bp, Homo sapien
tgcatctggcaggttcaaaatcgaa

SEQ ID NO: 5410304 - DNA, 25 bp, Homo sapien
tctacatatcactgagacagggagg

SEQ ID NO: 5410305 - DNA, 25 bp, Homo sapien
caatagttcaacaagctgcgtccct

SEQ ID NO: 5410306 - DNA, 25 bp, Homo sapien
gcatgccagaagtgtagagtatttc

SEQ ID NO: 5410307 - DNA, 25 bp, Homo sapien
tattgatcccaatactgaagtggtt

SEQ ID NO: 5410308 - DNA, 25 bp, Homo sapien
taaggtcattatgaactacctcttg

SEQ ID NO: 5410309 - DNA, 25 bp, Homo sapien
ccctgttggaaatgttgctgcagtt

SEQ ID NO: 5410310 - DNA, 25 bp, Homo sapien
gatttggactggctcattaccttac

SEQ ID NO: 5410311 - DNA, 25 bp, Homo sapien
aaagtggaatggctcaatctcttag

SEQ ID NO: 5410312 - DNA, 25 bp, Homo sapien
acagtgagggatttggactggctca

SEQ ID NO: 5410313 - DNA, 25 bp, Homo sapien
ctgtaaagtggaatggctcaatctc

SEQ ID NO: 5410314 - DNA, 25 bp, Homo sapien
aagaggccaagggtatgaagcccca

SEQ ID NO: 5410315 - DNA, 25 bp, Homo sapien
caaattcttagcagtcaaaaagagg

SEQ ID NO: 5410316 - DNA, 25 bp, Homo sapien
tcttagcagtcaaaaagaggccaag

SEQ ID NO: 5410317 - DNA, 25 bp, Homo sapien
cagtcaaaaagaggccaagggtatg

SEQ ID NO: 5410318 - DNA, 25 bp, Homo sapien
cagggtagacccagaacacgattgt

SEQ ID NO: 5410319 - DNA, 25 bp, Homo sapien
cttacaagggatgcacagggtagac

SEQ ID NO: 5410320 - DNA, 25 bp, Homo sapien
ggtcagccatatctcctccaacaga

SEQ ID NO: 5410321 - DNA, 25 bp, Homo sapien
tattcacttgcgaaaagcagagggc

SEQ ID NO: 5410322 - DNA, 25 bp, Homo sapien
tctcgagaacagcagaatggaatca

SEQ ID NO: 5410323 - DNA, 25 bp, Homo sapien
gaacagaactgagcatccacatatg

SEQ ID NO: 5410324 - DNA, 25 bp, Homo sapien
cctaaacaggtcttgtggctgacag

SEQ ID NO: 5410325 - DNA, 25 bp, Homo sapien
aataaagcaggagcactacagccca

SEQ ID NO: 5410326 - DNA, 25 bp, Homo sapien
cactgactgcaaccaaacattttgt

SEQ ID NO: 5410327 - DNA, 25 bp, Homo sapien
gactgcaaccaaacattttgttcca

SEQ ID NO: 5410328 - DNA, 25 bp, Homo sapien
caaccaaacattttgttccattcaa

SEQ ID NO: 5410329 - DNA, 25 bp, Homo sapien
gcaaccaaacattttgttccattca

SEQ ID NO: 5410330 - DNA, 25 bp, Homo sapien
taacaaaaatcaccgagggctggcg

SEQ ID NO: 5410331 - DNA, 25 bp, Homo sapien
taaaaggatgctccgaggtaaggcc

SEQ ID NO: 5410332 - DNA, 25 bp, Homo sapien
tatgtaacgggcctcaactggctgg

SEQ ID NO: 5410333 - DNA, 25 bp, Homo sapien
taatgacagccttcaccaggtcgag

SEQ ID NO: 5410334 - DNA, 25 bp, Homo sapien
tagttgctgagtacgggtcggtcca

SEQ ID NO: 5410335 - DNA, 25 bp, Homo sapien
caactttgtgggcaggagaccgagt

SEQ ID NO: 5410336 - DNA, 25 bp, Homo sapien
ttcgcccaggcgtactgataggtgc

SEQ ID NO: 5410337 - DNA, 25 bp, Homo sapien
tgataggtgcgctgcagatgacctc

SEQ ID NO: 5410338 - DNA, 25 bp, Homo sapien
caactctcatctaaagtggtccacg

SEQ ID NO: 5410339 - DNA, 25 bp, Homo sapien
tcatctaaagtggtccacgacagtt

SEQ ID NO: 5410340 - DNA, 25 bp, Homo sapien
cataatccaactctcatctaaagtg

SEQ ID NO: 5410341 - DNA, 25 bp, Homo sapien
aagtggtccacgacagtttcaaatc

SEQ ID NO: 5410342 - DNA, 25 bp, Homo sapien
taacacacagtttggtaacagaatg

SEQ ID NO: 5410343 - DNA, 25 bp, Homo sapien
gacttactgcgataaactgaacata

SEQ ID NO: 5410344 - DNA, 25 bp, Homo sapien
gactctggcttctgacatggccggc

SEQ ID NO: 5410345 - DNA, 25 bp, Homo sapien
gaacataacacacagtttggtaaca

SEQ ID NO: 5410346 - DNA, 25 bp, Homo sapien
gggtaacatataccctgcaactgtg

SEQ ID NO: 5410347 - DNA, 25 bp, Homo sapien
aacacttcattcgtgcctggcaaca

SEQ ID NO: 5410348 - DNA, 25 bp, Homo sapien
tcatggtatctaccaggtcacacag

SEQ ID NO: 5410349 - DNA, 25 bp, Homo sapien
taaatttaggactccactttagagc

SEQ ID NO: 5410350 - DNA, 25 bp, Homo sapien
gattcactatatgatcaggacagaa

SEQ ID NO: 5410351 - DNA, 25 bp, Homo sapien
ggatacatgaggatgcgtgtacatg

SEQ ID NO: 5410352 - DNA, 25 bp, Homo sapien
aagcaacccaggaaatcatgatcat

SEQ ID NO: 5410353 - DNA, 25 bp, Homo sapien
tttagaccactgagcctagattcac

SEQ ID NO: 5410354 - DNA, 25 bp, Homo sapien
tggacaactttaattcgattcctgg

SEQ ID NO: 5410355 - DNA, 25 bp, Homo sapien
tctcttcacaccaggggtttgctct

SEQ ID NO: 5410356 - DNA, 25 bp, Homo sapien
aactttaattcgattcctggcacca

SEQ ID NO: 5410357 - DNA, 25 bp, Homo sapien
accaggggtttgctcttttaagcat

SEQ ID NO: 5410358 - DNA, 25 bp, Homo sapien
taacttgtaagcaccaataagatca

SEQ ID NO: 5410359 - DNA, 25 bp, Homo sapien
taactggagtgttactcagtgttct

SEQ ID NO: 5410360 - DNA, 25 bp, Homo sapien
tcattcctggtattattaactggag

SEQ ID NO: 5410361 - DNA, 25 bp, Homo sapien
gggtagttggaactctgatcccact

SEQ ID NO: 5410362 - DNA, 25 bp, Homo sapien
agcataagtggactgagctagggag

SEQ ID NO: 5410363 - DNA, 25 bp, Homo sapien
tggactgagctagggagtctttcat

SEQ ID NO: 5410364 - DNA, 25 bp, Homo sapien
aagtggactgagctagggagtcttt

SEQ ID NO: 5410365 - DNA, 25 bp, Homo sapien
gcataagtggactgagctagggagt

SEQ ID NO: 5410366 - DNA, 25 bp, Homo sapien
gcttcttcaacaccttttgtaacaa

SEQ ID NO: 5410367 - DNA, 25 bp, Homo sapien
tgcttcttcaacaccttttgtaaca

SEQ ID NO: 5410368 - DNA, 25 bp, Homo sapien
ggtatctgatctaataggtggagaa

SEQ ID NO: 5410369 - DNA, 25 bp, Homo sapien
ctaataggtggagaaatgtgctgaa

SEQ ID NO: 5410370 - DNA, 25 bp, Homo sapien
tgatctaataggtggagaaatgtgc

SEQ ID NO: 5410371 - DNA, 25 bp, Homo sapien
tgtgctgaattgtcacagcatacat

SEQ ID NO: 5410372 - DNA, 25 bp, Homo sapien
aagtcactaggggtgtcaccaacag

SEQ ID NO: 5410373 - DNA, 25 bp, Homo sapien
ggggtgtcaccaacagcttcactaa

SEQ ID NO: 5410374 - DNA, 25 bp, Homo sapien
tcactaggggtgtcaccaacagctt

SEQ ID NO: 5410375 - DNA, 25 bp, Homo sapien
tgtcaccaacagcttcactaacaat

SEQ ID NO: 5410376 - DNA, 25 bp, Homo sapien
tttgagtacatggttaatgacccag

SEQ ID NO: 5410377 - DNA, 25 bp, Homo sapien
ttctttgagtacatggttaatgacc

SEQ ID NO: 5410378 - DNA, 25 bp, Homo sapien
tctttgagtacatggttaatgaccc

SEQ ID NO: 5410379 - DNA, 25 bp, Homo sapien
ctttgagtacatggttaatgaccca

SEQ ID NO: 5410380 - DNA, 25 bp, Homo sapien
tctgacttctttcgccattctacat

SEQ ID NO: 5410381 - DNA, 25 bp, Homo sapien
tctctgacttctttcgccattctac

SEQ ID NO: 5410382 - DNA, 25 bp, Homo sapien
gacttctttcgccattctacattct

SEQ ID NO: 5410383 - DNA, 25 bp, Homo sapien
tgacttctttcgccattctacattc

SEQ ID NO: 5410384 - DNA, 25 bp, Homo sapien
ggcacaggaatcttgtaccgcaaag

SEQ ID NO: 5410385 - DNA, 25 bp, Homo sapien
ttaccaaaatgcctcagtggcacag

SEQ ID NO: 5410386 - DNA, 25 bp, Homo sapien
caggaatcttgtaccgcaaagcaaa

SEQ ID NO: 5410387 - DNA, 25 bp, Homo sapien
cttttaccaaaatgcctcagtggca

SEQ ID NO: 5410388 - DNA, 25 bp, Homo sapien
tcaactttctagatatgtgaagcca

SEQ ID NO: 5410389 - DNA, 25 bp, Homo sapien
tagcacaaccaatgaaccaatacca

SEQ ID NO: 5410390 - DNA, 25 bp, Homo sapien
gagttgctatatatcctacacccaa

SEQ ID NO: 5410391 - DNA, 25 bp, Homo sapien
gttgagctaggtaactttaagtcac

SEQ ID NO: 5410392 - DNA, 25 bp, Homo sapien
tactgtaagtctaggacataaagcg

SEQ ID NO: 5410393 - DNA, 25 bp, Homo sapien
gcagaagagtcaattccagaatcta

SEQ ID NO: 5410394 - DNA, 25 bp, Homo sapien
gaatgattgcactacgcactgcctc

SEQ ID NO: 5410395 - DNA, 25 bp, Homo sapien
gaatcaacttccacattgtctggta

SEQ ID NO: 5410396 - DNA, 25 bp, Homo sapien
gagtctcctttaacataacatatca

SEQ ID NO: 5410397 - DNA, 25 bp, Homo sapien
cttcagagtctcctttaacataaca

SEQ ID NO: 5410398 - DNA, 25 bp, Homo sapien
cataacatatcatctggctcctttt

SEQ ID NO: 5410399 - DNA, 25 bp, Homo sapien
ataacatatcatctggctccttttg

SEQ ID NO: 5410400 - DNA, 25 bp, Homo sapien
agccaactacctctggactcctttt

SEQ ID NO: 5410401 - DNA, 25 bp, Homo sapien
tgtggcaccgcaaaccaagcacaaa

SEQ ID NO: 5410402 - DNA, 25 bp, Homo sapien
gcacaaaatcttacttcctcactac

SEQ ID NO: 5410403 - DNA, 25 bp, Homo sapien
tgctatcatggtatacatcttcttg

SEQ ID NO: 5410404 - DNA, 25 bp, Homo sapien
tctagaattagtgcttccatccttt

SEQ ID NO: 5410405 - DNA, 25 bp, Homo sapien
gaattagtgcttccatccttttgtt

SEQ ID NO: 5410406 - DNA, 25 bp, Homo sapien
tcttctagaattagtgcttccatcc

SEQ ID NO: 5410407 - DNA, 25 bp, Homo sapien
tgctcttctagaattagtgcttcca

SEQ ID NO: 5410408 - DNA, 25 bp, Homo sapien
taatttggcagctacctacatattc

SEQ ID NO: 5410409 - DNA, 25 bp, Homo sapien
acatattcttcagaggtcagataaa

SEQ ID NO: 5410410 - DNA, 25 bp, Homo sapien
tattcttcagaggtcagataaacca

SEQ ID NO: 5410411 - DNA, 25 bp, Homo sapien
taccttccgtcctataatttggcag

SEQ ID NO: 5410412 - DNA, 25 bp, Homo sapien
gggctcccggagtccactgtatata

SEQ ID NO: 5410413 - DNA, 25 bp, Homo sapien
caaatacaagtcgaaatctagggcc

SEQ ID NO: 5410414 - DNA, 25 bp, Homo sapien
ccttatcagcctgtctagcagagaa

SEQ ID NO: 5410415 - DNA, 25 bp, Homo sapien
cagagcttcatgcagcctctttggg

SEQ ID NO: 5410416 - DNA, 25 bp, Homo sapien
tcctatactaaagcaaataatacta

SEQ ID NO: 5410417 - DNA, 25 bp, Homo sapien
gaaagaatcctatactaaagcaaat

SEQ ID NO: 5410418 - DNA, 25 bp, Homo sapien
gaatcctatactaaagcaaataata

SEQ ID NO: 5410419 - DNA, 25 bp, Homo sapien
atggaaagaatcctatactaaagca

SEQ ID NO: 5410420 - DNA, 25 bp, Homo sapien
taggctggaatggtccttggagttc

SEQ ID NO: 5410421 - DNA, 25 bp, Homo sapien
gcttaatgcataggctggaatggtc

SEQ ID NO: 5410422 - DNA, 25 bp, Homo sapien
gaaataggttccaaatgacaccaca

SEQ ID NO: 5410423 - DNA, 25 bp, Homo sapien
ttcatgtagcccctttacagaggaa

SEQ ID NO: 5410424 - DNA, 25 bp, Homo sapien
cgattttgaagcacgatgaagggca

SEQ ID NO: 5410425 - DNA, 25 bp, Homo sapien
tgtgctaagagaccaagactgcgaa

SEQ ID NO: 5410426 - DNA, 25 bp, Homo sapien
gagttggctcacaccggattggaca

SEQ ID NO: 5410427 - DNA, 25 bp, Homo sapien
tgactgctgtgaataaaagggcctg

SEQ ID NO: 5410428 - DNA, 25 bp, Homo sapien
tactggaggaataactaggaagcca

SEQ ID NO: 5410429 - DNA, 25 bp, Homo sapien
tagggcataggcagtccaagacaaa

SEQ ID NO: 5410430 - DNA, 25 bp, Homo sapien
tctacccttttgtgatgagttggca

SEQ ID NO: 5410431 - DNA, 25 bp, Homo sapien
catgtttggccgtgttccccttagg

SEQ ID NO: 5410432 - DNA, 25 bp, Homo sapien
caaagtaaatatatgcctaacaaag

SEQ ID NO: 5410433 - DNA, 25 bp, Homo sapien
ctatacctactgaaatgcttgattg

SEQ ID NO: 5410434 - DNA, 25 bp, Homo sapien
tgattgactatcaggcatgccttag

SEQ ID NO: 5410435 - DNA, 25 bp, Homo sapien
taaaaacagtagagaatttcaatcg

SEQ ID NO: 5410436 - DNA, 25 bp, Homo sapien
ggcaagcgccttggtacttccttta

SEQ ID NO: 5410437 - DNA, 25 bp, Homo sapien
gcaagcgccttggtacttcctttaa

SEQ ID NO: 5410438 - DNA, 25 bp, Homo sapien
tacttcctttaaccgcaacttcagc

SEQ ID NO: 5410439 - DNA, 25 bp, Homo sapien
cagctctggtttctcttcccttcat

SEQ ID NO: 5410440 - DNA, 25 bp, Homo sapien
gagtcagctctggtttctcttccct

SEQ ID NO: 5410441 - DNA, 25 bp, Homo sapien
cagtcgagtcagctctggtttctct

SEQ ID NO: 5410442 - DNA, 25 bp, Homo sapien
tcagctctggtttctcttcccttca

SEQ ID NO: 5410443 - DNA, 25 bp, Homo sapien
tactcctagcaccttgcatgtagtg

SEQ ID NO: 5410444 - DNA, 25 bp, Homo sapien
tattgttctcattaaaacacggccc

SEQ ID NO: 5410445 - DNA, 25 bp, Homo sapien
gaagctgatcctcactaaatactgg

SEQ ID NO: 5410446 - DNA, 25 bp, Homo sapien
cagagacagatctaccatgaagcgt

SEQ ID NO: 5410447 - DNA, 25 bp, Homo sapien
gagactgttacaagcggtttatcaa

SEQ ID NO: 5410448 - DNA, 25 bp, Homo sapien
atttttgtgggactggaatcactcc

SEQ ID NO: 5410449 - DNA, 25 bp, Homo sapien
caggcatgtgacagaaagtgctaca

SEQ ID NO: 5410450 - DNA, 25 bp, Homo sapien
tactgctgggcaactgaaactgtgc

SEQ ID NO: 5410451 - DNA, 25 bp, Homo sapien
gaggcataaagtggcaattctgtgg

SEQ ID NO: 5410452 - DNA, 25 bp, Homo sapien
caatggctatgaggtattggacaaa

SEQ ID NO: 5410453 - DNA, 25 bp, Homo sapien
aattgtcaggcatttccttgtgggc

SEQ ID NO: 5410454 - DNA, 25 bp, Homo sapien
tcagaacatggagcgtaattgtcag

SEQ ID NO: 5410455 - DNA, 25 bp, Homo sapien
ctaaagagataccagctccaactgg

SEQ ID NO: 5410456 - DNA, 25 bp, Homo sapien
tgagtaaattgatatcgatgattgg

SEQ ID NO: 5410457 - DNA, 25 bp, Homo sapien
gagataccagctccaactggacatt

SEQ ID NO: 5410458 - DNA, 25 bp, Homo sapien
attctactatcttaccatccatgag

SEQ ID NO: 5410459 - DNA, 25 bp, Homo sapien
gtacttggcaacagagaacctccta

SEQ ID NO: 5410460 - DNA, 25 bp, Homo sapien
tctgggcctgggataagtattgaag

SEQ ID NO: 5410461 - DNA, 25 bp, Homo sapien
tatcagcacagaacgttggtaaagg

SEQ ID NO: 5410462 - DNA, 25 bp, Homo sapien
ccttaaccgaggagggatagtggca

SEQ ID NO: 5410463 - DNA, 25 bp, Homo sapien
tagtatctttttcggcagaggcaga

SEQ ID NO: 5410464 - DNA, 25 bp, Homo sapien
tagtgacttctacaaaggtggcccc

SEQ ID NO: 5410465 - DNA, 25 bp, Homo sapien
cattttaattttgcgctgggtctca

SEQ ID NO: 5410466 - DNA, 25 bp, Homo sapien
ggtggccccagataaaagtctgtag

SEQ ID NO: 5410467 - DNA, 25 bp, Homo sapien
atagctaaagggagttaaatgcagt

SEQ ID NO: 5410468 - DNA, 25 bp, Homo sapien
tagctaaagggagttaaatgcagtt

SEQ ID NO: 5410469 - DNA, 25 bp, Homo sapien
tatagctaaagggagttaaatgcag

SEQ ID NO: 5410470 - DNA, 25 bp, Homo sapien
ccttgggccttcatataataaatca

SEQ ID NO: 5410471 - DNA, 25 bp, Homo sapien
taagctgagctatagggtaaaaaac

SEQ ID NO: 5410472 - DNA, 25 bp, Homo sapien
caaaaatgattggaagcagtgatac

SEQ ID NO: 5410473 - DNA, 25 bp, Homo sapien
gaacagaaacctagtaagaagcaaa

SEQ ID NO: 5410474 - DNA, 25 bp, Homo sapien
tgaaattctcctttggatttactgc

SEQ ID NO: 5410475 - DNA, 25 bp, Homo sapien
gcccaccatatgcaatgttaagcaa

SEQ ID NO: 5410476 - DNA, 25 bp, Homo sapien
tactgcttctgatacaccctgaaac

SEQ ID NO: 5410477 - DNA, 25 bp, Homo sapien
tgttaagcaaagtgtcaatattcaa

SEQ ID NO: 5410478 - DNA, 25 bp, Homo sapien
gtttctcttgataaacgacttgttc

SEQ ID NO: 5410479 - DNA, 25 bp, Homo sapien
ctcggacctaacttttagaggatca

SEQ ID NO: 5410480 - DNA, 25 bp, Homo sapien
aggatcaatgtgacaaggcagtccc

SEQ ID NO: 5410481 - DNA, 25 bp, Homo sapien
ggcagtccctgatagatgtttctct

SEQ ID NO: 5410482 - DNA, 25 bp, Homo sapien
tagctctggttcctttaggccgcac

SEQ ID NO: 5410483 - DNA, 25 bp, Homo sapien
gctctggttcctttaggccgcacat

SEQ ID NO: 5410484 - DNA, 25 bp, Homo sapien
tgtagctctggttcctttaggccgc

SEQ ID NO: 5410485 - DNA, 25 bp, Homo sapien
ctggttcctttaggccgcacatttg

SEQ ID NO: 5410486 - DNA, 25 bp, Homo sapien
tgaattggatttctcacaagcagga

SEQ ID NO: 5410487 - DNA, 25 bp, Homo sapien
taaacactggtgctactgatcattt

SEQ ID NO: 5410488 - DNA, 25 bp, Homo sapien
cgtgggccctttcgtcaggtattca

SEQ ID NO: 5410489 - DNA, 25 bp, Homo sapien
caggaattccaaaggttgcttttca

SEQ ID NO: 5410490 - DNA, 25 bp, Homo sapien
aagctagggttaagtgaaggtgcct

SEQ ID NO: 5410491 - DNA, 25 bp, Homo sapien
gataggttagcgtagcatcgatccg

SEQ ID NO: 5410492 - DNA, 25 bp, Homo sapien
cagcctctgccatgttggaatttca

SEQ ID NO: 5410493 - DNA, 25 bp, Homo sapien
cgcggagagagaacccgataggtta

SEQ ID NO: 5410494 - DNA, 25 bp, Homo sapien
ttggaaggagccagcatgccagagg

SEQ ID NO: 5410495 - DNA, 25 bp, Homo sapien
ctgcttggaaggagccagcatgcca

SEQ ID NO: 5410496 - DNA, 25 bp, Homo sapien
tgcttggaaggagccagcatgccag

SEQ ID NO: 5410497 - DNA, 25 bp, Homo sapien
cttggaaggagccagcatgccagag

SEQ ID NO: 5410498 - DNA, 25 bp, Homo sapien
gcgcagagcgccgcagagccaaatt

SEQ ID NO: 5410499 - DNA, 25 bp, Homo sapien
gcagagcgccgcagagccaaattca

SEQ ID NO: 5410500 - DNA, 25 bp, Homo sapien
cgcagagcgccgcagagccaaattc

SEQ ID NO: 5410501 - DNA, 25 bp, Homo sapien
cagagcgccgcagagccaaattcaa

SEQ ID NO: 5410502 - DNA, 25 bp, Homo sapien
gagggggccccgaggtcatgattac

SEQ ID NO: 5410503 - DNA, 25 bp, Homo sapien
gcgcgcggggactcgcagctctccc

SEQ ID NO: 5410504 - DNA, 25 bp, Homo sapien
gcggggactcgcagctctccctgca

SEQ ID NO: 5410505 - DNA, 25 bp, Homo sapien
gggactcgcagctctccctgcacgc

SEQ ID NO: 5410506 - DNA, 25 bp, Homo sapien
ggactcgcagctctccctgcacgca

SEQ ID NO: 5410507 - DNA, 25 bp, Homo sapien
gctttctttcccacgcgtgaccagc

SEQ ID NO: 5410508 - DNA, 25 bp, Homo sapien
gatctggtctcgagagcctggacct

SEQ ID NO: 5410509 - DNA, 25 bp, Homo sapien
tctgcgcacgggacgggatctggtc

SEQ ID NO: 5410510 - DNA, 25 bp, Homo sapien
ttcccggccctctcgacagctgcgg

SEQ ID NO: 5410511 - DNA, 25 bp, Homo sapien
cggctggtgcgcaggcatagacgtt

SEQ ID NO: 5410512 - DNA, 25 bp, Homo sapien
gtgcgcaggcatagacgttaggctt

SEQ ID NO: 5410513 - DNA, 25 bp, Homo sapien
atagacgttaggcttctgccttccc

SEQ ID NO: 5410514 - DNA, 25 bp, Homo sapien
caggcatagacgttaggcttctgcc

SEQ ID NO: 5410515 - DNA, 25 bp, Homo sapien
gtgctgggagccgaggaagaatgaa

SEQ ID NO: 5410516 - DNA, 25 bp, Homo sapien
gtggtgctgggagccgaggaagaat

SEQ ID NO: 5410517 - DNA, 25 bp, Homo sapien
ggtgctgggagccgaggaagaatga

SEQ ID NO: 5410518 - DNA, 25 bp, Homo sapien
ttgtggtgctgggagccgaggaaga

SEQ ID NO: 5410519 - DNA, 25 bp, Homo sapien
tgtgggcgaactcccttaagacact

SEQ ID NO: 5410520 - DNA, 25 bp, Homo sapien
gtttcaaacttctagaccgcagtga

SEQ ID NO: 5410521 - DNA, 25 bp, Homo sapien
ccttcctagaggcacttaagtatct

SEQ ID NO: 5410522 - DNA, 25 bp, Homo sapien
taagacactcagcacttagctcctc

SEQ ID NO: 5410523 - DNA, 25 bp, Homo sapien
attttaagggtgttcatgtctttca

SEQ ID NO: 5410524 - DNA, 25 bp, Homo sapien
ttcttgagggcaggcaattatcttc

SEQ ID NO: 5410525 - DNA, 25 bp, Homo sapien
ttgagggcaggcaattatcttccat

SEQ ID NO: 5410526 - DNA, 25 bp, Homo sapien
tcattttaagggtgttcatgtcttt

SEQ ID NO: 5410527 - DNA, 25 bp, Homo sapien
ggctgaaccctgctttaagaagata

SEQ ID NO: 5410528 - DNA, 25 bp, Homo sapien
caggagggaagttattgcaatggtc

SEQ ID NO: 5410529 - DNA, 25 bp, Homo sapien
taggcagttaacagaaagtgctgga

SEQ ID NO: 5410530 - DNA, 25 bp, Homo sapien
ccttcttgtaggtttggtgatatgc

SEQ ID NO: 5410531 - DNA, 25 bp, Homo sapien
cagaccgtgctttcaagcttagaag

SEQ ID NO: 5410532 - DNA, 25 bp, Homo sapien
caattagttccactcagaccgtgct

SEQ ID NO: 5410533 - DNA, 25 bp, Homo sapien
gttccactcagaccgtgctttcaag

SEQ ID NO: 5410534 - DNA, 25 bp, Homo sapien
ccactttacaattagttccactcag

SEQ ID NO: 5410535 - DNA, 25 bp, Homo sapien
ttttcatggcaaacgactactggca

SEQ ID NO: 5410536 - DNA, 25 bp, Homo sapien
caggtctagccttaagtatgagtaa

SEQ ID NO: 5410537 - DNA, 25 bp, Homo sapien
caagcacctgtttgtatctatggag

SEQ ID NO: 5410538 - DNA, 25 bp, Homo sapien
gcttttaaagcacaggtatcttggg

SEQ ID NO: 5410539 - DNA, 25 bp, Homo sapien
cgaatgcatgtttatcctagtccaa

SEQ ID NO: 5410540 - DNA, 25 bp, Homo sapien
cgtgtcccgtggatacgaatgcatg

SEQ ID NO: 5410541 - DNA, 25 bp, Homo sapien
tgcatccctcttaggagcttcataa

SEQ ID NO: 5410542 - DNA, 25 bp, Homo sapien
aatgcatccagtcagcgtgtcccgt

SEQ ID NO: 5410543 - DNA, 25 bp, Homo sapien
gcgtcaagggtttcagccagtaaca

SEQ ID NO: 5410544 - DNA, 25 bp, Homo sapien
caataaacagaaatgcgtcaagggt

SEQ ID NO: 5410545 - DNA, 25 bp, Homo sapien
ttcagccagtaacagcagtttcttc

SEQ ID NO: 5410546 - DNA, 25 bp, Homo sapien
cagaaatgcgtcaagggtttcagcc

SEQ ID NO: 5410547 - DNA, 25 bp, Homo sapien
gtcacattccgttgctgtggggagg

SEQ ID NO: 5410548 - DNA, 25 bp, Homo sapien
gagggttgtgatgtcatagagaatc

SEQ ID NO: 5410549 - DNA, 25 bp, Homo sapien
gctgtggggagggttgtgatgtcat

SEQ ID NO: 5410550 - DNA, 25 bp, Homo sapien
cacattccgttgctgtggggagggt

SEQ ID NO: 5410551 - DNA, 25 bp, Homo sapien
aattcttcgtgtgcattcttgatcg

SEQ ID NO: 5410552 - DNA, 25 bp, Homo sapien
catgtgattgaattcttcgtgtgca

SEQ ID NO: 5410553 - DNA, 25 bp, Homo sapien
tgcaccttgccccatgtgattgaat

SEQ ID NO: 5410554 - DNA, 25 bp, Homo sapien
cttcgtgtgcattcttgatcggcca

SEQ ID NO: 5410555 - DNA, 25 bp, Homo sapien
accaaggtttatgccctttcagtgc

SEQ ID NO: 5410556 - DNA, 25 bp, Homo sapien
tcctagcattggcagacaaattggg

SEQ ID NO: 5410557 - DNA, 25 bp, Homo sapien
taaggattgtcccacttaaccagtg

SEQ ID NO: 5410558 - DNA, 25 bp, Homo sapien
tgccctgatactccaagctcgggaa

SEQ ID NO: 5410559 - DNA, 25 bp, Homo sapien
gcaggccagcactagtgaaaataac

SEQ ID NO: 5410560 - DNA, 25 bp, Homo sapien
attccagcactaactggcaggccag

SEQ ID NO: 5410561 - DNA, 25 bp, Homo sapien
taaaatctaattccagcactaactg

SEQ ID NO: 5410562 - DNA, 25 bp, Homo sapien
aactggcaggccagcactagtgaaa

SEQ ID NO: 5410563 - DNA, 25 bp, Homo sapien
cagatcccgtaattctggtttgttc

SEQ ID NO: 5410564 - DNA, 25 bp, Homo sapien
ggtttgttctacgaagcataaatga

SEQ ID NO: 5410565 - DNA, 25 bp, Homo sapien
tctacgaagcataaatgatgtcttt

SEQ ID NO: 5410566 - DNA, 25 bp, Homo sapien
attctggtttgttctacgaagcata

SEQ ID NO: 5410567 - DNA, 25 bp, Homo sapien
ctccttccaaagtcagaccaggaat

SEQ ID NO: 5410568 - DNA, 25 bp, Homo sapien
agtcagaccaggaatgccaaaacac

SEQ ID NO: 5410569 - DNA, 25 bp, Homo sapien
gaaagcctggactccttccaaagtc

SEQ ID NO: 5410570 - DNA, 25 bp, Homo sapien
ctggactccttccaaagtcagacca

SEQ ID NO: 5410571 - DNA, 25 bp, Homo sapien
cttagcaggtagagtttcttggtca

SEQ ID NO: 5410572 - DNA, 25 bp, Homo sapien
tcaggcaggaagatacggggatgtt

SEQ ID NO: 5410573 - DNA, 25 bp, Homo sapien
caggaagatacggggatgtttcttt

SEQ ID NO: 5410574 - DNA, 25 bp, Homo sapien
gtagagtttcttggtcaggcaggaa

SEQ ID NO: 5410575 - DNA, 25 bp, Homo sapien
gctctctaaatgttccccacctact

SEQ ID NO: 5410576 - DNA, 25 bp, Homo sapien
tattttgtgtcgcatttactttctt

SEQ ID NO: 5410577 - DNA, 25 bp, Homo sapien
cttgaatattttgtgtcgcatttac

SEQ ID NO: 5410578 - DNA, 25 bp, Homo sapien
tgctctctaaatgttccccacctac

SEQ ID NO: 5410579 - DNA, 25 bp, Homo sapien
tccaaatagtaacaagcttgcagtg

SEQ ID NO: 5410580 - DNA, 25 bp, Homo sapien
gcttgcagtgaatagagcccacaga

SEQ ID NO: 5410581 - DNA, 25 bp, Homo sapien
gtccctttatggactgaggctaaca

SEQ ID NO: 5410582 - DNA, 25 bp, Homo sapien
caatgactgttgaggagtttagggt

SEQ ID NO: 5410583 - DNA, 25 bp, Homo sapien
tggcttaaaactagaagttgttcag

SEQ ID NO: 5410584 - DNA, 25 bp, Homo sapien
gcatttgtcctgctttaatgggtat

SEQ ID NO: 5410585 - DNA, 25 bp, Homo sapien
gcaatgactttgataaataactagg

SEQ ID NO: 5410586 - DNA, 25 bp, Homo sapien
taactaggaagtcccactgttggct

SEQ ID NO: 5410587 - DNA, 25 bp, Homo sapien
gacatttgggatcatatgtagtttt

SEQ ID NO: 5410588 - DNA, 25 bp, Homo sapien
ttgggatcatatgtagttttcattt

SEQ ID NO: 5410589 - DNA, 25 bp, Homo sapien
catttgggatcatatgtagttttca

SEQ ID NO: 5410590 - DNA, 25 bp, Homo sapien
tttgggatcatatgtagttttcatt

SEQ ID NO: 5410591 - DNA, 25 bp, Homo sapien
tttcatccccgttgatctgaactgc

SEQ ID NO: 5410592 - DNA, 25 bp, Homo sapien
atttcatccccgttgatctgaactg

SEQ ID NO: 5410593 - DNA, 25 bp, Homo sapien
aatttcatccccgttgatctgaact

SEQ ID NO: 5410594 - DNA, 25 bp, Homo sapien
gactctttacacaatgatctgaatc

SEQ ID NO: 5410595 - DNA, 25 bp, Homo sapien
tcagtgtttgcgcataatgaccatc

SEQ ID NO: 5410596 - DNA, 25 bp, Homo sapien
aatgcaggtaacaaatggaattcaa

SEQ ID NO: 5410597 - DNA, 25 bp, Homo sapien
ttgtaattattcctctcagctcaaa

SEQ ID NO: 5410598 - DNA, 25 bp, Homo sapien
cttttcacccttggtcacgtcaaag

SEQ ID NO: 5410599 - DNA, 25 bp, Homo sapien
ctgctttcttcggtatgggtgtcat

SEQ ID NO: 5410600 - DNA, 25 bp, Homo sapien
ccagctgctttcttcggtatgggtg

SEQ ID NO: 5410601 - DNA, 25 bp, Homo sapien
ctttcttcggtatgggtgtcattat

SEQ ID NO: 5410602 - DNA, 25 bp, Homo sapien
aatttcgtagtgaaacttatgttgc

SEQ ID NO: 5410603 - DNA, 25 bp, Homo sapien
tgctgtcgtactaaaataaatttcg

SEQ ID NO: 5410604 - DNA, 25 bp, Homo sapien
tcagggtctgctgtcgtactaaaat

SEQ ID NO: 5410605 - DNA, 25 bp, Homo sapien
tagtgaaacttatgttgctcaatca

SEQ ID NO: 5410606 - DNA, 25 bp, Homo sapien
ccatttctgagagcggctttcaact

SEQ ID NO: 5410607 - DNA, 25 bp, Homo sapien
tctgagagcggctttcaactttcat

SEQ ID NO: 5410608 - DNA, 25 bp, Homo sapien
tttctgagagcggctttcaactttc

SEQ ID NO: 5410609 - DNA, 25 bp, Homo sapien
tatgtcttcttacatgtccatttct

SEQ ID NO: 5410610 - DNA, 25 bp, Homo sapien
tacaaagcaaaccaaacagcatatt

SEQ ID NO: 5410611 - DNA, 25 bp, Homo sapien
ctacaaagcaaaccaaacagcatat

SEQ ID NO: 5410612 - DNA, 25 bp, Homo sapien
acaaagcaaaccaaacagcatattc

SEQ ID NO: 5410613 - DNA, 25 bp, Homo sapien
ggataatttatgactgagtgctgtc

SEQ ID NO: 5410614 - DNA, 25 bp, Homo sapien
tgggataatttatgactgagtgctg

SEQ ID NO: 5410615 - DNA, 25 bp, Homo sapien
taaacttgggataatttatgactga

SEQ ID NO: 5410616 - DNA, 25 bp, Homo sapien
caggttaaacttgggataatttatg

SEQ ID NO: 5410617 - DNA, 25 bp, Homo sapien
taccggagtcagtgtttccaggcca

SEQ ID NO: 5410618 - DNA, 25 bp, Homo sapien
ggatctctctggaatgcctctcact

SEQ ID NO: 5410619 - DNA, 25 bp, Homo sapien
tgtctaaccagcaactattctaagg

SEQ ID NO: 5410620 - DNA, 25 bp, Homo sapien
gatgctacctctcagaatatgacca

SEQ ID NO: 5410621 - DNA, 25 bp, Homo sapien
taagtgggattttaggcacaagcca

SEQ ID NO: 5410622 - DNA, 25 bp, Homo sapien
agtaagtgggattttaggcacaagc

SEQ ID NO: 5410623 - DNA, 25 bp, Homo sapien
agtgggattttaggcacaagccacc

SEQ ID NO: 5410624 - DNA, 25 bp, Homo sapien
caagtaagtgggattttaggcacaa

SEQ ID NO: 5410625 - DNA, 25 bp, Homo sapien
ttactcagaaacttgccagtccgca

SEQ ID NO: 5410626 - DNA, 25 bp, Homo sapien
atttactcagaaacttgccagtccg

SEQ ID NO: 5410627 - DNA, 25 bp, Homo sapien
tttactcagaaacttgccagtccgc

SEQ ID NO: 5410628 - DNA, 25 bp, Homo sapien
tactcagaaacttgccagtccgcat

SEQ ID NO: 5410629 - DNA, 25 bp, Homo sapien
gacaaatgaggatactagcaatacc

SEQ ID NO: 5410630 - DNA, 25 bp, Homo sapien
tcttattagatactgtgggactgga

SEQ ID NO: 5410631 - DNA, 25 bp, Homo sapien
tctgctgaggccacgaaaatgatga

SEQ ID NO: 5410632 - DNA, 25 bp, Homo sapien
tgttccctggttatctcatgctcca

SEQ ID NO: 5410633 - DNA, 25 bp, Homo sapien
cttgcgggcctttagtagtaaatct

SEQ ID NO: 5410634 - DNA, 25 bp, Homo sapien
tagataaaagcctactgccacagaa

SEQ ID NO: 5410635 - DNA, 25 bp, Homo sapien
gaatgctcaaatacccttgcgggcc

SEQ ID NO: 5410636 - DNA, 25 bp, Homo sapien
cagtagcctgcgaatatcatgaatt

SEQ ID NO: 5410637 - DNA, 25 bp, Homo sapien
aaattgccccattagcaaggcctca

SEQ ID NO: 5410638 - DNA, 25 bp, Homo sapien
gacgcggcttcggttggcaagctaa

SEQ ID NO: 5410639 - DNA, 25 bp, Homo sapien
tatttggccagtttagacgcggctt

SEQ ID NO: 5410640 - DNA, 25 bp, Homo sapien
tgagtaccacccttgaaaatcatgc

SEQ ID NO: 5410641 - DNA, 25 bp, Homo sapien
ctggacaacaaacaacgtggagtac

SEQ ID NO: 5410642 - DNA, 25 bp, Homo sapien
aaaagcaccacgggcctctggctgt

SEQ ID NO: 5410643 - DNA, 25 bp, Homo sapien
ctggctgtgctctgtagctgtgaaa

SEQ ID NO: 5410644 - DNA, 25 bp, Homo sapien
ctgtagctgtgaaatagaatcaaga

SEQ ID NO: 5410645 - DNA, 25 bp, Homo sapien
aatagaatcaagattccattaggca

SEQ ID NO: 5410646 - DNA, 25 bp, Homo sapien
gagtgggtttcttaaataatctcca

SEQ ID NO: 5410647 - DNA, 25 bp, Homo sapien
acaagcatataccatccccctttgc

SEQ ID NO: 5410648 - DNA, 25 bp, Homo sapien
catatcacacaagcatataccatcc

SEQ ID NO: 5410649 - DNA, 25 bp, Homo sapien
tatcacacaagcatataccatcccc

SEQ ID NO: 5410650 - DNA, 25 bp, Homo sapien
cacagggcagacctcaatagtcatg

SEQ ID NO: 5410651 - DNA, 25 bp, Homo sapien
gatacttgtcccagttccttagcag

SEQ ID NO: 5410652 - DNA, 25 bp, Homo sapien
ggagaggtgttgctcttaccagcaa

SEQ ID NO: 5410653 - DNA, 25 bp, Homo sapien
tacagtgttaaggttccacagggca

SEQ ID NO: 5410654 - DNA, 25 bp, Homo sapien
agttttcaccccagagctccctatg

SEQ ID NO: 5410655 - DNA, 25 bp, Homo sapien
ccagagctccctatggggttggcca

SEQ ID NO: 5410656 - DNA, 25 bp, Homo sapien
agagctccctatggggttggccaag

SEQ ID NO: 5410657 - DNA, 25 bp, Homo sapien
ttttcaccccagagctccctatggg

SEQ ID NO: 5410658 - DNA, 25 bp, Homo sapien
ttttgccctaagctgctgcctgctc

SEQ ID NO: 5410659 - DNA, 25 bp, Homo sapien
tgtgatagagattttgccctaagct

SEQ ID NO: 5410660 - DNA, 25 bp, Homo sapien
caaagaaccctacctgtgatagaga

SEQ ID NO: 5410661 - DNA, 25 bp, Homo sapien
ccaaagaaccctacctgtgatagag

SEQ ID NO: 5410662 - DNA, 25 bp, Homo sapien
tctggtgttcagtgtaatccttgac

SEQ ID NO: 5410663 - DNA, 25 bp, Homo sapien
gaaactcctcccatatgccctggag

SEQ ID NO: 5410664 - DNA, 25 bp, Homo sapien
aataatcctttcagtgtgttcaggc

SEQ ID NO: 5410665 - DNA, 25 bp, Homo sapien
gacaccatgattcctcaaagaaact

SEQ ID NO: 5410666 - DNA, 25 bp, Homo sapien
tctatttggatctaatggaaagacg

SEQ ID NO: 5410667 - DNA, 25 bp, Homo sapien
tatttggatctaatggaaagacgat

SEQ ID NO: 5410668 - DNA, 25 bp, Homo sapien
gacgatgatgccatcaacagaaatg

SEQ ID NO: 5410669 - DNA, 25 bp, Homo sapien
aatggaaagacgatgatgccatcaa

SEQ ID NO: 5410670 - DNA, 25 bp, Homo sapien
tctgaagtaatccttgctacatgcg

SEQ ID NO: 5410671 - DNA, 25 bp, Homo sapien
aagtaatccttgctacatgcgtccc

SEQ ID NO: 5410672 - DNA, 25 bp, Homo sapien
taatccttgctacatgcgtccctca

SEQ ID NO: 5410673 - DNA, 25 bp, Homo sapien
ctgatctgaagtaatccttgctaca

SEQ ID NO: 5410674 - DNA, 25 bp, Homo sapien
tttcataacgaacattgaaagaaat

SEQ ID NO: 5410675 - DNA, 25 bp, Homo sapien
ttttcataacgaacattgaaagaaa

SEQ ID NO: 5410676 - DNA, 25 bp, Homo sapien
tgagagctgtgcctagactgacgcc

SEQ ID NO: 5410677 - DNA, 25 bp, Homo sapien
tctgaggagcgattcataacaaaga

SEQ ID NO: 5410678 - DNA, 25 bp, Homo sapien
tttgtgccaaaagaattgctccatt

SEQ ID NO: 5410679 - DNA, 25 bp, Homo sapien
ttcattatccccacagatgcttggc

SEQ ID NO: 5410680 - DNA, 25 bp, Homo sapien
tacacaagagatgatgagtttgtaa

SEQ ID NO: 5410681 - DNA, 25 bp, Homo sapien
gattggcaagaggataaaaagtgtc

SEQ ID NO: 5410682 - DNA, 25 bp, Homo sapien
taggctatcattatctacacaagag

SEQ ID NO: 5410683 - DNA, 25 bp, Homo sapien
tgaagttgacgaggcttattcagac

SEQ ID NO: 5410684 - DNA, 25 bp, Homo sapien
tctgccaattctcttgtcaggaatg

SEQ ID NO: 5410685 - DNA, 25 bp, Homo sapien
tcttgtcaggaatgcaacgttcagg

SEQ ID NO: 5410686 - DNA, 25 bp, Homo sapien
caggctggtctatgggctgctccct

SEQ ID NO: 5410687 - DNA, 25 bp, Homo sapien
caacgttcaggctggtctatgggct

SEQ ID NO: 5410688 - DNA, 25 bp, Homo sapien
gccagcagaggactcttttgatcca

SEQ ID NO: 5410689 - DNA, 25 bp, Homo sapien
agccagcagaggactcttttgatcc

SEQ ID NO: 5410690 - DNA, 25 bp, Homo sapien
tagccagcagaggactcttttgatc

SEQ ID NO: 5410691 - DNA, 25 bp, Homo sapien
ccagcagaggactcttttgatccat

SEQ ID NO: 5410692 - DNA, 25 bp, Homo sapien
caatatactcacactcaaccaccac

SEQ ID NO: 5410693 - DNA, 25 bp, Homo sapien
acacccttaagccaagcaccagtgg

SEQ ID NO: 5410694 - DNA, 25 bp, Homo sapien
ttaagccaagcaccagtggagccca

SEQ ID NO: 5410695 - DNA, 25 bp, Homo sapien
ttttatcagcccaacacccttaagc

SEQ ID NO: 5410696 - DNA, 25 bp, Homo sapien
agttgaaacaatgatcgaaggctcc

SEQ ID NO: 5410697 - DNA, 25 bp, Homo sapien
agtttggagccaactgccttaaaat

SEQ ID NO: 5410698 - DNA, 25 bp, Homo sapien
tcgaaggctccttttctactgacat

SEQ ID NO: 5410699 - DNA, 25 bp, Homo sapien
ggagccaactgccttaaaattcata

SEQ ID NO: 5410700 - DNA, 25 bp, Homo sapien
gaatcatgggttgctagagataact

SEQ ID NO: 5410701 - DNA, 25 bp, Homo sapien
caaccaggcctatcagctgctgctc

SEQ ID NO: 5410702 - DNA, 25 bp, Homo sapien
tgggttgctagagataactgcctct

SEQ ID NO: 5410703 - DNA, 25 bp, Homo sapien
tgctagagataactgcctcttggag

SEQ ID NO: 5410704 - DNA, 25 bp, Homo sapien
catactcacacataggaactagttg

SEQ ID NO: 5410705 - DNA, 25 bp, Homo sapien
caactgtggtgagtgtatttccaac

SEQ ID NO: 5410706 - DNA, 25 bp, Homo sapien
tatgctggagccaactcatactcac

SEQ ID NO: 5410707 - DNA, 25 bp, Homo sapien
tgttgaatgaaaggctaccaagaac

SEQ ID NO: 5410708 - DNA, 25 bp, Homo sapien
tacaagaaatgacaagcgtgtaact

SEQ ID NO: 5410709 - DNA, 25 bp, Homo sapien
tagtctcgcaccgaagagttcagcc

SEQ ID NO: 5410710 - DNA, 25 bp, Homo sapien
agtgatgtgcattagttctgagtga

SEQ ID NO: 5410711 - DNA, 25 bp, Homo sapien
cttaatgattacttcacaacactca

SEQ ID NO: 5410712 - DNA, 25 bp, Homo sapien
tggtcaaaaattcatggctccaact

SEQ ID NO: 5410713 - DNA, 25 bp, Homo sapien
tcaaaaattcatggctccaactaag

SEQ ID NO: 5410714 - DNA, 25 bp, Homo sapien
atcattggtcaaaaattcatggctc

SEQ ID NO: 5410715 - DNA, 25 bp, Homo sapien
cattggtcaaaaattcatggctcca

SEQ ID NO: 5410716 - DNA, 25 bp, Homo sapien
caatctggctgtataaatcattgtg

SEQ ID NO: 5410717 - DNA, 25 bp, Homo sapien
tctggctgtataaatcattgtgatt

SEQ ID NO: 5410718 - DNA, 25 bp, Homo sapien
ttcaatctggctgtataaatcattg

SEQ ID NO: 5410719 - DNA, 25 bp, Homo sapien
gtttcaatctggctgtataaatcat

SEQ ID NO: 5410720 - DNA, 25 bp, Homo sapien
tctggaatccactcactgttcacat

SEQ ID NO: 5410721 - DNA, 25 bp, Homo sapien
tcggaagtgtaaggatatcactatc

SEQ ID NO: 5410722 - DNA, 25 bp, Homo sapien
gttcacatatgcacaactcggaagt

SEQ ID NO: 5410723 - DNA, 25 bp, Homo sapien
gattctgtgatgtgagatgcctctg

SEQ ID NO: 5410724 - DNA, 25 bp, Homo sapien
cagggaagatacttggtaagtggga

SEQ ID NO: 5410725 - DNA, 25 bp, Homo sapien
tgcagggaagatacttggtaagtgg

SEQ ID NO: 5410726 - DNA, 25 bp, Homo sapien
ctgcagggaagatacttggtaagtg

SEQ ID NO: 5410727 - DNA, 25 bp, Homo sapien
gcagggaagatacttggtaagtggg

SEQ ID NO: 5410728 - DNA, 25 bp, Homo sapien
taaccatagtcagaaaagggccagt

SEQ ID NO: 5410729 - DNA, 25 bp, Homo sapien
ggctgacgagaccaataaccatagt

SEQ ID NO: 5410730 - DNA, 25 bp, Homo sapien
ttgtgctcggtgtatgcctcgcagg

SEQ ID NO: 5410731 - DNA, 25 bp, Homo sapien
cagagcagagcattaggctgacgag

SEQ ID NO: 5410732 - DNA, 25 bp, Homo sapien
gaggaggcaagaaatccagagaaaa

SEQ ID NO: 5410733 - DNA, 25 bp, Homo sapien
gtgaggaggcaagaaatccagagaa

SEQ ID NO: 5410734 - DNA, 25 bp, Homo sapien
ggaggcaagaaatccagagaaaaca

SEQ ID NO: 5410735 - DNA, 25 bp, Homo sapien
gaggcaagaaatccagagaaaacat

SEQ ID NO: 5410736 - DNA, 25 bp, Homo sapien
gtgaagggtcatagtacttccccat

SEQ ID NO: 5410737 - DNA, 25 bp, Homo sapien
ggtgaagggtcatagtacttcccca

SEQ ID NO: 5410738 - DNA, 25 bp, Homo sapien
caagggttctctgacattgcagatg

SEQ ID NO: 5410739 - DNA, 25 bp, Homo sapien
tcaagggttctctgacattgcagat

SEQ ID NO: 5410740 - DNA, 25 bp, Homo sapien
gctctgagtgaccaataaaatgcca

SEQ ID NO: 5410741 - DNA, 25 bp, Homo sapien
tgtgctctgagtgaccaataaaatg

SEQ ID NO: 5410742 - DNA, 25 bp, Homo sapien
tctgcatatgcagcagctatattaa

SEQ ID NO: 5410743 - DNA, 25 bp, Homo sapien
gatagattttcaatgctctacaagc

SEQ ID NO: 5410744 - DNA, 25 bp, Homo sapien
catatgcagcagctatattaacatg

SEQ ID NO: 5410745 - DNA, 25 bp, Homo sapien
tgttttgggccaatagtccatgaat

SEQ ID NO: 5410746 - DNA, 25 bp, Homo sapien
tctgattcctaagttgtagttggag

SEQ ID NO: 5410747 - DNA, 25 bp, Homo sapien
tagttggagttatgtggaaatcgac

SEQ ID NO: 5410748 - DNA, 25 bp, Homo sapien
aaatcgacgagaggaattcttttct

SEQ ID NO: 5410749 - DNA, 25 bp, Homo sapien
gagccacacgggtaaaatgctttgt

SEQ ID NO: 5410750 - DNA, 25 bp, Homo sapien
attccaatccctttgtgctgtactg

SEQ ID NO: 5410751 - DNA, 25 bp, Homo sapien
ggtacgagcctgaatgcctgagtta

SEQ ID NO: 5410752 - DNA, 25 bp, Homo sapien
ctttggctaagtaatgtgtcaaggg

SEQ ID NO: 5410753 - DNA, 25 bp, Homo sapien
gaaatttcagaaatcctccttgcat

SEQ ID NO: 5410754 - DNA, 25 bp, Homo sapien
ttgtaatgtgggctcatgtcaatca

SEQ ID NO: 5410755 - DNA, 25 bp, Homo sapien
tcatcccatgatataaactagttat

SEQ ID NO: 5410756 - DNA, 25 bp, Homo sapien
gccagaggatcttcattaaaaaggg

SEQ ID NO: 5410757 - DNA, 25 bp, Homo sapien
tcaatcatcagaacagacagcttca

SEQ ID NO: 5410758 - DNA, 25 bp, Homo sapien
tgccttgatgcagtgatagtcacca

SEQ ID NO: 5410759 - DNA, 25 bp, Homo sapien
tcatacctatggagagcaagataaa

SEQ ID NO: 5410760 - DNA, 25 bp, Homo sapien
attttcatgagccttgatgaaagca

SEQ ID NO: 5410761 - DNA, 25 bp, Homo sapien
tcttgcatcactaatttgtgccttg

SEQ ID NO: 5410762 - DNA, 25 bp, Homo sapien
ctacatctgctacttccttgggctt

SEQ ID NO: 5410763 - DNA, 25 bp, Homo sapien
acatctgctacttccttgggcttca

SEQ ID NO: 5410764 - DNA, 25 bp, Homo sapien
tacatctgctacttccttgggcttc

SEQ ID NO: 5410765 - DNA, 25 bp, Homo sapien
ggttattttcatgcgtggccttaca

SEQ ID NO: 5410766 - DNA, 25 bp, Homo sapien
gccctttacttctgggcaaagataa

SEQ ID NO: 5410767 - DNA, 25 bp, Homo sapien
gctagggttattttcatgcgtggcc

SEQ ID NO: 5410768 - DNA, 25 bp, Homo sapien
gtagctagggttattttcatgcgtg

SEQ ID NO: 5410769 - DNA, 25 bp, Homo sapien
cttcatccagcaaccctccataaac

SEQ ID NO: 5410770 - DNA, 25 bp, Homo sapien
aaacattttagcaagtgtaagatca

SEQ ID NO: 5410771 - DNA, 25 bp, Homo sapien
tccagcaaccctccataaacatttt

SEQ ID NO: 5410772 - DNA, 25 bp, Homo sapien
aacattttagcaagtgtaagatcac

SEQ ID NO: 5410773 - DNA, 25 bp, Homo sapien
ggacaagatcccctctaatgagagc

SEQ ID NO: 5410774 - DNA, 25 bp, Homo sapien
tatagacttcacatccgggttctga

SEQ ID NO: 5410775 - DNA, 25 bp, Homo sapien
taaaaactgttctcggacaagatcc

SEQ ID NO: 5410776 - DNA, 25 bp, Homo sapien
gaacccactttatcagcgacactta

SEQ ID NO: 5410777 - DNA, 25 bp, Homo sapien
acgtataataccgaaagatacccat

SEQ ID NO: 5410778 - DNA, 25 bp, Homo sapien
tagtagcaggtggtacagttgatca

SEQ ID NO: 5410779 - DNA, 25 bp, Homo sapien
cagttgatcagtcaggaacctgtca

SEQ ID NO: 5410780 - DNA, 25 bp, Homo sapien
gaataggccaatatatctgagagac

SEQ ID NO: 5410781 - DNA, 25 bp, Homo sapien
ggttgagcacaagatctctgaggtg

SEQ ID NO: 5410782 - DNA, 25 bp, Homo sapien
gcaatgccagagcccgtggactctc

SEQ ID NO: 5410783 - DNA, 25 bp, Homo sapien
tgccagagcccgtggactctctctg

SEQ ID NO: 5410784 - DNA, 25 bp, Homo sapien
cagagcccgtggactctctctgcag

SEQ ID NO: 5410785 - DNA, 25 bp, Homo sapien
gagcccgtggactctctctgcaggg

SEQ ID NO: 5410786 - DNA, 25 bp, Homo sapien
gctataagcaaaattctcttcttct

SEQ ID NO: 5410787 - DNA, 25 bp, Homo sapien
aaattctcttcttctccaagtccat

SEQ ID NO: 5410788 - DNA, 25 bp, Homo sapien
caaggctataagcaaaattctcttc

SEQ ID NO: 5410789 - DNA, 25 bp, Homo sapien
ggctataagcaaaattctcttcttc

SEQ ID NO: 5410790 - DNA, 25 bp, Homo sapien
caatttacttaatggtatcagcaga

SEQ ID NO: 5410791 - DNA, 25 bp, Homo sapien
cagcatatgccagaaaaagtggagg

SEQ ID NO: 5410792 - DNA, 25 bp, Homo sapien
aaaagtcgacttgtttccatcaggt

SEQ ID NO: 5410793 - DNA, 25 bp, Homo sapien
taaagcggactttgtcattgtacaa

SEQ ID NO: 5410794 - DNA, 25 bp, Homo sapien
tctgatagtgtcatagagctagcat

SEQ ID NO: 5410795 - DNA, 25 bp, Homo sapien
caatttcaggtcgttcttgttctga

SEQ ID NO: 5410796 - DNA, 25 bp, Homo sapien
gagaggcgtctctcaatttcaggtc

SEQ ID NO: 5410797 - DNA, 25 bp, Homo sapien
gcccagtgtgttgagaggcgtctct

SEQ ID NO: 5410798 - DNA, 25 bp, Homo sapien
gatagtattgatttgaaagaacaag

SEQ ID NO: 5410799 - DNA, 25 bp, Homo sapien
cctctagtgcccacagctttgaaga

SEQ ID NO: 5410800 - DNA, 25 bp, Homo sapien
caagtttaggccactcattgttagt

SEQ ID NO: 5410801 - DNA, 25 bp, Homo sapien
tagtattagttccaagagcaccctc

SEQ ID NO: 5410802 - DNA, 25 bp, Homo sapien
tagccggatgtcttacaagctgggt

SEQ ID NO: 5410803 - DNA, 25 bp, Homo sapien
cagaatatgggaaaacctgttagcc

SEQ ID NO: 5410804 - DNA, 25 bp, Homo sapien
gaaaacctgttagccggatgtctta

SEQ ID NO: 5410805 - DNA, 25 bp, Homo sapien
tgttagccggatgtcttacaagctg

SEQ ID NO: 5410806 - DNA, 25 bp, Homo sapien
ttaccatcagcagttcctaaatcaa

SEQ ID NO: 5410807 - DNA, 25 bp, Homo sapien
ctttttaccatcagcagttcctaaa

SEQ ID NO: 5410808 - DNA, 25 bp, Homo sapien
gcagttcctaaatcaagcacataca

SEQ ID NO: 5410809 - DNA, 25 bp, Homo sapien
tcagcagttcctaaatcaagcacat

SEQ ID NO: 5410810 - DNA, 25 bp, Homo sapien
taggttattcattgattgagtgttt

SEQ ID NO: 5410811 - DNA, 25 bp, Homo sapien
tatcctggtacaatgcaccattccc

SEQ ID NO: 5410812 - DNA, 25 bp, Homo sapien
tgtaggttattcattgattgagtgt

SEQ ID NO: 5410813 - DNA, 25 bp, Homo sapien
cattgattgagtgtttaagtatatt

SEQ ID NO: 5410814 - DNA, 25 bp, Homo sapien
tcattccagtcaattgggcatataa

SEQ ID NO: 5410815 - DNA, 25 bp, Homo sapien
tgtattcattccagtcaattgggca

SEQ ID NO: 5410816 - DNA, 25 bp, Homo sapien
ctgatggactttgtattcattccag

SEQ ID NO: 5410817 - DNA, 25 bp, Homo sapien
caattgggcatataatactcgttta

SEQ ID NO: 5410818 - DNA, 25 bp, Homo sapien
gaaacaaagggataacttattggca

SEQ ID NO: 5410819 - DNA, 25 bp, Homo sapien
cattacatggtttccctgtgctctc

SEQ ID NO: 5410820 - DNA, 25 bp, Homo sapien
cagcgagtgcttctccctgtcatta

SEQ ID NO: 5410821 - DNA, 25 bp, Homo sapien
caggtgaattgcagctattgccagc

SEQ ID NO: 5410822 - DNA, 25 bp, Homo sapien
tcacagtttgacagctgggatttac

SEQ ID NO: 5410823 - DNA, 25 bp, Homo sapien
gggaataatagagctatcagtataa

SEQ ID NO: 5410824 - DNA, 25 bp, Homo sapien
gtttgcaacaaacacactctctgga

SEQ ID NO: 5410825 - DNA, 25 bp, Homo sapien
caatcagcttggacctattacagga

SEQ ID NO: 5410826 - DNA, 25 bp, Homo sapien
tatgtacatactgctgactcccttg

SEQ ID NO: 5410827 - DNA, 25 bp, Homo sapien
tagggccgttgacgctgcaatatac

SEQ ID NO: 5410828 - DNA, 25 bp, Homo sapien
tggatctataatgggtttcctcctg

SEQ ID NO: 5410829 - DNA, 25 bp, Homo sapien
cataacttcagagtgaatagggccg

SEQ ID NO: 5410830 - DNA, 25 bp, Homo sapien
ttccttgggtaacaacatggcttct

SEQ ID NO: 5410831 - DNA, 25 bp, Homo sapien
aatattccgccaacagttatttcct

SEQ ID NO: 5410832 - DNA, 25 bp, Homo sapien
ttatttccttgggtaacaacatggc

SEQ ID NO: 5410833 - DNA, 25 bp, Homo sapien
tcagtcagctgtagggctacaatat

SEQ ID NO: 5410834 - DNA, 25 bp, Homo sapien
gaaatagtgcttgtgcagatagcac

SEQ ID NO: 5410835 - DNA, 25 bp, Homo sapien
tctgaggaaatagtgcttgtgcaga

SEQ ID NO: 5410836 - DNA, 25 bp, Homo sapien
gcagatagcactcaatgatgcattc

SEQ ID NO: 5410837 - DNA, 25 bp, Homo sapien
tgcttgtgcagatagcactcaatga

SEQ ID NO: 5410838 - DNA, 25 bp, Homo sapien
tgagggctgtgacttgatcttgcac

SEQ ID NO: 5410839 - DNA, 25 bp, Homo sapien
tggaaagctcctaacaaccatctgt

SEQ ID NO: 5410840 - DNA, 25 bp, Homo sapien
tcaaggcatggtcccagacaatgag

SEQ ID NO: 5410841 - DNA, 25 bp, Homo sapien
caaatgagtcttctgccatcggatc

SEQ ID NO: 5410842 - DNA, 25 bp, Homo sapien
tatgtgcgggagctttctttcagga

SEQ ID NO: 5410843 - DNA, 25 bp, Homo sapien
tcaatacctatgttcttaagagtct

SEQ ID NO: 5410844 - DNA, 25 bp, Homo sapien
taaattttggtgtggagtatggccc

SEQ ID NO: 5410845 - DNA, 25 bp, Homo sapien
gaagggtggctaaattgtagaacca

SEQ ID NO: 5410846 - DNA, 25 bp, Homo sapien
gcctttgcggaaaccagaccagtat

SEQ ID NO: 5410847 - DNA, 25 bp, Homo sapien
tgtttaaactgggtacaacctgaga

SEQ ID NO: 5410848 - DNA, 25 bp, Homo sapien
tctacttagaagtcctgtgtgcctt

SEQ ID NO: 5410849 - DNA, 25 bp, Homo sapien
tactcagggccattctgagaggttg

SEQ ID NO: 5410850 - DNA, 25 bp, Homo sapien
ttttgtaacttgcaggtgaaataca

SEQ ID NO: 5410851 - DNA, 25 bp, Homo sapien
atgttttcgcccttatttatggtct

SEQ ID NO: 5410852 - DNA, 25 bp, Homo sapien
ccttcaatagtttaataagtcactt

SEQ ID NO: 5410853 - DNA, 25 bp, Homo sapien
tcttttcacatggtaatgttttcgc

SEQ ID NO: 5410854 - DNA, 25 bp, Homo sapien
gagagcaatcctagcacaataatgt

SEQ ID NO: 5410855 - DNA, 25 bp, Homo sapien
gaactccaccagctgtattagatct

SEQ ID NO: 5410856 - DNA, 25 bp, Homo sapien
tgtaaatcttgtgtggccatcatcc

SEQ ID NO: 5410857 - DNA, 25 bp, Homo sapien
tgcaaggaagaacgcccttattgag

SEQ ID NO: 5410858 - DNA, 25 bp, Homo sapien
tcatattcgattgcaaactatctcc

SEQ ID NO: 5410859 - DNA, 25 bp, Homo sapien
cagtgaaaagaatgttacggcatat

SEQ ID NO: 5410860 - DNA, 25 bp, Homo sapien
gaagattttaatgctcccacttgag

SEQ ID NO: 5410861 - DNA, 25 bp, Homo sapien
ctccacatgccaaaactgccaagtt

SEQ ID NO: 5410862 - DNA, 25 bp, Homo sapien
ttgtccatgactcattgacagtacg

SEQ ID NO: 5410863 - DNA, 25 bp, Homo sapien
ctgactatcccgtaccaagaaaact

SEQ ID NO: 5410864 - DNA, 25 bp, Homo sapien
tcattgacagtacgaaagttttggg

SEQ ID NO: 5410865 - DNA, 25 bp, Homo sapien
gggttactctgactatcccgtacca

SEQ ID NO: 5410866 - DNA, 25 bp, Homo sapien
catggcctctaacagcctaagagaa

SEQ ID NO: 5410867 - DNA, 25 bp, Homo sapien
tacaccgtgtaaatgatccccactg

SEQ ID NO: 5410868 - DNA, 25 bp, Homo sapien
gctagaaaaacaagacatggcctct

SEQ ID NO: 5410869 - DNA, 25 bp, Homo sapien
cactggcagtgcaatgcaaaaccag

SEQ ID NO: 5410870 - DNA, 25 bp, Homo sapien
ccttgctgaataatcaatcgctgag

SEQ ID NO: 5410871 - DNA, 25 bp, Homo sapien
ttgtggtgaaaccatggctgggacc

SEQ ID NO: 5410872 - DNA, 25 bp, Homo sapien
caagtccttgctgaataatcaatcg

SEQ ID NO: 5410873 - DNA, 25 bp, Homo sapien
taatcaatcgctgagcctcatctct

SEQ ID NO: 5410874 - DNA, 25 bp, Homo sapien
gaggcagtggggctaccgtgagtgc

SEQ ID NO: 5410875 - DNA, 25 bp, Homo sapien
tggggctaccgtgagtgcccaggcg

SEQ ID NO: 5410876 - DNA, 25 bp, Homo sapien
gcagtggggctaccgtgagtgccca

SEQ ID NO: 5410877 - DNA, 25 bp, Homo sapien
gctaccgtgagtgcccaggcgtaaa

SEQ ID NO: 5410878 - DNA, 25 bp, Homo sapien
tcaaccgcaactgaaagggcttcag

SEQ ID NO: 5410879 - DNA, 25 bp, Homo sapien
gaagtccattgctaccagggaattc

SEQ ID NO: 5410880 - DNA, 25 bp, Homo sapien
tcagtgggattttctataactctgc

SEQ ID NO: 5410881 - DNA, 25 bp, Homo sapien
cgagtccttcttcaaccgcaactga

SEQ ID NO: 5410882 - DNA, 25 bp, Homo sapien
tcagctatacctggcttggttgcat

SEQ ID NO: 5410883 - DNA, 25 bp, Homo sapien
tcaccccgtgatcttctgtgcaggt

SEQ ID NO: 5410884 - DNA, 25 bp, Homo sapien
tgtagaccagtcagatatacttgtg

SEQ ID NO: 5410885 - DNA, 25 bp, Homo sapien
caaactatgctgtagtggcctacaa

SEQ ID NO: 5410886 - DNA, 25 bp, Homo sapien
ccatcattagcaaaagggcacacaa

SEQ ID NO: 5410887 - DNA, 25 bp, Homo sapien
taaaaagagcttgagtagactcgcc

SEQ ID NO: 5410888 - DNA, 25 bp, Homo sapien
gaagtttggctaggtgacaaccagt

SEQ ID NO: 5410889 - DNA, 25 bp, Homo sapien
cacaggcagcttatggtaaaagcag

SEQ ID NO: 5410890 - DNA, 25 bp, Homo sapien
ccttgatatggatgcatataattct

SEQ ID NO: 5410891 - DNA, 25 bp, Homo sapien
taggtgatatgctctgtgaactgca

SEQ ID NO: 5410892 - DNA, 25 bp, Homo sapien
cagccacttctaccttgatatggat

SEQ ID NO: 5410893 - DNA, 25 bp, Homo sapien
cataggtgatatgctctgtgaactg

SEQ ID NO: 5410894 - DNA, 25 bp, Homo sapien
agacaagacgtctgggtggatttta

SEQ ID NO: 5410895 - DNA, 25 bp, Homo sapien
tgatggtcctggattatccatgtgg

SEQ ID NO: 5410896 - DNA, 25 bp, Homo sapien
cttgctgtgacagtgttggctttga

SEQ ID NO: 5410897 - DNA, 25 bp, Homo sapien
cagagcctatgttaagctacatgga

SEQ ID NO: 5410898 - DNA, 25 bp, Homo sapien
tcattgcccgaaacctttggtggga

SEQ ID NO: 5410899 - DNA, 25 bp, Homo sapien
aatatcagtggaacacagccccatg

SEQ ID NO: 5410900 - DNA, 25 bp, Homo sapien
gtgatttgtcattgcccgaaacctt

SEQ ID NO: 5410901 - DNA, 25 bp, Homo sapien
cctgtggaaaatacaggtatctgtg

SEQ ID NO: 5410902 - DNA, 25 bp, Homo sapien
tagtgatgtctcctggtaaaaacca

SEQ ID NO: 5410903 - DNA, 25 bp, Homo sapien
tgattaaaggaagtgggcttaccac

SEQ ID NO: 5410904 - DNA, 25 bp, Homo sapien
tagagccttccaaagagtaccagcc

SEQ ID NO: 5410905 - DNA, 25 bp, Homo sapien
cataactcttgatggagtagagcct

SEQ ID NO: 5410906 - DNA, 25 bp, Homo sapien
cttaagcaatctaatcgcggtcacc

SEQ ID NO: 5410907 - DNA, 25 bp, Homo sapien
tcttcttctgcacagagcattttca

SEQ ID NO: 5410908 - DNA, 25 bp, Homo sapien
cacccagcacgtcctactctgctct

SEQ ID NO: 5410909 - DNA, 25 bp, Homo sapien
gagcattttcaggtctcggggccct

SEQ ID NO: 5410910 - DNA, 25 bp, Homo sapien
ttatcgttaatgcatatcttgaagg

SEQ ID NO: 5410911 - DNA, 25 bp, Homo sapien
ctagaaggccacagcacattgttta

SEQ ID NO: 5410912 - DNA, 25 bp, Homo sapien
cgttaatgcatatcttgaaggtaac

SEQ ID NO: 5410913 - DNA, 25 bp, Homo sapien
cagcacattgtttatcgttaatgca

SEQ ID NO: 5410914 - DNA, 25 bp, Homo sapien
cctaaaaggctgaggcttgctttat

SEQ ID NO: 5410915 - DNA, 25 bp, Homo sapien
ttacctaaaaggctgaggcttgctt

SEQ ID NO: 5410916 - DNA, 25 bp, Homo sapien
gcttacctaaaaggctgaggcttgc

SEQ ID NO: 5410917 - DNA, 25 bp, Homo sapien
caagcttacctaaaaggctgaggct

SEQ ID NO: 5410918 - DNA, 25 bp, Homo sapien
tgaaaaactgcaaatgccgcggttc

SEQ ID NO: 5410919 - DNA, 25 bp, Homo sapien
actattgccaaattcgctgaaaaac

SEQ ID NO: 5410920 - DNA, 25 bp, Homo sapien
tagttagtcggtgctccatgttttt

SEQ ID NO: 5410921 - DNA, 25 bp, Homo sapien
taaagcagaatccatagttagtcgg

SEQ ID NO: 5410922 - DNA, 25 bp, Homo sapien
tgttctttcgcatgtaagaaaccat

SEQ ID NO: 5410923 - DNA, 25 bp, Homo sapien
gttctttcgcatgtaagaaaccatg

SEQ ID NO: 5410924 - DNA, 25 bp, Homo sapien
cctgttctttcgcatgtaagaaacc

SEQ ID NO: 5410925 - DNA, 25 bp, Homo sapien
ccctgttctttcgcatgtaagaaac

SEQ ID NO: 5410926 - DNA, 25 bp, Homo sapien
tcaggatatgtgcttgaactcagaa

SEQ ID NO: 5410927 - DNA, 25 bp, Homo sapien
ttcaaaatctgggcatgtataaaaa

SEQ ID NO: 5410928 - DNA, 25 bp, Homo sapien
tcaaaatctgggcatgtataaaaaa

SEQ ID NO: 5410929 - DNA, 25 bp, Homo sapien
caaaatctgggcatgtataaaaaag

SEQ ID NO: 5410930 - DNA, 25 bp, Homo sapien
gcaaaatctgtgtgggggatatttc

SEQ ID NO: 5410931 - DNA, 25 bp, Homo sapien
ttggtttcagttgcaaaagatacca

SEQ ID NO: 5410932 - DNA, 25 bp, Homo sapien
aaagataccatatgctctggaaaaa

SEQ ID NO: 5410933 - DNA, 25 bp, Homo sapien
ctgcaaaatctgtgtgggggatatt

SEQ ID NO: 5410934 - DNA, 25 bp, Homo sapien
gaccaatatagtaatcaaaagcaaa

SEQ ID NO: 5410935 - DNA, 25 bp, Homo sapien
cataggtaccttaatgagaatgtct

SEQ ID NO: 5410936 - DNA, 25 bp, Homo sapien
ttgaaaatgcccgtccttagactct

SEQ ID NO: 5410937 - DNA, 25 bp, Homo sapien
tgtgactaaaattcacccaaaagtg

SEQ ID NO: 5410938 - DNA, 25 bp, Homo sapien
gcaaccagcctatcaggtcaaaagg

SEQ ID NO: 5410939 - DNA, 25 bp, Homo sapien
gattcagtagatccgggcaagtcct

SEQ ID NO: 5410940 - DNA, 25 bp, Homo sapien
aagtacagagtttagggtatgccca

SEQ ID NO: 5410941 - DNA, 25 bp, Homo sapien
cacagcacagtggaggtcaggactt

SEQ ID NO: 5410942 - DNA, 25 bp, Homo sapien
tttacagtgactatcttcttcacat

SEQ ID NO: 5410943 - DNA, 25 bp, Homo sapien
tattttatttacagtgactatcttc

SEQ ID NO: 5410944 - DNA, 25 bp, Homo sapien
ttatttacagtgactatcttcttca

SEQ ID NO: 5410945 - DNA, 25 bp, Homo sapien
tacagtgactatcttcttcacataa

SEQ ID NO: 5410946 - DNA, 25 bp, Homo sapien
tagcacttcaatcaccagttcgtgg

SEQ ID NO: 5410947 - DNA, 25 bp, Homo sapien
caatcaccagttcgtggtcttctat

SEQ ID NO: 5410948 - DNA, 25 bp, Homo sapien
ccagttcgtggtcttctattgttct

SEQ ID NO: 5410949 - DNA, 25 bp, Homo sapien
ccccagttggatagcacttcaatca

SEQ ID NO: 5410950 - DNA, 25 bp, Homo sapien
gagtgtctcttacacaacaaacaac

SEQ ID NO: 5410951 - DNA, 25 bp, Homo sapien
tacgtctgctccaatatcttctact

SEQ ID NO: 5410952 - DNA, 25 bp, Homo sapien
gcaactttctctacgtctgctccaa

SEQ ID NO: 5410953 - DNA, 25 bp, Homo sapien
tctcagatagcagggattctttctc

SEQ ID NO: 5410954 - DNA, 25 bp, Homo sapien
gcaattgcccaaggggtgtatgagt

SEQ ID NO: 5410955 - DNA, 25 bp, Homo sapien
gggtgtatgagtacggacggtggca

SEQ ID NO: 5410956 - DNA, 25 bp, Homo sapien
tttgcaattgcccaaggggtgtatg

SEQ ID NO: 5410957 - DNA, 25 bp, Homo sapien
tatgagtacggacggtggcagcaag

SEQ ID NO: 5410958 - DNA, 25 bp, Homo sapien
aaaactgagtagaaactgtagtata

SEQ ID NO: 5410959 - DNA, 25 bp, Homo sapien
ctgtagtatatgcaggcatctgcag

SEQ ID NO: 5410960 - DNA, 25 bp, Homo sapien
catctgcaggcagttctctaatgta

SEQ ID NO: 5410961 - DNA, 25 bp, Homo sapien
tgcaggcagttctctaatgtataaa

SEQ ID NO: 5410962 - DNA, 25 bp, Homo sapien
tattgcccatttccggtctgtgcgt

SEQ ID NO: 5410963 - DNA, 25 bp, Homo sapien
tctgtgcgtgccaccaggacaccat

SEQ ID NO: 5410964 - DNA, 25 bp, Homo sapien
gctagttacatattgcccatttccg

SEQ ID NO: 5410965 - DNA, 25 bp, Homo sapien
tatctttgctagttacatattgccc

SEQ ID NO: 5410966 - DNA, 25 bp, Homo sapien
tgagggtggtcacaactctgatggc

SEQ ID NO: 5410967 - DNA, 25 bp, Homo sapien
ttctgctgtgatgagggtggtcaca

SEQ ID NO: 5410968 - DNA, 25 bp, Homo sapien
cacagtgccacatgtcccaaaggct

SEQ ID NO: 5410969 - DNA, 25 bp, Homo sapien
tggtatgttataaactgcacaggaa

SEQ ID NO: 5410970 - DNA, 25 bp, Homo sapien
caattgttctgtttaaacatataat

SEQ ID NO: 5410971 - DNA, 25 bp, Homo sapien
tcaattgttctgtttaaacatataa

SEQ ID NO: 5410972 - DNA, 25 bp, Homo sapien
gcaggtgctcaaaaagggtccagct

SEQ ID NO: 5410973 - DNA, 25 bp, Homo sapien
tcgagccgttatgtcactgggtaca

SEQ ID NO: 5410974 - DNA, 25 bp, Homo sapien
ggatcaacagctgacaaacatctcg

SEQ ID NO: 5410975 - DNA, 25 bp, Homo sapien
tcaatgtaatgattcttcaggatca

SEQ ID NO: 5410976 - DNA, 25 bp, Homo sapien
catcttcactgtatactttaatcac

SEQ ID NO: 5410977 - DNA, 25 bp, Homo sapien
tgactacccccatatgttttcctac

SEQ ID NO: 5410978 - DNA, 25 bp, Homo sapien
tatgttttcctacagtaagctctca

SEQ ID NO: 5410979 - DNA, 25 bp, Homo sapien
atatgttttcctacagtaagctctc

SEQ ID NO: 5410980 - DNA, 25 bp, Homo sapien
ctcctgactacccccatatgttttc

SEQ ID NO: 5410981 - DNA, 25 bp, Homo sapien
ggccaagagccatgaagagtactca

SEQ ID NO: 5410982 - DNA, 25 bp, Homo sapien
gccaagagccatgaagagtactcat

SEQ ID NO: 5410983 - DNA, 25 bp, Homo sapien
tttctgctctccttgtctcaggcca

SEQ ID NO: 5410984 - DNA, 25 bp, Homo sapien
gctctccttgtctcaggccaagagc

SEQ ID NO: 5410985 - DNA, 25 bp, Homo sapien
tacagaccgccccaagcagtagtct

SEQ ID NO: 5410986 - DNA, 25 bp, Homo sapien
cttcactgccaaatgtggaacatgc

SEQ ID NO: 5410987 - DNA, 25 bp, Homo sapien
tgagaccgttcattagcccagctat

SEQ ID NO: 5410988 - DNA, 25 bp, Homo sapien
ttagactcctcatactgtaaaatgg

SEQ ID NO: 5410989 - DNA, 25 bp, Homo sapien
gcagagtgactcttcttgcactcaa

SEQ ID NO: 5410990 - DNA, 25 bp, Homo sapien
tctgtagaattattggcgttattgc

SEQ ID NO: 5410991 - DNA, 25 bp, Homo sapien
tattggcgttattgcaggcagagtg

SEQ ID NO: 5410992 - DNA, 25 bp, Homo sapien
caggcagagtgactcttcttgcact

SEQ ID NO: 5410993 - DNA, 25 bp, Homo sapien
ttcttagaatgatcctgtctcgtag

SEQ ID NO: 5410994 - DNA, 25 bp, Homo sapien
cgtaggtcatggacaaaataaaaga

SEQ ID NO: 5410995 - DNA, 25 bp, Homo sapien
aatgatcctgtctcgtaggtcatgg

SEQ ID NO: 5410996 - DNA, 25 bp, Homo sapien
ctcgtaggtcatggacaaaataaaa

SEQ ID NO: 5410997 - DNA, 25 bp, Homo sapien
gactgaacaagatagcaccctgcat

SEQ ID NO: 5410998 - DNA, 25 bp, Homo sapien
tacttaagacaggtggaatctcatt

SEQ ID NO: 5410999 - DNA, 25 bp, Homo sapien
tctgtaatcctttgcaggtgctcat

SEQ ID NO: 5411000 - DNA, 25 bp, Homo sapien
ctgcatacttaagacaggtggaatc

SEQ ID NO: 5411001 - DNA, 25 bp, Homo sapien
cagtagaagccagaatcttgagttg

SEQ ID NO: 5411002 - DNA, 25 bp, Homo sapien
caaaatgtaagtcaccctttatata

SEQ ID NO: 5411003 - DNA, 25 bp, Homo sapien
agtagaagccagaatcttgagttgc

SEQ ID NO: 5411004 - DNA, 25 bp, Homo sapien
cataacctaatatcttccctggtct

SEQ ID NO: 5411005 - DNA, 25 bp, Homo sapien
ggtctccacaccgtcatggaaatag

SEQ ID NO: 5411006 - DNA, 25 bp, Homo sapien
cctggtctccacaccgtcatggaaa

SEQ ID NO: 5411007 - DNA, 25 bp, Homo sapien
ttcaggtctccataacctaatatct

SEQ ID NO: 5411008 - DNA, 25 bp, Homo sapien
aagagccagaagtctatatttagat

SEQ ID NO: 5411009 - DNA, 25 bp, Homo sapien
tcaaaatgataagcttagagaagca

SEQ ID NO: 5411010 - DNA, 25 bp, Homo sapien
gattcaaatcccttgatcaaaatga

SEQ ID NO: 5411011 - DNA, 25 bp, Homo sapien
gccagaagtctatatttagattcaa

SEQ ID NO: 5411012 - DNA, 25 bp, Homo sapien
gaaataggtctgctgacaacacaga

SEQ ID NO: 5411013 - DNA, 25 bp, Homo sapien
ttggaatagatggcatttccggaac

SEQ ID NO: 5411014 - DNA, 25 bp, Homo sapien
tgggaaataggtctgctgacaacac

SEQ ID NO: 5411015 - DNA, 25 bp, Homo sapien
ataggtctgctgacaacacagatgt

SEQ ID NO: 5411016 - DNA, 25 bp, Homo sapien
gcgccaggtcgtgggcgtcgcccct

SEQ ID NO: 5411017 - DNA, 25 bp, Homo sapien
gggccggcgccaggtcgtgggcgtc

SEQ ID NO: 5411018 - DNA, 25 bp, Homo sapien
gccaggtcgtgggcgtcgcccctcc

SEQ ID NO: 5411019 - DNA, 25 bp, Homo sapien
gccggcgccaggtcgtgggcgtcgc

SEQ ID NO: 5411020 - DNA, 25 bp, Homo sapien
ggccagcggcgaatcccgggcagcc

SEQ ID NO: 5411021 - DNA, 25 bp, Homo sapien
tgggcggccagcggcgaatcccggg

SEQ ID NO: 5411022 - DNA, 25 bp, Homo sapien
ctgggcggccagcggcgaatcccgg

SEQ ID NO: 5411023 - DNA, 25 bp, Homo sapien
gcggccagcggcgaatcccgggcag

SEQ ID NO: 5411024 - DNA, 25 bp, Homo sapien
ttgccgggaggaccgcaggcgggat

SEQ ID NO: 5411025 - DNA, 25 bp, Homo sapien
gctcgggcgtcatgggagactcggc

SEQ ID NO: 5411026 - DNA, 25 bp, Homo sapien
agacgcgcggccgagctatctgcga

SEQ ID NO: 5411027 - DNA, 25 bp, Homo sapien
cgggaggcgaggtgccggctaggca

SEQ ID NO: 5411028 - DNA, 25 bp, Homo sapien
gaccaaattaggtaatatctgtccc

SEQ ID NO: 5411029 - DNA, 25 bp, Homo sapien
ttgaccaaattaggtaatatctgtc

SEQ ID NO: 5411030 - DNA, 25 bp, Homo sapien
tgaccaaattaggtaatatctgtcc

SEQ ID NO: 5411031 - DNA, 25 bp, Homo sapien
tgtatatgtctttggaatcactgga

SEQ ID NO: 5411032 - DNA, 25 bp, Homo sapien
gctccacatcctagcataattgcca

SEQ ID NO: 5411033 - DNA, 25 bp, Homo sapien
gcattctcctatttagtggaaatcc

SEQ ID NO: 5411034 - DNA, 25 bp, Homo sapien
tgctattccccaatggtgcatcctg

SEQ ID NO: 5411035 - DNA, 25 bp, Homo sapien
ggacttgggcctgtaaaattgcaga

SEQ ID NO: 5411036 - DNA, 25 bp, Homo sapien
cctgggtggctgtccgccttttgga

SEQ ID NO: 5411037 - DNA, 25 bp, Homo sapien
gagcaatatcagtcccctgggtggc

SEQ ID NO: 5411038 - DNA, 25 bp, Homo sapien
tgcagagaagcagcttgtcccctgg

SEQ ID NO: 5411039 - DNA, 25 bp, Homo sapien
gcacattttgcacacttcccttggt

SEQ ID NO: 5411040 - DNA, 25 bp, Homo sapien
gaaagatatctaggctgtttccagc

SEQ ID NO: 5411041 - DNA, 25 bp, Homo sapien
tattcttccatgcagttgcaagtag

SEQ ID NO: 5411042 - DNA, 25 bp, Homo sapien
ttcccttggtatgcataggcatgca

SEQ ID NO: 5411043 - DNA, 25 bp, Homo sapien
tgcagtgtgactctcatttcctccc

SEQ ID NO: 5411044 - DNA, 25 bp, Homo sapien
cacaccatctcgaggaaaggcaaga

SEQ ID NO: 5411045 - DNA, 25 bp, Homo sapien
ttacggcagacaagatcactttggg

SEQ ID NO: 5411046 - DNA, 25 bp, Homo sapien
ccaagtggctctccataaagaaaca

SEQ ID NO: 5411047 - DNA, 25 bp, Homo sapien
ataggtctttcccacttatccacac

SEQ ID NO: 5411048 - DNA, 25 bp, Homo sapien
tccctccaggtatgatttttaactg

SEQ ID NO: 5411049 - DNA, 25 bp, Homo sapien
tatccttgaagttttagcatattga

SEQ ID NO: 5411050 - DNA, 25 bp, Homo sapien
cattgcaatattctcctagctgtcg

SEQ ID NO: 5411051 - DNA, 25 bp, Homo sapien
catggatgcttatagcttattgatg

SEQ ID NO: 5411052 - DNA, 25 bp, Homo sapien
tatgtatgtgtaggtcaattaagac

SEQ ID NO: 5411053 - DNA, 25 bp, Homo sapien
actttatggcccagactatggtcaa

SEQ ID NO: 5411054 - DNA, 25 bp, Homo sapien
taagacaaatgtgttaaccatgctg

SEQ ID NO: 5411055 - DNA, 25 bp, Homo sapien
gcaatcactctctattttactccaa

SEQ ID NO: 5411056 - DNA, 25 bp, Homo sapien
tactccagggagtgtgatttcttct

SEQ ID NO: 5411057 - DNA, 25 bp, Homo sapien
tgcttatgaattcccgtaatgcccc

SEQ ID NO: 5411058 - DNA, 25 bp, Homo sapien
cagttttatgagctataggcagcac

SEQ ID NO: 5411059 - DNA, 25 bp, Homo sapien
tcttagacctctgagctccagatgg

SEQ ID NO: 5411060 - DNA, 25 bp, Homo sapien
tcacaggactgcgataacaaagttc

SEQ ID NO: 5411061 - DNA, 25 bp, Homo sapien
ctttgaggaatttgagggagaatct

SEQ ID NO: 5411062 - DNA, 25 bp, Homo sapien
gaatctgtttcatacctcgcctctg

SEQ ID NO: 5411063 - DNA, 25 bp, Homo sapien
tagacgtttgaatcaagttgttggc

SEQ ID NO: 5411064 - DNA, 25 bp, Homo sapien
taatgtggtcaaaacatagtagaaa

SEQ ID NO: 5411065 - DNA, 25 bp, Homo sapien
tacaaaactgcaaccttatgcccat

SEQ ID NO: 5411066 - DNA, 25 bp, Homo sapien
tactgtgaaaagagaagatatggtc

SEQ ID NO: 5411067 - DNA, 25 bp, Homo sapien
cacaggcaagattagaagatactgt

SEQ ID NO: 5411068 - DNA, 25 bp, Homo sapien
ggtgcctttgtagaagatcatttca

SEQ ID NO: 5411069 - DNA, 25 bp, Homo sapien
gatatagatacacggttttcccaac

SEQ ID NO: 5411070 - DNA, 25 bp, Homo sapien
ttcccaacatcattcgctgaagaga

SEQ ID NO: 5411071 - DNA, 25 bp, Homo sapien
tacaagtgtcctagtttctccatgg

SEQ ID NO: 5411072 - DNA, 25 bp, Homo sapien
tgaaccatcctcacgttccaggaat

SEQ ID NO: 5411073 - DNA, 25 bp, Homo sapien
gtgtcttagtgtgggcctttttaca

SEQ ID NO: 5411074 - DNA, 25 bp, Homo sapien
gaatgagctcagttctgctgacttt

SEQ ID NO: 5411075 - DNA, 25 bp, Homo sapien
tcttatggaagttcccctgtatgtg

SEQ ID NO: 5411076 - DNA, 25 bp, Homo sapien
cctaagttggagtgacaaagccagg

SEQ ID NO: 5411077 - DNA, 25 bp, Homo sapien
tccagtaagccaggatcagtgaaca

SEQ ID NO: 5411078 - DNA, 25 bp, Homo sapien
ttttaagtggcaaagaggactctag

SEQ ID NO: 5411079 - DNA, 25 bp, Homo sapien
tatgccaaagttaaggcagatgccc

SEQ ID NO: 5411080 - DNA, 25 bp, Homo sapien
cagccttgacagcccaagctcaagt

SEQ ID NO: 5411081 - DNA, 25 bp, Homo sapien
gccttgacagcccaagctcaagtga

SEQ ID NO: 5411082 - DNA, 25 bp, Homo sapien
ggagtgcaatggcccagtaatggct

SEQ ID NO: 5411083 - DNA, 25 bp, Homo sapien
gcaatggcccagtaatggctcactg

SEQ ID NO: 5411084 - DNA, 25 bp, Homo sapien
tatttattgtaggaacagtgtctcc

SEQ ID NO: 5411085 - DNA, 25 bp, Homo sapien
gaactaattcactcttaattcaccc

SEQ ID NO: 5411086 - DNA, 25 bp, Homo sapien
accatgtccggctgacaataatttt

SEQ ID NO: 5411087 - DNA, 25 bp, Homo sapien
tctcaccccatgaactaagatatag

SEQ ID NO: 5411088 - DNA, 25 bp, Homo sapien
tagccttcctatggactgtctgagc

SEQ ID NO: 5411089 - DNA, 25 bp, Homo sapien
tgagccaacctatattcttccagtg

SEQ ID NO: 5411090 - DNA, 25 bp, Homo sapien
tgaggacctagtggtggcactgcta

SEQ ID NO: 5411091 - DNA, 25 bp, Homo sapien
tctaaggcccatttcctgagcgtgg

SEQ ID NO: 5411092 - DNA, 25 bp, Homo sapien
ggtcatgtgtgagttaagttgtaag

SEQ ID NO: 5411093 - DNA, 25 bp, Homo sapien
atctgattggtcatgtgtgagttaa

SEQ ID NO: 5411094 - DNA, 25 bp, Homo sapien
tgtgtgagttaagttgtaagccccg

SEQ ID NO: 5411095 - DNA, 25 bp, Homo sapien
actatctgattggtcatgtgtgagt

SEQ ID NO: 5411096 - DNA, 25 bp, Homo sapien
ttgactggtacagtttcctaattgg

SEQ ID NO: 5411097 - DNA, 25 bp, Homo sapien
cctaattggttgttgactcattttt

SEQ ID NO: 5411098 - DNA, 25 bp, Homo sapien
taatggtttctgtcaatttgtaatc

SEQ ID NO: 5411099 - DNA, 25 bp, Homo sapien
ggtgtattatactcatactgtgttg

SEQ ID NO: 5411100 - DNA, 25 bp, Homo sapien
gttctaccaacaactatgcaacaga

SEQ ID NO: 5411101 - DNA, 25 bp, Homo sapien
catagggcaacctgcacatttaaat

SEQ ID NO: 5411102 - DNA, 25 bp, Homo sapien
tattcaccagttattgtctaccaca

SEQ ID NO: 5411103 - DNA, 25 bp, Homo sapien
gaatcaacctgggtgctcactgatg

SEQ ID NO: 5411104 - DNA, 25 bp, Homo sapien
tcaggtttacagatgcattatccat

SEQ ID NO: 5411105 - DNA, 25 bp, Homo sapien
caaggagaatgggtacgtttcaggt

SEQ ID NO: 5411106 - DNA, 25 bp, Homo sapien
ttcaggtttacagatgcattatcca

SEQ ID NO: 5411107 - DNA, 25 bp, Homo sapien
tttcaggtttacagatgcattatcc

SEQ ID NO: 5411108 - DNA, 25 bp, Homo sapien
gagtatggactcattaacctcctag

SEQ ID NO: 5411109 - DNA, 25 bp, Homo sapien
cttaggacagttctgactggaggca

SEQ ID NO: 5411110 - DNA, 25 bp, Homo sapien
acagctacagtgctctcaggaggcc

SEQ ID NO: 5411111 - DNA, 25 bp, Homo sapien
gaggcctaggagttgacttagtcca

SEQ ID NO: 5411112 - DNA, 25 bp, Homo sapien
ttacacaaatcacttcaccatagct

SEQ ID NO: 5411113 - DNA, 25 bp, Homo sapien
tcccttcagtgcctcctgaatgaga

SEQ ID NO: 5411114 - DNA, 25 bp, Homo sapien
ttggcaatgacaagtgtctgtccct

SEQ ID NO: 5411115 - DNA, 25 bp, Homo sapien
tcctgaatgagatcatttacacaaa

SEQ ID NO: 5411116 - DNA, 25 bp, Homo sapien
tctagacttcaagaaaggagagggt

SEQ ID NO: 5411117 - DNA, 25 bp, Homo sapien
tcacttaaatagaatctagacttca

SEQ ID NO: 5411118 - DNA, 25 bp, Homo sapien
gacaaatagtatcacttaaatagaa

SEQ ID NO: 5411119 - DNA, 25 bp, Homo sapien
gaatctagacttcaagaaaggagag

SEQ ID NO: 5411120 - DNA, 25 bp, Homo sapien
agcaaggtgcggtccagtactgctg

SEQ ID NO: 5411121 - DNA, 25 bp, Homo sapien
cacctgctgccaagcaaggtgcggt

SEQ ID NO: 5411122 - DNA, 25 bp, Homo sapien
gaaagacagataacataagcactgg

SEQ ID NO: 5411123 - DNA, 25 bp, Homo sapien
ggttatatggtgaactgtgacagca

SEQ ID NO: 5411124 - DNA, 25 bp, Homo sapien
gctaggactagcaagggcaaggatc

SEQ ID NO: 5411125 - DNA, 25 bp, Homo sapien
tgatctcactaagaaccttgacctg

SEQ ID NO: 5411126 - DNA, 25 bp, Homo sapien
aatctcaaaagggtagctgcagctt

SEQ ID NO: 5411127 - DNA, 25 bp, Homo sapien
caaaggtactggtaggaacaagatc

SEQ ID NO: 5411128 - DNA, 25 bp, Homo sapien
ggcagaataagtggtcttggagaaa

SEQ ID NO: 5411129 - DNA, 25 bp, Homo sapien
ggtcttggagaaatactggtcactt

SEQ ID NO: 5411130 - DNA, 25 bp, Homo sapien
atggcagaataagtggtcttggaga

SEQ ID NO: 5411131 - DNA, 25 bp, Homo sapien
gtcttggagaaatactggtcacttt

SEQ ID NO: 5411132 - DNA, 25 bp, Homo sapien
gagtcctgggcctgctcacttctat

SEQ ID NO: 5411133 - DNA, 25 bp, Homo sapien
tattactcatatggcagattctgct

SEQ ID NO: 5411134 - DNA, 25 bp, Homo sapien
tcgctgagggagaactaccaaggag

SEQ ID NO: 5411135 - DNA, 25 bp, Homo sapien
ggagcacacagggtgagttactctt

SEQ ID NO: 5411136 - DNA, 25 bp, Homo sapien
cctagttagcttgaacgtcagataa

SEQ ID NO: 5411137 - DNA, 25 bp, Homo sapien
atgcctagttagcttgaacgtcaga

SEQ ID NO: 5411138 - DNA, 25 bp, Homo sapien
tttatcttgcaatcctgtgaaatag

SEQ ID NO: 5411139 - DNA, 25 bp, Homo sapien
tattttatcttgcaatcctgtgaaa

SEQ ID NO: 5411140 - DNA, 25 bp, Homo sapien
tatcgcaaggcgtgggctggaaact

SEQ ID NO: 5411141 - DNA, 25 bp, Homo sapien
tcaaaacctgctcctatgggtggga

SEQ ID NO: 5411142 - DNA, 25 bp, Homo sapien
tgaaatcggaagaagggtcactcct

SEQ ID NO: 5411143 - DNA, 25 bp, Homo sapien
tcttaggtgatctaggctggcctca

SEQ ID NO: 5411144 - DNA, 25 bp, Homo sapien
gctgttttacacaaggctgccgtga

SEQ ID NO: 5411145 - DNA, 25 bp, Homo sapien
gagggtctctccaactgattcaagg

SEQ ID NO: 5411146 - DNA, 25 bp, Homo sapien
taaagctgagcacgggttaggaccc

SEQ ID NO: 5411147 - DNA, 25 bp, Homo sapien
gcttaaatgtacactagggatccct

SEQ ID NO: 5411148 - DNA, 25 bp, Homo sapien
ggacagaacaccaacaggctctaga

SEQ ID NO: 5411149 - DNA, 25 bp, Homo sapien
gaaagatgtttaaggcttctggcac

SEQ ID NO: 5411150 - DNA, 25 bp, Homo sapien
gagctgtaagccgacaaatgggcat

SEQ ID NO: 5411151 - DNA, 25 bp, Homo sapien
tttccaattgctacactgaggcagc

SEQ ID NO: 5411152 - DNA, 25 bp, Homo sapien
catctgaatatacatttgccaaaat

SEQ ID NO: 5411153 - DNA, 25 bp, Homo sapien
tatattagtgtacatctgaatatac

SEQ ID NO: 5411154 - DNA, 25 bp, Homo sapien
taatatattagtgtacatctgaata

SEQ ID NO: 5411155 - DNA, 25 bp, Homo sapien
tagataatatattagtgtacatctg

SEQ ID NO: 5411156 - DNA, 25 bp, Homo sapien
ttccattagtatgaagttggtctga

SEQ ID NO: 5411157 - DNA, 25 bp, Homo sapien
gtctgaagtggaagtgaagtgcagt

SEQ ID NO: 5411158 - DNA, 25 bp, Homo sapien
gttccattagtatgaagttggtctg

SEQ ID NO: 5411159 - DNA, 25 bp, Homo sapien
gaagttggtctgaagtggaagtgaa

SEQ ID NO: 5411160 - DNA, 25 bp, Homo sapien
ggaatggctgagtcttgaccttcca

SEQ ID NO: 5411161 - DNA, 25 bp, Homo sapien
gaatggctgagtcttgaccttccat

SEQ ID NO: 5411162 - DNA, 25 bp, Homo sapien
agatattgtatttgatggaatggta

SEQ ID NO: 5411163 - DNA, 25 bp, Homo sapien
ccattcacagatattgtatttgatg

SEQ ID NO: 5411164 - DNA, 25 bp, Homo sapien
tttgcacccatcaatttaaaatggg

SEQ ID NO: 5411165 - DNA, 25 bp, Homo sapien
aaagaaacacactttgcacccatca

SEQ ID NO: 5411166 - DNA, 25 bp, Homo sapien
tcaacagttaccacattttaacttc

SEQ ID NO: 5411167 - DNA, 25 bp, Homo sapien
aaatgggatagctgtctaattttca

SEQ ID NO: 5411168 - DNA, 25 bp, Homo sapien
cacaaaggacaagagcacaaacaga

SEQ ID NO: 5411169 - DNA, 25 bp, Homo sapien
tcttacaagaagacaactggagtac

SEQ ID NO: 5411170 - DNA, 25 bp, Homo sapien
tctgtgactgttaagccaaatgact

SEQ ID NO: 5411171 - DNA, 25 bp, Homo sapien
taattctgtaattctggctccccaa

SEQ ID NO: 5411172 - DNA, 25 bp, Homo sapien
caggatggagcagagtgattgacgc

SEQ ID NO: 5411173 - DNA, 25 bp, Homo sapien
gagcagagtgattgacgctacacac

SEQ ID NO: 5411174 - DNA, 25 bp, Homo sapien
gttttctcgattgtctgatgaatcc

SEQ ID NO: 5411175 - DNA, 25 bp, Homo sapien
gatggagcagagtgattgacgctac

SEQ ID NO: 5411176 - DNA, 25 bp, Homo sapien
caacaaatgacaggtaatgactttc

SEQ ID NO: 5411177 - DNA, 25 bp, Homo sapien
cggtaagaagagttgccaccagcag

SEQ ID NO: 5411178 - DNA, 25 bp, Homo sapien
tagtatgcctgtgagatttctttcc

SEQ ID NO: 5411179 - DNA, 25 bp, Homo sapien
aggatacggtaagaagagttgccac

SEQ ID NO: 5411180 - DNA, 25 bp, Homo sapien
cacagggccacaactggggatgtac

SEQ ID NO: 5411181 - DNA, 25 bp, Homo sapien
tccacagggccacaactggggatgt

SEQ ID NO: 5411182 - DNA, 25 bp, Homo sapien
tgtccacagggccacaactggggat

SEQ ID NO: 5411183 - DNA, 25 bp, Homo sapien
ttgtccacagggccacaactgggga

SEQ ID NO: 5411184 - DNA, 25 bp, Homo sapien
gaccccacagccatatgagccactt

SEQ ID NO: 5411185 - DNA, 25 bp, Homo sapien
ccccacagccatatgagccacttct

SEQ ID NO: 5411186 - DNA, 25 bp, Homo sapien
tgaccccacagccatatgagccact

SEQ ID NO: 5411187 - DNA, 25 bp, Homo sapien
ccacagccatatgagccacttctca

SEQ ID NO: 5411188 - DNA, 25 bp, Homo sapien
gaagtggatcgtctggcagccagag

SEQ ID NO: 5411189 - DNA, 25 bp, Homo sapien
agaagtggatcgtctggcagccaga

SEQ ID NO: 5411190 - DNA, 25 bp, Homo sapien
cggacggacatggtaacttggccaa

SEQ ID NO: 5411191 - DNA, 25 bp, Homo sapien
ttggtgcggacggacatggtaactt

SEQ ID NO: 5411192 - DNA, 25 bp, Homo sapien
gccaatgtgacccctgaccacagtg

SEQ ID NO: 5411193 - DNA, 25 bp, Homo sapien
agcttggtgcggacggacatggtaa

SEQ ID NO: 5411194 - DNA, 25 bp, Homo sapien
gtcagagacatgaacatacatctga

SEQ ID NO: 5411195 - DNA, 25 bp, Homo sapien
ctacattggggtaatgcaaggtcag

SEQ ID NO: 5411196 - DNA, 25 bp, Homo sapien
cattggggtaatgcaaggtcagaga

SEQ ID NO: 5411197 - DNA, 25 bp, Homo sapien
attggggtaatgcaaggtcagagac

SEQ ID NO: 5411198 - DNA, 25 bp, Homo sapien
actcagtacacttaattgactgcag

SEQ ID NO: 5411199 - DNA, 25 bp, Homo sapien
gaactcagtacacttaattgactgc

SEQ ID NO: 5411200 - DNA, 25 bp, Homo sapien
ttagagcaacctatagaggaaacag

SEQ ID NO: 5411201 - DNA, 25 bp, Homo sapien
aggaactcagtacacttaattgact

SEQ ID NO: 5411202 - DNA, 25 bp, Homo sapien
catttagaaaacgtatcgatggctc

SEQ ID NO: 5411203 - DNA, 25 bp, Homo sapien
tactagtttacgcattctgagggca

SEQ ID NO: 5411204 - DNA, 25 bp, Homo sapien
tgtagaaatcgctgccaacctgaaa

SEQ ID NO: 5411205 - DNA, 25 bp, Homo sapien
tgggctagaagcttacagagcaacc

SEQ ID NO: 5411206 - DNA, 25 bp, Homo sapien
ccaccttctgttgaaccaaagataa

SEQ ID NO: 5411207 - DNA, 25 bp, Homo sapien
tccaccttctgttgaaccaaagata

SEQ ID NO: 5411208 - DNA, 25 bp, Homo sapien
tttagtaaatcagagaccatcaagt

SEQ ID NO: 5411209 - DNA, 25 bp, Homo sapien
ttttagtaaatcagagaccatcaag

SEQ ID NO: 5411210 - DNA, 25 bp, Homo sapien
ttagtaaatcagagaccatcaagta

SEQ ID NO: 5411211 - DNA, 25 bp, Homo sapien
taactagaagtgaaaaatgctcgtc

SEQ ID NO: 5411212 - DNA, 25 bp, Homo sapien
cccttaaattgtgtgcatggcctac

SEQ ID NO: 5411213 - DNA, 25 bp, Homo sapien
tccctctggaagtaagcgctatcat

SEQ ID NO: 5411214 - DNA, 25 bp, Homo sapien
tgctcagagctatcaataaggttcc

SEQ ID NO: 5411215 - DNA, 25 bp, Homo sapien
gaactttgtctcataacagtgaatg

SEQ ID NO: 5411216 - DNA, 25 bp, Homo sapien
ctcccgaacggattgcagtcagcaa

SEQ ID NO: 5411217 - DNA, 25 bp, Homo sapien
tctgggtcagagctttggaatgtta

SEQ ID NO: 5411218 - DNA, 25 bp, Homo sapien
caaactctgtcgcatctgttctggg

SEQ ID NO: 5411219 - DNA, 25 bp, Homo sapien
cttatcagacacaccaagctgtggg

SEQ ID NO: 5411220 - DNA, 25 bp, Homo sapien
gctgtgggatgtccacaaatttatt

SEQ ID NO: 5411221 - DNA, 25 bp, Homo sapien
caagctgtgggatgtccacaaattt

SEQ ID NO: 5411222 - DNA, 25 bp, Homo sapien
aagctgtgggatgtccacaaattta

SEQ ID NO: 5411223 - DNA, 25 bp, Homo sapien
gactcggtgcgctctttactgaaag

SEQ ID NO: 5411224 - DNA, 25 bp, Homo sapien
gcaggagcctgaccgatgacatcat

SEQ ID NO: 5411225 - DNA, 25 bp, Homo sapien
gaaagagtctgctccggagaaggca

SEQ ID NO: 5411226 - DNA, 25 bp, Homo sapien
ttcactacagcaagagcaaacggtg

SEQ ID NO: 5411227 - DNA, 25 bp, Homo sapien
acattctcatgagtgtgctttttcc

SEQ ID NO: 5411228 - DNA, 25 bp, Homo sapien
ttttccctaaagcatgcatgtcctg

SEQ ID NO: 5411229 - DNA, 25 bp, Homo sapien
tcggtttaaggtttggcagtggctc

SEQ ID NO: 5411230 - DNA, 25 bp, Homo sapien
tgctctgttctcaggttaggcttcg

SEQ ID NO: 5411231 - DNA, 25 bp, Homo sapien
gggtatatactctcgtgtaatttca

SEQ ID NO: 5411232 - DNA, 25 bp, Homo sapien
ccagtctttcgatatttccaaggat

SEQ ID NO: 5411233 - DNA, 25 bp, Homo sapien
aagtagtcatgccaattttgggtat

SEQ ID NO: 5411234 - DNA, 25 bp, Homo sapien
tagtcctgtctataaagtgggtaat

SEQ ID NO: 5411235 - DNA, 25 bp, Homo sapien
tgccttgactcctgaattcccttga

SEQ ID NO: 5411236 - DNA, 25 bp, Homo sapien
tgtcaatcctatctacaggaggcaa

SEQ ID NO: 5411237 - DNA, 25 bp, Homo sapien
cagtatcagtttcatgtgcctcaga

SEQ ID NO: 5411238 - DNA, 25 bp, Homo sapien
tacggtaagcggatcttctgaatgt

SEQ ID NO: 5411239 - DNA, 25 bp, Homo sapien
catgtgcccagtaccgaattaagtc

SEQ ID NO: 5411240 - DNA, 25 bp, Homo sapien
tagtgaccctctactcaaaagtgac

SEQ ID NO: 5411241 - DNA, 25 bp, Homo sapien
ccaagaatggccagtagagggagaa

SEQ ID NO: 5411242 - DNA, 25 bp, Homo sapien
cgtaaatgtacttgtgactctggca

SEQ ID NO: 5411243 - DNA, 25 bp, Homo sapien
tgcttgtatcatatactacactgtg

SEQ ID NO: 5411244 - DNA, 25 bp, Homo sapien
tcttggtttgggcccaacgacttca

SEQ ID NO: 5411245 - DNA, 25 bp, Homo sapien
ttgtatcatatactacactgtgtgg

SEQ ID NO: 5411246 - DNA, 25 bp, Homo sapien
tatcatatactacactgtgtggttc

SEQ ID NO: 5411247 - DNA, 25 bp, Homo sapien
aaggaatatcttgtgacttcggaga

SEQ ID NO: 5411248 - DNA, 25 bp, Homo sapien
tccactaccattgccaagggctgag

SEQ ID NO: 5411249 - DNA, 25 bp, Homo sapien
tattttcagcttcaactttaggcac

SEQ ID NO: 5411250 - DNA, 25 bp, Homo sapien
tctcttcaaggctataatcagagct

SEQ ID NO: 5411251 - DNA, 25 bp, Homo sapien
gtttcctccatcagtttgggcgcag

SEQ ID NO: 5411252 - DNA, 25 bp, Homo sapien
tcagtttgggcgcagtgcactgctc

SEQ ID NO: 5411253 - DNA, 25 bp, Homo sapien
gaggtttcctccatcagtttgggcg

SEQ ID NO: 5411254 - DNA, 25 bp, Homo sapien
ctccatcagtttgggcgcagtgcac

SEQ ID NO: 5411255 - DNA, 25 bp, Homo sapien
ctgactggaaagcccagggtgaaag

SEQ ID NO: 5411256 - DNA, 25 bp, Homo sapien
tgactggaaagcccagggtgaaagg

SEQ ID NO: 5411257 - DNA, 25 bp, Homo sapien
taaagatgaaagattcaagagtgtt

SEQ ID NO: 5411258 - DNA, 25 bp, Homo sapien
gattcaagagtgttcctcctaaatg

SEQ ID NO: 5411259 - DNA, 25 bp, Homo sapien
gatgaaagattcaagagtgttcctc

SEQ ID NO: 5411260 - DNA, 25 bp, Homo sapien
gaaagattcaagagtgttcctccta

SEQ ID NO: 5411261 - DNA, 25 bp, Homo sapien
atagctcctcaggagagtttgcttc

SEQ ID NO: 5411262 - DNA, 25 bp, Homo sapien
tctggaggaactccatctactggct

SEQ ID NO: 5411263 - DNA, 25 bp, Homo sapien
gctcctcaggagagtttgcttctga

SEQ ID NO: 5411264 - DNA, 25 bp, Homo sapien
ctgtctggaggaactccatctactg

SEQ ID NO: 5411265 - DNA, 25 bp, Homo sapien
cactttgatgcgggggtattttgga

SEQ ID NO: 5411266 - DNA, 25 bp, Homo sapien
tggggaaggtgcttttcgctttgtc

SEQ ID NO: 5411267 - DNA, 25 bp, Homo sapien
cagtcacacgactattttcatcact

SEQ ID NO: 5411268 - DNA, 25 bp, Homo sapien
tctcaaagatgaattccctgcagac

SEQ ID NO: 5411269 - DNA, 25 bp, Homo sapien
gtgaacctgccctcactcttcctgc

SEQ ID NO: 5411270 - DNA, 25 bp, Homo sapien
gctgctgagctgcagtgaacctgcc

SEQ ID NO: 5411271 - DNA, 25 bp, Homo sapien
gagctgcagtgaacctgccctcact

SEQ ID NO: 5411272 - DNA, 25 bp, Homo sapien
gctgagctgcagtgaacctgccctc

SEQ ID NO: 5411273 - DNA, 25 bp, Homo sapien
gaaatgagttaaagcctgccaccca

SEQ ID NO: 5411274 - DNA, 25 bp, Homo sapien
caagggcccgctgcaacaaaaaggt

SEQ ID NO: 5411275 - DNA, 25 bp, Homo sapien
tgtaaagccctattaaagccatgct

SEQ ID NO: 5411276 - DNA, 25 bp, Homo sapien
ccagtaagaatgcaacaggtgatca

SEQ ID NO: 5411277 - DNA, 25 bp, Homo sapien
ccactgttcctaggcaattgtagaa

SEQ ID NO: 5411278 - DNA, 25 bp, Homo sapien
tgtagaattatgcatggtggtccac

SEQ ID NO: 5411279 - DNA, 25 bp, Homo sapien
aaatagcaaaatatgtacctgtaca

SEQ ID NO: 5411280 - DNA, 25 bp, Homo sapien
caacagagggtacaaccttacatac

SEQ ID NO: 5411281 - DNA, 25 bp, Homo sapien
aattgattgctgttgtatatccatc

SEQ ID NO: 5411282 - DNA, 25 bp, Homo sapien
aaaatgatgtgccatccccgtagcc

SEQ ID NO: 5411283 - DNA, 25 bp, Homo sapien
atatccatcattccaagcagcagtc

SEQ ID NO: 5411284 - DNA, 25 bp, Homo sapien
gtgtttccagccacaatgtaatatc

SEQ ID NO: 5411285 - DNA, 25 bp, Homo sapien
tactgcatcacagacctgtatgtac

SEQ ID NO: 5411286 - DNA, 25 bp, Homo sapien
tcctagtaccaatcttagaatgagc

SEQ ID NO: 5411287 - DNA, 25 bp, Homo sapien
ggaaaaataaatggtacactgcctc

SEQ ID NO: 5411288 - DNA, 25 bp, Homo sapien
ttaccaactgttataggactacttc

SEQ ID NO: 5411289 - DNA, 25 bp, Homo sapien
gatttcactatacaagaagcaggcc

SEQ ID NO: 5411290 - DNA, 25 bp, Homo sapien
catccgacggcagggtgttggaaat

SEQ ID NO: 5411291 - DNA, 25 bp, Homo sapien
gggacactctgagatgctggcatcg

SEQ ID NO: 5411292 - DNA, 25 bp, Homo sapien
ggagcccgcctcttcttgggtgcat

SEQ ID NO: 5411293 - DNA, 25 bp, Homo sapien
tagaggggttgcaggggcacttgca

SEQ ID NO: 5411294 - DNA, 25 bp, Homo sapien
ctagaggggttgcaggggcacttgc

SEQ ID NO: 5411295 - DNA, 25 bp, Homo sapien
tcttactgcgttgaaaaaaactgaa

SEQ ID NO: 5411296 - DNA, 25 bp, Homo sapien
ctcgctttttcttactgcgttgaaa

SEQ ID NO: 5411297 - DNA, 25 bp, Homo sapien
ggtctcgctttttcttactgcgttg

SEQ ID NO: 5411298 - DNA, 25 bp, Homo sapien
ttggtctcgctttttcttactgcgt

SEQ ID NO: 5411299 - DNA, 25 bp, Homo sapien
ctaggttttgtgatatttggcagga

SEQ ID NO: 5411300 - DNA, 25 bp, Homo sapien
tatctaggttttgtgatatttggca

SEQ ID NO: 5411301 - DNA, 25 bp, Homo sapien
tctaggttttgtgatatttggcagg

SEQ ID NO: 5411302 - DNA, 25 bp, Homo sapien
aatatctaggttttgtgatatttgg

SEQ ID NO: 5411303 - DNA, 25 bp, Homo sapien
tagaggccagtgaggattccaaaca

SEQ ID NO: 5411304 - DNA, 25 bp, Homo sapien
ctgaagggcctacaaacaatgacac

SEQ ID NO: 5411305 - DNA, 25 bp, Homo sapien
tcatatagctgacacggagaacctt

SEQ ID NO: 5411306 - DNA, 25 bp, Homo sapien
taatagggtgggtctcaactgggac

SEQ ID NO: 5411307 - DNA, 25 bp, Homo sapien
taagatggaatacaccgcttatcgc

SEQ ID NO: 5411308 - DNA, 25 bp, Homo sapien
tactcagaacagtagatgaaaaatt

SEQ ID NO: 5411309 - DNA, 25 bp, Homo sapien
tatcgcatatggatacacaattaaa

SEQ ID NO: 5411310 - DNA, 25 bp, Homo sapien
aaaattcatatggttgtgcaataca

SEQ ID NO: 5411311 - DNA, 25 bp, Homo sapien
tgagagtaaagaatacgttttccca

SEQ ID NO: 5411312 - DNA, 25 bp, Homo sapien
tccttgtatgagagtaaagaatacg

SEQ ID NO: 5411313 - DNA, 25 bp, Homo sapien
cccagtaaagatcctagtaaatcat

SEQ ID NO: 5411314 - DNA, 25 bp, Homo sapien
ttgtacccagtaaagatcctagtaa

SEQ ID NO: 5411315 - DNA, 25 bp, Homo sapien
ttactgaagacagtaacagaagtgg

SEQ ID NO: 5411316 - DNA, 25 bp, Homo sapien
gacttactgaagacagtaacagaag

SEQ ID NO: 5411317 - DNA, 25 bp, Homo sapien
tgacttactgaagacagtaacagaa

SEQ ID NO: 5411318 - DNA, 25 bp, Homo sapien
cttgtaaagatgacttactgaagac

SEQ ID NO: 5411319 - DNA, 25 bp, Homo sapien
caagaggctcctgcgattgataatc

SEQ ID NO: 5411320 - DNA, 25 bp, Homo sapien
caatagtgtatgcaacggatcaaac

SEQ ID NO: 5411321 - DNA, 25 bp, Homo sapien
tgaagcgatgcatgtggactcactc

SEQ ID NO: 5411322 - DNA, 25 bp, Homo sapien
gcatataattctcttagtcccaggt

SEQ ID NO: 5411323 - DNA, 25 bp, Homo sapien
tcttatccaacatttttggctttaa

SEQ ID NO: 5411324 - DNA, 25 bp, Homo sapien
ttcttatccaacatttttggcttta

SEQ ID NO: 5411325 - DNA, 25 bp, Homo sapien
ctctggtattataggtgtaggtttt

SEQ ID NO: 5411326 - DNA, 25 bp, Homo sapien
gctgacaacagatcgattgtgtaac

SEQ ID NO: 5411327 - DNA, 25 bp, Homo sapien
tgttcagctgacaacagatcgattg

SEQ ID NO: 5411328 - DNA, 25 bp, Homo sapien
ttcagctgacaacagatcgattgtg

SEQ ID NO: 5411329 - DNA, 25 bp, Homo sapien
ttctgttcagctgacaacagatcga

SEQ ID NO: 5411330 - DNA, 25 bp, Homo sapien
tatcaacaagtccatcataggttta

SEQ ID NO: 5411331 - DNA, 25 bp, Homo sapien
acaaaggaatatcaacaagtccatc

SEQ ID NO: 5411332 - DNA, 25 bp, Homo sapien
gaatatcaacaagtccatcataggt

SEQ ID NO: 5411333 - DNA, 25 bp, Homo sapien
aggaatatcaacaagtccatcatag

SEQ ID NO: 5411334 - DNA, 25 bp, Homo sapien
attttttgcttccctttccatagat

SEQ ID NO: 5411335 - DNA, 25 bp, Homo sapien
caattttttgcttccctttccatag

SEQ ID NO: 5411336 - DNA, 25 bp, Homo sapien
tttttgcttccctttccatagattc

SEQ ID NO: 5411337 - DNA, 25 bp, Homo sapien
ttgcttccctttccatagattctca

SEQ ID NO: 5411338 - DNA, 25 bp, Homo sapien
atgccaggcaaaaccgcgggcttag

SEQ ID NO: 5411339 - DNA, 25 bp, Homo sapien
tcaggctgaaaagcatgtgcgacat

SEQ ID NO: 5411340 - DNA, 25 bp, Homo sapien
tctactttttcccaataggtggcgc

SEQ ID NO: 5411341 - DNA, 25 bp, Homo sapien
tccatgtaaaatgctcccgagttcc

SEQ ID NO: 5411342 - DNA, 25 bp, Homo sapien
aatgtaagcagagcctcacaaaggc

SEQ ID NO: 5411343 - DNA, 25 bp, Homo sapien
tgagctggcagatggctaccaacct

SEQ ID NO: 5411344 - DNA, 25 bp, Homo sapien
gatattaggatatgcagaaatgccc

SEQ ID NO: 5411345 - DNA, 25 bp, Homo sapien
gatggcatcactaagttctggtacc

SEQ ID NO: 5411346 - DNA, 25 bp, Homo sapien
taactatgacgggtgacaggacgga

SEQ ID NO: 5411347 - DNA, 25 bp, Homo sapien
gaacccagaggtgcaatgatagcaa

SEQ ID NO: 5411348 - DNA, 25 bp, Homo sapien
caggacggagagaaaaaacacgctt

SEQ ID NO: 5411349 - DNA, 25 bp, Homo sapien
tgaccatggatctcggtttccagag

SEQ ID NO: 5411350 - DNA, 25 bp, Homo sapien
tttaacaggtaactaaactgagtga

SEQ ID NO: 5411351 - DNA, 25 bp, Homo sapien
actgagtgataaatgaagtgttttg

SEQ ID NO: 5411352 - DNA, 25 bp, Homo sapien
tcatttaattgggtttgtggaattc

SEQ ID NO: 5411353 - DNA, 25 bp, Homo sapien
ggtaactaaactgagtgataaatga

SEQ ID NO: 5411354 - DNA, 25 bp, Homo sapien
gacgtatatcacagagactttcaat

SEQ ID NO: 5411355 - DNA, 25 bp, Homo sapien
acaaacatcaagacgtatatcacag

SEQ ID NO: 5411356 - DNA, 25 bp, Homo sapien
tatcacagagactttcaatggtgga

SEQ ID NO: 5411357 - DNA, 25 bp, Homo sapien
actttcaatggtggaataagaaggg

SEQ ID NO: 5411358 - DNA, 25 bp, Homo sapien
gagagttcaacgtctttatctatca

SEQ ID NO: 5411359 - DNA, 25 bp, Homo sapien
tcagtatatttggtctcagctggag

SEQ ID NO: 5411360 - DNA, 25 bp, Homo sapien
gataatatccccaggtaggaccact

SEQ ID NO: 5411361 - DNA, 25 bp, Homo sapien
agtggattctacagaatcagcagct

SEQ ID NO: 5411362 - DNA, 25 bp, Homo sapien
aactccaactcctttaacatatgac

SEQ ID NO: 5411363 - DNA, 25 bp, Homo sapien
tccaactcctttaacatatgactca

SEQ ID NO: 5411364 - DNA, 25 bp, Homo sapien
ccaactcctttaacatatgactcat

SEQ ID NO: 5411365 - DNA, 25 bp, Homo sapien
ctccaactcctttaacatatgactc

SEQ ID NO: 5411366 - DNA, 25 bp, Homo sapien
tacacactggatttattagcaaggg

SEQ ID NO: 5411367 - DNA, 25 bp, Homo sapien
gaaagtaggacaaagcgctacttga

SEQ ID NO: 5411368 - DNA, 25 bp, Homo sapien
gaactcctctcactcacagttttga

SEQ ID NO: 5411369 - DNA, 25 bp, Homo sapien
tacttcctcaggtagtttgtatcta

SEQ ID NO: 5411370 - DNA, 25 bp, Homo sapien
taacaagagcgaaagagccaagctc

SEQ ID NO: 5411371 - DNA, 25 bp, Homo sapien
aagagcgaaagagccaagctcgcat

SEQ ID NO: 5411372 - DNA, 25 bp, Homo sapien
ctgagtaacaagagcgaaagagcca

SEQ ID NO: 5411373 - DNA, 25 bp, Homo sapien
agtaacaagagcgaaagagccaagc

SEQ ID NO: 5411374 - DNA, 25 bp, Homo sapien
ggaagttatcccaaagacacaccag

SEQ ID NO: 5411375 - DNA, 25 bp, Homo sapien
taccttgctggtgggagaccaaaat

SEQ ID NO: 5411376 - DNA, 25 bp, Homo sapien
cacaccagcttatggcttatgcgaa

SEQ ID NO: 5411377 - DNA, 25 bp, Homo sapien
tgtcaacacacactataggtatggt

SEQ ID NO: 5411378 - DNA, 25 bp, Homo sapien
gcatacaaaggcttgcctttgatgt

SEQ ID NO: 5411379 - DNA, 25 bp, Homo sapien
atagcatacaaaggcttgcctttga

SEQ ID NO: 5411380 - DNA, 25 bp, Homo sapien
atacaaaggcttgcctttgatgttc

SEQ ID NO: 5411381 - DNA, 25 bp, Homo sapien
catagcatacaaaggcttgcctttg

SEQ ID NO: 5411382 - DNA, 25 bp, Homo sapien
gattggacacctttgaattaagata

SEQ ID NO: 5411383 - DNA, 25 bp, Homo sapien
gaaataatccctcttatctggggaa

SEQ ID NO: 5411384 - DNA, 25 bp, Homo sapien
gatccagaaccatcttatgtctatt

SEQ ID NO: 5411385 - DNA, 25 bp, Homo sapien
tgtggatagatcacatgcaccagaa

SEQ ID NO: 5411386 - DNA, 25 bp, Homo sapien
tttccatatggttcagtaatttgct

SEQ ID NO: 5411387 - DNA, 25 bp, Homo sapien
ttatagtctcgatcatctaacctca

SEQ ID NO: 5411388 - DNA, 25 bp, Homo sapien
ctcttccttattaatgacatcatta

SEQ ID NO: 5411389 - DNA, 25 bp, Homo sapien
ttctaaagaacgtatgcatagtggg

SEQ ID NO: 5411390 - DNA, 25 bp, Homo sapien
gaatgctgaaccaactgtcctgctc

SEQ ID NO: 5411391 - DNA, 25 bp, Homo sapien
aactgttccagaaagtctccataaa

SEQ ID NO: 5411392 - DNA, 25 bp, Homo sapien
cctctagcgctttacttttagagaa

SEQ ID NO: 5411393 - DNA, 25 bp, Homo sapien
taaaacagtattgttcctctagcgc

SEQ ID NO: 5411394 - DNA, 25 bp, Homo sapien
cacacagactagggccttccttcag

SEQ ID NO: 5411395 - DNA, 25 bp, Homo sapien
ctctgagtctctcgaccaaaaagtc

SEQ ID NO: 5411396 - DNA, 25 bp, Homo sapien
ctctctgagtctctcgaccaaaaag

SEQ ID NO: 5411397 - DNA, 25 bp, Homo sapien
accacacagactagggccttccttc

SEQ ID NO: 5411398 - DNA, 25 bp, Homo sapien
taacaagtagatttctggtcaaaga

SEQ ID NO: 5411399 - DNA, 25 bp, Homo sapien
tagagctcctcatccctaaattaac

SEQ ID NO: 5411400 - DNA, 25 bp, Homo sapien
gagggactgctttatgagtacaggc

SEQ ID NO: 5411401 - DNA, 25 bp, Homo sapien
ccattattttgcaatcggtgacatc

SEQ ID NO: 5411402 - DNA, 25 bp, Homo sapien
tactaagatatagagtcctgccaca

SEQ ID NO: 5411403 - DNA, 25 bp, Homo sapien
caccttgctagagagcataggagct

SEQ ID NO: 5411404 - DNA, 25 bp, Homo sapien
tacaaagtgtcctaaaagtcatgcc

SEQ ID NO: 5411405 - DNA, 25 bp, Homo sapien
gagggcttttcctacactctgtttg

SEQ ID NO: 5411406 - DNA, 25 bp, Homo sapien
gttcattaacaaccattccttcgcc

SEQ ID NO: 5411407 - DNA, 25 bp, Homo sapien
tctgcactaatgtatgactgtagtt

SEQ ID NO: 5411408 - DNA, 25 bp, Homo sapien
gaaaggaaacagtcagcattttcct

SEQ ID NO: 5411409 - DNA, 25 bp, Homo sapien
gggtctcaccatccatgtctatcac

SEQ ID NO: 5411410 - DNA, 25 bp, Homo sapien
aacttttgagtttaggcacctgagc

SEQ ID NO: 5411411 - DNA, 25 bp, Homo sapien
caaagagcctccctatggaattgtt

SEQ ID NO: 5411412 - DNA, 25 bp, Homo sapien
gcacctgagctaagaacaatccgtt

SEQ ID NO: 5411413 - DNA, 25 bp, Homo sapien
gatcgctgatgggaaaatgctttgg

SEQ ID NO: 5411414 - DNA, 25 bp, Homo sapien
tcagaaatccatggttatactggct

SEQ ID NO: 5411415 - DNA, 25 bp, Homo sapien
ttacaggagattggttcagaaatcc

SEQ ID NO: 5411416 - DNA, 25 bp, Homo sapien
atcaattattacaggagattggttc

SEQ ID NO: 5411417 - DNA, 25 bp, Homo sapien
tccatggttatactggcttgtgctt

SEQ ID NO: 5411418 - DNA, 25 bp, Homo sapien
tcaagaagtctattttgaccttccc

SEQ ID NO: 5411419 - DNA, 25 bp, Homo sapien
cccaacctgtggtacagtggcacaa

SEQ ID NO: 5411420 - DNA, 25 bp, Homo sapien
taactctggaaagccattacaacat

SEQ ID NO: 5411421 - DNA, 25 bp, Homo sapien
gctaattgtggcctctacctctcga

SEQ ID NO: 5411422 - DNA, 25 bp, Homo sapien
gacttactgatatatagaggccctc

SEQ ID NO: 5411423 - DNA, 25 bp, Homo sapien
tgataaggcatgaacaaacatctgt

SEQ ID NO: 5411424 - DNA, 25 bp, Homo sapien
tatacaatagcttagggacttactg

SEQ ID NO: 5411425 - DNA, 25 bp, Homo sapien
catcagtgcttaccgttagtccaac

SEQ ID NO: 5411426 - DNA, 25 bp, Homo sapien
tgtactttccccgtaagtatggcat

SEQ ID NO: 5411427 - DNA, 25 bp, Homo sapien
tttaaaccacaacagaacaatatgc

SEQ ID NO: 5411428 - DNA, 25 bp, Homo sapien
gaacaaccatgtaccccttgaaaga

SEQ ID NO: 5411429 - DNA, 25 bp, Homo sapien
tctcacaggcctatcatcaaatgga

SEQ ID NO: 5411430 - DNA, 25 bp, Homo sapien
cgtgttgacttcttgagctaatgag

SEQ ID NO: 5411431 - DNA, 25 bp, Homo sapien
cataggtcgtaaagcatcaataact

SEQ ID NO: 5411432 - DNA, 25 bp, Homo sapien
caataacttttacatattaagagct

SEQ ID NO: 5411433 - DNA, 25 bp, Homo sapien
taaaagagataaagcataggaagtg

SEQ ID NO: 5411434 - DNA, 25 bp, Homo sapien
aaaactagcgaaatatttagaacat

SEQ ID NO: 5411435 - DNA, 25 bp, Homo sapien
tgggcacactctagtgggctaccct

SEQ ID NO: 5411436 - DNA, 25 bp, Homo sapien
atgtgggcacactctagtgggctac

SEQ ID NO: 5411437 - DNA, 25 bp, Homo sapien
gtgggctaccctcttgcatgatcac

SEQ ID NO: 5411438 - DNA, 25 bp, Homo sapien
gggctaccctcttgcatgatcacac

SEQ ID NO: 5411439 - DNA, 25 bp, Homo sapien
gactttgaggttcgcaccaattttc

SEQ ID NO: 5411440 - DNA, 25 bp, Homo sapien
tcagcagtttatgagcagtggtaac

SEQ ID NO: 5411441 - DNA, 25 bp, Homo sapien
agcagtggtaacctggttaggattc

SEQ ID NO: 5411442 - DNA, 25 bp, Homo sapien
gaggttcgcaccaattttcagcagt

SEQ ID NO: 5411443 - DNA, 25 bp, Homo sapien
tctgatgtcaaactggcagctctgc

SEQ ID NO: 5411444 - DNA, 25 bp, Homo sapien
tcacacgtttaaggcaacaaaggta

SEQ ID NO: 5411445 - DNA, 25 bp, Homo sapien
caaaggtaactgctagagtctggtc

SEQ ID NO: 5411446 - DNA, 25 bp, Homo sapien
tctggtcagatgaagaataacctcc

SEQ ID NO: 5411447 - DNA, 25 bp, Homo sapien
tttcccctgagaacatcccctctct

SEQ ID NO: 5411448 - DNA, 25 bp, Homo sapien
tacagtccagcattaacacagcagc

SEQ ID NO: 5411449 - DNA, 25 bp, Homo sapien
gaatacaagcgatcacagccttcaa

SEQ ID NO: 5411450 - DNA, 25 bp, Homo sapien
gtgctccacaaacagtacccgagtt

SEQ ID NO: 5411451 - DNA, 25 bp, Homo sapien
caaatttcagaagctggctggttcc

SEQ ID NO: 5411452 - DNA, 25 bp, Homo sapien
ggtccatattggtgtgacatagatc

SEQ ID NO: 5411453 - DNA, 25 bp, Homo sapien
gaatgtttgacataggtccatattg

SEQ ID NO: 5411454 - DNA, 25 bp, Homo sapien
catattggtgtgacatagatccaca

SEQ ID NO: 5411455 - DNA, 25 bp, Homo sapien
gacataggtccatattggtgtgaca

SEQ ID NO: 5411456 - DNA, 25 bp, Homo sapien
gagacgagttcctcagtataagtag

SEQ ID NO: 5411457 - DNA, 25 bp, Homo sapien
gatgccagaaagtcggtctctacct

SEQ ID NO: 5411458 - DNA, 25 bp, Homo sapien
tgagtggcaactaagcagagacgag

SEQ ID NO: 5411459 - DNA, 25 bp, Homo sapien
aaagagagtcctagggccatggtga

SEQ ID NO: 5411460 - DNA, 25 bp, Homo sapien
gaatgtcccaaatccaagacattca

SEQ ID NO: 5411461 - DNA, 25 bp, Homo sapien
aaactgtgaatgtcccaaatccaag

SEQ ID NO: 5411462 - DNA, 25 bp, Homo sapien
tcccaaatccaagacattcaaatcc

SEQ ID NO: 5411463 - DNA, 25 bp, Homo sapien
ctgtgaatgtcccaaatccaagaca

SEQ ID NO: 5411464 - DNA, 25 bp, Homo sapien
gctgaggagtctgccaccaataact

SEQ ID NO: 5411465 - DNA, 25 bp, Homo sapien
cccacagtgtagcaggacagtttgc

SEQ ID NO: 5411466 - DNA, 25 bp, Homo sapien
cacattttatgtgggagcaagagac

SEQ ID NO: 5411467 - DNA, 25 bp, Homo sapien
cacggatacctgagaattatgggag

SEQ ID NO: 5411468 - DNA, 25 bp, Homo sapien
ccttgcttgtatgctcaatatcttt

SEQ ID NO: 5411469 - DNA, 25 bp, Homo sapien
acataattttgcagctccacttagg

SEQ ID NO: 5411470 - DNA, 25 bp, Homo sapien
tgcaatccctgaatacatttcggta

SEQ ID NO: 5411471 - DNA, 25 bp, Homo sapien
catttcggtatcctgacagctgtct

SEQ ID NO: 5411472 - DNA, 25 bp, Homo sapien
gaaagtcaacagtgggagtaatatt

SEQ ID NO: 5411473 - DNA, 25 bp, Homo sapien
caatgttcgcatggtctctgatgaa

SEQ ID NO: 5411474 - DNA, 25 bp, Homo sapien
gatgaataaacatgctgtgacttgc

SEQ ID NO: 5411475 - DNA, 25 bp, Homo sapien
tgcttctaaggaaacgcctgtcatg

SEQ ID NO: 5411476 - DNA, 25 bp, Homo sapien
gactcctcacccaattcctggcatt

SEQ ID NO: 5411477 - DNA, 25 bp, Homo sapien
tgttacaatttttgctcccggactc

SEQ ID NO: 5411478 - DNA, 25 bp, Homo sapien
tcccggactcctcacccaattcctg

SEQ ID NO: 5411479 - DNA, 25 bp, Homo sapien
aggtatcgtccaccgctcccccaga

SEQ ID NO: 5411480 - DNA, 25 bp, Homo sapien
cgccctccccggtgagaggcggcgc

SEQ ID NO: 5411481 - DNA, 25 bp, Homo sapien
agccaggtgaaacggccgaggcctc

SEQ ID NO: 5411482 - DNA, 25 bp, Homo sapien
tccccggtgagaggcggcgcggcgc

SEQ ID NO: 5411483 - DNA, 25 bp, Homo sapien
tcagtgagtcaggccgccggcaggg

SEQ ID NO: 5411484 - DNA, 25 bp, Homo sapien
tcccgggtgcgcttccacctgcggg

SEQ ID NO: 5411485 - DNA, 25 bp, Homo sapien
aggccggagcgaagctggctgagcg

SEQ ID NO: 5411486 - DNA, 25 bp, Homo sapien
gaagctggctgagcgtcaagagccc

SEQ ID NO: 5411487 - DNA, 25 bp, Homo sapien
gtctctacaaggtctagcgggcgcc

SEQ ID NO: 5411488 - DNA, 25 bp, Homo sapien
ccatttggcgcctctcggagggaga

SEQ ID NO: 5411489 - DNA, 25 bp, Homo sapien
agccatttggcgcctctcggaggga

SEQ ID NO: 5411490 - DNA, 25 bp, Homo sapien
tggcgcctctcggagggagaggagc

SEQ ID NO: 5411491 - DNA, 25 bp, Homo sapien
gtagccatttggcgcctctcggagg

SEQ ID NO: 5411492 - DNA, 25 bp, Homo sapien
gctcggctctcaagccaggacttga

SEQ ID NO: 5411493 - DNA, 25 bp, Homo sapien
cctgttctccctcgcggcttcctct

SEQ ID NO: 5411494 - DNA, 25 bp, Homo sapien
ccaaaggagacagtagctcgcctgt

SEQ ID NO: 5411495 - DNA, 25 bp, Homo sapien
gcgctcttgccgctcggctctcaag

SEQ ID NO: 5411496 - DNA, 25 bp, Homo sapien
cccctgcgaggctcagcccagcgcg

SEQ ID NO: 5411497 - DNA, 25 bp, Homo sapien
agcacctcccctgtcccgcgggcgg

SEQ ID NO: 5411498 - DNA, 25 bp, Homo sapien
ccctgcgaggctcagcccagcgcgg

SEQ ID NO: 5411499 - DNA, 25 bp, Homo sapien
cagggccgactcagcacctcccctg

SEQ ID NO: 5411500 - DNA, 25 bp, Homo sapien
ataagtggggaccagctcggcggca

SEQ ID NO: 5411501 - DNA, 25 bp, Homo sapien
tgcagcacggccgcacataagtggg

SEQ ID NO: 5411502 - DNA, 25 bp, Homo sapien
agcagcgagccggagagaggaacgg

SEQ ID NO: 5411503 - DNA, 25 bp, Homo sapien
cggcattggagcgagggaagcagcg

SEQ ID NO: 5411504 - DNA, 25 bp, Homo sapien
aaagaaagctcccagacgaggtgtt

SEQ ID NO: 5411505 - DNA, 25 bp, Homo sapien
aagctcccagacgaggtgttcccat

SEQ ID NO: 5411506 - DNA, 25 bp, Homo sapien
ccgaaagaaagctcccagacgaggt

SEQ ID NO: 5411507 - DNA, 25 bp, Homo sapien
ctgaaccgaaagaaagctcccagac

SEQ ID NO: 5411508 - DNA, 25 bp, Homo sapien
cccaccgctaggctgcgcttcggga

SEQ ID NO: 5411509 - DNA, 25 bp, Homo sapien
tcccaccgctaggctgcgcttcggg

SEQ ID NO: 5411510 - DNA, 25 bp, Homo sapien
ggcctccgcggaatgcggtcagaaa

SEQ ID NO: 5411511 - DNA, 25 bp, Homo sapien
atgcggtcagaaactcgcagagtgg

SEQ ID NO: 5411512 - DNA, 25 bp, Homo sapien
cgcggaatgcggtcagaaactcgca

SEQ ID NO: 5411513 - DNA, 25 bp, Homo sapien
ggaatgcggtcagaaactcgcagag

SEQ ID NO: 5411514 - DNA, 25 bp, Homo sapien
ctcatttctccaggtgtgattctta

SEQ ID NO: 5411515 - DNA, 25 bp, Homo sapien
gataatcagtgaccttttacataga

SEQ ID NO: 5411516 - DNA, 25 bp, Homo sapien
tgtcaataccacagaacaagctgag

SEQ ID NO: 5411517 - DNA, 25 bp, Homo sapien
ccagacttcaaaactaccatatcag

SEQ ID NO: 5411518 - DNA, 25 bp, Homo sapien
tgtcaatagttgtctctttcactag

SEQ ID NO: 5411519 - DNA, 25 bp, Homo sapien
tagttgtctctttcactagactctc

SEQ ID NO: 5411520 - DNA, 25 bp, Homo sapien
ttctgtcaatagttgtctctttcac

SEQ ID NO: 5411521 - DNA, 25 bp, Homo sapien
aatagttgtctctttcactagactc

SEQ ID NO: 5411522 - DNA, 25 bp, Homo sapien
aaaatccacattttgcggactcatg

SEQ ID NO: 5411523 - DNA, 25 bp, Homo sapien
tttgggtaccaacagtcatgtagtg

SEQ ID NO: 5411524 - DNA, 25 bp, Homo sapien
gctgtagcccctcaaatgttgctca

SEQ ID NO: 5411525 - DNA, 25 bp, Homo sapien
tttgctaatgcagtggctgtagccc

SEQ ID NO: 5411526 - DNA, 25 bp, Homo sapien
cttatgatcaaatttatcctcgacc

SEQ ID NO: 5411527 - DNA, 25 bp, Homo sapien
tatcctcgacctccaggattttaag

SEQ ID NO: 5411528 - DNA, 25 bp, Homo sapien
gatcaaatttatcctcgacctccag

SEQ ID NO: 5411529 - DNA, 25 bp, Homo sapien
tcaaatttatcctcgacctccagga

SEQ ID NO: 5411530 - DNA, 25 bp, Homo sapien
ttgaggacaaggctgtcatctgatt

SEQ ID NO: 5411531 - DNA, 25 bp, Homo sapien
aaggctgtctgtagtctttgtacaa

SEQ ID NO: 5411532 - DNA, 25 bp, Homo sapien
gcttcacttttgtttggctatcagt

SEQ ID NO: 5411533 - DNA, 25 bp, Homo sapien
ggctgtctgtagtctttgtacaact

SEQ ID NO: 5411534 - DNA, 25 bp, Homo sapien
aaaatcatctggcattgtccaatcc

SEQ ID NO: 5411535 - DNA, 25 bp, Homo sapien
aaatcatctggcattgtccaatcca

SEQ ID NO: 5411536 - DNA, 25 bp, Homo sapien
tctgctttattgtctccagcttgtc

SEQ ID NO: 5411537 - DNA, 25 bp, Homo sapien
caaaaatcatctggcattgtccaat

SEQ ID NO: 5411538 - DNA, 25 bp, Homo sapien
tctgctgagagtttagtccttggaa

SEQ ID NO: 5411539 - DNA, 25 bp, Homo sapien
tcttccctgagatctagcatggtat

SEQ ID NO: 5411540 - DNA, 25 bp, Homo sapien
tgcagcttaaccagcataactgtgt

SEQ ID NO: 5411541 - DNA, 25 bp, Homo sapien
tggcagccatgaaactcaggtaacc

SEQ ID NO: 5411542 - DNA, 25 bp, Homo sapien
acaaggccagaccatacttagcttc

SEQ ID NO: 5411543 - DNA, 25 bp, Homo sapien
actaacaaggccagaccatacttag

SEQ ID NO: 5411544 - DNA, 25 bp, Homo sapien
ctaacaaggccagaccatacttagc

SEQ ID NO: 5411545 - DNA, 25 bp, Homo sapien
aaggccagaccatacttagcttcca

SEQ ID NO: 5411546 - DNA, 25 bp, Homo sapien
tcataagcagtcttgttctacagct

SEQ ID NO: 5411547 - DNA, 25 bp, Homo sapien
taatttgaaagatgtcggtaatccg

SEQ ID NO: 5411548 - DNA, 25 bp, Homo sapien
ggtaatccgtgcagctaataactgg

SEQ ID NO: 5411549 - DNA, 25 bp, Homo sapien
gctaataactgggtcataagcagtc

SEQ ID NO: 5411550 - DNA, 25 bp, Homo sapien
ggtcagtgtttctcagtcttgagca

SEQ ID NO: 5411551 - DNA, 25 bp, Homo sapien
taggcactaatgctgcgctcagttc

SEQ ID NO: 5411552 - DNA, 25 bp, Homo sapien
ttcctaccaggagctttcatctact

SEQ ID NO: 5411553 - DNA, 25 bp, Homo sapien
tacaagataagagatggttacgtgc

SEQ ID NO: 5411554 - DNA, 25 bp, Homo sapien
cagactaaagcaagcgtaaatgtta

SEQ ID NO: 5411555 - DNA, 25 bp, Homo sapien
taaagcaagcgtaaatgttatgtgt

SEQ ID NO: 5411556 - DNA, 25 bp, Homo sapien
actactcataaaagccaagtcttga

SEQ ID NO: 5411557 - DNA, 25 bp, Homo sapien
taaatacagactaaagcaagcgtaa

SEQ ID NO: 5411558 - DNA, 25 bp, Homo sapien
ttgtctgctgaacatgagactctga

SEQ ID NO: 5411559 - DNA, 25 bp, Homo sapien
gactctgaggtatttgtgagagaga

SEQ ID NO: 5411560 - DNA, 25 bp, Homo sapien
taaagtagaaagttgtgttgtctgc

SEQ ID NO: 5411561 - DNA, 25 bp, Homo sapien
gctgaacatgagactctgaggtatt

SEQ ID NO: 5411562 - DNA, 25 bp, Homo sapien
tttgtaatagccatgacgaatccaa

SEQ ID NO: 5411563 - DNA, 25 bp, Homo sapien
tgggaagcatgacacaagacataat

SEQ ID NO: 5411564 - DNA, 25 bp, Homo sapien
tgaggggagttgcacagagcacacc

SEQ ID NO: 5411565 - DNA, 25 bp, Homo sapien
tcttatcggagtgtgtccttggttc

SEQ ID NO: 5411566 - DNA, 25 bp, Homo sapien
caagaaacaagataatgtcactaga

SEQ ID NO: 5411567 - DNA, 25 bp, Homo sapien
aacatgtgataggttcagttgaatc

SEQ ID NO: 5411568 - DNA, 25 bp, Homo sapien
gaaagacttagaaataggcattacc

SEQ ID NO: 5411569 - DNA, 25 bp, Homo sapien
cattcttcggacagcttttaaaagc

SEQ ID NO: 5411570 - DNA, 25 bp, Homo sapien
ctgagcttgtatggaagatgtgcct

SEQ ID NO: 5411571 - DNA, 25 bp, Homo sapien
gagcttgtatggaagatgtgcctat

SEQ ID NO: 5411572 - DNA, 25 bp, Homo sapien
tgagcttgtatggaagatgtgccta

SEQ ID NO: 5411573 - DNA, 25 bp, Homo sapien
tctgtgaagaatgccgttagaattt

SEQ ID NO: 5411574 - DNA, 25 bp, Homo sapien
tgtcctcttggtgatcttgtagaaa

SEQ ID NO: 5411575 - DNA, 25 bp, Homo sapien
gccttacatttaggtatcttatcca

SEQ ID NO: 5411576 - DNA, 25 bp, Homo sapien
ttgcatttgagaatccatttttccc

SEQ ID NO: 5411577 - DNA, 25 bp, Homo sapien
tatttggttgatggcagtgcagact

SEQ ID NO: 5411578 - DNA, 25 bp, Homo sapien
catgatagttgaaacagagctggga

SEQ ID NO: 5411579 - DNA, 25 bp, Homo sapien
caactgtgatattatgaggacttct

SEQ ID NO: 5411580 - DNA, 25 bp, Homo sapien
gaaaatgccgataaactgaaagcag

SEQ ID NO: 5411581 - DNA, 25 bp, Homo sapien
tgaaggggtaaatctttgcacgtac

SEQ ID NO: 5411582 - DNA, 25 bp, Homo sapien
gagtgaaggggtaaatctttgcacg

SEQ ID NO: 5411583 - DNA, 25 bp, Homo sapien
ggggtaaatctttgcacgtactcac

SEQ ID NO: 5411584 - DNA, 25 bp, Homo sapien
tagagtgaaggggtaaatctttgca

SEQ ID NO: 5411585 - DNA, 25 bp, Homo sapien
gaaaaccgatgaaagattcccacca

SEQ ID NO: 5411586 - DNA, 25 bp, Homo sapien
caagcgtggctacagtgatgaccat

SEQ ID NO: 5411587 - DNA, 25 bp, Homo sapien
caatcagcaatgacacaagcgtggc

SEQ ID NO: 5411588 - DNA, 25 bp, Homo sapien
gagttctagaactatcccgaggcaa

SEQ ID NO: 5411589 - DNA, 25 bp, Homo sapien
cacaaagcattccatagggtatgtc

SEQ ID NO: 5411590 - DNA, 25 bp, Homo sapien
tcttccaaatgttaccaggtcatca

SEQ ID NO: 5411591 - DNA, 25 bp, Homo sapien
aaatcttccaaatgttaccaggtca

SEQ ID NO: 5411592 - DNA, 25 bp, Homo sapien
tccatagggtatgtcaaaatgacag

SEQ ID NO: 5411593 - DNA, 25 bp, Homo sapien
cctaatggcccacatatatgattac

SEQ ID NO: 5411594 - DNA, 25 bp, Homo sapien
ccacatatatgattacaatgctgta

SEQ ID NO: 5411595 - DNA, 25 bp, Homo sapien
tctagatttgtgtacgtatactctg

SEQ ID NO: 5411596 - DNA, 25 bp, Homo sapien
acagttatgcatcacctaatggccc

SEQ ID NO: 5411597 - DNA, 25 bp, Homo sapien
cgggaccacttagctactgtgggtt

SEQ ID NO: 5411598 - DNA, 25 bp, Homo sapien
gacatatggataaggcgggaccact

SEQ ID NO: 5411599 - DNA, 25 bp, Homo sapien
aagccagtaaatgtcaagtatccac

SEQ ID NO: 5411600 - DNA, 25 bp, Homo sapien
tacagaaatcacgatggacatatgg

SEQ ID NO: 5411601 - DNA, 25 bp, Homo sapien
tgccatttgggacataataaagggt

SEQ ID NO: 5411602 - DNA, 25 bp, Homo sapien
aaaacttaggacatctgctatccag

SEQ ID NO: 5411603 - DNA, 25 bp, Homo sapien
gaagaagtccataacacttgctagc

SEQ ID NO: 5411604 - DNA, 25 bp, Homo sapien
cagagaactccacattgagaaaggg

SEQ ID NO: 5411605 - DNA, 25 bp, Homo sapien
aatggcattgggctttgcaaatacc

SEQ ID NO: 5411606 - DNA, 25 bp, Homo sapien
gacataaccccgaccgcttgaatgg

SEQ ID NO: 5411607 - DNA, 25 bp, Homo sapien
aaccccgaccgcttgaatggcattg

SEQ ID NO: 5411608 - DNA, 25 bp, Homo sapien
gcaaatacccaagcgtcttctgttt

SEQ ID NO: 5411609 - DNA, 25 bp, Homo sapien
gagaaatataccatatccatacaca

SEQ ID NO: 5411610 - DNA, 25 bp, Homo sapien
ggagaaatataccatatccatacac

SEQ ID NO: 5411611 - DNA, 25 bp, Homo sapien
tgaaagaaacaagcggagaatgcat

SEQ ID NO: 5411612 - DNA, 25 bp, Homo sapien
taatgaatccaattgcctggcccct

SEQ ID NO: 5411613 - DNA, 25 bp, Homo sapien
tctccaatggcgaaataatgaatcc

SEQ ID NO: 5411614 - DNA, 25 bp, Homo sapien
tgttctcccgtggtgcaactgagga

SEQ ID NO: 5411615 - DNA, 25 bp, Homo sapien
atgaattgaattgcgtccctccgaa

SEQ ID NO: 5411616 - DNA, 25 bp, Homo sapien
tctcagggcacaacacaatcactgg

SEQ ID NO: 5411617 - DNA, 25 bp, Homo sapien
gccatattgaagtgaaacaggtgca

SEQ ID NO: 5411618 - DNA, 25 bp, Homo sapien
taactctcactgtgctggcatttgg

SEQ ID NO: 5411619 - DNA, 25 bp, Homo sapien
caattccaagaatcagagttgttaa

SEQ ID NO: 5411620 - DNA, 25 bp, Homo sapien
tcagagttgttaaacctgtagagat

SEQ ID NO: 5411621 - DNA, 25 bp, Homo sapien
atgtgtggacccagtgaaattgccc

SEQ ID NO: 5411622 - DNA, 25 bp, Homo sapien
agtgaaattgcccttgccattacaa

SEQ ID NO: 5411623 - DNA, 25 bp, Homo sapien
cctgcatggaatacaaaactggtga

SEQ ID NO: 5411624 - DNA, 25 bp, Homo sapien
caaaactggtgattttagcttataa

SEQ ID NO: 5411625 - DNA, 25 bp, Homo sapien
aaatttttagtggctcctgcatgga

SEQ ID NO: 5411626 - DNA, 25 bp, Homo sapien
ggaatacaaaactggtgattttagc

SEQ ID NO: 5411627 - DNA, 25 bp, Homo sapien
gtggcgaccaataaacacgttttca

SEQ ID NO: 5411628 - DNA, 25 bp, Homo sapien
ggtaactgtggaaagtccaataatg

SEQ ID NO: 5411629 - DNA, 25 bp, Homo sapien
ccaagctttgctatatttcggtaca

SEQ ID NO: 5411630 - DNA, 25 bp, Homo sapien
tttcggtacaaggataaaggcagag

SEQ ID NO: 5411631 - DNA, 25 bp, Homo sapien
tgctcaaagtatctccagctattat

SEQ ID NO: 5411632 - DNA, 25 bp, Homo sapien
actttgctcaaagtatctccagcta

SEQ ID NO: 5411633 - DNA, 25 bp, Homo sapien
aaactttgctcaaagtatctccagc

SEQ ID NO: 5411634 - DNA, 25 bp, Homo sapien
aagtatctccagctattatattgta

SEQ ID NO: 5411635 - DNA, 25 bp, Homo sapien
caaagactggtaggtatctgttcca

SEQ ID NO: 5411636 - DNA, 25 bp, Homo sapien
gaccaaagactggtaggtatctgtt

SEQ ID NO: 5411637 - DNA, 25 bp, Homo sapien
tataaaaggatacaaaaactgaaga

SEQ ID NO: 5411638 - DNA, 25 bp, Homo sapien
ctggtaggtatctgttccagagagg

SEQ ID NO: 5411639 - DNA, 25 bp, Homo sapien
tggttgatcaccagagcttcatttc

SEQ ID NO: 5411640 - DNA, 25 bp, Homo sapien
agaggcttgatgagccctgctggtt

SEQ ID NO: 5411641 - DNA, 25 bp, Homo sapien
catttaaagacagtagcaggcagcg

SEQ ID NO: 5411642 - DNA, 25 bp, Homo sapien
agcgagtttgggcaggcataagcca

SEQ ID NO: 5411643 - DNA, 25 bp, Homo sapien
cacagtcgtctcttagccttaatga

SEQ ID NO: 5411644 - DNA, 25 bp, Homo sapien
gcactttcagagcacagtcgtctct

SEQ ID NO: 5411645 - DNA, 25 bp, Homo sapien
aggttgctcattcacacgcacctgc

SEQ ID NO: 5411646 - DNA, 25 bp, Homo sapien
ctccacaaacaacagctgaataagg

SEQ ID NO: 5411647 - DNA, 25 bp, Homo sapien
atgtgtgtagttattgcacagttga

SEQ ID NO: 5411648 - DNA, 25 bp, Homo sapien
catgaaaaggatttaggcttggtaa

SEQ ID NO: 5411649 - DNA, 25 bp, Homo sapien
taggaaattcagttgcagcatgtgt

SEQ ID NO: 5411650 - DNA, 25 bp, Homo sapien
tgtatgtgtgtagttattgcacagt

SEQ ID NO: 5411651 - DNA, 25 bp, Homo sapien
tatgaaacccagaataaaagcaata

SEQ ID NO: 5411652 - DNA, 25 bp, Homo sapien
catatgaaacccagaataaaagcaa

SEQ ID NO: 5411653 - DNA, 25 bp, Homo sapien
aacatatgaaacccagaataaaagc

SEQ ID NO: 5411654 - DNA, 25 bp, Homo sapien
atgaaacccagaataaaagcaatat

SEQ ID NO: 5411655 - DNA, 25 bp, Homo sapien
aaagtacattcggtaacactagcaa

SEQ ID NO: 5411656 - DNA, 25 bp, Homo sapien
gatggacccttcagtaagtggaaaa

SEQ ID NO: 5411657 - DNA, 25 bp, Homo sapien
aatcaaccacgcagcctacagaaaa

SEQ ID NO: 5411658 - DNA, 25 bp, Homo sapien
tgattcaccaccacccatatgcagt

SEQ ID NO: 5411659 - DNA, 25 bp, Homo sapien
taccagatcctataatcgagttgac

SEQ ID NO: 5411660 - DNA, 25 bp, Homo sapien
ctcatgttcagaaacaagggtttct

SEQ ID NO: 5411661 - DNA, 25 bp, Homo sapien
tattataccagatcctataatcgag

SEQ ID NO: 5411662 - DNA, 25 bp, Homo sapien
gatcctataatcgagttgacaacat

SEQ ID NO: 5411663 - DNA, 25 bp, Homo sapien
tgggtacggattcgcacccggccag

SEQ ID NO: 5411664 - DNA, 25 bp, Homo sapien
acacagccgaggtccgcgtgtagcc

SEQ ID NO: 5411665 - DNA, 25 bp, Homo sapien
tagcccatggctgagcggtggtcct

SEQ ID NO: 5411666 - DNA, 25 bp, Homo sapien
ctctggtagcccatggctgagcggt

SEQ ID NO: 5411667 - DNA, 25 bp, Homo sapien
gcagggagccagttccacgggcgcc

SEQ ID NO: 5411668 - DNA, 25 bp, Homo sapien
cagggagccagttccacgggcgccc

SEQ ID NO: 5411669 - DNA, 25 bp, Homo sapien
tccaccggagttcgcccagacaaat

SEQ ID NO: 5411670 - DNA, 25 bp, Homo sapien
gcttttccaccggagttcgcccaga

SEQ ID NO: 5411671 - DNA, 25 bp, Homo sapien
ccggagttcgcccagacaaatgtat

SEQ ID NO: 5411672 - DNA, 25 bp, Homo sapien
gagttcgcccagacaaatgtatttt

SEQ ID NO: 5411673 - DNA, 25 bp, Homo sapien
ctcaaggtcaaatagtggtggaaca

SEQ ID NO: 5411674 - DNA, 25 bp, Homo sapien
ttaaaagaaagtgtacatcctcatc

SEQ ID NO: 5411675 - DNA, 25 bp, Homo sapien
tctaccaaatatggtctccaggcaa

SEQ ID NO: 5411676 - DNA, 25 bp, Homo sapien
gattagaaactacactttgtcgtcc

SEQ ID NO: 5411677 - DNA, 25 bp, Homo sapien
acatagtgagattttgtccttactt

SEQ ID NO: 5411678 - DNA, 25 bp, Homo sapien
tatttggaacccggacaacatagtg

SEQ ID NO: 5411679 - DNA, 25 bp, Homo sapien
tagtgagattttgtccttacttaaa

SEQ ID NO: 5411680 - DNA, 25 bp, Homo sapien
tttggaacccggacaacatagtgag

SEQ ID NO: 5411681 - DNA, 25 bp, Homo sapien
ccattgtatcgaggccaccagagat

SEQ ID NO: 5411682 - DNA, 25 bp, Homo sapien
ttaactgagcagacccaaactagct

SEQ ID NO: 5411683 - DNA, 25 bp, Homo sapien
cttaggtaccagcatcaaaggaagg

SEQ ID NO: 5411684 - DNA, 25 bp, Homo sapien
ttcagcctaaggtggccactccagg

SEQ ID NO: 5411685 - DNA, 25 bp, Homo sapien
gaaataagactggtaaagtctccca

SEQ ID NO: 5411686 - DNA, 25 bp, Homo sapien
caattgtttagctacaaaatatgtg

SEQ ID NO: 5411687 - DNA, 25 bp, Homo sapien
gatgatgatcttactgtgtaggaac

SEQ ID NO: 5411688 - DNA, 25 bp, Homo sapien
aatatgtggtaatcatgacttgcag

SEQ ID NO: 5411689 - DNA, 25 bp, Homo sapien
tgccttggcctcccaaagtactggg

SEQ ID NO: 5411690 - DNA, 25 bp, Homo sapien
accgtgtgttagccaggttggtctc

SEQ ID NO: 5411691 - DNA, 25 bp, Homo sapien
ctgccttggcctcccaaagtactgg

SEQ ID NO: 5411692 - DNA, 25 bp, Homo sapien
tctgtagagaattcccaaggaggac

SEQ ID NO: 5411693 - DNA, 25 bp, Homo sapien
gacaatgtagttcaggaagacctca

SEQ ID NO: 5411694 - DNA, 25 bp, Homo sapien
tgagccatttgagtacagacaatgt

SEQ ID NO: 5411695 - DNA, 25 bp, Homo sapien
tacaaaatgctcctaatttggttgg

SEQ ID NO: 5411696 - DNA, 25 bp, Homo sapien
tggattcacacagaactcgatactg

SEQ ID NO: 5411697 - DNA, 25 bp, Homo sapien
tcgatactgtatctatttgccatgg

SEQ ID NO: 5411698 - DNA, 25 bp, Homo sapien
agcacagcagcaactgattcttgtg

SEQ ID NO: 5411699 - DNA, 25 bp, Homo sapien
gaaatgcgggcttcttatcaaaatg

SEQ ID NO: 5411700 - DNA, 25 bp, Homo sapien
caattggcaaggacgtaccggcctc

SEQ ID NO: 5411701 - DNA, 25 bp, Homo sapien
cgtaccggcctctactgcagaattt

SEQ ID NO: 5411702 - DNA, 25 bp, Homo sapien
gacttcttgccaattggcaaggacg

SEQ ID NO: 5411703 - DNA, 25 bp, Homo sapien
aggctaaactctttgacttcttgcc

SEQ ID NO: 5411704 - DNA, 25 bp, Homo sapien
tgttgtcatctcacactcttggacg

SEQ ID NO: 5411705 - DNA, 25 bp, Homo sapien
tgatagtcacaattagccagaaacc

SEQ ID NO: 5411706 - DNA, 25 bp, Homo sapien
cactcaggaagttgttaggataaca

SEQ ID NO: 5411707 - DNA, 25 bp, Homo sapien
gacggttaagtctcttacaaagaga

SEQ ID NO: 5411708 - DNA, 25 bp, Homo sapien
ttacacttgtacagtatgcctgcat

SEQ ID NO: 5411709 - DNA, 25 bp, Homo sapien
gataaaataggagattccttacact

SEQ ID NO: 5411710 - DNA, 25 bp, Homo sapien
ttccttacacttgtacagtatgcct

SEQ ID NO: 5411711 - DNA, 25 bp, Homo sapien
ccttacacttgtacagtatgcctgc

SEQ ID NO: 5411712 - DNA, 25 bp, Homo sapien
ctaggtcattgcttggtgtccactg

SEQ ID NO: 5411713 - DNA, 25 bp, Homo sapien
taggtcattgcttggtgtccactgc

SEQ ID NO: 5411714 - DNA, 25 bp, Homo sapien
gtctccatgacaaccgtgtgtcctc

SEQ ID NO: 5411715 - DNA, 25 bp, Homo sapien
agccctgctgtttcggctccaagca

SEQ ID NO: 5411716 - DNA, 25 bp, Homo sapien
cattgtgtttcggtgctcgctccca

SEQ ID NO: 5411717 - DNA, 25 bp, Homo sapien
tgacaaccgtgtgtcctccgggaag

SEQ ID NO: 5411718 - DNA, 25 bp, Homo sapien
ttctttcaatcttgtggcttcagat

SEQ ID NO: 5411719 - DNA, 25 bp, Homo sapien
ctttcaatcttgtggcttcagatag

SEQ ID NO: 5411720 - DNA, 25 bp, Homo sapien
ctataccaggtagcagtagtgggct

SEQ ID NO: 5411721 - DNA, 25 bp, Homo sapien
tctttcaatcttgtggcttcagata

SEQ ID NO: 5411722 - DNA, 25 bp, Homo sapien
acatgctaaattgcctctgttgctg

SEQ ID NO: 5411723 - DNA, 25 bp, Homo sapien
tatcttctcttttggcgtctctgaa

SEQ ID NO: 5411724 - DNA, 25 bp, Homo sapien
cagtgcagccttttgacttcttagc

SEQ ID NO: 5411725 - DNA, 25 bp, Homo sapien
ctctgttgctgcagagaccgcagtg

SEQ ID NO: 5411726 - DNA, 25 bp, Homo sapien
atgtaaggactattggttccgttct

SEQ ID NO: 5411727 - DNA, 25 bp, Homo sapien
ccaaatgtaaggactattggttccg

SEQ ID NO: 5411728 - DNA, 25 bp, Homo sapien
caaatgtaaggactattggttccgt

SEQ ID NO: 5411729 - DNA, 25 bp, Homo sapien
ttatttcatagtattgtcatttcta

SEQ ID NO: 5411730 - DNA, 25 bp, Homo sapien
tgtcatttctatggcaacttgattg

SEQ ID NO: 5411731 - DNA, 25 bp, Homo sapien
tttctatggcaacttgattgattct

SEQ ID NO: 5411732 - DNA, 25 bp, Homo sapien
tatggcaacttgattgattctacct

SEQ ID NO: 5411733 - DNA, 25 bp, Homo sapien
gatagaatcctatcatgaagttgca

SEQ ID NO: 5411734 - DNA, 25 bp, Homo sapien
tacctgcgttttcaagatagaatcc

SEQ ID NO: 5411735 - DNA, 25 bp, Homo sapien
gatgtgtaaattgacttgagcagaa

SEQ ID NO: 5411736 - DNA, 25 bp, Homo sapien
tcagaatatcctttagctaggtagg

SEQ ID NO: 5411737 - DNA, 25 bp, Homo sapien
ttttgacctcacataaatccaaggg

SEQ ID NO: 5411738 - DNA, 25 bp, Homo sapien
gacataatggacagagcaggttgaa

SEQ ID NO: 5411739 - DNA, 25 bp, Homo sapien
tagtactgcttggtgaatcatgcac

SEQ ID NO: 5411740 - DNA, 25 bp, Homo sapien
cctgttggaagcttgcaaaagacac

SEQ ID NO: 5411741 - DNA, 25 bp, Homo sapien
tacgctgaatgatagcggcagacac

SEQ ID NO: 5411742 - DNA, 25 bp, Homo sapien
cacagtcgggtggtgcactattaag

SEQ ID NO: 5411743 - DNA, 25 bp, Homo sapien
caaagtggttgtaataggctcataa

SEQ ID NO: 5411744 - DNA, 25 bp, Homo sapien
tgagctgccagggtgaattgtgtca

SEQ ID NO: 5411745 - DNA, 25 bp, Homo sapien
caaaactagggtcatgtatttgccc

SEQ ID NO: 5411746 - DNA, 25 bp, Homo sapien
caatgaacactaggttgatccggga

SEQ ID NO: 5411747 - DNA, 25 bp, Homo sapien
aaagatgttccagcctatagtgaag

SEQ ID NO: 5411748 - DNA, 25 bp, Homo sapien
acgagcttcagcacaaattctccag

SEQ ID NO: 5411749 - DNA, 25 bp, Homo sapien
gctgggcgaggtatgggtttctgag

SEQ ID NO: 5411750 - DNA, 25 bp, Homo sapien
tgctgggcgaggtatgggtttctga

SEQ ID NO: 5411751 - DNA, 25 bp, Homo sapien
taaagacatagtataaaactggtta

SEQ ID NO: 5411752 - DNA, 25 bp, Homo sapien
gtataaaactggttacaattctgtg

SEQ ID NO: 5411753 - DNA, 25 bp, Homo sapien
atagtataaaactggttacaattct

SEQ ID NO: 5411754 - DNA, 25 bp, Homo sapien
tataaaactggttacaattctgtgt

SEQ ID NO: 5411755 - DNA, 25 bp, Homo sapien
ttcttcatatacaggctgaagttta

SEQ ID NO: 5411756 - DNA, 25 bp, Homo sapien
gatgacaccaatgaatagattcaga

SEQ ID NO: 5411757 - DNA, 25 bp, Homo sapien
tcttcatatacaggctgaagtttaa

SEQ ID NO: 5411758 - DNA, 25 bp, Homo sapien
tttcttcatatacaggctgaagttt

SEQ ID NO: 5411759 - DNA, 25 bp, Homo sapien
aatatccatccagcctttaaatgtg

SEQ ID NO: 5411760 - DNA, 25 bp, Homo sapien
cataatatccatccagcctttaaat

SEQ ID NO: 5411761 - DNA, 25 bp, Homo sapien
gcatacataatatccatccagcctt

SEQ ID NO: 5411762 - DNA, 25 bp, Homo sapien
tctcgtgaatcaacagctgcataca

SEQ ID NO: 5411763 - DNA, 25 bp, Homo sapien
tgaagcagtgcaagatagccagcgc

SEQ ID NO: 5411764 - DNA, 25 bp, Homo sapien
cacgtttttccaccgagcttgcttg

SEQ ID NO: 5411765 - DNA, 25 bp, Homo sapien
ccgttgtcatgttaacacagtggta

SEQ ID NO: 5411766 - DNA, 25 bp, Homo sapien
aatgtcaaacatgttacccgttgtc

SEQ ID NO: 5411767 - DNA, 25 bp, Homo sapien
gatagagggaattgctccaacaaga

SEQ ID NO: 5411768 - DNA, 25 bp, Homo sapien
tagagggaattgctccaacaagagc

SEQ ID NO: 5411769 - DNA, 25 bp, Homo sapien
gggaattgctccaacaagagcattc

SEQ ID NO: 5411770 - DNA, 25 bp, Homo sapien
gagggaattgctccaacaagagcat

SEQ ID NO: 5411771 - DNA, 25 bp, Homo sapien
tggcaccgagttctgagtagccaag

SEQ ID NO: 5411772 - DNA, 25 bp, Homo sapien
cctcatgccttcaaaccgggataag

SEQ ID NO: 5411773 - DNA, 25 bp, Homo sapien
caagagcattggctaccaggctaac

SEQ ID NO: 5411774 - DNA, 25 bp, Homo sapien
tccgtaatgatttgatggcaccgag

SEQ ID NO: 5411775 - DNA, 25 bp, Homo sapien
ttccctgcaacaccacagatgtctc

SEQ ID NO: 5411776 - DNA, 25 bp, Homo sapien
aatctgtacttgctacagacatcag

SEQ ID NO: 5411777 - DNA, 25 bp, Homo sapien
gacatcagaacatctaaacagttat

SEQ ID NO: 5411778 - DNA, 25 bp, Homo sapien
gagtaaaatctgtacttgctacaga

SEQ ID NO: 5411779 - DNA, 25 bp, Homo sapien
tcaacgatcaagaaatctagccagc

SEQ ID NO: 5411780 - DNA, 25 bp, Homo sapien
gatagtctttcgctgttcaatgtat

SEQ ID NO: 5411781 - DNA, 25 bp, Homo sapien
gaaatccataagcaacccatttgag

SEQ ID NO: 5411782 - DNA, 25 bp, Homo sapien
tctagcatggttttgatagtctttc

SEQ ID NO: 5411783 - DNA, 25 bp, Homo sapien
aaaccagttgtgctcaacaatactg

SEQ ID NO: 5411784 - DNA, 25 bp, Homo sapien
tgtgctcaacaatactgtagcaggt

SEQ ID NO: 5411785 - DNA, 25 bp, Homo sapien
ctgtagcaggtttttcgaagattcc

SEQ ID NO: 5411786 - DNA, 25 bp, Homo sapien
ggtttttcgaagattccaccagatc

SEQ ID NO: 5411787 - DNA, 25 bp, Homo sapien
cagaatggaaactttttaatacatc

SEQ ID NO: 5411788 - DNA, 25 bp, Homo sapien
gacagaatggaaactttttaataca

SEQ ID NO: 5411789 - DNA, 25 bp, Homo sapien
cttgacagaatggaaactttttaat

SEQ ID NO: 5411790 - DNA, 25 bp, Homo sapien
tgacagaatggaaactttttaatac

SEQ ID NO: 5411791 - DNA, 25 bp, Homo sapien
cttcgggttcagtttcagcttgttc

SEQ ID NO: 5411792 - DNA, 25 bp, Homo sapien
gttcagtttcagcttgttcaccttc

SEQ ID NO: 5411793 - DNA, 25 bp, Homo sapien
caccttctcggggtagaacaacatc

SEQ ID NO: 5411794 - DNA, 25 bp, Homo sapien
ggtagaacaacatcaactgtgcttc

SEQ ID NO: 5411795 - DNA, 25 bp, Homo sapien
gaattcaatgtgtgatccggctgtg

SEQ ID NO: 5411796 - DNA, 25 bp, Homo sapien
tgaaaacagttgcaaagacatgacg

SEQ ID NO: 5411797 - DNA, 25 bp, Homo sapien
aaatcattgtgacatgccacatggc

SEQ ID NO: 5411798 - DNA, 25 bp, Homo sapien
tctatagactttcattaggagcaca

SEQ ID NO: 5411799 - DNA, 25 bp, Homo sapien
ccttagtctgatcttttggatatgc

SEQ ID NO: 5411800 - DNA, 25 bp, Homo sapien
tatgcataaccatatcttgacttat

SEQ ID NO: 5411801 - DNA, 25 bp, Homo sapien
tttggatatgcataaccatatcttg

SEQ ID NO: 5411802 - DNA, 25 bp, Homo sapien
tatcagggccttagtctgatctttt

SEQ ID NO: 5411803 - DNA, 25 bp, Homo sapien
gaagacactggccatgtaacagaga

SEQ ID NO: 5411804 - DNA, 25 bp, Homo sapien
cagaagggcatgtgctccggacctt

SEQ ID NO: 5411805 - DNA, 25 bp, Homo sapien
tagcacaaagtcatgtccagaaggg

SEQ ID NO: 5411806 - DNA, 25 bp, Homo sapien
tccggaccttagtcaaacatctact

SEQ ID NO: 5411807 - DNA, 25 bp, Homo sapien
cagaacccgcactctggctgagatt

SEQ ID NO: 5411808 - DNA, 25 bp, Homo sapien
tatgtgttgcccaaatgcatacaga

SEQ ID NO: 5411809 - DNA, 25 bp, Homo sapien
taacaaatgggtacactaggccaat

SEQ ID NO: 5411810 - DNA, 25 bp, Homo sapien
ggctgagattccagtaagcaatgga

SEQ ID NO: 5411811 - DNA, 25 bp, Homo sapien
gagctcctccattttcagggaatca

SEQ ID NO: 5411812 - DNA, 25 bp, Homo sapien
accatttcagaaagtggcattgctg

SEQ ID NO: 5411813 - DNA, 25 bp, Homo sapien
tcattacttattgccctagctgaga

SEQ ID NO: 5411814 - DNA, 25 bp, Homo sapien
gcttcagaacagaaaatagctccct

SEQ ID NO: 5411815 - DNA, 25 bp, Homo sapien
aaacctgtctttgataactccatct

SEQ ID NO: 5411816 - DNA, 25 bp, Homo sapien
ataactccatctgtgctagacttac

SEQ ID NO: 5411817 - DNA, 25 bp, Homo sapien
accctcaagccaaaacctgtctttg

SEQ ID NO: 5411818 - DNA, 25 bp, Homo sapien
ttataccctcaagccaaaacctgtc

SEQ ID NO: 5411819 - DNA, 25 bp, Homo sapien
tcccatctctaagataattaagctc

SEQ ID NO: 5411820 - DNA, 25 bp, Homo sapien
ttccagtacctacaccactggtggt

SEQ ID NO: 5411821 - DNA, 25 bp, Homo sapien
ttacgtatttttcaacactgcttcc

SEQ ID NO: 5411822 - DNA, 25 bp, Homo sapien
ccagtattattggacatgcagctgt

SEQ ID NO: 5411823 - DNA, 25 bp, Homo sapien
tttggaaacactcccgcatcttatt

SEQ ID NO: 5411824 - DNA, 25 bp, Homo sapien
ttggaaacactcccgcatcttattt

SEQ ID NO: 5411825 - DNA, 25 bp, Homo sapien
tggaaacactcccgcatcttatttt

SEQ ID NO: 5411826 - DNA, 25 bp, Homo sapien
gagctaaatgaactcaacaataagg

SEQ ID NO: 5411827 - DNA, 25 bp, Homo sapien
agcaaggttgtctgagctaaatgaa

SEQ ID NO: 5411828 - DNA, 25 bp, Homo sapien
gctaaatgaactcaacaataaggcc

SEQ ID NO: 5411829 - DNA, 25 bp, Homo sapien
caaggttgtctgagctaaatgaact

SEQ ID NO: 5411830 - DNA, 25 bp, Homo sapien
tgggagcgtacagtcatcattgatc

SEQ ID NO: 5411831 - DNA, 25 bp, Homo sapien
acagtcatcattgatcttgcagaca

SEQ ID NO: 5411832 - DNA, 25 bp, Homo sapien
tcatgtgccaccgtgggagcgtaca

SEQ ID NO: 5411833 - DNA, 25 bp, Homo sapien
gaagaagtcgttcatgtgccaccgt

SEQ ID NO: 5411834 - DNA, 25 bp, Homo sapien
gtaataaggatccatggcaatgatc

SEQ ID NO: 5411835 - DNA, 25 bp, Homo sapien
gaatgatcgcagtacagacaatccc

SEQ ID NO: 5411836 - DNA, 25 bp, Homo sapien
caagctccattaaactgaggctgac

SEQ ID NO: 5411837 - DNA, 25 bp, Homo sapien
tccacatttgacagaccaagctcca

SEQ ID NO: 5411838 - DNA, 25 bp, Homo sapien
ttctgctgtgaaaatcccagtaaag

SEQ ID NO: 5411839 - DNA, 25 bp, Homo sapien
tctgctgtgaaaatcccagtaaaga

SEQ ID NO: 5411840 - DNA, 25 bp, Homo sapien
ctgctgtgaaaatcccagtaaagac

SEQ ID NO: 5411841 - DNA, 25 bp, Homo sapien
tacggagcaccttagcaaaacttaa

SEQ ID NO: 5411842 - DNA, 25 bp, Homo sapien
gatgttgtctaacctactatgattg

SEQ ID NO: 5411843 - DNA, 25 bp, Homo sapien
cagttaaggccctaaaaatcaatgg

SEQ ID NO: 5411844 - DNA, 25 bp, Homo sapien
ccctatgatgggagcaagcatttta

SEQ ID NO: 5411845 - DNA, 25 bp, Homo sapien
agttgagttttaggctgtatctctg

SEQ ID NO: 5411846 - DNA, 25 bp, Homo sapien
ttgagttttaggctgtatctctgag

SEQ ID NO: 5411847 - DNA, 25 bp, Homo sapien
gttttaggctgtatctctgagattc

SEQ ID NO: 5411848 - DNA, 25 bp, Homo sapien
gagttttaggctgtatctctgagat

SEQ ID NO: 5411849 - DNA, 25 bp, Homo sapien
gtcaacacactactgaattgctcag

SEQ ID NO: 5411850 - DNA, 25 bp, Homo sapien
cagcatggcggacatttctgtctag

SEQ ID NO: 5411851 - DNA, 25 bp, Homo sapien
ttttaaccatgcatcacagcagtcc

SEQ ID NO: 5411852 - DNA, 25 bp, Homo sapien
tgcaaatagtgatggcaagatcaac

SEQ ID NO: 5411853 - DNA, 25 bp, Homo sapien
caataacaaggaagagtagtaaata

SEQ ID NO: 5411854 - DNA, 25 bp, Homo sapien
gctcacggctctttgccttccagag

SEQ ID NO: 5411855 - DNA, 25 bp, Homo sapien
tttgccttccagaggaatcctccag

SEQ ID NO: 5411856 - DNA, 25 bp, Homo sapien
cattgtgttggtcagaatgctggct

SEQ ID NO: 5411857 - DNA, 25 bp, Homo sapien
ttgtgttggtcagaatgctggctat

SEQ ID NO: 5411858 - DNA, 25 bp, Homo sapien
aatctggtaagagcttaaccttctc

SEQ ID NO: 5411859 - DNA, 25 bp, Homo sapien
tctttctgacttccgtttctgtggt

SEQ ID NO: 5411860 - DNA, 25 bp, Homo sapien
ttctctttctgacttccgtttctgt

SEQ ID NO: 5411861 - DNA, 25 bp, Homo sapien
ttctgacttccgtttctgtggtggt

SEQ ID NO: 5411862 - DNA, 25 bp, Homo sapien
cactcttcccaataagtaatacaac

SEQ ID NO: 5411863 - DNA, 25 bp, Homo sapien
accactcttcccaataagtaataca

SEQ ID NO: 5411864 - DNA, 25 bp, Homo sapien
accaaatactgatggctcaaaccac

SEQ ID NO: 5411865 - DNA, 25 bp, Homo sapien
caaaccaaatactgatggctcaaac

SEQ ID NO: 5411866 - DNA, 25 bp, Homo sapien
cacaggtagtactctttaagaggaa

SEQ ID NO: 5411867 - DNA, 25 bp, Homo sapien
ctttgaggctatattgacaatattg

SEQ ID NO: 5411868 - DNA, 25 bp, Homo sapien
tgttgtaaacatgctaaagtcattt

SEQ ID NO: 5411869 - DNA, 25 bp, Homo sapien
tatgattatatagtctcaaggctga

SEQ ID NO: 5411870 - DNA, 25 bp, Homo sapien
tattgacagttgtatgaaattgccc

SEQ ID NO: 5411871 - DNA, 25 bp, Homo sapien
tttcatagcagactctaaaaacggg

SEQ ID NO: 5411872 - DNA, 25 bp, Homo sapien
caacaaaagctaatggtcccataca

SEQ ID NO: 5411873 - DNA, 25 bp, Homo sapien
cattatttgtctcggtaggtctacc

SEQ ID NO: 5411874 - DNA, 25 bp, Homo sapien
taatgtcagtagcagctaggtcatc

SEQ ID NO: 5411875 - DNA, 25 bp, Homo sapien
ctaaactgtccaggctttgattatt

SEQ ID NO: 5411876 - DNA, 25 bp, Homo sapien
ttggtgaataatgtcagtagcagct

SEQ ID NO: 5411877 - DNA, 25 bp, Homo sapien
tagcagctaggtcatctattatcac

SEQ ID NO: 5411878 - DNA, 25 bp, Homo sapien
taggtgacgttagagctgaaggtcc

SEQ ID NO: 5411879 - DNA, 25 bp, Homo sapien
ggtgacgttagagctgaaggtccac

SEQ ID NO: 5411880 - DNA, 25 bp, Homo sapien
gacgttagagctgaaggtccaccca

SEQ ID NO: 5411881 - DNA, 25 bp, Homo sapien
ccagtaggtgacgttagagctgaag

SEQ ID NO: 5411882 - DNA, 25 bp, Homo sapien
ctggatgacatactggcctgactaa

SEQ ID NO: 5411883 - DNA, 25 bp, Homo sapien
tggatgacatactggcctgactaac

SEQ ID NO: 5411884 - DNA, 25 bp, Homo sapien
cctggatgacatactggcctgacta

SEQ ID NO: 5411885 - DNA, 25 bp, Homo sapien
tgcggcacaaacagtgagtctctcc

SEQ ID NO: 5411886 - DNA, 25 bp, Homo sapien
tgcccgacctctgaaactgaaaatg

SEQ ID NO: 5411887 - DNA, 25 bp, Homo sapien
ctgctttcgctgtcttcaaatgtgc

SEQ ID NO: 5411888 - DNA, 25 bp, Homo sapien
cagggagccacggatactcaagaga

SEQ ID NO: 5411889 - DNA, 25 bp, Homo sapien
ttttgacgctgtcttcagattcgga

SEQ ID NO: 5411890 - DNA, 25 bp, Homo sapien
tcggatttgggaaagctgtctctct

SEQ ID NO: 5411891 - DNA, 25 bp, Homo sapien
gaagcagctgatgctgccgcaactg

SEQ ID NO: 5411892 - DNA, 25 bp, Homo sapien
cagaattttttgtcactggtcagtc

SEQ ID NO: 5411893 - DNA, 25 bp, Homo sapien
gggtgaatcactaataattggaaat

SEQ ID NO: 5411894 - DNA, 25 bp, Homo sapien
cctctcttaggttctatgagacaat

SEQ ID NO: 5411895 - DNA, 25 bp, Homo sapien
tacagtggctaaaaagtttgttaga

SEQ ID NO: 5411896 - DNA, 25 bp, Homo sapien
ttttctatccgctagctgatttctt

SEQ ID NO: 5411897 - DNA, 25 bp, Homo sapien
atctgctgaaattcggcctcttttt

SEQ ID NO: 5411898 - DNA, 25 bp, Homo sapien
catctgctgaaattcggcctctttt

SEQ ID NO: 5411899 - DNA, 25 bp, Homo sapien
agagacaggaaagcccagctaaagg

SEQ ID NO: 5411900 - DNA, 25 bp, Homo sapien
tagagacaggaaagcccagctaaag

SEQ ID NO: 5411901 - DNA, 25 bp, Homo sapien
tcatgagtcgaaatagagacaggaa

SEQ ID NO: 5411902 - DNA, 25 bp, Homo sapien
gtcttgagtcatgagtcgaaataga

SEQ ID NO: 5411903 - DNA, 25 bp, Homo sapien
gaagctctttcagttgacacctgta

SEQ ID NO: 5411904 - DNA, 25 bp, Homo sapien
catacaccatggttgtgggttgcat

SEQ ID NO: 5411905 - DNA, 25 bp, Homo sapien
gaacccgcagttatgatcttaagta

SEQ ID NO: 5411906 - DNA, 25 bp, Homo sapien
tacagaccacatttaaggaacccgc

SEQ ID NO: 5411907 - DNA, 25 bp, Homo sapien
tccacagagtaaagggtctttttgc

SEQ ID NO: 5411908 - DNA, 25 bp, Homo sapien
cattgtgccattaaagtaggaagtg

SEQ ID NO: 5411909 - DNA, 25 bp, Homo sapien
gtcatctccaatgtaatccttccag

SEQ ID NO: 5411910 - DNA, 25 bp, Homo sapien
tttgaatccattgtgccattaaagt

SEQ ID NO: 5411911 - DNA, 25 bp, Homo sapien
agcagaatcgcttgggggccactgc

SEQ ID NO: 5411912 - DNA, 25 bp, Homo sapien
tttcagtgctcggagaactctgaat

SEQ ID NO: 5411913 - DNA, 25 bp, Homo sapien
agtgctcggagaactctgaatgttc

SEQ ID NO: 5411914 - DNA, 25 bp, Homo sapien
aaattgttttcagtgctcggagaac

SEQ ID NO: 5411915 - DNA, 25 bp, Homo sapien
tgttctcaacgctgagacattgccc

SEQ ID NO: 5411916 - DNA, 25 bp, Homo sapien
aataacacacaagaaaagttggaga

SEQ ID NO: 5411917 - DNA, 25 bp, Homo sapien
caataacacacaagaaaagttggag

SEQ ID NO: 5411918 - DNA, 25 bp, Homo sapien
ttggagatataaggggcctactacc

SEQ ID NO: 5411919 - DNA, 25 bp, Homo sapien
aagttggagatataaggggcctact

SEQ ID NO: 5411920 - DNA, 25 bp, Homo sapien
tcaagactctgaaagttcgaagggc

SEQ ID NO: 5411921 - DNA, 25 bp, Homo sapien
tgcctaggcttacaaattctgttac

SEQ ID NO: 5411922 - DNA, 25 bp, Homo sapien
aagttcgaagggctgaaacattgcc

SEQ ID NO: 5411923 - DNA, 25 bp, Homo sapien
cagaaatagttttcagagctctcaa

SEQ ID NO: 5411924 - DNA, 25 bp, Homo sapien
taaggacttaatgctgggtttggca

SEQ ID NO: 5411925 - DNA, 25 bp, Homo sapien
aaggacttaatgctgggtttggcac

SEQ ID NO: 5411926 - DNA, 25 bp, Homo sapien
gcagaattaaatcagagttactgat

SEQ ID NO: 5411927 - DNA, 25 bp, Homo sapien
gaattaaatcagagttactgatagt

SEQ ID NO: 5411928 - DNA, 25 bp, Homo sapien
gactcaaaggtatagattccagtga

SEQ ID NO: 5411929 - DNA, 25 bp, Homo sapien
gatttttataagtgactcaaaggta

SEQ ID NO: 5411930 - DNA, 25 bp, Homo sapien
taagcaaaaccctcttgccaagatt

SEQ ID NO: 5411931 - DNA, 25 bp, Homo sapien
gttccatggatcacgaagaaacgta

SEQ ID NO: 5411932 - DNA, 25 bp, Homo sapien
cagtaaatcctcagagaaatctata

SEQ ID NO: 5411933 - DNA, 25 bp, Homo sapien
gtaaatcctcagagaaatctataaa

SEQ ID NO: 5411934 - DNA, 25 bp, Homo sapien
taaatcctcagagaaatctataaaa

SEQ ID NO: 5411935 - DNA, 25 bp, Homo sapien
acagtaaatcctcagagaaatctat

SEQ ID NO: 5411936 - DNA, 25 bp, Homo sapien
caatgaagggcattttttctcacac

SEQ ID NO: 5411937 - DNA, 25 bp, Homo sapien
tcttttagtgcaacaagggcctggt

SEQ ID NO: 5411938 - DNA, 25 bp, Homo sapien
tagttcatgcacagttttccccagc

SEQ ID NO: 5411939 - DNA, 25 bp, Homo sapien
ggccacaaagaactcaatggctatg

SEQ ID NO: 5411940 - DNA, 25 bp, Homo sapien
tcaggagggttgctcaaggtcataa

SEQ ID NO: 5411941 - DNA, 25 bp, Homo sapien
tacacagttggtcaaaatagtgcac

SEQ ID NO: 5411942 - DNA, 25 bp, Homo sapien
cagtcaggagggttgctcaaggtca

SEQ ID NO: 5411943 - DNA, 25 bp, Homo sapien
tctacattctttgtccagtcaggag

SEQ ID NO: 5411944 - DNA, 25 bp, Homo sapien
gttagaaatagcatttaggcaattc

SEQ ID NO: 5411945 - DNA, 25 bp, Homo sapien
tagaaatagcatttaggcaattcac

SEQ ID NO: 5411946 - DNA, 25 bp, Homo sapien
tcaactgttagaaatagcatttagg

SEQ ID NO: 5411947 - DNA, 25 bp, Homo sapien
ctgttagaaatagcatttaggcaat

SEQ ID NO: 5411948 - DNA, 25 bp, Homo sapien
tgtaccaaaatcttgatagcaattt

SEQ ID NO: 5411949 - DNA, 25 bp, Homo sapien
gaatgtaccaaaatcttgatagcaa

SEQ ID NO: 5411950 - DNA, 25 bp, Homo sapien
tgatagcaattttcctaacagggtt

SEQ ID NO: 5411951 - DNA, 25 bp, Homo sapien
aaatcttgatagcaattttcctaac

SEQ ID NO: 5411952 - DNA, 25 bp, Homo sapien
actgaatcggaaaattgcctttcct

SEQ ID NO: 5411953 - DNA, 25 bp, Homo sapien
ctgaatcggaaaattgcctttcctt

SEQ ID NO: 5411954 - DNA, 25 bp, Homo sapien
ggtactcatgctcttttgaaacaat

SEQ ID NO: 5411955 - DNA, 25 bp, Homo sapien
cttgcgacattaggagagagtttca

SEQ ID NO: 5411956 - DNA, 25 bp, Homo sapien
cgtaatttaaggttcaggtactcat

SEQ ID NO: 5411957 - DNA, 25 bp, Homo sapien
caatttctgcttgcgacattaggag

SEQ ID NO: 5411958 - DNA, 25 bp, Homo sapien
cttgtttaatagcacctcaatcttc

SEQ ID NO: 5411959 - DNA, 25 bp, Homo sapien
ttgtttaatagcacctcaatcttca

SEQ ID NO: 5411960 - DNA, 25 bp, Homo sapien
tgtttaatagcacctcaatcttcat

SEQ ID NO: 5411961 - DNA, 25 bp, Homo sapien
aagatttattagaagtctaaaatca

SEQ ID NO: 5411962 - DNA, 25 bp, Homo sapien
ttagaagtctaaaatcaatactcac

SEQ ID NO: 5411963 - DNA, 25 bp, Homo sapien
tttattagaagtctaaaatcaatac

SEQ ID NO: 5411964 - DNA, 25 bp, Homo sapien
tattagaagtctaaaatcaatactc

SEQ ID NO: 5411965 - DNA, 25 bp, Homo sapien
tctgcagcacgtttttcgatagcag

SEQ ID NO: 5411966 - DNA, 25 bp, Homo sapien
aaaaggcggaagctttcaggtcctg

SEQ ID NO: 5411967 - DNA, 25 bp, Homo sapien
tcctgggggtaccaacagtgcctgt

SEQ ID NO: 5411968 - DNA, 25 bp, Homo sapien
caagagattctctagtaaaaaggcg

SEQ ID NO: 5411969 - DNA, 25 bp, Homo sapien
gtgtagcttcttgcatacgaattac

SEQ ID NO: 5411970 - DNA, 25 bp, Homo sapien
tatttacttatcaagggctggaata

SEQ ID NO: 5411971 - DNA, 25 bp, Homo sapien
tactgttgtctctaagtcctcggaa

SEQ ID NO: 5411972 - DNA, 25 bp, Homo sapien
gataggctagttccagactctcagc

SEQ ID NO: 5411973 - DNA, 25 bp, Homo sapien
gaatttgaatcttggtcaaaagaaa

SEQ ID NO: 5411974 - DNA, 25 bp, Homo sapien
gccactctactatgaatccttgaca

SEQ ID NO: 5411975 - DNA, 25 bp, Homo sapien
caaaccttgatgtggcttggcttca

SEQ ID NO: 5411976 - DNA, 25 bp, Homo sapien
gatagtcacagcacctttttccgga

SEQ ID NO: 5411977 - DNA, 25 bp, Homo sapien
tattcttacaatatccctagaagag

SEQ ID NO: 5411978 - DNA, 25 bp, Homo sapien
tgtaatttcgctgcacctggaacct

SEQ ID NO: 5411979 - DNA, 25 bp, Homo sapien
aaaaggccttataatctgtctgacc

SEQ ID NO: 5411980 - DNA, 25 bp, Homo sapien
tattacacagaagcctgcaattgct

SEQ ID NO: 5411981 - DNA, 25 bp, Homo sapien
tgtttttaccttgcctgtcagagtg

SEQ ID NO: 5411982 - DNA, 25 bp, Homo sapien
caatgaatctcatgtgtctagaaca

SEQ ID NO: 5411983 - DNA, 25 bp, Homo sapien
cataaaaggactcaatataggaaaa

SEQ ID NO: 5411984 - DNA, 25 bp, Homo sapien
cagtacacgcacatagtagtgctca

SEQ ID NO: 5411985 - DNA, 25 bp, Homo sapien
gaaattcagcccaatctttagaaac

SEQ ID NO: 5411986 - DNA, 25 bp, Homo sapien
cagcgcagttacttgagtcagttta

SEQ ID NO: 5411987 - DNA, 25 bp, Homo sapien
gttacttgagtcagtttaaagaggc

SEQ ID NO: 5411988 - DNA, 25 bp, Homo sapien
tcatcttggctgccatgaagatgaa

SEQ ID NO: 5411989 - DNA, 25 bp, Homo sapien
aagctgacagcgcagttacttgagt

SEQ ID NO: 5411990 - DNA, 25 bp, Homo sapien
gagattcactctatggtacccaaca

SEQ ID NO: 5411991 - DNA, 25 bp, Homo sapien
cctccgcttcctgttctgagattca

SEQ ID NO: 5411992 - DNA, 25 bp, Homo sapien
tagggtataacgtgtcttcctctgc

SEQ ID NO: 5411993 - DNA, 25 bp, Homo sapien
ctgataaaacagagccttatgaatt

SEQ ID NO: 5411994 - DNA, 25 bp, Homo sapien
ccgggaatagcatccctccagcttt

SEQ ID NO: 5411995 - DNA, 25 bp, Homo sapien
tagcatccctccagctttgcatggc

SEQ ID NO: 5411996 - DNA, 25 bp, Homo sapien
actgggccccgggaatagcatccct

SEQ ID NO: 5411997 - DNA, 25 bp, Homo sapien
atccctccagctttgcatggcagca

SEQ ID NO: 5411998 - DNA, 25 bp, Homo sapien
tttcattgatatgtttacctctctc

SEQ ID NO: 5411999 - DNA, 25 bp, Homo sapien
ttttcattgatatgtttacctctct

SEQ ID NO: 5412000 - DNA, 25 bp, Homo sapien
gggcgcactggaaagcttagtcagc

SEQ ID NO: 5412001 - DNA, 25 bp, Homo sapien
cactggaaagcttagtcagcagcgg

SEQ ID NO: 5412002 - DNA, 25 bp, Homo sapien
cggaattaccttcttcctgaaggct

SEQ ID NO: 5412003 - DNA, 25 bp, Homo sapien
tagtcagcagcggaattaccttctt

SEQ ID NO: 5412004 - DNA, 25 bp, Homo sapien
ggttttattggaaaatctgctatca

SEQ ID NO: 5412005 - DNA, 25 bp, Homo sapien
tctgctatcaataacatcttgaaga

SEQ ID NO: 5412006 - DNA, 25 bp, Homo sapien
ttttgaccacagaaattgtcttaac

SEQ ID NO: 5412007 - DNA, 25 bp, Homo sapien
caataacatcttgaagactacattt

SEQ ID NO: 5412008 - DNA, 25 bp, Homo sapien
ttgaaagtcactgctggatatttga

SEQ ID NO: 5412009 - DNA, 25 bp, Homo sapien
gaacattgaaagtcactgctggata

SEQ ID NO: 5412010 - DNA, 25 bp, Homo sapien
actgctggatatttgacatctggtg

SEQ ID NO: 5412011 - DNA, 25 bp, Homo sapien
aagtcactgctggatatttgacatc

SEQ ID NO: 5412012 - DNA, 25 bp, Homo sapien
gatatcttttattcttgactcaccg

SEQ ID NO: 5412013 - DNA, 25 bp, Homo sapien
tattcttgactcaccgttccatcta

SEQ ID NO: 5412014 - DNA, 25 bp, Homo sapien
cgttccatctactccacttgtacat

SEQ ID NO: 5412015 - DNA, 25 bp, Homo sapien
gatttcaacattgatatcttttatt

SEQ ID NO: 5412016 - DNA, 25 bp, Homo sapien
tttgtcttctagaaagtgaacctgg

SEQ ID NO: 5412017 - DNA, 25 bp, Homo sapien
tctgtttcttagtatgcctttttca

SEQ ID NO: 5412018 - DNA, 25 bp, Homo sapien
ctcttctaccctatgctcatgaatg

SEQ ID NO: 5412019 - DNA, 25 bp, Homo sapien
ttcattattaggtggtgtatactct

SEQ ID NO: 5412020 - DNA, 25 bp, Homo sapien
ggtgtatactcttctaccctatgct

SEQ ID NO: 5412021 - DNA, 25 bp, Homo sapien
cttgtttgtaagatgaagtatctcc

SEQ ID NO: 5412022 - DNA, 25 bp, Homo sapien
cctcagtaaaggctattggtggcat

SEQ ID NO: 5412023 - DNA, 25 bp, Homo sapien
tctgattaaatcagtttgttcctca

SEQ ID NO: 5412024 - DNA, 25 bp, Homo sapien
aagatgaagtatctcctctgattaa

SEQ ID NO: 5412025 - DNA, 25 bp, Homo sapien
cctctaaggtgaatgcattttcttg

SEQ ID NO: 5412026 - DNA, 25 bp, Homo sapien
cctcttggggctttcttagagccaa

SEQ ID NO: 5412027 - DNA, 25 bp, Homo sapien
ctggcagttacagaatcctcttggg

SEQ ID NO: 5412028 - DNA, 25 bp, Homo sapien
ggctttcttagagccaatctcctct

SEQ ID NO: 5412029 - DNA, 25 bp, Homo sapien
ttaagaagcaattacactagctagc

SEQ ID NO: 5412030 - DNA, 25 bp, Homo sapien
ctagcagcaggttgctaagccaggg

SEQ ID NO: 5412031 - DNA, 25 bp, Homo sapien
ttcctgcccggtttggcaggagctg

SEQ ID NO: 5412032 - DNA, 25 bp, Homo sapien
gggtccgagctacagacctctgatg

SEQ ID NO: 5412033 - DNA, 25 bp, Homo sapien
ggccttccgctccttgccatagcaa

SEQ ID NO: 5412034 - DNA, 25 bp, Homo sapien
aacctcgcctgcgttagcttgcact

SEQ ID NO: 5412035 - DNA, 25 bp, Homo sapien
agaggaagctgccagtggttctgct

SEQ ID NO: 5412036 - DNA, 25 bp, Homo sapien
ttctgctaccgatgtcagcagcatg

SEQ ID NO: 5412037 - DNA, 25 bp, Homo sapien
caggcttgttgatccggttggcaat

SEQ ID NO: 5412038 - DNA, 25 bp, Homo sapien
tgtccagggtaatggatagcctcat

SEQ ID NO: 5412039 - DNA, 25 bp, Homo sapien
ctttttaactacagccaagtctccg

SEQ ID NO: 5412040 - DNA, 25 bp, Homo sapien
tacagccaagtctccgttgtccagg

SEQ ID NO: 5412041 - DNA, 25 bp, Homo sapien
tgtctgtctcattggacaactctat

SEQ ID NO: 5412042 - DNA, 25 bp, Homo sapien
tctatgaacagggaatctaaacagt

SEQ ID NO: 5412043 - DNA, 25 bp, Homo sapien
caaaccatttgcaatacaatgccat

SEQ ID NO: 5412044 - DNA, 25 bp, Homo sapien
tgttttagacagaatagtagacaga

SEQ ID NO: 5412045 - DNA, 25 bp, Homo sapien
tctaatgaatctatacacagtgtcc

SEQ ID NO: 5412046 - DNA, 25 bp, Homo sapien
aataaggtccaaatagactagggca

SEQ ID NO: 5412047 - DNA, 25 bp, Homo sapien
tcatttcataagcaagacataaggc

SEQ ID NO: 5412048 - DNA, 25 bp, Homo sapien
gacataaggcaattagtacttggaa

SEQ ID NO: 5412049 - DNA, 25 bp, Homo sapien
gctgatactcttggcattgcttgaa

SEQ ID NO: 5412050 - DNA, 25 bp, Homo sapien
tcagatataatatgggatcccagct

SEQ ID NO: 5412051 - DNA, 25 bp, Homo sapien
catatggcactagaactgtatcaga

SEQ ID NO: 5412052 - DNA, 25 bp, Homo sapien
tagatcttattgacccatatggcac

SEQ ID NO: 5412053 - DNA, 25 bp, Homo sapien
attattagtagctcttagtaacttt

SEQ ID NO: 5412054 - DNA, 25 bp, Homo sapien
gacactgtgtatgtagaacagtttc

SEQ ID NO: 5412055 - DNA, 25 bp, Homo sapien
tctttagacactgtgtatgtagaac

SEQ ID NO: 5412056 - DNA, 25 bp, Homo sapien
tcttactttctttagacactgtgta

SEQ ID NO: 5412057 - DNA, 25 bp, Homo sapien
gagaatagcttatcaaggtggcaaa

SEQ ID NO: 5412058 - DNA, 25 bp, Homo sapien
tccactgtgggcaatgctataaaat

SEQ ID NO: 5412059 - DNA, 25 bp, Homo sapien
tggagactactcctgatgcagatgc

SEQ ID NO: 5412060 - DNA, 25 bp, Homo sapien
taacttgaacggatgaggagctgct

SEQ ID NO: 5412061 - DNA, 25 bp, Homo sapien
gcatatttaatagactatagtgagg

SEQ ID NO: 5412062 - DNA, 25 bp, Homo sapien
tatagcagcagtctggaacagaaca

SEQ ID NO: 5412063 - DNA, 25 bp, Homo sapien
gactatagtgaggtatagatgtagc

SEQ ID NO: 5412064 - DNA, 25 bp, Homo sapien
tagcagcagtctggaacagaacaca

SEQ ID NO: 5412065 - DNA, 25 bp, Homo sapien
actgctttgctgttcactactgctg

SEQ ID NO: 5412066 - DNA, 25 bp, Homo sapien
tgctttgctgttcactactgctgca

SEQ ID NO: 5412067 - DNA, 25 bp, Homo sapien
caaactgctttgctgttcactactg

SEQ ID NO: 5412068 - DNA, 25 bp, Homo sapien
aaactgctttgctgttcactactgc

SEQ ID NO: 5412069 - DNA, 25 bp, Homo sapien
ttgcagcagatgatgtatctatctc

SEQ ID NO: 5412070 - DNA, 25 bp, Homo sapien
aatgcagtagcttgcagcagatgat

SEQ ID NO: 5412071 - DNA, 25 bp, Homo sapien
tgcctcttgagccaaactctcagtt

SEQ ID NO: 5412072 - DNA, 25 bp, Homo sapien
gatcatttgcctcttgagccaaact

SEQ ID NO: 5412073 - DNA, 25 bp, Homo sapien
cacaggacaaggatctggaaagcct

SEQ ID NO: 5412074 - DNA, 25 bp, Homo sapien
caaaccaaagttgccagaaagagat

SEQ ID NO: 5412075 - DNA, 25 bp, Homo sapien
taaaaccacggtgactaagatgtac

SEQ ID NO: 5412076 - DNA, 25 bp, Homo sapien
ggcaggaaacagttcttaatccaca

SEQ ID NO: 5412077 - DNA, 25 bp, Homo sapien
aagtccgtcagaacacctgcttcca

SEQ ID NO: 5412078 - DNA, 25 bp, Homo sapien
agtccgtcagaacacctgcttccat

SEQ ID NO: 5412079 - DNA, 25 bp, Homo sapien
caagtccgtcagaacacctgcttcc

SEQ ID NO: 5412080 - DNA, 25 bp, Homo sapien
tctctccatttccttccaactccat

SEQ ID NO: 5412081 - DNA, 25 bp, Homo sapien
ttctctccatttccttccaactcca

SEQ ID NO: 5412082 - DNA, 25 bp, Homo sapien
ctctctcaatcctctttgctttctt

SEQ ID NO: 5412083 - DNA, 25 bp, Homo sapien
ctctctctctcaatcctctttgctt

SEQ ID NO: 5412084 - DNA, 25 bp, Homo sapien
tcttttctccactcgcttcctctct

SEQ ID NO: 5412085 - DNA, 25 bp, Homo sapien
tgcagacattttccatagttgggag

SEQ ID NO: 5412086 - DNA, 25 bp, Homo sapien
gacattttccatagttgggagctat

SEQ ID NO: 5412087 - DNA, 25 bp, Homo sapien
ttccatagttgggagctattttttg

SEQ ID NO: 5412088 - DNA, 25 bp, Homo sapien
gagccagggcatcctcaacaggaag

SEQ ID NO: 5412089 - DNA, 25 bp, Homo sapien
gcatcctcaacaggaagactttgca

SEQ ID NO: 5412090 - DNA, 25 bp, Homo sapien
cctcaacaggaagactttgcaccat

SEQ ID NO: 5412091 - DNA, 25 bp, Homo sapien
cagggcatcctcaacaggaagactt

SEQ ID NO: 5412092 - DNA, 25 bp, Homo sapien
cgctgatcttctgtgatgtgcccag

SEQ ID NO: 5412093 - DNA, 25 bp, Homo sapien
caggaaaaatggcagttcccgctga

SEQ ID NO: 5412094 - DNA, 25 bp, Homo sapien
aggcagtgttgaggctatccagttt

SEQ ID NO: 5412095 - DNA, 25 bp, Homo sapien
gataacctcataaaggcaagattcc

SEQ ID NO: 5412096 - DNA, 25 bp, Homo sapien
gtttgcttggaaactagcagcttac

SEQ ID NO: 5412097 - DNA, 25 bp, Homo sapien
ctttaataattccatgttctgctag

SEQ ID NO: 5412098 - DNA, 25 bp, Homo sapien
taataattccatgttctgctagctg

SEQ ID NO: 5412099 - DNA, 25 bp, Homo sapien
tgtgcttggaagtttgcttggaaac

SEQ ID NO: 5412100 - DNA, 25 bp, Homo sapien
tttcttccacagtacatgcagccat

SEQ ID NO: 5412101 - DNA, 25 bp, Homo sapien
cacattcatgagtgctacaggagca

SEQ ID NO: 5412102 - DNA, 25 bp, Homo sapien
gaacccgagctatagtgaatccttt

SEQ ID NO: 5412103 - DNA, 25 bp, Homo sapien
tgtgaatctttgcaatcccctccag

SEQ ID NO: 5412104 - DNA, 25 bp, Homo sapien
ttcattctgactgtggtcggccact

SEQ ID NO: 5412105 - DNA, 25 bp, Homo sapien
catacacttaatgaaggcacaagcc

SEQ ID NO: 5412106 - DNA, 25 bp, Homo sapien
caccccagtgtagggtgactgctca

SEQ ID NO: 5412107 - DNA, 25 bp, Homo sapien
ctggtgtcaagatctgagcagttgt

SEQ ID NO: 5412108 - DNA, 25 bp, Homo sapien
gttgtttctatctctcctgtcatac

SEQ ID NO: 5412109 - DNA, 25 bp, Homo sapien
caaagcttgtgtccactttatgtct

SEQ ID NO: 5412110 - DNA, 25 bp, Homo sapien
ctaaagatagctgtctcaaagcttg

SEQ ID NO: 5412111 - DNA, 25 bp, Homo sapien
gatagctgtctcaaagcttgtgtcc

SEQ ID NO: 5412112 - DNA, 25 bp, Homo sapien
gcttgtgtccactttatgtctatat

SEQ ID NO: 5412113 - DNA, 25 bp, Homo sapien
attgtgaacaagttttacatttccg

SEQ ID NO: 5412114 - DNA, 25 bp, Homo sapien
gggtgaatctcctctaaacagtgaa

SEQ ID NO: 5412115 - DNA, 25 bp, Homo sapien
gatccgcctgactctacttttgtga

SEQ ID NO: 5412116 - DNA, 25 bp, Homo sapien
caaaagattgtatgactatggtgca

SEQ ID NO: 5412117 - DNA, 25 bp, Homo sapien
ttcagatgattcctctaaaggaaaa

SEQ ID NO: 5412118 - DNA, 25 bp, Homo sapien
cagtgcttggatgggtatagttcta

SEQ ID NO: 5412119 - DNA, 25 bp, Homo sapien
tgtgcagtatctttggcaggatccc

SEQ ID NO: 5412120 - DNA, 25 bp, Homo sapien
ggtatagttctaaagcttgcccata

SEQ ID NO: 5412121 - DNA, 25 bp, Homo sapien
gccctgtcctaggaagtgggtgacc

SEQ ID NO: 5412122 - DNA, 25 bp, Homo sapien
aagccacaaagttgcagatgaggcc

SEQ ID NO: 5412123 - DNA, 25 bp, Homo sapien
caaatgccggaagaaactgaaggag

SEQ ID NO: 5412124 - DNA, 25 bp, Homo sapien
tggcagccaagacgacagtgaagaa

SEQ ID NO: 5412125 - DNA, 25 bp, Homo sapien
gtttacaatgtctctcatgtcacca

SEQ ID NO: 5412126 - DNA, 25 bp, Homo sapien
tcatcttctatctggcccagtagac

SEQ ID NO: 5412127 - DNA, 25 bp, Homo sapien
gaccatctggttgataatttgacgt

SEQ ID NO: 5412128 - DNA, 25 bp, Homo sapien
tacttttgccagctaagctcttccg

SEQ ID NO: 5412129 - DNA, 25 bp, Homo sapien
ttaagttcattagaatagaacttta

SEQ ID NO: 5412130 - DNA, 25 bp, Homo sapien
caaattcatacaatccgaaaactac

SEQ ID NO: 5412131 - DNA, 25 bp, Homo sapien
caactatggagtcatattgactctt

SEQ ID NO: 5412132 - DNA, 25 bp, Homo sapien
gactctttttgctaccagaaagtat

SEQ ID NO: 5412133 - DNA, 25 bp, Homo sapien
taaactccttctgattcaaattcat

SEQ ID NO: 5412134 - DNA, 25 bp, Homo sapien
cctcgtctgtaaagcaggttcaggg

SEQ ID NO: 5412135 - DNA, 25 bp, Homo sapien
tgtaaagcaggttcagggagagcat

SEQ ID NO: 5412136 - DNA, 25 bp, Homo sapien
ttcatcctcgtctgtaaagcaggtt

SEQ ID NO: 5412137 - DNA, 25 bp, Homo sapien
tcttctttcatcctcgtctgtaaag

SEQ ID NO: 5412138 - DNA, 25 bp, Homo sapien
taagcttgttgtctccgctcaatat

SEQ ID NO: 5412139 - DNA, 25 bp, Homo sapien
agcttgttgtctccgctcaatattc

SEQ ID NO: 5412140 - DNA, 25 bp, Homo sapien
ttgtctccgctcaatattcttctcc

SEQ ID NO: 5412141 - DNA, 25 bp, Homo sapien
ttgttgtctccgctcaatattcttc

SEQ ID NO: 5412142 - DNA, 25 bp, Homo sapien
atttcctctttatagcaggtacagt

SEQ ID NO: 5412143 - DNA, 25 bp, Homo sapien
ctttatagcaggtacagtaattttc

SEQ ID NO: 5412144 - DNA, 25 bp, Homo sapien
cctctttatagcaggtacagtaatt

SEQ ID NO: 5412145 - DNA, 25 bp, Homo sapien
tatagcaggtacagtaattttcctg

SEQ ID NO: 5412146 - DNA, 25 bp, Homo sapien
aatcctttgctatctcccctggaag

SEQ ID NO: 5412147 - DNA, 25 bp, Homo sapien
tctctttcgttctgggcccttgaag

SEQ ID NO: 5412148 - DNA, 25 bp, Homo sapien
cttgaagtaggcatagcttactttt

SEQ ID NO: 5412149 - DNA, 25 bp, Homo sapien
gtaggcatagcttacttttactggg

SEQ ID NO: 5412150 - DNA, 25 bp, Homo sapien
tccgggcttggtgttctcagctgag

SEQ ID NO: 5412151 - DNA, 25 bp, Homo sapien
agctgccaaagtgcgcagccaggct

SEQ ID NO: 5412152 - DNA, 25 bp, Homo sapien
gtgttctcagctgagggagctgatt

SEQ ID NO: 5412153 - DNA, 25 bp, Homo sapien
gagctgccaaagtgcgcagccaggc

SEQ ID NO: 5412154 - DNA, 25 bp, Homo sapien
gaagatgcatagctagttccacaga

SEQ ID NO: 5412155 - DNA, 25 bp, Homo sapien
taaatgattctatatgtgcaggtcc

SEQ ID NO: 5412156 - DNA, 25 bp, Homo sapien
acagagcatgcccacatggattgca

SEQ ID NO: 5412157 - DNA, 25 bp, Homo sapien
tttgatgaaaatgaacagccgcatg

SEQ ID NO: 5412158 - DNA, 25 bp, Homo sapien
tctttgagggttaggcacctggcaa

SEQ ID NO: 5412159 - DNA, 25 bp, Homo sapien
gactgtttcagatccccagtacaaa

SEQ ID NO: 5412160 - DNA, 25 bp, Homo sapien
taaagaaagacacggattcagagac

SEQ ID NO: 5412161 - DNA, 25 bp, Homo sapien
cttatgtcggtaggtaatgtcagga

SEQ ID NO: 5412162 - DNA, 25 bp, Homo sapien
aagtaatgaccttctcattaatctt

SEQ ID NO: 5412163 - DNA, 25 bp, Homo sapien
taagtaatgaccttctcattaatct

SEQ ID NO: 5412164 - DNA, 25 bp, Homo sapien
agtaatgaccttctcattaatcttt

SEQ ID NO: 5412165 - DNA, 25 bp, Homo sapien
tatctgctcagagttgacacccaac

SEQ ID NO: 5412166 - DNA, 25 bp, Homo sapien
tcacttgattcaagcactccctgga

SEQ ID NO: 5412167 - DNA, 25 bp, Homo sapien
tcttgacaaggcctgaaaacgaagg

SEQ ID NO: 5412168 - DNA, 25 bp, Homo sapien
gagatttacacagccaccatttgat

SEQ ID NO: 5412169 - DNA, 25 bp, Homo sapien
cagtgtggttactccccacaaataa

SEQ ID NO: 5412170 - DNA, 25 bp, Homo sapien
aagatgaggaacacccccgaaatca

SEQ ID NO: 5412171 - DNA, 25 bp, Homo sapien
tacagctgcatatctcccaaactcg

SEQ ID NO: 5412172 - DNA, 25 bp, Homo sapien
ctcccaaactcggatgctcttgtga

SEQ ID NO: 5412173 - DNA, 25 bp, Homo sapien
gccaacgggcagaacgtcctagatc

SEQ ID NO: 5412174 - DNA, 25 bp, Homo sapien
tggccaacgggcagaacgtcctaga

SEQ ID NO: 5412175 - DNA, 25 bp, Homo sapien
ggccaacgggcagaacgtcctagat

SEQ ID NO: 5412176 - DNA, 25 bp, Homo sapien
acatcaggattgatatatccaaaca

SEQ ID NO: 5412177 - DNA, 25 bp, Homo sapien
ccacacatcaggattgatatatcca

SEQ ID NO: 5412178 - DNA, 25 bp, Homo sapien
atcaggattgatatatccaaacaag

SEQ ID NO: 5412179 - DNA, 25 bp, Homo sapien
cacacatcaggattgatatatccaa

SEQ ID NO: 5412180 - DNA, 25 bp, Homo sapien
gccattcaggagtttgctttgaatc

SEQ ID NO: 5412181 - DNA, 25 bp, Homo sapien
aagggagatcttgccattcaggagt

SEQ ID NO: 5412182 - DNA, 25 bp, Homo sapien
ggagaagggagatcttgccattcag

SEQ ID NO: 5412183 - DNA, 25 bp, Homo sapien
gatcttgccattcaggagtttgctt

SEQ ID NO: 5412184 - DNA, 25 bp, Homo sapien
ttactgaacaccgactcttaaggct

SEQ ID NO: 5412185 - DNA, 25 bp, Homo sapien
actgaacaccgactcttaaggcttt

SEQ ID NO: 5412186 - DNA, 25 bp, Homo sapien
tgaacaccgactcttaaggcttttg

SEQ ID NO: 5412187 - DNA, 25 bp, Homo sapien
tactgaacaccgactcttaaggctt

SEQ ID NO: 5412188 - DNA, 25 bp, Homo sapien
tacgttagatgtaagtgacgagaag

SEQ ID NO: 5412189 - DNA, 25 bp, Homo sapien
gtgacgagaaggaatatagcgaggg

SEQ ID NO: 5412190 - DNA, 25 bp, Homo sapien
ggaatatagcgaggggaagaaatcc

SEQ ID NO: 5412191 - DNA, 25 bp, Homo sapien
tcagtacgttagatgtaagtgacga

SEQ ID NO: 5412192 - DNA, 25 bp, Homo sapien
tggctgctttgtttacctaagcaag

SEQ ID NO: 5412193 - DNA, 25 bp, Homo sapien
ttcctggctgctttgtttacctaag

SEQ ID NO: 5412194 - DNA, 25 bp, Homo sapien
cctggctgctttgtttacctaagca

SEQ ID NO: 5412195 - DNA, 25 bp, Homo sapien
tcctggctgctttgtttacctaagc

SEQ ID NO: 5412196 - DNA, 25 bp, Homo sapien
ggtcatccagtagccaatgtcagca

SEQ ID NO: 5412197 - DNA, 25 bp, Homo sapien
ctagtgttccaaatgactctgtgaa

SEQ ID NO: 5412198 - DNA, 25 bp, Homo sapien
tatcctcactagtcaagttctgcag

SEQ ID NO: 5412199 - DNA, 25 bp, Homo sapien
cactttgttttatcctgcctgccca

SEQ ID NO: 5412200 - DNA, 25 bp, Homo sapien
gaatatagatcagaaaagctgccct

SEQ ID NO: 5412201 - DNA, 25 bp, Homo sapien
gatataataagattcccagagagaa

SEQ ID NO: 5412202 - DNA, 25 bp, Homo sapien
cattaagaatacatcctggatatgc

SEQ ID NO: 5412203 - DNA, 25 bp, Homo sapien
gccctcctatatagactagagaatc

SEQ ID NO: 5412204 - DNA, 25 bp, Homo sapien
caaccgagagttcttaggacttggt

SEQ ID NO: 5412205 - DNA, 25 bp, Homo sapien
ggcagcatgccaggtcttctgtagc

SEQ ID NO: 5412206 - DNA, 25 bp, Homo sapien
accgagagttcttaggacttggtgc

SEQ ID NO: 5412207 - DNA, 25 bp, Homo sapien
tcttctgtagcaaccagaccatttg

SEQ ID NO: 5412208 - DNA, 25 bp, Homo sapien
taggcacataatacacattagttga

SEQ ID NO: 5412209 - DNA, 25 bp, Homo sapien
gacctgtgagtccatcgaacctatt

SEQ ID NO: 5412210 - DNA, 25 bp, Homo sapien
cttctgatagaaaattaggcacata

SEQ ID NO: 5412211 - DNA, 25 bp, Homo sapien
tgtgaaaacgggctaatacaacttc

SEQ ID NO: 5412212 - DNA, 25 bp, Homo sapien
atgaaaccgatcgtattttacttcg

SEQ ID NO: 5412213 - DNA, 25 bp, Homo sapien
atatgctctttttcgtacagctgag

SEQ ID NO: 5412214 - DNA, 25 bp, Homo sapien
caatgagaagatagggtcaataacc

SEQ ID NO: 5412215 - DNA, 25 bp, Homo sapien
cagctgaggctctgccagatttaaa

SEQ ID NO: 5412216 - DNA, 25 bp, Homo sapien
aacaataggcgcttagaaattcagc

SEQ ID NO: 5412217 - DNA, 25 bp, Homo sapien
tctatcagatgcttaaggaacttta

SEQ ID NO: 5412218 - DNA, 25 bp, Homo sapien
ggtaaatctcctaagcaagcgtcaa

SEQ ID NO: 5412219 - DNA, 25 bp, Homo sapien
tttgtgccataagaaatatctgatg

SEQ ID NO: 5412220 - DNA, 25 bp, Homo sapien
ggtttgtacacagaggccaatgctg

SEQ ID NO: 5412221 - DNA, 25 bp, Homo sapien
tctggatctgtaaaagctcttggtt

SEQ ID NO: 5412222 - DNA, 25 bp, Homo sapien
taaacatctcttcccctacatctgg

SEQ ID NO: 5412223 - DNA, 25 bp, Homo sapien
gcttcaagtggagtgtattacagac

SEQ ID NO: 5412224 - DNA, 25 bp, Homo sapien
tgcatgacactaaacttggatgctc

SEQ ID NO: 5412225 - DNA, 25 bp, Homo sapien
taatcattttggctaagtatccatt

SEQ ID NO: 5412226 - DNA, 25 bp, Homo sapien
ggatctgatgggttgcatgacacta

SEQ ID NO: 5412227 - DNA, 25 bp, Homo sapien
ttttggagtggatctgatgggttgc

SEQ ID NO: 5412228 - DNA, 25 bp, Homo sapien
cttctggatgttgtgccgaatttca

SEQ ID NO: 5412229 - DNA, 25 bp, Homo sapien
tgagcagcatgaagacataattcct

SEQ ID NO: 5412230 - DNA, 25 bp, Homo sapien
ttcagctgaacgagaccttgagcag

SEQ ID NO: 5412231 - DNA, 25 bp, Homo sapien
cttgtgacctttgtaggtacatgcc

SEQ ID NO: 5412232 - DNA, 25 bp, Homo sapien
caaatggcattattctattattttc

SEQ ID NO: 5412233 - DNA, 25 bp, Homo sapien
gctggaccgcaattgtgtgatctcg

SEQ ID NO: 5412234 - DNA, 25 bp, Homo sapien
aaaaatttcaaatggcattattcta

SEQ ID NO: 5412235 - DNA, 25 bp, Homo sapien
tggaccgcaattgtgtgatctcggc

SEQ ID NO: 5412236 - DNA, 25 bp, Homo sapien
cataattaatggtttgcctccttga

SEQ ID NO: 5412237 - DNA, 25 bp, Homo sapien
catagaggctgaccaacgcttttaa

SEQ ID NO: 5412238 - DNA, 25 bp, Homo sapien
tttcccccaagtccatgacatgtat

SEQ ID NO: 5412239 - DNA, 25 bp, Homo sapien
ccaagtccatgacatgtatacataa

SEQ ID NO: 5412240 - DNA, 25 bp, Homo sapien
cacatacacctctggataaatgttg

SEQ ID NO: 5412241 - DNA, 25 bp, Homo sapien
acaggattaaggtctggcacataca

SEQ ID NO: 5412242 - DNA, 25 bp, Homo sapien
caaatctttttgaaagatcaccaaa

SEQ ID NO: 5412243 - DNA, 25 bp, Homo sapien
ggataaatgttgttcagataccatg

SEQ ID NO: 5412244 - DNA, 25 bp, Homo sapien
tgccttttggaaagctatgagggct

SEQ ID NO: 5412245 - DNA, 25 bp, Homo sapien
cagacttctgcaaggcgaacttggt

SEQ ID NO: 5412246 - DNA, 25 bp, Homo sapien
gcaaggcgaacttggtttctagcaa

SEQ ID NO: 5412247 - DNA, 25 bp, Homo sapien
caatcacctgagtgccttttggaaa

SEQ ID NO: 5412248 - DNA, 25 bp, Homo sapien
gcaaggcataatctccaactgccca

SEQ ID NO: 5412249 - DNA, 25 bp, Homo sapien
agagcaaggcataatctccaactgc

SEQ ID NO: 5412250 - DNA, 25 bp, Homo sapien
gagcaaggcataatctccaactgcc

SEQ ID NO: 5412251 - DNA, 25 bp, Homo sapien
caaggcataatctccaactgcccac

SEQ ID NO: 5412252 - DNA, 25 bp, Homo sapien
tcttgttacactggcgacaatgaat

SEQ ID NO: 5412253 - DNA, 25 bp, Homo sapien
cacaaaaagtagagtgcacacatct

SEQ ID NO: 5412254 - DNA, 25 bp, Homo sapien
gctggaattcagtagctacaagtgc

SEQ ID NO: 5412255 - DNA, 25 bp, Homo sapien
tgtaccagccgattagaacacaata

SEQ ID NO: 5412256 - DNA, 25 bp, Homo sapien
catcatagcttccaatatactcaaa

SEQ ID NO: 5412257 - DNA, 25 bp, Homo sapien
ttcttcatcatagcttccaatatac

SEQ ID NO: 5412258 - DNA, 25 bp, Homo sapien
tcatcatagcttccaatatactcaa

SEQ ID NO: 5412259 - DNA, 25 bp, Homo sapien
ccatttcttcatcatagcttccaat

SEQ ID NO: 5412260 - DNA, 25 bp, Homo sapien
tgtcttctcctaaccatgctttacg

SEQ ID NO: 5412261 - DNA, 25 bp, Homo sapien
tataagactctgagagcaatcatct

SEQ ID NO: 5412262 - DNA, 25 bp, Homo sapien
tgatgaggaagacataagagctcac

SEQ ID NO: 5412263 - DNA, 25 bp, Homo sapien
tctttatcaattacctcagaggcaa

SEQ ID NO: 5412264 - DNA, 25 bp, Homo sapien
tattctggccaacagaggttctagc

SEQ ID NO: 5412265 - DNA, 25 bp, Homo sapien
gaagcgactcccagccaaatgaaag

SEQ ID NO: 5412266 - DNA, 25 bp, Homo sapien
aagactccagtcaaaatttccacgg

SEQ ID NO: 5412267 - DNA, 25 bp, Homo sapien
tacgacagccgtgtagttctcagct

SEQ ID NO: 5412268 - DNA, 25 bp, Homo sapien
tgagaataacagagtcaatttgtgt

SEQ ID NO: 5412269 - DNA, 25 bp, Homo sapien
aatgagaataacagagtcaatttgt

SEQ ID NO: 5412270 - DNA, 25 bp, Homo sapien
acagagtcaatttgtgttttgaaca

SEQ ID NO: 5412271 - DNA, 25 bp, Homo sapien
taacagagtcaatttgtgttttgaa

SEQ ID NO: 5412272 - DNA, 25 bp, Homo sapien
gcagtgtatatcatagtgtttatat

SEQ ID NO: 5412273 - DNA, 25 bp, Homo sapien
tacatttgcagtgtatatcatagtg

SEQ ID NO: 5412274 - DNA, 25 bp, Homo sapien
catttgcagtgtatatcatagtgtt

SEQ ID NO: 5412275 - DNA, 25 bp, Homo sapien
ctatacatttgcagtgtatatcata

SEQ ID NO: 5412276 - DNA, 25 bp, Homo sapien
agtgttctcttcattttctaaatgt

SEQ ID NO: 5412277 - DNA, 25 bp, Homo sapien
ttagtgttctcttcattttctaaat

SEQ ID NO: 5412278 - DNA, 25 bp, Homo sapien
ctttagtgttctcttcattttctaa

SEQ ID NO: 5412279 - DNA, 25 bp, Homo sapien
tagtgttctcttcattttctaaatg

SEQ ID NO: 5412280 - DNA, 25 bp, Homo sapien
gcaaggataactggctggaacagct

SEQ ID NO: 5412281 - DNA, 25 bp, Homo sapien
gaacactgaagttgaggaaacttaa

SEQ ID NO: 5412282 - DNA, 25 bp, Homo sapien
tcaaatgattcaccaacgccggcct

SEQ ID NO: 5412283 - DNA, 25 bp, Homo sapien
agctagtaactggagaacactgaag

SEQ ID NO: 5412284 - DNA, 25 bp, Homo sapien
tcattgctataatcgccagttgaaa

SEQ ID NO: 5412285 - DNA, 25 bp, Homo sapien
tgtcattgctataatcgccagttga

SEQ ID NO: 5412286 - DNA, 25 bp, Homo sapien
gtcattgctataatcgccagttgaa

SEQ ID NO: 5412287 - DNA, 25 bp, Homo sapien
aagaaaatgcaattaggcatttaga

SEQ ID NO: 5412288 - DNA, 25 bp, Homo sapien
agaaaatgcaattaggcatttagaa

SEQ ID NO: 5412289 - DNA, 25 bp, Homo sapien
gaaaatgcaattaggcatttagaaa

SEQ ID NO: 5412290 - DNA, 25 bp, Homo sapien
tgttacaaccatatccatacatata

SEQ ID NO: 5412291 - DNA, 25 bp, Homo sapien
aaaatgttacaaccatatccataca

SEQ ID NO: 5412292 - DNA, 25 bp, Homo sapien
ggagggaaaatgttacaaccatatc

SEQ ID NO: 5412293 - DNA, 25 bp, Homo sapien
tacaaccatatccatacatatatac

SEQ ID NO: 5412294 - DNA, 25 bp, Homo sapien
tgttgctcctagcaaccgagcagtg

SEQ ID NO: 5412295 - DNA, 25 bp, Homo sapien
ctagcaaccgagcagtgatcagacc

SEQ ID NO: 5412296 - DNA, 25 bp, Homo sapien
cagctgttgcgactgttgctcctag

SEQ ID NO: 5412297 - DNA, 25 bp, Homo sapien
atctaaaaatgtgagcgtttcagct

SEQ ID NO: 5412298 - DNA, 25 bp, Homo sapien
tcctgaactcaagctatttgcaggc

SEQ ID NO: 5412299 - DNA, 25 bp, Homo sapien
ctgaactcaagctatttgcaggcct

SEQ ID NO: 5412300 - DNA, 25 bp, Homo sapien
gaactcaagctatttgcaggcctca

SEQ ID NO: 5412301 - DNA, 25 bp, Homo sapien
aactcaagctatttgcaggcctcag

SEQ ID NO: 5412302 - DNA, 25 bp, Homo sapien
ccagtggttcagttaagagagctgc

SEQ ID NO: 5412303 - DNA, 25 bp, Homo sapien
ttcttgggcccaaaacatagcctca

SEQ ID NO: 5412304 - DNA, 25 bp, Homo sapien
ctgcgcccagctgttcatattctga

SEQ ID NO: 5412305 - DNA, 25 bp, Homo sapien
gaaagtgcaggaacaacccttgtag

SEQ ID NO: 5412306 - DNA, 25 bp, Homo sapien
cgtggaccacgcttcattatgaaaa

SEQ ID NO: 5412307 - DNA, 25 bp, Homo sapien
gacagttctaagcaacgtggaccac

SEQ ID NO: 5412308 - DNA, 25 bp, Homo sapien
tgaaaaactattatgacactggtgg

SEQ ID NO: 5412309 - DNA, 25 bp, Homo sapien
gtgaagaatagagcacactgtggac

SEQ ID NO: 5412310 - DNA, 25 bp, Homo sapien
tgtgttatttgctgatactggttac

SEQ ID NO: 5412311 - DNA, 25 bp, Homo sapien
gcttaaattatcagtcacatgacca

SEQ ID NO: 5412312 - DNA, 25 bp, Homo sapien
taccaatatcaagtacaaatgtcat

SEQ ID NO: 5412313 - DNA, 25 bp, Homo sapien
caaaccatttgaaaaacctggcaca

SEQ ID NO: 5412314 - DNA, 25 bp, Homo sapien
gagctgtcactgattgtcatgtcaa

SEQ ID NO: 5412315 - DNA, 25 bp, Homo sapien
cacagtttcaatgttaagggactca

SEQ ID NO: 5412316 - DNA, 25 bp, Homo sapien
aaaacctgagtgaaacaatagacca

SEQ ID NO: 5412317 - DNA, 25 bp, Homo sapien
aagggactcatatacttggatccag

SEQ ID NO: 5412318 - DNA, 25 bp, Homo sapien
taataacttttcatatctgcactgc

SEQ ID NO: 5412319 - DNA, 25 bp, Homo sapien
tagcagtcagatctagaattcagtt

SEQ ID NO: 5412320 - DNA, 25 bp, Homo sapien
gaatttccttgtggatagcagtcag

SEQ ID NO: 5412321 - DNA, 25 bp, Homo sapien
taaatagggatatgtagcctcaatc

SEQ ID NO: 5412322 - DNA, 25 bp, Homo sapien
caaagcctggtgataaagaataaac

SEQ ID NO: 5412323 - DNA, 25 bp, Homo sapien
gatctcggtgcaaagaaatcctgtc

SEQ ID NO: 5412324 - DNA, 25 bp, Homo sapien
catcaatgttttgcctgacaggtgc

SEQ ID NO: 5412325 - DNA, 25 bp, Homo sapien
taaagcagtgtttagcttccccacg

SEQ ID NO: 5412326 - DNA, 25 bp, Homo sapien
tcaggaggtcgagtgtctggtccaa

SEQ ID NO: 5412327 - DNA, 25 bp, Homo sapien
tattgaacacttacttctctttgca

SEQ ID NO: 5412328 - DNA, 25 bp, Homo sapien
tgaacacttacttctctttgcatta

SEQ ID NO: 5412329 - DNA, 25 bp, Homo sapien
ttcctctttggaatattgaacactt

SEQ ID NO: 5412330 - DNA, 25 bp, Homo sapien
cctctttggaatattgaacacttac

SEQ ID NO: 5412331 - DNA, 25 bp, Homo sapien
ttttactagtcgctttaggtgagcc

SEQ ID NO: 5412332 - DNA, 25 bp, Homo sapien
ccagaactttttatggtaatgtctt

SEQ ID NO: 5412333 - DNA, 25 bp, Homo sapien
aaaattactgcaccaagcttccaga

SEQ ID NO: 5412334 - DNA, 25 bp, Homo sapien
ttactagtcgctttaggtgagccat

SEQ ID NO: 5412335 - DNA, 25 bp, Homo sapien
gagaagaaggtatctttaatggtag

SEQ ID NO: 5412336 - DNA, 25 bp, Homo sapien
gacattaaaagcttgtcacttgaca

SEQ ID NO: 5412337 - DNA, 25 bp, Homo sapien
gaagaaggtatctttaatggtagta

SEQ ID NO: 5412338 - DNA, 25 bp, Homo sapien
tgtcacttgacaaataacagttatt

SEQ ID NO: 5412339 - DNA, 25 bp, Homo sapien
ggctccctagacacccagtcttgtg

SEQ ID NO: 5412340 - DNA, 25 bp, Homo sapien
acacaggtaacaacggctctgggct

SEQ ID NO: 5412341 - DNA, 25 bp, Homo sapien
ggccccgagtttggcatgtgtggat

SEQ ID NO: 5412342 - DNA, 25 bp, Homo sapien
ctgggacaaaggttgggcagctggc

SEQ ID NO: 5412343 - DNA, 25 bp, Homo sapien
gactaagggaatcgccaagaagcca

SEQ ID NO: 5412344 - DNA, 25 bp, Homo sapien
gaaagataggtcagattttacccag

SEQ ID NO: 5412345 - DNA, 25 bp, Homo sapien
cattagagttgctaccaaagaagtc

SEQ ID NO: 5412346 - DNA, 25 bp, Homo sapien
tgttgtacatcgctaaccttatgga

SEQ ID NO: 5412347 - DNA, 25 bp, Homo sapien
agcaactacatttggagtcacccaa

SEQ ID NO: 5412348 - DNA, 25 bp, Homo sapien
tggtccttgtaaattggcagaaaaa

SEQ ID NO: 5412349 - DNA, 25 bp, Homo sapien
agtttaggggagtctacagccattc

SEQ ID NO: 5412350 - DNA, 25 bp, Homo sapien
aaagatattacatctgggtcagcaa

SEQ ID NO: 5412351 - DNA, 25 bp, Homo sapien
tacagtcatgtcctggtatctgcag

SEQ ID NO: 5412352 - DNA, 25 bp, Homo sapien
aatgatgcagtacttggatttaacc

SEQ ID NO: 5412353 - DNA, 25 bp, Homo sapien
ggagattggttccacaacccctgtg

SEQ ID NO: 5412354 - DNA, 25 bp, Homo sapien
catctgcagatgttcatgtcgcttt

SEQ ID NO: 5412355 - DNA, 25 bp, Homo sapien
ggaaaatagtatgcacctcataggg

SEQ ID NO: 5412356 - DNA, 25 bp, Homo sapien
gtaaattgcttaaaatatgcctgcc

SEQ ID NO: 5412357 - DNA, 25 bp, Homo sapien
gaaacagaaggcgaactgtgcagga

SEQ ID NO: 5412358 - DNA, 25 bp, Homo sapien
gaattgtactgcttcgacttgagtc

SEQ ID NO: 5412359 - DNA, 25 bp, Homo sapien
ggctgctccctttaagctcctcaac

SEQ ID NO: 5412360 - DNA, 25 bp, Homo sapien
taaatgataaaaccccaagatcttg

SEQ ID NO: 5412361 - DNA, 25 bp, Homo sapien
agcaaaagctgcaagacatttcaat

SEQ ID NO: 5412362 - DNA, 25 bp, Homo sapien
tatactcaattgtggaatatgtata

SEQ ID NO: 5412363 - DNA, 25 bp, Homo sapien
aaagaactcttctccattgatcagg

SEQ ID NO: 5412364 - DNA, 25 bp, Homo sapien
tcaacaggtcctctaacgagatggt

SEQ ID NO: 5412365 - DNA, 25 bp, Homo sapien
cgcgatatgcaggtccttaagtcaa

SEQ ID NO: 5412366 - DNA, 25 bp, Homo sapien
caggcaaaccatagccgcgatatgc

SEQ ID NO: 5412367 - DNA, 25 bp, Homo sapien
tccccggctaggaaagttgcctggc

SEQ ID NO: 5412368 - DNA, 25 bp, Homo sapien
gccgcggtttgcagcctagaactgt

SEQ ID NO: 5412369 - DNA, 25 bp, Homo sapien
aaccatttaaatggctcggcggccg

SEQ ID NO: 5412370 - DNA, 25 bp, Homo sapien
aaagccatgtctttcgctgtcgcgg

SEQ ID NO: 5412371 - DNA, 25 bp, Homo sapien
ggaggagacaggcaacctgctagcc

SEQ ID NO: 5412372 - DNA, 25 bp, Homo sapien
aggcaacctgctagccggagtggaa

SEQ ID NO: 5412373 - DNA, 25 bp, Homo sapien
ggcgagagggtgtgaccgggctccc

SEQ ID NO: 5412374 - DNA, 25 bp, Homo sapien
tgcgaccctcccaagggcaagtccg

SEQ ID NO: 5412375 - DNA, 25 bp, Homo sapien
ggcaaccgacacactgctctcgaga

SEQ ID NO: 5412376 - DNA, 25 bp, Homo sapien
tgctctaacgcagcccaggggtacc

SEQ ID NO: 5412377 - DNA, 25 bp, Homo sapien
gctctcgagaccgtctccaaccggc

SEQ ID NO: 5412378 - DNA, 25 bp, Homo sapien
tgtccccaacacgtgaacccctgcg

SEQ ID NO: 5412379 - DNA, 25 bp, Homo sapien
gcagggcagggtggcgggaagcggc

SEQ ID NO: 5412380 - DNA, 25 bp, Homo sapien
gtgggcagggcagggtggcgggaag

SEQ ID NO: 5412381 - DNA, 25 bp, Homo sapien
agcggcggccgggcaggcgctggac

SEQ ID NO: 5412382 - DNA, 25 bp, Homo sapien
gggaagcggcggccgggcaggcgct

SEQ ID NO: 5412383 - DNA, 25 bp, Homo sapien
ccacagttgcggctcagtagagctc

SEQ ID NO: 5412384 - DNA, 25 bp, Homo sapien
tgctgtcgccacagttgcggctcag

SEQ ID NO: 5412385 - DNA, 25 bp, Homo sapien
tccggttgctgtcgccacagttgcg

SEQ ID NO: 5412386 - DNA, 25 bp, Homo sapien
gctgcgactccggttgctgtcgcca

SEQ ID NO: 5412387 - DNA, 25 bp, Homo sapien
gcagaaccgaggctcggcttccact

SEQ ID NO: 5412388 - DNA, 25 bp, Homo sapien
gaggcagaaccgaggctcggcttcc

SEQ ID NO: 5412389 - DNA, 25 bp, Homo sapien
tggagaggcagaaccgaggctcggc

SEQ ID NO: 5412390 - DNA, 25 bp, Homo sapien
accgaggctcggcttccacttggag

SEQ ID NO: 5412391 - DNA, 25 bp, Homo sapien
tgcgacgtcggcaggggcgaggccc

SEQ ID NO: 5412392 - DNA, 25 bp, Homo sapien
ctgcgacgtcggcaggggcgaggcc

SEQ ID NO: 5412393 - DNA, 25 bp, Homo sapien
gggcgaggccccacttccgcgcctg

SEQ ID NO: 5412394 - DNA, 25 bp, Homo sapien
gaggccccacttccgcgcctgcgcg

SEQ ID NO: 5412395 - DNA, 25 bp, Homo sapien
tcctcctcggttcgccaaaatgaag

SEQ ID NO: 5412396 - DNA, 25 bp, Homo sapien
ttctctctgagtggtcggcgaggct

SEQ ID NO: 5412397 - DNA, 25 bp, Homo sapien
caggtgagaaccttggatcgcgcgc

SEQ ID NO: 5412398 - DNA, 25 bp, Homo sapien
tgtagccagaacacagtctgctggg

SEQ ID NO: 5412399 - DNA, 25 bp, Homo sapien
gctggctcatgtggtttcttcgggc

SEQ ID NO: 5412400 - DNA, 25 bp, Homo sapien
tggctcatgtggtttcttcgggcag

SEQ ID NO: 5412401 - DNA, 25 bp, Homo sapien
ctggctcatgtggtttcttcgggca

SEQ ID NO: 5412402 - DNA, 25 bp, Homo sapien
tccgtttctgtacgcgggcgctctg

SEQ ID NO: 5412403 - DNA, 25 bp, Homo sapien
ttcagcgcagctagtggtttccgtt

SEQ ID NO: 5412404 - DNA, 25 bp, Homo sapien
cgcagctagtggtttccgtttctgt

SEQ ID NO: 5412405 - DNA, 25 bp, Homo sapien
tttccgtttctgtacgcgggcgctc

SEQ ID NO: 5412406 - DNA, 25 bp, Homo sapien
aagagcctttggtatttggcagagc

SEQ ID NO: 5412407 - DNA, 25 bp, Homo sapien
tttggtatttggcagagcctcgcca

SEQ ID NO: 5412408 - DNA, 25 bp, Homo sapien
tttggcagagcctcgccaatttggg

SEQ ID NO: 5412409 - DNA, 25 bp, Homo sapien
ttcttccaaagaagagcctttggta

SEQ ID NO: 5412410 - DNA, 25 bp, Homo sapien
ctgcaggtttgtttaaaagctcaac

SEQ ID NO: 5412411 - DNA, 25 bp, Homo sapien
cctggagagggcttgcttctactgc

SEQ ID NO: 5412412 - DNA, 25 bp, Homo sapien
actgcaggtttgtttaaaagctcaa

SEQ ID NO: 5412413 - DNA, 25 bp, Homo sapien
agagaacaacgcagactccaggaag

SEQ ID NO: 5412414 - DNA, 25 bp, Homo sapien
aagagaacaacgcagactccaggaa

SEQ ID NO: 5412415 - DNA, 25 bp, Homo sapien
tggaagagaacaacgcagactccag

SEQ ID NO: 5412416 - DNA, 25 bp, Homo sapien
ggaagagaacaacgcagactccagg

SEQ ID NO: 5412417 - DNA, 25 bp, Homo sapien
taagaacaagactaatacaagcctc

SEQ ID NO: 5412418 - DNA, 25 bp, Homo sapien
tcctggatcagttcaaatcaccttg

SEQ ID NO: 5412419 - DNA, 25 bp, Homo sapien
tcttgactccaataagggagagttg

SEQ ID NO: 5412420 - DNA, 25 bp, Homo sapien
taaggaattcaagccgtagaggatg

SEQ ID NO: 5412421 - DNA, 25 bp, Homo sapien
ggtcggaggtggatatcgacaatgt

SEQ ID NO: 5412422 - DNA, 25 bp, Homo sapien
agagagtcaggggtaagaccgtggg

SEQ ID NO: 5412423 - DNA, 25 bp, Homo sapien
tcggaggtggatatcgacaatgtac

SEQ ID NO: 5412424 - DNA, 25 bp, Homo sapien
aaggagaagagagtcaggggtaaga

SEQ ID NO: 5412425 - DNA, 25 bp, Homo sapien
tgagtaaaagccctgtagcctctca

SEQ ID NO: 5412426 - DNA, 25 bp, Homo sapien
gagtaaaagccctgtagcctctcac

SEQ ID NO: 5412427 - DNA, 25 bp, Homo sapien
ctgagtaaaagccctgtagcctctc

SEQ ID NO: 5412428 - DNA, 25 bp, Homo sapien
tgaatccaagggtgaataatttgtc

SEQ ID NO: 5412429 - DNA, 25 bp, Homo sapien
gaatccaagggtgaataatttgtca

SEQ ID NO: 5412430 - DNA, 25 bp, Homo sapien
aatccaagggtgaataatttgtcat

SEQ ID NO: 5412431 - DNA, 25 bp, Homo sapien
cttgaatccaagggtgaataatttg

SEQ ID NO: 5412432 - DNA, 25 bp, Homo sapien
gaaggcctataagaatgtgatgtcc

SEQ ID NO: 5412433 - DNA, 25 bp, Homo sapien
ggtacaatactaccagaagcacatg

SEQ ID NO: 5412434 - DNA, 25 bp, Homo sapien
tgttcctagagtggtaccctcccag

SEQ ID NO: 5412435 - DNA, 25 bp, Homo sapien
gaagaggatccgttaactatccaac

SEQ ID NO: 5412436 - DNA, 25 bp, Homo sapien
gaagctctcctagcggcgactcctt

SEQ ID NO: 5412437 - DNA, 25 bp, Homo sapien
tcacaaaatggctgctattgcccag

SEQ ID NO: 5412438 - DNA, 25 bp, Homo sapien
taatactcgaatgctcgagcgaggg

SEQ ID NO: 5412439 - DNA, 25 bp, Homo sapien
cggtgggtgtcatatcagggtcaca

SEQ ID NO: 5412440 - DNA, 25 bp, Homo sapien
tagttattagcctcatcttaagtgt

SEQ ID NO: 5412441 - DNA, 25 bp, Homo sapien
ccaagccatgcttgcacataatgca

SEQ ID NO: 5412442 - DNA, 25 bp, Homo sapien
cgtactttatctaatcttcacaaca

SEQ ID NO: 5412443 - DNA, 25 bp, Homo sapien
cacaacaacactgctaggtagttat

SEQ ID NO: 5412444 - DNA, 25 bp, Homo sapien
gacaacttcgactttagagtgtggt

SEQ ID NO: 5412445 - DNA, 25 bp, Homo sapien
cagtcaggatagctaagctgttctg

SEQ ID NO: 5412446 - DNA, 25 bp, Homo sapien
tccagtccatggaacctaacacttc

SEQ ID NO: 5412447 - DNA, 25 bp, Homo sapien
tagctatatcgagtacttccagtcc

SEQ ID NO: 5412448 - DNA, 25 bp, Homo sapien
taagagtatacagtaacgcatggca

SEQ ID NO: 5412449 - DNA, 25 bp, Homo sapien
tcggcactcagaacagtaactggaa

SEQ ID NO: 5412450 - DNA, 25 bp, Homo sapien
tgtactggctggaaatttagactct

SEQ ID NO: 5412451 - DNA, 25 bp, Homo sapien
cgcatggcattattgtgaggtacaa

SEQ ID NO: 5412452 - DNA, 25 bp, Homo sapien
gcaaagaatggaaggaccttctcca

SEQ ID NO: 5412453 - DNA, 25 bp, Homo sapien
tgcaaagaatggaaggaccttctcc

SEQ ID NO: 5412454 - DNA, 25 bp, Homo sapien
ctgcaaagaatggaaggaccttctc

SEQ ID NO: 5412455 - DNA, 25 bp, Homo sapien
caaagaatggaaggaccttctccaa

SEQ ID NO: 5412456 - DNA, 25 bp, Homo sapien
tgttctgagaaatggtgtcacggca

SEQ ID NO: 5412457 - DNA, 25 bp, Homo sapien
tcacggcagtaaaagatagtggcct

SEQ ID NO: 5412458 - DNA, 25 bp, Homo sapien
gatagtggccttcttcagagtcatg

SEQ ID NO: 5412459 - DNA, 25 bp, Homo sapien
cagagtcatgccttacagagcctcc

SEQ ID NO: 5412460 - DNA, 25 bp, Homo sapien
ctgtcagactcaagttggttctctt

SEQ ID NO: 5412461 - DNA, 25 bp, Homo sapien
tgtcagactcaagttggttctcttc

SEQ ID NO: 5412462 - DNA, 25 bp, Homo sapien
ttggctgtgttatatggtggaggtg

SEQ ID NO: 5412463 - DNA, 25 bp, Homo sapien
tgtgttatatggtggaggtgggtgc

SEQ ID NO: 5412464 - DNA, 25 bp, Homo sapien
gcttcctgaggctgctattcttctt

SEQ ID NO: 5412465 - DNA, 25 bp, Homo sapien
actgtgagccaaacttcttatttta

SEQ ID NO: 5412466 - DNA, 25 bp, Homo sapien
caagtttagatagctaataataatt

SEQ ID NO: 5412467 - DNA, 25 bp, Homo sapien
tcttcttgcacagcttgcagaactg

SEQ ID NO: 5412468 - DNA, 25 bp, Homo sapien
gactcttcaattagttacattttct

SEQ ID NO: 5412469 - DNA, 25 bp, Homo sapien
aaataaatctttggcattcccagtg

SEQ ID NO: 5412470 - DNA, 25 bp, Homo sapien
gataattgtcatccagactcttcaa

SEQ ID NO: 5412471 - DNA, 25 bp, Homo sapien
cagtgcctctgaagtgtaaactcca

SEQ ID NO: 5412472 - DNA, 25 bp, Homo sapien
gagaagggattgcatagttcagcat

SEQ ID NO: 5412473 - DNA, 25 bp, Homo sapien
cgtaccaccttttgagaatcactga

SEQ ID NO: 5412474 - DNA, 25 bp, Homo sapien
cctcaggagattcggatgtgacccc

SEQ ID NO: 5412475 - DNA, 25 bp, Homo sapien
taattgtgtaatatcttgctgctgt

SEQ ID NO: 5412476 - DNA, 25 bp, Homo sapien
caccagcttagttgtgatcaccatg

SEQ ID NO: 5412477 - DNA, 25 bp, Homo sapien
cactccgttacttggctgtcaggaa

SEQ ID NO: 5412478 - DNA, 25 bp, Homo sapien
taatggcagtctcaggtctaagtaa

SEQ ID NO: 5412479 - DNA, 25 bp, Homo sapien
ggaagagttcaagcctagtcttggt

SEQ ID NO: 5412480 - DNA, 25 bp, Homo sapien
tatggataaatacacagcaatggga

SEQ ID NO: 5412481 - DNA, 25 bp, Homo sapien
cgctgatgattagaaatactgagca

SEQ ID NO: 5412482 - DNA, 25 bp, Homo sapien
gctggatagtatgatttttgagaaa

SEQ ID NO: 5412483 - DNA, 25 bp, Homo sapien
tttcttatggataaatacacagcaa

SEQ ID NO: 5412484 - DNA, 25 bp, Homo sapien
cagtctgttgtataggtgttcataa

SEQ ID NO: 5412485 - DNA, 25 bp, Homo sapien
tgtggtatcagctgtaatgttgcct

SEQ ID NO: 5412486 - DNA, 25 bp, Homo sapien
cttggctgggttggttagcagttta

SEQ ID NO: 5412487 - DNA, 25 bp, Homo sapien
ctagttcccctaagtatattattgg

SEQ ID NO: 5412488 - DNA, 25 bp, Homo sapien
ggtaagtgtggacttatccttgtca

SEQ ID NO: 5412489 - DNA, 25 bp, Homo sapien
ttttgtttccaggtatagaatgccc

SEQ ID NO: 5412490 - DNA, 25 bp, Homo sapien
taggtctggtctagcagtgatgaat

SEQ ID NO: 5412491 - DNA, 25 bp, Homo sapien
gaatgcccttgatcatttcttgtag

SEQ ID NO: 5412492 - DNA, 25 bp, Homo sapien
tacgttgataactgtacctccggtg

SEQ ID NO: 5412493 - DNA, 25 bp, Homo sapien
tgcctcaacctgctaagtatttagg

SEQ ID NO: 5412494 - DNA, 25 bp, Homo sapien
tcaagttcctactctcaagcctgcc

SEQ ID NO: 5412495 - DNA, 25 bp, Homo sapien
taggactatagcctgcagtgtgctg

SEQ ID NO: 5412496 - DNA, 25 bp, Homo sapien
cagggaaagcctgccattagggtat

SEQ ID NO: 5412497 - DNA, 25 bp, Homo sapien
tagtgatatctacaaggagctgggt

SEQ ID NO: 5412498 - DNA, 25 bp, Homo sapien
tgacactcaggctcccagtagagag

SEQ ID NO: 5412499 - DNA, 25 bp, Homo sapien
ccctaggaggactgcacagatgcca

SEQ ID NO: 5412500 - DNA, 25 bp, Homo sapien
taaaatgaacttgtatatgtggaag

SEQ ID NO: 5412501 - DNA, 25 bp, Homo sapien
gaaggattgatgatctgtactgact

SEQ ID NO: 5412502 - DNA, 25 bp, Homo sapien
ccagatggttatgttctcctgatga

SEQ ID NO: 5412503 - DNA, 25 bp, Homo sapien
aaatgaacttgtatatgtggaagga

SEQ ID NO: 5412504 - DNA, 25 bp, Homo sapien
gaaagacatagctctcatcctgatg

SEQ ID NO: 5412505 - DNA, 25 bp, Homo sapien
tgccagcaagatatggttctactgc

SEQ ID NO: 5412506 - DNA, 25 bp, Homo sapien
tactgctggtgacctcatagaagca

SEQ ID NO: 5412507 - DNA, 25 bp, Homo sapien
gggatttcactccatcagttagcat

SEQ ID NO: 5412508 - DNA, 25 bp, Homo sapien
ccaggaagtacattcacaggtattc

SEQ ID NO: 5412509 - DNA, 25 bp, Homo sapien
tgtccagtctaatgactgtgatgac

SEQ ID NO: 5412510 - DNA, 25 bp, Homo sapien
gaagtacattcacaggtattcacat

SEQ ID NO: 5412511 - DNA, 25 bp, Homo sapien
ccagtctaatgactgtgatgactga

SEQ ID NO: 5412512 - DNA, 25 bp, Homo sapien
aaactattatccattggaaccacaa

SEQ ID NO: 5412513 - DNA, 25 bp, Homo sapien
cacaatattcttgtgaataacatca

SEQ ID NO: 5412514 - DNA, 25 bp, Homo sapien
cataaactattatccattggaacca

SEQ ID NO: 5412515 - DNA, 25 bp, Homo sapien
ctattatccattggaaccacaatat

SEQ ID NO: 5412516 - DNA, 25 bp, Homo sapien
gtgctgaaaatacttgaggtcaaac

SEQ ID NO: 5412517 - DNA, 25 bp, Homo sapien
gtttataataatgtagatctacaac

SEQ ID NO: 5412518 - DNA, 25 bp, Homo sapien
tgctgaaaatacttgaggtcaaaca

SEQ ID NO: 5412519 - DNA, 25 bp, Homo sapien
tgtagatctacaacatacttttaac

SEQ ID NO: 5412520 - DNA, 25 bp, Homo sapien
gtgatggtctgtttaagctccagag

SEQ ID NO: 5412521 - DNA, 25 bp, Homo sapien
tatcatcgatatggttggcgtggga

SEQ ID NO: 5412522 - DNA, 25 bp, Homo sapien
gagtcccttactctccttcctgcca

SEQ ID NO: 5412523 - DNA, 25 bp, Homo sapien
catgtgatggtctgtttaagctcca

SEQ ID NO: 5412524 - DNA, 25 bp, Homo sapien
ttcaagcaatgattctcctgcctca

SEQ ID NO: 5412525 - DNA, 25 bp, Homo sapien
attcaagcaatgattctcctgcctc

SEQ ID NO: 5412526 - DNA, 25 bp, Homo sapien
taagacaagttttgctcttgtcgcc

SEQ ID NO: 5412527 - DNA, 25 bp, Homo sapien
tttaagacaagttttgctcttgtcg

SEQ ID NO: 5412528 - DNA, 25 bp, Homo sapien
cacaagtaagtgacatcaggatcta

SEQ ID NO: 5412529 - DNA, 25 bp, Homo sapien
ttgccctgacccgaaataagtgagg

SEQ ID NO: 5412530 - DNA, 25 bp, Homo sapien
taagggttgccatcgagtctcatgt

SEQ ID NO: 5412531 - DNA, 25 bp, Homo sapien
taccactcggaagtaagacatttag

SEQ ID NO: 5412532 - DNA, 25 bp, Homo sapien
tatgctcttacacatcccctctgga

SEQ ID NO: 5412533 - DNA, 25 bp, Homo sapien
tgcacgaccacacgtggaggctctg

SEQ ID NO: 5412534 - DNA, 25 bp, Homo sapien
tggactaaaattacagaggactggg

SEQ ID NO: 5412535 - DNA, 25 bp, Homo sapien
gaatctctatcgctggccatcgaag

SEQ ID NO: 5412536 - DNA, 25 bp, Homo sapien
tagagacgaggatccccgtgttgcc

SEQ ID NO: 5412537 - DNA, 25 bp, Homo sapien
agagacgaggatccccgtgttgccc

SEQ ID NO: 5412538 - DNA, 25 bp, Homo sapien
tgggcttgtcacataaggcaatcaa

SEQ ID NO: 5412539 - DNA, 25 bp, Homo sapien
tccttcaaatactagttcagagcag

SEQ ID NO: 5412540 - DNA, 25 bp, Homo sapien
tgcttccatcctgagtgtacgtccc

SEQ ID NO: 5412541 - DNA, 25 bp, Homo sapien
tcaagactgcctagtttgagctcca

SEQ ID NO: 5412542 - DNA, 25 bp, Homo sapien
cactgaggagagtagggcaaaagca

SEQ ID NO: 5412543 - DNA, 25 bp, Homo sapien
tggacatgaacacggcctctttgag

SEQ ID NO: 5412544 - DNA, 25 bp, Homo sapien
tttaagggcactaatcgcactcgca

SEQ ID NO: 5412545 - DNA, 25 bp, Homo sapien
tgaaagcttctatgccagggtgctg

SEQ ID NO: 5412546 - DNA, 25 bp, Homo sapien
tttgaaacaacacagaatacaacaa

SEQ ID NO: 5412547 - DNA, 25 bp, Homo sapien
gaaacaacacagaatacaacaaaaa

SEQ ID NO: 5412548 - DNA, 25 bp, Homo sapien
tatttacagggagatttattccaat

SEQ ID NO: 5412549 - DNA, 25 bp, Homo sapien
ttatttacagggagatttattccaa

SEQ ID NO: 5412550 - DNA, 25 bp, Homo sapien
cgggtgtgatggcacatgcctttag

SEQ ID NO: 5412551 - DNA, 25 bp, Homo sapien
gccgggtgtgatggcacatgccttt

SEQ ID NO: 5412552 - DNA, 25 bp, Homo sapien
aagagatcaagcccctcctggctaa

SEQ ID NO: 5412553 - DNA, 25 bp, Homo sapien
tcaagagatcaagcccctcctggct

SEQ ID NO: 5412554 - DNA, 25 bp, Homo sapien
gatacagggtatttaattacctaga

SEQ ID NO: 5412555 - DNA, 25 bp, Homo sapien
gtcaccaaatctgtacccaatcaaa

SEQ ID NO: 5412556 - DNA, 25 bp, Homo sapien
tagtctttaccacagagtcaccaaa

SEQ ID NO: 5412557 - DNA, 25 bp, Homo sapien
aaaacagagtcaaatagaccagctc

SEQ ID NO: 5412558 - DNA, 25 bp, Homo sapien
tttcacatagtacttctcttgatgt

SEQ ID NO: 5412559 - DNA, 25 bp, Homo sapien
gtacttctcttgatgtacagcagca

SEQ ID NO: 5412560 - DNA, 25 bp, Homo sapien
tagtacttctcttgatgtacagcag

SEQ ID NO: 5412561 - DNA, 25 bp, Homo sapien
cacatagtacttctcttgatgtaca

SEQ ID NO: 5412562 - DNA, 25 bp, Homo sapien
gtatacttctaataacaaagcactg

SEQ ID NO: 5412563 - DNA, 25 bp, Homo sapien
tacttctaataacaaagcactgagc

SEQ ID NO: 5412564 - DNA, 25 bp, Homo sapien
agggtatacttctaataacaaagca

SEQ ID NO: 5412565 - DNA, 25 bp, Homo sapien
tctaataacaaagcactgagctcaa

SEQ ID NO: 5412566 - DNA, 25 bp, Homo sapien
ctgttttgaacaggaagaactgaaa

SEQ ID NO: 5412567 - DNA, 25 bp, Homo sapien
aacaggaagaactgaaagttagatt

SEQ ID NO: 5412568 - DNA, 25 bp, Homo sapien
tcatttcctgttaaaccaacaccta

SEQ ID NO: 5412569 - DNA, 25 bp, Homo sapien
tctttcatttcctgttaaaccaaca

SEQ ID NO: 5412570 - DNA, 25 bp, Homo sapien
gacgcacgggccttatcaagtatat

SEQ ID NO: 5412571 - DNA, 25 bp, Homo sapien
gccttatcaagtatatcctttctga

SEQ ID NO: 5412572 - DNA, 25 bp, Homo sapien
ttggataagttggatgtgcttcaag

SEQ ID NO: 5412573 - DNA, 25 bp, Homo sapien
tcaaggtcttaaagacgcacgggcc

SEQ ID NO: 5412574 - DNA, 25 bp, Homo sapien
acatatgtcaattgaatccacatat

SEQ ID NO: 5412575 - DNA, 25 bp, Homo sapien
catatgtcaattgaatccacatatc

SEQ ID NO: 5412576 - DNA, 25 bp, Homo sapien
tgacatatgtcaattgaatccacat

SEQ ID NO: 5412577 - DNA, 25 bp, Homo sapien
atatgtcaattgaatccacatatct

SEQ ID NO: 5412578 - DNA, 25 bp, Homo sapien
taaactaggctagggtgggaatcaa

SEQ ID NO: 5412579 - DNA, 25 bp, Homo sapien
gacagagcacataggagagcgacac

SEQ ID NO: 5412580 - DNA, 25 bp, Homo sapien
tgggaatcaaggacactctcagaca

SEQ ID NO: 5412581 - DNA, 25 bp, Homo sapien
cagcagctgtgcacgcagtaaacaa

SEQ ID NO: 5412582 - DNA, 25 bp, Homo sapien
ggaaactaacagatgagggaagacc

SEQ ID NO: 5412583 - DNA, 25 bp, Homo sapien
cagcagttagtatgaggttgactca

SEQ ID NO: 5412584 - DNA, 25 bp, Homo sapien
caagtctagtatagtatgagaacag

SEQ ID NO: 5412585 - DNA, 25 bp, Homo sapien
gaagacctgagctaacagcagttag

SEQ ID NO: 5412586 - DNA, 25 bp, Homo sapien
catttatggtacaacaggtcagagg

SEQ ID NO: 5412587 - DNA, 25 bp, Homo sapien
gagactcggaatccaatcttaggaa

SEQ ID NO: 5412588 - DNA, 25 bp, Homo sapien
acactattttagagcttccaggaga

SEQ ID NO: 5412589 - DNA, 25 bp, Homo sapien
gatggcttgaagacaagtcctagga

SEQ ID NO: 5412590 - DNA, 25 bp, Homo sapien
aaatctaggtgattgccaaactcac

SEQ ID NO: 5412591 - DNA, 25 bp, Homo sapien
tccatgccatctcatagttcaaggc

SEQ ID NO: 5412592 - DNA, 25 bp, Homo sapien
ggcagcatctgtatatgcttgctct

SEQ ID NO: 5412593 - DNA, 25 bp, Homo sapien
tactgccggatttgtccgattgcta

SEQ ID NO: 5412594 - DNA, 25 bp, Homo sapien
gatttgtccgattgctatatttcca

SEQ ID NO: 5412595 - DNA, 25 bp, Homo sapien
cattttcgcaatacgcttcagctgg

SEQ ID NO: 5412596 - DNA, 25 bp, Homo sapien
gcaccgttttaacaggtcttctgcc

SEQ ID NO: 5412597 - DNA, 25 bp, Homo sapien
tctattatgacgcaggcaccgtttt

SEQ ID NO: 5412598 - DNA, 25 bp, Homo sapien
tcttcagcatcaatagcattccaat

SEQ ID NO: 5412599 - DNA, 25 bp, Homo sapien
tcaagatcatataagccgttgccat

SEQ ID NO: 5412600 - DNA, 25 bp, Homo sapien
tttcaagatcatataagccgttgcc

SEQ ID NO: 5412601 - DNA, 25 bp, Homo sapien
ctgtttcaagatcatataagccgtt

SEQ ID NO: 5412602 - DNA, 25 bp, Homo sapien
tgtttcaagatcatataagccgttg

SEQ ID NO: 5412603 - DNA, 25 bp, Homo sapien
cccaagagcgctgggatatgctcct

SEQ ID NO: 5412604 - DNA, 25 bp, Homo sapien
tcccaagagcgctgggatatgctcc

SEQ ID NO: 5412605 - DNA, 25 bp, Homo sapien
ccaagagcgctgggatatgctcctt

SEQ ID NO: 5412606 - DNA, 25 bp, Homo sapien
gaccctgaacagtctgaggttttag

SEQ ID NO: 5412607 - DNA, 25 bp, Homo sapien
tatgcgaagctgtacgtgaccctga

SEQ ID NO: 5412608 - DNA, 25 bp, Homo sapien
gatttctgtttggtagccattaagc

SEQ ID NO: 5412609 - DNA, 25 bp, Homo sapien
tctgctgttcttactgccagttgca

SEQ ID NO: 5412610 - DNA, 25 bp, Homo sapien
cagatctctatcatattataaaggg

SEQ ID NO: 5412611 - DNA, 25 bp, Homo sapien
cacgatctttccgagctttattaaa

SEQ ID NO: 5412612 - DNA, 25 bp, Homo sapien
ctttattaaaatgtcgaagggcatc

SEQ ID NO: 5412613 - DNA, 25 bp, Homo sapien
gcattttggccccagtcacgatctt

SEQ ID NO: 5412614 - DNA, 25 bp, Homo sapien
gctctggagttacgtttctcagcca

SEQ ID NO: 5412615 - DNA, 25 bp, Homo sapien
aagatacagtcctttacaatactga

SEQ ID NO: 5412616 - DNA, 25 bp, Homo sapien
cttcttaggagatcaatcaaacgag

SEQ ID NO: 5412617 - DNA, 25 bp, Homo sapien
gaaaaatcttgggacatcctcgagt

SEQ ID NO: 5412618 - DNA, 25 bp, Homo sapien
taccgatttaattgcacaggacaag

SEQ ID NO: 5412619 - DNA, 25 bp, Homo sapien
tacagtttgggctaggctggtcaca

SEQ ID NO: 5412620 - DNA, 25 bp, Homo sapien
caagttcactgtcggtctctgagaa

SEQ ID NO: 5412621 - DNA, 25 bp, Homo sapien
gctgtatggccaactagatgatcta

SEQ ID NO: 5412622 - DNA, 25 bp, Homo sapien
taaaaagggcacaataagaatatgg

SEQ ID NO: 5412623 - DNA, 25 bp, Homo sapien
tacaggatgtcaaactaatacaggc

SEQ ID NO: 5412624 - DNA, 25 bp, Homo sapien
gacacacaatcttgggtccagagat

SEQ ID NO: 5412625 - DNA, 25 bp, Homo sapien
taatattgactgtaggagtgctaca

SEQ ID NO: 5412626 - DNA, 25 bp, Homo sapien
tgagatgtggcaagcatgcagtgct

SEQ ID NO: 5412627 - DNA, 25 bp, Homo sapien
ttactagacggacaaaggcattcca

SEQ ID NO: 5412628 - DNA, 25 bp, Homo sapien
cattccaagtagcagaaggcatgcg

SEQ ID NO: 5412629 - DNA, 25 bp, Homo sapien
cataggagttgacctttgagcagcc

SEQ ID NO: 5412630 - DNA, 25 bp, Homo sapien
ttgctccgaggcaaatctaggatgg

SEQ ID NO: 5412631 - DNA, 25 bp, Homo sapien
tgcatccaggaaaaccctttgctcc

SEQ ID NO: 5412632 - DNA, 25 bp, Homo sapien
ttctgttagcatgggaagtcctgca

SEQ ID NO: 5412633 - DNA, 25 bp, Homo sapien
tggttggtcatgctacccagcacca

SEQ ID NO: 5412634 - DNA, 25 bp, Homo sapien
cactgcttgttcatagtcttgtttt

SEQ ID NO: 5412635 - DNA, 25 bp, Homo sapien
tgaaacactgcttgttcatagtctt

SEQ ID NO: 5412636 - DNA, 25 bp, Homo sapien
aaacactgcttgttcatagtcttgt

SEQ ID NO: 5412637 - DNA, 25 bp, Homo sapien
aaagctgctgtaaatgaaacactgc

SEQ ID NO: 5412638 - DNA, 25 bp, Homo sapien
tataatcgtgccagttccaacataa

SEQ ID NO: 5412639 - DNA, 25 bp, Homo sapien
gtagagcacactgccgcaggcagga

SEQ ID NO: 5412640 - DNA, 25 bp, Homo sapien
ggtagcagcttcgttatcctggtca

SEQ ID NO: 5412641 - DNA, 25 bp, Homo sapien
cagggtcatcttgtgccaggtataa

SEQ ID NO: 5412642 - DNA, 25 bp, Homo sapien
aactgcatctggctgttccatctga

SEQ ID NO: 5412643 - DNA, 25 bp, Homo sapien
tgtttcgcagtgaaccagagcctct

SEQ ID NO: 5412644 - DNA, 25 bp, Homo sapien
tctgaacacgttttagtacccgagc

SEQ ID NO: 5412645 - DNA, 25 bp, Homo sapien
ttttcatagtctcgctgagcaacag

SEQ ID NO: 5412646 - DNA, 25 bp, Homo sapien
tgcatgtgctcctagtaaaaaacct

SEQ ID NO: 5412647 - DNA, 25 bp, Homo sapien
caattggtttagatagaatgatctc

SEQ ID NO: 5412648 - DNA, 25 bp, Homo sapien
cagtatgtcagtatatgtaccttta

SEQ ID NO: 5412649 - DNA, 25 bp, Homo sapien
tgttttagattatacacatgcatac

SEQ ID NO: 5412650 - DNA, 25 bp, Homo sapien
cattatttcaagtccacatggaacc

SEQ ID NO: 5412651 - DNA, 25 bp, Homo sapien
ccggtccaagaagcaatcaaagtga

SEQ ID NO: 5412652 - DNA, 25 bp, Homo sapien
tcaaagtatgtcttggcacagcaga

SEQ ID NO: 5412653 - DNA, 25 bp, Homo sapien
cagcagaagtgtactagaagtcagt

SEQ ID NO: 5412654 - DNA, 25 bp, Homo sapien
gaccacactcacagacaaatgtgtt

SEQ ID NO: 5412655 - DNA, 25 bp, Homo sapien
atgaccacactcacagacaaatgtg

SEQ ID NO: 5412656 - DNA, 25 bp, Homo sapien
ccacactcacagacaaatgtgttta

SEQ ID NO: 5412657 - DNA, 25 bp, Homo sapien
ctcatgaccacactcacagacaaat

SEQ ID NO: 5412658 - DNA, 25 bp, Homo sapien
tgacaacgtccatcctccatgagag

SEQ ID NO: 5412659 - DNA, 25 bp, Homo sapien
aagaacttgacaacgtccatcctcc

SEQ ID NO: 5412660 - DNA, 25 bp, Homo sapien
acttgacaacgtccatcctccatga

SEQ ID NO: 5412661 - DNA, 25 bp, Homo sapien
gcagtgatcgcatcaccaagttttt

SEQ ID NO: 5412662 - DNA, 25 bp, Homo sapien
attttaataagagctcagccaggtc

SEQ ID NO: 5412663 - DNA, 25 bp, Homo sapien
ccagagcatgctgaagaactttttc

SEQ ID NO: 5412664 - DNA, 25 bp, Homo sapien
tcagagcagcttcatagtaagtgat

SEQ ID NO: 5412665 - DNA, 25 bp, Homo sapien
tcagccaggtcatagcaaagataat

SEQ ID NO: 5412666 - DNA, 25 bp, Homo sapien
tgctttgcccattttgcttgccaat

SEQ ID NO: 5412667 - DNA, 25 bp, Homo sapien
caatgttccatctttcgggttctga

SEQ ID NO: 5412668 - DNA, 25 bp, Homo sapien
gatttaatgcttgctcatatgctac

SEQ ID NO: 5412669 - DNA, 25 bp, Homo sapien
cattgagtagttatgagttttgata

SEQ ID NO: 5412670 - DNA, 25 bp, Homo sapien
taaaaaatagcataactgggtccca

SEQ ID NO: 5412671 - DNA, 25 bp, Homo sapien
gaagactcctaacatacctctggta

SEQ ID NO: 5412672 - DNA, 25 bp, Homo sapien
agaaaacaccaccttagtctgtagc

SEQ ID NO: 5412673 - DNA, 25 bp, Homo sapien
aacaatatgtggactaagagacacc

SEQ ID NO: 5412674 - DNA, 25 bp, Homo sapien
ttcatgtatgcatcaccaaggagaa

SEQ ID NO: 5412675 - DNA, 25 bp, Homo sapien
tattcatgtatgcatcaccaaggag

SEQ ID NO: 5412676 - DNA, 25 bp, Homo sapien
tcatgtatgcatcaccaaggagaag

SEQ ID NO: 5412677 - DNA, 25 bp, Homo sapien
catgtatgcatcaccaaggagaaga

SEQ ID NO: 5412678 - DNA, 25 bp, Homo sapien
catcttgagctctgatactcatggc

SEQ ID NO: 5412679 - DNA, 25 bp, Homo sapien
cccaaattgtttatgctagatcagc

SEQ ID NO: 5412680 - DNA, 25 bp, Homo sapien
tacagatgatgttaagagttgcagc

SEQ ID NO: 5412681 - DNA, 25 bp, Homo sapien
gctgatgtgtcagatcttcctgaaa

SEQ ID NO: 5412682 - DNA, 25 bp, Homo sapien
tcggctgtaacattctgaaggatgc

SEQ ID NO: 5412683 - DNA, 25 bp, Homo sapien
aaagcccgttcaatatctccttggg

SEQ ID NO: 5412684 - DNA, 25 bp, Homo sapien
aatggtaacccgcacttcttcagat

SEQ ID NO: 5412685 - DNA, 25 bp, Homo sapien
caaggtctgcattagcaatggtaac

SEQ ID NO: 5412686 - DNA, 25 bp, Homo sapien
agctgctacagagggtcactgctac

SEQ ID NO: 5412687 - DNA, 25 bp, Homo sapien
tattccctccaccagaacactgttg

SEQ ID NO: 5412688 - DNA, 25 bp, Homo sapien
taatgaagagctgtacacactggct

SEQ ID NO: 5412689 - DNA, 25 bp, Homo sapien
gggagattttctcataacgcagaat

SEQ ID NO: 5412690 - DNA, 25 bp, Homo sapien
tcaagaaagatcgataaacgatggc

SEQ ID NO: 5412691 - DNA, 25 bp, Homo sapien
tgctctccatttaagcggtgaacgt

SEQ ID NO: 5412692 - DNA, 25 bp, Homo sapien
aaacgatggcttgtatcaacttcag

SEQ ID NO: 5412693 - DNA, 25 bp, Homo sapien
caaatggtataaaggatagtctctc

SEQ ID NO: 5412694 - DNA, 25 bp, Homo sapien
cctgagctagcagcagatgagcatc

SEQ ID NO: 5412695 - DNA, 25 bp, Homo sapien
tcttgagacaagtaaacctgagcta

SEQ ID NO: 5412696 - DNA, 25 bp, Homo sapien
aatcatagctcagacaaagttcaag

SEQ ID NO: 5412697 - DNA, 25 bp, Homo sapien
cagcataagagggattgtgttctaa

SEQ ID NO: 5412698 - DNA, 25 bp, Homo sapien
cattgttataattcaaatgattaag

SEQ ID NO: 5412699 - DNA, 25 bp, Homo sapien
aaaacaatgcattgttataattcaa

SEQ ID NO: 5412700 - DNA, 25 bp, Homo sapien
aattcaaatgattaagaaatggaga

SEQ ID NO: 5412701 - DNA, 25 bp, Homo sapien
caatgcattgttataattcaaatga

SEQ ID NO: 5412702 - DNA, 25 bp, Homo sapien
tttcattagggcctgaaatctggca

SEQ ID NO: 5412703 - DNA, 25 bp, Homo sapien
gcattttcccagcaattcgcttaag

SEQ ID NO: 5412704 - DNA, 25 bp, Homo sapien
gaacacaaccatggattaatgactg

SEQ ID NO: 5412705 - DNA, 25 bp, Homo sapien
taaagtggtataactgcattttccc

SEQ ID NO: 5412706 - DNA, 25 bp, Homo sapien
gctattaggaagactgtttgcagaa

SEQ ID NO: 5412707 - DNA, 25 bp, Homo sapien
tatttcacttttgctattaggaaga

SEQ ID NO: 5412708 - DNA, 25 bp, Homo sapien
acagttcttactacagtctccagga

SEQ ID NO: 5412709 - DNA, 25 bp, Homo sapien
cctggaacagttcttactacagtct

SEQ ID NO: 5412710 - DNA, 25 bp, Homo sapien
gagaagtggacaaagaggttgccca

SEQ ID NO: 5412711 - DNA, 25 bp, Homo sapien
gtggacaaagaggttgcccaggact

SEQ ID NO: 5412712 - DNA, 25 bp, Homo sapien
aagtggacaaagaggttgcccagga

SEQ ID NO: 5412713 - DNA, 25 bp, Homo sapien
ctgagaagtggacaaagaggttgcc

SEQ ID NO: 5412714 - DNA, 25 bp, Homo sapien
tataatggctgtctacccaaccaac

SEQ ID NO: 5412715 - DNA, 25 bp, Homo sapien
cagagtcaaggcagtaagtgttcga

SEQ ID NO: 5412716 - DNA, 25 bp, Homo sapien
cccggcatgttttagaccctcaaag

SEQ ID NO: 5412717 - DNA, 25 bp, Homo sapien
tatcccctagagtattgtaaaccag

SEQ ID NO: 5412718 - DNA, 25 bp, Homo sapien
taagatgccgatatagtctaatgca

SEQ ID NO: 5412719 - DNA, 25 bp, Homo sapien
gaacttcattttagtgtgtccagac

SEQ ID NO: 5412720 - DNA, 25 bp, Homo sapien
tccagacatgggatagacattgaca

SEQ ID NO: 5412721 - DNA, 25 bp, Homo sapien
taaacgcatccttgaaagtaagtcc

SEQ ID NO: 5412722 - DNA, 25 bp, Homo sapien
catggcaagaactgcatgtaaatag

SEQ ID NO: 5412723 - DNA, 25 bp, Homo sapien
gctcagatactccataacaatttct

SEQ ID NO: 5412724 - DNA, 25 bp, Homo sapien
caatttctaacaagaaatcaggatt

SEQ ID NO: 5412725 - DNA, 25 bp, Homo sapien
tcaaaatactgtatgccaagaggca

SEQ ID NO: 5412726 - DNA, 25 bp, Homo sapien
cctgtaattgcccttctatcaactg

SEQ ID NO: 5412727 - DNA, 25 bp, Homo sapien
gcccttctatcaactgacattggat

SEQ ID NO: 5412728 - DNA, 25 bp, Homo sapien
gcagattttccaatggattgctgga

SEQ ID NO: 5412729 - DNA, 25 bp, Homo sapien
cgcagattttccaatggattgctgg

SEQ ID NO: 5412730 - DNA, 25 bp, Homo sapien
gcggtcttataccacttcagtgcct

SEQ ID NO: 5412731 - DNA, 25 bp, Homo sapien
ctcatcaagtgtcatggcggtctta

SEQ ID NO: 5412732 - DNA, 25 bp, Homo sapien
gttctgtagcaaattctgattgctg

SEQ ID NO: 5412733 - DNA, 25 bp, Homo sapien
tccttgtaaaatcatttggtatcca

SEQ ID NO: 5412734 - DNA, 25 bp, Homo sapien
ctctctcaagtaacgtttgaatttt

SEQ ID NO: 5412735 - DNA, 25 bp, Homo sapien
agctctctcaagtaacgtttgaatt

SEQ ID NO: 5412736 - DNA, 25 bp, Homo sapien
gctctctcaagtaacgtttgaattt

SEQ ID NO: 5412737 - DNA, 25 bp, Homo sapien
tatagaaaagttgagcattctgtgg

SEQ ID NO: 5412738 - DNA, 25 bp, Homo sapien
tgaaggcgagtgtaatgttatagaa

SEQ ID NO: 5412739 - DNA, 25 bp, Homo sapien
gttatagaaaagttgagcattctgt

SEQ ID NO: 5412740 - DNA, 25 bp, Homo sapien
agttctgctgaaggcgagtgtaatg

SEQ ID NO: 5412741 - DNA, 25 bp, Homo sapien
ctctacacacatagtagagtgcctg

SEQ ID NO: 5412742 - DNA, 25 bp, Homo sapien
tctctatatccccctctctacacac

SEQ ID NO: 5412743 - DNA, 25 bp, Homo sapien
tacacacatagtagagtgcctgcat

SEQ ID NO: 5412744 - DNA, 25 bp, Homo sapien
cctctctacacacatagtagagtgc

SEQ ID NO: 5412745 - DNA, 25 bp, Homo sapien
attttggctatcttggagcagcaac

SEQ ID NO: 5412746 - DNA, 25 bp, Homo sapien
cacattttggctatcttggagcagc

SEQ ID NO: 5412747 - DNA, 25 bp, Homo sapien
tccacattttggctatcttggagca

SEQ ID NO: 5412748 - DNA, 25 bp, Homo sapien
cattttggctatcttggagcagcaa

SEQ ID NO: 5412749 - DNA, 25 bp, Homo sapien
atgtgccacattcacccagctgcat

SEQ ID NO: 5412750 - DNA, 25 bp, Homo sapien
cctcgatgacccacaaaaatgtgag

SEQ ID NO: 5412751 - DNA, 25 bp, Homo sapien
caagccttgcctgagatcagcagac

SEQ ID NO: 5412752 - DNA, 25 bp, Homo sapien
ggtgacaagagtccaaactgcaatg

SEQ ID NO: 5412753 - DNA, 25 bp, Homo sapien
taaaagttagacatgcttgcaagtc

SEQ ID NO: 5412754 - DNA, 25 bp, Homo sapien
gacgatcttagcaaagatgttacca

SEQ ID NO: 5412755 - DNA, 25 bp, Homo sapien
tcggccctgagatagccattaatat

SEQ ID NO: 5412756 - DNA, 25 bp, Homo sapien
gatgttaccaagatgttcggccctg

SEQ ID NO: 5412757 - DNA, 25 bp, Homo sapien
tctatcctctagtgcaagtagtggg

SEQ ID NO: 5412758 - DNA, 25 bp, Homo sapien
tgttattctggtagttcaggccaaa

SEQ ID NO: 5412759 - DNA, 25 bp, Homo sapien
cagtaacctcatgcttcagaagaaa

SEQ ID NO: 5412760 - DNA, 25 bp, Homo sapien
caaaatgctacaggtccagattcca

SEQ ID NO: 5412761 - DNA, 25 bp, Homo sapien
gaaaattcacgattatctggttcac

SEQ ID NO: 5412762 - DNA, 25 bp, Homo sapien
caggaaggaagctcggaaaattcac

SEQ ID NO: 5412763 - DNA, 25 bp, Homo sapien
gtctggtcccaatcctgcaaggcta

SEQ ID NO: 5412764 - DNA, 25 bp, Homo sapien
ttctggcgcatctcaaggcattgtg

SEQ ID NO: 5412765 - DNA, 25 bp, Homo sapien
taatatcaagccatgctttcaaaac

SEQ ID NO: 5412766 - DNA, 25 bp, Homo sapien
caagccatgctttcaaaacgtgtcc

SEQ ID NO: 5412767 - DNA, 25 bp, Homo sapien
ttacccagcagagcaaaagtatcat

SEQ ID NO: 5412768 - DNA, 25 bp, Homo sapien
tatcaagccatgctttcaaaacgtg

SEQ ID NO: 5412769 - DNA, 25 bp, Homo sapien
ctttatcatggcgaccaatgtgcca

SEQ ID NO: 5412770 - DNA, 25 bp, Homo sapien
gtgccataaaaataagcctgcatgg

SEQ ID NO: 5412771 - DNA, 25 bp, Homo sapien
tttacgttgttccttcactctggca

SEQ ID NO: 5412772 - DNA, 25 bp, Homo sapien
tcattctgtcaatatattcccttgc

SEQ ID NO: 5412773 - DNA, 25 bp, Homo sapien
tgatcagactgaatgacttggtaac

SEQ ID NO: 5412774 - DNA, 25 bp, Homo sapien
tgaatttacacccttgtcaggaaga

SEQ ID NO: 5412775 - DNA, 25 bp, Homo sapien
ggaaaaaatgtcctaagcattgcat

SEQ ID NO: 5412776 - DNA, 25 bp, Homo sapien
tgccagaggatataaggaacacgaa

SEQ ID NO: 5412777 - DNA, 25 bp, Homo sapien
cattttatgggcatatatcagtgca

SEQ ID NO: 5412778 - DNA, 25 bp, Homo sapien
agagaacaaagtgatacatcttgtt

SEQ ID NO: 5412779 - DNA, 25 bp, Homo sapien
ttttaatagcctcaaattctcgaag

SEQ ID NO: 5412780 - DNA, 25 bp, Homo sapien
caaattctcgaagagcttcttgagt

SEQ ID NO: 5412781 - DNA, 25 bp, Homo sapien
ggatcacttccatacctcttaattc

SEQ ID NO: 5412782 - DNA, 25 bp, Homo sapien
tgataaaacctgaagactggatcac

SEQ ID NO: 5412783 - DNA, 25 bp, Homo sapien
cactggcaaccagtaatacatgatg

SEQ ID NO: 5412784 - DNA, 25 bp, Homo sapien
cttccattaatgtgccataggcatg

SEQ ID NO: 5412785 - DNA, 25 bp, Homo sapien
tagagaagaccaacatccgaaaagt

SEQ ID NO: 5412786 - DNA, 25 bp, Homo sapien
tatcagcctttcttaagttgaccgt

SEQ ID NO: 5412787 - DNA, 25 bp, Homo sapien
tgagtcagtgataaacagagaagac

SEQ ID NO: 5412788 - DNA, 25 bp, Homo sapien
tctaatggacatacagtaacccttc

SEQ ID NO: 5412789 - DNA, 25 bp, Homo sapien
tctcgccgcagcctaaaggaagacg

SEQ ID NO: 5412790 - DNA, 25 bp, Homo sapien
ctagcctcccggagcgctctagcgc

SEQ ID NO: 5412791 - DNA, 25 bp, Homo sapien
aagacgcagaattcagctcccctag

SEQ ID NO: 5412792 - DNA, 25 bp, Homo sapien
gctctggggattgtctcgccgcagc

SEQ ID NO: 5412793 - DNA, 25 bp, Homo sapien
gtttgtctggaggcggattcccgca

SEQ ID NO: 5412794 - DNA, 25 bp, Homo sapien
ttgtctggaggcggattcccgcagt

SEQ ID NO: 5412795 - DNA, 25 bp, Homo sapien
tgtctggaggcggattcccgcagtg

SEQ ID NO: 5412796 - DNA, 25 bp, Homo sapien
tttgtctggaggcggattcccgcag

SEQ ID NO: 5412797 - DNA, 25 bp, Homo sapien
tgccggcgcgggaaaaagcggtcaa

SEQ ID NO: 5412798 - DNA, 25 bp, Homo sapien
caactttcacgtgggcaagttgttt

SEQ ID NO: 5412799 - DNA, 25 bp, Homo sapien
tcacgtgggcaagttgttttacggc

SEQ ID NO: 5412800 - DNA, 25 bp, Homo sapien
caagttgttttacggccacaaggtg

SEQ ID NO: 5412801 - DNA, 25 bp, Homo sapien
tcatgaagtctttaaggatcaccat

SEQ ID NO: 5412802 - DNA, 25 bp, Homo sapien
tttcatgaagtctttaaggatcacc

SEQ ID NO: 5412803 - DNA, 25 bp, Homo sapien
aaatttcatgaagtctttaaggatc

SEQ ID NO: 5412804 - DNA, 25 bp, Homo sapien
atttcatgaagtctttaaggatcac

SEQ ID NO: 5412805 - DNA, 25 bp, Homo sapien
ttcttttgccgaattagaaagataa

SEQ ID NO: 5412806 - DNA, 25 bp, Homo sapien
tttcttttgccgaattagaaagata

SEQ ID NO: 5412807 - DNA, 25 bp, Homo sapien
caacagacgtgtggagatgcagcac

SEQ ID NO: 5412808 - DNA, 25 bp, Homo sapien
gaatatgcaagtacaaaagtccaac

SEQ ID NO: 5412809 - DNA, 25 bp, Homo sapien
tgttgatggctgatagggatagact

SEQ ID NO: 5412810 - DNA, 25 bp, Homo sapien
cagcaccaactcagcaaaaaggctg

SEQ ID NO: 5412811 - DNA, 25 bp, Homo sapien
tcactgaattctaaaaatctgccag

SEQ ID NO: 5412812 - DNA, 25 bp, Homo sapien
tctgccagatacgatgaagcctgaa

SEQ ID NO: 5412813 - DNA, 25 bp, Homo sapien
ccagatacgatgaagcctgaataaa

SEQ ID NO: 5412814 - DNA, 25 bp, Homo sapien
aaaatctgccagatacgatgaagcc

SEQ ID NO: 5412815 - DNA, 25 bp, Homo sapien
gaacaatctagagcagcattactcc

SEQ ID NO: 5412816 - DNA, 25 bp, Homo sapien
taaacatgtctgtacagtctggcta

SEQ ID NO: 5412817 - DNA, 25 bp, Homo sapien
gcattttccagcatgcagttcacga

SEQ ID NO: 5412818 - DNA, 25 bp, Homo sapien
tcagttagtgcaggtactaccagaa

SEQ ID NO: 5412819 - DNA, 25 bp, Homo sapien
aaacatgcattgatagcatccaaac

SEQ ID NO: 5412820 - DNA, 25 bp, Homo sapien
cttgactttaccactgacatatggt

SEQ ID NO: 5412821 - DNA, 25 bp, Homo sapien
tgagagaaaccagatacagcagcat

SEQ ID NO: 5412822 - DNA, 25 bp, Homo sapien
cagatacagcagcatggtaatataa

SEQ ID NO: 5412823 - DNA, 25 bp, Homo sapien
aaaccacgactttgtgtagctggga

SEQ ID NO: 5412824 - DNA, 25 bp, Homo sapien
aattacccctcccagaaatatggtg

SEQ ID NO: 5412825 - DNA, 25 bp, Homo sapien
cagtgtcaaccttgctgagagccga

SEQ ID NO: 5412826 - DNA, 25 bp, Homo sapien
gatctctaagtgcagcatgccctca

SEQ ID NO: 5412827 - DNA, 25 bp, Homo sapien
gaacagtaacctcctgtcaaggtca

SEQ ID NO: 5412828 - DNA, 25 bp, Homo sapien
cacagtttgctgacaaggggtcact

SEQ ID NO: 5412829 - DNA, 25 bp, Homo sapien
agtctgactagccattgtgcatctt

SEQ ID NO: 5412830 - DNA, 25 bp, Homo sapien
tcagctggtagtgagaacagtaacc

SEQ ID NO: 5412831 - DNA, 25 bp, Homo sapien
ggagtcctgttgataaaaatacatc

SEQ ID NO: 5412832 - DNA, 25 bp, Homo sapien
aggagatttgtgtaaaaacagtcag

SEQ ID NO: 5412833 - DNA, 25 bp, Homo sapien
attgacctcctaaaggagtcctgtt

SEQ ID NO: 5412834 - DNA, 25 bp, Homo sapien
taaggagatttgtgtaaaaacagtc

SEQ ID NO: 5412835 - DNA, 25 bp, Homo sapien
tgtttttccacaattggctttgtca

SEQ ID NO: 5412836 - DNA, 25 bp, Homo sapien
tcatgtttttccacaattggctttg

SEQ ID NO: 5412837 - DNA, 25 bp, Homo sapien
gtttttccacaattggctttgtcac

SEQ ID NO: 5412838 - DNA, 25 bp, Homo sapien
tgccttcttgctcatgtttttccac

SEQ ID NO: 5412839 - DNA, 25 bp, Homo sapien
tcttttataagaagattagccccac

SEQ ID NO: 5412840 - DNA, 25 bp, Homo sapien
catggtcagatcagttttttctgta

SEQ ID NO: 5412841 - DNA, 25 bp, Homo sapien
tattctgtcaattatcatgtcttct

SEQ ID NO: 5412842 - DNA, 25 bp, Homo sapien
tggacaagctgcagtggacatggtc

SEQ ID NO: 5412843 - DNA, 25 bp, Homo sapien
cagttcgctttaaaaggtggcgtct

SEQ ID NO: 5412844 - DNA, 25 bp, Homo sapien
cagcagatacttcctcttgttttcg

SEQ ID NO: 5412845 - DNA, 25 bp, Homo sapien
ggtggcgtctgtaagcacgctgaat

SEQ ID NO: 5412846 - DNA, 25 bp, Homo sapien
tagtgattggctgataggagacctt

SEQ ID NO: 5412847 - DNA, 25 bp, Homo sapien
tcaagacagtggatccggtcaccac

SEQ ID NO: 5412848 - DNA, 25 bp, Homo sapien
caagacagtggatccggtcaccact

SEQ ID NO: 5412849 - DNA, 25 bp, Homo sapien
tttctatcagctcggcaagaaacat

SEQ ID NO: 5412850 - DNA, 25 bp, Homo sapien
tgagcttccagggttaactttatta

SEQ ID NO: 5412851 - DNA, 25 bp, Homo sapien
tgaactgagttgcatcgggatcaaa

SEQ ID NO: 5412852 - DNA, 25 bp, Homo sapien
attgagaggcggttcaagcgcagct

SEQ ID NO: 5412853 - DNA, 25 bp, Homo sapien
aatgagaataccaaccagtgaagaa

SEQ ID NO: 5412854 - DNA, 25 bp, Homo sapien
gaaatcatgcgttaaaataaacata

SEQ ID NO: 5412855 - DNA, 25 bp, Homo sapien
caatgagaataccaaccagtgaaga

SEQ ID NO: 5412856 - DNA, 25 bp, Homo sapien
cagtgaagaaatcatgcgttaaaat

SEQ ID NO: 5412857 - DNA, 25 bp, Homo sapien
caatgaacaccagattgatgcgtga

SEQ ID NO: 5412858 - DNA, 25 bp, Homo sapien
gagtttcagtacacactctccagta

SEQ ID NO: 5412859 - DNA, 25 bp, Homo sapien
taataatggcgtagagagatgagtt

SEQ ID NO: 5412860 - DNA, 25 bp, Homo sapien
gatgcgtgacaaaatggtagtcaca

SEQ ID NO: 5412861 - DNA, 25 bp, Homo sapien
tgtcaaaaacttgtctggttacgaa

SEQ ID NO: 5412862 - DNA, 25 bp, Homo sapien
gcttatgtcaaaaacttgtctggtt

SEQ ID NO: 5412863 - DNA, 25 bp, Homo sapien
tatgtcaaaaacttgtctggttacg

SEQ ID NO: 5412864 - DNA, 25 bp, Homo sapien
aacttgtctggttacgaagtcaaag

SEQ ID NO: 5412865 - DNA, 25 bp, Homo sapien
tggtcgaggtataggcttttgcggt

SEQ ID NO: 5412866 - DNA, 25 bp, Homo sapien
ctggtcgaggtataggcttttgcgg

SEQ ID NO: 5412867 - DNA, 25 bp, Homo sapien
tcctggtcgaggtataggcttttgc

SEQ ID NO: 5412868 - DNA, 25 bp, Homo sapien
cctggtcgaggtataggcttttgcg

SEQ ID NO: 5412869 - DNA, 25 bp, Homo sapien
tcttcatacttaggctggagttcca

SEQ ID NO: 5412870 - DNA, 25 bp, Homo sapien
cttcatacttaggctggagttccac

SEQ ID NO: 5412871 - DNA, 25 bp, Homo sapien
atacattatatccatccatcctttg

SEQ ID NO: 5412872 - DNA, 25 bp, Homo sapien
tatatccatccatcctttgaatgtg

SEQ ID NO: 5412873 - DNA, 25 bp, Homo sapien
acattatatccatccatcctttgaa

SEQ ID NO: 5412874 - DNA, 25 bp, Homo sapien
ggaatcaactgctgcatacattata

SEQ ID NO: 5412875 - DNA, 25 bp, Homo sapien
aaagacactgtagaaccacaaggga

SEQ ID NO: 5412876 - DNA, 25 bp, Homo sapien
gaaatcataaccttggtgagcaaaa

SEQ ID NO: 5412877 - DNA, 25 bp, Homo sapien
taatcatagttgacacctctggaag

SEQ ID NO: 5412878 - DNA, 25 bp, Homo sapien
caaataaatatcatcatgtgtcgac

SEQ ID NO: 5412879 - DNA, 25 bp, Homo sapien
tccctgctttgttgtggtgctgctg

SEQ ID NO: 5412880 - DNA, 25 bp, Homo sapien
atctggactcttattttattccctg

SEQ ID NO: 5412881 - DNA, 25 bp, Homo sapien
aatctggactcttattttattccct

SEQ ID NO: 5412882 - DNA, 25 bp, Homo sapien
tattccctgctttgttgtggtgctg

SEQ ID NO: 5412883 - DNA, 25 bp, Homo sapien
cccagtcttagagacccagtagtga

SEQ ID NO: 5412884 - DNA, 25 bp, Homo sapien
tggagacccagtcttagagacccag

SEQ ID NO: 5412885 - DNA, 25 bp, Homo sapien
atttgagataagacaacagctgctt

SEQ ID NO: 5412886 - DNA, 25 bp, Homo sapien
tagagacccagtagtgaaaacatta

SEQ ID NO: 5412887 - DNA, 25 bp, Homo sapien
catttttccatcgagcagtctcatt

SEQ ID NO: 5412888 - DNA, 25 bp, Homo sapien
cacgtcttcgatgtcaaacctgtca

SEQ ID NO: 5412889 - DNA, 25 bp, Homo sapien
ccagttgtggtgttaatacagtggt

SEQ ID NO: 5412890 - DNA, 25 bp, Homo sapien
ggatggaattgctcctaaaagggca

SEQ ID NO: 5412891 - DNA, 25 bp, Homo sapien
ttatatccaacctcaccatcattca

SEQ ID NO: 5412892 - DNA, 25 bp, Homo sapien
ttcttatatccaacctcaccatcat

SEQ ID NO: 5412893 - DNA, 25 bp, Homo sapien
cattcttatatccaacctcaccatc

SEQ ID NO: 5412894 - DNA, 25 bp, Homo sapien
tcttatatccaacctcaccatcatt

SEQ ID NO: 5412895 - DNA, 25 bp, Homo sapien
ctcttagaggtctcagagctcttag

SEQ ID NO: 5412896 - DNA, 25 bp, Homo sapien
tcttagaggtctcagagctcttagt

SEQ ID NO: 5412897 - DNA, 25 bp, Homo sapien
gagataaggctcttagaggtctcag

SEQ ID NO: 5412898 - DNA, 25 bp, Homo sapien
tataaataagacaagctaccttgaa

SEQ ID NO: 5412899 - DNA, 25 bp, Homo sapien
atataaataagacaagctaccttga

SEQ ID NO: 5412900 - DNA, 25 bp, Homo sapien
aataagacaagctaccttgaacaga

SEQ ID NO: 5412901 - DNA, 25 bp, Homo sapien
taaataagacaagctaccttgaaca

SEQ ID NO: 5412902 - DNA, 25 bp, Homo sapien
aatatgtttgatagccatatgccac

SEQ ID NO: 5412903 - DNA, 25 bp, Homo sapien
gcatattccaacatcgtcttaatcg

SEQ ID NO: 5412904 - DNA, 25 bp, Homo sapien
atgtttgatagccatatgccaccca

SEQ ID NO: 5412905 - DNA, 25 bp, Homo sapien
cgtctttcgctgatcaatatatata

SEQ ID NO: 5412906 - DNA, 25 bp, Homo sapien
caacacttgaatctttgtacacagc

SEQ ID NO: 5412907 - DNA, 25 bp, Homo sapien
ggttccaccattgttttcctctgcc

SEQ ID NO: 5412908 - DNA, 25 bp, Homo sapien
accactactaaggagaatcatgaaa

SEQ ID NO: 5412909 - DNA, 25 bp, Homo sapien
ggtctcaaaccagttatgttcaact

SEQ ID NO: 5412910 - DNA, 25 bp, Homo sapien
gtctttttattactatgctcatctc

SEQ ID NO: 5412911 - DNA, 25 bp, Homo sapien
tgtcttgctagcatagctctctaag

SEQ ID NO: 5412912 - DNA, 25 bp, Homo sapien
gtagataaagtgtctctgcttccat

SEQ ID NO: 5412913 - DNA, 25 bp, Homo sapien
aataaaagtagataaagtgtctctg

SEQ ID NO: 5412914 - DNA, 25 bp, Homo sapien
cttcaggttccactacgggctgttc

SEQ ID NO: 5412915 - DNA, 25 bp, Homo sapien
gatgtccacagtgctaccttctgat

SEQ ID NO: 5412916 - DNA, 25 bp, Homo sapien
aacaagcttctggttcaagagtttc

SEQ ID NO: 5412917 - DNA, 25 bp, Homo sapien
ttcttctacaggtgcgccgatgtcc

SEQ ID NO: 5412918 - DNA, 25 bp, Homo sapien
gctgccagttcctataccacttgta

SEQ ID NO: 5412919 - DNA, 25 bp, Homo sapien
tgtgcatcctatccacagcaatttg

SEQ ID NO: 5412920 - DNA, 25 bp, Homo sapien
tccagatccgattcactactaaagt

SEQ ID NO: 5412921 - DNA, 25 bp, Homo sapien
cataagctactcctttgtgcatcct

SEQ ID NO: 5412922 - DNA, 25 bp, Homo sapien
ccccacggaattgccgatgatcttt

SEQ ID NO: 5412923 - DNA, 25 bp, Homo sapien
ggcgatcttgcagacacaatctttg

SEQ ID NO: 5412924 - DNA, 25 bp, Homo sapien
agtaaggcacatggcttgaccagca

SEQ ID NO: 5412925 - DNA, 25 bp, Homo sapien
cgtgggagttgacaatcactggcga

SEQ ID NO: 5412926 - DNA, 25 bp, Homo sapien
tccttccacattggcgagtccaagt

SEQ ID NO: 5412927 - DNA, 25 bp, Homo sapien
caggctaagcgtcacaataaaaccg

SEQ ID NO: 5412928 - DNA, 25 bp, Homo sapien
caatcgaaatgaacggagaacagat

SEQ ID NO: 5412929 - DNA, 25 bp, Homo sapien
gagtccaagttctaccaggctaagc

SEQ ID NO: 5412930 - DNA, 25 bp, Homo sapien
cattattgaaatggtccgtcattgg

SEQ ID NO: 5412931 - DNA, 25 bp, Homo sapien
aatggtccgtcattggatagtgctc

SEQ ID NO: 5412932 - DNA, 25 bp, Homo sapien
cctactgtaagcacattattgaaat

SEQ ID NO: 5412933 - DNA, 25 bp, Homo sapien
caagtttcctactgtaagcacatta

SEQ ID NO: 5412934 - DNA, 25 bp, Homo sapien
tatggagaacagtcccagattaaga

SEQ ID NO: 5412935 - DNA, 25 bp, Homo sapien
agaatatgttggaaaatttatacca

SEQ ID NO: 5412936 - DNA, 25 bp, Homo sapien
gagaacagtcccagattaagaatat

SEQ ID NO: 5412937 - DNA, 25 bp, Homo sapien
aatatggagaacagtcccagattaa

SEQ ID NO: 5412938 - DNA, 25 bp, Homo sapien
tatactcattgctcgttgcctttgg

SEQ ID NO: 5412939 - DNA, 25 bp, Homo sapien
tgttagaatgctggctatactcatt

SEQ ID NO: 5412940 - DNA, 25 bp, Homo sapien
ctcattgctcgttgcctttgggaag

SEQ ID NO: 5412941 - DNA, 25 bp, Homo sapien
tgtatttgttagaatgctggctata

SEQ ID NO: 5412942 - DNA, 25 bp, Homo sapien
tcatcagtagctggcttatctatta

SEQ ID NO: 5412943 - DNA, 25 bp, Homo sapien
attgtcatcagtagctggcttatct

SEQ ID NO: 5412944 - DNA, 25 bp, Homo sapien
tgtcatcagtagctggcttatctat

SEQ ID NO: 5412945 - DNA, 25 bp, Homo sapien
cagtagctggcttatctattatcac

SEQ ID NO: 5412946 - DNA, 25 bp, Homo sapien
gaagctgtccaacaggcgatgtagg

SEQ ID NO: 5412947 - DNA, 25 bp, Homo sapien
ggcagaagctgtccaacaggcgatg

SEQ ID NO: 5412948 - DNA, 25 bp, Homo sapien
gatgtaggaactgaaggtccaccaa

SEQ ID NO: 5412949 - DNA, 25 bp, Homo sapien
tccaacaggcgatgtaggaactgaa

SEQ ID NO: 5412950 - DNA, 25 bp, Homo sapien
aaacactgccagcatccgggatgac

SEQ ID NO: 5412951 - DNA, 25 bp, Homo sapien
ccttggtgaaaatagggagccacgg

SEQ ID NO: 5412952 - DNA, 25 bp, Homo sapien
gctgtgctcatcatctgcgaagtcg

SEQ ID NO: 5412953 - DNA, 25 bp, Homo sapien
gggcacaaacaaggaatctctacgg

SEQ ID NO: 5412954 - DNA, 25 bp, Homo sapien
tgtcaatcggttcccttcaatggag

SEQ ID NO: 5412955 - DNA, 25 bp, Homo sapien
tcttggaactcaacttagaggcttc

SEQ ID NO: 5412956 - DNA, 25 bp, Homo sapien
ttcaatggagaagcgaaaacctttc

SEQ ID NO: 5412957 - DNA, 25 bp, Homo sapien
aatgttctgaggcagttgccgttgc

SEQ ID NO: 5412958 - DNA, 25 bp, Homo sapien
atctgctgaaattcggcctctttct

SEQ ID NO: 5412959 - DNA, 25 bp, Homo sapien
gagagtgtggctctttagttctcac

SEQ ID NO: 5412960 - DNA, 25 bp, Homo sapien
ggagagtgtggctctttagttctca

SEQ ID NO: 5412961 - DNA, 25 bp, Homo sapien
tgtgtagccataattgggatttcta

SEQ ID NO: 5412962 - DNA, 25 bp, Homo sapien
cagaagtcctgagtcattagtcgaa

SEQ ID NO: 5412963 - DNA, 25 bp, Homo sapien
gatttctaccagctttcacacacat

SEQ ID NO: 5412964 - DNA, 25 bp, Homo sapien
caaaaaagcccaactgaaggtatca

SEQ ID NO: 5412965 - DNA, 25 bp, Homo sapien
atttccacatagtagtgcatctaaa

SEQ ID NO: 5412966 - DNA, 25 bp, Homo sapien
cacatagtagtgcatctaaaaaacc

SEQ ID NO: 5412967 - DNA, 25 bp, Homo sapien
catagtagtgcatctaaaaaaccct

SEQ ID NO: 5412968 - DNA, 25 bp, Homo sapien
ttccacatagtagtgcatctaaaaa

SEQ ID NO: 5412969 - DNA, 25 bp, Homo sapien
ttttctatactatgttcctccaagg

SEQ ID NO: 5412970 - DNA, 25 bp, Homo sapien
tccagtcaaactcaaagacagtttc

SEQ ID NO: 5412971 - DNA, 25 bp, Homo sapien
attggtgggaggccattgtatacat

SEQ ID NO: 5412972 - DNA, 25 bp, Homo sapien
ttgaatcttgaatatatgacttcca

SEQ ID NO: 5412973 - DNA, 25 bp, Homo sapien
agaaagaagtctattactatgaaga

SEQ ID NO: 5412974 - DNA, 25 bp, Homo sapien
ctgaaagaaagaagtctattactat

SEQ ID NO: 5412975 - DNA, 25 bp, Homo sapien
gaaagaaagaagtctattactatga

SEQ ID NO: 5412976 - DNA, 25 bp, Homo sapien
aagaaagaagtctattactatgaag

SEQ ID NO: 5412977 - DNA, 25 bp, Homo sapien
gtcttcaatgctcggagaactctga

SEQ ID NO: 5412978 - DNA, 25 bp, Homo sapien
gaatgactgaaatcgtcttcaatgc

SEQ ID NO: 5412979 - DNA, 25 bp, Homo sapien
tctcaatgccgagacattgcccagg

SEQ ID NO: 5412980 - DNA, 25 bp, Homo sapien
caggtccacaaactctgtgacgtac

SEQ ID NO: 5412981 - DNA, 25 bp, Homo sapien
aatagttttcaaagctctcaagact

SEQ ID NO: 5412982 - DNA, 25 bp, Homo sapien
cgaaatagttttcaaagctctcaag

SEQ ID NO: 5412983 - DNA, 25 bp, Homo sapien
aaatagttttcaaagctctcaagac

SEQ ID NO: 5412984 - DNA, 25 bp, Homo sapien
taccgaaatagttttcaaagctctc

SEQ ID NO: 5412985 - DNA, 25 bp, Homo sapien
gcctaggtttacaaattctgttaca

SEQ ID NO: 5412986 - DNA, 25 bp, Homo sapien
gagctgaaaaattgcctaggtttac

SEQ ID NO: 5412987 - DNA, 25 bp, Homo sapien
ctgaaagtgcgaagagctgaaaaat

SEQ ID NO: 5412988 - DNA, 25 bp, Homo sapien
aagtgcgaagagctgaaaaattgcc

SEQ ID NO: 5412989 - DNA, 25 bp, Homo sapien
gtaatgacagtgaaatcgagccagt

SEQ ID NO: 5412990 - DNA, 25 bp, Homo sapien
atgtaatgacagtgaaatcgagcca

SEQ ID NO: 5412991 - DNA, 25 bp, Homo sapien
tgtaatgacagtgaaatcgagccag

SEQ ID NO: 5412992 - DNA, 25 bp, Homo sapien
aaaagtatatattcctgtgaaggtg

SEQ ID NO: 5412993 - DNA, 25 bp, Homo sapien
cagaatccccttgcaataattttta

SEQ ID NO: 5412994 - DNA, 25 bp, Homo sapien
tgcaataatttttataagtgattca

SEQ ID NO: 5412995 - DNA, 25 bp, Homo sapien
aaatcttctaaacagaatccccttg

SEQ ID NO: 5412996 - DNA, 25 bp, Homo sapien
caatcaggagggttactcattgtca

SEQ ID NO: 5412997 - DNA, 25 bp, Homo sapien
ccaatcaggagggttactcattgtc

SEQ ID NO: 5412998 - DNA, 25 bp, Homo sapien
atcaggagggttactcattgtcata

SEQ ID NO: 5412999 - DNA, 25 bp, Homo sapien
tgtccaatcaggagggttactcatt

SEQ ID NO: 5413000 - DNA, 25 bp, Homo sapien
attttcctaagaggattgaagggag

SEQ ID NO: 5413001 - DNA, 25 bp, Homo sapien
tcctaagaggattgaagggagttaa

SEQ ID NO: 5413002 - DNA, 25 bp, Homo sapien
gaagatggccttccctttattcaat

SEQ ID NO: 5413003 - DNA, 25 bp, Homo sapien
ggaagatggccttccctttattcaa

SEQ ID NO: 5413004 - DNA, 25 bp, Homo sapien
tattgatcaacatcaccatcttggg

SEQ ID NO: 5413005 - DNA, 25 bp, Homo sapien
caacatcaccatcttgggactgttt

SEQ ID NO: 5413006 - DNA, 25 bp, Homo sapien
gatcaacatcaccatcttgggactg

SEQ ID NO: 5413007 - DNA, 25 bp, Homo sapien
ttattgatcaacatcaccatcttgg

SEQ ID NO: 5413008 - DNA, 25 bp, Homo sapien
aaaatatgcctgataaaaaacactc

SEQ ID NO: 5413009 - DNA, 25 bp, Homo sapien
agcagcaaaatatgcctgataaaaa

SEQ ID NO: 5413010 - DNA, 25 bp, Homo sapien
attagcagcaaaatatgcctgataa

SEQ ID NO: 5413011 - DNA, 25 bp, Homo sapien
aatatgcctgataaaaaacactcac

SEQ ID NO: 5413012 - DNA, 25 bp, Homo sapien
gcgtctttcaatagccgcaagagat

SEQ ID NO: 5413013 - DNA, 25 bp, Homo sapien
tttcttctgcaatgcgtctttcaat

SEQ ID NO: 5413014 - DNA, 25 bp, Homo sapien
gagattctctggtgaagaagttgaa

SEQ ID NO: 5413015 - DNA, 25 bp, Homo sapien
aagagattctctggtgaagaagttg

SEQ ID NO: 5413016 - DNA, 25 bp, Homo sapien
cattttaattaccatttattctgca

SEQ ID NO: 5413017 - DNA, 25 bp, Homo sapien
ttaattaccatttattctgcatatg

SEQ ID NO: 5413018 - DNA, 25 bp, Homo sapien
gcacattttaattaccatttattct

SEQ ID NO: 5413019 - DNA, 25 bp, Homo sapien
ttttaattaccatttattctgcata

SEQ ID NO: 5413020 - DNA, 25 bp, Homo sapien
aaatcctgcacacggatgtatacag

SEQ ID NO: 5413021 - DNA, 25 bp, Homo sapien
tgcacacggatgtatacagcagcct

SEQ ID NO: 5413022 - DNA, 25 bp, Homo sapien
cacggatgtatacagcagccttatt

SEQ ID NO: 5413023 - DNA, 25 bp, Homo sapien
cacaaaatcctgcacacggatgtat

SEQ ID NO: 5413024 - DNA, 25 bp, Homo sapien
cagcatagaacccacgggcagcggg

SEQ ID NO: 5413025 - DNA, 25 bp, Homo sapien
tgctgtatggagagatacagcatag

SEQ ID NO: 5413026 - DNA, 25 bp, Homo sapien
gagatacagcatagaacccacgggc

SEQ ID NO: 5413027 - DNA, 25 bp, Homo sapien
aactgtccaggcatagttgctgtat

SEQ ID NO: 5413028 - DNA, 25 bp, Homo sapien
caaagcccgtgggctaggtagggca

SEQ ID NO: 5413029 - DNA, 25 bp, Homo sapien
gctaccctacattcacccccagtaa

SEQ ID NO: 5413030 - DNA, 25 bp, Homo sapien
aaagcccgtgggctaggtagggcat

SEQ ID NO: 5413031 - DNA, 25 bp, Homo sapien
gagctctctttaagcagaagccagg

SEQ ID NO: 5413032 - DNA, 25 bp, Homo sapien
gccaggccataggttcttcactagt

SEQ ID NO: 5413033 - DNA, 25 bp, Homo sapien
taaactttcgtacaggcagtatctc

SEQ ID NO: 5413034 - DNA, 25 bp, Homo sapien
gatgaaactgctacacgtggacagc

SEQ ID NO: 5413035 - DNA, 25 bp, Homo sapien
taagcactggatacacggaaaggtg

SEQ ID NO: 5413036 - DNA, 25 bp, Homo sapien
tgtctcctgtggcataacgatttca

SEQ ID NO: 5413037 - DNA, 25 bp, Homo sapien
tactaatgcggtagggagatgctgc

SEQ ID NO: 5413038 - DNA, 25 bp, Homo sapien
tcataggaaagagaactacacagct

SEQ ID NO: 5413039 - DNA, 25 bp, Homo sapien
cgggctataggaagggcaaatgtca

SEQ ID NO: 5413040 - DNA, 25 bp, Homo sapien
cagtgcacgggctataggaagggca

SEQ ID NO: 5413041 - DNA, 25 bp, Homo sapien
ctgctcagtgcacgggctataggaa

SEQ ID NO: 5413042 - DNA, 25 bp, Homo sapien
tgcacgggctataggaagggcaaat

SEQ ID NO: 5413043 - DNA, 25 bp, Homo sapien
aaggagtttgatctgtaactgactg

SEQ ID NO: 5413044 - DNA, 25 bp, Homo sapien
gagataactcactacctttggatca

SEQ ID NO: 5413045 - DNA, 25 bp, Homo sapien
gtgagaagaggggaaagcgtagaac

SEQ ID NO: 5413046 - DNA, 25 bp, Homo sapien
ttagacaagagcagtagtgagaaga

SEQ ID NO: 5413047 - DNA, 25 bp, Homo sapien
ttttgtgtgtcactgtcaggctcac

SEQ ID NO: 5413048 - DNA, 25 bp, Homo sapien
ttgtgtgtcactgtcaggctcacac

SEQ ID NO: 5413049 - DNA, 25 bp, Homo sapien
ccccaggctaaattttggagggatg

SEQ ID NO: 5413050 - DNA, 25 bp, Homo sapien
tttggagggatgcttttgtgtgtca

SEQ ID NO: 5413051 - DNA, 25 bp, Homo sapien
gaaatgcctggttggtgacgtccta

SEQ ID NO: 5413052 - DNA, 25 bp, Homo sapien
tgacgtcctagaggtaacaccaagc

SEQ ID NO: 5413053 - DNA, 25 bp, Homo sapien
tcttcgtcagcaattcccagatgag

SEQ ID NO: 5413054 - DNA, 25 bp, Homo sapien
tgtttaccctctctgattgtctgga

SEQ ID NO: 5413055 - DNA, 25 bp, Homo sapien
ttggtttcccgtaaatctctgtggc

SEQ ID NO: 5413056 - DNA, 25 bp, Homo sapien
tggtttcccgtaaatctctgtggcc

SEQ ID NO: 5413057 - DNA, 25 bp, Homo sapien
attggtttcccgtaaatctctgtgg

SEQ ID NO: 5413058 - DNA, 25 bp, Homo sapien
aattggtttcccgtaaatctctgtg

SEQ ID NO: 5413059 - DNA, 25 bp, Homo sapien
gacgagatgataacaatgtgccttc

SEQ ID NO: 5413060 - DNA, 25 bp, Homo sapien
ggaacagcatcacccaaagacgaga

SEQ ID NO: 5413061 - DNA, 25 bp, Homo sapien
tatccatctgcagtgaggaacagca

SEQ ID NO: 5413062 - DNA, 25 bp, Homo sapien
gagacctctgcagtatcctctcggc

SEQ ID NO: 5413063 - DNA, 25 bp, Homo sapien
ttttaatactcccaacactctcttc

SEQ ID NO: 5413064 - DNA, 25 bp, Homo sapien
ctccagcatttgttgggctctggga

SEQ ID NO: 5413065 - DNA, 25 bp, Homo sapien
tttccaggttggcagttgtgaaggg

SEQ ID NO: 5413066 - DNA, 25 bp, Homo sapien
gtccagtgctcctgctagtagccct

SEQ ID NO: 5413067 - DNA, 25 bp, Homo sapien
tgcaccttgaacatgtaaatcagcc

SEQ ID NO: 5413068 - DNA, 25 bp, Homo sapien
ccttctgcaccttgaacatgtaaat

SEQ ID NO: 5413069 - DNA, 25 bp, Homo sapien
ttccttctgcaccttgaacatgtaa

SEQ ID NO: 5413070 - DNA, 25 bp, Homo sapien
caccttgaacatgtaaatcagccat

SEQ ID NO: 5413071 - DNA, 25 bp, Homo sapien
tcgcacatatcaggtcgagaaaatg

SEQ ID NO: 5413072 - DNA, 25 bp, Homo sapien
gttccttaatccacatatatctcag

SEQ ID NO: 5413073 - DNA, 25 bp, Homo sapien
gaggcttgtctacttctatcgcaca

SEQ ID NO: 5413074 - DNA, 25 bp, Homo sapien
tatctcagaatagcacctaatttga

SEQ ID NO: 5413075 - DNA, 25 bp, Homo sapien
tttgatgagtgccagatttactttg

SEQ ID NO: 5413076 - DNA, 25 bp, Homo sapien
cccttttgatgagtgccagatttac

SEQ ID NO: 5413077 - DNA, 25 bp, Homo sapien
gtttccattattccccttttgatga

SEQ ID NO: 5413078 - DNA, 25 bp, Homo sapien
tattccccttttgatgagtgccaga

SEQ ID NO: 5413079 - DNA, 25 bp, Homo sapien
ccacgacccctacaggcattggaaa

SEQ ID NO: 5413080 - DNA, 25 bp, Homo sapien
cagctttgggaggttcgcacctggg

SEQ ID NO: 5413081 - DNA, 25 bp, Homo sapien
tacaggcattggaaagcttgtttgg

SEQ ID NO: 5413082 - DNA, 25 bp, Homo sapien
tcctagctacaagagatcccacgac

SEQ ID NO: 5413083 - DNA, 25 bp, Homo sapien
attgctgtcaggtggaagtgacacc

SEQ ID NO: 5413084 - DNA, 25 bp, Homo sapien
tattgctgtcaggtggaagtgacac

SEQ ID NO: 5413085 - DNA, 25 bp, Homo sapien
tgctgtcaggtggaagtgacaccat

SEQ ID NO: 5413086 - DNA, 25 bp, Homo sapien
ttgctgtcaggtggaagtgacacca

SEQ ID NO: 5413087 - DNA, 25 bp, Homo sapien
cctttttgcctataacgctgctcta

SEQ ID NO: 5413088 - DNA, 25 bp, Homo sapien
gcctataacgctgctctaagtagta

SEQ ID NO: 5413089 - DNA, 25 bp, Homo sapien
tttttgcctataacgctgctctaag

SEQ ID NO: 5413090 - DNA, 25 bp, Homo sapien
ctctaagtagtattctggctgaggc

SEQ ID NO: 5413091 - DNA, 25 bp, Homo sapien
atgtgaaagacatgtatagtctctc

SEQ ID NO: 5413092 - DNA, 25 bp, Homo sapien
catgtgaaagacatgtatagtctct

SEQ ID NO: 5413093 - DNA, 25 bp, Homo sapien
cactggcactgtataagaatgtaag

SEQ ID NO: 5413094 - DNA, 25 bp, Homo sapien
aaagcactggcactgtataagaatg

SEQ ID NO: 5413095 - DNA, 25 bp, Homo sapien
gaatgtaagaatacactatactttt

SEQ ID NO: 5413096 - DNA, 25 bp, Homo sapien
acactatacttttgttgagaagatc

SEQ ID NO: 5413097 - DNA, 25 bp, Homo sapien
tatcagtattttgggcagcacagtc

SEQ ID NO: 5413098 - DNA, 25 bp, Homo sapien
tacataggtcctaaacccaggccaa

SEQ ID NO: 5413099 - DNA, 25 bp, Homo sapien
tgtaccgtggtcaaacaactaactg

SEQ ID NO: 5413100 - DNA, 25 bp, Homo sapien
tgaaagcttgccaaacacgggattg

SEQ ID NO: 5413101 - DNA, 25 bp, Homo sapien
cttgttggcatgtgagtcaagatga

SEQ ID NO: 5413102 - DNA, 25 bp, Homo sapien
caaagccaaggcaaatacttttgtt

SEQ ID NO: 5413103 - DNA, 25 bp, Homo sapien
aaaagtcaagctccctaataatgca

SEQ ID NO: 5413104 - DNA, 25 bp, Homo sapien
gaaacaagactaattacaatcctgt

SEQ ID NO: 5413105 - DNA, 25 bp, Homo sapien
tagtgactgcactgccttcgagaat

SEQ ID NO: 5413106 - DNA, 25 bp, Homo sapien
aaaaataaccatctgctaatgctgc

SEQ ID NO: 5413107 - DNA, 25 bp, Homo sapien
ttggcatagacttcctcaaaagagt

SEQ ID NO: 5413108 - DNA, 25 bp, Homo sapien
gcccacctttcttaggaaatcagag

SEQ ID NO: 5413109 - DNA, 25 bp, Homo sapien
cggtaacgtctataagcacgctgaa

SEQ ID NO: 5413110 - DNA, 25 bp, Homo sapien
tgaatgacagtagcagacacatcct

SEQ ID NO: 5413111 - DNA, 25 bp, Homo sapien
tgtgatgggttcataggacactttg

SEQ ID NO: 5413112 - DNA, 25 bp, Homo sapien
cagtcgggtggcttactgttaagaa

SEQ ID NO: 5413113 - DNA, 25 bp, Homo sapien
ataaaatctgaaaaataaatattct

SEQ ID NO: 5413114 - DNA, 25 bp, Homo sapien
cactaggtcaaatatacatccttgg

SEQ ID NO: 5413115 - DNA, 25 bp, Homo sapien
catggttaccatgttgagacagata

SEQ ID NO: 5413116 - DNA, 25 bp, Homo sapien
tattccatcctacagtgaagtagta

SEQ ID NO: 5413117 - DNA, 25 bp, Homo sapien
tgagggagatcagttttagcacaca

SEQ ID NO: 5413118 - DNA, 25 bp, Homo sapien
cctggtcgaggaattggcttttgtg

SEQ ID NO: 5413119 - DNA, 25 bp, Homo sapien
ccctggtcgaggaattggcttttgt

SEQ ID NO: 5413120 - DNA, 25 bp, Homo sapien
tggaaaataattgttcatccctttc

SEQ ID NO: 5413121 - DNA, 25 bp, Homo sapien
taatcatgaattgatatcaaattaa

SEQ ID NO: 5413122 - DNA, 25 bp, Homo sapien
catgaattgatatcaaattaaactt

SEQ ID NO: 5413123 - DNA, 25 bp, Homo sapien
gttcatccctttcattacaatgaaa

SEQ ID NO: 5413124 - DNA, 25 bp, Homo sapien
aaatatacatgtagaggctatattc

SEQ ID NO: 5413125 - DNA, 25 bp, Homo sapien
attcatatttgggctgcttgtctac

SEQ ID NO: 5413126 - DNA, 25 bp, Homo sapien
gaggctatattcatatttgggctgc

SEQ ID NO: 5413127 - DNA, 25 bp, Homo sapien
catgtagaggctatattcatatttg

SEQ ID NO: 5413128 - DNA, 25 bp, Homo sapien
actgctgcatacataataatcgtcc

SEQ ID NO: 5413129 - DNA, 25 bp, Homo sapien
ctgcatacataataatcgtccatcc

SEQ ID NO: 5413130 - DNA, 25 bp, Homo sapien
attaacagaatccactgctgcatac

SEQ ID NO: 5413131 - DNA, 25 bp, Homo sapien
tgctgcatacataataatcgtccat

SEQ ID NO: 5413132 - DNA, 25 bp, Homo sapien
aacttgaagcagagataggtaacca

SEQ ID NO: 5413133 - DNA, 25 bp, Homo sapien
tgcaggaaaccgtgacccatctgtg

SEQ ID NO: 5413134 - DNA, 25 bp, Homo sapien
aacgatttggaacttgacttgcagg

SEQ ID NO: 5413135 - DNA, 25 bp, Homo sapien
tcataagggcaaaacattcggaacg

SEQ ID NO: 5413136 - DNA, 25 bp, Homo sapien
aggtcttaaagctctcagtgtccga

SEQ ID NO: 5413137 - DNA, 25 bp, Homo sapien
tcagtgtccgaagggatttaatggg

SEQ ID NO: 5413138 - DNA, 25 bp, Homo sapien
ggggccaagatctgagtagccaaga

SEQ ID NO: 5413139 - DNA, 25 bp, Homo sapien
ggctcttagaggtcttaaagctctc

SEQ ID NO: 5413140 - DNA, 25 bp, Homo sapien
taaatcctcttttaaaatgtactca

SEQ ID NO: 5413141 - DNA, 25 bp, Homo sapien
tatgttttataaccatatgctatcc

SEQ ID NO: 5413142 - DNA, 25 bp, Homo sapien
tgttttataaccatatgctatccat

SEQ ID NO: 5413143 - DNA, 25 bp, Homo sapien
atatgttttataaccatatgctatc

SEQ ID NO: 5413144 - DNA, 25 bp, Homo sapien
ttttataaccatatgctatccattt

SEQ ID NO: 5413145 - DNA, 25 bp, Homo sapien
tgtctacagtcatgaacttgtgcca

SEQ ID NO: 5413146 - DNA, 25 bp, Homo sapien
gtctacagtcatgaacttgtgccat

SEQ ID NO: 5413147 - DNA, 25 bp, Homo sapien
ctgtctacagtcatgaacttgtgcc

SEQ ID NO: 5413148 - DNA, 25 bp, Homo sapien
tcaatatattgacttaggtgtcaga

SEQ ID NO: 5413149 - DNA, 25 bp, Homo sapien
ttgacttaggtgtcagatcatttac

SEQ ID NO: 5413150 - DNA, 25 bp, Homo sapien
atatattgacttaggtgtcagatca

SEQ ID NO: 5413151 - DNA, 25 bp, Homo sapien
tattgacttaggtgtcagatcattt

SEQ ID NO: 5413152 - DNA, 25 bp, Homo sapien
ggatcatgaggacaatgaagctttc

SEQ ID NO: 5413153 - DNA, 25 bp, Homo sapien
catgaggacaatgaagctttcaaac

SEQ ID NO: 5413154 - DNA, 25 bp, Homo sapien
tttccctgactctatgttaacttgg

SEQ ID NO: 5413155 - DNA, 25 bp, Homo sapien
ggcagcatgagaacctccatacaca

SEQ ID NO: 5413156 - DNA, 25 bp, Homo sapien
tatcaactgtgctgcactctgagga

SEQ ID NO: 5413157 - DNA, 25 bp, Homo sapien
ggaattcataggttcagcctctgct

SEQ ID NO: 5413158 - DNA, 25 bp, Homo sapien
ggcctctggctcatcggaattcata

SEQ ID NO: 5413159 - DNA, 25 bp, Homo sapien
tccaggcaaagggttatcaactgtg

SEQ ID NO: 5413160 - DNA, 25 bp, Homo sapien
cacttattcattcataggcaaggcc

SEQ ID NO: 5413161 - DNA, 25 bp, Homo sapien
taaagtcccataactaacagtgcat

SEQ ID NO: 5413162 - DNA, 25 bp, Homo sapien
ggcaaggcctatcaacttttaactg

SEQ ID NO: 5413163 - DNA, 25 bp, Homo sapien
gaccccaactttctagatgtgtact

SEQ ID NO: 5413164 - DNA, 25 bp, Homo sapien
tatgccagaaacacttcttccacaa

SEQ ID NO: 5413165 - DNA, 25 bp, Homo sapien
aatttaaatgtgacaatttaatgtg

SEQ ID NO: 5413166 - DNA, 25 bp, Homo sapien
tagctgaacagcatgcaagacattg

SEQ ID NO: 5413167 - DNA, 25 bp, Homo sapien
actttcttgcagtgggtcaggcaga

SEQ ID NO: 5413168 - DNA, 25 bp, Homo sapien
ccctgtgagaagaaggttaggtact

SEQ ID NO: 5413169 - DNA, 25 bp, Homo sapien
ggttacatcaagaagtcatcaagag

SEQ ID NO: 5413170 - DNA, 25 bp, Homo sapien
gcataactgtaactaatccctaaat

SEQ ID NO: 5413171 - DNA, 25 bp, Homo sapien
caattttacgaaacagcataactgt

SEQ ID NO: 5413172 - DNA, 25 bp, Homo sapien
tcaaatgccaattttacgaaacagc

SEQ ID NO: 5413173 - DNA, 25 bp, Homo sapien
tggtctaagtgcaattctacagaag

SEQ ID NO: 5413174 - DNA, 25 bp, Homo sapien
ccatcagtgtattcttaattgtatc

SEQ ID NO: 5413175 - DNA, 25 bp, Homo sapien
cctccatcagtgtattcttaattgt

SEQ ID NO: 5413176 - DNA, 25 bp, Homo sapien
tcctccatcagtgtattcttaattg

SEQ ID NO: 5413177 - DNA, 25 bp, Homo sapien
ctccatcagtgtattcttaattgta

SEQ ID NO: 5413178 - DNA, 25 bp, Homo sapien
tgtgtcctccaacattactgaattc

SEQ ID NO: 5413179 - DNA, 25 bp, Homo sapien
ttgtaaatatatttcacctccttgt

SEQ ID NO: 5413180 - DNA, 25 bp, Homo sapien
cagattatttgttgttaacatatag

SEQ ID NO: 5413181 - DNA, 25 bp, Homo sapien
aatgggattgctttcttattttcag

SEQ ID NO: 5413182 - DNA, 25 bp, Homo sapien
tccatcaagtgtttgtccacgctgc

SEQ ID NO: 5413183 - DNA, 25 bp, Homo sapien
tccgaatcactgctaagttcctcag

SEQ ID NO: 5413184 - DNA, 25 bp, Homo sapien
aatcggattccccaggtgcaattgg

SEQ ID NO: 5413185 - DNA, 25 bp, Homo sapien
ggaggttgtttgcatcagggtcttc

SEQ ID NO: 5413186 - DNA, 25 bp, Homo sapien
tcccaccttctggatacctgatgag

SEQ ID NO: 5413187 - DNA, 25 bp, Homo sapien
catatggctgttaccatatcccacc

SEQ ID NO: 5413188 - DNA, 25 bp, Homo sapien
cctgatgagagatttgatgtcaagc

SEQ ID NO: 5413189 - DNA, 25 bp, Homo sapien
tatggctgttaccatatcccacctt

SEQ ID NO: 5413190 - DNA, 25 bp, Homo sapien
tacacatggctataaggtgcgggac

SEQ ID NO: 5413191 - DNA, 25 bp, Homo sapien
tagcttcaagagagcatatgccatc

SEQ ID NO: 5413192 - DNA, 25 bp, Homo sapien
cacaataacaggcattggactggct

SEQ ID NO: 5413193 - DNA, 25 bp, Homo sapien
tatagaggctagtcttacacatggc

SEQ ID NO: 5413194 - DNA, 25 bp, Homo sapien
aaaaataatagatcacatcatcaca

SEQ ID NO: 5413195 - DNA, 25 bp, Homo sapien
aattaaaatgcatgaacatctggtt

SEQ ID NO: 5413196 - DNA, 25 bp, Homo sapien
ttccacagagaaattaaaatgcatg

SEQ ID NO: 5413197 - DNA, 25 bp, Homo sapien
taatagatcacatcatcacaaaata

SEQ ID NO: 5413198 - DNA, 25 bp, Homo sapien
aatgatcttaatcagcatgttcaat

SEQ ID NO: 5413199 - DNA, 25 bp, Homo sapien
tacctagagcccctactgagttacc

SEQ ID NO: 5413200 - DNA, 25 bp, Homo sapien
gagttaccaatgatcttaatcagca

SEQ ID NO: 5413201 - DNA, 25 bp, Homo sapien
aataaggcacatagcttgaccagcg

SEQ ID NO: 5413202 - DNA, 25 bp, Homo sapien
cattattatccagctaaaatattct

SEQ ID NO: 5413203 - DNA, 25 bp, Homo sapien
ttagttcaggattgctatagaaacc

SEQ ID NO: 5413204 - DNA, 25 bp, Homo sapien
gcagactttaagtcctataatattg

SEQ ID NO: 5413205 - DNA, 25 bp, Homo sapien
tattttgttccacttgccacaaaaa

SEQ ID NO: 5413206 - DNA, 25 bp, Homo sapien
taaacttaaagtcacaataaggctg

SEQ ID NO: 5413207 - DNA, 25 bp, Homo sapien
tttaataccatttcagctgcaaaga

SEQ ID NO: 5413208 - DNA, 25 bp, Homo sapien
tggatccatggcaatcagttttaat

SEQ ID NO: 5413209 - DNA, 25 bp, Homo sapien
ttccacatctgctagaaagagctcc

SEQ ID NO: 5413210 - DNA, 25 bp, Homo sapien
gaattttatccaatatggagagcaa

SEQ ID NO: 5413211 - DNA, 25 bp, Homo sapien
tgggtggtgttccatagccataaat

SEQ ID NO: 5413212 - DNA, 25 bp, Homo sapien
ttgtgtgcaaatctgtaccaccaag

SEQ ID NO: 5413213 - DNA, 25 bp, Homo sapien
ggtaattgcaagatctacaaaagga

SEQ ID NO: 5413214 - DNA, 25 bp, Homo sapien
tcttgtgtatttgattggtcgtgcc

SEQ ID NO: 5413215 - DNA, 25 bp, Homo sapien
acagtgtttgttaatatgcttgctc

SEQ ID NO: 5413216 - DNA, 25 bp, Homo sapien
gaactacaacgccttttcttgtgta

SEQ ID NO: 5413217 - DNA, 25 bp, Homo sapien
tcctctgaaaggagataggaactac

SEQ ID NO: 5413218 - DNA, 25 bp, Homo sapien
agccatgcctgagctatgtaaaacg

SEQ ID NO: 5413219 - DNA, 25 bp, Homo sapien
gcctgagctatgtaaaacgtcctta

SEQ ID NO: 5413220 - DNA, 25 bp, Homo sapien
catgcctgagctatgtaaaacgtcc

SEQ ID NO: 5413221 - DNA, 25 bp, Homo sapien
ccatgcctgagctatgtaaaacgtc

SEQ ID NO: 5413222 - DNA, 25 bp, Homo sapien
ctgtcatcagaagttgccttatcta

SEQ ID NO: 5413223 - DNA, 25 bp, Homo sapien
tcagaagttgccttatctattatca

SEQ ID NO: 5413224 - DNA, 25 bp, Homo sapien
tcatcagaagttgccttatctatta

SEQ ID NO: 5413225 - DNA, 25 bp, Homo sapien
cagaagttgccttatctattatcac

SEQ ID NO: 5413226 - DNA, 25 bp, Homo sapien
gggcacaaacagtgagccccttctg

SEQ ID NO: 5413227 - DNA, 25 bp, Homo sapien
tgatgttactgctgcgtcgctcctg

SEQ ID NO: 5413228 - DNA, 25 bp, Homo sapien
aaaacaaggagccacgaatgctgag

SEQ ID NO: 5413229 - DNA, 25 bp, Homo sapien
gcatgagggctgagcgtccatcaac

SEQ ID NO: 5413230 - DNA, 25 bp, Homo sapien
tagcacttttagagctcagtttgga

SEQ ID NO: 5413231 - DNA, 25 bp, Homo sapien
atacttgtatattcagccgctgccg

SEQ ID NO: 5413232 - DNA, 25 bp, Homo sapien
tcttttcatgtgctcgcctatgccc

SEQ ID NO: 5413233 - DNA, 25 bp, Homo sapien
gcctatgcccttcgacaccaaggtg

SEQ ID NO: 5413234 - DNA, 25 bp, Homo sapien
ctgttgtaaccgtttgcatttctac

SEQ ID NO: 5413235 - DNA, 25 bp, Homo sapien
aagaaaatctagctggagaaggcca

SEQ ID NO: 5413236 - DNA, 25 bp, Homo sapien
agaaggccaagcatataccgcagag

SEQ ID NO: 5413237 - DNA, 25 bp, Homo sapien
aagcatataccgcagagcctctgtt

SEQ ID NO: 5413238 - DNA, 25 bp, Homo sapien
tctaggaagaattttaaatcaaata

SEQ ID NO: 5413239 - DNA, 25 bp, Homo sapien
ctctaggaagaattttaaatcaaat

SEQ ID NO: 5413240 - DNA, 25 bp, Homo sapien
tcttcaatgtttgcctggttctgtt

SEQ ID NO: 5413241 - DNA, 25 bp, Homo sapien
tttaagacggtctaacatctgttga

SEQ ID NO: 5413242 - DNA, 25 bp, Homo sapien
ggagcccaggaaaatcactacgaca

SEQ ID NO: 5413243 - DNA, 25 bp, Homo sapien
gccaggatcaagtttattagataaa

SEQ ID NO: 5413244 - DNA, 25 bp, Homo sapien
gcccagctgaaagtgtcaaagctcg

SEQ ID NO: 5413245 - DNA, 25 bp, Homo sapien
aaacaaggctaagaaggcccagctg

SEQ ID NO: 5413246 - DNA, 25 bp, Homo sapien
cagtaatcttgggtcattagcctaa

SEQ ID NO: 5413247 - DNA, 25 bp, Homo sapien
gctcgtgtagccataatcagggttt

SEQ ID NO: 5413248 - DNA, 25 bp, Homo sapien
gaacattataggtgagagtgtcttc

SEQ ID NO: 5413249 - DNA, 25 bp, Homo sapien
aaagaacattataggtgagagtgtc

SEQ ID NO: 5413250 - DNA, 25 bp, Homo sapien
cgagaaagaacattataggtgagag

SEQ ID NO: 5413251 - DNA, 25 bp, Homo sapien
cacacgagaaagaacattataggtg

SEQ ID NO: 5413252 - DNA, 25 bp, Homo sapien
cacaaaggagagcatctttggatcc

SEQ ID NO: 5413253 - DNA, 25 bp, Homo sapien
acaaaggagagcatctttggatcct

SEQ ID NO: 5413254 - DNA, 25 bp, Homo sapien
caaaggagagcatctttggatcctt

SEQ ID NO: 5413255 - DNA, 25 bp, Homo sapien
tggatccttccaagtaataaaaata

SEQ ID NO: 5413256 - DNA, 25 bp, Homo sapien
gctagatagcttagaaccaggatga

SEQ ID NO: 5413257 - DNA, 25 bp, Homo sapien
gaaattaggaattatggaactatcc

SEQ ID NO: 5413258 - DNA, 25 bp, Homo sapien
tttcaacctaataacaaatgcaagg

SEQ ID NO: 5413259 - DNA, 25 bp, Homo sapien
taattcaaggctacatttatttctc

SEQ ID NO: 5413260 - DNA, 25 bp, Homo sapien
tcactgactggatcaaagcccctac

SEQ ID NO: 5413261 - DNA, 25 bp, Homo sapien
caattagtgcaaacacactcagaca

SEQ ID NO: 5413262 - DNA, 25 bp, Homo sapien
tgaacagctgtagtccaattagtgc

SEQ ID NO: 5413263 - DNA, 25 bp, Homo sapien
tctctagggtattcattatgctttc

SEQ ID NO: 5413264 - DNA, 25 bp, Homo sapien
aagtgtttgtaatgacataaagcct

SEQ ID NO: 5413265 - DNA, 25 bp, Homo sapien
aaaaagtgtttgtaatgacataaag

SEQ ID NO: 5413266 - DNA, 25 bp, Homo sapien
aaaagtgtttgtaatgacataaagc

SEQ ID NO: 5413267 - DNA, 25 bp, Homo sapien
aaagtgtttgtaatgacataaagcc

SEQ ID NO: 5413268 - DNA, 25 bp, Homo sapien
gatgtgagccaagtagtcatcctca

SEQ ID NO: 5413269 - DNA, 25 bp, Homo sapien
gaacaatttggctattcaaaccact

SEQ ID NO: 5413270 - DNA, 25 bp, Homo sapien
gaatacctaggttgtcaaaatgaac

SEQ ID NO: 5413271 - DNA, 25 bp, Homo sapien
tcctaaagacccatgcaattgatta

SEQ ID NO: 5413272 - DNA, 25 bp, Homo sapien
tgttttcaatgctcggagaactctg

SEQ ID NO: 5413273 - DNA, 25 bp, Homo sapien
ctgaaattgttttcaatgctcggag

SEQ ID NO: 5413274 - DNA, 25 bp, Homo sapien
aaattgttttcaatgctcggagaac

SEQ ID NO: 5413275 - DNA, 25 bp, Homo sapien
gagaactctgaatgttctcaatgct

SEQ ID NO: 5413276 - DNA, 25 bp, Homo sapien
agaaatagttttcaaagctctcaat

SEQ ID NO: 5413277 - DNA, 25 bp, Homo sapien
aatagttttcaaagctctcaatact

SEQ ID NO: 5413278 - DNA, 25 bp, Homo sapien
tgggattacagaaatagttttcaaa

SEQ ID NO: 5413279 - DNA, 25 bp, Homo sapien
ctgggattacagaaatagttttcaa

SEQ ID NO: 5413280 - DNA, 25 bp, Homo sapien
gaagagctgaaacattgcctaggtt

SEQ ID NO: 5413281 - DNA, 25 bp, Homo sapien
tgcctaggtttacaaattctgttaa

SEQ ID NO: 5413282 - DNA, 25 bp, Homo sapien
gaaagttcgaagagctgaaacattg

SEQ ID NO: 5413283 - DNA, 25 bp, Homo sapien
gttcgaagagctgaaacattgccta

SEQ ID NO: 5413284 - DNA, 25 bp, Homo sapien
caatgacgacaaaatccagccagtt

SEQ ID NO: 5413285 - DNA, 25 bp, Homo sapien
cagttccacgggtcacgaagaaaag

SEQ ID NO: 5413286 - DNA, 25 bp, Homo sapien
agtatatattccagtaaaagtgtac

SEQ ID NO: 5413287 - DNA, 25 bp, Homo sapien
cacgggtcacgaagaaaagtgaatt

SEQ ID NO: 5413288 - DNA, 25 bp, Homo sapien
tggtccagtccggtgggttattcat

SEQ ID NO: 5413289 - DNA, 25 bp, Homo sapien
ttggtccagtccggtgggttattca

SEQ ID NO: 5413290 - DNA, 25 bp, Homo sapien
ataaatatgcagtttgtcagaatag

SEQ ID NO: 5413291 - DNA, 25 bp, Homo sapien
cataaatatgcagtttgtcagaata

SEQ ID NO: 5413292 - DNA, 25 bp, Homo sapien
gatgtaatcatttttaaaaggatat

SEQ ID NO: 5413293 - DNA, 25 bp, Homo sapien
ggatgtaatcatttttaaaaggata

SEQ ID NO: 5413294 - DNA, 25 bp, Homo sapien
tggatgtaatcatttttaaaaggat

SEQ ID NO: 5413295 - DNA, 25 bp, Homo sapien
gcattgaaacggaagattgttttcc

SEQ ID NO: 5413296 - DNA, 25 bp, Homo sapien
tatataaagcaggtgtggcattgaa

SEQ ID NO: 5413297 - DNA, 25 bp, Homo sapien
taaagcaggtgtggcattgaaacgg

SEQ ID NO: 5413298 - DNA, 25 bp, Homo sapien
caggtgtggcattgaaacggaagat

SEQ ID NO: 5413299 - DNA, 25 bp, Homo sapien
caccatgccgggaggaatgtcccca

SEQ ID NO: 5413300 - DNA, 25 bp, Homo sapien
tctgacaccatgccgggaggaatgt

SEQ ID NO: 5413301 - DNA, 25 bp, Homo sapien
aatgcgttgttcaatgagggcaaga

SEQ ID NO: 5413302 - DNA, 25 bp, Homo sapien
tgcgttgttcaatgagggcaagaga

SEQ ID NO: 5413303 - DNA, 25 bp, Homo sapien
tgttttgtgaaatggacaaagctct

SEQ ID NO: 5413304 - DNA, 25 bp, Homo sapien
ctgttttgtgaaatggacaaagctc

SEQ ID NO: 5413305 - DNA, 25 bp, Homo sapien
gttttgtgaaatggacaaagctctg

SEQ ID NO: 5413306 - DNA, 25 bp, Homo sapien
ctcttcagctcctcacataagaggc

SEQ ID NO: 5413307 - DNA, 25 bp, Homo sapien
agagtatgaaatcctacaagcagtg

SEQ ID NO: 5413308 - DNA, 25 bp, Homo sapien
ctacaagcagtgtatctttagcctg

SEQ ID NO: 5413309 - DNA, 25 bp, Homo sapien
ctgggaacttttaagagtatgaaat

SEQ ID NO: 5413310 - DNA, 25 bp, Homo sapien
tctttagcctgtaacattgcttgga

SEQ ID NO: 5413311 - DNA, 25 bp, Homo sapien
cttgaaacttgggcttaaagaccat

SEQ ID NO: 5413312 - DNA, 25 bp, Homo sapien
gttcacaacttgaaacttgggctta

SEQ ID NO: 5413313 - DNA, 25 bp, Homo sapien
tcacaacttgaaacttgggcttaaa

SEQ ID NO: 5413314 - DNA, 25 bp, Homo sapien
cacaacttgaaacttgggcttaaag

SEQ ID NO: 5413315 - DNA, 25 bp, Homo sapien
aatacaaaaatagtgagtccctgtt

SEQ ID NO: 5413316 - DNA, 25 bp, Homo sapien
aaagatctgtgctttctgggcgtgg

SEQ ID NO: 5413317 - DNA, 25 bp, Homo sapien
caccaagcaagtttgaataaattat

SEQ ID NO: 5413318 - DNA, 25 bp, Homo sapien
agttgcctaacaccaagcaagtttg

SEQ ID NO: 5413319 - DNA, 25 bp, Homo sapien
gatggtgaaatacttctcctaaccc

SEQ ID NO: 5413320 - DNA, 25 bp, Homo sapien
caaggtataacatgatatctggcac

SEQ ID NO: 5413321 - DNA, 25 bp, Homo sapien
agcacttgaagaagcacgctatcta

SEQ ID NO: 5413322 - DNA, 25 bp, Homo sapien
gccagcagtcccctaaatgcggatt

SEQ ID NO: 5413323 - DNA, 25 bp, Homo sapien
ccaaattgcaggtttatgactccca

SEQ ID NO: 5413324 - DNA, 25 bp, Homo sapien
tatcatcctaagcatcagagcagtt

SEQ ID NO: 5413325 - DNA, 25 bp, Homo sapien
cacagggaaacttgtgttacagggt

SEQ ID NO: 5413326 - DNA, 25 bp, Homo sapien
caccaaggtcttaagccaagtactt

SEQ ID NO: 5413327 - DNA, 25 bp, Homo sapien
gtaaaatgttccatttgtaaccaga

SEQ ID NO: 5413328 - DNA, 25 bp, Homo sapien
cagggattgtttgcacataccttca

SEQ ID NO: 5413329 - DNA, 25 bp, Homo sapien
gaagttcaccacctatttctggaaa

SEQ ID NO: 5413330 - DNA, 25 bp, Homo sapien
caagaagttagcttgtgcgccatac

SEQ ID NO: 5413331 - DNA, 25 bp, Homo sapien
tctttggccatcgaataaagcttgc

SEQ ID NO: 5413332 - DNA, 25 bp, Homo sapien
ttgcaacctagcccgccgatcatcc

SEQ ID NO: 5413333 - DNA, 25 bp, Homo sapien
agcccgccgatcatccccacccagt

SEQ ID NO: 5413334 - DNA, 25 bp, Homo sapien
caggagagggcgcgggcctctcctt

SEQ ID NO: 5413335 - DNA, 25 bp, Homo sapien
tccaggagagggcgcgggcctctcc

SEQ ID NO: 5413336 - DNA, 25 bp, Homo sapien
cacacttgtcacattagggatccat

SEQ ID NO: 5413337 - DNA, 25 bp, Homo sapien
ttcaggaacaatgaacaacggattc

SEQ ID NO: 5413338 - DNA, 25 bp, Homo sapien
tatcccaggatccaatgtatgtgag

SEQ ID NO: 5413339 - DNA, 25 bp, Homo sapien
tgcagatggctcatagctgtgattc

SEQ ID NO: 5413340 - DNA, 25 bp, Homo sapien
gctttcggaaggtaactggcaaaca

SEQ ID NO: 5413341 - DNA, 25 bp, Homo sapien
ggagcttagataaagcaccagctgt

SEQ ID NO: 5413342 - DNA, 25 bp, Homo sapien
taagggccaagacactatgagaatc

SEQ ID NO: 5413343 - DNA, 25 bp, Homo sapien
tcctgcttaagagccagagcttagg

SEQ ID NO: 5413344 - DNA, 25 bp, Homo sapien
gaatacaagcttaattaccatcggt

SEQ ID NO: 5413345 - DNA, 25 bp, Homo sapien
tcttaatagtggtgacttaaagccc

SEQ ID NO: 5413346 - DNA, 25 bp, Homo sapien
aaatgcagttttaatcagcccaaga

SEQ ID NO: 5413347 - DNA, 25 bp, Homo sapien
tctctgaggttgatctcaaaggcac

SEQ ID NO: 5413348 - DNA, 25 bp, Homo sapien
tccttttccaagacgcagcatgtga

SEQ ID NO: 5413349 - DNA, 25 bp, Homo sapien
gaatgatggttgctgaaactgcctc

SEQ ID NO: 5413350 - DNA, 25 bp, Homo sapien
tcaaagtagtcgtaattggctcaca

SEQ ID NO: 5413351 - DNA, 25 bp, Homo sapien
tgctagagtctatgtactgggtcct

SEQ ID NO: 5413352 - DNA, 25 bp, Homo sapien
ttatcagtaaaaatttgactaaaca

SEQ ID NO: 5413353 - DNA, 25 bp, Homo sapien
tatcagtaaaaatttgactaaacaa

SEQ ID NO: 5413354 - DNA, 25 bp, Homo sapien
ttattatcagtaaaaatttgactaa

SEQ ID NO: 5413355 - DNA, 25 bp, Homo sapien
atattattatcagtaaaaatttgac

SEQ ID NO: 5413356 - DNA, 25 bp, Homo sapien
caatggacatttgtagactctgaac

SEQ ID NO: 5413357 - DNA, 25 bp, Homo sapien
caaaaatgttccacgcaatggtgaa

SEQ ID NO: 5413358 - DNA, 25 bp, Homo sapien
taaaaacaacggaaagcgatgagct

SEQ ID NO: 5413359 - DNA, 25 bp, Homo sapien
gaacatcagtgtctatcatcatggc

SEQ ID NO: 5413360 - DNA, 25 bp, Homo sapien
catacattagcttcttcagcctgcg

SEQ ID NO: 5413361 - DNA, 25 bp, Homo sapien
cagcctgcggtactgttttctctgt

SEQ ID NO: 5413362 - DNA, 25 bp, Homo sapien
ttaaccgttataaagatatttgagc

SEQ ID NO: 5413363 - DNA, 25 bp, Homo sapien
taatgggcgaggtactggtctttga

SEQ ID NO: 5413364 - DNA, 25 bp, Homo sapien
ggtcttggaacgcagtccccttgga

SEQ ID NO: 5413365 - DNA, 25 bp, Homo sapien
tcccaaaagagattaggtgcctgtg

SEQ ID NO: 5413366 - DNA, 25 bp, Homo sapien
gaaaaggcatcttaacgtgaacaga

SEQ ID NO: 5413367 - DNA, 25 bp, Homo sapien
taatcaggttaggtactaccctgcg

SEQ ID NO: 5413368 - DNA, 25 bp, Homo sapien
atgtagatgttgacttcaaaatgag

SEQ ID NO: 5413369 - DNA, 25 bp, Homo sapien
aagtaacaatacatgtagatgttga

SEQ ID NO: 5413370 - DNA, 25 bp, Homo sapien
gtaatcagcatactcagagggagaa

SEQ ID NO: 5413371 - DNA, 25 bp, Homo sapien
acagtaatcagcatactcagaggga

SEQ ID NO: 5413372 - DNA, 25 bp, Homo sapien
tcaattgctgaattcataatagtga

SEQ ID NO: 5413373 - DNA, 25 bp, Homo sapien
taatagtgatccatccattaaatgt

SEQ ID NO: 5413374 - DNA, 25 bp, Homo sapien
acagaatcaattgctgaattcataa

SEQ ID NO: 5413375 - DNA, 25 bp, Homo sapien
ttcataatagtgatccatccattaa

SEQ ID NO: 5413376 - DNA, 25 bp, Homo sapien
tccacttgttgggtcaatgcattca

SEQ ID NO: 5413377 - DNA, 25 bp, Homo sapien
ccatagcatggattcgttaaacaga

SEQ ID NO: 5413378 - DNA, 25 bp, Homo sapien
ggttgttttgatcaaagctctcaca

SEQ ID NO: 5413379 - DNA, 25 bp, Homo sapien
aaacagaaggctttcacaccgactc

SEQ ID NO: 5413380 - DNA, 25 bp, Homo sapien
agcccacatgctggtactggaataa

SEQ ID NO: 5413381 - DNA, 25 bp, Homo sapien
aaatacactcaaatcaggctgggcg

SEQ ID NO: 5413382 - DNA, 25 bp, Homo sapien
ggaataacctaaatagcaattcaat

SEQ ID NO: 5413383 - DNA, 25 bp, Homo sapien
tatctaaagatttaacagcccacat

SEQ ID NO: 5413384 - DNA, 25 bp, Homo sapien
tattttgagtaaataggccctctgt

SEQ ID NO: 5413385 - DNA, 25 bp, Homo sapien
cagggcctaatttctgacagagtca

SEQ ID NO: 5413386 - DNA, 25 bp, Homo sapien
gactttgacctaagcatggctacta

SEQ ID NO: 5413387 - DNA, 25 bp, Homo sapien
tcctgaccttgaattgtccacagcc

SEQ ID NO: 5413388 - DNA, 25 bp, Homo sapien
ctctgaggggccgaaggaatttcat

SEQ ID NO: 5413389 - DNA, 25 bp, Homo sapien
gggccgaaggaatttcatggaaata

SEQ ID NO: 5413390 - DNA, 25 bp, Homo sapien
atagaactctgaggggccgaaggaa

SEQ ID NO: 5413391 - DNA, 25 bp, Homo sapien
aaattgagatagaactctgaggggc

SEQ ID NO: 5413392 - DNA, 25 bp, Homo sapien
aaagtaaatcaaatagcctttcatt

SEQ ID NO: 5413393 - DNA, 25 bp, Homo sapien
gtgaaagagtaagagtgaggaagaa

SEQ ID NO: 5413394 - DNA, 25 bp, Homo sapien
aagtaaatcaaatagcctttcattt

SEQ ID NO: 5413395 - DNA, 25 bp, Homo sapien
agtgaaagagtaagagtgaggaaga

SEQ ID NO: 5413396 - DNA, 25 bp, Homo sapien
ataacaaccacgaagtccagcctgt

SEQ ID NO: 5413397 - DNA, 25 bp, Homo sapien
aataacaaccacgaagtccagcctg

SEQ ID NO: 5413398 - DNA, 25 bp, Homo sapien
taacaaccacgaagtccagcctgta

SEQ ID NO: 5413399 - DNA, 25 bp, Homo sapien
aacaaccacgaagtccagcctgtac

SEQ ID NO: 5413400 - DNA, 25 bp, Homo sapien
agagaaataggccttaaaaccatat

SEQ ID NO: 5413401 - DNA, 25 bp, Homo sapien
agtaaagatcatgtcagcatattct

SEQ ID NO: 5413402 - DNA, 25 bp, Homo sapien
aatgaagatataagtaaagatcatg

SEQ ID NO: 5413403 - DNA, 25 bp, Homo sapien
aaataggccttaaaaccatatgcca

SEQ ID NO: 5413404 - DNA, 25 bp, Homo sapien
gaccaagtgaagatccgcgtctgca

SEQ ID NO: 5413405 - DNA, 25 bp, Homo sapien
gttctctacaatcttgcagcaggtt

SEQ ID NO: 5413406 - DNA, 25 bp, Homo sapien
gatgctccactgatttgaccaagtg

SEQ ID NO: 5413407 - DNA, 25 bp, Homo sapien
gctgagcagagtaacaagcccaata

SEQ ID NO: 5413408 - DNA, 25 bp, Homo sapien
gcaatatcaacagtactgcattcag

SEQ ID NO: 5413409 - DNA, 25 bp, Homo sapien
cattcagatgagctagattgcttta

SEQ ID NO: 5413410 - DNA, 25 bp, Homo sapien
tcaacagtactgcattcagatgagc

SEQ ID NO: 5413411 - DNA, 25 bp, Homo sapien
cttcagagatagcaatatcaacagt

SEQ ID NO: 5413412 - DNA, 25 bp, Homo sapien
caatatcctaagtagtcatgggcta

SEQ ID NO: 5413413 - DNA, 25 bp, Homo sapien
tcatgggctacataatctagaaagc

SEQ ID NO: 5413414 - DNA, 25 bp, Homo sapien
gttttcagggacactccaacatgct

SEQ ID NO: 5413415 - DNA, 25 bp, Homo sapien
gagtagttaatcaaccagcaagacc

SEQ ID NO: 5413416 - DNA, 25 bp, Homo sapien
ggataagtgattggctctcattttc

SEQ ID NO: 5413417 - DNA, 25 bp, Homo sapien
gaagcaattggtacagtttctgaga

SEQ ID NO: 5413418 - DNA, 25 bp, Homo sapien
cagacttactctgaatctccttatt

SEQ ID NO: 5413419 - DNA, 25 bp, Homo sapien
gggtgttgctcaattcagaaagggt

SEQ ID NO: 5413420 - DNA, 25 bp, Homo sapien
catatacctcatttacatggtccat

SEQ ID NO: 5413421 - DNA, 25 bp, Homo sapien
taacatatacctcatttacatggtc

SEQ ID NO: 5413422 - DNA, 25 bp, Homo sapien
tttaacatatacctcatttacatgg

SEQ ID NO: 5413423 - DNA, 25 bp, Homo sapien
aacatatacctcatttacatggtcc

SEQ ID NO: 5413424 - DNA, 25 bp, Homo sapien
cactgcaagctggagattttttgct

SEQ ID NO: 5413425 - DNA, 25 bp, Homo sapien
aactaaatgagctcaccaatgccag

SEQ ID NO: 5413426 - DNA, 25 bp, Homo sapien
aaatgagctcaccaatgccagaaac

SEQ ID NO: 5413427 - DNA, 25 bp, Homo sapien
cttcagctgttacatccttgcatga

SEQ ID NO: 5413428 - DNA, 25 bp, Homo sapien
gcaactgagcataaggaggacctac

SEQ ID NO: 5413429 - DNA, 25 bp, Homo sapien
tgtttcatgcccagagcaggacaga

SEQ ID NO: 5413430 - DNA, 25 bp, Homo sapien
acagagtggtatggcaggagattcc

SEQ ID NO: 5413431 - DNA, 25 bp, Homo sapien
tgcgtactacatgatctgacagccc

SEQ ID NO: 5413432 - DNA, 25 bp, Homo sapien
atggaaaatgtaaaagaattgacta

SEQ ID NO: 5413433 - DNA, 25 bp, Homo sapien
tggaaaatgtaaaagaattgactac

SEQ ID NO: 5413434 - DNA, 25 bp, Homo sapien
cttataccagttttcatggaaaatg

SEQ ID NO: 5413435 - DNA, 25 bp, Homo sapien
ataccagttttcatggaaaatgtaa

SEQ ID NO: 5413436 - DNA, 25 bp, Homo sapien
gacagtctttgtctatgtggcagac

SEQ ID NO: 5413437 - DNA, 25 bp, Homo sapien
aaaaggaatacaccaggattggcct

SEQ ID NO: 5413438 - DNA, 25 bp, Homo sapien
gcttcatgccgaatgcagcagaaaa

SEQ ID NO: 5413439 - DNA, 25 bp, Homo sapien
aattcggaacacattcaggaaggag

SEQ ID NO: 5413440 - DNA, 25 bp, Homo sapien
gggccacccatgagttactaagaga

SEQ ID NO: 5413441 - DNA, 25 bp, Homo sapien
tgctttccaaaatgtactcagttac

SEQ ID NO: 5413442 - DNA, 25 bp, Homo sapien
gagactgcttactctttccttggca

SEQ ID NO: 5413443 - DNA, 25 bp, Homo sapien
tgtcccaatgggataggtattactg

SEQ ID NO: 5413444 - DNA, 25 bp, Homo sapien
tgtggtcaaataacagcattggaga

SEQ ID NO: 5413445 - DNA, 25 bp, Homo sapien
cattcctgcaacatttgctagacaa

SEQ ID NO: 5413446 - DNA, 25 bp, Homo sapien
cgaagaagagccattcctgcaacat

SEQ ID NO: 5413447 - DNA, 25 bp, Homo sapien
cctgcaacatttgctagacaaagtt

SEQ ID NO: 5413448 - DNA, 25 bp, Homo sapien
tcgaagaagagccattcctgcaaca

SEQ ID NO: 5413449 - DNA, 25 bp, Homo sapien
tacccatatggatgcattgcaatta

SEQ ID NO: 5413450 - DNA, 25 bp, Homo sapien
tatcatgctatcaaaaatgttccaa

SEQ ID NO: 5413451 - DNA, 25 bp, Homo sapien
gaaatacccatatggatgcattgca

SEQ ID NO: 5413452 - DNA, 25 bp, Homo sapien
tattaaaccatggaacactatcatg

SEQ ID NO: 5413453 - DNA, 25 bp, Homo sapien
tataatcctatggacaaactctttc

SEQ ID NO: 5413454 - DNA, 25 bp, Homo sapien
caaacttataccagtataatgggca

SEQ ID NO: 5413455 - DNA, 25 bp, Homo sapien
ccagatcaagaaagttttagcaaac

SEQ ID NO: 5413456 - DNA, 25 bp, Homo sapien
cattggataatgctccaaggtcaga

SEQ ID NO: 5413457 - DNA, 25 bp, Homo sapien
cttccttatgtctgagagtagcatc

SEQ ID NO: 5413458 - DNA, 25 bp, Homo sapien
tatgtctgagagtagcatcttccaa

SEQ ID NO: 5413459 - DNA, 25 bp, Homo sapien
gtggaaattggtgaccttttcttca

SEQ ID NO: 5413460 - DNA, 25 bp, Homo sapien
tgtctgtggaaattggtgacctttt

SEQ ID NO: 5413461 - DNA, 25 bp, Homo sapien
gaaattttggttcaatcttcttaga

SEQ ID NO: 5413462 - DNA, 25 bp, Homo sapien
gatatttcaccaactctctgctttt

SEQ ID NO: 5413463 - DNA, 25 bp, Homo sapien
atcttcttagatatttcaccaactc

SEQ ID NO: 5413464 - DNA, 25 bp, Homo sapien
ccagtctgttgaaattttggttcaa

SEQ ID NO: 5413465 - DNA, 25 bp, Homo sapien
tatcatgtagaccttcccagaagca

SEQ ID NO: 5413466 - DNA, 25 bp, Homo sapien
aaaatatcatgtagaccttcccaga

SEQ ID NO: 5413467 - DNA, 25 bp, Homo sapien
tagaccttcccagaagcataaagta

SEQ ID NO: 5413468 - DNA, 25 bp, Homo sapien
ggcaagtatgcctaagaacaaactt

SEQ ID NO: 5413469 - DNA, 25 bp, Homo sapien
gtcaaccaaaataagcatggactgg

SEQ ID NO: 5413470 - DNA, 25 bp, Homo sapien
acttcagaagttagagtaatgctgc

SEQ ID NO: 5413471 - DNA, 25 bp, Homo sapien
tattatgaaactttgtctgtgcccc

SEQ ID NO: 5413472 - DNA, 25 bp, Homo sapien
cctttctgagaaactatgacacata

SEQ ID NO: 5413473 - DNA, 25 bp, Homo sapien
ttagttacgaatacagactctcaga

SEQ ID NO: 5413474 - DNA, 25 bp, Homo sapien
gttacgaatacagactctcagaatt

SEQ ID NO: 5413475 - DNA, 25 bp, Homo sapien
gccttctgttattgtaactggaaca

SEQ ID NO: 5413476 - DNA, 25 bp, Homo sapien
aactggaacatggttgaatattgaa

SEQ ID NO: 5413477 - DNA, 25 bp, Homo sapien
ttcaactaaagaattaatacctaga

SEQ ID NO: 5413478 - DNA, 25 bp, Homo sapien
tcaactaaagaattaatacctagat

SEQ ID NO: 5413479 - DNA, 25 bp, Homo sapien
tcaaaatgtttcaactaaagaatta

SEQ ID NO: 5413480 - DNA, 25 bp, Homo sapien
ggcatggtgccattcctaagtacag

SEQ ID NO: 5413481 - DNA, 25 bp, Homo sapien
ggcaatgtggccagcatataatttg

SEQ ID NO: 5413482 - DNA, 25 bp, Homo sapien
taaataagatataatacacctggca

SEQ ID NO: 5413483 - DNA, 25 bp, Homo sapien
tgacattcagtaattctagttctct

SEQ ID NO: 5413484 - DNA, 25 bp, Homo sapien
caaaatttgtgaagccttgatcagg

SEQ ID NO: 5413485 - DNA, 25 bp, Homo sapien
gataaagtacttcagggtaatcctg

SEQ ID NO: 5413486 - DNA, 25 bp, Homo sapien
tcctgagccattaaccgaaataggg

SEQ ID NO: 5413487 - DNA, 25 bp, Homo sapien
gaaatagggcaaataaggcccagcc

SEQ ID NO: 5413488 - DNA, 25 bp, Homo sapien
cacaaaggagagcatatctttctcc

SEQ ID NO: 5413489 - DNA, 25 bp, Homo sapien
tgtcctgttgccacaaaggagagca

SEQ ID NO: 5413490 - DNA, 25 bp, Homo sapien
cagcatctgtcctgttgccacaaag

SEQ ID NO: 5413491 - DNA, 25 bp, Homo sapien
gagagcatatctttctccttccaaa

SEQ ID NO: 5413492 - DNA, 25 bp, Homo sapien
cgaatataatatgggtttccagttc

SEQ ID NO: 5413493 - DNA, 25 bp, Homo sapien
ctcgaatataatatgggtttccagt

SEQ ID NO: 5413494 - DNA, 25 bp, Homo sapien
gaatataatatgggtttccagttct

SEQ ID NO: 5413495 - DNA, 25 bp, Homo sapien
tcgaatataatatgggtttccagtt

SEQ ID NO: 5413496 - DNA, 25 bp, Homo sapien
tcaagttgcccatgaagagccccat

SEQ ID NO: 5413497 - DNA, 25 bp, Homo sapien
tatgtttcaagttgcccatgaagag

SEQ ID NO: 5413498 - DNA, 25 bp, Homo sapien
ttcaagttgcccatgaagagcccca

SEQ ID NO: 5413499 - DNA, 25 bp, Homo sapien
aacatttatgtttcaagttgcccat

SEQ ID NO: 5413500 - DNA, 25 bp, Homo sapien
gttaggataatgacaccaataagct

SEQ ID NO: 5413501 - DNA, 25 bp, Homo sapien
gacaccaataagctgcttcaagcag

SEQ ID NO: 5413502 - DNA, 25 bp, Homo sapien
gatcaggacccctacaagggatttc

SEQ ID NO: 5413503 - DNA, 25 bp, Homo sapien
tgcttcaagcagtggatcaggaccc

SEQ ID NO: 5413504 - DNA, 25 bp, Homo sapien
ttctcaaagttcttgcagtttgaag

SEQ ID NO: 5413505 - DNA, 25 bp, Homo sapien
ttgaagcgttggaatgaagtccaga

SEQ ID NO: 5413506 - DNA, 25 bp, Homo sapien
cagaggtgagtatcttataataacc

SEQ ID NO: 5413507 - DNA, 25 bp, Homo sapien
aagtccagaggtgagtatcttataa

SEQ ID NO: 5413508 - DNA, 25 bp, Homo sapien
atcaccgaggaaggaaaatgatcct

SEQ ID NO: 5413509 - DNA, 25 bp, Homo sapien
tgcccagacacctcttgcaaagagt

SEQ ID NO: 5413510 - DNA, 25 bp, Homo sapien
cacagttacgctgaaatcgagccag

SEQ ID NO: 5413511 - DNA, 25 bp, Homo sapien
agttccatggatcaccgaggaagga

SEQ ID NO: 5413512 - DNA, 25 bp, Homo sapien
tacgcaatcaatcaggacactaatt

SEQ ID NO: 5413513 - DNA, 25 bp, Homo sapien
ttagtcagggacatgaatacgcaat

SEQ ID NO: 5413514 - DNA, 25 bp, Homo sapien
tctaatactggtctccattttggca

SEQ ID NO: 5413515 - DNA, 25 bp, Homo sapien
caatcaggacactaattagaataaa

SEQ ID NO: 5413516 - DNA, 25 bp, Homo sapien
gttgttcttctaatacaattgaaag

SEQ ID NO: 5413517 - DNA, 25 bp, Homo sapien
gttcttctaatacaattgaaaggag

SEQ ID NO: 5413518 - DNA, 25 bp, Homo sapien
acaattgaaaggagacaatgtacac

SEQ ID NO: 5413519 - DNA, 25 bp, Homo sapien
caaaaccttgatagttgttcttcta

SEQ ID NO: 5413520 - DNA, 25 bp, Homo sapien
aagatggaagccgcattgaatctga

SEQ ID NO: 5413521 - DNA, 25 bp, Homo sapien
aagccgcattgaatctgaagattgt

SEQ ID NO: 5413522 - DNA, 25 bp, Homo sapien
agatggaagccgcattgaatctgaa

SEQ ID NO: 5413523 - DNA, 25 bp, Homo sapien
tggaagccgcattgaatctgaagat

SEQ ID NO: 5413524 - DNA, 25 bp, Homo sapien
tataagttcaaaagactctttagtg

SEQ ID NO: 5413525 - DNA, 25 bp, Homo sapien
gtgttttagcaatatgctgttttat

SEQ ID NO: 5413526 - DNA, 25 bp, Homo sapien
cttcatggtcttcattatgtgtttt

SEQ ID NO: 5413527 - DNA, 25 bp, Homo sapien
tatgggtccacatcttccaagggct

SEQ ID NO: 5413528 - DNA, 25 bp, Homo sapien
tgcaaaaaattctgtattaaagttg

SEQ ID NO: 5413529 - DNA, 25 bp, Homo sapien
ctgcaaaaaattctgtattaaagtt

SEQ ID NO: 5413530 - DNA, 25 bp, Homo sapien
gaagatccacactcttttcatatct

SEQ ID NO: 5413531 - DNA, 25 bp, Homo sapien
tttgggcactagttttccctcagct

SEQ ID NO: 5413532 - DNA, 25 bp, Homo sapien
ctctaatgacctggccatgttggca

SEQ ID NO: 5413533 - DNA, 25 bp, Homo sapien
atgacctggccatgttggcattcac

SEQ ID NO: 5413534 - DNA, 25 bp, Homo sapien
cacaatggaacgctattcggacttt

SEQ ID NO: 5413535 - DNA, 25 bp, Homo sapien
aaaaatctagaactggcacatttac

SEQ ID NO: 5413536 - DNA, 25 bp, Homo sapien
ttgcactgctattttatttggatta

SEQ ID NO: 5413537 - DNA, 25 bp, Homo sapien
catttactgaaaccctggaggcttc

SEQ ID NO: 5413538 - DNA, 25 bp, Homo sapien
aaagctcctttagcttttcaaatgt

SEQ ID NO: 5413539 - DNA, 25 bp, Homo sapien
tccaggattccaacctgccctccct

SEQ ID NO: 5413540 - DNA, 25 bp, Homo sapien
aagctcctttagcttttcaaatgtg

SEQ ID NO: 5413541 - DNA, 25 bp, Homo sapien
ttccaggattccaacctgccctccc

SEQ ID NO: 5413542 - DNA, 25 bp, Homo sapien
aaaatgtccaacatggagccccagg

SEQ ID NO: 5413543 - DNA, 25 bp, Homo sapien
tgcttagaccatgtcgcctctggga

SEQ ID NO: 5413544 - DNA, 25 bp, Homo sapien
gagcctgtaatcaagtgcttagacc

SEQ ID NO: 5413545 - DNA, 25 bp, Homo sapien
gaaaggtgccttgaaacatcttagg

SEQ ID NO: 5413546 - DNA, 25 bp, Homo sapien
gctggcagcggatagcggctatcac

SEQ ID NO: 5413547 - DNA, 25 bp, Homo sapien
taatgcacgtccacaatttcaaatc

SEQ ID NO: 5413548 - DNA, 25 bp, Homo sapien
ggaccctaagggtgtgtatgggatg

SEQ ID NO: 5413549 - DNA, 25 bp, Homo sapien
ctgctggggaccctaagggtgtgta

SEQ ID NO: 5413550 - DNA, 25 bp, Homo sapien
ccacggatctctcgggttttctgag

SEQ ID NO: 5413551 - DNA, 25 bp, Homo sapien
ttgctacgaagcgacaggtctccac

SEQ ID NO: 5413552 - DNA, 25 bp, Homo sapien
tgctgttaggctggcgtctgtcctc

SEQ ID NO: 5413553 - DNA, 25 bp, Homo sapien
accagtgcctgagggacccttcagg

SEQ ID NO: 5413554 - DNA, 25 bp, Homo sapien
ctaaatggccagttagacaccgact

SEQ ID NO: 5413555 - DNA, 25 bp, Homo sapien
aatggccagttagacaccgactcac

SEQ ID NO: 5413556 - DNA, 25 bp, Homo sapien
tcactggggcgactctccagccact

SEQ ID NO: 5413557 - DNA, 25 bp, Homo sapien
gccagttagacaccgactcactggg

SEQ ID NO: 5413558 - DNA, 25 bp, Homo sapien
ccaaaggccacaccatagaaccttc

SEQ ID NO: 5413559 - DNA, 25 bp, Homo sapien
caaaggccacaccatagaaccttca

SEQ ID NO: 5413560 - DNA, 25 bp, Homo sapien
aaaggccacaccatagaaccttcat

SEQ ID NO: 5413561 - DNA, 25 bp, Homo sapien
tcccaaaggccacaccatagaacct

SEQ ID NO: 5413562 - DNA, 25 bp, Homo sapien
cttatcacctctcctgcactgccaa

SEQ ID NO: 5413563 - DNA, 25 bp, Homo sapien
tgccaactctctcccaaaactaact

SEQ ID NO: 5413564 - DNA, 25 bp, Homo sapien
aactctctcccaaaactaactgcat

SEQ ID NO: 5413565 - DNA, 25 bp, Homo sapien
tcctgcactgccaactctctcccaa

SEQ ID NO: 5413566 - DNA, 25 bp, Homo sapien
ttccttttcttacctgcttcctcat

SEQ ID NO: 5413567 - DNA, 25 bp, Homo sapien
tcctgattccttttcttacctgctt

SEQ ID NO: 5413568 - DNA, 25 bp, Homo sapien
gattccttttcttacctgcttcctc

SEQ ID NO: 5413569 - DNA, 25 bp, Homo sapien
tcttcctgattccttttcttacctg

SEQ ID NO: 5413570 - DNA, 25 bp, Homo sapien
ggtagtggccgatgtccttataagg

SEQ ID NO: 5413571 - DNA, 25 bp, Homo sapien
gaggtagtggccgatgtccttataa

SEQ ID NO: 5413572 - DNA, 25 bp, Homo sapien
actgaggtagtggccgatgtcctta

SEQ ID NO: 5413573 - DNA, 25 bp, Homo sapien
gtagtggccgatgtccttataaggc

SEQ ID NO: 5413574 - DNA, 25 bp, Homo sapien
caactcaagtctggccaacttgcgt

SEQ ID NO: 5413575 - DNA, 25 bp, Homo sapien
ccaaatcacaactcaagtctggcca

SEQ ID NO: 5413576 - DNA, 25 bp, Homo sapien
tcacaactcaagtctggccaacttg

SEQ ID NO: 5413577 - DNA, 25 bp, Homo sapien
aatcacaactcaagtctggccaact

SEQ ID NO: 5413578 - DNA, 25 bp, Homo sapien
ccaaatcagggtttccattgcaaac

SEQ ID NO: 5413579 - DNA, 25 bp, Homo sapien
caccaaatcagggtttccattgcaa

SEQ ID NO: 5413580 - DNA, 25 bp, Homo sapien
tcaccaaatcagggtttccattgca

SEQ ID NO: 5413581 - DNA, 25 bp, Homo sapien
accaaatcagggtttccattgcaaa

SEQ ID NO: 5413582 - DNA, 25 bp, Homo sapien
gactggccctgtacatatttggcta

SEQ ID NO: 5413583 - DNA, 25 bp, Homo sapien
ttccggatggcaaacaagaaacaca

SEQ ID NO: 5413584 - DNA, 25 bp, Homo sapien
taagaacggcttctcttgcacgact

SEQ ID NO: 5413585 - DNA, 25 bp, Homo sapien
tttgagtccgtgcacagccttatgc

SEQ ID NO: 5413586 - DNA, 25 bp, Homo sapien
tactctctacaaggcacaattgaaa

SEQ ID NO: 5413587 - DNA, 25 bp, Homo sapien
tgagtgctttcagtcccgttttagg

SEQ ID NO: 5413588 - DNA, 25 bp, Homo sapien
caggagtattttggtcactgagaga

SEQ ID NO: 5413589 - DNA, 25 bp, Homo sapien
taaaacttgacgaataaatgtgctc

SEQ ID NO: 5413590 - DNA, 25 bp, Homo sapien
cagattctatcacacccactcccct

SEQ ID NO: 5413591 - DNA, 25 bp, Homo sapien
gcagattctatcacacccactcccc

SEQ ID NO: 5413592 - DNA, 25 bp, Homo sapien
aagaatttgcaatctctactgtctt

SEQ ID NO: 5413593 - DNA, 25 bp, Homo sapien
tcaagaatttgcaatctctactgtc

SEQ ID NO: 5413594 - DNA, 25 bp, Homo sapien
tatgttcagaaaatacttccaatag

SEQ ID NO: 5413595 - DNA, 25 bp, Homo sapien
aagatagacatgaaatatgttcaga

SEQ ID NO: 5413596 - DNA, 25 bp, Homo sapien
gatggaaaccacagcatgggttatc

SEQ ID NO: 5413597 - DNA, 25 bp, Homo sapien
gcatgggttatctcttctgactgca

SEQ ID NO: 5413598 - DNA, 25 bp, Homo sapien
tttccgtcctgtcacttgattactt

SEQ ID NO: 5413599 - DNA, 25 bp, Homo sapien
agtcaggaaatagcatccagtatag

SEQ ID NO: 5413600 - DNA, 25 bp, Homo sapien
gaaatagcatccagtataggagatc

SEQ ID NO: 5413601 - DNA, 25 bp, Homo sapien
tgtcacttgattactttcctttgct

SEQ ID NO: 5413602 - DNA, 25 bp, Homo sapien
ctaccaaaagggaggacagtcaaca

SEQ ID NO: 5413603 - DNA, 25 bp, Homo sapien
taccaaaagggaggacagtcaacaa

SEQ ID NO: 5413604 - DNA, 25 bp, Homo sapien
caaaagggaggacagtcaacaacac

SEQ ID NO: 5413605 - DNA, 25 bp, Homo sapien
aagggaggacagtcaacaacacatc

SEQ ID NO: 5413606 - DNA, 25 bp, Homo sapien
gctccttgtttactaacgacatccg

SEQ ID NO: 5413607 - DNA, 25 bp, Homo sapien
ctaacgacatccgtgattataattc

SEQ ID NO: 5413608 - DNA, 25 bp, Homo sapien
catgtgctccttgtttactaacgac

SEQ ID NO: 5413609 - DNA, 25 bp, Homo sapien
tgtttactaacgacatccgtgatta

SEQ ID NO: 5413610 - DNA, 25 bp, Homo sapien
tctatggccatttcaagacacattt

SEQ ID NO: 5413611 - DNA, 25 bp, Homo sapien
ccatttcaagacacattttctgcat

SEQ ID NO: 5413612 - DNA, 25 bp, Homo sapien
cttctatggccatttcaagacacat

SEQ ID NO: 5413613 - DNA, 25 bp, Homo sapien
gcattttttctcctactgtagtcat

SEQ ID NO: 5413614 - DNA, 25 bp, Homo sapien
gccacgtgggacttttggacttcca

SEQ ID NO: 5413615 - DNA, 25 bp, Homo sapien
ttccaaattataacatctgctgctt

SEQ ID NO: 5413616 - DNA, 25 bp, Homo sapien
tccaaattataacatctgctgcttt

SEQ ID NO: 5413617 - DNA, 25 bp, Homo sapien
cttccaaattataacatctgctgct

SEQ ID NO: 5413618 - DNA, 25 bp, Homo sapien
ttttcaacaccttcacatttagtta

SEQ ID NO: 5413619 - DNA, 25 bp, Homo sapien
caacaccttcacatttagttaccat

SEQ ID NO: 5413620 - DNA, 25 bp, Homo sapien
ttcaacaccttcacatttagttacc

SEQ ID NO: 5413621 - DNA, 25 bp, Homo sapien
cgttttcaacaccttcacatttagt

SEQ ID NO: 5413622 - DNA, 25 bp, Homo sapien
tcctacttcctttcgatgacgcctt

SEQ ID NO: 5413623 - DNA, 25 bp, Homo sapien
ttcctacttcctttcgatgacgcct

SEQ ID NO: 5413624 - DNA, 25 bp, Homo sapien
cctacttcctttcgatgacgccttc

SEQ ID NO: 5413625 - DNA, 25 bp, Homo sapien
taaaatctcatcaaccaaatgagtt

SEQ ID NO: 5413626 - DNA, 25 bp, Homo sapien
tctcatcaaccaaatgagttttatc

SEQ ID NO: 5413627 - DNA, 25 bp, Homo sapien
aatctcatcaaccaaatgagtttta

SEQ ID NO: 5413628 - DNA, 25 bp, Homo sapien
ctaaaatctcatcaaccaaatgagt

SEQ ID NO: 5413629 - DNA, 25 bp, Homo sapien
tgagtaagattcaaacccactggtc

SEQ ID NO: 5413630 - DNA, 25 bp, Homo sapien
tggttgtagcaaagctctaagaatg

SEQ ID NO: 5413631 - DNA, 25 bp, Homo sapien
agaatgagcactagtaaattataca

SEQ ID NO: 5413632 - DNA, 25 bp, Homo sapien
tgttcagggttttcaaggaggcgca

SEQ ID NO: 5413633 - DNA, 25 bp, Homo sapien
taaatgctacggatgtcttgagttc

SEQ ID NO: 5413634 - DNA, 25 bp, Homo sapien
gctacggatgtcttgagttccaaaa

SEQ ID NO: 5413635 - DNA, 25 bp, Homo sapien
ggatgtcttgagttccaaaaggtgc

SEQ ID NO: 5413636 - DNA, 25 bp, Homo sapien
aacagtaaatgctacggatgtcttg

SEQ ID NO: 5413637 - DNA, 25 bp, Homo sapien
caagatggtgtgcatcgtcctttac

SEQ ID NO: 5413638 - DNA, 25 bp, Homo sapien
cagatgccttgcaagatggtgtgca

SEQ ID NO: 5413639 - DNA, 25 bp, Homo sapien
tgcatcgtcctttacatctgtgttc

SEQ ID NO: 5413640 - DNA, 25 bp, Homo sapien
gcagatgccttgcaagatggtgtgc

SEQ ID NO: 5413641 - DNA, 25 bp, Homo sapien
cactggtgaatcataactgactggc

SEQ ID NO: 5413642 - DNA, 25 bp, Homo sapien
cacagctaaggtagtcttagaggga

SEQ ID NO: 5413643 - DNA, 25 bp, Homo sapien
gccagtgtatatgtgcacaggcaca

SEQ ID NO: 5413644 - DNA, 25 bp, Homo sapien
gatcccagtttaacaagctaacatc

SEQ ID NO: 5413645 - DNA, 25 bp, Homo sapien
ccagaacaaagaatccgatgatagc

SEQ ID NO: 5413646 - DNA, 25 bp, Homo sapien
tccaaaaacagcaccacaattatca

SEQ ID NO: 5413647 - DNA, 25 bp, Homo sapien
gcttataatcagatagttccaaaaa

SEQ ID NO: 5413648 - DNA, 25 bp, Homo sapien
cctttagatgaaagctaatgtggag

SEQ ID NO: 5413649 - DNA, 25 bp, Homo sapien
gcagtgtggggctctctggtagttg

SEQ ID NO: 5413650 - DNA, 25 bp, Homo sapien
tgtcggggctagaagccagagccca

SEQ ID NO: 5413651 - DNA, 25 bp, Homo sapien
cagtgtggggctctctggtagttgt

SEQ ID NO: 5413652 - DNA, 25 bp, Homo sapien
tctctggtagttgtcggggctagaa

SEQ ID NO: 5413653 - DNA, 25 bp, Homo sapien
ggatctctatttgtgtgatgaacag

SEQ ID NO: 5413654 - DNA, 25 bp, Homo sapien
tttgtgtgatgaacagttgcaccat

SEQ ID NO: 5413655 - DNA, 25 bp, Homo sapien
ctctatttgtgtgatgaacagttgc

SEQ ID NO: 5413656 - DNA, 25 bp, Homo sapien
tttctgtggatctctatttgtgtga

SEQ ID NO: 5413657 - DNA, 25 bp, Homo sapien
taggcaaaggcaaatagtaagccag

SEQ ID NO: 5413658 - DNA, 25 bp, Homo sapien
caaaggcaaatagtaagccagtttt

SEQ ID NO: 5413659 - DNA, 25 bp, Homo sapien
attaggcaaaggcaaatagtaagcc

SEQ ID NO: 5413660 - DNA, 25 bp, Homo sapien
gggattaggcaaaggcaaatagtaa

SEQ ID NO: 5413661 - DNA, 25 bp, Homo sapien
taggaacaactctgtctttgtctgc

SEQ ID NO: 5413662 - DNA, 25 bp, Homo sapien
tccagcatcagttatctccaacaga

SEQ ID NO: 5413663 - DNA, 25 bp, Homo sapien
agtcctaacgcaagtaacaaactgg

SEQ ID NO: 5413664 - DNA, 25 bp, Homo sapien
tgctcttaatcagggctataatgat

SEQ ID NO: 5413665 - DNA, 25 bp, Homo sapien
caggaagtggctagtgttgaactgc

SEQ ID NO: 5413666 - DNA, 25 bp, Homo sapien
gtataaatggctgcacacctctccc

SEQ ID NO: 5413667 - DNA, 25 bp, Homo sapien
ttttccaacccaatgcatgccctga

SEQ ID NO: 5413668 - DNA, 25 bp, Homo sapien
gccaccaaggaactccagagaggta

SEQ ID NO: 5413669 - DNA, 25 bp, Homo sapien
accaaagctccatggttatcctggg

SEQ ID NO: 5413670 - DNA, 25 bp, Homo sapien
ttcaaccaaagctccatggttatcc

SEQ ID NO: 5413671 - DNA, 25 bp, Homo sapien
caaagctccatggttatcctgggct

SEQ ID NO: 5413672 - DNA, 25 bp, Homo sapien
aagctccatggttatcctgggctga

SEQ ID NO: 5413673 - DNA, 25 bp, Homo sapien
tatatgtactgtcaatgagggacag

SEQ ID NO: 5413674 - DNA, 25 bp, Homo sapien
gccgaatcagtgcagcgtacgtaat

SEQ ID NO: 5413675 - DNA, 25 bp, Homo sapien
tcctaggaggagtaacaaattctat

SEQ ID NO: 5413676 - DNA, 25 bp, Homo sapien
tacgtaatgctcagtaacttaaccc

SEQ ID NO: 5413677 - DNA, 25 bp, Homo sapien
ttacatatgaaatgctttcctgcac

SEQ ID NO: 5413678 - DNA, 25 bp, Homo sapien
gacacctccctaaacaatttctgtg

SEQ ID NO: 5413679 - DNA, 25 bp, Homo sapien
agacacctccctaaacaatttctgt

SEQ ID NO: 5413680 - DNA, 25 bp, Homo sapien
acacctccctaaacaatttctgtgc

SEQ ID NO: 5413681 - DNA, 25 bp, Homo sapien
gttcttgatgttgatgagtccttcc

SEQ ID NO: 5413682 - DNA, 25 bp, Homo sapien
tcttgatgttgatgagtccttccat

SEQ ID NO: 5413683 - DNA, 25 bp, Homo sapien
ctgcttggggttcttgatgttgatg

SEQ ID NO: 5413684 - DNA, 25 bp, Homo sapien
ggggttcttgatgttgatgagtcct

SEQ ID NO: 5413685 - DNA, 25 bp, Homo sapien
ttagttggcccatagcgttcatcta

SEQ ID NO: 5413686 - DNA, 25 bp, Homo sapien
cttttctttagttggcccatagcgt

SEQ ID NO: 5413687 - DNA, 25 bp, Homo sapien
tctttagttggcccatagcgttcat

SEQ ID NO: 5413688 - DNA, 25 bp, Homo sapien
tagttggcccatagcgttcatctag

SEQ ID NO: 5413689 - DNA, 25 bp, Homo sapien
ttggtgtccccactgcctatcaggg

SEQ ID NO: 5413690 - DNA, 25 bp, Homo sapien
cctatcagggtgataggcacaggaa

SEQ ID NO: 5413691 - DNA, 25 bp, Homo sapien
gtcagcatgtagcagaggactccag

SEQ ID NO: 5413692 - DNA, 25 bp, Homo sapien
gggagtaattcttgggatacttcat

SEQ ID NO: 5413693 - DNA, 25 bp, Homo sapien
ggagattgactataatcagtaaaac

SEQ ID NO: 5413694 - DNA, 25 bp, Homo sapien
aggagattgactataatcagtaaaa

SEQ ID NO: 5413695 - DNA, 25 bp, Homo sapien
caggagattgactataatcagtaaa

SEQ ID NO: 5413696 - DNA, 25 bp, Homo sapien
ataatcagtaaaacattgaatgtca

SEQ ID NO: 5413697 - DNA, 25 bp, Homo sapien
tattggtttaccatttcttgttcac

SEQ ID NO: 5413698 - DNA, 25 bp, Homo sapien
ttattggtttaccatttcttgttca

SEQ ID NO: 5413699 - DNA, 25 bp, Homo sapien
tcttgttcactgctagtccagtcag

SEQ ID NO: 5413700 - DNA, 25 bp, Homo sapien
atttcttgttcactgctagtccagt

SEQ ID NO: 5413701 - DNA, 25 bp, Homo sapien
tggtcataaacagcccacctggcat

SEQ ID NO: 5413702 - DNA, 25 bp, Homo sapien
gttggtcataaacagcccacctggc

SEQ ID NO: 5413703 - DNA, 25 bp, Homo sapien
aagttggtcataaacagcccacctg

SEQ ID NO: 5413704 - DNA, 25 bp, Homo sapien
ttggtcataaacagcccacctggca

SEQ ID NO: 5413705 - DNA, 25 bp, Homo sapien
gaaaaaaggctctgtgtccatgctc

SEQ ID NO: 5413706 - DNA, 25 bp, Homo sapien
gctctgtgtccatgctcaaatgaga

SEQ ID NO: 5413707 - DNA, 25 bp, Homo sapien
tcaccgtgctaaagaccacaaagaa

SEQ ID NO: 5413708 - DNA, 25 bp, Homo sapien
tttctcttcaccgtgctaaagacca

SEQ ID NO: 5413709 - DNA, 25 bp, Homo sapien
ctggattcctggaagtaaattccga

SEQ ID NO: 5413710 - DNA, 25 bp, Homo sapien
aagtaaattccgaattagttcatct

SEQ ID NO: 5413711 - DNA, 25 bp, Homo sapien
taaattccgaattagttcatctttg

SEQ ID NO: 5413712 - DNA, 25 bp, Homo sapien
tggattcctggaagtaaattccgaa

SEQ ID NO: 5413713 - DNA, 25 bp, Homo sapien
aaacaagtagattatgcatgatgcc

SEQ ID NO: 5413714 - DNA, 25 bp, Homo sapien
gcccacaattgctctaaagactaca

SEQ ID NO: 5413715 - DNA, 25 bp, Homo sapien
tttctggcatttgataggtgcccaa

SEQ ID NO: 5413716 - DNA, 25 bp, Homo sapien
tagcctataagtgattgtaccagac

SEQ ID NO: 5413717 - DNA, 25 bp, Homo sapien
ggacatttctcagttgcgctttctt

SEQ ID NO: 5413718 - DNA, 25 bp, Homo sapien
aagtctccttgcttacagaccgtaa

SEQ ID NO: 5413719 - DNA, 25 bp, Homo sapien
ttttgtttctctcacgtatcatggg

SEQ ID NO: 5413720 - DNA, 25 bp, Homo sapien
ttccctggaaatggtagcttctgct

SEQ ID NO: 5413721 - DNA, 25 bp, Homo sapien
tcactattacagtcagtgagtcaaa

SEQ ID NO: 5413722 - DNA, 25 bp, Homo sapien
ttacagtcagatccacctgcagatt

SEQ ID NO: 5413723 - DNA, 25 bp, Homo sapien
tccttttagtcactattacagtcag

SEQ ID NO: 5413724 - DNA, 25 bp, Homo sapien
gatgactcccacatgttccttttag

SEQ ID NO: 5413725 - DNA, 25 bp, Homo sapien
tttttgcgttgctatgaagaagttc

SEQ ID NO: 5413726 - DNA, 25 bp, Homo sapien
attatatacagttgattgatggttg

SEQ ID NO: 5413727 - DNA, 25 bp, Homo sapien
tgcataaagtagtctatagatatct

SEQ ID NO: 5413728 - DNA, 25 bp, Homo sapien
aattccattgtagtctaaggataga

SEQ ID NO: 5413729 - DNA, 25 bp, Homo sapien
ggaccaagcccagattctcaggctc

SEQ ID NO: 5413730 - DNA, 25 bp, Homo sapien
tcagttttgttgctccagtcccatg

SEQ ID NO: 5413731 - DNA, 25 bp, Homo sapien
cagttttgttgctccagtcccatgg

SEQ ID NO: 5413732 - DNA, 25 bp, Homo sapien
tccacggaccaagcccagattctca

SEQ ID NO: 5413733 - DNA, 25 bp, Homo sapien
gcagtttccaactggaactcaggaa

SEQ ID NO: 5413734 - DNA, 25 bp, Homo sapien
actcaggaaataggacaagggaggc

SEQ ID NO: 5413735 - DNA, 25 bp, Homo sapien
gcatctcagtttgctcagagcgagc

SEQ ID NO: 5413736 - DNA, 25 bp, Homo sapien
aatcaacagcttgatcccctccagt

SEQ ID NO: 5413737 - DNA, 25 bp, Homo sapien
tccactcatttttattccctcgccc

SEQ ID NO: 5413738 - DNA, 25 bp, Homo sapien
ctcatttttattccctcgcccttct

SEQ ID NO: 5413739 - DNA, 25 bp, Homo sapien
tttattccctcgcccttcttctcca

SEQ ID NO: 5413740 - DNA, 25 bp, Homo sapien
ttattccctcgcccttcttctccat

SEQ ID NO: 5413741 - DNA, 25 bp, Homo sapien
gcaagataggccgagtgaagctgaa

SEQ ID NO: 5413742 - DNA, 25 bp, Homo sapien
cagtccacccatgtttgtcagaaag

SEQ ID NO: 5413743 - DNA, 25 bp, Homo sapien
tgctatcccctgaatttaaaagtga

SEQ ID NO: 5413744 - DNA, 25 bp, Homo sapien
acctaagtggccacctgaaatgaca

SEQ ID NO: 5413745 - DNA, 25 bp, Homo sapien
tcaacagccattccacaagcattta

SEQ ID NO: 5413746 - DNA, 25 bp, Homo sapien
agcatttatgggaccatttgaatgc

SEQ ID NO: 5413747 - DNA, 25 bp, Homo sapien
cagtcaacagccattccacaagcat

SEQ ID NO: 5413748 - DNA, 25 bp, Homo sapien
tatggcatcacccagtcaacagcca

SEQ ID NO: 5413749 - DNA, 25 bp, Homo sapien
ggttgtgctgtaggatagaatttca

SEQ ID NO: 5413750 - DNA, 25 bp, Homo sapien
gcggcccatgttaaaaggcagataa

SEQ ID NO: 5413751 - DNA, 25 bp, Homo sapien
atagaatttcacataggtgcggccc

SEQ ID NO: 5413752 - DNA, 25 bp, Homo sapien
cacgatgtggctgggttgtgctgta

SEQ ID NO: 5413753 - DNA, 25 bp, Homo sapien
gagtacacaagattcaggcccttgc

SEQ ID NO: 5413754 - DNA, 25 bp, Homo sapien
tgaagatgacagtggccctttggct

SEQ ID NO: 5413755 - DNA, 25 bp, Homo sapien
gcagtgtccgaaatacaggatttgg

SEQ ID NO: 5413756 - DNA, 25 bp, Homo sapien
ttgcaatgttaaggctagtaggtcc

SEQ ID NO: 5413757 - DNA, 25 bp, Homo sapien
atctccccttttgtcttgaggatct

SEQ ID NO: 5413758 - DNA, 25 bp, Homo sapien
ttggcatttggaacttctgtgtttt

SEQ ID NO: 5413759 - DNA, 25 bp, Homo sapien
gcatttggaacttctgtgttttctg

SEQ ID NO: 5413760 - DNA, 25 bp, Homo sapien
tccccttttgtcttgaggatcttgg

SEQ ID NO: 5413761 - DNA, 25 bp, Homo sapien
gaatccctcaagctgtggagactct

SEQ ID NO: 5413762 - DNA, 25 bp, Homo sapien
ggaggactggttcatttcaattcta

SEQ ID NO: 5413763 - DNA, 25 bp, Homo sapien
ttggtcacccggaaatagccccaga

SEQ ID NO: 5413764 - DNA, 25 bp, Homo sapien
gctggaatccctcaagctgtggaga

SEQ ID NO: 5413765 - DNA, 25 bp, Homo sapien
agctcctccccatgaataaaatata

SEQ ID NO: 5413766 - DNA, 25 bp, Homo sapien
aaacttaccttttatcaggcatatt

SEQ ID NO: 5413767 - DNA, 25 bp, Homo sapien
cagcgattggctgccgggcgttgtc

SEQ ID NO: 5413768 - DNA, 25 bp, Homo sapien
gaaacaagcccgctgagcaaaggcg

SEQ ID NO: 5413769 - DNA, 25 bp, Homo sapien
ggcgttgtcagtcgccgaggccaga

SEQ ID NO: 5413770 - DNA, 25 bp, Homo sapien
accttgggccttccgctctgattgg

SEQ ID NO: 5413771 - DNA, 25 bp, Homo sapien
ctggcgccggggatcggggcagcgg

SEQ ID NO: 5413772 - DNA, 25 bp, Homo sapien
ggcagagaagtgatgctggcgccgg

SEQ ID NO: 5413773 - DNA, 25 bp, Homo sapien
gggcggcagagaagtgatgctggcg

SEQ ID NO: 5413774 - DNA, 25 bp, Homo sapien
gcgggggcggcagagaagtgatgct

SEQ ID NO: 5413775 - DNA, 25 bp, Homo sapien
tagtgagatctaattttgggtcctc

SEQ ID NO: 5413776 - DNA, 25 bp, Homo sapien
taattttgggtcctcgtctgaacga

SEQ ID NO: 5413777 - DNA, 25 bp, Homo sapien
ttgggtcctcgtctgaacgaatcat

SEQ ID NO: 5413778 - DNA, 25 bp, Homo sapien
tgagatctaattttgggtcctcgtc

SEQ ID NO: 5413779 - DNA, 25 bp, Homo sapien
gcaggttcactattcatttctgaca

SEQ ID NO: 5413780 - DNA, 25 bp, Homo sapien
ttctgtcagggaccaatatggtgct

SEQ ID NO: 5413781 - DNA, 25 bp, Homo sapien
tttattgaagttgctatttggaaaa

SEQ ID NO: 5413782 - DNA, 25 bp, Homo sapien
tttctgctggcaggttcactattca

SEQ ID NO: 5413783 - DNA, 25 bp, Homo sapien
tgctccatccttactgctgctgctc

SEQ ID NO: 5413784 - DNA, 25 bp, Homo sapien
gctgctgctctcaggccaaccctca

SEQ ID NO: 5413785 - DNA, 25 bp, Homo sapien
aaccctcagcttgtctttcttgcat

SEQ ID NO: 5413786 - DNA, 25 bp, Homo sapien
tcaggccaaccctcagcttgtcttt

SEQ ID NO: 5413787 - DNA, 25 bp, Homo sapien
gttgcagactcattcactgaagatc

SEQ ID NO: 5413788 - DNA, 25 bp, Homo sapien
tcactgttgtagacttaaacttttc

SEQ ID NO: 5413789 - DNA, 25 bp, Homo sapien
gatacattaacttgcagaaatttgt

SEQ ID NO: 5413790 - DNA, 25 bp, Homo sapien
tcttcactgccaattcagcgggatt

SEQ ID NO: 5413791 - DNA, 25 bp, Homo sapien
caggattagtaaccagagaaatgct

SEQ ID NO: 5413792 - DNA, 25 bp, Homo sapien
gattgcttggcaaactaacaaacgt

SEQ ID NO: 5413793 - DNA, 25 bp, Homo sapien
tggaatatgcccataagacccactg

SEQ ID NO: 5413794 - DNA, 25 bp, Homo sapien
ggtgaaaaatggatagcagctggat

SEQ ID NO: 5413795 - DNA, 25 bp, Homo sapien
catgcctagcatggccgtggtaagc

SEQ ID NO: 5413796 - DNA, 25 bp, Homo sapien
catccatgagattggccttggaaac

SEQ ID NO: 5413797 - DNA, 25 bp, Homo sapien
tcttgtccattttatcagttgcacc

SEQ ID NO: 5413798 - DNA, 25 bp, Homo sapien
tatatgaaccattgtactcttgtcc

SEQ ID NO: 5413799 - DNA, 25 bp, Homo sapien
cgtaccaaagtgttctggaaatact

SEQ ID NO: 5413800 - DNA, 25 bp, Homo sapien
tgagtcagaagctcatttagtctgg

SEQ ID NO: 5413801 - DNA, 25 bp, Homo sapien
aatactgtccctaactgagtcagaa

SEQ ID NO: 5413802 - DNA, 25 bp, Homo sapien
aggtgaagcattttccgtaccaaag

SEQ ID NO: 5413803 - DNA, 25 bp, Homo sapien
acggcaatgtcaagtttagaacctg

SEQ ID NO: 5413804 - DNA, 25 bp, Homo sapien
catatgtaacggcaatgtcaagttt

SEQ ID NO: 5413805 - DNA, 25 bp, Homo sapien
gaggactagctgcatatgtaacggc

SEQ ID NO: 5413806 - DNA, 25 bp, Homo sapien
agtggttttctgaggactagctgca

SEQ ID NO: 5413807 - DNA, 25 bp, Homo sapien
agcacgtcctcggtcttctcaatac

SEQ ID NO: 5413808 - DNA, 25 bp, Homo sapien
accacagcagcacgtcctcggtctt

SEQ ID NO: 5413809 - DNA, 25 bp, Homo sapien
tgggctggctcagtcccaccacagc

SEQ ID NO: 5413810 - DNA, 25 bp, Homo sapien
tgcagcagacgctgtactgctgctg

SEQ ID NO: 5413811 - DNA, 25 bp, Homo sapien
ctcttggtcagcctgcccgttcaat

SEQ ID NO: 5413812 - DNA, 25 bp, Homo sapien
gagagcagccacatgtttcaacaga

SEQ ID NO: 5413813 - DNA, 25 bp, Homo sapien
gtcagcctgcccgttcaatgtacat

SEQ ID NO: 5413814 - DNA, 25 bp, Homo sapien
catgtttcaacagatccatacacaa

SEQ ID NO: 5413815 - DNA, 25 bp, Homo sapien
cagtgacttcccaactccacctcca

SEQ ID NO: 5413816 - DNA, 25 bp, Homo sapien
agtgacttcccaactccacctccat

SEQ ID NO: 5413817 - DNA, 25 bp, Homo sapien
agtacagctgtttatatttacaaac

SEQ ID NO: 5413818 - DNA, 25 bp, Homo sapien
tttacaaacattatatctgttactt

SEQ ID NO: 5413819 - DNA, 25 bp, Homo sapien
tatatctgttactttaatttcaaca

SEQ ID NO: 5413820 - DNA, 25 bp, Homo sapien
caaacattatatctgttactttaat

SEQ ID NO: 5413821 - DNA, 25 bp, Homo sapien
atcttggccattgcttccaccctgg

SEQ ID NO: 5413822 - DNA, 25 bp, Homo sapien
agggtagaaccctttctgtgaatgt

SEQ ID NO: 5413823 - DNA, 25 bp, Homo sapien
cagaaatgttgcagagtcatggctt

SEQ ID NO: 5413824 - DNA, 25 bp, Homo sapien
ggtttctatcttggccattgcttcc

SEQ ID NO: 5413825 - DNA, 25 bp, Homo sapien
ggggaggagcatggttaatcttatc

SEQ ID NO: 5413826 - DNA, 25 bp, Homo sapien
gaggggaggagcatggttaatctta

SEQ ID NO: 5413827 - DNA, 25 bp, Homo sapien
aggggaggagcatggttaatcttat

SEQ ID NO: 5413828 - DNA, 25 bp, Homo sapien
tactgctattttgtaagagaaaggc

SEQ ID NO: 5413829 - DNA, 25 bp, Homo sapien
gagaaaggcaaagctcctaggagcc

SEQ ID NO: 5413830 - DNA, 25 bp, Homo sapien
cacctaatactgctattttgtaaga

SEQ ID NO: 5413831 - DNA, 25 bp, Homo sapien
ctgctattttgtaagagaaaggcaa

SEQ ID NO: 5413832 - DNA, 25 bp, Homo sapien
tatattccatgcagatttcaggacc

SEQ ID NO: 5413833 - DNA, 25 bp, Homo sapien
attccatgcagatttcaggacccat

SEQ ID NO: 5413834 - DNA, 25 bp, Homo sapien
ggctgtatattccatgcagatttca

SEQ ID NO: 5413835 - DNA, 25 bp, Homo sapien
ctgtatattccatgcagatttcagg

SEQ ID NO: 5413836 - DNA, 25 bp, Homo sapien
tggagccctttgtcgttttctttca

SEQ ID NO: 5413837 - DNA, 25 bp, Homo sapien
tcattcctgagcagcacgtcaggcc

SEQ ID NO: 5413838 - DNA, 25 bp, Homo sapien
ttcttcacgtagagccactgctttc

SEQ ID NO: 5413839 - DNA, 25 bp, Homo sapien
aggccctctgctgattcctgtaacg

SEQ ID NO: 5413840 - DNA, 25 bp, Homo sapien
tgtaacgcggacagtcacaccttca

SEQ ID NO: 5413841 - DNA, 25 bp, Homo sapien
catcctatcacttcatgcagattga

SEQ ID NO: 5413842 - DNA, 25 bp, Homo sapien
tacaccaagcttattgatgtgccca

SEQ ID NO: 5413843 - DNA, 25 bp, Homo sapien
tagctctcccattgtatacaccaag

SEQ ID NO: 5413844 - DNA, 25 bp, Homo sapien
tgcagattgaaccaggcagctcctt

SEQ ID NO: 5413845 - DNA, 25 bp, Homo sapien
agcatctagcatgccatagagcaca

SEQ ID NO: 5413846 - DNA, 25 bp, Homo sapien
tccacatacctgcagatagcaactc

SEQ ID NO: 5413847 - DNA, 25 bp, Homo sapien
actcacactcacagcatctagcatg

SEQ ID NO: 5413848 - DNA, 25 bp, Homo sapien
ctgcagatagcaactcacactcaca

SEQ ID NO: 5413849 - DNA, 25 bp, Homo sapien
gggcatctgttagggctatctccat

SEQ ID NO: 5413850 - DNA, 25 bp, Homo sapien
ggggcatctgttagggctatctcca

SEQ ID NO: 5413851 - DNA, 25 bp, Homo sapien
tggggcatctgttagggctatctcc

SEQ ID NO: 5413852 - DNA, 25 bp, Homo sapien
ctggggcatctgttagggctatctc

SEQ ID NO: 5413853 - DNA, 25 bp, Homo sapien
taaacccctctgtggatagatgttt

SEQ ID NO: 5413854 - DNA, 25 bp, Homo sapien
tcttggatgaaagtaaggaggtaaa

SEQ ID NO: 5413855 - DNA, 25 bp, Homo sapien
gaggtaaacccctctgtggatagat

SEQ ID NO: 5413856 - DNA, 25 bp, Homo sapien
aaatccaggtcttggatgaaagtaa

SEQ ID NO: 5413857 - DNA, 25 bp, Homo sapien
ctgggaaatcccttgatagaaaata

SEQ ID NO: 5413858 - DNA, 25 bp, Homo sapien
tgggaaatcccttgatagaaaataa

SEQ ID NO: 5413859 - DNA, 25 bp, Homo sapien
gcgaacgctctctgccaaatgttgt

SEQ ID NO: 5413860 - DNA, 25 bp, Homo sapien
catcagttgacctatcacagcttgg

SEQ ID NO: 5413861 - DNA, 25 bp, Homo sapien
cctgtgagcatcagttgacctatca

SEQ ID NO: 5413862 - DNA, 25 bp, Homo sapien
ggagccctgtgagcatcagttgacc

SEQ ID NO: 5413863 - DNA, 25 bp, Homo sapien
caagatctttggctagctttctata

SEQ ID NO: 5413864 - DNA, 25 bp, Homo sapien
aaaatgaacagttctctccaattct

SEQ ID NO: 5413865 - DNA, 25 bp, Homo sapien
taaaaatgaacagttctctccaatt

SEQ ID NO: 5413866 - DNA, 25 bp, Homo sapien
ggctagctttctataggtctccagc

SEQ ID NO: 5413867 - DNA, 25 bp, Homo sapien
tcagataactgaataataatgtggt

SEQ ID NO: 5413868 - DNA, 25 bp, Homo sapien
ttggagtcttcaaatgttattttct

SEQ ID NO: 5413869 - DNA, 25 bp, Homo sapien
ttttctgtttattaagttcagtcac

SEQ ID NO: 5413870 - DNA, 25 bp, Homo sapien
tattttctgtttattaagttcagtc

SEQ ID NO: 5413871 - DNA, 25 bp, Homo sapien
ggagtcttcaaatgttattttctgt

SEQ ID NO: 5413872 - DNA, 25 bp, Homo sapien
atcgcccgtcgttcttcagtcattg

SEQ ID NO: 5413873 - DNA, 25 bp, Homo sapien
cgttcttcagtcattggaagaatct

SEQ ID NO: 5413874 - DNA, 25 bp, Homo sapien
gcccgtcgttcttcagtcattggaa

SEQ ID NO: 5413875 - DNA, 25 bp, Homo sapien
ccgtcgttcttcagtcattggaaga

SEQ ID NO: 5413876 - DNA, 25 bp, Homo sapien
agaacaacaaaaaatccaacaacag

SEQ ID NO: 5413877 - DNA, 25 bp, Homo sapien
gagaacaacaaaaaatccaacaaca

SEQ ID NO: 5413878 - DNA, 25 bp, Homo sapien
accataaggattcgaatcttgtctc

SEQ ID NO: 5413879 - DNA, 25 bp, Homo sapien
cataaggattcgaatcttgtctcat

SEQ ID NO: 5413880 - DNA, 25 bp, Homo sapien
aaaccataaggattcgaatcttgtc

SEQ ID NO: 5413881 - DNA, 25 bp, Homo sapien
taaggattcgaatcttgtctcatac

SEQ ID NO: 5413882 - DNA, 25 bp, Homo sapien
cagccccaagtagggccgagcggta

SEQ ID NO: 5413883 - DNA, 25 bp, Homo sapien
gaccagccccaagtagggccgagcg

SEQ ID NO: 5413884 - DNA, 25 bp, Homo sapien
caagtagggccgagcggtagcgccg

SEQ ID NO: 5413885 - DNA, 25 bp, Homo sapien
aagtagggccgagcggtagcgccgg

SEQ ID NO: 5413886 - DNA, 25 bp, Homo sapien
gggggctggccctttgctttaggca

SEQ ID NO: 5413887 - DNA, 25 bp, Homo sapien
taggcatggcaaataatcgacctct

SEQ ID NO: 5413888 - DNA, 25 bp, Homo sapien
ccagccaagaagataagctctccaa

SEQ ID NO: 5413889 - DNA, 25 bp, Homo sapien
cctccagccaagaagataagctctc

SEQ ID NO: 5413890 - DNA, 25 bp, Homo sapien
gaaacactgactccgttctcgaggt

SEQ ID NO: 5413891 - DNA, 25 bp, Homo sapien
agcacaaaccagaatacatttccaa

SEQ ID NO: 5413892 - DNA, 25 bp, Homo sapien
tctcgaggtttccacagaccagcag

SEQ ID NO: 5413893 - DNA, 25 bp, Homo sapien
actgtgcaagacgtagaggagagaa

SEQ ID NO: 5413894 - DNA, 25 bp, Homo sapien
gaatcctgaagaggaacggcgatgc

SEQ ID NO: 5413895 - DNA, 25 bp, Homo sapien
gtgaatgaaagtggcctgggaatcc

SEQ ID NO: 5413896 - DNA, 25 bp, Homo sapien
aggaacggcgatgcccctggtgact

SEQ ID NO: 5413897 - DNA, 25 bp, Homo sapien
cccagtggtacagatgtggggaact

SEQ ID NO: 5413898 - DNA, 25 bp, Homo sapien
cttgaggagaacacccatctcatta

SEQ ID NO: 5413899 - DNA, 25 bp, Homo sapien
acccatctcattagatttgaaagcc

SEQ ID NO: 5413900 - DNA, 25 bp, Homo sapien
gaggagaacacccatctcattagat

SEQ ID NO: 5413901 - DNA, 25 bp, Homo sapien
gaacacccatctcattagatttgaa

SEQ ID NO: 5413902 - DNA, 25 bp, Homo sapien
caagttgtcaattgttatctcggca

SEQ ID NO: 5413903 - DNA, 25 bp, Homo sapien
tggaggtagcaagaagtggcatcct

SEQ ID NO: 5413904 - DNA, 25 bp, Homo sapien
gaatgggctgcctaaacatcagaga

SEQ ID NO: 5413905 - DNA, 25 bp, Homo sapien
tatgcttagccaagaagagattcta

SEQ ID NO: 5413906 - DNA, 25 bp, Homo sapien
tctggtcaatacagctgccagcatc

SEQ ID NO: 5413907 - DNA, 25 bp, Homo sapien
taagcaccacctcccaatctcctat

SEQ ID NO: 5413908 - DNA, 25 bp, Homo sapien
tctgtaccaaatattcctggatata

SEQ ID NO: 5413909 - DNA, 25 bp, Homo sapien
tccctgttatgcctctctggtcaat

SEQ ID NO: 5413910 - DNA, 25 bp, Homo sapien
cacatatcaggtcaagatgccatcc

SEQ ID NO: 5413911 - DNA, 25 bp, Homo sapien
ggaggaggattgttttcccagcaca

SEQ ID NO: 5413912 - DNA, 25 bp, Homo sapien
tggagaaccacttaagtcaggagga

SEQ ID NO: 5413913 - DNA, 25 bp, Homo sapien
agatgttggactattctctcgccca

SEQ ID NO: 5413914 - DNA, 25 bp, Homo sapien
gagaatctcagagtcccaaagcgac

SEQ ID NO: 5413915 - DNA, 25 bp, Homo sapien
tcacattagagacaggtgttgttcc

SEQ ID NO: 5413916 - DNA, 25 bp, Homo sapien
gttataaacgtatgtgccaccagtt

SEQ ID NO: 5413917 - DNA, 25 bp, Homo sapien
tggcacgcactggactctgcagaac

SEQ ID NO: 5413918 - DNA, 25 bp, Homo sapien
aaaattcatagtaatttgcactgga

SEQ ID NO: 5413919 - DNA, 25 bp, Homo sapien
gcactggatatgttggttttcacag

SEQ ID NO: 5413920 - DNA, 25 bp, Homo sapien
tctctaaggtttcagttgatagttt

SEQ ID NO: 5413921 - DNA, 25 bp, Homo sapien
tcacagcctttggagatttctctaa

SEQ ID NO: 5413922 - DNA, 25 bp, Homo sapien
cagcccctgacagtgagtcgcaaga

SEQ ID NO: 5413923 - DNA, 25 bp, Homo sapien
gagcagtggagcagcgtcagcacac

SEQ ID NO: 5413924 - DNA, 25 bp, Homo sapien
gagtcgcaagaggaccctctgatga

SEQ ID NO: 5413925 - DNA, 25 bp, Homo sapien
cagtggagcagcgtcagcacacagc

SEQ ID NO: 5413926 - DNA, 25 bp, Homo sapien
ctcaagcctccagagcctaaggaag

SEQ ID NO: 5413927 - DNA, 25 bp, Homo sapien
agctccccaagcaactgaaccagag

SEQ ID NO: 5413928 - DNA, 25 bp, Homo sapien
aaggacagggaccagtgtcatttgg

SEQ ID NO: 5413929 - DNA, 25 bp, Homo sapien
gtgtcatttggtccctgatctctct

SEQ ID NO: 5413930 - DNA, 25 bp, Homo sapien
tatccaaagtccttcgcaagctgtg

SEQ ID NO: 5413931 - DNA, 25 bp, Homo sapien
ggcctcggatgctctatatccaaag

SEQ ID NO: 5413932 - DNA, 25 bp, Homo sapien
gagtgcactttctgatggcgtgttt

SEQ ID NO: 5413933 - DNA, 25 bp, Homo sapien
gcgtgtttgcatatggcctcggatg

SEQ ID NO: 5413934 - DNA, 25 bp, Homo sapien
ttgattccctggcacctattcctgg

SEQ ID NO: 5413935 - DNA, 25 bp, Homo sapien
ccatgggtctggacgccactgcaca

SEQ ID NO: 5413936 - DNA, 25 bp, Homo sapien
aagcagcagcgtgaggtgttgctaa

SEQ ID NO: 5413937 - DNA, 25 bp, Homo sapien
tggcttgaatatcagggcagccttg

SEQ ID NO: 5413938 - DNA, 25 bp, Homo sapien
gttgtaagaacatgggtgagcctct

SEQ ID NO: 5413939 - DNA, 25 bp, Homo sapien
taacagacaatctaccatgcagttt

SEQ ID NO: 5413940 - DNA, 25 bp, Homo sapien
aatttcagcaattctgtgggtttct

SEQ ID NO: 5413941 - DNA, 25 bp, Homo sapien
aattgaaaattctgccccactaact

SEQ ID NO: 5413942 - DNA, 25 bp, Homo sapien
gtttctaggagaaatacgtgcttct

SEQ ID NO: 5413943 - DNA, 25 bp, Homo sapien
ggtatcgccgagttatcactgtgca

SEQ ID NO: 5413944 - DNA, 25 bp, Homo sapien
ggactggctacatcttttcagccga

SEQ ID NO: 5413945 - DNA, 25 bp, Homo sapien
ccttgaagacgtatatgtgggactg

SEQ ID NO: 5413946 - DNA, 25 bp, Homo sapien
tgtcttcgaaagctgggcatacatc

SEQ ID NO: 5413947 - DNA, 25 bp, Homo sapien
gacaatagcaattaggtaacctggg

SEQ ID NO: 5413948 - DNA, 25 bp, Homo sapien
ccgaaaggacctgatatgagacaag

SEQ ID NO: 5413949 - DNA, 25 bp, Homo sapien
ccccgtaggagttgatagcaaacag

SEQ ID NO: 5413950 - DNA, 25 bp, Homo sapien
tcatcttatggtcagcaggactgct

SEQ ID NO: 5413951 - DNA, 25 bp, Homo sapien
tcaagtatttgttaggcctgttgca

SEQ ID NO: 5413952 - DNA, 25 bp, Homo sapien
agtatttgttaggcctgttgcaatg

SEQ ID NO: 5413953 - DNA, 25 bp, Homo sapien
atttgttaggcctgttgcaatgacc

SEQ ID NO: 5413954 - DNA, 25 bp, Homo sapien
caagtatttgttaggcctgttgcaa

SEQ ID NO: 5413955 - DNA, 25 bp, Homo sapien
cagagtttctctgcttcagagctca

SEQ ID NO: 5413956 - DNA, 25 bp, Homo sapien
aacagagtttctctgcttcagagct

SEQ ID NO: 5413957 - DNA, 25 bp, Homo sapien
agagtttctctgcttcagagctcac

SEQ ID NO: 5413958 - DNA, 25 bp, Homo sapien
ttaacagagtttctctgcttcagag

SEQ ID NO: 5413959 - DNA, 25 bp, Homo sapien
tctggagaggtgtccatcactaact

SEQ ID NO: 5413960 - DNA, 25 bp, Homo sapien
tagagagaacgatctataagttcaa

SEQ ID NO: 5413961 - DNA, 25 bp, Homo sapien
ggtttcttcgacatatgctagtcca

SEQ ID NO: 5413962 - DNA, 25 bp, Homo sapien
aggcaggccctgtttacactcaagg

SEQ ID NO: 5413963 - DNA, 25 bp, Homo sapien
catgaatgctcaataagggcttgtt

SEQ ID NO: 5413964 - DNA, 25 bp, Homo sapien
gctctgtggtctgcgatgacctcct

SEQ ID NO: 5413965 - DNA, 25 bp, Homo sapien
tgtggtctgcgatgacctcctcacc

SEQ ID NO: 5413966 - DNA, 25 bp, Homo sapien
ttagctttactgaactccacatgaa

SEQ ID NO: 5413967 - DNA, 25 bp, Homo sapien
gatgcagggagctcattccttccta

SEQ ID NO: 5413968 - DNA, 25 bp, Homo sapien
tgaaatctaagttgttggaagggcc

SEQ ID NO: 5413969 - DNA, 25 bp, Homo sapien
ggttccccatggctgcacaaaaaga

SEQ ID NO: 5413970 - DNA, 25 bp, Homo sapien
tccctttatgggtagatcactggct

SEQ ID NO: 5413971 - DNA, 25 bp, Homo sapien
gttgactggaaggatgtgtgcactc

SEQ ID NO: 5413972 - DNA, 25 bp, Homo sapien
ttgactggaaggatgtgtgcactca

SEQ ID NO: 5413973 - DNA, 25 bp, Homo sapien
ctctggttgactggaaggatgtgtg

SEQ ID NO: 5413974 - DNA, 25 bp, Homo sapien
tggttgactggaaggatgtgtgcac

SEQ ID NO: 5413975 - DNA, 25 bp, Homo sapien
gggagcgtacgatcattctcagaaa

SEQ ID NO: 5413976 - DNA, 25 bp, Homo sapien
tctagtagagccaaagtgtcgtcca

SEQ ID NO: 5413977 - DNA, 25 bp, Homo sapien
tttgaacgagccaactgaatctggt

SEQ ID NO: 5413978 - DNA, 25 bp, Homo sapien
gcttcaaatattaacccagagaggg

SEQ ID NO: 5413979 - DNA, 25 bp, Homo sapien
ttcacagcagctcagtgtagtttgt

SEQ ID NO: 5413980 - DNA, 25 bp, Homo sapien
cagttcacagcagctcagtgtagtt

SEQ ID NO: 5413981 - DNA, 25 bp, Homo sapien
gttcacagcagctcagtgtagtttg

SEQ ID NO: 5413982 - DNA, 25 bp, Homo sapien
gcagttcacagcagctcagtgtagt

SEQ ID NO: 5413983 - DNA, 25 bp, Homo sapien
gccatgtacataagtcctgatagac

SEQ ID NO: 5413984 - DNA, 25 bp, Homo sapien
tgtctctaagaacccaaacatccca

SEQ ID NO: 5413985 - DNA, 25 bp, Homo sapien
cagtgagtatctgagaaccgatcaa

SEQ ID NO: 5413986 - DNA, 25 bp, Homo sapien
gtcctgccgctatccaggagtgcca

SEQ ID NO: 5413987 - DNA, 25 bp, Homo sapien
aaatggaaacatcggcttttcctgg

SEQ ID NO: 5413988 - DNA, 25 bp, Homo sapien
tggaaacatcggcttttcctgggtc

SEQ ID NO: 5413989 - DNA, 25 bp, Homo sapien
ctttggactcaaatggaaacatcgg

SEQ ID NO: 5413990 - DNA, 25 bp, Homo sapien
gactcaaatggaaacatcggctttt

SEQ ID NO: 5413991 - DNA, 25 bp, Homo sapien
gttcatccatgccattgcaagtgat

SEQ ID NO: 5413992 - DNA, 25 bp, Homo sapien
cataactaccactttcttagattcc

SEQ ID NO: 5413993 - DNA, 25 bp, Homo sapien
cctcctgcccctcataactaccact

SEQ ID NO: 5413994 - DNA, 25 bp, Homo sapien
atatgagatcatgcagaatttttct

SEQ ID NO: 5413995 - DNA, 25 bp, Homo sapien
ttatcccattttgttgaagccggcc

SEQ ID NO: 5413996 - DNA, 25 bp, Homo sapien
aaaatgagcaacagtcgtgcagctg

SEQ ID NO: 5413997 - DNA, 25 bp, Homo sapien
cataatatacagtcaagcagagggc

SEQ ID NO: 5413998 - DNA, 25 bp, Homo sapien
tgacagatcagggtgacatcaaggg

SEQ ID NO: 5413999 - DNA, 25 bp, Homo sapien
gaatctccgacccatcacagccaga

SEQ ID NO: 5414000 - DNA, 25 bp, Homo sapien
aatcagcttcacttcatcaggaatc

SEQ ID NO: 5414001 - DNA, 25 bp, Homo sapien
tcatcaggaatctccgacccatcac

SEQ ID NO: 5414002 - DNA, 25 bp, Homo sapien
caatcagcttcacttcatcaggaat

SEQ ID NO: 5414003 - DNA, 25 bp, Homo sapien
tacaggcatagagggcattttggct

SEQ ID NO: 5414004 - DNA, 25 bp, Homo sapien
gtacctatccagtgatatctctggt

SEQ ID NO: 5414005 - DNA, 25 bp, Homo sapien
tcactttcaacaaagtagtacaggc

SEQ ID NO: 5414006 - DNA, 25 bp, Homo sapien
gggcgatgaggtctgaaatgctctt

SEQ ID NO: 5414007 - DNA, 25 bp, Homo sapien
tgtgtgccgacattaccagttttac

SEQ ID NO: 5414008 - DNA, 25 bp, Homo sapien
ggctttacaccaacgtcaacacagt

SEQ ID NO: 5414009 - DNA, 25 bp, Homo sapien
caaaagatgtgtcctgtagctgaaa

SEQ ID NO: 5414010 - DNA, 25 bp, Homo sapien
tgaagactgtcaatgtacacccgta

SEQ ID NO: 5414011 - DNA, 25 bp, Homo sapien
aaaatgttgccttagtcatacagcc

SEQ ID NO: 5414012 - DNA, 25 bp, Homo sapien
gattcacctacttacaaaactgcca

SEQ ID NO: 5414013 - DNA, 25 bp, Homo sapien
gagacatggaccttctggaactgga

SEQ ID NO: 5414014 - DNA, 25 bp, Homo sapien
caattatgcagaagctaagaacctc

SEQ ID NO: 5414015 - DNA, 25 bp, Homo sapien
ttggcttgaaatgctgacacaggct

SEQ ID NO: 5414016 - DNA, 25 bp, Homo sapien
gcggctgttttcacaaaatcttcgg

SEQ ID NO: 5414017 - DNA, 25 bp, Homo sapien
atcttcggtagtaggaaagggccag

SEQ ID NO: 5414018 - DNA, 25 bp, Homo sapien
tacctagagattgtacagcggctgt

SEQ ID NO: 5414019 - DNA, 25 bp, Homo sapien
ggcttcaagattcttatatggccgc

SEQ ID NO: 5414020 - DNA, 25 bp, Homo sapien
gaaaacgttccctaacgctgcagag

SEQ ID NO: 5414021 - DNA, 25 bp, Homo sapien
tgcaagcaaaatgatctaggcttca

SEQ ID NO: 5414022 - DNA, 25 bp, Homo sapien
tagtcaaaggtgtgacgataagaaa

SEQ ID NO: 5414023 - DNA, 25 bp, Homo sapien
gggatcatctacaatcttctgtaaa

SEQ ID NO: 5414024 - DNA, 25 bp, Homo sapien
ccaagtttgctgaacagggtcaagc

SEQ ID NO: 5414025 - DNA, 25 bp, Homo sapien
tcaagcactagagtagacgctgtca

SEQ ID NO: 5414026 - DNA, 25 bp, Homo sapien
ggataacctctacaactcaagcgca

SEQ ID NO: 5414027 - DNA, 25 bp, Homo sapien
ggaaagtagaaatgatagcagcccc

SEQ ID NO: 5414028 - DNA, 25 bp, Homo sapien
caaactaagtcaggcattctccaga

SEQ ID NO: 5414029 - DNA, 25 bp, Homo sapien
cagcggagccgacacttttttggca

SEQ ID NO: 5414030 - DNA, 25 bp, Homo sapien
catatgcgggctttttacctaggtg

SEQ ID NO: 5414031 - DNA, 25 bp, Homo sapien
gccacacggaaaagacgctgatgct

SEQ ID NO: 5414032 - DNA, 25 bp, Homo sapien
cagaaaggcagcatgagattgcaaa

SEQ ID NO: 5414033 - DNA, 25 bp, Homo sapien
gagaaccagtgaacacggagtctaa

SEQ ID NO: 5414034 - DNA, 25 bp, Homo sapien
catggtcttgggttacctgacaagg

SEQ ID NO: 5414035 - DNA, 25 bp, Homo sapien
tccaaagagacaccctgaatagatt

SEQ ID NO: 5414036 - DNA, 25 bp, Homo sapien
aatacccagaattcatctgagttga

SEQ ID NO: 5414037 - DNA, 25 bp, Homo sapien
gaatacccagaattcatctgagttg

SEQ ID NO: 5414038 - DNA, 25 bp, Homo sapien
tcatctgagttgaaggtaagaatta

SEQ ID NO: 5414039 - DNA, 25 bp, Homo sapien
caggaatacccagaattcatctgag

SEQ ID NO: 5414040 - DNA, 25 bp, Homo sapien
gagaggtaaaacgttccaagagtgc

SEQ ID NO: 5414041 - DNA, 25 bp, Homo sapien
caggtgtttcttaatccgagaggta

SEQ ID NO: 5414042 - DNA, 25 bp, Homo sapien
aataactctgttgtggtatcctgta

SEQ ID NO: 5414043 - DNA, 25 bp, Homo sapien
tatggtcagtctttaattcaagcca

SEQ ID NO: 5414044 - DNA, 25 bp, Homo sapien
tcaggcattcttgcaggtcatccag

SEQ ID NO: 5414045 - DNA, 25 bp, Homo sapien
taaaacatacatagaggcatcaggc

SEQ ID NO: 5414046 - DNA, 25 bp, Homo sapien
catcttggaaagtgtgctagagctt

SEQ ID NO: 5414047 - DNA, 25 bp, Homo sapien
cagaaaccctgactttcttctacgg

SEQ ID NO: 5414048 - DNA, 25 bp, Homo sapien
gctgaactgtacaacgtgcttaata

SEQ ID NO: 5414049 - DNA, 25 bp, Homo sapien
cattgcaggtccacgtaaggtatgg

SEQ ID NO: 5414050 - DNA, 25 bp, Homo sapien
taaggtatggagtatgcaccagaat

SEQ ID NO: 5414051 - DNA, 25 bp, Homo sapien
taagacttcacactacgttaggcca

SEQ ID NO: 5414052 - DNA, 25 bp, Homo sapien
tatgggaagggcagcaacaatgata

SEQ ID NO: 5414053 - DNA, 25 bp, Homo sapien
caatgatagatcgagagcaatcagt

SEQ ID NO: 5414054 - DNA, 25 bp, Homo sapien
gcagcaacaatgatagatcgagagc

SEQ ID NO: 5414055 - DNA, 25 bp, Homo sapien
agagtcatgctttatgggaagggca

SEQ ID NO: 5414056 - DNA, 25 bp, Homo sapien
aaatgaagggcgctgttcacaacca

SEQ ID NO: 5414057 - DNA, 25 bp, Homo sapien
tgaagggcgctgttcacaaccaaat

SEQ ID NO: 5414058 - DNA, 25 bp, Homo sapien
aagacaaatgaagggcgctgttcac

SEQ ID NO: 5414059 - DNA, 25 bp, Homo sapien
taagacaaatgaagggcgctgttca

SEQ ID NO: 5414060 - DNA, 25 bp, Homo sapien
gcgtttgcacctaaagctgttcaga

SEQ ID NO: 5414061 - DNA, 25 bp, Homo sapien
ggttctatagctcagcagacacaga

SEQ ID NO: 5414062 - DNA, 25 bp, Homo sapien
tttctaaatctatcggcaggtgacc

SEQ ID NO: 5414063 - DNA, 25 bp, Homo sapien
tgtcagaagggtacactggccaggc

SEQ ID NO: 5414064 - DNA, 25 bp, Homo sapien
tatggccctaaagaaggagtgtcct

SEQ ID NO: 5414065 - DNA, 25 bp, Homo sapien
ggttgtgcagccattactacttcta

SEQ ID NO: 5414066 - DNA, 25 bp, Homo sapien
gaggctgctcaagaccattttgtga

SEQ ID NO: 5414067 - DNA, 25 bp, Homo sapien
gagaagagacatctgagaagtgaga

SEQ ID NO: 5414068 - DNA, 25 bp, Homo sapien
tacgcccaatactgccaataggtca

SEQ ID NO: 5414069 - DNA, 25 bp, Homo sapien
tccccaggtacagctttgaaaagaa

SEQ ID NO: 5414070 - DNA, 25 bp, Homo sapien
gaaagggtccttggacacatcaaga

SEQ ID NO: 5414071 - DNA, 25 bp, Homo sapien
gagcctcaggtttaggaacatggca

SEQ ID NO: 5414072 - DNA, 25 bp, Homo sapien
tctatacagtgaaagaaccggcctg

SEQ ID NO: 5414073 - DNA, 25 bp, Homo sapien
gaaccggcctgaatgatctttaagt

SEQ ID NO: 5414074 - DNA, 25 bp, Homo sapien
caccactgaacctcttaaggaattc

SEQ ID NO: 5414075 - DNA, 25 bp, Homo sapien
cagctgcatggttctagacacacca

SEQ ID NO: 5414076 - DNA, 25 bp, Homo sapien
tcatggacttttgggtcttctaagt

SEQ ID NO: 5414077 - DNA, 25 bp, Homo sapien
tgtccagatatatgagacaggatta

SEQ ID NO: 5414078 - DNA, 25 bp, Homo sapien
tctaagttctttgttatatttccaa

SEQ ID NO: 5414079 - DNA, 25 bp, Homo sapien
cctcattggataaatcatgtccaga

SEQ ID NO: 5414080 - DNA, 25 bp, Homo sapien
ccaacaaaatgacagtgcatactaa

SEQ ID NO: 5414081 - DNA, 25 bp, Homo sapien
tatataccaacaaaatgacagtgca

SEQ ID NO: 5414082 - DNA, 25 bp, Homo sapien
taccaacaaaatgacagtgcatact

SEQ ID NO: 5414083 - DNA, 25 bp, Homo sapien
tataccaacaaaatgacagtgcata

SEQ ID NO: 5414084 - DNA, 25 bp, Homo sapien
ctataactacatcgtgaccatccac

SEQ ID NO: 5414085 - DNA, 25 bp, Homo sapien
tataactacatcgtgaccatccacc

SEQ ID NO: 5414086 - DNA, 25 bp, Homo sapien
ctcctgagatacaccatctgctgta

SEQ ID NO: 5414087 - DNA, 25 bp, Homo sapien
aactacatcgtgaccatccaccaag

SEQ ID NO: 5414088 - DNA, 25 bp, Homo sapien
tcataaggatgggactaaagaggct

SEQ ID NO: 5414089 - DNA, 25 bp, Homo sapien
caaaggttgaatgggtagcatctga

SEQ ID NO: 5414090 - DNA, 25 bp, Homo sapien
caatgataagtgacaggagttcgca

SEQ ID NO: 5414091 - DNA, 25 bp, Homo sapien
tataactgttccctatgacactgct

SEQ ID NO: 5414092 - DNA, 25 bp, Homo sapien
ctcttcctggagtaaactcaaatcg

SEQ ID NO: 5414093 - DNA, 25 bp, Homo sapien
aatcgtatgtcattaagttcctttc

SEQ ID NO: 5414094 - DNA, 25 bp, Homo sapien
ctcaaatcgtatgtcattaagttcc

SEQ ID NO: 5414095 - DNA, 25 bp, Homo sapien
tggagtaaactcaaatcgtatgtca

SEQ ID NO: 5414096 - DNA, 25 bp, Homo sapien
gcaccctctcctcgaacataacaca

SEQ ID NO: 5414097 - DNA, 25 bp, Homo sapien
cagcaccctctcctcgaacataaca

SEQ ID NO: 5414098 - DNA, 25 bp, Homo sapien
ctctcctcgaacataacacattgta

SEQ ID NO: 5414099 - DNA, 25 bp, Homo sapien
ccctctcctcgaacataacacattg

SEQ ID NO: 5414100 - DNA, 25 bp, Homo sapien
atgtataacacagcgaatacgtgag

SEQ ID NO: 5414101 - DNA, 25 bp, Homo sapien
taaatgtataacacagcgaatacgt

SEQ ID NO: 5414102 - DNA, 25 bp, Homo sapien
caagcagtaagagaaccaagacttc

SEQ ID NO: 5414103 - DNA, 25 bp, Homo sapien
gcagtaagagaaccaagacttccca

SEQ ID NO: 5414104 - DNA, 25 bp, Homo sapien
ctcttgggtgcaagcagttctctgc

SEQ ID NO: 5414105 - DNA, 25 bp, Homo sapien
ggagtgagccactgcacccagccac

SEQ ID NO: 5414106 - DNA, 25 bp, Homo sapien
gcctcttgggtgcaagcagttctct

SEQ ID NO: 5414107 - DNA, 25 bp, Homo sapien
taggagtgagccactgcacccagcc

SEQ ID NO: 5414108 - DNA, 25 bp, Homo sapien
cttctaattttggagctttgcaggg

SEQ ID NO: 5414109 - DNA, 25 bp, Homo sapien
gctttgcagggtccatagatgggtt

SEQ ID NO: 5414110 - DNA, 25 bp, Homo sapien
tccttctaattttggagctttgcag

SEQ ID NO: 5414111 - DNA, 25 bp, Homo sapien
tgcagggtccatagatgggtttctg

SEQ ID NO: 5414112 - DNA, 25 bp, Homo sapien
actttcaaatgtgaacgatgagagt

SEQ ID NO: 5414113 - DNA, 25 bp, Homo sapien
ctgtggatagaaacatagcacatcc

SEQ ID NO: 5414114 - DNA, 25 bp, Homo sapien
gtgaacgatgagagtttgtcctgag

SEQ ID NO: 5414115 - DNA, 25 bp, Homo sapien
aaatgtgaacgatgagagtttgtcc

SEQ ID NO: 5414116 - DNA, 25 bp, Homo sapien
ctctgacagagaacctgccttgcag

SEQ ID NO: 5414117 - DNA, 25 bp, Homo sapien
tcttgcctgctggactgatcgtttg

SEQ ID NO: 5414118 - DNA, 25 bp, Homo sapien
gaatgctcgcgcaaggcccttgttt

SEQ ID NO: 5414119 - DNA, 25 bp, Homo sapien
gtcatatttccaggactctccacac

SEQ ID NO: 5414120 - DNA, 25 bp, Homo sapien
tatatagataagcatgcagagaaaa

SEQ ID NO: 5414121 - DNA, 25 bp, Homo sapien
ttatatagataagcatgcagagaaa

SEQ ID NO: 5414122 - DNA, 25 bp, Homo sapien
ctttatatagataagcatgcagaga

SEQ ID NO: 5414123 - DNA, 25 bp, Homo sapien
tatagataagcatgcagagaaaata

SEQ ID NO: 5414124 - DNA, 25 bp, Homo sapien
taaggtcaaaattcaaagctaacag

SEQ ID NO: 5414125 - DNA, 25 bp, Homo sapien
tcaggcttctcaaagtctaagagca

SEQ ID NO: 5414126 - DNA, 25 bp, Homo sapien
cctactgggcagttttcaaacacca

SEQ ID NO: 5414127 - DNA, 25 bp, Homo sapien
gctaacagagattttcctactgggc

SEQ ID NO: 5414128 - DNA, 25 bp, Homo sapien
gacactgaccctggattcgtcctat

SEQ ID NO: 5414129 - DNA, 25 bp, Homo sapien
gccaagatatgcatcagggactcaa

SEQ ID NO: 5414130 - DNA, 25 bp, Homo sapien
aacgtgcttatcatcgtgcttggca

SEQ ID NO: 5414131 - DNA, 25 bp, Homo sapien
gaaggataccactaataaagccaag

SEQ ID NO: 5414132 - DNA, 25 bp, Homo sapien
gatcaaacttgccaatgaaaaatgt

SEQ ID NO: 5414133 - DNA, 25 bp, Homo sapien
tccacagtggctgatcaaacttgcc

SEQ ID NO: 5414134 - DNA, 25 bp, Homo sapien
gaaaaatgttctgaacaggcaacct

SEQ ID NO: 5414135 - DNA, 25 bp, Homo sapien
acctgtagtacaagcatggtttatt

SEQ ID NO: 5414136 - DNA, 25 bp, Homo sapien
cgaggttcacggcacaagaagaagc

SEQ ID NO: 5414137 - DNA, 25 bp, Homo sapien
ctgtagtcttcattagcattgggtg

SEQ ID NO: 5414138 - DNA, 25 bp, Homo sapien
taatctcaaaacgaggttcacggca

SEQ ID NO: 5414139 - DNA, 25 bp, Homo sapien
agtcttcattagcattgggtgggcc

SEQ ID NO: 5414140 - DNA, 25 bp, Homo sapien
gtcgtgcacagagagggactgtatt

SEQ ID NO: 5414141 - DNA, 25 bp, Homo sapien
ggatggtgctggcactcactgcaat

SEQ ID NO: 5414142 - DNA, 25 bp, Homo sapien
acagagagggactgtatttgttcgg

SEQ ID NO: 5414143 - DNA, 25 bp, Homo sapien
actgtatttgttcggggatggtgct

SEQ ID NO: 5414144 - DNA, 25 bp, Homo sapien
taatattcgacttgcagtgcatacc

SEQ ID NO: 5414145 - DNA, 25 bp, Homo sapien
gcatacccaattcatgtcatcagtg

SEQ ID NO: 5414146 - DNA, 25 bp, Homo sapien
tagtttactgtagcaccttactctg

SEQ ID NO: 5414147 - DNA, 25 bp, Homo sapien
tatttggcacagataagcattttca

SEQ ID NO: 5414148 - DNA, 25 bp, Homo sapien
ctggattttcttcttttactcttcg

SEQ ID NO: 5414149 - DNA, 25 bp, Homo sapien
ctctggattttcttcttttactctt

SEQ ID NO: 5414150 - DNA, 25 bp, Homo sapien
gattttcttcttttactcttcgtga

SEQ ID NO: 5414151 - DNA, 25 bp, Homo sapien
tctggattttcttcttttactcttc

SEQ ID NO: 5414152 - DNA, 25 bp, Homo sapien
tttcccttcttcgctcttctcatcc

SEQ ID NO: 5414153 - DNA, 25 bp, Homo sapien
tatgaaggtgaccacttgacccagg

SEQ ID NO: 5414154 - DNA, 25 bp, Homo sapien
cggttttatgaaggtgaccacttga

SEQ ID NO: 5414155 - DNA, 25 bp, Homo sapien
ctcgtcgtcactccactcccagtcc

SEQ ID NO: 5414156 - DNA, 25 bp, Homo sapien
gtcttcggttttatgaaggtgacca

SEQ ID NO: 5414157 - DNA, 25 bp, Homo sapien
gagcattagcccagcaagcagagaa

SEQ ID NO: 5414158 - DNA, 25 bp, Homo sapien
gaagcttttgtcgatccaattggaa

SEQ ID NO: 5414159 - DNA, 25 bp, Homo sapien
caaactgtatactccttcagggcag

SEQ ID NO: 5414160 - DNA, 25 bp, Homo sapien
gagtagttcacagtccagacaggtg

SEQ ID NO: 5414161 - DNA, 25 bp, Homo sapien
ggtgacctgaccatctggcgcagtg

SEQ ID NO: 5414162 - DNA, 25 bp, Homo sapien
tgtggccagagcgtagatagatagc

SEQ ID NO: 5414163 - DNA, 25 bp, Homo sapien
tgctcactggaatactcaacggttg

SEQ ID NO: 5414164 - DNA, 25 bp, Homo sapien
actgggagacttactaaaggactgc

SEQ ID NO: 5414165 - DNA, 25 bp, Homo sapien
tctctgaaaaagtaggtcaatacat

SEQ ID NO: 5414166 - DNA, 25 bp, Homo sapien
gtaggtcaatacatagtcaattttc

SEQ ID NO: 5414167 - DNA, 25 bp, Homo sapien
ctattatcaaggaccaagtcaagtc

SEQ ID NO: 5414168 - DNA, 25 bp, Homo sapien
tcagtgtggtctctattatcaagga

SEQ ID NO: 5414169 - DNA, 25 bp, Homo sapien
cagggtacggaatctttcgcacaca

SEQ ID NO: 5414170 - DNA, 25 bp, Homo sapien
tcccagggtacggaatctttcgcac

SEQ ID NO: 5414171 - DNA, 25 bp, Homo sapien
cccagggtacggaatctttcgcaca

SEQ ID NO: 5414172 - DNA, 25 bp, Homo sapien
gggtacggaatctttcgcacacaat

SEQ ID NO: 5414173 - DNA, 25 bp, Homo sapien
cagacatgcatattggtctcctgtg

SEQ ID NO: 5414174 - DNA, 25 bp, Homo sapien
tggaagccctgcaagaatctctcgc

SEQ ID NO: 5414175 - DNA, 25 bp, Homo sapien
ggccaccctctcctgtgatttgcag

SEQ ID NO: 5414176 - DNA, 25 bp, Homo sapien
tgcatattggtctcctgtgcatctc

SEQ ID NO: 5414177 - DNA, 25 bp, Homo sapien
taagctgtactagtccattctcata

SEQ ID NO: 5414178 - DNA, 25 bp, Homo sapien
ctttcaagacctaagctgtactagt

SEQ ID NO: 5414179 - DNA, 25 bp, Homo sapien
ataaagctctccttatccttcacca

SEQ ID NO: 5414180 - DNA, 25 bp, Homo sapien
aagtcagaaagcagggagtcagtct

SEQ ID NO: 5414181 - DNA, 25 bp, Homo sapien
tgtgtcttcctgccctttacaacca

SEQ ID NO: 5414182 - DNA, 25 bp, Homo sapien
tgcacatcccaagctatgtgtgtct

SEQ ID NO: 5414183 - DNA, 25 bp, Homo sapien
gcacatcccaagctatgtgtgtctt

SEQ ID NO: 5414184 - DNA, 25 bp, Homo sapien
tgtcttcctgccctttacaaccaaa

SEQ ID NO: 5414185 - DNA, 25 bp, Homo sapien
tccaatgtccttttgtgagtcttca

SEQ ID NO: 5414186 - DNA, 25 bp, Homo sapien
gaaaaacaagctaaatccaatgtcc

SEQ ID NO: 5414187 - DNA, 25 bp, Homo sapien
tggttcctgggacagcactttcttt

SEQ ID NO: 5414188 - DNA, 25 bp, Homo sapien
tctctgcagcattcagaactgctga

SEQ ID NO: 5414189 - DNA, 25 bp, Homo sapien
tattagtgccatcctagcgggtatg

SEQ ID NO: 5414190 - DNA, 25 bp, Homo sapien
ggccatatgctaaccttctgaggaa

SEQ ID NO: 5414191 - DNA, 25 bp, Homo sapien
cagctatgacattctgggaccatga

SEQ ID NO: 5414192 - DNA, 25 bp, Homo sapien
tgagaaggctgtacaagccagccct

SEQ ID NO: 5414193 - DNA, 25 bp, Homo sapien
tcaaatgcaagctcaggcggacaag

SEQ ID NO: 5414194 - DNA, 25 bp, Homo sapien
aagctcaggcggacaaggtgcagct

SEQ ID NO: 5414195 - DNA, 25 bp, Homo sapien
gcctgggctcgaaagtcaatttcaa

SEQ ID NO: 5414196 - DNA, 25 bp, Homo sapien
ggagcctgggctcgaaagtcaattt

SEQ ID NO: 5414197 - DNA, 25 bp, Homo sapien
gattgcagttccagtctatttcatc

SEQ ID NO: 5414198 - DNA, 25 bp, Homo sapien
gaaaggacaaatagggtatcttcca

SEQ ID NO: 5414199 - DNA, 25 bp, Homo sapien
ctcctataaaatgagccctaaactg

SEQ ID NO: 5414200 - DNA, 25 bp, Homo sapien
tccagttctagagatcctttatgat

SEQ ID NO: 5414201 - DNA, 25 bp, Homo sapien
gaaacttctaggactgtgtatgttg

SEQ ID NO: 5414202 - DNA, 25 bp, Homo sapien
tctaggactgtgtatgttggcagaa

SEQ ID NO: 5414203 - DNA, 25 bp, Homo sapien
gttgtagctgttgggttattgtgct

SEQ ID NO: 5414204 - DNA, 25 bp, Homo sapien
ccttaaggaaacttctaggactgtg

SEQ ID NO: 5414205 - DNA, 25 bp, Homo sapien
ggcagctggtttatcacttgtttgt

SEQ ID NO: 5414206 - DNA, 25 bp, Homo sapien
aggcagctggtttatcacttgtttg

SEQ ID NO: 5414207 - DNA, 25 bp, Homo sapien
tccaagtgatgtgcacctcatctta

SEQ ID NO: 5414208 - DNA, 25 bp, Homo sapien
tcatcttataagtggcgggaacttg

SEQ ID NO: 5414209 - DNA, 25 bp, Homo sapien
gatgtgcacctcatcttataagtgg

SEQ ID NO: 5414210 - DNA, 25 bp, Homo sapien
aagtggcgggaacttgtatcttatc

SEQ ID NO: 5414211 - DNA, 25 bp, Homo sapien
ggaaggtcagcacctagtaggttac

SEQ ID NO: 5414212 - DNA, 25 bp, Homo sapien
ctagtaggttaccaggatgctcggg

SEQ ID NO: 5414213 - DNA, 25 bp, Homo sapien
gtcagcacctagtaggttaccagga

SEQ ID NO: 5414214 - DNA, 25 bp, Homo sapien
tagggaaggtcagcacctagtaggt

SEQ ID NO: 5414215 - DNA, 25 bp, Homo sapien
gagtttcactgtctgtgctatgtcc

SEQ ID NO: 5414216 - DNA, 25 bp, Homo sapien
tgctatgtccttgtatcatgtgcac

SEQ ID NO: 5414217 - DNA, 25 bp, Homo sapien
ttcttcacagaaaggtgagtttcac

SEQ ID NO: 5414218 - DNA, 25 bp, Homo sapien
gtcttgtgacgtttgtgcgttcttc

SEQ ID NO: 5414219 - DNA, 25 bp, Homo sapien
tgcccactactggtagcagtggttg

SEQ ID NO: 5414220 - DNA, 25 bp, Homo sapien
actggtagcagtggttgtaatggaa

SEQ ID NO: 5414221 - DNA, 25 bp, Homo sapien
gagtgcccactactggtagcagtgg

SEQ ID NO: 5414222 - DNA, 25 bp, Homo sapien
cactactggtagcagtggttgtaat

SEQ ID NO: 5414223 - DNA, 25 bp, Homo sapien
acaaaaacaatctggactataataa

SEQ ID NO: 5414224 - DNA, 25 bp, Homo sapien
gttacaaaaacaatctggactataa

SEQ ID NO: 5414225 - DNA, 25 bp, Homo sapien
atgttacaaaaacaatctggactat

SEQ ID NO: 5414226 - DNA, 25 bp, Homo sapien
ctgtggcagcaatcataaatgttac

SEQ ID NO: 5414227 - DNA, 25 bp, Homo sapien
ccatttcacccaaattaacggcaat

SEQ ID NO: 5414228 - DNA, 25 bp, Homo sapien
tctttctgtaggcatccataggctt

SEQ ID NO: 5414229 - DNA, 25 bp, Homo sapien
gtaggcatccataggcttttcctcc

SEQ ID NO: 5414230 - DNA, 25 bp, Homo sapien
caaattaacggcaatgcagaaacaa

SEQ ID NO: 5414231 - DNA, 25 bp, Homo sapien
tcccataaggatgatcatggttgtt

SEQ ID NO: 5414232 - DNA, 25 bp, Homo sapien
tgatcatggttgtttatcagaatca

SEQ ID NO: 5414233 - DNA, 25 bp, Homo sapien
cgtctacacgaagtttcccataagg

SEQ ID NO: 5414234 - DNA, 25 bp, Homo sapien
ttccagcagccacgtctacacgaag

SEQ ID NO: 5414235 - DNA, 25 bp, Homo sapien
tggctctttgggctatgtctggtgt

SEQ ID NO: 5414236 - DNA, 25 bp, Homo sapien
gtctggtgttcttgtaagcagcttc

SEQ ID NO: 5414237 - DNA, 25 bp, Homo sapien
taagcagcttctcaatcaggtactc

SEQ ID NO: 5414238 - DNA, 25 bp, Homo sapien
ggctctttgggctatgtctggtgtt

SEQ ID NO: 5414239 - DNA, 25 bp, Homo sapien
tttgcattttaaaagttctgctgct

SEQ ID NO: 5414240 - DNA, 25 bp, Homo sapien
cttggctttctggaagaatttgcat

SEQ ID NO: 5414241 - DNA, 25 bp, Homo sapien
tgcattttaaaagttctgctgctgt

SEQ ID NO: 5414242 - DNA, 25 bp, Homo sapien
cattttaaaagttctgctgctgtgg

SEQ ID NO: 5414243 - DNA, 25 bp, Homo sapien
tgcttggggcgtaatcaattttcca

SEQ ID NO: 5414244 - DNA, 25 bp, Homo sapien
taaactcctgtacattaagtgcttg

SEQ ID NO: 5414245 - DNA, 25 bp, Homo sapien
aactcctgtacattaagtgcttggg

SEQ ID NO: 5414246 - DNA, 25 bp, Homo sapien
cacataaactcctgtacattaagtg

SEQ ID NO: 5414247 - DNA, 25 bp, Homo sapien
tctttatcctctacccctgtttcca

SEQ ID NO: 5414248 - DNA, 25 bp, Homo sapien
tgggtggatcattttgcaaagtcaa

SEQ ID NO: 5414249 - DNA, 25 bp, Homo sapien
gggtggatcattttgcaaagtcaac

SEQ ID NO: 5414250 - DNA, 25 bp, Homo sapien
tatttgtgataaggcgctgctcctg

SEQ ID NO: 5414251 - DNA, 25 bp, Homo sapien
gaggatatttgtgataaggcgctgc

SEQ ID NO: 5414252 - DNA, 25 bp, Homo sapien
catgggaggatatttgtgataaggc

SEQ ID NO: 5414253 - DNA, 25 bp, Homo sapien
tttcatgggaggatatttgtgataa

SEQ ID NO: 5414254 - DNA, 25 bp, Homo sapien
catggggtgccaacgaatgtttttc

SEQ ID NO: 5414255 - DNA, 25 bp, Homo sapien
ttcgggtaacatcaccccctgttgc

SEQ ID NO: 5414256 - DNA, 25 bp, Homo sapien
tgctaggaacgcacttaccccaaaa

SEQ ID NO: 5414257 - DNA, 25 bp, Homo sapien
cccctgttgctaggaacgcacttac

SEQ ID NO: 5414258 - DNA, 25 bp, Homo sapien
caatgatagccaggtcaaggactac

SEQ ID NO: 5414259 - DNA, 25 bp, Homo sapien
gaaatctgaaatgtacccgtgaaca

SEQ ID NO: 5414260 - DNA, 25 bp, Homo sapien
gcgagctggtgggtagtaataaaaa

SEQ ID NO: 5414261 - DNA, 25 bp, Homo sapien
caaggactacttgatagcgagctgg

SEQ ID NO: 5414262 - DNA, 25 bp, Homo sapien
tcgtctaggtacatcaaccctccat

SEQ ID NO: 5414263 - DNA, 25 bp, Homo sapien
atgctttgtcgtctaggtacatcaa

SEQ ID NO: 5414264 - DNA, 25 bp, Homo sapien
gctttgtcgtctaggtacatcaacc

SEQ ID NO: 5414265 - DNA, 25 bp, Homo sapien
tgtcgtctaggtacatcaaccctcc

SEQ ID NO: 5414266 - DNA, 25 bp, Homo sapien
gaccttgttaatgacacagcatctc

SEQ ID NO: 5414267 - DNA, 25 bp, Homo sapien
ctcttggtgagtaatttgatgtgca

SEQ ID NO: 5414268 - DNA, 25 bp, Homo sapien
ttaatgacacagcatctccggcacc

SEQ ID NO: 5414269 - DNA, 25 bp, Homo sapien
ggctcttggtgagtaatttgatgtg

SEQ ID NO: 5414270 - DNA, 25 bp, Homo sapien
cccaaggtggaacatagtggcatga

SEQ ID NO: 5414271 - DNA, 25 bp, Homo sapien
tcgcccaaggtggaacatagtggca

SEQ ID NO: 5414272 - DNA, 25 bp, Homo sapien
gtcgcccaaggtggaacatagtggc

SEQ ID NO: 5414273 - DNA, 25 bp, Homo sapien
cgcccaaggtggaacatagtggcat

SEQ ID NO: 5414274 - DNA, 25 bp, Homo sapien
ggagcagtagtcataaccttctttg

SEQ ID NO: 5414275 - DNA, 25 bp, Homo sapien
ctattaatgagggagcagtagtcat

SEQ ID NO: 5414276 - DNA, 25 bp, Homo sapien
gtcataaccttctttgaaacatcag

SEQ ID NO: 5414277 - DNA, 25 bp, Homo sapien
aatccatcttccctatctattaatg

SEQ ID NO: 5414278 - DNA, 25 bp, Homo sapien
taagaagtagagtcactggtcacac

SEQ ID NO: 5414279 - DNA, 25 bp, Homo sapien
tcagtaagaagtagagtcactggtc

SEQ ID NO: 5414280 - DNA, 25 bp, Homo sapien
cagtaagaagtagagtcactggtca

SEQ ID NO: 5414281 - DNA, 25 bp, Homo sapien
gtaagaagtagagtcactggtcaca

SEQ ID NO: 5414282 - DNA, 25 bp, Homo sapien
gtgaaaaacccagggcataagcttg

SEQ ID NO: 5414283 - DNA, 25 bp, Homo sapien
ccaggctgctttcgctcagtaccag

SEQ ID NO: 5414284 - DNA, 25 bp, Homo sapien
gtaactttctagagttccaggctgc

SEQ ID NO: 5414285 - DNA, 25 bp, Homo sapien
ttgaatggatgcacatacgtgaggc

SEQ ID NO: 5414286 - DNA, 25 bp, Homo sapien
attattgagcttaattctataccaa

SEQ ID NO: 5414287 - DNA, 25 bp, Homo sapien
tctataccaaatgacgcttagatgg

SEQ ID NO: 5414288 - DNA, 25 bp, Homo sapien
attgagcttaattctataccaaatg

SEQ ID NO: 5414289 - DNA, 25 bp, Homo sapien
tataccaaatgacgcttagatggct

SEQ ID NO: 5414290 - DNA, 25 bp, Homo sapien
agcccgcacagtgcaggcacgtact

SEQ ID NO: 5414291 - DNA, 25 bp, Homo sapien
caggcacgtactgggtcacaacaga

SEQ ID NO: 5414292 - DNA, 25 bp, Homo sapien
ggtcacaacagactcctcggcagtg

SEQ ID NO: 5414293 - DNA, 25 bp, Homo sapien
tcctcggcagtgaggaaaaacccaa

SEQ ID NO: 5414294 - DNA, 25 bp, Homo sapien
gggagaggctcggatcattaatctg

SEQ ID NO: 5414295 - DNA, 25 bp, Homo sapien
aatctgacaagaataatgggatgag

SEQ ID NO: 5414296 - DNA, 25 bp, Homo sapien
ttaatctgacaagaataatgggatg

SEQ ID NO: 5414297 - DNA, 25 bp, Homo sapien
gctcggatcattaatctgacaagaa

SEQ ID NO: 5414298 - DNA, 25 bp, Homo sapien
aagaatattaccagctttcaaatcc

SEQ ID NO: 5414299 - DNA, 25 bp, Homo sapien
ttaaacatctctgcagaggtcatac

SEQ ID NO: 5414300 - DNA, 25 bp, Homo sapien
caaaacctctttaagaattgttgct

SEQ ID NO: 5414301 - DNA, 25 bp, Homo sapien
ttgttgctattattgcctcttccag

SEQ ID NO: 5414302 - DNA, 25 bp, Homo sapien
tattttatgatatccaacattgaac

SEQ ID NO: 5414303 - DNA, 25 bp, Homo sapien
tctgtgtagatagtctaagccttcc

SEQ ID NO: 5414304 - DNA, 25 bp, Homo sapien
tactgggcgccaagttcaatgaatt

SEQ ID NO: 5414305 - DNA, 25 bp, Homo sapien
gaccttttaggcctgagcacatgga

SEQ ID NO: 5414306 - DNA, 25 bp, Homo sapien
aattgccttggacaggatctagcca

SEQ ID NO: 5414307 - DNA, 25 bp, Homo sapien
tgcctctcagcctagaaggtcgggc

SEQ ID NO: 5414308 - DNA, 25 bp, Homo sapien
taggtcactacgttgggatggctgc

SEQ ID NO: 5414309 - DNA, 25 bp, Homo sapien
tgtaataggtcactacgttgggatg

SEQ ID NO: 5414310 - DNA, 25 bp, Homo sapien
agaggtgtaataggtcactacgttg

SEQ ID NO: 5414311 - DNA, 25 bp, Homo sapien
ggtcactacgttgggatggctgcac

SEQ ID NO: 5414312 - DNA, 25 bp, Homo sapien
tcctactcgaaagcctacctgaggg

SEQ ID NO: 5414313 - DNA, 25 bp, Homo sapien
tgtggaccagctaccagacacagga

SEQ ID NO: 5414314 - DNA, 25 bp, Homo sapien
tgaactctggtggatcttagctcct

SEQ ID NO: 5414315 - DNA, 25 bp, Homo sapien
taagagcctcatacctgaaccgaag

SEQ ID NO: 5414316 - DNA, 25 bp, Homo sapien
ttcacttcttggctaggggggtcca

SEQ ID NO: 5414317 - DNA, 25 bp, Homo sapien
tcacttcttggctaggggggtccat

SEQ ID NO: 5414318 - DNA, 25 bp, Homo sapien
tcctgcacagcagcttttccacaag

SEQ ID NO: 5414319 - DNA, 25 bp, Homo sapien
tgtcctgcacagcagcttttccaca

SEQ ID NO: 5414320 - DNA, 25 bp, Homo sapien
tgcacagcagcttttccacaagcat

SEQ ID NO: 5414321 - DNA, 25 bp, Homo sapien
ctgcacagcagcttttccacaagca

SEQ ID NO: 5414322 - DNA, 25 bp, Homo sapien
tcaagccacgaagatatctagagct

SEQ ID NO: 5414323 - DNA, 25 bp, Homo sapien
tctccaataacccacaaatcatagc

SEQ ID NO: 5414324 - DNA, 25 bp, Homo sapien
gagctttattctccaataacccaca

SEQ ID NO: 5414325 - DNA, 25 bp, Homo sapien
gatatctagagctttattctccaat

SEQ ID NO: 5414326 - DNA, 25 bp, Homo sapien
cttgcctgggtttgcatagggctgc

SEQ ID NO: 5414327 - DNA, 25 bp, Homo sapien
gggctgcctgaaccacagcagtagc

SEQ ID NO: 5414328 - DNA, 25 bp, Homo sapien
aatagttcatccatactggtctggc

SEQ ID NO: 5414329 - DNA, 25 bp, Homo sapien
caagttgatccgttttattgctaca

SEQ ID NO: 5414330 - DNA, 25 bp, Homo sapien
ggttcatatcccagacctgccacat

SEQ ID NO: 5414331 - DNA, 25 bp, Homo sapien
taatgctacttcactcatagagtgg

SEQ ID NO: 5414332 - DNA, 25 bp, Homo sapien
actgcttatgcttggatgacttgcc

SEQ ID NO: 5414333 - DNA, 25 bp, Homo sapien
aagtctttgaaactgtgcctagcac

SEQ ID NO: 5414334 - DNA, 25 bp, Homo sapien
aaggaatgcggccatttttcatccc

SEQ ID NO: 5414335 - DNA, 25 bp, Homo sapien
gtttagagctaggagggatcctgtc

SEQ ID NO: 5414336 - DNA, 25 bp, Homo sapien
gaattcagtttagagctaggaggga

SEQ ID NO: 5414337 - DNA, 25 bp, Homo sapien
tagaaggaatgcggccatttttcat

SEQ ID NO: 5414338 - DNA, 25 bp, Homo sapien
tacacatgcagaaccaatcctaaag

SEQ ID NO: 5414339 - DNA, 25 bp, Homo sapien
taaagttgtgaaccttgcaagcagc

SEQ ID NO: 5414340 - DNA, 25 bp, Homo sapien
ttataataccctgagaacacaggca

SEQ ID NO: 5414341 - DNA, 25 bp, Homo sapien
tatgaacacaactccaggtaaaccc

SEQ ID NO: 5414342 - DNA, 25 bp, Homo sapien
gcccaggagctgacaagtaataaca

SEQ ID NO: 5414343 - DNA, 25 bp, Homo sapien
ggagtttcctccaattgccaagtga

SEQ ID NO: 5414344 - DNA, 25 bp, Homo sapien
taaagctagcaaatgatgccactgg

SEQ ID NO: 5414345 - DNA, 25 bp, Homo sapien
tctgcaaggccaatatgatggtcca

SEQ ID NO: 5414346 - DNA, 25 bp, Homo sapien
attaaaacgcagattcaagaccacc

SEQ ID NO: 5414347 - DNA, 25 bp, Homo sapien
gaaaccaggctgtcaaaatgaaagc

SEQ ID NO: 5414348 - DNA, 25 bp, Homo sapien
taacatacctgtcagctgaaaccag

SEQ ID NO: 5414349 - DNA, 25 bp, Homo sapien
taagccaggcattaggtgattttca

SEQ ID NO: 5414350 - DNA, 25 bp, Homo sapien
agattgtattagatgtattccgtga

SEQ ID NO: 5414351 - DNA, 25 bp, Homo sapien
ggtgatccaatagtatctagaagac

SEQ ID NO: 5414352 - DNA, 25 bp, Homo sapien
caatcaacgaagtgccaaatatcag

SEQ ID NO: 5414353 - DNA, 25 bp, Homo sapien
gatactcctaagaaatctaagtcgt

SEQ ID NO: 5414354 - DNA, 25 bp, Homo sapien
taacattaggtattaggtatttctc

SEQ ID NO: 5414355 - DNA, 25 bp, Homo sapien
tctaagctacacaggataggtcaat

SEQ ID NO: 5414356 - DNA, 25 bp, Homo sapien
tgaagatctatcattcacagggcag

SEQ ID NO: 5414357 - DNA, 25 bp, Homo sapien
gagaagtctcacaactgtcacaggt

SEQ ID NO: 5414358 - DNA, 25 bp, Homo sapien
caatccccagactaaacagagtagg

SEQ ID NO: 5414359 - DNA, 25 bp, Homo sapien
tcgactctagaaataaagtatgcca

SEQ ID NO: 5414360 - DNA, 25 bp, Homo sapien
gaaacatatcatttactcacatcgg

SEQ ID NO: 5414361 - DNA, 25 bp, Homo sapien
gtatgccaatccattctctaaagga

SEQ ID NO: 5414362 - DNA, 25 bp, Homo sapien
cttgtctagtatcaaaaacttggcc

SEQ ID NO: 5414363 - DNA, 25 bp, Homo sapien
tggtatacagtcaggaagaccctca

SEQ ID NO: 5414364 - DNA, 25 bp, Homo sapien
gaaacaagattaggactgaggccag

SEQ ID NO: 5414365 - DNA, 25 bp, Homo sapien
gaaagatggcacctaaccctgcaga

SEQ ID NO: 5414366 - DNA, 25 bp, Homo sapien
caggaaagtataggatggccagcag

SEQ ID NO: 5414367 - DNA, 25 bp, Homo sapien
cagctcgtacgcgtccctgcagatg

SEQ ID NO: 5414368 - DNA, 25 bp, Homo sapien
agctcgtacgcgtccctgcagatgg

SEQ ID NO: 5414369 - DNA, 25 bp, Homo sapien
gctcgtacgcgtccctgcagatggg

SEQ ID NO: 5414370 - DNA, 25 bp, Homo sapien
tgcagctcgtacgcgtccctgcaga

SEQ ID NO: 5414371 - DNA, 25 bp, Homo sapien
gccggcgctgctgtcgcggccgccg

SEQ ID NO: 5414372 - DNA, 25 bp, Homo sapien
gggccggcgctgctgtcgcggccgc

SEQ ID NO: 5414373 - DNA, 25 bp, Homo sapien
ccggggccggcgctgctgtcgcggc

SEQ ID NO: 5414374 - DNA, 25 bp, Homo sapien
cgcgggagctgccggggccggcgct

SEQ ID NO: 5414375 - DNA, 25 bp, Homo sapien
acgtgcacgggcgagccgctcggct

SEQ ID NO: 5414376 - DNA, 25 bp, Homo sapien
gggaagctggacgtgcacgggcgag

SEQ ID NO: 5414377 - DNA, 25 bp, Homo sapien
tgctggggaagctggacgtgcacgg

SEQ ID NO: 5414378 - DNA, 25 bp, Homo sapien
gctggacgtgcacgggcgagccgct

SEQ ID NO: 5414379 - DNA, 25 bp, Homo sapien
aacttcctttgcctcgccgccgaca

SEQ ID NO: 5414380 - DNA, 25 bp, Homo sapien
cggccgacggacgaccttccacttg

SEQ ID NO: 5414381 - DNA, 25 bp, Homo sapien
gccgacacctctcggccggcgcacg

SEQ ID NO: 5414382 - DNA, 25 bp, Homo sapien
gccgacggacgaccttccacttgaa

SEQ ID NO: 5414383 - DNA, 25 bp, Homo sapien
gaagccagctaggaggggagggagc

SEQ ID NO: 5414384 - DNA, 25 bp, Homo sapien
gtccccgccgaagccagctaggagg

SEQ ID NO: 5414385 - DNA, 25 bp, Homo sapien
gccgtccccgccgaagccagctagg

SEQ ID NO: 5414386 - DNA, 25 bp, Homo sapien
gccgccgtccccgccgaagccagct

SEQ ID NO: 5414387 - DNA, 25 bp, Homo sapien
cgagcgggatacctacatggtgtcc

SEQ ID NO: 5414388 - DNA, 25 bp, Homo sapien
ggccgccaggttctcacattcagaa

SEQ ID NO: 5414389 - DNA, 25 bp, Homo sapien
tgtccctttgcaagacgccagttag

SEQ ID NO: 5414390 - DNA, 25 bp, Homo sapien
tcatttacaagttgacgagcgggat

SEQ ID NO: 5414391 - DNA, 25 bp, Homo sapien
ttctggccggcttgtgttaactgca

SEQ ID NO: 5414392 - DNA, 25 bp, Homo sapien
aatgcgagtgccaggtaaccttgag

SEQ ID NO: 5414393 - DNA, 25 bp, Homo sapien
ctgaggaaatgcgagtgccaggtaa

SEQ ID NO: 5414394 - DNA, 25 bp, Homo sapien
aactgcatatccagagtctgaggaa

SEQ ID NO: 5414395 - DNA, 25 bp, Homo sapien
tagtttgttatgcaggaatatgaga

SEQ ID NO: 5414396 - DNA, 25 bp, Homo sapien
caactcttttaaatctggatccagg

SEQ ID NO: 5414397 - DNA, 25 bp, Homo sapien
aacacatccccaaagctcaaaaagg

SEQ ID NO: 5414398 - DNA, 25 bp, Homo sapien
aaaagggtgttcctgattggcaggc

SEQ ID NO: 5414399 - DNA, 25 bp, Homo sapien
tgaactaatgttcctcttaagcctc

SEQ ID NO: 5414400 - DNA, 25 bp, Homo sapien
ccattcacatggttacacctaactg

SEQ ID NO: 5414401 - DNA, 25 bp, Homo sapien
tgaacagccagttagtctcatgaac

SEQ ID NO: 5414402 - DNA, 25 bp, Homo sapien
gggtagaaaccatggaactggacaa

SEQ ID NO: 5414403 - DNA, 25 bp, Homo sapien
tctgtcaatttatcaaacattctca

SEQ ID NO: 5414404 - DNA, 25 bp, Homo sapien
ttaatcaatttgaaccccagtagga

SEQ ID NO: 5414405 - DNA, 25 bp, Homo sapien
aatcaatttgaaccccagtaggaag

SEQ ID NO: 5414406 - DNA, 25 bp, Homo sapien
gctggtagtccatgggcgcctgtaa

SEQ ID NO: 5414407 - DNA, 25 bp, Homo sapien
gtctacttaaaaagctggtagtcca

SEQ ID NO: 5414408 - DNA, 25 bp, Homo sapien
ctttgggcgtcaggtttcaggtgta

SEQ ID NO: 5414409 - DNA, 25 bp, Homo sapien
tcagtagttgattgggtctctgcct

SEQ ID NO: 5414410 - DNA, 25 bp, Homo sapien
tgtagactagcacagtgtgtccagg

SEQ ID NO: 5414411 - DNA, 25 bp, Homo sapien
tctttttaaagtcttggtgccacca

SEQ ID NO: 5414412 - DNA, 25 bp, Homo sapien
tccctattccccgcaatgaacttaa

SEQ ID NO: 5414413 - DNA, 25 bp, Homo sapien
aaagaagaaggttgctactggaagg

SEQ ID NO: 5414414 - DNA, 25 bp, Homo sapien
cacagtctcacaaagagctgaatta

SEQ ID NO: 5414415 - DNA, 25 bp, Homo sapien
tactggaagggtatggtaaagctca

SEQ ID NO: 5414416 - DNA, 25 bp, Homo sapien
gcattcacgtcttctctcctatgtg

SEQ ID NO: 5414417 - DNA, 25 bp, Homo sapien
tcccagtgatgctgattgatgactc

SEQ ID NO: 5414418 - DNA, 25 bp, Homo sapien
tctctgctcagtggtcaaattccag

SEQ ID NO: 5414419 - DNA, 25 bp, Homo sapien
ggaagagcagaaaatactccagctc

SEQ ID NO: 5414420 - DNA, 25 bp, Homo sapien
aggcacagtcccactgctgatcagc

SEQ ID NO: 5414421 - DNA, 25 bp, Homo sapien
cttgctatgttttccaggatgtagt

SEQ ID NO: 5414422 - DNA, 25 bp, Homo sapien
gctatgttttccaggatgtagtgca

SEQ ID NO: 5414423 - DNA, 25 bp, Homo sapien
acaggcacagtcccactgctgatca

SEQ ID NO: 5414424 - DNA, 25 bp, Homo sapien
ccccattccagggagtttaccatat

SEQ ID NO: 5414425 - DNA, 25 bp, Homo sapien
cagcatagcaccctgatcagcatag

SEQ ID NO: 5414426 - DNA, 25 bp, Homo sapien
ttaccatattggaagcaagcttaat

SEQ ID NO: 5414427 - DNA, 25 bp, Homo sapien
atcagcatagcaccctgatcagcat

SEQ ID NO: 5414428 - DNA, 25 bp, Homo sapien
tgaagttcccttgatctcttcaaaa

SEQ ID NO: 5414429 - DNA, 25 bp, Homo sapien
ttgaagttcccttgatctcttcaaa

SEQ ID NO: 5414430 - DNA, 25 bp, Homo sapien
ctgcagtatttgcacacttgtcaca

SEQ ID NO: 5414431 - DNA, 25 bp, Homo sapien
tgcagtatttgcacacttgtcacat

SEQ ID NO: 5414432 - DNA, 25 bp, Homo sapien
gcagtatttgcacacttgtcacata

SEQ ID NO: 5414433 - DNA, 25 bp, Homo sapien
accaacagtattatacatgcttggg

SEQ ID NO: 5414434 - DNA, 25 bp, Homo sapien
cagatcccagggcattaactcacca

SEQ ID NO: 5414435 - DNA, 25 bp, Homo sapien
gcccatgatcaaagtcagatcccag

SEQ ID NO: 5414436 - DNA, 25 bp, Homo sapien
tcttcattgcccatgatcaaagtca

SEQ ID NO: 5414437 - DNA, 25 bp, Homo sapien
gcattctgagcatgtgcgagccagc

SEQ ID NO: 5414438 - DNA, 25 bp, Homo sapien
cctccgggcgcacgggaagaggact

SEQ ID NO: 5414439 - DNA, 25 bp, Homo sapien
cgggcgcacgggaagaggactgaga

SEQ ID NO: 5414440 - DNA, 25 bp, Homo sapien
gagagccctgaaaccccagcggggc

SEQ ID NO: 5414441 - DNA, 25 bp, Homo sapien
cgctctctggcgcacgcccccgcgc

SEQ ID NO: 5414442 - DNA, 25 bp, Homo sapien
gcgctctctggcgcacgcccccgcg

SEQ ID NO: 5414443 - DNA, 25 bp, Homo sapien
tcgcgcgctctctggcgcacgcccc

SEQ ID NO: 5414444 - DNA, 25 bp, Homo sapien
gcgcgctctctggcgcacgcccccg

SEQ ID NO: 5414445 - DNA, 25 bp, Homo sapien
aaaagaattcgccagggacttcctg

SEQ ID NO: 5414446 - DNA, 25 bp, Homo sapien
ttttatccgtgaaactatcaggccc

SEQ ID NO: 5414447 - DNA, 25 bp, Homo sapien
taatagcatttcaggttatcagcgg

SEQ ID NO: 5414448 - DNA, 25 bp, Homo sapien
caatctttatgctccggcacacgga

SEQ ID NO: 5414449 - DNA, 25 bp, Homo sapien
cagaacgcgtcttttgagtcatttg

SEQ ID NO: 5414450 - DNA, 25 bp, Homo sapien
ttgagggtggcagaacgcgtctttt

SEQ ID NO: 5414451 - DNA, 25 bp, Homo sapien
aaacgactgttgagggtggcagaac

SEQ ID NO: 5414452 - DNA, 25 bp, Homo sapien
tttgcctgaaaacgactgttgaggg

SEQ ID NO: 5414453 - DNA, 25 bp, Homo sapien
gatgtttgactattttgaatgactg

SEQ ID NO: 5414454 - DNA, 25 bp, Homo sapien
tttgtttgatgtttgactattttga

SEQ ID NO: 5414455 - DNA, 25 bp, Homo sapien
tttgactattttgaatgactgccat

SEQ ID NO: 5414456 - DNA, 25 bp, Homo sapien
tgtttgactattttgaatgactgcc

SEQ ID NO: 5414457 - DNA, 25 bp, Homo sapien
tgagaaatactgttctgtaatttga

SEQ ID NO: 5414458 - DNA, 25 bp, Homo sapien
cttgagaaatactgttctgtaattt

SEQ ID NO: 5414459 - DNA, 25 bp, Homo sapien
tgcttgagaaatactgttctgtaat

SEQ ID NO: 5414460 - DNA, 25 bp, Homo sapien
ctgcttgagaaatactgttctgtaa

SEQ ID NO: 5414461 - DNA, 25 bp, Homo sapien
tttacatcatagacatttaccatag

SEQ ID NO: 5414462 - DNA, 25 bp, Homo sapien
tagacctctttcctgcatagatccc

SEQ ID NO: 5414463 - DNA, 25 bp, Homo sapien
tcatagacatttaccatagacctct

SEQ ID NO: 5414464 - DNA, 25 bp, Homo sapien
taccatagacctctttcctgcatag

SEQ ID NO: 5414465 - DNA, 25 bp, Homo sapien
tgtttcatggcacaggtgaccagaa

SEQ ID NO: 5414466 - DNA, 25 bp, Homo sapien
acaggtgaccagaagaccacacttt

SEQ ID NO: 5414467 - DNA, 25 bp, Homo sapien
ggcacaggtgaccagaagaccacac

SEQ ID NO: 5414468 - DNA, 25 bp, Homo sapien
taccagggtacactgttcctaccca

SEQ ID NO: 5414469 - DNA, 25 bp, Homo sapien
agagtttccacattactcccctaca

SEQ ID NO: 5414470 - DNA, 25 bp, Homo sapien
tacttttgttgcagttgatgagcca

SEQ ID NO: 5414471 - DNA, 25 bp, Homo sapien
tacaggaacatgaatggcaagtaca

SEQ ID NO: 5414472 - DNA, 25 bp, Homo sapien
acatgaatggcaagtacagagtttc

SEQ ID NO: 5414473 - DNA, 25 bp, Homo sapien
gacagtcacgctgaggatggagtct

SEQ ID NO: 5414474 - DNA, 25 bp, Homo sapien
gagggaagagcctcattgtctgcag

SEQ ID NO: 5414475 - DNA, 25 bp, Homo sapien
aggcagttgacagtcacgctgagga

SEQ ID NO: 5414476 - DNA, 25 bp, Homo sapien
agcaaggagtgccaaagaggtgagg

SEQ ID NO: 5414477 - DNA, 25 bp, Homo sapien
gaaccacaatgtaaaacgctgttat

SEQ ID NO: 5414478 - DNA, 25 bp, Homo sapien
ctggcagaagaaccacaatgtaaaa

SEQ ID NO: 5414479 - DNA, 25 bp, Homo sapien
aaacgctgttatcagtaagcttcag

SEQ ID NO: 5414480 - DNA, 25 bp, Homo sapien
tcagtaagcttcagttttgtaaaca

SEQ ID NO: 5414481 - DNA, 25 bp, Homo sapien
cttttgctccttagattgggcctgc

SEQ ID NO: 5414482 - DNA, 25 bp, Homo sapien
aattcatgcggccttctagaggtcc

SEQ ID NO: 5414483 - DNA, 25 bp, Homo sapien
tgagaggcgatcagatatggatgcc

SEQ ID NO: 5414484 - DNA, 25 bp, Homo sapien
catttgaatgtcctcgctgcctgaa

SEQ ID NO: 5414485 - DNA, 25 bp, Homo sapien
aatgtttcccgccaacattaaaatg

SEQ ID NO: 5414486 - DNA, 25 bp, Homo sapien
ttatccattctttagctaaaatgtt

SEQ ID NO: 5414487 - DNA, 25 bp, Homo sapien
gatttatccattctttagctaaaat

SEQ ID NO: 5414488 - DNA, 25 bp, Homo sapien
gctaaaatgtttcccgccaacatta

SEQ ID NO: 5414489 - DNA, 25 bp, Homo sapien
taagttaatgccattaagacaacca

SEQ ID NO: 5414490 - DNA, 25 bp, Homo sapien
gtgaatatttacagccccaattttc

SEQ ID NO: 5414491 - DNA, 25 bp, Homo sapien
gacaaccagtttcattgttgagcac

SEQ ID NO: 5414492 - DNA, 25 bp, Homo sapien
cattgttgagcacattgtgaatatt

SEQ ID NO: 5414493 - DNA, 25 bp, Homo sapien
gttgcgaggtggagccggaccagag

SEQ ID NO: 5414494 - DNA, 25 bp, Homo sapien
ttggaactggttgcgaggtggagcc

SEQ ID NO: 5414495 - DNA, 25 bp, Homo sapien
gctcctgaggctgttggaactggtt

SEQ ID NO: 5414496 - DNA, 25 bp, Homo sapien
tcctgaggctgttggaactggttgc

SEQ ID NO: 5414497 - DNA, 25 bp, Homo sapien
aggtttgccacgtggaaatgggatt

SEQ ID NO: 5414498 - DNA, 25 bp, Homo sapien
ttgattagaggtttgccacgtggaa

SEQ ID NO: 5414499 - DNA, 25 bp, Homo sapien
ttagaggtttgccacgtggaaatgg

SEQ ID NO: 5414500 - DNA, 25 bp, Homo sapien
tttgccacgtggaaatgggattggt

SEQ ID NO: 5414501 - DNA, 25 bp, Homo sapien
cttgtgggaagaacacagggctaag

SEQ ID NO: 5414502 - DNA, 25 bp, Homo sapien
tgcagttcagagaaccagactcacc

SEQ ID NO: 5414503 - DNA, 25 bp, Homo sapien
agttcagagaaccagactcacccac

SEQ ID NO: 5414504 - DNA, 25 bp, Homo sapien
cacagggctaagatgtcataacatc

SEQ ID NO: 5414505 - DNA, 25 bp, Homo sapien
tacaaagccatagagacgtagagcc

SEQ ID NO: 5414506 - DNA, 25 bp, Homo sapien
gatactgactaggtgaaaactgatg

SEQ ID NO: 5414507 - DNA, 25 bp, Homo sapien
gatcttgtataacagaagcatgtag

SEQ ID NO: 5414508 - DNA, 25 bp, Homo sapien
ttgctgcactagctttacaaagcca

SEQ ID NO: 5414509 - DNA, 25 bp, Homo sapien
tgtgtcaccaactcaacaaagtcag

SEQ ID NO: 5414510 - DNA, 25 bp, Homo sapien
gatcaggagtaaaaccaggtaccga

SEQ ID NO: 5414511 - DNA, 25 bp, Homo sapien
caggtaccgatcattgatgaccaaa

SEQ ID NO: 5414512 - DNA, 25 bp, Homo sapien
tgaggcaccaatggataatcccttg

SEQ ID NO: 5414513 - DNA, 25 bp, Homo sapien
gctgtttcagggctgtgaggatgca

SEQ ID NO: 5414514 - DNA, 25 bp, Homo sapien
caggtgcactggcttgcagctgact

SEQ ID NO: 5414515 - DNA, 25 bp, Homo sapien
tgcaggtgcactggcttgcagctga

SEQ ID NO: 5414516 - DNA, 25 bp, Homo sapien
ggctgtgaggatgcaggtgcactgg

SEQ ID NO: 5414517 - DNA, 25 bp, Homo sapien
catttgtaacttgcacgctgaaggc

SEQ ID NO: 5414518 - DNA, 25 bp, Homo sapien
ctgaaggctctaatatatcctggtt

SEQ ID NO: 5414519 - DNA, 25 bp, Homo sapien
tctaatatatcctggtttccctccc

SEQ ID NO: 5414520 - DNA, 25 bp, Homo sapien
ctccatgaacattataggtgacagt

SEQ ID NO: 5414521 - DNA, 25 bp, Homo sapien
taagtatggaatggttcaagagttt

SEQ ID NO: 5414522 - DNA, 25 bp, Homo sapien
atggttcaagagtttgtgtctcatc

SEQ ID NO: 5414523 - DNA, 25 bp, Homo sapien
gttctctggatccttcctgttttag

SEQ ID NO: 5414524 - DNA, 25 bp, Homo sapien
gctaatgttctctggatccttcctg

SEQ ID NO: 5414525 - DNA, 25 bp, Homo sapien
ggagatgtctgtcctagagtcatat

SEQ ID NO: 5414526 - DNA, 25 bp, Homo sapien
actggcccatactcatgaaacttga

SEQ ID NO: 5414527 - DNA, 25 bp, Homo sapien
ttattgggtgtacgtcataagccag

SEQ ID NO: 5414528 - DNA, 25 bp, Homo sapien
ttgtagttggtagtttgtctagcca

SEQ ID NO: 5414529 - DNA, 25 bp, Homo sapien
aactcttgcaatcagcatgcagctc

SEQ ID NO: 5414530 - DNA, 25 bp, Homo sapien
tcagccagtcagctaagaacttcat

SEQ ID NO: 5414531 - DNA, 25 bp, Homo sapien
cagcatgcagctcatatggcatcag

SEQ ID NO: 5414532 - DNA, 25 bp, Homo sapien
catatggcatcagccagtcagctaa

SEQ ID NO: 5414533 - DNA, 25 bp, Homo sapien
ggttgatgtctatagacttggcccc

SEQ ID NO: 5414534 - DNA, 25 bp, Homo sapien
gaacgccaacctccagaatgcagta

SEQ ID NO: 5414535 - DNA, 25 bp, Homo sapien
tgtatgtggattgtctaagaacgcc

SEQ ID NO: 5414536 - DNA, 25 bp, Homo sapien
tataaagcagctatctccaatagcc

SEQ ID NO: 5414537 - DNA, 25 bp, Homo sapien
cactctgcattagctgaaccatcat

SEQ ID NO: 5414538 - DNA, 25 bp, Homo sapien
tcactctgcattagctgaaccatca

SEQ ID NO: 5414539 - DNA, 25 bp, Homo sapien
cattcactctgcattagctgaacca

SEQ ID NO: 5414540 - DNA, 25 bp, Homo sapien
ttcactctgcattagctgaaccatc

SEQ ID NO: 5414541 - DNA, 25 bp, Homo sapien
agaaaagtcagctgacagccagttt

SEQ ID NO: 5414542 - DNA, 25 bp, Homo sapien
cccaagaaaagtcagctgacagcca

SEQ ID NO: 5414543 - DNA, 25 bp, Homo sapien
caagaaaagtcagctgacagccagt

SEQ ID NO: 5414544 - DNA, 25 bp, Homo sapien
catttcctccttgttaggaagactt

SEQ ID NO: 5414545 - DNA, 25 bp, Homo sapien
cctctgtttgggtagggtctggtat

SEQ ID NO: 5414546 - DNA, 25 bp, Homo sapien
gacaggaatcacaaatgcctgagtg

SEQ ID NO: 5414547 - DNA, 25 bp, Homo sapien
tgctttcttgcagacactggagttg

SEQ ID NO: 5414548 - DNA, 25 bp, Homo sapien
tccaggtttaattctgacatcaggg

SEQ ID NO: 5414549 - DNA, 25 bp, Homo sapien
cactctgttactgtctgtccgttca

SEQ ID NO: 5414550 - DNA, 25 bp, Homo sapien
ccagcacatcattgacagagcttgg

SEQ ID NO: 5414551 - DNA, 25 bp, Homo sapien
ttgacagagcttgggaatttattac

SEQ ID NO: 5414552 - DNA, 25 bp, Homo sapien
ggaaaggtggctccactctgttact

SEQ ID NO: 5414553 - DNA, 25 bp, Homo sapien
tttcatgtcttgtgaaggtagcagt

SEQ ID NO: 5414554 - DNA, 25 bp, Homo sapien
ggttttcatgtcttgtgaaggtagc

SEQ ID NO: 5414555 - DNA, 25 bp, Homo sapien
tgaaggtagcagttcctcctccttt

SEQ ID NO: 5414556 - DNA, 25 bp, Homo sapien
ctgggttttcatgtcttgtgaaggt

SEQ ID NO: 5414557 - DNA, 25 bp, Homo sapien
tttccaatggctgctccacttttct

SEQ ID NO: 5414558 - DNA, 25 bp, Homo sapien
ttccaatggctgctccacttttctt

SEQ ID NO: 5414559 - DNA, 25 bp, Homo sapien
ccaatggctgctccacttttcttga

SEQ ID NO: 5414560 - DNA, 25 bp, Homo sapien
ccattcgtggggtcggtcagtacca

SEQ ID NO: 5414561 - DNA, 25 bp, Homo sapien
gggtcggtcagtaccacggtcagca

SEQ ID NO: 5414562 - DNA, 25 bp, Homo sapien
agtttccattcgtggggtcggtcag

SEQ ID NO: 5414563 - DNA, 25 bp, Homo sapien
cagtaccacggtcagcatgacaaac

SEQ ID NO: 5414564 - DNA, 25 bp, Homo sapien
ctggttttagcatagcggtagtgag

SEQ ID NO: 5414565 - DNA, 25 bp, Homo sapien
catgacatacaagctgggccatatt

SEQ ID NO: 5414566 - DNA, 25 bp, Homo sapien
tagtgagcagttgcatgcacccttg

SEQ ID NO: 5414567 - DNA, 25 bp, Homo sapien
tgcacccttgacagtatgccacatg

SEQ ID NO: 5414568 - DNA, 25 bp, Homo sapien
atctgcttgtttctatgatagaacc

SEQ ID NO: 5414569 - DNA, 25 bp, Homo sapien
tctgcttgtttctatgatagaaccc

SEQ ID NO: 5414570 - DNA, 25 bp, Homo sapien
catctgcttgtttctatgatagaac

SEQ ID NO: 5414571 - DNA, 25 bp, Homo sapien
ctgcttgtttctatgatagaaccct

SEQ ID NO: 5414572 - DNA, 25 bp, Homo sapien
aaatatttttgcgttggagctcaga

SEQ ID NO: 5414573 - DNA, 25 bp, Homo sapien
cattgcctcacttgtaatcatttcc

SEQ ID NO: 5414574 - DNA, 25 bp, Homo sapien
ttccatatagaatctgaagtttaaa

SEQ ID NO: 5414575 - DNA, 25 bp, Homo sapien
catttccagagttggtacttatttg

SEQ ID NO: 5414576 - DNA, 25 bp, Homo sapien
gatggggattgatgtagacttctct

SEQ ID NO: 5414577 - DNA, 25 bp, Homo sapien
atgacatcggatcatcctggcaggg

SEQ ID NO: 5414578 - DNA, 25 bp, Homo sapien
taaaatcacaccagatgacatcgga

SEQ ID NO: 5414579 - DNA, 25 bp, Homo sapien
aaagctaaaatcacaccagatgaca

SEQ ID NO: 5414580 - DNA, 25 bp, Homo sapien
cctgaagtcgtgaactccttcactt

SEQ ID NO: 5414581 - DNA, 25 bp, Homo sapien
ggcccttgggaggtttggtcattca

SEQ ID NO: 5414582 - DNA, 25 bp, Homo sapien
cccactttggccgtttatagctctg

SEQ ID NO: 5414583 - DNA, 25 bp, Homo sapien
gagtttctctcaagtcaattctagg

SEQ ID NO: 5414584 - DNA, 25 bp, Homo sapien
tgtgctttttcataatcacgatgtg

SEQ ID NO: 5414585 - DNA, 25 bp, Homo sapien
cgtcagttttcggatatgcttttca

SEQ ID NO: 5414586 - DNA, 25 bp, Homo sapien
gatgtgctcatacgtcagttttcgg

SEQ ID NO: 5414587 - DNA, 25 bp, Homo sapien
ttcataatcacgatgtgctcatacg

SEQ ID NO: 5414588 - DNA, 25 bp, Homo sapien
ctcaagaagctgcttgatttcttct

SEQ ID NO: 5414589 - DNA, 25 bp, Homo sapien
tccagaagagggttgcactctttac

SEQ ID NO: 5414590 - DNA, 25 bp, Homo sapien
ccacaggatagttggaaaaggatgt

SEQ ID NO: 5414591 - DNA, 25 bp, Homo sapien
ggttgcactctttactaatgatttc

SEQ ID NO: 5414592 - DNA, 25 bp, Homo sapien
aatactattttaacgtatcaacaca

SEQ ID NO: 5414593 - DNA, 25 bp, Homo sapien
cgcaccaccaggaccggtctaattt

SEQ ID NO: 5414594 - DNA, 25 bp, Homo sapien
caagtgattcttcggcctcaagtag

SEQ ID NO: 5414595 - DNA, 25 bp, Homo sapien
cattaccacacatctagatttagtt

SEQ ID NO: 5414596 - DNA, 25 bp, Homo sapien
gaggaggcaccaagcaggcagttat

SEQ ID NO: 5414597 - DNA, 25 bp, Homo sapien
tctggataaaccctgtatgcgttca

SEQ ID NO: 5414598 - DNA, 25 bp, Homo sapien
ctcataaatatccaagaggaggcac

SEQ ID NO: 5414599 - DNA, 25 bp, Homo sapien
ggtggttaacaacgtggactctgga

SEQ ID NO: 5414600 - DNA, 25 bp, Homo sapien
gatttgagctttgacgtgactattg

SEQ ID NO: 5414601 - DNA, 25 bp, Homo sapien
aggtcccgcccaacttcagtcagag

SEQ ID NO: 5414602 - DNA, 25 bp, Homo sapien
tcaaaaaatgagcatgtcgctggca

SEQ ID NO: 5414603 - DNA, 25 bp, Homo sapien
tgagcatgtcgctggcagctccatg

SEQ ID NO: 5414604 - DNA, 25 bp, Homo sapien
tcacgttccgagtgtggtctccatc

SEQ ID NO: 5414605 - DNA, 25 bp, Homo sapien
tggagggacatgatgagactctact

SEQ ID NO: 5414606 - DNA, 25 bp, Homo sapien
cctctgccatcacgttccgagtgtg

SEQ ID NO: 5414607 - DNA, 25 bp, Homo sapien
gagactctactgatgtctggtattt

SEQ ID NO: 5414608 - DNA, 25 bp, Homo sapien
caaaagacaaggtttgaggtattgt

SEQ ID NO: 5414609 - DNA, 25 bp, Homo sapien
ccaaaagacaaggtttgaggtattg

SEQ ID NO: 5414610 - DNA, 25 bp, Homo sapien
acaaggtttgaggtattgtacccat

SEQ ID NO: 5414611 - DNA, 25 bp, Homo sapien
gacaaggtttgaggtattgtaccca

SEQ ID NO: 5414612 - DNA, 25 bp, Homo sapien
gatgcttttgtttccacgcatattg

SEQ ID NO: 5414613 - DNA, 25 bp, Homo sapien
tccttctgctaccctggaaggctgg

SEQ ID NO: 5414614 - DNA, 25 bp, Homo sapien
tgttctgtctaacctattggcactg

SEQ ID NO: 5414615 - DNA, 25 bp, Homo sapien
tgggaagtggaaccctttacatgta

SEQ ID NO: 5414616 - DNA, 25 bp, Homo sapien
taccaacgggtatctcctgactggc

SEQ ID NO: 5414617 - DNA, 25 bp, Homo sapien
ccacaggtgtccaaggatgatcgaa

SEQ ID NO: 5414618 - DNA, 25 bp, Homo sapien
tgaggaggactcagaacctccggga

SEQ ID NO: 5414619 - DNA, 25 bp, Homo sapien
caatgggaccagtggtaccaacggg

SEQ ID NO: 5414620 - DNA, 25 bp, Homo sapien
gctgtagtccaatgtgctatgagca

SEQ ID NO: 5414621 - DNA, 25 bp, Homo sapien
aaaacccagtgcaagagtctcgttc

SEQ ID NO: 5414622 - DNA, 25 bp, Homo sapien
ttgtcacttagagcaagcaaaaccc

SEQ ID NO: 5414623 - DNA, 25 bp, Homo sapien
ggctcatgacagtgaaggagatgct

SEQ ID NO: 5414624 - DNA, 25 bp, Homo sapien
ccagaagttacttagaaggagaact

SEQ ID NO: 5414625 - DNA, 25 bp, Homo sapien
gggtctctctaactgatggcattca

SEQ ID NO: 5414626 - DNA, 25 bp, Homo sapien
aattgcataaaacgtagtaaatggg

SEQ ID NO: 5414627 - DNA, 25 bp, Homo sapien
ggaacacttggggtctctctaactg

SEQ ID NO: 5414628 - DNA, 25 bp, Homo sapien
tttttaataggatccgcagacaccc

SEQ ID NO: 5414629 - DNA, 25 bp, Homo sapien
taatcagcagttcagttgtcacaag

SEQ ID NO: 5414630 - DNA, 25 bp, Homo sapien
caaagtaccccgtagtgatgagcac

SEQ ID NO: 5414631 - DNA, 25 bp, Homo sapien
aatcaaatcgaagtcagcctgctgg

SEQ ID NO: 5414632 - DNA, 25 bp, Homo sapien
gaatggaaaacaacctctgagtttg

SEQ ID NO: 5414633 - DNA, 25 bp, Homo sapien
taaagcccctaagctcatgattttc

SEQ ID NO: 5414634 - DNA, 25 bp, Homo sapien
ggaacagttatgtgatgattctgaa

SEQ ID NO: 5414635 - DNA, 25 bp, Homo sapien
tctgaaactttaacttagagcttca

SEQ ID NO: 5414636 - DNA, 25 bp, Homo sapien
aggataggtgacaaaaccttacttg

SEQ ID NO: 5414637 - DNA, 25 bp, Homo sapien
ctccacagccgtttgttgtcataga

SEQ ID NO: 5414638 - DNA, 25 bp, Homo sapien
ttttcaacttgcagtgagaaatagg

SEQ ID NO: 5414639 - DNA, 25 bp, Homo sapien
tccacagccgtttgttgtcatagaa

SEQ ID NO: 5414640 - DNA, 25 bp, Homo sapien
tattatgaggatcattttactttgg

SEQ ID NO: 5414641 - DNA, 25 bp, Homo sapien
gatctctggaagcaatcattattat

SEQ ID NO: 5414642 - DNA, 25 bp, Homo sapien
gaatgaaatactgttagccaattag

SEQ ID NO: 5414643 - DNA, 25 bp, Homo sapien
gaaatactgttagccaattagaatt

SEQ ID NO: 5414644 - DNA, 25 bp, Homo sapien
gcagcgtcccaataagatctcaggt

SEQ ID NO: 5414645 - DNA, 25 bp, Homo sapien
tctcaggtgttaggtaagtgggctc

SEQ ID NO: 5414646 - DNA, 25 bp, Homo sapien
tcaggtgttaggtaagtgggctcaa

SEQ ID NO: 5414647 - DNA, 25 bp, Homo sapien
caataagatctcaggtgttaggtaa

SEQ ID NO: 5414648 - DNA, 25 bp, Homo sapien
taactccccttagaggcagcacaaa

SEQ ID NO: 5414649 - DNA, 25 bp, Homo sapien
caaaatgtcaaagttggagtccagc

SEQ ID NO: 5414650 - DNA, 25 bp, Homo sapien
ccccttagaggcagcacaaaatgtc

SEQ ID NO: 5414651 - DNA, 25 bp, Homo sapien
atgtcaaagttggagtccagcagag

SEQ ID NO: 5414652 - DNA, 25 bp, Homo sapien
cacaaacgggatgaaagtccagggc

SEQ ID NO: 5414653 - DNA, 25 bp, Homo sapien
tactctaggccctttgaatcccgga

SEQ ID NO: 5414654 - DNA, 25 bp, Homo sapien
gcagttctttactttctcgggacac

SEQ ID NO: 5414655 - DNA, 25 bp, Homo sapien
tgacaaggactgacgtactctaggc

SEQ ID NO: 5414656 - DNA, 25 bp, Homo sapien
catttcaacatgagggacccactga

SEQ ID NO: 5414657 - DNA, 25 bp, Homo sapien
gacccactgacagattgtccggtga

SEQ ID NO: 5414658 - DNA, 25 bp, Homo sapien
tccggtgagtagctcagtgtggttt

SEQ ID NO: 5414659 - DNA, 25 bp, Homo sapien
ctgacagattgtccggtgagtagct

SEQ ID NO: 5414660 - DNA, 25 bp, Homo sapien
caatgtttttgtataggggcggcag

SEQ ID NO: 5414661 - DNA, 25 bp, Homo sapien
ggtaagtggcagcaaaatcttggca

SEQ ID NO: 5414662 - DNA, 25 bp, Homo sapien
ctcaatgtttttgtataggggcggc

SEQ ID NO: 5414663 - DNA, 25 bp, Homo sapien
acagggatggggtaagtggcagcaa

SEQ ID NO: 5414664 - DNA, 25 bp, Homo sapien
tcaatggaagccatagactgtgctt

SEQ ID NO: 5414665 - DNA, 25 bp, Homo sapien
ccatgggtcaatggaagccatagac

SEQ ID NO: 5414666 - DNA, 25 bp, Homo sapien
gtcaatggaagccatagactgtgct

SEQ ID NO: 5414667 - DNA, 25 bp, Homo sapien
tgggtcaatggaagccatagactgt

SEQ ID NO: 5414668 - DNA, 25 bp, Homo sapien
tcaccactgccactgaaggcaattg

SEQ ID NO: 5414669 - DNA, 25 bp, Homo sapien
gccactgaaggcaattgagttttca

SEQ ID NO: 5414670 - DNA, 25 bp, Homo sapien
aatgcctttgccacaggcttcacca

SEQ ID NO: 5414671 - DNA, 25 bp, Homo sapien
ttaagaggttgaatgtgaatgcctt

SEQ ID NO: 5414672 - DNA, 25 bp, Homo sapien
tctttaagatccagtcatcccactg

SEQ ID NO: 5414673 - DNA, 25 bp, Homo sapien
tgttgtagctcttacaccctgcact

SEQ ID NO: 5414674 - DNA, 25 bp, Homo sapien
cacaggctgtattgcctgcctggta

SEQ ID NO: 5414675 - DNA, 25 bp, Homo sapien
gaattagtgcttgcatctgttgtag

SEQ ID NO: 5414676 - DNA, 25 bp, Homo sapien
ccactgtgttaagtgtgtcttatac

SEQ ID NO: 5414677 - DNA, 25 bp, Homo sapien
agtcataagtgggtatgtcaaaaac

SEQ ID NO: 5414678 - DNA, 25 bp, Homo sapien
caggagagaccacttattcagtaca

SEQ ID NO: 5414679 - DNA, 25 bp, Homo sapien
gtacaacccatagaccagccactgt

SEQ ID NO: 5414680 - DNA, 25 bp, Homo sapien
gacatttgctgtcagagtccccatc

SEQ ID NO: 5414681 - DNA, 25 bp, Homo sapien
tgaatgctagttctaaacccttcgg

SEQ ID NO: 5414682 - DNA, 25 bp, Homo sapien
ccagagggctagctcggtgacattt

SEQ ID NO: 5414683 - DNA, 25 bp, Homo sapien
gcagagtaatttgctcaggttccca

SEQ ID NO: 5414684 - DNA, 25 bp, Homo sapien
gaataacggctgatctgctgggtct

SEQ ID NO: 5414685 - DNA, 25 bp, Homo sapien
tgttccagggaaaaacattctgctg

SEQ ID NO: 5414686 - DNA, 25 bp, Homo sapien
gtagcattcgctagatctcagagtg

SEQ ID NO: 5414687 - DNA, 25 bp, Homo sapien
gtaacttacatcagatctccctggg

SEQ ID NO: 5414688 - DNA, 25 bp, Homo sapien
cacagaaaatgattcgagtggctgc

SEQ ID NO: 5414689 - DNA, 25 bp, Homo sapien
tattgtaaagcctcaaatgtgacta

SEQ ID NO: 5414690 - DNA, 25 bp, Homo sapien
gcattgaactacattcaaggcagtg

SEQ ID NO: 5414691 - DNA, 25 bp, Homo sapien
tagggtcctacgaagtgttctctta

SEQ ID NO: 5414692 - DNA, 25 bp, Homo sapien
cctgttaacggattactttgtgagt

SEQ ID NO: 5414693 - DNA, 25 bp, Homo sapien
tactgagggacttacattgaaaaaa

SEQ ID NO: 5414694 - DNA, 25 bp, Homo sapien
tacattaatggagaatcttaggtac

SEQ ID NO: 5414695 - DNA, 25 bp, Homo sapien
aacggattactttgtgagtatgaaa

SEQ ID NO: 5414696 - DNA, 25 bp, Homo sapien
gtgtgatgtcagcttgcgcctcagc

SEQ ID NO: 5414697 - DNA, 25 bp, Homo sapien
gagttgtaggagttgcatgtaataa

SEQ ID NO: 5414698 - DNA, 25 bp, Homo sapien
ggtgtcttagcagtttagtcagagt

SEQ ID NO: 5414699 - DNA, 25 bp, Homo sapien
ccttcaacagggaaggactaatggt

SEQ ID NO: 5414700 - DNA, 25 bp, Homo sapien
gttccatacacagctagggatgatg

SEQ ID NO: 5414701 - DNA, 25 bp, Homo sapien
ttatacctgaatggcaaaactggtg

SEQ ID NO: 5414702 - DNA, 25 bp, Homo sapien
gagtcactgttgcattgtttgagaa

SEQ ID NO: 5414703 - DNA, 25 bp, Homo sapien
gagcttcagctcatattcatttgcc

SEQ ID NO: 5414704 - DNA, 25 bp, Homo sapien
gagacatacttatagcagccaacac

SEQ ID NO: 5414705 - DNA, 25 bp, Homo sapien
gtttggtgacaatccatcagctaca

SEQ ID NO: 5414706 - DNA, 25 bp, Homo sapien
gcatgtgaaaccctcaaagtacgga

SEQ ID NO: 5414707 - DNA, 25 bp, Homo sapien
tgagccaggcagcataaggatatat

SEQ ID NO: 5414708 - DNA, 25 bp, Homo sapien
ccgtttttatatacactatttgtat

SEQ ID NO: 5414709 - DNA, 25 bp, Homo sapien
aaagagatatgtaatagagaagaaa

SEQ ID NO: 5414710 - DNA, 25 bp, Homo sapien
aaaaaaagagatatgtaatagagaa

SEQ ID NO: 5414711 - DNA, 25 bp, Homo sapien
cgtttttatatacactatttgtatg

SEQ ID NO: 5414712 - DNA, 25 bp, Homo sapien
cgtggcagtaaaagctttccgaaca

SEQ ID NO: 5414713 - DNA, 25 bp, Homo sapien
gaaattctgctaggccctcaagatg

SEQ ID NO: 5414714 - DNA, 25 bp, Homo sapien
aaagctttccgaacattggcaagaa

SEQ ID NO: 5414715 - DNA, 25 bp, Homo sapien
gttggtcttccttacattctcttga

SEQ ID NO: 5414716 - DNA, 25 bp, Homo sapien
aaaggatacacttgattttcctatg

SEQ ID NO: 5414717 - DNA, 25 bp, Homo sapien
aggatacacttgattttcctatgcc

SEQ ID NO: 5414718 - DNA, 25 bp, Homo sapien
gaatgagtttttttatggcacagaa

SEQ ID NO: 5414719 - DNA, 25 bp, Homo sapien
aatgagtttttttatggcacagaag

SEQ ID NO: 5414720 - DNA, 25 bp, Homo sapien
tgcttcattgagatgtaaggaaaac

SEQ ID NO: 5414721 - DNA, 25 bp, Homo sapien
gcttcattgagatgtaaggaaaaca

SEQ ID NO: 5414722 - DNA, 25 bp, Homo sapien
ataaatgggctctcaggattcttag

SEQ ID NO: 5414723 - DNA, 25 bp, Homo sapien
gattcttagggtcaatattagtgaa

SEQ ID NO: 5414724 - DNA, 25 bp, Homo sapien
taccgaatgataaataactacagca

SEQ ID NO: 5414725 - DNA, 25 bp, Homo sapien
gaatccaaatgttggtagaagcaaa

SEQ ID NO: 5414726 - DNA, 25 bp, Homo sapien
ggatgactgtatttctaaaactgaa

SEQ ID NO: 5414727 - DNA, 25 bp, Homo sapien
agaatacaatgctgataggaagaac

SEQ ID NO: 5414728 - DNA, 25 bp, Homo sapien
ttttcgaatttctagtccaagtcga

SEQ ID NO: 5414729 - DNA, 25 bp, Homo sapien
tatacaagtctgcagatttctgcag

SEQ ID NO: 5414730 - DNA, 25 bp, Homo sapien
gaatttctagtccaagtcgatcttt

SEQ ID NO: 5414731 - DNA, 25 bp, Homo sapien
gtcgatctttatacaagtctgcaga

SEQ ID NO: 5414732 - DNA, 25 bp, Homo sapien
aaatgatgccaagcctataaatctg

SEQ ID NO: 5414733 - DNA, 25 bp, Homo sapien
taaaatgatgccaagcctataaatc

SEQ ID NO: 5414734 - DNA, 25 bp, Homo sapien
ctaccagttggctaaaagaagcttc

SEQ ID NO: 5414735 - DNA, 25 bp, Homo sapien
tctatatctaccagttggctaaaag

SEQ ID NO: 5414736 - DNA, 25 bp, Homo sapien
ttcagcaatcaattttaacaagtta

SEQ ID NO: 5414737 - DNA, 25 bp, Homo sapien
ggatatttgcagtcagtacttccaa

SEQ ID NO: 5414738 - DNA, 25 bp, Homo sapien
cctggatatttgcagtcagtacttc

SEQ ID NO: 5414739 - DNA, 25 bp, Homo sapien
tgcagtcagtacttccaattcctgc

SEQ ID NO: 5414740 - DNA, 25 bp, Homo sapien
aggtggtcaatgtaaggcatttagc

SEQ ID NO: 5414741 - DNA, 25 bp, Homo sapien
cctggagaactatcatgaggactga

SEQ ID NO: 5414742 - DNA, 25 bp, Homo sapien
gtcaatgtaaggcatttagcacagt

SEQ ID NO: 5414743 - DNA, 25 bp, Homo sapien
tgaggactgaaggaggtggtcaatg

SEQ ID NO: 5414744 - DNA, 25 bp, Homo sapien
aacatctcaaccattcgttcttctt

SEQ ID NO: 5414745 - DNA, 25 bp, Homo sapien
gaaacatctcaaccattcgttcttc

SEQ ID NO: 5414746 - DNA, 25 bp, Homo sapien
cagaaacatctcaaccattcgttct

SEQ ID NO: 5414747 - DNA, 25 bp, Homo sapien
tccagaaacatctcaaccattcgtt

SEQ ID NO: 5414748 - DNA, 25 bp, Homo sapien
gacaggaggtgtccgtacttttgaa

SEQ ID NO: 5414749 - DNA, 25 bp, Homo sapien
ggtatctcttagtcccgccatctga

SEQ ID NO: 5414750 - DNA, 25 bp, Homo sapien
gatggaatccttgtaggtatctctt

SEQ ID NO: 5414751 - DNA, 25 bp, Homo sapien
aaaagtgccagttcgtcctctacca

SEQ ID NO: 5414752 - DNA, 25 bp, Homo sapien
aagtgtaactgcacaggacactcac

SEQ ID NO: 5414753 - DNA, 25 bp, Homo sapien
cagcttgttagtaggtaagtgtaac

SEQ ID NO: 5414754 - DNA, 25 bp, Homo sapien
ctcctagcagcttgttagtaggtaa

SEQ ID NO: 5414755 - DNA, 25 bp, Homo sapien
taggtaagtgtaactgcacaggaca

SEQ ID NO: 5414756 - DNA, 25 bp, Homo sapien
tctaaccctttctgaacagagatca

SEQ ID NO: 5414757 - DNA, 25 bp, Homo sapien
aaactgttgacttctgaaacccctg

SEQ ID NO: 5414758 - DNA, 25 bp, Homo sapien
gaataagaccccacacatctatcct

SEQ ID NO: 5414759 - DNA, 25 bp, Homo sapien
gatcatcaggatagccaggtggccg

SEQ ID NO: 5414760 - DNA, 25 bp, Homo sapien
gatgcgcatttcacaaacgccgccg

SEQ ID NO: 5414761 - DNA, 25 bp, Homo sapien
tgcagtgaaacccagaacgctttgg

SEQ ID NO: 5414762 - DNA, 25 bp, Homo sapien
gaccaaagatacctcctgcagtgaa

SEQ ID NO: 5414763 - DNA, 25 bp, Homo sapien
tgcgacgctaaaaccttcccaggag

SEQ ID NO: 5414764 - DNA, 25 bp, Homo sapien
ccttgacaggattggttgaactcac

SEQ ID NO: 5414765 - DNA, 25 bp, Homo sapien
actttccgatttcaaacctagtgca

SEQ ID NO: 5414766 - DNA, 25 bp, Homo sapien
gccaacagccggactctaggctcag

SEQ ID NO: 5414767 - DNA, 25 bp, Homo sapien
tctgattggccgatagcgcaggctc

SEQ ID NO: 5414768 - DNA, 25 bp, Homo sapien
gggcattctgggattcgtagttctt

SEQ ID NO: 5414769 - DNA, 25 bp, Homo sapien
ggcattctgggattcgtagttcttt

SEQ ID NO: 5414770 - DNA, 25 bp, Homo sapien
tcatttatcggcttcaaataaaggt

SEQ ID NO: 5414771 - DNA, 25 bp, Homo sapien
cgaaagtattaatagcacccgaagg

SEQ ID NO: 5414772 - DNA, 25 bp, Homo sapien
gaagggctcgcccacgacaagtcat

SEQ ID NO: 5414773 - DNA, 25 bp, Homo sapien
gtattaatagcacccgaagggctcg

SEQ ID NO: 5414774 - DNA, 25 bp, Homo sapien
caaatacagatattgacctttaatc

SEQ ID NO: 5414775 - DNA, 25 bp, Homo sapien
tacagatattgacctttaatcgtat

SEQ ID NO: 5414776 - DNA, 25 bp, Homo sapien
taatcgtatcttttgcaacaaatac

SEQ ID NO: 5414777 - DNA, 25 bp, Homo sapien
ttgacctttaatcgtatcttttgca

SEQ ID NO: 5414778 - DNA, 25 bp, Homo sapien
tctctttacgacattcacatttatg

SEQ ID NO: 5414779 - DNA, 25 bp, Homo sapien
ctgtaagtataaggttctctttacg

SEQ ID NO: 5414780 - DNA, 25 bp, Homo sapien
taagtataaggttctctttacgaca

SEQ ID NO: 5414781 - DNA, 25 bp, Homo sapien
ctttacgacattcacatttatgctg

SEQ ID NO: 5414782 - DNA, 25 bp, Homo sapien
tcttccaacagatacgtacaagcac

SEQ ID NO: 5414783 - DNA, 25 bp, Homo sapien
ggtgaaaattgtggcttcttccaac

SEQ ID NO: 5414784 - DNA, 25 bp, Homo sapien
gcttcttccaacagatacgtacaag

SEQ ID NO: 5414785 - DNA, 25 bp, Homo sapien
caacagatacgtacaagcacaaaca

SEQ ID NO: 5414786 - DNA, 25 bp, Homo sapien
tgttatcgtggtcaattccagtcct

SEQ ID NO: 5414787 - DNA, 25 bp, Homo sapien
gggagggatgatgcatagtttatct

SEQ ID NO: 5414788 - DNA, 25 bp, Homo sapien
tgggtaacatttgagaccaccgaaa

SEQ ID NO: 5414789 - DNA, 25 bp, Homo sapien
ggcatgtgttccaccttataagaca

SEQ ID NO: 5414790 - DNA, 25 bp, Homo sapien
attcttgtttattcttcttccacat

SEQ ID NO: 5414791 - DNA, 25 bp, Homo sapien
cattaccaaattcttgtttattctt

SEQ ID NO: 5414792 - DNA, 25 bp, Homo sapien
tacattaccaaattcttgtttattc

SEQ ID NO: 5414793 - DNA, 25 bp, Homo sapien
caaattcttgtttattcttcttcca

SEQ ID NO: 5414794 - DNA, 25 bp, Homo sapien
gaacaggccaggctacagtatggac

SEQ ID NO: 5414795 - DNA, 25 bp, Homo sapien
tctaggtgggaccaacagtggctcc

SEQ ID NO: 5414796 - DNA, 25 bp, Homo sapien
gatgtatatacacacgggtccaggg

SEQ ID NO: 5414797 - DNA, 25 bp, Homo sapien
tcaaaaccagagaaatcaggtgcct

SEQ ID NO: 5414798 - DNA, 25 bp, Homo sapien
gaacagcatggaccggattgtcatc

SEQ ID NO: 5414799 - DNA, 25 bp, Homo sapien
tcatctgtgctcatacatcctgctg

SEQ ID NO: 5414800 - DNA, 25 bp, Homo sapien
ccctgtacgtcaactgagccgatca

SEQ ID NO: 5414801 - DNA, 25 bp, Homo sapien
cctgctgctaatagaagatgggcac

SEQ ID NO: 5414802 - DNA, 25 bp, Homo sapien
ctcttagctttggaatgctgatgcc

SEQ ID NO: 5414803 - DNA, 25 bp, Homo sapien
gcaggtgccaggaaattcaaaggca

SEQ ID NO: 5414804 - DNA, 25 bp, Homo sapien
caggtccacatgtggatcccagagg

SEQ ID NO: 5414805 - DNA, 25 bp, Homo sapien
caagcaagaggttgcgccacaggtc

SEQ ID NO: 5414806 - DNA, 25 bp, Homo sapien
ggcatatcctgtcaaagggatctag

SEQ ID NO: 5414807 - DNA, 25 bp, Homo sapien
gtgatatcgtctttccatggcagtg

SEQ ID NO: 5414808 - DNA, 25 bp, Homo sapien
tgccaggacacccatccagtgatat

SEQ ID NO: 5414809 - DNA, 25 bp, Homo sapien
cactaagtgcctaaagtaaaagctt

SEQ ID NO: 5414810 - DNA, 25 bp, Homo sapien
cccaggctttattcagaaagggaca

SEQ ID NO: 5414811 - DNA, 25 bp, Homo sapien
tgaagtagctgcacaaaggatgttc

SEQ ID NO: 5414812 - DNA, 25 bp, Homo sapien
ggaatcaggctgaatatcttcctgc

SEQ ID NO: 5414813 - DNA, 25 bp, Homo sapien
catctgtggtgtgtggcttttgtcc

SEQ ID NO: 5414814 - DNA, 25 bp, Homo sapien
gaacccagtgtgaaagaaattggaa

SEQ ID NO: 5414815 - DNA, 25 bp, Homo sapien
tatgaggtgggatcctaaaccaaca

SEQ ID NO: 5414816 - DNA, 25 bp, Homo sapien
caaacccttagttggaaatatgagg

SEQ ID NO: 5414817 - DNA, 25 bp, Homo sapien
caaatccaagtggacacagtgctca

SEQ ID NO: 5414818 - DNA, 25 bp, Homo sapien
tatgcagggagttctggtcacacag

SEQ ID NO: 5414819 - DNA, 25 bp, Homo sapien
tgcacaatataacatgggcattgct

SEQ ID NO: 5414820 - DNA, 25 bp, Homo sapien
gccctcaaagaccatcaatagacat

SEQ ID NO: 5414821 - DNA, 25 bp, Homo sapien
agtgtgtgtgcatagatgattagac

SEQ ID NO: 5414822 - DNA, 25 bp, Homo sapien
cagagaaatttccccaactttatct

SEQ ID NO: 5414823 - DNA, 25 bp, Homo sapien
tcagagaaatttccccaactttatc

SEQ ID NO: 5414824 - DNA, 25 bp, Homo sapien
gaataaaaacgtagacatcatcgcc

SEQ ID NO: 5414825 - DNA, 25 bp, Homo sapien
gaatgcattccttcaccgtctgcct

SEQ ID NO: 5414826 - DNA, 25 bp, Homo sapien
taagccaaccccttggtcatctgag

SEQ ID NO: 5414827 - DNA, 25 bp, Homo sapien
ccatctacgtagagtgagcttggga

SEQ ID NO: 5414828 - DNA, 25 bp, Homo sapien
taaaatacttcctcagtgtctggtg

SEQ ID NO: 5414829 - DNA, 25 bp, Homo sapien
ggaaatatgttctcttgacccattg

SEQ ID NO: 5414830 - DNA, 25 bp, Homo sapien
tcttaggattccaaggacggagtcc

SEQ ID NO: 5414831 - DNA, 25 bp, Homo sapien
ggcttcatagaagggtaatacggct

SEQ ID NO: 5414832 - DNA, 25 bp, Homo sapien
tgcctgttatagacccgcctctgtg

SEQ ID NO: 5414833 - DNA, 25 bp, Homo sapien
cctcagagagggagtatgcagtttc

SEQ ID NO: 5414834 - DNA, 25 bp, Homo sapien
caacaatcagtatgcagggaggtgc

SEQ ID NO: 5414835 - DNA, 25 bp, Homo sapien
tgtctctaagtgcaaacctccctgt

SEQ ID NO: 5414836 - DNA, 25 bp, Homo sapien
tgactagtttgtagtaggctccttt

SEQ ID NO: 5414837 - DNA, 25 bp, Homo sapien
cagtggtgactagtttgtagtaggc

SEQ ID NO: 5414838 - DNA, 25 bp, Homo sapien
ttgtagtaggctcctttttgggcca

SEQ ID NO: 5414839 - DNA, 25 bp, Homo sapien
tcttcatgggtccccttttcaatca

SEQ ID NO: 5414840 - DNA, 25 bp, Homo sapien
tggacaagcgatgggcaatgacaat

SEQ ID NO: 5414841 - DNA, 25 bp, Homo sapien
tctggatggtggacaagcgatgggc

SEQ ID NO: 5414842 - DNA, 25 bp, Homo sapien
caatgacaatgcaggtccgaccctc

SEQ ID NO: 5414843 - DNA, 25 bp, Homo sapien
ccatgacagcaatgatatccgcgtt

SEQ ID NO: 5414844 - DNA, 25 bp, Homo sapien
ttttaggatctcgtacaatggcccg

SEQ ID NO: 5414845 - DNA, 25 bp, Homo sapien
tggcccgagcaatagcaatgcgttg

SEQ ID NO: 5414846 - DNA, 25 bp, Homo sapien
aatgcgttgtttctcccctctagag

SEQ ID NO: 5414847 - DNA, 25 bp, Homo sapien
ctctagagagttgagacccctggga

SEQ ID NO: 5414848 - DNA, 25 bp, Homo sapien
ttgtccattatgctacaggcaaaca

SEQ ID NO: 5414849 - DNA, 25 bp, Homo sapien
acaattccaatgtttgagcggagga

SEQ ID NO: 5414850 - DNA, 25 bp, Homo sapien
acttgatattgtccattatgctaca

SEQ ID NO: 5414851 - DNA, 25 bp, Homo sapien
tgagcggaggaactggacatttact

SEQ ID NO: 5414852 - DNA, 25 bp, Homo sapien
tgaatgctagtgcttttgccacatc

SEQ ID NO: 5414853 - DNA, 25 bp, Homo sapien
cgttccaacagctgaatgctagtgc

SEQ ID NO: 5414854 - DNA, 25 bp, Homo sapien
ttgatcaggatcatagaaacgttcc

SEQ ID NO: 5414855 - DNA, 25 bp, Homo sapien
cactgctcccaacaaacgccagtgt

SEQ ID NO: 5414856 - DNA, 25 bp, Homo sapien
gagagaccattcagaacttgcgagt

SEQ ID NO: 5414857 - DNA, 25 bp, Homo sapien
tcaggtcgagaaggatatgtaaatt

SEQ ID NO: 5414858 - DNA, 25 bp, Homo sapien
ggactaatcgacactgagagaccat

SEQ ID NO: 5414859 - DNA, 25 bp, Homo sapien
tgccctggactaatcgacactgaga

SEQ ID NO: 5414860 - DNA, 25 bp, Homo sapien
gctgttgcactcagtacaactgcag

SEQ ID NO: 5414861 - DNA, 25 bp, Homo sapien
tatacactgattgggggttgtcggt

SEQ ID NO: 5414862 - DNA, 25 bp, Homo sapien
ttccaagagctgttgcactcagtac

SEQ ID NO: 5414863 - DNA, 25 bp, Homo sapien
aaagcgtgcagctgatattttagct

SEQ ID NO: 5414864 - DNA, 25 bp, Homo sapien
gaatggctgtcttgaagggcttctc

SEQ ID NO: 5414865 - DNA, 25 bp, Homo sapien
cacatagctgaaatggagcccctca

SEQ ID NO: 5414866 - DNA, 25 bp, Homo sapien
taacctccatatctgtaggaagcag

SEQ ID NO: 5414867 - DNA, 25 bp, Homo sapien
caacagtgcggatgttactgagggc

SEQ ID NO: 5414868 - DNA, 25 bp, Homo sapien
gaattgactatcatcccgatctgag

SEQ ID NO: 5414869 - DNA, 25 bp, Homo sapien
gatcatggccacagtgacgttagtg

SEQ ID NO: 5414870 - DNA, 25 bp, Homo sapien
tgcttatctcgagaggcaaatcctg

SEQ ID NO: 5414871 - DNA, 25 bp, Homo sapien
gaagaagcacaagatgaccaggctc

SEQ ID NO: 5414872 - DNA, 25 bp, Homo sapien
ataagcacctttcaagtccctgctt

SEQ ID NO: 5414873 - DNA, 25 bp, Homo sapien
tataagcacctttcaagtccctgct

SEQ ID NO: 5414874 - DNA, 25 bp, Homo sapien
tgccctgaaaccaaatttacgtagc

SEQ ID NO: 5414875 - DNA, 25 bp, Homo sapien
tagcctttttgttaggagctcccca

SEQ ID NO: 5414876 - DNA, 25 bp, Homo sapien
gagctccccagatttagcaaaggca

SEQ ID NO: 5414877 - DNA, 25 bp, Homo sapien
tcttgttgtcaatgctccagggcta

SEQ ID NO: 5414878 - DNA, 25 bp, Homo sapien
ggcacacaccattgatctgtgacct

SEQ ID NO: 5414879 - DNA, 25 bp, Homo sapien
cacaccattgatctgtgacctttgt

SEQ ID NO: 5414880 - DNA, 25 bp, Homo sapien
tgtagaaattgggtgaaaagagata

SEQ ID NO: 5414881 - DNA, 25 bp, Homo sapien
cattgatctgtgacctttgttcctc

SEQ ID NO: 5414882 - DNA, 25 bp, Homo sapien
taagtgtggctacttttgctcaact

SEQ ID NO: 5414883 - DNA, 25 bp, Homo sapien
tatagtcagcatttagttggattat

SEQ ID NO: 5414884 - DNA, 25 bp, Homo sapien
tttttacgccccattactctcagtc

SEQ ID NO: 5414885 - DNA, 25 bp, Homo sapien
aagtcaaatcgggaactgcttaggg

SEQ ID NO: 5414886 - DNA, 25 bp, Homo sapien
ctaactggggcaggttcaacttctt

SEQ ID NO: 5414887 - DNA, 25 bp, Homo sapien
cctaccagcatgtagggccattctg

SEQ ID NO: 5414888 - DNA, 25 bp, Homo sapien
caagggtgtgactgtcccgttcaca

SEQ ID NO: 5414889 - DNA, 25 bp, Homo sapien
gaatttcagaatcctcctaactggg

SEQ ID NO: 5414890 - DNA, 25 bp, Homo sapien
tatgatctacaacagctaatggagg

SEQ ID NO: 5414891 - DNA, 25 bp, Homo sapien
cttcttcataggtagacttatgatc

SEQ ID NO: 5414892 - DNA, 25 bp, Homo sapien
gagacttggagcgttgccggatgga

SEQ ID NO: 5414893 - DNA, 25 bp, Homo sapien
taatggaggttcgtgcaccaggtaa

SEQ ID NO: 5414894 - DNA, 25 bp, Homo sapien
tagctccctctgctaaaggtcctcg

SEQ ID NO: 5414895 - DNA, 25 bp, Homo sapien
taaactatcctggtagctccctctg

SEQ ID NO: 5414896 - DNA, 25 bp, Homo sapien
ggtcctcgcaagcatgtcatcttca

SEQ ID NO: 5414897 - DNA, 25 bp, Homo sapien
tctgctaaaggtcctcgcaagcatg

SEQ ID NO: 5414898 - DNA, 25 bp, Homo sapien
tttgcaaagtcactagagtgaagta

SEQ ID NO: 5414899 - DNA, 25 bp, Homo sapien
aaagtcactagagtgaagtaaacac

SEQ ID NO: 5414900 - DNA, 25 bp, Homo sapien
tcttcattaagagcttgatttccct

SEQ ID NO: 5414901 - DNA, 25 bp, Homo sapien
tgcaaagtcactagagtgaagtaaa

SEQ ID NO: 5414902 - DNA, 25 bp, Homo sapien
gcagctctgaccgtagacaagcgat

SEQ ID NO: 5414903 - DNA, 25 bp, Homo sapien
catgttcaaaaccaatgatggtatc

SEQ ID NO: 5414904 - DNA, 25 bp, Homo sapien
gaaatgattgtgtgcccatgctgaa

SEQ ID NO: 5414905 - DNA, 25 bp, Homo sapien
tagacaagcgatgagcaactgaaat

SEQ ID NO: 5414906 - DNA, 25 bp, Homo sapien
gatgagggctctggcgatagctacc

SEQ ID NO: 5414907 - DNA, 25 bp, Homo sapien
gcgatagctaccctttgtttctggc

SEQ ID NO: 5414908 - DNA, 25 bp, Homo sapien
cttgcaccatggcttcactctcatt

SEQ ID NO: 5414909 - DNA, 25 bp, Homo sapien
aagcagaatcttgggatttcggatg

SEQ ID NO: 5414910 - DNA, 25 bp, Homo sapien
tctcccaggaatgtatggctagggg

SEQ ID NO: 5414911 - DNA, 25 bp, Homo sapien
cccaggaatgtatggctaggggtac

SEQ ID NO: 5414912 - DNA, 25 bp, Homo sapien
tttctcccaggaatgtatggctagg

SEQ ID NO: 5414913 - DNA, 25 bp, Homo sapien
tcccaggaatgtatggctaggggta

SEQ ID NO: 5414914 - DNA, 25 bp, Homo sapien
cactatcccaatctgatctctaagc

SEQ ID NO: 5414915 - DNA, 25 bp, Homo sapien
aagccactgaatgttaagagagcga

SEQ ID NO: 5414916 - DNA, 25 bp, Homo sapien
ccttggcagcttggactatgtcttc

SEQ ID NO: 5414917 - DNA, 25 bp, Homo sapien
tctgccatagcgaatattttctgca

SEQ ID NO: 5414918 - DNA, 25 bp, Homo sapien
ttcacaggggtcatagaatcgctga

SEQ ID NO: 5414919 - DNA, 25 bp, Homo sapien
cattccttcacaggggtcatagaat

SEQ ID NO: 5414920 - DNA, 25 bp, Homo sapien
gcagtgctgtactttttccagctcc

SEQ ID NO: 5414921 - DNA, 25 bp, Homo sapien
catagaatcgctgaatgagttgcag

SEQ ID NO: 5414922 - DNA, 25 bp, Homo sapien
ccctggtttaatgaccatgttgagg

SEQ ID NO: 5414923 - DNA, 25 bp, Homo sapien
ctggtttaatgaccatgttgaggtc

SEQ ID NO: 5414924 - DNA, 25 bp, Homo sapien
ggtttaatgaccatgttgaggtcat

SEQ ID NO: 5414925 - DNA, 25 bp, Homo sapien
ttcccctggtttaatgaccatgttg

SEQ ID NO: 5414926 - DNA, 25 bp, Homo sapien
tcacctctggtctggaaggataatg

SEQ ID NO: 5414927 - DNA, 25 bp, Homo sapien
cttgattcgatccaacttgtaacca

SEQ ID NO: 5414928 - DNA, 25 bp, Homo sapien
ggaaggtcacattatggaattcaat

SEQ ID NO: 5414929 - DNA, 25 bp, Homo sapien
ggaattcaatttcacccttgattcg

SEQ ID NO: 5414930 - DNA, 25 bp, Homo sapien
gagaggcattgccaagatttaaagc

SEQ ID NO: 5414931 - DNA, 25 bp, Homo sapien
gcattgccaagatttaaagctccta

SEQ ID NO: 5414932 - DNA, 25 bp, Homo sapien
gctcctactatgacactgaggaaaa

SEQ ID NO: 5414933 - DNA, 25 bp, Homo sapien
gatttaaagctcctactatgacact

SEQ ID NO: 5414934 - DNA, 25 bp, Homo sapien
ggacaagggttcctggtgtatattc

SEQ ID NO: 5414935 - DNA, 25 bp, Homo sapien
ttcatccaggacaagtgtggagccg

SEQ ID NO: 5414936 - DNA, 25 bp, Homo sapien
caacgctgggcgaacacaagatttt

SEQ ID NO: 5414937 - DNA, 25 bp, Homo sapien
gagacaccacacgaatccagtaaag

SEQ ID NO: 5414938 - DNA, 25 bp, Homo sapien
catagtccgtaaacttggacacact

SEQ ID NO: 5414939 - DNA, 25 bp, Homo sapien
ttggcataggccttcagctcatagt

SEQ ID NO: 5414940 - DNA, 25 bp, Homo sapien
tctcattgatgaaatgacttcatca

SEQ ID NO: 5414941 - DNA, 25 bp, Homo sapien
gatgaaatgacttcatcagccacca

SEQ ID NO: 5414942 - DNA, 25 bp, Homo sapien
actgtgttaccaagactggaagctg

SEQ ID NO: 5414943 - DNA, 25 bp, Homo sapien
ctagtgaagttgcttgtatagtttg

SEQ ID NO: 5414944 - DNA, 25 bp, Homo sapien
aaaatttacatttgagcctagtgaa

SEQ ID NO: 5414945 - DNA, 25 bp, Homo sapien
agtttgttgtatagttgcttgtaga

SEQ ID NO: 5414946 - DNA, 25 bp, Homo sapien
ggctgacagaaataataaccaaggt

SEQ ID NO: 5414947 - DNA, 25 bp, Homo sapien
cgctgaatgaaaagggccatttggt

SEQ ID NO: 5414948 - DNA, 25 bp, Homo sapien
cagatggtcgaggtcatgcgctgaa

SEQ ID NO: 5414949 - DNA, 25 bp, Homo sapien
tccaatcccaatgagagggctgaca

SEQ ID NO: 5414950 - DNA, 25 bp, Homo sapien
tctcattttctgtatctgacgagct

SEQ ID NO: 5414951 - DNA, 25 bp, Homo sapien
cactgaattgcagtcaaaccaccct

SEQ ID NO: 5414952 - DNA, 25 bp, Homo sapien
ctgcggcaatgacccaaaagcatat

SEQ ID NO: 5414953 - DNA, 25 bp, Homo sapien
gaattgcagtcaaaccaccctattt

SEQ ID NO: 5414954 - DNA, 25 bp, Homo sapien
tcctgtgataagtactgcgacagca

SEQ ID NO: 5414955 - DNA, 25 bp, Homo sapien
agcaattccagcatagtaactggca

SEQ ID NO: 5414956 - DNA, 25 bp, Homo sapien
ggcaaatttgatcatttcgctctcg

SEQ ID NO: 5414957 - DNA, 25 bp, Homo sapien
ttgatcatttcgctctcgatgttca

SEQ ID NO: 5414958 - DNA, 25 bp, Homo sapien
gttcatgaaattcccattacagatg

SEQ ID NO: 5414959 - DNA, 25 bp, Homo sapien
tcatgaaattcccattacagatgga

SEQ ID NO: 5414960 - DNA, 25 bp, Homo sapien
ttcatgaaattcccattacagatgg

SEQ ID NO: 5414961 - DNA, 25 bp, Homo sapien
tgtcagttgatgaagaaaaccgaaa

SEQ ID NO: 5414962 - DNA, 25 bp, Homo sapien
gagttcttgtaactcaacgtcgtag

SEQ ID NO: 5414963 - DNA, 25 bp, Homo sapien
caaaaatgagtagcacgcctggctg

SEQ ID NO: 5414964 - DNA, 25 bp, Homo sapien
cctggctgggctattccatggagaa

SEQ ID NO: 5414965 - DNA, 25 bp, Homo sapien
caactctaacgccatcacctttctt

SEQ ID NO: 5414966 - DNA, 25 bp, Homo sapien
gaaagaagccaactctaacgccatc

SEQ ID NO: 5414967 - DNA, 25 bp, Homo sapien
agccaactctaacgccatcaccttt

SEQ ID NO: 5414968 - DNA, 25 bp, Homo sapien
aagaagccaactctaacgccatcac

SEQ ID NO: 5414969 - DNA, 25 bp, Homo sapien
ctgatgagaaaaacataaggattta

SEQ ID NO: 5414970 - DNA, 25 bp, Homo sapien
tgagaaaaacataaggatttaaaga

SEQ ID NO: 5414971 - DNA, 25 bp, Homo sapien
tgatgagaaaaacataaggatttaa

SEQ ID NO: 5414972 - DNA, 25 bp, Homo sapien
gatgagaaaaacataaggatttaaa

SEQ ID NO: 5414973 - DNA, 25 bp, Homo sapien
tatacttcgaagaattactgagtca

SEQ ID NO: 5414974 - DNA, 25 bp, Homo sapien
ctttatacttcgaagaattactgag

SEQ ID NO: 5414975 - DNA, 25 bp, Homo sapien
cttcgaagaattactgagtcagaca

SEQ ID NO: 5414976 - DNA, 25 bp, Homo sapien
tgatttatctgactcaaaaccatca

SEQ ID NO: 5414977 - DNA, 25 bp, Homo sapien
taattgcaacccacagccaacgacc

SEQ ID NO: 5414978 - DNA, 25 bp, Homo sapien
ggtaattgcaacccacagccaacga

SEQ ID NO: 5414979 - DNA, 25 bp, Homo sapien
gtaattgcaacccacagccaacgac

SEQ ID NO: 5414980 - DNA, 25 bp, Homo sapien
cagccaatccagacatatacttatt

SEQ ID NO: 5414981 - DNA, 25 bp, Homo sapien
gtgaaaaggatacgtcatgcaaata

SEQ ID NO: 5414982 - DNA, 25 bp, Homo sapien
cgtcatgcaaatactgatgtctcaa

SEQ ID NO: 5414983 - DNA, 25 bp, Homo sapien
tgatgtctcaaagctgttatgttaa

SEQ ID NO: 5414984 - DNA, 25 bp, Homo sapien
gcagcataccactcctaaataaaac

SEQ ID NO: 5414985 - DNA, 25 bp, Homo sapien
aataaaacacttcatgacagaaaat

SEQ ID NO: 5414986 - DNA, 25 bp, Homo sapien
gcttgggatggaggcactatgcacc

SEQ ID NO: 5414987 - DNA, 25 bp, Homo sapien
catatggaaagctggataatgccac

SEQ ID NO: 5414988 - DNA, 25 bp, Homo sapien
ggtgtagtgtcttgcccacgaaatt

SEQ ID NO: 5414989 - DNA, 25 bp, Homo sapien
tttccactggtgtgcaaatacctcg

SEQ ID NO: 5414990 - DNA, 25 bp, Homo sapien
tcgtagtatttagaggacagtggtg

SEQ ID NO: 5414991 - DNA, 25 bp, Homo sapien
gatcctgatacacctgttgcttcac

SEQ ID NO: 5414992 - DNA, 25 bp, Homo sapien
cactgtcggttgatgctgtgtgtca

SEQ ID NO: 5414993 - DNA, 25 bp, Homo sapien
tttcttcagaggcaccgttgaggta

SEQ ID NO: 5414994 - DNA, 25 bp, Homo sapien
aaatacacggtgatcccattggcca

SEQ ID NO: 5414995 - DNA, 25 bp, Homo sapien
gaatagactaaaatgaggcccttcc

SEQ ID NO: 5414996 - DNA, 25 bp, Homo sapien
cccctaaatagcttcttaatccatt

SEQ ID NO: 5414997 - DNA, 25 bp, Homo sapien
gagtcatcccctaatatttgtcacc

SEQ ID NO: 5414998 - DNA, 25 bp, Homo sapien
ccattattcttggtactaggaaaca

SEQ ID NO: 5414999 - DNA, 25 bp, Homo sapien
gagtgtaaacagaagctcctagaca

SEQ ID NO: 5415000 - DNA, 25 bp, Homo sapien
tgtttacactggacaagagaccaat

SEQ ID NO: 5415001 - DNA, 25 bp, Homo sapien
ccaagtattgtagcgttgtttacac

SEQ ID NO: 5415002 - DNA, 25 bp, Homo sapien
tataaagaagacagcaaccaagagt

SEQ ID NO: 5415003 - DNA, 25 bp, Homo sapien
gttgtgaaatcattaatgcatcctg

SEQ ID NO: 5415004 - DNA, 25 bp, Homo sapien
cactgtggagagttaaaaggtttca

SEQ ID NO: 5415005 - DNA, 25 bp, Homo sapien
ctccactgtggagagttaaaaggtt

SEQ ID NO: 5415006 - DNA, 25 bp, Homo sapien
gctcagtgcctagtttgctccacct

SEQ ID NO: 5415007 - DNA, 25 bp, Homo sapien
tggctctcccaaaagctggctatca

SEQ ID NO: 5415008 - DNA, 25 bp, Homo sapien
ctgatgctcctgctcagtggtgtgc

SEQ ID NO: 5415009 - DNA, 25 bp, Homo sapien
gaggtagatccaccctatcccagct

SEQ ID NO: 5415010 - DNA, 25 bp, Homo sapien
taaagatagagcaacttcattttgc

SEQ ID NO: 5415011 - DNA, 25 bp, Homo sapien
gattttgattaagtggatctggaga

SEQ ID NO: 5415012 - DNA, 25 bp, Homo sapien
ttttgccatttgatcaggttgccaa

SEQ ID NO: 5415013 - DNA, 25 bp, Homo sapien
tgcagattttgattaagtggatctg

SEQ ID NO: 5415014 - DNA, 25 bp, Homo sapien
agacttgaaagaagcgccttagctt

SEQ ID NO: 5415015 - DNA, 25 bp, Homo sapien
aagacttgaaagaagcgccttagct

SEQ ID NO: 5415016 - DNA, 25 bp, Homo sapien
gtaacgagaagagatcctcagcaga

SEQ ID NO: 5415017 - DNA, 25 bp, Homo sapien
ttggccaaggtcgaagacaaggaca

SEQ ID NO: 5415018 - DNA, 25 bp, Homo sapien
tcttccctattgtataagttaggtg

SEQ ID NO: 5415019 - DNA, 25 bp, Homo sapien
cctcagcagaacactcagaatgatg

SEQ ID NO: 5415020 - DNA, 25 bp, Homo sapien
taataagatgtgacgcgagtttggg

SEQ ID NO: 5415021 - DNA, 25 bp, Homo sapien
gaggcaagcacgtctctataataag

SEQ ID NO: 5415022 - DNA, 25 bp, Homo sapien
ttctgagacaggaacgtgagcggta

SEQ ID NO: 5415023 - DNA, 25 bp, Homo sapien
tgctcgcctgagatgggcctgcaag

SEQ ID NO: 5415024 - DNA, 25 bp, Homo sapien
tctccccgctcttgcagatgagctg

SEQ ID NO: 5415025 - DNA, 25 bp, Homo sapien
tgcgcctgtgggttaactacccttg

SEQ ID NO: 5415026 - DNA, 25 bp, Homo sapien
cccgctcttgcagatgagctgagtc

SEQ ID NO: 5415027 - DNA, 25 bp, Homo sapien
tcctgattgagcagatgcgcctgtg

SEQ ID NO: 5415028 - DNA, 25 bp, Homo sapien
ctgatgagtttttttggctcagatt

SEQ ID NO: 5415029 - DNA, 25 bp, Homo sapien
tctgctatcatcatcagctgatgag

SEQ ID NO: 5415030 - DNA, 25 bp, Homo sapien
tttttttggctcagatttcgataag

SEQ ID NO: 5415031 - DNA, 25 bp, Homo sapien
accctctgctatcatcatcagctga

SEQ ID NO: 5415032 - DNA, 25 bp, Homo sapien
tcagctgtcagaggcagcctttgat

SEQ ID NO: 5415033 - DNA, 25 bp, Homo sapien
cctttgatggatgtgtggttggtcc

SEQ ID NO: 5415034 - DNA, 25 bp, Homo sapien
tttgatggatgtgtggttggtcctt

SEQ ID NO: 5415035 - DNA, 25 bp, Homo sapien
agctgtcagaggcagcctttgatgg

SEQ ID NO: 5415036 - DNA, 25 bp, Homo sapien
ggttgaaattgtactggccctgact

SEQ ID NO: 5415037 - DNA, 25 bp, Homo sapien
gtggttgaaattgtactggccctga

SEQ ID NO: 5415038 - DNA, 25 bp, Homo sapien
ggccctgacttcatgagctggcttt

SEQ ID NO: 5415039 - DNA, 25 bp, Homo sapien
attgtactggccctgacttcatgag

SEQ ID NO: 5415040 - DNA, 25 bp, Homo sapien
tctaattagatccatggaggctgtg

SEQ ID NO: 5415041 - DNA, 25 bp, Homo sapien
ttttcacagagtaggagcctgtagg

SEQ ID NO: 5415042 - DNA, 25 bp, Homo sapien
tatgctgcttaatgttgcctagaac

SEQ ID NO: 5415043 - DNA, 25 bp, Homo sapien
gactcacacgtttgacagttaccct

SEQ ID NO: 5415044 - DNA, 25 bp, Homo sapien
tgagctccaactactagggcaggtg

SEQ ID NO: 5415045 - DNA, 25 bp, Homo sapien
cagggtccatcagcagaagagctca

SEQ ID NO: 5415046 - DNA, 25 bp, Homo sapien
tatacccactatttaagaggagagc

SEQ ID NO: 5415047 - DNA, 25 bp, Homo sapien
tcttggcagctagtgagagaacaca

SEQ ID NO: 5415048 - DNA, 25 bp, Homo sapien
aattattccctaaatagctggtata

SEQ ID NO: 5415049 - DNA, 25 bp, Homo sapien
attattccctaaatagctggtatag

SEQ ID NO: 5415050 - DNA, 25 bp, Homo sapien
taaaaatatgagacggcataagtaa

SEQ ID NO: 5415051 - DNA, 25 bp, Homo sapien
aattcagtaacaggataatctttcc

SEQ ID NO: 5415052 - DNA, 25 bp, Homo sapien
gatttgcggtgtctttaaaagtgtc

SEQ ID NO: 5415053 - DNA, 25 bp, Homo sapien
cagaataggttggagttgggtctct

SEQ ID NO: 5415054 - DNA, 25 bp, Homo sapien
ggtctcttctcgaaggaggcttagg

SEQ ID NO: 5415055 - DNA, 25 bp, Homo sapien
aggtggtgtcgcagcaacactttcc

SEQ ID NO: 5415056 - DNA, 25 bp, Homo sapien
ctgtgcatagattggattttcaaag

SEQ ID NO: 5415057 - DNA, 25 bp, Homo sapien
tagattttcgtttgaagagattcca

SEQ ID NO: 5415058 - DNA, 25 bp, Homo sapien
ttagattttcgtttgaagagattcc

SEQ ID NO: 5415059 - DNA, 25 bp, Homo sapien
agattttcgtttgaagagattccat

SEQ ID NO: 5415060 - DNA, 25 bp, Homo sapien
atctcagaagggtttatgggacttc

SEQ ID NO: 5415061 - DNA, 25 bp, Homo sapien
aagttgggtttgtctctggaactat

SEQ ID NO: 5415062 - DNA, 25 bp, Homo sapien
tgggtttgtctctggaactatctca

SEQ ID NO: 5415063 - DNA, 25 bp, Homo sapien
gggacttccataattcttattatcc

SEQ ID NO: 5415064 - DNA, 25 bp, Homo sapien
ttttgccatcttgttctcccacaga

SEQ ID NO: 5415065 - DNA, 25 bp, Homo sapien
ctttttgccatcttgttctcccaca

SEQ ID NO: 5415066 - DNA, 25 bp, Homo sapien
tcttgttctcccacagacatcatca

SEQ ID NO: 5415067 - DNA, 25 bp, Homo sapien
tgccatcttgttctcccacagacat

SEQ ID NO: 5415068 - DNA, 25 bp, Homo sapien
cattaatgcgtctttaataaaaacg

SEQ ID NO: 5415069 - DNA, 25 bp, Homo sapien
tgcaccaccatgcaagaggtttcct

SEQ ID NO: 5415070 - DNA, 25 bp, Homo sapien
gggactacatgtcagtatttatact

SEQ ID NO: 5415071 - DNA, 25 bp, Homo sapien
ttcctcactacacaagggtcctcta

SEQ ID NO: 5415072 - DNA, 25 bp, Homo sapien
gtcttatgtccttgggttggtcctg

SEQ ID NO: 5415073 - DNA, 25 bp, Homo sapien
gcagcatggaccactcactatgctt

SEQ ID NO: 5415074 - DNA, 25 bp, Homo sapien
tttcaggtcttatgtccttgggttg

SEQ ID NO: 5415075 - DNA, 25 bp, Homo sapien
ctgcagcatggaccactcactatgc

SEQ ID NO: 5415076 - DNA, 25 bp, Homo sapien
aaccactttgacagcactgtctctg

SEQ ID NO: 5415077 - DNA, 25 bp, Homo sapien
tgtctctggctgagtacattgggtt

SEQ ID NO: 5415078 - DNA, 25 bp, Homo sapien
ctggattggctgaaccactttgaca

SEQ ID NO: 5415079 - DNA, 25 bp, Homo sapien
tctggctgagtacattgggttttca

SEQ ID NO: 5415080 - DNA, 25 bp, Homo sapien
agtctcaggtccaaaaccagacact

SEQ ID NO: 5415081 - DNA, 25 bp, Homo sapien
tgccattgacctgtcaatagcagtc

SEQ ID NO: 5415082 - DNA, 25 bp, Homo sapien
ttttcagagggcttgacgagactgc

SEQ ID NO: 5415083 - DNA, 25 bp, Homo sapien
tgatctgaaggtcaccccattccca

SEQ ID NO: 5415084 - DNA, 25 bp, Homo sapien
gcagagcaggcaaaagggagccggt

SEQ ID NO: 5415085 - DNA, 25 bp, Homo sapien
agagcaggcaaaagggagccggtcc

SEQ ID NO: 5415086 - DNA, 25 bp, Homo sapien
gggcagagcaggcaaaagggagccg

SEQ ID NO: 5415087 - DNA, 25 bp, Homo sapien
agcaggcaaaagggagccggtcctt

SEQ ID NO: 5415088 - DNA, 25 bp, Homo sapien
gccagagctccaattacgacgatca

SEQ ID NO: 5415089 - DNA, 25 bp, Homo sapien
agtggaagaatcctgcaattgccag

SEQ ID NO: 5415090 - DNA, 25 bp, Homo sapien
gatcaagaggattgtcaacagcaca

SEQ ID NO: 5415091 - DNA, 25 bp, Homo sapien
gaagaatcctgcaattgccagagct

SEQ ID NO: 5415092 - DNA, 25 bp, Homo sapien
ttttccggtgtagccgctaggacac

SEQ ID NO: 5415093 - DNA, 25 bp, Homo sapien
gccttttgaaaacgccatttcacaa

SEQ ID NO: 5415094 - DNA, 25 bp, Homo sapien
tcacaatattttccggtgtagccgc

SEQ ID NO: 5415095 - DNA, 25 bp, Homo sapien
caatattttccggtgtagccgctag

SEQ ID NO: 5415096 - DNA, 25 bp, Homo sapien
tttcctccgtgcatgcacctgcatg

SEQ ID NO: 5415097 - DNA, 25 bp, Homo sapien
ggcaggttgataggcagttcgatgg

SEQ ID NO: 5415098 - DNA, 25 bp, Homo sapien
gcaatttcctccgtgcatgcacctg

SEQ ID NO: 5415099 - DNA, 25 bp, Homo sapien
aatagcaatttcctccgtgcatgca

SEQ ID NO: 5415100 - DNA, 25 bp, Homo sapien
acactcagtggtgctcccctctata

SEQ ID NO: 5415101 - DNA, 25 bp, Homo sapien
ccctctataaagctggagccttggg

SEQ ID NO: 5415102 - DNA, 25 bp, Homo sapien
tggctgcagatctgtttgcaaaggt

SEQ ID NO: 5415103 - DNA, 25 bp, Homo sapien
cagatctgtttgcaaaggttgggca

SEQ ID NO: 5415104 - DNA, 25 bp, Homo sapien
accctcatttacactatcatctctg

SEQ ID NO: 5415105 - DNA, 25 bp, Homo sapien
tacctctcgtccacgtgtcagctgg

SEQ ID NO: 5415106 - DNA, 25 bp, Homo sapien
agcaactggaagtggctctgccagg

SEQ ID NO: 5415107 - DNA, 25 bp, Homo sapien
gaacagcagttaggtcctgacagaa

SEQ ID NO: 5415108 - DNA, 25 bp, Homo sapien
gctgccggagggagatgcttttcct

SEQ ID NO: 5415109 - DNA, 25 bp, Homo sapien
tttccaaaggagccgccttccctga

SEQ ID NO: 5415110 - DNA, 25 bp, Homo sapien
tagcctttccaggtgtactgtgcct

SEQ ID NO: 5415111 - DNA, 25 bp, Homo sapien
tctcctcagggtccagaggcggtag

SEQ ID NO: 5415112 - DNA, 25 bp, Homo sapien
tgagccaagggttcactaccagcgt

SEQ ID NO: 5415113 - DNA, 25 bp, Homo sapien
tctgagttgatgaaagattcgaact

SEQ ID NO: 5415114 - DNA, 25 bp, Homo sapien
agatgtccaggctgtaagggttcat

SEQ ID NO: 5415115 - DNA, 25 bp, Homo sapien
ttccttagatatccagtataactgg

SEQ ID NO: 5415116 - DNA, 25 bp, Homo sapien
taatcgatagaaaggccagttggcc

SEQ ID NO: 5415117 - DNA, 25 bp, Homo sapien
aaccaggatgttgcggtcctctcca

SEQ ID NO: 5415118 - DNA, 25 bp, Homo sapien
tccaggcagactcgattttaggttc

SEQ ID NO: 5415119 - DNA, 25 bp, Homo sapien
gaagtcactccagtagattcggtca

SEQ ID NO: 5415120 - DNA, 25 bp, Homo sapien
ttcactgtagcatctcacctggtaa

SEQ ID NO: 5415121 - DNA, 25 bp, Homo sapien
tcactgtagcatctcacctggtaag

SEQ ID NO: 5415122 - DNA, 25 bp, Homo sapien
gtaaggtaggagaactatcacagtg

SEQ ID NO: 5415123 - DNA, 25 bp, Homo sapien
aaggtaggagaactatcacagtgtt

SEQ ID NO: 5415124 - DNA, 25 bp, Homo sapien
tgtaaggtaggagaactatcacagt

SEQ ID NO: 5415125 - DNA, 25 bp, Homo sapien
taaggtaggagaactatcacagtgt

SEQ ID NO: 5415126 - DNA, 25 bp, Homo sapien
gtcaacagttgctgtctgaaggagc

SEQ ID NO: 5415127 - DNA, 25 bp, Homo sapien
ttatattatagtcaacagttgctgt

SEQ ID NO: 5415128 - DNA, 25 bp, Homo sapien
tatattatagtcaacagttgctgtc

SEQ ID NO: 5415129 - DNA, 25 bp, Homo sapien
caacagttgctgtctgaaggagcat

SEQ ID NO: 5415130 - DNA, 25 bp, Homo sapien
agacgctactcccaaaaacttgaag

SEQ ID NO: 5415131 - DNA, 25 bp, Homo sapien
aatggttggttctatatgatctcaa

SEQ ID NO: 5415132 - DNA, 25 bp, Homo sapien
tgaaacagtcatagacgctactccc

SEQ ID NO: 5415133 - DNA, 25 bp, Homo sapien
gatctcaagggcatgttataattct

SEQ ID NO: 5415134 - DNA, 25 bp, Homo sapien
caatagcagctggttggtccaggtc

SEQ ID NO: 5415135 - DNA, 25 bp, Homo sapien
tgtaccttccatcaagtttagccac

SEQ ID NO: 5415136 - DNA, 25 bp, Homo sapien
cttgacatctgaccagtaaatatgc

SEQ ID NO: 5415137 - DNA, 25 bp, Homo sapien
cacctcaatgcgtttattcttgaca

SEQ ID NO: 5415138 - DNA, 25 bp, Homo sapien
tcttgacatctgaccagtaaatatg

SEQ ID NO: 5415139 - DNA, 25 bp, Homo sapien
tattgcggccggattcaaagttggg

SEQ ID NO: 5415140 - DNA, 25 bp, Homo sapien
tcccctcgcacagtgtaatacacaa

SEQ ID NO: 5415141 - DNA, 25 bp, Homo sapien
gatgtaggcacgtttgatagcacca

SEQ ID NO: 5415142 - DNA, 25 bp, Homo sapien
ccatctggctgcattacgtatttca

SEQ ID NO: 5415143 - DNA, 25 bp, Homo sapien
tcaggcagtagcaacaaaggagagc

SEQ ID NO: 5415144 - DNA, 25 bp, Homo sapien
cgaattcggacattgtcaggcagta

SEQ ID NO: 5415145 - DNA, 25 bp, Homo sapien
atcttgaagatactctgagaacctc

SEQ ID NO: 5415146 - DNA, 25 bp, Homo sapien
tccttgggatcccaatcataatcaa

SEQ ID NO: 5415147 - DNA, 25 bp, Homo sapien
gacacactcataacttcctttggta

SEQ ID NO: 5415148 - DNA, 25 bp, Homo sapien
actcatagacgtgaagccatcagca

SEQ ID NO: 5415149 - DNA, 25 bp, Homo sapien
tcagcacagacacactcataacttc

SEQ ID NO: 5415150 - DNA, 25 bp, Homo sapien
tcagctgcacatcgttttccagggc

SEQ ID NO: 5415151 - DNA, 25 bp, Homo sapien
cattggtttcgaacccagctgtaca

SEQ ID NO: 5415152 - DNA, 25 bp, Homo sapien
ctgtacaggagcagataaatcctcc

SEQ ID NO: 5415153 - DNA, 25 bp, Homo sapien
caggaggttctgtcaaaaacattgg

SEQ ID NO: 5415154 - DNA, 25 bp, Homo sapien
tgggtacaattttgctcgcatatat

SEQ ID NO: 5415155 - DNA, 25 bp, Homo sapien
cattgtcatgtggaatgcaatgccc

SEQ ID NO: 5415156 - DNA, 25 bp, Homo sapien
tgcaacccagttcatcggaccagtc

SEQ ID NO: 5415157 - DNA, 25 bp, Homo sapien
acttatattcatattctgtacaagg

SEQ ID NO: 5415158 - DNA, 25 bp, Homo sapien
ttcatcggaccagtcaccacagtca

SEQ ID NO: 5415159 - DNA, 25 bp, Homo sapien
gtttggtgaattacagggaacatcc

SEQ ID NO: 5415160 - DNA, 25 bp, Homo sapien
tgtcacaccggaaacggtttggtga

SEQ ID NO: 5415161 - DNA, 25 bp, Homo sapien
catgactataaatgcagcgattgtt

SEQ ID NO: 5415162 - DNA, 25 bp, Homo sapien
caccattgcacacctcatgactata

SEQ ID NO: 5415163 - DNA, 25 bp, Homo sapien
ccatcacatttccaatatggcggga

SEQ ID NO: 5415164 - DNA, 25 bp, Homo sapien
gatacaaacatggtttttgcattcg

SEQ ID NO: 5415165 - DNA, 25 bp, Homo sapien
tttgcattcgaacatagtagcctgg

SEQ ID NO: 5415166 - DNA, 25 bp, Homo sapien
cctggcagtatgcaccatcaggaaa

SEQ ID NO: 5415167 - DNA, 25 bp, Homo sapien
aagatgtatagtggccttgacctgt

SEQ ID NO: 5415168 - DNA, 25 bp, Homo sapien
tattcatcaagatgtatagtggcct

SEQ ID NO: 5415169 - DNA, 25 bp, Homo sapien
tatacaaattgactactttggggaa

SEQ ID NO: 5415170 - DNA, 25 bp, Homo sapien
tactttggggaagcttcctgctatt

SEQ ID NO: 5415171 - DNA, 25 bp, Homo sapien
tcagacgcatccaaacagtcagcgg

SEQ ID NO: 5415172 - DNA, 25 bp, Homo sapien
caatcagcttcatcagacgcatcca

SEQ ID NO: 5415173 - DNA, 25 bp, Homo sapien
tcagcggatccatcgcatttcagtt

SEQ ID NO: 5415174 - DNA, 25 bp, Homo sapien
tacacaatgtccacttgtacactga

SEQ ID NO: 5415175 - DNA, 25 bp, Homo sapien
attgtcattccgagaaggccttgtc

SEQ ID NO: 5415176 - DNA, 25 bp, Homo sapien
aagattgtcattccgagaaggcctt

SEQ ID NO: 5415177 - DNA, 25 bp, Homo sapien
gattgtcattccgagaaggccttgt

SEQ ID NO: 5415178 - DNA, 25 bp, Homo sapien
gaaaagattgtcattccgagaaggc

SEQ ID NO: 5415179 - DNA, 25 bp, Homo sapien
tggtaagcttctcaaatgacagtta

SEQ ID NO: 5415180 - DNA, 25 bp, Homo sapien
ggtaagcttctcaaatgacagttac

SEQ ID NO: 5415181 - DNA, 25 bp, Homo sapien
ctatggtaagcttctcaaatgacag

SEQ ID NO: 5415182 - DNA, 25 bp, Homo sapien
tatggtaagcttctcaaatgacagt

SEQ ID NO: 5415183 - DNA, 25 bp, Homo sapien
catcgaaactcgctctctgtgcact

SEQ ID NO: 5415184 - DNA, 25 bp, Homo sapien
cagatccatcgcgagggaatgcact

SEQ ID NO: 5415185 - DNA, 25 bp, Homo sapien
cagtcgttgtaatggtcacagatcc

SEQ ID NO: 5415186 - DNA, 25 bp, Homo sapien
tgctgattgacacatcgaaactcgc

SEQ ID NO: 5415187 - DNA, 25 bp, Homo sapien
ctggaaaggaaaggcacctggccat

SEQ ID NO: 5415188 - DNA, 25 bp, Homo sapien
ctggtggtatataaggaccatagga

SEQ ID NO: 5415189 - DNA, 25 bp, Homo sapien
cagctctggtggtatataaggacca

SEQ ID NO: 5415190 - DNA, 25 bp, Homo sapien
cacagctctggtggtatataaggac

SEQ ID NO: 5415191 - DNA, 25 bp, Homo sapien
gctctggtggtatataaggaccata

SEQ ID NO: 5415192 - DNA, 25 bp, Homo sapien
tcacactgccaacgaagagggatgc

SEQ ID NO: 5415193 - DNA, 25 bp, Homo sapien
ggaaatcccccacaggatggcatgt

SEQ ID NO: 5415194 - DNA, 25 bp, Homo sapien
tcctcatctgagttatctccacagt

SEQ ID NO: 5415195 - DNA, 25 bp, Homo sapien
tggtgatttttacagcggaaatccc

SEQ ID NO: 5415196 - DNA, 25 bp, Homo sapien
gcccactttgggatgcagcggtaat

SEQ ID NO: 5415197 - DNA, 25 bp, Homo sapien
gcagcggtaatttgttttgcagctg

SEQ ID NO: 5415198 - DNA, 25 bp, Homo sapien
agtcatctacaccattgcacacggc

SEQ ID NO: 5415199 - DNA, 25 bp, Homo sapien
tgtgaagttgtcacagagatgggca

SEQ ID NO: 5415200 - DNA, 25 bp, Homo sapien
ctgcgggatgcagcggccattagca

SEQ ID NO: 5415201 - DNA, 25 bp, Homo sapien
tcctcacagtcgttaaatgtgtcac

SEQ ID NO: 5415202 - DNA, 25 bp, Homo sapien
caggattctgggatgcaacgtttgt

SEQ ID NO: 5415203 - DNA, 25 bp, Homo sapien
gggctcatccgagtggtctccacaa

SEQ ID NO: 5415204 - DNA, 25 bp, Homo sapien
gccattcattggagtcacagtggtg

SEQ ID NO: 5415205 - DNA, 25 bp, Homo sapien
ctgccattcattggagtcacagtgg

SEQ ID NO: 5415206 - DNA, 25 bp, Homo sapien
cattcattggagtcacagtggtgat

SEQ ID NO: 5415207 - DNA, 25 bp, Homo sapien
ttcattggagtcacagtggtgattc

SEQ ID NO: 5415208 - DNA, 25 bp, Homo sapien
gagagcagggacatttggttatcag

SEQ ID NO: 5415209 - DNA, 25 bp, Homo sapien
ctgagagcagggacatttggttatc

SEQ ID NO: 5415210 - DNA, 25 bp, Homo sapien
tgagagcagggacatttggttatca

SEQ ID NO: 5415211 - DNA, 25 bp, Homo sapien
catgatattcaggaaatacccacag

SEQ ID NO: 5415212 - DNA, 25 bp, Homo sapien
gagccaccagtagagacaacttatt

SEQ ID NO: 5415213 - DNA, 25 bp, Homo sapien
gaagtcggaaaaagaggcataaagc

SEQ ID NO: 5415214 - DNA, 25 bp, Homo sapien
cgtatacaatcaacatagaagtcgg

SEQ ID NO: 5415215 - DNA, 25 bp, Homo sapien
aagggccagttcatcagagccatct

SEQ ID NO: 5415216 - DNA, 25 bp, Homo sapien
cccatcagggcaattttggtgagca

SEQ ID NO: 5415217 - DNA, 25 bp, Homo sapien
tgcataaagtctgcgggctggtgca

SEQ ID NO: 5415218 - DNA, 25 bp, Homo sapien
tggaactgtcccagtcggcagaagc

SEQ ID NO: 5415219 - DNA, 25 bp, Homo sapien
gaagtcaacactgaattccaagaaa

SEQ ID NO: 5415220 - DNA, 25 bp, Homo sapien
agagaagaagtcaacactgaattcc

SEQ ID NO: 5415221 - DNA, 25 bp, Homo sapien
gaagaagtcaacactgaattccaag

SEQ ID NO: 5415222 - DNA, 25 bp, Homo sapien
gagaagaagtcaacactgaattcca

SEQ ID NO: 5415223 - DNA, 25 bp, Homo sapien
ccttgaaggtcaatgtctgtccacg

SEQ ID NO: 5415224 - DNA, 25 bp, Homo sapien
tagaaaactcccatcccttggagcc

SEQ ID NO: 5415225 - DNA, 25 bp, Homo sapien
ccatcccttggagccttgaaggtca

SEQ ID NO: 5415226 - DNA, 25 bp, Homo sapien
aatgtctgtccacgggctagagagg

SEQ ID NO: 5415227 - DNA, 25 bp, Homo sapien
tcctggcttgatgaggcagagatga

SEQ ID NO: 5415228 - DNA, 25 bp, Homo sapien
cattgttagcgcacaggaactgggt

SEQ ID NO: 5415229 - DNA, 25 bp, Homo sapien
tggacactcgcaagtgaaccctttt

SEQ ID NO: 5415230 - DNA, 25 bp, Homo sapien
cactcagctgaagggtgcggaagtc

SEQ ID NO: 5415231 - DNA, 25 bp, Homo sapien
tacacatggatgtcaaatggtctgt

SEQ ID NO: 5415232 - DNA, 25 bp, Homo sapien
caatgggctgcctatatggatggta

SEQ ID NO: 5415233 - DNA, 25 bp, Homo sapien
caccagtgtctgtctatttgatcca

SEQ ID NO: 5415234 - DNA, 25 bp, Homo sapien
tacaccgtgtgtcgatggtggccct

SEQ ID NO: 5415235 - DNA, 25 bp, Homo sapien
gaagggctaagggtattaccatcag

SEQ ID NO: 5415236 - DNA, 25 bp, Homo sapien
aaagttagtctctaccctaagagtg

SEQ ID NO: 5415237 - DNA, 25 bp, Homo sapien
caagaataatctataggacccaaag

SEQ ID NO: 5415238 - DNA, 25 bp, Homo sapien
ggattatatggaaagctaactcagc

SEQ ID NO: 5415239 - DNA, 25 bp, Homo sapien
caatggtgatgccattaggccactc

SEQ ID NO: 5415240 - DNA, 25 bp, Homo sapien
aatgtatgcgcggtgaccccagtct

SEQ ID NO: 5415241 - DNA, 25 bp, Homo sapien
tccatgcctactctcccaatgtatg

SEQ ID NO: 5415242 - DNA, 25 bp, Homo sapien
ggccactctaacttggtggagatta

SEQ ID NO: 5415243 - DNA, 25 bp, Homo sapien
ctgtcagggcaaacacaaagggtca

SEQ ID NO: 5415244 - DNA, 25 bp, Homo sapien
cagggcaaacacaaagggtcagtcc

SEQ ID NO: 5415245 - DNA, 25 bp, Homo sapien
tcagggcaaacacaaagggtcagtc

SEQ ID NO: 5415246 - DNA, 25 bp, Homo sapien
gtcagggcaaacacaaagggtcagt

SEQ ID NO: 5415247 - DNA, 25 bp, Homo sapien
gccttctcggtaacagaggcagaag

SEQ ID NO: 5415248 - DNA, 25 bp, Homo sapien
agacattggccttgagatagttaca

SEQ ID NO: 5415249 - DNA, 25 bp, Homo sapien
gcccaggattgcagggagacaatac

SEQ ID NO: 5415250 - DNA, 25 bp, Homo sapien
gatagttacatgaacagccttctcg

SEQ ID NO: 5415251 - DNA, 25 bp, Homo sapien
ggtgttgttggcatccacacagtgc

SEQ ID NO: 5415252 - DNA, 25 bp, Homo sapien
gcggcggtgtccaccattgaggtca

SEQ ID NO: 5415253 - DNA, 25 bp, Homo sapien
gcgggcatccaaccagtagagcttt

SEQ ID NO: 5415254 - DNA, 25 bp, Homo sapien
tctgggattatcaaagcagaaggtg

SEQ ID NO: 5415255 - DNA, 25 bp, Homo sapien
gagtcttatagcatccataaccttc

SEQ ID NO: 5415256 - DNA, 25 bp, Homo sapien
gtcttatagcatccataaccttcca

SEQ ID NO: 5415257 - DNA, 25 bp, Homo sapien
tcaccagagtcttatagcatccata

SEQ ID NO: 5415258 - DNA, 25 bp, Homo sapien
ccagagtcttatagcatccataacc

SEQ ID NO: 5415259 - DNA, 25 bp, Homo sapien
tctttacagtgcctgcagattgatg

SEQ ID NO: 5415260 - DNA, 25 bp, Homo sapien
taagggagtcaaatataaggatgtg

SEQ ID NO: 5415261 - DNA, 25 bp, Homo sapien
ccttaagggagtcaaatataaggat

SEQ ID NO: 5415262 - DNA, 25 bp, Homo sapien
gaatctttacagcatacatctttac

SEQ ID NO: 5415263 - DNA, 25 bp, Homo sapien
tctactcggtcaaaatctaatgcca

SEQ ID NO: 5415264 - DNA, 25 bp, Homo sapien
catgagcttgtaaccaggacgacag

SEQ ID NO: 5415265 - DNA, 25 bp, Homo sapien
caagtccgcttgtcagacatgagct

SEQ ID NO: 5415266 - DNA, 25 bp, Homo sapien
tgatcgcagccactgattgaagggt

SEQ ID NO: 5415267 - DNA, 25 bp, Homo sapien
tgcagcgcccgttctgacaggtaaa

SEQ ID NO: 5415268 - DNA, 25 bp, Homo sapien
gatgcagcgcccattgtcacacttg

SEQ ID NO: 5415269 - DNA, 25 bp, Homo sapien
tatagtcaccacagtcattgtgccg

SEQ ID NO: 5415270 - DNA, 25 bp, Homo sapien
gcaagtctggtataagcagcccctc

SEQ ID NO: 5415271 - DNA, 25 bp, Homo sapien
taatcgccaattctagaagaatcca

SEQ ID NO: 5415272 - DNA, 25 bp, Homo sapien
atcaccagtgtccttgatccccttt

SEQ ID NO: 5415273 - DNA, 25 bp, Homo sapien
taaatgccaggtcaaccatttcgac

SEQ ID NO: 5415274 - DNA, 25 bp, Homo sapien
tcaaccatttcgacaagatcaccag

SEQ ID NO: 5415275 - DNA, 25 bp, Homo sapien
aacacacaatcgtacaccacactgg

SEQ ID NO: 5415276 - DNA, 25 bp, Homo sapien
ccttcgcatgctgtaaggtggccat

SEQ ID NO: 5415277 - DNA, 25 bp, Homo sapien
cactggactccaacggtacattagc

SEQ ID NO: 5415278 - DNA, 25 bp, Homo sapien
gtacattagcgcctgttgatgagct

SEQ ID NO: 5415279 - DNA, 25 bp, Homo sapien
tggactcccctacttttgctaatgc

SEQ ID NO: 5415280 - DNA, 25 bp, Homo sapien
tgagcaagcgcctttctggactccc

SEQ ID NO: 5415281 - DNA, 25 bp, Homo sapien
tctggactcccctacttttgctaat

SEQ ID NO: 5415282 - DNA, 25 bp, Homo sapien
tccaccttgagcaagcgcctttctg

SEQ ID NO: 5415283 - DNA, 25 bp, Homo sapien
gattctcatcgtagccgtcagtaca

SEQ ID NO: 5415284 - DNA, 25 bp, Homo sapien
cctgtccggaggtctgtcatttaca

SEQ ID NO: 5415285 - DNA, 25 bp, Homo sapien
gatacacagtccgtaaccacaggtg

SEQ ID NO: 5415286 - DNA, 25 bp, Homo sapien
tacacagagaaactcggaatccgag

SEQ ID NO: 5415287 - DNA, 25 bp, Homo sapien
gtcactcatatccccacagtcatta

SEQ ID NO: 5415288 - DNA, 25 bp, Homo sapien
gtcattatcaccgtcacagatccat

SEQ ID NO: 5415289 - DNA, 25 bp, Homo sapien
cacagatccattcgcttgggatgca

SEQ ID NO: 5415290 - DNA, 25 bp, Homo sapien
gacactggtgccttttatcctcgtc

SEQ ID NO: 5415291 - DNA, 25 bp, Homo sapien
tcacacttgaactcatcagctaggc

SEQ ID NO: 5415292 - DNA, 25 bp, Homo sapien
gctaggcatgttcgctcagagtgac

SEQ ID NO: 5415293 - DNA, 25 bp, Homo sapien
tcagctaggcatgttcgctcagagt

SEQ ID NO: 5415294 - DNA, 25 bp, Homo sapien
aactcatcagctaggcatgttcgct

SEQ ID NO: 5415295 - DNA, 25 bp, Homo sapien
taatgaaggtgtcataggctcccaa

SEQ ID NO: 5415296 - DNA, 25 bp, Homo sapien
gggaccctggaattagcctaaggca

SEQ ID NO: 5415297 - DNA, 25 bp, Homo sapien
tactgattggttgcctgtctcccct

SEQ ID NO: 5415298 - DNA, 25 bp, Homo sapien
gaaaagtgtgtacattgatccagac

SEQ ID NO: 5415299 - DNA, 25 bp, Homo sapien
tctagctgcatcgtgatgtttttca

SEQ ID NO: 5415300 - DNA, 25 bp, Homo sapien
agttggaagagactgaagttgtcta

SEQ ID NO: 5415301 - DNA, 25 bp, Homo sapien
cctggtctgtatttgaagcagttgg

SEQ ID NO: 5415302 - DNA, 25 bp, Homo sapien
aagagactgaagttgtctagctgca

SEQ ID NO: 5415303 - DNA, 25 bp, Homo sapien
tgtttcttgatcacaataccaatgt

SEQ ID NO: 5415304 - DNA, 25 bp, Homo sapien
ttgaggaatacagcgcccagatgcg

SEQ ID NO: 5415305 - DNA, 25 bp, Homo sapien
cagatgcgcattggaactcactgct

SEQ ID NO: 5415306 - DNA, 25 bp, Homo sapien
tcatcagaggcatcaaaacaatctg

SEQ ID NO: 5415307 - DNA, 25 bp, Homo sapien
caaataaacgcgaggaatacaaata

SEQ ID NO: 5415308 - DNA, 25 bp, Homo sapien
ataagtagggttttcatcactgtta

SEQ ID NO: 5415309 - DNA, 25 bp, Homo sapien
cagtcattgtctccgtcacacaaat

SEQ ID NO: 5415310 - DNA, 25 bp, Homo sapien
tatccagactggcaagtgcgatcag

SEQ ID NO: 5415311 - DNA, 25 bp, Homo sapien
tcacagcggtaagagtattggacac

SEQ ID NO: 5415312 - DNA, 25 bp, Homo sapien
tggcattgcagtccctgaacaggca

SEQ ID NO: 5415313 - DNA, 25 bp, Homo sapien
tattggacacatcgcccattggcac

SEQ ID NO: 5415314 - DNA, 25 bp, Homo sapien
tattgcacataaactccgtggtggc

SEQ ID NO: 5415315 - DNA, 25 bp, Homo sapien
ctaagaacaggaaaaacatgagaac

SEQ ID NO: 5415316 - DNA, 25 bp, Homo sapien
taagaacaggaaaaacatgagaaca

SEQ ID NO: 5415317 - DNA, 25 bp, Homo sapien
gaacaggaaaaacatgagaacaaac

SEQ ID NO: 5415318 - DNA, 25 bp, Homo sapien
aagaacaggaaaaacatgagaacaa

SEQ ID NO: 5415319 - DNA, 25 bp, Homo sapien
gacactggcactcggcaccatttgg

SEQ ID NO: 5415320 - DNA, 25 bp, Homo sapien
gccaaataccagttgccctcatgtg

SEQ ID NO: 5415321 - DNA, 25 bp, Homo sapien
ttccgagatgcagcgcccattggag

SEQ ID NO: 5415322 - DNA, 25 bp, Homo sapien
gatgcaccacatcgttcaccattgt

SEQ ID NO: 5415323 - DNA, 25 bp, Homo sapien
tatactggccatagagagtcaagcc

SEQ ID NO: 5415324 - DNA, 25 bp, Homo sapien
tcattgcaatctgacctgacccgtc

SEQ ID NO: 5415325 - DNA, 25 bp, Homo sapien
catgaacggctgcattgacaatgac

SEQ ID NO: 5415326 - DNA, 25 bp, Homo sapien
tggtgcacagatatggctgcagccc

SEQ ID NO: 5415327 - DNA, 25 bp, Homo sapien
catagtccagagtcagcccactggg

SEQ ID NO: 5415328 - DNA, 25 bp, Homo sapien
tgtgtatcccagtcagcccagtaca

SEQ ID NO: 5415329 - DNA, 25 bp, Homo sapien
gctgttcacaatgggtacgcggaag

SEQ ID NO: 5415330 - DNA, 25 bp, Homo sapien
tgggcatgaccagactgctgttcac

SEQ ID NO: 5415331 - DNA, 25 bp, Homo sapien
catctggttgaggtagtcactgtaa

SEQ ID NO: 5415332 - DNA, 25 bp, Homo sapien
tcttggttttggaacgcgggctatc

SEQ ID NO: 5415333 - DNA, 25 bp, Homo sapien
gcggttagacccatcttcagccatg

SEQ ID NO: 5415334 - DNA, 25 bp, Homo sapien
cagggatctaacacaattgctcttg

SEQ ID NO: 5415335 - DNA, 25 bp, Homo sapien
cagggtggcataggaaatctgtcca

SEQ ID NO: 5415336 - DNA, 25 bp, Homo sapien
cactttgcagggtcccaaaggcaca

SEQ ID NO: 5415337 - DNA, 25 bp, Homo sapien
aatctgtccaactccagaggctaaa

SEQ ID NO: 5415338 - DNA, 25 bp, Homo sapien
tgtaagcttctcaaggaattagaca

SEQ ID NO: 5415339 - DNA, 25 bp, Homo sapien
ccataaggagttgggtaacgactgc

SEQ ID NO: 5415340 - DNA, 25 bp, Homo sapien
ttgttgacctctgctggtgaccggg

SEQ ID NO: 5415341 - DNA, 25 bp, Homo sapien
tgggatctacaacaatatgcctagg

SEQ ID NO: 5415342 - DNA, 25 bp, Homo sapien
taaacgtagccatcacttcggtcca

SEQ ID NO: 5415343 - DNA, 25 bp, Homo sapien
tgcaataccccggactccattttct

SEQ ID NO: 5415344 - DNA, 25 bp, Homo sapien
ctggtttaattctacggatcgcatt

SEQ ID NO: 5415345 - DNA, 25 bp, Homo sapien
ccatgtgtcacaatgttcatcagag

SEQ ID NO: 5415346 - DNA, 25 bp, Homo sapien
gatcgcattatcagatgccactgag

SEQ ID NO: 5415347 - DNA, 25 bp, Homo sapien
attgagtttaaatccagtggcacag

SEQ ID NO: 5415348 - DNA, 25 bp, Homo sapien
tgccaccggcaccatggtttctgaa

SEQ ID NO: 5415349 - DNA, 25 bp, Homo sapien
gagagcaggaccgattatcaggatt

SEQ ID NO: 5415350 - DNA, 25 bp, Homo sapien
tctgaatgatctgacaattccaagc

SEQ ID NO: 5415351 - DNA, 25 bp, Homo sapien
ttgctacagccatttgaggattcgg

SEQ ID NO: 5415352 - DNA, 25 bp, Homo sapien
cagccatttgaggattcggcggcat

SEQ ID NO: 5415353 - DNA, 25 bp, Homo sapien
ggcaaatctgctgacaggcattcat

SEQ ID NO: 5415354 - DNA, 25 bp, Homo sapien
tcatgttgttgctacagccatttga

SEQ ID NO: 5415355 - DNA, 25 bp, Homo sapien
aagactattttgttggccccagtgg

SEQ ID NO: 5415356 - DNA, 25 bp, Homo sapien
cttgaagacccctcagatttggaac

SEQ ID NO: 5415357 - DNA, 25 bp, Homo sapien
aatcatggactgcaattccccaggg

SEQ ID NO: 5415358 - DNA, 25 bp, Homo sapien
gctggtgtaccaggatcattcgatc

SEQ ID NO: 5415359 - DNA, 25 bp, Homo sapien
gtgttcgaggttcccagtaaagaga

SEQ ID NO: 5415360 - DNA, 25 bp, Homo sapien
atccatgttagcactggcgatcttg

SEQ ID NO: 5415361 - DNA, 25 bp, Homo sapien
agttttcacagatgtgccatccatg

SEQ ID NO: 5415362 - DNA, 25 bp, Homo sapien
gagtttctgctcttcgatgtcaaga

SEQ ID NO: 5415363 - DNA, 25 bp, Homo sapien
tgatatctccgtggagtgtcaaaac

SEQ ID NO: 5415364 - DNA, 25 bp, Homo sapien
tgtcccatcattggcaatcaatgtt

SEQ ID NO: 5415365 - DNA, 25 bp, Homo sapien
caattggaaagccaactccaagagc

SEQ ID NO: 5415366 - DNA, 25 bp, Homo sapien
ctgtatctgatatctccgtggagtg

SEQ ID NO: 5415367 - DNA, 25 bp, Homo sapien
taatgggaaagacacgttccctgct

SEQ ID NO: 5415368 - DNA, 25 bp, Homo sapien
acacatgcacgctcagttattctcc

SEQ ID NO: 5415369 - DNA, 25 bp, Homo sapien
tgcattgtacctaacactaatggga

SEQ ID NO: 5415370 - DNA, 25 bp, Homo sapien
tattctccaactggccactactgca

SEQ ID NO: 5415371 - DNA, 25 bp, Homo sapien
caaatactgtcctgttggtgccatc

SEQ ID NO: 5415372 - DNA, 25 bp, Homo sapien
taaggccaggttcatagaaggcccc

SEQ ID NO: 5415373 - DNA, 25 bp, Homo sapien
gattggtagaataaaggtttcttga

SEQ ID NO: 5415374 - DNA, 25 bp, Homo sapien
gtttcttgaaatccaatctaaggcc

SEQ ID NO: 5415375 - DNA, 25 bp, Homo sapien
agcatcattgctcttcacctcagga

SEQ ID NO: 5415376 - DNA, 25 bp, Homo sapien
cctcaggattaagggagattccaaa

SEQ ID NO: 5415377 - DNA, 25 bp, Homo sapien
aaccattctgtatccctgctatggg

SEQ ID NO: 5415378 - DNA, 25 bp, Homo sapien
cccaatagatgtattgctcagcatc

SEQ ID NO: 5415379 - DNA, 25 bp, Homo sapien
tctgatcctgcccttttgaatgggt

SEQ ID NO: 5415380 - DNA, 25 bp, Homo sapien
agatctgatcctgcccttttgaatg

SEQ ID NO: 5415381 - DNA, 25 bp, Homo sapien
gtaagatctgatcctgcccttttga

SEQ ID NO: 5415382 - DNA, 25 bp, Homo sapien
gatcctgcccttttgaatgggtcat

SEQ ID NO: 5415383 - DNA, 25 bp, Homo sapien
taagcatacatctacagaccaggta

SEQ ID NO: 5415384 - DNA, 25 bp, Homo sapien
tcaaggaacgcagcatctagagggc

SEQ ID NO: 5415385 - DNA, 25 bp, Homo sapien
tctagagggcaagaccaagtatatg

SEQ ID NO: 5415386 - DNA, 25 bp, Homo sapien
tgagcccttacaattatgacaatgg

SEQ ID NO: 5415387 - DNA, 25 bp, Homo sapien
cagcacatgttcagtcgcaattggt

SEQ ID NO: 5415388 - DNA, 25 bp, Homo sapien
cattctgcagacacctgaggaatca

SEQ ID NO: 5415389 - DNA, 25 bp, Homo sapien
tgaggaatcaaaggacacagcacat

SEQ ID NO: 5415390 - DNA, 25 bp, Homo sapien
gagaagtctaactgtacccaggtga

SEQ ID NO: 5415391 - DNA, 25 bp, Homo sapien
caaacacaggagtaaaaatgaggcc

SEQ ID NO: 5415392 - DNA, 25 bp, Homo sapien
ccatcctgaaggacaaacacaggag

SEQ ID NO: 5415393 - DNA, 25 bp, Homo sapien
cagagatggctgcagcgggaaaagg

SEQ ID NO: 5415394 - DNA, 25 bp, Homo sapien
aggagtaaaaatgaggcccctgtga

SEQ ID NO: 5415395 - DNA, 25 bp, Homo sapien
tagcacggtcagtccagtacacaga

SEQ ID NO: 5415396 - DNA, 25 bp, Homo sapien
ccacttgttggctcgcataacccga

SEQ ID NO: 5415397 - DNA, 25 bp, Homo sapien
tatacattacaactgactggttccc

SEQ ID NO: 5415398 - DNA, 25 bp, Homo sapien
ggatgaaccgcaacaatcccaaggg

SEQ ID NO: 5415399 - DNA, 25 bp, Homo sapien
cgatggtgtccattataatcacaaa

SEQ ID NO: 5415400 - DNA, 25 bp, Homo sapien
aatcactggctatcacctgtctccg

SEQ ID NO: 5415401 - DNA, 25 bp, Homo sapien
tccatgtaatcaagataggagtcca

SEQ ID NO: 5415402 - DNA, 25 bp, Homo sapien
gagtccatgaagtagagcagtctgt

SEQ ID NO: 5415403 - DNA, 25 bp, Homo sapien
ggacaatgacagtgcgcatgctgcc

SEQ ID NO: 5415404 - DNA, 25 bp, Homo sapien
atgacagtgcgcatgctgccgtcca

SEQ ID NO: 5415405 - DNA, 25 bp, Homo sapien
agatcttgtcctggacaatgacagt

SEQ ID NO: 5415406 - DNA, 25 bp, Homo sapien
aagatcttgtcctggacaatgacag

SEQ ID NO: 5415407 - DNA, 25 bp, Homo sapien
cgctcgatgcgagggtggtggcccc

SEQ ID NO: 5415408 - DNA, 25 bp, Homo sapien
gtcagaccagaacagtagatgctca

SEQ ID NO: 5415409 - DNA, 25 bp, Homo sapien
gctggctcgctcgatgcgagggtgg

SEQ ID NO: 5415410 - DNA, 25 bp, Homo sapien
ggtggtggccccagtcagaccagaa

SEQ ID NO: 5415411 - DNA, 25 bp, Homo sapien
tggagacttcaattgtttccagagc

SEQ ID NO: 5415412 - DNA, 25 bp, Homo sapien
ctgtggctcccatcaattttggaga

SEQ ID NO: 5415413 - DNA, 25 bp, Homo sapien
tcattctgggatctaatgctagtcc

SEQ ID NO: 5415414 - DNA, 25 bp, Homo sapien
gtctgtccagtaaagattacgacct

SEQ ID NO: 5415415 - DNA, 25 bp, Homo sapien
tgtaagaaccattctcgaccaatga

SEQ ID NO: 5415416 - DNA, 25 bp, Homo sapien
tgaatagatattgtggacctgggag

SEQ ID NO: 5415417 - DNA, 25 bp, Homo sapien
gccacaagtaacagcagactctcag

SEQ ID NO: 5415418 - DNA, 25 bp, Homo sapien
gagttgcatcagaccaaaagatacg

SEQ ID NO: 5415419 - DNA, 25 bp, Homo sapien
cgagcaccggaaagaacctctcata

SEQ ID NO: 5415420 - DNA, 25 bp, Homo sapien
ccaatggacataggcatttagcccc

SEQ ID NO: 5415421 - DNA, 25 bp, Homo sapien
tgtagcctgtatcacacgagcaccg

SEQ ID NO: 5415422 - DNA, 25 bp, Homo sapien
caaagggctcttgaacacactcgtg

SEQ ID NO: 5415423 - DNA, 25 bp, Homo sapien
tggttaccccctacacagatgtgaa

SEQ ID NO: 5415424 - DNA, 25 bp, Homo sapien
tgaattcaattatggttacccccta

SEQ ID NO: 5415425 - DNA, 25 bp, Homo sapien
cagaaaattatccaatggtgatgta

SEQ ID NO: 5415426 - DNA, 25 bp, Homo sapien
ttcctacaaagctacacagtgactg

SEQ ID NO: 5415427 - DNA, 25 bp, Homo sapien
aatgagtttatggccagtaaactgt

SEQ ID NO: 5415428 - DNA, 25 bp, Homo sapien
gaatgagtttatggccagtaaactg

SEQ ID NO: 5415429 - DNA, 25 bp, Homo sapien
cagaatgagtttatggccagtaaac

SEQ ID NO: 5415430 - DNA, 25 bp, Homo sapien
tcagaatgagtttatggccagtaaa

SEQ ID NO: 5415431 - DNA, 25 bp, Homo sapien
tcacacagatgttatggccaagaca

SEQ ID NO: 5415432 - DNA, 25 bp, Homo sapien
ccagaagttcgggatgcagatacca

SEQ ID NO: 5415433 - DNA, 25 bp, Homo sapien
tctgagtggcacataccaggaggcc

SEQ ID NO: 5415434 - DNA, 25 bp, Homo sapien
cattgccaactaggacagcgaaagg

SEQ ID NO: 5415435 - DNA, 25 bp, Homo sapien
aaaacaccatcacaacgatttgtga

SEQ ID NO: 5415436 - DNA, 25 bp, Homo sapien
tccccactggcacacttgaattgag

SEQ ID NO: 5415437 - DNA, 25 bp, Homo sapien
gacgccaatacatttatccccactg

SEQ ID NO: 5415438 - DNA, 25 bp, Homo sapien
cagcctgcttcatccgagttgtcac

SEQ ID NO: 5415439 - DNA, 25 bp, Homo sapien
taaactgactaggttggcatgtctc

SEQ ID NO: 5415440 - DNA, 25 bp, Homo sapien
gataggtcaatacatcgatgattgg

SEQ ID NO: 5415441 - DNA, 25 bp, Homo sapien
tcagatccatcaacacaatccttgt

SEQ ID NO: 5415442 - DNA, 25 bp, Homo sapien
tgtcaccatcacagacaaacgatag

SEQ ID NO: 5415443 - DNA, 25 bp, Homo sapien
gccacaggtgaacgccgaagatgaa

SEQ ID NO: 5415444 - DNA, 25 bp, Homo sapien
tcacaggtgtattgggtgtcaaggc

SEQ ID NO: 5415445 - DNA, 25 bp, Homo sapien
tcacagcgccagtgtgcaggaatgc

SEQ ID NO: 5415446 - DNA, 25 bp, Homo sapien
cacagtcgttgcgtttgtcacagcg

SEQ ID NO: 5415447 - DNA, 25 bp, Homo sapien
gaagccagcctcattccataagggc

SEQ ID NO: 5415448 - DNA, 25 bp, Homo sapien
cacactcgctggaaatttggcaccg

SEQ ID NO: 5415449 - DNA, 25 bp, Homo sapien
taagtgtgccacatagttgctcatc

SEQ ID NO: 5415450 - DNA, 25 bp, Homo sapien
gaagtggctgcagtcaccgttagga

SEQ ID NO: 5415451 - DNA, 25 bp, Homo sapien
ggatgttgacatcatacgatttcaa

SEQ ID NO: 5415452 - DNA, 25 bp, Homo sapien
caaatgcagtatgtaagcaatgcca

SEQ ID NO: 5415453 - DNA, 25 bp, Homo sapien
gcaatgccacttcggataactgtca

SEQ ID NO: 5415454 - DNA, 25 bp, Homo sapien
ttcctgactcgaataatggcaccca

SEQ ID NO: 5415455 - DNA, 25 bp, Homo sapien
gtctccagtcagtaaaaaataaatg

SEQ ID NO: 5415456 - DNA, 25 bp, Homo sapien
tctccagtcagtaaaaaataaatgc

SEQ ID NO: 5415457 - DNA, 25 bp, Homo sapien
ctccagtcagtaaaaaataaatgct

SEQ ID NO: 5415458 - DNA, 25 bp, Homo sapien
ggcatctacccagtacaatcgtgaa

SEQ ID NO: 5415459 - DNA, 25 bp, Homo sapien
caaagatggcaagtccaaacggatg

SEQ ID NO: 5415460 - DNA, 25 bp, Homo sapien
tctgtctaaaccatcaaaggtgctg

SEQ ID NO: 5415461 - DNA, 25 bp, Homo sapien
gtgtcatctgctctatatggcccag

SEQ ID NO: 5415462 - DNA, 25 bp, Homo sapien
tcataattttagcaggacggaacca

SEQ ID NO: 5415463 - DNA, 25 bp, Homo sapien
ccaagagtagtgtttattacaggca

SEQ ID NO: 5415464 - DNA, 25 bp, Homo sapien
tacaggcaagaggtgagatccgtca

SEQ ID NO: 5415465 - DNA, 25 bp, Homo sapien
caatcgatggccaagccattgggcc

SEQ ID NO: 5415466 - DNA, 25 bp, Homo sapien
cattttccaccctgttagctgcgag

SEQ ID NO: 5415467 - DNA, 25 bp, Homo sapien
tgtgcgtctcgttttatcagctagc

SEQ ID NO: 5415468 - DNA, 25 bp, Homo sapien
aaggatgaactaccaccgaccgtgg

SEQ ID NO: 5415469 - DNA, 25 bp, Homo sapien
taaatactgaactactgtgcgtctc

SEQ ID NO: 5415470 - DNA, 25 bp, Homo sapien
aggtaggttgccaaaaagagtccag

SEQ ID NO: 5415471 - DNA, 25 bp, Homo sapien
acaatgtaatgcctccctcaacaaa

SEQ ID NO: 5415472 - DNA, 25 bp, Homo sapien
tccctcaacaaagcatacagagttt

SEQ ID NO: 5415473 - DNA, 25 bp, Homo sapien
gagtttaaccactgactatgaggaa

SEQ ID NO: 5415474 - DNA, 25 bp, Homo sapien
gcaatcctcccgtctcggttcccaa

SEQ ID NO: 5415475 - DNA, 25 bp, Homo sapien
ttttttggtacaagtggaatctcac

SEQ ID NO: 5415476 - DNA, 25 bp, Homo sapien
ctcaaacaatccttccattgcagcc

SEQ ID NO: 5415477 - DNA, 25 bp, Homo sapien
caaacaatccttccattgcagcctc

SEQ ID NO: 5415478 - DNA, 25 bp, Homo sapien
gtcctgggcgtcaaaatcaatcccg

SEQ ID NO: 5415479 - DNA, 25 bp, Homo sapien
cgggatcccacgaatagcaacttgg

SEQ ID NO: 5415480 - DNA, 25 bp, Homo sapien
aaaaaagatagtgctgtcctgggcg

SEQ ID NO: 5415481 - DNA, 25 bp, Homo sapien
aggattccccgaaactggaaccatg

SEQ ID NO: 5415482 - DNA, 25 bp, Homo sapien
gcaacggaaacccaaaccatcatta

SEQ ID NO: 5415483 - DNA, 25 bp, Homo sapien
cattgttatctttacacggattggt

SEQ ID NO: 5415484 - DNA, 25 bp, Homo sapien
tatccagttggaagccgaatgtgca

SEQ ID NO: 5415485 - DNA, 25 bp, Homo sapien
tgcagtggcgctcatctgtatccag

SEQ ID NO: 5415486 - DNA, 25 bp, Homo sapien
gggagcctccatgaactacagtctt

SEQ ID NO: 5415487 - DNA, 25 bp, Homo sapien
gaacacctgaccttcaaataagctt

SEQ ID NO: 5415488 - DNA, 25 bp, Homo sapien
taagcttactccaaagggatgagga

SEQ ID NO: 5415489 - DNA, 25 bp, Homo sapien
cacttgtgggttggtctctgtgaac

SEQ ID NO: 5415490 - DNA, 25 bp, Homo sapien
tacggttgctgccatccatgaatgc

SEQ ID NO: 5415491 - DNA, 25 bp, Homo sapien
gatatcatatccagagttaccccag

SEQ ID NO: 5415492 - DNA, 25 bp, Homo sapien
ccagcaggccatcccagctttgttt

SEQ ID NO: 5415493 - DNA, 25 bp, Homo sapien
gagtcaacccagtaaacacgcttcg

SEQ ID NO: 5415494 - DNA, 25 bp, Homo sapien
gcaattcctctaggatgccccaagt

SEQ ID NO: 5415495 - DNA, 25 bp, Homo sapien
caacagttgggtccacggcaattcc

SEQ ID NO: 5415496 - DNA, 25 bp, Homo sapien
tgagaacctcttggatatttaaacc

SEQ ID NO: 5415497 - DNA, 25 bp, Homo sapien
taccatatctatgcggttgaccttg

SEQ ID NO: 5415498 - DNA, 25 bp, Homo sapien
tgatagtggaaagccacacccacgg

SEQ ID NO: 5415499 - DNA, 25 bp, Homo sapien
gagaagataatggaggcctcgccaa

SEQ ID NO: 5415500 - DNA, 25 bp, Homo sapien
gagactccactaggatccggaagct

SEQ ID NO: 5415501 - DNA, 25 bp, Homo sapien
taacaaatcccgaccattggagaag

SEQ ID NO: 5415502 - DNA, 25 bp, Homo sapien
cattagctttgcaatactgtccacg

SEQ ID NO: 5415503 - DNA, 25 bp, Homo sapien
caagatatacccttcttcacagtgg

SEQ ID NO: 5415504 - DNA, 25 bp, Homo sapien
aggtcggctttcacacttctggtca

SEQ ID NO: 5415505 - DNA, 25 bp, Homo sapien
cacaaattccccatatctggcaatc

SEQ ID NO: 5415506 - DNA, 25 bp, Homo sapien
gacaaaaatcctagataagatggcc

SEQ ID NO: 5415507 - DNA, 25 bp, Homo sapien
tttattaagcactctctgacaaaaa

SEQ ID NO: 5415508 - DNA, 25 bp, Homo sapien
tagtcaaggttatcagcatttatta

SEQ ID NO: 5415509 - DNA, 25 bp, Homo sapien
gccaagaatgtggtgttgcccatgt

SEQ ID NO: 5415510 - DNA, 25 bp, Homo sapien
caaggaccgtgactaaccagaggaa

SEQ ID NO: 5415511 - DNA, 25 bp, Homo sapien
cataacaacatgagccagcatatct

SEQ ID NO: 5415512 - DNA, 25 bp, Homo sapien
ccaatccgatctggacactaccaag

SEQ ID NO: 5415513 - DNA, 25 bp, Homo sapien
gaaatgccctcactgatgaatccct

SEQ ID NO: 5415514 - DNA, 25 bp, Homo sapien
taacaactctttagttgtgggatcc

SEQ ID NO: 5415515 - DNA, 25 bp, Homo sapien
acaactctttagttgtgggatcctg

SEQ ID NO: 5415516 - DNA, 25 bp, Homo sapien
caactctttagttgtgggatcctgg

SEQ ID NO: 5415517 - DNA, 25 bp, Homo sapien
gtaacaactctttagttgtgggatc

SEQ ID NO: 5415518 - DNA, 25 bp, Homo sapien
catacggcgtctcatggcactggta

SEQ ID NO: 5415519 - DNA, 25 bp, Homo sapien
gggacaaaaacacgctcctccatac

SEQ ID NO: 5415520 - DNA, 25 bp, Homo sapien
caacacaggtacggctgtcattgtg

SEQ ID NO: 5415521 - DNA, 25 bp, Homo sapien
cattgtggttgatgatataacctgg

SEQ ID NO: 5415522 - DNA, 25 bp, Homo sapien
tcttcctgggcaatctaaaatccca

SEQ ID NO: 5415523 - DNA, 25 bp, Homo sapien
ttctcttcctgggcaatctaaaatc

SEQ ID NO: 5415524 - DNA, 25 bp, Homo sapien
cagtattttccggtactagtgttgt

SEQ ID NO: 5415525 - DNA, 25 bp, Homo sapien
acagtattttccggtactagtgttg

SEQ ID NO: 5415526 - DNA, 25 bp, Homo sapien
tggagatgcatcgtcccgactctgg

SEQ ID NO: 5415527 - DNA, 25 bp, Homo sapien
tataaatggagatgcatcgtcccga

SEQ ID NO: 5415528 - DNA, 25 bp, Homo sapien
atgcatcgtcccgactctgggcaag

SEQ ID NO: 5415529 - DNA, 25 bp, Homo sapien
cgtcccgactctgggcaagaccatt

SEQ ID NO: 5415530 - DNA, 25 bp, Homo sapien
cttggggaacatttatgaacatcat

SEQ ID NO: 5415531 - DNA, 25 bp, Homo sapien
ttggggaacatttatgaacatcatg

SEQ ID NO: 5415532 - DNA, 25 bp, Homo sapien
ttatgaacatcatgaggaccgcttt

SEQ ID NO: 5415533 - DNA, 25 bp, Homo sapien
catttatgaacatcatgaggaccgc

SEQ ID NO: 5415534 - DNA, 25 bp, Homo sapien
ctgaggcttgcttgtcacacaaaat

SEQ ID NO: 5415535 - DNA, 25 bp, Homo sapien
gaggcttgcttgtcacacaaaattt

SEQ ID NO: 5415536 - DNA, 25 bp, Homo sapien
cagccaatcctgaggcttgcttgtc

SEQ ID NO: 5415537 - DNA, 25 bp, Homo sapien
cccttcaactccagccaatcctgag

SEQ ID NO: 5415538 - DNA, 25 bp, Homo sapien
catcttcatctccattatctttaca

SEQ ID NO: 5415539 - DNA, 25 bp, Homo sapien
tcacaaacccagttttgataaatgc

SEQ ID NO: 5415540 - DNA, 25 bp, Homo sapien
tcatctccattatctttacagtcat

SEQ ID NO: 5415541 - DNA, 25 bp, Homo sapien
tcttcatctccattatctttacagt

SEQ ID NO: 5415542 - DNA, 25 bp, Homo sapien
tggtaaccaccgcaggtcggatagt

SEQ ID NO: 5415543 - DNA, 25 bp, Homo sapien
ctggtaaccaccgcaggtcggatag

SEQ ID NO: 5415544 - DNA, 25 bp, Homo sapien
aacagctgcactccaaagacacaaa

SEQ ID NO: 5415545 - DNA, 25 bp, Homo sapien
agacacaaatcaccgggaaaaactg

SEQ ID NO: 5415546 - DNA, 25 bp, Homo sapien
taaagcaacagctgcactccaaaga

SEQ ID NO: 5415547 - DNA, 25 bp, Homo sapien
aaaactgaaagtgctctcacctcac

SEQ ID NO: 5415548 - DNA, 25 bp, Homo sapien
catgaaaactcattgtgcaagcata

SEQ ID NO: 5415549 - DNA, 25 bp, Homo sapien
gggatacactctccattgccacatg

SEQ ID NO: 5415550 - DNA, 25 bp, Homo sapien
tgcaagcatgttcgtcactgccgtc

SEQ ID NO: 5415551 - DNA, 25 bp, Homo sapien
cacagacataagcacgagggataca

SEQ ID NO: 5415552 - DNA, 25 bp, Homo sapien
tgcagttgatttcatctgaggagtc

SEQ ID NO: 5415553 - DNA, 25 bp, Homo sapien
gcagttgatttcatctgaggagtcc

SEQ ID NO: 5415554 - DNA, 25 bp, Homo sapien
tcacaagtaagctgctcacatgttg

SEQ ID NO: 5415555 - DNA, 25 bp, Homo sapien
ggccccattgtcacaagtaagctgc

SEQ ID NO: 5415556 - DNA, 25 bp, Homo sapien
ggtgttatagcaggccccattgtca

SEQ ID NO: 5415557 - DNA, 25 bp, Homo sapien
tctgactggtgttatagcaggcccc

SEQ ID NO: 5415558 - DNA, 25 bp, Homo sapien
cagtctctgacgtggtcgcacctgt

SEQ ID NO: 5415559 - DNA, 25 bp, Homo sapien
gacgtggtcgcacctgtattcactt

SEQ ID NO: 5415560 - DNA, 25 bp, Homo sapien
tctctgacgtggtcgcacctgtatt

SEQ ID NO: 5415561 - DNA, 25 bp, Homo sapien
agctccatcggggcagtctctgacg

SEQ ID NO: 5415562 - DNA, 25 bp, Homo sapien
tgggtcaggtatcagtgctcgttca

SEQ ID NO: 5415563 - DNA, 25 bp, Homo sapien
gctttcttctttacgtcaagcccaa

SEQ ID NO: 5415564 - DNA, 25 bp, Homo sapien
aaatatgaaaagaacctgggtcagg

SEQ ID NO: 5415565 - DNA, 25 bp, Homo sapien
ttattcccgagaaggcaagtcatgg

SEQ ID NO: 5415566 - DNA, 25 bp, Homo sapien
aaagccaaagcaagattcctctcca

SEQ ID NO: 5415567 - DNA, 25 bp, Homo sapien
tgtaacttctttgcgacaggttggg

SEQ ID NO: 5415568 - DNA, 25 bp, Homo sapien
ttttaggtgtccacaaagccaaagc

SEQ ID NO: 5415569 - DNA, 25 bp, Homo sapien
attgtgtgtaacttctttgcgacag

SEQ ID NO: 5415570 - DNA, 25 bp, Homo sapien
tgaaatagccctgctggcaggtcac

SEQ ID NO: 5415571 - DNA, 25 bp, Homo sapien
tcttgatcttggtcacacacccagg

SEQ ID NO: 5415572 - DNA, 25 bp, Homo sapien
agcaatcttgacgttcatctgagcc

SEQ ID NO: 5415573 - DNA, 25 bp, Homo sapien
gatgcattgtccctcactctggcac

SEQ ID NO: 5415574 - DNA, 25 bp, Homo sapien
aaggaaattgcagatgtatgattga

SEQ ID NO: 5415575 - DNA, 25 bp, Homo sapien
ggaaattgcagatgtatgattgatc

SEQ ID NO: 5415576 - DNA, 25 bp, Homo sapien
gaaggaaattgcagatgtatgattg

SEQ ID NO: 5415577 - DNA, 25 bp, Homo sapien
aaattgcagatgtatgattgatcac

SEQ ID NO: 5415578 - DNA, 25 bp, Homo sapien
cacttccacagcgaaaatgcgcact

SEQ ID NO: 5415579 - DNA, 25 bp, Homo sapien
gcagccaatttcatccgcgtcatct

SEQ ID NO: 5415580 - DNA, 25 bp, Homo sapien
tcatccgcgtcatctgaacagtctt

SEQ ID NO: 5415581 - DNA, 25 bp, Homo sapien
agtctgcagggatgcaatgcccact

SEQ ID NO: 5415582 - DNA, 25 bp, Homo sapien
gcatggcaaactacgaacaggttcc

SEQ ID NO: 5415583 - DNA, 25 bp, Homo sapien
atccaaagcaggtccgcttgcatgg

SEQ ID NO: 5415584 - DNA, 25 bp, Homo sapien
cagctgccccagaagcatccaaagc

SEQ ID NO: 5415585 - DNA, 25 bp, Homo sapien
ggtccgcttgcatggcaaactacga

SEQ ID NO: 5415586 - DNA, 25 bp, Homo sapien
gtccatcagcactacagaacattat

SEQ ID NO: 5415587 - DNA, 25 bp, Homo sapien
tcaggcagtccatcagcactacaga

SEQ ID NO: 5415588 - DNA, 25 bp, Homo sapien
tctacaatcaggcagtccatcagca

SEQ ID NO: 5415589 - DNA, 25 bp, Homo sapien
gcactacagaacattataagcaaag

SEQ ID NO: 5415590 - DNA, 25 bp, Homo sapien
tgcacaggacacctaaaatggaaac

SEQ ID NO: 5415591 - DNA, 25 bp, Homo sapien
caccaggtccaccaacgtttgaact

SEQ ID NO: 5415592 - DNA, 25 bp, Homo sapien
acatttggatctgtgccttcaagac

SEQ ID NO: 5415593 - DNA, 25 bp, Homo sapien
gagttacagagacatcatcagcaag

SEQ ID NO: 5415594 - DNA, 25 bp, Homo sapien
tggagtcttgcaactgtgttgcttt

SEQ ID NO: 5415595 - DNA, 25 bp, Homo sapien
gaatccccaaggaatggttgatgga

SEQ ID NO: 5415596 - DNA, 25 bp, Homo sapien
ctgtgttgcttttaacgacaacttt

SEQ ID NO: 5415597 - DNA, 25 bp, Homo sapien
tgaatccccaaggaatggttgatgg

SEQ ID NO: 5415598 - DNA, 25 bp, Homo sapien
gaggatgccccttcttagcacccat

SEQ ID NO: 5415599 - DNA, 25 bp, Homo sapien
cctcgaggaattaagggctggtagt

SEQ ID NO: 5415600 - DNA, 25 bp, Homo sapien
gctttgatagagacagcaattttcc

SEQ ID NO: 5415601 - DNA, 25 bp, Homo sapien
gctggtagtaccagggaatggtgat

SEQ ID NO: 5415602 - DNA, 25 bp, Homo sapien
atccccacagacagattagtccctg

SEQ ID NO: 5415603 - DNA, 25 bp, Homo sapien
tctgtctgtctggtggtcggtcaca

SEQ ID NO: 5415604 - DNA, 25 bp, Homo sapien
tgtagggcaattaagttgtccgacg

SEQ ID NO: 5415605 - DNA, 25 bp, Homo sapien
ttagtccctgcggtggcagcagcgt

SEQ ID NO: 5415606 - DNA, 25 bp, Homo sapien
ggccactggccggcgctaggcaggc

SEQ ID NO: 5415607 - DNA, 25 bp, Homo sapien
tggccactggccggcgctaggcagg

SEQ ID NO: 5415608 - DNA, 25 bp, Homo sapien
ccactgctgccggcccgcgatccat

SEQ ID NO: 5415609 - DNA, 25 bp, Homo sapien
gcctctgctagcgaacgctccttta

SEQ ID NO: 5415610 - DNA, 25 bp, Homo sapien
aggtgggcgcgcgtagcacaccgca

SEQ ID NO: 5415611 - DNA, 25 bp, Homo sapien
ggcagcgcctctgctagcgaacgct

SEQ ID NO: 5415612 - DNA, 25 bp, Homo sapien
gaacgctcctttaggtctgcacctc

SEQ ID NO: 5415613 - DNA, 25 bp, Homo sapien
gcaaaattgaaaaagagcgaacgtc

SEQ ID NO: 5415614 - DNA, 25 bp, Homo sapien
tattcagcaccacatctacaggtgt

SEQ ID NO: 5415615 - DNA, 25 bp, Homo sapien
gatcgtgcttcttacaagtctgctc

SEQ ID NO: 5415616 - DNA, 25 bp, Homo sapien
tacaggtgtcatggccagatcgtgc

SEQ ID NO: 5415617 - DNA, 25 bp, Homo sapien
ctttggggccgctttggacaggctg

SEQ ID NO: 5415618 - DNA, 25 bp, Homo sapien
ccttctttggggccgctttggacag

SEQ ID NO: 5415619 - DNA, 25 bp, Homo sapien
tctttggggccgctttggacaggct

SEQ ID NO: 5415620 - DNA, 25 bp, Homo sapien
ttctttggggccgctttggacaggc

SEQ ID NO: 5415621 - DNA, 25 bp, Homo sapien
cgccctcagcgcacgtcctcagcct

SEQ ID NO: 5415622 - DNA, 25 bp, Homo sapien
ccctcagcgcacgtcctcagcctgt

SEQ ID NO: 5415623 - DNA, 25 bp, Homo sapien
acccgccctcagcgcacgtcctcag

SEQ ID NO: 5415624 - DNA, 25 bp, Homo sapien
ctcagcgcacgtcctcagcctgtac

SEQ ID NO: 5415625 - DNA, 25 bp, Homo sapien
aacgcacgtggtcgctggacaggtt

SEQ ID NO: 5415626 - DNA, 25 bp, Homo sapien
caacagtccggatcgcgtagcttcc

SEQ ID NO: 5415627 - DNA, 25 bp, Homo sapien
tgtttgcgggcctgaggccatccca

SEQ ID NO: 5415628 - DNA, 25 bp, Homo sapien
tggtccaagaagtcaggagcccttt

SEQ ID NO: 5415629 - DNA, 25 bp, Homo sapien
ctgcagtggtaggcgcagctttagg

SEQ ID NO: 5415630 - DNA, 25 bp, Homo sapien
cagcatatctctggtgtgcagccag

SEQ ID NO: 5415631 - DNA, 25 bp, Homo sapien
taacagcatatctctggtgtgcagc

SEQ ID NO: 5415632 - DNA, 25 bp, Homo sapien
gaggaccaggttctgagccataaat

SEQ ID NO: 5415633 - DNA, 25 bp, Homo sapien
ggttctgagccataaattaacagca

SEQ ID NO: 5415634 - DNA, 25 bp, Homo sapien
ctgaaaggacagccagtgcaacaga

SEQ ID NO: 5415635 - DNA, 25 bp, Homo sapien
tgaaaggacagccagtgcaacagac

SEQ ID NO: 5415636 - DNA, 25 bp, Homo sapien
gaaaggacagccagtgcaacagaca

SEQ ID NO: 5415637 - DNA, 25 bp, Homo sapien
aaaggacagccagtgcaacagacat

SEQ ID NO: 5415638 - DNA, 25 bp, Homo sapien
agacaccaggtataatatcacaagg

SEQ ID NO: 5415639 - DNA, 25 bp, Homo sapien
caggtataatatcacaagggaatcc

SEQ ID NO: 5415640 - DNA, 25 bp, Homo sapien
gacaccaggtataatatcacaaggg

SEQ ID NO: 5415641 - DNA, 25 bp, Homo sapien
caccaggtataatatcacaagggaa

SEQ ID NO: 5415642 - DNA, 25 bp, Homo sapien
ctggggctaaggccatcacaaatgc

SEQ ID NO: 5415643 - DNA, 25 bp, Homo sapien
ggggctaaggccatcacaaatgctg

SEQ ID NO: 5415644 - DNA, 25 bp, Homo sapien
tggggctaaggccatcacaaatgct

SEQ ID NO: 5415645 - DNA, 25 bp, Homo sapien
gggctaaggccatcacaaatgctgc

SEQ ID NO: 5415646 - DNA, 25 bp, Homo sapien
aggaggaccagacccttgggaatag

SEQ ID NO: 5415647 - DNA, 25 bp, Homo sapien
tcaaagtgccctatatgttgaaggg

SEQ ID NO: 5415648 - DNA, 25 bp, Homo sapien
gggaatagcaatgaggctctccatg

SEQ ID NO: 5415649 - DNA, 25 bp, Homo sapien
catggccaaacttgtagaaattaga

SEQ ID NO: 5415650 - DNA, 25 bp, Homo sapien
ttgcactcaaataagtgaaggttca

SEQ ID NO: 5415651 - DNA, 25 bp, Homo sapien
agtgctgactaaccatttgccatct

SEQ ID NO: 5415652 - DNA, 25 bp, Homo sapien
agtttattgcagccagcaagagtag

SEQ ID NO: 5415653 - DNA, 25 bp, Homo sapien
cactcaaataagtgaaggttcagtt

SEQ ID NO: 5415654 - DNA, 25 bp, Homo sapien
tctaatctggattggcatgtctgac

SEQ ID NO: 5415655 - DNA, 25 bp, Homo sapien
ggattggcatgtctgaccaaattct

SEQ ID NO: 5415656 - DNA, 25 bp, Homo sapien
tcctctgcgttccatttcctctaat

SEQ ID NO: 5415657 - DNA, 25 bp, Homo sapien
aatctggattggcatgtctgaccaa

SEQ ID NO: 5415658 - DNA, 25 bp, Homo sapien
tcagaaactcactcaaaaccgctca

SEQ ID NO: 5415659 - DNA, 25 bp, Homo sapien
aggattcagaaactcactcaaaacc

SEQ ID NO: 5415660 - DNA, 25 bp, Homo sapien
gattcagaaactcactcaaaaccgc

SEQ ID NO: 5415661 - DNA, 25 bp, Homo sapien
ttcagaaactcactcaaaaccgctc

SEQ ID NO: 5415662 - DNA, 25 bp, Homo sapien
gacacatgcatgtacccggatttac

SEQ ID NO: 5415663 - DNA, 25 bp, Homo sapien
gggagtgttcggtatgacacatgca

SEQ ID NO: 5415664 - DNA, 25 bp, Homo sapien
attgctacactcttcaggcccaggg

SEQ ID NO: 5415665 - DNA, 25 bp, Homo sapien
cagggcatcgtgttgcacagccttc

SEQ ID NO: 5415666 - DNA, 25 bp, Homo sapien
tggggtccgttgacaccctggtctc

SEQ ID NO: 5415667 - DNA, 25 bp, Homo sapien
atctgtctggggtccgttgacaccc

SEQ ID NO: 5415668 - DNA, 25 bp, Homo sapien
aagagtcacaagactatcttgtaag

SEQ ID NO: 5415669 - DNA, 25 bp, Homo sapien
ttcaaaatttcaagagtcacaagac

SEQ ID NO: 5415670 - DNA, 25 bp, Homo sapien
caatttctctaacggcagttaccca

SEQ ID NO: 5415671 - DNA, 25 bp, Homo sapien
gtggttctcttctccttgtacccca

SEQ ID NO: 5415672 - DNA, 25 bp, Homo sapien
cagggaattcatcacctctgtggtt

SEQ ID NO: 5415673 - DNA, 25 bp, Homo sapien
cagttacccacttcctctcactggg

SEQ ID NO: 5415674 - DNA, 25 bp, Homo sapien
tgctaacactgactgtcttaagaca

SEQ ID NO: 5415675 - DNA, 25 bp, Homo sapien
ctatgtgtatctccaactccctaca

SEQ ID NO: 5415676 - DNA, 25 bp, Homo sapien
acagggctcacaaaatccccatgga

SEQ ID NO: 5415677 - DNA, 25 bp, Homo sapien
cacctcattacagtgtatacagggc

SEQ ID NO: 5415678 - DNA, 25 bp, Homo sapien
gatgcctttccgcatcagagcccat

SEQ ID NO: 5415679 - DNA, 25 bp, Homo sapien
atgaccatcatgatgcctttccgca

SEQ ID NO: 5415680 - DNA, 25 bp, Homo sapien
ttgaactgcccacgtccatgaccat

SEQ ID NO: 5415681 - DNA, 25 bp, Homo sapien
gagatgagttgaactgcccacgtcc

SEQ ID NO: 5415682 - DNA, 25 bp, Homo sapien
caggtatgtggtgcttccttggcat

SEQ ID NO: 5415683 - DNA, 25 bp, Homo sapien
tccttggcatagatttagcacactg

SEQ ID NO: 5415684 - DNA, 25 bp, Homo sapien
cagagtaaggtgtctcttggattcc

SEQ ID NO: 5415685 - DNA, 25 bp, Homo sapien
ccatccagagggctttagctattaa

SEQ ID NO: 5415686 - DNA, 25 bp, Homo sapien
gatctacgtgtgctttttcaaggga

SEQ ID NO: 5415687 - DNA, 25 bp, Homo sapien
tcccaaaatggccgaagctggactg

SEQ ID NO: 5415688 - DNA, 25 bp, Homo sapien
gtgctttttcaagggagctgataaa

SEQ ID NO: 5415689 - DNA, 25 bp, Homo sapien
ccaaagaggactggtgatctacgtg

SEQ ID NO: 5415690 - DNA, 25 bp, Homo sapien
tagtgctagacaatgtggatcctgc

SEQ ID NO: 5415691 - DNA, 25 bp, Homo sapien
tcatcgattgcaccctaaaagcagg

SEQ ID NO: 5415692 - DNA, 25 bp, Homo sapien
gccgctttcagatcccctcagtgtt

SEQ ID NO: 5415693 - DNA, 25 bp, Homo sapien
tgatctcaatgacggaaatgtgcaa

SEQ ID NO: 5415694 - DNA, 25 bp, Homo sapien
taggtcatagctaatcatggctggg

SEQ ID NO: 5415695 - DNA, 25 bp, Homo sapien
tatgggcactttagttggaaaggcc

SEQ ID NO: 5415696 - DNA, 25 bp, Homo sapien
tgaaggagttggcttaacctttgtc

SEQ ID NO: 5415697 - DNA, 25 bp, Homo sapien
tccataatgccaataccgaaacttt

SEQ ID NO: 5415698 - DNA, 25 bp, Homo sapien
gatgacttcagaaatcctacttcag

SEQ ID NO: 5415699 - DNA, 25 bp, Homo sapien
tctcctcgtgcttcaaaatgacagg

SEQ ID NO: 5415700 - DNA, 25 bp, Homo sapien
ttaaaagcttgtacagacactcatg

SEQ ID NO: 5415701 - DNA, 25 bp, Homo sapien
ggagaatatgtgcatctacactaaa

SEQ ID NO: 5415702 - DNA, 25 bp, Homo sapien
gatctaagtgtccatacaccttttt

SEQ ID NO: 5415703 - DNA, 25 bp, Homo sapien
tgcataaagaacagatctaagtgtc

SEQ ID NO: 5415704 - DNA, 25 bp, Homo sapien
gaacagatctaagtgtccatacacc

SEQ ID NO: 5415705 - DNA, 25 bp, Homo sapien
gagttgcataaagaacagatctaag

SEQ ID NO: 5415706 - DNA, 25 bp, Homo sapien
taattttagggagagaatgccaatc

SEQ ID NO: 5415707 - DNA, 25 bp, Homo sapien
tttgaatcagatagcctagagcaag

SEQ ID NO: 5415708 - DNA, 25 bp, Homo sapien
taatggtgtccggaaatgtacatct

SEQ ID NO: 5415709 - DNA, 25 bp, Homo sapien
caaagtggaaaatcctacaggttct

SEQ ID NO: 5415710 - DNA, 25 bp, Homo sapien
ccaccaggtggcgtaactgagagta

SEQ ID NO: 5415711 - DNA, 25 bp, Homo sapien
tgcttatgattgaaggcactccagc

SEQ ID NO: 5415712 - DNA, 25 bp, Homo sapien
taagcctaagccaaacatcagtgaa

SEQ ID NO: 5415713 - DNA, 25 bp, Homo sapien
tggagtcagaagatagccacggttc

SEQ ID NO: 5415714 - DNA, 25 bp, Homo sapien
caaggtagccaaagtaacgcagtta

SEQ ID NO: 5415715 - DNA, 25 bp, Homo sapien
tgttgtaagacagggagaagccatt

SEQ ID NO: 5415716 - DNA, 25 bp, Homo sapien
gattacaccaggtcaagatggtcca

SEQ ID NO: 5415717 - DNA, 25 bp, Homo sapien
tctcatctcgctcagagtagccaag

SEQ ID NO: 5415718 - DNA, 25 bp, Homo sapien
atgtaacacacgataacattcattt

SEQ ID NO: 5415719 - DNA, 25 bp, Homo sapien
caaatgtaacacacgataacattca

SEQ ID NO: 5415720 - DNA, 25 bp, Homo sapien
ggtccaaatgtaacacacgataaca

SEQ ID NO: 5415721 - DNA, 25 bp, Homo sapien
gtaacacacgataacattcatttta

SEQ ID NO: 5415722 - DNA, 25 bp, Homo sapien
tcctttgttgacagtgccatagagt

SEQ ID NO: 5415723 - DNA, 25 bp, Homo sapien
gtgccatagagttccattcaaactg

SEQ ID NO: 5415724 - DNA, 25 bp, Homo sapien
tagtccatccgagcatcctttgttg

SEQ ID NO: 5415725 - DNA, 25 bp, Homo sapien
ctacaaacatgacttgacttctcca

SEQ ID NO: 5415726 - DNA, 25 bp, Homo sapien
gtcgttttttcatagcagattttcc

SEQ ID NO: 5415727 - DNA, 25 bp, Homo sapien
tccaaatgtcgttttttcatagcag

SEQ ID NO: 5415728 - DNA, 25 bp, Homo sapien
tacacgataccccagaatttccaaa

SEQ ID NO: 5415729 - DNA, 25 bp, Homo sapien
gtgagggatatttctacaaagtgct

SEQ ID NO: 5415730 - DNA, 25 bp, Homo sapien
ctggtggcagccttgatccaactat

SEQ ID NO: 5415731 - DNA, 25 bp, Homo sapien
tggtggcagccttgatccaactatt

SEQ ID NO: 5415732 - DNA, 25 bp, Homo sapien
gtggcagccttgatccaactatttc

SEQ ID NO: 5415733 - DNA, 25 bp, Homo sapien
ggtggcagccttgatccaactattt

SEQ ID NO: 5415734 - DNA, 25 bp, Homo sapien
ttatggcttccatacggaagaggtt

SEQ ID NO: 5415735 - DNA, 25 bp, Homo sapien
tatggcttccatacggaagaggttt

SEQ ID NO: 5415736 - DNA, 25 bp, Homo sapien
attatggcttccatacggaagaggt

SEQ ID NO: 5415737 - DNA, 25 bp, Homo sapien
atggcttccatacggaagaggtttt

SEQ ID NO: 5415738 - DNA, 25 bp, Homo sapien
cacaaaagaatgacgaacctctcag

SEQ ID NO: 5415739 - DNA, 25 bp, Homo sapien
tagcgctgggctaggccaaatcaca

SEQ ID NO: 5415740 - DNA, 25 bp, Homo sapien
actttaccacccctctgaatgatgg

SEQ ID NO: 5415741 - DNA, 25 bp, Homo sapien
tataagatctggtccaatggcacct

SEQ ID NO: 5415742 - DNA, 25 bp, Homo sapien
agggctgcaattagaaaagttcgaa

SEQ ID NO: 5415743 - DNA, 25 bp, Homo sapien
tcactaatggtttacagcaaaccca

SEQ ID NO: 5415744 - DNA, 25 bp, Homo sapien
gcagaaagaagtacaagccacttat

SEQ ID NO: 5415745 - DNA, 25 bp, Homo sapien
tttaaatgttatcacagggctgcaa

SEQ ID NO: 5415746 - DNA, 25 bp, Homo sapien
ctatgttaagcatgtctcatgtaat

SEQ ID NO: 5415747 - DNA, 25 bp, Homo sapien
tctatgttaagcatgtctcatgtaa

SEQ ID NO: 5415748 - DNA, 25 bp, Homo sapien
ttctatgttaagcatgtctcatgta

SEQ ID NO: 5415749 - DNA, 25 bp, Homo sapien
tttctatgttaagcatgtctcatgt

SEQ ID NO: 5415750 - DNA, 25 bp, Homo sapien
ttaagagatggggttatattcatat

SEQ ID NO: 5415751 - DNA, 25 bp, Homo sapien
gagatggggttatattcatattgtt

SEQ ID NO: 5415752 - DNA, 25 bp, Homo sapien
taagagatggggttatattcatatt

SEQ ID NO: 5415753 - DNA, 25 bp, Homo sapien
agagatggggttatattcatattgt

SEQ ID NO: 5415754 - DNA, 25 bp, Homo sapien
gcctcaacattacttcttcagaaag

SEQ ID NO: 5415755 - DNA, 25 bp, Homo sapien
tcctgcccagtgcaaaaatcacaca

SEQ ID NO: 5415756 - DNA, 25 bp, Homo sapien
gctgagactatgtgtatgagcatga

SEQ ID NO: 5415757 - DNA, 25 bp, Homo sapien
ggatttttgtcactcatacccaact

SEQ ID NO: 5415758 - DNA, 25 bp, Homo sapien
ggcttttacacaattgattcctcct

SEQ ID NO: 5415759 - DNA, 25 bp, Homo sapien
ttttacacaattgattcctcctagt

SEQ ID NO: 5415760 - DNA, 25 bp, Homo sapien
tacacaattgattcctcctagtacc

SEQ ID NO: 5415761 - DNA, 25 bp, Homo sapien
gaggcttttacacaattgattcctc

SEQ ID NO: 5415762 - DNA, 25 bp, Homo sapien
tatctgactaaaagaaaactcaaac

SEQ ID NO: 5415763 - DNA, 25 bp, Homo sapien
ctatctgactaaaagaaaactcaaa

SEQ ID NO: 5415764 - DNA, 25 bp, Homo sapien
aactggactcttgcacttcgagatg

SEQ ID NO: 5415765 - DNA, 25 bp, Homo sapien
cggtcatgaaaccatggaatctgaa

SEQ ID NO: 5415766 - DNA, 25 bp, Homo sapien
ttgacagaagcggtcatgaaaccat

SEQ ID NO: 5415767 - DNA, 25 bp, Homo sapien
tattgttgacagaagcggtcatgaa

SEQ ID NO: 5415768 - DNA, 25 bp, Homo sapien
tccaatctagctaagaatttgatgt

SEQ ID NO: 5415769 - DNA, 25 bp, Homo sapien
ttcaagttgagaatccaatctagct

SEQ ID NO: 5415770 - DNA, 25 bp, Homo sapien
gttgagaatccaatctagctaagaa

SEQ ID NO: 5415771 - DNA, 25 bp, Homo sapien
aattgcctttagcagatcttctgga

SEQ ID NO: 5415772 - DNA, 25 bp, Homo sapien
ttctttggtactggtaatgatacca

SEQ ID NO: 5415773 - DNA, 25 bp, Homo sapien
taatgataccagtattgtagttaca

SEQ ID NO: 5415774 - DNA, 25 bp, Homo sapien
tagttacataggagaacgtccttat

SEQ ID NO: 5415775 - DNA, 25 bp, Homo sapien
ctaggtagtagatggtacttgttca

SEQ ID NO: 5415776 - DNA, 25 bp, Homo sapien
gttcaatacgctgaatggacgaata

SEQ ID NO: 5415777 - DNA, 25 bp, Homo sapien
aggtggatcatagttcaatacgctg

SEQ ID NO: 5415778 - DNA, 25 bp, Homo sapien
tagcagggattgtaaaaggatggat

SEQ ID NO: 5415779 - DNA, 25 bp, Homo sapien
taatagcagggattgtaaaaggatg

SEQ ID NO: 5415780 - DNA, 25 bp, Homo sapien
gtctctgacgaccatagtgatctaa

SEQ ID NO: 5415781 - DNA, 25 bp, Homo sapien
gccactgaggctatcctatctagta

SEQ ID NO: 5415782 - DNA, 25 bp, Homo sapien
taagttccttccgtaacagatccaa

SEQ ID NO: 5415783 - DNA, 25 bp, Homo sapien
cagttgtttcgcagtcatattatcc

SEQ ID NO: 5415784 - DNA, 25 bp, Homo sapien
gaacagacacctcagttggtatgaa

SEQ ID NO: 5415785 - DNA, 25 bp, Homo sapien
taaaacggcttcaattcgggatatc

SEQ ID NO: 5415786 - DNA, 25 bp, Homo sapien
cagggaaatagcacggaccagaaca

SEQ ID NO: 5415787 - DNA, 25 bp, Homo sapien
ggatatccccacttcgtccaagtga

SEQ ID NO: 5415788 - DNA, 25 bp, Homo sapien
aatattaatactcagtgttagcaag

SEQ ID NO: 5415789 - DNA, 25 bp, Homo sapien
gcatactaaaataatcgtaatatta

SEQ ID NO: 5415790 - DNA, 25 bp, Homo sapien
aatactcagtgttagcaagggtgta

SEQ ID NO: 5415791 - DNA, 25 bp, Homo sapien
taaaataatcgtaatattaatactc

SEQ ID NO: 5415792 - DNA, 25 bp, Homo sapien
tggtttatagccatccaaatgttta

SEQ ID NO: 5415793 - DNA, 25 bp, Homo sapien
tcttgagttatcttcaacaactcta

SEQ ID NO: 5415794 - DNA, 25 bp, Homo sapien
caactctaatggtttatagccatcc

SEQ ID NO: 5415795 - DNA, 25 bp, Homo sapien
ccaaatgtttatgcagaactgaagt

SEQ ID NO: 5415796 - DNA, 25 bp, Homo sapien
gctcgccagttaggtcctctgacat

SEQ ID NO: 5415797 - DNA, 25 bp, Homo sapien
tgccagggcttgctcgccagttagg

SEQ ID NO: 5415798 - DNA, 25 bp, Homo sapien
ggcttgctcgccagttaggtcctct

SEQ ID NO: 5415799 - DNA, 25 bp, Homo sapien
tcccattgctcccaacactgccagg

SEQ ID NO: 5415800 - DNA, 25 bp, Homo sapien
tcaaacctgacatgggaacatatgc

SEQ ID NO: 5415801 - DNA, 25 bp, Homo sapien
gattaaaggcgtgcaacgccgtgcc

SEQ ID NO: 5415802 - DNA, 25 bp, Homo sapien
aaatggccctctgctatgactacta

SEQ ID NO: 5415803 - DNA, 25 bp, Homo sapien
tgagaggcgccacacaaaatttgct

SEQ ID NO: 5415804 - DNA, 25 bp, Homo sapien
gagacctaagcttgaaggctccacg

SEQ ID NO: 5415805 - DNA, 25 bp, Homo sapien
gaaggctccacgtattcacaacaaa

SEQ ID NO: 5415806 - DNA, 25 bp, Homo sapien
tatttgtaccttccagagctgcaag

SEQ ID NO: 5415807 - DNA, 25 bp, Homo sapien
cccttccacaacctaatagggtgat

SEQ ID NO: 5415808 - DNA, 25 bp, Homo sapien
gctagcaggatgattacacagagga

SEQ ID NO: 5415809 - DNA, 25 bp, Homo sapien
gataacgatatctaacatttcgaag

SEQ ID NO: 5415810 - DNA, 25 bp, Homo sapien
catttcgaagaaactttgctatgct

SEQ ID NO: 5415811 - DNA, 25 bp, Homo sapien
cgttattacatctttctaatagtgg

SEQ ID NO: 5415812 - DNA, 25 bp, Homo sapien
ctgtgtggtttccaagttcctatga

SEQ ID NO: 5415813 - DNA, 25 bp, Homo sapien
gttcctatgaacaatatcagctatt

SEQ ID NO: 5415814 - DNA, 25 bp, Homo sapien
ggtttccaagttcctatgaacaata

SEQ ID NO: 5415815 - DNA, 25 bp, Homo sapien
tccaagttcctatgaacaatatcag

SEQ ID NO: 5415816 - DNA, 25 bp, Homo sapien
tctgctaggcaagaggaaaattctg

SEQ ID NO: 5415817 - DNA, 25 bp, Homo sapien
ttctgagagcagtttaatatcaaac

SEQ ID NO: 5415818 - DNA, 25 bp, Homo sapien
aaaattctgagagcagtttaatatc

SEQ ID NO: 5415819 - DNA, 25 bp, Homo sapien
aaatacaaatgctgatctgctaggc

SEQ ID NO: 5415820 - DNA, 25 bp, Homo sapien
ctgtaactagtgcttcaactagcgg

SEQ ID NO: 5415821 - DNA, 25 bp, Homo sapien
gcttctgtaactagtgcttcaacta

SEQ ID NO: 5415822 - DNA, 25 bp, Homo sapien
ttctgtaactagtgcttcaactagc

SEQ ID NO: 5415823 - DNA, 25 bp, Homo sapien
atgcttctgtaactagtgcttcaac

SEQ ID NO: 5415824 - DNA, 25 bp, Homo sapien
tttcctcttatacaggcagtcctta

SEQ ID NO: 5415825 - DNA, 25 bp, Homo sapien
ttctggtccactcttatttcaatat

SEQ ID NO: 5415826 - DNA, 25 bp, Homo sapien
catatgcaatacgaatgataatgca

SEQ ID NO: 5415827 - DNA, 25 bp, Homo sapien
taaacatctatactttatcccatgc

SEQ ID NO: 5415828 - DNA, 25 bp, Homo sapien
ctttgtaacctgagaaaggccacca

SEQ ID NO: 5415829 - DNA, 25 bp, Homo sapien
taagcatccccttcaagtacctcag

SEQ ID NO: 5415830 - DNA, 25 bp, Homo sapien
atcaatccccaatataagccccaag

SEQ ID NO: 5415831 - DNA, 25 bp, Homo sapien
tcatcagtgagactaataaacagat

SEQ ID NO: 5415832 - DNA, 25 bp, Homo sapien
ttttcacaaaactccacaataatcc

SEQ ID NO: 5415833 - DNA, 25 bp, Homo sapien
ctgcagccaaccacattttcacaaa

SEQ ID NO: 5415834 - DNA, 25 bp, Homo sapien
ctactatatcctcatctgcagccaa

SEQ ID NO: 5415835 - DNA, 25 bp, Homo sapien
aaaactccacaataatccaatttca

SEQ ID NO: 5415836 - DNA, 25 bp, Homo sapien
caccagggtatcgtcattcattaat

SEQ ID NO: 5415837 - DNA, 25 bp, Homo sapien
gatggtctctgacatactcagcatt

SEQ ID NO: 5415838 - DNA, 25 bp, Homo sapien
gaagcttccaaagcatatcaaatgc

SEQ ID NO: 5415839 - DNA, 25 bp, Homo sapien
gacgtataacacattcaccagggta

SEQ ID NO: 5415840 - DNA, 25 bp, Homo sapien
tttgtaaccaatgactctaggaaaa

SEQ ID NO: 5415841 - DNA, 25 bp, Homo sapien
gtaaccaatgactctaggaaaacag

SEQ ID NO: 5415842 - DNA, 25 bp, Homo sapien
ccaatgactctaggaaaacaggtgt

SEQ ID NO: 5415843 - DNA, 25 bp, Homo sapien
taaccaatgactctaggaaaacagg

SEQ ID NO: 5415844 - DNA, 25 bp, Homo sapien
tgtaaacgcattccaatgtacagct

SEQ ID NO: 5415845 - DNA, 25 bp, Homo sapien
caataagcagggatacaaataacag

SEQ ID NO: 5415846 - DNA, 25 bp, Homo sapien
tattttgcttccattacaatgactg

SEQ ID NO: 5415847 - DNA, 25 bp, Homo sapien
actagtcgtcaggtgcaataagcag

SEQ ID NO: 5415848 - DNA, 25 bp, Homo sapien
cgacacaattaaagcaccaatcaag

SEQ ID NO: 5415849 - DNA, 25 bp, Homo sapien
atcattactggccttggataggttt

SEQ ID NO: 5415850 - DNA, 25 bp, Homo sapien
tcttgtgcccttaaagagctcaaat

SEQ ID NO: 5415851 - DNA, 25 bp, Homo sapien
ttgagaagtaatggttagaaaagca

SEQ ID NO: 5415852 - DNA, 25 bp, Homo sapien
tctgcgccgggcataaaggagagct

SEQ ID NO: 5415853 - DNA, 25 bp, Homo sapien
gcatcctgacctaagctgacctggg

SEQ ID NO: 5415854 - DNA, 25 bp, Homo sapien
ttttgtggcaagcagtacagcatcc

SEQ ID NO: 5415855 - DNA, 25 bp, Homo sapien
gcatagaaaggtgtcgagtccccag

SEQ ID NO: 5415856 - DNA, 25 bp, Homo sapien
aaacaggctcggatgtctcgcccaa

SEQ ID NO: 5415857 - DNA, 25 bp, Homo sapien
tcagcgcgccgcaaattttctggag

SEQ ID NO: 5415858 - DNA, 25 bp, Homo sapien
gaagtcagggttattcctggtccca

SEQ ID NO: 5415859 - DNA, 25 bp, Homo sapien
gggttatgaaagctcagaagtcagg

SEQ ID NO: 5415860 - DNA, 25 bp, Homo sapien
gctctagcgcagtacacagcttaag

SEQ ID NO: 5415861 - DNA, 25 bp, Homo sapien
ttgagggaggctctagcgcagtaca

SEQ ID NO: 5415862 - DNA, 25 bp, Homo sapien
ggtgaaatggacgtcgctcacgcat

SEQ ID NO: 5415863 - DNA, 25 bp, Homo sapien
tgggtcgcggcgaggtgggtgaaat

SEQ ID NO: 5415864 - DNA, 25 bp, Homo sapien
cggagagggtggctgccgggtggag

SEQ ID NO: 5415865 - DNA, 25 bp, Homo sapien
tcccggagagggtggctgccgggtg

SEQ ID NO: 5415866 - DNA, 25 bp, Homo sapien
ggcggctggcctggcgggggctgac

SEQ ID NO: 5415867 - DNA, 25 bp, Homo sapien
cttccctgacggggcggctgctggg

SEQ ID NO: 5415868 - DNA, 25 bp, Homo sapien
tccttctagaatgtccagtaaccaa

SEQ ID NO: 5415869 - DNA, 25 bp, Homo sapien
tctagaatgtccagtaaccaatata

SEQ ID NO: 5415870 - DNA, 25 bp, Homo sapien
gaagacttccttctagaatgtccag

SEQ ID NO: 5415871 - DNA, 25 bp, Homo sapien
taaaacttgaagacttccttctaga

SEQ ID NO: 5415872 - DNA, 25 bp, Homo sapien
acctggcctgattggatttcttcac

SEQ ID NO: 5415873 - DNA, 25 bp, Homo sapien
gacatagggaatgaatggttaagcc

SEQ ID NO: 5415874 - DNA, 25 bp, Homo sapien
tagtcttaatactcctagatgtcgg

SEQ ID NO: 5415875 - DNA, 25 bp, Homo sapien
tgtcagtaaccttcaattaaccatg

SEQ ID NO: 5415876 - DNA, 25 bp, Homo sapien
ttttccatcatcttcgggattgcga

SEQ ID NO: 5415877 - DNA, 25 bp, Homo sapien
tctctgcaatgcaccaaggggtatt

SEQ ID NO: 5415878 - DNA, 25 bp, Homo sapien
gcaccaaggggtattttttccatca

SEQ ID NO: 5415879 - DNA, 25 bp, Homo sapien
cgggattgcgaattatagatctcaa

SEQ ID NO: 5415880 - DNA, 25 bp, Homo sapien
tactctggagactaaggtgggagaa

SEQ ID NO: 5415881 - DNA, 25 bp, Homo sapien
tctggagactaaggtgggagaatcg

SEQ ID NO: 5415882 - DNA, 25 bp, Homo sapien
tgactccaggagttcaagtccatcc

SEQ ID NO: 5415883 - DNA, 25 bp, Homo sapien
tcaagtccatcctgagcaacataat

SEQ ID NO: 5415884 - DNA, 25 bp, Homo sapien
actgtctacactctgataggcccca

SEQ ID NO: 5415885 - DNA, 25 bp, Homo sapien
tgtgcccctctatgtcttcatgtgt

SEQ ID NO: 5415886 - DNA, 25 bp, Homo sapien
tgtattgtgcccctctatgtcttca

SEQ ID NO: 5415887 - DNA, 25 bp, Homo sapien
tcctgcgaagggcatgagatcattc

SEQ ID NO: 5415888 - DNA, 25 bp, Homo sapien
aacgcatccacaaagcattaggcca

SEQ ID NO: 5415889 - DNA, 25 bp, Homo sapien
taacggttacaagcgttcccagtca

SEQ ID NO: 5415890 - DNA, 25 bp, Homo sapien
gcattaggccacctataaactagga

SEQ ID NO: 5415891 - DNA, 25 bp, Homo sapien
ggcaccaaaatcctagaagtcctag

SEQ ID NO: 5415892 - DNA, 25 bp, Homo sapien
cattttgccgcacaagctgtaacat

SEQ ID NO: 5415893 - DNA, 25 bp, Homo sapien
gcattttgccgcacaagctgtaaca

SEQ ID NO: 5415894 - DNA, 25 bp, Homo sapien
ctccctcactgacgcattttgccgc

SEQ ID NO: 5415895 - DNA, 25 bp, Homo sapien
tagtgaggcaaaagccctctccagt

SEQ ID NO: 5415896 - DNA, 25 bp, Homo sapien
agtctttgcctgagcttgaaggtcg

SEQ ID NO: 5415897 - DNA, 25 bp, Homo sapien
gagcaccagcgtagccaactttata

SEQ ID NO: 5415898 - DNA, 25 bp, Homo sapien
tgaaggtcgggagtagtttacacaa

SEQ ID NO: 5415899 - DNA, 25 bp, Homo sapien
ttggagccacgcaaccagcactaat

SEQ ID NO: 5415900 - DNA, 25 bp, Homo sapien
ggcatgcgccattacgctcagctca

SEQ ID NO: 5415901 - DNA, 25 bp, Homo sapien
gatggtgccagaagtaatgccagca

SEQ ID NO: 5415902 - DNA, 25 bp, Homo sapien
aaggctccaggagtcacctaatgca

SEQ ID NO: 5415903 - DNA, 25 bp, Homo sapien
caactgtgatgtatttctcatagga

SEQ ID NO: 5415904 - DNA, 25 bp, Homo sapien
gtatttctcataggaaagaatctca

SEQ ID NO: 5415905 - DNA, 25 bp, Homo sapien
ccctcaggtttattagtttagcata

SEQ ID NO: 5415906 - DNA, 25 bp, Homo sapien
aaatcagactggtgattaaagcttt

SEQ ID NO: 5415907 - DNA, 25 bp, Homo sapien
tcccaacacttacggaggttgagac

SEQ ID NO: 5415908 - DNA, 25 bp, Homo sapien
caacacttacggaggttgagacagg

SEQ ID NO: 5415909 - DNA, 25 bp, Homo sapien
cccaacacttacggaggttgagaca

SEQ ID NO: 5415910 - DNA, 25 bp, Homo sapien
cccatcttcataaataaacaaggtt

SEQ ID NO: 5415911 - DNA, 25 bp, Homo sapien
cagtgaattctggagatctggactc

SEQ ID NO: 5415912 - DNA, 25 bp, Homo sapien
ggcaattgacttccctctgttatga

SEQ ID NO: 5415913 - DNA, 25 bp, Homo sapien
gcactgaaatataagcccatgccag

SEQ ID NO: 5415914 - DNA, 25 bp, Homo sapien
tatttccctgcactagttctgccaa

SEQ ID NO: 5415915 - DNA, 25 bp, Homo sapien
caagaacccatgacagagatcgcag

SEQ ID NO: 5415916 - DNA, 25 bp, Homo sapien
tagacgcgcacaatccaggagtaga

SEQ ID NO: 5415917 - DNA, 25 bp, Homo sapien
tcacgaagccgagagagaagaacac

SEQ ID NO: 5415918 - DNA, 25 bp, Homo sapien
gatcatgaatcaagccctggaacag

SEQ ID NO: 5415919 - DNA, 25 bp, Homo sapien
ggctttgcggaatgacctttgatat

SEQ ID NO: 5415920 - DNA, 25 bp, Homo sapien
gatactgatgcatggacggctttgc

SEQ ID NO: 5415921 - DNA, 25 bp, Homo sapien
gataaatctgcctttgcacaaatgt

SEQ ID NO: 5415922 - DNA, 25 bp, Homo sapien
catggacggctttgcggaatgacct

SEQ ID NO: 5415923 - DNA, 25 bp, Homo sapien
caactgcccatagtgagcttcccaa

SEQ ID NO: 5415924 - DNA, 25 bp, Homo sapien
ccttcagtggattcgggcaagtgca

SEQ ID NO: 5415925 - DNA, 25 bp, Homo sapien
aattccgtcaacaaggttggagtag

SEQ ID NO: 5415926 - DNA, 25 bp, Homo sapien
cccaggaagtacagcattgactggc

SEQ ID NO: 5415927 - DNA, 25 bp, Homo sapien
tccatatgttaccaaaagcacatgc

SEQ ID NO: 5415928 - DNA, 25 bp, Homo sapien
aagttaatgcacttcttttcctagc

SEQ ID NO: 5415929 - DNA, 25 bp, Homo sapien
tgggatgtacaaaattgtggccgct

SEQ ID NO: 5415930 - DNA, 25 bp, Homo sapien
gtggccgctctctttgtggaaggaa

SEQ ID NO: 5415931 - DNA, 25 bp, Homo sapien
aaaattctggaactacacaatggtc

SEQ ID NO: 5415932 - DNA, 25 bp, Homo sapien
aatacccagtataggcaaagcagat

SEQ ID NO: 5415933 - DNA, 25 bp, Homo sapien
tcaaaatacccagtataggcaaagc

SEQ ID NO: 5415934 - DNA, 25 bp, Homo sapien
tggtcatggctacacaatattttga

SEQ ID NO: 5415935 - DNA, 25 bp, Homo sapien
aagaacagctttattaactgaaatc

SEQ ID NO: 5415936 - DNA, 25 bp, Homo sapien
ttgaagctcatatatgctacaactt

SEQ ID NO: 5415937 - DNA, 25 bp, Homo sapien
tttgaagctcatatatgctacaact

SEQ ID NO: 5415938 - DNA, 25 bp, Homo sapien
cagctttattaactgaaatccattt

SEQ ID NO: 5415939 - DNA, 25 bp, Homo sapien
ccatgtaaaacctagccttctcttt

SEQ ID NO: 5415940 - DNA, 25 bp, Homo sapien
aaattatattttggtccctgagagt

SEQ ID NO: 5415941 - DNA, 25 bp, Homo sapien
catcatttgcctgatagctgggtct

SEQ ID NO: 5415942 - DNA, 25 bp, Homo sapien
gagagttataaaaagggagctggac

SEQ ID NO: 5415943 - DNA, 25 bp, Homo sapien
aattacctctctggcatagtcctga

SEQ ID NO: 5415944 - DNA, 25 bp, Homo sapien
tctgtccacaaacactggtccacgg

SEQ ID NO: 5415945 - DNA, 25 bp, Homo sapien
cagccacaagagcttcagtaagtct

SEQ ID NO: 5415946 - DNA, 25 bp, Homo sapien
tgtacagcttttacaagagggtaaa

SEQ ID NO: 5415947 - DNA, 25 bp, Homo sapien
atttgctgaatatgggcatcttgaa

SEQ ID NO: 5415948 - DNA, 25 bp, Homo sapien
gctgaatatgggcatcttgaacctc

SEQ ID NO: 5415949 - DNA, 25 bp, Homo sapien
tgaatatgggcatcttgaacctctt

SEQ ID NO: 5415950 - DNA, 25 bp, Homo sapien
cagccagcaattgttctttagcctc

SEQ ID NO: 5415951 - DNA, 25 bp, Homo sapien
cccatgcggccagtttactttggtt

SEQ ID NO: 5415952 - DNA, 25 bp, Homo sapien
gggtggttcccatgcggccagttta

SEQ ID NO: 5415953 - DNA, 25 bp, Homo sapien
tatttcctgaatatcagaaaatacc

SEQ ID NO: 5415954 - DNA, 25 bp, Homo sapien
tcctgaatatcagaaaatacccaag

SEQ ID NO: 5415955 - DNA, 25 bp, Homo sapien
cacaatggctcgatattctgcaatt

SEQ ID NO: 5415956 - DNA, 25 bp, Homo sapien
ttaattctgctttgtttttttcatc

SEQ ID NO: 5415957 - DNA, 25 bp, Homo sapien
caatggctcgatattctgcaattgt

SEQ ID NO: 5415958 - DNA, 25 bp, Homo sapien
ctgcaattgtttttaattctgcttt

SEQ ID NO: 5415959 - DNA, 25 bp, Homo sapien
tctgcaatatctctagcaataatca

SEQ ID NO: 5415960 - DNA, 25 bp, Homo sapien
agttcactcaggaagttatgtattc

SEQ ID NO: 5415961 - DNA, 25 bp, Homo sapien
ataatcatatcttcattgtcaagtt

SEQ ID NO: 5415962 - DNA, 25 bp, Homo sapien
gcctcagcttctgcaatatctctag

SEQ ID NO: 5415963 - DNA, 25 bp, Homo sapien
gtgtgtttcagcctctttttctttc

SEQ ID NO: 5415964 - DNA, 25 bp, Homo sapien
tgtgtttcagcctctttttctttcc

SEQ ID NO: 5415965 - DNA, 25 bp, Homo sapien
cagcctctttttctttccccatttg

SEQ ID NO: 5415966 - DNA, 25 bp, Homo sapien
ctgtgtgtttcagcctctttttctt

SEQ ID NO: 5415967 - DNA, 25 bp, Homo sapien
ttgataatatgtttatcctgcatat

SEQ ID NO: 5415968 - DNA, 25 bp, Homo sapien
ctgctgttctacagctttgataata

SEQ ID NO: 5415969 - DNA, 25 bp, Homo sapien
gctgttctacagctttgataatatg

SEQ ID NO: 5415970 - DNA, 25 bp, Homo sapien
tttgataatatgtttatcctgcata

SEQ ID NO: 5415971 - DNA, 25 bp, Homo sapien
gtcatcctgagttcatcaaaccaga

SEQ ID NO: 5415972 - DNA, 25 bp, Homo sapien
attaatccttatacaactcaatgtt

SEQ ID NO: 5415973 - DNA, 25 bp, Homo sapien
tcatcctgagttcatcaaaccagag

SEQ ID NO: 5415974 - DNA, 25 bp, Homo sapien
attattaatccttatacaactcaat

SEQ ID NO: 5415975 - DNA, 25 bp, Homo sapien
gaaaactctttagcagaagcctgtt

SEQ ID NO: 5415976 - DNA, 25 bp, Homo sapien
aactctttagcagaagcctgttctt

SEQ ID NO: 5415977 - DNA, 25 bp, Homo sapien
ttctgaaaactctttagcagaagcc

SEQ ID NO: 5415978 - DNA, 25 bp, Homo sapien
ctgaaaactctttagcagaagcctg

SEQ ID NO: 5415979 - DNA, 25 bp, Homo sapien
tagatgctgggtgggagaatatggc

SEQ ID NO: 5415980 - DNA, 25 bp, Homo sapien
ctagatgctgggtgggagaatatgg

SEQ ID NO: 5415981 - DNA, 25 bp, Homo sapien
tgctgggtgggagaatatggcgtac

SEQ ID NO: 5415982 - DNA, 25 bp, Homo sapien
gatgctgggtgggagaatatggcgt

SEQ ID NO: 5415983 - DNA, 25 bp, Homo sapien
atgctgcttctaaccgctgagacaa

SEQ ID NO: 5415984 - DNA, 25 bp, Homo sapien
taaccgctgagacaattcataaaat

SEQ ID NO: 5415985 - DNA, 25 bp, Homo sapien
tgcctcccagtggaacaaatgcacc

SEQ ID NO: 5415986 - DNA, 25 bp, Homo sapien
ttgcctcccagtggaacaaatgcac

SEQ ID NO: 5415987 - DNA, 25 bp, Homo sapien
ctcttgtatttcatggtcatctcct

SEQ ID NO: 5415988 - DNA, 25 bp, Homo sapien
tttcatataatgcattctgtcgctt

SEQ ID NO: 5415989 - DNA, 25 bp, Homo sapien
atataatgcattctgtcgctttatt

SEQ ID NO: 5415990 - DNA, 25 bp, Homo sapien
atttcatataatgcattctgtcgct

SEQ ID NO: 5415991 - DNA, 25 bp, Homo sapien
tcatataatgcattctgtcgcttta

SEQ ID NO: 5415992 - DNA, 25 bp, Homo sapien
ttttagatgatctttggcaagagcc

SEQ ID NO: 5415993 - DNA, 25 bp, Homo sapien
ttagatgatctttggcaagagccac

SEQ ID NO: 5415994 - DNA, 25 bp, Homo sapien
tttagatgatctttggcaagagcca

SEQ ID NO: 5415995 - DNA, 25 bp, Homo sapien
tgttttagatgatctttggcaagag

SEQ ID NO: 5415996 - DNA, 25 bp, Homo sapien
tactctttcggaattcaatctgggc

SEQ ID NO: 5415997 - DNA, 25 bp, Homo sapien
aatctgggcatcacgttctttcata

SEQ ID NO: 5415998 - DNA, 25 bp, Homo sapien
caatgttgagtttcaactgttcctc

SEQ ID NO: 5415999 - DNA, 25 bp, Homo sapien
ctgattttatcttactctttcggaa

SEQ ID NO: 5416000 - DNA, 25 bp, Homo sapien
tctggtaaaattgatattgctttgc

SEQ ID NO: 5416001 - DNA, 25 bp, Homo sapien
ggtaaaattgatattgctttgcatt

SEQ ID NO: 5416002 - DNA, 25 bp, Homo sapien
ttctgtctggtaaaattgatattgc

SEQ ID NO: 5416003 - DNA, 25 bp, Homo sapien
ctgtctggtaaaattgatattgctt

SEQ ID NO: 5416004 - DNA, 25 bp, Homo sapien
cactcatcgtgtggaattatggtga

SEQ ID NO: 5416005 - DNA, 25 bp, Homo sapien
tgcttctcttgtcaacctgtcaagg

SEQ ID NO: 5416006 - DNA, 25 bp, Homo sapien
ttatggtgacctgctggagatctac

SEQ ID NO: 5416007 - DNA, 25 bp, Homo sapien
taccacttcttgagatcgcaaatgc

SEQ ID NO: 5416008 - DNA, 25 bp, Homo sapien
aagaggcagatagagaacttgatct

SEQ ID NO: 5416009 - DNA, 25 bp, Homo sapien
taagtgatattcgtctgagaagttc

SEQ ID NO: 5416010 - DNA, 25 bp, Homo sapien
agtttaagtgatattcgtctgagaa

SEQ ID NO: 5416011 - DNA, 25 bp, Homo sapien
cgtctgagaagttccgatattggca

SEQ ID NO: 5416012 - DNA, 25 bp, Homo sapien
gatattcgtctgagaagttccgata

SEQ ID NO: 5416013 - DNA, 25 bp, Homo sapien
tctgtatgcattagcagtcctctcc

SEQ ID NO: 5416014 - DNA, 25 bp, Homo sapien
taaaaatccgccactgtaaacagta

SEQ ID NO: 5416015 - DNA, 25 bp, Homo sapien
gctctacggatttgcccattggaga

SEQ ID NO: 5416016 - DNA, 25 bp, Homo sapien
tttactctactgtcaaagctgggca

SEQ ID NO: 5416017 - DNA, 25 bp, Homo sapien
ttatctttggtatatgcttaggaac

SEQ ID NO: 5416018 - DNA, 25 bp, Homo sapien
acagaattataactccatatttaac

SEQ ID NO: 5416019 - DNA, 25 bp, Homo sapien
tccattctatagaagtagcacattt

SEQ ID NO: 5416020 - DNA, 25 bp, Homo sapien
gttgatggatattaggggtgtttcc

SEQ ID NO: 5416021 - DNA, 25 bp, Homo sapien
tatcttctcccattcggtggatgta

SEQ ID NO: 5416022 - DNA, 25 bp, Homo sapien
ggattatagatccttagcatatata

SEQ ID NO: 5416023 - DNA, 25 bp, Homo sapien
taatctggattatagatccttagca

SEQ ID NO: 5416024 - DNA, 25 bp, Homo sapien
cattcggtggatgtatttgcacttt

SEQ ID NO: 5416025 - DNA, 25 bp, Homo sapien
gggcagaggtaaaatgacgctagtc

SEQ ID NO: 5416026 - DNA, 25 bp, Homo sapien
taagaatggcatggtaaagaccagc

SEQ ID NO: 5416027 - DNA, 25 bp, Homo sapien
caaaagcggaagtccctgataatcc

SEQ ID NO: 5416028 - DNA, 25 bp, Homo sapien
cattagggactctacgtgggagctc

SEQ ID NO: 5416029 - DNA, 25 bp, Homo sapien
catctgggcttacaacaactgcaac

SEQ ID NO: 5416030 - DNA, 25 bp, Homo sapien
ttttgtccacccctacttctgtaga

SEQ ID NO: 5416031 - DNA, 25 bp, Homo sapien
tgtacatatatgtgtcaactctgga

SEQ ID NO: 5416032 - DNA, 25 bp, Homo sapien
actgcacagttttaggtcagttggg

SEQ ID NO: 5416033 - DNA, 25 bp, Homo sapien
tctacaaattgttgcaagcctttgg

SEQ ID NO: 5416034 - DNA, 25 bp, Homo sapien
tactgtggttatctaggctgacacg

SEQ ID NO: 5416035 - DNA, 25 bp, Homo sapien
taaataacaataagcctcatgagtg

SEQ ID NO: 5416036 - DNA, 25 bp, Homo sapien
ccacacatgcctctgatagctgtga

SEQ ID NO: 5416037 - DNA, 25 bp, Homo sapien
gagagaccttatatttactttagag

SEQ ID NO: 5416038 - DNA, 25 bp, Homo sapien
agagatattccaattcaatcagtga

SEQ ID NO: 5416039 - DNA, 25 bp, Homo sapien
gaagagccaagcctctaaagaggtg

SEQ ID NO: 5416040 - DNA, 25 bp, Homo sapien
tgaataacaaactttaagcgtgcgg

SEQ ID NO: 5416041 - DNA, 25 bp, Homo sapien
gggtctctgatttcctatcttttct

SEQ ID NO: 5416042 - DNA, 25 bp, Homo sapien
gggtgggggtctctgatttcctatc

SEQ ID NO: 5416043 - DNA, 25 bp, Homo sapien
ctgatttcctatcttttctccaccc

SEQ ID NO: 5416044 - DNA, 25 bp, Homo sapien
tctctgatttcctatcttttctcca

SEQ ID NO: 5416045 - DNA, 25 bp, Homo sapien
aaacattctcccacccacttccact

SEQ ID NO: 5416046 - DNA, 25 bp, Homo sapien
taaacattctcccacccacttccac

SEQ ID NO: 5416047 - DNA, 25 bp, Homo sapien
cattctcccacccacttccactccc

SEQ ID NO: 5416048 - DNA, 25 bp, Homo sapien
tgtaaacattctcccacccacttcc

SEQ ID NO: 5416049 - DNA, 25 bp, Homo sapien
taacttcacacagagcccaaagatg

SEQ ID NO: 5416050 - DNA, 25 bp, Homo sapien
ccctggataggtcagtttagctcac

SEQ ID NO: 5416051 - DNA, 25 bp, Homo sapien
cttattgaggatgctttcgacctgg

SEQ ID NO: 5416052 - DNA, 25 bp, Homo sapien
ctgagggcaagacggcctaacttca

SEQ ID NO: 5416053 - DNA, 25 bp, Homo sapien
ctgtactttccttcgcccgtccaca

SEQ ID NO: 5416054 - DNA, 25 bp, Homo sapien
agcgccgtccaaaccgtaccagcat

SEQ ID NO: 5416055 - DNA, 25 bp, Homo sapien
ttcgcccgtccacagcgccgtccaa

SEQ ID NO: 5416056 - DNA, 25 bp, Homo sapien
tccacagcgccgtccaaaccgtacc

SEQ ID NO: 5416057 - DNA, 25 bp, Homo sapien
tggaaaagtgactgtggcgccaagc

SEQ ID NO: 5416058 - DNA, 25 bp, Homo sapien
gttgttactcgtaccacgcggttgc

SEQ ID NO: 5416059 - DNA, 25 bp, Homo sapien
tctgacgaggtgtccatgatgctcc

SEQ ID NO: 5416060 - DNA, 25 bp, Homo sapien
gacgccagccggtggagttgttact

SEQ ID NO: 5416061 - DNA, 25 bp, Homo sapien
cgcttgcgagctgggcttgtgagtg

SEQ ID NO: 5416062 - DNA, 25 bp, Homo sapien
cttgcgagctgggcttgtgagtggg

SEQ ID NO: 5416063 - DNA, 25 bp, Homo sapien
ctgcgcttgcgagctgggcttgtga

SEQ ID NO: 5416064 - DNA, 25 bp, Homo sapien
tgcgcttgcgagctgggcttgtgag

SEQ ID NO: 5416065 - DNA, 25 bp, Homo sapien
ccgcaggagcgtcacgggcgccggg

SEQ ID NO: 5416066 - DNA, 25 bp, Homo sapien
ggctgccgacggcgggactgggtca

SEQ ID NO: 5416067 - DNA, 25 bp, Homo sapien
tgggtcagtgagaagcccgtgggcc

SEQ ID NO: 5416068 - DNA, 25 bp, Homo sapien
gccctgcctgctactcccatcccca

SEQ ID NO: 5416069 - DNA, 25 bp, Homo sapien
gatgtaaattgctagcttagttgtc

SEQ ID NO: 5416070 - DNA, 25 bp, Homo sapien
tactctctatttactgactaccaga

SEQ ID NO: 5416071 - DNA, 25 bp, Homo sapien
gattgttactgttcaaagagcttac

SEQ ID NO: 5416072 - DNA, 25 bp, Homo sapien
tttagagccagaaagcatgtagagc

SEQ ID NO: 5416073 - DNA, 25 bp, Homo sapien
aacctctccttgattagagcttcct

SEQ ID NO: 5416074 - DNA, 25 bp, Homo sapien
cactgcaaatcacagacaggcctag

SEQ ID NO: 5416075 - DNA, 25 bp, Homo sapien
tgcacactggcactgcaaatcacag

SEQ ID NO: 5416076 - DNA, 25 bp, Homo sapien
aaatcacagacaggcctagatacag

SEQ ID NO: 5416077 - DNA, 25 bp, Homo sapien
cacacagagcgtctggtgcctcagg

SEQ ID NO: 5416078 - DNA, 25 bp, Homo sapien
ggaagacaagatgcccgctgtggtt

SEQ ID NO: 5416079 - DNA, 25 bp, Homo sapien
tcctccggtgctgggtcttcaggta

SEQ ID NO: 5416080 - DNA, 25 bp, Homo sapien
tgtcttccaaagaagccggtcagga

SEQ ID NO: 5416081 - DNA, 25 bp, Homo sapien
gcccatctgagtataacttctctgg

SEQ ID NO: 5416082 - DNA, 25 bp, Homo sapien
tatctgctccataatcctaaaaggt

SEQ ID NO: 5416083 - DNA, 25 bp, Homo sapien
gatgtcctggtcgtcattatgaaaa

SEQ ID NO: 5416084 - DNA, 25 bp, Homo sapien
gaacataaacccttcctcattggcc

SEQ ID NO: 5416085 - DNA, 25 bp, Homo sapien
cagttgtggtatgtgcgtataccac

SEQ ID NO: 5416086 - DNA, 25 bp, Homo sapien
agaagaatgggccagacgtcgtggc

SEQ ID NO: 5416087 - DNA, 25 bp, Homo sapien
ggataaatcagttgtggtatgtgcg

SEQ ID NO: 5416088 - DNA, 25 bp, Homo sapien
aatcagttgtggtatgtgcgtatac

SEQ ID NO: 5416089 - DNA, 25 bp, Homo sapien
attcagggagaccctagatttctgg

SEQ ID NO: 5416090 - DNA, 25 bp, Homo sapien
tcagggagaccctagatttctggct

SEQ ID NO: 5416091 - DNA, 25 bp, Homo sapien
agggagaccctagatttctggcttt

SEQ ID NO: 5416092 - DNA, 25 bp, Homo sapien
ttcagggagaccctagatttctggc

SEQ ID NO: 5416093 - DNA, 25 bp, Homo sapien
agtccattctacgaagccatcagag

SEQ ID NO: 5416094 - DNA, 25 bp, Homo sapien
ggtccagttttgctcatcatccaca

SEQ ID NO: 5416095 - DNA, 25 bp, Homo sapien
cctagcagccttcagagtggtactc

SEQ ID NO: 5416096 - DNA, 25 bp, Homo sapien
gaaaaacttagcaagcctagcagcc

SEQ ID NO: 5416097 - DNA, 25 bp, Homo sapien
gctgttgctgtttgtgagcctgtgg

SEQ ID NO: 5416098 - DNA, 25 bp, Homo sapien
agagctgccgggacggtccccatct

SEQ ID NO: 5416099 - DNA, 25 bp, Homo sapien
ttcttggagcgctttaggctggccg

SEQ ID NO: 5416100 - DNA, 25 bp, Homo sapien
tgtttgggattgagggcgggactcc

SEQ ID NO: 5416101 - DNA, 25 bp, Homo sapien
tgtacaccagcgtcactcttttggt

SEQ ID NO: 5416102 - DNA, 25 bp, Homo sapien
ttctgtggagcctatgggactgact

SEQ ID NO: 5416103 - DNA, 25 bp, Homo sapien
ccaaagaactttgggccgcagatgt

SEQ ID NO: 5416104 - DNA, 25 bp, Homo sapien
tgtggccatctctgtaaagtttctg

SEQ ID NO: 5416105 - DNA, 25 bp, Homo sapien
caagtgatccgtagtacctttgcag

SEQ ID NO: 5416106 - DNA, 25 bp, Homo sapien
cagtactgatgcaggaggatggctt

SEQ ID NO: 5416107 - DNA, 25 bp, Homo sapien
tgcagtactgatgcaggaggatggc

SEQ ID NO: 5416108 - DNA, 25 bp, Homo sapien
gcagtactgatgcaggaggatggct

SEQ ID NO: 5416109 - DNA, 25 bp, Homo sapien
taaacttgattgacttagagatgca

SEQ ID NO: 5416110 - DNA, 25 bp, Homo sapien
catagttccctactttagaagactg

SEQ ID NO: 5416111 - DNA, 25 bp, Homo sapien
tcatagtatcagtgttaaatcctca

SEQ ID NO: 5416112 - DNA, 25 bp, Homo sapien
gcactgtgatgggtcatagtatcag

SEQ ID NO: 5416113 - DNA, 25 bp, Homo sapien
aaataccagttgtataagagatcaa

SEQ ID NO: 5416114 - DNA, 25 bp, Homo sapien
caagatagtttaatagccagattta

SEQ ID NO: 5416115 - DNA, 25 bp, Homo sapien
tagtttaatagccagatttatgtag

SEQ ID NO: 5416116 - DNA, 25 bp, Homo sapien
ccagttgtataagagatcaaataat

SEQ ID NO: 5416117 - DNA, 25 bp, Homo sapien
aggtggtgtgagtcatttctggtct

SEQ ID NO: 5416118 - DNA, 25 bp, Homo sapien
tttcgggtgatttagatgatcagac

SEQ ID NO: 5416119 - DNA, 25 bp, Homo sapien
tcttgtatagctataaggtggtgtg

SEQ ID NO: 5416120 - DNA, 25 bp, Homo sapien
tttctggtctgttgttgcttttaag

SEQ ID NO: 5416121 - DNA, 25 bp, Homo sapien
aaccgaattaggtccacttcaatgt

SEQ ID NO: 5416122 - DNA, 25 bp, Homo sapien
aaaccgaattaggtccacttcaatg

SEQ ID NO: 5416123 - DNA, 25 bp, Homo sapien
ttacacaggaaagttggtaacacta

SEQ ID NO: 5416124 - DNA, 25 bp, Homo sapien
caggccatttatggtgtctcctagg

SEQ ID NO: 5416125 - DNA, 25 bp, Homo sapien
gaaagcttttcaataccgaatgtag

SEQ ID NO: 5416126 - DNA, 25 bp, Homo sapien
tagctattgacgatgggcctttccc

SEQ ID NO: 5416127 - DNA, 25 bp, Homo sapien
aaacttgtatgatgctggcaggtca

SEQ ID NO: 5416128 - DNA, 25 bp, Homo sapien
aacttgtatgatgctggcaggtcat

SEQ ID NO: 5416129 - DNA, 25 bp, Homo sapien
gctggtaagctgaacattttagaac

SEQ ID NO: 5416130 - DNA, 25 bp, Homo sapien
gagggatggcagtgagtctactact

SEQ ID NO: 5416131 - DNA, 25 bp, Homo sapien
agaaaagtgttaagtgctggtaagc

SEQ ID NO: 5416132 - DNA, 25 bp, Homo sapien
taacttatccaagtagtgacttctg

SEQ ID NO: 5416133 - DNA, 25 bp, Homo sapien
catgttggcccttttggatattagg

SEQ ID NO: 5416134 - DNA, 25 bp, Homo sapien
gcgaatacatgttggcccttttgga

SEQ ID NO: 5416135 - DNA, 25 bp, Homo sapien
tgaaaattttggttgggcgaataca

SEQ ID NO: 5416136 - DNA, 25 bp, Homo sapien
tggatattaggattgagatttgtct

SEQ ID NO: 5416137 - DNA, 25 bp, Homo sapien
gctataatatctatcttgattttcc

SEQ ID NO: 5416138 - DNA, 25 bp, Homo sapien
tttccattctgcagctttcttttga

SEQ ID NO: 5416139 - DNA, 25 bp, Homo sapien
attctgcagctttcttttgaacatg

SEQ ID NO: 5416140 - DNA, 25 bp, Homo sapien
ctgctataatatctatcttgatttt

SEQ ID NO: 5416141 - DNA, 25 bp, Homo sapien
gatagaaagctactcatgcaccaca

SEQ ID NO: 5416142 - DNA, 25 bp, Homo sapien
tatgccaagactatactttcaggga

SEQ ID NO: 5416143 - DNA, 25 bp, Homo sapien
cagactataaccacagagcctcggt

SEQ ID NO: 5416144 - DNA, 25 bp, Homo sapien
cattgatatatacagctagctagcc

SEQ ID NO: 5416145 - DNA, 25 bp, Homo sapien
gccacagaatatcagatgatttgaa

SEQ ID NO: 5416146 - DNA, 25 bp, Homo sapien
tgccacagaatatcagatgatttga

SEQ ID NO: 5416147 - DNA, 25 bp, Homo sapien
ccacagaatatcagatgatttgaac

SEQ ID NO: 5416148 - DNA, 25 bp, Homo sapien
gaatatactgctgttcttgccattt

SEQ ID NO: 5416149 - DNA, 25 bp, Homo sapien
tactgctgttcttgccatttccaaa

SEQ ID NO: 5416150 - DNA, 25 bp, Homo sapien
aatatactgctgttcttgccatttc

SEQ ID NO: 5416151 - DNA, 25 bp, Homo sapien
tatactgctgttcttgccatttcca

SEQ ID NO: 5416152 - DNA, 25 bp, Homo sapien
tcattcataagggttaggcaaatta

SEQ ID NO: 5416153 - DNA, 25 bp, Homo sapien
ttcataagggttaggcaaattattc

SEQ ID NO: 5416154 - DNA, 25 bp, Homo sapien
cgtattcattcataagggttaggca

SEQ ID NO: 5416155 - DNA, 25 bp, Homo sapien
tatgtttcgtattcattcataaggg

SEQ ID NO: 5416156 - DNA, 25 bp, Homo sapien
aatataccaatatacccgattcttg

SEQ ID NO: 5416157 - DNA, 25 bp, Homo sapien
ggctaccaattcctggccccaaatg

SEQ ID NO: 5416158 - DNA, 25 bp, Homo sapien
tatgttgcccgggatggctaccaat

SEQ ID NO: 5416159 - DNA, 25 bp, Homo sapien
atcgcagccccgaatacctgagctc

SEQ ID NO: 5416160 - DNA, 25 bp, Homo sapien
attactgtatcgaatgacttggaca

SEQ ID NO: 5416161 - DNA, 25 bp, Homo sapien
aaatatttccaatgcgtcttcatct

SEQ ID NO: 5416162 - DNA, 25 bp, Homo sapien
tatttccaatgcgtcttcatctatg

SEQ ID NO: 5416163 - DNA, 25 bp, Homo sapien
atgacttggacattctgttagataa

SEQ ID NO: 5416164 - DNA, 25 bp, Homo sapien
tgctcctaacattgcagttccgatg

SEQ ID NO: 5416165 - DNA, 25 bp, Homo sapien
tagatctgcaacgactttattttca

SEQ ID NO: 5416166 - DNA, 25 bp, Homo sapien
gatgctaagtactccacaaccacat

SEQ ID NO: 5416167 - DNA, 25 bp, Homo sapien
caaccacatcctagatctgcaacga

SEQ ID NO: 5416168 - DNA, 25 bp, Homo sapien
agcaaggactgttggccactgattc

SEQ ID NO: 5416169 - DNA, 25 bp, Homo sapien
gaagatatctgaacccagcaaggac

SEQ ID NO: 5416170 - DNA, 25 bp, Homo sapien
tgagacctgataatagaactactgg

SEQ ID NO: 5416171 - DNA, 25 bp, Homo sapien
gaactactgggtgttagatacacac

SEQ ID NO: 5416172 - DNA, 25 bp, Homo sapien
tgcggcctggtaggatactgttcca

SEQ ID NO: 5416173 - DNA, 25 bp, Homo sapien
ttccagaagtagcttgggcttttca

SEQ ID NO: 5416174 - DNA, 25 bp, Homo sapien
gcaatgtgcggcctggtaggatact

SEQ ID NO: 5416175 - DNA, 25 bp, Homo sapien
ccagaagtagcttgggcttttcaaa

SEQ ID NO: 5416176 - DNA, 25 bp, Homo sapien
taaagtatggactcgtagggtttga

SEQ ID NO: 5416177 - DNA, 25 bp, Homo sapien
aagtatggactcgtagggtttgaag

SEQ ID NO: 5416178 - DNA, 25 bp, Homo sapien
tattgaactgggatcttgtttcctc

SEQ ID NO: 5416179 - DNA, 25 bp, Homo sapien
ttcagcaccgctggccggacccgaa

SEQ ID NO: 5416180 - DNA, 25 bp, Homo sapien
gacccgaagacgcgccctaaggaga

SEQ ID NO: 5416181 - DNA, 25 bp, Homo sapien
gccctaaggagacgcccggacgcag

SEQ ID NO: 5416182 - DNA, 25 bp, Homo sapien
agcctcaggatccctcgcgccacga

SEQ ID NO: 5416183 - DNA, 25 bp, Homo sapien
gatccctcgcgccacgaccacgcac

SEQ ID NO: 5416184 - DNA, 25 bp, Homo sapien
gcggcggcgcactgctggagcagcc

SEQ ID NO: 5416185 - DNA, 25 bp, Homo sapien
cggctaacccaagccgccccaggag

SEQ ID NO: 5416186 - DNA, 25 bp, Homo sapien
aggcgacccgcacctcggccggtgc

SEQ ID NO: 5416187 - DNA, 25 bp, Homo sapien
acctcggccggtgccggaagcgcca

SEQ ID NO: 5416188 - DNA, 25 bp, Homo sapien
cgacccgcacctcggccggtgccgg

SEQ ID NO: 5416189 - DNA, 25 bp, Homo sapien
ctctggaggcgacccgcacctcggc

SEQ ID NO: 5416190 - DNA, 25 bp, Homo sapien
gacttcaacatgttccgcagccagg

SEQ ID NO: 5416191 - DNA, 25 bp, Homo sapien
ctggtctggacagccaacttcgtgg

SEQ ID NO: 5416192 - DNA, 25 bp, Homo sapien
tgcatgtcgctgtgcgccgagtgct

SEQ ID NO: 5416193 - DNA, 25 bp, Homo sapien
taccgctgccggacgtgcggcatct

SEQ ID NO: 5416194 - DNA, 25 bp, Homo sapien
tgcttattgaaacttggtgttaatg

SEQ ID NO: 5416195 - DNA, 25 bp, Homo sapien
ttctgcttattgaaacttggtgtta

SEQ ID NO: 5416196 - DNA, 25 bp, Homo sapien
cttcatacctagttgatgagttgat

SEQ ID NO: 5416197 - DNA, 25 bp, Homo sapien
cttattgaaacttggtgttaatgag

SEQ ID NO: 5416198 - DNA, 25 bp, Homo sapien
tgagaacaacatagggcaaaccatc

SEQ ID NO: 5416199 - DNA, 25 bp, Homo sapien
ggtagaaggcacctagtcacagagc

SEQ ID NO: 5416200 - DNA, 25 bp, Homo sapien
taggaaacgtagaatcatggtagaa

SEQ ID NO: 5416201 - DNA, 25 bp, Homo sapien
acctatgtgtgtcctaagttctcta

SEQ ID NO: 5416202 - DNA, 25 bp, Homo sapien
agagatggggcttcgccacattggc

SEQ ID NO: 5416203 - DNA, 25 bp, Homo sapien
tgggacttacaggcacgtgtcacca

SEQ ID NO: 5416204 - DNA, 25 bp, Homo sapien
gtagagatggggcttcgccacattg

SEQ ID NO: 5416205 - DNA, 25 bp, Homo sapien
ggacttacaggcacgtgtcaccatg

SEQ ID NO: 5416206 - DNA, 25 bp, Homo sapien
tatgatagcaatgaaatgtcccagc

SEQ ID NO: 5416207 - DNA, 25 bp, Homo sapien
taaccatgtgggcttatcataagcc

SEQ ID NO: 5416208 - DNA, 25 bp, Homo sapien
tatgtgccaccacacgggcttgaaa

SEQ ID NO: 5416209 - DNA, 25 bp, Homo sapien
tcgacttctaagtgggttactcaca

SEQ ID NO: 5416210 - DNA, 25 bp, Homo sapien
gaattgttcatgaccttgcttgatt

SEQ ID NO: 5416211 - DNA, 25 bp, Homo sapien
cgtatatagtataagataggaatca

SEQ ID NO: 5416212 - DNA, 25 bp, Homo sapien
tagttaattatcttccaggctccat

SEQ ID NO: 5416213 - DNA, 25 bp, Homo sapien
gaagcttttgatttacatagtcagt

SEQ ID NO: 5416214 - DNA, 25 bp, Homo sapien
tacttccaatcgtagggagcttacc

SEQ ID NO: 5416215 - DNA, 25 bp, Homo sapien
gcataccgtgtcttcattaaggccc

SEQ ID NO: 5416216 - DNA, 25 bp, Homo sapien
tcatttagtgcacagtgatgggaca

SEQ ID NO: 5416217 - DNA, 25 bp, Homo sapien
cattcctgacagttggtaagcctct

SEQ ID NO: 5416218 - DNA, 25 bp, Homo sapien
tgcagattgggagtttgaatctgtt

SEQ ID NO: 5416219 - DNA, 25 bp, Homo sapien
gagaaaccatctgtagattttgcag

SEQ ID NO: 5416220 - DNA, 25 bp, Homo sapien
ccaaaatgttttggacctgtgtcca

SEQ ID NO: 5416221 - DNA, 25 bp, Homo sapien
ttccaaaatgttttggacctgtgtc

SEQ ID NO: 5416222 - DNA, 25 bp, Homo sapien
tctgggccctgtagtatgcttttac

SEQ ID NO: 5416223 - DNA, 25 bp, Homo sapien
taagagcggcagagagggattgtag

SEQ ID NO: 5416224 - DNA, 25 bp, Homo sapien
tctccagtggcaagctaagagcggc

SEQ ID NO: 5416225 - DNA, 25 bp, Homo sapien
gtttgactgttagttctgttgcctg

SEQ ID NO: 5416226 - DNA, 25 bp, Homo sapien
tctgcattgtcatagttggctggct

SEQ ID NO: 5416227 - DNA, 25 bp, Homo sapien
tctgatctagccttaaaccaccaca

SEQ ID NO: 5416228 - DNA, 25 bp, Homo sapien
cttggttttacaagaggcgggctgc

SEQ ID NO: 5416229 - DNA, 25 bp, Homo sapien
tactctgttgtacagtgttaacatg

SEQ ID NO: 5416230 - DNA, 25 bp, Homo sapien
tacaaacttgaataggttgtgagtg

SEQ ID NO: 5416231 - DNA, 25 bp, Homo sapien
cctgggcctgcaaatgatcttccca

SEQ ID NO: 5416232 - DNA, 25 bp, Homo sapien
aacttgaataggttgtgagtgtcca

SEQ ID NO: 5416233 - DNA, 25 bp, Homo sapien
cccaggtaccaattactgcttttgt

SEQ ID NO: 5416234 - DNA, 25 bp, Homo sapien
gcctattgttatgtagcaagttatg

SEQ ID NO: 5416235 - DNA, 25 bp, Homo sapien
attgttatgtagcaagttatggtac

SEQ ID NO: 5416236 - DNA, 25 bp, Homo sapien
aaatgacttgcctattgttatgtag

SEQ ID NO: 5416237 - DNA, 25 bp, Homo sapien
actgtgctgggtccatgtcatgttt

SEQ ID NO: 5416238 - DNA, 25 bp, Homo sapien
gaagggatatatagcatttgcggca

SEQ ID NO: 5416239 - DNA, 25 bp, Homo sapien
caggaggctaaaaccatagggagtc

SEQ ID NO: 5416240 - DNA, 25 bp, Homo sapien
ccttctggcagcatatagagggtaa

SEQ ID NO: 5416241 - DNA, 25 bp, Homo sapien
taaagatacagtaatccagtgggag

SEQ ID NO: 5416242 - DNA, 25 bp, Homo sapien
caaaagctggcttactcctgttaaa

SEQ ID NO: 5416243 - DNA, 25 bp, Homo sapien
aaccaacaaaagctggcttactcct

SEQ ID NO: 5416244 - DNA, 25 bp, Homo sapien
agtggttgaaacaagcctctggttt

SEQ ID NO: 5416245 - DNA, 25 bp, Homo sapien
gctggcttactcctgttaaagtggg

SEQ ID NO: 5416246 - DNA, 25 bp, Homo sapien
caaattcaagatagtcattgctcac

SEQ ID NO: 5416247 - DNA, 25 bp, Homo sapien
gagcatgccttctaatgagtgtaca

SEQ ID NO: 5416248 - DNA, 25 bp, Homo sapien
tgagtgtacacaggctaaaagaccc

SEQ ID NO: 5416249 - DNA, 25 bp, Homo sapien
taagacaaatttgtctaccaaagca

SEQ ID NO: 5416250 - DNA, 25 bp, Homo sapien
gctaccttctgacgtatacttagga

SEQ ID NO: 5416251 - DNA, 25 bp, Homo sapien
gagaggcctattcttagggtaacag

SEQ ID NO: 5416252 - DNA, 25 bp, Homo sapien
tgttcattctctgttaggagaggcc

SEQ ID NO: 5416253 - DNA, 25 bp, Homo sapien
tgaaatatgtcctagtagaaacggg

SEQ ID NO: 5416254 - DNA, 25 bp, Homo sapien
tctccttgtctaggagagactttat

SEQ ID NO: 5416255 - DNA, 25 bp, Homo sapien
ggaggacctttttgagtctaatcta

SEQ ID NO: 5416256 - DNA, 25 bp, Homo sapien
cttgggaatttttcaggtgttactg

SEQ ID NO: 5416257 - DNA, 25 bp, Homo sapien
atctattttttactggcctataagg

SEQ ID NO: 5416258 - DNA, 25 bp, Homo sapien
taactgcaatgtaggtggagagaca

SEQ ID NO: 5416259 - DNA, 25 bp, Homo sapien
taaaagggacgcttgctaaatacca

SEQ ID NO: 5416260 - DNA, 25 bp, Homo sapien
taaatggtgggtactcaatagagtg

SEQ ID NO: 5416261 - DNA, 25 bp, Homo sapien
tctagagatactggtgagtagcagg

SEQ ID NO: 5416262 - DNA, 25 bp, Homo sapien
gaggtatctgttaatgccgtggtac

SEQ ID NO: 5416263 - DNA, 25 bp, Homo sapien
gcaatgacatttggccaccgttgta

SEQ ID NO: 5416264 - DNA, 25 bp, Homo sapien
tctgatgacatacggtctggagcat

SEQ ID NO: 5416265 - DNA, 25 bp, Homo sapien
tgaatctctaggtcaagtagcaaag

SEQ ID NO: 5416266 - DNA, 25 bp, Homo sapien
ttccatatggctgggaggtctcaca

SEQ ID NO: 5416267 - DNA, 25 bp, Homo sapien
tgggaggtctcacaatcatggcaga

SEQ ID NO: 5416268 - DNA, 25 bp, Homo sapien
agttccatatggctgggaggtctca

SEQ ID NO: 5416269 - DNA, 25 bp, Homo sapien
gttccatatggctgggaggtctcac

SEQ ID NO: 5416270 - DNA, 25 bp, Homo sapien
tccagaggtgtacagttttacccaa

SEQ ID NO: 5416271 - DNA, 25 bp, Homo sapien
gaccaactacccagtttcattgtga

SEQ ID NO: 5416272 - DNA, 25 bp, Homo sapien
aaagtcttacgaagtattactgagc

SEQ ID NO: 5416273 - DNA, 25 bp, Homo sapien
ccatgaagaaggaactcaggaatgt

SEQ ID NO: 5416274 - DNA, 25 bp, Homo sapien
tgaaaacctatgcaggatgacatgg

SEQ ID NO: 5416275 - DNA, 25 bp, Homo sapien
tataattgtagaaccaaggcaggga

SEQ ID NO: 5416276 - DNA, 25 bp, Homo sapien
gtaagtacaccaccatttgacctgt

SEQ ID NO: 5416277 - DNA, 25 bp, Homo sapien
agtgatgagcacacccagagtttgt

SEQ ID NO: 5416278 - DNA, 25 bp, Homo sapien
ttttcagttggtgtgtagtcttcaa

SEQ ID NO: 5416279 - DNA, 25 bp, Homo sapien
ttttttcagttggtgtgtagtcttc

SEQ ID NO: 5416280 - DNA, 25 bp, Homo sapien
tttttcagttggtgtgtagtcttca

SEQ ID NO: 5416281 - DNA, 25 bp, Homo sapien
tttcagttggtgtgtagtcttcaat

SEQ ID NO: 5416282 - DNA, 25 bp, Homo sapien
tcttccatagataagtagttttctt

SEQ ID NO: 5416283 - DNA, 25 bp, Homo sapien
tatatacattgggaatgagggactc

SEQ ID NO: 5416284 - DNA, 25 bp, Homo sapien
cttccatagataagtagttttcttg

SEQ ID NO: 5416285 - DNA, 25 bp, Homo sapien
acatccaaagttatatacattggga

SEQ ID NO: 5416286 - DNA, 25 bp, Homo sapien
cattgatacttagagtgggtgtgat

SEQ ID NO: 5416287 - DNA, 25 bp, Homo sapien
cagaaatgattctcccaacaatgcg

SEQ ID NO: 5416288 - DNA, 25 bp, Homo sapien
ttaagtgcacaattaataagaagca

SEQ ID NO: 5416289 - DNA, 25 bp, Homo sapien
gcatctgccaagcataatgcatctt

SEQ ID NO: 5416290 - DNA, 25 bp, Homo sapien
tgtatttgtgcagtgtaatcactac

SEQ ID NO: 5416291 - DNA, 25 bp, Homo sapien
tgtaatcactactatttctgctcgg

SEQ ID NO: 5416292 - DNA, 25 bp, Homo sapien
aacttcctttcagctcaagaggttc

SEQ ID NO: 5416293 - DNA, 25 bp, Homo sapien
tagaaatgctcagacttccccagaa

SEQ ID NO: 5416294 - DNA, 25 bp, Homo sapien
tggacgtgtttgcaccagaacctac

SEQ ID NO: 5416295 - DNA, 25 bp, Homo sapien
ttctgtggagaggttaagagccaaa

SEQ ID NO: 5416296 - DNA, 25 bp, Homo sapien
gaatgtgtcctgtttcaagccacag

SEQ ID NO: 5416297 - DNA, 25 bp, Homo sapien
tggaggagtagaacacacatttcct

SEQ ID NO: 5416298 - DNA, 25 bp, Homo sapien
gccactggagattctaccggagcag

SEQ ID NO: 5416299 - DNA, 25 bp, Homo sapien
gagattctaccggagcagctccctc

SEQ ID NO: 5416300 - DNA, 25 bp, Homo sapien
tgaaggaaagactattaagtagaac

SEQ ID NO: 5416301 - DNA, 25 bp, Homo sapien
agacatcccctttacggccactgga

SEQ ID NO: 5416302 - DNA, 25 bp, Homo sapien
cctctcctcctatcagcattcccat

SEQ ID NO: 5416303 - DNA, 25 bp, Homo sapien
ctgatgggttacagctcagctctgg

SEQ ID NO: 5416304 - DNA, 25 bp, Homo sapien
ttttttggattcctccagatttctg

SEQ ID NO: 5416305 - DNA, 25 bp, Homo sapien
caagccctgggttgcccattcctct

SEQ ID NO: 5416306 - DNA, 25 bp, Homo sapien
cttcgtcctgagttcccaaagccac

SEQ ID NO: 5416307 - DNA, 25 bp, Homo sapien
gtggggtgaagtcccttcgtcctga

SEQ ID NO: 5416308 - DNA, 25 bp, Homo sapien
gaagtcccttcgtcctgagttccca

SEQ ID NO: 5416309 - DNA, 25 bp, Homo sapien
ggtgaagtcccttcgtcctgagttc

SEQ ID NO: 5416310 - DNA, 25 bp, Homo sapien
tttttcacatatctgctgccaaagc

SEQ ID NO: 5416311 - DNA, 25 bp, Homo sapien
ttttcacatatctgctgccaaagca

SEQ ID NO: 5416312 - DNA, 25 bp, Homo sapien
gccaagcactgtgcattccagatgt

SEQ ID NO: 5416313 - DNA, 25 bp, Homo sapien
ttggacgcactgtatcaagagcagg

SEQ ID NO: 5416314 - DNA, 25 bp, Homo sapien
ggcttgaagcactctcttggacgca

SEQ ID NO: 5416315 - DNA, 25 bp, Homo sapien
agatctgaggttgctaatgctgtga

SEQ ID NO: 5416316 - DNA, 25 bp, Homo sapien
tcttggtacaaattatacttcccat

SEQ ID NO: 5416317 - DNA, 25 bp, Homo sapien
gttcaaacaagcctgggtagcaggt

SEQ ID NO: 5416318 - DNA, 25 bp, Homo sapien
ctcttggtacaaattatacttccca

SEQ ID NO: 5416319 - DNA, 25 bp, Homo sapien
ttcaaacaagcctgggtagcaggtt

SEQ ID NO: 5416320 - DNA, 25 bp, Homo sapien
tttgctgaacaaggatataggcgct

SEQ ID NO: 5416321 - DNA, 25 bp, Homo sapien
gctggcagttaatccgatcttgggc

SEQ ID NO: 5416322 - DNA, 25 bp, Homo sapien
tcagcatcacgcagaaaaacagcag

SEQ ID NO: 5416323 - DNA, 25 bp, Homo sapien
taagttggtggagaggcactttgct

SEQ ID NO: 5416324 - DNA, 25 bp, Homo sapien
tgtagactttaatactatcgaccac

SEQ ID NO: 5416325 - DNA, 25 bp, Homo sapien
caaatggccttttcacggtcctcgg

SEQ ID NO: 5416326 - DNA, 25 bp, Homo sapien
tggctaggatctccactaaccactc

SEQ ID NO: 5416327 - DNA, 25 bp, Homo sapien
cacggtcctcggttgtcttgtagac

SEQ ID NO: 5416328 - DNA, 25 bp, Homo sapien
tcatcgatgtgagttgcagttattt

SEQ ID NO: 5416329 - DNA, 25 bp, Homo sapien
cagaaaataggtcatcgatgtgagt

SEQ ID NO: 5416330 - DNA, 25 bp, Homo sapien
gattcagaaaataggtcatcgatgt

SEQ ID NO: 5416331 - DNA, 25 bp, Homo sapien
taggtcatcgatgtgagttgcagtt

SEQ ID NO: 5416332 - DNA, 25 bp, Homo sapien
gagtaggtccctcctgcatgtcaca

SEQ ID NO: 5416333 - DNA, 25 bp, Homo sapien
ttacaaagcggatcactgtgtaggg

SEQ ID NO: 5416334 - DNA, 25 bp, Homo sapien
gatttgaacagagtgccagaggcca

SEQ ID NO: 5416335 - DNA, 25 bp, Homo sapien
cagttcttacaggtaggccttatgc

SEQ ID NO: 5416336 - DNA, 25 bp, Homo sapien
acaaaccaaattgttcctatatggg

SEQ ID NO: 5416337 - DNA, 25 bp, Homo sapien
tcacaaaccaaattgttcctatatg

SEQ ID NO: 5416338 - DNA, 25 bp, Homo sapien
gttcctatatgggaagcagtagtct

SEQ ID NO: 5416339 - DNA, 25 bp, Homo sapien
tcctatatgggaagcagtagtctct

SEQ ID NO: 5416340 - DNA, 25 bp, Homo sapien
agggagccctgagtcaccagtaatt

SEQ ID NO: 5416341 - DNA, 25 bp, Homo sapien
gcagggagccctgagtcaccagtaa

SEQ ID NO: 5416342 - DNA, 25 bp, Homo sapien
agccctgagtcaccagtaattgtct

SEQ ID NO: 5416343 - DNA, 25 bp, Homo sapien
ccctgagtcaccagtaattgtctca

SEQ ID NO: 5416344 - DNA, 25 bp, Homo sapien
ccccagaatatcttctgggcccagg

SEQ ID NO: 5416345 - DNA, 25 bp, Homo sapien
tttccgtgggaacccagtagctgga

SEQ ID NO: 5416346 - DNA, 25 bp, Homo sapien
cctttccgtgggaacccagtagctg

SEQ ID NO: 5416347 - DNA, 25 bp, Homo sapien
agatccccagaatatcttctgggcc

SEQ ID NO: 5416348 - DNA, 25 bp, Homo sapien
cacatacatgaatgctgtgacagga

SEQ ID NO: 5416349 - DNA, 25 bp, Homo sapien
agggctggccttagtctccactgcc

SEQ ID NO: 5416350 - DNA, 25 bp, Homo sapien
tgtgaaggactctgccattagtatc

SEQ ID NO: 5416351 - DNA, 25 bp, Homo sapien
taagagatacggtcacatacacctc

SEQ ID NO: 5416352 - DNA, 25 bp, Homo sapien
ctacaacgagtggtgatgctgtcat

SEQ ID NO: 5416353 - DNA, 25 bp, Homo sapien
tgtctacaacgagtggtgatgctgt

SEQ ID NO: 5416354 - DNA, 25 bp, Homo sapien
gatgtctacaacgagtggtgatgct

SEQ ID NO: 5416355 - DNA, 25 bp, Homo sapien
tctacaacgagtggtgatgctgtca

SEQ ID NO: 5416356 - DNA, 25 bp, Homo sapien
ctgaagttaggatttccaagaagat

SEQ ID NO: 5416357 - DNA, 25 bp, Homo sapien
cacagtagtacttggggacattgag

SEQ ID NO: 5416358 - DNA, 25 bp, Homo sapien
acattgagaggtagctgttgtggcc

SEQ ID NO: 5416359 - DNA, 25 bp, Homo sapien
gcctatctggcacaggtcctctgaa

SEQ ID NO: 5416360 - DNA, 25 bp, Homo sapien
ctcatcattaggcttggtgatctgc

SEQ ID NO: 5416361 - DNA, 25 bp, Homo sapien
ctctctcatcattaggcttggtgat

SEQ ID NO: 5416362 - DNA, 25 bp, Homo sapien
ctctcatcattaggcttggtgatct

SEQ ID NO: 5416363 - DNA, 25 bp, Homo sapien
catcattaggcttggtgatctgcct

SEQ ID NO: 5416364 - DNA, 25 bp, Homo sapien
ttgtaaatttaattctttgatctcc

SEQ ID NO: 5416365 - DNA, 25 bp, Homo sapien
cttgtaaatttaattctttgatctc

SEQ ID NO: 5416366 - DNA, 25 bp, Homo sapien
gcaatttccaacataaatttcagca

SEQ ID NO: 5416367 - DNA, 25 bp, Homo sapien
ccatttccttttgtagcagcaattt

SEQ ID NO: 5416368 - DNA, 25 bp, Homo sapien
aggctttcctggattatatctagtc

SEQ ID NO: 5416369 - DNA, 25 bp, Homo sapien
tagaggctttcctggattatatcta

SEQ ID NO: 5416370 - DNA, 25 bp, Homo sapien
tttagaggctttcctggattatatc

SEQ ID NO: 5416371 - DNA, 25 bp, Homo sapien
ttcccatttatatctatttagaggc

SEQ ID NO: 5416372 - DNA, 25 bp, Homo sapien
tatagtttactactgttgtaaatgt

SEQ ID NO: 5416373 - DNA, 25 bp, Homo sapien
tgagtctactgaaacaaacatgccg

SEQ ID NO: 5416374 - DNA, 25 bp, Homo sapien
caactatgttgtctatgaatggaaa

SEQ ID NO: 5416375 - DNA, 25 bp, Homo sapien
tactgaaacaaacatgccgcatttt

SEQ ID NO: 5416376 - DNA, 25 bp, Homo sapien
tcgaatcacgtggactttcactggt

SEQ ID NO: 5416377 - DNA, 25 bp, Homo sapien
tcctggcaaaagagcttcgaatcac

SEQ ID NO: 5416378 - DNA, 25 bp, Homo sapien
tcctttacctttctatgttgggcga

SEQ ID NO: 5416379 - DNA, 25 bp, Homo sapien
ttacctttctatgttgggcgaaatc

SEQ ID NO: 5416380 - DNA, 25 bp, Homo sapien
gtggtggatttagcacttagcatgg

SEQ ID NO: 5416381 - DNA, 25 bp, Homo sapien
cctggacgaatctttcacatttaat

SEQ ID NO: 5416382 - DNA, 25 bp, Homo sapien
tttaatgacggtatagtatgtagca

SEQ ID NO: 5416383 - DNA, 25 bp, Homo sapien
gaccctgattgggaggtgcctttgt

SEQ ID NO: 5416384 - DNA, 25 bp, Homo sapien
tgatggacagttgtatagaagtatg

SEQ ID NO: 5416385 - DNA, 25 bp, Homo sapien
ggagccttcactcaaaaaccgagtg

SEQ ID NO: 5416386 - DNA, 25 bp, Homo sapien
ggttaggtttaatgaatgatggaca

SEQ ID NO: 5416387 - DNA, 25 bp, Homo sapien
gaagtatgattgaacaaaaaaggca

SEQ ID NO: 5416388 - DNA, 25 bp, Homo sapien
gataagatcattctgagccctaaaa

SEQ ID NO: 5416389 - DNA, 25 bp, Homo sapien
tcaaatgggtataagcagttgccct

SEQ ID NO: 5416390 - DNA, 25 bp, Homo sapien
tgttgaagcagtctttcctagccct

SEQ ID NO: 5416391 - DNA, 25 bp, Homo sapien
catttctcggagtgagcattgtggc

SEQ ID NO: 5416392 - DNA, 25 bp, Homo sapien
tagtgtcaatgaacaacacacttgc

SEQ ID NO: 5416393 - DNA, 25 bp, Homo sapien
ccctgaaggcaacaattctcagctc

SEQ ID NO: 5416394 - DNA, 25 bp, Homo sapien
acattgattgtatttccctgaaggc

SEQ ID NO: 5416395 - DNA, 25 bp, Homo sapien
tgtgtttcaaggctgcttaattcca

SEQ ID NO: 5416396 - DNA, 25 bp, Homo sapien
caggaggccatgcaaagggttaata

SEQ ID NO: 5416397 - DNA, 25 bp, Homo sapien
tatttacgtcttgtcggattctcag

SEQ ID NO: 5416398 - DNA, 25 bp, Homo sapien
gatattcttggctatttacgtcttg

SEQ ID NO: 5416399 - DNA, 25 bp, Homo sapien
cgtcttgtcggattctcaggaggcc

SEQ ID NO: 5416400 - DNA, 25 bp, Homo sapien
tctttgctctgcaaacaaaccttcc

SEQ ID NO: 5416401 - DNA, 25 bp, Homo sapien
cacctggcccaggtaacaccttctc

SEQ ID NO: 5416402 - DNA, 25 bp, Homo sapien
ggtaacaccttctccaagttgagca

SEQ ID NO: 5416403 - DNA, 25 bp, Homo sapien
cacttctttgctctgcaaacaaacc

SEQ ID NO: 5416404 - DNA, 25 bp, Homo sapien
agaggcagaatccacagtgcttggc

SEQ ID NO: 5416405 - DNA, 25 bp, Homo sapien
gagaggcagaatccacagtgcttgg

SEQ ID NO: 5416406 - DNA, 25 bp, Homo sapien
tcttgaggagtagctgtcaggatcc

SEQ ID NO: 5416407 - DNA, 25 bp, Homo sapien
gggatgaatcacaacagagaggatc

SEQ ID NO: 5416408 - DNA, 25 bp, Homo sapien
acagagaggatcttgaggagtagct

SEQ ID NO: 5416409 - DNA, 25 bp, Homo sapien
tagctgtcaggatccctctgaaccc

SEQ ID NO: 5416410 - DNA, 25 bp, Homo sapien
catacaataggtgactcctttttct

SEQ ID NO: 5416411 - DNA, 25 bp, Homo sapien
tcatacaataggtgactcctttttc

SEQ ID NO: 5416412 - DNA, 25 bp, Homo sapien
aatcatacaataggtgactcctttt

SEQ ID NO: 5416413 - DNA, 25 bp, Homo sapien
atacaataggtgactcctttttctt

SEQ ID NO: 5416414 - DNA, 25 bp, Homo sapien
caaggcctgtgaatgcaactttact

SEQ ID NO: 5416415 - DNA, 25 bp, Homo sapien
gaaacatcaccatttgaaggctgcc

SEQ ID NO: 5416416 - DNA, 25 bp, Homo sapien
tccacagaaagattgaagagaagcc

SEQ ID NO: 5416417 - DNA, 25 bp, Homo sapien
tcgagatgtggaaaagttcaaggcc

SEQ ID NO: 5416418 - DNA, 25 bp, Homo sapien
cacactaatagatcttactaaagaa

SEQ ID NO: 5416419 - DNA, 25 bp, Homo sapien
ggatggtagtaagcagaagaaatga

SEQ ID NO: 5416420 - DNA, 25 bp, Homo sapien
aaaatgatttaggatggtagtaagc

SEQ ID NO: 5416421 - DNA, 25 bp, Homo sapien
gatacatacattaatagcttaatag

SEQ ID NO: 5416422 - DNA, 25 bp, Homo sapien
aaggtgatgccttaggtttatactt

SEQ ID NO: 5416423 - DNA, 25 bp, Homo sapien
ttaattctcggacacaaaattgaca

SEQ ID NO: 5416424 - DNA, 25 bp, Homo sapien
tgccgtaggacagtttgaaagcgta

SEQ ID NO: 5416425 - DNA, 25 bp, Homo sapien
taagactgccttaattctcggacac

SEQ ID NO: 5416426 - DNA, 25 bp, Homo sapien
ttgtcaaatgccgtaggacagtttg

SEQ ID NO: 5416427 - DNA, 25 bp, Homo sapien
gggcagcacagtgaatcacacggca

SEQ ID NO: 5416428 - DNA, 25 bp, Homo sapien
ttgacgatgatagcaaccacagggc

SEQ ID NO: 5416429 - DNA, 25 bp, Homo sapien
tccaaggcagaatactgtgtgctct

SEQ ID NO: 5416430 - DNA, 25 bp, Homo sapien
catagtcttgtcttgcagaatggaa

SEQ ID NO: 5416431 - DNA, 25 bp, Homo sapien
cagcattattgtcttggagcagaga

SEQ ID NO: 5416432 - DNA, 25 bp, Homo sapien
gagagcccgaccttgtttcttgcta

SEQ ID NO: 5416433 - DNA, 25 bp, Homo sapien
gaaatggcagtttacaggcacagag

SEQ ID NO: 5416434 - DNA, 25 bp, Homo sapien
ttggtaaacaacagtcagaggctct

SEQ ID NO: 5416435 - DNA, 25 bp, Homo sapien
tggccgcgaagtattgtttcgtacg

SEQ ID NO: 5416436 - DNA, 25 bp, Homo sapien
tgtttcgtacgttgtacctttgtca

SEQ ID NO: 5416437 - DNA, 25 bp, Homo sapien
gtcttccctgactacagttcttccc

SEQ ID NO: 5416438 - DNA, 25 bp, Homo sapien
agttcttccctctggccgcgaagta

SEQ ID NO: 5416439 - DNA, 25 bp, Homo sapien
ggaaggagacaaactagctgaattt

SEQ ID NO: 5416440 - DNA, 25 bp, Homo sapien
caaactagctgaatttaatatggta

SEQ ID NO: 5416441 - DNA, 25 bp, Homo sapien
ggagacaaactagctgaatttaata

SEQ ID NO: 5416442 - DNA, 25 bp, Homo sapien
atgtaggaaggagacaaactagctg

SEQ ID NO: 5416443 - DNA, 25 bp, Homo sapien
aaatagatacttagggccaggcgtg

SEQ ID NO: 5416444 - DNA, 25 bp, Homo sapien
tctaggtggcaagggtagaaacatt

SEQ ID NO: 5416445 - DNA, 25 bp, Homo sapien
gcacttggcaagtcttacgcagtag

SEQ ID NO: 5416446 - DNA, 25 bp, Homo sapien
tatgtgaaggataagcaaagggcac

SEQ ID NO: 5416447 - DNA, 25 bp, Homo sapien
ccaaaaatcaatgcctgtgcttaag

SEQ ID NO: 5416448 - DNA, 25 bp, Homo sapien
tgtactgactacctgcaacctctag

SEQ ID NO: 5416449 - DNA, 25 bp, Homo sapien
gtaattgcatcgcaagtctgtcaga

SEQ ID NO: 5416450 - DNA, 25 bp, Homo sapien
gtttaaaggactcagacacaattgt

SEQ ID NO: 5416451 - DNA, 25 bp, Homo sapien
gctgtgtggctatcttggaaaagtc

SEQ ID NO: 5416452 - DNA, 25 bp, Homo sapien
gactccaacgtaacaatggtctttg

SEQ ID NO: 5416453 - DNA, 25 bp, Homo sapien
gatgtcactggcatgaatggctctg

SEQ ID NO: 5416454 - DNA, 25 bp, Homo sapien
gattagatcactgggtactgggaaa

SEQ ID NO: 5416455 - DNA, 25 bp, Homo sapien
ctgcctgaacttttaaactctttca

SEQ ID NO: 5416456 - DNA, 25 bp, Homo sapien
ttcagtgcaaggttttctcctagcc

SEQ ID NO: 5416457 - DNA, 25 bp, Homo sapien
caatgattaggtggttgtaatttcc

SEQ ID NO: 5416458 - DNA, 25 bp, Homo sapien
tcctttagcatcatcagtgggttgg

SEQ ID NO: 5416459 - DNA, 25 bp, Homo sapien
tttcctggtgttttccgtatccaca

SEQ ID NO: 5416460 - DNA, 25 bp, Homo sapien
cttcttggccgtagggcaggaggca

SEQ ID NO: 5416461 - DNA, 25 bp, Homo sapien
caggtgtgagagaagacaagatcca

SEQ ID NO: 5416462 - DNA, 25 bp, Homo sapien
tcttggccgtagggcaggaggcagc

SEQ ID NO: 5416463 - DNA, 25 bp, Homo sapien
tatgcaaagagtccttttagaagat

SEQ ID NO: 5416464 - DNA, 25 bp, Homo sapien
catcagtgatccttatgcaaagagt

SEQ ID NO: 5416465 - DNA, 25 bp, Homo sapien
tgtcaagaatgccaacagtctcttt

SEQ ID NO: 5416466 - DNA, 25 bp, Homo sapien
ttagaagatttctgtatgtcaagaa

SEQ ID NO: 5416467 - DNA, 25 bp, Homo sapien
cttattggatttactgactggcagg

SEQ ID NO: 5416468 - DNA, 25 bp, Homo sapien
gcgccaggttgaggcatcgtctttg

SEQ ID NO: 5416469 - DNA, 25 bp, Homo sapien
gagcaaggatgttattctcagatcc

SEQ ID NO: 5416470 - DNA, 25 bp, Homo sapien
ttgcttattggatttactgactggc

SEQ ID NO: 5416471 - DNA, 25 bp, Homo sapien
catcatccctcaatgaactgacaaa

SEQ ID NO: 5416472 - DNA, 25 bp, Homo sapien
gaattttggagcctgtgaagctgag

SEQ ID NO: 5416473 - DNA, 25 bp, Homo sapien
tggtgacttcacctagtgccaccgg

SEQ ID NO: 5416474 - DNA, 25 bp, Homo sapien
ggcccagtccctggaccatggtgac

SEQ ID NO: 5416475 - DNA, 25 bp, Homo sapien
tcaaacagataagctgactccctgt

SEQ ID NO: 5416476 - DNA, 25 bp, Homo sapien
aacagataagctgactccctgtgga

SEQ ID NO: 5416477 - DNA, 25 bp, Homo sapien
ttgagctgccttcgattcttccaaa

SEQ ID NO: 5416478 - DNA, 25 bp, Homo sapien
acattgagctgccttcgattcttcc

SEQ ID NO: 5416479 - DNA, 25 bp, Homo sapien
caaagtaaatgtgtatcactccttc

SEQ ID NO: 5416480 - DNA, 25 bp, Homo sapien
ccagagttctccaaaagggtgcgat

SEQ ID NO: 5416481 - DNA, 25 bp, Homo sapien
tgcaaacaaggtagctggatatctt

SEQ ID NO: 5416482 - DNA, 25 bp, Homo sapien
gatatcttcgcaggacatgcaaaca

SEQ ID NO: 5416483 - DNA, 25 bp, Homo sapien
caagttcataggcatgaagcttgtc

SEQ ID NO: 5416484 - DNA, 25 bp, Homo sapien
gttcataggcatgaagcttgtctgc

SEQ ID NO: 5416485 - DNA, 25 bp, Homo sapien
gcgtggttggaccatccaaacttga

SEQ ID NO: 5416486 - DNA, 25 bp, Homo sapien
gcttgtctgcggctgcgtggttgga

SEQ ID NO: 5416487 - DNA, 25 bp, Homo sapien
ttttgaagtctttgagacaaaagcc

SEQ ID NO: 5416488 - DNA, 25 bp, Homo sapien
tttctgaagcactcggtttctggga

SEQ ID NO: 5416489 - DNA, 25 bp, Homo sapien
ggagcccctcaaaagcctggtaaga

SEQ ID NO: 5416490 - DNA, 25 bp, Homo sapien
aagaacgttttgaattgcatgcggc

SEQ ID NO: 5416491 - DNA, 25 bp, Homo sapien
tgcatgcggcttctaccatttgcat

SEQ ID NO: 5416492 - DNA, 25 bp, Homo sapien
tagttaatgtgccagattctctgtt

SEQ ID NO: 5416493 - DNA, 25 bp, Homo sapien
tcctctctcaacacaaagctgatgt

SEQ ID NO: 5416494 - DNA, 25 bp, Homo sapien
gctgactttttgtgacatacttttc

SEQ ID NO: 5416495 - DNA, 25 bp, Homo sapien
ctctcaacacaaagctgatgtttct

SEQ ID NO: 5416496 - DNA, 25 bp, Homo sapien
ttaatcatctgaggcacatgtgccc

SEQ ID NO: 5416497 - DNA, 25 bp, Homo sapien
aatgatcagatttcaccttgggtcc

SEQ ID NO: 5416498 - DNA, 25 bp, Homo sapien
atcatgtgaatgatcagatttcacc

SEQ ID NO: 5416499 - DNA, 25 bp, Homo sapien
gggtccttcttcatgagatatcaag

SEQ ID NO: 5416500 - DNA, 25 bp, Homo sapien
ccagcggggctgattttatttagca

SEQ ID NO: 5416501 - DNA, 25 bp, Homo sapien
tgatcattattgtaaggccagcggg

SEQ ID NO: 5416502 - DNA, 25 bp, Homo sapien
atttagcaaatgaccattttgatta

SEQ ID NO: 5416503 - DNA, 25 bp, Homo sapien
gctttttggcggttttccttgatca

SEQ ID NO: 5416504 - DNA, 25 bp, Homo sapien
tggagccattggcactacctccaga

SEQ ID NO: 5416505 - DNA, 25 bp, Homo sapien
tgctcttgatggatcccccagtgcc

SEQ ID NO: 5416506 - DNA, 25 bp, Homo sapien
tgaccatacgttaccctgtgtgaac

SEQ ID NO: 5416507 - DNA, 25 bp, Homo sapien
tcagtgggtggtcttggagccattg

SEQ ID NO: 5416508 - DNA, 25 bp, Homo sapien
cagcaggtctgtagaattcccagga

SEQ ID NO: 5416509 - DNA, 25 bp, Homo sapien
ggtctgtagaattcccaggaagcaa

SEQ ID NO: 5416510 - DNA, 25 bp, Homo sapien
gcaaatgaagttagtgtaacaagtg

SEQ ID NO: 5416511 - DNA, 25 bp, Homo sapien
caagtgttgcttccctacttctact

SEQ ID NO: 5416512 - DNA, 25 bp, Homo sapien
ccagtgggcagcactgattgacagg

SEQ ID NO: 5416513 - DNA, 25 bp, Homo sapien
ggcagcactgattgacaggtgctca

SEQ ID NO: 5416514 - DNA, 25 bp, Homo sapien
aaatcccgtttccttcagtggcttg

SEQ ID NO: 5416515 - DNA, 25 bp, Homo sapien
tttgccaccctagccttcctctact

SEQ ID NO: 5416516 - DNA, 25 bp, Homo sapien
ggttcagtcctttctcgctgagcct

SEQ ID NO: 5416517 - DNA, 25 bp, Homo sapien
gcaggcctcgaagaacatggcatca

SEQ ID NO: 5416518 - DNA, 25 bp, Homo sapien
tcagtcctttctcgctgagccttgc

SEQ ID NO: 5416519 - DNA, 25 bp, Homo sapien
ttcagtcctttctcgctgagccttg

SEQ ID NO: 5416520 - DNA, 25 bp, Homo sapien
tcctggttaactttcttaatgtctc

SEQ ID NO: 5416521 - DNA, 25 bp, Homo sapien
tccctgtttgactgttaccatttcc

SEQ ID NO: 5416522 - DNA, 25 bp, Homo sapien
ggtggtccctgtttgactgttacca

SEQ ID NO: 5416523 - DNA, 25 bp, Homo sapien
cctgtttgactgttaccatttccag

SEQ ID NO: 5416524 - DNA, 25 bp, Homo sapien
gtaggtggtccctgtttgactgtta

SEQ ID NO: 5416525 - DNA, 25 bp, Homo sapien
cgatatgtagctgtatcctttttgt

SEQ ID NO: 5416526 - DNA, 25 bp, Homo sapien
gctcgatatgtagctgtatcctttt

SEQ ID NO: 5416527 - DNA, 25 bp, Homo sapien
tcgatatgtagctgtatcctttttg

SEQ ID NO: 5416528 - DNA, 25 bp, Homo sapien
ctcgatatgtagctgtatccttttt

SEQ ID NO: 5416529 - DNA, 25 bp, Homo sapien
caacatcgctaataggcaggccagg

SEQ ID NO: 5416530 - DNA, 25 bp, Homo sapien
tttctttgcaacatcgctaataggc

SEQ ID NO: 5416531 - DNA, 25 bp, Homo sapien
ttgcaacatcgctaataggcaggcc

SEQ ID NO: 5416532 - DNA, 25 bp, Homo sapien
tctttgcaacatcgctaataggcag

SEQ ID NO: 5416533 - DNA, 25 bp, Homo sapien
taggttttcatttctctttcataac

SEQ ID NO: 5416534 - DNA, 25 bp, Homo sapien
ctttaggagggatataggttttcat

SEQ ID NO: 5416535 - DNA, 25 bp, Homo sapien
gatataggttttcatttctctttca

SEQ ID NO: 5416536 - DNA, 25 bp, Homo sapien
tataggttttcatttctctttcata

SEQ ID NO: 5416537 - DNA, 25 bp, Homo sapien
gggtgcttcttcttacactcctccc

SEQ ID NO: 5416538 - DNA, 25 bp, Homo sapien
gcttcttcttacactcctcccgaca

SEQ ID NO: 5416539 - DNA, 25 bp, Homo sapien
ggcatctgggtgcttcttcttacac

SEQ ID NO: 5416540 - DNA, 25 bp, Homo sapien
ggtctttgtccacctttgccatatc

SEQ ID NO: 5416541 - DNA, 25 bp, Homo sapien
gtctctgtggagctcaatgtactgc

SEQ ID NO: 5416542 - DNA, 25 bp, Homo sapien
tggagctcaatgtactgcagtggct

SEQ ID NO: 5416543 - DNA, 25 bp, Homo sapien
tgtggagctcaatgtactgcagtgg

SEQ ID NO: 5416544 - DNA, 25 bp, Homo sapien
gctcaatgtactgcagtggctgtga

SEQ ID NO: 5416545 - DNA, 25 bp, Homo sapien
ttcaggatctggtcagcagcccaca

SEQ ID NO: 5416546 - DNA, 25 bp, Homo sapien
tctggtcagcagcccacaatgcaat

SEQ ID NO: 5416547 - DNA, 25 bp, Homo sapien
aggatctggtcagcagcccacaatg

SEQ ID NO: 5416548 - DNA, 25 bp, Homo sapien
tggtcagcagcccacaatgcaatgg

SEQ ID NO: 5416549 - DNA, 25 bp, Homo sapien
ctcaaggtctgttgtgaggttacag

SEQ ID NO: 5416550 - DNA, 25 bp, Homo sapien
tacaggactgcgttaccatgtggca

SEQ ID NO: 5416551 - DNA, 25 bp, Homo sapien
agctgcagtctcatgtgaagtctca

SEQ ID NO: 5416552 - DNA, 25 bp, Homo sapien
tctctcaccacatgggactctttac

SEQ ID NO: 5416553 - DNA, 25 bp, Homo sapien
tggcttcagattgacttggcaatgt

SEQ ID NO: 5416554 - DNA, 25 bp, Homo sapien
cttcagattgacttggcaatgtggg

SEQ ID NO: 5416555 - DNA, 25 bp, Homo sapien
ttggcttcagattgacttggcaatg

SEQ ID NO: 5416556 - DNA, 25 bp, Homo sapien
ggcttcagattgacttggcaatgtg

SEQ ID NO: 5416557 - DNA, 25 bp, Homo sapien
gaatgaatgaatcatgttagaatga

SEQ ID NO: 5416558 - DNA, 25 bp, Homo sapien
cctaaacacattttgattggtcgta

SEQ ID NO: 5416559 - DNA, 25 bp, Homo sapien
cctttgaagcctaaacacattttga

SEQ ID NO: 5416560 - DNA, 25 bp, Homo sapien
gattggtcgtatttaaattccaaca

SEQ ID NO: 5416561 - DNA, 25 bp, Homo sapien
gaaatggaatctagcacaagtgtga

SEQ ID NO: 5416562 - DNA, 25 bp, Homo sapien
ctcaaagtgtgggacatgggccact

SEQ ID NO: 5416563 - DNA, 25 bp, Homo sapien
caagtgaaggcctctaataagtgct

SEQ ID NO: 5416564 - DNA, 25 bp, Homo sapien
ctcttgatgacgtatggatgtggca

SEQ ID NO: 5416565 - DNA, 25 bp, Homo sapien
catcctactccaatagactggcaac

SEQ ID NO: 5416566 - DNA, 25 bp, Homo sapien
actttacatccactcacgacctgtg

SEQ ID NO: 5416567 - DNA, 25 bp, Homo sapien
gttagccaacgggactgctcatcta

SEQ ID NO: 5416568 - DNA, 25 bp, Homo sapien
gcaacaacctgttccgtccacttta

SEQ ID NO: 5416569 - DNA, 25 bp, Homo sapien
ctttggccagtaattcttcttttag

SEQ ID NO: 5416570 - DNA, 25 bp, Homo sapien
ttggccagtaattcttcttttagaa

SEQ ID NO: 5416571 - DNA, 25 bp, Homo sapien
tggccagtaattcttcttttagaaa

SEQ ID NO: 5416572 - DNA, 25 bp, Homo sapien
tttggccagtaattcttcttttaga

SEQ ID NO: 5416573 - DNA, 25 bp, Homo sapien
cctgagaacgcctcatccacaaaat

SEQ ID NO: 5416574 - DNA, 25 bp, Homo sapien
aatctagaacactgaacactctgtt

SEQ ID NO: 5416575 - DNA, 25 bp, Homo sapien
ttataacctcatataggatttgcca

SEQ ID NO: 5416576 - DNA, 25 bp, Homo sapien
ggatttgccatctgtaaatctagaa

SEQ ID NO: 5416577 - DNA, 25 bp, Homo sapien
tcaagcttgctaggaaatttaccag

SEQ ID NO: 5416578 - DNA, 25 bp, Homo sapien
agggtgccagggtctatggctctcc

SEQ ID NO: 5416579 - DNA, 25 bp, Homo sapien
gcgttgcctgcccattcctcaggag

SEQ ID NO: 5416580 - DNA, 25 bp, Homo sapien
aagaacgcattctgccccaccaagc

SEQ ID NO: 5416581 - DNA, 25 bp, Homo sapien
taagttttagaggacagcgtaggag

SEQ ID NO: 5416582 - DNA, 25 bp, Homo sapien
tggaaacattaagttttagaggaca

SEQ ID NO: 5416583 - DNA, 25 bp, Homo sapien
tagctgcaactcagcaagtcaaatg

SEQ ID NO: 5416584 - DNA, 25 bp, Homo sapien
ggcatgtgtagccaaaatagctgca

SEQ ID NO: 5416585 - DNA, 25 bp, Homo sapien
gcacccagccatgtcctccatttca

SEQ ID NO: 5416586 - DNA, 25 bp, Homo sapien
tgagccactgctccgagctgagcca

SEQ ID NO: 5416587 - DNA, 25 bp, Homo sapien
catctggcaactctagcttgagtat

SEQ ID NO: 5416588 - DNA, 25 bp, Homo sapien
ccatgtcctccatttcatctggcaa

SEQ ID NO: 5416589 - DNA, 25 bp, Homo sapien
ttcacaccagcagccggacctaagg

SEQ ID NO: 5416590 - DNA, 25 bp, Homo sapien
gacctaaggacacttctcttcattg

SEQ ID NO: 5416591 - DNA, 25 bp, Homo sapien
gccgtattagaaagtctgagggaga

SEQ ID NO: 5416592 - DNA, 25 bp, Homo sapien
gagagtggatgtcagacctccagag

SEQ ID NO: 5416593 - DNA, 25 bp, Homo sapien
gcagagtatggacttcacaaagcaa

SEQ ID NO: 5416594 - DNA, 25 bp, Homo sapien
cacaaagcaaacaaggaggaggtat

SEQ ID NO: 5416595 - DNA, 25 bp, Homo sapien
gactttgccagcacaacaggctaga

SEQ ID NO: 5416596 - DNA, 25 bp, Homo sapien
tgttggaaccgtcagaaagaaccgc

SEQ ID NO: 5416597 - DNA, 25 bp, Homo sapien
tctatgtattctataatctatataa

SEQ ID NO: 5416598 - DNA, 25 bp, Homo sapien
aggagcatcgcttgaggcggaggct

SEQ ID NO: 5416599 - DNA, 25 bp, Homo sapien
agcatcgcttgaggcggaggctaca

SEQ ID NO: 5416600 - DNA, 25 bp, Homo sapien
tattctatgtattctataatctata

SEQ ID NO: 5416601 - DNA, 25 bp, Homo sapien
cacttgatctgagatgagccattca

SEQ ID NO: 5416602 - DNA, 25 bp, Homo sapien
tggccacttgatctgagatgagcca

SEQ ID NO: 5416603 - DNA, 25 bp, Homo sapien
gagatgagccattcaattttatggg

SEQ ID NO: 5416604 - DNA, 25 bp, Homo sapien
tgatctgagatgagccattcaattt

SEQ ID NO: 5416605 - DNA, 25 bp, Homo sapien
aacactagacggttggatgcctctt

SEQ ID NO: 5416606 - DNA, 25 bp, Homo sapien
gcaaagaaactattccgaccaacta

SEQ ID NO: 5416607 - DNA, 25 bp, Homo sapien
gatgcctcttgccagatcagtgtag

SEQ ID NO: 5416608 - DNA, 25 bp, Homo sapien
ccaactaacatttccgtgacaacac

SEQ ID NO: 5416609 - DNA, 25 bp, Homo sapien
catgtagacaccttcagcctccata

SEQ ID NO: 5416610 - DNA, 25 bp, Homo sapien
agaaagttgtggagactccagattg

SEQ ID NO: 5416611 - DNA, 25 bp, Homo sapien
caaagacctcgcaatttgcagcagg

SEQ ID NO: 5416612 - DNA, 25 bp, Homo sapien
cctccataagaagcctacagaaggg

SEQ ID NO: 5416613 - DNA, 25 bp, Homo sapien
ataacagtatctctccatgcagaag

SEQ ID NO: 5416614 - DNA, 25 bp, Homo sapien
gtatctctccatgcagaagttgaag

SEQ ID NO: 5416615 - DNA, 25 bp, Homo sapien
tctctccatgcagaagttgaagaat

SEQ ID NO: 5416616 - DNA, 25 bp, Homo sapien
cagtatctctccatgcagaagttga

SEQ ID NO: 5416617 - DNA, 25 bp, Homo sapien
gcagtgaaatcagcaaagaaatatt

SEQ ID NO: 5416618 - DNA, 25 bp, Homo sapien
ccatgaatgcattggattcatttct

SEQ ID NO: 5416619 - DNA, 25 bp, Homo sapien
gatttcactaacaccatgaatgcat

SEQ ID NO: 5416620 - DNA, 25 bp, Homo sapien
ttgagagatttcactaacaccatga

SEQ ID NO: 5416621 - DNA, 25 bp, Homo sapien
ctctcttggagcttacacggcctca

SEQ ID NO: 5416622 - DNA, 25 bp, Homo sapien
ggtgaccaagacaaacaagatccct

SEQ ID NO: 5416623 - DNA, 25 bp, Homo sapien
agcagctgaaatatcacggtgacca

SEQ ID NO: 5416624 - DNA, 25 bp, Homo sapien
ttggagcttacacggcctcacgtct

SEQ ID NO: 5416625 - DNA, 25 bp, Homo sapien
gaaagagaagcattagccaggcatg

SEQ ID NO: 5416626 - DNA, 25 bp, Homo sapien
tatagaaagagaagcattagccagg

SEQ ID NO: 5416627 - DNA, 25 bp, Homo sapien
tagaaagagaagcattagccaggca

SEQ ID NO: 5416628 - DNA, 25 bp, Homo sapien
tttatagaaagagaagcattagcca

SEQ ID NO: 5416629 - DNA, 25 bp, Homo sapien
tggccagatggaagtattgtgtgaa

SEQ ID NO: 5416630 - DNA, 25 bp, Homo sapien
tttcataatacaagcgatgcatctg

SEQ ID NO: 5416631 - DNA, 25 bp, Homo sapien
gattctttgaaacagttgtggccag

SEQ ID NO: 5416632 - DNA, 25 bp, Homo sapien
tgtgtgaatatgacagcagctatgc

SEQ ID NO: 5416633 - DNA, 25 bp, Homo sapien
tgacagctggaagcccctagcaggg

SEQ ID NO: 5416634 - DNA, 25 bp, Homo sapien
caacctgacagctggaagcccctag

SEQ ID NO: 5416635 - DNA, 25 bp, Homo sapien
tgtcaacctgacagctggaagcccc

SEQ ID NO: 5416636 - DNA, 25 bp, Homo sapien
acctgacagctggaagcccctagca

SEQ ID NO: 5416637 - DNA, 25 bp, Homo sapien
atcagcagcgtcaatccccaatgtg

SEQ ID NO: 5416638 - DNA, 25 bp, Homo sapien
ccccaatgtgctggtttggccgtgc

SEQ ID NO: 5416639 - DNA, 25 bp, Homo sapien
aatgtgctggtttggccgtgctccc

SEQ ID NO: 5416640 - DNA, 25 bp, Homo sapien
cagcaggaggtgtgatcagcaatca

SEQ ID NO: 5416641 - DNA, 25 bp, Homo sapien
caacactgatttgctgggtgataag

SEQ ID NO: 5416642 - DNA, 25 bp, Homo sapien
gctgggtgataagccgtctccagaa

SEQ ID NO: 5416643 - DNA, 25 bp, Homo sapien
tagaaagggtcgctgagtcccagat

SEQ ID NO: 5416644 - DNA, 25 bp, Homo sapien
ctcgtagaaagggtcgctgagtccc

SEQ ID NO: 5416645 - DNA, 25 bp, Homo sapien
tcaattggtattaagagcaggtcaa

SEQ ID NO: 5416646 - DNA, 25 bp, Homo sapien
caccgctgattcttggcagccggca

SEQ ID NO: 5416647 - DNA, 25 bp, Homo sapien
tgctcatcagatggaagccacgtgt

SEQ ID NO: 5416648 - DNA, 25 bp, Homo sapien
tgtgctcccacgttagcagagtggc

SEQ ID NO: 5416649 - DNA, 25 bp, Homo sapien
ctgaagagtgatattgctcttgtgg

SEQ ID NO: 5416650 - DNA, 25 bp, Homo sapien
gatattgctcttgtggctaattatg

SEQ ID NO: 5416651 - DNA, 25 bp, Homo sapien
gggtgtgcgtccagggcaccactca

SEQ ID NO: 5416652 - DNA, 25 bp, Homo sapien
aagagacggtggcctcaccctcagc

SEQ ID NO: 5416653 - DNA, 25 bp, Homo sapien
aaaccaaagagcagtgccctgattt

SEQ ID NO: 5416654 - DNA, 25 bp, Homo sapien
agtgccctgattttcggcatctatt

SEQ ID NO: 5416655 - DNA, 25 bp, Homo sapien
gattttcggcatctattccagataa

SEQ ID NO: 5416656 - DNA, 25 bp, Homo sapien
aaaaccaaagagcagtgccctgatt

SEQ ID NO: 5416657 - DNA, 25 bp, Homo sapien
gaaactggaaggaatttcatcagtc

SEQ ID NO: 5416658 - DNA, 25 bp, Homo sapien
gttgtgcttatgtcttccttggtca

SEQ ID NO: 5416659 - DNA, 25 bp, Homo sapien
tcttccttggcttgacggcatgtag

SEQ ID NO: 5416660 - DNA, 25 bp, Homo sapien
cgttggcagatagattaagatgtca

SEQ ID NO: 5416661 - DNA, 25 bp, Homo sapien
cagaaacagctacaccagaatggca

SEQ ID NO: 5416662 - DNA, 25 bp, Homo sapien
tggcagaatgctcctctcaagagac

SEQ ID NO: 5416663 - DNA, 25 bp, Homo sapien
tgcactagaatggtagaaagccaag

SEQ ID NO: 5416664 - DNA, 25 bp, Homo sapien
gatcataagaggtcatttcacccag

SEQ ID NO: 5416665 - DNA, 25 bp, Homo sapien
catgccaggggatccattttgtggg

SEQ ID NO: 5416666 - DNA, 25 bp, Homo sapien
atgttgacaggtgcccgttaatccc

SEQ ID NO: 5416667 - DNA, 25 bp, Homo sapien
taagaggtgatttttgccaggtgcg

SEQ ID NO: 5416668 - DNA, 25 bp, Homo sapien
ccgggcatgttgacaggtgcccgtt

SEQ ID NO: 5416669 - DNA, 25 bp, Homo sapien
tggattctaaactctctgagggcgc

SEQ ID NO: 5416670 - DNA, 25 bp, Homo sapien
taaactctctgagggcgcagtgact

SEQ ID NO: 5416671 - DNA, 25 bp, Homo sapien
ctctgagggcgcagtgactctttgt

SEQ ID NO: 5416672 - DNA, 25 bp, Homo sapien
gattctaaactctctgagggcgcag

SEQ ID NO: 5416673 - DNA, 25 bp, Homo sapien
tgggcattcttccaccacactcagt

SEQ ID NO: 5416674 - DNA, 25 bp, Homo sapien
ctgggcattcttccaccacactcag

SEQ ID NO: 5416675 - DNA, 25 bp, Homo sapien
cttgtccatcacactcactgccact

SEQ ID NO: 5416676 - DNA, 25 bp, Homo sapien
tgtccatcacactcactgccactgc

SEQ ID NO: 5416677 - DNA, 25 bp, Homo sapien
ttctctttagccttgtccatcacac

SEQ ID NO: 5416678 - DNA, 25 bp, Homo sapien
tcttctctttagccttgtccatcac

SEQ ID NO: 5416679 - DNA, 25 bp, Homo sapien
tgagatagaattacataccatattg

SEQ ID NO: 5416680 - DNA, 25 bp, Homo sapien
gctttccgtctctggatttttctat

SEQ ID NO: 5416681 - DNA, 25 bp, Homo sapien
caccacaatcgatttgaagatactt

SEQ ID NO: 5416682 - DNA, 25 bp, Homo sapien
ctaatgtgctttccgtctctggatt

SEQ ID NO: 5416683 - DNA, 25 bp, Homo sapien
tacagtccagattccgagtccgttg

SEQ ID NO: 5416684 - DNA, 25 bp, Homo sapien
tgtgggaccacaacaaccaggcttc

SEQ ID NO: 5416685 - DNA, 25 bp, Homo sapien
taacctctgacgctgcatcgggaga

SEQ ID NO: 5416686 - DNA, 25 bp, Homo sapien
cattgtatttgggtcgcaagcagcc

SEQ ID NO: 5416687 - DNA, 25 bp, Homo sapien
ggaagagtgtctcgagcaacccaag

SEQ ID NO: 5416688 - DNA, 25 bp, Homo sapien
gaccaacaaacacaccataggagct

SEQ ID NO: 5416689 - DNA, 25 bp, Homo sapien
gctttcgcttctgaaagagccgcta

SEQ ID NO: 5416690 - DNA, 25 bp, Homo sapien
tattctttgatgattgggtagcggc

SEQ ID NO: 5416691 - DNA, 25 bp, Homo sapien
tggaaagggccgtgtccggatctct

SEQ ID NO: 5416692 - DNA, 25 bp, Homo sapien
ggaacgactcgctgcaggcctttct

SEQ ID NO: 5416693 - DNA, 25 bp, Homo sapien
acctaatccggtgtggcctttgctg

SEQ ID NO: 5416694 - DNA, 25 bp, Homo sapien
gtactccgtgcaccttgaacctcaa

SEQ ID NO: 5416695 - DNA, 25 bp, Homo sapien
gtccttcggggctgcgcacgagctt

SEQ ID NO: 5416696 - DNA, 25 bp, Homo sapien
cctacgagttctcgccggtcaagat

SEQ ID NO: 5416697 - DNA, 25 bp, Homo sapien
gcatcccagcttggggctgacgccg

SEQ ID NO: 5416698 - DNA, 25 bp, Homo sapien
agaagacgcacctgcagccgtcctt

SEQ ID NO: 5416699 - DNA, 25 bp, Homo sapien
ttgggcccgtcggactttgcgcagt

SEQ ID NO: 5416700 - DNA, 25 bp, Homo sapien
gtgttgggcccgtcggactttgcgc

SEQ ID NO: 5416701 - DNA, 25 bp, Homo sapien
ctggtgttgggcccgtcggactttg

SEQ ID NO: 5416702 - DNA, 25 bp, Homo sapien
gggcccgtcggactttgcgcagtac

SEQ ID NO: 5416703 - DNA, 25 bp, Homo sapien
gaccacctcgcgaagcacgtcaaga

SEQ ID NO: 5416704 - DNA, 25 bp, Homo sapien
gagaagcgctttgcctgtcccgagt

SEQ ID NO: 5416705 - DNA, 25 bp, Homo sapien
gctgtcccaactgccaggcggcggg

SEQ ID NO: 5416706 - DNA, 25 bp, Homo sapien
aagaagaagcagcacgtgtgccacg

SEQ ID NO: 5416707 - DNA, 25 bp, Homo sapien
agaagctcaaagtcgctgaggccgg

SEQ ID NO: 5416708 - DNA, 25 bp, Homo sapien
acctgtgagccctcccggaggtgga

SEQ ID NO: 5416709 - DNA, 25 bp, Homo sapien
gaggacgcgcgggacctgtgagccc

SEQ ID NO: 5416710 - DNA, 25 bp, Homo sapien
ccagcacctctgcgagagatccggg

SEQ ID NO: 5416711 - DNA, 25 bp, Homo sapien
cggaggggagactcagcagacggac

SEQ ID NO: 5416712 - DNA, 25 bp, Homo sapien
gcggaggggagactcagcagacgga

SEQ ID NO: 5416713 - DNA, 25 bp, Homo sapien
ctggcggaggggagactcagcagac

SEQ ID NO: 5416714 - DNA, 25 bp, Homo sapien
tggcggaggggagactcagcagacg

SEQ ID NO: 5416715 - DNA, 25 bp, Homo sapien
tacgccagggcggttccaaactcta

SEQ ID NO: 5416716 - DNA, 25 bp, Homo sapien
aacttccgctgccttcggacatagg

SEQ ID NO: 5416717 - DNA, 25 bp, Homo sapien
tcggacatagggacccagttcccag

SEQ ID NO: 5416718 - DNA, 25 bp, Homo sapien
tctgccgtacgccagggcggttcca

SEQ ID NO: 5416719 - DNA, 25 bp, Homo sapien
agtgctcgggttttcgctaggaccg

SEQ ID NO: 5416720 - DNA, 25 bp, Homo sapien
tgggctttgtacaggttatttaata

SEQ ID NO: 5416721 - DNA, 25 bp, Homo sapien
tttgaaacagtgctcgggttttcgc

SEQ ID NO: 5416722 - DNA, 25 bp, Homo sapien
cctggtctggccttgtatataggaa

SEQ ID NO: 5416723 - DNA, 25 bp, Homo sapien
gagctacagcatgatatgtctctgt

SEQ ID NO: 5416724 - DNA, 25 bp, Homo sapien
gctacagcatgatatgtctctgtaa

SEQ ID NO: 5416725 - DNA, 25 bp, Homo sapien
gcagagctacagcatgatatgtctc

SEQ ID NO: 5416726 - DNA, 25 bp, Homo sapien
acagcatgatatgtctctgtaaagt

SEQ ID NO: 5416727 - DNA, 25 bp, Homo sapien
tctaaggcagtgtctaaatgtcatc

SEQ ID NO: 5416728 - DNA, 25 bp, Homo sapien
gaactatagtagtatctgcacaaca

SEQ ID NO: 5416729 - DNA, 25 bp, Homo sapien
gcctacatcagataccatgaaagct

SEQ ID NO: 5416730 - DNA, 25 bp, Homo sapien
gataccacttggaaaatctacagct

SEQ ID NO: 5416731 - DNA, 25 bp, Homo sapien
gaagattatggtttgaggtaatacc

SEQ ID NO: 5416732 - DNA, 25 bp, Homo sapien
tatacccaagtcattaaacagccct

SEQ ID NO: 5416733 - DNA, 25 bp, Homo sapien
tgaatttgtgaacatcagtgggaaa

SEQ ID NO: 5416734 - DNA, 25 bp, Homo sapien
gaactaagacctataagcacatagc

SEQ ID NO: 5416735 - DNA, 25 bp, Homo sapien
tccatgtcatctcttgatagtactg

SEQ ID NO: 5416736 - DNA, 25 bp, Homo sapien
aagtccatgtcatctcttgatagta

SEQ ID NO: 5416737 - DNA, 25 bp, Homo sapien
catctcttgatagtactgcagacag

SEQ ID NO: 5416738 - DNA, 25 bp, Homo sapien
tgtcatctcttgatagtactgcaga

SEQ ID NO: 5416739 - DNA, 25 bp, Homo sapien
catcacttgggaatcactggttaga

SEQ ID NO: 5416740 - DNA, 25 bp, Homo sapien
aatcagaaaccctgagaacggcctg

SEQ ID NO: 5416741 - DNA, 25 bp, Homo sapien
aaatgcagattctcgggtccaaccg

SEQ ID NO: 5416742 - DNA, 25 bp, Homo sapien
gttagttcaagacattggtccccag

SEQ ID NO: 5416743 - DNA, 25 bp, Homo sapien
gctgggaattaccagtaccagggaa

SEQ ID NO: 5416744 - DNA, 25 bp, Homo sapien
ctgtagtagatgtcatgaccctttc

SEQ ID NO: 5416745 - DNA, 25 bp, Homo sapien
gctgtagtagatgtcatgacccttt

SEQ ID NO: 5416746 - DNA, 25 bp, Homo sapien
atgaacatccatcatgaaaaagtca

SEQ ID NO: 5416747 - DNA, 25 bp, Homo sapien
aagtcatacaaggttcttgctgtca

SEQ ID NO: 5416748 - DNA, 25 bp, Homo sapien
acatccatcatgaaaaagtcataca

SEQ ID NO: 5416749 - DNA, 25 bp, Homo sapien
gaacatccatcatgaaaaagtcata

SEQ ID NO: 5416750 - DNA, 25 bp, Homo sapien
tgactaagttcccaccaatggcatg

SEQ ID NO: 5416751 - DNA, 25 bp, Homo sapien
cagaaggcataagggtcctcagacc

SEQ ID NO: 5416752 - DNA, 25 bp, Homo sapien
caatcatgtggataggacaacaccc

SEQ ID NO: 5416753 - DNA, 25 bp, Homo sapien
aacacccgagaggatggcaaagcaa

SEQ ID NO: 5416754 - DNA, 25 bp, Homo sapien
aaattcaagcaggtccgggcacagt

SEQ ID NO: 5416755 - DNA, 25 bp, Homo sapien
gctcatcataaaaattcaagcaggt

SEQ ID NO: 5416756 - DNA, 25 bp, Homo sapien
agtttgcagggcatgatgagcatgt

SEQ ID NO: 5416757 - DNA, 25 bp, Homo sapien
tgagcatgtggttccaccgcaggag

SEQ ID NO: 5416758 - DNA, 25 bp, Homo sapien
taagcacttaagctttgcctcgggc

SEQ ID NO: 5416759 - DNA, 25 bp, Homo sapien
gctgggtctgtacctcccgacaaaa

SEQ ID NO: 5416760 - DNA, 25 bp, Homo sapien
cataaagcctgtccaaagaggtcct

SEQ ID NO: 5416761 - DNA, 25 bp, Homo sapien
gaagctataatgtcctgtgggcaaa

SEQ ID NO: 5416762 - DNA, 25 bp, Homo sapien
gggatgaacctattgcatgcctcca

SEQ ID NO: 5416763 - DNA, 25 bp, Homo sapien
tttcctgattcgcaagctgaagcta

SEQ ID NO: 5416764 - DNA, 25 bp, Homo sapien
cctgtaataggttgctagggctgcc

SEQ ID NO: 5416765 - DNA, 25 bp, Homo sapien
ccgtctgacttcccgtccgtgccga

SEQ ID NO: 5416766 - DNA, 25 bp, Homo sapien
cactcgagccgcagccatgtctggg

SEQ ID NO: 5416767 - DNA, 25 bp, Homo sapien
ccgtgccgagcccactcgagccgca

SEQ ID NO: 5416768 - DNA, 25 bp, Homo sapien
cccgtccgtgccgagcccactcgag

SEQ ID NO: 5416769 - DNA, 25 bp, Homo sapien
tggagccagagccaactgaggacaa

SEQ ID NO: 5416770 - DNA, 25 bp, Homo sapien
aaggaaatttgtcatgaaacctcca

SEQ ID NO: 5416771 - DNA, 25 bp, Homo sapien
gaggatgaagctctagaagatgaag

SEQ ID NO: 5416772 - DNA, 25 bp, Homo sapien
caagtcgtccgagtaggaaccaaga

SEQ ID NO: 5416773 - DNA, 25 bp, Homo sapien
gatcaccggacacaatcctgcagaa

SEQ ID NO: 5416774 - DNA, 25 bp, Homo sapien
gctggacaggtttgccatcagagtg

SEQ ID NO: 5416775 - DNA, 25 bp, Homo sapien
cacctgtcagagaaacgtgatatgg

SEQ ID NO: 5416776 - DNA, 25 bp, Homo sapien
gaagtccttgcaagacgctgatgct

SEQ ID NO: 5416777 - DNA, 25 bp, Homo sapien
ttcagtggtgtaaatgcacaggcca

SEQ ID NO: 5416778 - DNA, 25 bp, Homo sapien
tagaacgaactcttgctagacagac

SEQ ID NO: 5416779 - DNA, 25 bp, Homo sapien
gaaatgtagttgtgggatgattcaa

SEQ ID NO: 5416780 - DNA, 25 bp, Homo sapien
tcctctccactttgttagaacgaac

SEQ ID NO: 5416781 - DNA, 25 bp, Homo sapien
ccttcttcggcgctcctgaaggtaa

SEQ ID NO: 5416782 - DNA, 25 bp, Homo sapien
gaaggtaaccggtgcgcgtgcgcac

SEQ ID NO: 5416783 - DNA, 25 bp, Homo sapien
ctttccttcttcggcgctcctgaag

SEQ ID NO: 5416784 - DNA, 25 bp, Homo sapien
tcttcggcgctcctgaaggtaaccg

SEQ ID NO: 5416785 - DNA, 25 bp, Homo sapien
aaaagtgaacatgaggaaggaaatc

SEQ ID NO: 5416786 - DNA, 25 bp, Homo sapien
gtatcctttctggtgtgatggaagc

SEQ ID NO: 5416787 - DNA, 25 bp, Homo sapien
tcaacattcatggagtgccaactat

SEQ ID NO: 5416788 - DNA, 25 bp, Homo sapien
ggtgttttagcaggccttagtatcc

SEQ ID NO: 5416789 - DNA, 25 bp, Homo sapien
tcccgggcaggaggtctcgtgttaa

SEQ ID NO: 5416790 - DNA, 25 bp, Homo sapien
cctttgtgtggtgctttcgccttga

SEQ ID NO: 5416791 - DNA, 25 bp, Homo sapien
tatgaaccaggcaccggcgttggag

SEQ ID NO: 5416792 - DNA, 25 bp, Homo sapien
ggaaagcccctttagacgctggcat

SEQ ID NO: 5416793 - DNA, 25 bp, Homo sapien
ctggttcgcctggaagctgccaaag

SEQ ID NO: 5416794 - DNA, 25 bp, Homo sapien
ggcgcaaatgccaagtcaccggtag

SEQ ID NO: 5416795 - DNA, 25 bp, Homo sapien
caacagaggcgatgacctgaatccg

SEQ ID NO: 5416796 - DNA, 25 bp, Homo sapien
tgccaaagcgaaggcaagagagccc

SEQ ID NO: 5416797 - DNA, 25 bp, Homo sapien
gatgtcactctccttatcgcctcca

SEQ ID NO: 5416798 - DNA, 25 bp, Homo sapien
tatcgcctccaacacctgtgcgaag

SEQ ID NO: 5416799 - DNA, 25 bp, Homo sapien
gcctcaggtttaatggatgtcactc

SEQ ID NO: 5416800 - DNA, 25 bp, Homo sapien
gggctctgttgtgcctcaggtttaa

SEQ ID NO: 5416801 - DNA, 25 bp, Homo sapien
gtaagcgagtgcttggagaggtttg

SEQ ID NO: 5416802 - DNA, 25 bp, Homo sapien
tagggtaagcgagtgcttggagagg

SEQ ID NO: 5416803 - DNA, 25 bp, Homo sapien
tcagggtagggtaagcgagtgcttg

SEQ ID NO: 5416804 - DNA, 25 bp, Homo sapien
ccagtcagggtagggtaagcgagtg

SEQ ID NO: 5416805 - DNA, 25 bp, Homo sapien
ggctgcttcccacgcttcttgctgg

SEQ ID NO: 5416806 - DNA, 25 bp, Homo sapien
gcagcaggtagaccttgaggggttt

SEQ ID NO: 5416807 - DNA, 25 bp, Homo sapien
cacaccactccgcttgggggcttag

SEQ ID NO: 5416808 - DNA, 25 bp, Homo sapien
tcttgctggaagttgaaccccgaag

SEQ ID NO: 5416809 - DNA, 25 bp, Homo sapien
cctagctcctttcaggaagtagctt

SEQ ID NO: 5416810 - DNA, 25 bp, Homo sapien
atgaagagctctggcaaagtcctca

SEQ ID NO: 5416811 - DNA, 25 bp, Homo sapien
aatgaagagctctggcaaagtcctc

SEQ ID NO: 5416812 - DNA, 25 bp, Homo sapien
caggaagtagcttttaatgaagagc

SEQ ID NO: 5416813 - DNA, 25 bp, Homo sapien
gggggcagccctcattcacccccat

SEQ ID NO: 5416814 - DNA, 25 bp, Homo sapien
ggtggggggcagccctcattcaccc

SEQ ID NO: 5416815 - DNA, 25 bp, Homo sapien
ctggcctgctgagggtggggggcag

SEQ ID NO: 5416816 - DNA, 25 bp, Homo sapien
tggggggcagccctcattcaccccc

SEQ ID NO: 5416817 - DNA, 25 bp, Homo sapien
gaaatctgcatttgccttgatgctt

SEQ ID NO: 5416818 - DNA, 25 bp, Homo sapien
gatggaagccccatcagtgtgaccc

SEQ ID NO: 5416819 - DNA, 25 bp, Homo sapien
gccttattcgacatatcactgggat

SEQ ID NO: 5416820 - DNA, 25 bp, Homo sapien
ggccgtttgccttcaagataggttg

SEQ ID NO: 5416821 - DNA, 25 bp, Homo sapien
gcaaccctgatgtatgactatggct

SEQ ID NO: 5416822 - DNA, 25 bp, Homo sapien
caaaattcagccgatactgatacag

SEQ ID NO: 5416823 - DNA, 25 bp, Homo sapien
tagctggagaatggctgacatcaac

SEQ ID NO: 5416824 - DNA, 25 bp, Homo sapien
tcaacggccaataccaacatgtaag

SEQ ID NO: 5416825 - DNA, 25 bp, Homo sapien
acttgtgggccttggagaaaatcag

SEQ ID NO: 5416826 - DNA, 25 bp, Homo sapien
ttacttgtgggccttggagaaaatc

SEQ ID NO: 5416827 - DNA, 25 bp, Homo sapien
tacttgtgggccttggagaaaatca

SEQ ID NO: 5416828 - DNA, 25 bp, Homo sapien
tgctggtgagtggaataaacaggaa

SEQ ID NO: 5416829 - DNA, 25 bp, Homo sapien
tgcgtttttaacaggaaagccctca

SEQ ID NO: 5416830 - DNA, 25 bp, Homo sapien
ttttaacaggaaagccctcattgtc

SEQ ID NO: 5416831 - DNA, 25 bp, Homo sapien
gcaaaagaacgcttcctttgtgcgt

SEQ ID NO: 5416832 - DNA, 25 bp, Homo sapien
ttagctcctcgaaggttgcccatca

SEQ ID NO: 5416833 - DNA, 25 bp, Homo sapien
ccagtgcaggagtgtagacagcgct

SEQ ID NO: 5416834 - DNA, 25 bp, Homo sapien
gacagcgctttagctcctcgaaggt

SEQ ID NO: 5416835 - DNA, 25 bp, Homo sapien
caggagtgtagacagcgctttagct

SEQ ID NO: 5416836 - DNA, 25 bp, Homo sapien
agggtgtgacatgaatgactctttt

SEQ ID NO: 5416837 - DNA, 25 bp, Homo sapien
ctgagagcttgtaactgcagggaac

SEQ ID NO: 5416838 - DNA, 25 bp, Homo sapien
gggtgtgacatgaatgactctttta

SEQ ID NO: 5416839 - DNA, 25 bp, Homo sapien
ggtgtgacatgaatgactcttttac

SEQ ID NO: 5416840 - DNA, 25 bp, Homo sapien
ctgcggcacagtctgcccttgagat

SEQ ID NO: 5416841 - DNA, 25 bp, Homo sapien
tgcccttgagataccgtctccacag

SEQ ID NO: 5416842 - DNA, 25 bp, Homo sapien
gcacagtctgcccttgagataccgt

SEQ ID NO: 5416843 - DNA, 25 bp, Homo sapien
ttgagataccgtctccacaggacac

SEQ ID NO: 5416844 - DNA, 25 bp, Homo sapien
gggattgaatcctgctccacgttca

SEQ ID NO: 5416845 - DNA, 25 bp, Homo sapien
gaccaacgcgaatatcatacatcct

SEQ ID NO: 5416846 - DNA, 25 bp, Homo sapien
gccagtgggattgaatcctgctcca

SEQ ID NO: 5416847 - DNA, 25 bp, Homo sapien
tcctcagggtccgtttgaccaacgc

SEQ ID NO: 5416848 - DNA, 25 bp, Homo sapien
cctcctcgtttgaccctgacattgt

SEQ ID NO: 5416849 - DNA, 25 bp, Homo sapien
tttgaccctgacattgttctttcat

SEQ ID NO: 5416850 - DNA, 25 bp, Homo sapien
cctcgtttgaccctgacattgttct

SEQ ID NO: 5416851 - DNA, 25 bp, Homo sapien
ctcgtttgaccctgacattgttctt

SEQ ID NO: 5416852 - DNA, 25 bp, Homo sapien
aggagagcttcagcctcgaggaccc

SEQ ID NO: 5416853 - DNA, 25 bp, Homo sapien
atccctcgggtcacccacagggaag

SEQ ID NO: 5416854 - DNA, 25 bp, Homo sapien
cgggtcacccacagggaaggtgaca

SEQ ID NO: 5416855 - DNA, 25 bp, Homo sapien
ctcttaggagagcttcagcctcgag

SEQ ID NO: 5416856 - DNA, 25 bp, Homo sapien
gaacagttagaacctactctcagca

SEQ ID NO: 5416857 - DNA, 25 bp, Homo sapien
caagttagttaacgcatccgtcacc

SEQ ID NO: 5416858 - DNA, 25 bp, Homo sapien
ctccccgggcttcagtacatttatt

SEQ ID NO: 5416859 - DNA, 25 bp, Homo sapien
tatttaaagtacaccacatgatgat

SEQ ID NO: 5416860 - DNA, 25 bp, Homo sapien
gaccacgaatggtggaagacaggcc

SEQ ID NO: 5416861 - DNA, 25 bp, Homo sapien
aatggaccacgaatggtggaagaca

SEQ ID NO: 5416862 - DNA, 25 bp, Homo sapien
gagagagtcacactgaccttaagga

SEQ ID NO: 5416863 - DNA, 25 bp, Homo sapien
gaatgaatggaccacgaatggtgga

SEQ ID NO: 5416864 - DNA, 25 bp, Homo sapien
acagcctgggttctataggccgcgg

SEQ ID NO: 5416865 - DNA, 25 bp, Homo sapien
tatgggagacaactggtccaaaaat

SEQ ID NO: 5416866 - DNA, 25 bp, Homo sapien
cggctgccatcagacatatgggaga

SEQ ID NO: 5416867 - DNA, 25 bp, Homo sapien
atggaccaccaacgatccacagcct

SEQ ID NO: 5416868 - DNA, 25 bp, Homo sapien
ggtaaatatcaagaacatagagcca

SEQ ID NO: 5416869 - DNA, 25 bp, Homo sapien
accctgtccttgaggagcctaataa

SEQ ID NO: 5416870 - DNA, 25 bp, Homo sapien
ttgttgaattagctgctaggcattc

SEQ ID NO: 5416871 - DNA, 25 bp, Homo sapien
cttgaggagcctaataactggagat

SEQ ID NO: 5416872 - DNA, 25 bp, Homo sapien
tgccatagaggcaagttaaccacct

SEQ ID NO: 5416873 - DNA, 25 bp, Homo sapien
tctgactcgacaaagagaactggcc

SEQ ID NO: 5416874 - DNA, 25 bp, Homo sapien
ggcataggccctttcataggactct

SEQ ID NO: 5416875 - DNA, 25 bp, Homo sapien
gacacatcccgtcttgtaaccagct

SEQ ID NO: 5416876 - DNA, 25 bp, Homo sapien
aatacttcatgggcgatagcacgta

SEQ ID NO: 5416877 - DNA, 25 bp, Homo sapien
agaatacttcatgggcgatagcacg

SEQ ID NO: 5416878 - DNA, 25 bp, Homo sapien
atacttcatgggcgatagcacgtac

SEQ ID NO: 5416879 - DNA, 25 bp, Homo sapien
gaatacttcatgggcgatagcacgt

SEQ ID NO: 5416880 - DNA, 25 bp, Homo sapien
cctggttgacgcaacatcagtccaa

SEQ ID NO: 5416881 - DNA, 25 bp, Homo sapien
atcagtccaactgaccacaaagcaa

SEQ ID NO: 5416882 - DNA, 25 bp, Homo sapien
taatacctggttgacgcaacatcag

SEQ ID NO: 5416883 - DNA, 25 bp, Homo sapien
tcacataggaatccacataatacct

SEQ ID NO: 5416884 - DNA, 25 bp, Homo sapien
gcagcaacggaatacgacaacggaa

SEQ ID NO: 5416885 - DNA, 25 bp, Homo sapien
acgacaacggaataagcatgaatac

SEQ ID NO: 5416886 - DNA, 25 bp, Homo sapien
ggcaaaagcagcaacggaatacgac

SEQ ID NO: 5416887 - DNA, 25 bp, Homo sapien
ggagtacacgtaaggggcaaaagca

SEQ ID NO: 5416888 - DNA, 25 bp, Homo sapien
gctggcatcgctctgattatgacca

SEQ ID NO: 5416889 - DNA, 25 bp, Homo sapien
gagactactgttttataaagggagc

SEQ ID NO: 5416890 - DNA, 25 bp, Homo sapien
ccctcagctgtacagtttgggaaaa

SEQ ID NO: 5416891 - DNA, 25 bp, Homo sapien
ggaatgccagggaaatccaaccgtg

SEQ ID NO: 5416892 - DNA, 25 bp, Homo sapien
tgcataaatctagtccaatccaggg

SEQ ID NO: 5416893 - DNA, 25 bp, Homo sapien
gcatttctgttctctcgcgagcacg

SEQ ID NO: 5416894 - DNA, 25 bp, Homo sapien
tcccaagtgctacgcggaggattag

SEQ ID NO: 5416895 - DNA, 25 bp, Homo sapien
gagcgggaacgcgtctgcataaatc

SEQ ID NO: 5416896 - DNA, 25 bp, Homo sapien
cacgttctgcgggtaagggctccga

SEQ ID NO: 5416897 - DNA, 25 bp, Homo sapien
ctcgcaaagcgtcgagatcccgggc

SEQ ID NO: 5416898 - DNA, 25 bp, Homo sapien
tccgcggctgtaggaggacgggctg

SEQ ID NO: 5416899 - DNA, 25 bp, Homo sapien
agccaggcccgatcccgcgaaggag

SEQ ID NO: 5416900 - DNA, 25 bp, Homo sapien
ggtgttaaatcacctcggcgccggc

SEQ ID NO: 5416901 - DNA, 25 bp, Homo sapien
gcaacgtctccaaagtggtgactgt

SEQ ID NO: 5416902 - DNA, 25 bp, Homo sapien
gacaaccttgctctttttccgcacg

SEQ ID NO: 5416903 - DNA, 25 bp, Homo sapien
gcagcctttgcgctttcctaggaga

SEQ ID NO: 5416904 - DNA, 25 bp, Homo sapien
aacatgaacagtcaacagagtggcc

SEQ ID NO: 5416905 - DNA, 25 bp, Homo sapien
acatgaacagtcaacagagtggccg

SEQ ID NO: 5416906 - DNA, 25 bp, Homo sapien
gttaacatgaacagtcaacagagtg

SEQ ID NO: 5416907 - DNA, 25 bp, Homo sapien
taacatgaacagtcaacagagtggc

SEQ ID NO: 5416908 - DNA, 25 bp, Homo sapien
caccgttgaggacagagtcggcgac

SEQ ID NO: 5416909 - DNA, 25 bp, Homo sapien
cgaggacgtgggttgtatcctgcca

SEQ ID NO: 5416910 - DNA, 25 bp, Homo sapien
cacgggagcgtgtctggaaacgcaa

SEQ ID NO: 5416911 - DNA, 25 bp, Homo sapien
cacacgctagggtgagatgtcagaa

SEQ ID NO: 5416912 - DNA, 25 bp, Homo sapien
agaaaccctcagacgccgtggaagc

SEQ ID NO: 5416913 - DNA, 25 bp, Homo sapien
gacacccttcggtggctgagaaacc

SEQ ID NO: 5416914 - DNA, 25 bp, Homo sapien
tgtgaaggcaaatctctccaccggg

SEQ ID NO: 5416915 - DNA, 25 bp, Homo sapien
caggtgtcccgaatccaaaagcatc

SEQ ID NO: 5416916 - DNA, 25 bp, Homo sapien
tcggttgtgaagtcaactcgattca

SEQ ID NO: 5416917 - DNA, 25 bp, Homo sapien
tcgattcagcctagtcaaatggccg

SEQ ID NO: 5416918 - DNA, 25 bp, Homo sapien
actgggggagcttccaccactgcag

SEQ ID NO: 5416919 - DNA, 25 bp, Homo sapien
gcctagtcaaatggccgctcgctac

SEQ ID NO: 5416920 - DNA, 25 bp, Homo sapien
tgcccctgcagactggcagagcagc

SEQ ID NO: 5416921 - DNA, 25 bp, Homo sapien
tcagcattcttcctgggcacgggca

SEQ ID NO: 5416922 - DNA, 25 bp, Homo sapien
tcttcctgggcacgggcatccttct

SEQ ID NO: 5416923 - DNA, 25 bp, Homo sapien
gggcacgggcatccttctgcccctg

SEQ ID NO: 5416924 - DNA, 25 bp, Homo sapien
gggtgagaaagtgctacaatgcgac

SEQ ID NO: 5416925 - DNA, 25 bp, Homo sapien
tagggtgagaaagtgctacaatgcg

SEQ ID NO: 5416926 - DNA, 25 bp, Homo sapien
agggtgagaaagtgctacaatgcga

SEQ ID NO: 5416927 - DNA, 25 bp, Homo sapien
ctagggtgagaaagtgctacaatgc

SEQ ID NO: 5416928 - DNA, 25 bp, Homo sapien
cgatgagtgtagctccatgtgctgg

SEQ ID NO: 5416929 - DNA, 25 bp, Homo sapien
acaggcgatgagtgtagctccatgt

SEQ ID NO: 5416930 - DNA, 25 bp, Homo sapien
aaaggcacaggcgatgagtgtagct

SEQ ID NO: 5416931 - DNA, 25 bp, Homo sapien
catatgccgcacaaaggcacaggcg

SEQ ID NO: 5416932 - DNA, 25 bp, Homo sapien
ggttagagtcgaaggggtggcagtc

SEQ ID NO: 5416933 - DNA, 25 bp, Homo sapien
aggttagagtcgaaggggtggcagt

SEQ ID NO: 5416934 - DNA, 25 bp, Homo sapien
ctaggttagagtcgaaggggtggca

SEQ ID NO: 5416935 - DNA, 25 bp, Homo sapien
taggttagagtcgaaggggtggcag

SEQ ID NO: 5416936 - DNA, 25 bp, Homo sapien
ggccactcccttctctggaccctgg

SEQ ID NO: 5416937 - DNA, 25 bp, Homo sapien
cctggacagggatttgagtggggag

SEQ ID NO: 5416938 - DNA, 25 bp, Homo sapien
accctggaccctggacagggatttg

SEQ ID NO: 5416939 - DNA, 25 bp, Homo sapien
tggaccctggacagggatttgagtg

SEQ ID NO: 5416940 - DNA, 25 bp, Homo sapien
cacagctcccaaaatctggcaaaag

SEQ ID NO: 5416941 - DNA, 25 bp, Homo sapien
gaggccacgactcaattctagcaag

SEQ ID NO: 5416942 - DNA, 25 bp, Homo sapien
gctggtttgctcctattcttgggta

SEQ ID NO: 5416943 - DNA, 25 bp, Homo sapien
gagatatagtacctcctgtgcagct

SEQ ID NO: 5416944 - DNA, 25 bp, Homo sapien
cgcccaggccggaagagtaattgta

SEQ ID NO: 5416945 - DNA, 25 bp, Homo sapien
caatattagtctatcagaaaagggt

SEQ ID NO: 5416946 - DNA, 25 bp, Homo sapien
tgtaacctacgtatatttcttgtag

SEQ ID NO: 5416947 - DNA, 25 bp, Homo sapien
gggtaaacggacacagaatagtcat

SEQ ID NO: 5416948 - DNA, 25 bp, Homo sapien
tggacgcacacacttccacaatagc

SEQ ID NO: 5416949 - DNA, 25 bp, Homo sapien
ggtggacgcacacacttccacaata

SEQ ID NO: 5416950 - DNA, 25 bp, Homo sapien
tcggtggacgcacacacttccacaa

SEQ ID NO: 5416951 - DNA, 25 bp, Homo sapien
gtcctgttccccctcggtggacgca

SEQ ID NO: 5416952 - DNA, 25 bp, Homo sapien
ttaggatgcaatatgacgtaagatc

SEQ ID NO: 5416953 - DNA, 25 bp, Homo sapien
catgctcattctttggatcaggtaa

SEQ ID NO: 5416954 - DNA, 25 bp, Homo sapien
gtgacataccacacacccaatcaag

SEQ ID NO: 5416955 - DNA, 25 bp, Homo sapien
ataagaccttagtacccctgtgaca

SEQ ID NO: 5416956 - DNA, 25 bp, Homo sapien
tctgtgcctgtgacagtgggcagag

SEQ ID NO: 5416957 - DNA, 25 bp, Homo sapien
gaggaagacctccatgaggtgcttt

SEQ ID NO: 5416958 - DNA, 25 bp, Homo sapien
ggaaccaggagtactttctgtgcct

SEQ ID NO: 5416959 - DNA, 25 bp, Homo sapien
ccaggagtactttctgtgcctgtga

SEQ ID NO: 5416960 - DNA, 25 bp, Homo sapien
gattttaccctacatcagtgctgac

SEQ ID NO: 5416961 - DNA, 25 bp, Homo sapien
tcatgtaatgaggtgtttgttcaca

SEQ ID NO: 5416962 - DNA, 25 bp, Homo sapien
tgccatttaaactgacagagttgtt

SEQ ID NO: 5416963 - DNA, 25 bp, Homo sapien
tcctctcaacatgcacacactaaag

SEQ ID NO: 5416964 - DNA, 25 bp, Homo sapien
ccttttctgcgttctgccactagca

SEQ ID NO: 5416965 - DNA, 25 bp, Homo sapien
cagtgtcaaagactgtcagagtgac

SEQ ID NO: 5416966 - DNA, 25 bp, Homo sapien
tagcagtcgctctcattcatttgaa

SEQ ID NO: 5416967 - DNA, 25 bp, Homo sapien
ccaactttccatgtgagggtaaaag

SEQ ID NO: 5416968 - DNA, 25 bp, Homo sapien
gcactcaatcaatgctaagatttca

SEQ ID NO: 5416969 - DNA, 25 bp, Homo sapien
tatcattcataaagacgaaaactct

SEQ ID NO: 5416970 - DNA, 25 bp, Homo sapien
actttatgaacataggactttatca

SEQ ID NO: 5416971 - DNA, 25 bp, Homo sapien
caggcagcacgtaaagcactcaatc

SEQ ID NO: 5416972 - DNA, 25 bp, Homo sapien
gctctacagaggaatgggtatagcc

SEQ ID NO: 5416973 - DNA, 25 bp, Homo sapien
taagtgttacttacccaggagttgc

SEQ ID NO: 5416974 - DNA, 25 bp, Homo sapien
cagccccttaaaccactcttgatgg

SEQ ID NO: 5416975 - DNA, 25 bp, Homo sapien
cccaggagttgccttgataatggtt

SEQ ID NO: 5416976 - DNA, 25 bp, Homo sapien
ttagtcaatatcctaccatcttgaa

SEQ ID NO: 5416977 - DNA, 25 bp, Homo sapien
tgaaagctcccttccaatgtaattt

SEQ ID NO: 5416978 - DNA, 25 bp, Homo sapien
taagtgaaggagctcagttagtcaa

SEQ ID NO: 5416979 - DNA, 25 bp, Homo sapien
ttttaagtgaaggagctcagttagt

SEQ ID NO: 5416980 - DNA, 25 bp, Homo sapien
tggtttctaccctacgaggcagtta

SEQ ID NO: 5416981 - DNA, 25 bp, Homo sapien
aaacggacatgtgatctcgaggtac

SEQ ID NO: 5416982 - DNA, 25 bp, Homo sapien
caattagagtgccttcaagaagact

SEQ ID NO: 5416983 - DNA, 25 bp, Homo sapien
caaatgctgaagaatgtatccaggc

SEQ ID NO: 5416984 - DNA, 25 bp, Homo sapien
tacaaatgacactatgaggaacttc

SEQ ID NO: 5416985 - DNA, 25 bp, Homo sapien
caaatgctctcaaacttaagtgtgc

SEQ ID NO: 5416986 - DNA, 25 bp, Homo sapien
gcatctggaagcaaattcaaagata

SEQ ID NO: 5416987 - DNA, 25 bp, Homo sapien
cattgtccatgatcctctctcatac

SEQ ID NO: 5416988 - DNA, 25 bp, Homo sapien
aatcgatcttcttttcgatatgcca

SEQ ID NO: 5416989 - DNA, 25 bp, Homo sapien
aagaatttgatcttctcatgtgtgg

SEQ ID NO: 5416990 - DNA, 25 bp, Homo sapien
gagaaggtatgggtcatttgccagc

SEQ ID NO: 5416991 - DNA, 25 bp, Homo sapien
atgccaaacagcgtcttataaatgc

SEQ ID NO: 5416992 - DNA, 25 bp, Homo sapien
tatgcatcattacactcctggaaaa

SEQ ID NO: 5416993 - DNA, 25 bp, Homo sapien
gagatcactgaagggacactttcat

SEQ ID NO: 5416994 - DNA, 25 bp, Homo sapien
atacatctatgtaactggcaaccag

SEQ ID NO: 5416995 - DNA, 25 bp, Homo sapien
cacaaatcgttaagtgcatagcaca

SEQ ID NO: 5416996 - DNA, 25 bp, Homo sapien
ttaaagatgcccacaccaagtcagg

SEQ ID NO: 5416997 - DNA, 25 bp, Homo sapien
gtggtgcctattaagagcctaagga

SEQ ID NO: 5416998 - DNA, 25 bp, Homo sapien
caggaatggctaaatgagactttgc

SEQ ID NO: 5416999 - DNA, 25 bp, Homo sapien
ggaagtcaatctgatcccttagagg

SEQ ID NO: 5417000 - DNA, 25 bp, Homo sapien
accgcgcatggcctatttggttttt

SEQ ID NO: 5417001 - DNA, 25 bp, Homo sapien
cgcgcatggcctatttggttttttt

SEQ ID NO: 5417002 - DNA, 25 bp, Homo sapien
ccgcgcatggcctatttggtttttt

SEQ ID NO: 5417003 - DNA, 25 bp, Homo sapien
caccgcgcatggcctatttggtttt

SEQ ID NO: 5417004 - DNA, 25 bp, Homo sapien
tcactgcttacaaccggttttacag

SEQ ID NO: 5417005 - DNA, 25 bp, Homo sapien
cactgcttacaaccggttttacagg

SEQ ID NO: 5417006 - DNA, 25 bp, Homo sapien
tacaaaacactcaggaggtaaatac

SEQ ID NO: 5417007 - DNA, 25 bp, Homo sapien
catacatcaaccttgttggaaatct

SEQ ID NO: 5417008 - DNA, 25 bp, Homo sapien
actacaaaacactcaggaggtaaat

SEQ ID NO: 5417009 - DNA, 25 bp, Homo sapien
agatgactccaaccgaccatacatc

SEQ ID NO: 5417010 - DNA, 25 bp, Homo sapien
tgagagcacttccatcattactggt

SEQ ID NO: 5417011 - DNA, 25 bp, Homo sapien
actgcgataggccttttactggaga

SEQ ID NO: 5417012 - DNA, 25 bp, Homo sapien
aacagttgagctccttacaatagca

SEQ ID NO: 5417013 - DNA, 25 bp, Homo sapien
taattgctcggagattagcatcaca

SEQ ID NO: 5417014 - DNA, 25 bp, Homo sapien
cccctgggaagttagatccattcca

SEQ ID NO: 5417015 - DNA, 25 bp, Homo sapien
catgctgttccatctaccagtagga

SEQ ID NO: 5417016 - DNA, 25 bp, Homo sapien
gatccattccatctacaccatagct

SEQ ID NO: 5417017 - DNA, 25 bp, Homo sapien
catcatccataatcttggacagacc

SEQ ID NO: 5417018 - DNA, 25 bp, Homo sapien
cttgtgttgcttcagatagaaatcc

SEQ ID NO: 5417019 - DNA, 25 bp, Homo sapien
gtgttgcttcagatagaaatccaag

SEQ ID NO: 5417020 - DNA, 25 bp, Homo sapien
atatcttagtgcatttacaatctgc

SEQ ID NO: 5417021 - DNA, 25 bp, Homo sapien
gatatcttagtgcatttacaatctg

SEQ ID NO: 5417022 - DNA, 25 bp, Homo sapien
tagagtttaactattctggggtgat

SEQ ID NO: 5417023 - DNA, 25 bp, Homo sapien
agaaataatcatagagtttaactat

SEQ ID NO: 5417024 - DNA, 25 bp, Homo sapien
tcatagagtttaactattctggggt

SEQ ID NO: 5417025 - DNA, 25 bp, Homo sapien
aataatcatagagtttaactattct

SEQ ID NO: 5417026 - DNA, 25 bp, Homo sapien
taagctgatgtatcttcacagcagc

SEQ ID NO: 5417027 - DNA, 25 bp, Homo sapien
cagcatatctttgttcataaaggtc

SEQ ID NO: 5417028 - DNA, 25 bp, Homo sapien
tcttcacagcagcatatctttgttc

SEQ ID NO: 5417029 - DNA, 25 bp, Homo sapien
ctccagcttttattaagctgatgta

SEQ ID NO: 5417030 - DNA, 25 bp, Homo sapien
taatcttatcagcttatctcagcac

SEQ ID NO: 5417031 - DNA, 25 bp, Homo sapien
tgagccatggccaacaagcaggatt

SEQ ID NO: 5417032 - DNA, 25 bp, Homo sapien
ttgttattattctcagaaggagcca

SEQ ID NO: 5417033 - DNA, 25 bp, Homo sapien
gccaatgagtcagacagggatttaa

SEQ ID NO: 5417034 - DNA, 25 bp, Homo sapien
gatgagcatataacccttcactagg

SEQ ID NO: 5417035 - DNA, 25 bp, Homo sapien
gacaatcagctatgaggttccggaa

SEQ ID NO: 5417036 - DNA, 25 bp, Homo sapien
tgtgagtttccagtacctatgaagc

SEQ ID NO: 5417037 - DNA, 25 bp, Homo sapien
ggacttcatcccaagagcaaatggg

SEQ ID NO: 5417038 - DNA, 25 bp, Homo sapien
ctaccaagcagatgaagtaataaat

SEQ ID NO: 5417039 - DNA, 25 bp, Homo sapien
agccacctctaccaagcagatgaag

SEQ ID NO: 5417040 - DNA, 25 bp, Homo sapien
cctctaccaagcagatgaagtaata

SEQ ID NO: 5417041 - DNA, 25 bp, Homo sapien
cacctctaccaagcagatgaagtaa

SEQ ID NO: 5417042 - DNA, 25 bp, Homo sapien
gaagctttaaactacatgaccagtc

SEQ ID NO: 5417043 - DNA, 25 bp, Homo sapien
tgggatacatggcttactgaaatac

SEQ ID NO: 5417044 - DNA, 25 bp, Homo sapien
ggcactcattctgacaactgattaa

SEQ ID NO: 5417045 - DNA, 25 bp, Homo sapien
ctgaggctcgtttttgactcctggg

SEQ ID NO: 5417046 - DNA, 25 bp, Homo sapien
cagaggaaatggtaagcacaaaagc

SEQ ID NO: 5417047 - DNA, 25 bp, Homo sapien
tattaagtgcctgccatatgtcagg

SEQ ID NO: 5417048 - DNA, 25 bp, Homo sapien
cactggtctaggctttacggataca

SEQ ID NO: 5417049 - DNA, 25 bp, Homo sapien
gcccactgagaagggaatgctcttg

SEQ ID NO: 5417050 - DNA, 25 bp, Homo sapien
gctcacgtatgtgaagatttctgac

SEQ ID NO: 5417051 - DNA, 25 bp, Homo sapien
ctctttccaaacgttcaagttctgc

SEQ ID NO: 5417052 - DNA, 25 bp, Homo sapien
agctcacgtatgtgaagatttctga

SEQ ID NO: 5417053 - DNA, 25 bp, Homo sapien
ctcacgtatgtgaagatttctgact

SEQ ID NO: 5417054 - DNA, 25 bp, Homo sapien
tatattataaagtaccaccgagtta

SEQ ID NO: 5417055 - DNA, 25 bp, Homo sapien
tacagtgatgggaagaatagtatat

SEQ ID NO: 5417056 - DNA, 25 bp, Homo sapien
gggactataacaagctcaatttatt

SEQ ID NO: 5417057 - DNA, 25 bp, Homo sapien
caaagtgctcttttcaatgccgaaa

SEQ ID NO: 5417058 - DNA, 25 bp, Homo sapien
ctcagtgaaatatatttgtctttca

SEQ ID NO: 5417059 - DNA, 25 bp, Homo sapien
actcagtgaaatatatttgtctttc

SEQ ID NO: 5417060 - DNA, 25 bp, Homo sapien
tcagtgaaatatatttgtctttcat

SEQ ID NO: 5417061 - DNA, 25 bp, Homo sapien
tcagcgtgcctataacctatgggag

SEQ ID NO: 5417062 - DNA, 25 bp, Homo sapien
tatggcttggaacagtctattcacc

SEQ ID NO: 5417063 - DNA, 25 bp, Homo sapien
gaggttttaacaccagccaggtgag

SEQ ID NO: 5417064 - DNA, 25 bp, Homo sapien
caatttctaagaactgcctcgcata

SEQ ID NO: 5417065 - DNA, 25 bp, Homo sapien
cagagaacaggatttcagtggcaga

SEQ ID NO: 5417066 - DNA, 25 bp, Homo sapien
caactagttgcatggtccactgtga

SEQ ID NO: 5417067 - DNA, 25 bp, Homo sapien
tccactgttcaaaaggcttgtagac

SEQ ID NO: 5417068 - DNA, 25 bp, Homo sapien
tgcaggtgccaatatcggtcagaga

SEQ ID NO: 5417069 - DNA, 25 bp, Homo sapien
aaagtttacgacaataacacatagc

SEQ ID NO: 5417070 - DNA, 25 bp, Homo sapien
tcctccactaaagggatatggtgtg

SEQ ID NO: 5417071 - DNA, 25 bp, Homo sapien
tcttctaatcgaaacatcacacatg

SEQ ID NO: 5417072 - DNA, 25 bp, Homo sapien
atctaaagaccttggaagtctgtcc

SEQ ID NO: 5417073 - DNA, 25 bp, Homo sapien
ctttttgagatgtcctagtctaagt

SEQ ID NO: 5417074 - DNA, 25 bp, Homo sapien
caagaccactcaatgaggaaagaat

SEQ ID NO: 5417075 - DNA, 25 bp, Homo sapien
tgatgctgggacaactagggaacca

SEQ ID NO: 5417076 - DNA, 25 bp, Homo sapien
gacccctacctcactctatgtacaa

SEQ ID NO: 5417077 - DNA, 25 bp, Homo sapien
aatgaatgaatgacctaaatatagt

SEQ ID NO: 5417078 - DNA, 25 bp, Homo sapien
ctgcgtagccggaattacaagtgcc

SEQ ID NO: 5417079 - DNA, 25 bp, Homo sapien
gtaacattcacgctcactggcaaca

SEQ ID NO: 5417080 - DNA, 25 bp, Homo sapien
tctgagaatttactgacctcacgtg

SEQ ID NO: 5417081 - DNA, 25 bp, Homo sapien
tggtaacctcttagctacctaggtc

SEQ ID NO: 5417082 - DNA, 25 bp, Homo sapien
taaatttggtctaacaaagggatca

SEQ ID NO: 5417083 - DNA, 25 bp, Homo sapien
aatttggtctaacaaagggatcatt

SEQ ID NO: 5417084 - DNA, 25 bp, Homo sapien
ctttgctgattcacccattcttgtt

SEQ ID NO: 5417085 - DNA, 25 bp, Homo sapien
tttgctgattcacccattcttgttg

SEQ ID NO: 5417086 - DNA, 25 bp, Homo sapien
tgcccgaggcgtaatcgatcttgca

SEQ ID NO: 5417087 - DNA, 25 bp, Homo sapien
ctgttgtaaagtgcccgaggcgtaa

SEQ ID NO: 5417088 - DNA, 25 bp, Homo sapien
ccgaggcgtaatcgatcttgcatac

SEQ ID NO: 5417089 - DNA, 25 bp, Homo sapien
taaagtgcccgaggcgtaatcgatc

SEQ ID NO: 5417090 - DNA, 25 bp, Homo sapien
gttcatctatttgccgtctgagatc

SEQ ID NO: 5417091 - DNA, 25 bp, Homo sapien
ttcttgctcattgatatgcacttat

SEQ ID NO: 5417092 - DNA, 25 bp, Homo sapien
tttgccgtctgagatcacagttagc

SEQ ID NO: 5417093 - DNA, 25 bp, Homo sapien
gcacttatttaatcgttctttgtat

SEQ ID NO: 5417094 - DNA, 25 bp, Homo sapien
cgcctggcctagctacagatttttt

SEQ ID NO: 5417095 - DNA, 25 bp, Homo sapien
taagtattttctgaacagtttgact

SEQ ID NO: 5417096 - DNA, 25 bp, Homo sapien
cagtttgactgttgccaaataattt

SEQ ID NO: 5417097 - DNA, 25 bp, Homo sapien
tgcgcctggcctagctacagatttt

SEQ ID NO: 5417098 - DNA, 25 bp, Homo sapien
ctgagcaaatcatctatacgtccct

SEQ ID NO: 5417099 - DNA, 25 bp, Homo sapien
caaatcatctatacgtccctccttc

SEQ ID NO: 5417100 - DNA, 25 bp, Homo sapien
gcaaatcatctatacgtccctcctt

SEQ ID NO: 5417101 - DNA, 25 bp, Homo sapien
gagcaaatcatctatacgtccctcc

SEQ ID NO: 5417102 - DNA, 25 bp, Homo sapien
tgagaaagtgccactcagaaactgt

SEQ ID NO: 5417103 - DNA, 25 bp, Homo sapien
tcaggatcatccaaagaaagaggtt

SEQ ID NO: 5417104 - DNA, 25 bp, Homo sapien
gcacaacagtttggatatgacctca

SEQ ID NO: 5417105 - DNA, 25 bp, Homo sapien
gaaataaactgtcaagctgagcttg

SEQ ID NO: 5417106 - DNA, 25 bp, Homo sapien
ctaatgcagtaggagaagggctatt

SEQ ID NO: 5417107 - DNA, 25 bp, Homo sapien
tgctaatgcagtaggagaagggcta

SEQ ID NO: 5417108 - DNA, 25 bp, Homo sapien
aatgctaatgcagtaggagaagggc

SEQ ID NO: 5417109 - DNA, 25 bp, Homo sapien
tggttgtacaatagggtggtcccca

SEQ ID NO: 5417110 - DNA, 25 bp, Homo sapien
gtatgcctcttactggacttgagcc

SEQ ID NO: 5417111 - DNA, 25 bp, Homo sapien
ctggacttgagccatttccaccctg

SEQ ID NO: 5417112 - DNA, 25 bp, Homo sapien
tactggacttgagccatttccaccc

SEQ ID NO: 5417113 - DNA, 25 bp, Homo sapien
aggaggtatgcctcttactggactt

SEQ ID NO: 5417114 - DNA, 25 bp, Homo sapien
aaaatagtcgctaattttgtggcca

SEQ ID NO: 5417115 - DNA, 25 bp, Homo sapien
agtcgctaattttgtggccacgtcc

SEQ ID NO: 5417116 - DNA, 25 bp, Homo sapien
tagtcgctaattttgtggccacgtc

SEQ ID NO: 5417117 - DNA, 25 bp, Homo sapien
aatagtcgctaattttgtggccacg

SEQ ID NO: 5417118 - DNA, 25 bp, Homo sapien
ctagtccataagatcagtagttccc

SEQ ID NO: 5417119 - DNA, 25 bp, Homo sapien
ggaatggacatatgaccaatctagt

SEQ ID NO: 5417120 - DNA, 25 bp, Homo sapien
cctaactagttttggaatggacata

SEQ ID NO: 5417121 - DNA, 25 bp, Homo sapien
taaggcaatagtacctctgttggtc

SEQ ID NO: 5417122 - DNA, 25 bp, Homo sapien
gtacgacccatttcccaataggcca

SEQ ID NO: 5417123 - DNA, 25 bp, Homo sapien
tgctgtacgacccatttcccaatag

SEQ ID NO: 5417124 - DNA, 25 bp, Homo sapien
tcccaataggccaaggactggaaga

SEQ ID NO: 5417125 - DNA, 25 bp, Homo sapien
caaggactggaagaccgggaggttg

SEQ ID NO: 5417126 - DNA, 25 bp, Homo sapien
taagtgtccactaggctctgaagga

SEQ ID NO: 5417127 - DNA, 25 bp, Homo sapien
gcaacattgaaaagcctaaaagcaa

SEQ ID NO: 5417128 - DNA, 25 bp, Homo sapien
tatacactaactacctgtgcacaca

SEQ ID NO: 5417129 - DNA, 25 bp, Homo sapien
attaattttaagtgtccactaggct

SEQ ID NO: 5417130 - DNA, 25 bp, Homo sapien
cccctggatgattccgattgtttct

SEQ ID NO: 5417131 - DNA, 25 bp, Homo sapien
tcttcccctggatgattccgattgt

SEQ ID NO: 5417132 - DNA, 25 bp, Homo sapien
gattccgattgtttcttctccggtg

SEQ ID NO: 5417133 - DNA, 25 bp, Homo sapien
cctgactactttcattctggttttc

SEQ ID NO: 5417134 - DNA, 25 bp, Homo sapien
ctacagaaaacaagataacagattt

SEQ ID NO: 5417135 - DNA, 25 bp, Homo sapien
tacagaaaacaagataacagatttt

SEQ ID NO: 5417136 - DNA, 25 bp, Homo sapien
cagttttaatatacaaaattatcac

SEQ ID NO: 5417137 - DNA, 25 bp, Homo sapien
ttaaatgacagttttaatatacaaa

SEQ ID NO: 5417138 - DNA, 25 bp, Homo sapien
tgctggcagctggtaaaacaatgtt

SEQ ID NO: 5417139 - DNA, 25 bp, Homo sapien
attcaagggtactataatttgaaca

SEQ ID NO: 5417140 - DNA, 25 bp, Homo sapien
catacttgggtaccaaattcaaggg

SEQ ID NO: 5417141 - DNA, 25 bp, Homo sapien
catgacaaacctttttgctggcagc

SEQ ID NO: 5417142 - DNA, 25 bp, Homo sapien
tttccccataagttgcattgtctta

SEQ ID NO: 5417143 - DNA, 25 bp, Homo sapien
ctttccccataagttgcattgtctt

SEQ ID NO: 5417144 - DNA, 25 bp, Homo sapien
aattaaattatgtttgactatacac

SEQ ID NO: 5417145 - DNA, 25 bp, Homo sapien
aattatgtttgactatacacactct

SEQ ID NO: 5417146 - DNA, 25 bp, Homo sapien
ggcaaatggaattggtggtttcttg

SEQ ID NO: 5417147 - DNA, 25 bp, Homo sapien
tgcgctttgcttccatagcatcttg

SEQ ID NO: 5417148 - DNA, 25 bp, Homo sapien
tctcttaaaaactcgactatcatct

SEQ ID NO: 5417149 - DNA, 25 bp, Homo sapien
tcttatgggatgaattcacagcctc

SEQ ID NO: 5417150 - DNA, 25 bp, Homo sapien
actgcagataaagtcccgtcacttg

SEQ ID NO: 5417151 - DNA, 25 bp, Homo sapien
tcaagggaacctactgcagataaag

SEQ ID NO: 5417152 - DNA, 25 bp, Homo sapien
taaagtcccgtcacttgcacagtcc

SEQ ID NO: 5417153 - DNA, 25 bp, Homo sapien
cgtcacttgcacagtcctttcagct

SEQ ID NO: 5417154 - DNA, 25 bp, Homo sapien
aaagatcccaagcttccaaaactgt

SEQ ID NO: 5417155 - DNA, 25 bp, Homo sapien
tgattagagctttcgttatttgttg

SEQ ID NO: 5417156 - DNA, 25 bp, Homo sapien
tcacttaaagatcccaagcttccaa

SEQ ID NO: 5417157 - DNA, 25 bp, Homo sapien
tgtgattagagctttcgttatttgt

SEQ ID NO: 5417158 - DNA, 25 bp, Homo sapien
aaaactaatgctacctttggctgaa

SEQ ID NO: 5417159 - DNA, 25 bp, Homo sapien
taggaactgacttctattagctggt

SEQ ID NO: 5417160 - DNA, 25 bp, Homo sapien
gaactgggccattgttaggatgaca

SEQ ID NO: 5417161 - DNA, 25 bp, Homo sapien
ggctcttcaggtcccttcacaatta

SEQ ID NO: 5417162 - DNA, 25 bp, Homo sapien
tttgcctttctctgtattaacaaac

SEQ ID NO: 5417163 - DNA, 25 bp, Homo sapien
ttttaactctatctcttcaaaaaca

SEQ ID NO: 5417164 - DNA, 25 bp, Homo sapien
ctctatctcttcaaaaacatctttg

SEQ ID NO: 5417165 - DNA, 25 bp, Homo sapien
ctgtattaacaaactgtcctgtttt

SEQ ID NO: 5417166 - DNA, 25 bp, Homo sapien
ccaggtggctgacagattatggcat

SEQ ID NO: 5417167 - DNA, 25 bp, Homo sapien
gtaccatcagtacatcagatcatag

SEQ ID NO: 5417168 - DNA, 25 bp, Homo sapien
gctttgtttccaatacgcttctatg

SEQ ID NO: 5417169 - DNA, 25 bp, Homo sapien
gaattaacattacatacaggcaagc

SEQ ID NO: 5417170 - DNA, 25 bp, Homo sapien
tgaatctcaaaggaatgatataata

SEQ ID NO: 5417171 - DNA, 25 bp, Homo sapien
ctcttccccagaagtttgaatctca

SEQ ID NO: 5417172 - DNA, 25 bp, Homo sapien
tgatataataagcatgggatggcgg

SEQ ID NO: 5417173 - DNA, 25 bp, Homo sapien
tccccagaagtttgaatctcaaagg

SEQ ID NO: 5417174 - DNA, 25 bp, Homo sapien
tttgctcaaggtagctagagagctg

SEQ ID NO: 5417175 - DNA, 25 bp, Homo sapien
tgatattcgatcaataacttccctt

SEQ ID NO: 5417176 - DNA, 25 bp, Homo sapien
gaattgactgatattcgatcaataa

SEQ ID NO: 5417177 - DNA, 25 bp, Homo sapien
tccaggcttccaaatcattctgtga

SEQ ID NO: 5417178 - DNA, 25 bp, Homo sapien
cactatgaccagctgtaggcaaaac

SEQ ID NO: 5417179 - DNA, 25 bp, Homo sapien
ggcaaaactgtaagacagactaagt

SEQ ID NO: 5417180 - DNA, 25 bp, Homo sapien
ggttaccatccacattcttatcagc

SEQ ID NO: 5417181 - DNA, 25 bp, Homo sapien
caaaagtagaaaacgaagtcaaatg

SEQ ID NO: 5417182 - DNA, 25 bp, Homo sapien
cagtaatttaaaagttctatgtata

SEQ ID NO: 5417183 - DNA, 25 bp, Homo sapien
aatttaaaagttctatgtatagcag

SEQ ID NO: 5417184 - DNA, 25 bp, Homo sapien
tatgtatagcagatgacacaaattc

SEQ ID NO: 5417185 - DNA, 25 bp, Homo sapien
aagttctatgtatagcagatgacac

SEQ ID NO: 5417186 - DNA, 25 bp, Homo sapien
taagattttatgaagaagatctcaa

SEQ ID NO: 5417187 - DNA, 25 bp, Homo sapien
ctaggttaagattttatgaagaaga

SEQ ID NO: 5417188 - DNA, 25 bp, Homo sapien
cttcagggcattggtctaggttaag

SEQ ID NO: 5417189 - DNA, 25 bp, Homo sapien
cagggcattggtctaggttaagatt

SEQ ID NO: 5417190 - DNA, 25 bp, Homo sapien
cactgactccacctaagaattcaaa

SEQ ID NO: 5417191 - DNA, 25 bp, Homo sapien
tttccacccacgatggccaagagaa

SEQ ID NO: 5417192 - DNA, 25 bp, Homo sapien
taatgttagctttcactgactccac

SEQ ID NO: 5417193 - DNA, 25 bp, Homo sapien
aagactagaataccatcttcgtagt

SEQ ID NO: 5417194 - DNA, 25 bp, Homo sapien
cacttgcaactccagtaaatctagc

SEQ ID NO: 5417195 - DNA, 25 bp, Homo sapien
actgcccgtacttccagtgctccca

SEQ ID NO: 5417196 - DNA, 25 bp, Homo sapien
gcaactccagtaaatctagcttcca

SEQ ID NO: 5417197 - DNA, 25 bp, Homo sapien
tgcccgtacttccagtgctcccact

SEQ ID NO: 5417198 - DNA, 25 bp, Homo sapien
ggtgatggtagcacagtatgaatgt

SEQ ID NO: 5417199 - DNA, 25 bp, Homo sapien
aaaataattagatgtcgcggcgcct

SEQ ID NO: 5417200 - DNA, 25 bp, Homo sapien
atagtggtgatggtagcacagtatg

SEQ ID NO: 5417201 - DNA, 25 bp, Homo sapien
aataattagatgtcgcggcgcctgc

SEQ ID NO: 5417202 - DNA, 25 bp, Homo sapien
gatgagggcatggggccctgctttg

SEQ ID NO: 5417203 - DNA, 25 bp, Homo sapien
tgagggcatggggccctgctttgac

SEQ ID NO: 5417204 - DNA, 25 bp, Homo sapien
aagatgagggcatggggccctgctt

SEQ ID NO: 5417205 - DNA, 25 bp, Homo sapien
catggaagatgagggcatggggccc

SEQ ID NO: 5417206 - DNA, 25 bp, Homo sapien
ctgggcgcagaatgagagcactttt

SEQ ID NO: 5417207 - DNA, 25 bp, Homo sapien
ccaggctggatacagaaacaatttc

SEQ ID NO: 5417208 - DNA, 25 bp, Homo sapien
taatactgatctgcaggctaaacgc

SEQ ID NO: 5417209 - DNA, 25 bp, Homo sapien
gatacaggcttgcagtgagtcatga

SEQ ID NO: 5417210 - DNA, 25 bp, Homo sapien
tcctcagctctgccattataaagca

SEQ ID NO: 5417211 - DNA, 25 bp, Homo sapien
caatcttttatggactcaaactgtc

SEQ ID NO: 5417212 - DNA, 25 bp, Homo sapien
tcaaactgtcatttttgacccttaa

SEQ ID NO: 5417213 - DNA, 25 bp, Homo sapien
gagaatgccatatacagtttctgtc

SEQ ID NO: 5417214 - DNA, 25 bp, Homo sapien
gaaaagcagatttatagggccccta

SEQ ID NO: 5417215 - DNA, 25 bp, Homo sapien
tgagatccatcgcacagcagggtga

SEQ ID NO: 5417216 - DNA, 25 bp, Homo sapien
taaattggtcctagcacagaggctc

SEQ ID NO: 5417217 - DNA, 25 bp, Homo sapien
tcacaggatagcgaccagtacaggt

SEQ ID NO: 5417218 - DNA, 25 bp, Homo sapien
ctcattcaatttcacaaccttgtga

SEQ ID NO: 5417219 - DNA, 25 bp, Homo sapien
ccatagtgacttgttaaagtgccat

SEQ ID NO: 5417220 - DNA, 25 bp, Homo sapien
ccttgtgaaaccttgtagttactat

SEQ ID NO: 5417221 - DNA, 25 bp, Homo sapien
aatccatagtgacttgttaaagtgc

SEQ ID NO: 5417222 - DNA, 25 bp, Homo sapien
tgctgtcaactaggtcagagaagta

SEQ ID NO: 5417223 - DNA, 25 bp, Homo sapien
gctgtcaactaggtcagagaagtag

SEQ ID NO: 5417224 - DNA, 25 bp, Homo sapien
atgctgtcaactaggtcagagaagt

SEQ ID NO: 5417225 - DNA, 25 bp, Homo sapien
ataagtaacagagtagtatacaaag

SEQ ID NO: 5417226 - DNA, 25 bp, Homo sapien
tacaaagttgaactaaactacatat

SEQ ID NO: 5417227 - DNA, 25 bp, Homo sapien
aataagtaacagagtagtatacaaa

SEQ ID NO: 5417228 - DNA, 25 bp, Homo sapien
caaagttgaactaaactacatattt

SEQ ID NO: 5417229 - DNA, 25 bp, Homo sapien
atttcagacctaatgatgaagccac

SEQ ID NO: 5417230 - DNA, 25 bp, Homo sapien
ggctaatgaatctatgtagaatata

SEQ ID NO: 5417231 - DNA, 25 bp, Homo sapien
aaatttcagacctaatgatgaagcc

SEQ ID NO: 5417232 - DNA, 25 bp, Homo sapien
aaatacaggttaaattgccttcttg

SEQ ID NO: 5417233 - DNA, 25 bp, Homo sapien
gattgcttccaagatccggttcagc

SEQ ID NO: 5417234 - DNA, 25 bp, Homo sapien
tgcaacaagtacatgaggtctcaag

SEQ ID NO: 5417235 - DNA, 25 bp, Homo sapien
gagaggtttgtactagattgcttcc

SEQ ID NO: 5417236 - DNA, 25 bp, Homo sapien
tagcacctcgcctgatgatattctc

SEQ ID NO: 5417237 - DNA, 25 bp, Homo sapien
tgctacatctggtggcagcccactt

SEQ ID NO: 5417238 - DNA, 25 bp, Homo sapien
aaacaattgtaaccgatttggtgcg

SEQ ID NO: 5417239 - DNA, 25 bp, Homo sapien
cgccggtgccttacaagctgtgtaa

SEQ ID NO: 5417240 - DNA, 25 bp, Homo sapien
taacctttacgcagatatttcccac

SEQ ID NO: 5417241 - DNA, 25 bp, Homo sapien
gggatcaaagtctgcccagataatt

SEQ ID NO: 5417242 - DNA, 25 bp, Homo sapien
cagtctgtcgtttaaattgctctag

SEQ ID NO: 5417243 - DNA, 25 bp, Homo sapien
taaaagcctgcccacgagtcagtct

SEQ ID NO: 5417244 - DNA, 25 bp, Homo sapien
ttaaattgctctagggggccacaca

SEQ ID NO: 5417245 - DNA, 25 bp, Homo sapien
cagcaaagctcgcaaagtggggacc

SEQ ID NO: 5417246 - DNA, 25 bp, Homo sapien
tccaggtcccgggcagcaaagctcg

SEQ ID NO: 5417247 - DNA, 25 bp, Homo sapien
aggagaaacccagcaagcgaggggc

SEQ ID NO: 5417248 - DNA, 25 bp, Homo sapien
aaagctcgcaaagtggggaccgcct

SEQ ID NO: 5417249 - DNA, 25 bp, Homo sapien
gagggggctcgaggacgaaggctcc

SEQ ID NO: 5417250 - DNA, 25 bp, Homo sapien
ggagggggctcgaggacgaaggctc

SEQ ID NO: 5417251 - DNA, 25 bp, Homo sapien
gacgaaggctccagcgggagggaaa

SEQ ID NO: 5417252 - DNA, 25 bp, Homo sapien
gaaccccaggcgagtctatgcgcct

SEQ ID NO: 5417253 - DNA, 25 bp, Homo sapien
agggcactacctccccagagccggg

SEQ ID NO: 5417254 - DNA, 25 bp, Homo sapien
gcttcccaccctcgcaggactggct

SEQ ID NO: 5417255 - DNA, 25 bp, Homo sapien
caggaggttaagagtactgagtgta

SEQ ID NO: 5417256 - DNA, 25 bp, Homo sapien
gagcccggggttggagacgtggaga

SEQ ID NO: 5417257 - DNA, 25 bp, Homo sapien
gcggcgtgtgattcagcagggacct

SEQ ID NO: 5417258 - DNA, 25 bp, Homo sapien
cctcccggatggcggcgtgtgattc

SEQ ID NO: 5417259 - DNA, 25 bp, Homo sapien
ggatggcggcgtgtgattcagcagg

SEQ ID NO: 5417260 - DNA, 25 bp, Homo sapien
caagatggcggcccctccaaacttc

SEQ ID NO: 5417261 - DNA, 25 bp, Homo sapien
ttccactgctactttggacactcat

SEQ ID NO: 5417262 - DNA, 25 bp, Homo sapien
gcggcccctccaaacttccactgct

SEQ ID NO: 5417263 - DNA, 25 bp, Homo sapien
atggcggcccctccaaacttccact

SEQ ID NO: 5417264 - DNA, 25 bp, Homo sapien
acggcagcggcggcaacggcaccgg

SEQ ID NO: 5417265 - DNA, 25 bp, Homo sapien
gcagcggcggcaacggcaccggcac

SEQ ID NO: 5417266 - DNA, 25 bp, Homo sapien
ggcagcggcggcaacggcaccggca

SEQ ID NO: 5417267 - DNA, 25 bp, Homo sapien
cgacggcagcggcggcaacggcacc

SEQ ID NO: 5417268 - DNA, 25 bp, Homo sapien
tgccggcacctctgcagtgcgtcgg

SEQ ID NO: 5417269 - DNA, 25 bp, Homo sapien
aggcggtggggtaacctctgcatca

SEQ ID NO: 5417270 - DNA, 25 bp, Homo sapien
aggacacttccgcgggcggaacctg

SEQ ID NO: 5417271 - DNA, 25 bp, Homo sapien
gagcgggcgcgccagaggagaggag

SEQ ID NO: 5417272 - DNA, 25 bp, Homo sapien
gggaagaataggccaaatgccccac

SEQ ID NO: 5417273 - DNA, 25 bp, Homo sapien
caggggaagaataggccaaatgccc

SEQ ID NO: 5417274 - DNA, 25 bp, Homo sapien
atctagcaggggaagaataggccaa

SEQ ID NO: 5417275 - DNA, 25 bp, Homo sapien
tctgggctggccatctagcagggga

SEQ ID NO: 5417276 - DNA, 25 bp, Homo sapien
cagggtccaaggtcttaactgtttg

SEQ ID NO: 5417277 - DNA, 25 bp, Homo sapien
tcctcgctggaatacgtacacctga

SEQ ID NO: 5417278 - DNA, 25 bp, Homo sapien
gatgcttcactccttcagggtccaa

SEQ ID NO: 5417279 - DNA, 25 bp, Homo sapien
taggagtctcccttgcattttggca

SEQ ID NO: 5417280 - DNA, 25 bp, Homo sapien
gaagtcctaattcccatatctcata

SEQ ID NO: 5417281 - DNA, 25 bp, Homo sapien
taagtaaaccatggttcagctacac

SEQ ID NO: 5417282 - DNA, 25 bp, Homo sapien
caaaatctgacgcagtaatgtgtcc

SEQ ID NO: 5417283 - DNA, 25 bp, Homo sapien
taaggtgcagcacagcgtaaatagt

SEQ ID NO: 5417284 - DNA, 25 bp, Homo sapien
tcagccagcaggtatatacagccgg

SEQ ID NO: 5417285 - DNA, 25 bp, Homo sapien
atacagccggatgtgccagggacag

SEQ ID NO: 5417286 - DNA, 25 bp, Homo sapien
ctcctatgatctttgcggtgacatc

SEQ ID NO: 5417287 - DNA, 25 bp, Homo sapien
ggtgacatcctttgggcacatgaaa

SEQ ID NO: 5417288 - DNA, 25 bp, Homo sapien
tcccacaaggaatgagagctgtctg

SEQ ID NO: 5417289 - DNA, 25 bp, Homo sapien
cagccttcaagatgagccctggtga

SEQ ID NO: 5417290 - DNA, 25 bp, Homo sapien
cataaaggatgttacggtttctgcc

SEQ ID NO: 5417291 - DNA, 25 bp, Homo sapien
gcctttagaggactgcagacttaga

SEQ ID NO: 5417292 - DNA, 25 bp, Homo sapien
cctgcccaggagctagaaccaaagg

SEQ ID NO: 5417293 - DNA, 25 bp, Homo sapien
ttatggctacataatagtttacata

SEQ ID NO: 5417294 - DNA, 25 bp, Homo sapien
tccctgcagtgttgacatccccagg

SEQ ID NO: 5417295 - DNA, 25 bp, Homo sapien
gagctagaaccaaaggcgcacatca

SEQ ID NO: 5417296 - DNA, 25 bp, Homo sapien
tcctcaatatatgatcttggcactg

SEQ ID NO: 5417297 - DNA, 25 bp, Homo sapien
ggttattcatcgcttgttagatggg

SEQ ID NO: 5417298 - DNA, 25 bp, Homo sapien
atatgagagatagggacttggtttc

SEQ ID NO: 5417299 - DNA, 25 bp, Homo sapien
gtctttgccccgaccaatgctatgg

SEQ ID NO: 5417300 - DNA, 25 bp, Homo sapien
gctcctatcatggagggaaagcact

SEQ ID NO: 5417301 - DNA, 25 bp, Homo sapien
cctgacataataagggccagtctcc

SEQ ID NO: 5417302 - DNA, 25 bp, Homo sapien
ctaaaaggcatctggtactctatcc

SEQ ID NO: 5417303 - DNA, 25 bp, Homo sapien
gacaacatttgcctagaacctgcta

SEQ ID NO: 5417304 - DNA, 25 bp, Homo sapien
aaaatcaagatgtcaccgggattgg

SEQ ID NO: 5417305 - DNA, 25 bp, Homo sapien
gtcaccgggattggttcttcctgga

SEQ ID NO: 5417306 - DNA, 25 bp, Homo sapien
ctcagagggagcctaggagaagcta

SEQ ID NO: 5417307 - DNA, 25 bp, Homo sapien
agatgtcaccgggattggttcttcc

SEQ ID NO: 5417308 - DNA, 25 bp, Homo sapien
ggtgctgtctataggcaatgatggt

SEQ ID NO: 5417309 - DNA, 25 bp, Homo sapien
taatgagaacttcaaggaacgtttc

SEQ ID NO: 5417310 - DNA, 25 bp, Homo sapien
ctgaacaatcatcactcccaggata

SEQ ID NO: 5417311 - DNA, 25 bp, Homo sapien
tcttaatttggaagaggtgctgtct

SEQ ID NO: 5417312 - DNA, 25 bp, Homo sapien
ccaatcttcgatgcgccttttgcct

SEQ ID NO: 5417313 - DNA, 25 bp, Homo sapien
ttacccttattgtcccaatcttcga

SEQ ID NO: 5417314 - DNA, 25 bp, Homo sapien
tattgtcccaatcttcgatgcgcct

SEQ ID NO: 5417315 - DNA, 25 bp, Homo sapien
tcttcgatgcgccttttgcctttgg

SEQ ID NO: 5417316 - DNA, 25 bp, Homo sapien
gcttgggaagcaactggtaacctgg

SEQ ID NO: 5417317 - DNA, 25 bp, Homo sapien
ggtttggccagctcctatagcatga

SEQ ID NO: 5417318 - DNA, 25 bp, Homo sapien
actactctgggtgaatgcttgggaa

SEQ ID NO: 5417319 - DNA, 25 bp, Homo sapien
ccaagaatgggttataagtgaggcc

SEQ ID NO: 5417320 - DNA, 25 bp, Homo sapien
tcatctccacacttaataactccac

SEQ ID NO: 5417321 - DNA, 25 bp, Homo sapien
ccctcatctccacacttaataactc

SEQ ID NO: 5417322 - DNA, 25 bp, Homo sapien
ccacacttaataactccacattgca

SEQ ID NO: 5417323 - DNA, 25 bp, Homo sapien
tctccacacttaataactccacatt

SEQ ID NO: 5417324 - DNA, 25 bp, Homo sapien
tttggatggacctctgcagtcttag

SEQ ID NO: 5417325 - DNA, 25 bp, Homo sapien
ctagttactgtggtccaggtttgga

SEQ ID NO: 5417326 - DNA, 25 bp, Homo sapien
tctgcagtcttagcacaggctcgag

SEQ ID NO: 5417327 - DNA, 25 bp, Homo sapien
caggctcgaggagtataagttttca

SEQ ID NO: 5417328 - DNA, 25 bp, Homo sapien
gattcccattggcaataatgtcggc

SEQ ID NO: 5417329 - DNA, 25 bp, Homo sapien
caaccataaatcatgttcaatgcca

SEQ ID NO: 5417330 - DNA, 25 bp, Homo sapien
aaatactttgagaccgtgcccttga

SEQ ID NO: 5417331 - DNA, 25 bp, Homo sapien
gtgcccttgattactactcaaaagt

SEQ ID NO: 5417332 - DNA, 25 bp, Homo sapien
ctttgatgataatagcttctgcctg

SEQ ID NO: 5417333 - DNA, 25 bp, Homo sapien
tgataatagcttctgcctgggctct

SEQ ID NO: 5417334 - DNA, 25 bp, Homo sapien
ttgatgataatagcttctgcctggg

SEQ ID NO: 5417335 - DNA, 25 bp, Homo sapien
gatgataatagcttctgcctgggct

SEQ ID NO: 5417336 - DNA, 25 bp, Homo sapien
ggagcatgaccctctcacgagactt

SEQ ID NO: 5417337 - DNA, 25 bp, Homo sapien
cgagacttggttggaagccctggac

SEQ ID NO: 5417338 - DNA, 25 bp, Homo sapien
ttcagggcactgtgagtctctacgg

SEQ ID NO: 5417339 - DNA, 25 bp, Homo sapien
tacgggcatcaaccgaacatcgcac

SEQ ID NO: 5417340 - DNA, 25 bp, Homo sapien
tggatgacaagagtatatgcacagt

SEQ ID NO: 5417341 - DNA, 25 bp, Homo sapien
tgccaggcacagtcgacatcggctg

SEQ ID NO: 5417342 - DNA, 25 bp, Homo sapien
ggtcatgtgtaactcctttgcttca

SEQ ID NO: 5417343 - DNA, 25 bp, Homo sapien
cacaaggagtaatggaagggctgaa

SEQ ID NO: 5417344 - DNA, 25 bp, Homo sapien
ccatttgccttcagtcatgactgtg

SEQ ID NO: 5417345 - DNA, 25 bp, Homo sapien
cttgcataagcatggagccatgtaa

SEQ ID NO: 5417346 - DNA, 25 bp, Homo sapien
taagcatggagccatgtaaaatatg

SEQ ID NO: 5417347 - DNA, 25 bp, Homo sapien
gaatacaggctattttgagggataa

SEQ ID NO: 5417348 - DNA, 25 bp, Homo sapien
ggggccatggcttcaggaggtgcaa

SEQ ID NO: 5417349 - DNA, 25 bp, Homo sapien
tcataggcccagcagcctaggaggg

SEQ ID NO: 5417350 - DNA, 25 bp, Homo sapien
ataggcccagcagcctaggagggaa

SEQ ID NO: 5417351 - DNA, 25 bp, Homo sapien
ccatcataggcccagcagcctagga

SEQ ID NO: 5417352 - DNA, 25 bp, Homo sapien
cctgcaggtgactgctcctgactga

SEQ ID NO: 5417353 - DNA, 25 bp, Homo sapien
gtctatgccaatagcttagtctttg

SEQ ID NO: 5417354 - DNA, 25 bp, Homo sapien
gaatgaccaactctggattcctcat

SEQ ID NO: 5417355 - DNA, 25 bp, Homo sapien
agagtgtgcttcctcaattggacct

SEQ ID NO: 5417356 - DNA, 25 bp, Homo sapien
aacaagtccccaagttgctactgag

SEQ ID NO: 5417357 - DNA, 25 bp, Homo sapien
ggcacttgccaatgacactggagta

SEQ ID NO: 5417358 - DNA, 25 bp, Homo sapien
tctatgaggaaaacgtcagcttgct

SEQ ID NO: 5417359 - DNA, 25 bp, Homo sapien
gctactgagccaaactgtaaaggcc

SEQ ID NO: 5417360 - DNA, 25 bp, Homo sapien
gagggagcagggcacaactaaagat

SEQ ID NO: 5417361 - DNA, 25 bp, Homo sapien
cacaactaaagatgtaaggagagcg

SEQ ID NO: 5417362 - DNA, 25 bp, Homo sapien
gcgatcgcattctttacgccaagca

SEQ ID NO: 5417363 - DNA, 25 bp, Homo sapien
taaggagagcgatcgcattctttac

SEQ ID NO: 5417364 - DNA, 25 bp, Homo sapien
tgccttgtagcttgcctttgccgag

SEQ ID NO: 5417365 - DNA, 25 bp, Homo sapien
tttaggaggcaatcaaaggctcatt

SEQ ID NO: 5417366 - DNA, 25 bp, Homo sapien
aaactcttggccaagtagcagtgcc

SEQ ID NO: 5417367 - DNA, 25 bp, Homo sapien
gatctactcagtgcctacctgctgg

SEQ ID NO: 5417368 - DNA, 25 bp, Homo sapien
ctctgtaggcactcacacgcagaac

SEQ ID NO: 5417369 - DNA, 25 bp, Homo sapien
gttactgcatgttgctgattcatac

SEQ ID NO: 5417370 - DNA, 25 bp, Homo sapien
ggcactcacacgcagaactattatt

SEQ ID NO: 5417371 - DNA, 25 bp, Homo sapien
tgctgattcatactcataggaaaaa

SEQ ID NO: 5417372 - DNA, 25 bp, Homo sapien
aaagacagattttggcatccacttt

SEQ ID NO: 5417373 - DNA, 25 bp, Homo sapien
atgaaagacagattttggcatccac

SEQ ID NO: 5417374 - DNA, 25 bp, Homo sapien
tcttgcgggtacctttgcgcctctc

SEQ ID NO: 5417375 - DNA, 25 bp, Homo sapien
gaaaccgtattccaagaaatgctca

SEQ ID NO: 5417376 - DNA, 25 bp, Homo sapien
aactacaccaaagccatcttgcggg

SEQ ID NO: 5417377 - DNA, 25 bp, Homo sapien
tgctcaacatttcatgcctgaattg

SEQ ID NO: 5417378 - DNA, 25 bp, Homo sapien
gttcaataggaactaggacccatgc

SEQ ID NO: 5417379 - DNA, 25 bp, Homo sapien
ttgacaatgcactttcacaagcggg

SEQ ID NO: 5417380 - DNA, 25 bp, Homo sapien
gaatgagccataaccttgaaggtcg

SEQ ID NO: 5417381 - DNA, 25 bp, Homo sapien
catttgggcccatccattacaagag

SEQ ID NO: 5417382 - DNA, 25 bp, Homo sapien
tgctgcgcagccatgtggaatagga

SEQ ID NO: 5417383 - DNA, 25 bp, Homo sapien
atctagcagcaaaccccgagaagga

SEQ ID NO: 5417384 - DNA, 25 bp, Homo sapien
tgaaattcagctctctcagaagatg

SEQ ID NO: 5417385 - DNA, 25 bp, Homo sapien
gacagagcccaaaagagaccagttt

SEQ ID NO: 5417386 - DNA, 25 bp, Homo sapien
taaacggagacacaaggagatctgc

SEQ ID NO: 5417387 - DNA, 25 bp, Homo sapien
tacattcaagaactagcctgagacc

SEQ ID NO: 5417388 - DNA, 25 bp, Homo sapien
gaagtcatacacctgctagtctagg

SEQ ID NO: 5417389 - DNA, 25 bp, Homo sapien
tctaggttatctacaagctgacccc

SEQ ID NO: 5417390 - DNA, 25 bp, Homo sapien
taccactgctatatgatgtgttggc

SEQ ID NO: 5417391 - DNA, 25 bp, Homo sapien
actgctaccactgctatatgatgtg

SEQ ID NO: 5417392 - DNA, 25 bp, Homo sapien
ctactgctaccactgctatatgatg

SEQ ID NO: 5417393 - DNA, 25 bp, Homo sapien
actgctatatgatgtgttggctgtg

SEQ ID NO: 5417394 - DNA, 25 bp, Homo sapien
ctcctgagtagctgggacaacaggt

SEQ ID NO: 5417395 - DNA, 25 bp, Homo sapien
ttccttccactccaggttggagtgc

SEQ ID NO: 5417396 - DNA, 25 bp, Homo sapien
ccaggctcaaaagatcctcccagct

SEQ ID NO: 5417397 - DNA, 25 bp, Homo sapien
tccaggaagtgaaatttccttccac

SEQ ID NO: 5417398 - DNA, 25 bp, Homo sapien
aaagtctgctagctggtaagttccc

SEQ ID NO: 5417399 - DNA, 25 bp, Homo sapien
cctgaagagcataaacaaggctggg

SEQ ID NO: 5417400 - DNA, 25 bp, Homo sapien
gatttgcaagccaacttatgtcctt

SEQ ID NO: 5417401 - DNA, 25 bp, Homo sapien
cagttgtcttaaacagagcttacca

SEQ ID NO: 5417402 - DNA, 25 bp, Homo sapien
gggagaaaatagacaacaacaagac

SEQ ID NO: 5417403 - DNA, 25 bp, Homo sapien
taagcggcgatcaaccagattttgc

SEQ ID NO: 5417404 - DNA, 25 bp, Homo sapien
gtcagcatgggctgtacttccccaa

SEQ ID NO: 5417405 - DNA, 25 bp, Homo sapien
gaaacaatagacttacagtagtcct

SEQ ID NO: 5417406 - DNA, 25 bp, Homo sapien
catctgggtatgagggtaaaacaag

SEQ ID NO: 5417407 - DNA, 25 bp, Homo sapien
tccaaaatggaacagccttcacctt

SEQ ID NO: 5417408 - DNA, 25 bp, Homo sapien
gcttaatcaatgactgaagcctcag

SEQ ID NO: 5417409 - DNA, 25 bp, Homo sapien
gaccagtaataagcatcaaagtatg

SEQ ID NO: 5417410 - DNA, 25 bp, Homo sapien
accatctcctcgaacataaaaattt

SEQ ID NO: 5417411 - DNA, 25 bp, Homo sapien
aagaaatatgctctggtaccatctc

SEQ ID NO: 5417412 - DNA, 25 bp, Homo sapien
aaagaaatatgctctggtaccatct

SEQ ID NO: 5417413 - DNA, 25 bp, Homo sapien
tctggtaccatctcctcgaacataa

SEQ ID NO: 5417414 - DNA, 25 bp, Homo sapien
aacaaggcattctttagaacattta

SEQ ID NO: 5417415 - DNA, 25 bp, Homo sapien
tagtctcgaaataacagcattcccc

SEQ ID NO: 5417416 - DNA, 25 bp, Homo sapien
taaaacgaagctgagtcttatcata

SEQ ID NO: 5417417 - DNA, 25 bp, Homo sapien
gacagtcggtttacaacaccttgca

SEQ ID NO: 5417418 - DNA, 25 bp, Homo sapien
taacttggacagtcggtttacaaca

SEQ ID NO: 5417419 - DNA, 25 bp, Homo sapien
aaagatacccagtttgtagaaatct

SEQ ID NO: 5417420 - DNA, 25 bp, Homo sapien
caaagaaatctaaaccataaacata

SEQ ID NO: 5417421 - DNA, 25 bp, Homo sapien
gccaaagaaatctaaaccataaaca

SEQ ID NO: 5417422 - DNA, 25 bp, Homo sapien
ccagtttgtagaaatcttgttttat

SEQ ID NO: 5417423 - DNA, 25 bp, Homo sapien
gaggcagaggtttcacagtagaaac

SEQ ID NO: 5417424 - DNA, 25 bp, Homo sapien
tcttctacaagtaatcaaagtgctc

SEQ ID NO: 5417425 - DNA, 25 bp, Homo sapien
tgacatacctcactaggtgctaaag

SEQ ID NO: 5417426 - DNA, 25 bp, Homo sapien
gtacctgaacaatgcctacagtcta

SEQ ID NO: 5417427 - DNA, 25 bp, Homo sapien
aagggtaaggtaagccatcatcaca

SEQ ID NO: 5417428 - DNA, 25 bp, Homo sapien
gaaaagggtaaggtaagccatcatc

SEQ ID NO: 5417429 - DNA, 25 bp, Homo sapien
tcacatacatcatgaacaaaggcaa

SEQ ID NO: 5417430 - DNA, 25 bp, Homo sapien
atcacatacatcatgaacaaaggca

SEQ ID NO: 5417431 - DNA, 25 bp, Homo sapien
aaagaggttctgtttggactacgat

SEQ ID NO: 5417432 - DNA, 25 bp, Homo sapien
tagacagtgttgttagaggcctgct

SEQ ID NO: 5417433 - DNA, 25 bp, Homo sapien
tgtaggtcagtaccctttctggtca

SEQ ID NO: 5417434 - DNA, 25 bp, Homo sapien
gactacgattattcatgggcaggca

SEQ ID NO: 5417435 - DNA, 25 bp, Homo sapien
cagttggtatgattcccaggagtag

SEQ ID NO: 5417436 - DNA, 25 bp, Homo sapien
atcagttggtatgattcccaggagt

SEQ ID NO: 5417437 - DNA, 25 bp, Homo sapien
tcagttggtatgattcccaggagta

SEQ ID NO: 5417438 - DNA, 25 bp, Homo sapien
tccagaagcaaaatcacaacaatac

SEQ ID NO: 5417439 - DNA, 25 bp, Homo sapien
atacagaaaggactccggagagttc

SEQ ID NO: 5417440 - DNA, 25 bp, Homo sapien
tttacgagctccacagctccagaag

SEQ ID NO: 5417441 - DNA, 25 bp, Homo sapien
tcacaacaatacagaaaggactccg

SEQ ID NO: 5417442 - DNA, 25 bp, Homo sapien
tggctggaccatggttacttaaggc

SEQ ID NO: 5417443 - DNA, 25 bp, Homo sapien
cctggctctcatgggttttatagtc

SEQ ID NO: 5417444 - DNA, 25 bp, Homo sapien
tcattaaacagtaaggatggtcctg

SEQ ID NO: 5417445 - DNA, 25 bp, Homo sapien
gaaattcagtaatgatggctggacc

SEQ ID NO: 5417446 - DNA, 25 bp, Homo sapien
caatatgtattgagctccaactaag

SEQ ID NO: 5417447 - DNA, 25 bp, Homo sapien
aggcaacctgggaaatcagattagg

SEQ ID NO: 5417448 - DNA, 25 bp, Homo sapien
taggcaacctgggaaatcagattag

SEQ ID NO: 5417449 - DNA, 25 bp, Homo sapien
tcaggcaatatgtattgagctccaa

SEQ ID NO: 5417450 - DNA, 25 bp, Homo sapien
tattataagctcagagaccactggg

SEQ ID NO: 5417451 - DNA, 25 bp, Homo sapien
aatttaccagcatcacccaggcctg

SEQ ID NO: 5417452 - DNA, 25 bp, Homo sapien
taataccttgagatcagtcataaag

SEQ ID NO: 5417453 - DNA, 25 bp, Homo sapien
caactgccaatgtagtgtatttacg

SEQ ID NO: 5417454 - DNA, 25 bp, Homo sapien
gaagggtgagcctggagcaaatctc

SEQ ID NO: 5417455 - DNA, 25 bp, Homo sapien
gaaatgttctgcaacgtgctaatgc

SEQ ID NO: 5417456 - DNA, 25 bp, Homo sapien
cagattggccatagataaaaggtgt

SEQ ID NO: 5417457 - DNA, 25 bp, Homo sapien
ttaggatgatgagtgattccctccc

SEQ ID NO: 5417458 - DNA, 25 bp, Homo sapien
gatttggcatgcaaacatcttacat

SEQ ID NO: 5417459 - DNA, 25 bp, Homo sapien
gacatctaagtatctagggagagta

SEQ ID NO: 5417460 - DNA, 25 bp, Homo sapien
tcagaagggatgacaaaatgaggct

SEQ ID NO: 5417461 - DNA, 25 bp, Homo sapien
tttaagcctagacacaatgatttgg

SEQ ID NO: 5417462 - DNA, 25 bp, Homo sapien
aattcccagttcacatgaaagtaga

SEQ ID NO: 5417463 - DNA, 25 bp, Homo sapien
gacaacccatggctacgaaacacta

SEQ ID NO: 5417464 - DNA, 25 bp, Homo sapien
aacaatgatggacaacccatggcta

SEQ ID NO: 5417465 - DNA, 25 bp, Homo sapien
catggctacgaaacactattttcag

SEQ ID NO: 5417466 - DNA, 25 bp, Homo sapien
ttcaaaattggaaacacactatttc

SEQ ID NO: 5417467 - DNA, 25 bp, Homo sapien
aaatgcaggtaaaggctatacccaa

SEQ ID NO: 5417468 - DNA, 25 bp, Homo sapien
ttaaaatgcccagtagtgtgaaaat

SEQ ID NO: 5417469 - DNA, 25 bp, Homo sapien
gaatacatgtacagtaataaaagaa

SEQ ID NO: 5417470 - DNA, 25 bp, Homo sapien
gatagtgaaaactgcttatgatgcc

SEQ ID NO: 5417471 - DNA, 25 bp, Homo sapien
taaaactgccctcagattaaaatga

SEQ ID NO: 5417472 - DNA, 25 bp, Homo sapien
caaggtctacaccagattatagcaa

SEQ ID NO: 5417473 - DNA, 25 bp, Homo sapien
cccttagatattatttatgcacaga

SEQ ID NO: 5417474 - DNA, 25 bp, Homo sapien
gattaaagacatgagtcccttagat

SEQ ID NO: 5417475 - DNA, 25 bp, Homo sapien
tcccatttttgtcccttgagcacaa

SEQ ID NO: 5417476 - DNA, 25 bp, Homo sapien
ctcccatttttgtcccttgagcaca

SEQ ID NO: 5417477 - DNA, 25 bp, Homo sapien
tgagaaacgatttgtagcactagtt

SEQ ID NO: 5417478 - DNA, 25 bp, Homo sapien
caacagccaattacgatccttgaaa

SEQ ID NO: 5417479 - DNA, 25 bp, Homo sapien
ttttcatcaggcacagtaggacagt

SEQ ID NO: 5417480 - DNA, 25 bp, Homo sapien
gaaagtggcattgctaccaggaaac

SEQ ID NO: 5417481 - DNA, 25 bp, Homo sapien
tgtaataggcctaatccacgcatta

SEQ ID NO: 5417482 - DNA, 25 bp, Homo sapien
taacctactgtagacgcatgccatt

SEQ ID NO: 5417483 - DNA, 25 bp, Homo sapien
cagtgctacaggcagtaacaatttc

SEQ ID NO: 5417484 - DNA, 25 bp, Homo sapien
tcagtaatactggttgcctctaggg

SEQ ID NO: 5417485 - DNA, 25 bp, Homo sapien
agcagcttctccaatcaatgctggc

SEQ ID NO: 5417486 - DNA, 25 bp, Homo sapien
cagcttctccaatcaatgctggcaa

SEQ ID NO: 5417487 - DNA, 25 bp, Homo sapien
gcttctccaatcaatgctggcaact

SEQ ID NO: 5417488 - DNA, 25 bp, Homo sapien
ctccaatcaatgctggcaactccat

SEQ ID NO: 5417489 - DNA, 25 bp, Homo sapien
ctttttaagccagaacacgattcca

SEQ ID NO: 5417490 - DNA, 25 bp, Homo sapien
aaagtagatccccaaattatatatg

SEQ ID NO: 5417491 - DNA, 25 bp, Homo sapien
ttagcatcacgtcctcaaggtccat

SEQ ID NO: 5417492 - DNA, 25 bp, Homo sapien
ttagaacagtaggattaagaggcaa

SEQ ID NO: 5417493 - DNA, 25 bp, Homo sapien
tcagaagcaatgacacgaggaggag

SEQ ID NO: 5417494 - DNA, 25 bp, Homo sapien
ggagctacagcacgcagttgactac

SEQ ID NO: 5417495 - DNA, 25 bp, Homo sapien
tggctctaggagctacagcacgcag

SEQ ID NO: 5417496 - DNA, 25 bp, Homo sapien
aaaagtcactaaagctctggctcta

SEQ ID NO: 5417497 - DNA, 25 bp, Homo sapien
cagaaggactcgcacagctgagttt

SEQ ID NO: 5417498 - DNA, 25 bp, Homo sapien
gcttcttcttccttagaccactgca

SEQ ID NO: 5417499 - DNA, 25 bp, Homo sapien
cttccagaaggactcgcacagctga

SEQ ID NO: 5417500 - DNA, 25 bp, Homo sapien
cttgctcttccagaaggactcgcac

SEQ ID NO: 5417501 - DNA, 25 bp, Homo sapien
tctgtcttcagtctttaagaactca

SEQ ID NO: 5417502 - DNA, 25 bp, Homo sapien
ttttctccagagaatagtctgtctt

SEQ ID NO: 5417503 - DNA, 25 bp, Homo sapien
ctttaagaactcagctccttacatg

SEQ ID NO: 5417504 - DNA, 25 bp, Homo sapien
tccagagaatagtctgtcttcagtc

SEQ ID NO: 5417505 - DNA, 25 bp, Homo sapien
ggtgttcggtctttgtgggcttcac

SEQ ID NO: 5417506 - DNA, 25 bp, Homo sapien
gggtgttcggtctttgtgggcttca

SEQ ID NO: 5417507 - DNA, 25 bp, Homo sapien
tactttgctgtgaattgcacaactc

SEQ ID NO: 5417508 - DNA, 25 bp, Homo sapien
gagatcgattcctgactactttgct

SEQ ID NO: 5417509 - DNA, 25 bp, Homo sapien
ctactttgctgtgaattgcacaact

SEQ ID NO: 5417510 - DNA, 25 bp, Homo sapien
atcgattcctgactactttgctgtg

SEQ ID NO: 5417511 - DNA, 25 bp, Homo sapien
tacagttagtgcagcgaataggatg

SEQ ID NO: 5417512 - DNA, 25 bp, Homo sapien
taggcattgaagacgctcacttcag

SEQ ID NO: 5417513 - DNA, 25 bp, Homo sapien
gcattgaagacgctcacttcagaaa

SEQ ID NO: 5417514 - DNA, 25 bp, Homo sapien
acataggcattgaagacgctcactt

SEQ ID NO: 5417515 - DNA, 25 bp, Homo sapien
ggcacggaccagagatatatgttta

SEQ ID NO: 5417516 - DNA, 25 bp, Homo sapien
tgccaagttcctcgttagcatagtg

SEQ ID NO: 5417517 - DNA, 25 bp, Homo sapien
aactgccaagttgtattccaaaatg

SEQ ID NO: 5417518 - DNA, 25 bp, Homo sapien
cctcgttagcatagtggtgagtaaa

SEQ ID NO: 5417519 - DNA, 25 bp, Homo sapien
ctttatgagggtctgggtcttttgc

SEQ ID NO: 5417520 - DNA, 25 bp, Homo sapien
caactgggctggtctatttgcttgc

SEQ ID NO: 5417521 - DNA, 25 bp, Homo sapien
gcttgctttgaatatacctcttgta

SEQ ID NO: 5417522 - DNA, 25 bp, Homo sapien
tttgtagttcttaactaactgggca

SEQ ID NO: 5417523 - DNA, 25 bp, Homo sapien
ccatatatgaaacagggcaagagga

SEQ ID NO: 5417524 - DNA, 25 bp, Homo sapien
aaaaaacacacatgtgtactgaaca

SEQ ID NO: 5417525 - DNA, 25 bp, Homo sapien
tgtgtactgaacatgtaaaaaacaa

SEQ ID NO: 5417526 - DNA, 25 bp, Homo sapien
gaatcagatgataagtataattttt

SEQ ID NO: 5417527 - DNA, 25 bp, Homo sapien
gtcagttaaaatccttgatcccaga

SEQ ID NO: 5417528 - DNA, 25 bp, Homo sapien
tatctgtgtggcacctttcctagcc

SEQ ID NO: 5417529 - DNA, 25 bp, Homo sapien
tcaaaaactttggctgggtcagtta

SEQ ID NO: 5417530 - DNA, 25 bp, Homo sapien
gtaaccactttggtatctgtgtggc

SEQ ID NO: 5417531 - DNA, 25 bp, Homo sapien
tatgatcttgctggcaataagcagc

SEQ ID NO: 5417532 - DNA, 25 bp, Homo sapien
gggctgaagtcaaaagaacctgcat

SEQ ID NO: 5417533 - DNA, 25 bp, Homo sapien
tgagggaattgggaagacacatagc

SEQ ID NO: 5417534 - DNA, 25 bp, Homo sapien
tgcatctgagtatacagcacactgt

SEQ ID NO: 5417535 - DNA, 25 bp, Homo sapien
tttgtggctgaataggagctctatg

SEQ ID NO: 5417536 - DNA, 25 bp, Homo sapien
tacaaggagcttatacctggatttg

SEQ ID NO: 5417537 - DNA, 25 bp, Homo sapien
tattggttttgtggttgtacttgta

SEQ ID NO: 5417538 - DNA, 25 bp, Homo sapien
tattttaagtcaactgagggacctg

SEQ ID NO: 5417539 - DNA, 25 bp, Homo sapien
tgcagaaagcaatttcaggtggcgc

SEQ ID NO: 5417540 - DNA, 25 bp, Homo sapien
gagggctgaaccgacaacaggctta

SEQ ID NO: 5417541 - DNA, 25 bp, Homo sapien
ccctaagtagggcagagtcatctca

SEQ ID NO: 5417542 - DNA, 25 bp, Homo sapien
cacttaataggtggctaagccggga

SEQ ID NO: 5417543 - DNA, 25 bp, Homo sapien
aatccataacgtggatgaaaagaaa

SEQ ID NO: 5417544 - DNA, 25 bp, Homo sapien
ttttaaatccataacgtggatgaaa

SEQ ID NO: 5417545 - DNA, 25 bp, Homo sapien
taaatccataacgtggatgaaaaga

SEQ ID NO: 5417546 - DNA, 25 bp, Homo sapien
ctttttaaatccataacgtggatga

SEQ ID NO: 5417547 - DNA, 25 bp, Homo sapien
tggaatctgggaggttgaaactgca

SEQ ID NO: 5417548 - DNA, 25 bp, Homo sapien
gcaggaggatgactggaatctggga

SEQ ID NO: 5417549 - DNA, 25 bp, Homo sapien
aggcaggaggatgactggaatctgg

SEQ ID NO: 5417550 - DNA, 25 bp, Homo sapien
actggaatctgggaggttgaaactg

SEQ ID NO: 5417551 - DNA, 25 bp, Homo sapien
tagccaagggtaaatgtccagagaa

SEQ ID NO: 5417552 - DNA, 25 bp, Homo sapien
tactcatgagtagaggatccactct

SEQ ID NO: 5417553 - DNA, 25 bp, Homo sapien
gattaaggtggagcaaagaaccagg

SEQ ID NO: 5417554 - DNA, 25 bp, Homo sapien
gattctggacccaaatagccaaggg

SEQ ID NO: 5417555 - DNA, 25 bp, Homo sapien
gtggctgaagcctatcccctcagct

SEQ ID NO: 5417556 - DNA, 25 bp, Homo sapien
accaacccttggacacgacgacatt

SEQ ID NO: 5417557 - DNA, 25 bp, Homo sapien
acattccatcgcagggagcactcac

SEQ ID NO: 5417558 - DNA, 25 bp, Homo sapien
cacagacaaggccaattcatccagc

SEQ ID NO: 5417559 - DNA, 25 bp, Homo sapien
gaaggggcaagatccacacaaacag

SEQ ID NO: 5417560 - DNA, 25 bp, Homo sapien
aaggggcaagatccacacaaacagt

SEQ ID NO: 5417561 - DNA, 25 bp, Homo sapien
agaaggggcaagatccacacaaaca

SEQ ID NO: 5417562 - DNA, 25 bp, Homo sapien
ggccgagaagcttgtgagtaccggg

SEQ ID NO: 5417563 - DNA, 25 bp, Homo sapien
gggatccctaagtgcagggcgcaca

SEQ ID NO: 5417564 - DNA, 25 bp, Homo sapien
cagaacctcccagggcgaaggtcgg

SEQ ID NO: 5417565 - DNA, 25 bp, Homo sapien
cagctagccactcgcagcacagaga

SEQ ID NO: 5417566 - DNA, 25 bp, Homo sapien
tgtgagaacattattttgagcccaa

SEQ ID NO: 5417567 - DNA, 25 bp, Homo sapien
cagctttgagctaggtggtaatgca

SEQ ID NO: 5417568 - DNA, 25 bp, Homo sapien
caaactttgcttaaggatgagaaat

SEQ ID NO: 5417569 - DNA, 25 bp, Homo sapien
tccaagaagtttagtgttttgcagc

SEQ ID NO: 5417570 - DNA, 25 bp, Homo sapien
ggatacaacctaacttccaacaata

SEQ ID NO: 5417571 - DNA, 25 bp, Homo sapien
caaagtcactgtgtaacgcgtgtca

SEQ ID NO: 5417572 - DNA, 25 bp, Homo sapien
gaaacatccacacattagaacataa

SEQ ID NO: 5417573 - DNA, 25 bp, Homo sapien
taaagtccagtttacgtgacaccat

SEQ ID NO: 5417574 - DNA, 25 bp, Homo sapien
agaacttagtctgtatccccttgag

SEQ ID NO: 5417575 - DNA, 25 bp, Homo sapien
tctctcccagagtttgtcaggacag

SEQ ID NO: 5417576 - DNA, 25 bp, Homo sapien
caagaaagatgaactggtgatctgc

SEQ ID NO: 5417577 - DNA, 25 bp, Homo sapien
acaaaggactgagtctaactgctgc

SEQ ID NO: 5417578 - DNA, 25 bp, Homo sapien
tacgactttctgttagcatactgga

SEQ ID NO: 5417579 - DNA, 25 bp, Homo sapien
catgtgcgcctttattagctgagcc

SEQ ID NO: 5417580 - DNA, 25 bp, Homo sapien
agtcatgtgcgcctttattagctga

SEQ ID NO: 5417581 - DNA, 25 bp, Homo sapien
atgtgcgcctttattagctgagcca

SEQ ID NO: 5417582 - DNA, 25 bp, Homo sapien
tcatgtgcgcctttattagctgagc

SEQ ID NO: 5417583 - DNA, 25 bp, Homo sapien
cgatgccgggccggccgtgctttac

SEQ ID NO: 5417584 - DNA, 25 bp, Homo sapien
aggagtgggtggccccgatgccggg

SEQ ID NO: 5417585 - DNA, 25 bp, Homo sapien
tgggtggccccgatgccgggccggc

SEQ ID NO: 5417586 - DNA, 25 bp, Homo sapien
ccccgatgccgggccggccgtgctt

SEQ ID NO: 5417587 - DNA, 25 bp, Homo sapien
ccaccatctcgggtaggatgatcat

SEQ ID NO: 5417588 - DNA, 25 bp, Homo sapien
caggtagtggccgatcatctcgggc

SEQ ID NO: 5417589 - DNA, 25 bp, Homo sapien
catgctgcccaccatctcgggtagg

SEQ ID NO: 5417590 - DNA, 25 bp, Homo sapien
agtggccgatcatctcgggcttgat

SEQ ID NO: 5417591 - DNA, 25 bp, Homo sapien
agctgcatcggctgctccagctgct

SEQ ID NO: 5417592 - DNA, 25 bp, Homo sapien
ctccagctgctcgtaggacatgtcc

SEQ ID NO: 5417593 - DNA, 25 bp, Homo sapien
cgcgcactgtacagctgcatcggct

SEQ ID NO: 5417594 - DNA, 25 bp, Homo sapien
tgtacagctgcatcggctgctccag

SEQ ID NO: 5417595 - DNA, 25 bp, Homo sapien
accgcgcccagtgactgtaaatgtt

SEQ ID NO: 5417596 - DNA, 25 bp, Homo sapien
aaagatttcttatactggatatgac

SEQ ID NO: 5417597 - DNA, 25 bp, Homo sapien
tggatatgacttttaatctggattc

SEQ ID NO: 5417598 - DNA, 25 bp, Homo sapien
aaccaacttatactctgctctatat

SEQ ID NO: 5417599 - DNA, 25 bp, Homo sapien
cttatgggattgacagagaaactga

SEQ ID NO: 5417600 - DNA, 25 bp, Homo sapien
cagcacttatgggattgacagagaa

SEQ ID NO: 5417601 - DNA, 25 bp, Homo sapien
gattgcaacagcacttatgggattg

SEQ ID NO: 5417602 - DNA, 25 bp, Homo sapien
cagtgattgcaacagcacttatggg

SEQ ID NO: 5417603 - DNA, 25 bp, Homo sapien
ggctgggcagagatctaccatgtaa

SEQ ID NO: 5417604 - DNA, 25 bp, Homo sapien
cctactctggcaacaacatggacaa

SEQ ID NO: 5417605 - DNA, 25 bp, Homo sapien
tggatagtcaccagaccgcaatgga

SEQ ID NO: 5417606 - DNA, 25 bp, Homo sapien
cattcccgccagaaggtgttttcgt

SEQ ID NO: 5417607 - DNA, 25 bp, Homo sapien
cattcagtccccagacagacgggat

SEQ ID NO: 5417608 - DNA, 25 bp, Homo sapien
cacacggctcatacatggtgggact

SEQ ID NO: 5417609 - DNA, 25 bp, Homo sapien
tgtttgctgtggcagattccccaga

SEQ ID NO: 5417610 - DNA, 25 bp, Homo sapien
gaataaacctcaattgctggagtgg

SEQ ID NO: 5417611 - DNA, 25 bp, Homo sapien
gaaggagtagttgcatagtcacaca

SEQ ID NO: 5417612 - DNA, 25 bp, Homo sapien
gatctgggctgacaaattaaaacct

SEQ ID NO: 5417613 - DNA, 25 bp, Homo sapien
ggtaatagagccagaaggatcccca

SEQ ID NO: 5417614 - DNA, 25 bp, Homo sapien
cagtcttggtgccatagaaggagta

SEQ ID NO: 5417615 - DNA, 25 bp, Homo sapien
caaaagctgatatttcctacctaag

SEQ ID NO: 5417616 - DNA, 25 bp, Homo sapien
gaaagccttaggtatcaattccaaa

SEQ ID NO: 5417617 - DNA, 25 bp, Homo sapien
tggctttggcactagaatagcactg

SEQ ID NO: 5417618 - DNA, 25 bp, Homo sapien
catgtgggctaatgtgaggataatc

SEQ ID NO: 5417619 - DNA, 25 bp, Homo sapien
tggaaccaagagaatacatcttcat

SEQ ID NO: 5417620 - DNA, 25 bp, Homo sapien
cttcataggatgcaggcttcaggga

SEQ ID NO: 5417621 - DNA, 25 bp, Homo sapien
tatcggctgtatgaagaactgtctt

SEQ ID NO: 5417622 - DNA, 25 bp, Homo sapien
actgtcttggaaccaagagaataca

SEQ ID NO: 5417623 - DNA, 25 bp, Homo sapien
acagaggcacaacccgtaaggccag

SEQ ID NO: 5417624 - DNA, 25 bp, Homo sapien
tgctcgatacgggagcggtccagga

SEQ ID NO: 5417625 - DNA, 25 bp, Homo sapien
cattctaaggacaggccaatttggg

SEQ ID NO: 5417626 - DNA, 25 bp, Homo sapien
caggagcacatgtctgccgaccttt

SEQ ID NO: 5417627 - DNA, 25 bp, Homo sapien
gaggtagcccacagggcagtgctca

SEQ ID NO: 5417628 - DNA, 25 bp, Homo sapien
cagaggtagcccacagggcagtgct

SEQ ID NO: 5417629 - DNA, 25 bp, Homo sapien
gtcagaggtagcccacagggcagtg

SEQ ID NO: 5417630 - DNA, 25 bp, Homo sapien
aggtagcccacagggcagtgctcat

SEQ ID NO: 5417631 - DNA, 25 bp, Homo sapien
gataccatctcaacagcgtttcaga

SEQ ID NO: 5417632 - DNA, 25 bp, Homo sapien
gaacacatatgtatcggcaaaagcg

SEQ ID NO: 5417633 - DNA, 25 bp, Homo sapien
tcagaaacgtgaaacccgtacattg

SEQ ID NO: 5417634 - DNA, 25 bp, Homo sapien
gcaaaagcgtaatgaaacaaatggg

SEQ ID NO: 5417635 - DNA, 25 bp, Homo sapien
acagcggttctcaacactgggaagg

SEQ ID NO: 5417636 - DNA, 25 bp, Homo sapien
cagcggttctcaacactgggaaggt

SEQ ID NO: 5417637 - DNA, 25 bp, Homo sapien
tgctcaggggttttttgccggccag

SEQ ID NO: 5417638 - DNA, 25 bp, Homo sapien
ttttttgccggccagcaggtgagaa

SEQ ID NO: 5417639 - DNA, 25 bp, Homo sapien
ccaggatttacatgacctcggtggg

SEQ ID NO: 5417640 - DNA, 25 bp, Homo sapien
tttagcataagtaagaataactgct

SEQ ID NO: 5417641 - DNA, 25 bp, Homo sapien
tactctgctgcatactcggtgccag

SEQ ID NO: 5417642 - DNA, 25 bp, Homo sapien
gggaacaactggatttagcataagt

SEQ ID NO: 5417643 - DNA, 25 bp, Homo sapien
gctttacgacaggtaagtcacggag

SEQ ID NO: 5417644 - DNA, 25 bp, Homo sapien
taacacatactacactgtgggcacg

SEQ ID NO: 5417645 - DNA, 25 bp, Homo sapien
ccaaatgtgcagcagcgtgattcac

SEQ ID NO: 5417646 - DNA, 25 bp, Homo sapien
tgggcacggatcaacagacgagaat

SEQ ID NO: 5417647 - DNA, 25 bp, Homo sapien
tgtttactgtcaagcattcctgaac

SEQ ID NO: 5417648 - DNA, 25 bp, Homo sapien
ttttaggatcctgcatacatgttgg

SEQ ID NO: 5417649 - DNA, 25 bp, Homo sapien
gtaaggaataactgctaaggacaac

SEQ ID NO: 5417650 - DNA, 25 bp, Homo sapien
tagtgtaaaacctctctcttgtgct

SEQ ID NO: 5417651 - DNA, 25 bp, Homo sapien
cattaacaattaaaaggcacataaa

SEQ ID NO: 5417652 - DNA, 25 bp, Homo sapien
atcaggttatcattaacaattaaaa

SEQ ID NO: 5417653 - DNA, 25 bp, Homo sapien
atcattaacaattaaaaggcacata

SEQ ID NO: 5417654 - DNA, 25 bp, Homo sapien
ggttatcattaacaattaaaaggca

SEQ ID NO: 5417655 - DNA, 25 bp, Homo sapien
gacaatttgtctagtgtaaattcat

SEQ ID NO: 5417656 - DNA, 25 bp, Homo sapien
ttccaaatagaaccaaaatcacaaa

SEQ ID NO: 5417657 - DNA, 25 bp, Homo sapien
tataaaatagtatgcattacagaat

SEQ ID NO: 5417658 - DNA, 25 bp, Homo sapien
tctaagctatactatctttggagga

SEQ ID NO: 5417659 - DNA, 25 bp, Homo sapien
cctctttaaagtagggcttgcatcc

SEQ ID NO: 5417660 - DNA, 25 bp, Homo sapien
tcagtgttcctagatacacaggata

SEQ ID NO: 5417661 - DNA, 25 bp, Homo sapien
cagtctcgattttgcattcctgtgg

SEQ ID NO: 5417662 - DNA, 25 bp, Homo sapien
tcaagttggtcctgtagggtttctc

SEQ ID NO: 5417663 - DNA, 25 bp, Homo sapien
taatatgtaggaacattgtttctcc

SEQ ID NO: 5417664 - DNA, 25 bp, Homo sapien
gattgacttcacagaaagcagcttt

SEQ ID NO: 5417665 - DNA, 25 bp, Homo sapien
acacctatccatgttcattctgaca

SEQ ID NO: 5417666 - DNA, 25 bp, Homo sapien
tccttagccgtagtatgcatacacc

SEQ ID NO: 5417667 - DNA, 25 bp, Homo sapien
tgtgccgcattctttatatgtagga

SEQ ID NO: 5417668 - DNA, 25 bp, Homo sapien
caagttatctcattgtagcagtgtc

SEQ ID NO: 5417669 - DNA, 25 bp, Homo sapien
gattttagccaagtctgtgccgcat

SEQ ID NO: 5417670 - DNA, 25 bp, Homo sapien
aattgacctggaattattggcccca

SEQ ID NO: 5417671 - DNA, 25 bp, Homo sapien
tcttcatgaccttagtttaaccagt

SEQ ID NO: 5417672 - DNA, 25 bp, Homo sapien
agacaatcggatattcacatacaga

SEQ ID NO: 5417673 - DNA, 25 bp, Homo sapien
ttgttgattaaagaacaccaaggca

SEQ ID NO: 5417674 - DNA, 25 bp, Homo sapien
accaaggcaattcactgaggaaagg

SEQ ID NO: 5417675 - DNA, 25 bp, Homo sapien
tgacaatatacaacagaaaaggcac

SEQ ID NO: 5417676 - DNA, 25 bp, Homo sapien
gagtgtacattagcacaggaaaaaa

SEQ ID NO: 5417677 - DNA, 25 bp, Homo sapien
catggattgaaaggcccactatgat

SEQ ID NO: 5417678 - DNA, 25 bp, Homo sapien
gcttatagattcatcgcaactccaa

SEQ ID NO: 5417679 - DNA, 25 bp, Homo sapien
gcacaacagactagccctatagcag

SEQ ID NO: 5417680 - DNA, 25 bp, Homo sapien
caactcataaaggagtagtagccag

SEQ ID NO: 5417681 - DNA, 25 bp, Homo sapien
gaaatgtgatcagcctcatgaacac

SEQ ID NO: 5417682 - DNA, 25 bp, Homo sapien
aaaccaaaatgtgagaggcaaaact

SEQ ID NO: 5417683 - DNA, 25 bp, Homo sapien
tgtcagccatcaatcgaggagcact

SEQ ID NO: 5417684 - DNA, 25 bp, Homo sapien
cagggagcctacagttgcagtcaca

SEQ ID NO: 5417685 - DNA, 25 bp, Homo sapien
taagtaacttggtctgtctccaggc

SEQ ID NO: 5417686 - DNA, 25 bp, Homo sapien
gacccggtggtcatatggtatgcac

SEQ ID NO: 5417687 - DNA, 25 bp, Homo sapien
cagaggagggtctacacacattaaa

SEQ ID NO: 5417688 - DNA, 25 bp, Homo sapien
cacaagtcattagcctggtcctctg

SEQ ID NO: 5417689 - DNA, 25 bp, Homo sapien
tagcagcactatgtctcgttatgcc

SEQ ID NO: 5417690 - DNA, 25 bp, Homo sapien
ttccatatgcacactgacaggcgag

SEQ ID NO: 5417691 - DNA, 25 bp, Homo sapien
tttccataagtcaccaataagagaa

SEQ ID NO: 5417692 - DNA, 25 bp, Homo sapien
tatttccataagtcaccaataagag

SEQ ID NO: 5417693 - DNA, 25 bp, Homo sapien
tccataagtcaccaataagagaatg

SEQ ID NO: 5417694 - DNA, 25 bp, Homo sapien
ctttatttccataagtcaccaataa

SEQ ID NO: 5417695 - DNA, 25 bp, Homo sapien
gaacactaattcatgccaaggctta

SEQ ID NO: 5417696 - DNA, 25 bp, Homo sapien
gaagagtttgactcctcagctcagt

SEQ ID NO: 5417697 - DNA, 25 bp, Homo sapien
tcactgtaagtgcaagctgtgcaaa

SEQ ID NO: 5417698 - DNA, 25 bp, Homo sapien
tgcagctgactggatacattacagg

SEQ ID NO: 5417699 - DNA, 25 bp, Homo sapien
gctgctctcctaggcctctttcttc

SEQ ID NO: 5417700 - DNA, 25 bp, Homo sapien
ctgctctcctaggcctctttcttca

SEQ ID NO: 5417701 - DNA, 25 bp, Homo sapien
gctctcctaggcctctttcttcaag

SEQ ID NO: 5417702 - DNA, 25 bp, Homo sapien
tgctctcctaggcctctttcttcaa

SEQ ID NO: 5417703 - DNA, 25 bp, Homo sapien
gcgccattttgccacactcaacagt

SEQ ID NO: 5417704 - DNA, 25 bp, Homo sapien
ccattttgccacactcaacagttgt

SEQ ID NO: 5417705 - DNA, 25 bp, Homo sapien
ttttgccacactcaacagttgtctc

SEQ ID NO: 5417706 - DNA, 25 bp, Homo sapien
cattttgccacactcaacagttgtc

SEQ ID NO: 5417707 - DNA, 25 bp, Homo sapien
caaacgtggctgtggcgagtctgta

SEQ ID NO: 5417708 - DNA, 25 bp, Homo sapien
tatccaccgatgtgatcagggttgg

SEQ ID NO: 5417709 - DNA, 25 bp, Homo sapien
tgacttaggtgttggttctgaacca

SEQ ID NO: 5417710 - DNA, 25 bp, Homo sapien
tgttttcgatgcctgcaaacgtggc

SEQ ID NO: 5417711 - DNA, 25 bp, Homo sapien
caaagaagaatgtttctctcaacca

SEQ ID NO: 5417712 - DNA, 25 bp, Homo sapien
gatgagcgcagcttacagctggaca

SEQ ID NO: 5417713 - DNA, 25 bp, Homo sapien
aaaagccaatggttagcatgctcaa

SEQ ID NO: 5417714 - DNA, 25 bp, Homo sapien
cattttcggtctgacccatgtgcca

SEQ ID NO: 5417715 - DNA, 25 bp, Homo sapien
ttcagcagctgattccctatatggc

SEQ ID NO: 5417716 - DNA, 25 bp, Homo sapien
cttggttcagcagctgattccctat

SEQ ID NO: 5417717 - DNA, 25 bp, Homo sapien
gttcagcagctgattccctatatgg

SEQ ID NO: 5417718 - DNA, 25 bp, Homo sapien
tggttcagcagctgattccctatat

SEQ ID NO: 5417719 - DNA, 25 bp, Homo sapien
agtgaccaaggtaacaccaaactgg

SEQ ID NO: 5417720 - DNA, 25 bp, Homo sapien
gaagttcataagtgaccaaggtaac

SEQ ID NO: 5417721 - DNA, 25 bp, Homo sapien
actggggagaggatcgaaacactcg

SEQ ID NO: 5417722 - DNA, 25 bp, Homo sapien
aaaatcaatgtaaaaccaccgctgg

SEQ ID NO: 5417723 - DNA, 25 bp, Homo sapien
cagtcttgtcttgatgacatcagca

SEQ ID NO: 5417724 - DNA, 25 bp, Homo sapien
tcctgaaacagtcgatgacaccact

SEQ ID NO: 5417725 - DNA, 25 bp, Homo sapien
actgtatgtcgtctggccagcgcgg

SEQ ID NO: 5417726 - DNA, 25 bp, Homo sapien
tgagggcccttcttcccggagaatc

SEQ ID NO: 5417727 - DNA, 25 bp, Homo sapien
gccaggcagccagttaagaaacaac

SEQ ID NO: 5417728 - DNA, 25 bp, Homo sapien
caaatacttccccttggcatggcct

SEQ ID NO: 5417729 - DNA, 25 bp, Homo sapien
tatcactgtatcctcactaggcgga

SEQ ID NO: 5417730 - DNA, 25 bp, Homo sapien
ggtaaacttcctgcctttggaggca

SEQ ID NO: 5417731 - DNA, 25 bp, Homo sapien
ttggttcaaccacttgcaaacacct

SEQ ID NO: 5417732 - DNA, 25 bp, Homo sapien
aaagtaggagactgggccaagtgtg

SEQ ID NO: 5417733 - DNA, 25 bp, Homo sapien
tgctgcccccatttaaaagtaggag

SEQ ID NO: 5417734 - DNA, 25 bp, Homo sapien
cacatttacagcctgactctctttt

SEQ ID NO: 5417735 - DNA, 25 bp, Homo sapien
ggagtttgagacctcacatttacag

SEQ ID NO: 5417736 - DNA, 25 bp, Homo sapien
gcttactttggtctaatgagggcaa

SEQ ID NO: 5417737 - DNA, 25 bp, Homo sapien
aagagggacagcttcacgacaaaag

SEQ ID NO: 5417738 - DNA, 25 bp, Homo sapien
gcatgagatacagctaagcaactga

SEQ ID NO: 5417739 - DNA, 25 bp, Homo sapien
cctggctaatgacaaagtgttaacg

SEQ ID NO: 5417740 - DNA, 25 bp, Homo sapien
taaacctcccacgtgtccattttca

SEQ ID NO: 5417741 - DNA, 25 bp, Homo sapien
gaatgtctcggaggaaacacgcttt

SEQ ID NO: 5417742 - DNA, 25 bp, Homo sapien
ccagctgcaagaagatttaaacctc

SEQ ID NO: 5417743 - DNA, 25 bp, Homo sapien
agaagggaatgtctcggaggaaaca

SEQ ID NO: 5417744 - DNA, 25 bp, Homo sapien
ccaatgggttggtaaaaatgacctg

SEQ ID NO: 5417745 - DNA, 25 bp, Homo sapien
tccagctacttgcagacgaatcttc

SEQ ID NO: 5417746 - DNA, 25 bp, Homo sapien
ggagcacattcagggcgctgactct

SEQ ID NO: 5417747 - DNA, 25 bp, Homo sapien
tctgggtcccgtggtgatctctcca

SEQ ID NO: 5417748 - DNA, 25 bp, Homo sapien
gtacaacaccctcaagatcaaagcc

SEQ ID NO: 5417749 - DNA, 25 bp, Homo sapien
gagagtatatttgcatctgaaatct

SEQ ID NO: 5417750 - DNA, 25 bp, Homo sapien
catgagtacaacaccctcaagatca

SEQ ID NO: 5417751 - DNA, 25 bp, Homo sapien
cattctatattcctgtggtgagtga

SEQ ID NO: 5417752 - DNA, 25 bp, Homo sapien
taaggcaaatactttccagaaacgc

SEQ ID NO: 5417753 - DNA, 25 bp, Homo sapien
gaggttgaccactctctctatccta

SEQ ID NO: 5417754 - DNA, 25 bp, Homo sapien
tctttttcggattctgaggttgacc

SEQ ID NO: 5417755 - DNA, 25 bp, Homo sapien
tcatgataggcctaggaacataagg

SEQ ID NO: 5417756 - DNA, 25 bp, Homo sapien
tatttgtcacaagaagcgcctaaca

SEQ ID NO: 5417757 - DNA, 25 bp, Homo sapien
gaaaacctgcttagaatcccttgag

SEQ ID NO: 5417758 - DNA, 25 bp, Homo sapien
gagttcaagagaaatgccactaaga

SEQ ID NO: 5417759 - DNA, 25 bp, Homo sapien
tatctgtgcaaaaaggtcaacggaa

SEQ ID NO: 5417760 - DNA, 25 bp, Homo sapien
gagccatctcttctggtaaatttgt

SEQ ID NO: 5417761 - DNA, 25 bp, Homo sapien
tcttctggtaaatttgtcccgaaca

SEQ ID NO: 5417762 - DNA, 25 bp, Homo sapien
gctggaagtggaacagagccatctc

SEQ ID NO: 5417763 - DNA, 25 bp, Homo sapien
acagcctccagcaagaacttctgct

SEQ ID NO: 5417764 - DNA, 25 bp, Homo sapien
tgagttcttactatgcttatgctgg

SEQ ID NO: 5417765 - DNA, 25 bp, Homo sapien
attagaaagacaacatcagttaacc

SEQ ID NO: 5417766 - DNA, 25 bp, Homo sapien
tatgctggtttagaactggtctcaa

SEQ ID NO: 5417767 - DNA, 25 bp, Homo sapien
tacaaattctgcgacagtgtgccag

SEQ ID NO: 5417768 - DNA, 25 bp, Homo sapien
tggccttttctggagcaacccctat

SEQ ID NO: 5417769 - DNA, 25 bp, Homo sapien
acccctataagttgtggtatcagac

SEQ ID NO: 5417770 - DNA, 25 bp, Homo sapien
ggagcaacccctataagttgtggta

SEQ ID NO: 5417771 - DNA, 25 bp, Homo sapien
tttctggagcaacccctataagttg

SEQ ID NO: 5417772 - DNA, 25 bp, Homo sapien
cattttatcattgttgcctgcgaag

SEQ ID NO: 5417773 - DNA, 25 bp, Homo sapien
cattgagaaggctaaactatgcagt

SEQ ID NO: 5417774 - DNA, 25 bp, Homo sapien
cagaataatggaccagttgcaagca

SEQ ID NO: 5417775 - DNA, 25 bp, Homo sapien
tgttttacaactcgcctcaataagg

SEQ ID NO: 5417776 - DNA, 25 bp, Homo sapien
tttataaatggtccctgaaagagac

SEQ ID NO: 5417777 - DNA, 25 bp, Homo sapien
tgtaggagcatggtgacatagaccc

SEQ ID NO: 5417778 - DNA, 25 bp, Homo sapien
ccacctgcagatatgtgccttggtt

SEQ ID NO: 5417779 - DNA, 25 bp, Homo sapien
gacccatgttgggacaaacacataa

SEQ ID NO: 5417780 - DNA, 25 bp, Homo sapien
cctgtagagtccaaagaagccctca

SEQ ID NO: 5417781 - DNA, 25 bp, Homo sapien
gaagccctcataacgcaagactttc

SEQ ID NO: 5417782 - DNA, 25 bp, Homo sapien
cgggtcttcaccagatctataggat

SEQ ID NO: 5417783 - DNA, 25 bp, Homo sapien
cgctggttttgcattcgggtcttca

SEQ ID NO: 5417784 - DNA, 25 bp, Homo sapien
tagccattgctacgacaagtctcct

SEQ ID NO: 5417785 - DNA, 25 bp, Homo sapien
gacccatgggaacaatgaactgcac

SEQ ID NO: 5417786 - DNA, 25 bp, Homo sapien
tgtcctgaagacagactggagccag

SEQ ID NO: 5417787 - DNA, 25 bp, Homo sapien
gaaagccctgaagtcgtgacccatg

SEQ ID NO: 5417788 - DNA, 25 bp, Homo sapien
tccagcaactgagcccagagtgaat

SEQ ID NO: 5417789 - DNA, 25 bp, Homo sapien
gagcccagagtgaatctgtaagcag

SEQ ID NO: 5417790 - DNA, 25 bp, Homo sapien
agcaactgagcccagagtgaatctg

SEQ ID NO: 5417791 - DNA, 25 bp, Homo sapien
caactgagcccagagtgaatctgta

SEQ ID NO: 5417792 - DNA, 25 bp, Homo sapien
ctggagccagataggcctgcctaac

SEQ ID NO: 5417793 - DNA, 25 bp, Homo sapien
gccagataggcctgcctaacccagg

SEQ ID NO: 5417794 - DNA, 25 bp, Homo sapien
agataggcctgcctaacccaggaga

SEQ ID NO: 5417795 - DNA, 25 bp, Homo sapien
taggcctgcctaacccaggagactg

SEQ ID NO: 5417796 - DNA, 25 bp, Homo sapien
taaaaaccatgttaggccaaataca

SEQ ID NO: 5417797 - DNA, 25 bp, Homo sapien
ttgaaagcgcacacagcaagtgaaa

SEQ ID NO: 5417798 - DNA, 25 bp, Homo sapien
taggatattcatgcagccaaaaatg

SEQ ID NO: 5417799 - DNA, 25 bp, Homo sapien
ctaaaagtgatattgttaatgcagt

SEQ ID NO: 5417800 - DNA, 25 bp, Homo sapien
tataacaaggatataacaagcagcc

SEQ ID NO: 5417801 - DNA, 25 bp, Homo sapien
catgaaactcaagcagatggagggc

SEQ ID NO: 5417802 - DNA, 25 bp, Homo sapien
catgtgttgagaccctactgcccaa

SEQ ID NO: 5417803 - DNA, 25 bp, Homo sapien
tggagggcccactatattgaatatg

SEQ ID NO: 5417804 - DNA, 25 bp, Homo sapien
tcacttatggctcacttgtattcag

SEQ ID NO: 5417805 - DNA, 25 bp, Homo sapien
gccctacaaaatcctatgaaaactg

SEQ ID NO: 5417806 - DNA, 25 bp, Homo sapien
aaggtttctcctgtattcaactgca

SEQ ID NO: 5417807 - DNA, 25 bp, Homo sapien
cctaaataagcatcaagtaaccact

SEQ ID NO: 5417808 - DNA, 25 bp, Homo sapien
gccaatggggctattctctcaatat

SEQ ID NO: 5417809 - DNA, 25 bp, Homo sapien
ctctgaagttctgccaggttgtaag

SEQ ID NO: 5417810 - DNA, 25 bp, Homo sapien
tctctcaatatctgccaaagtcaag

SEQ ID NO: 5417811 - DNA, 25 bp, Homo sapien
tctgccaggttgtaaggtaaggccc

SEQ ID NO: 5417812 - DNA, 25 bp, Homo sapien
catttgcgtaggatgtaacttcagc

SEQ ID NO: 5417813 - DNA, 25 bp, Homo sapien
gacccatttttaggcaggagaatag

SEQ ID NO: 5417814 - DNA, 25 bp, Homo sapien
ccggaagatttgcaactagggctct

SEQ ID NO: 5417815 - DNA, 25 bp, Homo sapien
tccaattgatcacgggctgagcctt

SEQ ID NO: 5417816 - DNA, 25 bp, Homo sapien
gcgtatggcactctgggcaaattcc

SEQ ID NO: 5417817 - DNA, 25 bp, Homo sapien
gaagcattatataagtctgcaagct

SEQ ID NO: 5417818 - DNA, 25 bp, Homo sapien
cattatataagtctgcaagctgata

SEQ ID NO: 5417819 - DNA, 25 bp, Homo sapien
tctagtggtgtgacttgtccatagc

SEQ ID NO: 5417820 - DNA, 25 bp, Homo sapien
ttaagttcaactatacaagaatatg

SEQ ID NO: 5417821 - DNA, 25 bp, Homo sapien
agttcaactatacaagaatatgcat

SEQ ID NO: 5417822 - DNA, 25 bp, Homo sapien
cttgaatgattcttaatatataaca

SEQ ID NO: 5417823 - DNA, 25 bp, Homo sapien
ttgaatgattcttaatatataacaa

SEQ ID NO: 5417824 - DNA, 25 bp, Homo sapien
ccttcctagtacaaacaagctgctg

SEQ ID NO: 5417825 - DNA, 25 bp, Homo sapien
tccttcctagtacaaacaagctgct

SEQ ID NO: 5417826 - DNA, 25 bp, Homo sapien
ctccttcctagtacaaacaagctgc

SEQ ID NO: 5417827 - DNA, 25 bp, Homo sapien
cttcctagtacaaacaagctgctgc

SEQ ID NO: 5417828 - DNA, 25 bp, Homo sapien
actgtcaaagccacttttccattcc

SEQ ID NO: 5417829 - DNA, 25 bp, Homo sapien
ctgtttgacagattgggtcaaggtt

SEQ ID NO: 5417830 - DNA, 25 bp, Homo sapien
tgtttgacagattgggtcaaggttc

SEQ ID NO: 5417831 - DNA, 25 bp, Homo sapien
gtcaaggttcttttcaaaactgtca

SEQ ID NO: 5417832 - DNA, 25 bp, Homo sapien
tgttattcagtaacgagttaaatgc

SEQ ID NO: 5417833 - DNA, 25 bp, Homo sapien
gccagctagagtgctatatatctta

SEQ ID NO: 5417834 - DNA, 25 bp, Homo sapien
cgagttaaatgcattgaagtaggag

SEQ ID NO: 5417835 - DNA, 25 bp, Homo sapien
tacgaacaagctccatgttattcag

SEQ ID NO: 5417836 - DNA, 25 bp, Homo sapien
ctggtgtgagatacttcctccagct

SEQ ID NO: 5417837 - DNA, 25 bp, Homo sapien
tggtgtgagatacttcctccagctg

SEQ ID NO: 5417838 - DNA, 25 bp, Homo sapien
tgtctttgagtgcaaaggcttgtct

SEQ ID NO: 5417839 - DNA, 25 bp, Homo sapien
gcatgtgagatctaatggtaaccat

SEQ ID NO: 5417840 - DNA, 25 bp, Homo sapien
agttctcctccacaaaaggagtaag

SEQ ID NO: 5417841 - DNA, 25 bp, Homo sapien
tgtcttgcatgttccaattgcagct

SEQ ID NO: 5417842 - DNA, 25 bp, Homo sapien
cactgaaagaaacagctattaagag

SEQ ID NO: 5417843 - DNA, 25 bp, Homo sapien
tgtctctggcgagggggaaatttaa

SEQ ID NO: 5417844 - DNA, 25 bp, Homo sapien
ttaataaatacaaagcgaaggacac

SEQ ID NO: 5417845 - DNA, 25 bp, Homo sapien
gaactagcttctaatcttctatagt

SEQ ID NO: 5417846 - DNA, 25 bp, Homo sapien
aatgcagtcggataaattcacaatc

SEQ ID NO: 5417847 - DNA, 25 bp, Homo sapien
caatcccagttaaaagggatatgat

SEQ ID NO: 5417848 - DNA, 25 bp, Homo sapien
gagaaactgcgtgaattctgtgtag

SEQ ID NO: 5417849 - DNA, 25 bp, Homo sapien
aagatgcttcttccggttatgccca

SEQ ID NO: 5417850 - DNA, 25 bp, Homo sapien
gtccaaaatgcaaaagcgttcaagc

SEQ ID NO: 5417851 - DNA, 25 bp, Homo sapien
ggatctaacttaattaattagctgt

SEQ ID NO: 5417852 - DNA, 25 bp, Homo sapien
caaaagcgttcaagctaagaaaatt

SEQ ID NO: 5417853 - DNA, 25 bp, Homo sapien
tggtagaatgaaattgaatcccttt

SEQ ID NO: 5417854 - DNA, 25 bp, Homo sapien
tgggcacttcctactggtcttgttc

SEQ ID NO: 5417855 - DNA, 25 bp, Homo sapien
tggttcttatgggcacttcctactg

SEQ ID NO: 5417856 - DNA, 25 bp, Homo sapien
ggcacttcctactggtcttgttcac

SEQ ID NO: 5417857 - DNA, 25 bp, Homo sapien
gttcttatgggcacttcctactggt

SEQ ID NO: 5417858 - DNA, 25 bp, Homo sapien
tctgaccggggctggcactcttctc

SEQ ID NO: 5417859 - DNA, 25 bp, Homo sapien
actcttctccaagactgccaccatg

SEQ ID NO: 5417860 - DNA, 25 bp, Homo sapien
cagtacaaaattacctctgaccggg

SEQ ID NO: 5417861 - DNA, 25 bp, Homo sapien
gagaactcctcctgtaggtatacaa

SEQ ID NO: 5417862 - DNA, 25 bp, Homo sapien
agcaggagccactacaaccaactta

SEQ ID NO: 5417863 - DNA, 25 bp, Homo sapien
gcccaacgacatccttattccaagg

SEQ ID NO: 5417864 - DNA, 25 bp, Homo sapien
ttataggcttgagaccaaacattct

SEQ ID NO: 5417865 - DNA, 25 bp, Homo sapien
caaacattcttattgtcagggggaa

SEQ ID NO: 5417866 - DNA, 25 bp, Homo sapien
tccttaggaaataggtgagcaccat

SEQ ID NO: 5417867 - DNA, 25 bp, Homo sapien
agagccaaccagctagccagggaat

SEQ ID NO: 5417868 - DNA, 25 bp, Homo sapien
ggtgaaatggtcaaagtccttagga

SEQ ID NO: 5417869 - DNA, 25 bp, Homo sapien
tccagaacagaaacagggtacagct

SEQ ID NO: 5417870 - DNA, 25 bp, Homo sapien
atttccactcttgtcaaacaactgg

SEQ ID NO: 5417871 - DNA, 25 bp, Homo sapien
catggaatctggagcacataaaaca

SEQ ID NO: 5417872 - DNA, 25 bp, Homo sapien
gccaaaaactcttgataggagatca

SEQ ID NO: 5417873 - DNA, 25 bp, Homo sapien
aaacaactggaaagccactatgaac

SEQ ID NO: 5417874 - DNA, 25 bp, Homo sapien
gagctgcacgatctttgggttacta

SEQ ID NO: 5417875 - DNA, 25 bp, Homo sapien
tataacgctctccatcaacctcagt

SEQ ID NO: 5417876 - DNA, 25 bp, Homo sapien
atccttggtttgatcagctactcct

SEQ ID NO: 5417877 - DNA, 25 bp, Homo sapien
cattatacagtccaagatagcgctg

SEQ ID NO: 5417878 - DNA, 25 bp, Homo sapien
ctttctccctctagtcatccatggt

SEQ ID NO: 5417879 - DNA, 25 bp, Homo sapien
tcatattttagattaagagggtaca

SEQ ID NO: 5417880 - DNA, 25 bp, Homo sapien
caggcatgagcctcaattcatattt

SEQ ID NO: 5417881 - DNA, 25 bp, Homo sapien
tccctctagtcatccatggtatcca

SEQ ID NO: 5417882 - DNA, 25 bp, Homo sapien
ttccacagtactaagtaagagaaat

SEQ ID NO: 5417883 - DNA, 25 bp, Homo sapien
agcaatggtttcagtggaagatgct

SEQ ID NO: 5417884 - DNA, 25 bp, Homo sapien
aacgctggccatagcaatggtttca

SEQ ID NO: 5417885 - DNA, 25 bp, Homo sapien
cagttctagaaacccaacgctggcc

SEQ ID NO: 5417886 - DNA, 25 bp, Homo sapien
agtgtgcccagccaatctgtgggct

SEQ ID NO: 5417887 - DNA, 25 bp, Homo sapien
gtgcccagccaatctgtgggctttt

SEQ ID NO: 5417888 - DNA, 25 bp, Homo sapien
gtgtgcccagccaatctgtgggctt

SEQ ID NO: 5417889 - DNA, 25 bp, Homo sapien
gcccagccaatctgtgggctttttt

SEQ ID NO: 5417890 - DNA, 25 bp, Homo sapien
taactcttcatttagaaatttgtca

SEQ ID NO: 5417891 - DNA, 25 bp, Homo sapien
tcagacttatgttcctgctgtccca

SEQ ID NO: 5417892 - DNA, 25 bp, Homo sapien
gtctccttttgctactgtacactgc

SEQ ID NO: 5417893 - DNA, 25 bp, Homo sapien
tgtcagacttatgttcctgctgtcc

SEQ ID NO: 5417894 - DNA, 25 bp, Homo sapien
taccaaattcgatagattcttccct

SEQ ID NO: 5417895 - DNA, 25 bp, Homo sapien
tacatcgctggtattgtccttgctt

SEQ ID NO: 5417896 - DNA, 25 bp, Homo sapien
ccatatttaataccaaattcgatag

SEQ ID NO: 5417897 - DNA, 25 bp, Homo sapien
atagattcttcccttacatcgctgg

SEQ ID NO: 5417898 - DNA, 25 bp, Homo sapien
catgaggatcccctcgcttagttgt

SEQ ID NO: 5417899 - DNA, 25 bp, Homo sapien
ttaactcatgaggatcccctcgctt

SEQ ID NO: 5417900 - DNA, 25 bp, Homo sapien
aggatcccctcgcttagttgtctgc

SEQ ID NO: 5417901 - DNA, 25 bp, Homo sapien
gatcccctcgcttagttgtctgcac

SEQ ID NO: 5417902 - DNA, 25 bp, Homo sapien
gctctccccgcagcaagccggagcc

SEQ ID NO: 5417903 - DNA, 25 bp, Homo sapien
cctcctccggtccaagccccgcaca

SEQ ID NO: 5417904 - DNA, 25 bp, Homo sapien
aagccccgcacagctctccccgcag

SEQ ID NO: 5417905 - DNA, 25 bp, Homo sapien
cctccggtccaagccccgcacagct

SEQ ID NO: 5417906 - DNA, 25 bp, Homo sapien
gcgtccctatgcaaatgaactcggg

SEQ ID NO: 5417907 - DNA, 25 bp, Homo sapien
ccgcgcgcgtccctatgcaaatgaa

SEQ ID NO: 5417908 - DNA, 25 bp, Homo sapien
agtgagcgagcagggccgagctgtc

SEQ ID NO: 5417909 - DNA, 25 bp, Homo sapien
tatgcaaatgaactcggggcgcgcc

SEQ ID NO: 5417910 - DNA, 25 bp, Homo sapien
gaggaagatcctgcaattggtcatt

SEQ ID NO: 5417911 - DNA, 25 bp, Homo sapien
tcagacgtaggtgaggaagatcctg

SEQ ID NO: 5417912 - DNA, 25 bp, Homo sapien
gagaaactcagacgtaggtgaggaa

SEQ ID NO: 5417913 - DNA, 25 bp, Homo sapien
tgaggaagatcctgcaattggtcat

SEQ ID NO: 5417914 - DNA, 25 bp, Homo sapien
gagcgcgcgggttgattcgtccttc

SEQ ID NO: 5417915 - DNA, 25 bp, Homo sapien
acgccgagacggtggtgacaatgcc

SEQ ID NO: 5417916 - DNA, 25 bp, Homo sapien
tagctcggaaatggcgggtaagtta

SEQ ID NO: 5417917 - DNA, 25 bp, Homo sapien
cctcagccgcgggtgatcgtagctc

SEQ ID NO: 5417918 - DNA, 25 bp, Homo sapien
aacaaaagaagtgcctctggttggt

SEQ ID NO: 5417919 - DNA, 25 bp, Homo sapien
gtgggagactggcttaagcacggga

SEQ ID NO: 5417920 - DNA, 25 bp, Homo sapien
gaggtgggagactggcttaagcacg

SEQ ID NO: 5417921 - DNA, 25 bp, Homo sapien
tctggttggtgagggcttagaataa

SEQ ID NO: 5417922 - DNA, 25 bp, Homo sapien
ggctattctgggtcctttgtctttc

SEQ ID NO: 5417923 - DNA, 25 bp, Homo sapien
tggcctgctctttttcaatattgtt

SEQ ID NO: 5417924 - DNA, 25 bp, Homo sapien
cctggcctgctctttttcaatattg

SEQ ID NO: 5417925 - DNA, 25 bp, Homo sapien
ctattctgggtcctttgtctttctt

SEQ ID NO: 5417926 - DNA, 25 bp, Homo sapien
ctgtatcaggtacacatagttttgg

SEQ ID NO: 5417927 - DNA, 25 bp, Homo sapien
gttcattggctgacactacttgctg

SEQ ID NO: 5417928 - DNA, 25 bp, Homo sapien
gggttatacatcacaatagctggga

SEQ ID NO: 5417929 - DNA, 25 bp, Homo sapien
tcttgaatgctgatggttcattggc

SEQ ID NO: 5417930 - DNA, 25 bp, Homo sapien
tgaacgacttgctcaagagtaaaga

SEQ ID NO: 5417931 - DNA, 25 bp, Homo sapien
gattaccggcgtgttattgaacgac

SEQ ID NO: 5417932 - DNA, 25 bp, Homo sapien
catgcaacatgaacagctggaagag

SEQ ID NO: 5417933 - DNA, 25 bp, Homo sapien
aatgtgctgtgaaaaatctgatgac

SEQ ID NO: 5417934 - DNA, 25 bp, Homo sapien
gttcattatattgctctgtatgttt

SEQ ID NO: 5417935 - DNA, 25 bp, Homo sapien
gagttcattatattgctctgtatgt

SEQ ID NO: 5417936 - DNA, 25 bp, Homo sapien
ctagagttcattatattgctctgta

SEQ ID NO: 5417937 - DNA, 25 bp, Homo sapien
agagttcattatattgctctgtatg

SEQ ID NO: 5417938 - DNA, 25 bp, Homo sapien
tgccaggcaatatgttaaatctgtt

SEQ ID NO: 5417939 - DNA, 25 bp, Homo sapien
tatgttttaaacaactgccaggcaa

SEQ ID NO: 5417940 - DNA, 25 bp, Homo sapien
ttttattctctgttaggatggatct

SEQ ID NO: 5417941 - DNA, 25 bp, Homo sapien
gcatgacagataatatcttggtgga

SEQ ID NO: 5417942 - DNA, 25 bp, Homo sapien
ctaacttaacggaaggagatgctgc

SEQ ID NO: 5417943 - DNA, 25 bp, Homo sapien
tgggagacgggacaaacagctagat

SEQ ID NO: 5417944 - DNA, 25 bp, Homo sapien
gctagatagcaacgtgatggcttca

SEQ ID NO: 5417945 - DNA, 25 bp, Homo sapien
aaaatcacagctgcggaagacagtc

SEQ ID NO: 5417946 - DNA, 25 bp, Homo sapien
tgtgtaaataggtctgtgagtcact

SEQ ID NO: 5417947 - DNA, 25 bp, Homo sapien
tcaggtttccatggttacacctttc

SEQ ID NO: 5417948 - DNA, 25 bp, Homo sapien
taggtctgtgagtcactggtaatta

SEQ ID NO: 5417949 - DNA, 25 bp, Homo sapien
tgtgagtcactggtaattatttgtt

SEQ ID NO: 5417950 - DNA, 25 bp, Homo sapien
actccagtagaagcatacttcaaaa

SEQ ID NO: 5417951 - DNA, 25 bp, Homo sapien
aaaaagtgtcccatcccctcagaca

SEQ ID NO: 5417952 - DNA, 25 bp, Homo sapien
aacactccagtagaagcatacttca

SEQ ID NO: 5417953 - DNA, 25 bp, Homo sapien
cactccagtagaagcatacttcaaa

SEQ ID NO: 5417954 - DNA, 25 bp, Homo sapien
tcagaaaatttggagcttttgcttt

SEQ ID NO: 5417955 - DNA, 25 bp, Homo sapien
atctgtgtactctcaactgcagaag

SEQ ID NO: 5417956 - DNA, 25 bp, Homo sapien
tccaaaaagctgccttcagaaaatt

SEQ ID NO: 5417957 - DNA, 25 bp, Homo sapien
aaaataactccttgatgagtgatct

SEQ ID NO: 5417958 - DNA, 25 bp, Homo sapien
gacagagcatttggttttggttcat

SEQ ID NO: 5417959 - DNA, 25 bp, Homo sapien
actttgacagagcatttggttttgg

SEQ ID NO: 5417960 - DNA, 25 bp, Homo sapien
tctttcctataactttgacagagca

SEQ ID NO: 5417961 - DNA, 25 bp, Homo sapien
ttctttcctataactttgacagagc

SEQ ID NO: 5417962 - DNA, 25 bp, Homo sapien
agaggctgttgccaaatgctgttaa

SEQ ID NO: 5417963 - DNA, 25 bp, Homo sapien
taaacactgtggctttatcatccag

SEQ ID NO: 5417964 - DNA, 25 bp, Homo sapien
gaagcagtggtgtatggtgtccata

SEQ ID NO: 5417965 - DNA, 25 bp, Homo sapien
ggcatcttagcttgaaatccaggaa

SEQ ID NO: 5417966 - DNA, 25 bp, Homo sapien
gtttcctgtaagttcaattggaaga

SEQ ID NO: 5417967 - DNA, 25 bp, Homo sapien
ttcctgtaagttcaattggaagacc

SEQ ID NO: 5417968 - DNA, 25 bp, Homo sapien
cctgtaagttcaattggaagacctt

SEQ ID NO: 5417969 - DNA, 25 bp, Homo sapien
tgtaagttcaattggaagaccttgt

SEQ ID NO: 5417970 - DNA, 25 bp, Homo sapien
tggtagtccaaacttgagtacaaat

SEQ ID NO: 5417971 - DNA, 25 bp, Homo sapien
tgtaacgtaactgaggattgatggc

SEQ ID NO: 5417972 - DNA, 25 bp, Homo sapien
aaatatatgtgttggtagtccaaac

SEQ ID NO: 5417973 - DNA, 25 bp, Homo sapien
cccagatatttgatacctctgcagt

SEQ ID NO: 5417974 - DNA, 25 bp, Homo sapien
catgcctgtgagagaagtaatacat

SEQ ID NO: 5417975 - DNA, 25 bp, Homo sapien
ttaggccaacccatcaccacttttg

SEQ ID NO: 5417976 - DNA, 25 bp, Homo sapien
tttggtcagcgaaggcagcttggct

SEQ ID NO: 5417977 - DNA, 25 bp, Homo sapien
tcatagattgagtccacctgtgtct

SEQ ID NO: 5417978 - DNA, 25 bp, Homo sapien
acattgccacataaggtattacagc

SEQ ID NO: 5417979 - DNA, 25 bp, Homo sapien
caaaacagtgccctgaatctagggt

SEQ ID NO: 5417980 - DNA, 25 bp, Homo sapien
atctagggtcgtcttggacattgcc

SEQ ID NO: 5417981 - DNA, 25 bp, Homo sapien
acagacctggtgcttagcagatgtt

SEQ ID NO: 5417982 - DNA, 25 bp, Homo sapien
taaccttgccagatcacagagcaga

SEQ ID NO: 5417983 - DNA, 25 bp, Homo sapien
tcaatttcagcatgacagcccaaca

SEQ ID NO: 5417984 - DNA, 25 bp, Homo sapien
gcctgcaagttataaccttgccaga

SEQ ID NO: 5417985 - DNA, 25 bp, Homo sapien
gacctggtgagcatttgtgggcatt

SEQ ID NO: 5417986 - DNA, 25 bp, Homo sapien
gtgaagacccgtaactcctgcagga

SEQ ID NO: 5417987 - DNA, 25 bp, Homo sapien
tgtgcaaaaccttgggactgaaaga

SEQ ID NO: 5417988 - DNA, 25 bp, Homo sapien
gcttcacaaagaagagagccctaac

SEQ ID NO: 5417989 - DNA, 25 bp, Homo sapien
tttcaattgaagagtgttatctccc

SEQ ID NO: 5417990 - DNA, 25 bp, Homo sapien
tgctggcttcggaggtcggtgctcc

SEQ ID NO: 5417991 - DNA, 25 bp, Homo sapien
caagcacataaagaagccagactat

SEQ ID NO: 5417992 - DNA, 25 bp, Homo sapien
ctggagggtctgttgtgctggcttc

SEQ ID NO: 5417993 - DNA, 25 bp, Homo sapien
cattgtcgtgcgctgggttctgatc

SEQ ID NO: 5417994 - DNA, 25 bp, Homo sapien
tacaagatttagttcttttaggcca

SEQ ID NO: 5417995 - DNA, 25 bp, Homo sapien
agatttagttcttttaggccaggcg

SEQ ID NO: 5417996 - DNA, 25 bp, Homo sapien
cttcctactacaagatttagttctt

SEQ ID NO: 5417997 - DNA, 25 bp, Homo sapien
acttcctactacaagatttagttct

SEQ ID NO: 5417998 - DNA, 25 bp, Homo sapien
tcgggaaatcatcagtcataatgcc

SEQ ID NO: 5417999 - DNA, 25 bp, Homo sapien
tatccctcacctctaggctatggag

SEQ ID NO: 5418000 - DNA, 25 bp, Homo sapien
gatagatgctcttgttcatcgggaa

SEQ ID NO: 5418001 - DNA, 25 bp, Homo sapien
tatcattcaattgaaacccaccggt

SEQ ID NO: 5418002 - DNA, 25 bp, Homo sapien
gaatagtatctagaccatgaaactg

SEQ ID NO: 5418003 - DNA, 25 bp, Homo sapien
gcttgaacacttgcaccacatacat

SEQ ID NO: 5418004 - DNA, 25 bp, Homo sapien
caatcatatgaggagatagccaacg

SEQ ID NO: 5418005 - DNA, 25 bp, Homo sapien
caatggtggaattcagtctgacttt

SEQ ID NO: 5418006 - DNA, 25 bp, Homo sapien
caaatgatagctaactacagaggca

SEQ ID NO: 5418007 - DNA, 25 bp, Homo sapien
tgttgaatcagacccctactgggaa

SEQ ID NO: 5418008 - DNA, 25 bp, Homo sapien
aatgggatgagtcgatagatgcacc

SEQ ID NO: 5418009 - DNA, 25 bp, Homo sapien
tcctgtcacggaacaacaaatgata

SEQ ID NO: 5418010 - DNA, 25 bp, Homo sapien
ttcaatttaattgtgcaacacagct

SEQ ID NO: 5418011 - DNA, 25 bp, Homo sapien
tgttctccctgtctcgctattcctc

SEQ ID NO: 5418012 - DNA, 25 bp, Homo sapien
ccctgtctcgctattcctccctcca

SEQ ID NO: 5418013 - DNA, 25 bp, Homo sapien
cctttgtggctctcattctttttcc

SEQ ID NO: 5418014 - DNA, 25 bp, Homo sapien
ctccctgtctcgctattcctccctc

SEQ ID NO: 5418015 - DNA, 25 bp, Homo sapien
tatcacaattactcatataattgag

SEQ ID NO: 5418016 - DNA, 25 bp, Homo sapien
tataattgagcctctttgtagcaag

SEQ ID NO: 5418017 - DNA, 25 bp, Homo sapien
acaattactcatataattgagcctc

SEQ ID NO: 5418018 - DNA, 25 bp, Homo sapien
tcacaattactcatataattgagcc

SEQ ID NO: 5418019 - DNA, 25 bp, Homo sapien
tggtttcattatagggtttttcata

SEQ ID NO: 5418020 - DNA, 25 bp, Homo sapien
gtagcctttctccatcatgaaaatg

SEQ ID NO: 5418021 - DNA, 25 bp, Homo sapien
tccagtagcctttctccatcatgaa

SEQ ID NO: 5418022 - DNA, 25 bp, Homo sapien
gcctttctccatcatgaaaatggtt

SEQ ID NO: 5418023 - DNA, 25 bp, Homo sapien
cacagagcctagtatacatcaaggg

SEQ ID NO: 5418024 - DNA, 25 bp, Homo sapien
atctcacattcaagtggcggctggg

SEQ ID NO: 5418025 - DNA, 25 bp, Homo sapien
cagatgagatgtgctaggaacaggc

SEQ ID NO: 5418026 - DNA, 25 bp, Homo sapien
ggagctcccgcctactactttgaaa

SEQ ID NO: 5418027 - DNA, 25 bp, Homo sapien
gagatctctacaggaaattttggaa

SEQ ID NO: 5418028 - DNA, 25 bp, Homo sapien
cactaggaaaagaacaagcaacttg

SEQ ID NO: 5418029 - DNA, 25 bp, Homo sapien
tgcgtagcctctctctactgataca

SEQ ID NO: 5418030 - DNA, 25 bp, Homo sapien
ttacaaacatctttcaactcggtct

SEQ ID NO: 5418031 - DNA, 25 bp, Homo sapien
aggaatccctggatttgtgcatttc

SEQ ID NO: 5418032 - DNA, 25 bp, Homo sapien
tccttttcattagaaggaatccctg

SEQ ID NO: 5418033 - DNA, 25 bp, Homo sapien
tttggaaaacagttgttggctttca

SEQ ID NO: 5418034 - DNA, 25 bp, Homo sapien
tattactaattgtacttaaacattc

SEQ ID NO: 5418035 - DNA, 25 bp, Homo sapien
catgccacagttagggttaccagta

SEQ ID NO: 5418036 - DNA, 25 bp, Homo sapien
tgtgaatttggacttaaaccctaca

SEQ ID NO: 5418037 - DNA, 25 bp, Homo sapien
ggagcacttcggtgcttctgcctgc

SEQ ID NO: 5418038 - DNA, 25 bp, Homo sapien
tactactggtcacttggattgtctc

SEQ ID NO: 5418039 - DNA, 25 bp, Homo sapien
taaaatgaagattgccattgtaaca

SEQ ID NO: 5418040 - DNA, 25 bp, Homo sapien
ttaaaatgaagattgccattgtaac

SEQ ID NO: 5418041 - DNA, 25 bp, Homo sapien
attaaaatgaagattgccattgtaa

SEQ ID NO: 5418042 - DNA, 25 bp, Homo sapien
atttaagatgtagccgtgatgcctg

SEQ ID NO: 5418043 - DNA, 25 bp, Homo sapien
taagatgtagccgtgatgcctgcca

SEQ ID NO: 5418044 - DNA, 25 bp, Homo sapien
gatgtagccgtgatgcctgccaatc

SEQ ID NO: 5418045 - DNA, 25 bp, Homo sapien
tgtagccgtgatgcctgccaatcag

SEQ ID NO: 5418046 - DNA, 25 bp, Homo sapien
tacttgcccaccaaagatccacaga

SEQ ID NO: 5418047 - DNA, 25 bp, Homo sapien
gtttattcagaaactgtgtggcaca

SEQ ID NO: 5418048 - DNA, 25 bp, Homo sapien
ttgacttaccgttcctgtcctcaac

SEQ ID NO: 5418049 - DNA, 25 bp, Homo sapien
tcattgaggtttgttgggattgaac

SEQ ID NO: 5418050 - DNA, 25 bp, Homo sapien
caagtctggggatggttaaaattat

SEQ ID NO: 5418051 - DNA, 25 bp, Homo sapien
ctatttctgcactaacagttacatc

SEQ ID NO: 5418052 - DNA, 25 bp, Homo sapien
tgctggttatagtgacatccaggtc

SEQ ID NO: 5418053 - DNA, 25 bp, Homo sapien
ttctgcactaacagttacatcaaaa

SEQ ID NO: 5418054 - DNA, 25 bp, Homo sapien
atttggttccccaatcaggagtaat

SEQ ID NO: 5418055 - DNA, 25 bp, Homo sapien
tgtacaaaggtaaatgactcaaacg

SEQ ID NO: 5418056 - DNA, 25 bp, Homo sapien
gactcaaacgactgtgttggataga

SEQ ID NO: 5418057 - DNA, 25 bp, Homo sapien
tatatcccggttatgtatggcaatc

SEQ ID NO: 5418058 - DNA, 25 bp, Homo sapien
taggatcttactttcatggacatcc

SEQ ID NO: 5418059 - DNA, 25 bp, Homo sapien
taaagccacataactcatcagaatg

SEQ ID NO: 5418060 - DNA, 25 bp, Homo sapien
gtctgtccacattttgtgggacatg

SEQ ID NO: 5418061 - DNA, 25 bp, Homo sapien
agaatggttttcaagtctgtccaca

SEQ ID NO: 5418062 - DNA, 25 bp, Homo sapien
gattagagcccagctgtttcaatcc

SEQ ID NO: 5418063 - DNA, 25 bp, Homo sapien
tgtcccagcagcatgcacatatgac

SEQ ID NO: 5418064 - DNA, 25 bp, Homo sapien
aaaacaaaacgccactgcatcagtg

SEQ ID NO: 5418065 - DNA, 25 bp, Homo sapien
tcttctcctgaagggtgcatggctg

SEQ ID NO: 5418066 - DNA, 25 bp, Homo sapien
gatttctagattatgcccacccttg

SEQ ID NO: 5418067 - DNA, 25 bp, Homo sapien
cgttgacagctgatgtatttagcag

SEQ ID NO: 5418068 - DNA, 25 bp, Homo sapien
tcttgtttttcactgcctgggtgtg

SEQ ID NO: 5418069 - DNA, 25 bp, Homo sapien
tatttagcagcatgtactccttcgt

SEQ ID NO: 5418070 - DNA, 25 bp, Homo sapien
cgaggaagcctgacgtgtctgaaac

SEQ ID NO: 5418071 - DNA, 25 bp, Homo sapien
tagtaggctgggagacctagtagcc

SEQ ID NO: 5418072 - DNA, 25 bp, Homo sapien
ggaggcttccctcctttgcatcctt

SEQ ID NO: 5418073 - DNA, 25 bp, Homo sapien
cagataatgcaaagactcaggccca

SEQ ID NO: 5418074 - DNA, 25 bp, Homo sapien
taattcggatgcactggaaatctga

SEQ ID NO: 5418075 - DNA, 25 bp, Homo sapien
cccggcagtccggtgaaggaccaat

SEQ ID NO: 5418076 - DNA, 25 bp, Homo sapien
gggcatggcattcactataggtaaa

SEQ ID NO: 5418077 - DNA, 25 bp, Homo sapien
tcttccgagtgagtgcgtagctcct

SEQ ID NO: 5418078 - DNA, 25 bp, Homo sapien
tatgtcccttgctccctgtcagcaa

SEQ ID NO: 5418079 - DNA, 25 bp, Homo sapien
tctggtggcccgttcctggctgatc

SEQ ID NO: 5418080 - DNA, 25 bp, Homo sapien
ttccagtcacctagggccgtaaaga

SEQ ID NO: 5418081 - DNA, 25 bp, Homo sapien
tctgactgtgggacttaatggagaa

SEQ ID NO: 5418082 - DNA, 25 bp, Homo sapien
taacctgcgtggctcctgatagcgt

SEQ ID NO: 5418083 - DNA, 25 bp, Homo sapien
aaactaccccatgaggcctgaggag

SEQ ID NO: 5418084 - DNA, 25 bp, Homo sapien
tgggaactcggatctgaagccctgc

SEQ ID NO: 5418085 - DNA, 25 bp, Homo sapien
gagcacacggttctgatcacgtcga

SEQ ID NO: 5418086 - DNA, 25 bp, Homo sapien
tagcccgcgaacagaggcattgatt

SEQ ID NO: 5418087 - DNA, 25 bp, Homo sapien
cctccatcgcggctttgcgatgaaa

SEQ ID NO: 5418088 - DNA, 25 bp, Homo sapien
gctttgcgatgaaagattagcccgc

SEQ ID NO: 5418089 - DNA, 25 bp, Homo sapien
attacaaacatgtccttggcagtgg

SEQ ID NO: 5418090 - DNA, 25 bp, Homo sapien
gctgttctggaaaccgagagggtcc

SEQ ID NO: 5418091 - DNA, 25 bp, Homo sapien
tgggcggtctagtctctaaaatgac

SEQ ID NO: 5418092 - DNA, 25 bp, Homo sapien
gcaggagccgcaaacgtcagctgtt

SEQ ID NO: 5418093 - DNA, 25 bp, Homo sapien
gagatacgggcgcatttgagagcaa

SEQ ID NO: 5418094 - DNA, 25 bp, Homo sapien
cctcctttcccttgcgcttgctctc

SEQ ID NO: 5418095 - DNA, 25 bp, Homo sapien
tgcgcttgctctccggtacctgttc

SEQ ID NO: 5418096 - DNA, 25 bp, Homo sapien
attcctgcccggagcaccctccttt

SEQ ID NO: 5418097 - DNA, 25 bp, Homo sapien
ctgtctgccaagggccattcctgcc

SEQ ID NO: 5418098 - DNA, 25 bp, Homo sapien
gataacttgggctttcggaagcggc

SEQ ID NO: 5418099 - DNA, 25 bp, Homo sapien
taactcttgtttctactgaagcggg

SEQ ID NO: 5418100 - DNA, 25 bp, Homo sapien
ggaacaagtccaacgagggtgttca

SEQ ID NO: 5418101 - DNA, 25 bp, Homo sapien
caagcagttaatggttgtgctaact

SEQ ID NO: 5418102 - DNA, 25 bp, Homo sapien
taagagccagctcatctttgtaaca

SEQ ID NO: 5418103 - DNA, 25 bp, Homo sapien
taacacagggttctctcgtcgtccc

SEQ ID NO: 5418104 - DNA, 25 bp, Homo sapien
gagatgagttccagcttttacctaa

SEQ ID NO: 5418105 - DNA, 25 bp, Homo sapien
tgtcctcggccaggactaagagcca

SEQ ID NO: 5418106 - DNA, 25 bp, Homo sapien
agatcaagagggttcagctggcctt

SEQ ID NO: 5418107 - DNA, 25 bp, Homo sapien
taaagatcaagagggttcagctggc

SEQ ID NO: 5418108 - DNA, 25 bp, Homo sapien
ctaaagatcaagagggttcagctgg

SEQ ID NO: 5418109 - DNA, 25 bp, Homo sapien
aagatcaagagggttcagctggcct

SEQ ID NO: 5418110 - DNA, 25 bp, Homo sapien
taggctccatgaggaatcccggacc

SEQ ID NO: 5418111 - DNA, 25 bp, Homo sapien
tggtcctgaggtgactccagtaggc

SEQ ID NO: 5418112 - DNA, 25 bp, Homo sapien
aatcccggaccctcaggacaaatgg

SEQ ID NO: 5418113 - DNA, 25 bp, Homo sapien
caaaccggcattcagaacaggtgtc

SEQ ID NO: 5418114 - DNA, 25 bp, Homo sapien
ctcggcatcagagggcccgcgctca

SEQ ID NO: 5418115 - DNA, 25 bp, Homo sapien
gcatcagagggcccgcgctcagtgc

SEQ ID NO: 5418116 - DNA, 25 bp, Homo sapien
ccgcgctcagtgctcctccctagac

SEQ ID NO: 5418117 - DNA, 25 bp, Homo sapien
agagggcccgcgctcagtgctcctc

SEQ ID NO: 5418118 - DNA, 25 bp, Homo sapien
aggtcccctgtgctaccgcaaaagt

SEQ ID NO: 5418119 - DNA, 25 bp, Homo sapien
taaattaagcaaggctctgaaacag

SEQ ID NO: 5418120 - DNA, 25 bp, Homo sapien
ggctcatgccggacttttgttccaa

SEQ ID NO: 5418121 - DNA, 25 bp, Homo sapien
aacagtatcccgaggggctcatgcc

SEQ ID NO: 5418122 - DNA, 25 bp, Homo sapien
cctcagggcacgcgcgagagacctg

SEQ ID NO: 5418123 - DNA, 25 bp, Homo sapien
tgggcacacggcgtggcactccata

SEQ ID NO: 5418124 - DNA, 25 bp, Homo sapien
ggcactccataccctaaaacaggca

SEQ ID NO: 5418125 - DNA, 25 bp, Homo sapien
cagtatccgagcgactgtgctgggc

SEQ ID NO: 5418126 - DNA, 25 bp, Homo sapien
ccgcgagggactggctgtattggta

SEQ ID NO: 5418127 - DNA, 25 bp, Homo sapien
cagggtggtgtacgccacaccgcga

SEQ ID NO: 5418128 - DNA, 25 bp, Homo sapien
ctgtattggtagtagtggcgatggg

SEQ ID NO: 5418129 - DNA, 25 bp, Homo sapien
agccagggtggtgtacgccacaccg

SEQ ID NO: 5418130 - DNA, 25 bp, Homo sapien
gcgctctcggggcgagtgagcccgg

SEQ ID NO: 5418131 - DNA, 25 bp, Homo sapien
cgctctcggggcgagtgagcccggg

SEQ ID NO: 5418132 - DNA, 25 bp, Homo sapien
ccgcgctctcggggcgagtgagccc

SEQ ID NO: 5418133 - DNA, 25 bp, Homo sapien
cgcgctctcggggcgagtgagcccg

SEQ ID NO: 5418134 - DNA, 25 bp, Homo sapien
cagtgattatgcaagacagcggacc

SEQ ID NO: 5418135 - DNA, 25 bp, Homo sapien
ccgcgagaagagatgaccatgacca

SEQ ID NO: 5418136 - DNA, 25 bp, Homo sapien
agtgtggatgcgtcttacccgaggc

SEQ ID NO: 5418137 - DNA, 25 bp, Homo sapien
catgcactgtttacactcggcgggc

SEQ ID NO: 5418138 - DNA, 25 bp, Homo sapien
tcggctgttcgcactaaaggcggcc

SEQ ID NO: 5418139 - DNA, 25 bp, Homo sapien
tgaagtgcgcttcaatggcaaggga

SEQ ID NO: 5418140 - DNA, 25 bp, Homo sapien
tcagtacctagctctgccggagagg

SEQ ID NO: 5418141 - DNA, 25 bp, Homo sapien
gaaccggaggttccagcaaactcag

SEQ ID NO: 5418142 - DNA, 25 bp, Homo sapien
cagatgcgccaggctcttccgacgc

SEQ ID NO: 5418143 - DNA, 25 bp, Homo sapien
agatgcgccaggctcttccgacgcc

SEQ ID NO: 5418144 - DNA, 25 bp, Homo sapien
tcagatgcgccaggctcttccgacg

SEQ ID NO: 5418145 - DNA, 25 bp, Homo sapien
tagctccagcgtagacagacaaacg

SEQ ID NO: 5418146 - DNA, 25 bp, Homo sapien
taatcctgacatcgctgacaagaag

SEQ ID NO: 5418147 - DNA, 25 bp, Homo sapien
tccatcaaatgcagtacagaaggcg

SEQ ID NO: 5418148 - DNA, 25 bp, Homo sapien
caatcttcgaggattaacacttcct

SEQ ID NO: 5418149 - DNA, 25 bp, Homo sapien
acgtttgctccgtgcgggccccagt

SEQ ID NO: 5418150 - DNA, 25 bp, Homo sapien
tctccggccagaagtccccattgtt

SEQ ID NO: 5418151 - DNA, 25 bp, Homo sapien
cattgttccgggtgcgatgatttca

SEQ ID NO: 5418152 - DNA, 25 bp, Homo sapien
tcctggaccacaatcgggacggaga

SEQ ID NO: 5418153 - DNA, 25 bp, Homo sapien
gcaaactgccgggacactgcagctt

SEQ ID NO: 5418154 - DNA, 25 bp, Homo sapien
gggcctctttcggagcgctgccacg

SEQ ID NO: 5418155 - DNA, 25 bp, Homo sapien
tcgtgggccggttctgcaccttctc

SEQ ID NO: 5418156 - DNA, 25 bp, Homo sapien
cctgccccgaagttgtaatcctctg

SEQ ID NO: 5418157 - DNA, 25 bp, Homo sapien
tcttggcgtggaggcgccgagctgc

SEQ ID NO: 5418158 - DNA, 25 bp, Homo sapien
tgcgttcttggcgtggaggcgccga

SEQ ID NO: 5418159 - DNA, 25 bp, Homo sapien
tgtctgcgttcttggcgtggaggcg

SEQ ID NO: 5418160 - DNA, 25 bp, Homo sapien
aggctgtctgcgttcttggcgtgga

SEQ ID NO: 5418161 - DNA, 25 bp, Homo sapien
caggccgcagggcggaatgtaacat

SEQ ID NO: 5418162 - DNA, 25 bp, Homo sapien
ccgccccgcccagcatcaggccgca

SEQ ID NO: 5418163 - DNA, 25 bp, Homo sapien
gggcttcttgctcccggacattgtt

SEQ ID NO: 5418164 - DNA, 25 bp, Homo sapien
cttttgacttttgagcgagttcggg

SEQ ID NO: 5418165 - DNA, 25 bp, Homo sapien
gagttgcactcgagttttactgccc

SEQ ID NO: 5418166 - DNA, 25 bp, Homo sapien
tgcccgtaagaacgactttttgaga

SEQ ID NO: 5418167 - DNA, 25 bp, Homo sapien
agtgcccgcgttctgcctgagttgg

SEQ ID NO: 5418168 - DNA, 25 bp, Homo sapien
cccgcgttctgcctgagttgggaga

SEQ ID NO: 5418169 - DNA, 25 bp, Homo sapien
ctcagtgcccgcgttctgcctgagt

SEQ ID NO: 5418170 - DNA, 25 bp, Homo sapien
tgcccgcgttctgcctgagttggga

SEQ ID NO: 5418171 - DNA, 25 bp, Homo sapien
gcgtccttgcaaccccttctctttg

SEQ ID NO: 5418172 - DNA, 25 bp, Homo sapien
ttgcccttctcgtggtctgcggaaa

SEQ ID NO: 5418173 - DNA, 25 bp, Homo sapien
cttctcgtggtctgcggaaacaccc

SEQ ID NO: 5418174 - DNA, 25 bp, Homo sapien
ctctttgcccttctcgtggtctgcg

SEQ ID NO: 5418175 - DNA, 25 bp, Homo sapien
caaaaatgcaatgggacactggatc

SEQ ID NO: 5418176 - DNA, 25 bp, Homo sapien
cagagaaggccccaaagcaatctgc

SEQ ID NO: 5418177 - DNA, 25 bp, Homo sapien
tctctggaccgcatggttgtaaacc

SEQ ID NO: 5418178 - DNA, 25 bp, Homo sapien
tcatcctagaggagacgaagcctgg

SEQ ID NO: 5418179 - DNA, 25 bp, Homo sapien
gggcccaaggtagaaagcagagccc

SEQ ID NO: 5418180 - DNA, 25 bp, Homo sapien
tgtaagctggttgtgtggggcccaa

SEQ ID NO: 5418181 - DNA, 25 bp, Homo sapien
agatgccactctcataccagtgtat

SEQ ID NO: 5418182 - DNA, 25 bp, Homo sapien
tatgaagtggaaagatgccactctc

SEQ ID NO: 5418183 - DNA, 25 bp, Homo sapien
ccgccggccggagaatccctcgcgg

SEQ ID NO: 5418184 - DNA, 25 bp, Homo sapien
gccggagaatccctcgcggggactc

SEQ ID NO: 5418185 - DNA, 25 bp, Homo sapien
agaatccctcgcggggactcgggag

SEQ ID NO: 5418186 - DNA, 25 bp, Homo sapien
gcccagcgcgcctgtcctctccttg

SEQ ID NO: 5418187 - DNA, 25 bp, Homo sapien
gctctgagcacgtgactgaccggac

SEQ ID NO: 5418188 - DNA, 25 bp, Homo sapien
agatgtaaacgtagctctcggccgg

SEQ ID NO: 5418189 - DNA, 25 bp, Homo sapien
ctcgcggtgtcgcagcctcggaaag

SEQ ID NO: 5418190 - DNA, 25 bp, Homo sapien
cctcggaaagatgtaaacgtagctc

SEQ ID NO: 5418191 - DNA, 25 bp, Homo sapien
tttcaacgtcaaaatgaggtcatcc

SEQ ID NO: 5418192 - DNA, 25 bp, Homo sapien
gaggtcatccgcaaaggcacctaaa

SEQ ID NO: 5418193 - DNA, 25 bp, Homo sapien
tgtccaagtccaggctaataatcct

SEQ ID NO: 5418194 - DNA, 25 bp, Homo sapien
gtgggaaaatctgcacagacacctt

SEQ ID NO: 5418195 - DNA, 25 bp, Homo sapien
cgcggtgggggtaagataagggatg

SEQ ID NO: 5418196 - DNA, 25 bp, Homo sapien
tgggaggcttccatctcccgggacc

SEQ ID NO: 5418197 - DNA, 25 bp, Homo sapien
ggaccgggaggtcaataactgcagc

SEQ ID NO: 5418198 - DNA, 25 bp, Homo sapien
ggtcaataactgcagcgtccgagct

SEQ ID NO: 5418199 - DNA, 25 bp, Homo sapien
ataactgcagcgtccgagctgagcc

SEQ ID NO: 5418200 - DNA, 25 bp, Homo sapien
tgctgtccggttcccccgagagagg

SEQ ID NO: 5418201 - DNA, 25 bp, Homo sapien
gggctcaggtcagaaatgcggcctt

SEQ ID NO: 5418202 - DNA, 25 bp, Homo sapien
agcagggcctgagacgggccactgc

SEQ ID NO: 5418203 - DNA, 25 bp, Homo sapien
atgcggccttttagggaggcctttg

SEQ ID NO: 5418204 - DNA, 25 bp, Homo sapien
tctctgctctcagtctctggcgagt

SEQ ID NO: 5418205 - DNA, 25 bp, Homo sapien
aatgaggataagtggtctctgctct

SEQ ID NO: 5418206 - DNA, 25 bp, Homo sapien
tctgctctcagtctctggcgagttc

SEQ ID NO: 5418207 - DNA, 25 bp, Homo sapien
ccccggctcggggtaagcaatgagg

SEQ ID NO: 5418208 - DNA, 25 bp, Homo sapien
cgaagcacaaggtggagaagcgctg

SEQ ID NO: 5418209 - DNA, 25 bp, Homo sapien
cggatcccgaggtctggtggtacca

SEQ ID NO: 5418210 - DNA, 25 bp, Homo sapien
ttgcccagaaaagccgaggccgcgc

SEQ ID NO: 5418211 - DNA, 25 bp, Homo sapien
acatcttcttgaacttggaccggcg

SEQ ID NO: 5418212 - DNA, 25 bp, Homo sapien
tgaggaaaaagacctgagcattagt

SEQ ID NO: 5418213 - DNA, 25 bp, Homo sapien
gcagtaggggttcgaagaggagaaa

SEQ ID NO: 5418214 - DNA, 25 bp, Homo sapien
gagcattagtggaggaacctagtct

SEQ ID NO: 5418215 - DNA, 25 bp, Homo sapien
tagtcttggggcagtaggggttcga

SEQ ID NO: 5418216 - DNA, 25 bp, Homo sapien
tatccgaatttcaggctcaaggtcc

SEQ ID NO: 5418217 - DNA, 25 bp, Homo sapien
tcgctccggcaaggccaagtattga

SEQ ID NO: 5418218 - DNA, 25 bp, Homo sapien
ctgaagagccgccagctggaaactg

SEQ ID NO: 5418219 - DNA, 25 bp, Homo sapien
tgagtcttttggaaacgccgctgaa

SEQ ID NO: 5418220 - DNA, 25 bp, Homo sapien
caggcgcaacttcgcagcgtgcgat

SEQ ID NO: 5418221 - DNA, 25 bp, Homo sapien
tgggtgcactgaactgtggcgccac

SEQ ID NO: 5418222 - DNA, 25 bp, Homo sapien
agcgtgcgatcggagccgccaccga

SEQ ID NO: 5418223 - DNA, 25 bp, Homo sapien
aaagaatcgtaagaacagcgcaacc

SEQ ID NO: 5418224 - DNA, 25 bp, Homo sapien
caaggagatgcccttatgaggcagg

SEQ ID NO: 5418225 - DNA, 25 bp, Homo sapien
acttggctcttgaggccaccaggtc

SEQ ID NO: 5418226 - DNA, 25 bp, Homo sapien
gaagggggagacaagtgcacaccca

SEQ ID NO: 5418227 - DNA, 25 bp, Homo sapien
gcaggcagagcacgcccacttggct

SEQ ID NO: 5418228 - DNA, 25 bp, Homo sapien
gtaaccggcgacctgcggcagattg

SEQ ID NO: 5418229 - DNA, 25 bp, Homo sapien
agagagggacgtaaccggcgacctg

SEQ ID NO: 5418230 - DNA, 25 bp, Homo sapien
aaccggcgacctgcggcagattgga

SEQ ID NO: 5418231 - DNA, 25 bp, Homo sapien
gacgtaaccggcgacctgcggcaga

SEQ ID NO: 5418232 - DNA, 25 bp, Homo sapien
tcggcactcttgacttcagcgttat

SEQ ID NO: 5418233 - DNA, 25 bp, Homo sapien
cactcttgacttcagcgttatgcat

SEQ ID NO: 5418234 - DNA, 25 bp, Homo sapien
ggcactcttgacttcagcgttatgc

SEQ ID NO: 5418235 - DNA, 25 bp, Homo sapien
ctcttgacttcagcgttatgcatac

SEQ ID NO: 5418236 - DNA, 25 bp, Homo sapien
cgtaggaggtgtaggcggcggtgta

SEQ ID NO: 5418237 - DNA, 25 bp, Homo sapien
aagggacgttgttgaggccgctggc

SEQ ID NO: 5418238 - DNA, 25 bp, Homo sapien
ttggctggggacgaactggttccat

SEQ ID NO: 5418239 - DNA, 25 bp, Homo sapien
tgctcttggcggagtaagggacgtt

SEQ ID NO: 5418240 - DNA, 25 bp, Homo sapien
cggcgatctgggtcgagtgcatatc

SEQ ID NO: 5418241 - DNA, 25 bp, Homo sapien
gccactagactgtcaaagactccag

SEQ ID NO: 5418242 - DNA, 25 bp, Homo sapien
tggtacgtgctggaggcggcgatct

SEQ ID NO: 5418243 - DNA, 25 bp, Homo sapien
tggacaccggaagggtgggcgactc

SEQ ID NO: 5418244 - DNA, 25 bp, Homo sapien
gatcaccgtgcgctgctcgggacag

SEQ ID NO: 5418245 - DNA, 25 bp, Homo sapien
gtcgcatcctctttcggcctctggg

SEQ ID NO: 5418246 - DNA, 25 bp, Homo sapien
caagaaaggaggcaaccgtctaggc

SEQ ID NO: 5418247 - DNA, 25 bp, Homo sapien
tccagcagccaatgtaattacgggg

SEQ ID NO: 5418248 - DNA, 25 bp, Homo sapien
gactggcgttttgcctcagaggaag

SEQ ID NO: 5418249 - DNA, 25 bp, Homo sapien
tcgaggtagcgaggagtcagggtgg

SEQ ID NO: 5418250 - DNA, 25 bp, Homo sapien
gggcgggcgtcacatggtgggcgct

SEQ ID NO: 5418251 - DNA, 25 bp, Homo sapien
gcggccccaggtgcaaacagactgc

SEQ ID NO: 5418252 - DNA, 25 bp, Homo sapien
cagttccagtgattcgtactttcat

SEQ ID NO: 5418253 - DNA, 25 bp, Homo sapien
taaagtacatcggtgcccagagtcc

SEQ ID NO: 5418254 - DNA, 25 bp, Homo sapien
cacaaaccacgtgtaatgctcgctt

SEQ ID NO: 5418255 - DNA, 25 bp, Homo sapien
tcacttttcctcgaagtgtctggca

SEQ ID NO: 5418256 - DNA, 25 bp, Homo sapien
tagccactcggcacttgacataatc

SEQ ID NO: 5418257 - DNA, 25 bp, Homo sapien
gagtaattatatacgtttgataagt

SEQ ID NO: 5418258 - DNA, 25 bp, Homo sapien
tggtactttcccgacacgcgagact

SEQ ID NO: 5418259 - DNA, 25 bp, Homo sapien
cacgcgagactctgagtaattatat

SEQ ID NO: 5418260 - DNA, 25 bp, Homo sapien
ctgaaagccatcccgaggacttcct

SEQ ID NO: 5418261 - DNA, 25 bp, Homo sapien
aaccttggcccgacggtgatggact

SEQ ID NO: 5418262 - DNA, 25 bp, Homo sapien
gggtagacggtctaatcacgcccag

SEQ ID NO: 5418263 - DNA, 25 bp, Homo sapien
aagtccgaagttcctgcggcagcgc

SEQ ID NO: 5418264 - DNA, 25 bp, Homo sapien
tgatggactgcacgacttgctggac

SEQ ID NO: 5418265 - DNA, 25 bp, Homo sapien
gaaagggagacagaacgcacaactg

SEQ ID NO: 5418266 - DNA, 25 bp, Homo sapien
gaagagaccagaggcaatgagcaag

SEQ ID NO: 5418267 - DNA, 25 bp, Homo sapien
tctggaaggaaatgactggagcccc

SEQ ID NO: 5418268 - DNA, 25 bp, Homo sapien
tccattaattagcagcccaaagtct

SEQ ID NO: 5418269 - DNA, 25 bp, Homo sapien
gaagcagtggcatagggaattgaca

SEQ ID NO: 5418270 - DNA, 25 bp, Homo sapien
cgagtttgggagaacactggtgctt

SEQ ID NO: 5418271 - DNA, 25 bp, Homo sapien
gacgcccgtctccttagtgatctga

SEQ ID NO: 5418272 - DNA, 25 bp, Homo sapien
ggaattgacagttttgtctacagtc

SEQ ID NO: 5418273 - DNA, 25 bp, Homo sapien
tctgacttcggcattcttttgctcc

SEQ ID NO: 5418274 - DNA, 25 bp, Homo sapien
gctttggatcgcttgtcccaggctg

SEQ ID NO: 5418275 - DNA, 25 bp, Homo sapien
gtgcttgcgtgttcgaatcccatcg

SEQ ID NO: 5418276 - DNA, 25 bp, Homo sapien
cttttgctccgcaggaacatagaga

SEQ ID NO: 5418277 - DNA, 25 bp, Homo sapien
cgtggcggggccaggcccattttca

SEQ ID NO: 5418278 - DNA, 25 bp, Homo sapien
gggccaggcccattttcactctcct

SEQ ID NO: 5418279 - DNA, 25 bp, Homo sapien
gcggggccaggcccattttcactct

SEQ ID NO: 5418280 - DNA, 25 bp, Homo sapien
tcagtgcgtggcggggccaggccca

SEQ ID NO: 5418281 - DNA, 25 bp, Homo sapien
catgcgctgctgctcctactcctca

SEQ ID NO: 5418282 - DNA, 25 bp, Homo sapien
ggatgggagggctgcatgcgctgct

SEQ ID NO: 5418283 - DNA, 25 bp, Homo sapien
gggatgggagggctgcatgcgctgc

SEQ ID NO: 5418284 - DNA, 25 bp, Homo sapien
cgggggatgggagggctgcatgcgc

SEQ ID NO: 5418285 - DNA, 25 bp, Homo sapien
tttcgtccccgaagtagtagctcta

SEQ ID NO: 5418286 - DNA, 25 bp, Homo sapien
caatgccagtttcggtacctttgtg

SEQ ID NO: 5418287 - DNA, 25 bp, Homo sapien
acctgcgctttcgaatccctttggg

SEQ ID NO: 5418288 - DNA, 25 bp, Homo sapien
aagtagtagctctaggaacctgcgc

SEQ ID NO: 5418289 - DNA, 25 bp, Homo sapien
agcctcgagggactccgggagccat

SEQ ID NO: 5418290 - DNA, 25 bp, Homo sapien
tgcgacccctaaggcagcctcgagg

SEQ ID NO: 5418291 - DNA, 25 bp, Homo sapien
gctgggtcctttcgcattgctggtc

SEQ ID NO: 5418292 - DNA, 25 bp, Homo sapien
attgctggtctcctcaacctgattt

SEQ ID NO: 5418293 - DNA, 25 bp, Homo sapien
tgtcctggcggcagccaaggtgaag

SEQ ID NO: 5418294 - DNA, 25 bp, Homo sapien
cgctgtttccgggatccagtggacc

SEQ ID NO: 5418295 - DNA, 25 bp, Homo sapien
cagccaaggtgaaggcagacgctgt

SEQ ID NO: 5418296 - DNA, 25 bp, Homo sapien
ggatttgggcgtgggcctccgaggc

SEQ ID NO: 5418297 - DNA, 25 bp, Homo sapien
cagaaaagattgaatactaaggagc

SEQ ID NO: 5418298 - DNA, 25 bp, Homo sapien
ctaagttctgaattgatgatatgct

SEQ ID NO: 5418299 - DNA, 25 bp, Homo sapien
gagcacaatttatcaccacattcca

SEQ ID NO: 5418300 - DNA, 25 bp, Homo sapien
acaccaagtcttgtgtaagacagtg

SEQ ID NO: 5418301 - DNA, 25 bp, Homo sapien
gaatcctgagatgtttaaacaaggt

SEQ ID NO: 5418302 - DNA, 25 bp, Homo sapien
tctattatacttttgatactctgtc

SEQ ID NO: 5418303 - DNA, 25 bp, Homo sapien
cataatccaaagaatagctgctgga

SEQ ID NO: 5418304 - DNA, 25 bp, Homo sapien
aacatcaaaagtaacctggacccag

SEQ ID NO: 5418305 - DNA, 25 bp, Homo sapien
ttctatcacttacagcagtgtttct

SEQ ID NO: 5418306 - DNA, 25 bp, Homo sapien
gctttctatcacttacagcagtgtt

SEQ ID NO: 5418307 - DNA, 25 bp, Homo sapien
caaattggggcctggagatacctgg

SEQ ID NO: 5418308 - DNA, 25 bp, Homo sapien
tggctttctatcacttacagcagtg

SEQ ID NO: 5418309 - DNA, 25 bp, Homo sapien
tacttgccacatttgaccataatta

SEQ ID NO: 5418310 - DNA, 25 bp, Homo sapien
tgccacatttgaccataattatctt

SEQ ID NO: 5418311 - DNA, 25 bp, Homo sapien
tatagctcctttatatataggaggt

SEQ ID NO: 5418312 - DNA, 25 bp, Homo sapien
aggtagtctcatattctctttgaac

SEQ ID NO: 5418313 - DNA, 25 bp, Homo sapien
gagtggaggccaaccttgagaatac

SEQ ID NO: 5418314 - DNA, 25 bp, Homo sapien
ttgtgaagtttccctgtgcctgtga

SEQ ID NO: 5418315 - DNA, 25 bp, Homo sapien
ttggttggtaaaagcaggagaatgc

SEQ ID NO: 5418316 - DNA, 25 bp, Homo sapien
tgagttgcccagggcctttgtgaag

SEQ ID NO: 5418317 - DNA, 25 bp, Homo sapien
ggcaggtagggcaaggtctccaggc

SEQ ID NO: 5418318 - DNA, 25 bp, Homo sapien
tcacagacctggtgttccacccaaa

SEQ ID NO: 5418319 - DNA, 25 bp, Homo sapien
ccagtagatatccaggtgggtgtct

SEQ ID NO: 5418320 - DNA, 25 bp, Homo sapien
aagtacagcacgcttggtaagtaag

SEQ ID NO: 5418321 - DNA, 25 bp, Homo sapien
tctctgcatcccaatattcttttct

SEQ ID NO: 5418322 - DNA, 25 bp, Homo sapien
ctctctgcatcccaatattcttttc

SEQ ID NO: 5418323 - DNA, 25 bp, Homo sapien
tttgggactggcaatacaaaaacat

SEQ ID NO: 5418324 - DNA, 25 bp, Homo sapien
ttgggactggcaatacaaaaacatt

SEQ ID NO: 5418325 - DNA, 25 bp, Homo sapien
ctgacacttcatatgctagccaatt

SEQ ID NO: 5418326 - DNA, 25 bp, Homo sapien
tctcttctcagtaatcacatctttc

SEQ ID NO: 5418327 - DNA, 25 bp, Homo sapien
ttaaagagtctagtcatgtggtctc

SEQ ID NO: 5418328 - DNA, 25 bp, Homo sapien
tcatgtaagccccacttctcagtct

SEQ ID NO: 5418329 - DNA, 25 bp, Homo sapien
gtttccaagatacgcatggaccctg

SEQ ID NO: 5418330 - DNA, 25 bp, Homo sapien
tccatggccccaggttagaactcat

SEQ ID NO: 5418331 - DNA, 25 bp, Homo sapien
tggtgggccttttgatgacagctat

SEQ ID NO: 5418332 - DNA, 25 bp, Homo sapien
tccagaaaaatgcacgtgcacataa

SEQ ID NO: 5418333 - DNA, 25 bp, Homo sapien
tgaagtgggatagcctaggagttaa

SEQ ID NO: 5418334 - DNA, 25 bp, Homo sapien
taggaacaaagggactgatagtgaa

SEQ ID NO: 5418335 - DNA, 25 bp, Homo sapien
taggagttaagagaatggaccccat

SEQ ID NO: 5418336 - DNA, 25 bp, Homo sapien
tctggtgggctgactaggaacaaag

SEQ ID NO: 5418337 - DNA, 25 bp, Homo sapien
tcaggtcttctgtgcctgctgctca

SEQ ID NO: 5418338 - DNA, 25 bp, Homo sapien
caggtcttctgtgcctgctgctcac

SEQ ID NO: 5418339 - DNA, 25 bp, Homo sapien
agtgttgacctctcgtcgactcagg

SEQ ID NO: 5418340 - DNA, 25 bp, Homo sapien
tgcccacgccttagatttcacaggt

SEQ ID NO: 5418341 - DNA, 25 bp, Homo sapien
agcctcctccatagccctggaaggt

SEQ ID NO: 5418342 - DNA, 25 bp, Homo sapien
tccgtggctgggatgctttctgcct

SEQ ID NO: 5418343 - DNA, 25 bp, Homo sapien
aaggagctcaggctcccatcagagc

SEQ ID NO: 5418344 - DNA, 25 bp, Homo sapien
tctgactttgggtggcagagtggtg

SEQ ID NO: 5418345 - DNA, 25 bp, Homo sapien
gtggtggggctcagctggatttaag

SEQ ID NO: 5418346 - DNA, 25 bp, Homo sapien
gggctcagctggatttaaggagctc

SEQ ID NO: 5418347 - DNA, 25 bp, Homo sapien
aaccttgaacaccaatatggacaca

SEQ ID NO: 5418348 - DNA, 25 bp, Homo sapien
aaaagtattaggatggatgaggttg

SEQ ID NO: 5418349 - DNA, 25 bp, Homo sapien
acaccaatatggacacatgtgcaga

SEQ ID NO: 5418350 - DNA, 25 bp, Homo sapien
cccagattttcattgaggggttaga

SEQ ID NO: 5418351 - DNA, 25 bp, Homo sapien
tccgacagctccaaagcttggacag

SEQ ID NO: 5418352 - DNA, 25 bp, Homo sapien
acagctccaaagcttggacagtggg

SEQ ID NO: 5418353 - DNA, 25 bp, Homo sapien
gcagctctgacagctccgacagctc

SEQ ID NO: 5418354 - DNA, 25 bp, Homo sapien
gctccgacagctccaaagcttggac

SEQ ID NO: 5418355 - DNA, 25 bp, Homo sapien
ataacctgcaggcagctagtggaga

SEQ ID NO: 5418356 - DNA, 25 bp, Homo sapien
gtttgcataacctgcaggcagctag

SEQ ID NO: 5418357 - DNA, 25 bp, Homo sapien
tgtttgtgatcatggtttgcataac

SEQ ID NO: 5418358 - DNA, 25 bp, Homo sapien
cattgtgcctggtgagtggttccca

SEQ ID NO: 5418359 - DNA, 25 bp, Homo sapien
tattcgtgtagtactgccaggactg

SEQ ID NO: 5418360 - DNA, 25 bp, Homo sapien
ggcccttgaggcatcagcattgctt

SEQ ID NO: 5418361 - DNA, 25 bp, Homo sapien
tatgctgattaggacaagcccacag

SEQ ID NO: 5418362 - DNA, 25 bp, Homo sapien
tatgcccgggtgctcttgatgttct

SEQ ID NO: 5418363 - DNA, 25 bp, Homo sapien
ctagcctgttttttcttctccattt

SEQ ID NO: 5418364 - DNA, 25 bp, Homo sapien
tccttttgccctatcagagttttcc

SEQ ID NO: 5418365 - DNA, 25 bp, Homo sapien
cacaccctgaatgaaagtttgccca

SEQ ID NO: 5418366 - DNA, 25 bp, Homo sapien
tctggccacaccctgaatgaaagtt

SEQ ID NO: 5418367 - DNA, 25 bp, Homo sapien
catttcctctgcaatgtctgcccaa

SEQ ID NO: 5418368 - DNA, 25 bp, Homo sapien
tatatagtgtgctaaggacatgtgg

SEQ ID NO: 5418369 - DNA, 25 bp, Homo sapien
acaggaagcagctaaccacattctg

SEQ ID NO: 5418370 - DNA, 25 bp, Homo sapien
gcaccgactgtcgtcctttgatcct

SEQ ID NO: 5418371 - DNA, 25 bp, Homo sapien
gaggcttcactaattgccaactgac

SEQ ID NO: 5418372 - DNA, 25 bp, Homo sapien
tgtgctaacgtcataacaaggttca

SEQ ID NO: 5418373 - DNA, 25 bp, Homo sapien
ggtggcagatctcacacatgcacgt

SEQ ID NO: 5418374 - DNA, 25 bp, Homo sapien
atgtgctaacgtcataacaaggttc

SEQ ID NO: 5418375 - DNA, 25 bp, Homo sapien
atgcacgtgaatacccaatcatcat

SEQ ID NO: 5418376 - DNA, 25 bp, Homo sapien
gctagattcaaactgtatgacctca

SEQ ID NO: 5418377 - DNA, 25 bp, Homo sapien
gatcattatctgtcacccattcagc

SEQ ID NO: 5418378 - DNA, 25 bp, Homo sapien
tgtatgacctcacgctccattctgg

SEQ ID NO: 5418379 - DNA, 25 bp, Homo sapien
tttggtgtgattactccaggcgagg

SEQ ID NO: 5418380 - DNA, 25 bp, Homo sapien
agccagagatggataaatagcccat

SEQ ID NO: 5418381 - DNA, 25 bp, Homo sapien
caggtgtgtagctccctgtggtcag

SEQ ID NO: 5418382 - DNA, 25 bp, Homo sapien
taaataacagtatggcaagaggatg

SEQ ID NO: 5418383 - DNA, 25 bp, Homo sapien
aaatttggtgattatgggggaagca

SEQ ID NO: 5418384 - DNA, 25 bp, Homo sapien
tgagtttgccattcgtcactgctaa

SEQ ID NO: 5418385 - DNA, 25 bp, Homo sapien
gaggagccttagatggcacttttac

SEQ ID NO: 5418386 - DNA, 25 bp, Homo sapien
tgactctgactctggctacccaagg

SEQ ID NO: 5418387 - DNA, 25 bp, Homo sapien
aatgctgtcaccgttctgagtttgc

SEQ ID NO: 5418388 - DNA, 25 bp, Homo sapien
caaaggggaatttattgactcatac

SEQ ID NO: 5418389 - DNA, 25 bp, Homo sapien
tatccctcgccctccatttttcaac

SEQ ID NO: 5418390 - DNA, 25 bp, Homo sapien
tgagaaatccaagtgggtgattatg

SEQ ID NO: 5418391 - DNA, 25 bp, Homo sapien
ttacctctgcctggctttattcaag

SEQ ID NO: 5418392 - DNA, 25 bp, Homo sapien
cttctgttagcatagagacatattt

SEQ ID NO: 5418393 - DNA, 25 bp, Homo sapien
gagatagaagtaagaagatgatttt

SEQ ID NO: 5418394 - DNA, 25 bp, Homo sapien
ttaggctagagagatagaagtaaga

SEQ ID NO: 5418395 - DNA, 25 bp, Homo sapien
tctgttagcatagagacatatttat

SEQ ID NO: 5418396 - DNA, 25 bp, Homo sapien
cattgatggtagatgcagcagatgc

SEQ ID NO: 5418397 - DNA, 25 bp, Homo sapien
gggccaggcattgcccattgatggt

SEQ ID NO: 5418398 - DNA, 25 bp, Homo sapien
acctggcatgaccagaggacctgtg

SEQ ID NO: 5418399 - DNA, 25 bp, Homo sapien
tgcagcaaacctggcatgaccagag

SEQ ID NO: 5418400 - DNA, 25 bp, Homo sapien
catgatggtatctctggtcatctaa

SEQ ID NO: 5418401 - DNA, 25 bp, Homo sapien
cccatgatggtatctctggtcatct

SEQ ID NO: 5418402 - DNA, 25 bp, Homo sapien
cccccatgatggtatctctggtcat

SEQ ID NO: 5418403 - DNA, 25 bp, Homo sapien
catttttgctgcatgcgtcactaac

SEQ ID NO: 5418404 - DNA, 25 bp, Homo sapien
ctgggatagataagctttgtctctt

SEQ ID NO: 5418405 - DNA, 25 bp, Homo sapien
cattgttccctcactggagccctgg

SEQ ID NO: 5418406 - DNA, 25 bp, Homo sapien
ctcttggaggtgctgggatagataa

SEQ ID NO: 5418407 - DNA, 25 bp, Homo sapien
catgaaagtagaaatctaacagacc

SEQ ID NO: 5418408 - DNA, 25 bp, Homo sapien
tacgacaggtaaacatagtgtacat

SEQ ID NO: 5418409 - DNA, 25 bp, Homo sapien
tgagaatcaggtaaacgaacagaat

SEQ ID NO: 5418410 - DNA, 25 bp, Homo sapien
taggcctaaaaatgtcagtaacttc

SEQ ID NO: 5418411 - DNA, 25 bp, Homo sapien
gaggccaaccaccagaaacattgct

SEQ ID NO: 5418412 - DNA, 25 bp, Homo sapien
tcctggtttatgattgtgtattcct

SEQ ID NO: 5418413 - DNA, 25 bp, Homo sapien
tgtctgagaatgcactgcgtctggc

SEQ ID NO: 5418414 - DNA, 25 bp, Homo sapien
tctgatttgagaggcccagaaggtg

SEQ ID NO: 5418415 - DNA, 25 bp, Homo sapien
catctgatttaaggagtcatcccca

SEQ ID NO: 5418416 - DNA, 25 bp, Homo sapien
cctctcctggatgtgatttgtattc

SEQ ID NO: 5418417 - DNA, 25 bp, Homo sapien
agctctgatcgtggcccagaaccac

SEQ ID NO: 5418418 - DNA, 25 bp, Homo sapien
cctggtctgcacaagctcccaatat

SEQ ID NO: 5418419 - DNA, 25 bp, Homo sapien
gtctgggtggagtcttgtaactgca

SEQ ID NO: 5418420 - DNA, 25 bp, Homo sapien
tttgcaattttagggagcggtctgg

SEQ ID NO: 5418421 - DNA, 25 bp, Homo sapien
agctttgcaattttagggagcggtc

SEQ ID NO: 5418422 - DNA, 25 bp, Homo sapien
cttgtaactgcaccccgaaacattt

SEQ ID NO: 5418423 - DNA, 25 bp, Homo sapien
tctgtttcggcccgtgaaggcagaa

SEQ ID NO: 5418424 - DNA, 25 bp, Homo sapien
ttctctgtttcggcccgtgaaggca

SEQ ID NO: 5418425 - DNA, 25 bp, Homo sapien
gtttcggcccgtgaaggcagaagca

SEQ ID NO: 5418426 - DNA, 25 bp, Homo sapien
tgtttcggcccgtgaaggcagaagc

SEQ ID NO: 5418427 - DNA, 25 bp, Homo sapien
acctctgtgcaagtgcttgcttgcc

SEQ ID NO: 5418428 - DNA, 25 bp, Homo sapien
ttgagaaagccctgactcaccccgc

SEQ ID NO: 5418429 - DNA, 25 bp, Homo sapien
tcacacgtgtttctagacctctggg

SEQ ID NO: 5418430 - DNA, 25 bp, Homo sapien
gttcctcgggctcacctctgtgcaa

SEQ ID NO: 5418431 - DNA, 25 bp, Homo sapien
ttccagtctgaggtaaatgtttctt

SEQ ID NO: 5418432 - DNA, 25 bp, Homo sapien
gacgatagttttgtaatccttgtaa

SEQ ID NO: 5418433 - DNA, 25 bp, Homo sapien
gaagaactctgtatcctgagcctgt

SEQ ID NO: 5418434 - DNA, 25 bp, Homo sapien
actttgatgatagcaccctgagctt

SEQ ID NO: 5418435 - DNA, 25 bp, Homo sapien
cagagtcagggccacatttagctgg

SEQ ID NO: 5418436 - DNA, 25 bp, Homo sapien
gctggttctgtaagaagggcctgat

SEQ ID NO: 5418437 - DNA, 25 bp, Homo sapien
gaaggtgtggtatctgtcctctcct

SEQ ID NO: 5418438 - DNA, 25 bp, Homo sapien
aagaaggtgtggtatctgtcctctc

SEQ ID NO: 5418439 - DNA, 25 bp, Homo sapien
cacgggagagtaggtgtggtctcca

SEQ ID NO: 5418440 - DNA, 25 bp, Homo sapien
tctgtaggcctctgtctctctataa

SEQ ID NO: 5418441 - DNA, 25 bp, Homo sapien
ttctccccagggcacgggagagtag

SEQ ID NO: 5418442 - DNA, 25 bp, Homo sapien
cccttcttggtatccaaacctggag

SEQ ID NO: 5418443 - DNA, 25 bp, Homo sapien
accatggcttgaagtggcttgatat

SEQ ID NO: 5418444 - DNA, 25 bp, Homo sapien
gaaaccatggcttgaagtggcttga

SEQ ID NO: 5418445 - DNA, 25 bp, Homo sapien
agagaaaccatggcttgaagtggct

SEQ ID NO: 5418446 - DNA, 25 bp, Homo sapien
gagaaaccatggcttgaagtggctt

SEQ ID NO: 5418447 - DNA, 25 bp, Homo sapien
gcataacagggtaacctgggcctcc

SEQ ID NO: 5418448 - DNA, 25 bp, Homo sapien
tcattcctaaggcataacagggtaa

SEQ ID NO: 5418449 - DNA, 25 bp, Homo sapien
atcattcctaaggcataacagggta

SEQ ID NO: 5418450 - DNA, 25 bp, Homo sapien
gttgagacaaacatataacagccgt

SEQ ID NO: 5418451 - DNA, 25 bp, Homo sapien
taacagccgtgtactcagctggcag

SEQ ID NO: 5418452 - DNA, 25 bp, Homo sapien
tcatcataactcaaggggtgaaagt

SEQ ID NO: 5418453 - DNA, 25 bp, Homo sapien
gggggaattctgtgagttccatcca

SEQ ID NO: 5418454 - DNA, 25 bp, Homo sapien
gaatagcagttttcaaggctgtaaa

SEQ ID NO: 5418455 - DNA, 25 bp, Homo sapien
tagcagaagaatctatttatggcac

SEQ ID NO: 5418456 - DNA, 25 bp, Homo sapien
ctatttatggcacgtatgttgtgaa

SEQ ID NO: 5418457 - DNA, 25 bp, Homo sapien
gaaaaacacaatcagggcagaagca

SEQ ID NO: 5418458 - DNA, 25 bp, Homo sapien
tgtacaggttgcaggacatgcttgg

SEQ ID NO: 5418459 - DNA, 25 bp, Homo sapien
aaaatcgtaggctagagggaggcaa

SEQ ID NO: 5418460 - DNA, 25 bp, Homo sapien
agatgatgagcctagggtcagagca

SEQ ID NO: 5418461 - DNA, 25 bp, Homo sapien
caaaggttcctgacccgctgaattc

SEQ ID NO: 5418462 - DNA, 25 bp, Homo sapien
tgaaaaacccaggagaacaatgagc

SEQ ID NO: 5418463 - DNA, 25 bp, Homo sapien
tgtttttacactctaaaatgaaatg

SEQ ID NO: 5418464 - DNA, 25 bp, Homo sapien
catgctgttggatggtatattacac

SEQ ID NO: 5418465 - DNA, 25 bp, Homo sapien
tagctcttgcttcaaagttttaaat

SEQ ID NO: 5418466 - DNA, 25 bp, Homo sapien
gcaaagggttgacttaggcagtaat

SEQ ID NO: 5418467 - DNA, 25 bp, Homo sapien
taatgaatggcaaagaacagtggag

SEQ ID NO: 5418468 - DNA, 25 bp, Homo sapien
ttggtctttagcacacaggtaggga

SEQ ID NO: 5418469 - DNA, 25 bp, Homo sapien
taaattggaccaggtagacggtctc

SEQ ID NO: 5418470 - DNA, 25 bp, Homo sapien
tttcagctgccctaaaatactccat

SEQ ID NO: 5418471 - DNA, 25 bp, Homo sapien
tgtctctggactggcttccttattg

SEQ ID NO: 5418472 - DNA, 25 bp, Homo sapien
ctttaagggatgttttatgtggctg

SEQ ID NO: 5418473 - DNA, 25 bp, Homo sapien
gattttcagctgccctaaaatactc

SEQ ID NO: 5418474 - DNA, 25 bp, Homo sapien
ctttttgtgctggtatagagtagaa

SEQ ID NO: 5418475 - DNA, 25 bp, Homo sapien
gagcctcatttgtgctaagtgaaga

SEQ ID NO: 5418476 - DNA, 25 bp, Homo sapien
taatgaacaactactgccttatttt

SEQ ID NO: 5418477 - DNA, 25 bp, Homo sapien
tttgccataggttaatgagcctcat

SEQ ID NO: 5418478 - DNA, 25 bp, Homo sapien
tagaagtctcaaaaatgtgcatgcc

SEQ ID NO: 5418479 - DNA, 25 bp, Homo sapien
gcaaaaatgcaacatgactaagggt

SEQ ID NO: 5418480 - DNA, 25 bp, Homo sapien
gtgcatgccattagactcaaaattg

SEQ ID NO: 5418481 - DNA, 25 bp, Homo sapien
tagaggcatcttttagagtagacac

SEQ ID NO: 5418482 - DNA, 25 bp, Homo sapien
tcttctccagggctaaagtacaaag

SEQ ID NO: 5418483 - DNA, 25 bp, Homo sapien
gaaggaagatagctctaagcccgat

SEQ ID NO: 5418484 - DNA, 25 bp, Homo sapien
gcccgatggtaccaggatttctctt

SEQ ID NO: 5418485 - DNA, 25 bp, Homo sapien
tcataaccacctaacccaatgtggg

SEQ ID NO: 5418486 - DNA, 25 bp, Homo sapien
ctgtgcggttttgtgaaaagttgac

SEQ ID NO: 5418487 - DNA, 25 bp, Homo sapien
gttgacctggattttgcttagatgg

SEQ ID NO: 5418488 - DNA, 25 bp, Homo sapien
tgcggttttgtgaaaagttgacctg

SEQ ID NO: 5418489 - DNA, 25 bp, Homo sapien
tgtgaaaagttgacctggattttgc

SEQ ID NO: 5418490 - DNA, 25 bp, Homo sapien
agtgtctttgatctgttaaaaaagc

SEQ ID NO: 5418491 - DNA, 25 bp, Homo sapien
cagtaagacctagtttgtcagacag

SEQ ID NO: 5418492 - DNA, 25 bp, Homo sapien
cagacagaactaaagattcaaggcc

SEQ ID NO: 5418493 - DNA, 25 bp, Homo sapien
aaaagcataagaaccaaagctccat

SEQ ID NO: 5418494 - DNA, 25 bp, Homo sapien
gagtatcctggaccttggaaccatt

SEQ ID NO: 5418495 - DNA, 25 bp, Homo sapien
gaagacacagtttcctcccagaaag

SEQ ID NO: 5418496 - DNA, 25 bp, Homo sapien
tggaaccattggctacctcgtgcct

SEQ ID NO: 5418497 - DNA, 25 bp, Homo sapien
caccacttcgactgagaagacacag

SEQ ID NO: 5418498 - DNA, 25 bp, Homo sapien
ctgcgcccttaagaaacgtttctgt

SEQ ID NO: 5418499 - DNA, 25 bp, Homo sapien
ccaccactgggccagatgagaagta

SEQ ID NO: 5418500 - DNA, 25 bp, Homo sapien
gagaagtacttgagagacccagcat

SEQ ID NO: 5418501 - DNA, 25 bp, Homo sapien
taaacctccagtcagactgtggccc

SEQ ID NO: 5418502 - DNA, 25 bp, Homo sapien
acccagcatgaccagcctctcctgg

SEQ ID NO: 5418503 - DNA, 25 bp, Homo sapien
ctggcggctgcatccagccttgctg

SEQ ID NO: 5418504 - DNA, 25 bp, Homo sapien
ggcggctgcatccagccttgctgct

SEQ ID NO: 5418505 - DNA, 25 bp, Homo sapien
gctgcatccagccttgctgctcggc

SEQ ID NO: 5418506 - DNA, 25 bp, Homo sapien
catccagccttgctgctcggcctgc

SEQ ID NO: 5418507 - DNA, 25 bp, Homo sapien
tgccagctattccatacatcatcct

SEQ ID NO: 5418508 - DNA, 25 bp, Homo sapien
gccagctattccatacatcatcctc

SEQ ID NO: 5418509 - DNA, 25 bp, Homo sapien
agatgccagctattccatacatcat

SEQ ID NO: 5418510 - DNA, 25 bp, Homo sapien
tattccatacatcatcctctgccac

SEQ ID NO: 5418511 - DNA, 25 bp, Homo sapien
tgggggcagtggacataattctcaa

SEQ ID NO: 5418512 - DNA, 25 bp, Homo sapien
gcatggctgccccagtgttatggaa

SEQ ID NO: 5418513 - DNA, 25 bp, Homo sapien
aagccaggtcctgcgtgaatctgca

SEQ ID NO: 5418514 - DNA, 25 bp, Homo sapien
ttgcgttcatgaagccaggtcctgc

SEQ ID NO: 5418515 - DNA, 25 bp, Homo sapien
ctgagaaatgcagatctctggaatt

SEQ ID NO: 5418516 - DNA, 25 bp, Homo sapien
gagaaatgcagatctctggaattct

SEQ ID NO: 5418517 - DNA, 25 bp, Homo sapien
tgcagatctctggaattctcagtgt

SEQ ID NO: 5418518 - DNA, 25 bp, Homo sapien
agatctctggaattctcagtgttct

SEQ ID NO: 5418519 - DNA, 25 bp, Homo sapien
gaattgtccctaagtgagaaaacag

SEQ ID NO: 5418520 - DNA, 25 bp, Homo sapien
tccactgtatgtgaattgtccctaa

SEQ ID NO: 5418521 - DNA, 25 bp, Homo sapien
tgtgaattgtccctaagtgagaaaa

SEQ ID NO: 5418522 - DNA, 25 bp, Homo sapien
tgtatgtgaattgtccctaagtgag

SEQ ID NO: 5418523 - DNA, 25 bp, Homo sapien
gtgagtagctctatgtgtaaccggg

SEQ ID NO: 5418524 - DNA, 25 bp, Homo sapien
actggtgagtagctctatgtgtaac

SEQ ID NO: 5418525 - DNA, 25 bp, Homo sapien
gagagggagccttggcacttggaaa

SEQ ID NO: 5418526 - DNA, 25 bp, Homo sapien
tggtgagtagctctatgtgtaaccg

SEQ ID NO: 5418527 - DNA, 25 bp, Homo sapien
tttgaaacaaggtccacaagcaacc

SEQ ID NO: 5418528 - DNA, 25 bp, Homo sapien
ggttcctggggagcgtgctttgacc

SEQ ID NO: 5418529 - DNA, 25 bp, Homo sapien
tgttttccccgaagaatactgaatg

SEQ ID NO: 5418530 - DNA, 25 bp, Homo sapien
acaagcaaccccgtgggtccattct

SEQ ID NO: 5418531 - DNA, 25 bp, Homo sapien
agccaaaagaagcttgtgtcgtgga

SEQ ID NO: 5418532 - DNA, 25 bp, Homo sapien
aaagaagcttgtgtcgtggagcagc

SEQ ID NO: 5418533 - DNA, 25 bp, Homo sapien
agggcggccgagttgtcggcggtgg

SEQ ID NO: 5418534 - DNA, 25 bp, Homo sapien
acagctggcggctcaacggcagcat

SEQ ID NO: 5418535 - DNA, 25 bp, Homo sapien
cgagaaaggtgacgagttctgcaaa

SEQ ID NO: 5418536 - DNA, 25 bp, Homo sapien
gcaaataacagctgcggagcaatcg

SEQ ID NO: 5418537 - DNA, 25 bp, Homo sapien
ggagcaatcgttatgtttggacaac

SEQ ID NO: 5418538 - DNA, 25 bp, Homo sapien
gacaacgtgggaagggccattgttc

SEQ ID NO: 5418539 - DNA, 25 bp, Homo sapien
ggtcactctcctagtcatctcggtt

SEQ ID NO: 5418540 - DNA, 25 bp, Homo sapien
ggcatttgtaaacttatggcacagg

SEQ ID NO: 5418541 - DNA, 25 bp, Homo sapien
gaatggctactccatggctctagac

SEQ ID NO: 5418542 - DNA, 25 bp, Homo sapien
taacttctgacgttgccgtggcatt

SEQ ID NO: 5418543 - DNA, 25 bp, Homo sapien
tgcctatgccacaatcaggaagcca

SEQ ID NO: 5418544 - DNA, 25 bp, Homo sapien
gaactggcctgccattacagcatct

SEQ ID NO: 5418545 - DNA, 25 bp, Homo sapien
agaactggcctgccattacagcatc

SEQ ID NO: 5418546 - DNA, 25 bp, Homo sapien
catctgcctatgccacaatcaggaa

SEQ ID NO: 5418547 - DNA, 25 bp, Homo sapien
aacaacagcaagaggtctacaaatc

SEQ ID NO: 5418548 - DNA, 25 bp, Homo sapien
atcattcccacttctttactccaag

SEQ ID NO: 5418549 - DNA, 25 bp, Homo sapien
aatctgggaaggtataaataggagt

SEQ ID NO: 5418550 - DNA, 25 bp, Homo sapien
tagtccacaatttgacaccaaacgg

SEQ ID NO: 5418551 - DNA, 25 bp, Homo sapien
ggtggagtggcttctctcctcttgc

SEQ ID NO: 5418552 - DNA, 25 bp, Homo sapien
tcctcttgccagtcagcaacccagg

SEQ ID NO: 5418553 - DNA, 25 bp, Homo sapien
tgtttcagcttggtggagtggcttc

SEQ ID NO: 5418554 - DNA, 25 bp, Homo sapien
tcagctccccaccgtgagggacagg

SEQ ID NO: 5418555 - DNA, 25 bp, Homo sapien
gggctgctgtgagtggcgcctgttt

SEQ ID NO: 5418556 - DNA, 25 bp, Homo sapien
cctgttttggcgatgtgagtggcgc

SEQ ID NO: 5418557 - DNA, 25 bp, Homo sapien
tgagtggcgcctgttttggcgatgt

SEQ ID NO: 5418558 - DNA, 25 bp, Homo sapien
tggaaacgcccagtggccgctgggc

SEQ ID NO: 5418559 - DNA, 25 bp, Homo sapien
cattaggtcgtgaccttgtttccaa

SEQ ID NO: 5418560 - DNA, 25 bp, Homo sapien
gatgacgccacaaagcattggcctg

SEQ ID NO: 5418561 - DNA, 25 bp, Homo sapien
ccacaaagcattggcctgcacggct

SEQ ID NO: 5418562 - DNA, 25 bp, Homo sapien
cacggctgaggagcattaggtcgtg

SEQ ID NO: 5418563 - DNA, 25 bp, Homo sapien
cttctttggtaccaggaatagccag

SEQ ID NO: 5418564 - DNA, 25 bp, Homo sapien
agaatggtcgctcctcacagggcag

SEQ ID NO: 5418565 - DNA, 25 bp, Homo sapien
tcagatggagcagaatggtcgctcc

SEQ ID NO: 5418566 - DNA, 25 bp, Homo sapien
cctcttgggtgataggccctgagac

SEQ ID NO: 5418567 - DNA, 25 bp, Homo sapien
aaataatcccgagtcttgagtcaga

SEQ ID NO: 5418568 - DNA, 25 bp, Homo sapien
caaaatcctgacagttacatccctc

SEQ ID NO: 5418569 - DNA, 25 bp, Homo sapien
gctgcccatgaccaatacatcaagt

SEQ ID NO: 5418570 - DNA, 25 bp, Homo sapien
tgtatccgttgtctttccaaagcct

SEQ ID NO: 5418571 - DNA, 25 bp, Homo sapien
gttacatccctccttggctaagaca

SEQ ID NO: 5418572 - DNA, 25 bp, Homo sapien
aagcatttgatgtagtctccttgtc

SEQ ID NO: 5418573 - DNA, 25 bp, Homo sapien
ttaagcatttgatgtagtctccttg

SEQ ID NO: 5418574 - DNA, 25 bp, Homo sapien
taagcatttgatgtagtctccttgt

SEQ ID NO: 5418575 - DNA, 25 bp, Homo sapien
ctctgagacccttgtccttttttgc

SEQ ID NO: 5418576 - DNA, 25 bp, Homo sapien
tttttgctctggacatcttgggtca

SEQ ID NO: 5418577 - DNA, 25 bp, Homo sapien
ccttttttgctctggacatcttggg

SEQ ID NO: 5418578 - DNA, 25 bp, Homo sapien
gagacccttgtccttttttgctctg

SEQ ID NO: 5418579 - DNA, 25 bp, Homo sapien
gggtctctgttagccccaggaatgg

SEQ ID NO: 5418580 - DNA, 25 bp, Homo sapien
tcctgtctagagagtgcagcacaat

SEQ ID NO: 5418581 - DNA, 25 bp, Homo sapien
gaaagactgatagcgagtctgccag

SEQ ID NO: 5418582 - DNA, 25 bp, Homo sapien
tcaggctgaccttctgtggctgccc

SEQ ID NO: 5418583 - DNA, 25 bp, Homo sapien
tgccagacagtctgagctcatcaga

SEQ ID NO: 5418584 - DNA, 25 bp, Homo sapien
gtgccagacagtctgagctcatcag

SEQ ID NO: 5418585 - DNA, 25 bp, Homo sapien
tattaattctttgtctgctccgaca

SEQ ID NO: 5418586 - DNA, 25 bp, Homo sapien
ttttttcacttcacgaaggatgcat

SEQ ID NO: 5418587 - DNA, 25 bp, Homo sapien
gaaggatgcatctgagattcagagc

SEQ ID NO: 5418588 - DNA, 25 bp, Homo sapien
cgcacagtctgtcatgaagtattca

SEQ ID NO: 5418589 - DNA, 25 bp, Homo sapien
gagttgtgggcctgtgcataaagtg

SEQ ID NO: 5418590 - DNA, 25 bp, Homo sapien
ggcctgtgcataaagtgttgaggga

SEQ ID NO: 5418591 - DNA, 25 bp, Homo sapien
ccgaggtggtatgaaagcacagggc

SEQ ID NO: 5418592 - DNA, 25 bp, Homo sapien
cgaggtggtatgaaagcacagggct

SEQ ID NO: 5418593 - DNA, 25 bp, Homo sapien
ggcttcttccaggagacttttcagt

SEQ ID NO: 5418594 - DNA, 25 bp, Homo sapien
gaacggcatccctatggatgtgggc

SEQ ID NO: 5418595 - DNA, 25 bp, Homo sapien
ttggcgggtgacaagatccagtctg

SEQ ID NO: 5418596 - DNA, 25 bp, Homo sapien
gagacttttcagttggcgggtgaca

SEQ ID NO: 5418597 - DNA, 25 bp, Homo sapien
ccttggaccaccaggcaaaggtgag

SEQ ID NO: 5418598 - DNA, 25 bp, Homo sapien
ggcacgtgtcattgggattcacaga

SEQ ID NO: 5418599 - DNA, 25 bp, Homo sapien
ggaaaatgtccagcaagtcccttgg

SEQ ID NO: 5418600 - DNA, 25 bp, Homo sapien
tgagcttcttagagtggaataacct

SEQ ID NO: 5418601 - DNA, 25 bp, Homo sapien
tggatggttcattgcatcccaccat

SEQ ID NO: 5418602 - DNA, 25 bp, Homo sapien
ccatggttagaaagagccttagtca

SEQ ID NO: 5418603 - DNA, 25 bp, Homo sapien
tttccctttgtccacactccatggt

SEQ ID NO: 5418604 - DNA, 25 bp, Homo sapien
ccttagtcaccaagttggatggttc

SEQ ID NO: 5418605 - DNA, 25 bp, Homo sapien
agtattcccttttgtacacttcagg

SEQ ID NO: 5418606 - DNA, 25 bp, Homo sapien
acagtattcccttttgtacacttca

SEQ ID NO: 5418607 - DNA, 25 bp, Homo sapien
ccttttgtacacttcaggtttagca

SEQ ID NO: 5418608 - DNA, 25 bp, Homo sapien
tttgtacacttcaggtttagcacca

SEQ ID NO: 5418609 - DNA, 25 bp, Homo sapien
gcatcagtggagtggctgtggactt

SEQ ID NO: 5418610 - DNA, 25 bp, Homo sapien
ctagtgactatttgctcaggctgcc

SEQ ID NO: 5418611 - DNA, 25 bp, Homo sapien
tttccgcatcatctgaggtgcaatg

SEQ ID NO: 5418612 - DNA, 25 bp, Homo sapien
gcaatggtaaactcttcccaaagca

SEQ ID NO: 5418613 - DNA, 25 bp, Homo sapien
atgggctttgcaggtctgggcaaat

SEQ ID NO: 5418614 - DNA, 25 bp, Homo sapien
tgggcaaatcagtttaatgttgctg

SEQ ID NO: 5418615 - DNA, 25 bp, Homo sapien
cctgaggcagaacaagggtaatgga

SEQ ID NO: 5418616 - DNA, 25 bp, Homo sapien
aacaagggtaatggatgggctttgc

SEQ ID NO: 5418617 - DNA, 25 bp, Homo sapien
gaggtgttatgaagtccagcaattt

SEQ ID NO: 5418618 - DNA, 25 bp, Homo sapien
ttatgaagtccagcaatttaaacat

SEQ ID NO: 5418619 - DNA, 25 bp, Homo sapien
tgttatgaagtccagcaatttaaac

SEQ ID NO: 5418620 - DNA, 25 bp, Homo sapien
aggtgttatgaagtccagcaattta

SEQ ID NO: 5418621 - DNA, 25 bp, Homo sapien
gcaattttaaggcaagtcaagagtg

SEQ ID NO: 5418622 - DNA, 25 bp, Homo sapien
tcaggtttgggtccttcaagctgat

SEQ ID NO: 5418623 - DNA, 25 bp, Homo sapien
tttctgttgatagaaggttgtgagg

SEQ ID NO: 5418624 - DNA, 25 bp, Homo sapien
caagagtgattcaggttctttctgt

SEQ ID NO: 5418625 - DNA, 25 bp, Homo sapien
gtaggaatgttgtatacagcttgtg

SEQ ID NO: 5418626 - DNA, 25 bp, Homo sapien
taggaatgttgtatacagcttgtgt

SEQ ID NO: 5418627 - DNA, 25 bp, Homo sapien
aggaatgttgtatacagcttgtgtg

SEQ ID NO: 5418628 - DNA, 25 bp, Homo sapien
gagtaggaatgttgtatacagcttg

SEQ ID NO: 5418629 - DNA, 25 bp, Homo sapien
taaaattaactcgagcccctgtcac

SEQ ID NO: 5418630 - DNA, 25 bp, Homo sapien
gatgtcagttgacgtcaccctgtcc

SEQ ID NO: 5418631 - DNA, 25 bp, Homo sapien
ctcaagacgtgcagatacagggtgc

SEQ ID NO: 5418632 - DNA, 25 bp, Homo sapien
tacagggtgcatttggagtgaagtc

SEQ ID NO: 5418633 - DNA, 25 bp, Homo sapien
gcaatatgaaagattggagaggaga

SEQ ID NO: 5418634 - DNA, 25 bp, Homo sapien
gccttgtatgaggaggcgtctctga

SEQ ID NO: 5418635 - DNA, 25 bp, Homo sapien
gaggggagcacctgataaggccttg

SEQ ID NO: 5418636 - DNA, 25 bp, Homo sapien
tgaggaggcgtctctgaaagccttg

SEQ ID NO: 5418637 - DNA, 25 bp, Homo sapien
ccgtcaacagagttcacccaatggg

SEQ ID NO: 5418638 - DNA, 25 bp, Homo sapien
gataaggatagaaaccacctggacc

SEQ ID NO: 5418639 - DNA, 25 bp, Homo sapien
tgattggactaggagaagacctgac

SEQ ID NO: 5418640 - DNA, 25 bp, Homo sapien
aaagggccgctgatctattggctgg

SEQ ID NO: 5418641 - DNA, 25 bp, Homo sapien
ctcttccctatcagctactgcagca

SEQ ID NO: 5418642 - DNA, 25 bp, Homo sapien
cctatcagctactgcagcaaaacca

SEQ ID NO: 5418643 - DNA, 25 bp, Homo sapien
tcttccctatcagctactgcagcaa

SEQ ID NO: 5418644 - DNA, 25 bp, Homo sapien
tccctatcagctactgcagcaaaac

SEQ ID NO: 5418645 - DNA, 25 bp, Homo sapien
gactgggtttcttgccaaccaggct

SEQ ID NO: 5418646 - DNA, 25 bp, Homo sapien
ttgccaaccaggctagaatgacctg

SEQ ID NO: 5418647 - DNA, 25 bp, Homo sapien
aagctgtagaggagtggcagcatcc

SEQ ID NO: 5418648 - DNA, 25 bp, Homo sapien
ccaagagaaaggaatacctctacct

SEQ ID NO: 5418649 - DNA, 25 bp, Homo sapien
gaatccagccagtacttcctagctg

SEQ ID NO: 5418650 - DNA, 25 bp, Homo sapien
gtggaatccagccagtacttcctag

SEQ ID NO: 5418651 - DNA, 25 bp, Homo sapien
cttcctagctggctctgaaatcgga

SEQ ID NO: 5418652 - DNA, 25 bp, Homo sapien
tcctagctggctctgaaatcggatg

SEQ ID NO: 5418653 - DNA, 25 bp, Homo sapien
ccaaacatgggcacgagagccacgt

SEQ ID NO: 5418654 - DNA, 25 bp, Homo sapien
ccccaaacatgggcacgagagccac

SEQ ID NO: 5418655 - DNA, 25 bp, Homo sapien
caaacatgggcacgagagccacgtc

SEQ ID NO: 5418656 - DNA, 25 bp, Homo sapien
aaacatgggcacgagagccacgtcc

SEQ ID NO: 5418657 - DNA, 25 bp, Homo sapien
ttttcttgatttgccagtctctccc

SEQ ID NO: 5418658 - DNA, 25 bp, Homo sapien
gatcctgggcttctagttattaaca

SEQ ID NO: 5418659 - DNA, 25 bp, Homo sapien
catacaggcatgcatgggtggatgc

SEQ ID NO: 5418660 - DNA, 25 bp, Homo sapien
tattaacagcagtatcacgtgtgtg

SEQ ID NO: 5418661 - DNA, 25 bp, Homo sapien
actggaaagactcccagagacaatg

SEQ ID NO: 5418662 - DNA, 25 bp, Homo sapien
tccagaagcgagaagaagccagagg

SEQ ID NO: 5418663 - DNA, 25 bp, Homo sapien
ttgtcgctgcacactcacgattgag

SEQ ID NO: 5418664 - DNA, 25 bp, Homo sapien
gcatcaagtccacacttgtaggtgg

SEQ ID NO: 5418665 - DNA, 25 bp, Homo sapien
aattcctccacaggattccaatttc

SEQ ID NO: 5418666 - DNA, 25 bp, Homo sapien
tccaatttcaataagagttgccagg

SEQ ID NO: 5418667 - DNA, 25 bp, Homo sapien
tttcaataagagttgccaggatctc

SEQ ID NO: 5418668 - DNA, 25 bp, Homo sapien
aggattccaatttcaataagagttg

SEQ ID NO: 5418669 - DNA, 25 bp, Homo sapien
tctgatcataggtatgtttaacgcc

SEQ ID NO: 5418670 - DNA, 25 bp, Homo sapien
caaattctttctgatcataggtatg

SEQ ID NO: 5418671 - DNA, 25 bp, Homo sapien
atgtttaacgccaataagaactaag

SEQ ID NO: 5418672 - DNA, 25 bp, Homo sapien
taggtatgtttaacgccaataagaa

SEQ ID NO: 5418673 - DNA, 25 bp, Homo sapien
gaaggacaccatatcatccttgcag

SEQ ID NO: 5418674 - DNA, 25 bp, Homo sapien
gtacactatagttgtggctttgaag

SEQ ID NO: 5418675 - DNA, 25 bp, Homo sapien
tcacatatctccgatgtctccagaa

SEQ ID NO: 5418676 - DNA, 25 bp, Homo sapien
catggtctgccatctcatactataa

SEQ ID NO: 5418677 - DNA, 25 bp, Homo sapien
tggctgagtacactctgcagtgagg

SEQ ID NO: 5418678 - DNA, 25 bp, Homo sapien
cctgtgaggaactaagggcagcagc

SEQ ID NO: 5418679 - DNA, 25 bp, Homo sapien
tatgcctataatagtctggacccca

SEQ ID NO: 5418680 - DNA, 25 bp, Homo sapien
gcttagtcctaggaaaatgggcagg

SEQ ID NO: 5418681 - DNA, 25 bp, Homo sapien
caggataaggttgcccctagggcca

SEQ ID NO: 5418682 - DNA, 25 bp, Homo sapien
caagtgttgggcacgccttaagcgc

SEQ ID NO: 5418683 - DNA, 25 bp, Homo sapien
taagcgctccataaacacctgtaga

SEQ ID NO: 5418684 - DNA, 25 bp, Homo sapien
ggaaagaacggcatcgtcgcctgag

SEQ ID NO: 5418685 - DNA, 25 bp, Homo sapien
ccttcaacttggacactcgggagga

SEQ ID NO: 5418686 - DNA, 25 bp, Homo sapien
gaggacaacgtgatccggaaatatg

SEQ ID NO: 5418687 - DNA, 25 bp, Homo sapien
cgggagcctcttcggcttctcgctg

SEQ ID NO: 5418688 - DNA, 25 bp, Homo sapien
cggctcggcgcagccttcaacttgg

SEQ ID NO: 5418689 - DNA, 25 bp, Homo sapien
ggagtagttggcccgtgggtcgcgc

SEQ ID NO: 5418690 - DNA, 25 bp, Homo sapien
tgcagcccgaggacaagcggctgtg

SEQ ID NO: 5418691 - DNA, 25 bp, Homo sapien
ctccattcagctcgggaaggaggag

SEQ ID NO: 5418692 - DNA, 25 bp, Homo sapien
gcgagttgaggcgagggcgcgccct

SEQ ID NO: 5418693 - DNA, 25 bp, Homo sapien
caggtggcacgctttgctgagcttc

SEQ ID NO: 5418694 - DNA, 25 bp, Homo sapien
tccaggatggtctaggcctttccca

SEQ ID NO: 5418695 - DNA, 25 bp, Homo sapien
tgtgtcctgcatgactttctcagca

SEQ ID NO: 5418696 - DNA, 25 bp, Homo sapien
tccctccgggcgtgtttgctgggac

SEQ ID NO: 5418697 - DNA, 25 bp, Homo sapien
aacccctgcgtcatgtttctgaata

SEQ ID NO: 5418698 - DNA, 25 bp, Homo sapien
ttagaaactaggctcggatttgcct

SEQ ID NO: 5418699 - DNA, 25 bp, Homo sapien
taggctcggatttgcctgtggccac

SEQ ID NO: 5418700 - DNA, 25 bp, Homo sapien
accaacccctgcgtcatgtttctga

SEQ ID NO: 5418701 - DNA, 25 bp, Homo sapien
ttttgcctgaaggtggccactttca

SEQ ID NO: 5418702 - DNA, 25 bp, Homo sapien
tcgtgatcgacccttatgtttgtgt

SEQ ID NO: 5418703 - DNA, 25 bp, Homo sapien
actgtctgctgcgagctcctgcaaa

SEQ ID NO: 5418704 - DNA, 25 bp, Homo sapien
cttgctgtcgtgatcgacccttatg

SEQ ID NO: 5418705 - DNA, 25 bp, Homo sapien
gtagttgaccatgcgacctgtgagg

SEQ ID NO: 5418706 - DNA, 25 bp, Homo sapien
agaaagaggtggaatgtagtccgtt

SEQ ID NO: 5418707 - DNA, 25 bp, Homo sapien
cagttctttataggtggttcattgc

SEQ ID NO: 5418708 - DNA, 25 bp, Homo sapien
ttcattgctttgactaccagaggcc

SEQ ID NO: 5418709 - DNA, 25 bp, Homo sapien
agagatgggacctgaactagcctgg

SEQ ID NO: 5418710 - DNA, 25 bp, Homo sapien
taaccattggatgtcctgtaagtgc

SEQ ID NO: 5418711 - DNA, 25 bp, Homo sapien
aatggtctcacacacagtcgtataa

SEQ ID NO: 5418712 - DNA, 25 bp, Homo sapien
gatgctaggtgatgcaacagtgaca

SEQ ID NO: 5418713 - DNA, 25 bp, Homo sapien
ggtaagatgtgtgccctcaccaagt

SEQ ID NO: 5418714 - DNA, 25 bp, Homo sapien
gggtgttaccaccaagtcacttggc

SEQ ID NO: 5418715 - DNA, 25 bp, Homo sapien
aaatacttactgagggcctgccacg

SEQ ID NO: 5418716 - DNA, 25 bp, Homo sapien
tcaacgtctcattgcataggtgggt

SEQ ID NO: 5418717 - DNA, 25 bp, Homo sapien
agatttgaagcgtggtgctgttgaa

SEQ ID NO: 5418718 - DNA, 25 bp, Homo sapien
tgttgagatttgaagcgtggtgctg

SEQ ID NO: 5418719 - DNA, 25 bp, Homo sapien
aagcgtggtgctgttgaattcaagc

SEQ ID NO: 5418720 - DNA, 25 bp, Homo sapien
tttgaagcgtggtgctgttgaattc

SEQ ID NO: 5418721 - DNA, 25 bp, Homo sapien
agtacctgcttttcacactgaacca

SEQ ID NO: 5418722 - DNA, 25 bp, Homo sapien
ctgcttttcacactgaaccatctgg

SEQ ID NO: 5418723 - DNA, 25 bp, Homo sapien
ttgctgtgagcatcctggtagtgcc

SEQ ID NO: 5418724 - DNA, 25 bp, Homo sapien
ggtggcctgggcccagtttttggca

SEQ ID NO: 5418725 - DNA, 25 bp, Homo sapien
ggtcccaggagaccgggcgcaactg

SEQ ID NO: 5418726 - DNA, 25 bp, Homo sapien
ccaggagaccgggcgcaactggagc

SEQ ID NO: 5418727 - DNA, 25 bp, Homo sapien
ggagaccgggcgcaactggagcagg

SEQ ID NO: 5418728 - DNA, 25 bp, Homo sapien
tcccaggagaccgggcgcaactgga

SEQ ID NO: 5418729 - DNA, 25 bp, Homo sapien
tgcaaggggcggtggaacactcctg

SEQ ID NO: 5418730 - DNA, 25 bp, Homo sapien
ttgcaaggggcggtggaacactcct

SEQ ID NO: 5418731 - DNA, 25 bp, Homo sapien
cagaggcggtgcaacagctaacgtt

SEQ ID NO: 5418732 - DNA, 25 bp, Homo sapien
gacacgaggacctcttctgcaagag

SEQ ID NO: 5418733 - DNA, 25 bp, Homo sapien
gtagccgccgcatgtaagacacgag

SEQ ID NO: 5418734 - DNA, 25 bp, Homo sapien
gctaacgttattctctgtgggtaca

SEQ ID NO: 5418735 - DNA, 25 bp, Homo sapien
tccagtcccgctgtcatctcttagt

SEQ ID NO: 5418736 - DNA, 25 bp, Homo sapien
cacctccagtcccgctgtcatctct

SEQ ID NO: 5418737 - DNA, 25 bp, Homo sapien
gccacctccagtcccgctgtcatct

SEQ ID NO: 5418738 - DNA, 25 bp, Homo sapien
cctccagtcccgctgtcatctctta

SEQ ID NO: 5418739 - DNA, 25 bp, Homo sapien
ctggtgcccacagcactctgtacca

SEQ ID NO: 5418740 - DNA, 25 bp, Homo sapien
acagcactctgtaccatcctctcat

SEQ ID NO: 5418741 - DNA, 25 bp, Homo sapien
tgcccacagcactctgtaccatcct

SEQ ID NO: 5418742 - DNA, 25 bp, Homo sapien
cccacagcactctgtaccatcctct

SEQ ID NO: 5418743 - DNA, 25 bp, Homo sapien
tttgtacaggttcgtgttcccagtc

SEQ ID NO: 5418744 - DNA, 25 bp, Homo sapien
attgggacccaacaggcatgaaggt

SEQ ID NO: 5418745 - DNA, 25 bp, Homo sapien
aactctcagctcttggtttatctct

SEQ ID NO: 5418746 - DNA, 25 bp, Homo sapien
tagttgttccatgagtcagccaggc

SEQ ID NO: 5418747 - DNA, 25 bp, Homo sapien
tgcgttttgcatgaaccagccatag

SEQ ID NO: 5418748 - DNA, 25 bp, Homo sapien
taaacaccagatcatacccagcaag

SEQ ID NO: 5418749 - DNA, 25 bp, Homo sapien
tgcacgcggatcgagtttgataacg

SEQ ID NO: 5418750 - DNA, 25 bp, Homo sapien
gcagaagcgcttccactgcagagag

SEQ ID NO: 5418751 - DNA, 25 bp, Homo sapien
cctagtgatgtgttgaggttctgca

SEQ ID NO: 5418752 - DNA, 25 bp, Homo sapien
tgctcctcctaaccgtggtttctaa

SEQ ID NO: 5418753 - DNA, 25 bp, Homo sapien
tctgaatcatactgggatgccgcgt

SEQ ID NO: 5418754 - DNA, 25 bp, Homo sapien
ccgatatggtgtagggatgttgcca

SEQ ID NO: 5418755 - DNA, 25 bp, Homo sapien
gggtatcatcaaaaggctacactgt

SEQ ID NO: 5418756 - DNA, 25 bp, Homo sapien
ggtgcgacatttcccatccgtggtg

SEQ ID NO: 5418757 - DNA, 25 bp, Homo sapien
gtttgagtctccctttaaccagcgc

SEQ ID NO: 5418758 - DNA, 25 bp, Homo sapien
ggtttcgccaagatgacctcccaaa

SEQ ID NO: 5418759 - DNA, 25 bp, Homo sapien
cgctcgaggttatggaacagcacat

SEQ ID NO: 5418760 - DNA, 25 bp, Homo sapien
tacttggacattctcatgcgagcct

SEQ ID NO: 5418761 - DNA, 25 bp, Homo sapien
tctctagaactgtagcgtgaacgtg

SEQ ID NO: 5418762 - DNA, 25 bp, Homo sapien
gagaggttccccagcttcattcagg

SEQ ID NO: 5418763 - DNA, 25 bp, Homo sapien
tcaacaggcatcataagggactttc

SEQ ID NO: 5418764 - DNA, 25 bp, Homo sapien
caaatgctgtactgggcaagctgct

SEQ ID NO: 5418765 - DNA, 25 bp, Homo sapien
caagctgctgcgataagtggtatca

SEQ ID NO: 5418766 - DNA, 25 bp, Homo sapien
gtggtatcaaccagcactgtcccgg

SEQ ID NO: 5418767 - DNA, 25 bp, Homo sapien
gccattggtgttggttatgcttaca

SEQ ID NO: 5418768 - DNA, 25 bp, Homo sapien
gaatgtgtatccctgctaatttcag

SEQ ID NO: 5418769 - DNA, 25 bp, Homo sapien
gaaaattttaccatgaacacctgta

SEQ ID NO: 5418770 - DNA, 25 bp, Homo sapien
gatataagtctggatctaagccaaa

SEQ ID NO: 5418771 - DNA, 25 bp, Homo sapien
gcctcgtctgttaaataagttgatt

SEQ ID NO: 5418772 - DNA, 25 bp, Homo sapien
cagcctttaatgagggtgagacagc

SEQ ID NO: 5418773 - DNA, 25 bp, Homo sapien
cctaagctgtatataatcttggtca

SEQ ID NO: 5418774 - DNA, 25 bp, Homo sapien
tctttttcagagcattggcagcctt

SEQ ID NO: 5418775 - DNA, 25 bp, Homo sapien
taaagagaggcttacttctgatgca

SEQ ID NO: 5418776 - DNA, 25 bp, Homo sapien
tttaattgctagctgtgggacccgc

SEQ ID NO: 5418777 - DNA, 25 bp, Homo sapien
tgtttgtaaacaagccactagtaga

SEQ ID NO: 5418778 - DNA, 25 bp, Homo sapien
cagcttgctatgtgtgtcccattaa

SEQ ID NO: 5418779 - DNA, 25 bp, Homo sapien
tagccctccatagtagcccagtttg

SEQ ID NO: 5418780 - DNA, 25 bp, Homo sapien
gcacagtctttcgttgcaggtgagt

SEQ ID NO: 5418781 - DNA, 25 bp, Homo sapien
cggtatgtagcattccactagggaa

SEQ ID NO: 5418782 - DNA, 25 bp, Homo sapien
cagatagaagctgtgtcgaccgcct

SEQ ID NO: 5418783 - DNA, 25 bp, Homo sapien
tctgaagtcctatgcagcacatgat

SEQ ID NO: 5418784 - DNA, 25 bp, Homo sapien
aacataaatgacctcctggctaatg

SEQ ID NO: 5418785 - DNA, 25 bp, Homo sapien
agctgttctcttccgttgatcccca

SEQ ID NO: 5418786 - DNA, 25 bp, Homo sapien
taaagttgacctgttggaacactgg

SEQ ID NO: 5418787 - DNA, 25 bp, Homo sapien
taaacgctctaggtacgatgacagt

SEQ ID NO: 5418788 - DNA, 25 bp, Homo sapien
gaaagcttagacattcccatttagt

SEQ ID NO: 5418789 - DNA, 25 bp, Homo sapien
cgatgacagtgttccccgataccat

SEQ ID NO: 5418790 - DNA, 25 bp, Homo sapien
tgtggattctttaaacgctctaggt

SEQ ID NO: 5418791 - DNA, 25 bp, Homo sapien
aagtcaagtcactggtctgtttgca

SEQ ID NO: 5418792 - DNA, 25 bp, Homo sapien
gattagaaattacctgtggatattt

SEQ ID NO: 5418793 - DNA, 25 bp, Homo sapien
gaacttgtgtccctaatgtgtttag

SEQ ID NO: 5418794 - DNA, 25 bp, Homo sapien
gattgctagattgctaaggagctga

SEQ ID NO: 5418795 - DNA, 25 bp, Homo sapien
atctgaaagatggactcatggtggc

SEQ ID NO: 5418796 - DNA, 25 bp, Homo sapien
gagccccaggattcaatgttgagtg

SEQ ID NO: 5418797 - DNA, 25 bp, Homo sapien
tcatcagagaaggattgtgacctct

SEQ ID NO: 5418798 - DNA, 25 bp, Homo sapien
gtttctcctagcaagcatggcacag

SEQ ID NO: 5418799 - DNA, 25 bp, Homo sapien
tctcgaggatacatgccaatgggct

SEQ ID NO: 5418800 - DNA, 25 bp, Homo sapien
taagagcctccagtggtttgcaggg

SEQ ID NO: 5418801 - DNA, 25 bp, Homo sapien
ccaatatgccggagggtgaacttga

SEQ ID NO: 5418802 - DNA, 25 bp, Homo sapien
tatagcagacatttgggtccccaca

SEQ ID NO: 5418803 - DNA, 25 bp, Homo sapien
gaaacaatggaggaatggcccaggc

SEQ ID NO: 5418804 - DNA, 25 bp, Homo sapien
acagcttcaccttagcagtctgcag

SEQ ID NO: 5418805 - DNA, 25 bp, Homo sapien
tttaatgagtccatgcaccctcccg

SEQ ID NO: 5418806 - DNA, 25 bp, Homo sapien
tttgggaggcaccttactgggccac

SEQ ID NO: 5418807 - DNA, 25 bp, Homo sapien
ggaactcagtgtctcataagggctt

SEQ ID NO: 5418808 - DNA, 25 bp, Homo sapien
tgtcctcatgtaaccatccaatagg

SEQ ID NO: 5418809 - DNA, 25 bp, Homo sapien
gatgccggaactcagtgtctcataa

SEQ ID NO: 5418810 - DNA, 25 bp, Homo sapien
gctgtgtcctcatgtaaccatccaa

SEQ ID NO: 5418811 - DNA, 25 bp, Homo sapien
tacgtactactgtttggcaagcggg

SEQ ID NO: 5418812 - DNA, 25 bp, Homo sapien
ccagtgttcagctttcgtatttacg

SEQ ID NO: 5418813 - DNA, 25 bp, Homo sapien
ggccacacgtcccagtgttcagctt

SEQ ID NO: 5418814 - DNA, 25 bp, Homo sapien
gccgtcgcggtgatactatttaggg

SEQ ID NO: 5418815 - DNA, 25 bp, Homo sapien
aggtggacttctacgcgcgcttctc

SEQ ID NO: 5418816 - DNA, 25 bp, Homo sapien
ggaaacctggcgtactggctgtggc

SEQ ID NO: 5418817 - DNA, 25 bp, Homo sapien
tggacttcggtgagtgcggcccggg

SEQ ID NO: 5418818 - DNA, 25 bp, Homo sapien
tctctagcgggactcggcatgaggc

SEQ ID NO: 5418819 - DNA, 25 bp, Homo sapien
tgtaaataccactgcattcggacca

SEQ ID NO: 5418820 - DNA, 25 bp, Homo sapien
taaataccactgcattcggaccagc

SEQ ID NO: 5418821 - DNA, 25 bp, Homo sapien
gttgtaaataccactgcattcggac

SEQ ID NO: 5418822 - DNA, 25 bp, Homo sapien
taaggctggtcaagttaagcagtgg

SEQ ID NO: 5418823 - DNA, 25 bp, Homo sapien
acctggaatcagtaagtttcccagt

SEQ ID NO: 5418824 - DNA, 25 bp, Homo sapien
tgtctttcctgagcatgaccctggg

SEQ ID NO: 5418825 - DNA, 25 bp, Homo sapien
gagtatggccttccagattcccagg

SEQ ID NO: 5418826 - DNA, 25 bp, Homo sapien
taacctttaggtcctgctcgcatag

SEQ ID NO: 5418827 - DNA, 25 bp, Homo sapien
aaattactttacagggccaagagca

SEQ ID NO: 5418828 - DNA, 25 bp, Homo sapien
tgttggctgcaaagcaaagtactac

SEQ ID NO: 5418829 - DNA, 25 bp, Homo sapien
tacagtctccgtggccaaaaggtta

SEQ ID NO: 5418830 - DNA, 25 bp, Homo sapien
tcatgttaactagcaaatgtgcagc

SEQ ID NO: 5418831 - DNA, 25 bp, Homo sapien
gaactctattcttctaggcttggaa

SEQ ID NO: 5418832 - DNA, 25 bp, Homo sapien
agaatgatctcatatcctagactga

SEQ ID NO: 5418833 - DNA, 25 bp, Homo sapien
gatcgtgatatagcagtagttttcc

SEQ ID NO: 5418834 - DNA, 25 bp, Homo sapien
tgacatttccagtagagttatgctg

SEQ ID NO: 5418835 - DNA, 25 bp, Homo sapien
gctacaggttgttgcatcatgccaa

SEQ ID NO: 5418836 - DNA, 25 bp, Homo sapien
tttagcaaccactacggctacaggt

SEQ ID NO: 5418837 - DNA, 25 bp, Homo sapien
taagatgtagtttgaaccagccaag

SEQ ID NO: 5418838 - DNA, 25 bp, Homo sapien
gatggcttcaacatgtctccagttg

SEQ ID NO: 5418839 - DNA, 25 bp, Homo sapien
ttgcagggccagcaccagccaccat

SEQ ID NO: 5418840 - DNA, 25 bp, Homo sapien
tctttgcagggccagcaccagccac

SEQ ID NO: 5418841 - DNA, 25 bp, Homo sapien
ctctttgcagggccagcaccagcca

SEQ ID NO: 5418842 - DNA, 25 bp, Homo sapien
cggatctctttgcagggccagcacc

SEQ ID NO: 5418843 - DNA, 25 bp, Homo sapien
cctctgtcttcccatagtctgaaca

SEQ ID NO: 5418844 - DNA, 25 bp, Homo sapien
tctgtcttcccatagtctgaacaaa

SEQ ID NO: 5418845 - DNA, 25 bp, Homo sapien
ctgtcttcccatagtctgaacaaat

SEQ ID NO: 5418846 - DNA, 25 bp, Homo sapien
tcctctgtcttcccatagtctgaac

SEQ ID NO: 5418847 - DNA, 25 bp, Homo sapien
gagatccatgaaagcttataatagc

SEQ ID NO: 5418848 - DNA, 25 bp, Homo sapien
tatctcgccacaattacacccaagg

SEQ ID NO: 5418849 - DNA, 25 bp, Homo sapien
tctgcggtaacagtctttccctgag

SEQ ID NO: 5418850 - DNA, 25 bp, Homo sapien
cacccaaggatattgacaggatctg

SEQ ID NO: 5418851 - DNA, 25 bp, Homo sapien
aaagaaacaccatggactgctgcca

SEQ ID NO: 5418852 - DNA, 25 bp, Homo sapien
caagtatgggcccaagaaagaaaca

SEQ ID NO: 5418853 - DNA, 25 bp, Homo sapien
aagaaacaccatggactgctgccat

SEQ ID NO: 5418854 - DNA, 25 bp, Homo sapien
gcgtagacagggcatagtaatcaac

SEQ ID NO: 5418855 - DNA, 25 bp, Homo sapien
gagacatgtaaagaatgagcacaat

SEQ ID NO: 5418856 - DNA, 25 bp, Homo sapien
taatcaacactgactgagtcagcag

SEQ ID NO: 5418857 - DNA, 25 bp, Homo sapien
gtaaagaatgagcacaatcattgtg

SEQ ID NO: 5418858 - DNA, 25 bp, Homo sapien
ctgtgctgagtcctcttttagcctc

SEQ ID NO: 5418859 - DNA, 25 bp, Homo sapien
gtgctgagtcctcttttagcctcaa

SEQ ID NO: 5418860 - DNA, 25 bp, Homo sapien
gggtgtggccgtgagccctgtgctt

SEQ ID NO: 5418861 - DNA, 25 bp, Homo sapien
gtcccaagcctcgatctgcagcagt

SEQ ID NO: 5418862 - DNA, 25 bp, Homo sapien
caaaaacaagcatggtagtcttcaa

SEQ ID NO: 5418863 - DNA, 25 bp, Homo sapien
aagccactaccccatagatggacaa

SEQ ID NO: 5418864 - DNA, 25 bp, Homo sapien
aatacaagcacgaaagcctgtgagc

SEQ ID NO: 5418865 - DNA, 25 bp, Homo sapien
actcagtactgccttgtcatcccct

SEQ ID NO: 5418866 - DNA, 25 bp, Homo sapien
ctctgctttaaggtgatcatctgtc

SEQ ID NO: 5418867 - DNA, 25 bp, Homo sapien
ggtgatcatctgtcccgaggaccag

SEQ ID NO: 5418868 - DNA, 25 bp, Homo sapien
ccatgggctctgctttaaggtgatc

SEQ ID NO: 5418869 - DNA, 25 bp, Homo sapien
tctgtcccgaggaccagctttaaaa

SEQ ID NO: 5418870 - DNA, 25 bp, Homo sapien
tattgaatacaaactccttaggcag

SEQ ID NO: 5418871 - DNA, 25 bp, Homo sapien
tttattgaatacaaactccttaggc

SEQ ID NO: 5418872 - DNA, 25 bp, Homo sapien
ttattgaatacaaactccttaggca

SEQ ID NO: 5418873 - DNA, 25 bp, Homo sapien
ggcagccctggtcgaagcaggtcct

SEQ ID NO: 5418874 - DNA, 25 bp, Homo sapien
tctttgtccaggcactttcttcagt

SEQ ID NO: 5418875 - DNA, 25 bp, Homo sapien
tatgtgacagcctcaaggacacttc

SEQ ID NO: 5418876 - DNA, 25 bp, Homo sapien
cttcaaatctgtggacactttgggt

SEQ ID NO: 5418877 - DNA, 25 bp, Homo sapien
ttgataatggtatacaaaaaaagac

SEQ ID NO: 5418878 - DNA, 25 bp, Homo sapien
tggtagtgatataaataagtttgat

SEQ ID NO: 5418879 - DNA, 25 bp, Homo sapien
agattcatactgacgttggggggtt

SEQ ID NO: 5418880 - DNA, 25 bp, Homo sapien
aatgagattcatactgacgttgggg

SEQ ID NO: 5418881 - DNA, 25 bp, Homo sapien
cagtccacgcgtgtaactttgatgg

SEQ ID NO: 5418882 - DNA, 25 bp, Homo sapien
tgcactccgcagtccacgcgtgtaa

SEQ ID NO: 5418883 - DNA, 25 bp, Homo sapien
ttcaaagtcgtcctgtgagcttggc

SEQ ID NO: 5418884 - DNA, 25 bp, Homo sapien
gccagggcacgtttcaaagtcgtcc

SEQ ID NO: 5418885 - DNA, 25 bp, Homo sapien
gggtggatatcttggcaaaccacat

SEQ ID NO: 5418886 - DNA, 25 bp, Homo sapien
ctgcgaatttgaggtcagccgggtg

SEQ ID NO: 5418887 - DNA, 25 bp, Homo sapien
gtcagccgggtggatatcttggcaa

SEQ ID NO: 5418888 - DNA, 25 bp, Homo sapien
aatttgaggtcagccgggtggatat

SEQ ID NO: 5418889 - DNA, 25 bp, Homo sapien
ccacgactatgcttcttaaatgtac

SEQ ID NO: 5418890 - DNA, 25 bp, Homo sapien
cagccggaggatcccagaaatgcag

SEQ ID NO: 5418891 - DNA, 25 bp, Homo sapien
tgattttctggtccacgactatgct

SEQ ID NO: 5418892 - DNA, 25 bp, Homo sapien
tactgggagtctgggttgaatgcca

SEQ ID NO: 5418893 - DNA, 25 bp, Homo sapien
ccagtagcttcctagagtatttgca

SEQ ID NO: 5418894 - DNA, 25 bp, Homo sapien
gaagtctcaggacaacagcttttca

SEQ ID NO: 5418895 - DNA, 25 bp, Homo sapien
gataaatggtgtcgtttttgcagca

SEQ ID NO: 5418896 - DNA, 25 bp, Homo sapien
cagatgggaccggaaagttcagaga

SEQ ID NO: 5418897 - DNA, 25 bp, Homo sapien
gctctagagcttagagtgtatgatg

SEQ ID NO: 5418898 - DNA, 25 bp, Homo sapien
cagagatttctttaagacaatggta

SEQ ID NO: 5418899 - DNA, 25 bp, Homo sapien
tctgtcgcagagatttctttaagac

SEQ ID NO: 5418900 - DNA, 25 bp, Homo sapien
gagtgtatgatgttgactctgtcgc

SEQ ID NO: 5418901 - DNA, 25 bp, Homo sapien
gaagactggaatggttctttgcctt

SEQ ID NO: 5418902 - DNA, 25 bp, Homo sapien
taaactagagacattatgatgagag

SEQ ID NO: 5418903 - DNA, 25 bp, Homo sapien
tagagacattatgatgagagcaacc

SEQ ID NO: 5418904 - DNA, 25 bp, Homo sapien
agaggaagactggaatggttctttg

SEQ ID NO: 5418905 - DNA, 25 bp, Homo sapien
aaaaatcttcgttgtctccaatgcc

SEQ ID NO: 5418906 - DNA, 25 bp, Homo sapien
gaacagacagctgcacgtggctatt

SEQ ID NO: 5418907 - DNA, 25 bp, Homo sapien
cagcatcgtattgctgctcaaaaaa

SEQ ID NO: 5418908 - DNA, 25 bp, Homo sapien
cacctcattcgatgctgaacagaca

SEQ ID NO: 5418909 - DNA, 25 bp, Homo sapien
ggtcaattgtcctggcaaatggcca

SEQ ID NO: 5418910 - DNA, 25 bp, Homo sapien
ccagctcttagagatattgaggtca

SEQ ID NO: 5418911 - DNA, 25 bp, Homo sapien
gccagttatctgtaggtcattcaca

SEQ ID NO: 5418912 - DNA, 25 bp, Homo sapien
taatccctaatgactgtgcagaatg

SEQ ID NO: 5418913 - DNA, 25 bp, Homo sapien
tcagactcagatactgggcaccaag

SEQ ID NO: 5418914 - DNA, 25 bp, Homo sapien
tagagaacatgtctttggcccctcc

SEQ ID NO: 5418915 - DNA, 25 bp, Homo sapien
caagagattggattaggcccctacc

SEQ ID NO: 5418916 - DNA, 25 bp, Homo sapien
taatgtcgaaaagatccaaaggcct

SEQ ID NO: 5418917 - DNA, 25 bp, Homo sapien
tctcatctggacttggagggtcgac

SEQ ID NO: 5418918 - DNA, 25 bp, Homo sapien
ccaggttgacctcttctaagcttcc

SEQ ID NO: 5418919 - DNA, 25 bp, Homo sapien
ctaagcttcctgagttatcttctat

SEQ ID NO: 5418920 - DNA, 25 bp, Homo sapien
ggagaaagaatcctgtcttcccagg

SEQ ID NO: 5418921 - DNA, 25 bp, Homo sapien
gaagagaacgatcctggagcccctt

SEQ ID NO: 5418922 - DNA, 25 bp, Homo sapien
taaatcctgctcaagaagacagctg

SEQ ID NO: 5418923 - DNA, 25 bp, Homo sapien
catgtgggccactcagagaacctgt

SEQ ID NO: 5418924 - DNA, 25 bp, Homo sapien
cacggttggtaggattggtctgcac

SEQ ID NO: 5418925 - DNA, 25 bp, Homo sapien
ccaattaacactctccctgaaagta

SEQ ID NO: 5418926 - DNA, 25 bp, Homo sapien
aatgcactgtggactcctcgagggt

SEQ ID NO: 5418927 - DNA, 25 bp, Homo sapien
aaatgcactgtggactcctcgaggg

SEQ ID NO: 5418928 - DNA, 25 bp, Homo sapien
agtgtcttccttccaatccaattaa

SEQ ID NO: 5418929 - DNA, 25 bp, Homo sapien
ttcagaaagcttttggtgaccttga

SEQ ID NO: 5418930 - DNA, 25 bp, Homo sapien
aacttaatatatataggagatacag

SEQ ID NO: 5418931 - DNA, 25 bp, Homo sapien
tcagaaagcttttggtgaccttgaa

SEQ ID NO: 5418932 - DNA, 25 bp, Homo sapien
gagacagcaaaggtgagcaagcaac

SEQ ID NO: 5418933 - DNA, 25 bp, Homo sapien
ggcaagtttcgacagctgctgagga

SEQ ID NO: 5418934 - DNA, 25 bp, Homo sapien
cattcctcactgagagactcgacgg

SEQ ID NO: 5418935 - DNA, 25 bp, Homo sapien
ctcactgagagactcgacgggcgtc

SEQ ID NO: 5418936 - DNA, 25 bp, Homo sapien
gcgcggccgggctgcgggtggccgg

SEQ ID NO: 5418937 - DNA, 25 bp, Homo sapien
agcgcggccgggctgcgggtggccg

SEQ ID NO: 5418938 - DNA, 25 bp, Homo sapien
cgcagcgcggccgggctgcgggtgg

SEQ ID NO: 5418939 - DNA, 25 bp, Homo sapien
tgggcgcagcgcggccgggctgcgg

SEQ ID NO: 5418940 - DNA, 25 bp, Homo sapien
tctcagaatactgacttgttagcac

SEQ ID NO: 5418941 - DNA, 25 bp, Homo sapien
ctcagaatactgacttgttagcaca

SEQ ID NO: 5418942 - DNA, 25 bp, Homo sapien
caatctcagaatactgacttgttag

SEQ ID NO: 5418943 - DNA, 25 bp, Homo sapien
aatctcagaatactgacttgttagc

SEQ ID NO: 5418944 - DNA, 25 bp, Homo sapien
ttgttggaatttcccatgagcttag

SEQ ID NO: 5418945 - DNA, 25 bp, Homo sapien
gtcagaataaaatcacgtttgtgca

SEQ ID NO: 5418946 - DNA, 25 bp, Homo sapien
ggccctctcatcgtagctgcttatt

SEQ ID NO: 5418947 - DNA, 25 bp, Homo sapien
catgagcttagaagattttatggcc

SEQ ID NO: 5418948 - DNA, 25 bp, Homo sapien
tatatgattaatcacctttagggaa

SEQ ID NO: 5418949 - DNA, 25 bp, Homo sapien
tctgcctataaagagttttgtggtc

SEQ ID NO: 5418950 - DNA, 25 bp, Homo sapien
tacttagccctagtattgttttgag

SEQ ID NO: 5418951 - DNA, 25 bp, Homo sapien
tagggaaatagtgtaggtattgatg

SEQ ID NO: 5418952 - DNA, 25 bp, Homo sapien
tcaagttgtcaccagggtgggcacc

SEQ ID NO: 5418953 - DNA, 25 bp, Homo sapien
gggcaccagcagcaggtactggtga

SEQ ID NO: 5418954 - DNA, 25 bp, Homo sapien
accagcagcaggtactggtgaacac

SEQ ID NO: 5418955 - DNA, 25 bp, Homo sapien
caccagcagcaggtactggtgaaca

SEQ ID NO: 5418956 - DNA, 25 bp, Homo sapien
tacttgctgtagatgtacgtatctc

SEQ ID NO: 5418957 - DNA, 25 bp, Homo sapien
agatgtacgtatctctgtatctctc

SEQ ID NO: 5418958 - DNA, 25 bp, Homo sapien
catttcaccttgatacttgctgtag

SEQ ID NO: 5418959 - DNA, 25 bp, Homo sapien
ccttgatacttgctgtagatgtacg

SEQ ID NO: 5418960 - DNA, 25 bp, Homo sapien
tttaactttgtgtgtgcagggacca

SEQ ID NO: 5418961 - DNA, 25 bp, Homo sapien
ttaactttgtgtgtgcagggaccat

SEQ ID NO: 5418962 - DNA, 25 bp, Homo sapien
ttttaactttgtgtgtgcagggacc

SEQ ID NO: 5418963 - DNA, 25 bp, Homo sapien
gcagtgcgtgcagtcattccctggg

SEQ ID NO: 5418964 - DNA, 25 bp, Homo sapien
gctcctccagtgtccgtagtggggt

SEQ ID NO: 5418965 - DNA, 25 bp, Homo sapien
ccttttttgcccctggattgctgaa

SEQ ID NO: 5418966 - DNA, 25 bp, Homo sapien
gcccctggattgctgaagcctaaaa

SEQ ID NO: 5418967 - DNA, 25 bp, Homo sapien
cagcccctcagtgtgagggacaatc

SEQ ID NO: 5418968 - DNA, 25 bp, Homo sapien
agcccctcagtgtgagggacaatct

SEQ ID NO: 5418969 - DNA, 25 bp, Homo sapien
gcccctcagtgtgagggacaatctt

SEQ ID NO: 5418970 - DNA, 25 bp, Homo sapien
ttgacatttttatatgcgtgtgcat

SEQ ID NO: 5418971 - DNA, 25 bp, Homo sapien
tttgacatttttatatgcgtgtgca

SEQ ID NO: 5418972 - DNA, 25 bp, Homo sapien
agttcaaggaccagctttgacattt

SEQ ID NO: 5418973 - DNA, 25 bp, Homo sapien
ccgtcccttctcactgagatcaaac

SEQ ID NO: 5418974 - DNA, 25 bp, Homo sapien
agccgtcccttctcactgagatcaa

SEQ ID NO: 5418975 - DNA, 25 bp, Homo sapien
ccagccgtcccttctcactgagatc

SEQ ID NO: 5418976 - DNA, 25 bp, Homo sapien
gccgtcccttctcactgagatcaaa

SEQ ID NO: 5418977 - DNA, 25 bp, Homo sapien
gtctagatatgccaagataaggcct

SEQ ID NO: 5418978 - DNA, 25 bp, Homo sapien
gatgatgaactagaatgatctggtt

SEQ ID NO: 5418979 - DNA, 25 bp, Homo sapien
gccttgcatggagtacaaatagaga

SEQ ID NO: 5418980 - DNA, 25 bp, Homo sapien
gaatctggatttagtcctgctgaca

SEQ ID NO: 5418981 - DNA, 25 bp, Homo sapien
ccaaggcgtacgctaggatctgtta

SEQ ID NO: 5418982 - DNA, 25 bp, Homo sapien
ggttggctatcttatctctgacagg

SEQ ID NO: 5418983 - DNA, 25 bp, Homo sapien
ctgtaaagaccaatctgtaaaggcc

SEQ ID NO: 5418984 - DNA, 25 bp, Homo sapien
tgtaaaggccttctcagtgagcacc

SEQ ID NO: 5418985 - DNA, 25 bp, Homo sapien
tgaccagaaagccgggactgaaggg

SEQ ID NO: 5418986 - DNA, 25 bp, Homo sapien
ctgaccagaaagccgggactgaagg

SEQ ID NO: 5418987 - DNA, 25 bp, Homo sapien
tcatagttcataagctgatttgtag

SEQ ID NO: 5418988 - DNA, 25 bp, Homo sapien
cccaaaccagtgctcggataccata

SEQ ID NO: 5418989 - DNA, 25 bp, Homo sapien
aaggcctgtgtatgtgctcctggaa

SEQ ID NO: 5418990 - DNA, 25 bp, Homo sapien
gtgctcggataccatactccagtga

SEQ ID NO: 5418991 - DNA, 25 bp, Homo sapien
agagcagggactcaatacttgattg

SEQ ID NO: 5418992 - DNA, 25 bp, Homo sapien
aaagagcagggactcaatacttgat

SEQ ID NO: 5418993 - DNA, 25 bp, Homo sapien
gcagggactcaatacttgattgatt

SEQ ID NO: 5418994 - DNA, 25 bp, Homo sapien
gactcaatacttgattgattgatgg

SEQ ID NO: 5418995 - DNA, 25 bp, Homo sapien
gtggcagttcgtttcttcttgccct

SEQ ID NO: 5418996 - DNA, 25 bp, Homo sapien
gggcagcctaagtttccaggtgacc

SEQ ID NO: 5418997 - DNA, 25 bp, Homo sapien
cacattctgattcccgcaaaaccag

SEQ ID NO: 5418998 - DNA, 25 bp, Homo sapien
tgctggcctctcaagctcaaaatgt

SEQ ID NO: 5418999 - DNA, 25 bp, Homo sapien
gagaggccggtttctgacaattcca

SEQ ID NO: 5419000 - DNA, 25 bp, Homo sapien
tgttcctaggacctgcttgccgtga

SEQ ID NO: 5419001 - DNA, 25 bp, Homo sapien
ggcagactgtcgttgctgaatttct

SEQ ID NO: 5419002 - DNA, 25 bp, Homo sapien
cttctgaagtggtaagctaattgca

SEQ ID NO: 5419003 - DNA, 25 bp, Homo sapien
tcagttatgccgtgtgttggttgct

SEQ ID NO: 5419004 - DNA, 25 bp, Homo sapien
tcctgtttctatagcctcagtccca

SEQ ID NO: 5419005 - DNA, 25 bp, Homo sapien
cctggaaagccttagagaggtgctc

SEQ ID NO: 5419006 - DNA, 25 bp, Homo sapien
ccaggatatttttctagcttgcggg

SEQ ID NO: 5419007 - DNA, 25 bp, Homo sapien
gcttcctgttggcacttggttcaat

SEQ ID NO: 5419008 - DNA, 25 bp, Homo sapien
tttgactttgctaaatgcagcatgg

SEQ ID NO: 5419009 - DNA, 25 bp, Homo sapien
gcaagtccatacagaacaattgagt

SEQ ID NO: 5419010 - DNA, 25 bp, Homo sapien
tgcagcatggtctggtctgcaagtc

SEQ ID NO: 5419011 - DNA, 25 bp, Homo sapien
tggtctgcaagtccatacagaacaa

SEQ ID NO: 5419012 - DNA, 25 bp, Homo sapien
tcagaacatacttcaaatcttgggc

SEQ ID NO: 5419013 - DNA, 25 bp, Homo sapien
agaacatacttcaaatcttgggcat

SEQ ID NO: 5419014 - DNA, 25 bp, Homo sapien
cagaacatacttcaaatcttgggca

SEQ ID NO: 5419015 - DNA, 25 bp, Homo sapien
ttcccacacttcggctgtttctgtt

SEQ ID NO: 5419016 - DNA, 25 bp, Homo sapien
cacacttcggctgtttctgtttcat

SEQ ID NO: 5419017 - DNA, 25 bp, Homo sapien
cttcccacacttcggctgtttctgt

SEQ ID NO: 5419018 - DNA, 25 bp, Homo sapien
cccacacttcggctgtttctgtttc

SEQ ID NO: 5419019 - DNA, 25 bp, Homo sapien
aaatgcagcccctactctgtgccgt

SEQ ID NO: 5419020 - DNA, 25 bp, Homo sapien
ctctaggaagcaaaccgagcaggcc

SEQ ID NO: 5419021 - DNA, 25 bp, Homo sapien
tgtggccactgcgacatcttctgta

SEQ ID NO: 5419022 - DNA, 25 bp, Homo sapien
gactctcacggatactgcagtgctg

SEQ ID NO: 5419023 - DNA, 25 bp, Homo sapien
tctaatataaattttcccattgtaa

SEQ ID NO: 5419024 - DNA, 25 bp, Homo sapien
tgcagtcattgattgccactatttc

SEQ ID NO: 5419025 - DNA, 25 bp, Homo sapien
gcagtcattgattgccactatttcc

SEQ ID NO: 5419026 - DNA, 25 bp, Homo sapien
tcttgtgcctgaagccgagatgcct

SEQ ID NO: 5419027 - DNA, 25 bp, Homo sapien
cattctgtgctagagggctgccaaa

SEQ ID NO: 5419028 - DNA, 25 bp, Homo sapien
tcaatacgggcgatgagagagccca

SEQ ID NO: 5419029 - DNA, 25 bp, Homo sapien
tggagtccaactcaataaacctggg

SEQ ID NO: 5419030 - DNA, 25 bp, Homo sapien
gaaggaagtcatcagtgcagttgcc

SEQ ID NO: 5419031 - DNA, 25 bp, Homo sapien
tacacaaccattcgggtgccagtgg

SEQ ID NO: 5419032 - DNA, 25 bp, Homo sapien
ggagggcctgatcatagtcaagatg

SEQ ID NO: 5419033 - DNA, 25 bp, Homo sapien
gagtgatttactaccttgttactgc

SEQ ID NO: 5419034 - DNA, 25 bp, Homo sapien
tcagcttcggttcagttccctaaga

SEQ ID NO: 5419035 - DNA, 25 bp, Homo sapien
tgagaggcagtcgtaaaccctaaaa

SEQ ID NO: 5419036 - DNA, 25 bp, Homo sapien
ctaaaatgtataagcttccccaact

SEQ ID NO: 5419037 - DNA, 25 bp, Homo sapien
ctgtcccctgtgtagagtaaattgg

SEQ ID NO: 5419038 - DNA, 25 bp, Homo sapien
tttcaggcagctagggaaggtcaag

SEQ ID NO: 5419039 - DNA, 25 bp, Homo sapien
aaatgtggtcgctttgctcgggctc

SEQ ID NO: 5419040 - DNA, 25 bp, Homo sapien
cacaaggcactatgggctcatgggc

SEQ ID NO: 5419041 - DNA, 25 bp, Homo sapien
tgttcctgggacaattcaaccttgg

SEQ ID NO: 5419042 - DNA, 25 bp, Homo sapien
cctcctctgggagggttctgactct

SEQ ID NO: 5419043 - DNA, 25 bp, Homo sapien
tcctctgggagggttctgactcttc

SEQ ID NO: 5419044 - DNA, 25 bp, Homo sapien
ctcctctgggagggttctgactctt

SEQ ID NO: 5419045 - DNA, 25 bp, Homo sapien
caggtccatcaggatctgaatcatc

SEQ ID NO: 5419046 - DNA, 25 bp, Homo sapien
taaagatatgtctaaggcaacttcc

SEQ ID NO: 5419047 - DNA, 25 bp, Homo sapien
gaaacttgtagtgtccaggtccatc

SEQ ID NO: 5419048 - DNA, 25 bp, Homo sapien
ggaaatgttgctcatggctattaag

SEQ ID NO: 5419049 - DNA, 25 bp, Homo sapien
tgtgatatagccacctggggatgaa

SEQ ID NO: 5419050 - DNA, 25 bp, Homo sapien
gatatagccacctggggatgaaagt

SEQ ID NO: 5419051 - DNA, 25 bp, Homo sapien
tgatatagccacctggggatgaaag

SEQ ID NO: 5419052 - DNA, 25 bp, Homo sapien
atatagccacctggggatgaaagtt

SEQ ID NO: 5419053 - DNA, 25 bp, Homo sapien
ctgggccttgaagacagcagaggtg

SEQ ID NO: 5419054 - DNA, 25 bp, Homo sapien
tggcgcgactgtggttcactttagc

SEQ ID NO: 5419055 - DNA, 25 bp, Homo sapien
cagtggcgcgactgtggttcacttt

SEQ ID NO: 5419056 - DNA, 25 bp, Homo sapien
gcgactgtggttcactttagcctcg

SEQ ID NO: 5419057 - DNA, 25 bp, Homo sapien
actgtggttcactttagcctcgact

SEQ ID NO: 5419058 - DNA, 25 bp, Homo sapien
gtcgcctcgtctggcctcgcttgcc

SEQ ID NO: 5419059 - DNA, 25 bp, Homo sapien
gcctcgtctggcctcgcttgcccat

SEQ ID NO: 5419060 - DNA, 25 bp, Homo sapien
ccaggccgtcgcctcgtctggcctc

SEQ ID NO: 5419061 - DNA, 25 bp, Homo sapien
ggccgtcgcctcgtctggcctcgct

SEQ ID NO: 5419062 - DNA, 25 bp, Homo sapien
gctgtctgtgtaccaggatgctcgg

SEQ ID NO: 5419063 - DNA, 25 bp, Homo sapien
tgacacagtagcctttcggcagagc

SEQ ID NO: 5419064 - DNA, 25 bp, Homo sapien
tcggcagagctccttgggatgagta

SEQ ID NO: 5419065 - DNA, 25 bp, Homo sapien
tgtgttcagtttgcagccgtttggc

SEQ ID NO: 5419066 - DNA, 25 bp, Homo sapien
aattaagggagggaaccaagcatgg

SEQ ID NO: 5419067 - DNA, 25 bp, Homo sapien
caatgagttggtcagggtaggcctc

SEQ ID NO: 5419068 - DNA, 25 bp, Homo sapien
caagtggtcttggaccttgtaggca

SEQ ID NO: 5419069 - DNA, 25 bp, Homo sapien
taagagcctccgacctaaattggaa

SEQ ID NO: 5419070 - DNA, 25 bp, Homo sapien
aaacaggggagtgaactagggattg

SEQ ID NO: 5419071 - DNA, 25 bp, Homo sapien
tgggaggtggtaggaaagagtactg

SEQ ID NO: 5419072 - DNA, 25 bp, Homo sapien
gtggtaggaaagagtactgtctgga

SEQ ID NO: 5419073 - DNA, 25 bp, Homo sapien
caggggagtgaactagggattggta

SEQ ID NO: 5419074 - DNA, 25 bp, Homo sapien
gctgaagggtgagctcaactggatc

SEQ ID NO: 5419075 - DNA, 25 bp, Homo sapien
tagggtgtgacatgccagaacttgt

SEQ ID NO: 5419076 - DNA, 25 bp, Homo sapien
aaaagttctgggttgcctgtggcca

SEQ ID NO: 5419077 - DNA, 25 bp, Homo sapien
tagtgccgcaggttggaattgttcc

SEQ ID NO: 5419078 - DNA, 25 bp, Homo sapien
caaatgtggtgattgtgagtctaaa

SEQ ID NO: 5419079 - DNA, 25 bp, Homo sapien
gattgtgagtctaaagatggtacgc

SEQ ID NO: 5419080 - DNA, 25 bp, Homo sapien
tctgcaaatgtggtgattgtgagtc

SEQ ID NO: 5419081 - DNA, 25 bp, Homo sapien
aagatggtacgccagattccatatc

SEQ ID NO: 5419082 - DNA, 25 bp, Homo sapien
tacagatccttcacgtgttttgtac

SEQ ID NO: 5419083 - DNA, 25 bp, Homo sapien
tacttctgatggttgttatgtggca

SEQ ID NO: 5419084 - DNA, 25 bp, Homo sapien
ttttaatacagatccttcacgtgtt

SEQ ID NO: 5419085 - DNA, 25 bp, Homo sapien
tcacgtgttttgtacttctgatggt

SEQ ID NO: 5419086 - DNA, 25 bp, Homo sapien
cactaatccattattttgatgcgca

SEQ ID NO: 5419087 - DNA, 25 bp, Homo sapien
gatatacttttgtatgatggaccat

SEQ ID NO: 5419088 - DNA, 25 bp, Homo sapien
gaattaactccttataactctcata

SEQ ID NO: 5419089 - DNA, 25 bp, Homo sapien
tcacatgttgactgaaattatttct

SEQ ID NO: 5419090 - DNA, 25 bp, Homo sapien
gaaaaagccactctgtattctgcag

SEQ ID NO: 5419091 - DNA, 25 bp, Homo sapien
agtcttcatagatgccatagttggc

SEQ ID NO: 5419092 - DNA, 25 bp, Homo sapien
cagcaggccatcgttgcgggcacct

SEQ ID NO: 5419093 - DNA, 25 bp, Homo sapien
tttcttacaacccatcaaacatgaa

SEQ ID NO: 5419094 - DNA, 25 bp, Homo sapien
cggcgtgtttatcatacctgcaggc

SEQ ID NO: 5419095 - DNA, 25 bp, Homo sapien
tgatttattggaggctaactccctg

SEQ ID NO: 5419096 - DNA, 25 bp, Homo sapien
ctgtggagtggtaattgcagccaaa

SEQ ID NO: 5419097 - DNA, 25 bp, Homo sapien
tcacggttagagctctcagagaaat

SEQ ID NO: 5419098 - DNA, 25 bp, Homo sapien
gagatgctaacaagggaggtcccct

SEQ ID NO: 5419099 - DNA, 25 bp, Homo sapien
taattgttgcagcttcacgtcgtga

SEQ ID NO: 5419100 - DNA, 25 bp, Homo sapien
tactggccgggagttgatatatctg

SEQ ID NO: 5419101 - DNA, 25 bp, Homo sapien
aagaacttcagtggcgtaaacaccg

SEQ ID NO: 5419102 - DNA, 25 bp, Homo sapien
tgtcacatattaatcaatggaagct

SEQ ID NO: 5419103 - DNA, 25 bp, Homo sapien
gacccttcagatacggtgtttgctg

SEQ ID NO: 5419104 - DNA, 25 bp, Homo sapien
tattgtagagattaaccattccaag

SEQ ID NO: 5419105 - DNA, 25 bp, Homo sapien
cattagttgtactgaacctgacttc

SEQ ID NO: 5419106 - DNA, 25 bp, Homo sapien
ctcttctgagacttgtggtccttac

SEQ ID NO: 5419107 - DNA, 25 bp, Homo sapien
gctgggcacttcctactcttctgag

SEQ ID NO: 5419108 - DNA, 25 bp, Homo sapien
tgttgaacagtttatgaacagagcc

SEQ ID NO: 5419109 - DNA, 25 bp, Homo sapien
cagagcccttggttctgtaacttgc

SEQ ID NO: 5419110 - DNA, 25 bp, Homo sapien
tcttaagtcccagcgaatgattact

SEQ ID NO: 5419111 - DNA, 25 bp, Homo sapien
tcattcctacacaacaaggcggagt

SEQ ID NO: 5419112 - DNA, 25 bp, Homo sapien
caggccacagcgtctggctttcaaa

SEQ ID NO: 5419113 - DNA, 25 bp, Homo sapien
gaatgacagtcctgatttctgacca

SEQ ID NO: 5419114 - DNA, 25 bp, Homo sapien
tggtcccagttactcaactcgggag

SEQ ID NO: 5419115 - DNA, 25 bp, Homo sapien
cattgagccgagatctggccacgac

SEQ ID NO: 5419116 - DNA, 25 bp, Homo sapien
ttgagccgagatctggccacgacac

SEQ ID NO: 5419117 - DNA, 25 bp, Homo sapien
gaggtcaaagctgcattgagccgag

SEQ ID NO: 5419118 - DNA, 25 bp, Homo sapien
ggcaacctgcactgaatgagccatg

SEQ ID NO: 5419119 - DNA, 25 bp, Homo sapien
caaagtactctcaccatgacgtgcg

SEQ ID NO: 5419120 - DNA, 25 bp, Homo sapien
tgcagtgttgtgatgagcgttccga

SEQ ID NO: 5419121 - DNA, 25 bp, Homo sapien
gtctcttggcaaaacacttggttgg

SEQ ID NO: 5419122 - DNA, 25 bp, Homo sapien
gaaatgttgagccaaatccagaccc

SEQ ID NO: 5419123 - DNA, 25 bp, Homo sapien
cacctccatacctgttcagagttgg

SEQ ID NO: 5419124 - DNA, 25 bp, Homo sapien
tgaggtgcatttcagacgagtagcg

SEQ ID NO: 5419125 - DNA, 25 bp, Homo sapien
ctgattgctgcctcccttgctctga

SEQ ID NO: 5419126 - DNA, 25 bp, Homo sapien
tcttatagcaatacactgtaatatc

SEQ ID NO: 5419127 - DNA, 25 bp, Homo sapien
tgagacctagcaatcagtcagggct

SEQ ID NO: 5419128 - DNA, 25 bp, Homo sapien
ctttgacacgtagtaattctgtgac

SEQ ID NO: 5419129 - DNA, 25 bp, Homo sapien
gtaatatcagaaatggttggcctga

SEQ ID NO: 5419130 - DNA, 25 bp, Homo sapien
tttttagaattacggcagcatacga

SEQ ID NO: 5419131 - DNA, 25 bp, Homo sapien
caacttgatgaaacagccaaatgca

SEQ ID NO: 5419132 - DNA, 25 bp, Homo sapien
cagcatacgacctgaattttgtgag

SEQ ID NO: 5419133 - DNA, 25 bp, Homo sapien
ctccttagaaatgctggtggcaact

SEQ ID NO: 5419134 - DNA, 25 bp, Homo sapien
agtccacagtgtattcagaaatcca

SEQ ID NO: 5419135 - DNA, 25 bp, Homo sapien
gagcaagtcctatgccaaatatctt

SEQ ID NO: 5419136 - DNA, 25 bp, Homo sapien
cagaaatccaagttggtgtcataca

SEQ ID NO: 5419137 - DNA, 25 bp, Homo sapien
ctattgcaatgttattctgagcaag

SEQ ID NO: 5419138 - DNA, 25 bp, Homo sapien
tgcaaagaggttattccaccagccc

SEQ ID NO: 5419139 - DNA, 25 bp, Homo sapien
agaacatctgcagtctgcttcttga

SEQ ID NO: 5419140 - DNA, 25 bp, Homo sapien
caatgctcccagacaaaatcagagt

SEQ ID NO: 5419141 - DNA, 25 bp, Homo sapien
tggaaaaatacttgtcagcatcaat

SEQ ID NO: 5419142 - DNA, 25 bp, Homo sapien
gccaaagctggtcgtcaatggaagc

SEQ ID NO: 5419143 - DNA, 25 bp, Homo sapien
gcaatccaaagagagcatgggtctt

SEQ ID NO: 5419144 - DNA, 25 bp, Homo sapien
ccaggcatggaaacgtgctgcaggt

SEQ ID NO: 5419145 - DNA, 25 bp, Homo sapien
gtgctgcaggtaccaagcaatccaa

SEQ ID NO: 5419146 - DNA, 25 bp, Homo sapien
gcaccctcattagttgccagatgat

SEQ ID NO: 5419147 - DNA, 25 bp, Homo sapien
ctgagactggaggacgctttgtgtt

SEQ ID NO: 5419148 - DNA, 25 bp, Homo sapien
caattcaagatttgtcagctggtag

SEQ ID NO: 5419149 - DNA, 25 bp, Homo sapien
gattatcaagatgtccaaactggct

SEQ ID NO: 5419150 - DNA, 25 bp, Homo sapien
gtctctgcgacttcatgaagccgcg

SEQ ID NO: 5419151 - DNA, 25 bp, Homo sapien
aaaacctccacagcgcggaagcaga

SEQ ID NO: 5419152 - DNA, 25 bp, Homo sapien
agcgtcttcctcctggcgggctggt

SEQ ID NO: 5419153 - DNA, 25 bp, Homo sapien
tctgatgttcggcagcgtcttcctc

SEQ ID NO: 5419154 - DNA, 25 bp, Homo sapien
aatggagctgttctcaggtgtgaca

SEQ ID NO: 5419155 - DNA, 25 bp, Homo sapien
aggtgtgacaggaatttggccatct

SEQ ID NO: 5419156 - DNA, 25 bp, Homo sapien
ttaggcaaatggagctgttctcagg

SEQ ID NO: 5419157 - DNA, 25 bp, Homo sapien
tgacaggaatttggccatctttaga

SEQ ID NO: 5419158 - DNA, 25 bp, Homo sapien
cacattaaggaagtctgaaggcaag

SEQ ID NO: 5419159 - DNA, 25 bp, Homo sapien
gatgaatgagatcaatgcaaaggga

SEQ ID NO: 5419160 - DNA, 25 bp, Homo sapien
caagctgttggatgggtcatttgca

SEQ ID NO: 5419161 - DNA, 25 bp, Homo sapien
gcacgggctctaaaattcttgagga

SEQ ID NO: 5419162 - DNA, 25 bp, Homo sapien
aatgagagactgatgaactgaactg

SEQ ID NO: 5419163 - DNA, 25 bp, Homo sapien
gccataaagcaataggagaattcat

SEQ ID NO: 5419164 - DNA, 25 bp, Homo sapien
actgaactgagccataaagcaatag

SEQ ID NO: 5419165 - DNA, 25 bp, Homo sapien
agagactgatgaactgaactgagcc

SEQ ID NO: 5419166 - DNA, 25 bp, Homo sapien
tgtcccttcagtccaagggaccagg

SEQ ID NO: 5419167 - DNA, 25 bp, Homo sapien
gacttagtgcctttttgagcaaggg

SEQ ID NO: 5419168 - DNA, 25 bp, Homo sapien
tcgctgggtgcttcaaacttggaga

SEQ ID NO: 5419169 - DNA, 25 bp, Homo sapien
gatcaggaacgttcactggtcaaat

SEQ ID NO: 5419170 - DNA, 25 bp, Homo sapien
ggaaggtttctaagtccactagatc

SEQ ID NO: 5419171 - DNA, 25 bp, Homo sapien
cctatgtcatcaggcgtccaatctt

SEQ ID NO: 5419172 - DNA, 25 bp, Homo sapien
agcagtccctatgtcatcaggcgtc

SEQ ID NO: 5419173 - DNA, 25 bp, Homo sapien
ttagttcacgtcatgcatgtgtgtt

SEQ ID NO: 5419174 - DNA, 25 bp, Homo sapien
tcatcaggcgtccaatctttggtga

SEQ ID NO: 5419175 - DNA, 25 bp, Homo sapien
gacagggatgctagttctcccaggg

SEQ ID NO: 5419176 - DNA, 25 bp, Homo sapien
tgctagttctcccagggccggatct

SEQ ID NO: 5419177 - DNA, 25 bp, Homo sapien
caagggacagggatgctagttctcc

SEQ ID NO: 5419178 - DNA, 25 bp, Homo sapien
agggatgctagttctcccagggccg

SEQ ID NO: 5419179 - DNA, 25 bp, Homo sapien
gtgggctagttgacaattctgaatg

SEQ ID NO: 5419180 - DNA, 25 bp, Homo sapien
tggcccaagaagtgaatacatcttt

SEQ ID NO: 5419181 - DNA, 25 bp, Homo sapien
cctgatggcccaagaagtgaataca

SEQ ID NO: 5419182 - DNA, 25 bp, Homo sapien
tgtgggtatagagattatgtgtcat

SEQ ID NO: 5419183 - DNA, 25 bp, Homo sapien
cttttgctgtggcctgtgccatcat

SEQ ID NO: 5419184 - DNA, 25 bp, Homo sapien
gtaggaggtcagcacacgacacagg

SEQ ID NO: 5419185 - DNA, 25 bp, Homo sapien
gtgaaattgtatctcctgtgtcaga

SEQ ID NO: 5419186 - DNA, 25 bp, Homo sapien
gaggtacgcctctattcccaaattg

SEQ ID NO: 5419187 - DNA, 25 bp, Homo sapien
taggagctgggcaaaataagccttg

SEQ ID NO: 5419188 - DNA, 25 bp, Homo sapien
cgctcgccgcgtgccggtgagggct

SEQ ID NO: 5419189 - DNA, 25 bp, Homo sapien
cgccgcgtgccggtgagggctgggc

SEQ ID NO: 5419190 - DNA, 25 bp, Homo sapien
cgccaccagcatggacgctcgccgc

SEQ ID NO: 5419191 - DNA, 25 bp, Homo sapien
tgagggctgggcgggcgaacccgag

SEQ ID NO: 5419192 - DNA, 25 bp, Homo sapien
gagtcccgccagccctcagagaatt

SEQ ID NO: 5419193 - DNA, 25 bp, Homo sapien
gagtaccaggggagcaaccaacaaa

SEQ ID NO: 5419194 - DNA, 25 bp, Homo sapien
gatgaagtttccagcgcggagtacc

SEQ ID NO: 5419195 - DNA, 25 bp, Homo sapien
tcagggtggcgatgaagtttccagc

SEQ ID NO: 5419196 - DNA, 25 bp, Homo sapien
tgtttagcaatcaaggagaccgcga

SEQ ID NO: 5419197 - DNA, 25 bp, Homo sapien
taagatggccatataggttttaggc

SEQ ID NO: 5419198 - DNA, 25 bp, Homo sapien
aatagctcatctctcaagttgaaag

SEQ ID NO: 5419199 - DNA, 25 bp, Homo sapien
aatggattcccttatacgtgctttg

SEQ ID NO: 5419200 - DNA, 25 bp, Homo sapien
tcccgggtgttgcttccaggagaaa

SEQ ID NO: 5419201 - DNA, 25 bp, Homo sapien
caggagaaaccctgaacggagagct

SEQ ID NO: 5419202 - DNA, 25 bp, Homo sapien
ccggatcctcgggtcccttgacgct

SEQ ID NO: 5419203 - DNA, 25 bp, Homo sapien
tcgtcctcttaccaggtcaaggtcc

SEQ ID NO: 5419204 - DNA, 25 bp, Homo sapien
agtttgttaacctgacatctctgcc

SEQ ID NO: 5419205 - DNA, 25 bp, Homo sapien
caaggtatttggtagaggtggaatc

SEQ ID NO: 5419206 - DNA, 25 bp, Homo sapien
gcatatgtaaaccattgctgtgcca

SEQ ID NO: 5419207 - DNA, 25 bp, Homo sapien
gcataattggaccttgaatcgataa

SEQ ID NO: 5419208 - DNA, 25 bp, Homo sapien
ggtgctcttgatccaaacttagggc

SEQ ID NO: 5419209 - DNA, 25 bp, Homo sapien
tgatgatgtaactcagcaccaagtt

SEQ ID NO: 5419210 - DNA, 25 bp, Homo sapien
tcctaattctaacaaggtgctcttg

SEQ ID NO: 5419211 - DNA, 25 bp, Homo sapien
ccagtggctggaagcttatggctga

SEQ ID NO: 5419212 - DNA, 25 bp, Homo sapien
agcaaaaacaagagtaggtcagtaa

SEQ ID NO: 5419213 - DNA, 25 bp, Homo sapien
gcaaaaacaagagtaggtcagtaaa

SEQ ID NO: 5419214 - DNA, 25 bp, Homo sapien
gtcagcaaaaacaagagtaggtcag

SEQ ID NO: 5419215 - DNA, 25 bp, Homo sapien
tagttgctttaacacgaccaccgag

SEQ ID NO: 5419216 - DNA, 25 bp, Homo sapien
tcctccatgaaattcagagtgggct

SEQ ID NO: 5419217 - DNA, 25 bp, Homo sapien
catgcgaaagaagacacgccgtgat

SEQ ID NO: 5419218 - DNA, 25 bp, Homo sapien
ccgtgatgtggagcaaaccttaggt

SEQ ID NO: 5419219 - DNA, 25 bp, Homo sapien
gtgccccaaaatggccacacattcc

SEQ ID NO: 5419220 - DNA, 25 bp, Homo sapien
ataaagagcctcgaaattctgtgcc

SEQ ID NO: 5419221 - DNA, 25 bp, Homo sapien
ccagtagttcataaggagtcctcgt

SEQ ID NO: 5419222 - DNA, 25 bp, Homo sapien
tgctccctaattctaagtcataaag

SEQ ID NO: 5419223 - DNA, 25 bp, Homo sapien
gatcagcgttctctggtcgccaagg

SEQ ID NO: 5419224 - DNA, 25 bp, Homo sapien
tgactctggaaaccggtcagtggcc

SEQ ID NO: 5419225 - DNA, 25 bp, Homo sapien
cgaacgctgtttcaccgggtctaga

SEQ ID NO: 5419226 - DNA, 25 bp, Homo sapien
tccagacagggttacgacgtgcttt

SEQ ID NO: 5419227 - DNA, 25 bp, Homo sapien
ggggctgagctctgatatgacatcc

SEQ ID NO: 5419228 - DNA, 25 bp, Homo sapien
ggctgagctctgatatgacatcctg

SEQ ID NO: 5419229 - DNA, 25 bp, Homo sapien
ctgagctctgatatgacatcctgtg

SEQ ID NO: 5419230 - DNA, 25 bp, Homo sapien
cgggggctgagctctgatatgacat

SEQ ID NO: 5419231 - DNA, 25 bp, Homo sapien
cctgtggttgggatgagctagattt

SEQ ID NO: 5419232 - DNA, 25 bp, Homo sapien
gtggttgggatgagctagatttcct

SEQ ID NO: 5419233 - DNA, 25 bp, Homo sapien
tgcctgtggttgggatgagctagat

SEQ ID NO: 5419234 - DNA, 25 bp, Homo sapien
ctgtggttgggatgagctagatttc

SEQ ID NO: 5419235 - DNA, 25 bp, Homo sapien
cttcgtgctgtagctacatcagtgc

SEQ ID NO: 5419236 - DNA, 25 bp, Homo sapien
cgtgctgtagctacatcagtgccaa

SEQ ID NO: 5419237 - DNA, 25 bp, Homo sapien
caagagaccccacttcccacgtctt

SEQ ID NO: 5419238 - DNA, 25 bp, Homo sapien
gctgtagctacatcagtgccaagag

SEQ ID NO: 5419239 - DNA, 25 bp, Homo sapien
tgcccctcttacaaaggaaacatct

SEQ ID NO: 5419240 - DNA, 25 bp, Homo sapien
ggctgcccctcttacaaaggaaaca

SEQ ID NO: 5419241 - DNA, 25 bp, Homo sapien
tggctgcccctcttacaaaggaaac

SEQ ID NO: 5419242 - DNA, 25 bp, Homo sapien
gctgcccctcttacaaaggaaacat

SEQ ID NO: 5419243 - DNA, 25 bp, Homo sapien
ccttctacctcagggaactctccta

SEQ ID NO: 5419244 - DNA, 25 bp, Homo sapien
catacacagagctcattcccccagt

SEQ ID NO: 5419245 - DNA, 25 bp, Homo sapien
cccatcccctgaacatgctcataca

SEQ ID NO: 5419246 - DNA, 25 bp, Homo sapien
cttcccaggagatgtaaacccctct

SEQ ID NO: 5419247 - DNA, 25 bp, Homo sapien
gagttctgagtccatgctagtgtgc

SEQ ID NO: 5419248 - DNA, 25 bp, Homo sapien
cctgggaagggttgcgaattttcat

SEQ ID NO: 5419249 - DNA, 25 bp, Homo sapien
tttttctagatctgctttaatttct

SEQ ID NO: 5419250 - DNA, 25 bp, Homo sapien
tctgagtccatgctagtgtgcatga

SEQ ID NO: 5419251 - DNA, 25 bp, Homo sapien
catttgctgaattgtgtggatcatt

SEQ ID NO: 5419252 - DNA, 25 bp, Homo sapien
tgctgaattgtgtggatcattattt

SEQ ID NO: 5419253 - DNA, 25 bp, Homo sapien
gcatttgctgaattgtgtggatcat

SEQ ID NO: 5419254 - DNA, 25 bp, Homo sapien
aattgtgtggatcattatttgcaac

SEQ ID NO: 5419255 - DNA, 25 bp, Homo sapien
gtcagagggttctcaccacttttcc

SEQ ID NO: 5419256 - DNA, 25 bp, Homo sapien
ttccatccttggcatgacaaccaca

SEQ ID NO: 5419257 - DNA, 25 bp, Homo sapien
cttggcatgacaaccacattaatct

SEQ ID NO: 5419258 - DNA, 25 bp, Homo sapien
tcctatctgtgtaactgtcagaggg

SEQ ID NO: 5419259 - DNA, 25 bp, Homo sapien
tgtctcccacaaatcatccttggct

SEQ ID NO: 5419260 - DNA, 25 bp, Homo sapien
cctctctaggccctcaggcctagaa

SEQ ID NO: 5419261 - DNA, 25 bp, Homo sapien
ccttctgtgccacgagcagaccttt

SEQ ID NO: 5419262 - DNA, 25 bp, Homo sapien
gagcagacctttcgcctcacgtatc

SEQ ID NO: 5419263 - DNA, 25 bp, Homo sapien
tgtgccacgagcagacctttcgcct

SEQ ID NO: 5419264 - DNA, 25 bp, Homo sapien
agcagagctgtctgttttatttctg

SEQ ID NO: 5419265 - DNA, 25 bp, Homo sapien
ccccagcagagctgtctgttttatt

SEQ ID NO: 5419266 - DNA, 25 bp, Homo sapien
ctaaaccccagcagagctgtctgtt

SEQ ID NO: 5419267 - DNA, 25 bp, Homo sapien
taaaccccagcagagctgtctgttt

SEQ ID NO: 5419268 - DNA, 25 bp, Homo sapien
ttgaggttaatattataatctttgt

SEQ ID NO: 5419269 - DNA, 25 bp, Homo sapien
ttttactacaataatcatatggcca

SEQ ID NO: 5419270 - DNA, 25 bp, Homo sapien
caataatcatatggccatttgttca

SEQ ID NO: 5419271 - DNA, 25 bp, Homo sapien
ctgtggtcacaaattctttgaggtt

SEQ ID NO: 5419272 - DNA, 25 bp, Homo sapien
cattttcttcttgtgtacccattat

SEQ ID NO: 5419273 - DNA, 25 bp, Homo sapien
acccattatctttgattttgacaac

SEQ ID NO: 5419274 - DNA, 25 bp, Homo sapien
cccattatctttgattttgacaact

SEQ ID NO: 5419275 - DNA, 25 bp, Homo sapien
tcttgtgtacccattatctttgatt

SEQ ID NO: 5419276 - DNA, 25 bp, Homo sapien
tagcgcttcggttctgcttctctca

SEQ ID NO: 5419277 - DNA, 25 bp, Homo sapien
cacatagcgcttcggttctgcttct

SEQ ID NO: 5419278 - DNA, 25 bp, Homo sapien
tccttccttcgttcccacatagcgc

SEQ ID NO: 5419279 - DNA, 25 bp, Homo sapien
cttcgttcccacatagcgcttcggt

SEQ ID NO: 5419280 - DNA, 25 bp, Homo sapien
gtaatccttagtgtacttgctggtt

SEQ ID NO: 5419281 - DNA, 25 bp, Homo sapien
tagtaatccttagtgtacttgctgg

SEQ ID NO: 5419282 - DNA, 25 bp, Homo sapien
tggttcttattcttattcgtattct

SEQ ID NO: 5419283 - DNA, 25 bp, Homo sapien
gtactagtaatccttagtgtacttg

SEQ ID NO: 5419284 - DNA, 25 bp, Homo sapien
cacttgccaccagggggatttccta

SEQ ID NO: 5419285 - DNA, 25 bp, Homo sapien
gggatttcctatggatggtcctggg

SEQ ID NO: 5419286 - DNA, 25 bp, Homo sapien
caaaacaacgaagttcaggatggtc

SEQ ID NO: 5419287 - DNA, 25 bp, Homo sapien
cagagcagagttaacccaggatgag

SEQ ID NO: 5419288 - DNA, 25 bp, Homo sapien
agcgttccttccctgcagtccggat

SEQ ID NO: 5419289 - DNA, 25 bp, Homo sapien
gcgttccttccctgcagtccggatg

SEQ ID NO: 5419290 - DNA, 25 bp, Homo sapien
cgttccttccctgcagtccggatga

SEQ ID NO: 5419291 - DNA, 25 bp, Homo sapien
acccagcagccgcaaaacccgggag

SEQ ID NO: 5419292 - DNA, 25 bp, Homo sapien
ccaatgtggcccaagaaggtggatt

SEQ ID NO: 5419293 - DNA, 25 bp, Homo sapien
ctgctgttggggttaacacccttga

SEQ ID NO: 5419294 - DNA, 25 bp, Homo sapien
atgtggcccaagaaggtggattttc

SEQ ID NO: 5419295 - DNA, 25 bp, Homo sapien
agaatgctgacaaggtcggaccgag

SEQ ID NO: 5419296 - DNA, 25 bp, Homo sapien
gaggagcaagttaggctggcgtgga

SEQ ID NO: 5419297 - DNA, 25 bp, Homo sapien
agcagaatgctgacaaggtcggacc

SEQ ID NO: 5419298 - DNA, 25 bp, Homo sapien
aggagcaagttaggctggcgtggaa

SEQ ID NO: 5419299 - DNA, 25 bp, Homo sapien
gactcaggtattctagccgggatgg

SEQ ID NO: 5419300 - DNA, 25 bp, Homo sapien
gaaagatgatgtgcgtgccccactg

SEQ ID NO: 5419301 - DNA, 25 bp, Homo sapien
gaacacgaaataaggctgcggctcc

SEQ ID NO: 5419302 - DNA, 25 bp, Homo sapien
ctgtggaggcccctagtgaagactg

SEQ ID NO: 5419303 - DNA, 25 bp, Homo sapien
tctaaacaatatcctagggctgagg

SEQ ID NO: 5419304 - DNA, 25 bp, Homo sapien
cattgaatggtggagctctcctggc

SEQ ID NO: 5419305 - DNA, 25 bp, Homo sapien
tcttgttggcaggacagatagaggc

SEQ ID NO: 5419306 - DNA, 25 bp, Homo sapien
cacgacggattcagacagtgaggga

SEQ ID NO: 5419307 - DNA, 25 bp, Homo sapien
tcggataattcatggtttgccactc

SEQ ID NO: 5419308 - DNA, 25 bp, Homo sapien
cacatcttagacagataattagggc

SEQ ID NO: 5419309 - DNA, 25 bp, Homo sapien
tgcgcttcgtggaaaaccaacctag

SEQ ID NO: 5419310 - DNA, 25 bp, Homo sapien
taagtcggacaaattgcattgcgct

SEQ ID NO: 5419311 - DNA, 25 bp, Homo sapien
tgttggcgcgctcaatagtcttgtt

SEQ ID NO: 5419312 - DNA, 25 bp, Homo sapien
tcctgacagcggattttctcagctg

SEQ ID NO: 5419313 - DNA, 25 bp, Homo sapien
ccagaggccgtggttaaagcagcca

SEQ ID NO: 5419314 - DNA, 25 bp, Homo sapien
gacctttcactaatctgttggcgcg

SEQ ID NO: 5419315 - DNA, 25 bp, Homo sapien
aacagtgagagacaactttggacat

SEQ ID NO: 5419316 - DNA, 25 bp, Homo sapien
aaagatccggttgctgctttccctg

SEQ ID NO: 5419317 - DNA, 25 bp, Homo sapien
taacagaacagcgttgtcccctgca

SEQ ID NO: 5419318 - DNA, 25 bp, Homo sapien
tatttatgccgttaggtaggaggcg

SEQ ID NO: 5419319 - DNA, 25 bp, Homo sapien
tgcggcactgtgacagggataacag

SEQ ID NO: 5419320 - DNA, 25 bp, Homo sapien
tgcttctcccgatggtgtccgtcca

SEQ ID NO: 5419321 - DNA, 25 bp, Homo sapien
tcccgatggtgtccgtccaacatgg

SEQ ID NO: 5419322 - DNA, 25 bp, Homo sapien
atgggctcttttgaactggcgtagt

SEQ ID NO: 5419323 - DNA, 25 bp, Homo sapien
aactggcgtagtgccccaaacacta

SEQ ID NO: 5419324 - DNA, 25 bp, Homo sapien
ggcatctccttgggactaaagatac

SEQ ID NO: 5419325 - DNA, 25 bp, Homo sapien
aagcagacgtccaaggaggcatctc

SEQ ID NO: 5419326 - DNA, 25 bp, Homo sapien
ctgggttgactgatcaaaggaatgc

SEQ ID NO: 5419327 - DNA, 25 bp, Homo sapien
agaagcagacgtccaaggaggcatc

SEQ ID NO: 5419328 - DNA, 25 bp, Homo sapien
tctcctgacatgtcccagaagccag

SEQ ID NO: 5419329 - DNA, 25 bp, Homo sapien
cccagaagccagggtccaagcatac

SEQ ID NO: 5419330 - DNA, 25 bp, Homo sapien
tcccagaagccagggtccaagcata

SEQ ID NO: 5419331 - DNA, 25 bp, Homo sapien
ttctcctgacatgtcccagaagcca

SEQ ID NO: 5419332 - DNA, 25 bp, Homo sapien
catccaggttcccatcacccactgt

SEQ ID NO: 5419333 - DNA, 25 bp, Homo sapien
ctcaagacttcctgcaaggacccca

SEQ ID NO: 5419334 - DNA, 25 bp, Homo sapien
agacttcctgcaaggaccccatcca

SEQ ID NO: 5419335 - DNA, 25 bp, Homo sapien
acttcctgcaaggaccccatccagg

SEQ ID NO: 5419336 - DNA, 25 bp, Homo sapien
gttgtccaaagtcaggaatggtgac

SEQ ID NO: 5419337 - DNA, 25 bp, Homo sapien
ttattcgagttgtccaaagtcagga

SEQ ID NO: 5419338 - DNA, 25 bp, Homo sapien
tattcgagttgtccaaagtcaggaa

SEQ ID NO: 5419339 - DNA, 25 bp, Homo sapien
tcgagttgtccaaagtcaggaatgg

SEQ ID NO: 5419340 - DNA, 25 bp, Homo sapien
actcaccgtcgacagagatgtggaa

SEQ ID NO: 5419341 - DNA, 25 bp, Homo sapien
aggactcaccgtcgacagagatgtg

SEQ ID NO: 5419342 - DNA, 25 bp, Homo sapien
gactcaccgtcgacagagatgtgga

SEQ ID NO: 5419343 - DNA, 25 bp, Homo sapien
ggactcaccgtcgacagagatgtgg

SEQ ID NO: 5419344 - DNA, 25 bp, Homo sapien
gtctggtggtttgtacacagattcc

SEQ ID NO: 5419345 - DNA, 25 bp, Homo sapien
cattttgatagcattaatcagagct

SEQ ID NO: 5419346 - DNA, 25 bp, Homo sapien
gggctggaatatcaatcacaggaaa

SEQ ID NO: 5419347 - DNA, 25 bp, Homo sapien
cgagtttggatgtgaaggtaaacac

SEQ ID NO: 5419348 - DNA, 25 bp, Homo sapien
gaaggtgcggccgagggacaatttc

SEQ ID NO: 5419349 - DNA, 25 bp, Homo sapien
tagaaggattggtgacagccattga

SEQ ID NO: 5419350 - DNA, 25 bp, Homo sapien
cctctgttgttagagtggaaggatt

SEQ ID NO: 5419351 - DNA, 25 bp, Homo sapien
ttagagtggaaggattagaaggatt

SEQ ID NO: 5419352 - DNA, 25 bp, Homo sapien
catttaagcgtagatattggccaga

SEQ ID NO: 5419353 - DNA, 25 bp, Homo sapien
taagcgtagatattggccagaagca

SEQ ID NO: 5419354 - DNA, 25 bp, Homo sapien
gaactcatttaagcgtagatattgg

SEQ ID NO: 5419355 - DNA, 25 bp, Homo sapien
aatgtgagaactcatttaagcgtag

SEQ ID NO: 5419356 - DNA, 25 bp, Homo sapien
tgagaagtggatcaacagaaaggtc

SEQ ID NO: 5419357 - DNA, 25 bp, Homo sapien
gagaagtggatcaacagaaaggtca

SEQ ID NO: 5419358 - DNA, 25 bp, Homo sapien
agaagtggatcaacagaaaggtcat

SEQ ID NO: 5419359 - DNA, 25 bp, Homo sapien
ctgagaagtggatcaacagaaaggt

SEQ ID NO: 5419360 - DNA, 25 bp, Homo sapien
caattttacaagtattcagggcaca

SEQ ID NO: 5419361 - DNA, 25 bp, Homo sapien
cgaatgataggacagagcgctgatc

SEQ ID NO: 5419362 - DNA, 25 bp, Homo sapien
gaaccgtgatgtgttggtgagacaa

SEQ ID NO: 5419363 - DNA, 25 bp, Homo sapien
catacaatagcttggtaggaaccgt

SEQ ID NO: 5419364 - DNA, 25 bp, Homo sapien
tctccgcaggataaagggtgagtag

SEQ ID NO: 5419365 - DNA, 25 bp, Homo sapien
cgtgtctccgcaggataaagggtga

SEQ ID NO: 5419366 - DNA, 25 bp, Homo sapien
tgtctccgcaggataaagggtgagt

SEQ ID NO: 5419367 - DNA, 25 bp, Homo sapien
ctccgcaggataaagggtgagtagg

SEQ ID NO: 5419368 - DNA, 25 bp, Homo sapien
tttggttgtatctctgcccggcttt

SEQ ID NO: 5419369 - DNA, 25 bp, Homo sapien
tcttttttggttgtatctctgcccg

SEQ ID NO: 5419370 - DNA, 25 bp, Homo sapien
ttttttggttgtatctctgcccggc

SEQ ID NO: 5419371 - DNA, 25 bp, Homo sapien
tttttggttgtatctctgcccggct

SEQ ID NO: 5419372 - DNA, 25 bp, Homo sapien
gaggagcactccattgttctgattg

SEQ ID NO: 5419373 - DNA, 25 bp, Homo sapien
tttcagtgcctcaagagcagttaac

SEQ ID NO: 5419374 - DNA, 25 bp, Homo sapien
aaagagcttctacttggtatctgag

SEQ ID NO: 5419375 - DNA, 25 bp, Homo sapien
gagaaacgaaaaagctttcagtgcc

SEQ ID NO: 5419376 - DNA, 25 bp, Homo sapien
tgtttgcaaacagtatcaattccca

SEQ ID NO: 5419377 - DNA, 25 bp, Homo sapien
gatcagacgtccttccttcggagga

SEQ ID NO: 5419378 - DNA, 25 bp, Homo sapien
tggattctgatactcccgactttgt

SEQ ID NO: 5419379 - DNA, 25 bp, Homo sapien
ccgactttgtcatcggctttgaaga

SEQ ID NO: 5419380 - DNA, 25 bp, Homo sapien
gcacatgcattggtggaacacttaa

SEQ ID NO: 5419381 - DNA, 25 bp, Homo sapien
tacatcaagggcagtgaatctactg

SEQ ID NO: 5419382 - DNA, 25 bp, Homo sapien
tttaaaatacatgggatgcacatgc

SEQ ID NO: 5419383 - DNA, 25 bp, Homo sapien
ctcttgctgggcgtatttggctatc

SEQ ID NO: 5419384 - DNA, 25 bp, Homo sapien
gctctgcttaagcatttctcgagag

SEQ ID NO: 5419385 - DNA, 25 bp, Homo sapien
tgcttaagcatttctcgagagatgt

SEQ ID NO: 5419386 - DNA, 25 bp, Homo sapien
accaaaccatgaataaaattgagaa

SEQ ID NO: 5419387 - DNA, 25 bp, Homo sapien
aagcatttctcgagagatgttgagg

SEQ ID NO: 5419388 - DNA, 25 bp, Homo sapien
cacagctgtccatgatgaacacacg

SEQ ID NO: 5419389 - DNA, 25 bp, Homo sapien
gctgtccatgatgaacacacgatgg

SEQ ID NO: 5419390 - DNA, 25 bp, Homo sapien
cagctgtccatgatgaacacacgat

SEQ ID NO: 5419391 - DNA, 25 bp, Homo sapien
tgtccatgatgaacacacgatggac

SEQ ID NO: 5419392 - DNA, 25 bp, Homo sapien
agcttgatgttgttctttttcttct

SEQ ID NO: 5419393 - DNA, 25 bp, Homo sapien
gcttgatgttgttctttttcttctt

SEQ ID NO: 5419394 - DNA, 25 bp, Homo sapien
tgatgttgttctttttcttcttgtt

SEQ ID NO: 5419395 - DNA, 25 bp, Homo sapien
cttgatgttgttctttttcttcttg

SEQ ID NO: 5419396 - DNA, 25 bp, Homo sapien
cagttattggtgagactcttgtaaa

SEQ ID NO: 5419397 - DNA, 25 bp, Homo sapien
gagggatgagtagcaatgctctaaa

SEQ ID NO: 5419398 - DNA, 25 bp, Homo sapien
caaagggagcccgttgagggatgag

SEQ ID NO: 5419399 - DNA, 25 bp, Homo sapien
ttcccagttattggtgagactcttg

SEQ ID NO: 5419400 - DNA, 25 bp, Homo sapien
ggtgacatcatgagggtttctggtc

SEQ ID NO: 5419401 - DNA, 25 bp, Homo sapien
acatcatgagggtttctggtccaga

SEQ ID NO: 5419402 - DNA, 25 bp, Homo sapien
gacatcatgagggtttctggtccag

SEQ ID NO: 5419403 - DNA, 25 bp, Homo sapien
ctgggtgacatcatgagggtttctg

SEQ ID NO: 5419404 - DNA, 25 bp, Homo sapien
tatctggtcttccttaaggtggagg

SEQ ID NO: 5419405 - DNA, 25 bp, Homo sapien
tctaagtactctatctggtcttcct

SEQ ID NO: 5419406 - DNA, 25 bp, Homo sapien
tactctatctggtcttccttaaggt

SEQ ID NO: 5419407 - DNA, 25 bp, Homo sapien
ttctaagtactctatctggtcttcc

SEQ ID NO: 5419408 - DNA, 25 bp, Homo sapien
tttggtatccctgctggtgggctca

SEQ ID NO: 5419409 - DNA, 25 bp, Homo sapien
ctttggtatccctgctggtgggctc

SEQ ID NO: 5419410 - DNA, 25 bp, Homo sapien
atctctttactgctgttcaactcag

SEQ ID NO: 5419411 - DNA, 25 bp, Homo sapien
aaagtcagggtgcattcctgagagt

SEQ ID NO: 5419412 - DNA, 25 bp, Homo sapien
caccaggtaggcaggctaaaaacca

SEQ ID NO: 5419413 - DNA, 25 bp, Homo sapien
ctgctgttcaactcagaagagtctg

SEQ ID NO: 5419414 - DNA, 25 bp, Homo sapien
aaggtattgatgttgagatacatga

SEQ ID NO: 5419415 - DNA, 25 bp, Homo sapien
tgatgttgagatacatgaattgggc

SEQ ID NO: 5419416 - DNA, 25 bp, Homo sapien
gatacatgaattgggcaacttctgc

SEQ ID NO: 5419417 - DNA, 25 bp, Homo sapien
tttccctggtacacttcctcaagca

SEQ ID NO: 5419418 - DNA, 25 bp, Homo sapien
ttagtgatgctcatcagacatagca

SEQ ID NO: 5419419 - DNA, 25 bp, Homo sapien
cttagtgatgctcatcagacatagc

SEQ ID NO: 5419420 - DNA, 25 bp, Homo sapien
gggactggttgattagattagttac

SEQ ID NO: 5419421 - DNA, 25 bp, Homo sapien
tattcatcagaaattctcctccata

SEQ ID NO: 5419422 - DNA, 25 bp, Homo sapien
tgtaatgaggtggagaattttattc

SEQ ID NO: 5419423 - DNA, 25 bp, Homo sapien
tagattagttacttgtgtaatgagg

SEQ ID NO: 5419424 - DNA, 25 bp, Homo sapien
acattagctgtagccagacatgtcc

SEQ ID NO: 5419425 - DNA, 25 bp, Homo sapien
ggctggacattagctgtagccagac

SEQ ID NO: 5419426 - DNA, 25 bp, Homo sapien
actgacaactggctggacattagct

SEQ ID NO: 5419427 - DNA, 25 bp, Homo sapien
caactggctggacattagctgtagc

SEQ ID NO: 5419428 - DNA, 25 bp, Homo sapien
tctgctccatagtagcctctgcctg

SEQ ID NO: 5419429 - DNA, 25 bp, Homo sapien
tagcgtctctccttacaataccttc

SEQ ID NO: 5419430 - DNA, 25 bp, Homo sapien
ttcacattaactctttcatagcgtc

SEQ ID NO: 5419431 - DNA, 25 bp, Homo sapien
cagccatgctccatcgtagcctctg

SEQ ID NO: 5419432 - DNA, 25 bp, Homo sapien
gactgacaggctccggaaccacaag

SEQ ID NO: 5419433 - DNA, 25 bp, Homo sapien
ggtaggggattttgactgacaggct

SEQ ID NO: 5419434 - DNA, 25 bp, Homo sapien
gtaggggattttgactgacaggctc

SEQ ID NO: 5419435 - DNA, 25 bp, Homo sapien
tgactgacaggctccggaaccacaa

SEQ ID NO: 5419436 - DNA, 25 bp, Homo sapien
gatttggtccctcgatcctcatttc

SEQ ID NO: 5419437 - DNA, 25 bp, Homo sapien
tgaccaagccagatttggtccctcg

SEQ ID NO: 5419438 - DNA, 25 bp, Homo sapien
ggtccctcgatcctcatttctcaat

SEQ ID NO: 5419439 - DNA, 25 bp, Homo sapien
tttggtccctcgatcctcatttctc

SEQ ID NO: 5419440 - DNA, 25 bp, Homo sapien
atgtctgctaatgggtccatgcgcc

SEQ ID NO: 5419441 - DNA, 25 bp, Homo sapien
tgctaatgggtccatgcgcctctgc

SEQ ID NO: 5419442 - DNA, 25 bp, Homo sapien
gtcctcatcatgtctgctaatgggt

SEQ ID NO: 5419443 - DNA, 25 bp, Homo sapien
catcatgtctgctaatgggtccatg

SEQ ID NO: 5419444 - DNA, 25 bp, Homo sapien
catccaggcataaaaccagtggcca

SEQ ID NO: 5419445 - DNA, 25 bp, Homo sapien
gaactgttcttttaagggcggctgc

SEQ ID NO: 5419446 - DNA, 25 bp, Homo sapien
tcagatgccgctctcggagaatgca

SEQ ID NO: 5419447 - DNA, 25 bp, Homo sapien
gcaagttcattgttggcagccccag

SEQ ID NO: 5419448 - DNA, 25 bp, Homo sapien
gtccaggttgatgggtggtggtaga

SEQ ID NO: 5419449 - DNA, 25 bp, Homo sapien
tccaggttgatgggtggtggtagaa

SEQ ID NO: 5419450 - DNA, 25 bp, Homo sapien
cactaatgccaaccaggaatcttat

SEQ ID NO: 5419451 - DNA, 25 bp, Homo sapien
tcaggcacaattatgccattttgag

SEQ ID NO: 5419452 - DNA, 25 bp, Homo sapien
gcaattaatgcaatcatatgatgca

SEQ ID NO: 5419453 - DNA, 25 bp, Homo sapien
gcacaattatgccattttgagtttc

SEQ ID NO: 5419454 - DNA, 25 bp, Homo sapien
tgtgttggcccctctcttgcatagg

SEQ ID NO: 5419455 - DNA, 25 bp, Homo sapien
cacaattgatctgatgtcatccaga

SEQ ID NO: 5419456 - DNA, 25 bp, Homo sapien
ctttatttggatgctgtgttggccc

SEQ ID NO: 5419457 - DNA, 25 bp, Homo sapien
caactgtgggttccatcacaattga

SEQ ID NO: 5419458 - DNA, 25 bp, Homo sapien
agtgtctgtttcagggatctataaa

SEQ ID NO: 5419459 - DNA, 25 bp, Homo sapien
tgtctgtttcagggatctataaagc

SEQ ID NO: 5419460 - DNA, 25 bp, Homo sapien
gtgtctgtttcagggatctataaag

SEQ ID NO: 5419461 - DNA, 25 bp, Homo sapien
gaaaaacttccagccgtgggattca

SEQ ID NO: 5419462 - DNA, 25 bp, Homo sapien
ccagccgtgggattcatacaaggga

SEQ ID NO: 5419463 - DNA, 25 bp, Homo sapien
tgaagatgccgatttacagaaaaac

SEQ ID NO: 5419464 - DNA, 25 bp, Homo sapien
tgggattcatacaagggacacactg

SEQ ID NO: 5419465 - DNA, 25 bp, Homo sapien
tccaatgattgtggactcatctggt

SEQ ID NO: 5419466 - DNA, 25 bp, Homo sapien
gctttggtcaatggctctttaatct

SEQ ID NO: 5419467 - DNA, 25 bp, Homo sapien
ttctttgtgtagctgtggaaactcc

SEQ ID NO: 5419468 - DNA, 25 bp, Homo sapien
accggcttgcatttgctttggtcaa

SEQ ID NO: 5419469 - DNA, 25 bp, Homo sapien
gaagttctgtggaggtgaatctgct

SEQ ID NO: 5419470 - DNA, 25 bp, Homo sapien
acgaggtgggtgggattgtatcctg

SEQ ID NO: 5419471 - DNA, 25 bp, Homo sapien
ctagaatgtcacacgaggtgggtgg

SEQ ID NO: 5419472 - DNA, 25 bp, Homo sapien
gatgatttctaagaagagtagcagc

SEQ ID NO: 5419473 - DNA, 25 bp, Homo sapien
ggtgatggcattggacacaagcaga

SEQ ID NO: 5419474 - DNA, 25 bp, Homo sapien
ctagacttaggagagacccgaggta

SEQ ID NO: 5419475 - DNA, 25 bp, Homo sapien
ccacagtgactggaacggaagggaa

SEQ ID NO: 5419476 - DNA, 25 bp, Homo sapien
acccgaggtaggaaagctcgcccag

SEQ ID NO: 5419477 - DNA, 25 bp, Homo sapien
gaagcctgggcatttaggccacaga

SEQ ID NO: 5419478 - DNA, 25 bp, Homo sapien
ggaagcctgggcatttaggccacag

SEQ ID NO: 5419479 - DNA, 25 bp, Homo sapien
gtaggatgttagcttaagtggaaga

SEQ ID NO: 5419480 - DNA, 25 bp, Homo sapien
tcactagcagaaatgaggtaggatg

SEQ ID NO: 5419481 - DNA, 25 bp, Homo sapien
gatgttagcttaagtggaagataaa

SEQ ID NO: 5419482 - DNA, 25 bp, Homo sapien
atagtcacatcactagcagaaatga

SEQ ID NO: 5419483 - DNA, 25 bp, Homo sapien
cgcaactctgcgtcttgggctcatt

SEQ ID NO: 5419484 - DNA, 25 bp, Homo sapien
caacagtaggaagactgtggtcctc

SEQ ID NO: 5419485 - DNA, 25 bp, Homo sapien
cagtaggaagactgtggtcctccat

SEQ ID NO: 5419486 - DNA, 25 bp, Homo sapien
tccttttacttcgccatctcctcct

SEQ ID NO: 5419487 - DNA, 25 bp, Homo sapien
tagctgagccataaagcctgaagtt

SEQ ID NO: 5419488 - DNA, 25 bp, Homo sapien
aggatcctgaaacgagcttgctgca

SEQ ID NO: 5419489 - DNA, 25 bp, Homo sapien
tgctgttttcccagagtggtgacat

SEQ ID NO: 5419490 - DNA, 25 bp, Homo sapien
gagagtagacgccactgagcaaaca

SEQ ID NO: 5419491 - DNA, 25 bp, Homo sapien
tatagactcaaagcatcactgattt

SEQ ID NO: 5419492 - DNA, 25 bp, Homo sapien
gggtaagaatgcatcccatagtcca

SEQ ID NO: 5419493 - DNA, 25 bp, Homo sapien
gttccctgtctctaagtgctcagaa

SEQ ID NO: 5419494 - DNA, 25 bp, Homo sapien
aaaggtactcttcacccatgataca

SEQ ID NO: 5419495 - DNA, 25 bp, Homo sapien
aagcatcgatcacatcattaatcac

SEQ ID NO: 5419496 - DNA, 25 bp, Homo sapien
ctgaagcaagcatcgatcacatcat

SEQ ID NO: 5419497 - DNA, 25 bp, Homo sapien
cttgtgaatagccacaaatcaagtt

SEQ ID NO: 5419498 - DNA, 25 bp, Homo sapien
gaagcaagcatcgatcacatcatta

SEQ ID NO: 5419499 - DNA, 25 bp, Homo sapien
tcatacagttcaggaggagagtctg

SEQ ID NO: 5419500 - DNA, 25 bp, Homo sapien
ggcccagacacttgcagatgcaaaa

SEQ ID NO: 5419501 - DNA, 25 bp, Homo sapien
gaaggcccagacacttgcagatgca

SEQ ID NO: 5419502 - DNA, 25 bp, Homo sapien
aaatagatttcatacagttcaggag

SEQ ID NO: 5419503 - DNA, 25 bp, Homo sapien
aaagacaaacagaataaaagggctg

SEQ ID NO: 5419504 - DNA, 25 bp, Homo sapien
ctcctccgccttcttcaataaagct

SEQ ID NO: 5419505 - DNA, 25 bp, Homo sapien
cctccgccttcttcaataaagctag

SEQ ID NO: 5419506 - DNA, 25 bp, Homo sapien
tccgccttcttcaataaagctagag

SEQ ID NO: 5419507 - DNA, 25 bp, Homo sapien
ccgccttcttcaataaagctagaga

SEQ ID NO: 5419508 - DNA, 25 bp, Homo sapien
gcaactctgcttggggatccctcca

SEQ ID NO: 5419509 - DNA, 25 bp, Homo sapien
gggatccctccagcaggtaagacag

SEQ ID NO: 5419510 - DNA, 25 bp, Homo sapien
ccagcaggtaagacaggaataggga

SEQ ID NO: 5419511 - DNA, 25 bp, Homo sapien
tggcatcagcaactctgcttgggga

SEQ ID NO: 5419512 - DNA, 25 bp, Homo sapien
tacccaacttaatcttctcaacaac

SEQ ID NO: 5419513 - DNA, 25 bp, Homo sapien
ttacccaacttaatcttctcaacaa

SEQ ID NO: 5419514 - DNA, 25 bp, Homo sapien
cttacccaacttaatcttctcaaca

SEQ ID NO: 5419515 - DNA, 25 bp, Homo sapien
acccaacttaatcttctcaacaact

SEQ ID NO: 5419516 - DNA, 25 bp, Homo sapien
ttatattggccacattcacatcttt

SEQ ID NO: 5419517 - DNA, 25 bp, Homo sapien
gaagtaatgcttgtcttctgcaact

SEQ ID NO: 5419518 - DNA, 25 bp, Homo sapien
gcaactactccttgtgtgctaatta

SEQ ID NO: 5419519 - DNA, 25 bp, Homo sapien
ggggtcactgcaaagctaatggctc

SEQ ID NO: 5419520 - DNA, 25 bp, Homo sapien
tggcgctacgctactcctataagta

SEQ ID NO: 5419521 - DNA, 25 bp, Homo sapien
tcaagaggaggcgttggatgagccc

SEQ ID NO: 5419522 - DNA, 25 bp, Homo sapien
tacatcccataatcacaactagctg

SEQ ID NO: 5419523 - DNA, 25 bp, Homo sapien
ggatgagcccttcccaaatacatcc

SEQ ID NO: 5419524 - DNA, 25 bp, Homo sapien
cgtctcctgtgccttccttgaacat

SEQ ID NO: 5419525 - DNA, 25 bp, Homo sapien
caaggtagatcctgaaaaccatttt

SEQ ID NO: 5419526 - DNA, 25 bp, Homo sapien
gatcctgaaaaccattttcatcaag

SEQ ID NO: 5419527 - DNA, 25 bp, Homo sapien
ggtagatcctgaaaaccattttcat

SEQ ID NO: 5419528 - DNA, 25 bp, Homo sapien
tcaaggtagatcctgaaaaccattt

SEQ ID NO: 5419529 - DNA, 25 bp, Homo sapien
ggcctgtggtttagcacaacccctg

SEQ ID NO: 5419530 - DNA, 25 bp, Homo sapien
aggcctgtggtttagcacaacccct

SEQ ID NO: 5419531 - DNA, 25 bp, Homo sapien
gcctgtggtttagcacaacccctga

SEQ ID NO: 5419532 - DNA, 25 bp, Homo sapien
cctgtggtttagcacaacccctgag

SEQ ID NO: 5419533 - DNA, 25 bp, Homo sapien
tgataccagctgaaggaatgacact

SEQ ID NO: 5419534 - DNA, 25 bp, Homo sapien
gaaggaatgacactcgctcatccat

SEQ ID NO: 5419535 - DNA, 25 bp, Homo sapien
agatcccggggtaactgcagctcct

SEQ ID NO: 5419536 - DNA, 25 bp, Homo sapien
ctggtgcattagtagaagaaacagt

SEQ ID NO: 5419537 - DNA, 25 bp, Homo sapien
tgaactggtgcattagtagaagaaa

SEQ ID NO: 5419538 - DNA, 25 bp, Homo sapien
gagcaagtgacgactctagaacttt

SEQ ID NO: 5419539 - DNA, 25 bp, Homo sapien
gtctactgtatattacagggaacac

SEQ ID NO: 5419540 - DNA, 25 bp, Homo sapien
tgagtagttactgtagagatagcag

SEQ ID NO: 5419541 - DNA, 25 bp, Homo sapien
ccttgatgaacttaacagctagcta

SEQ ID NO: 5419542 - DNA, 25 bp, Homo sapien
gctaagaaagctatgcacccataaa

SEQ ID NO: 5419543 - DNA, 25 bp, Homo sapien
ctgcagacctctcagtgcctggcac

SEQ ID NO: 5419544 - DNA, 25 bp, Homo sapien
cacattgtggggtgaacagtggcac

SEQ ID NO: 5419545 - DNA, 25 bp, Homo sapien
tggcacttggtgaagacttcactca

SEQ ID NO: 5419546 - DNA, 25 bp, Homo sapien
cgccatgtgttctgcagacctctca

SEQ ID NO: 5419547 - DNA, 25 bp, Homo sapien
aggcctgctggtgacaaaatcggtc

SEQ ID NO: 5419548 - DNA, 25 bp, Homo sapien
ttttaagccggtctgaaaagcgcaa

SEQ ID NO: 5419549 - DNA, 25 bp, Homo sapien
cgcgcacccactggcctgcgcccac

SEQ ID NO: 5419550 - DNA, 25 bp, Homo sapien
cctgctggtgacaaaatcggtcagc

SEQ ID NO: 5419551 - DNA, 25 bp, Homo sapien
gaagaaacaagtcccagagaaagtc

SEQ ID NO: 5419552 - DNA, 25 bp, Homo sapien
caggctgcgagcagagttctgcaat

SEQ ID NO: 5419553 - DNA, 25 bp, Homo sapien
ttctgcaatggaaggatgtaccacc

SEQ ID NO: 5419554 - DNA, 25 bp, Homo sapien
ctaacggttcttgataatgcttgga

SEQ ID NO: 5419555 - DNA, 25 bp, Homo sapien
tctcccatgtgttctttgatgcctt

SEQ ID NO: 5419556 - DNA, 25 bp, Homo sapien
gtgttctttgatgccttaaattcct

SEQ ID NO: 5419557 - DNA, 25 bp, Homo sapien
attggtagtctcccatgtgttcttt

SEQ ID NO: 5419558 - DNA, 25 bp, Homo sapien
ttggtagtctcccatgtgttctttg

SEQ ID NO: 5419559 - DNA, 25 bp, Homo sapien
gaccaaaaggctgtgtgcaaactta

SEQ ID NO: 5419560 - DNA, 25 bp, Homo sapien
gctgttcatagagatgagaccaaaa

SEQ ID NO: 5419561 - DNA, 25 bp, Homo sapien
gaagaatctataccctgcctttggg

SEQ ID NO: 5419562 - DNA, 25 bp, Homo sapien
cattgtctggtgtccactcaaagaa

SEQ ID NO: 5419563 - DNA, 25 bp, Homo sapien
tttccagcactctcttgctagggtc

SEQ ID NO: 5419564 - DNA, 25 bp, Homo sapien
cacaagaccaaagcggagaggttgt

SEQ ID NO: 5419565 - DNA, 25 bp, Homo sapien
caaagcggagaggttgtcttttcct

SEQ ID NO: 5419566 - DNA, 25 bp, Homo sapien
tcagtgatgtgaaagcacaagacca

SEQ ID NO: 5419567 - DNA, 25 bp, Homo sapien
gggtgacacttaactcaaggccaac

SEQ ID NO: 5419568 - DNA, 25 bp, Homo sapien
aaatacctaatgatgccctgagact

SEQ ID NO: 5419569 - DNA, 25 bp, Homo sapien
cttcccatggtaggaacaaagggtg

SEQ ID NO: 5419570 - DNA, 25 bp, Homo sapien
atacctaatgatgccctgagactgg

SEQ ID NO: 5419571 - DNA, 25 bp, Homo sapien
acaagaggtgctcttcaaactcttc

SEQ ID NO: 5419572 - DNA, 25 bp, Homo sapien
tcatgctgaggtgacaagaggtgct

SEQ ID NO: 5419573 - DNA, 25 bp, Homo sapien
gtcattctcacatgagctctctctc

SEQ ID NO: 5419574 - DNA, 25 bp, Homo sapien
gctctgaggctgagctttctgtcat

SEQ ID NO: 5419575 - DNA, 25 bp, Homo sapien
caaaacacaagtttcgaaggcaatt

SEQ ID NO: 5419576 - DNA, 25 bp, Homo sapien
ggcaattctggttcatgattaggtc

SEQ ID NO: 5419577 - DNA, 25 bp, Homo sapien
agcccaggaacgctgagggccgaca

SEQ ID NO: 5419578 - DNA, 25 bp, Homo sapien
gctgagggccgacatcattcactcc

SEQ ID NO: 5419579 - DNA, 25 bp, Homo sapien
tacagttcacagatggaataatcca

SEQ ID NO: 5419580 - DNA, 25 bp, Homo sapien
gaactcttcatttgcaatatcatac

SEQ ID NO: 5419581 - DNA, 25 bp, Homo sapien
gttaaaccaagtctgaactcttcat

SEQ ID NO: 5419582 - DNA, 25 bp, Homo sapien
tttgcaagatcgtcaagagttaaac

SEQ ID NO: 5419583 - DNA, 25 bp, Homo sapien
tattgccttagtgcagctcaaggct

SEQ ID NO: 5419584 - DNA, 25 bp, Homo sapien
ctgcccgacatgtgtaatttgccat

SEQ ID NO: 5419585 - DNA, 25 bp, Homo sapien
tgccatgtagtatattgccttagtg

SEQ ID NO: 5419586 - DNA, 25 bp, Homo sapien
ccctgcccgacatgtgtaatttgcc

SEQ ID NO: 5419587 - DNA, 25 bp, Homo sapien
ctgctgaatccacagttcctcttag

SEQ ID NO: 5419588 - DNA, 25 bp, Homo sapien
tctcgtaattgagggcgcttgtttt

SEQ ID NO: 5419589 - DNA, 25 bp, Homo sapien
tttcccctttgccaatgaggagagc

SEQ ID NO: 5419590 - DNA, 25 bp, Homo sapien
gaatccacagttcctcttagaacct

SEQ ID NO: 5419591 - DNA, 25 bp, Homo sapien
ttctggacacatcagtagctttagt

SEQ ID NO: 5419592 - DNA, 25 bp, Homo sapien
agctggcagggtgtgtagctattct

SEQ ID NO: 5419593 - DNA, 25 bp, Homo sapien
gacacatcagtagctttagtatgtc

SEQ ID NO: 5419594 - DNA, 25 bp, Homo sapien
tggaaaaatgcagcttgctctgagt

SEQ ID NO: 5419595 - DNA, 25 bp, Homo sapien
caggttccttccaagtgctgctttt

SEQ ID NO: 5419596 - DNA, 25 bp, Homo sapien
tgcaggttccttccaagtgctgctt

SEQ ID NO: 5419597 - DNA, 25 bp, Homo sapien
gttccttccaagtgctgctttttcc

SEQ ID NO: 5419598 - DNA, 25 bp, Homo sapien
ttttccttgactgttgtaattatat

SEQ ID NO: 5419599 - DNA, 25 bp, Homo sapien
caagggccttagtcatggcggcaac

SEQ ID NO: 5419600 - DNA, 25 bp, Homo sapien
ctgaaggcggccctgtagaggctgg

SEQ ID NO: 5419601 - DNA, 25 bp, Homo sapien
tggcaagggccttagtcatggcggc

SEQ ID NO: 5419602 - DNA, 25 bp, Homo sapien
ggccttagtcatggcggcaacaatg

SEQ ID NO: 5419603 - DNA, 25 bp, Homo sapien
gaagacagtggtgtctttcaccaag

SEQ ID NO: 5419604 - DNA, 25 bp, Homo sapien
gagagagacgtaccaaggaggcaaa

SEQ ID NO: 5419605 - DNA, 25 bp, Homo sapien
ttctctgctgtaatcggcctgtgga

SEQ ID NO: 5419606 - DNA, 25 bp, Homo sapien
gtctttcaccaagataaggaacaca

SEQ ID NO: 5419607 - DNA, 25 bp, Homo sapien
ttatttgtaaagaaggattacatca

SEQ ID NO: 5419608 - DNA, 25 bp, Homo sapien
ttccagacgcccagggcgtaactac

SEQ ID NO: 5419609 - DNA, 25 bp, Homo sapien
gggcgtaactactgatccaaggact

SEQ ID NO: 5419610 - DNA, 25 bp, Homo sapien
gcccagggcgtaactactgatccaa

SEQ ID NO: 5419611 - DNA, 25 bp, Homo sapien
gacgcccagggcgtaactactgatc

SEQ ID NO: 5419612 - DNA, 25 bp, Homo sapien
tcccaggtcgttcctgagtagcctg

SEQ ID NO: 5419613 - DNA, 25 bp, Homo sapien
cattgtttaccaacagggctccctg

SEQ ID NO: 5419614 - DNA, 25 bp, Homo sapien
gccacttcatgcacaacattttcag

SEQ ID NO: 5419615 - DNA, 25 bp, Homo sapien
aacagacacttcattggacagccaa

SEQ ID NO: 5419616 - DNA, 25 bp, Homo sapien
cctccattggaaggcgtctgttctg

SEQ ID NO: 5419617 - DNA, 25 bp, Homo sapien
gggccagtgcatcctctgtagatag

SEQ ID NO: 5419618 - DNA, 25 bp, Homo sapien
tgcaagaccccagaaaagcagtttt

SEQ ID NO: 5419619 - DNA, 25 bp, Homo sapien
ggagccggttgtggaagtggcccca

SEQ ID NO: 5419620 - DNA, 25 bp, Homo sapien
gctcctctgattgcacctgctttca

SEQ ID NO: 5419621 - DNA, 25 bp, Homo sapien
ggctcctctgattgcacctgctttc

SEQ ID NO: 5419622 - DNA, 25 bp, Homo sapien
aatcgctgtgacttatggctcctct

SEQ ID NO: 5419623 - DNA, 25 bp, Homo sapien
gcagaatcgctgtgacttatggctc

SEQ ID NO: 5419624 - DNA, 25 bp, Homo sapien
tacttgtgagcattaatggtgactg

SEQ ID NO: 5419625 - DNA, 25 bp, Homo sapien
gtgactgattgcaccctgctcggga

SEQ ID NO: 5419626 - DNA, 25 bp, Homo sapien
tttatcatccatccataagtagctg

SEQ ID NO: 5419627 - DNA, 25 bp, Homo sapien
actcatggagaaggaactgcttcgt

SEQ ID NO: 5419628 - DNA, 25 bp, Homo sapien
gaaccgaaattcagctgccaacctc

SEQ ID NO: 5419629 - DNA, 25 bp, Homo sapien
tgtagagagccacctcttaatggct

SEQ ID NO: 5419630 - DNA, 25 bp, Homo sapien
gctagcctttaagctgctctgtgaa

SEQ ID NO: 5419631 - DNA, 25 bp, Homo sapien
cagaaattgttgtcagggagactga

SEQ ID NO: 5419632 - DNA, 25 bp, Homo sapien
agcatcatataatccacacccattg

SEQ ID NO: 5419633 - DNA, 25 bp, Homo sapien
tctgcagaagcaattagcacttctt

SEQ ID NO: 5419634 - DNA, 25 bp, Homo sapien
ttgaagttagcatcatataatccac

SEQ ID NO: 5419635 - DNA, 25 bp, Homo sapien
caggaattggttgcttgaatgccat

SEQ ID NO: 5419636 - DNA, 25 bp, Homo sapien
ggatgacatctatggcagccctggc

SEQ ID NO: 5419637 - DNA, 25 bp, Homo sapien
tcagggtgggtccatccttcagccg

SEQ ID NO: 5419638 - DNA, 25 bp, Homo sapien
ttcagggtgggtccatccttcagcc

SEQ ID NO: 5419639 - DNA, 25 bp, Homo sapien
gggtgggtccatccttcagccgctc

SEQ ID NO: 5419640 - DNA, 25 bp, Homo sapien
caagaccactgcataatcatgatca

SEQ ID NO: 5419641 - DNA, 25 bp, Homo sapien
catgatcatccataacaccctctgg

SEQ ID NO: 5419642 - DNA, 25 bp, Homo sapien
ctgcctttcaagaccactgcataat

SEQ ID NO: 5419643 - DNA, 25 bp, Homo sapien
aatcatgatcatccataacaccctc

SEQ ID NO: 5419644 - DNA, 25 bp, Homo sapien
aggtataaagcaaccgtggaaggag

SEQ ID NO: 5419645 - DNA, 25 bp, Homo sapien
ggtataaagcaaccgtggaaggagc

SEQ ID NO: 5419646 - DNA, 25 bp, Homo sapien
taagaaaagaggaccaggcactgga

SEQ ID NO: 5419647 - DNA, 25 bp, Homo sapien
gcactggagtagatgaaggcatggc

SEQ ID NO: 5419648 - DNA, 25 bp, Homo sapien
cagatccaggtaggacgcctgcagg

SEQ ID NO: 5419649 - DNA, 25 bp, Homo sapien
cagggagcccacacgaagtgctttc

SEQ ID NO: 5419650 - DNA, 25 bp, Homo sapien
ggacttcagagactgagtccttgtt

SEQ ID NO: 5419651 - DNA, 25 bp, Homo sapien
catccgcctactccacatggaagcc

SEQ ID NO: 5419652 - DNA, 25 bp, Homo sapien
ctcggacccttcaacaggagggact

SEQ ID NO: 5419653 - DNA, 25 bp, Homo sapien
gagactgagtccttgttcaggccca

SEQ ID NO: 5419654 - DNA, 25 bp, Homo sapien
gctgaaggttaagaactggactgga

SEQ ID NO: 5419655 - DNA, 25 bp, Homo sapien
tctgaaggccaaaaggcagcccaga

SEQ ID NO: 5419656 - DNA, 25 bp, Homo sapien
cagacagtcctttgtatgagctgaa

SEQ ID NO: 5419657 - DNA, 25 bp, Homo sapien
caataaacggcatcacagaaggcaa

SEQ ID NO: 5419658 - DNA, 25 bp, Homo sapien
tgctgaaattccacttacggtttgg

SEQ ID NO: 5419659 - DNA, 25 bp, Homo sapien
caaatgctacagtgcacctctccca

SEQ ID NO: 5419660 - DNA, 25 bp, Homo sapien
tgtattcttgccacgctgctggctt

SEQ ID NO: 5419661 - DNA, 25 bp, Homo sapien
tggcttcattagtctggagctgaat

SEQ ID NO: 5419662 - DNA, 25 bp, Homo sapien
aagctgttgctcacggcaattacgc

SEQ ID NO: 5419663 - DNA, 25 bp, Homo sapien
tcacggcaattacgcctgctgtctt

SEQ ID NO: 5419664 - DNA, 25 bp, Homo sapien
tgttgctcacggcaattacgcctgc

SEQ ID NO: 5419665 - DNA, 25 bp, Homo sapien
gcaattacgcctgctgtcttccttt

SEQ ID NO: 5419666 - DNA, 25 bp, Homo sapien
ttatagaatctgttgagattctgca

SEQ ID NO: 5419667 - DNA, 25 bp, Homo sapien
ggtgtgtttgagggtccgggctgtg

SEQ ID NO: 5419668 - DNA, 25 bp, Homo sapien
gtatcttctgacgagcccctctggg

SEQ ID NO: 5419669 - DNA, 25 bp, Homo sapien
tgtgtttgagggtccgggctgtgca

SEQ ID NO: 5419670 - DNA, 25 bp, Homo sapien
cgtatcttctgacgagcccctctgg

SEQ ID NO: 5419671 - DNA, 25 bp, Homo sapien
agtgccccgacgctgctggaaaaac

SEQ ID NO: 5419672 - DNA, 25 bp, Homo sapien
ctaaacaagaataaccagagcactg

SEQ ID NO: 5419673 - DNA, 25 bp, Homo sapien
taaccagagcactggacgctgagcg

SEQ ID NO: 5419674 - DNA, 25 bp, Homo sapien
acgctgagcgcctgaggtggaagaa

SEQ ID NO: 5419675 - DNA, 25 bp, Homo sapien
ctgggaagctaacggagcagaagac

SEQ ID NO: 5419676 - DNA, 25 bp, Homo sapien
aagctaacggagcagaagacagatc

SEQ ID NO: 5419677 - DNA, 25 bp, Homo sapien
tgggaagctaacggagcagaagaca

SEQ ID NO: 5419678 - DNA, 25 bp, Homo sapien
ggaagctaacggagcagaagacaga

SEQ ID NO: 5419679 - DNA, 25 bp, Homo sapien
tggaagactgtgaaaggtaaaaaga

SEQ ID NO: 5419680 - DNA, 25 bp, Homo sapien
ttcatggaagactgtgaaaggtaaa

SEQ ID NO: 5419681 - DNA, 25 bp, Homo sapien
cggggttttatattcatggaagact

SEQ ID NO: 5419682 - DNA, 25 bp, Homo sapien
cagaccccggggttttatattcatg

SEQ ID NO: 5419683 - DNA, 25 bp, Homo sapien
ctgacttcacatggatacgcaatca

SEQ ID NO: 5419684 - DNA, 25 bp, Homo sapien
aatcccgaatagtttaaacaatatg

SEQ ID NO: 5419685 - DNA, 25 bp, Homo sapien
catactgtgagtaagcagtcacaca

SEQ ID NO: 5419686 - DNA, 25 bp, Homo sapien
caaaagacaaatactctgacactct

SEQ ID NO: 5419687 - DNA, 25 bp, Homo sapien
gaatgcgatgagttggcgttgctcc

SEQ ID NO: 5419688 - DNA, 25 bp, Homo sapien
gagttggcgttgctcctgagtcacc

SEQ ID NO: 5419689 - DNA, 25 bp, Homo sapien
gcgttgctcctgagtcacctggacc

SEQ ID NO: 5419690 - DNA, 25 bp, Homo sapien
ctacagtattctgacgaatgcgatg

SEQ ID NO: 5419691 - DNA, 25 bp, Homo sapien
ccaagtctggagttatgcagttctt

SEQ ID NO: 5419692 - DNA, 25 bp, Homo sapien
accaagtctggagttatgcagttct

SEQ ID NO: 5419693 - DNA, 25 bp, Homo sapien
tctccacatcgtattcatctccagt

SEQ ID NO: 5419694 - DNA, 25 bp, Homo sapien
actttactgtcagtggtggttctgg

SEQ ID NO: 5419695 - DNA, 25 bp, Homo sapien
gaaggcatcaggctgaccatcaatg

SEQ ID NO: 5419696 - DNA, 25 bp, Homo sapien
tccaaatagtaggtgaaggcatcag

SEQ ID NO: 5419697 - DNA, 25 bp, Homo sapien
tgcaggccaggacgacgtgctgaag

SEQ ID NO: 5419698 - DNA, 25 bp, Homo sapien
ggccaggacgacgtgctgaagcata

SEQ ID NO: 5419699 - DNA, 25 bp, Homo sapien
gacgtgctgaagcataatttgtcag

SEQ ID NO: 5419700 - DNA, 25 bp, Homo sapien
ggacgacgtgctgaagcataatttg

SEQ ID NO: 5419701 - DNA, 25 bp, Homo sapien
taaggtgcacggacattcatatccc

SEQ ID NO: 5419702 - DNA, 25 bp, Homo sapien
ggacattcatatccccttgcataca

SEQ ID NO: 5419703 - DNA, 25 bp, Homo sapien
gtgcataaggtgcacggacattcat

SEQ ID NO: 5419704 - DNA, 25 bp, Homo sapien
gcacggacattcatatccccttgca

SEQ ID NO: 5419705 - DNA, 25 bp, Homo sapien
tatcatcctggatttggacgtgtac

SEQ ID NO: 5419706 - DNA, 25 bp, Homo sapien
catcctggatttggacgtgtactta

SEQ ID NO: 5419707 - DNA, 25 bp, Homo sapien
tgaactatcatcctggatttggacg

SEQ ID NO: 5419708 - DNA, 25 bp, Homo sapien
ggatttggacgtgtacttattttca

SEQ ID NO: 5419709 - DNA, 25 bp, Homo sapien
gcatctccatttggcagtggatgat

SEQ ID NO: 5419710 - DNA, 25 bp, Homo sapien
atctccatttggcagtggatgatct

SEQ ID NO: 5419711 - DNA, 25 bp, Homo sapien
cttcctgtgaggttcccatatgcta

SEQ ID NO: 5419712 - DNA, 25 bp, Homo sapien
tcctgtgaggttcccatatgctaag

SEQ ID NO: 5419713 - DNA, 25 bp, Homo sapien
gggtgaggttctggatcgtggggca

SEQ ID NO: 5419714 - DNA, 25 bp, Homo sapien
catctactttaatccaggggtgagg

SEQ ID NO: 5419715 - DNA, 25 bp, Homo sapien
gaggttctggatcgtggggcaggaa

SEQ ID NO: 5419716 - DNA, 25 bp, Homo sapien
atcgtggggcaggaatggaggcttc

SEQ ID NO: 5419717 - DNA, 25 bp, Homo sapien
tccttaagcctcgttcttaatgagg

SEQ ID NO: 5419718 - DNA, 25 bp, Homo sapien
ttttttgtggtttcagagatatctt

SEQ ID NO: 5419719 - DNA, 25 bp, Homo sapien
tagcatgtctaactgcatccgtgaa

SEQ ID NO: 5419720 - DNA, 25 bp, Homo sapien
tcccagatgtctcaactgggccaca

SEQ ID NO: 5419721 - DNA, 25 bp, Homo sapien
tggccactccacagaataagataga

SEQ ID NO: 5419722 - DNA, 25 bp, Homo sapien
catgacttcgcactccaatagggag

SEQ ID NO: 5419723 - DNA, 25 bp, Homo sapien
ggagggctgtgtcgtttagaactaa

SEQ ID NO: 5419724 - DNA, 25 bp, Homo sapien
aataagatagacagtggcccaatcg

SEQ ID NO: 5419725 - DNA, 25 bp, Homo sapien
tcacgagtgatggaattgccatagc

SEQ ID NO: 5419726 - DNA, 25 bp, Homo sapien
tagttgaggaatccgaattgttcca

SEQ ID NO: 5419727 - DNA, 25 bp, Homo sapien
gaattatctgtgtacttcacgagtg

SEQ ID NO: 5419728 - DNA, 25 bp, Homo sapien
tgccatagcaagaggcgtggtttcc

SEQ ID NO: 5419729 - DNA, 25 bp, Homo sapien
gccgatcattgttcaagggcaggtt

SEQ ID NO: 5419730 - DNA, 25 bp, Homo sapien
cacagaggacaccacttgaaggact

SEQ ID NO: 5419731 - DNA, 25 bp, Homo sapien
catgtagctttcgtgcacagaggac

SEQ ID NO: 5419732 - DNA, 25 bp, Homo sapien
tttgcactgagacatgaatcatcag

SEQ ID NO: 5419733 - DNA, 25 bp, Homo sapien
cattcagggagatctgccatgccca

SEQ ID NO: 5419734 - DNA, 25 bp, Homo sapien
caaaggtgcttattagactgagtga

SEQ ID NO: 5419735 - DNA, 25 bp, Homo sapien
gctgagtgtagaatcagaccctgta

SEQ ID NO: 5419736 - DNA, 25 bp, Homo sapien
cttgttcaataaagcaaactccttc

SEQ ID NO: 5419737 - DNA, 25 bp, Homo sapien
aggaagaccattctgccagcaaagc

SEQ ID NO: 5419738 - DNA, 25 bp, Homo sapien
aaagagggtgcaatgagacgtttcc

SEQ ID NO: 5419739 - DNA, 25 bp, Homo sapien
cctgtcaattagcagattacaaaac

SEQ ID NO: 5419740 - DNA, 25 bp, Homo sapien
agccgtagtgtttggaatgggtcca

SEQ ID NO: 5419741 - DNA, 25 bp, Homo sapien
tgcagctggagaagcgtacagatgt

SEQ ID NO: 5419742 - DNA, 25 bp, Homo sapien
cacgacaagcacaacagtgggctgc

SEQ ID NO: 5419743 - DNA, 25 bp, Homo sapien
agaagcgtacagatgtctagaggca

SEQ ID NO: 5419744 - DNA, 25 bp, Homo sapien
gaggagccacaaggtgaagtgtgtc

SEQ ID NO: 5419745 - DNA, 25 bp, Homo sapien
cttgaggtagttcctcctgaaggtg

SEQ ID NO: 5419746 - DNA, 25 bp, Homo sapien
tctcagctgaaatcgtgtagagagg

SEQ ID NO: 5419747 - DNA, 25 bp, Homo sapien
aatcgtgtagagaggagacattgag

SEQ ID NO: 5419748 - DNA, 25 bp, Homo sapien
gggtctctcagctgaaatcgtgtag

SEQ ID NO: 5419749 - DNA, 25 bp, Homo sapien
gctgaaatcgtgtagagaggagaca

SEQ ID NO: 5419750 - DNA, 25 bp, Homo sapien
ctcctgatgcctccgcaatgttgct

SEQ ID NO: 5419751 - DNA, 25 bp, Homo sapien
gcaatgttgctaccccctcaattag

SEQ ID NO: 5419752 - DNA, 25 bp, Homo sapien
tgctcctgatgcctccgcaatgttg

SEQ ID NO: 5419753 - DNA, 25 bp, Homo sapien
tgatgcctccgcaatgttgctaccc

SEQ ID NO: 5419754 - DNA, 25 bp, Homo sapien
gaggagacttccttaccggatgtca

SEQ ID NO: 5419755 - DNA, 25 bp, Homo sapien
tcaacccatcatgtgcagtagccta

SEQ ID NO: 5419756 - DNA, 25 bp, Homo sapien
cagagagggcattataatcagcagg

SEQ ID NO: 5419757 - DNA, 25 bp, Homo sapien
tcagcagggaaacgttggaccattc

SEQ ID NO: 5419758 - DNA, 25 bp, Homo sapien
tgagagactatgaggactaccacac

SEQ ID NO: 5419759 - DNA, 25 bp, Homo sapien
tatgtgagaagacccctacagtgag

SEQ ID NO: 5419760 - DNA, 25 bp, Homo sapien
tgactgagagatagaaggtggaacc

SEQ ID NO: 5419761 - DNA, 25 bp, Homo sapien
taagaatatcctgttggccagtgat

SEQ ID NO: 5419762 - DNA, 25 bp, Homo sapien
ggacccttttctataggatcaagtc

SEQ ID NO: 5419763 - DNA, 25 bp, Homo sapien
gattctcttaaggagggcactacct

SEQ ID NO: 5419764 - DNA, 25 bp, Homo sapien
caactctatggtgttttacgagaga

SEQ ID NO: 5419765 - DNA, 25 bp, Homo sapien
gaatgctcgcttacctcctgctgta

SEQ ID NO: 5419766 - DNA, 25 bp, Homo sapien
aaaaagactaggaatcactgacaaa

SEQ ID NO: 5419767 - DNA, 25 bp, Homo sapien
tagactccagatttggccaagcgtg

SEQ ID NO: 5419768 - DNA, 25 bp, Homo sapien
tgcaatttggcagcccctcttaaaa

SEQ ID NO: 5419769 - DNA, 25 bp, Homo sapien
aacaataaaccctggactagaatga

SEQ ID NO: 5419770 - DNA, 25 bp, Homo sapien
cgcaaatctgtctgaacaaggcaag

SEQ ID NO: 5419771 - DNA, 25 bp, Homo sapien
ttacattatacgcaaatctgtctga

SEQ ID NO: 5419772 - DNA, 25 bp, Homo sapien
ctgaacaaggcaaggggccaatgtt

SEQ ID NO: 5419773 - DNA, 25 bp, Homo sapien
tatacgcaaatctgtctgaacaagg

SEQ ID NO: 5419774 - DNA, 25 bp, Homo sapien
gcatggacacctatcgattcaaagt

SEQ ID NO: 5419775 - DNA, 25 bp, Homo sapien
tatgaatcaatgtgggctaagggct

SEQ ID NO: 5419776 - DNA, 25 bp, Homo sapien
tattacagacagagtcagactgggc

SEQ ID NO: 5419777 - DNA, 25 bp, Homo sapien
gactttctgcggtaggtgtagctcc

SEQ ID NO: 5419778 - DNA, 25 bp, Homo sapien
tatagctcttacaagaccagcaatg

SEQ ID NO: 5419779 - DNA, 25 bp, Homo sapien
gcccaacttcgttattgaaagaata

SEQ ID NO: 5419780 - DNA, 25 bp, Homo sapien
tcactgctaagacgcaatacacctt

SEQ ID NO: 5419781 - DNA, 25 bp, Homo sapien
tttttggtcctccaatagtcaagaa

SEQ ID NO: 5419782 - DNA, 25 bp, Homo sapien
taaaaggtgactatccctagagttc

SEQ ID NO: 5419783 - DNA, 25 bp, Homo sapien
aaaggtgactatccctagagttcca

SEQ ID NO: 5419784 - DNA, 25 bp, Homo sapien
ggtgactatccctagagttccatgt

SEQ ID NO: 5419785 - DNA, 25 bp, Homo sapien
tgactatccctagagttccatgtta

SEQ ID NO: 5419786 - DNA, 25 bp, Homo sapien
tataaccaagttactgtcaatccaa

SEQ ID NO: 5419787 - DNA, 25 bp, Homo sapien
ggttagactaccattcgcattgtta

SEQ ID NO: 5419788 - DNA, 25 bp, Homo sapien
aaagatatctaagaacttaggaaca

SEQ ID NO: 5419789 - DNA, 25 bp, Homo sapien
caaagtaaggcatttcagtgtcatg

SEQ ID NO: 5419790 - DNA, 25 bp, Homo sapien
taatcaaagtatcatctcgcgcagc

SEQ ID NO: 5419791 - DNA, 25 bp, Homo sapien
tggcaaggtggtcacttctcataaa

SEQ ID NO: 5419792 - DNA, 25 bp, Homo sapien
gaagtattaacagttcctatccctg

SEQ ID NO: 5419793 - DNA, 25 bp, Homo sapien
gatatcttgattgctggtggcggaa

SEQ ID NO: 5419794 - DNA, 25 bp, Homo sapien
taagtcaacgctgacaggtgaggat

SEQ ID NO: 5419795 - DNA, 25 bp, Homo sapien
tcattttacgagctacccctgccag

SEQ ID NO: 5419796 - DNA, 25 bp, Homo sapien
gccagatttctcttacagaatattt

SEQ ID NO: 5419797 - DNA, 25 bp, Homo sapien
caactttaatagctcaatcatctcc

SEQ ID NO: 5419798 - DNA, 25 bp, Homo sapien
ctacccaatgagagacaggaactaa

SEQ ID NO: 5419799 - DNA, 25 bp, Homo sapien
tctgttgcagtttcatgtaggttaa

SEQ ID NO: 5419800 - DNA, 25 bp, Homo sapien
tttatacaatactgaaggccaaagt

SEQ ID NO: 5419801 - DNA, 25 bp, Homo sapien
gtatactactacagacttcataggt

SEQ ID NO: 5419802 - DNA, 25 bp, Homo sapien
tgcctctgtaattcatcacttcgag

SEQ ID NO: 5419803 - DNA, 25 bp, Homo sapien
ctgtgcctctgtaattcatcacttc

SEQ ID NO: 5419804 - DNA, 25 bp, Homo sapien
tcatcacttcgagtaaatcttttac

SEQ ID NO: 5419805 - DNA, 25 bp, Homo sapien
tgtaattcatcacttcgagtaaatc

SEQ ID NO: 5419806 - DNA, 25 bp, Homo sapien
tagactttaccacatcctggtatat

SEQ ID NO: 5419807 - DNA, 25 bp, Homo sapien
tcctggtatatgacaaatgtgttgc

SEQ ID NO: 5419808 - DNA, 25 bp, Homo sapien
tacaaacaaaagggcgttctccaga

SEQ ID NO: 5419809 - DNA, 25 bp, Homo sapien
tgccaacgcagatgagctctcagat

SEQ ID NO: 5419810 - DNA, 25 bp, Homo sapien
taggacaaacagtgctaaacggtgc

SEQ ID NO: 5419811 - DNA, 25 bp, Homo sapien
gaacagaggtatcttagcctaagca

SEQ ID NO: 5419812 - DNA, 25 bp, Homo sapien
aaagcaatggtctgaactcccttag

SEQ ID NO: 5419813 - DNA, 25 bp, Homo sapien
tagatgccataggtgttctgaacag

SEQ ID NO: 5419814 - DNA, 25 bp, Homo sapien
tacggcatgtcataccaaggcttga

SEQ ID NO: 5419815 - DNA, 25 bp, Homo sapien
cactcaggtcaataatcaacgcgct

SEQ ID NO: 5419816 - DNA, 25 bp, Homo sapien
ttctcaaagaagcaagaagctaggg

SEQ ID NO: 5419817 - DNA, 25 bp, Homo sapien
caatgtttgtggctactggtgtaca

SEQ ID NO: 5419818 - DNA, 25 bp, Homo sapien
catctaccacctgtactcttaagtg

SEQ ID NO: 5419819 - DNA, 25 bp, Homo sapien
taggtcattggtattcaaggtagaa

SEQ ID NO: 5419820 - DNA, 25 bp, Homo sapien
tattcaaggtagaatcaccactgag

SEQ ID NO: 5419821 - DNA, 25 bp, Homo sapien
taagtgtgttaggtcattggtattc

SEQ ID NO: 5419822 - DNA, 25 bp, Homo sapien
ctgccactcttcaggatcaggttct

SEQ ID NO: 5419823 - DNA, 25 bp, Homo sapien
aggttcttcttccttgatcctaata

SEQ ID NO: 5419824 - DNA, 25 bp, Homo sapien
tcaggttcttcttccttgatcctaa

SEQ ID NO: 5419825 - DNA, 25 bp, Homo sapien
actcttcaggatcaggttcttcttc

SEQ ID NO: 5419826 - DNA, 25 bp, Homo sapien
catagttgactaaaccttcccccat

SEQ ID NO: 5419827 - DNA, 25 bp, Homo sapien
aactggtgtccagaaaccaaactga

SEQ ID NO: 5419828 - DNA, 25 bp, Homo sapien
gagttcaggtagaaatctggcctgc

SEQ ID NO: 5419829 - DNA, 25 bp, Homo sapien
gaaggtgttcatcagacagtcaatg

SEQ ID NO: 5419830 - DNA, 25 bp, Homo sapien
tcatttcgggaagaacttaactgtg

SEQ ID NO: 5419831 - DNA, 25 bp, Homo sapien
ccccacccgacctatatcattctta

SEQ ID NO: 5419832 - DNA, 25 bp, Homo sapien
cacccgacctatatcattcttataa

SEQ ID NO: 5419833 - DNA, 25 bp, Homo sapien
caatggtaatggcatatatcacaat

SEQ ID NO: 5419834 - DNA, 25 bp, Homo sapien
caccccacccgacctatatcattct

SEQ ID NO: 5419835 - DNA, 25 bp, Homo sapien
ccttcagggcatcagttatttaaga

SEQ ID NO: 5419836 - DNA, 25 bp, Homo sapien
tttatggtatcaaataggccctaga

SEQ ID NO: 5419837 - DNA, 25 bp, Homo sapien
tctggtgatatcaactctccatcct

SEQ ID NO: 5419838 - DNA, 25 bp, Homo sapien
gcaggaagctcagaacgttatttaa

SEQ ID NO: 5419839 - DNA, 25 bp, Homo sapien
tggtaagggagatgtgatcatgaca

SEQ ID NO: 5419840 - DNA, 25 bp, Homo sapien
aatgtccaattcaggttggtaaggg

SEQ ID NO: 5419841 - DNA, 25 bp, Homo sapien
gagtccaggctccccttgatacatg

SEQ ID NO: 5419842 - DNA, 25 bp, Homo sapien
tcatgacagtgcctcaggagtccag

SEQ ID NO: 5419843 - DNA, 25 bp, Homo sapien
tatgcacgtaagactaaacctaacg

SEQ ID NO: 5419844 - DNA, 25 bp, Homo sapien
cagaattggtagaggtatgaaacac

SEQ ID NO: 5419845 - DNA, 25 bp, Homo sapien
gatgctcactaaagtccgagaaaaa

SEQ ID NO: 5419846 - DNA, 25 bp, Homo sapien
aatctccaatatataccaaagtagg

SEQ ID NO: 5419847 - DNA, 25 bp, Homo sapien
taatgaagagcacacatcaggtgat

SEQ ID NO: 5419848 - DNA, 25 bp, Homo sapien
gcagtttagagaacaagctgtaata

SEQ ID NO: 5419849 - DNA, 25 bp, Homo sapien
ctcttggaataaaatacggcattac

SEQ ID NO: 5419850 - DNA, 25 bp, Homo sapien
attgtccccaagaaccactaaaatg

SEQ ID NO: 5419851 - DNA, 25 bp, Homo sapien
tactgttcccactacatcagaagac

SEQ ID NO: 5419852 - DNA, 25 bp, Homo sapien
tgtatacctcaactcaacatgacta

SEQ ID NO: 5419853 - DNA, 25 bp, Homo sapien
tacactacttgtgaggtgaaagagg

SEQ ID NO: 5419854 - DNA, 25 bp, Homo sapien
ggacaaaagattaatatcccagaca

SEQ ID NO: 5419855 - DNA, 25 bp, Homo sapien
gatgcactccgatttcaaaaaattg

SEQ ID NO: 5419856 - DNA, 25 bp, Homo sapien
acatgccttgaatagcaagatgcac

SEQ ID NO: 5419857 - DNA, 25 bp, Homo sapien
gaaatgggtttctcatgtacaggat

SEQ ID NO: 5419858 - DNA, 25 bp, Homo sapien
tgtacaggatttgattgtttttccg

SEQ ID NO: 5419859 - DNA, 25 bp, Homo sapien
tcagcaatgaatctaactctgggtt

SEQ ID NO: 5419860 - DNA, 25 bp, Homo sapien
tctgcaagccccaaaactcatatat

SEQ ID NO: 5419861 - DNA, 25 bp, Homo sapien
tgcatcatcgtctcatctccgtaaa

SEQ ID NO: 5419862 - DNA, 25 bp, Homo sapien
tccaggctcttgttttcagcaatga

SEQ ID NO: 5419863 - DNA, 25 bp, Homo sapien
cacaatgcgttataatcatgccact

SEQ ID NO: 5419864 - DNA, 25 bp, Homo sapien
ggtggcgctagcctgtagttctaca

SEQ ID NO: 5419865 - DNA, 25 bp, Homo sapien
tgttacattaatgtcatgcttatca

SEQ ID NO: 5419866 - DNA, 25 bp, Homo sapien
tatcaaaagtaaagtgcaggctagg

SEQ ID NO: 5419867 - DNA, 25 bp, Homo sapien
ccagcaatccagtcccaggtacata

SEQ ID NO: 5419868 - DNA, 25 bp, Homo sapien
ggctgtaatcagaaagatgggcaat

SEQ ID NO: 5419869 - DNA, 25 bp, Homo sapien
caataataaggttggtggcgctaga

SEQ ID NO: 5419870 - DNA, 25 bp, Homo sapien
tgggactctcaacacattgctgatg

SEQ ID NO: 5419871 - DNA, 25 bp, Homo sapien
catcgaggtcattcttgagtgaaac

SEQ ID NO: 5419872 - DNA, 25 bp, Homo sapien
taaagagtgagttttacggtatgtg

SEQ ID NO: 5419873 - DNA, 25 bp, Homo sapien
tgagttttacggtatgtgagttata

SEQ ID NO: 5419874 - DNA, 25 bp, Homo sapien
tatgaccatagttacaaccagtgaa

SEQ ID NO: 5419875 - DNA, 25 bp, Homo sapien
cctggtgcaacggaaaatatttgtt

SEQ ID NO: 5419876 - DNA, 25 bp, Homo sapien
tcacttgatattgaacactggacac

SEQ ID NO: 5419877 - DNA, 25 bp, Homo sapien
ccatctgctgactggatctgtggta

SEQ ID NO: 5419878 - DNA, 25 bp, Homo sapien
tactatctatcgtaacaggcaactg

SEQ ID NO: 5419879 - DNA, 25 bp, Homo sapien
ctttcctaacattacagtgacaaat

SEQ ID NO: 5419880 - DNA, 25 bp, Homo sapien
aatgtttcatttcggtctcttggca

SEQ ID NO: 5419881 - DNA, 25 bp, Homo sapien
gtgacaaatgtttcatttcggtctc

SEQ ID NO: 5419882 - DNA, 25 bp, Homo sapien
cagtgacaaatgtttcatttcggtc

SEQ ID NO: 5419883 - DNA, 25 bp, Homo sapien
tacagctaacgcaaatgacaaatct

SEQ ID NO: 5419884 - DNA, 25 bp, Homo sapien
aatacctgtgaagcacaacgatggg

SEQ ID NO: 5419885 - DNA, 25 bp, Homo sapien
caattttctcatgtcaacaaccgga

SEQ ID NO: 5419886 - DNA, 25 bp, Homo sapien
caaccggaaaaacattaccttgcag

SEQ ID NO: 5419887 - DNA, 25 bp, Homo sapien
tggtttagaagcaagataatcctct

SEQ ID NO: 5419888 - DNA, 25 bp, Homo sapien
tctcagtacctttcttaccggacaa

SEQ ID NO: 5419889 - DNA, 25 bp, Homo sapien
caggcaaccaagacgagaactagta

SEQ ID NO: 5419890 - DNA, 25 bp, Homo sapien
tacaaccgtgacagggccggtggct

SEQ ID NO: 5419891 - DNA, 25 bp, Homo sapien
tgaacagaaggcgtaccaatccata

SEQ ID NO: 5419892 - DNA, 25 bp, Homo sapien
tgggcctcagactcacatatgtatg

SEQ ID NO: 5419893 - DNA, 25 bp, Homo sapien
tcatataacacaggcgagctcctcc

SEQ ID NO: 5419894 - DNA, 25 bp, Homo sapien
ggcactttggaactagagggataca

SEQ ID NO: 5419895 - DNA, 25 bp, Homo sapien
tcctcgtcgtcgcccggcgatggcg

SEQ ID NO: 5419896 - DNA, 25 bp, Homo sapien
cctcgtcgtcgcccggcgatggcgg

SEQ ID NO: 5419897 - DNA, 25 bp, Homo sapien
gcggccagcagagcgagcggtgacg

SEQ ID NO: 5419898 - DNA, 25 bp, Homo sapien
ggtagcggccagcagagcgagcggt

SEQ ID NO: 5419899 - DNA, 25 bp, Homo sapien
tagcggccagcagagcgagcggtga

SEQ ID NO: 5419900 - DNA, 25 bp, Homo sapien
caggtagcggccagcagagcgagcg

SEQ ID NO: 5419901 - DNA, 25 bp, Homo sapien
cactcacacgcgcacaaaaaggcgg

SEQ ID NO: 5419902 - DNA, 25 bp, Homo sapien
ctcacacgcgcacaaaaaggcggca

SEQ ID NO: 5419903 - DNA, 25 bp, Homo sapien
ggtcgggccgcctttcgcacaggaa

SEQ ID NO: 5419904 - DNA, 25 bp, Homo sapien
tcgcacaggaagtacgactcggtcc

SEQ ID NO: 5419905 - DNA, 25 bp, Homo sapien
ccgccgctatccacgtccaaggcag

SEQ ID NO: 5419906 - DNA, 25 bp, Homo sapien
cgccgccgctatccacgtccaaggc

SEQ ID NO: 5419907 - DNA, 25 bp, Homo sapien
cgctatccacgtccaaggcagccat

SEQ ID NO: 5419908 - DNA, 25 bp, Homo sapien
gccgctatccacgtccaaggcagcc

SEQ ID NO: 5419909 - DNA, 25 bp, Homo sapien
ttttcctattttgattgactgtgcg

SEQ ID NO: 5419910 - DNA, 25 bp, Homo sapien
gtgtgtttagggcacctcaggcggg

SEQ ID NO: 5419911 - DNA, 25 bp, Homo sapien
gactgtgcgggaaacacaaaaggtg

SEQ ID NO: 5419912 - DNA, 25 bp, Homo sapien
cttacacatggtgaggagcgaaggc

SEQ ID NO: 5419913 - DNA, 25 bp, Homo sapien
aggcgcctgtccgtcggtctgccag

SEQ ID NO: 5419914 - DNA, 25 bp, Homo sapien
cagcgtaggttttcgagagcggcta

SEQ ID NO: 5419915 - DNA, 25 bp, Homo sapien
tcattcgccgccgtgctctttgtcg

SEQ ID NO: 5419916 - DNA, 25 bp, Homo sapien
tgtgctcattggtccaggcgcctgt

SEQ ID NO: 5419917 - DNA, 25 bp, Homo sapien
aaattcgtccccggtgactcctgct

SEQ ID NO: 5419918 - DNA, 25 bp, Homo sapien
cggcagcagtcttggccggatctcc

SEQ ID NO: 5419919 - DNA, 25 bp, Homo sapien
tcggagcaggcctagccaagctgta

SEQ ID NO: 5419920 - DNA, 25 bp, Homo sapien
agggcctcgcgctcttggagccgcc

SEQ ID NO: 5419921 - DNA, 25 bp, Homo sapien
gagctggtattaggggagacacccc

SEQ ID NO: 5419922 - DNA, 25 bp, Homo sapien
ccgctactgagcaaaccagacccgc

SEQ ID NO: 5419923 - DNA, 25 bp, Homo sapien
gagggagctggtattaggggagaca

SEQ ID NO: 5419924 - DNA, 25 bp, Homo sapien
gagcaaaccagacccgccccacgag

SEQ ID NO: 5419925 - DNA, 25 bp, Homo sapien
cctgaaggcaggcatttaaagcaaa

SEQ ID NO: 5419926 - DNA, 25 bp, Homo sapien
caagtcacctcacatacggaaggag

SEQ ID NO: 5419927 - DNA, 25 bp, Homo sapien
aaaatcggtcacataaccattttgc

SEQ ID NO: 5419928 - DNA, 25 bp, Homo sapien
tcattttacttgtggtatgtgtatg

SEQ ID NO: 5419929 - DNA, 25 bp, Homo sapien
tttgctcttaattgtacaaagatca

SEQ ID NO: 5419930 - DNA, 25 bp, Homo sapien
ctcttaattgtacaaagatcaaatt

SEQ ID NO: 5419931 - DNA, 25 bp, Homo sapien
tgctcttaattgtacaaagatcaaa

SEQ ID NO: 5419932 - DNA, 25 bp, Homo sapien
gctcttaattgtacaaagatcaaat

SEQ ID NO: 5419933 - DNA, 25 bp, Homo sapien
catggaatattttgcaacccgtttc

SEQ ID NO: 5419934 - DNA, 25 bp, Homo sapien
gatctggatgtcactttcttttccc

SEQ ID NO: 5419935 - DNA, 25 bp, Homo sapien
ttttcccatatcctcgatttcctca

SEQ ID NO: 5419936 - DNA, 25 bp, Homo sapien
ccctgaaggcttctatacacctgtt

SEQ ID NO: 5419937 - DNA, 25 bp, Homo sapien
gttctactacataatcactatcaca

SEQ ID NO: 5419938 - DNA, 25 bp, Homo sapien
taatcactatcacacttcagaaaca

SEQ ID NO: 5419939 - DNA, 25 bp, Homo sapien
caaggatcttaagttgttctactac

SEQ ID NO: 5419940 - DNA, 25 bp, Homo sapien
actggatttcaaggatcttaagttg

SEQ ID NO: 5419941 - DNA, 25 bp, Homo sapien
tcagtgtaaatgcagcacggaaggg

SEQ ID NO: 5419942 - DNA, 25 bp, Homo sapien
attttgccatccagtttcagtgtaa

SEQ ID NO: 5419943 - DNA, 25 bp, Homo sapien
gagggatgtcctagcctgagccaaa

SEQ ID NO: 5419944 - DNA, 25 bp, Homo sapien
ccaaagccgggctccaagccaggat

SEQ ID NO: 5419945 - DNA, 25 bp, Homo sapien
ctgcaccaggatgcctacactagaa

SEQ ID NO: 5419946 - DNA, 25 bp, Homo sapien
aacaccaatagcttcagtgcctcag

SEQ ID NO: 5419947 - DNA, 25 bp, Homo sapien
tgcctcaggtacagtctgcaccagg

SEQ ID NO: 5419948 - DNA, 25 bp, Homo sapien
ctagaaaccatggaccactgggagt

SEQ ID NO: 5419949 - DNA, 25 bp, Homo sapien
tcagtgacccggcaaaacattcgtt

SEQ ID NO: 5419950 - DNA, 25 bp, Homo sapien
cattcgttacgcgaaatcgcaccca

SEQ ID NO: 5419951 - DNA, 25 bp, Homo sapien
ctcgaggcatcagtgacccggcaaa

SEQ ID NO: 5419952 - DNA, 25 bp, Homo sapien
gcaaaacattcgttacgcgaaatcg

SEQ ID NO: 5419953 - DNA, 25 bp, Homo sapien
tattagctacctatccttcagggcc

SEQ ID NO: 5419954 - DNA, 25 bp, Homo sapien
tcttccaagcaaggtaggatggcgc

SEQ ID NO: 5419955 - DNA, 25 bp, Homo sapien
ttggctgcccagacaagttgactga

SEQ ID NO: 5419956 - DNA, 25 bp, Homo sapien
cttgagtacggtaatgagccagaac

SEQ ID NO: 5419957 - DNA, 25 bp, Homo sapien
ccctcaagtttaggccaaggaagag

SEQ ID NO: 5419958 - DNA, 25 bp, Homo sapien
aaataactgtcccaacgcagctgcc

SEQ ID NO: 5419959 - DNA, 25 bp, Homo sapien
tatttctggcaaggactaaacccca

SEQ ID NO: 5419960 - DNA, 25 bp, Homo sapien
gaagcaagctgtctctgccaacaag

SEQ ID NO: 5419961 - DNA, 25 bp, Homo sapien
gaggatgagatactataagtgtcag

SEQ ID NO: 5419962 - DNA, 25 bp, Homo sapien
gataaggctaccacctctctcgagg

SEQ ID NO: 5419963 - DNA, 25 bp, Homo sapien
tctctcgaggactgggcctccgagg

SEQ ID NO: 5419964 - DNA, 25 bp, Homo sapien
taagtgtcagcatgctcagtttctt

SEQ ID NO: 5419965 - DNA, 25 bp, Homo sapien
taaaggtgatagcagcagtccagcc

SEQ ID NO: 5419966 - DNA, 25 bp, Homo sapien
gatgagccgcatgcacaggtaggaa

SEQ ID NO: 5419967 - DNA, 25 bp, Homo sapien
tccagcccggctagactgaagagca

SEQ ID NO: 5419968 - DNA, 25 bp, Homo sapien
tctcatttccgcaactagccaggca

SEQ ID NO: 5419969 - DNA, 25 bp, Homo sapien
ggctctggagttcacggatctggtc

SEQ ID NO: 5419970 - DNA, 25 bp, Homo sapien
tcaatgagagaaactagcaacatgc

SEQ ID NO: 5419971 - DNA, 25 bp, Homo sapien
ggtgggtgctccctagttcctagca

SEQ ID NO: 5419972 - DNA, 25 bp, Homo sapien
aacatgctaattggaaaagccaggg

SEQ ID NO: 5419973 - DNA, 25 bp, Homo sapien
caaatctccaggcaaccttgtgagg

SEQ ID NO: 5419974 - DNA, 25 bp, Homo sapien
aaagtccatctccagagttgggctc

SEQ ID NO: 5419975 - DNA, 25 bp, Homo sapien
cctagaggagactggatagtcacag

SEQ ID NO: 5419976 - DNA, 25 bp, Homo sapien
tagtcacagtaagtggaatccgccg

SEQ ID NO: 5419977 - DNA, 25 bp, Homo sapien
gtgtgagaggctcccgcctctctct

SEQ ID NO: 5419978 - DNA, 25 bp, Homo sapien
ccgcctctctctcccgcggggcccg

SEQ ID NO: 5419979 - DNA, 25 bp, Homo sapien
cgggctctgccgctcctccgccgtg

SEQ ID NO: 5419980 - DNA, 25 bp, Homo sapien
ggctctgccgctcctccgccgtggg

SEQ ID NO: 5419981 - DNA, 25 bp, Homo sapien
atgatttttctctgttagtttctga

SEQ ID NO: 5419982 - DNA, 25 bp, Homo sapien
gatttttctctgttagtttctgaag

SEQ ID NO: 5419983 - DNA, 25 bp, Homo sapien
tttttctctgttagtttctgaagac

SEQ ID NO: 5419984 - DNA, 25 bp, Homo sapien
cacagttctatgatttttctctgtt

SEQ ID NO: 5419985 - DNA, 25 bp, Homo sapien
tgcacaggctgcattgctgcaggag

SEQ ID NO: 5419986 - DNA, 25 bp, Homo sapien
ctgcattgctgcaggagcggttcag

SEQ ID NO: 5419987 - DNA, 25 bp, Homo sapien
cagcagctgttagggctgtggcttc

SEQ ID NO: 5419988 - DNA, 25 bp, Homo sapien
tcagcagctgttagggctgtggctt

SEQ ID NO: 5419989 - DNA, 25 bp, Homo sapien
gcaggcagcaggtctctgcaaaaga

SEQ ID NO: 5419990 - DNA, 25 bp, Homo sapien
caggcagcaggtctctgcaaaagat

SEQ ID NO: 5419991 - DNA, 25 bp, Homo sapien
ggcagcaggtctctgcaaaagatgc

SEQ ID NO: 5419992 - DNA, 25 bp, Homo sapien
ctgcaggcagcaggtctctgcaaaa

SEQ ID NO: 5419993 - DNA, 25 bp, Homo sapien
ccattgccgtgcggcttgtcttccg

SEQ ID NO: 5419994 - DNA, 25 bp, Homo sapien
tcaaagctttctaatatccatctcc

SEQ ID NO: 5419995 - DNA, 25 bp, Homo sapien
tcatcaaagctttctaatatccatc

SEQ ID NO: 5419996 - DNA, 25 bp, Homo sapien
ttgtcttccgccctcatcactgaga

SEQ ID NO: 5419997 - DNA, 25 bp, Homo sapien
gcactggaggtccatttggcaaatt

SEQ ID NO: 5419998 - DNA, 25 bp, Homo sapien
ggtggcagagccatcattgtgaggg

SEQ ID NO: 5419999 - DNA, 25 bp, Homo sapien
tgtggaggagcagcaactagagaag

SEQ ID NO: 5420000 - DNA, 25 bp, Homo sapien
gagacctggacagggttgggtcctg

SEQ ID NO: 5420001 - DNA, 25 bp, Homo sapien
accaagtcccgtatgagccagaaca

SEQ ID NO: 5420002 - DNA, 25 bp, Homo sapien
gaagaagtgtatcaaagacttgcct

SEQ ID NO: 5420003 - DNA, 25 bp, Homo sapien
cagaacacagcaatggggtgcaggt

SEQ ID NO: 5420004 - DNA, 25 bp, Homo sapien
caaacgatagatgtagaagaagtgt

SEQ ID NO: 5420005 - DNA, 25 bp, Homo sapien
aaggaaaggagagtgaaggtgatgt

SEQ ID NO: 5420006 - DNA, 25 bp, Homo sapien
gaaggaaaggagagtgaaggtgatg

SEQ ID NO: 5420007 - DNA, 25 bp, Homo sapien
tggaaggaaaggagagtgaaggtga

SEQ ID NO: 5420008 - DNA, 25 bp, Homo sapien
ctggaaggaaaggagagtgaaggtg

SEQ ID NO: 5420009 - DNA, 25 bp, Homo sapien
atagtctctgctgtacttccagtgt

SEQ ID NO: 5420010 - DNA, 25 bp, Homo sapien
taaatagtctctgctgtacttccag

SEQ ID NO: 5420011 - DNA, 25 bp, Homo sapien
ctaaatagtctctgctgtacttcca

SEQ ID NO: 5420012 - DNA, 25 bp, Homo sapien
aatagtctctgctgtacttccagtg

SEQ ID NO: 5420013 - DNA, 25 bp, Homo sapien
cttggacaggcatatggctgcataa

SEQ ID NO: 5420014 - DNA, 25 bp, Homo sapien
gggaccccagatctgcctgtgcggg

SEQ ID NO: 5420015 - DNA, 25 bp, Homo sapien
gggttaccacactgcctgcgagcat

SEQ ID NO: 5420016 - DNA, 25 bp, Homo sapien
ccttgaccgctttgtgttagggcag

SEQ ID NO: 5420017 - DNA, 25 bp, Homo sapien
cccctgctgccttcaggagcctcat

SEQ ID NO: 5420018 - DNA, 25 bp, Homo sapien
attgcccagcccctcttcacacccc

SEQ ID NO: 5420019 - DNA, 25 bp, Homo sapien
cagaaagctccctctggctattgcc

SEQ ID NO: 5420020 - DNA, 25 bp, Homo sapien
gaaagctccctctggctattgccca

SEQ ID NO: 5420021 - DNA, 25 bp, Homo sapien
ttgccattaggaacaaccgacattt

SEQ ID NO: 5420022 - DNA, 25 bp, Homo sapien
gaggaggagataccgtctctgactc

SEQ ID NO: 5420023 - DNA, 25 bp, Homo sapien
tgaatttaagtagactaatcagaac

SEQ ID NO: 5420024 - DNA, 25 bp, Homo sapien
taatcagaacaatagaagaggcagg

SEQ ID NO: 5420025 - DNA, 25 bp, Homo sapien
aaggctaagtggcaaagggtctcca

SEQ ID NO: 5420026 - DNA, 25 bp, Homo sapien
tgcttccttgggagatccggctctg

SEQ ID NO: 5420027 - DNA, 25 bp, Homo sapien
tgatcacagaagagcacaaaagggc

SEQ ID NO: 5420028 - DNA, 25 bp, Homo sapien
taaagtcccaaagcgatacagtaga

SEQ ID NO: 5420029 - DNA, 25 bp, Homo sapien
ttaagatacaattgcagctgcccca

SEQ ID NO: 5420030 - DNA, 25 bp, Homo sapien
tgccagttactgtgtcatacacacg

SEQ ID NO: 5420031 - DNA, 25 bp, Homo sapien
gcacaccacagtcagtcaatacaga

SEQ ID NO: 5420032 - DNA, 25 bp, Homo sapien
caaccaccaggtgccgtatcgcatt

SEQ ID NO: 5420033 - DNA, 25 bp, Homo sapien
tgttttattgagtgtagacatctgg

SEQ ID NO: 5420034 - DNA, 25 bp, Homo sapien
ggagattaatgaagtatcatgagag

SEQ ID NO: 5420035 - DNA, 25 bp, Homo sapien
catgatggagattaatgaagtatca

SEQ ID NO: 5420036 - DNA, 25 bp, Homo sapien
ttcaaaaaggagcaagccacattgt

SEQ ID NO: 5420037 - DNA, 25 bp, Homo sapien
cttaatcacgtgaaaagcaaagctg

SEQ ID NO: 5420038 - DNA, 25 bp, Homo sapien
aagcaaagctgttcacatttagtga

SEQ ID NO: 5420039 - DNA, 25 bp, Homo sapien
tgaacctgcatttcatggggggggg

SEQ ID NO: 5420040 - DNA, 25 bp, Homo sapien
tcacatttagtgaacctgcatttca

SEQ ID NO: 5420041 - DNA, 25 bp, Homo sapien
cagatgccttttggaagttgtatgt

SEQ ID NO: 5420042 - DNA, 25 bp, Homo sapien
atctccccaactttatttgtcgcat

SEQ ID NO: 5420043 - DNA, 25 bp, Homo sapien
cccaactttatttgtcgcattggtt

SEQ ID NO: 5420044 - DNA, 25 bp, Homo sapien
tatttgtcgcattggttttcagaaa

SEQ ID NO: 5420045 - DNA, 25 bp, Homo sapien
tgaggtgtgttaaatttgaagaaga

SEQ ID NO: 5420046 - DNA, 25 bp, Homo sapien
atttcttcttcggttgttgaggtgt

SEQ ID NO: 5420047 - DNA, 25 bp, Homo sapien
tgaagaagataatatctccatcttc

SEQ ID NO: 5420048 - DNA, 25 bp, Homo sapien
tcttcggttgttgaggtgtgttaaa

SEQ ID NO: 5420049 - DNA, 25 bp, Homo sapien
cctaagcagatatgattgctaataa

SEQ ID NO: 5420050 - DNA, 25 bp, Homo sapien
tgcctaagcagatatgattgctaat

SEQ ID NO: 5420051 - DNA, 25 bp, Homo sapien
ctttgcctaagcagatatgattgct

SEQ ID NO: 5420052 - DNA, 25 bp, Homo sapien
tttgtgaatcttgagtatgtattaa

SEQ ID NO: 5420053 - DNA, 25 bp, Homo sapien
aaattagttatgctgcactggtgtt

SEQ ID NO: 5420054 - DNA, 25 bp, Homo sapien
tgtagactacaaagcccacacagag

SEQ ID NO: 5420055 - DNA, 25 bp, Homo sapien
tagttatgctgcactggtgttagaa

SEQ ID NO: 5420056 - DNA, 25 bp, Homo sapien
ctattcagtatatagttcacagcac

SEQ ID NO: 5420057 - DNA, 25 bp, Homo sapien
taaagcacaattttggacctgccct

SEQ ID NO: 5420058 - DNA, 25 bp, Homo sapien
tgccctctagtgttgagaaagcaaa

SEQ ID NO: 5420059 - DNA, 25 bp, Homo sapien
taaagtcctgctgttcggtatgacc

SEQ ID NO: 5420060 - DNA, 25 bp, Homo sapien
taaagaaccttcctacaatgtcagt

SEQ ID NO: 5420061 - DNA, 25 bp, Homo sapien
ttcagccataatgaatcccttttca

SEQ ID NO: 5420062 - DNA, 25 bp, Homo sapien
tacttcagccataatgaatcccttt

SEQ ID NO: 5420063 - DNA, 25 bp, Homo sapien
ctgcagcctgaggagccttagtccc

SEQ ID NO: 5420064 - DNA, 25 bp, Homo sapien
gcagcctgaggagccttagtccctt

SEQ ID NO: 5420065 - DNA, 25 bp, Homo sapien
gattgtaagcacagagtttcttttc

SEQ ID NO: 5420066 - DNA, 25 bp, Homo sapien
agatgactgattgtaagcacagagt

SEQ ID NO: 5420067 - DNA, 25 bp, Homo sapien
catttaagatgactgattgtaagca

SEQ ID NO: 5420068 - DNA, 25 bp, Homo sapien
attgcatttaagatgactgattgta

SEQ ID NO: 5420069 - DNA, 25 bp, Homo sapien
ttttcaagcccagaacatgctatct

SEQ ID NO: 5420070 - DNA, 25 bp, Homo sapien
aaataacggtgacctaaaggctgct

SEQ ID NO: 5420071 - DNA, 25 bp, Homo sapien
gggttaatatagctactcactgatg

SEQ ID NO: 5420072 - DNA, 25 bp, Homo sapien
taaggagtctgacactagaaagcac

SEQ ID NO: 5420073 - DNA, 25 bp, Homo sapien
caggaggagggtagacagattctac

SEQ ID NO: 5420074 - DNA, 25 bp, Homo sapien
cagtcacacagattaagcaagcaca

SEQ ID NO: 5420075 - DNA, 25 bp, Homo sapien
caaacaaacttagcgaatacaaaat

SEQ ID NO: 5420076 - DNA, 25 bp, Homo sapien
tactggtgcgtcttatctctgacca

SEQ ID NO: 5420077 - DNA, 25 bp, Homo sapien
agttggagtgctgcaaacccagcct

SEQ ID NO: 5420078 - DNA, 25 bp, Homo sapien
tagttggagtgctgcaaacccagcc

SEQ ID NO: 5420079 - DNA, 25 bp, Homo sapien
ttgtgtcatgttcgcttccagatac

SEQ ID NO: 5420080 - DNA, 25 bp, Homo sapien
acctgggtcatacttgtccacccac

SEQ ID NO: 5420081 - DNA, 25 bp, Homo sapien
tgggtcatacttgtccacccactct

SEQ ID NO: 5420082 - DNA, 25 bp, Homo sapien
ctttgtgtcatgttcgcttccagat

SEQ ID NO: 5420083 - DNA, 25 bp, Homo sapien
gacaaaaaagggcacaacattatct

SEQ ID NO: 5420084 - DNA, 25 bp, Homo sapien
agggcacaacattatcttgtagtgc

SEQ ID NO: 5420085 - DNA, 25 bp, Homo sapien
caacattatcttgtagtgcatgcat

SEQ ID NO: 5420086 - DNA, 25 bp, Homo sapien
ctgtagacaaaaaagggcacaacat

SEQ ID NO: 5420087 - DNA, 25 bp, Homo sapien
attatcaagtagcacatacatattc

SEQ ID NO: 5420088 - DNA, 25 bp, Homo sapien
cattattatcaagtagcacatacat

SEQ ID NO: 5420089 - DNA, 25 bp, Homo sapien
ttatcaagtagcacatacatattca

SEQ ID NO: 5420090 - DNA, 25 bp, Homo sapien
tatcaagtagcacatacatattcat

SEQ ID NO: 5420091 - DNA, 25 bp, Homo sapien
tgattactgacgttgtgcatctttt

SEQ ID NO: 5420092 - DNA, 25 bp, Homo sapien
tcaagtcctccgctcttgtttttaa

SEQ ID NO: 5420093 - DNA, 25 bp, Homo sapien
ttatagtggcttcccaatgggtgtg

SEQ ID NO: 5420094 - DNA, 25 bp, Homo sapien
tctcttatgattactgacgttgtgc

SEQ ID NO: 5420095 - DNA, 25 bp, Homo sapien
gaataagtaagaccgacattgtcct

SEQ ID NO: 5420096 - DNA, 25 bp, Homo sapien
agtctcactgtgctacctatgctgg

SEQ ID NO: 5420097 - DNA, 25 bp, Homo sapien
tgtgtcagatactgtgctagctggg

SEQ ID NO: 5420098 - DNA, 25 bp, Homo sapien
tctgctgttgattgacctctctagg

SEQ ID NO: 5420099 - DNA, 25 bp, Homo sapien
caagctacagctgaggcataagcac

SEQ ID NO: 5420100 - DNA, 25 bp, Homo sapien
gaatgccctgcataggaaaagaagc

SEQ ID NO: 5420101 - DNA, 25 bp, Homo sapien
tgggagcacgctggacaactgtcag

SEQ ID NO: 5420102 - DNA, 25 bp, Homo sapien
tcacagggtgccaatactaacaaag

SEQ ID NO: 5420103 - DNA, 25 bp, Homo sapien
gaagcacagagtcatccatcgtagg

SEQ ID NO: 5420104 - DNA, 25 bp, Homo sapien
tctagacaaggcagtcacacaaggt

SEQ ID NO: 5420105 - DNA, 25 bp, Homo sapien
tatttactgagtccagtgccaagca

SEQ ID NO: 5420106 - DNA, 25 bp, Homo sapien
tacagcttgtgataagtgctctgaa

SEQ ID NO: 5420107 - DNA, 25 bp, Homo sapien
tgtccaagatatagcaagttgtact

SEQ ID NO: 5420108 - DNA, 25 bp, Homo sapien
tatgatgcaaggaatatgccatgca

SEQ ID NO: 5420109 - DNA, 25 bp, Homo sapien
tcaagagatccaggcaactgagatg

SEQ ID NO: 5420110 - DNA, 25 bp, Homo sapien
gaagcagagcaagttctatgatgca

SEQ ID NO: 5420111 - DNA, 25 bp, Homo sapien
aggtgcaggccatcacaagaggcta

SEQ ID NO: 5420112 - DNA, 25 bp, Homo sapien
gtgcaggccatcacaagaggctaat

SEQ ID NO: 5420113 - DNA, 25 bp, Homo sapien
aggccatcacaagaggctaatttct

SEQ ID NO: 5420114 - DNA, 25 bp, Homo sapien
gccatcacaagaggctaatttcttt

SEQ ID NO: 5420115 - DNA, 25 bp, Homo sapien
ttaacaaattatggtttgctataac

SEQ ID NO: 5420116 - DNA, 25 bp, Homo sapien
aacaaattatggtttgctataacag

SEQ ID NO: 5420117 - DNA, 25 bp, Homo sapien
caaattatggtttgctataacagaa

SEQ ID NO: 5420118 - DNA, 25 bp, Homo sapien
acaaattatggtttgctataacaga

SEQ ID NO: 5420119 - DNA, 25 bp, Homo sapien
tccaatcatggcaaaggtaaacagg

SEQ ID NO: 5420120 - DNA, 25 bp, Homo sapien
caatcatggcaaaggtaaacaggaa

SEQ ID NO: 5420121 - DNA, 25 bp, Homo sapien
ccaatcatggcaaaggtaaacagga

SEQ ID NO: 5420122 - DNA, 25 bp, Homo sapien
atcatggcaaaggtaaacaggaagc

SEQ ID NO: 5420123 - DNA, 25 bp, Homo sapien
taagaaaccagaagtgcactactgt

SEQ ID NO: 5420124 - DNA, 25 bp, Homo sapien
tatgcatagggtcagtagcattatg

SEQ ID NO: 5420125 - DNA, 25 bp, Homo sapien
gcactactgtattgttatctctcga

SEQ ID NO: 5420126 - DNA, 25 bp, Homo sapien
aaaagtgctttcgtatataattatc

SEQ ID NO: 5420127 - DNA, 25 bp, Homo sapien
ttcagaaagattaaccaagtagacc

SEQ ID NO: 5420128 - DNA, 25 bp, Homo sapien
cagaaagattaaccaagtagaccat

SEQ ID NO: 5420129 - DNA, 25 bp, Homo sapien
tttcagaaagattaaccaagtagac

SEQ ID NO: 5420130 - DNA, 25 bp, Homo sapien
tcagaaagattaaccaagtagacca

SEQ ID NO: 5420131 - DNA, 25 bp, Homo sapien
aataagtgtttattcaacacttcaa

SEQ ID NO: 5420132 - DNA, 25 bp, Homo sapien
aaataagtgtttattcaacacttca

SEQ ID NO: 5420133 - DNA, 25 bp, Homo sapien
tgatctataacccaggattttactt

SEQ ID NO: 5420134 - DNA, 25 bp, Homo sapien
tccaatcatgatagaagcgaacagg

SEQ ID NO: 5420135 - DNA, 25 bp, Homo sapien
gtcattccaatcatgatagaagcga

SEQ ID NO: 5420136 - DNA, 25 bp, Homo sapien
caatcatgatagaagcgaacaggtt

SEQ ID NO: 5420137 - DNA, 25 bp, Homo sapien
ttaaatcaactgaccagatcccttt

SEQ ID NO: 5420138 - DNA, 25 bp, Homo sapien
ttatcgatgatccagcctccaaaat

SEQ ID NO: 5420139 - DNA, 25 bp, Homo sapien
caatattacctagtgatgccatata

SEQ ID NO: 5420140 - DNA, 25 bp, Homo sapien
gactaatacaagagttactaccatt

SEQ ID NO: 5420141 - DNA, 25 bp, Homo sapien
attgcttttcagataagactatctt

SEQ ID NO: 5420142 - DNA, 25 bp, Homo sapien
atatggtatagtttcaatgtgctct

SEQ ID NO: 5420143 - DNA, 25 bp, Homo sapien
tatatggtatagtttcaatgtgctc

SEQ ID NO: 5420144 - DNA, 25 bp, Homo sapien
gcttttcagataagactatcttata

SEQ ID NO: 5420145 - DNA, 25 bp, Homo sapien
taaatcccagtgatctacaaaatgg

SEQ ID NO: 5420146 - DNA, 25 bp, Homo sapien
catgagtggactaattcaagaggta

SEQ ID NO: 5420147 - DNA, 25 bp, Homo sapien
acttttcggttagactgcagttaca

SEQ ID NO: 5420148 - DNA, 25 bp, Homo sapien
ggaataaatcctagccacttaccag

SEQ ID NO: 5420149 - DNA, 25 bp, Homo sapien
taatatttatggagctgggcgcagt

SEQ ID NO: 5420150 - DNA, 25 bp, Homo sapien
tcctggttctaacactttctggctg

SEQ ID NO: 5420151 - DNA, 25 bp, Homo sapien
ggccatattcctcaagatctgagtt

SEQ ID NO: 5420152 - DNA, 25 bp, Homo sapien
aaacaactggcaagttctaggcaca

SEQ ID NO: 5420153 - DNA, 25 bp, Homo sapien
gactacaagaattagggcaaggctt

SEQ ID NO: 5420154 - DNA, 25 bp, Homo sapien
gaagtccactaatacagcatcctcc

SEQ ID NO: 5420155 - DNA, 25 bp, Homo sapien
ttaggtagctttaacaaagacagcc

SEQ ID NO: 5420156 - DNA, 25 bp, Homo sapien
caaggcttccggttcaaaacagtcg

SEQ ID NO: 5420157 - DNA, 25 bp, Homo sapien
caggagtactgatccctggacaaca

SEQ ID NO: 5420158 - DNA, 25 bp, Homo sapien
tgttgctctactagataaatgctgc

SEQ ID NO: 5420159 - DNA, 25 bp, Homo sapien
tcttataaaatagacctccactgtg

SEQ ID NO: 5420160 - DNA, 25 bp, Homo sapien
tgtttgggatctctctgaatcacag

SEQ ID NO: 5420161 - DNA, 25 bp, Homo sapien
tagccatctgaacataatctagtac

SEQ ID NO: 5420162 - DNA, 25 bp, Homo sapien
gcagcagagaggtggacttttcaaa

SEQ ID NO: 5420163 - DNA, 25 bp, Homo sapien
cataatctagtactaaagcatttca

SEQ ID NO: 5420164 - DNA, 25 bp, Homo sapien
ggctgacatacaatactttcaactt

SEQ ID NO: 5420165 - DNA, 25 bp, Homo sapien
aaaatccctttctccctatcagcaa

SEQ ID NO: 5420166 - DNA, 25 bp, Homo sapien
tgctttcttctcattcgtgtgttct

SEQ ID NO: 5420167 - DNA, 25 bp, Homo sapien
acagtgagacaccatgtcaaaacaa

SEQ ID NO: 5420168 - DNA, 25 bp, Homo sapien
ttctcattcgtgtgttctctggagg

SEQ ID NO: 5420169 - DNA, 25 bp, Homo sapien
tataatgggcccaatcatttcctca

SEQ ID NO: 5420170 - DNA, 25 bp, Homo sapien
ccttcaacgtgcgtgatatcatcat

SEQ ID NO: 5420171 - DNA, 25 bp, Homo sapien
aggatctacacttccttcaacgtgc

SEQ ID NO: 5420172 - DNA, 25 bp, Homo sapien
tctacacttccttcaacgtgcgtga

SEQ ID NO: 5420173 - DNA, 25 bp, Homo sapien
gcagctaatttcatcggcctgattt

SEQ ID NO: 5420174 - DNA, 25 bp, Homo sapien
catcggcctgatttgagggtatggt

SEQ ID NO: 5420175 - DNA, 25 bp, Homo sapien
aatttcatcggcctgatttgagggt

SEQ ID NO: 5420176 - DNA, 25 bp, Homo sapien
cctgatttgagggtatggtttttag

SEQ ID NO: 5420177 - DNA, 25 bp, Homo sapien
caaaatgatgctggcccttattaga

SEQ ID NO: 5420178 - DNA, 25 bp, Homo sapien
tgatgctggcccttattagaaacac

SEQ ID NO: 5420179 - DNA, 25 bp, Homo sapien
gaacaaaatgatgctggcccttatt

SEQ ID NO: 5420180 - DNA, 25 bp, Homo sapien
actatctgaacaaaatgatgctggc

SEQ ID NO: 5420181 - DNA, 25 bp, Homo sapien
cagttgaagccataatttcaaattg

SEQ ID NO: 5420182 - DNA, 25 bp, Homo sapien
aattaagttgtatctaaatgtggat

SEQ ID NO: 5420183 - DNA, 25 bp, Homo sapien
taattaagttgtatctaaatgtgga

SEQ ID NO: 5420184 - DNA, 25 bp, Homo sapien
aataattaagttgtatctaaatgtg

SEQ ID NO: 5420185 - DNA, 25 bp, Homo sapien
aaaataattaagttgtatctaaatg

SEQ ID NO: 5420186 - DNA, 25 bp, Homo sapien
tgcgcttatactcttggctactggg

SEQ ID NO: 5420187 - DNA, 25 bp, Homo sapien
aggagtgactaagctttctgtgaca

SEQ ID NO: 5420188 - DNA, 25 bp, Homo sapien
tctatgtagggtccaaagactaacc

SEQ ID NO: 5420189 - DNA, 25 bp, Homo sapien
tcaggagtgagctgtaacaagccat

SEQ ID NO: 5420190 - DNA, 25 bp, Homo sapien
acattgtgagaccttgtccctaaat

SEQ ID NO: 5420191 - DNA, 25 bp, Homo sapien
cattgtgagaccttgtccctaaata

SEQ ID NO: 5420192 - DNA, 25 bp, Homo sapien
attgtgagaccttgtccctaaataa

SEQ ID NO: 5420193 - DNA, 25 bp, Homo sapien
tattgagctgactgtttctgttgta

SEQ ID NO: 5420194 - DNA, 25 bp, Homo sapien
ttccaatattgagctgactgtttct

SEQ ID NO: 5420195 - DNA, 25 bp, Homo sapien
ccaatattgagctgactgtttctgt

SEQ ID NO: 5420196 - DNA, 25 bp, Homo sapien
agctgactgtttctgttgtatttac

SEQ ID NO: 5420197 - DNA, 25 bp, Homo sapien
aagccagtatcagaatggatttgga

SEQ ID NO: 5420198 - DNA, 25 bp, Homo sapien
ccaggtggtgccaaatcaaagccag

SEQ ID NO: 5420199 - DNA, 25 bp, Homo sapien
tttggatgggccaggaccttgtgac

SEQ ID NO: 5420200 - DNA, 25 bp, Homo sapien
gttaagctagagctatcaccaccag

SEQ ID NO: 5420201 - DNA, 25 bp, Homo sapien
gttggaacaccagactaaagccttg

SEQ ID NO: 5420202 - DNA, 25 bp, Homo sapien
tctgggtgccataaactataaagtt

SEQ ID NO: 5420203 - DNA, 25 bp, Homo sapien
tattatccatcagtattgctattcc

SEQ ID NO: 5420204 - DNA, 25 bp, Homo sapien
tgagagaacatccaacaaaatgact

SEQ ID NO: 5420205 - DNA, 25 bp, Homo sapien
catggtagacttgacttctcgagac

SEQ ID NO: 5420206 - DNA, 25 bp, Homo sapien
tctcgagacagcattttcaagccgt

SEQ ID NO: 5420207 - DNA, 25 bp, Homo sapien
gaatacttcccagagtaggcacacc

SEQ ID NO: 5420208 - DNA, 25 bp, Homo sapien
tacttccactaaatgtctgatacgg

SEQ ID NO: 5420209 - DNA, 25 bp, Homo sapien
taaagcaaattactccgggatgtgg

SEQ ID NO: 5420210 - DNA, 25 bp, Homo sapien
gctattaaagctgaatggtgatggt

SEQ ID NO: 5420211 - DNA, 25 bp, Homo sapien
tcatttgcagcctaattgtggacat

SEQ ID NO: 5420212 - DNA, 25 bp, Homo sapien
gatttgcaaccctcttgatgatcag

SEQ ID NO: 5420213 - DNA, 25 bp, Homo sapien
cagcctgggggagaagaacgagacc

SEQ ID NO: 5420214 - DNA, 25 bp, Homo sapien
cctgggggagaagaacgagaccttg

SEQ ID NO: 5420215 - DNA, 25 bp, Homo sapien
tgggggagaagaacgagaccttgtc

SEQ ID NO: 5420216 - DNA, 25 bp, Homo sapien
gggagaagaacgagaccttgtctca

SEQ ID NO: 5420217 - DNA, 25 bp, Homo sapien
ttccctttactcattctgtctcctg

SEQ ID NO: 5420218 - DNA, 25 bp, Homo sapien
actgaaaagttaaggaggtatattg

SEQ ID NO: 5420219 - DNA, 25 bp, Homo sapien
agttaaggaggtatattgtaatcac

SEQ ID NO: 5420220 - DNA, 25 bp, Homo sapien
atcactagagcaatcacttaaaaaa

SEQ ID NO: 5420221 - DNA, 25 bp, Homo sapien
agtattacatacaactatggcataa

SEQ ID NO: 5420222 - DNA, 25 bp, Homo sapien
cagactacgcatagccaaaagacaa

SEQ ID NO: 5420223 - DNA, 25 bp, Homo sapien
cacagaggatgatccctatctatta

SEQ ID NO: 5420224 - DNA, 25 bp, Homo sapien
agtaagaatgttagaaaagctccaa

SEQ ID NO: 5420225 - DNA, 25 bp, Homo sapien
caagagcatgtagttcatttggccc

SEQ ID NO: 5420226 - DNA, 25 bp, Homo sapien
cacctccgcaaccactggggagacc

SEQ ID NO: 5420227 - DNA, 25 bp, Homo sapien
ggggagacccagcagacgccgcgcc

SEQ ID NO: 5420228 - DNA, 25 bp, Homo sapien
agacccagcagacgccgcgcccccg

SEQ ID NO: 5420229 - DNA, 25 bp, Homo sapien
ggagacccagcagacgccgcgcccc

SEQ ID NO: 5420230 - DNA, 25 bp, Homo sapien
agaccagcagggacaagaaggtcat

SEQ ID NO: 5420231 - DNA, 25 bp, Homo sapien
tgggacaacatagaccagcagggac

SEQ ID NO: 5420232 - DNA, 25 bp, Homo sapien
catagaccagcagggacaagaaggt

SEQ ID NO: 5420233 - DNA, 25 bp, Homo sapien
ctgggacaacatagaccagcaggga

SEQ ID NO: 5420234 - DNA, 25 bp, Homo sapien
caatatcaacagttacggaacctgt

SEQ ID NO: 5420235 - DNA, 25 bp, Homo sapien
tatcaacagttacggaacctgtaaa

SEQ ID NO: 5420236 - DNA, 25 bp, Homo sapien
caacagttacggaacctgtaaatat

SEQ ID NO: 5420237 - DNA, 25 bp, Homo sapien
cttcaatatcaacagttacggaacc

SEQ ID NO: 5420238 - DNA, 25 bp, Homo sapien
gcttcacggcactcgcatttgctgt

SEQ ID NO: 5420239 - DNA, 25 bp, Homo sapien
tataagcactttgagggcacagatt

SEQ ID NO: 5420240 - DNA, 25 bp, Homo sapien
gaagcagatttcacgtgcaagtgga

SEQ ID NO: 5420241 - DNA, 25 bp, Homo sapien
tgggcagggacaactcacttgttat

SEQ ID NO: 5420242 - DNA, 25 bp, Homo sapien
cacatatgacagcaatgggccactt

SEQ ID NO: 5420243 - DNA, 25 bp, Homo sapien
tctgtgaggtataaatgggtgttga

SEQ ID NO: 5420244 - DNA, 25 bp, Homo sapien
tgggccacttcacctacaatataaa

SEQ ID NO: 5420245 - DNA, 25 bp, Homo sapien
tattactgtggtcataattagacag

SEQ ID NO: 5420246 - DNA, 25 bp, Homo sapien
cccgaagttagcagaaagtaggcca

SEQ ID NO: 5420247 - DNA, 25 bp, Homo sapien
caaagtcagacttgataatccagcc

SEQ ID NO: 5420248 - DNA, 25 bp, Homo sapien
gtaggccactggcatcagaatgagc

SEQ ID NO: 5420249 - DNA, 25 bp, Homo sapien
gaatgagctggccaatagcaaagtc

SEQ ID NO: 5420250 - DNA, 25 bp, Homo sapien
gaagttagcactattgttaccctga

SEQ ID NO: 5420251 - DNA, 25 bp, Homo sapien
ctttcttttacaccaggaatcgctg

SEQ ID NO: 5420252 - DNA, 25 bp, Homo sapien
tttatctagttaggcactgggctgg

SEQ ID NO: 5420253 - DNA, 25 bp, Homo sapien
gatcctcttgtgtgcaacagtagaa

SEQ ID NO: 5420254 - DNA, 25 bp, Homo sapien
aagccacgtgtcaccgctgttctcg

SEQ ID NO: 5420255 - DNA, 25 bp, Homo sapien
gatgatggcttttgttgtatagtgg

SEQ ID NO: 5420256 - DNA, 25 bp, Homo sapien
cacatcgcatacttttggggactct

SEQ ID NO: 5420257 - DNA, 25 bp, Homo sapien
tttgttgtatagtggagagaaggaa

SEQ ID NO: 5420258 - DNA, 25 bp, Homo sapien
gaatatacaagagggtaccaggttc

SEQ ID NO: 5420259 - DNA, 25 bp, Homo sapien
agaatatacaagagggtaccaggtt

SEQ ID NO: 5420260 - DNA, 25 bp, Homo sapien
gacaagtgatgagcactttgttcaa

SEQ ID NO: 5420261 - DNA, 25 bp, Homo sapien
tgccactgatggctgacaagtgatg

SEQ ID NO: 5420262 - DNA, 25 bp, Homo sapien
tcttgcaaagcaagtaccacaagta

SEQ ID NO: 5420263 - DNA, 25 bp, Homo sapien
gattattctagcgtgtaatacttta

SEQ ID NO: 5420264 - DNA, 25 bp, Homo sapien
gaactcaggaaagaatagggcaata

SEQ ID NO: 5420265 - DNA, 25 bp, Homo sapien
tagggcaatatattccctactccca

SEQ ID NO: 5420266 - DNA, 25 bp, Homo sapien
tacactctaacgagaaaaagtatag

SEQ ID NO: 5420267 - DNA, 25 bp, Homo sapien
taactacaacaattggtgaccagaa

SEQ ID NO: 5420268 - DNA, 25 bp, Homo sapien
tccatagttacgagttagcatacag

SEQ ID NO: 5420269 - DNA, 25 bp, Homo sapien
tgaccctccgataaatgaagactga

SEQ ID NO: 5420270 - DNA, 25 bp, Homo sapien
cacattacaacctcaactactgggc

SEQ ID NO: 5420271 - DNA, 25 bp, Homo sapien
taagacctaactttcacctcagcag

SEQ ID NO: 5420272 - DNA, 25 bp, Homo sapien
actgtaattgcaaaataagctactg

SEQ ID NO: 5420273 - DNA, 25 bp, Homo sapien
tgctcagcccattttgattggttaa

SEQ ID NO: 5420274 - DNA, 25 bp, Homo sapien
tcagcccattttgattggttaaaac

SEQ ID NO: 5420275 - DNA, 25 bp, Homo sapien
cctcccaatccagcctcgagtagct

SEQ ID NO: 5420276 - DNA, 25 bp, Homo sapien
gaataagccttcagatacggagatg

SEQ ID NO: 5420277 - DNA, 25 bp, Homo sapien
tatagtcagtcaacagagcccaaac

SEQ ID NO: 5420278 - DNA, 25 bp, Homo sapien
tctctaatagataacccagaagcct

SEQ ID NO: 5420279 - DNA, 25 bp, Homo sapien
tgattgctctaatccagaacaggga

SEQ ID NO: 5420280 - DNA, 25 bp, Homo sapien
agcaatatccaccacatttagaaag

SEQ ID NO: 5420281 - DNA, 25 bp, Homo sapien
tcacaaggccagcaatatccaccac

SEQ ID NO: 5420282 - DNA, 25 bp, Homo sapien
gccatcacaggcactaatatgagat

SEQ ID NO: 5420283 - DNA, 25 bp, Homo sapien
aatatgagataaaaaagcattcccc

SEQ ID NO: 5420284 - DNA, 25 bp, Homo sapien
gcctgaagagccaatctgagggata

SEQ ID NO: 5420285 - DNA, 25 bp, Homo sapien
caagggtatataagcacttgtgtac

SEQ ID NO: 5420286 - DNA, 25 bp, Homo sapien
aaaggacactgaagtcagcctgaag

SEQ ID NO: 5420287 - DNA, 25 bp, Homo sapien
ctaagaatctgggtatgcaagggta

SEQ ID NO: 5420288 - DNA, 25 bp, Homo sapien
tgactattggttaacacattgaaga

SEQ ID NO: 5420289 - DNA, 25 bp, Homo sapien
agcctgactattggttaacacattg

SEQ ID NO: 5420290 - DNA, 25 bp, Homo sapien
ctcattaggatcaatagtgcagaac

SEQ ID NO: 5420291 - DNA, 25 bp, Homo sapien
caatagtgcagaacgggaagttttc

SEQ ID NO: 5420292 - DNA, 25 bp, Homo sapien
ctctagcatgaaatgtagaagtcat

SEQ ID NO: 5420293 - DNA, 25 bp, Homo sapien
ctaacaaaaccttctctagcatgaa

SEQ ID NO: 5420294 - DNA, 25 bp, Homo sapien
aaccttctctagcatgaaatgtaga

SEQ ID NO: 5420295 - DNA, 25 bp, Homo sapien
aacaaaaccttctctagcatgaaat

SEQ ID NO: 5420296 - DNA, 25 bp, Homo sapien
tagtgatcctccactcctgataggt

SEQ ID NO: 5420297 - DNA, 25 bp, Homo sapien
accactgtgggtggcgttgcagaca

SEQ ID NO: 5420298 - DNA, 25 bp, Homo sapien
tgctgacactggatcaccactgtgg

SEQ ID NO: 5420299 - DNA, 25 bp, Homo sapien
tacatgtgggcaccactgagaccag

SEQ ID NO: 5420300 - DNA, 25 bp, Homo sapien
ttcagtgaggttccaaatcttccaa

SEQ ID NO: 5420301 - DNA, 25 bp, Homo sapien
ccaacatttggcaatccaacaatac

SEQ ID NO: 5420302 - DNA, 25 bp, Homo sapien
catcacctccctttttagggggcat

SEQ ID NO: 5420303 - DNA, 25 bp, Homo sapien
caacaataccaattttcagtgaggt

SEQ ID NO: 5420304 - DNA, 25 bp, Homo sapien
aagttctgtaaacatatccgttgtc

SEQ ID NO: 5420305 - DNA, 25 bp, Homo sapien
tccaaaactaacacagagctaaatc

SEQ ID NO: 5420306 - DNA, 25 bp, Homo sapien
aaattagccggccatcaggcgcgca

SEQ ID NO: 5420307 - DNA, 25 bp, Homo sapien
ccgttgtcaaaagagtcattgctga

SEQ ID NO: 5420308 - DNA, 25 bp, Homo sapien
ctttggcactgaaggtacggctcat

SEQ ID NO: 5420309 - DNA, 25 bp, Homo sapien
ccacctttggcactgaaggtacggc

SEQ ID NO: 5420310 - DNA, 25 bp, Homo sapien
cctttggcactgaaggtacggctca

SEQ ID NO: 5420311 - DNA, 25 bp, Homo sapien
cacctttggcactgaaggtacggct

SEQ ID NO: 5420312 - DNA, 25 bp, Homo sapien
ggtcccagcggcagcgagagaaagg

SEQ ID NO: 5420313 - DNA, 25 bp, Homo sapien
cgtgctcggcctgggcgatgacacg

SEQ ID NO: 5420314 - DNA, 25 bp, Homo sapien
tgggcgatgacacggggtcccagcg

SEQ ID NO: 5420315 - DNA, 25 bp, Homo sapien
cagcgagagaaaggtcctgccggca

SEQ ID NO: 5420316 - DNA, 25 bp, Homo sapien
caggcccgtcccctccgccgagcgg

SEQ ID NO: 5420317 - DNA, 25 bp, Homo sapien
cggcgacagcggcggaacgggcggg

SEQ ID NO: 5420318 - DNA, 25 bp, Homo sapien
cgacagcggcggaacgggcgggccg

SEQ ID NO: 5420319 - DNA, 25 bp, Homo sapien
aaaagctgtatgagtgacctctccc

SEQ ID NO: 5420320 - DNA, 25 bp, Homo sapien
catcagcaatggctacgtgggtaag

SEQ ID NO: 5420321 - DNA, 25 bp, Homo sapien
ggtgctgccaacacttgcctgataa

SEQ ID NO: 5420322 - DNA, 25 bp, Homo sapien
aaagttctaacaagggtcccatcag

SEQ ID NO: 5420323 - DNA, 25 bp, Homo sapien
taaaacacaagtaatcaattgcttc

SEQ ID NO: 5420324 - DNA, 25 bp, Homo sapien
gtcattcttatgcttgaagagtctg

SEQ ID NO: 5420325 - DNA, 25 bp, Homo sapien
gaatttggaccataagttaccagtg

SEQ ID NO: 5420326 - DNA, 25 bp, Homo sapien
cattcaaagtactagggctcaagca

SEQ ID NO: 5420327 - DNA, 25 bp, Homo sapien
acagtggtcacatcggttgagctgg

SEQ ID NO: 5420328 - DNA, 25 bp, Homo sapien
caaaaggtgtcacagtggtcacatc

SEQ ID NO: 5420329 - DNA, 25 bp, Homo sapien
tggtcacatcggttgagctggaaat

SEQ ID NO: 5420330 - DNA, 25 bp, Homo sapien
tgagctggaaattggggaatcttgt

SEQ ID NO: 5420331 - DNA, 25 bp, Homo sapien
tgaagaaggaacaaaaggaacatat

SEQ ID NO: 5420332 - DNA, 25 bp, Homo sapien
tagtcaagtaaagaagtgggagtga

SEQ ID NO: 5420333 - DNA, 25 bp, Homo sapien
caagtaaagaagtgggagtgaagaa

SEQ ID NO: 5420334 - DNA, 25 bp, Homo sapien
aacaaaaggaacatataactggttg

SEQ ID NO: 5420335 - DNA, 25 bp, Homo sapien
tcttcaatcccagattatccaccat

SEQ ID NO: 5420336 - DNA, 25 bp, Homo sapien
agtgactatccaaacatttgctact

SEQ ID NO: 5420337 - DNA, 25 bp, Homo sapien
gtgactatccaaacatttgctactc

SEQ ID NO: 5420338 - DNA, 25 bp, Homo sapien
tgctactctcttcaatcccagatta

SEQ ID NO: 5420339 - DNA, 25 bp, Homo sapien
gacagattctctttccttaagatct

SEQ ID NO: 5420340 - DNA, 25 bp, Homo sapien
gggacagattctctttccttaagat

SEQ ID NO: 5420341 - DNA, 25 bp, Homo sapien
tgggacagattctctttccttaaga

SEQ ID NO: 5420342 - DNA, 25 bp, Homo sapien
ttgggacagattctctttccttaag

SEQ ID NO: 5420343 - DNA, 25 bp, Homo sapien
tgtggaggagtcacaaagagcagct

SEQ ID NO: 5420344 - DNA, 25 bp, Homo sapien
gaaagctccaccaagtggtccccat

SEQ ID NO: 5420345 - DNA, 25 bp, Homo sapien
gactaacaaggtgcgcttcttcagg

SEQ ID NO: 5420346 - DNA, 25 bp, Homo sapien
agagaaagccctgcggctcttccag

SEQ ID NO: 5420347 - DNA, 25 bp, Homo sapien
agatatctacgaatgcaactggctt

SEQ ID NO: 5420348 - DNA, 25 bp, Homo sapien
gctgagatatctacgaatgcaactg

SEQ ID NO: 5420349 - DNA, 25 bp, Homo sapien
gagatatctacgaatgcaactggct

SEQ ID NO: 5420350 - DNA, 25 bp, Homo sapien
tgagatatctacgaatgcaactggc

SEQ ID NO: 5420351 - DNA, 25 bp, Homo sapien
ccagaagctgcatgctatgaatgtc

SEQ ID NO: 5420352 - DNA, 25 bp, Homo sapien
tgaatcagggtgtcgcatacatgcc

SEQ ID NO: 5420353 - DNA, 25 bp, Homo sapien
tttaacaaatctggcagctccgtcc

SEQ ID NO: 5420354 - DNA, 25 bp, Homo sapien
catacatgccattctctcaggtgcg

SEQ ID NO: 5420355 - DNA, 25 bp, Homo sapien
cacgacgactaaagttccctccaag

SEQ ID NO: 5420356 - DNA, 25 bp, Homo sapien
ttcaggataatctcttgggtgatgt

SEQ ID NO: 5420357 - DNA, 25 bp, Homo sapien
ctgttcaggataatctcttgggtga

SEQ ID NO: 5420358 - DNA, 25 bp, Homo sapien
caggataatctcttgggtgatgttc

SEQ ID NO: 5420359 - DNA, 25 bp, Homo sapien
cacactgttcaggataatctcttgg

SEQ ID NO: 5420360 - DNA, 25 bp, Homo sapien
cacacagcccgtgagcattccgtgt

SEQ ID NO: 5420361 - DNA, 25 bp, Homo sapien
cgtgttgctcaaaatggcccctcag

SEQ ID NO: 5420362 - DNA, 25 bp, Homo sapien
attccgtgttgctcaaaatggcccc

SEQ ID NO: 5420363 - DNA, 25 bp, Homo sapien
acagcccgtgagcattccgtgttgc

SEQ ID NO: 5420364 - DNA, 25 bp, Homo sapien
ggctctttaggagactctgacttag

SEQ ID NO: 5420365 - DNA, 25 bp, Homo sapien
tctttaggagactctgacttagaca

SEQ ID NO: 5420366 - DNA, 25 bp, Homo sapien
ctgttcgggctctttaggagactct

SEQ ID NO: 5420367 - DNA, 25 bp, Homo sapien
ctttaggagactctgacttagacat

SEQ ID NO: 5420368 - DNA, 25 bp, Homo sapien
ccaccccagtggtgtatacccgctg

SEQ ID NO: 5420369 - DNA, 25 bp, Homo sapien
cccaccccagtggtgtatacccgct

SEQ ID NO: 5420370 - DNA, 25 bp, Homo sapien
tccctctattagtaaatctacgcgg

SEQ ID NO: 5420371 - DNA, 25 bp, Homo sapien
gaaacgcctcgctgccacttaacaa

SEQ ID NO: 5420372 - DNA, 25 bp, Homo sapien
gagactctatgggaagccgagaacc

SEQ ID NO: 5420373 - DNA, 25 bp, Homo sapien
agccgagaaccagtgtcttcttcca

SEQ ID NO: 5420374 - DNA, 25 bp, Homo sapien
tcaagagatcttgcaaaagaggaga

SEQ ID NO: 5420375 - DNA, 25 bp, Homo sapien
aggctccatcacagggccgagagca

SEQ ID NO: 5420376 - DNA, 25 bp, Homo sapien
gacaactcgtcgtttgcacccgagg

SEQ ID NO: 5420377 - DNA, 25 bp, Homo sapien
cactctggtcgtacttttgggtcaa

SEQ ID NO: 5420378 - DNA, 25 bp, Homo sapien
agtgcccaggtctgcccgagggcgc

SEQ ID NO: 5420379 - DNA, 25 bp, Homo sapien
cgagggcgctggtatttctggttca

SEQ ID NO: 5420380 - DNA, 25 bp, Homo sapien
tctgcccgagggcgctggtatttct

SEQ ID NO: 5420381 - DNA, 25 bp, Homo sapien
gtggggagtgtgctatattaaaacc

SEQ ID NO: 5420382 - DNA, 25 bp, Homo sapien
cacactgacaaggtccagggaggac

SEQ ID NO: 5420383 - DNA, 25 bp, Homo sapien
ttttcacactgacaaggtccaggga

SEQ ID NO: 5420384 - DNA, 25 bp, Homo sapien
cttttcacactgacaaggtccaggg

SEQ ID NO: 5420385 - DNA, 25 bp, Homo sapien
ttcacactgacaaggtccagggagg

SEQ ID NO: 5420386 - DNA, 25 bp, Homo sapien
ttgttacagtgagaaaataagcggc

SEQ ID NO: 5420387 - DNA, 25 bp, Homo sapien
cagcacatcccactgtttagtcata

SEQ ID NO: 5420388 - DNA, 25 bp, Homo sapien
cttcgtgcagcgtgttgtatgggct

SEQ ID NO: 5420389 - DNA, 25 bp, Homo sapien
gcaaaacccggcagataatcagcac

SEQ ID NO: 5420390 - DNA, 25 bp, Homo sapien
gggaaatggcgggatgcagcaggct

SEQ ID NO: 5420391 - DNA, 25 bp, Homo sapien
gcgacaattaggaagtcacttacac

SEQ ID NO: 5420392 - DNA, 25 bp, Homo sapien
aaatggcgggatgcagcaggctcca

SEQ ID NO: 5420393 - DNA, 25 bp, Homo sapien
ttaggaagtcacttacaccgctggg

SEQ ID NO: 5420394 - DNA, 25 bp, Homo sapien
gcttgtggctcggtttcattggtac

SEQ ID NO: 5420395 - DNA, 25 bp, Homo sapien
gagtcgagtaggactgtcagcccta

SEQ ID NO: 5420396 - DNA, 25 bp, Homo sapien
gctcacatttccgtctccacttggg

SEQ ID NO: 5420397 - DNA, 25 bp, Homo sapien
acctggcttggtgcgtgagtgtaaa

SEQ ID NO: 5420398 - DNA, 25 bp, Homo sapien
gaggcgcagccagcggcacttcaaa

SEQ ID NO: 5420399 - DNA, 25 bp, Homo sapien
tctgcctgcgccctcattgggcgag

SEQ ID NO: 5420400 - DNA, 25 bp, Homo sapien
cggcacttcaaagcgggtgctcctc

SEQ ID NO: 5420401 - DNA, 25 bp, Homo sapien
tcgggcccctcggagcgtctgattg

SEQ ID NO: 5420402 - DNA, 25 bp, Homo sapien
gcgaagtgcaactttccggcgcctg

SEQ ID NO: 5420403 - DNA, 25 bp, Homo sapien
tctgcggctccggagaaactgttgc

SEQ ID NO: 5420404 - DNA, 25 bp, Homo sapien
agaaaagtcaagtcgtagccaccct

SEQ ID NO: 5420405 - DNA, 25 bp, Homo sapien
tgctatggccacgtctatactcggg

SEQ ID NO: 5420406 - DNA, 25 bp, Homo sapien
ctccttcttgctccctcccccatcc

SEQ ID NO: 5420407 - DNA, 25 bp, Homo sapien
tcttcccccacttcctcttgccctc

SEQ ID NO: 5420408 - DNA, 25 bp, Homo sapien
tcctcttgccctcctccttcttgct

SEQ ID NO: 5420409 - DNA, 25 bp, Homo sapien
tgcactttgtttcttcccccacttc

SEQ ID NO: 5420410 - DNA, 25 bp, Homo sapien
tcatttccaaggtgcacacgacggc

SEQ ID NO: 5420411 - DNA, 25 bp, Homo sapien
tacgagtcctggtacaagtcgggct

SEQ ID NO: 5420412 - DNA, 25 bp, Homo sapien
aagtcgggcttccattcgacgctgg

SEQ ID NO: 5420413 - DNA, 25 bp, Homo sapien
gacctgcaacaagatcggcaacacg

SEQ ID NO: 5420414 - DNA, 25 bp, Homo sapien
gccagcgccatgatatcgggcgccg

SEQ ID NO: 5420415 - DNA, 25 bp, Homo sapien
cgccgccagcgccatgatatcgggc

SEQ ID NO: 5420416 - DNA, 25 bp, Homo sapien
agcgccatgatatcgggcgccgcgg

SEQ ID NO: 5420417 - DNA, 25 bp, Homo sapien
cgccatgatatcgggcgccgcggct

SEQ ID NO: 5420418 - DNA, 25 bp, Homo sapien
ctcggcacgctctgcccgccgctac

SEQ ID NO: 5420419 - DNA, 25 bp, Homo sapien
agctcggcacgctctgcccgccgct

SEQ ID NO: 5420420 - DNA, 25 bp, Homo sapien
ggggagctcggcacgctctgcccgc

SEQ ID NO: 5420421 - DNA, 25 bp, Homo sapien
gggagctcggcacgctctgcccgcc

SEQ ID NO: 5420422 - DNA, 25 bp, Homo sapien
gtctggccccaacgactcttagagg

SEQ ID NO: 5420423 - DNA, 25 bp, Homo sapien
catcctgcatgactccggcgtcagt

SEQ ID NO: 5420424 - DNA, 25 bp, Homo sapien
aaaagggcagcgacagtgacacgga

SEQ ID NO: 5420425 - DNA, 25 bp, Homo sapien
caaacacattaagacgcacaacggg

SEQ ID NO: 5420426 - DNA, 25 bp, Homo sapien
aactttatctcagctggtccgcggg

SEQ ID NO: 5420427 - DNA, 25 bp, Homo sapien
tgaaacaccaagtcgcaaagtagcg

SEQ ID NO: 5420428 - DNA, 25 bp, Homo sapien
ttttgacttagagcacacagcagcc

SEQ ID NO: 5420429 - DNA, 25 bp, Homo sapien
caggcctgggaacacatttgggaca

SEQ ID NO: 5420430 - DNA, 25 bp, Homo sapien
tgccccgctcttcttactcgagttt

SEQ ID NO: 5420431 - DNA, 25 bp, Homo sapien
tcaagctgttcataaccgggagccc

SEQ ID NO: 5420432 - DNA, 25 bp, Homo sapien
tctcgttgataataaaggcagatca

SEQ ID NO: 5420433 - DNA, 25 bp, Homo sapien
tcaaagggcccggtcgtgcaggtcc

SEQ ID NO: 5420434 - DNA, 25 bp, Homo sapien
cgcgggtcagcggacgtccatcacc

SEQ ID NO: 5420435 - DNA, 25 bp, Homo sapien
ggtcagcggacgtccatcacccagg

SEQ ID NO: 5420436 - DNA, 25 bp, Homo sapien
ctgccccgcgggtcagcggacgtcc

SEQ ID NO: 5420437 - DNA, 25 bp, Homo sapien
cagccgggagacagcagtccgcgga

SEQ ID NO: 5420438 - DNA, 25 bp, Homo sapien
aaccttgacctgagcgggtggcgac

SEQ ID NO: 5420439 - DNA, 25 bp, Homo sapien
aacacgagttcggtccccaattgcg

SEQ ID NO: 5420440 - DNA, 25 bp, Homo sapien
gatcccgccagttacaacacgagtt

SEQ ID NO: 5420441 - DNA, 25 bp, Homo sapien
accaaattggagacagcgcgcgtgg

SEQ ID NO: 5420442 - DNA, 25 bp, Homo sapien
gcaccatcctccagcgtttcctttt

SEQ ID NO: 5420443 - DNA, 25 bp, Homo sapien
tccgcaccatcctccagcgtttcct

SEQ ID NO: 5420444 - DNA, 25 bp, Homo sapien
ttctgcccttggaatgaattggatt

SEQ ID NO: 5420445 - DNA, 25 bp, Homo sapien
atcctccagcgtttccttttctgac

SEQ ID NO: 5420446 - DNA, 25 bp, Homo sapien
acgcgacagtttgcgttccagcggg

SEQ ID NO: 5420447 - DNA, 25 bp, Homo sapien
cagcaaccaagaggatcctgcgaag

SEQ ID NO: 5420448 - DNA, 25 bp, Homo sapien
ctgtcagcgcgtggagaccggcttt

SEQ ID NO: 5420449 - DNA, 25 bp, Homo sapien
agaccggcttttgccgcgagcagca

SEQ ID NO: 5420450 - DNA, 25 bp, Homo sapien
gggcgttggccgattttctctcctc

SEQ ID NO: 5420451 - DNA, 25 bp, Homo sapien
cccaaatctgaaatcgggtaacagt

SEQ ID NO: 5420452 - DNA, 25 bp, Homo sapien
aaaagcgacaccttcaaaccctgcg

SEQ ID NO: 5420453 - DNA, 25 bp, Homo sapien
tcatactgcgtggagtgacttcctc

SEQ ID NO: 5420454 - DNA, 25 bp, Homo sapien
ctttgcggcgggtaactcggctggg

SEQ ID NO: 5420455 - DNA, 25 bp, Homo sapien
ttagggcgacgtcctcctgggaagc

SEQ ID NO: 5420456 - DNA, 25 bp, Homo sapien
gtcccgcacatcttcgtcattactg

SEQ ID NO: 5420457 - DNA, 25 bp, Homo sapien
gctccggggcagctcgggccggagg

SEQ ID NO: 5420458 - DNA, 25 bp, Homo sapien
agctctccgcgttcgtcccgcacat

SEQ ID NO: 5420459 - DNA, 25 bp, Homo sapien
catcttcgtcattactgctacattc

SEQ ID NO: 5420460 - DNA, 25 bp, Homo sapien
tgtggaaggcagaataatagtccct

SEQ ID NO: 5420461 - DNA, 25 bp, Homo sapien
tagatgtacacatcctaacccctgg

SEQ ID NO: 5420462 - DNA, 25 bp, Homo sapien
tgtatgccagtaatagaagggccaa

SEQ ID NO: 5420463 - DNA, 25 bp, Homo sapien
tgcatgattcttcaggtgggcctga

SEQ ID NO: 5420464 - DNA, 25 bp, Homo sapien
tacaattcacttcaagcaaattcaa

SEQ ID NO: 5420465 - DNA, 25 bp, Homo sapien
acttcaagcaaattcaaatcctaga

SEQ ID NO: 5420466 - DNA, 25 bp, Homo sapien
gcaaattcaaatcctagaataacaa

SEQ ID NO: 5420467 - DNA, 25 bp, Homo sapien
ataattattacaattcacttcaagc

SEQ ID NO: 5420468 - DNA, 25 bp, Homo sapien
tacttgaattgacagtctagagatg

SEQ ID NO: 5420469 - DNA, 25 bp, Homo sapien
gaaaatgtcacagagttatatgcgg

SEQ ID NO: 5420470 - DNA, 25 bp, Homo sapien
ggaacaagaaacagttaccaacaga

SEQ ID NO: 5420471 - DNA, 25 bp, Homo sapien
tatatgcggtttttatctggtatgg

SEQ ID NO: 5420472 - DNA, 25 bp, Homo sapien
ttcccaggtaattgtcacatacagt

SEQ ID NO: 5420473 - DNA, 25 bp, Homo sapien
cccaggtaattgtcacatacagtct

SEQ ID NO: 5420474 - DNA, 25 bp, Homo sapien
tcccaggtaattgtcacatacagtc

SEQ ID NO: 5420475 - DNA, 25 bp, Homo sapien
cattctctttgtgtcactttagtat

SEQ ID NO: 5420476 - DNA, 25 bp, Homo sapien
tctctttgtgtcactttagtatgtg

SEQ ID NO: 5420477 - DNA, 25 bp, Homo sapien
tctttgtgtcactttagtatgtgta

SEQ ID NO: 5420478 - DNA, 25 bp, Homo sapien
ctttgtgtcactttagtatgtgtac

SEQ ID NO: 5420479 - DNA, 25 bp, Homo sapien
tgctcttcaccaggatttcgctgtg

SEQ ID NO: 5420480 - DNA, 25 bp, Homo sapien
ggatttcgctgtgcccgtttccttg

SEQ ID NO: 5420481 - DNA, 25 bp, Homo sapien
ctttgcttgtaactaccaggacttc

SEQ ID NO: 5420482 - DNA, 25 bp, Homo sapien
ttctcctctatacaagtctgtgcca

SEQ ID NO: 5420483 - DNA, 25 bp, Homo sapien
gctttttcccggttatggtgactgc

SEQ ID NO: 5420484 - DNA, 25 bp, Homo sapien
tcctccctagaactctcgtgtttta

SEQ ID NO: 5420485 - DNA, 25 bp, Homo sapien
cccggttatggtgactgctagaaag

SEQ ID NO: 5420486 - DNA, 25 bp, Homo sapien
aagttcttcatgaagctttctcttc

SEQ ID NO: 5420487 - DNA, 25 bp, Homo sapien
ttattgttactctcactctcactac

SEQ ID NO: 5420488 - DNA, 25 bp, Homo sapien
attgttactctcactctcactactg

SEQ ID NO: 5420489 - DNA, 25 bp, Homo sapien
gttactctcactctcactactgctt

SEQ ID NO: 5420490 - DNA, 25 bp, Homo sapien
tgttactctcactctcactactgct

SEQ ID NO: 5420491 - DNA, 25 bp, Homo sapien
tcatgagctccctctattggaccca

SEQ ID NO: 5420492 - DNA, 25 bp, Homo sapien
catgagctccctctattggacccag

SEQ ID NO: 5420493 - DNA, 25 bp, Homo sapien
tcttcaccctcacttgcaacatact

SEQ ID NO: 5420494 - DNA, 25 bp, Homo sapien
cttcaccctcacttgcaacatactc

SEQ ID NO: 5420495 - DNA, 25 bp, Homo sapien
ttcttcaccctcacttgcaacatac

SEQ ID NO: 5420496 - DNA, 25 bp, Homo sapien
agcttactgataaaaagatcattac

SEQ ID NO: 5420497 - DNA, 25 bp, Homo sapien
cagcttactgataaaaagatcatta

SEQ ID NO: 5420498 - DNA, 25 bp, Homo sapien
tcagcttactgataaaaagatcatt

SEQ ID NO: 5420499 - DNA, 25 bp, Homo sapien
tcatttgcggtcaagtttctcccca

SEQ ID NO: 5420500 - DNA, 25 bp, Homo sapien
ctccgctattagctccgaggggtgc

SEQ ID NO: 5420501 - DNA, 25 bp, Homo sapien
gctattagctccgaggggtgcatcg

SEQ ID NO: 5420502 - DNA, 25 bp, Homo sapien
ccgctattagctccgaggggtgcat

SEQ ID NO: 5420503 - DNA, 25 bp, Homo sapien
tattagctccgaggggtgcatcgat

SEQ ID NO: 5420504 - DNA, 25 bp, Homo sapien
tctctacctttttcggactccacag

SEQ ID NO: 5420505 - DNA, 25 bp, Homo sapien
ttagtagttattctctcagtaagag

SEQ ID NO: 5420506 - DNA, 25 bp, Homo sapien
ggagtcttcttatgtaactttgtca

SEQ ID NO: 5420507 - DNA, 25 bp, Homo sapien
tccacagtaggaatgcagttgaagc

SEQ ID NO: 5420508 - DNA, 25 bp, Homo sapien
tccctgcagatagcaaactaatgac

SEQ ID NO: 5420509 - DNA, 25 bp, Homo sapien
cataaggtttatgtaaggtaagaga

SEQ ID NO: 5420510 - DNA, 25 bp, Homo sapien
agcagttttaggctggctattggta

SEQ ID NO: 5420511 - DNA, 25 bp, Homo sapien
tttatgtaaggtaagagagactctt

SEQ ID NO: 5420512 - DNA, 25 bp, Homo sapien
tgtttattagaaactttgccttaca

SEQ ID NO: 5420513 - DNA, 25 bp, Homo sapien
ttatctccttagtacttgagagagc

SEQ ID NO: 5420514 - DNA, 25 bp, Homo sapien
ctggtgtgtaatattgagagtttat

SEQ ID NO: 5420515 - DNA, 25 bp, Homo sapien
tccttagtacttgagagagcttgtt

SEQ ID NO: 5420516 - DNA, 25 bp, Homo sapien
ttattttatctccttagtacttgag

SEQ ID NO: 5420517 - DNA, 25 bp, Homo sapien
tccaaggagttgcataagggaactg

SEQ ID NO: 5420518 - DNA, 25 bp, Homo sapien
taagggaactgctctgtaacagatt

SEQ ID NO: 5420519 - DNA, 25 bp, Homo sapien
ggattgccagaagggcaactgagtt

SEQ ID NO: 5420520 - DNA, 25 bp, Homo sapien
tgtaacagattcaggtaggattgcc

SEQ ID NO: 5420521 - DNA, 25 bp, Homo sapien
tcctcagtctgtgtgcttaaccgct

SEQ ID NO: 5420522 - DNA, 25 bp, Homo sapien
cattgcttccttagaggagcccttc

SEQ ID NO: 5420523 - DNA, 25 bp, Homo sapien
tacgtatggagctacaaagatgcct

SEQ ID NO: 5420524 - DNA, 25 bp, Homo sapien
gaactgatggtttcctctatacgaa

SEQ ID NO: 5420525 - DNA, 25 bp, Homo sapien
caacatatatgatcagagtttccca

SEQ ID NO: 5420526 - DNA, 25 bp, Homo sapien
catattttgggaatggtcttagtca

SEQ ID NO: 5420527 - DNA, 25 bp, Homo sapien
tgtttgtcctctcccgaaacaaatc

SEQ ID NO: 5420528 - DNA, 25 bp, Homo sapien
gaaacaaatcatgtctagtgcctac

SEQ ID NO: 5420529 - DNA, 25 bp, Homo sapien
aacttgcattgattccagaaagacc

SEQ ID NO: 5420530 - DNA, 25 bp, Homo sapien
tgagaaataatgaatgtgattttgg

SEQ ID NO: 5420531 - DNA, 25 bp, Homo sapien
gagaaataatgaatgtgattttggt

SEQ ID NO: 5420532 - DNA, 25 bp, Homo sapien
gaaataatgaatgtgattttggtta

SEQ ID NO: 5420533 - DNA, 25 bp, Homo sapien
ctgagaaataatgaatgtgattttg

SEQ ID NO: 5420534 - DNA, 25 bp, Homo sapien
tgatctctgatgttcatgtcatctt

SEQ ID NO: 5420535 - DNA, 25 bp, Homo sapien
tgatgttcatgtcatctttggcata

SEQ ID NO: 5420536 - DNA, 25 bp, Homo sapien
tctctgatgttcatgtcatctttgg

SEQ ID NO: 5420537 - DNA, 25 bp, Homo sapien
caaagggctgatctctgatgttcat

SEQ ID NO: 5420538 - DNA, 25 bp, Homo sapien
attcaaatttgtattcggtctctcc

SEQ ID NO: 5420539 - DNA, 25 bp, Homo sapien
caaatttgtattcggtctctccttc

SEQ ID NO: 5420540 - DNA, 25 bp, Homo sapien
aatttgtattcggtctctccttctg

SEQ ID NO: 5420541 - DNA, 25 bp, Homo sapien
tcaaatttgtattcggtctctcctt

SEQ ID NO: 5420542 - DNA, 25 bp, Homo sapien
ggcttcatacatgaaattaaggcca

SEQ ID NO: 5420543 - DNA, 25 bp, Homo sapien
gggcttcatacatgaaattaaggcc

SEQ ID NO: 5420544 - DNA, 25 bp, Homo sapien
ggggcttcatacatgaaattaaggc

SEQ ID NO: 5420545 - DNA, 25 bp, Homo sapien
cttcttatcatatgatattttctgt

SEQ ID NO: 5420546 - DNA, 25 bp, Homo sapien
ctttaagatattgctgcatcaattc

SEQ ID NO: 5420547 - DNA, 25 bp, Homo sapien
tattgctgcatcaattcttcttgtt

SEQ ID NO: 5420548 - DNA, 25 bp, Homo sapien
ccaccagggctttaggcctagagaa

SEQ ID NO: 5420549 - DNA, 25 bp, Homo sapien
cggaggctgtcctagggatctcaga

SEQ ID NO: 5420550 - DNA, 25 bp, Homo sapien
tcagcagagaaaggcgagaccacca

SEQ ID NO: 5420551 - DNA, 25 bp, Homo sapien
cagaataaacgctgaggacccgctg

SEQ ID NO: 5420552 - DNA, 25 bp, Homo sapien
tgaagttggcgaaggatttccccat

SEQ ID NO: 5420553 - DNA, 25 bp, Homo sapien
gatttggaggcaggatgaaagtctt

SEQ ID NO: 5420554 - DNA, 25 bp, Homo sapien
tctttcttgcacatgaagttggcga

SEQ ID NO: 5420555 - DNA, 25 bp, Homo sapien
tttttgatattggatttggaggcag

SEQ ID NO: 5420556 - DNA, 25 bp, Homo sapien
gaacttccgagatcaaaggtgacag

SEQ ID NO: 5420557 - DNA, 25 bp, Homo sapien
ggaactgcgtttccagcagcaaggg

SEQ ID NO: 5420558 - DNA, 25 bp, Homo sapien
tccacctgtcacttcgggtagctgg

SEQ ID NO: 5420559 - DNA, 25 bp, Homo sapien
aaggtgacagcttccggcaactgat

SEQ ID NO: 5420560 - DNA, 25 bp, Homo sapien
tcataacagcccatcaaatagtgtc

SEQ ID NO: 5420561 - DNA, 25 bp, Homo sapien
ggagatccaggacataagagttgaa

SEQ ID NO: 5420562 - DNA, 25 bp, Homo sapien
cagaaggcataggtaagagagagat

SEQ ID NO: 5420563 - DNA, 25 bp, Homo sapien
taacagaagccatcaagacatcaga

SEQ ID NO: 5420564 - DNA, 25 bp, Homo sapien
aagattagtaagacatactcccagc

SEQ ID NO: 5420565 - DNA, 25 bp, Homo sapien
ttttttccataagacaagttccagc

SEQ ID NO: 5420566 - DNA, 25 bp, Homo sapien
tagcatctgcctgtgtaaagccatt

SEQ ID NO: 5420567 - DNA, 25 bp, Homo sapien
aaacaatgtgtctgttctggcagca

SEQ ID NO: 5420568 - DNA, 25 bp, Homo sapien
gaaatttgccttaccagacactaga

SEQ ID NO: 5420569 - DNA, 25 bp, Homo sapien
tcctggtaacagcaatgaggcctta

SEQ ID NO: 5420570 - DNA, 25 bp, Homo sapien
tctcccatggaaaaagatattgcag

SEQ ID NO: 5420571 - DNA, 25 bp, Homo sapien
tagacttacccttgagcattcagag

SEQ ID NO: 5420572 - DNA, 25 bp, Homo sapien
cctgcattacgatgctttgttcaaa

SEQ ID NO: 5420573 - DNA, 25 bp, Homo sapien
caggactgtggagataataatacat

SEQ ID NO: 5420574 - DNA, 25 bp, Homo sapien
taatacatatggaggttcttattcc

SEQ ID NO: 5420575 - DNA, 25 bp, Homo sapien
cagattgtacttctgcaggactgtg

SEQ ID NO: 5420576 - DNA, 25 bp, Homo sapien
cactaccacacctgggtattctttt

SEQ ID NO: 5420577 - DNA, 25 bp, Homo sapien
tcaaggggtactcccacctcagtct

SEQ ID NO: 5420578 - DNA, 25 bp, Homo sapien
acctcagtctccaaagtagctggga

SEQ ID NO: 5420579 - DNA, 25 bp, Homo sapien
ctacaggcatgcactaccacacctg

SEQ ID NO: 5420580 - DNA, 25 bp, Homo sapien
taaatgagtactatttgtcaaggaa

SEQ ID NO: 5420581 - DNA, 25 bp, Homo sapien
ggtccatctcctgctagtaatacac

SEQ ID NO: 5420582 - DNA, 25 bp, Homo sapien
ccactaagcctagccctctagtttt

SEQ ID NO: 5420583 - DNA, 25 bp, Homo sapien
taatttataggaacagttaatagga

SEQ ID NO: 5420584 - DNA, 25 bp, Homo sapien
catagattcaatcaaccgcagataa

SEQ ID NO: 5420585 - DNA, 25 bp, Homo sapien
aatccccttggatactaaaggatga

SEQ ID NO: 5420586 - DNA, 25 bp, Homo sapien
tgtagtcaggcttaacaatggttgc

SEQ ID NO: 5420587 - DNA, 25 bp, Homo sapien
cagttgaccctccatatgcacaggt

SEQ ID NO: 5420588 - DNA, 25 bp, Homo sapien
aaggtcacccagctaaaaactaatg

SEQ ID NO: 5420589 - DNA, 25 bp, Homo sapien
aatacgcggctagaatatgattcca

SEQ ID NO: 5420590 - DNA, 25 bp, Homo sapien
accctgcgcatgtggtgggagcaca

SEQ ID NO: 5420591 - DNA, 25 bp, Homo sapien
agaggttgcctctgttaacttgccc

SEQ ID NO: 5420592 - DNA, 25 bp, Homo sapien
agggtggggatgaatgctcaatttc

SEQ ID NO: 5420593 - DNA, 25 bp, Homo sapien
taggtcttaggggaatgtgagggtg

SEQ ID NO: 5420594 - DNA, 25 bp, Homo sapien
gttggagagtgtttgcattaatagc

SEQ ID NO: 5420595 - DNA, 25 bp, Homo sapien
gggatgaatgctcaatttctttata

SEQ ID NO: 5420596 - DNA, 25 bp, Homo sapien
tctgtaaaacaagtactcatcccgg

SEQ ID NO: 5420597 - DNA, 25 bp, Homo sapien
gtatatcacagcttcaccacggtcg

SEQ ID NO: 5420598 - DNA, 25 bp, Homo sapien
tcatcccggaattcatactcgttgg

SEQ ID NO: 5420599 - DNA, 25 bp, Homo sapien
aattagccagctcaccaggtcacag

SEQ ID NO: 5420600 - DNA, 25 bp, Homo sapien
gaggtcacggtgataatggataaat

SEQ ID NO: 5420601 - DNA, 25 bp, Homo sapien
agaggtcacggtgataatggataaa

SEQ ID NO: 5420602 - DNA, 25 bp, Homo sapien
ggagaatccctgttttctgctgtgt

SEQ ID NO: 5420603 - DNA, 25 bp, Homo sapien
aggagaatccctgttttctgctgtg

SEQ ID NO: 5420604 - DNA, 25 bp, Homo sapien
caggagaatccctgttttctgctgt

SEQ ID NO: 5420605 - DNA, 25 bp, Homo sapien
tgttccaaagctgtcgatcaccaaa

SEQ ID NO: 5420606 - DNA, 25 bp, Homo sapien
ccaaagctgtcgatcaccaaagctg

SEQ ID NO: 5420607 - DNA, 25 bp, Homo sapien
gagaactcttcctgccttatcaccc

SEQ ID NO: 5420608 - DNA, 25 bp, Homo sapien
aaagctgtcgatcaccaaagctgtc

SEQ ID NO: 5420609 - DNA, 25 bp, Homo sapien
cttcttttgaaaggcaggatgatta

SEQ ID NO: 5420610 - DNA, 25 bp, Homo sapien
gattaaatgtttatctaatccaaag

SEQ ID NO: 5420611 - DNA, 25 bp, Homo sapien
aggcaggatgattaaatgtttatct

SEQ ID NO: 5420612 - DNA, 25 bp, Homo sapien
ctaatccaaagattccaaaggaaat

SEQ ID NO: 5420613 - DNA, 25 bp, Homo sapien
cagtctgtggactaatattctgtaa

SEQ ID NO: 5420614 - DNA, 25 bp, Homo sapien
gatttaatagacaaactcagtgatt

SEQ ID NO: 5420615 - DNA, 25 bp, Homo sapien
ttagatttaatagacaaactcagtg

SEQ ID NO: 5420616 - DNA, 25 bp, Homo sapien
tgacctgatactcagtctgtggact

SEQ ID NO: 5420617 - DNA, 25 bp, Homo sapien
agttaaacacggcacagaaaaactg

SEQ ID NO: 5420618 - DNA, 25 bp, Homo sapien
tccaggctcttggttgaatagccac

SEQ ID NO: 5420619 - DNA, 25 bp, Homo sapien
cttggttgaatagccaccataaaca

SEQ ID NO: 5420620 - DNA, 25 bp, Homo sapien
ctgaccaaagttaaacacggcacag

SEQ ID NO: 5420621 - DNA, 25 bp, Homo sapien
tcttcctgggctaatatgcagctct

SEQ ID NO: 5420622 - DNA, 25 bp, Homo sapien
gcgaacaggccaatgatgagaagta

SEQ ID NO: 5420623 - DNA, 25 bp, Homo sapien
ggtctccactctgtagatactgttc

SEQ ID NO: 5420624 - DNA, 25 bp, Homo sapien
acagcaacacatgtcgggtcagttg

SEQ ID NO: 5420625 - DNA, 25 bp, Homo sapien
gtgcttgtgtttgctattggctcta

SEQ ID NO: 5420626 - DNA, 25 bp, Homo sapien
ttttctcaaacgaaggaatcacagg

SEQ ID NO: 5420627 - DNA, 25 bp, Homo sapien
ggctctattgatgggcagtgtaatt

SEQ ID NO: 5420628 - DNA, 25 bp, Homo sapien
acaggctcactggtgcttgtgtttg

SEQ ID NO: 5420629 - DNA, 25 bp, Homo sapien
taggctcggagagggaatatggctg

SEQ ID NO: 5420630 - DNA, 25 bp, Homo sapien
cgctttgggcatcacgggcactgca

SEQ ID NO: 5420631 - DNA, 25 bp, Homo sapien
ggagaggtggcagaataggctcgga

SEQ ID NO: 5420632 - DNA, 25 bp, Homo sapien
ggcttgggcactacgtgcagcgctt

SEQ ID NO: 5420633 - DNA, 25 bp, Homo sapien
catttactggtgctggactctcctc

SEQ ID NO: 5420634 - DNA, 25 bp, Homo sapien
tcatgcacatgagggatatgccagc

SEQ ID NO: 5420635 - DNA, 25 bp, Homo sapien
gatgctgcagaacagggtgactgct

SEQ ID NO: 5420636 - DNA, 25 bp, Homo sapien
ggctctgagactgatcgaaaccttc

SEQ ID NO: 5420637 - DNA, 25 bp, Homo sapien
caatgctatctccattgtgttttcc

SEQ ID NO: 5420638 - DNA, 25 bp, Homo sapien
atcaaaagaacaccaacaaggagag

SEQ ID NO: 5420639 - DNA, 25 bp, Homo sapien
tcaaaagaacaccaacaaggagagc

SEQ ID NO: 5420640 - DNA, 25 bp, Homo sapien
aatgctatctccattgtgttttcca

SEQ ID NO: 5420641 - DNA, 25 bp, Homo sapien
ctgtaatcacaagtgatattgggag

SEQ ID NO: 5420642 - DNA, 25 bp, Homo sapien
gtaatcacaagtgatattgggagag

SEQ ID NO: 5420643 - DNA, 25 bp, Homo sapien
tcacaagtgatattgggagagaaaa

SEQ ID NO: 5420644 - DNA, 25 bp, Homo sapien
aatcacaagtgatattgggagagaa

SEQ ID NO: 5420645 - DNA, 25 bp, Homo sapien
ccagccagatattatgattattcca

SEQ ID NO: 5420646 - DNA, 25 bp, Homo sapien
taccctctctcgctttttcaaaaga

SEQ ID NO: 5420647 - DNA, 25 bp, Homo sapien
tattccaacaggaatttgtaccctc

SEQ ID NO: 5420648 - DNA, 25 bp, Homo sapien
aacaggaatttgtaccctctctcgc

SEQ ID NO: 5420649 - DNA, 25 bp, Homo sapien
cagtctcatgatttcagaatttaca

SEQ ID NO: 5420650 - DNA, 25 bp, Homo sapien
aattactgctcaaaattctgggctc

SEQ ID NO: 5420651 - DNA, 25 bp, Homo sapien
tatccaccttgcaaccaacatgcag

SEQ ID NO: 5420652 - DNA, 25 bp, Homo sapien
cagcatgcaaagctaattttcaaat

SEQ ID NO: 5420653 - DNA, 25 bp, Homo sapien
tgggcctatttctcagtttgcaaaa

SEQ ID NO: 5420654 - DNA, 25 bp, Homo sapien
actaattagcaaatgaaacctggga

SEQ ID NO: 5420655 - DNA, 25 bp, Homo sapien
tcgaatgggatgacttaaaatgaca

SEQ ID NO: 5420656 - DNA, 25 bp, Homo sapien
ccagtgtttcctaaggtgtagagat

SEQ ID NO: 5420657 - DNA, 25 bp, Homo sapien
tccctcttgtctccaaaagggagca

SEQ ID NO: 5420658 - DNA, 25 bp, Homo sapien
ttctccatctgccttcagtatcttc

SEQ ID NO: 5420659 - DNA, 25 bp, Homo sapien
gagctgtacaatagaacaaacacca

SEQ ID NO: 5420660 - DNA, 25 bp, Homo sapien
gctgtacaatagaacaaacaccaaa

SEQ ID NO: 5420661 - DNA, 25 bp, Homo sapien
gggagctgtacaatagaacaaacac

SEQ ID NO: 5420662 - DNA, 25 bp, Homo sapien
agggagctgtacaatagaacaaaca

SEQ ID NO: 5420663 - DNA, 25 bp, Homo sapien
attagttgtaagcatatgaggaagc

SEQ ID NO: 5420664 - DNA, 25 bp, Homo sapien
agttgtaagcatatgaggaagctgt

SEQ ID NO: 5420665 - DNA, 25 bp, Homo sapien
catatgaggaagctgtttatatttc

SEQ ID NO: 5420666 - DNA, 25 bp, Homo sapien
taagcatatgaggaagctgtttata

SEQ ID NO: 5420667 - DNA, 25 bp, Homo sapien
aggagatcaggctgacaatacttat

SEQ ID NO: 5420668 - DNA, 25 bp, Homo sapien
caaggagatcaggctgacaatactt

SEQ ID NO: 5420669 - DNA, 25 bp, Homo sapien
ggagatcaggctgacaatacttata

SEQ ID NO: 5420670 - DNA, 25 bp, Homo sapien
gagatcaggctgacaatacttatat

SEQ ID NO: 5420671 - DNA, 25 bp, Homo sapien
atggcttagggtccatagtgggaaa

SEQ ID NO: 5420672 - DNA, 25 bp, Homo sapien
ggaaaggtcagtaaccaggcagaaa

SEQ ID NO: 5420673 - DNA, 25 bp, Homo sapien
ttctggatggcatatgccaatggct

SEQ ID NO: 5420674 - DNA, 25 bp, Homo sapien
aaacgtacatgatgggagcagacac

SEQ ID NO: 5420675 - DNA, 25 bp, Homo sapien
aaagatagccactcctggtgctaca

SEQ ID NO: 5420676 - DNA, 25 bp, Homo sapien
ttgtgttgcaaagatagccactcct

SEQ ID NO: 5420677 - DNA, 25 bp, Homo sapien
tacttccatgttgaattgtgttgca

SEQ ID NO: 5420678 - DNA, 25 bp, Homo sapien
tcctggtgctacaggaaatacacca

SEQ ID NO: 5420679 - DNA, 25 bp, Homo sapien
ccaagagttccaccatttctctgca

SEQ ID NO: 5420680 - DNA, 25 bp, Homo sapien
gataaacttgtatggttcaccacac

SEQ ID NO: 5420681 - DNA, 25 bp, Homo sapien
gaaatgcataatttgataaacttgt

SEQ ID NO: 5420682 - DNA, 25 bp, Homo sapien
cacactgtcgcccttgtccaagagt

SEQ ID NO: 5420683 - DNA, 25 bp, Homo sapien
gaaggcgatgccaatgaagaccata

SEQ ID NO: 5420684 - DNA, 25 bp, Homo sapien
gaattagtactacaaatgccgactt

SEQ ID NO: 5420685 - DNA, 25 bp, Homo sapien
tacaggtacctttcgatcaagaata

SEQ ID NO: 5420686 - DNA, 25 bp, Homo sapien
tatttttcccaccatcgtgagacca

SEQ ID NO: 5420687 - DNA, 25 bp, Homo sapien
gtaatacacgcaggagtccgagtcc

SEQ ID NO: 5420688 - DNA, 25 bp, Homo sapien
ctgtaatacacgcaggagtccgagt

SEQ ID NO: 5420689 - DNA, 25 bp, Homo sapien
tgtaatacacgcaggagtccgagtc

SEQ ID NO: 5420690 - DNA, 25 bp, Homo sapien
gagatattctgggtatgtagtttga

SEQ ID NO: 5420691 - DNA, 25 bp, Homo sapien
ctatagggtttaacatcataagaga

SEQ ID NO: 5420692 - DNA, 25 bp, Homo sapien
taagagatattggtgccaccaaata

SEQ ID NO: 5420693 - DNA, 25 bp, Homo sapien
ccaaataaatgtactggagatattc

SEQ ID NO: 5420694 - DNA, 25 bp, Homo sapien
attggacagatgtggaacaaatgca

SEQ ID NO: 5420695 - DNA, 25 bp, Homo sapien
aaaaggacatttcttataacccatg

SEQ ID NO: 5420696 - DNA, 25 bp, Homo sapien
tcttataacccatgatcgatgcttg

SEQ ID NO: 5420697 - DNA, 25 bp, Homo sapien
taaattggacagatgtggaacaaat

SEQ ID NO: 5420698 - DNA, 25 bp, Homo sapien
tatcggctcactaatctatgggagc

SEQ ID NO: 5420699 - DNA, 25 bp, Homo sapien
ctatgggagcatgaaactatatact

SEQ ID NO: 5420700 - DNA, 25 bp, Homo sapien
aaaatatctgccctacccaaatgag

SEQ ID NO: 5420701 - DNA, 25 bp, Homo sapien
gataagtatataagaaagtactctg

SEQ ID NO: 5420702 - DNA, 25 bp, Homo sapien
cagctttgctaaatcgactatcagg

SEQ ID NO: 5420703 - DNA, 25 bp, Homo sapien
gactatcaggactggcaaccaataa

SEQ ID NO: 5420704 - DNA, 25 bp, Homo sapien
tatagggtatcccaatgcaaagtca

SEQ ID NO: 5420705 - DNA, 25 bp, Homo sapien
gatgttatgacattggcccttcctg

SEQ ID NO: 5420706 - DNA, 25 bp, Homo sapien
gtggaattaaatccatgcgttactg

SEQ ID NO: 5420707 - DNA, 25 bp, Homo sapien
actgctgtaggcaaagtcttggtca

SEQ ID NO: 5420708 - DNA, 25 bp, Homo sapien
aaatccatgcgttactgctgtaggc

SEQ ID NO: 5420709 - DNA, 25 bp, Homo sapien
ccatgcgttactgctgtaggcaaag

SEQ ID NO: 5420710 - DNA, 25 bp, Homo sapien
gactgcaatggttaagttctctgca

SEQ ID NO: 5420711 - DNA, 25 bp, Homo sapien
actgcaatggttaagttctctgcag

SEQ ID NO: 5420712 - DNA, 25 bp, Homo sapien
ttctctcaccctccaactccaacca

SEQ ID NO: 5420713 - DNA, 25 bp, Homo sapien
tctcaccctccaactccaaccagat

SEQ ID NO: 5420714 - DNA, 25 bp, Homo sapien
tcaccctccaactccaaccagatct

SEQ ID NO: 5420715 - DNA, 25 bp, Homo sapien
ctctcaccctccaactccaaccaga

SEQ ID NO: 5420716 - DNA, 25 bp, Homo sapien
tgtgcccgacctgaacgaattaact

SEQ ID NO: 5420717 - DNA, 25 bp, Homo sapien
tttgtagcgacatgttgcttaggct

SEQ ID NO: 5420718 - DNA, 25 bp, Homo sapien
tttttgtagcgacatgttgcttagg

SEQ ID NO: 5420719 - DNA, 25 bp, Homo sapien
ttcaagcgattcgtgtgccaccacg

SEQ ID NO: 5420720 - DNA, 25 bp, Homo sapien
gaacttgcgattattccactgaagt

SEQ ID NO: 5420721 - DNA, 25 bp, Homo sapien
tgggaacttgcgattattccactga

SEQ ID NO: 5420722 - DNA, 25 bp, Homo sapien
cacatgggaacttgcgattattcca

SEQ ID NO: 5420723 - DNA, 25 bp, Homo sapien
acatgggaacttgcgattattccac

SEQ ID NO: 5420724 - DNA, 25 bp, Homo sapien
taaatataacttttggtagaacatg

SEQ ID NO: 5420725 - DNA, 25 bp, Homo sapien
gggactttgtgccacagggactttg

SEQ ID NO: 5420726 - DNA, 25 bp, Homo sapien
agtgtcacggaagcagggactatgc

SEQ ID NO: 5420727 - DNA, 25 bp, Homo sapien
agggactttgcacattcagttcact

SEQ ID NO: 5420728 - DNA, 25 bp, Homo sapien
gtgtccttaacatctaggacagtac

SEQ ID NO: 5420729 - DNA, 25 bp, Homo sapien
cctgctgaggtaaagtcaaaataat

SEQ ID NO: 5420730 - DNA, 25 bp, Homo sapien
caaacacgttcacagtaaaagacca

SEQ ID NO: 5420731 - DNA, 25 bp, Homo sapien
caaagcttgttacagaacaaacacg

SEQ ID NO: 5420732 - DNA, 25 bp, Homo sapien
taaaagaccactcgctgaggcacga

SEQ ID NO: 5420733 - DNA, 25 bp, Homo sapien
aaccgaataggctgctcggagagca

SEQ ID NO: 5420734 - DNA, 25 bp, Homo sapien
gataaggggcgcagagagttcctaa

SEQ ID NO: 5420735 - DNA, 25 bp, Homo sapien
gactgtggccctccaagataagggg

SEQ ID NO: 5420736 - DNA, 25 bp, Homo sapien
agggagcgctgagcactgcctcctt

SEQ ID NO: 5420737 - DNA, 25 bp, Homo sapien
ccagatactgagggtaccctcggga

SEQ ID NO: 5420738 - DNA, 25 bp, Homo sapien
gggagaaaatttggcgcagtgctcc

SEQ ID NO: 5420739 - DNA, 25 bp, Homo sapien
gatactgagggtaccctcgggataa

SEQ ID NO: 5420740 - DNA, 25 bp, Homo sapien
agggagaaaatttggcgcagtgctc

SEQ ID NO: 5420741 - DNA, 25 bp, Homo sapien
tgcagcagcttaggcacgttccgat

SEQ ID NO: 5420742 - DNA, 25 bp, Homo sapien
ttcgccgagcgcaaccgggtgccag

SEQ ID NO: 5420743 - DNA, 25 bp, Homo sapien
aggcacgttccgataaagtaaggtg

SEQ ID NO: 5420744 - DNA, 25 bp, Homo sapien
gggtaagccgatgcggccctgtcag

SEQ ID NO: 5420745 - DNA, 25 bp, Homo sapien
gccgtgctcagggatctttcacaag

SEQ ID NO: 5420746 - DNA, 25 bp, Homo sapien
aaactggctcactactgttaagagg

SEQ ID NO: 5420747 - DNA, 25 bp, Homo sapien
taatgtctgtctatgctgtttgcgg

SEQ ID NO: 5420748 - DNA, 25 bp, Homo sapien
gattgcagggcttcagacaccaact

SEQ ID NO: 5420749 - DNA, 25 bp, Homo sapien
caggtgaacattacttgtcttggaa

SEQ ID NO: 5420750 - DNA, 25 bp, Homo sapien
taaagatgcatgaagtgatgcattc

SEQ ID NO: 5420751 - DNA, 25 bp, Homo sapien
ataaagttcaaagcctttaaagatg

SEQ ID NO: 5420752 - DNA, 25 bp, Homo sapien
gcattcaagcaggtgaacattactt

SEQ ID NO: 5420753 - DNA, 25 bp, Homo sapien
tcatggtacgagttggaaagagacc

SEQ ID NO: 5420754 - DNA, 25 bp, Homo sapien
tccacttggaaccacggtgctctga

SEQ ID NO: 5420755 - DNA, 25 bp, Homo sapien
gccacgttcgccaatgtcatgaggg

SEQ ID NO: 5420756 - DNA, 25 bp, Homo sapien
tctgagaggacgctgaactcacagc

SEQ ID NO: 5420757 - DNA, 25 bp, Homo sapien
gagtgcacggcttttgctgtgacgc

SEQ ID NO: 5420758 - DNA, 25 bp, Homo sapien
gagtgcctaacatatgccaggtatc

SEQ ID NO: 5420759 - DNA, 25 bp, Homo sapien
gaatatggcctaggtttgatggcaa

SEQ ID NO: 5420760 - DNA, 25 bp, Homo sapien
caaacgcagatttgtgagtgcacgg

SEQ ID NO: 5420761 - DNA, 25 bp, Homo sapien
tgcagatgtctagggtagtctctac

SEQ ID NO: 5420762 - DNA, 25 bp, Homo sapien
tatcctgatgacacagatagcaaaa

SEQ ID NO: 5420763 - DNA, 25 bp, Homo sapien
ttcctctacggtccttgactataag

SEQ ID NO: 5420764 - DNA, 25 bp, Homo sapien
ggaactttaacaatcatcccatttc

SEQ ID NO: 5420765 - DNA, 25 bp, Homo sapien
ggtacctgccaagttcagatatgca

SEQ ID NO: 5420766 - DNA, 25 bp, Homo sapien
tttcagatttagaacggtacctgcc

SEQ ID NO: 5420767 - DNA, 25 bp, Homo sapien
gaatggcaactttgagctatcaccc

SEQ ID NO: 5420768 - DNA, 25 bp, Homo sapien
tactaaatcaggactttggcaagga

SEQ ID NO: 5420769 - DNA, 25 bp, Homo sapien
tccagctgacaagtggagtgcgtga

SEQ ID NO: 5420770 - DNA, 25 bp, Homo sapien
agttttgcccaccaactcaaatcgg

SEQ ID NO: 5420771 - DNA, 25 bp, Homo sapien
aaaggctgcttccatttcacaaggc

SEQ ID NO: 5420772 - DNA, 25 bp, Homo sapien
ggtagcatctcccagtaatacatga

SEQ ID NO: 5420773 - DNA, 25 bp, Homo sapien
gaggaaaatcgaaggtcaaactgtg

SEQ ID NO: 5420774 - DNA, 25 bp, Homo sapien
tcaaacaaggtgctgggtcctaatt

SEQ ID NO: 5420775 - DNA, 25 bp, Homo sapien
gactcgtgctgtctaatccagtagc

SEQ ID NO: 5420776 - DNA, 25 bp, Homo sapien
gctctgtcctagagccaagctcgga

SEQ ID NO: 5420777 - DNA, 25 bp, Homo sapien
ttactcagcagcttgcttaggtggt

SEQ ID NO: 5420778 - DNA, 25 bp, Homo sapien
aggaggccaagcatgcgaaaaagga

SEQ ID NO: 5420779 - DNA, 25 bp, Homo sapien
caagcatgcgaaaaaggaacgggag

SEQ ID NO: 5420780 - DNA, 25 bp, Homo sapien
gaggccaagcatgcgaaaaaggaac

SEQ ID NO: 5420781 - DNA, 25 bp, Homo sapien
ggccaagcatgcgaaaaaggaacgg

SEQ ID NO: 5420782 - DNA, 25 bp, Homo sapien
gctctcagggactttaataattaca

SEQ ID NO: 5420783 - DNA, 25 bp, Homo sapien
tcatctctgcctattacgacaaaag

SEQ ID NO: 5420784 - DNA, 25 bp, Homo sapien
tacgacaaaagcctatcgaccccag

SEQ ID NO: 5420785 - DNA, 25 bp, Homo sapien
gaatgtttgaatttggttggtggaa

SEQ ID NO: 5420786 - DNA, 25 bp, Homo sapien
atatgaaaagctaggtgcatttctt

SEQ ID NO: 5420787 - DNA, 25 bp, Homo sapien
ccacacacgcatattcccactcccc

SEQ ID NO: 5420788 - DNA, 25 bp, Homo sapien
gctaggtgcatttcttaccgattcc

SEQ ID NO: 5420789 - DNA, 25 bp, Homo sapien
aaagctaggtgcatttcttaccgat

SEQ ID NO: 5420790 - DNA, 25 bp, Homo sapien
gaggagggtatgcagttcttagata

SEQ ID NO: 5420791 - DNA, 25 bp, Homo sapien
gagggtatgcagttcttagatagca

SEQ ID NO: 5420792 - DNA, 25 bp, Homo sapien
gcagttcttagatagcaacagaagc

SEQ ID NO: 5420793 - DNA, 25 bp, Homo sapien
tatgcagttcttagatagcaacaga

SEQ ID NO: 5420794 - DNA, 25 bp, Homo sapien
gagcacccctttctcttcggttgga

SEQ ID NO: 5420795 - DNA, 25 bp, Homo sapien
ggagtggtggagcacccctttctct

SEQ ID NO: 5420796 - DNA, 25 bp, Homo sapien
gcacccctttctcttcggttggatc

SEQ ID NO: 5420797 - DNA, 25 bp, Homo sapien
gagggagtggtggagcacccctttc

SEQ ID NO: 5420798 - DNA, 25 bp, Homo sapien
atggttgcacgggtacccactacct

SEQ ID NO: 5420799 - DNA, 25 bp, Homo sapien
gggatggttgcacgggtacccacta

SEQ ID NO: 5420800 - DNA, 25 bp, Homo sapien
gttgcacgggtacccactacctcat

SEQ ID NO: 5420801 - DNA, 25 bp, Homo sapien
tcggggatggttgcacgggtaccca

SEQ ID NO: 5420802 - DNA, 25 bp, Homo sapien
taacatgggcactatttactaagca

SEQ ID NO: 5420803 - DNA, 25 bp, Homo sapien
tactagaatgtagatggctccaaag

SEQ ID NO: 5420804 - DNA, 25 bp, Homo sapien
cagaggaagacgtccaaagaagtaa

SEQ ID NO: 5420805 - DNA, 25 bp, Homo sapien
agaagatggctctacttgtgctgtc

SEQ ID NO: 5420806 - DNA, 25 bp, Homo sapien
ctcaggctactcaagcgtgaatctt

SEQ ID NO: 5420807 - DNA, 25 bp, Homo sapien
caagcgtgaatcttcaaaaaccttg

SEQ ID NO: 5420808 - DNA, 25 bp, Homo sapien
tatatagcccgagtgtcactcaggc

SEQ ID NO: 5420809 - DNA, 25 bp, Homo sapien
ctatatagcccgagtgtcactcagg

SEQ ID NO: 5420810 - DNA, 25 bp, Homo sapien
tctggaggtggcaaatcggaaatcg

SEQ ID NO: 5420811 - DNA, 25 bp, Homo sapien
tcggaaatcggatggaagtagaatc

SEQ ID NO: 5420812 - DNA, 25 bp, Homo sapien
gctttcgtttcttgccagtttgctg

SEQ ID NO: 5420813 - DNA, 25 bp, Homo sapien
cgtttgtacatatggctctggaggt

SEQ ID NO: 5420814 - DNA, 25 bp, Homo sapien
acagacatcagtgctagtttttatg

SEQ ID NO: 5420815 - DNA, 25 bp, Homo sapien
cagacatcagtgctagtttttatgc

SEQ ID NO: 5420816 - DNA, 25 bp, Homo sapien
cagggcccgagatgtgctgccgttt

SEQ ID NO: 5420817 - DNA, 25 bp, Homo sapien
cctgggactgtctactccactcctg

SEQ ID NO: 5420818 - DNA, 25 bp, Homo sapien
tggagagtcttggaagccatttcta

SEQ ID NO: 5420819 - DNA, 25 bp, Homo sapien
tccactcctggatggcaactgaggg

SEQ ID NO: 5420820 - DNA, 25 bp, Homo sapien
cattaccgtggtcaccattggtgta

SEQ ID NO: 5420821 - DNA, 25 bp, Homo sapien
gaggacttgctggacacatgccctt

SEQ ID NO: 5420822 - DNA, 25 bp, Homo sapien
ctcagattggagatggcacagtgaa

SEQ ID NO: 5420823 - DNA, 25 bp, Homo sapien
ttggctgagaaatgagtaaacacac

SEQ ID NO: 5420824 - DNA, 25 bp, Homo sapien
aatctattagattccaaggcccact

SEQ ID NO: 5420825 - DNA, 25 bp, Homo sapien
tatgccaggaaataagataaccact

SEQ ID NO: 5420826 - DNA, 25 bp, Homo sapien
gcttgaaaagctcatcagaagactg

SEQ ID NO: 5420827 - DNA, 25 bp, Homo sapien
gatgaactctcatacgctccttgtg

SEQ ID NO: 5420828 - DNA, 25 bp, Homo sapien
tagggccatggcacaatggtttcaa

SEQ ID NO: 5420829 - DNA, 25 bp, Homo sapien
gactcatccatttggtagggccatg

SEQ ID NO: 5420830 - DNA, 25 bp, Homo sapien
tgcacactataatcaccagggagct

SEQ ID NO: 5420831 - DNA, 25 bp, Homo sapien
gatggcccatatgaccaagtgaggg

SEQ ID NO: 5420832 - DNA, 25 bp, Homo sapien
tctttaatgaatagggaaatggcct

SEQ ID NO: 5420833 - DNA, 25 bp, Homo sapien
ttagtctttaatgaatagggaaatg

SEQ ID NO: 5420834 - DNA, 25 bp, Homo sapien
gaaatggcctcaaagcctggcgaat

SEQ ID NO: 5420835 - DNA, 25 bp, Homo sapien
aaatggcctcaaagcctggcgaatg

SEQ ID NO: 5420836 - DNA, 25 bp, Homo sapien
cgaaattctctctagggaggcaggg

SEQ ID NO: 5420837 - DNA, 25 bp, Homo sapien
gggtttacacgaggtcacgatcaca

SEQ ID NO: 5420838 - DNA, 25 bp, Homo sapien
ggattattggtacatttgggcaggc

SEQ ID NO: 5420839 - DNA, 25 bp, Homo sapien
tggactggcaagtacacttcagaga

SEQ ID NO: 5420840 - DNA, 25 bp, Homo sapien
tcggcctggcgggtccctcactgga

SEQ ID NO: 5420841 - DNA, 25 bp, Homo sapien
ctgatcggcctggcgggtccctcac

SEQ ID NO: 5420842 - DNA, 25 bp, Homo sapien
gcctggcgggtccctcactggaggt

SEQ ID NO: 5420843 - DNA, 25 bp, Homo sapien
tgatcggcctggcgggtccctcact

SEQ ID NO: 5420844 - DNA, 25 bp, Homo sapien
gacagattccgctgtgggagtcttg

SEQ ID NO: 5420845 - DNA, 25 bp, Homo sapien
agcagtgccgcggtttccagggaaa

SEQ ID NO: 5420846 - DNA, 25 bp, Homo sapien
tcattgccgctggaacttggaggca

SEQ ID NO: 5420847 - DNA, 25 bp, Homo sapien
cctgaacgtcctggcgaaggtaacg

SEQ ID NO: 5420848 - DNA, 25 bp, Homo sapien
gaggaatgctatcaggctttgagcc

SEQ ID NO: 5420849 - DNA, 25 bp, Homo sapien
cccggttgtgcggacttgattgaat

SEQ ID NO: 5420850 - DNA, 25 bp, Homo sapien
atgggtcttggagtactaggtactg

SEQ ID NO: 5420851 - DNA, 25 bp, Homo sapien
ctggaggaggaatgctatcaggctt

SEQ ID NO: 5420852 - DNA, 25 bp, Homo sapien
gatgtggatcttcctcccggtggca

SEQ ID NO: 5420853 - DNA, 25 bp, Homo sapien
caacaatggtggtcggcttcctcca

SEQ ID NO: 5420854 - DNA, 25 bp, Homo sapien
gcggcattcggttcctctgaggctc

SEQ ID NO: 5420855 - DNA, 25 bp, Homo sapien
gaaggcacaggaaacctccctgggc

SEQ ID NO: 5420856 - DNA, 25 bp, Homo sapien
gaaagctgaatctgtcaggtcacca

SEQ ID NO: 5420857 - DNA, 25 bp, Homo sapien
tgtgctccatcgtgtttgaaaagcg

SEQ ID NO: 5420858 - DNA, 25 bp, Homo sapien
gaaaagcggctcacaagtatttact

SEQ ID NO: 5420859 - DNA, 25 bp, Homo sapien
tatttactctactagacagctgggc

SEQ ID NO: 5420860 - DNA, 25 bp, Homo sapien
ttggccgtggatctcagcttcggca

SEQ ID NO: 5420861 - DNA, 25 bp, Homo sapien
tgttggccgtggatctcagcttcgg

SEQ ID NO: 5420862 - DNA, 25 bp, Homo sapien
gttggccgtggatctcagcttcggc

SEQ ID NO: 5420863 - DNA, 25 bp, Homo sapien
tggccgtggatctcagcttcggcat

SEQ ID NO: 5420864 - DNA, 25 bp, Homo sapien
tccagcctggaacaatcctcccaga

SEQ ID NO: 5420865 - DNA, 25 bp, Homo sapien
ccagcctggaacaatcctcccagac

SEQ ID NO: 5420866 - DNA, 25 bp, Homo sapien
tccaaaacttccaccgcctccgcca

SEQ ID NO: 5420867 - DNA, 25 bp, Homo sapien
aattaaactgtaggacagggctgag

SEQ ID NO: 5420868 - DNA, 25 bp, Homo sapien
gctgaggattaagctttcagattat

SEQ ID NO: 5420869 - DNA, 25 bp, Homo sapien
ggcccattagtgttcttaacctgca

SEQ ID NO: 5420870 - DNA, 25 bp, Homo sapien
gagttatcacacataaccatggtca

SEQ ID NO: 5420871 - DNA, 25 bp, Homo sapien
tcacatgcaaacagatacaaaactg

SEQ ID NO: 5420872 - DNA, 25 bp, Homo sapien
caaaactgtggataaacactgctgc

SEQ ID NO: 5420873 - DNA, 25 bp, Homo sapien
taggtgtccagttgagtgtgtggac

SEQ ID NO: 5420874 - DNA, 25 bp, Homo sapien
gagtgtgtggacaagggcctgcact

SEQ ID NO: 5420875 - DNA, 25 bp, Homo sapien
gcctcattattcacttgttgacaaa

SEQ ID NO: 5420876 - DNA, 25 bp, Homo sapien
tgttgacaaagatccatctggtgat

SEQ ID NO: 5420877 - DNA, 25 bp, Homo sapien
tgttccgtccaaatgggatctgtag

SEQ ID NO: 5420878 - DNA, 25 bp, Homo sapien
tgattttggaaggtcagtctatttc

SEQ ID NO: 5420879 - DNA, 25 bp, Homo sapien
cagggagtgatacagtcccttattt

SEQ ID NO: 5420880 - DNA, 25 bp, Homo sapien
tgttcctctccatggtagatagcct

SEQ ID NO: 5420881 - DNA, 25 bp, Homo sapien
tcccttattttgctagctttgcagc

SEQ ID NO: 5420882 - DNA, 25 bp, Homo sapien
gattattaggccataaactgttcct

SEQ ID NO: 5420883 - DNA, 25 bp, Homo sapien
tgtcttattcaaggtaggcttctct

SEQ ID NO: 5420884 - DNA, 25 bp, Homo sapien
tattggtgcacttctgtcattggtg

SEQ ID NO: 5420885 - DNA, 25 bp, Homo sapien
ctttgctgatatcagaaaggagagc

SEQ ID NO: 5420886 - DNA, 25 bp, Homo sapien
tcaaggtaggcttctctgtattggc

SEQ ID NO: 5420887 - DNA, 25 bp, Homo sapien
cagtgcaaacgtcgggggcggcggg

SEQ ID NO: 5420888 - DNA, 25 bp, Homo sapien
cttgggcagttatgcgttcaacagt

SEQ ID NO: 5420889 - DNA, 25 bp, Homo sapien
ttgggcagttatgcgttcaacagtc

SEQ ID NO: 5420890 - DNA, 25 bp, Homo sapien
gggcagttatgcgttcaacagtctt

SEQ ID NO: 5420891 - DNA, 25 bp, Homo sapien
gcagttatgcgttcaacagtcttgc

SEQ ID NO: 5420892 - DNA, 25 bp, Homo sapien
cgttcaccgattaactttctgtcat

SEQ ID NO: 5420893 - DNA, 25 bp, Homo sapien
caagactattttgtctgactccacg

SEQ ID NO: 5420894 - DNA, 25 bp, Homo sapien
atagcctggtctgcccggtgggccc

SEQ ID NO: 5420895 - DNA, 25 bp, Homo sapien
tggttgatgaaaaatccctcaagac

SEQ ID NO: 5420896 - DNA, 25 bp, Homo sapien
tttcatctatgtatttcttgagtgc

SEQ ID NO: 5420897 - DNA, 25 bp, Homo sapien
cctcccaagatgctatgataatagg

SEQ ID NO: 5420898 - DNA, 25 bp, Homo sapien
taatgctcttaactcattttcatct

SEQ ID NO: 5420899 - DNA, 25 bp, Homo sapien
ttactttatatataatgctcttaac

SEQ ID NO: 5420900 - DNA, 25 bp, Homo sapien
caaactcaaattgctgctaagacgg

SEQ ID NO: 5420901 - DNA, 25 bp, Homo sapien
tgtccttccagcttataagtacatg

SEQ ID NO: 5420902 - DNA, 25 bp, Homo sapien
tttaaccactaaaggaagcactgaa

SEQ ID NO: 5420903 - DNA, 25 bp, Homo sapien
gcaagggcattcattacaaagacag

SEQ ID NO: 5420904 - DNA, 25 bp, Homo sapien
tgaagcatctcgaacatcactaaga

SEQ ID NO: 5420905 - DNA, 25 bp, Homo sapien
ggagcttggacacaattttactgca

SEQ ID NO: 5420906 - DNA, 25 bp, Homo sapien
tgaaggtgagctgaatgacacgcct

SEQ ID NO: 5420907 - DNA, 25 bp, Homo sapien
cactaagactggctaggagcttgga

SEQ ID NO: 5420908 - DNA, 25 bp, Homo sapien
aaatgtgacatactgagtcagaggc

SEQ ID NO: 5420909 - DNA, 25 bp, Homo sapien
tatcatcttctaacgcaagtgtggg

SEQ ID NO: 5420910 - DNA, 25 bp, Homo sapien
tcagaggcagacgtccttctgtggt

SEQ ID NO: 5420911 - DNA, 25 bp, Homo sapien
ggttattcgcttcctgtctgattaa

SEQ ID NO: 5420912 - DNA, 25 bp, Homo sapien
gggtagaggagagctacaaccacac

SEQ ID NO: 5420913 - DNA, 25 bp, Homo sapien
ggtggcttacaccattgggcaatgt

SEQ ID NO: 5420914 - DNA, 25 bp, Homo sapien
gagagatcatgtggtgggtagagga

SEQ ID NO: 5420915 - DNA, 25 bp, Homo sapien
caggtaaaacccttggcccatcagt

SEQ ID NO: 5420916 - DNA, 25 bp, Homo sapien
caggtgctggatgtaacagtgctgt

SEQ ID NO: 5420917 - DNA, 25 bp, Homo sapien
ctggatgtaacagtgctgtctggcc

SEQ ID NO: 5420918 - DNA, 25 bp, Homo sapien
gcagtgaagcggagttctcagctca

SEQ ID NO: 5420919 - DNA, 25 bp, Homo sapien
gtgctgtctggccttccgcagtgaa

SEQ ID NO: 5420920 - DNA, 25 bp, Homo sapien
tcatttcaggttcgggtgataccac

SEQ ID NO: 5420921 - DNA, 25 bp, Homo sapien
cctgagataagtggattgaaagcct

SEQ ID NO: 5420922 - DNA, 25 bp, Homo sapien
actttaaggctgcaggagacttgca

SEQ ID NO: 5420923 - DNA, 25 bp, Homo sapien
ccagagaagttaggcatcctgctca

SEQ ID NO: 5420924 - DNA, 25 bp, Homo sapien
gagacaggagcctactcatggtaca

SEQ ID NO: 5420925 - DNA, 25 bp, Homo sapien
gctgtgatctgcaaccaagatgggt

SEQ ID NO: 5420926 - DNA, 25 bp, Homo sapien
tgtaggctcaaaactgactagaggc

SEQ ID NO: 5420927 - DNA, 25 bp, Homo sapien
ttggagacttgcaggttggaaaacc

SEQ ID NO: 5420928 - DNA, 25 bp, Homo sapien
gaactatatggacactaaaggcccc

SEQ ID NO: 5420929 - DNA, 25 bp, Homo sapien
tctcaggaacaagggtaaatagctc

SEQ ID NO: 5420930 - DNA, 25 bp, Homo sapien
gaggcttcttgcaacccaagggaga

SEQ ID NO: 5420931 - DNA, 25 bp, Homo sapien
catgtgaatgatagaaagaggcttc

SEQ ID NO: 5420932 - DNA, 25 bp, Homo sapien
tttagagtacaatcactagaagaca

SEQ ID NO: 5420933 - DNA, 25 bp, Homo sapien
gttttagcttgcatactcccatcag

SEQ ID NO: 5420934 - DNA, 25 bp, Homo sapien
catactttggatgtgtacgtgcgtc

SEQ ID NO: 5420935 - DNA, 25 bp, Homo sapien
acatgtgctattatgacgtttcaaa

SEQ ID NO: 5420936 - DNA, 25 bp, Homo sapien
aatgttcaaaggcttttcggatagt

SEQ ID NO: 5420937 - DNA, 25 bp, Homo sapien
attccaagagccgaatgccgagcca

SEQ ID NO: 5420938 - DNA, 25 bp, Homo sapien
aaggcttttcggatagtctcaccca

SEQ ID NO: 5420939 - DNA, 25 bp, Homo sapien
gaatgccgagccacttgtctccaaa

SEQ ID NO: 5420940 - DNA, 25 bp, Homo sapien
cccaagagcctggaagtatcaaaga

SEQ ID NO: 5420941 - DNA, 25 bp, Homo sapien
taaaacttatcaggacccaagagcc

SEQ ID NO: 5420942 - DNA, 25 bp, Homo sapien
cagtcatcactttgcttggctaggc

SEQ ID NO: 5420943 - DNA, 25 bp, Homo sapien
gcaggcaaaggtcatcggaggacat

SEQ ID NO: 5420944 - DNA, 25 bp, Homo sapien
tctaggtggcaccagtcagtcatcc

SEQ ID NO: 5420945 - DNA, 25 bp, Homo sapien
taggcatctggaaaagagagacagc

SEQ ID NO: 5420946 - DNA, 25 bp, Homo sapien
tattcaagctgggtacaagcagcag

SEQ ID NO: 5420947 - DNA, 25 bp, Homo sapien
gagagacagcccagaaagaatgatg

SEQ ID NO: 5420948 - DNA, 25 bp, Homo sapien
tttggactgtgcaggactacacagt

SEQ ID NO: 5420949 - DNA, 25 bp, Homo sapien
gcctaccagggtgattaggcaccaa

SEQ ID NO: 5420950 - DNA, 25 bp, Homo sapien
acatgctgttggaagtttaggagac

SEQ ID NO: 5420951 - DNA, 25 bp, Homo sapien
agaacaatgaggaagcccgctgggc

SEQ ID NO: 5420952 - DNA, 25 bp, Homo sapien
gaatccaccatctgtgggcatttac

SEQ ID NO: 5420953 - DNA, 25 bp, Homo sapien
tggaatccaccatctgtgggcattt

SEQ ID NO: 5420954 - DNA, 25 bp, Homo sapien
tccaccatctgtgggcatttactgt

SEQ ID NO: 5420955 - DNA, 25 bp, Homo sapien
catctgtgggcatttactgtgtttg

SEQ ID NO: 5420956 - DNA, 25 bp, Homo sapien
gctcaggccagagccttaaggtcct

SEQ ID NO: 5420957 - DNA, 25 bp, Homo sapien
ctacagcgttctgacaactggcact

SEQ ID NO: 5420958 - DNA, 25 bp, Homo sapien
cagagccctgtccatttttctgagc

SEQ ID NO: 5420959 - DNA, 25 bp, Homo sapien
gcgttctgacaactggcactatggg

SEQ ID NO: 5420960 - DNA, 25 bp, Homo sapien
gcggctggctggcagtctcccagtt

SEQ ID NO: 5420961 - DNA, 25 bp, Homo sapien
ggctggcagtctcccagttaccagg

SEQ ID NO: 5420962 - DNA, 25 bp, Homo sapien
tggctggcagtctcccagttaccag

SEQ ID NO: 5420963 - DNA, 25 bp, Homo sapien
ggctggctggcagtctcccagttac

SEQ ID NO: 5420964 - DNA, 25 bp, Homo sapien
gcttctgtgcaactgagggttgagt

SEQ ID NO: 5420965 - DNA, 25 bp, Homo sapien
cttctgtgcaactgagggttgagtg

SEQ ID NO: 5420966 - DNA, 25 bp, Homo sapien
tgggcttctgtgcaactgagggttg

SEQ ID NO: 5420967 - DNA, 25 bp, Homo sapien
caactgagggttgagtggaagtttc

SEQ ID NO: 5420968 - DNA, 25 bp, Homo sapien
aagtaaagacaaaaagtgacttcag

SEQ ID NO: 5420969 - DNA, 25 bp, Homo sapien
aataagatgctttttgctttcacaa

SEQ ID NO: 5420970 - DNA, 25 bp, Homo sapien
ctttttgctttcacaagctgactaa

SEQ ID NO: 5420971 - DNA, 25 bp, Homo sapien
gaagtcaaatgtaactcaatagtct

SEQ ID NO: 5420972 - DNA, 25 bp, Homo sapien
cgatccatagttggctgaacccaca

SEQ ID NO: 5420973 - DNA, 25 bp, Homo sapien
tatggagggccagcggtatctcctt

SEQ ID NO: 5420974 - DNA, 25 bp, Homo sapien
tgcttagatccaacccagaagaact

SEQ ID NO: 5420975 - DNA, 25 bp, Homo sapien
aatttgaagttgcatatttcgatcc

SEQ ID NO: 5420976 - DNA, 25 bp, Homo sapien
taatggaagttttagaagctacaga

SEQ ID NO: 5420977 - DNA, 25 bp, Homo sapien
ttaggagtgatattaaaccaagacc

SEQ ID NO: 5420978 - DNA, 25 bp, Homo sapien
gaagcaaagttcgaaacaagaatcc

SEQ ID NO: 5420979 - DNA, 25 bp, Homo sapien
gaacacatcactatgcagagtcaca

SEQ ID NO: 5420980 - DNA, 25 bp, Homo sapien
gagaggctgctgtttaccctgaaaa

SEQ ID NO: 5420981 - DNA, 25 bp, Homo sapien
ttaatccatgccgtggtgagccctg

SEQ ID NO: 5420982 - DNA, 25 bp, Homo sapien
aatcagtgctaaggatggctaaccc

SEQ ID NO: 5420983 - DNA, 25 bp, Homo sapien
cagagcgttatcatagaggtcccca

SEQ ID NO: 5420984 - DNA, 25 bp, Homo sapien
gccaatactgggcaaccattggaaa

SEQ ID NO: 5420985 - DNA, 25 bp, Homo sapien
tccacaagattcaggacctattttc

SEQ ID NO: 5420986 - DNA, 25 bp, Homo sapien
caggacctattttccaggccaatac

SEQ ID NO: 5420987 - DNA, 25 bp, Homo sapien
tgaggaccagttcattgcccacaac

SEQ ID NO: 5420988 - DNA, 25 bp, Homo sapien
tagccttccgcgtagcaggctggtg

SEQ ID NO: 5420989 - DNA, 25 bp, Homo sapien
ggtgaggtattgagcagcccctcta

SEQ ID NO: 5420990 - DNA, 25 bp, Homo sapien
tgcttcaaggacgaccaaatctatc

SEQ ID NO: 5420991 - DNA, 25 bp, Homo sapien
tggccccgcacccagttttcagaag

SEQ ID NO: 5420992 - DNA, 25 bp, Homo sapien
tatgacagggttctacttcaaggac

SEQ ID NO: 5420993 - DNA, 25 bp, Homo sapien
actggatgttgtataagctgggaac

SEQ ID NO: 5420994 - DNA, 25 bp, Homo sapien
agctgggaacagatgcctcttaaat

SEQ ID NO: 5420995 - DNA, 25 bp, Homo sapien
aggaaaagctttctatgcactttca

SEQ ID NO: 5420996 - DNA, 25 bp, Homo sapien
tggcagagtaaaaaatcaatcaggc

SEQ ID NO: 5420997 - DNA, 25 bp, Homo sapien
atagagggaaattgaaatggcagag

SEQ ID NO: 5420998 - DNA, 25 bp, Homo sapien
caaccttctgactgatgacgaaata

SEQ ID NO: 5420999 - DNA, 25 bp, Homo sapien
gactgatgacgaaatagagggaaat

SEQ ID NO: 5421000 - DNA, 25 bp, Homo sapien
gaacctggggatcagaggttttgta

SEQ ID NO: 5421001 - DNA, 25 bp, Homo sapien
acacagcgcagtgaaagtggaaaga

SEQ ID NO: 5421002 - DNA, 25 bp, Homo sapien
agaggttttgtataatgatgacact

SEQ ID NO: 5421003 - DNA, 25 bp, Homo sapien
tgtgtctccactcgttctttcagaa

SEQ ID NO: 5421004 - DNA, 25 bp, Homo sapien
cctcttcacggcctgctgggctttg

SEQ ID NO: 5421005 - DNA, 25 bp, Homo sapien
cgtcacacctcacggcctcttcacg

SEQ ID NO: 5421006 - DNA, 25 bp, Homo sapien
gctccttaaactctggtgccgggaa

SEQ ID NO: 5421007 - DNA, 25 bp, Homo sapien
gacataaagctctggcaaccgtcac

SEQ ID NO: 5421008 - DNA, 25 bp, Homo sapien
aacttctcgagttcccctgctgtct

SEQ ID NO: 5421009 - DNA, 25 bp, Homo sapien
tctgctgaaaacaaccaacttctcg

SEQ ID NO: 5421010 - DNA, 25 bp, Homo sapien
gttttaatctgctgaaaacaaccaa

SEQ ID NO: 5421011 - DNA, 25 bp, Homo sapien
acaaccaacttctcgagttcccctg

SEQ ID NO: 5421012 - DNA, 25 bp, Homo sapien
tgggttcctggcagcgtgtgagtcc

SEQ ID NO: 5421013 - DNA, 25 bp, Homo sapien
cttgaaagggctgggcatcatcttc

SEQ ID NO: 5421014 - DNA, 25 bp, Homo sapien
ccagcattttggtttcccttgaaag

SEQ ID NO: 5421015 - DNA, 25 bp, Homo sapien
aaagggctgggcatcatcttcctcc

SEQ ID NO: 5421016 - DNA, 25 bp, Homo sapien
gtgattctctcagccatcaggaggg

SEQ ID NO: 5421017 - DNA, 25 bp, Homo sapien
caatttataagacttgactctgcaa

SEQ ID NO: 5421018 - DNA, 25 bp, Homo sapien
ggtaactgtagacatattccaagtc

SEQ ID NO: 5421019 - DNA, 25 bp, Homo sapien
caaagttgcttctatttggctaccc

SEQ ID NO: 5421020 - DNA, 25 bp, Homo sapien
gaaaccagtcctgggactcagaact

SEQ ID NO: 5421021 - DNA, 25 bp, Homo sapien
gctgtccaagctatagtagacatgg

SEQ ID NO: 5421022 - DNA, 25 bp, Homo sapien
tttccatgggagaataccgagtaag

SEQ ID NO: 5421023 - DNA, 25 bp, Homo sapien
cagttgagtcaaaatggctgtccaa

SEQ ID NO: 5421024 - DNA, 25 bp, Homo sapien
tactacatagatgaaaaatgatgat

SEQ ID NO: 5421025 - DNA, 25 bp, Homo sapien
aatactacatagatgaaaaatgatg

SEQ ID NO: 5421026 - DNA, 25 bp, Homo sapien
ggaaaaacaaaatactacatagatg

SEQ ID NO: 5421027 - DNA, 25 bp, Homo sapien
aacaaaatactacatagatgaaaaa

SEQ ID NO: 5421028 - DNA, 25 bp, Homo sapien
ctttgttgcctatgcgtttgaggtc

SEQ ID NO: 5421029 - DNA, 25 bp, Homo sapien
caaggtgaaagaagtctacactaaa

SEQ ID NO: 5421030 - DNA, 25 bp, Homo sapien
ttttgtccagaccaacgtcaagaag

SEQ ID NO: 5421031 - DNA, 25 bp, Homo sapien
caaaaagagatacctaacaatgaac

SEQ ID NO: 5421032 - DNA, 25 bp, Homo sapien
caaactggcgctttccaacgttgtg

SEQ ID NO: 5421033 - DNA, 25 bp, Homo sapien
tgaattccaaataattaggccctat

SEQ ID NO: 5421034 - DNA, 25 bp, Homo sapien
ggcctgatgccaacaaccaaactgg

SEQ ID NO: 5421035 - DNA, 25 bp, Homo sapien
tcttcttcggcataacacagggcct

SEQ ID NO: 5421036 - DNA, 25 bp, Homo sapien
tgaaaaaggtttgtggcagaccact

SEQ ID NO: 5421037 - DNA, 25 bp, Homo sapien
tactcttctctaccagaggacaggg

SEQ ID NO: 5421038 - DNA, 25 bp, Homo sapien
gctaagcagagctaagaagcaccta

SEQ ID NO: 5421039 - DNA, 25 bp, Homo sapien
gaactgtgcatcaccagcgtctctg

SEQ ID NO: 5421040 - DNA, 25 bp, Homo sapien
tagatgccccctcggatgttccctg

SEQ ID NO: 5421041 - DNA, 25 bp, Homo sapien
tcggatgttccctgggacctagaaa

SEQ ID NO: 5421042 - DNA, 25 bp, Homo sapien
ctctttgactagatgccccctcgga

SEQ ID NO: 5421043 - DNA, 25 bp, Homo sapien
gacctagaaaccctagagaatgaaa

SEQ ID NO: 5421044 - DNA, 25 bp, Homo sapien
agtaacttctggtggaggcattagg

SEQ ID NO: 5421045 - DNA, 25 bp, Homo sapien
gagccaggaacccaattctcgcctt

SEQ ID NO: 5421046 - DNA, 25 bp, Homo sapien
tgctcatacgccagccactaggctg

SEQ ID NO: 5421047 - DNA, 25 bp, Homo sapien
aggagcagcgggtttctgcaacaaa

SEQ ID NO: 5421048 - DNA, 25 bp, Homo sapien
tgagagattatcatggtcaacccaa

SEQ ID NO: 5421049 - DNA, 25 bp, Homo sapien
tgttacttggcaggtagtcaacatt

SEQ ID NO: 5421050 - DNA, 25 bp, Homo sapien
ctactgactgttacttggcaggtag

SEQ ID NO: 5421051 - DNA, 25 bp, Homo sapien
aggtagtcaacattcccagggcaga

SEQ ID NO: 5421052 - DNA, 25 bp, Homo sapien
tgactgttacttggcaggtagtcaa

SEQ ID NO: 5421053 - DNA, 25 bp, Homo sapien
ggtgggatgtgcctctaaaactgcc

SEQ ID NO: 5421054 - DNA, 25 bp, Homo sapien
ggcaatagcctgcacatgcccaggg

SEQ ID NO: 5421055 - DNA, 25 bp, Homo sapien
ccttgaccactaagaaggagagctg

SEQ ID NO: 5421056 - DNA, 25 bp, Homo sapien
cagaatgctcggtggtgggatgtgc

SEQ ID NO: 5421057 - DNA, 25 bp, Homo sapien
gagtcatattttcagcaaaaacata

SEQ ID NO: 5421058 - DNA, 25 bp, Homo sapien
catagaagcaaagactataaattac

SEQ ID NO: 5421059 - DNA, 25 bp, Homo sapien
ccttttccaagttctaagagacaat

SEQ ID NO: 5421060 - DNA, 25 bp, Homo sapien
caccatgcttggtcaacagtacaat

SEQ ID NO: 5421061 - DNA, 25 bp, Homo sapien
tatacatcacttatcgtaaaggacc

SEQ ID NO: 5421062 - DNA, 25 bp, Homo sapien
tcacattgtggccaggtataatggc

SEQ ID NO: 5421063 - DNA, 25 bp, Homo sapien
gtaaaggaccactcttaggatcaaa

SEQ ID NO: 5421064 - DNA, 25 bp, Homo sapien
cctgttatccgagcttacttgggag

SEQ ID NO: 5421065 - DNA, 25 bp, Homo sapien
cccgtggctgaagaaggaatactcc

SEQ ID NO: 5421066 - DNA, 25 bp, Homo sapien
ctgcggctgcatccgacgggagtct

SEQ ID NO: 5421067 - DNA, 25 bp, Homo sapien
tcactgagccaacttgagaggcttc

SEQ ID NO: 5421068 - DNA, 25 bp, Homo sapien
gcaggacggacacacgcttttcagt

SEQ ID NO: 5421069 - DNA, 25 bp, Homo sapien
cgggcgggcaggaaaagcgctcagc

SEQ ID NO: 5421070 - DNA, 25 bp, Homo sapien
gcgcagcggctccggacgactccgc

SEQ ID NO: 5421071 - DNA, 25 bp, Homo sapien
ggctccggacgactccgcagccccg

SEQ ID NO: 5421072 - DNA, 25 bp, Homo sapien
ccgggcgggcaggaaaagcgctcag

SEQ ID NO: 5421073 - DNA, 25 bp, Homo sapien
gaatgaaggtgtccgctgaagacct

SEQ ID NO: 5421074 - DNA, 25 bp, Homo sapien
ggttgttctccacccataacaagga

SEQ ID NO: 5421075 - DNA, 25 bp, Homo sapien
cccataacaaggatccaggagcctt

SEQ ID NO: 5421076 - DNA, 25 bp, Homo sapien
cactggtcaggtatgaatgaaggtg

SEQ ID NO: 5421077 - DNA, 25 bp, Homo sapien
ccctagctagaactggtgcctgact

SEQ ID NO: 5421078 - DNA, 25 bp, Homo sapien
ctgagtcttaggaggtgcaactgga

SEQ ID NO: 5421079 - DNA, 25 bp, Homo sapien
gtctccctagctagaactggtgcct

SEQ ID NO: 5421080 - DNA, 25 bp, Homo sapien
gagtcaacctggactgagtcttagg

SEQ ID NO: 5421081 - DNA, 25 bp, Homo sapien
cttgagatgagaactagcaaggtcc

SEQ ID NO: 5421082 - DNA, 25 bp, Homo sapien
gaactagcaaggtccctcgagtgaa

SEQ ID NO: 5421083 - DNA, 25 bp, Homo sapien
aaggtccctcgagtgaagactggca

SEQ ID NO: 5421084 - DNA, 25 bp, Homo sapien
gatgagaactagcaaggtccctcga

SEQ ID NO: 5421085 - DNA, 25 bp, Homo sapien
gctttgctgcaggaagcttgaacac

SEQ ID NO: 5421086 - DNA, 25 bp, Homo sapien
gacttggatcctgaggctttgctgc

SEQ ID NO: 5421087 - DNA, 25 bp, Homo sapien
cactgacgcttgcattagcagacag

SEQ ID NO: 5421088 - DNA, 25 bp, Homo sapien
tgggccgatatgcaccccttgtaca

SEQ ID NO: 5421089 - DNA, 25 bp, Homo sapien
tgaaatgtttcccatcatagtggat

SEQ ID NO: 5421090 - DNA, 25 bp, Homo sapien
aaatatctaacgttcagaactacca

SEQ ID NO: 5421091 - DNA, 25 bp, Homo sapien
ggattcttaagcacgttctccacgt

SEQ ID NO: 5421092 - DNA, 25 bp, Homo sapien
gcggcgtgctagctggatgtctttt

SEQ ID NO: 5421093 - DNA, 25 bp, Homo sapien
cgttctccacgtatgcggcgtgcta

SEQ ID NO: 5421094 - DNA, 25 bp, Homo sapien
taagcacgttctccacgtatgcggc

SEQ ID NO: 5421095 - DNA, 25 bp, Homo sapien
tattggtagttctgaacgttagata

SEQ ID NO: 5421096 - DNA, 25 bp, Homo sapien
cgtggagaacgtgcttaagaatcca

SEQ ID NO: 5421097 - DNA, 25 bp, Homo sapien
ctaagtatatgattgcgagtggaaa

SEQ ID NO: 5421098 - DNA, 25 bp, Homo sapien
tagcacgccgcatacgtggagaacg

SEQ ID NO: 5421099 - DNA, 25 bp, Homo sapien
taagaatccactatgatgggaaaca

SEQ ID NO: 5421100 - DNA, 25 bp, Homo sapien
caaaagacatccagctagcacgccg

SEQ ID NO: 5421101 - DNA, 25 bp, Homo sapien
tccctagtggtctcgtggttagaca

SEQ ID NO: 5421102 - DNA, 25 bp, Homo sapien
tagaacatcagcaactccctagtgg

SEQ ID NO: 5421103 - DNA, 25 bp, Homo sapien
aaatgccttatctctttaggactgg

SEQ ID NO: 5421104 - DNA, 25 bp, Homo sapien
cagaaaacctcggttatcctggcaa

SEQ ID NO: 5421105 - DNA, 25 bp, Homo sapien
gcgagtggagcaagtagacaaatct

SEQ ID NO: 5421106 - DNA, 25 bp, Homo sapien
catttactaaagagggttcactctt

SEQ ID NO: 5421107 - DNA, 25 bp, Homo sapien
taagtatggaatataacacgtttga

SEQ ID NO: 5421108 - DNA, 25 bp, Homo sapien
cagggagacagcagaactaaaggga

SEQ ID NO: 5421109 - DNA, 25 bp, Homo sapien
tccgaggagtatgtggtccatcacc

SEQ ID NO: 5421110 - DNA, 25 bp, Homo sapien
gcaaacaagcatgaagactccgagg

SEQ ID NO: 5421111 - DNA, 25 bp, Homo sapien
tagggttccgatgatgcaaacaagc

SEQ ID NO: 5421112 - DNA, 25 bp, Homo sapien
tcaatgagtcgacctgcaaacacgg

SEQ ID NO: 5421113 - DNA, 25 bp, Homo sapien
catgatatttgggatagtgtcgata

SEQ ID NO: 5421114 - DNA, 25 bp, Homo sapien
gatgccctcgatggcacttttcacc

SEQ ID NO: 5421115 - DNA, 25 bp, Homo sapien
acttcatggtctctgcgatgtactt

SEQ ID NO: 5421116 - DNA, 25 bp, Homo sapien
tccagaaatgtcagagatatcaatg

SEQ ID NO: 5421117 - DNA, 25 bp, Homo sapien
ggagcccatgtgcagtcatcgacct

SEQ ID NO: 5421118 - DNA, 25 bp, Homo sapien
gagcttaaaagcgtcaggatcccct

SEQ ID NO: 5421119 - DNA, 25 bp, Homo sapien
gcagtacaggtattgccagcagtca

SEQ ID NO: 5421120 - DNA, 25 bp, Homo sapien
aatgccttagcaatgtgtcaccagg

SEQ ID NO: 5421121 - DNA, 25 bp, Homo sapien
caaagacagtaagacagagatgctc

SEQ ID NO: 5421122 - DNA, 25 bp, Homo sapien
gaggcaatgacgaacaccatggtga

SEQ ID NO: 5421123 - DNA, 25 bp, Homo sapien
tccgcacccagttgggcatgacatg

SEQ ID NO: 5421124 - DNA, 25 bp, Homo sapien
cgatgaccagaaggaacacagtcaa

SEQ ID NO: 5421125 - DNA, 25 bp, Homo sapien
gcaaatgcaccctcctaatgatgat

SEQ ID NO: 5421126 - DNA, 25 bp, Homo sapien
tgagaagtgtctgggatcacatgcc

SEQ ID NO: 5421127 - DNA, 25 bp, Homo sapien
tacactgtgcatctctagggtcatg

SEQ ID NO: 5421128 - DNA, 25 bp, Homo sapien
ttaaccagcctaagctacactgtgc

SEQ ID NO: 5421129 - DNA, 25 bp, Homo sapien
aaaatagcagcacgagacccatcag

SEQ ID NO: 5421130 - DNA, 25 bp, Homo sapien
aatagcagcacgagacccatcagcg

SEQ ID NO: 5421131 - DNA, 25 bp, Homo sapien
cccaaaatagcagcacgagacccat

SEQ ID NO: 5421132 - DNA, 25 bp, Homo sapien
caaaatagcagcacgagacccatca

SEQ ID NO: 5421133 - DNA, 25 bp, Homo sapien
tcagcagcagcagtcatggcaacca

SEQ ID NO: 5421134 - DNA, 25 bp, Homo sapien
cagcagtcatggcaaccacacccac

SEQ ID NO: 5421135 - DNA, 25 bp, Homo sapien
gcagcagcagtcatggcaaccacac

SEQ ID NO: 5421136 - DNA, 25 bp, Homo sapien
agcagcagtcatggcaaccacaccc

SEQ ID NO: 5421137 - DNA, 25 bp, Homo sapien
gcaggcgctgcatgacgaagtggta

SEQ ID NO: 5421138 - DNA, 25 bp, Homo sapien
ggccagttaagaaggagaagagcag

SEQ ID NO: 5421139 - DNA, 25 bp, Homo sapien
tgatgacgttgacgatgaagtagag

SEQ ID NO: 5421140 - DNA, 25 bp, Homo sapien
gggcagcaggaataggtcacggagt

SEQ ID NO: 5421141 - DNA, 25 bp, Homo sapien
acagagccgtcgtaggtccaggtgc

SEQ ID NO: 5421142 - DNA, 25 bp, Homo sapien
gccacgacagagccgtcgtaggtcc

SEQ ID NO: 5421143 - DNA, 25 bp, Homo sapien
gagccgtcgtaggtccaggtgccca

SEQ ID NO: 5421144 - DNA, 25 bp, Homo sapien
cgacagagccgtcgtaggtccaggt

SEQ ID NO: 5421145 - DNA, 25 bp, Homo sapien
tactgcaggagcactttggtgaact

SEQ ID NO: 5421146 - DNA, 25 bp, Homo sapien
ggtgaacttgacaatagcaaagtca

SEQ ID NO: 5421147 - DNA, 25 bp, Homo sapien
gaaagtgggtgacgatgatctcaca

SEQ ID NO: 5421148 - DNA, 25 bp, Homo sapien
cagtagcttttaaagatggctggag

SEQ ID NO: 5421149 - DNA, 25 bp, Homo sapien
ttttcacaccgccatagtcatctgg

SEQ ID NO: 5421150 - DNA, 25 bp, Homo sapien
agaacaaggtctgggcgccagatct

SEQ ID NO: 5421151 - DNA, 25 bp, Homo sapien
gattccattttaggttgtaatccac

SEQ ID NO: 5421152 - DNA, 25 bp, Homo sapien
tgttatagagaacaaggtctgggcg

SEQ ID NO: 5421153 - DNA, 25 bp, Homo sapien
caaaggaactcccaaagtcacgcag

SEQ ID NO: 5421154 - DNA, 25 bp, Homo sapien
cagctggggcgtggcagatctacca

SEQ ID NO: 5421155 - DNA, 25 bp, Homo sapien
ggcgtggcagatctaccatgtcacc

SEQ ID NO: 5421156 - DNA, 25 bp, Homo sapien
acaaaggaactcccaaagtcacgca

SEQ ID NO: 5421157 - DNA, 25 bp, Homo sapien
gacgcacattggttgtcacgatctg

SEQ ID NO: 5421158 - DNA, 25 bp, Homo sapien
ggttgtcacgatctgatttacttca

SEQ ID NO: 5421159 - DNA, 25 bp, Homo sapien
ctgtttcagacgcacattggttgtc

SEQ ID NO: 5421160 - DNA, 25 bp, Homo sapien
cattggttgtcacgatctgatttac

SEQ ID NO: 5421161 - DNA, 25 bp, Homo sapien
gatgagctgtatcagctgcaggccc

SEQ ID NO: 5421162 - DNA, 25 bp, Homo sapien
acgggtctcatgttcggagcccagg

SEQ ID NO: 5421163 - DNA, 25 bp, Homo sapien
tagctttgccaccagacgggtctca

SEQ ID NO: 5421164 - DNA, 25 bp, Homo sapien
cgacctggcggtggtcttccactgg

SEQ ID NO: 5421165 - DNA, 25 bp, Homo sapien
gatgacaccaacactgtcagattct

SEQ ID NO: 5421166 - DNA, 25 bp, Homo sapien
gacagcagatgacaccaacactgtc

SEQ ID NO: 5421167 - DNA, 25 bp, Homo sapien
ctgagacagcagatgacaccaacac

SEQ ID NO: 5421168 - DNA, 25 bp, Homo sapien
gcagatgacaccaacactgtcagat

SEQ ID NO: 5421169 - DNA, 25 bp, Homo sapien
tgagcaaaggctaaagagcaggagg

SEQ ID NO: 5421170 - DNA, 25 bp, Homo sapien
cttgtgtggaccagggcagagtggt

SEQ ID NO: 5421171 - DNA, 25 bp, Homo sapien
gagcttgtgtggaccagggcagagt

SEQ ID NO: 5421172 - DNA, 25 bp, Homo sapien
ctaccggagcttgtgtggaccaggg

SEQ ID NO: 5421173 - DNA, 25 bp, Homo sapien
accggagcttgtgtggaccagggca

SEQ ID NO: 5421174 - DNA, 25 bp, Homo sapien
tattaaagcggtggccgagcgctag

SEQ ID NO: 5421175 - DNA, 25 bp, Homo sapien
gcaggtggcaacaaatggttattaa

SEQ ID NO: 5421176 - DNA, 25 bp, Homo sapien
gagcgctagaggctctctccggatg

SEQ ID NO: 5421177 - DNA, 25 bp, Homo sapien
gccaaactcctgtttccagcatgga

SEQ ID NO: 5421178 - DNA, 25 bp, Homo sapien
ggcaccccaggaactacaggtgctc

SEQ ID NO: 5421179 - DNA, 25 bp, Homo sapien
gaaggcaccccaggaactacaggtg

SEQ ID NO: 5421180 - DNA, 25 bp, Homo sapien
gtgaggaaggcaccccaggaactac

SEQ ID NO: 5421181 - DNA, 25 bp, Homo sapien
ctttcgggtgaggaaggcaccccag

SEQ ID NO: 5421182 - DNA, 25 bp, Homo sapien
agtcaagaaagaggggtcaactcta

SEQ ID NO: 5421183 - DNA, 25 bp, Homo sapien
caagaaagaggggtcaactctaagc

SEQ ID NO: 5421184 - DNA, 25 bp, Homo sapien
agagtcaagaaagaggggtcaactc

SEQ ID NO: 5421185 - DNA, 25 bp, Homo sapien
tcaagaaagaggggtcaactctaag

SEQ ID NO: 5421186 - DNA, 25 bp, Homo sapien
ctttgtctctggggtactttctgac

SEQ ID NO: 5421187 - DNA, 25 bp, Homo sapien
aaggaggagaaaaatctgcgcctct

SEQ ID NO: 5421188 - DNA, 25 bp, Homo sapien
aggagaaaaatctgcgcctctttct

SEQ ID NO: 5421189 - DNA, 25 bp, Homo sapien
aaaaatctgcgcctctttctctcaa

SEQ ID NO: 5421190 - DNA, 25 bp, Homo sapien
aacacgaaccgaagccaggccttgg

SEQ ID NO: 5421191 - DNA, 25 bp, Homo sapien
cagtggacccctggcagaagtaagc

SEQ ID NO: 5421192 - DNA, 25 bp, Homo sapien
gggtccaaccacttgatcaatgcag

SEQ ID NO: 5421193 - DNA, 25 bp, Homo sapien
tgcaggaccacgcagagtcaacacg

SEQ ID NO: 5421194 - DNA, 25 bp, Homo sapien
tgggtgaggcagtccaaagcctact

SEQ ID NO: 5421195 - DNA, 25 bp, Homo sapien
ttctgggtgaggcagtccaaagcct

SEQ ID NO: 5421196 - DNA, 25 bp, Homo sapien
gaggcagtccaaagcctactcccat

SEQ ID NO: 5421197 - DNA, 25 bp, Homo sapien
ggtgaggcagtccaaagcctactcc

SEQ ID NO: 5421198 - DNA, 25 bp, Homo sapien
tagtcctgtgagagagtttctgccc

SEQ ID NO: 5421199 - DNA, 25 bp, Homo sapien
tgccaggactatagacgagttcaac

SEQ ID NO: 5421200 - DNA, 25 bp, Homo sapien
cccagtgtggtgacacagtcttgct

SEQ ID NO: 5421201 - DNA, 25 bp, Homo sapien
tctttatgtggtccactgccaggac

SEQ ID NO: 5421202 - DNA, 25 bp, Homo sapien
gctcattaaggtagagacacctcag

SEQ ID NO: 5421203 - DNA, 25 bp, Homo sapien
cactaaagacaggtactcagggttg

SEQ ID NO: 5421204 - DNA, 25 bp, Homo sapien
tgcagtaaagccagctcgcatgtgc

SEQ ID NO: 5421205 - DNA, 25 bp, Homo sapien
ttcccagggaagtaggcgatttgag

SEQ ID NO: 5421206 - DNA, 25 bp, Homo sapien
ctcgcctctccctagcatagggaag

SEQ ID NO: 5421207 - DNA, 25 bp, Homo sapien
cccaaagacctttcacaagagcctg

SEQ ID NO: 5421208 - DNA, 25 bp, Homo sapien
gaaagctttggatactgctgtccaa

SEQ ID NO: 5421209 - DNA, 25 bp, Homo sapien
ccctagcatagggaagaagttggaa

SEQ ID NO: 5421210 - DNA, 25 bp, Homo sapien
atggcggagaaggtggtgtgatgac

SEQ ID NO: 5421211 - DNA, 25 bp, Homo sapien
gcggagaaggtggtgtgatgacaga

SEQ ID NO: 5421212 - DNA, 25 bp, Homo sapien
ctgtgttgatggcggagaaggtggt

SEQ ID NO: 5421213 - DNA, 25 bp, Homo sapien
tgttgatggcggagaaggtggtgtg

SEQ ID NO: 5421214 - DNA, 25 bp, Homo sapien
tggcccttggccactgaacagaata

SEQ ID NO: 5421215 - DNA, 25 bp, Homo sapien
taactgagcgttcctagctggcaag

SEQ ID NO: 5421216 - DNA, 25 bp, Homo sapien
tataacttgtgtgcccatctacgga

SEQ ID NO: 5421217 - DNA, 25 bp, Homo sapien
gctggcaagactgagagcaactctg

SEQ ID NO: 5421218 - DNA, 25 bp, Homo sapien
ggaaaaatttgcttctcaaacagcc

SEQ ID NO: 5421219 - DNA, 25 bp, Homo sapien
aatggaaaaatttgcttctcaaaca

SEQ ID NO: 5421220 - DNA, 25 bp, Homo sapien
tacacaatggaaaaatttgcttctc

SEQ ID NO: 5421221 - DNA, 25 bp, Homo sapien
cacaatggaaaaatttgcttctcaa

SEQ ID NO: 5421222 - DNA, 25 bp, Homo sapien
gatatcaaagcaagccctcgatttt

SEQ ID NO: 5421223 - DNA, 25 bp, Homo sapien
atcatccttgtagtcaccctcccct

SEQ ID NO: 5421224 - DNA, 25 bp, Homo sapien
gctttgcagggcttgtagatatcaa

SEQ ID NO: 5421225 - DNA, 25 bp, Homo sapien
gagtggccggaaggccatcatcctt

SEQ ID NO: 5421226 - DNA, 25 bp, Homo sapien
tcttgttccaagttctagcacagtg

SEQ ID NO: 5421227 - DNA, 25 bp, Homo sapien
aagaaacgcaaaaccatccacgctg

SEQ ID NO: 5421228 - DNA, 25 bp, Homo sapien
cagagatgctacaagggatgcagat

SEQ ID NO: 5421229 - DNA, 25 bp, Homo sapien
tgacatctagcactgaggcatacag

SEQ ID NO: 5421230 - DNA, 25 bp, Homo sapien
taaatggccaaacacattttcccga

SEQ ID NO: 5421231 - DNA, 25 bp, Homo sapien
cattttcccgaatattcttatgaga

SEQ ID NO: 5421232 - DNA, 25 bp, Homo sapien
tggccaaacacattttcccgaatat

SEQ ID NO: 5421233 - DNA, 25 bp, Homo sapien
tatttaataaatggccaaacacatt

SEQ ID NO: 5421234 - DNA, 25 bp, Homo sapien
taaattaataaacgcatgccagaaa

SEQ ID NO: 5421235 - DNA, 25 bp, Homo sapien
taataaattaataaacgcatgccag

SEQ ID NO: 5421236 - DNA, 25 bp, Homo sapien
aattaataaacgcatgccagaaaaa

SEQ ID NO: 5421237 - DNA, 25 bp, Homo sapien
aataaattaataaacgcatgccaga

SEQ ID NO: 5421238 - DNA, 25 bp, Homo sapien
gatatggtttatggtaatgtaacag

SEQ ID NO: 5421239 - DNA, 25 bp, Homo sapien
cgtgtttgtacaagcatcagaaacc

SEQ ID NO: 5421240 - DNA, 25 bp, Homo sapien
cagccagaggtgctgttttatccat

SEQ ID NO: 5421241 - DNA, 25 bp, Homo sapien
tcagaaaccaatgacatagacccca

SEQ ID NO: 5421242 - DNA, 25 bp, Homo sapien
tctctgaacgtgataaacacccagg

SEQ ID NO: 5421243 - DNA, 25 bp, Homo sapien
gttttacaagacagctgagcggtgc

SEQ ID NO: 5421244 - DNA, 25 bp, Homo sapien
aagcacagactacccaggacgcaga

SEQ ID NO: 5421245 - DNA, 25 bp, Homo sapien
gggctaatcatgcaatagcttgagt

SEQ ID NO: 5421246 - DNA, 25 bp, Homo sapien
tatatgcccaaacctctaatcaaga

SEQ ID NO: 5421247 - DNA, 25 bp, Homo sapien
ttaatctggttatatgcccaaacct

SEQ ID NO: 5421248 - DNA, 25 bp, Homo sapien
tggttatatgcccaaacctctaatc

SEQ ID NO: 5421249 - DNA, 25 bp, Homo sapien
tatgcccaaacctctaatcaagaaa

SEQ ID NO: 5421250 - DNA, 25 bp, Homo sapien
atgtcttcgtttttgataagcagct

SEQ ID NO: 5421251 - DNA, 25 bp, Homo sapien
ataaaatgtcttcgtttttgataag

SEQ ID NO: 5421252 - DNA, 25 bp, Homo sapien
aatgtcttcgtttttgataagcagc

SEQ ID NO: 5421253 - DNA, 25 bp, Homo sapien
tgtcttcgtttttgataagcagctc

SEQ ID NO: 5421254 - DNA, 25 bp, Homo sapien
gtccaaagacgattccaaggttctc

SEQ ID NO: 5421255 - DNA, 25 bp, Homo sapien
tctggagatctcataagggtgggtc

SEQ ID NO: 5421256 - DNA, 25 bp, Homo sapien
gattctccttttcgtggagggtcac

SEQ ID NO: 5421257 - DNA, 25 bp, Homo sapien
tgcagccatggcgtctagttctgga

SEQ ID NO: 5421258 - DNA, 25 bp, Homo sapien
ttgtgtaagccatatgttcttcatt

SEQ ID NO: 5421259 - DNA, 25 bp, Homo sapien
aaaatgcaagtacaggaataaatga

SEQ ID NO: 5421260 - DNA, 25 bp, Homo sapien
tgcaagtacaggaataaatgacttt

SEQ ID NO: 5421261 - DNA, 25 bp, Homo sapien
ctttgtgtaagccatatgttcttca

SEQ ID NO: 5421262 - DNA, 25 bp, Homo sapien
ttaaaatttggatgcaatacaagtg

SEQ ID NO: 5421263 - DNA, 25 bp, Homo sapien
atttggatgcaatacaagtgtaaga

SEQ ID NO: 5421264 - DNA, 25 bp, Homo sapien
aatttggatgcaatacaagtgtaag

SEQ ID NO: 5421265 - DNA, 25 bp, Homo sapien
aaaatttggatgcaatacaagtgta

SEQ ID NO: 5421266 - DNA, 25 bp, Homo sapien
gaagggtttccaattgctcatccgg

SEQ ID NO: 5421267 - DNA, 25 bp, Homo sapien
cggagggtttcgcagtgagcaggtg

SEQ ID NO: 5421268 - DNA, 25 bp, Homo sapien
ttcagtgcttcatgaagggtttcca

SEQ ID NO: 5421269 - DNA, 25 bp, Homo sapien
ccaattgctcatccggatccataat

SEQ ID NO: 5421270 - DNA, 25 bp, Homo sapien
caatgtggcaacactatttacttgg

SEQ ID NO: 5421271 - DNA, 25 bp, Homo sapien
ttcttgtgataatgctctgaaactg

SEQ ID NO: 5421272 - DNA, 25 bp, Homo sapien
gctttctcgtaattccttgtccaca

SEQ ID NO: 5421273 - DNA, 25 bp, Homo sapien
taaaatagcaagtcgaataccaaga

SEQ ID NO: 5421274 - DNA, 25 bp, Homo sapien
acacagacttcaggtgggttcatca

SEQ ID NO: 5421275 - DNA, 25 bp, Homo sapien
cataatgttgggttactggaggctc

SEQ ID NO: 5421276 - DNA, 25 bp, Homo sapien
gcagtgctgtttccatcgtgaccag

SEQ ID NO: 5421277 - DNA, 25 bp, Homo sapien
tagcatgggatgacctggccttctc

SEQ ID NO: 5421278 - DNA, 25 bp, Homo sapien
tcttatgatgtggtttccagagttc

SEQ ID NO: 5421279 - DNA, 25 bp, Homo sapien
cctgaagtacagtttaagtgcacca

SEQ ID NO: 5421280 - DNA, 25 bp, Homo sapien
tgatatcttcatacatgttcacaga

SEQ ID NO: 5421281 - DNA, 25 bp, Homo sapien
ggcagattctataaacttagggtag

SEQ ID NO: 5421282 - DNA, 25 bp, Homo sapien
caccagtgataatgttgatatcttc

SEQ ID NO: 5421283 - DNA, 25 bp, Homo sapien
cgaaagccatcttgacatcttcaat

SEQ ID NO: 5421284 - DNA, 25 bp, Homo sapien
tgtcgaaagccatcttgacatcttc

SEQ ID NO: 5421285 - DNA, 25 bp, Homo sapien
tctgtcgaaagccatcttgacatct

SEQ ID NO: 5421286 - DNA, 25 bp, Homo sapien
gtcgaaagccatcttgacatcttca

SEQ ID NO: 5421287 - DNA, 25 bp, Homo sapien
tagtggtatgtgctttcacgagcgt

SEQ ID NO: 5421288 - DNA, 25 bp, Homo sapien
cctttttgacatgcttcaagtctgg

SEQ ID NO: 5421289 - DNA, 25 bp, Homo sapien
catgtctaccaccattggccgctta

SEQ ID NO: 5421290 - DNA, 25 bp, Homo sapien
tcacgagcgtcgtaaggtcacagct

SEQ ID NO: 5421291 - DNA, 25 bp, Homo sapien
cactgcttatgaacattcaaaccac

SEQ ID NO: 5421292 - DNA, 25 bp, Homo sapien
ttggacctccaaaagtaggaatatc

SEQ ID NO: 5421293 - DNA, 25 bp, Homo sapien
caaaagtaggaatatccagggccct

SEQ ID NO: 5421294 - DNA, 25 bp, Homo sapien
agcggaattggacctccaaaagtag

SEQ ID NO: 5421295 - DNA, 25 bp, Homo sapien
tccagggccctcttaaaatggtgct

SEQ ID NO: 5421296 - DNA, 25 bp, Homo sapien
aattcctctagtagctggaaatagc

SEQ ID NO: 5421297 - DNA, 25 bp, Homo sapien
tattgctatactattaccggctaac

SEQ ID NO: 5421298 - DNA, 25 bp, Homo sapien
gtagctggaaatagctgtaactatt

SEQ ID NO: 5421299 - DNA, 25 bp, Homo sapien
tactattaccggctaacatttattg

SEQ ID NO: 5421300 - DNA, 25 bp, Homo sapien
caagagtgttcataattgcttgttg

SEQ ID NO: 5421301 - DNA, 25 bp, Homo sapien
tgggggcatttttatgatagctgct

SEQ ID NO: 5421302 - DNA, 25 bp, Homo sapien
atctgtgtcatcttgacgttgctgt

SEQ ID NO: 5421303 - DNA, 25 bp, Homo sapien
tttcttgtctgataattacaacatc

SEQ ID NO: 5421304 - DNA, 25 bp, Homo sapien
ctggcttacaaggacaaacgcaact

SEQ ID NO: 5421305 - DNA, 25 bp, Homo sapien
gacgaatgtttgacagtctccatga

SEQ ID NO: 5421306 - DNA, 25 bp, Homo sapien
tttattattaggagaactgctgcca

SEQ ID NO: 5421307 - DNA, 25 bp, Homo sapien
gcaactctttaggtacgatcaatca

SEQ ID NO: 5421308 - DNA, 25 bp, Homo sapien
cagacactgaacctgctgccagctt

SEQ ID NO: 5421309 - DNA, 25 bp, Homo sapien
tgaacctgctgccagcttgatcttg

SEQ ID NO: 5421310 - DNA, 25 bp, Homo sapien
acactgaacctgctgccagcttgat

SEQ ID NO: 5421311 - DNA, 25 bp, Homo sapien
atcttggacttcctggcctccagaa

SEQ ID NO: 5421312 - DNA, 25 bp, Homo sapien
gcttcgactctgagctgaggcgctc

SEQ ID NO: 5421313 - DNA, 25 bp, Homo sapien
agctccaagtccacacgtgtaggat

SEQ ID NO: 5421314 - DNA, 25 bp, Homo sapien
catcccaactctggataaccaccag

SEQ ID NO: 5421315 - DNA, 25 bp, Homo sapien
aggcgctccctgacgaacacctttg

SEQ ID NO: 5421316 - DNA, 25 bp, Homo sapien
agtgtggccctctgaatgtatgcac

SEQ ID NO: 5421317 - DNA, 25 bp, Homo sapien
cagtgtggccctctgaatgtatgca

SEQ ID NO: 5421318 - DNA, 25 bp, Homo sapien
tgcacatttcactccctgagcaatg

SEQ ID NO: 5421319 - DNA, 25 bp, Homo sapien
catttcactccctgagcaatgagac

SEQ ID NO: 5421320 - DNA, 25 bp, Homo sapien
cctattgatcaatgtctggctgtgg

SEQ ID NO: 5421321 - DNA, 25 bp, Homo sapien
catgtgaacaccaaccagtgacttt

SEQ ID NO: 5421322 - DNA, 25 bp, Homo sapien
tctgccccatacatttgagctgctt

SEQ ID NO: 5421323 - DNA, 25 bp, Homo sapien
gggtagaccacaagactctgcttgg

SEQ ID NO: 5421324 - DNA, 25 bp, Homo sapien
ggacttctctttaagaacaagggca

SEQ ID NO: 5421325 - DNA, 25 bp, Homo sapien
cagagatcagggttgtgtcacatgc

SEQ ID NO: 5421326 - DNA, 25 bp, Homo sapien
gaggtgaagctccaaacaaaggtag

SEQ ID NO: 5421327 - DNA, 25 bp, Homo sapien
caattgcggagtaatgagctgtaac

SEQ ID NO: 5421328 - DNA, 25 bp, Homo sapien
ctctatcgtccaggccatattgcag

SEQ ID NO: 5421329 - DNA, 25 bp, Homo sapien
cgtccaggccatattgcagtggcac

SEQ ID NO: 5421330 - DNA, 25 bp, Homo sapien
agcagcctcgatttcctgggcccca

SEQ ID NO: 5421331 - DNA, 25 bp, Homo sapien
atcgtccaggccatattgcagtggc

SEQ ID NO: 5421332 - DNA, 25 bp, Homo sapien
gtgaggttgagagggccaccgtgct

SEQ ID NO: 5421333 - DNA, 25 bp, Homo sapien
cagcattggcagaagtggaaagcag

SEQ ID NO: 5421334 - DNA, 25 bp, Homo sapien
gcatgacaaaccataaggccaggca

SEQ ID NO: 5421335 - DNA, 25 bp, Homo sapien
gccagcatgacaaaccataaggcca

SEQ ID NO: 5421336 - DNA, 25 bp, Homo sapien
ggagaagctgctagtgtcagcagca

SEQ ID NO: 5421337 - DNA, 25 bp, Homo sapien
aggagaagctgctagtgtcagcagc

SEQ ID NO: 5421338 - DNA, 25 bp, Homo sapien
ttgctcttctaacaagtgatgtcaa

SEQ ID NO: 5421339 - DNA, 25 bp, Homo sapien
atattttggaatttgctcgttttct

SEQ ID NO: 5421340 - DNA, 25 bp, Homo sapien
tgctcgttttctttcagagttgctc

SEQ ID NO: 5421341 - DNA, 25 bp, Homo sapien
ctttcagagttgctcttctaacaag

SEQ ID NO: 5421342 - DNA, 25 bp, Homo sapien
ttcagaggttgccagattgtcacag

SEQ ID NO: 5421343 - DNA, 25 bp, Homo sapien
agattgtcacagacgactttggaga

SEQ ID NO: 5421344 - DNA, 25 bp, Homo sapien
gaggttgccagattgtcacagacga

SEQ ID NO: 5421345 - DNA, 25 bp, Homo sapien
gagtttcagaggttgccagattgtc

SEQ ID NO: 5421346 - DNA, 25 bp, Homo sapien
gcagccctattagttttcctccctg

SEQ ID NO: 5421347 - DNA, 25 bp, Homo sapien
ttcctccctgaccaagactctttgg

SEQ ID NO: 5421348 - DNA, 25 bp, Homo sapien
tcccaaggctgctatcaataaatct

SEQ ID NO: 5421349 - DNA, 25 bp, Homo sapien
aaatcttgctgacggccctcttgtt

SEQ ID NO: 5421350 - DNA, 25 bp, Homo sapien
accctaacctacagagagctgcaga

SEQ ID NO: 5421351 - DNA, 25 bp, Homo sapien
gatatctattcagctaacacatgag

SEQ ID NO: 5421352 - DNA, 25 bp, Homo sapien
gaagcacttcttaaacagaggtcga

SEQ ID NO: 5421353 - DNA, 25 bp, Homo sapien
cacatgagcattctgccaggcagca

SEQ ID NO: 5421354 - DNA, 25 bp, Homo sapien
tacatactgcctgcaatcagtttct

SEQ ID NO: 5421355 - DNA, 25 bp, Homo sapien
ttcttaaagggatctatattctagc

SEQ ID NO: 5421356 - DNA, 25 bp, Homo sapien
tgaatgaaagatgcctacatactgc

SEQ ID NO: 5421357 - DNA, 25 bp, Homo sapien
gagtcgatgctaacatacaaaacac

SEQ ID NO: 5421358 - DNA, 25 bp, Homo sapien
ttctggattaactgcaatctgagca

SEQ ID NO: 5421359 - DNA, 25 bp, Homo sapien
tggattaactgcaatctgagcagct

SEQ ID NO: 5421360 - DNA, 25 bp, Homo sapien
ttagtcaagaaattctggattaact

SEQ ID NO: 5421361 - DNA, 25 bp, Homo sapien
gattaactgcaatctgagcagctac

SEQ ID NO: 5421362 - DNA, 25 bp, Homo sapien
tcaaggagcataaggagagaaatct

SEQ ID NO: 5421363 - DNA, 25 bp, Homo sapien
tcccatttgagttagactgtgagag

SEQ ID NO: 5421364 - DNA, 25 bp, Homo sapien
gaaatcatacaactgccataatttt

SEQ ID NO: 5421365 - DNA, 25 bp, Homo sapien
tagtggtgttccataggaaactctg

SEQ ID NO: 5421366 - DNA, 25 bp, Homo sapien
ctggtaccatgaggtagagttcaca

SEQ ID NO: 5421367 - DNA, 25 bp, Homo sapien
tgtgatcatgagtatcacctgctgg

SEQ ID NO: 5421368 - DNA, 25 bp, Homo sapien
gaggtagagttcacactcagagagc

SEQ ID NO: 5421369 - DNA, 25 bp, Homo sapien
agcaggggatgctctactttcccat

SEQ ID NO: 5421370 - DNA, 25 bp, Homo sapien
tcaagctgttgaacaggtcatcaac

SEQ ID NO: 5421371 - DNA, 25 bp, Homo sapien
cagggaatcaacgtttcaagctgtt

SEQ ID NO: 5421372 - DNA, 25 bp, Homo sapien
ggtcatcaaccctgtcctgttggat

SEQ ID NO: 5421373 - DNA, 25 bp, Homo sapien
cattgtgacagggaatcaacgtttc

SEQ ID NO: 5421374 - DNA, 25 bp, Homo sapien
ccatcctggcctgtagaatctctct

SEQ ID NO: 5421375 - DNA, 25 bp, Homo sapien
caaagtgcttgccatcgtagtagag

SEQ ID NO: 5421376 - DNA, 25 bp, Homo sapien
gagagtaatcaagccatcagtcacc

SEQ ID NO: 5421377 - DNA, 25 bp, Homo sapien
cagatcgtggatggactcaaagcgt

SEQ ID NO: 5421378 - DNA, 25 bp, Homo sapien
ctgaagtttctggtttgacttccaa

SEQ ID NO: 5421379 - DNA, 25 bp, Homo sapien
tgaagtttctggtttgacttccaaa

SEQ ID NO: 5421380 - DNA, 25 bp, Homo sapien
tgcataggcccaactctcacctagg

SEQ ID NO: 5421381 - DNA, 25 bp, Homo sapien
acctaggtagagttcagcaagatga

SEQ ID NO: 5421382 - DNA, 25 bp, Homo sapien
aactctcacctaggtagagttcagc

SEQ ID NO: 5421383 - DNA, 25 bp, Homo sapien
taggcccaactctcacctaggtaga

SEQ ID NO: 5421384 - DNA, 25 bp, Homo sapien
gattgggcttgcttagaaaattcca

SEQ ID NO: 5421385 - DNA, 25 bp, Homo sapien
ggctgtcagtaggacgggctccttt

SEQ ID NO: 5421386 - DNA, 25 bp, Homo sapien
tcacagagctttaaaactccttggc

SEQ ID NO: 5421387 - DNA, 25 bp, Homo sapien
tataccagtagattctttttgaatg

SEQ ID NO: 5421388 - DNA, 25 bp, Homo sapien
aaggaacaaagtacttatacatgcc

SEQ ID NO: 5421389 - DNA, 25 bp, Homo sapien
tattcataataacattatttacagc

SEQ ID NO: 5421390 - DNA, 25 bp, Homo sapien
caaagtacttatacatgccacaaca

SEQ ID NO: 5421391 - DNA, 25 bp, Homo sapien
tgtccatcaactactggaatatttt

SEQ ID NO: 5421392 - DNA, 25 bp, Homo sapien
tagtcactaagagataaacaccaaa

SEQ ID NO: 5421393 - DNA, 25 bp, Homo sapien
caagactcttgcacatgtcactttg

SEQ ID NO: 5421394 - DNA, 25 bp, Homo sapien
tctccatagtcaaagaaaaactgct

SEQ ID NO: 5421395 - DNA, 25 bp, Homo sapien
ttgtaggtataaggcattctctgga

SEQ ID NO: 5421396 - DNA, 25 bp, Homo sapien
catgctgttctacattccggcacca

SEQ ID NO: 5421397 - DNA, 25 bp, Homo sapien
cacatattagtgacataccagggat

SEQ ID NO: 5421398 - DNA, 25 bp, Homo sapien
tgtctttggaactcacacctggttt

SEQ ID NO: 5421399 - DNA, 25 bp, Homo sapien
gtaagccagtctacctttaagagct

SEQ ID NO: 5421400 - DNA, 25 bp, Homo sapien
tgatctctttccttattcaagaaat

SEQ ID NO: 5421401 - DNA, 25 bp, Homo sapien
tcaagaaattgacggaagccgacaa

SEQ ID NO: 5421402 - DNA, 25 bp, Homo sapien
gatctctttccttattcaagaaatt

SEQ ID NO: 5421403 - DNA, 25 bp, Homo sapien
tattcaagaaattgacggaagccga

SEQ ID NO: 5421404 - DNA, 25 bp, Homo sapien
ctctcccggatgaggtagctcccct

SEQ ID NO: 5421405 - DNA, 25 bp, Homo sapien
agccaaagtgtaggtccctggctgc

SEQ ID NO: 5421406 - DNA, 25 bp, Homo sapien
ggatgaggtagctcccctcagccac

SEQ ID NO: 5421407 - DNA, 25 bp, Homo sapien
cttaaagccaaagtgtaggtccctg

SEQ ID NO: 5421408 - DNA, 25 bp, Homo sapien
ctcttccataatactttggtctgtt

SEQ ID NO: 5421409 - DNA, 25 bp, Homo sapien
tctcttccataatactttggtctgt

SEQ ID NO: 5421410 - DNA, 25 bp, Homo sapien
ttccataatactttggtctgttttc

SEQ ID NO: 5421411 - DNA, 25 bp, Homo sapien
cataatactttggtctgttttccac

SEQ ID NO: 5421412 - DNA, 25 bp, Homo sapien
tacagtggtagtcattgggtcagaa

SEQ ID NO: 5421413 - DNA, 25 bp, Homo sapien
tgaaaaatgatacacataggcaggc

SEQ ID NO: 5421414 - DNA, 25 bp, Homo sapien
aataaaattctgcaggtaatgccac

SEQ ID NO: 5421415 - DNA, 25 bp, Homo sapien
ttttccatggctacagttcaagaca

SEQ ID NO: 5421416 - DNA, 25 bp, Homo sapien
gtaattcttcgaggatgaggggctt

SEQ ID NO: 5421417 - DNA, 25 bp, Homo sapien
aggtaattcttcgaggatgaggggc

SEQ ID NO: 5421418 - DNA, 25 bp, Homo sapien
ggtaattcttcgaggatgaggggct

SEQ ID NO: 5421419 - DNA, 25 bp, Homo sapien
ccaaacaggaggtctatattcatct

SEQ ID NO: 5421420 - DNA, 25 bp, Homo sapien
aacaggaggtctatattcatctgta

SEQ ID NO: 5421421 - DNA, 25 bp, Homo sapien
aaacaggaggtctatattcatctgt

SEQ ID NO: 5421422 - DNA, 25 bp, Homo sapien
tccaaacaggaggtctatattcatc

SEQ ID NO: 5421423 - DNA, 25 bp, Homo sapien
gctgttattataattcaatcctaag

SEQ ID NO: 5421424 - DNA, 25 bp, Homo sapien
gggctccaaaccataagaggtggtg

SEQ ID NO: 5421425 - DNA, 25 bp, Homo sapien
taacaggacacccatattctatgtg

SEQ ID NO: 5421426 - DNA, 25 bp, Homo sapien
agtatgacgtggagcgagtttccag

SEQ ID NO: 5421427 - DNA, 25 bp, Homo sapien
cggtgactgctgtgacctgggccat

SEQ ID NO: 5421428 - DNA, 25 bp, Homo sapien
aactgcggtgactgctgtgacctgg

SEQ ID NO: 5421429 - DNA, 25 bp, Homo sapien
cttcaactgcggtgactgctgtgac

SEQ ID NO: 5421430 - DNA, 25 bp, Homo sapien
gcggtgactgctgtgacctgggcca

SEQ ID NO: 5421431 - DNA, 25 bp, Homo sapien
ttcagcagacccactatataacctc

SEQ ID NO: 5421432 - DNA, 25 bp, Homo sapien
gcagacccactatataacctcctta

SEQ ID NO: 5421433 - DNA, 25 bp, Homo sapien
ctccttcagcagacccactatataa

SEQ ID NO: 5421434 - DNA, 25 bp, Homo sapien
tccttcagcagacccactatataac

SEQ ID NO: 5421435 - DNA, 25 bp, Homo sapien
ggagttaactgttgtagcaatcttg

SEQ ID NO: 5421436 - DNA, 25 bp, Homo sapien
gagttaactgttgtagcaatcttgc

SEQ ID NO: 5421437 - DNA, 25 bp, Homo sapien
ctggagttaactgttgtagcaatct

SEQ ID NO: 5421438 - DNA, 25 bp, Homo sapien
cactggagttaactgttgtagcaat

SEQ ID NO: 5421439 - DNA, 25 bp, Homo sapien
tccttgctaacagcctagaaaagtc

SEQ ID NO: 5421440 - DNA, 25 bp, Homo sapien
ccaccagggtctgaaagggagacct

SEQ ID NO: 5421441 - DNA, 25 bp, Homo sapien
tataggaacaacttacaggagtagt

SEQ ID NO: 5421442 - DNA, 25 bp, Homo sapien
tatgaacttggctaacccaccaggg

SEQ ID NO: 5421443 - DNA, 25 bp, Homo sapien
caccagtgaccggttctggtttcat

SEQ ID NO: 5421444 - DNA, 25 bp, Homo sapien
caaacattgagtttacagtccttga

SEQ ID NO: 5421445 - DNA, 25 bp, Homo sapien
catggtttcaattacgcacagtcaa

SEQ ID NO: 5421446 - DNA, 25 bp, Homo sapien
gaaatcttacactacacagctccat

SEQ ID NO: 5421447 - DNA, 25 bp, Homo sapien
tttaccagagtaacttcacagccat

SEQ ID NO: 5421448 - DNA, 25 bp, Homo sapien
tgctgcctgtcaaacctagcaccaa

SEQ ID NO: 5421449 - DNA, 25 bp, Homo sapien
gtcaaacctagcaccaactacttca

SEQ ID NO: 5421450 - DNA, 25 bp, Homo sapien
tcatctttaccagagtaacttcaca

SEQ ID NO: 5421451 - DNA, 25 bp, Homo sapien
gcgggctagggatcacctcatcagc

SEQ ID NO: 5421452 - DNA, 25 bp, Homo sapien
ctcccaggcgggctagggatcacct

SEQ ID NO: 5421453 - DNA, 25 bp, Homo sapien
gccgcccgcgagtccaggcgctcct

SEQ ID NO: 5421454 - DNA, 25 bp, Homo sapien
ggctagggatcacctcatcagcccg

SEQ ID NO: 5421455 - DNA, 25 bp, Homo sapien
agggagccccgctagctctccgcga

SEQ ID NO: 5421456 - DNA, 25 bp, Homo sapien
caagaaaaagttattcacgcgttat

SEQ ID NO: 5421457 - DNA, 25 bp, Homo sapien
tcacgcgttattgtcgggcgcaccg

SEQ ID NO: 5421458 - DNA, 25 bp, Homo sapien
tcgctgccatcaggcgcggagcgtg

SEQ ID NO: 5421459 - DNA, 25 bp, Homo sapien
cagcagcctcgcacagcccccggcg

SEQ ID NO: 5421460 - DNA, 25 bp, Homo sapien
cagcagcagcctcgcacagcccccg

SEQ ID NO: 5421461 - DNA, 25 bp, Homo sapien
gcagcagcctcgcacagcccccggc

SEQ ID NO: 5421462 - DNA, 25 bp, Homo sapien
agcagcctcgcacagcccccggcgg

SEQ ID NO: 5421463 - DNA, 25 bp, Homo sapien
ccgcggcctcgcagacgccatcttg

SEQ ID NO: 5421464 - DNA, 25 bp, Homo sapien
gcttcccggtcgagtgcgttcccat

SEQ ID NO: 5421465 - DNA, 25 bp, Homo sapien
gcgatagcgtctcccacgagctcgg

SEQ ID NO: 5421466 - DNA, 25 bp, Homo sapien
tcgggcttcccggtcgagtgcgttc

SEQ ID NO: 5421467 - DNA, 25 bp, Homo sapien
tggactggaaactcgtctactgctg

SEQ ID NO: 5421468 - DNA, 25 bp, Homo sapien
tgctgtgatggagttttcataaagc

SEQ ID NO: 5421469 - DNA, 25 bp, Homo sapien
gaaactcgtctactgctgtgatgga

SEQ ID NO: 5421470 - DNA, 25 bp, Homo sapien
aatcacaatctggactggaaactcg

SEQ ID NO: 5421471 - DNA, 25 bp, Homo sapien
taggcaggcaactagcacatgtctg

SEQ ID NO: 5421472 - DNA, 25 bp, Homo sapien
aatcaagagttaccctgaacctgag

SEQ ID NO: 5421473 - DNA, 25 bp, Homo sapien
taccagtcaacaactagaggaaggg

SEQ ID NO: 5421474 - DNA, 25 bp, Homo sapien
gaggcaagtgcaagccaatcaagag

SEQ ID NO: 5421475 - DNA, 25 bp, Homo sapien
caagtggactagtatctctgtgccc

SEQ ID NO: 5421476 - DNA, 25 bp, Homo sapien
gatgtagccacctcagttccaaaac

SEQ ID NO: 5421477 - DNA, 25 bp, Homo sapien
agaggtcaagttcctgtctccgccc

SEQ ID NO: 5421478 - DNA, 25 bp, Homo sapien
tagtagattggctcgtccagaggtc

SEQ ID NO: 5421479 - DNA, 25 bp, Homo sapien
gggtgtgtcattgcccaacaatatc

SEQ ID NO: 5421480 - DNA, 25 bp, Homo sapien
cctagtcaaataactgtagcctaaa

SEQ ID NO: 5421481 - DNA, 25 bp, Homo sapien
caaacaaattttacgatctgacaag

SEQ ID NO: 5421482 - DNA, 25 bp, Homo sapien
agtgacaaccatatctttcccatcc

SEQ ID NO: 5421483 - DNA, 25 bp, Homo sapien
tgtttcccaggacagattgttccca

SEQ ID NO: 5421484 - DNA, 25 bp, Homo sapien
gtttcccaggacagattgttcccaa

SEQ ID NO: 5421485 - DNA, 25 bp, Homo sapien
agtcccgtgggagtggaaagaggca

SEQ ID NO: 5421486 - DNA, 25 bp, Homo sapien
tttcccaggacagattgttcccaac

SEQ ID NO: 5421487 - DNA, 25 bp, Homo sapien
catggaaggacgtggaagaagccgt

SEQ ID NO: 5421488 - DNA, 25 bp, Homo sapien
tttcaggattgtgcccacgtggtca

SEQ ID NO: 5421489 - DNA, 25 bp, Homo sapien
ttccgtattgctgatgcctgtggcc

SEQ ID NO: 5421490 - DNA, 25 bp, Homo sapien
tggtcaaagttgagtctactttccg

SEQ ID NO: 5421491 - DNA, 25 bp, Homo sapien
ctgtgtaagatgaagacttgtgaaa

SEQ ID NO: 5421492 - DNA, 25 bp, Homo sapien
gtaagatgaagacttgtgaaaccac

SEQ ID NO: 5421493 - DNA, 25 bp, Homo sapien
gtgtaagatgaagacttgtgaaacc

SEQ ID NO: 5421494 - DNA, 25 bp, Homo sapien
taagatgaagacttgtgaaaccact

SEQ ID NO: 5421495 - DNA, 25 bp, Homo sapien
taagagccctggtgtcaattgtgca

SEQ ID NO: 5421496 - DNA, 25 bp, Homo sapien
ctgtctgctgtcttggccctaagga

SEQ ID NO: 5421497 - DNA, 25 bp, Homo sapien
tcacagggccacagctttagcagct

SEQ ID NO: 5421498 - DNA, 25 bp, Homo sapien
tcaaaggccgtaagagacacagcaa

SEQ ID NO: 5421499 - DNA, 25 bp, Homo sapien
tatcatgttccttacagatttgcat

SEQ ID NO: 5421500 - DNA, 25 bp, Homo sapien
cagcatgttgggtaacatcatagac

SEQ ID NO: 5421501 - DNA, 25 bp, Homo sapien
agtactcatttccttgacgtctaca

SEQ ID NO: 5421502 - DNA, 25 bp, Homo sapien
ttaatgtgctccacacacacattct

SEQ ID NO: 5421503 - DNA, 25 bp, Homo sapien
ttccaaacacgtttcatactgtatg

SEQ ID NO: 5421504 - DNA, 25 bp, Homo sapien
gaattccaaacacgtttcatactgt

SEQ ID NO: 5421505 - DNA, 25 bp, Homo sapien
caggcccagaagtgaagttccttcc

SEQ ID NO: 5421506 - DNA, 25 bp, Homo sapien
tcccaagaattccaaacacgtttca

SEQ ID NO: 5421507 - DNA, 25 bp, Homo sapien
agactgcaaacttcgtggacttggg

SEQ ID NO: 5421508 - DNA, 25 bp, Homo sapien
cttagcacagtttcaataactcctc

SEQ ID NO: 5421509 - DNA, 25 bp, Homo sapien
ttaaataccaacgtcaacagcaccc

SEQ ID NO: 5421510 - DNA, 25 bp, Homo sapien
gcttccttgatgagactgcaaactt

SEQ ID NO: 5421511 - DNA, 25 bp, Homo sapien
gacagaagaaccctctaaagtgtgg

SEQ ID NO: 5421512 - DNA, 25 bp, Homo sapien
aaatgtttctcaggcagcgtgtgca

SEQ ID NO: 5421513 - DNA, 25 bp, Homo sapien
gacaatatacaaactggaccaggaa

SEQ ID NO: 5421514 - DNA, 25 bp, Homo sapien
tagttgccaatacaaagggaatcgg

SEQ ID NO: 5421515 - DNA, 25 bp, Homo sapien
agaataagagacattgagaaaaaag

SEQ ID NO: 5421516 - DNA, 25 bp, Homo sapien
cgagtcttctcacaagataatggct

SEQ ID NO: 5421517 - DNA, 25 bp, Homo sapien
gactgaaccctgaagcaaaaaatcg

SEQ ID NO: 5421518 - DNA, 25 bp, Homo sapien
tgctcctaaacgctaaagaataaga

SEQ ID NO: 5421519 - DNA, 25 bp, Homo sapien
ggagtgagaaagaggctaatgtcgt

SEQ ID NO: 5421520 - DNA, 25 bp, Homo sapien
gaaagaggctaatgtcgtgaacctt

SEQ ID NO: 5421521 - DNA, 25 bp, Homo sapien
aagaggctaatgtcgtgaaccttac

SEQ ID NO: 5421522 - DNA, 25 bp, Homo sapien
gtcgtgaaccttacttgatgtgttt

SEQ ID NO: 5421523 - DNA, 25 bp, Homo sapien
ggctcagccaggagtatgcctttga

SEQ ID NO: 5421524 - DNA, 25 bp, Homo sapien
gatctgcaaactgaccaatccagag

SEQ ID NO: 5421525 - DNA, 25 bp, Homo sapien
gccaagtcttatgcatagcaagggc

SEQ ID NO: 5421526 - DNA, 25 bp, Homo sapien
cccagctagctgtgagtgttctttt

SEQ ID NO: 5421527 - DNA, 25 bp, Homo sapien
taactgggtgattgctagcctggca

SEQ ID NO: 5421528 - DNA, 25 bp, Homo sapien
cataatctgctgtgggctaagtgga

SEQ ID NO: 5421529 - DNA, 25 bp, Homo sapien
tgatggaggcttgtgcagaacagcc

SEQ ID NO: 5421530 - DNA, 25 bp, Homo sapien
cagcctgcaagtgggtgtaaatctc

SEQ ID NO: 5421531 - DNA, 25 bp, Homo sapien
gacagaagggaaacataaagcgagc

SEQ ID NO: 5421532 - DNA, 25 bp, Homo sapien
tttccagggtgcagcaactgggccg

SEQ ID NO: 5421533 - DNA, 25 bp, Homo sapien
tgggccgggaaacacagagccatgt

SEQ ID NO: 5421534 - DNA, 25 bp, Homo sapien
gaggaacatgattgatactcccacc

SEQ ID NO: 5421535 - DNA, 25 bp, Homo sapien
gaacttaggcaggagggatatttcc

SEQ ID NO: 5421536 - DNA, 25 bp, Homo sapien
agtatggatgcaggacaaactacac

SEQ ID NO: 5421537 - DNA, 25 bp, Homo sapien
tagtggaatcctgcttgaatgccag

SEQ ID NO: 5421538 - DNA, 25 bp, Homo sapien
gctactgggtaggactcataactat

SEQ ID NO: 5421539 - DNA, 25 bp, Homo sapien
gcatcacactgaaggcatcgttaaa

SEQ ID NO: 5421540 - DNA, 25 bp, Homo sapien
gaatgttagttatccaagcctgcac

SEQ ID NO: 5421541 - DNA, 25 bp, Homo sapien
caagaatagtacaagttagctcgca

SEQ ID NO: 5421542 - DNA, 25 bp, Homo sapien
tagctcgcaagtacaagacaatggg

SEQ ID NO: 5421543 - DNA, 25 bp, Homo sapien
tactactaccgtcacagttgagggt

SEQ ID NO: 5421544 - DNA, 25 bp, Homo sapien
caacagggactatgcaaaactttgg

SEQ ID NO: 5421545 - DNA, 25 bp, Homo sapien
tatgactccgttaacattacaaagt

SEQ ID NO: 5421546 - DNA, 25 bp, Homo sapien
gcagtttgtaacctgaaatctgtaa

SEQ ID NO: 5421547 - DNA, 25 bp, Homo sapien
ccgtttttcagtctgatcaactgct

SEQ ID NO: 5421548 - DNA, 25 bp, Homo sapien
cgtttttcagtctgatcaactgctg

SEQ ID NO: 5421549 - DNA, 25 bp, Homo sapien
acaatttacacattgagcacagaaa

SEQ ID NO: 5421550 - DNA, 25 bp, Homo sapien
tacaatttacacattgagcacagaa

SEQ ID NO: 5421551 - DNA, 25 bp, Homo sapien
cagatttcgcataaatggaaactgg

SEQ ID NO: 5421552 - DNA, 25 bp, Homo sapien
acagatttcgcataaatggaaactg

SEQ ID NO: 5421553 - DNA, 25 bp, Homo sapien
cacagatttcgcataaatggaaact

SEQ ID NO: 5421554 - DNA, 25 bp, Homo sapien
ctgtgactgggaggaaggagccata

SEQ ID NO: 5421555 - DNA, 25 bp, Homo sapien
gactgggaggaaggagccataacga

SEQ ID NO: 5421556 - DNA, 25 bp, Homo sapien
tcaacttcctgagggctgtgactgg

SEQ ID NO: 5421557 - DNA, 25 bp, Homo sapien
tgactgggaggaaggagccataacg

SEQ ID NO: 5421558 - DNA, 25 bp, Homo sapien
attggatgtgctgaccgaactatgc

SEQ ID NO: 5421559 - DNA, 25 bp, Homo sapien
ggttgaactgactccattggatgtg

SEQ ID NO: 5421560 - DNA, 25 bp, Homo sapien
ccgaactatgctgtatagcttctgt

SEQ ID NO: 5421561 - DNA, 25 bp, Homo sapien
tctgtatgtggactactcggcactg

SEQ ID NO: 5421562 - DNA, 25 bp, Homo sapien
aacaggtcgtttctcaactagtgcc

SEQ ID NO: 5421563 - DNA, 25 bp, Homo sapien
tacttttctgatcaagcagtaatga

SEQ ID NO: 5421564 - DNA, 25 bp, Homo sapien
taaaatagccaatataatcattaca

SEQ ID NO: 5421565 - DNA, 25 bp, Homo sapien
gcaatgacagtttaactggagggaa

SEQ ID NO: 5421566 - DNA, 25 bp, Homo sapien
aagggatgaatgcttacctacagac

SEQ ID NO: 5421567 - DNA, 25 bp, Homo sapien
tggtgtaatcacaagcactagagag

SEQ ID NO: 5421568 - DNA, 25 bp, Homo sapien
tatttgcacctatgtccagttctag

SEQ ID NO: 5421569 - DNA, 25 bp, Homo sapien
gctgtactcaaagagccacttccag

SEQ ID NO: 5421570 - DNA, 25 bp, Homo sapien
tatttcactgacgtagcctaaggct

SEQ ID NO: 5421571 - DNA, 25 bp, Homo sapien
catcattaatgaacggaggctggga

SEQ ID NO: 5421572 - DNA, 25 bp, Homo sapien
aagacaaagtgttatcctgagaaga

SEQ ID NO: 5421573 - DNA, 25 bp, Homo sapien
tgttgatctatagtaacgcttagga

SEQ ID NO: 5421574 - DNA, 25 bp, Homo sapien
atttcttctgcatggcggttacagg

SEQ ID NO: 5421575 - DNA, 25 bp, Homo sapien
tctgcatggcggttacagggcaatc

SEQ ID NO: 5421576 - DNA, 25 bp, Homo sapien
gggcaatctttatgagccagaagaa

SEQ ID NO: 5421577 - DNA, 25 bp, Homo sapien
cggttacagggcaatctttatgagc

SEQ ID NO: 5421578 - DNA, 25 bp, Homo sapien
taatgaacatcaaggactgaagagg

SEQ ID NO: 5421579 - DNA, 25 bp, Homo sapien
tgaagatgccagtagctaggaaagg

SEQ ID NO: 5421580 - DNA, 25 bp, Homo sapien
cttaacggttggtggtattcagact

SEQ ID NO: 5421581 - DNA, 25 bp, Homo sapien
gaggtacagtacttgattcttgcta

SEQ ID NO: 5421582 - DNA, 25 bp, Homo sapien
gagaaggggctgctacacaaatata

SEQ ID NO: 5421583 - DNA, 25 bp, Homo sapien
tattactattcagataagatggctg

SEQ ID NO: 5421584 - DNA, 25 bp, Homo sapien
taagatggctgcataagtcctgatt

SEQ ID NO: 5421585 - DNA, 25 bp, Homo sapien
taaagataggcatgatttattacta

SEQ ID NO: 5421586 - DNA, 25 bp, Homo sapien
gatagccaactgactaatcaatcga

SEQ ID NO: 5421587 - DNA, 25 bp, Homo sapien
gctgaaatcatcacacgatagccaa

SEQ ID NO: 5421588 - DNA, 25 bp, Homo sapien
tgtctatgtaatgtaaatcagcctg

SEQ ID NO: 5421589 - DNA, 25 bp, Homo sapien
tcaaaggttaattacatagcagcag

SEQ ID NO: 5421590 - DNA, 25 bp, Homo sapien
ctcagtggaaaaacgtggaagatag

SEQ ID NO: 5421591 - DNA, 25 bp, Homo sapien
tattgtctggtaccagaaataaaag

SEQ ID NO: 5421592 - DNA, 25 bp, Homo sapien
tcattttctataagtcaacggacca

SEQ ID NO: 5421593 - DNA, 25 bp, Homo sapien
tgatggcagctacactaatacccct

SEQ ID NO: 5421594 - DNA, 25 bp, Homo sapien
cattctgaaagctacaatctgtcac

SEQ ID NO: 5421595 - DNA, 25 bp, Homo sapien
tgtgcaactaccaccctctgtctag

SEQ ID NO: 5421596 - DNA, 25 bp, Homo sapien
taaaatgctacctatacttacggag

SEQ ID NO: 5421597 - DNA, 25 bp, Homo sapien
tacggagtcatttctataccagttc

SEQ ID NO: 5421598 - DNA, 25 bp, Homo sapien
ctggtctgtggataattagagtcct

SEQ ID NO: 5421599 - DNA, 25 bp, Homo sapien
gcacctttcacgagcaatatattca

SEQ ID NO: 5421600 - DNA, 25 bp, Homo sapien
tgtggataattagagtccttcagtt

SEQ ID NO: 5421601 - DNA, 25 bp, Homo sapien
atctggcacctttcacgagcaatat

SEQ ID NO: 5421602 - DNA, 25 bp, Homo sapien
catcaggatcttcgttagctgctct

SEQ ID NO: 5421603 - DNA, 25 bp, Homo sapien
gaccatttaatgaactcaagtcttc

SEQ ID NO: 5421604 - DNA, 25 bp, Homo sapien
gctgctgctctatttcgctctaaaa

SEQ ID NO: 5421605 - DNA, 25 bp, Homo sapien
tttgtcggcatcttgaagctgctgc

SEQ ID NO: 5421606 - DNA, 25 bp, Homo sapien
tgtggagttgtgtgagctggagaag

SEQ ID NO: 5421607 - DNA, 25 bp, Homo sapien
ctgtggagttgtgtgagctggagaa

SEQ ID NO: 5421608 - DNA, 25 bp, Homo sapien
gtggagttgtgtgagctggagaagc

SEQ ID NO: 5421609 - DNA, 25 bp, Homo sapien
tgacctttgacagtatcaccattgg

SEQ ID NO: 5421610 - DNA, 25 bp, Homo sapien
tgactgcggtcgagattcctctgac

SEQ ID NO: 5421611 - DNA, 25 bp, Homo sapien
tatcaccattggtaactggaggatg

SEQ ID NO: 5421612 - DNA, 25 bp, Homo sapien
tgagtcctaaccaatccgctaccat

SEQ ID NO: 5421613 - DNA, 25 bp, Homo sapien
tctgatattggtcagtccattacta

SEQ ID NO: 5421614 - DNA, 25 bp, Homo sapien
ggtcagtccattactaagatcaaaa

SEQ ID NO: 5421615 - DNA, 25 bp, Homo sapien
gtaaagattgagcactcataaaaat

SEQ ID NO: 5421616 - DNA, 25 bp, Homo sapien
tgtaaataaggattaagtactctaa

SEQ ID NO: 5421617 - DNA, 25 bp, Homo sapien
acataatatcttcctggaaaggcac

SEQ ID NO: 5421618 - DNA, 25 bp, Homo sapien
ctctttagctgtagtgtgctactca

SEQ ID NO: 5421619 - DNA, 25 bp, Homo sapien
gagagatgcagaaccccaaaaggat

SEQ ID NO: 5421620 - DNA, 25 bp, Homo sapien
ttaaccacaggtcattttagcagaa

SEQ ID NO: 5421621 - DNA, 25 bp, Homo sapien
gggatacgaacccatcttcaatgtt

SEQ ID NO: 5421622 - DNA, 25 bp, Homo sapien
tataatctaatctaacttgccaagc

SEQ ID NO: 5421623 - DNA, 25 bp, Homo sapien
tgagtcttcttaagcccactgaagc

SEQ ID NO: 5421624 - DNA, 25 bp, Homo sapien
tttaaggcatgaaagaatcaagttc

SEQ ID NO: 5421625 - DNA, 25 bp, Homo sapien
tttgcttctgactgtactggttggg

SEQ ID NO: 5421626 - DNA, 25 bp, Homo sapien
ttgcttctgactgtactggttgggg

SEQ ID NO: 5421627 - DNA, 25 bp, Homo sapien
caatttctgagacgtgtgctttcct

SEQ ID NO: 5421628 - DNA, 25 bp, Homo sapien
tctcaaagatctgtcaaacttccat

SEQ ID NO: 5421629 - DNA, 25 bp, Homo sapien
tcttaatggtccctgttagaaattc

SEQ ID NO: 5421630 - DNA, 25 bp, Homo sapien
tgtcaaaacttgtgacacttaggca

SEQ ID NO: 5421631 - DNA, 25 bp, Homo sapien
catttccggttgctttcatcactag

SEQ ID NO: 5421632 - DNA, 25 bp, Homo sapien
ggcaagaatgtttccctcctcaaaa

SEQ ID NO: 5421633 - DNA, 25 bp, Homo sapien
tatctgagtccttacaaagtctctc

SEQ ID NO: 5421634 - DNA, 25 bp, Homo sapien
tcatcactaggtacatgtaacagga

SEQ ID NO: 5421635 - DNA, 25 bp, Homo sapien
ttgaatgtcaaagacataactgaag

SEQ ID NO: 5421636 - DNA, 25 bp, Homo sapien
aaatttgaatgtcaaagacataact

SEQ ID NO: 5421637 - DNA, 25 bp, Homo sapien
tttgaatgtcaaagacataactgaa

SEQ ID NO: 5421638 - DNA, 25 bp, Homo sapien
aatttgaatgtcaaagacataactg

SEQ ID NO: 5421639 - DNA, 25 bp, Homo sapien
catgctgggctatcaaagattctac

SEQ ID NO: 5421640 - DNA, 25 bp, Homo sapien
aatttcataagccagtcaagcagcc

SEQ ID NO: 5421641 - DNA, 25 bp, Homo sapien
tatttgaatgctacaagtccagtca

SEQ ID NO: 5421642 - DNA, 25 bp, Homo sapien
gaaataccacagagttacctgacaa

SEQ ID NO: 5421643 - DNA, 25 bp, Homo sapien
caggaatagcaacaggcatggtttg

SEQ ID NO: 5421644 - DNA, 25 bp, Homo sapien
tgtaattgatgcaggaatagcaaca

SEQ ID NO: 5421645 - DNA, 25 bp, Homo sapien
tgatgcaggaatagcaacaggcatg

SEQ ID NO: 5421646 - DNA, 25 bp, Homo sapien
ctgcagctggaacatgcacattaga

SEQ ID NO: 5421647 - DNA, 25 bp, Homo sapien
aaaagagattcataccaactgtctc

SEQ ID NO: 5421648 - DNA, 25 bp, Homo sapien
ttaaaaaagagattcataccaactg

SEQ ID NO: 5421649 - DNA, 25 bp, Homo sapien
gattcataccaactgtctcttaaaa

SEQ ID NO: 5421650 - DNA, 25 bp, Homo sapien
gagattcataccaactgtctcttaa

SEQ ID NO: 5421651 - DNA, 25 bp, Homo sapien
tccaaaattcgaagcatgcacacac

SEQ ID NO: 5421652 - DNA, 25 bp, Homo sapien
catcttaaatgcataacctgtgtag

SEQ ID NO: 5421653 - DNA, 25 bp, Homo sapien
tcttgggagctaccagtaagaactg

SEQ ID NO: 5421654 - DNA, 25 bp, Homo sapien
gaagactacgcaagtactttttcca

SEQ ID NO: 5421655 - DNA, 25 bp, Homo sapien
taatgatgctggacgaacaatagct

SEQ ID NO: 5421656 - DNA, 25 bp, Homo sapien
gttggtgaaggtactgcctgctgaa

SEQ ID NO: 5421657 - DNA, 25 bp, Homo sapien
aacaatagctgatgtgggctgtgca

SEQ ID NO: 5421658 - DNA, 25 bp, Homo sapien
ttgtaagcagcacattgggaacctg

SEQ ID NO: 5421659 - DNA, 25 bp, Homo sapien
gcttcttatgataggtgttgcaaga

SEQ ID NO: 5421660 - DNA, 25 bp, Homo sapien
tcatcactggtagtagactctgggt

SEQ ID NO: 5421661 - DNA, 25 bp, Homo sapien
tgaggtaaaggactatcctggtgag

SEQ ID NO: 5421662 - DNA, 25 bp, Homo sapien
ggtgagttgtttctacaacagaagg

SEQ ID NO: 5421663 - DNA, 25 bp, Homo sapien
attaaacaaacccacttcttcacag

SEQ ID NO: 5421664 - DNA, 25 bp, Homo sapien
tggactcgccaactcattaaacaaa

SEQ ID NO: 5421665 - DNA, 25 bp, Homo sapien
aatcttgttggtgttggggtctgat

SEQ ID NO: 5421666 - DNA, 25 bp, Homo sapien
tcattctcaaatggactcgccaact

SEQ ID NO: 5421667 - DNA, 25 bp, Homo sapien
aataaatgtcaagaagtaatcatgc

SEQ ID NO: 5421668 - DNA, 25 bp, Homo sapien
gaaataaatgtcaagaagtaatcat

SEQ ID NO: 5421669 - DNA, 25 bp, Homo sapien
taaatgtcaagaagtaatcatgcat

SEQ ID NO: 5421670 - DNA, 25 bp, Homo sapien
tgaaataaatgtcaagaagtaatca

SEQ ID NO: 5421671 - DNA, 25 bp, Homo sapien
cagtgtcatctcatgtttatgttta

SEQ ID NO: 5421672 - DNA, 25 bp, Homo sapien
ctgtcattacgtgctggaccaaatt

SEQ ID NO: 5421673 - DNA, 25 bp, Homo sapien
cactgtcattacgtgctggaccaaa

SEQ ID NO: 5421674 - DNA, 25 bp, Homo sapien
tgacactgtcattacgtgctggacc

SEQ ID NO: 5421675 - DNA, 25 bp, Homo sapien
cagccaaatgatcctcgttggtaaa

SEQ ID NO: 5421676 - DNA, 25 bp, Homo sapien
ccaaatgatcctcgttggtaaaacg

SEQ ID NO: 5421677 - DNA, 25 bp, Homo sapien
gccaaatgatcctcgttggtaaaac

SEQ ID NO: 5421678 - DNA, 25 bp, Homo sapien
agccaaatgatcctcgttggtaaaa

SEQ ID NO: 5421679 - DNA, 25 bp, Homo sapien
cagggattacagaatcaagttgttt

SEQ ID NO: 5421680 - DNA, 25 bp, Homo sapien
tctcattccatttaactcagtacca

SEQ ID NO: 5421681 - DNA, 25 bp, Homo sapien
gtaaagtgggtcaggcgaagtggct

SEQ ID NO: 5421682 - DNA, 25 bp, Homo sapien
tattgcattagctgtacttcaggga

SEQ ID NO: 5421683 - DNA, 25 bp, Homo sapien
aagagaactgtagtttttagctctc

SEQ ID NO: 5421684 - DNA, 25 bp, Homo sapien
tgttaacacctaattcaaaccacca

SEQ ID NO: 5421685 - DNA, 25 bp, Homo sapien
cagaaagagtaaatttggttggtga

SEQ ID NO: 5421686 - DNA, 25 bp, Homo sapien
gtaaatctgatttaccagaaagagt

SEQ ID NO: 5421687 - DNA, 25 bp, Homo sapien
ttaagtactttgtaactttgctata

SEQ ID NO: 5421688 - DNA, 25 bp, Homo sapien
atggtccgtatatttaagtactttg

SEQ ID NO: 5421689 - DNA, 25 bp, Homo sapien
taagtactttgtaactttgctatac

SEQ ID NO: 5421690 - DNA, 25 bp, Homo sapien
agtactttgtaactttgctatacat

SEQ ID NO: 5421691 - DNA, 25 bp, Homo sapien
tggccacatccaggcgcagtacata

SEQ ID NO: 5421692 - DNA, 25 bp, Homo sapien
caggcgcagtacatagaaagggttt

SEQ ID NO: 5421693 - DNA, 25 bp, Homo sapien
aagggtttgtcatcactcatattcc

SEQ ID NO: 5421694 - DNA, 25 bp, Homo sapien
cactcatattccacaggtccttgta

SEQ ID NO: 5421695 - DNA, 25 bp, Homo sapien
tggcagaattcacatgtaacttgaa

SEQ ID NO: 5421696 - DNA, 25 bp, Homo sapien
ggcagaattcacatgtaacttgaat

SEQ ID NO: 5421697 - DNA, 25 bp, Homo sapien
ctggcagaattcacatgtaacttga

SEQ ID NO: 5421698 - DNA, 25 bp, Homo sapien
ctatcccaccatgggctggattctt

SEQ ID NO: 5421699 - DNA, 25 bp, Homo sapien
cctatcccaccatgggctggattct

SEQ ID NO: 5421700 - DNA, 25 bp, Homo sapien
ctcctcctatcccaccatgggctgg

SEQ ID NO: 5421701 - DNA, 25 bp, Homo sapien
ctcctatcccaccatgggctggatt

SEQ ID NO: 5421702 - DNA, 25 bp, Homo sapien
ttccaggaataccttagctgttatc

SEQ ID NO: 5421703 - DNA, 25 bp, Homo sapien
ctttctcaagtttccatctagtacc

SEQ ID NO: 5421704 - DNA, 25 bp, Homo sapien
gcaaacactgctaatggcaaatttc

SEQ ID NO: 5421705 - DNA, 25 bp, Homo sapien
ggtggagagaagttagcttctgtcc

SEQ ID NO: 5421706 - DNA, 25 bp, Homo sapien
taacagatgcaagggcaatcctggg

SEQ ID NO: 5421707 - DNA, 25 bp, Homo sapien
tgtaacagatgcaagggcaatcctg

SEQ ID NO: 5421708 - DNA, 25 bp, Homo sapien
tgggtggtggagagaagttagcttc

SEQ ID NO: 5421709 - DNA, 25 bp, Homo sapien
caagaagcaaacgtctgggaggaac

SEQ ID NO: 5421710 - DNA, 25 bp, Homo sapien
gatcccctctcgattgggcaagaag

SEQ ID NO: 5421711 - DNA, 25 bp, Homo sapien
caataaggctggatctgtaagaggc

SEQ ID NO: 5421712 - DNA, 25 bp, Homo sapien
tatctacacagccacgcagggtgag

SEQ ID NO: 5421713 - DNA, 25 bp, Homo sapien
ctaacggtccggcccagccagtcag

SEQ ID NO: 5421714 - DNA, 25 bp, Homo sapien
acggtccggcccagccagtcaggtt

SEQ ID NO: 5421715 - DNA, 25 bp, Homo sapien
tcccaaagcccacaccgcgcgggcc

SEQ ID NO: 5421716 - DNA, 25 bp, Homo sapien
agcacagccacaatcgccccaaggg

SEQ ID NO: 5421717 - DNA, 25 bp, Homo sapien
ttcatgatcctttcggtcacccgcg

SEQ ID NO: 5421718 - DNA, 25 bp, Homo sapien
ctagttcatgatcctttcggtcacc

SEQ ID NO: 5421719 - DNA, 25 bp, Homo sapien
agttcatgatcctttcggtcacccg

SEQ ID NO: 5421720 - DNA, 25 bp, Homo sapien
atgatcctttcggtcacccgcgagc

SEQ ID NO: 5421721 - DNA, 25 bp, Homo sapien
gcacagccgtgtttacaaagcaccc

SEQ ID NO: 5421722 - DNA, 25 bp, Homo sapien
gagcacagccgtgtttacaaagcac

SEQ ID NO: 5421723 - DNA, 25 bp, Homo sapien
tgagcacagccgtgtttacaaagca

SEQ ID NO: 5421724 - DNA, 25 bp, Homo sapien
ctgagcacagccgtgtttacaaagc

SEQ ID NO: 5421725 - DNA, 25 bp, Homo sapien
caggcttccgtcctctctcgcgaga

SEQ ID NO: 5421726 - DNA, 25 bp, Homo sapien
ctttaaaggccacgggctcccacag

SEQ ID NO: 5421727 - DNA, 25 bp, Homo sapien
ctgaacggcactttaaaggccacgg

SEQ ID NO: 5421728 - DNA, 25 bp, Homo sapien
gaggaaaaggctgaacggcacttta

SEQ ID NO: 5421729 - DNA, 25 bp, Homo sapien
gcgggtcttcggcagggcgggtaga

SEQ ID NO: 5421730 - DNA, 25 bp, Homo sapien
gcgggtagaggggacgggcatcaaa

SEQ ID NO: 5421731 - DNA, 25 bp, Homo sapien
agtcaggtgattccgtcaggcttaa

SEQ ID NO: 5421732 - DNA, 25 bp, Homo sapien
catcaaagagcactcgggcgctcat

SEQ ID NO: 5421733 - DNA, 25 bp, Homo sapien
aaggagcccgaagggcgggaagcag

SEQ ID NO: 5421734 - DNA, 25 bp, Homo sapien
aggagcccgaagggcgggaagcagt

SEQ ID NO: 5421735 - DNA, 25 bp, Homo sapien
atatccccaagagtcctaaaattct

SEQ ID NO: 5421736 - DNA, 25 bp, Homo sapien
ctttacaaacgcaggaaacttcttg

SEQ ID NO: 5421737 - DNA, 25 bp, Homo sapien
cttctctttacaaacgcaggaaact

SEQ ID NO: 5421738 - DNA, 25 bp, Homo sapien
ttttgcattcctcaatatccccaag

SEQ ID NO: 5421739 - DNA, 25 bp, Homo sapien
ttctgttcagaaacgaagatgtcag

SEQ ID NO: 5421740 - DNA, 25 bp, Homo sapien
tatgcagccacagttcagttagtcc

SEQ ID NO: 5421741 - DNA, 25 bp, Homo sapien
tgtttgcaaagctcgtaagctgagg

SEQ ID NO: 5421742 - DNA, 25 bp, Homo sapien
gctagtagatgcattccagtgatgt

SEQ ID NO: 5421743 - DNA, 25 bp, Homo sapien
taggtgaatattaatctaagcattt

SEQ ID NO: 5421744 - DNA, 25 bp, Homo sapien
tacttggaataggtgaatattaatc

SEQ ID NO: 5421745 - DNA, 25 bp, Homo sapien
aaatatacttggaataggtgaatat

SEQ ID NO: 5421746 - DNA, 25 bp, Homo sapien
gtaagacatgtaaaatttgccattt

SEQ ID NO: 5421747 - DNA, 25 bp, Homo sapien
gatttagcagtgaggggctatatac

SEQ ID NO: 5421748 - DNA, 25 bp, Homo sapien
tgaggggctatataccaactttaat

SEQ ID NO: 5421749 - DNA, 25 bp, Homo sapien
gcagtgaggggctatataccaactt

SEQ ID NO: 5421750 - DNA, 25 bp, Homo sapien
gccagatttagcagtgaggggctat

SEQ ID NO: 5421751 - DNA, 25 bp, Homo sapien
tgctgagtctcatgtccaaagagtc

SEQ ID NO: 5421752 - DNA, 25 bp, Homo sapien
tggaaatcaaacaggcaaagggcac

SEQ ID NO: 5421753 - DNA, 25 bp, Homo sapien
catgctttcttagggttcactcaca

SEQ ID NO: 5421754 - DNA, 25 bp, Homo sapien
ggaatccccatacgcattacgcagt

SEQ ID NO: 5421755 - DNA, 25 bp, Homo sapien
ttgttcaagtaagaaactagctgct

SEQ ID NO: 5421756 - DNA, 25 bp, Homo sapien
ttcaagtaagaaactagctgctagt

SEQ ID NO: 5421757 - DNA, 25 bp, Homo sapien
ctagctgctagttggactgagcctg

SEQ ID NO: 5421758 - DNA, 25 bp, Homo sapien
agctgctagttggactgagcctgtt

SEQ ID NO: 5421759 - DNA, 25 bp, Homo sapien
cagcatctgcctgaatgcacgttct

SEQ ID NO: 5421760 - DNA, 25 bp, Homo sapien
gaaccacctgtcaagtcagtcttgg

SEQ ID NO: 5421761 - DNA, 25 bp, Homo sapien
ttcattagaggcacacaattgctta

SEQ ID NO: 5421762 - DNA, 25 bp, Homo sapien
actgctgtagcttcctctgaatggg

SEQ ID NO: 5421763 - DNA, 25 bp, Homo sapien
tctttaatgaaatgactttggaaat

SEQ ID NO: 5421764 - DNA, 25 bp, Homo sapien
catgacaccaatactacagttttcg

SEQ ID NO: 5421765 - DNA, 25 bp, Homo sapien
ttcggagtcacagtaagatacacag

SEQ ID NO: 5421766 - DNA, 25 bp, Homo sapien
caatactacagttttcggagtcaca

SEQ ID NO: 5421767 - DNA, 25 bp, Homo sapien
agacccatagcttcagacaaggcaa

SEQ ID NO: 5421768 - DNA, 25 bp, Homo sapien
agagacccatagcttcagacaaggc

SEQ ID NO: 5421769 - DNA, 25 bp, Homo sapien
gagacccatagcttcagacaaggca

SEQ ID NO: 5421770 - DNA, 25 bp, Homo sapien
tattctcataacaccccaaatggtg

SEQ ID NO: 5421771 - DNA, 25 bp, Homo sapien
tactagctatgacctgggcaagtaa

SEQ ID NO: 5421772 - DNA, 25 bp, Homo sapien
tctgctggaagagtatttgcctaga

SEQ ID NO: 5421773 - DNA, 25 bp, Homo sapien
gcttaacaattaggaatgcagactc

SEQ ID NO: 5421774 - DNA, 25 bp, Homo sapien
aatttggcagcagtatcaatgtctc

SEQ ID NO: 5421775 - DNA, 25 bp, Homo sapien
aaatttggcagcagtatcaatgtct

SEQ ID NO: 5421776 - DNA, 25 bp, Homo sapien
atctcactcttgtgtaacagggata

SEQ ID NO: 5421777 - DNA, 25 bp, Homo sapien
taaaggtcgtatcagtaaccacagg

SEQ ID NO: 5421778 - DNA, 25 bp, Homo sapien
tagctgagtgtaaagagacaaatca

SEQ ID NO: 5421779 - DNA, 25 bp, Homo sapien
gccaccgcatccagtccaatagagt

SEQ ID NO: 5421780 - DNA, 25 bp, Homo sapien
cactgatgcagaaattggtctgtat

SEQ ID NO: 5421781 - DNA, 25 bp, Homo sapien
tccagtcctactagcctctggtcga

SEQ ID NO: 5421782 - DNA, 25 bp, Homo sapien
taacactgatgcagaaattggtctg

SEQ ID NO: 5421783 - DNA, 25 bp, Homo sapien
gcctctggtcgagataacactgatg

SEQ ID NO: 5421784 - DNA, 25 bp, Homo sapien
aggcgagcttggcgcaggcgaacat

SEQ ID NO: 5421785 - DNA, 25 bp, Homo sapien
gcaggcgagcttggcgcaggcgaac

SEQ ID NO: 5421786 - DNA, 25 bp, Homo sapien
caggcgagcttggcgcaggcgaaca

SEQ ID NO: 5421787 - DNA, 25 bp, Homo sapien
tgggtgacaggcgacgtgggctcct

SEQ ID NO: 5421788 - DNA, 25 bp, Homo sapien
gactgcgcggctggagatattgggt

SEQ ID NO: 5421789 - DNA, 25 bp, Homo sapien
tcttcgggactgcgcggctggagat

SEQ ID NO: 5421790 - DNA, 25 bp, Homo sapien
tggagatattgggtgacaggcgacg

SEQ ID NO: 5421791 - DNA, 25 bp, Homo sapien
aggcgccggcacaatgaatgggtcc

SEQ ID NO: 5421792 - DNA, 25 bp, Homo sapien
atgaatgggtccctactgggcgccg

SEQ ID NO: 5421793 - DNA, 25 bp, Homo sapien
ggctcccgtgcacgccgtcagcttg

SEQ ID NO: 5421794 - DNA, 25 bp, Homo sapien
gtgcccagtgaggcgccggcacaat

SEQ ID NO: 5421795 - DNA, 25 bp, Homo sapien
ttcccaggaggcggcggcggcacgg

SEQ ID NO: 5421796 - DNA, 25 bp, Homo sapien
tcccaggaggcggcggcggcacggg

SEQ ID NO: 5421797 - DNA, 25 bp, Homo sapien
cttcccaggaggcggcggcggcacg

SEQ ID NO: 5421798 - DNA, 25 bp, Homo sapien
aaggagtgggactcaatgcgcaagc

SEQ ID NO: 5421799 - DNA, 25 bp, Homo sapien
ccgcagcacccggatgaagaaggcg

SEQ ID NO: 5421800 - DNA, 25 bp, Homo sapien
tttcgggtgcaccaaggaagacact

SEQ ID NO: 5421801 - DNA, 25 bp, Homo sapien
tattggcaactagccgggaaggaca

SEQ ID NO: 5421802 - DNA, 25 bp, Homo sapien
ttcaccccggcagagaggactaaac

SEQ ID NO: 5421803 - DNA, 25 bp, Homo sapien
actgtagattcaccccggcagagag

SEQ ID NO: 5421804 - DNA, 25 bp, Homo sapien
ccggcagagaggactaaacagatta

SEQ ID NO: 5421805 - DNA, 25 bp, Homo sapien
gaaaaactgtagattcaccccggca

SEQ ID NO: 5421806 - DNA, 25 bp, Homo sapien
ggctgcaggatagtgggcctttttc

SEQ ID NO: 5421807 - DNA, 25 bp, Homo sapien
gctgcaggatagtgggcctttttct

SEQ ID NO: 5421808 - DNA, 25 bp, Homo sapien
gagttggctgcaggatagtgggcct

SEQ ID NO: 5421809 - DNA, 25 bp, Homo sapien
ttggctgcaggatagtgggcctttt

SEQ ID NO: 5421810 - DNA, 25 bp, Homo sapien
ttgtaagatttggccttttatcagt

SEQ ID NO: 5421811 - DNA, 25 bp, Homo sapien
cttgtaagatttggccttttatcag

SEQ ID NO: 5421812 - DNA, 25 bp, Homo sapien
tgtaagatttggccttttatcagtt

SEQ ID NO: 5421813 - DNA, 25 bp, Homo sapien
ctcttcctctgtgaaataggactgt

SEQ ID NO: 5421814 - DNA, 25 bp, Homo sapien
tcttcctctgtgaaataggactgtg

SEQ ID NO: 5421815 - DNA, 25 bp, Homo sapien
cttcctctgtgaaataggactgtgg

SEQ ID NO: 5421816 - DNA, 25 bp, Homo sapien
tctcttcctctgtgaaataggactg

SEQ ID NO: 5421817 - DNA, 25 bp, Homo sapien
caagcgttgagtaatcagccccaga

SEQ ID NO: 5421818 - DNA, 25 bp, Homo sapien
taagaccgggtgatgatgatagcct

SEQ ID NO: 5421819 - DNA, 25 bp, Homo sapien
gaataatctgcttctatccggccgg

SEQ ID NO: 5421820 - DNA, 25 bp, Homo sapien
taacaggaaactagggtccccagca

SEQ ID NO: 5421821 - DNA, 25 bp, Homo sapien
ttgggctgtgtttacagctgaagtg

SEQ ID NO: 5421822 - DNA, 25 bp, Homo sapien
ctgtgtttacagctgaagtgaccat

SEQ ID NO: 5421823 - DNA, 25 bp, Homo sapien
tggcctttgggctgtgtttacagct

SEQ ID NO: 5421824 - DNA, 25 bp, Homo sapien
tctgaagatctttggcctttgggct

SEQ ID NO: 5421825 - DNA, 25 bp, Homo sapien
ttggtcagtatcagctaacatccga

SEQ ID NO: 5421826 - DNA, 25 bp, Homo sapien
taacatccgatcacacagcatgctg

SEQ ID NO: 5421827 - DNA, 25 bp, Homo sapien
tccgatcacacagcatgctgagagc

SEQ ID NO: 5421828 - DNA, 25 bp, Homo sapien
tatcagctaacatccgatcacacag

SEQ ID NO: 5421829 - DNA, 25 bp, Homo sapien
attaatgtaagcttaaaagccttct

SEQ ID NO: 5421830 - DNA, 25 bp, Homo sapien
tactaattaatgtaagcttaaaagc

SEQ ID NO: 5421831 - DNA, 25 bp, Homo sapien
aagatattcgtttgatgaaaaacct

SEQ ID NO: 5421832 - DNA, 25 bp, Homo sapien
tgtatactaattaatgtaagcttaa

SEQ ID NO: 5421833 - DNA, 25 bp, Homo sapien
ctctttggtagggacatgtgttggc

SEQ ID NO: 5421834 - DNA, 25 bp, Homo sapien
aacatgctctttggtagggacatgt

SEQ ID NO: 5421835 - DNA, 25 bp, Homo sapien
gggacatgtgttggcgatctccagt

SEQ ID NO: 5421836 - DNA, 25 bp, Homo sapien
gtagggacatgtgttggcgatctcc

SEQ ID NO: 5421837 - DNA, 25 bp, Homo sapien
aagctgaaccttagcagtgtcaaaa

SEQ ID NO: 5421838 - DNA, 25 bp, Homo sapien
agctgaaccttagcagtgtcaaaag

SEQ ID NO: 5421839 - DNA, 25 bp, Homo sapien
ggttttagaagggtggctttcatca

SEQ ID NO: 5421840 - DNA, 25 bp, Homo sapien
ttagaagggtggctttcatcacaca

SEQ ID NO: 5421841 - DNA, 25 bp, Homo sapien
ttttagaagggtggctttcatcaca

SEQ ID NO: 5421842 - DNA, 25 bp, Homo sapien
tagaagggtggctttcatcacacac

SEQ ID NO: 5421843 - DNA, 25 bp, Homo sapien
aagcgccatttcttgggccaggcaa

SEQ ID NO: 5421844 - DNA, 25 bp, Homo sapien
caagcgccatttcttgggccaggca

SEQ ID NO: 5421845 - DNA, 25 bp, Homo sapien
cttacatctgtacatgcttgaggac

SEQ ID NO: 5421846 - DNA, 25 bp, Homo sapien
tcttacatctgtacatgcttgagga

SEQ ID NO: 5421847 - DNA, 25 bp, Homo sapien
gacctcatggtcacattcattgcca

SEQ ID NO: 5421848 - DNA, 25 bp, Homo sapien
caaggaggccatgagaaaatctgaa

SEQ ID NO: 5421849 - DNA, 25 bp, Homo sapien
tacctcagggaattaacatggataa

SEQ ID NO: 5421850 - DNA, 25 bp, Homo sapien
gaacacatcctttatagctttggac

SEQ ID NO: 5421851 - DNA, 25 bp, Homo sapien
ttaacaccgaaaggagaatgcttcc

SEQ ID NO: 5421852 - DNA, 25 bp, Homo sapien
tgcctctgtacaagtagagcagaag

SEQ ID NO: 5421853 - DNA, 25 bp, Homo sapien
ggttacattggctgccaactctggc

SEQ ID NO: 5421854 - DNA, 25 bp, Homo sapien
ccatggagatcctgtagaggtggcc

SEQ ID NO: 5421855 - DNA, 25 bp, Homo sapien
tgtggataagtgaatacaggttaca

SEQ ID NO: 5421856 - DNA, 25 bp, Homo sapien
tacgtcctaattcaggtaactcata

SEQ ID NO: 5421857 - DNA, 25 bp, Homo sapien
aagcttagcctttgttgtaggtcca

SEQ ID NO: 5421858 - DNA, 25 bp, Homo sapien
cctttgttgtaggtccaacagctgt

SEQ ID NO: 5421859 - DNA, 25 bp, Homo sapien
ggtaactcataaagcttagcctttg

SEQ ID NO: 5421860 - DNA, 25 bp, Homo sapien
tctcacacagtaagatgcccagcga

SEQ ID NO: 5421861 - DNA, 25 bp, Homo sapien
aatgggtggttctaattcagcctgg

SEQ ID NO: 5421862 - DNA, 25 bp, Homo sapien
cctggaggagagttgccggtcccat

SEQ ID NO: 5421863 - DNA, 25 bp, Homo sapien
gccggtcccattatagtctcacaca

SEQ ID NO: 5421864 - DNA, 25 bp, Homo sapien
cattttgcattatcaccagagctca

SEQ ID NO: 5421865 - DNA, 25 bp, Homo sapien
attttgcattatcaccagagctcat

SEQ ID NO: 5421866 - DNA, 25 bp, Homo sapien
taatggctactgtgagatgtctcct

SEQ ID NO: 5421867 - DNA, 25 bp, Homo sapien
taacaaggattcttaacaccctctg

SEQ ID NO: 5421868 - DNA, 25 bp, Homo sapien
tagtaatttgttccacaataatggc

SEQ ID NO: 5421869 - DNA, 25 bp, Homo sapien
ccctctgtaggtaacaatatgcaat

SEQ ID NO: 5421870 - DNA, 25 bp, Homo sapien
ttgataactctgtttgatgaatgca

SEQ ID NO: 5421871 - DNA, 25 bp, Homo sapien
ctctgtttgatgaatgcagatgcca

SEQ ID NO: 5421872 - DNA, 25 bp, Homo sapien
tgtttgatgaatgcagatgccacct

SEQ ID NO: 5421873 - DNA, 25 bp, Homo sapien
tgcagatgccaccttttacggccat

SEQ ID NO: 5421874 - DNA, 25 bp, Homo sapien
agtgtggagagcttgccaaaaagcc

SEQ ID NO: 5421875 - DNA, 25 bp, Homo sapien
aatcagtaccaaagtgtggagagct

SEQ ID NO: 5421876 - DNA, 25 bp, Homo sapien
tgccaaaaagccagatgcagctgct

SEQ ID NO: 5421877 - DNA, 25 bp, Homo sapien
ggcatctgggttctacaatgaacat

SEQ ID NO: 5421878 - DNA, 25 bp, Homo sapien
ttcacaaatcctccctggatttctg

SEQ ID NO: 5421879 - DNA, 25 bp, Homo sapien
tctgtctctggctcttgcatttgca

SEQ ID NO: 5421880 - DNA, 25 bp, Homo sapien
atcccttcctggctctatccttctg

SEQ ID NO: 5421881 - DNA, 25 bp, Homo sapien
gaaattgcacttccctggcatccct

SEQ ID NO: 5421882 - DNA, 25 bp, Homo sapien
agcattttgtgatgtcagcaggttt

SEQ ID NO: 5421883 - DNA, 25 bp, Homo sapien
ttaatccacatgcacaaagcatttt

SEQ ID NO: 5421884 - DNA, 25 bp, Homo sapien
tccacatgcacaaagcattttgtga

SEQ ID NO: 5421885 - DNA, 25 bp, Homo sapien
gcattttgtgatgtcagcaggttta

SEQ ID NO: 5421886 - DNA, 25 bp, Homo sapien
cttgctattgcctctactcttcctt

SEQ ID NO: 5421887 - DNA, 25 bp, Homo sapien
tgtccaccttgctattgcctctact

SEQ ID NO: 5421888 - DNA, 25 bp, Homo sapien
tcctgctgtccaccttgctattgcc

SEQ ID NO: 5421889 - DNA, 25 bp, Homo sapien
tgctgtccaccttgctattgcctct

SEQ ID NO: 5421890 - DNA, 25 bp, Homo sapien
actgcttgctgtacagtggtattgg

SEQ ID NO: 5421891 - DNA, 25 bp, Homo sapien
gtattggggactagaacttctacca

SEQ ID NO: 5421892 - DNA, 25 bp, Homo sapien
catctctacatgcaggcagtgggtt

SEQ ID NO: 5421893 - DNA, 25 bp, Homo sapien
gacttagtgccatgtaccgtgcctc

SEQ ID NO: 5421894 - DNA, 25 bp, Homo sapien
ccatccttctcactcccctcacacc

SEQ ID NO: 5421895 - DNA, 25 bp, Homo sapien
catccttctcactcccctcacacct

SEQ ID NO: 5421896 - DNA, 25 bp, Homo sapien
ccttctcactcccctcacacctcat

SEQ ID NO: 5421897 - DNA, 25 bp, Homo sapien
atccttctcactcccctcacacctc

SEQ ID NO: 5421898 - DNA, 25 bp, Homo sapien
agatacccagggcagcaggactcac

SEQ ID NO: 5421899 - DNA, 25 bp, Homo sapien
tgagatacccagggcagcaggactc

SEQ ID NO: 5421900 - DNA, 25 bp, Homo sapien
ctatgagatacccagggcagcagga

SEQ ID NO: 5421901 - DNA, 25 bp, Homo sapien
tatgagatacccagggcagcaggac

SEQ ID NO: 5421902 - DNA, 25 bp, Homo sapien
gtcagcaggttcacccaagcagaag

SEQ ID NO: 5421903 - DNA, 25 bp, Homo sapien
tcagcaggttcacccaagcagaagt

SEQ ID NO: 5421904 - DNA, 25 bp, Homo sapien
ttccaaggttaggtacagacatata

SEQ ID NO: 5421905 - DNA, 25 bp, Homo sapien
caaggttaggtacagacatataaat

SEQ ID NO: 5421906 - DNA, 25 bp, Homo sapien
tccaaggttaggtacagacatataa

SEQ ID NO: 5421907 - DNA, 25 bp, Homo sapien
cattccaaggttaggtacagacata

SEQ ID NO: 5421908 - DNA, 25 bp, Homo sapien
gggaaggactctggaccatacaaaa

SEQ ID NO: 5421909 - DNA, 25 bp, Homo sapien
tgatgcctgaaggtgttgcatatcc

SEQ ID NO: 5421910 - DNA, 25 bp, Homo sapien
gactctggaccatacaaaacagcct

SEQ ID NO: 5421911 - DNA, 25 bp, Homo sapien
gcatatccagggcatttgagattgg

SEQ ID NO: 5421912 - DNA, 25 bp, Homo sapien
gattacttcagtgtgcccaggcctg

SEQ ID NO: 5421913 - DNA, 25 bp, Homo sapien
tgattacttcagtgtgcccaggcct

SEQ ID NO: 5421914 - DNA, 25 bp, Homo sapien
tggatgatcatgtgtctgtaatgta

SEQ ID NO: 5421915 - DNA, 25 bp, Homo sapien
gttccaaagcccaatgaagtaatta

SEQ ID NO: 5421916 - DNA, 25 bp, Homo sapien
aatatgcaggtaatgacttggatga

SEQ ID NO: 5421917 - DNA, 25 bp, Homo sapien
tgtaatgtataagttccaaagccca

SEQ ID NO: 5421918 - DNA, 25 bp, Homo sapien
ctgcaaacatgcagggggaaaaagc

SEQ ID NO: 5421919 - DNA, 25 bp, Homo sapien
ggagctggttccagcttctatggtg

SEQ ID NO: 5421920 - DNA, 25 bp, Homo sapien
gccgttacagagtgggccaatccat

SEQ ID NO: 5421921 - DNA, 25 bp, Homo sapien
tctatggtgaatccatatatttctg

SEQ ID NO: 5421922 - DNA, 25 bp, Homo sapien
tgctgcatctgaggagctggttcca

SEQ ID NO: 5421923 - DNA, 25 bp, Homo sapien
tcttatttgcacgaaagcatttgtg

SEQ ID NO: 5421924 - DNA, 25 bp, Homo sapien
tatttgcacgaaagcatttgtgaac

SEQ ID NO: 5421925 - DNA, 25 bp, Homo sapien
tcctcttgtcactcctttaaattca

SEQ ID NO: 5421926 - DNA, 25 bp, Homo sapien
taaggaatcttatttgcacgaaagc

SEQ ID NO: 5421927 - DNA, 25 bp, Homo sapien
ctctgccagtcctgattccagtcat

SEQ ID NO: 5421928 - DNA, 25 bp, Homo sapien
tctctgccagtcctgattccagtca

SEQ ID NO: 5421929 - DNA, 25 bp, Homo sapien
gtataatgggctctgtagtcttctc

SEQ ID NO: 5421930 - DNA, 25 bp, Homo sapien
tttctgggagtataatgggctctgt

SEQ ID NO: 5421931 - DNA, 25 bp, Homo sapien
tctccatgatgtgatgcagagtttt

SEQ ID NO: 5421932 - DNA, 25 bp, Homo sapien
gatgcagagttttatctaccccact

SEQ ID NO: 5421933 - DNA, 25 bp, Homo sapien
gatgtgatgcagagttttatctacc

SEQ ID NO: 5421934 - DNA, 25 bp, Homo sapien
ttatctaccccactttctttagcag

SEQ ID NO: 5421935 - DNA, 25 bp, Homo sapien
ccatggatgtctgccttttggagca

SEQ ID NO: 5421936 - DNA, 25 bp, Homo sapien
catgaaatggatgagtatccatcca

SEQ ID NO: 5421937 - DNA, 25 bp, Homo sapien
cattgcgccccattctagtttgacg

SEQ ID NO: 5421938 - DNA, 25 bp, Homo sapien
tagtttgacggcacccagagtcctt

SEQ ID NO: 5421939 - DNA, 25 bp, Homo sapien
aatgctatacgaagaacagaatcca

SEQ ID NO: 5421940 - DNA, 25 bp, Homo sapien
tgctcttttacgaggatatctgaaa

SEQ ID NO: 5421941 - DNA, 25 bp, Homo sapien
ttagcctcttggagattaattactg

SEQ ID NO: 5421942 - DNA, 25 bp, Homo sapien
taattactgtaccaaatgctatacg

SEQ ID NO: 5421943 - DNA, 25 bp, Homo sapien
acagaggccaggtacaacgaacgct

SEQ ID NO: 5421944 - DNA, 25 bp, Homo sapien
acgctgtcctttgacacccaggagg

SEQ ID NO: 5421945 - DNA, 25 bp, Homo sapien
tacaacgaacgctgtcctttgacac

SEQ ID NO: 5421946 - DNA, 25 bp, Homo sapien
caggtacaacgaacgctgtcctttg

SEQ ID NO: 5421947 - DNA, 25 bp, Homo sapien
taatagagacttttcactaatgaag

SEQ ID NO: 5421948 - DNA, 25 bp, Homo sapien
taatgaaggaccgattagttaagct

SEQ ID NO: 5421949 - DNA, 25 bp, Homo sapien
tggtgatcagttggcagaacagcct

SEQ ID NO: 5421950 - DNA, 25 bp, Homo sapien
gctttggttgccactctggtgatca

SEQ ID NO: 5421951 - DNA, 25 bp, Homo sapien
gcttgtgtccctgatgagaagattt

SEQ ID NO: 5421952 - DNA, 25 bp, Homo sapien
ggaagagagtggtctgaaaattgaa

SEQ ID NO: 5421953 - DNA, 25 bp, Homo sapien
catgcatgagagttagcttgtgtcc

SEQ ID NO: 5421954 - DNA, 25 bp, Homo sapien
cacatgcttcgggagtctggtgaca

SEQ ID NO: 5421955 - DNA, 25 bp, Homo sapien
agttaaaggccattaaaagcgtgtg

SEQ ID NO: 5421956 - DNA, 25 bp, Homo sapien
ccagttaaaggccattaaaagcgtg

SEQ ID NO: 5421957 - DNA, 25 bp, Homo sapien
cagttaaaggccattaaaagcgtgt

SEQ ID NO: 5421958 - DNA, 25 bp, Homo sapien
catcaactgtaagactttctccacc

SEQ ID NO: 5421959 - DNA, 25 bp, Homo sapien
acatcaactgtaagactttctccac

SEQ ID NO: 5421960 - DNA, 25 bp, Homo sapien
atcaactgtaagactttctccacct

SEQ ID NO: 5421961 - DNA, 25 bp, Homo sapien
gcctctcaatcttggctcctgtgag

SEQ ID NO: 5421962 - DNA, 25 bp, Homo sapien
tcagtgcctctcaatcttggctcct

SEQ ID NO: 5421963 - DNA, 25 bp, Homo sapien
gacatagaggaatcttcagctctaa

SEQ ID NO: 5421964 - DNA, 25 bp, Homo sapien
ggcttgaggagacatagaggaatct

SEQ ID NO: 5421965 - DNA, 25 bp, Homo sapien
tgtaaatcatagtcttctctcttag

SEQ ID NO: 5421966 - DNA, 25 bp, Homo sapien
tttgtaaatcatagtcttctctctt

SEQ ID NO: 5421967 - DNA, 25 bp, Homo sapien
ttgtaaatcatagtcttctctctta

SEQ ID NO: 5421968 - DNA, 25 bp, Homo sapien
tccacgaggttctgaggatgtttaa

SEQ ID NO: 5421969 - DNA, 25 bp, Homo sapien
aaggtccacgaggttctgaggatgt

SEQ ID NO: 5421970 - DNA, 25 bp, Homo sapien
cacgaggttctgaggatgtttaatg

SEQ ID NO: 5421971 - DNA, 25 bp, Homo sapien
ctaaaggtccacgaggttctgagga

SEQ ID NO: 5421972 - DNA, 25 bp, Homo sapien
aataaacgaaaccgctcattttcat

SEQ ID NO: 5421973 - DNA, 25 bp, Homo sapien
ctgtactctggcctgcttgcagacc

SEQ ID NO: 5421974 - DNA, 25 bp, Homo sapien
accgctgtactctggcctgcttgca

SEQ ID NO: 5421975 - DNA, 25 bp, Homo sapien
cagggcaccgctgtactctggcctg

SEQ ID NO: 5421976 - DNA, 25 bp, Homo sapien
atgcttgcccaacttgccctccagg

SEQ ID NO: 5421977 - DNA, 25 bp, Homo sapien
ttccacaaaggagggtgatcagcca

SEQ ID NO: 5421978 - DNA, 25 bp, Homo sapien
tgctccatgaggttagccctgtctg

SEQ ID NO: 5421979 - DNA, 25 bp, Homo sapien
gccactatttagacattcttaaaga

SEQ ID NO: 5421980 - DNA, 25 bp, Homo sapien
tagtgtgctaggtttccacaaagga

SEQ ID NO: 5421981 - DNA, 25 bp, Homo sapien
gcggcccctgtgagaagcgctttga

SEQ ID NO: 5421982 - DNA, 25 bp, Homo sapien
tgtgagaagcgctttgattcctgct

SEQ ID NO: 5421983 - DNA, 25 bp, Homo sapien
cccctgtgagaagcgctttgattcc

SEQ ID NO: 5421984 - DNA, 25 bp, Homo sapien
agaagcgctttgattcctgctgtcc

SEQ ID NO: 5421985 - DNA, 25 bp, Homo sapien
gaggcgaagctggtgttaaatgata

SEQ ID NO: 5421986 - DNA, 25 bp, Homo sapien
aaatgatatgggaagtgacacttta

SEQ ID NO: 5421987 - DNA, 25 bp, Homo sapien
taaagtgtagaaaattaggaactgc

SEQ ID NO: 5421988 - DNA, 25 bp, Homo sapien
taggaactgcaaaagaggcgaagct

SEQ ID NO: 5421989 - DNA, 25 bp, Homo sapien
ttcagccaggcagcgagcttttgac

SEQ ID NO: 5421990 - DNA, 25 bp, Homo sapien
tgcagtgataatgctgttgtcaaat

SEQ ID NO: 5421991 - DNA, 25 bp, Homo sapien
taacacattgatggcattttgctgg

SEQ ID NO: 5421992 - DNA, 25 bp, Homo sapien
gtgtttagtgcaccaaatctcctgg

SEQ ID NO: 5421993 - DNA, 25 bp, Homo sapien
tccctaaactggctgaagagtcctc

SEQ ID NO: 5421994 - DNA, 25 bp, Homo sapien
taatgaacaagagggagcggcatct

SEQ ID NO: 5421995 - DNA, 25 bp, Homo sapien
tacaggttgggagcagcaagtactg

SEQ ID NO: 5421996 - DNA, 25 bp, Homo sapien
tctgcagccgtctaaatgaaggacc

SEQ ID NO: 5421997 - DNA, 25 bp, Homo sapien
cctctgtggcaagtgagcgcctagc

SEQ ID NO: 5421998 - DNA, 25 bp, Homo sapien
ggcaagtgagcgcctagcctggcca

SEQ ID NO: 5421999 - DNA, 25 bp, Homo sapien
ctgtggcaagtgagcgcctagcctg

SEQ ID NO: 5422000 - DNA, 25 bp, Homo sapien
gcaagtgagcgcctagcctggccag

SEQ ID NO: 5422001 - DNA, 25 bp, Homo sapien
tagaagctttctgaacctgagtttg

SEQ ID NO: 5422002 - DNA, 25 bp, Homo sapien
ttgcttggggtgtccacataggatg

SEQ ID NO: 5422003 - DNA, 25 bp, Homo sapien
tccacataatgctggtgggtagaag

SEQ ID NO: 5422004 - DNA, 25 bp, Homo sapien
taaagtgattgcttggggtgtccac

SEQ ID NO: 5422005 - DNA, 25 bp, Homo sapien
tgctgtgtgaagtgaggagtatgga

SEQ ID NO: 5422006 - DNA, 25 bp, Homo sapien
tatggatttgacgtggacagcagaa

SEQ ID NO: 5422007 - DNA, 25 bp, Homo sapien
ctgggtcatgctaggctttgggtgc

SEQ ID NO: 5422008 - DNA, 25 bp, Homo sapien
tggtgttaagtagtggagtcctttg

SEQ ID NO: 5422009 - DNA, 25 bp, Homo sapien
cttcacttgtgctctaatgagccta

SEQ ID NO: 5422010 - DNA, 25 bp, Homo sapien
acaaacacctgagtacaagcacaaa

SEQ ID NO: 5422011 - DNA, 25 bp, Homo sapien
gcatggctgttgtcttgtaagaatt

SEQ ID NO: 5422012 - DNA, 25 bp, Homo sapien
ctgcatggctgttgtcttgtaagaa

SEQ ID NO: 5422013 - DNA, 25 bp, Homo sapien
ttatatgcacaagtaggatgaacct

SEQ ID NO: 5422014 - DNA, 25 bp, Homo sapien
tctccattcccagtttatatgcaca

SEQ ID NO: 5422015 - DNA, 25 bp, Homo sapien
gggcacggagcccacccacaaagag

SEQ ID NO: 5422016 - DNA, 25 bp, Homo sapien
gcacggagcccacccacaaagaggg

SEQ ID NO: 5422017 - DNA, 25 bp, Homo sapien
ctacccaggaaggctttagtcctgt

SEQ ID NO: 5422018 - DNA, 25 bp, Homo sapien
ctgttaccataattcaaggttagtt

SEQ ID NO: 5422019 - DNA, 25 bp, Homo sapien
gtcactgacatcttacccattgagt

SEQ ID NO: 5422020 - DNA, 25 bp, Homo sapien
gaaaaataattggatcgaataggac

SEQ ID NO: 5422021 - DNA, 25 bp, Homo sapien
gtctctgtgtagagcttcatatgtc

SEQ ID NO: 5422022 - DNA, 25 bp, Homo sapien
cagactctgtagtgaacagcatcca

SEQ ID NO: 5422023 - DNA, 25 bp, Homo sapien
agcagcatctgtcatgctgggggac

SEQ ID NO: 5422024 - DNA, 25 bp, Homo sapien
cctgtggcacttgtgggaagcagca

SEQ ID NO: 5422025 - DNA, 25 bp, Homo sapien
tgggaagcagcatctgtcatgctgg

SEQ ID NO: 5422026 - DNA, 25 bp, Homo sapien
gaagcagcatctgtcatgctggggg

SEQ ID NO: 5422027 - DNA, 25 bp, Homo sapien
ctggggagttgcaagggacccttct

SEQ ID NO: 5422028 - DNA, 25 bp, Homo sapien
tgcaagggacccttctggtctgtac

SEQ ID NO: 5422029 - DNA, 25 bp, Homo sapien
tcccataggactggggagttgcaag

SEQ ID NO: 5422030 - DNA, 25 bp, Homo sapien
cttccaagttcccataggactgggg

SEQ ID NO: 5422031 - DNA, 25 bp, Homo sapien
ggtttgtgaagccatgtcacacctg

SEQ ID NO: 5422032 - DNA, 25 bp, Homo sapien
ctggatcccatgacagtgggggttt

SEQ ID NO: 5422033 - DNA, 25 bp, Homo sapien
caaagatttagattgggatggctgg

SEQ ID NO: 5422034 - DNA, 25 bp, Homo sapien
gaaccacaccactaacatctacagg

SEQ ID NO: 5422035 - DNA, 25 bp, Homo sapien
cctccaggccgaaagcagtttcttt

SEQ ID NO: 5422036 - DNA, 25 bp, Homo sapien
tttctaccattgtacagcaagcctc

SEQ ID NO: 5422037 - DNA, 25 bp, Homo sapien
tttttatctcccctgtgttatatcc

SEQ ID NO: 5422038 - DNA, 25 bp, Homo sapien
tcccctgtgttatatcctttttcta

SEQ ID NO: 5422039 - DNA, 25 bp, Homo sapien
tagatatgtatttcatgtagcgata

SEQ ID NO: 5422040 - DNA, 25 bp, Homo sapien
atttcatgtagcgataactccccat

SEQ ID NO: 5422041 - DNA, 25 bp, Homo sapien
gtatttcatgtagcgataactcccc

SEQ ID NO: 5422042 - DNA, 25 bp, Homo sapien
tatgtatttcatgtagcgataactc

SEQ ID NO: 5422043 - DNA, 25 bp, Homo sapien
tggcatattctgaccacctctgaca

SEQ ID NO: 5422044 - DNA, 25 bp, Homo sapien
catgaagtcgtagtgagagcaagtc

SEQ ID NO: 5422045 - DNA, 25 bp, Homo sapien
gttcaggctggaatagacgctgcca

SEQ ID NO: 5422046 - DNA, 25 bp, Homo sapien
aacagattcaggtggtaatggcata

SEQ ID NO: 5422047 - DNA, 25 bp, Homo sapien
gagacgctagtttcaaaggcctggt

SEQ ID NO: 5422048 - DNA, 25 bp, Homo sapien
cagtgggccgctccaggaagagtca

SEQ ID NO: 5422049 - DNA, 25 bp, Homo sapien
gccaagcagagaagggtgctacatc

SEQ ID NO: 5422050 - DNA, 25 bp, Homo sapien
caggtggtactcatccccagtgggc

SEQ ID NO: 5422051 - DNA, 25 bp, Homo sapien
ggtgattcagcagaacccacatggg

SEQ ID NO: 5422052 - DNA, 25 bp, Homo sapien
aacccacatggggtgttatttcata

SEQ ID NO: 5422053 - DNA, 25 bp, Homo sapien
tgtggtgattcagcagaacccacat

SEQ ID NO: 5422054 - DNA, 25 bp, Homo sapien
ctgtgtggtgattcagcagaaccca

SEQ ID NO: 5422055 - DNA, 25 bp, Homo sapien
ctcaattatgtaactatcaggcaat

SEQ ID NO: 5422056 - DNA, 25 bp, Homo sapien
ttatgtaactatcaggcaattgagc

SEQ ID NO: 5422057 - DNA, 25 bp, Homo sapien
ggaaagacccttctcaattatgtaa

SEQ ID NO: 5422058 - DNA, 25 bp, Homo sapien
cccttctcaattatgtaactatcag

SEQ ID NO: 5422059 - DNA, 25 bp, Homo sapien
gcaggcgttaaagtatgaaatctcg

SEQ ID NO: 5422060 - DNA, 25 bp, Homo sapien
tcaaaatatgcagccctttgatgaa

SEQ ID NO: 5422061 - DNA, 25 bp, Homo sapien
ccctttgatgaatgaactttaggca

SEQ ID NO: 5422062 - DNA, 25 bp, Homo sapien
tatccctgatgggtttagtagtact

SEQ ID NO: 5422063 - DNA, 25 bp, Homo sapien
cttgaccgtcgacatgaagcgatca

SEQ ID NO: 5422064 - DNA, 25 bp, Homo sapien
ccaacctgccgcactgagtgtgcat

SEQ ID NO: 5422065 - DNA, 25 bp, Homo sapien
gacatgaagcgatcagagtcatatt

SEQ ID NO: 5422066 - DNA, 25 bp, Homo sapien
caacctgccgcactgagtgtgcatc

SEQ ID NO: 5422067 - DNA, 25 bp, Homo sapien
agagcttattagctgttccaagtcc

SEQ ID NO: 5422068 - DNA, 25 bp, Homo sapien
tgggtgtcagagcttattagctgtt

SEQ ID NO: 5422069 - DNA, 25 bp, Homo sapien
ccaagtcctcaggtaacttgacata

SEQ ID NO: 5422070 - DNA, 25 bp, Homo sapien
gtcctcaggtaacttgacatagcca

SEQ ID NO: 5422071 - DNA, 25 bp, Homo sapien
agaggctagaggtgagagcataagc

SEQ ID NO: 5422072 - DNA, 25 bp, Homo sapien
aaagaggctagaggtgagagcataa

SEQ ID NO: 5422073 - DNA, 25 bp, Homo sapien
aggctagaggtgagagcataagctg

SEQ ID NO: 5422074 - DNA, 25 bp, Homo sapien
agaaagaggctagaggtgagagcat

SEQ ID NO: 5422075 - DNA, 25 bp, Homo sapien
ggacacgagatacccatttctcaga

SEQ ID NO: 5422076 - DNA, 25 bp, Homo sapien
cacaagccatgaccagccatacaag

SEQ ID NO: 5422077 - DNA, 25 bp, Homo sapien
cagccatacaagtcaatatcagatg

SEQ ID NO: 5422078 - DNA, 25 bp, Homo sapien
ggcttggaggacacgagatacccat

SEQ ID NO: 5422079 - DNA, 25 bp, Homo sapien
agaagactcacaagcgacacggatt

SEQ ID NO: 5422080 - DNA, 25 bp, Homo sapien
caagcgacacggatttttgtgcgag

SEQ ID NO: 5422081 - DNA, 25 bp, Homo sapien
gacacggatttttgtgcgagtacag

SEQ ID NO: 5422082 - DNA, 25 bp, Homo sapien
ttgtgcgagtacagttatggcccat

SEQ ID NO: 5422083 - DNA, 25 bp, Homo sapien
tctcttgttgggcggaagaggcact

SEQ ID NO: 5422084 - DNA, 25 bp, Homo sapien
ctcttgttgggcggaagaggcactt

SEQ ID NO: 5422085 - DNA, 25 bp, Homo sapien
gcacacaccgagcatgcttgggcag

SEQ ID NO: 5422086 - DNA, 25 bp, Homo sapien
tgcaaatagctgaagcactctcctg

SEQ ID NO: 5422087 - DNA, 25 bp, Homo sapien
gagaaagtccaacatcagcttgaga

SEQ ID NO: 5422088 - DNA, 25 bp, Homo sapien
gaacagcagtcacgtgcctcaatga

SEQ ID NO: 5422089 - DNA, 25 bp, Homo sapien
atgataacatttttaataaggtggg

SEQ ID NO: 5422090 - DNA, 25 bp, Homo sapien
cttaatgataacatttttaataagg

SEQ ID NO: 5422091 - DNA, 25 bp, Homo sapien
taatgataacatttttaataaggtg

SEQ ID NO: 5422092 - DNA, 25 bp, Homo sapien
aatgataacatttttaataaggtgg

SEQ ID NO: 5422093 - DNA, 25 bp, Homo sapien
cattcagtaggacggagacagtgtg

SEQ ID NO: 5422094 - DNA, 25 bp, Homo sapien
agacagtgtgggttccacgtgggct

SEQ ID NO: 5422095 - DNA, 25 bp, Homo sapien
tggcgttcaggacatttggcttctt

SEQ ID NO: 5422096 - DNA, 25 bp, Homo sapien
tcccccatggcgttcaggacatttg

SEQ ID NO: 5422097 - DNA, 25 bp, Homo sapien
cagtcttttcgcactgtgcctgctt

SEQ ID NO: 5422098 - DNA, 25 bp, Homo sapien
tctttgccagtcttttcgcactgtg

SEQ ID NO: 5422099 - DNA, 25 bp, Homo sapien
ttgccagtcttttcgcactgtgcct

SEQ ID NO: 5422100 - DNA, 25 bp, Homo sapien
gtcttttcgcactgtgcctgctttt

SEQ ID NO: 5422101 - DNA, 25 bp, Homo sapien
aagatacttcctgttgtgactttca

SEQ ID NO: 5422102 - DNA, 25 bp, Homo sapien
ttttcagatatccagtcataaacaa

SEQ ID NO: 5422103 - DNA, 25 bp, Homo sapien
ctcaaagaaaagaccgcagtgtgtg

SEQ ID NO: 5422104 - DNA, 25 bp, Homo sapien
gaaaagaccgcagtgtgtgtacatg

SEQ ID NO: 5422105 - DNA, 25 bp, Homo sapien
tatgttaacatgagatcaaagagag

SEQ ID NO: 5422106 - DNA, 25 bp, Homo sapien
tctacaagttgctttagtgctgttc

SEQ ID NO: 5422107 - DNA, 25 bp, Homo sapien
aacaaacagtcatgtctacaagttg

SEQ ID NO: 5422108 - DNA, 25 bp, Homo sapien
cagtcatgtctacaagttgctttag

SEQ ID NO: 5422109 - DNA, 25 bp, Homo sapien
aaagacggccaacaccattgaccag

SEQ ID NO: 5422110 - DNA, 25 bp, Homo sapien
ggcgagccactgagtgcatattcat

SEQ ID NO: 5422111 - DNA, 25 bp, Homo sapien
catattcattcagtgcgagcggtgc

SEQ ID NO: 5422112 - DNA, 25 bp, Homo sapien
agtgagcaccgctatgttggaaggc

SEQ ID NO: 5422113 - DNA, 25 bp, Homo sapien
ggaagaggccaaagtcatgaacgcc

SEQ ID NO: 5422114 - DNA, 25 bp, Homo sapien
catgaacgccatagctttccataaa

SEQ ID NO: 5422115 - DNA, 25 bp, Homo sapien
catagatcaagagcgggaagaggcc

SEQ ID NO: 5422116 - DNA, 25 bp, Homo sapien
gcactgctgtctacaccacataaca

SEQ ID NO: 5422117 - DNA, 25 bp, Homo sapien
gaagacaaagtctagggctttcagc

SEQ ID NO: 5422118 - DNA, 25 bp, Homo sapien
caaagtctagggctttcagcttatt

SEQ ID NO: 5422119 - DNA, 25 bp, Homo sapien
tctctgaagacaaagtctagggctt

SEQ ID NO: 5422120 - DNA, 25 bp, Homo sapien
tctgaagacaaagtctagggctttc

SEQ ID NO: 5422121 - DNA, 25 bp, Homo sapien
aagtaatgtcactaaattaaagcag

SEQ ID NO: 5422122 - DNA, 25 bp, Homo sapien
tcactaaattaaagcaggtgggagg

SEQ ID NO: 5422123 - DNA, 25 bp, Homo sapien
gctacatgacattcctttaagacca

SEQ ID NO: 5422124 - DNA, 25 bp, Homo sapien
ggaggtgtccctattgcaatgactg

SEQ ID NO: 5422125 - DNA, 25 bp, Homo sapien
tctaaacagattgtcttccatttga

SEQ ID NO: 5422126 - DNA, 25 bp, Homo sapien
ttctaaacagattgtcttccatttg

SEQ ID NO: 5422127 - DNA, 25 bp, Homo sapien
ttattctaaacagattgtcttccat

SEQ ID NO: 5422128 - DNA, 25 bp, Homo sapien
gtcttccatttgaaagatgctggcc

SEQ ID NO: 5422129 - DNA, 25 bp, Homo sapien
ggaagtcacggagatctgtttccaa

SEQ ID NO: 5422130 - DNA, 25 bp, Homo sapien
caggaagtcacggagatctgtttcc

SEQ ID NO: 5422131 - DNA, 25 bp, Homo sapien
aggaagtcacggagatctgtttcca

SEQ ID NO: 5422132 - DNA, 25 bp, Homo sapien
gaagtcacggagatctgtttccaaa

SEQ ID NO: 5422133 - DNA, 25 bp, Homo sapien
tcctttagacctagagtgttcccca

SEQ ID NO: 5422134 - DNA, 25 bp, Homo sapien
tccctcctgttgaggttcctttaga

SEQ ID NO: 5422135 - DNA, 25 bp, Homo sapien
cataattatgcactggctgaataca

SEQ ID NO: 5422136 - DNA, 25 bp, Homo sapien
ctgtcctctgaccacatgctctgtg

SEQ ID NO: 5422137 - DNA, 25 bp, Homo sapien
caaacttggcatctggtgaatggct

SEQ ID NO: 5422138 - DNA, 25 bp, Homo sapien
tgggttaattacatcctgtcctctg

SEQ ID NO: 5422139 - DNA, 25 bp, Homo sapien
taggtcatgggtttgttccatatga

SEQ ID NO: 5422140 - DNA, 25 bp, Homo sapien
tttaaccttaattgaatggtatcag

SEQ ID NO: 5422141 - DNA, 25 bp, Homo sapien
taaccttaattgaatggtatcagac

SEQ ID NO: 5422142 - DNA, 25 bp, Homo sapien
catttaaccttaattgaatggtatc

SEQ ID NO: 5422143 - DNA, 25 bp, Homo sapien
aaccttaattgaatggtatcagaca

SEQ ID NO: 5422144 - DNA, 25 bp, Homo sapien
tttggctcagaatatgaggttccca

SEQ ID NO: 5422145 - DNA, 25 bp, Homo sapien
gaatgtgacgtgacttttggctcag

SEQ ID NO: 5422146 - DNA, 25 bp, Homo sapien
gaagctgctagcagtagccacagga

SEQ ID NO: 5422147 - DNA, 25 bp, Homo sapien
caagatggtctaagccagcatgccc

SEQ ID NO: 5422148 - DNA, 25 bp, Homo sapien
catccattaactctgggataggccc

SEQ ID NO: 5422149 - DNA, 25 bp, Homo sapien
cattaactctgggataggccctttc

SEQ ID NO: 5422150 - DNA, 25 bp, Homo sapien
tccattaactctgggataggccctt

SEQ ID NO: 5422151 - DNA, 25 bp, Homo sapien
tcatccattaactctgggataggcc

SEQ ID NO: 5422152 - DNA, 25 bp, Homo sapien
gcaccatcacagacagagttaagag

SEQ ID NO: 5422153 - DNA, 25 bp, Homo sapien
accatcacagacagagttaagagca

SEQ ID NO: 5422154 - DNA, 25 bp, Homo sapien
gtgcaccatcacagacagagttaag

SEQ ID NO: 5422155 - DNA, 25 bp, Homo sapien
tgtgcaccatcacagacagagttaa

SEQ ID NO: 5422156 - DNA, 25 bp, Homo sapien
tccttcttccgctccgcatacagac

SEQ ID NO: 5422157 - DNA, 25 bp, Homo sapien
tccgctccgcatacagacaaatcag

SEQ ID NO: 5422158 - DNA, 25 bp, Homo sapien
tccgcatacagacaaatcaggcttt

SEQ ID NO: 5422159 - DNA, 25 bp, Homo sapien
tcttccgctccgcatacagacaaat

SEQ ID NO: 5422160 - DNA, 25 bp, Homo sapien
tctcaggtttcctggtgaccagtcc

SEQ ID NO: 5422161 - DNA, 25 bp, Homo sapien
catccacatgactcctgcaaacttc

SEQ ID NO: 5422162 - DNA, 25 bp, Homo sapien
cctttatctcaggtttcctggtgac

SEQ ID NO: 5422163 - DNA, 25 bp, Homo sapien
tatctcaggtttcctggtgaccagt

SEQ ID NO: 5422164 - DNA, 25 bp, Homo sapien
atccagctgtagtgatactcagaaa

SEQ ID NO: 5422165 - DNA, 25 bp, Homo sapien
gctgtagtgatactcagaaactgac

SEQ ID NO: 5422166 - DNA, 25 bp, Homo sapien
cagctgtagtgatactcagaaactg

SEQ ID NO: 5422167 - DNA, 25 bp, Homo sapien
gtagtgatactcagaaactgacacc

SEQ ID NO: 5422168 - DNA, 25 bp, Homo sapien
tgcctagtgtcacccgaaccagaac

SEQ ID NO: 5422169 - DNA, 25 bp, Homo sapien
ttgtgtctgcaacttctgaatctgc

SEQ ID NO: 5422170 - DNA, 25 bp, Homo sapien
gtcacccgaaccagaactccagtgg

SEQ ID NO: 5422171 - DNA, 25 bp, Homo sapien
actccagtggtctgaggtcttttca

SEQ ID NO: 5422172 - DNA, 25 bp, Homo sapien
cgtgtgtgtggctgcctggccagtc

SEQ ID NO: 5422173 - DNA, 25 bp, Homo sapien
tcgtgtgtgtggctgcctggccagt

SEQ ID NO: 5422174 - DNA, 25 bp, Homo sapien
tttcgtgtgtgtggctgcctggcca

SEQ ID NO: 5422175 - DNA, 25 bp, Homo sapien
tgtttcgtgtgtgtggctgcctggc

SEQ ID NO: 5422176 - DNA, 25 bp, Homo sapien
ggccaggaagggtgaagactgtctc

SEQ ID NO: 5422177 - DNA, 25 bp, Homo sapien
ccaggaagggtgaagactgtctcat

SEQ ID NO: 5422178 - DNA, 25 bp, Homo sapien
agggccaggaagggtgaagactgtc

SEQ ID NO: 5422179 - DNA, 25 bp, Homo sapien
ctggtagttagggccaggaagggtg

SEQ ID NO: 5422180 - DNA, 25 bp, Homo sapien
caatcaagttgtttagtgtccccat

SEQ ID NO: 5422181 - DNA, 25 bp, Homo sapien
caactcctccaatcaagttgtttag

SEQ ID NO: 5422182 - DNA, 25 bp, Homo sapien
ttgccaactcctccaatcaagttgt

SEQ ID NO: 5422183 - DNA, 25 bp, Homo sapien
ctgcgacagttttgccaactcctcc

SEQ ID NO: 5422184 - DNA, 25 bp, Homo sapien
gggcctacagtagtcacgagccatt

SEQ ID NO: 5422185 - DNA, 25 bp, Homo sapien
gacagttgtcttgatttgccgctga

SEQ ID NO: 5422186 - DNA, 25 bp, Homo sapien
taatagggcagaaagcgctaagcgg

SEQ ID NO: 5422187 - DNA, 25 bp, Homo sapien
caaggccaattaaacaggcagccag

SEQ ID NO: 5422188 - DNA, 25 bp, Homo sapien
aattgttcatcgttgcctttgttgc

SEQ ID NO: 5422189 - DNA, 25 bp, Homo sapien
cctttgttgcagagactaagctaat

SEQ ID NO: 5422190 - DNA, 25 bp, Homo sapien
tacagtatgaagataattaacaccc

SEQ ID NO: 5422191 - DNA, 25 bp, Homo sapien
tgaagtactgtacgcctatcaaagc

SEQ ID NO: 5422192 - DNA, 25 bp, Homo sapien
agctgaccggctccagttgtcctgc

SEQ ID NO: 5422193 - DNA, 25 bp, Homo sapien
cgagcaggcgagaaagaagctttgc

SEQ ID NO: 5422194 - DNA, 25 bp, Homo sapien
ggaatattaattgaaggcagcatct

SEQ ID NO: 5422195 - DNA, 25 bp, Homo sapien
gctgctctgctttcgagagtaagcg

SEQ ID NO: 5422196 - DNA, 25 bp, Homo sapien
gattttcctgcacgatcctctgtgt

SEQ ID NO: 5422197 - DNA, 25 bp, Homo sapien
cctgcacgatcctctgtgtttgtcg

SEQ ID NO: 5422198 - DNA, 25 bp, Homo sapien
tgtttaacttggattttcctgcacg

SEQ ID NO: 5422199 - DNA, 25 bp, Homo sapien
cgatcctctgtgtttgtcgttacca

SEQ ID NO: 5422200 - DNA, 25 bp, Homo sapien
ggcttcttaaggcatatccatctca

SEQ ID NO: 5422201 - DNA, 25 bp, Homo sapien
caagggattaagcttggcagacaag

SEQ ID NO: 5422202 - DNA, 25 bp, Homo sapien
caagatggcgccctgttccatggat

SEQ ID NO: 5422203 - DNA, 25 bp, Homo sapien
tggatagatagagccccgtttgggc

SEQ ID NO: 5422204 - DNA, 25 bp, Homo sapien
taccgtcaatgctccactcacaaga

SEQ ID NO: 5422205 - DNA, 25 bp, Homo sapien
ggactttggggagttgccactgcca

SEQ ID NO: 5422206 - DNA, 25 bp, Homo sapien
aagagcccactcctaagaccaaatg

SEQ ID NO: 5422207 - DNA, 25 bp, Homo sapien
ctcttgactcctattgaaccctggg

SEQ ID NO: 5422208 - DNA, 25 bp, Homo sapien
ctccatgtagtaaggggcactgtca

SEQ ID NO: 5422209 - DNA, 25 bp, Homo sapien
tcctcctccatgtagtaaggggcac

SEQ ID NO: 5422210 - DNA, 25 bp, Homo sapien
cctcctccatgtagtaaggggcact

SEQ ID NO: 5422211 - DNA, 25 bp, Homo sapien
tcctccatgtagtaaggggcactgt

SEQ ID NO: 5422212 - DNA, 25 bp, Homo sapien
tttctgctatggcacagtagaaggc

SEQ ID NO: 5422213 - DNA, 25 bp, Homo sapien
aggttttctgctatggcacagtaga

SEQ ID NO: 5422214 - DNA, 25 bp, Homo sapien
catttggggtactcgaatgaagaaa

SEQ ID NO: 5422215 - DNA, 25 bp, Homo sapien
tctgctatggcacagtagaaggcaa

SEQ ID NO: 5422216 - DNA, 25 bp, Homo sapien
cacatccttcggtggtcatcctgtg

SEQ ID NO: 5422217 - DNA, 25 bp, Homo sapien
tcctgtgctcaactggcaccttcat

SEQ ID NO: 5422218 - DNA, 25 bp, Homo sapien
cttcacacatccttcggtggtcatc

SEQ ID NO: 5422219 - DNA, 25 bp, Homo sapien
tcatcctgtgctcaactggcacctt

SEQ ID NO: 5422220 - DNA, 25 bp, Homo sapien
aatttggggtcagtatcaacatttc

SEQ ID NO: 5422221 - DNA, 25 bp, Homo sapien
tctgttgaatttggggtcagtatca

SEQ ID NO: 5422222 - DNA, 25 bp, Homo sapien
gggtcagtatcaacatttctgttaa

SEQ ID NO: 5422223 - DNA, 25 bp, Homo sapien
tcagtatcaacatttctgttaattc

SEQ ID NO: 5422224 - DNA, 25 bp, Homo sapien
tggaagtgctctttacagtggtaac

SEQ ID NO: 5422225 - DNA, 25 bp, Homo sapien
gactcattggtctcataaggtgggc

SEQ ID NO: 5422226 - DNA, 25 bp, Homo sapien
cacttggaggatcttcagtagactc

SEQ ID NO: 5422227 - DNA, 25 bp, Homo sapien
tattaagggcatcctccaatgtctt

SEQ ID NO: 5422228 - DNA, 25 bp, Homo sapien
taatcaacaaacttggctccaaata

SEQ ID NO: 5422229 - DNA, 25 bp, Homo sapien
cttaatcaacaaacttggctccaaa

SEQ ID NO: 5422230 - DNA, 25 bp, Homo sapien
ttaatcaacaaacttggctccaaat

SEQ ID NO: 5422231 - DNA, 25 bp, Homo sapien
cagccaagcatctgaaaaagataag

SEQ ID NO: 5422232 - DNA, 25 bp, Homo sapien
tcttcccagccaagcatctgaaaaa

SEQ ID NO: 5422233 - DNA, 25 bp, Homo sapien
ttcccagccaagcatctgaaaaaga

SEQ ID NO: 5422234 - DNA, 25 bp, Homo sapien
cccagccaagcatctgaaaaagata

SEQ ID NO: 5422235 - DNA, 25 bp, Homo sapien
gagtaatcagatcaagcagtgttca

SEQ ID NO: 5422236 - DNA, 25 bp, Homo sapien
gagtggccttcacttatactgctgt

SEQ ID NO: 5422237 - DNA, 25 bp, Homo sapien
tgcctctgcagcttactaagtgacc

SEQ ID NO: 5422238 - DNA, 25 bp, Homo sapien
aattcttctaaggaccaaatgacac

SEQ ID NO: 5422239 - DNA, 25 bp, Homo sapien
gaacctcattttaccatgcaacagg

SEQ ID NO: 5422240 - DNA, 25 bp, Homo sapien
taatggtagttcatgtgagcagagc

SEQ ID NO: 5422241 - DNA, 25 bp, Homo sapien
tgcaacaggctttggcctacagaat

SEQ ID NO: 5422242 - DNA, 25 bp, Homo sapien
agcctgcctgagtatgagggaaaaa

SEQ ID NO: 5422243 - DNA, 25 bp, Homo sapien
tctcttcccgaagaaatgtgcatgc

SEQ ID NO: 5422244 - DNA, 25 bp, Homo sapien
cataagcaagagctttctgggaggg

SEQ ID NO: 5422245 - DNA, 25 bp, Homo sapien
aattttgccgctagtgtggcatggc

SEQ ID NO: 5422246 - DNA, 25 bp, Homo sapien
gatagttagctattctccaagaaga

SEQ ID NO: 5422247 - DNA, 25 bp, Homo sapien
gaggtctagtacaatgatcacaagc

SEQ ID NO: 5422248 - DNA, 25 bp, Homo sapien
cagtacctggtggacaataatgcag

SEQ ID NO: 5422249 - DNA, 25 bp, Homo sapien
gatgtcagcactatgaatctccgac

SEQ ID NO: 5422250 - DNA, 25 bp, Homo sapien
gccagtggcaaggttagatgtcagc

SEQ ID NO: 5422251 - DNA, 25 bp, Homo sapien
caatgggaactcattaaacgaacac

SEQ ID NO: 5422252 - DNA, 25 bp, Homo sapien
tgttgtgaggtcatctccagttcaa

SEQ ID NO: 5422253 - DNA, 25 bp, Homo sapien
taacactaaatgagtcagaaatcgg

SEQ ID NO: 5422254 - DNA, 25 bp, Homo sapien
gttagaaaccttatccaaatcatgg

SEQ ID NO: 5422255 - DNA, 25 bp, Homo sapien
tatggagtgataaaatttaataagg

SEQ ID NO: 5422256 - DNA, 25 bp, Homo sapien
tatatttacttattgaccagtagaa

SEQ ID NO: 5422257 - DNA, 25 bp, Homo sapien
attcttgtttgtattctaacaaatg

SEQ ID NO: 5422258 - DNA, 25 bp, Homo sapien
tttatctgtctacattcagagcctg

SEQ ID NO: 5422259 - DNA, 25 bp, Homo sapien
cattcagagcctgaatatatttact

SEQ ID NO: 5422260 - DNA, 25 bp, Homo sapien
tcattactgcaaggacaacgccaag

SEQ ID NO: 5422261 - DNA, 25 bp, Homo sapien
tgctgacaccaacattgagaggcag

SEQ ID NO: 5422262 - DNA, 25 bp, Homo sapien
caatgtctatgtgagtgggagcgta

SEQ ID NO: 5422263 - DNA, 25 bp, Homo sapien
ggtgcagatgccagccataactagg

SEQ ID NO: 5422264 - DNA, 25 bp, Homo sapien
tctggcatgggatgacaaagcacaa

SEQ ID NO: 5422265 - DNA, 25 bp, Homo sapien
tacaggacgttgagagcaagaggcc

SEQ ID NO: 5422266 - DNA, 25 bp, Homo sapien
gaaaggagttccatatggctacagc

SEQ ID NO: 5422267 - DNA, 25 bp, Homo sapien
gacccttgcacaaacggacattatg

SEQ ID NO: 5422268 - DNA, 25 bp, Homo sapien
taaatatccagttgaaggcacgtgg

SEQ ID NO: 5422269 - DNA, 25 bp, Homo sapien
aatggctggcctacgatgttcctga

SEQ ID NO: 5422270 - DNA, 25 bp, Homo sapien
gatacacaagcatacccttagaggg

SEQ ID NO: 5422271 - DNA, 25 bp, Homo sapien
gagaattcgtaccagtgcctatgtg

SEQ ID NO: 5422272 - DNA, 25 bp, Homo sapien
caggatcaggaatagaatcagctcc

SEQ ID NO: 5422273 - DNA, 25 bp, Homo sapien
cctctggttcctctgagtcagatgc

SEQ ID NO: 5422274 - DNA, 25 bp, Homo sapien
tggagttggtttcaatcactgaggc

SEQ ID NO: 5422275 - DNA, 25 bp, Homo sapien
gttctgtagctggtattttgtcatc

SEQ ID NO: 5422276 - DNA, 25 bp, Homo sapien
ttgagccagtaagacttctttccag

SEQ ID NO: 5422277 - DNA, 25 bp, Homo sapien
tgagccagtaagacttctttccagg

SEQ ID NO: 5422278 - DNA, 25 bp, Homo sapien
gtttgagccagtaagacttctttcc

SEQ ID NO: 5422279 - DNA, 25 bp, Homo sapien
tgagacgtctggggtattgctcctc

SEQ ID NO: 5422280 - DNA, 25 bp, Homo sapien
caaaaggctgcaatggcaaggcaga

SEQ ID NO: 5422281 - DNA, 25 bp, Homo sapien
tttcagttccaaaaggctgcaatgg

SEQ ID NO: 5422282 - DNA, 25 bp, Homo sapien
ctcagagcacgacttaagcaaaaga

SEQ ID NO: 5422283 - DNA, 25 bp, Homo sapien
caaggcagatggtttgcatgtgaca

SEQ ID NO: 5422284 - DNA, 25 bp, Homo sapien
attaaactggttgtctgatgaaagc

SEQ ID NO: 5422285 - DNA, 25 bp, Homo sapien
aaactggttgtctgatgaaagcaca

SEQ ID NO: 5422286 - DNA, 25 bp, Homo sapien
ttaaactggttgtctgatgaaagca

SEQ ID NO: 5422287 - DNA, 25 bp, Homo sapien
taaactggttgtctgatgaaagcac

SEQ ID NO: 5422288 - DNA, 25 bp, Homo sapien
tcaggaagtcttggagcctgaggtc

SEQ ID NO: 5422289 - DNA, 25 bp, Homo sapien
caactgaacttgaaccttccaccac

SEQ ID NO: 5422290 - DNA, 25 bp, Homo sapien
gcctcttctcaaaactaaactcagg

SEQ ID NO: 5422291 - DNA, 25 bp, Homo sapien
ttgaaccttccaccacctgcctctt

SEQ ID NO: 5422292 - DNA, 25 bp, Homo sapien
aaaaaacagtaggcacatcgaaaag

SEQ ID NO: 5422293 - DNA, 25 bp, Homo sapien
tgatgcctggacctcatactcagtc

SEQ ID NO: 5422294 - DNA, 25 bp, Homo sapien
gtggctacacatgagaatcatctgc

SEQ ID NO: 5422295 - DNA, 25 bp, Homo sapien
cataacaggttacatagcaggctaa

SEQ ID NO: 5422296 - DNA, 25 bp, Homo sapien
taagttacacagcaggttgacagca

SEQ ID NO: 5422297 - DNA, 25 bp, Homo sapien
aaacactgctgacatataagtgcat

SEQ ID NO: 5422298 - DNA, 25 bp, Homo sapien
acactgctgacatataagtgcatac

SEQ ID NO: 5422299 - DNA, 25 bp, Homo sapien
aacactgctgacatataagtgcata

SEQ ID NO: 5422300 - DNA, 25 bp, Homo sapien
tgttttgtggaccatcaccaaccaa

SEQ ID NO: 5422301 - DNA, 25 bp, Homo sapien
tattcaacaattctatccaaagcac

SEQ ID NO: 5422302 - DNA, 25 bp, Homo sapien
ttctcgggggagaataggtcttgct

SEQ ID NO: 5422303 - DNA, 25 bp, Homo sapien
tatccaaagcacctcgttctcgggg

SEQ ID NO: 5422304 - DNA, 25 bp, Homo sapien
actaattcttataaatctctgaaga

SEQ ID NO: 5422305 - DNA, 25 bp, Homo sapien
tataaatctctgaagaacattcaaa

SEQ ID NO: 5422306 - DNA, 25 bp, Homo sapien
caagaactacctatacttgttagaa

SEQ ID NO: 5422307 - DNA, 25 bp, Homo sapien
ccaagaactacctatacttgttaga

SEQ ID NO: 5422308 - DNA, 25 bp, Homo sapien
tatagagagtttccactcggcagtg

SEQ ID NO: 5422309 - DNA, 25 bp, Homo sapien
gttcacaagaaagggtaccaagcag

SEQ ID NO: 5422310 - DNA, 25 bp, Homo sapien
taaacccagatgaaatgtagcagac

SEQ ID NO: 5422311 - DNA, 25 bp, Homo sapien
gaaacagcattcatacagggccaag

SEQ ID NO: 5422312 - DNA, 25 bp, Homo sapien
ttcacaatctctggcaacagattaa

SEQ ID NO: 5422313 - DNA, 25 bp, Homo sapien
aaattcacaatctctggcaacagat

SEQ ID NO: 5422314 - DNA, 25 bp, Homo sapien
attcacaatctctggcaacagatta

SEQ ID NO: 5422315 - DNA, 25 bp, Homo sapien
aattcacaatctctggcaacagatt

SEQ ID NO: 5422316 - DNA, 25 bp, Homo sapien
tttgagaggtcgaggtagacagatc

SEQ ID NO: 5422317 - DNA, 25 bp, Homo sapien
tgggcaatatgaggaagccccatct

SEQ ID NO: 5422318 - DNA, 25 bp, Homo sapien
gcctgggcaatatgaggaagcccca

SEQ ID NO: 5422319 - DNA, 25 bp, Homo sapien
ttgagaggtcgaggtagacagatca

SEQ ID NO: 5422320 - DNA, 25 bp, Homo sapien
gagctaacatcatgcaaaactgtga

SEQ ID NO: 5422321 - DNA, 25 bp, Homo sapien
ggatgtccactcctagcacttctat

SEQ ID NO: 5422322 - DNA, 25 bp, Homo sapien
ggcacttcaagctgataaggagtat

SEQ ID NO: 5422323 - DNA, 25 bp, Homo sapien
ctaactaagaataggtgggcacttc

SEQ ID NO: 5422324 - DNA, 25 bp, Homo sapien
gaattgagacaacacagaaggcact

SEQ ID NO: 5422325 - DNA, 25 bp, Homo sapien
cagcaatggaggtttacatggagac

SEQ ID NO: 5422326 - DNA, 25 bp, Homo sapien
tggaagatgccctgcaatataggga

SEQ ID NO: 5422327 - DNA, 25 bp, Homo sapien
cagaatgaacatgataaggtgggca

SEQ ID NO: 5422328 - DNA, 25 bp, Homo sapien
caaatcatgggtatctcaaatcaac

SEQ ID NO: 5422329 - DNA, 25 bp, Homo sapien
tatatggctgccttaagtattgtca

SEQ ID NO: 5422330 - DNA, 25 bp, Homo sapien
taaacacagtctttcacacagaaac

SEQ ID NO: 5422331 - DNA, 25 bp, Homo sapien
catacattcgcacccaaaaaagttc

SEQ ID NO: 5422332 - DNA, 25 bp, Homo sapien
taacacatttgatgatagggctgga

SEQ ID NO: 5422333 - DNA, 25 bp, Homo sapien
tgagctgcagttcgctgacgaatct

SEQ ID NO: 5422334 - DNA, 25 bp, Homo sapien
gatccaagatgtcttggtaacacat

SEQ ID NO: 5422335 - DNA, 25 bp, Homo sapien
cagaactgtcctttggtggtccagg

SEQ ID NO: 5422336 - DNA, 25 bp, Homo sapien
ttccctagcactggtcaaaggcttt

SEQ ID NO: 5422337 - DNA, 25 bp, Homo sapien
ccttaatatgagtgttggcaaaact

SEQ ID NO: 5422338 - DNA, 25 bp, Homo sapien
tcttgctccttacgtgaactaaaac

SEQ ID NO: 5422339 - DNA, 25 bp, Homo sapien
tggaaactcttagggtgaattttgc

SEQ ID NO: 5422340 - DNA, 25 bp, Homo sapien
gctttgcagaccacataagctcctg

SEQ ID NO: 5422341 - DNA, 25 bp, Homo sapien
gcacggtggtacatactcgtagtcc

SEQ ID NO: 5422342 - DNA, 25 bp, Homo sapien
caactgcaagatctataacccatta

SEQ ID NO: 5422343 - DNA, 25 bp, Homo sapien
gatcacttctcaggtttaagcatcc

SEQ ID NO: 5422344 - DNA, 25 bp, Homo sapien
tcagcatcacatcgcacttactcca

SEQ ID NO: 5422345 - DNA, 25 bp, Homo sapien
cttaatagggatctacagaactctc

SEQ ID NO: 5422346 - DNA, 25 bp, Homo sapien
taaggtaagtccttagcaacctaca

SEQ ID NO: 5422347 - DNA, 25 bp, Homo sapien
accaagctgccttaatagggatcta

SEQ ID NO: 5422348 - DNA, 25 bp, Homo sapien
gctgctccagcagatggcggctcac

SEQ ID NO: 5422349 - DNA, 25 bp, Homo sapien
ccaggtcttgcagttacagctgctc

SEQ ID NO: 5422350 - DNA, 25 bp, Homo sapien
ttgtccaggtcttgcagttacagct

SEQ ID NO: 5422351 - DNA, 25 bp, Homo sapien
gctccagcagatggcggctcacact

SEQ ID NO: 5422352 - DNA, 25 bp, Homo sapien
ttgagtccggatcaaacctttcaag

SEQ ID NO: 5422353 - DNA, 25 bp, Homo sapien
tccggatcaaacctttcaagaatta

SEQ ID NO: 5422354 - DNA, 25 bp, Homo sapien
agtccggatcaaacctttcaagaat

SEQ ID NO: 5422355 - DNA, 25 bp, Homo sapien
cggatcaaacctttcaagaattaat

SEQ ID NO: 5422356 - DNA, 25 bp, Homo sapien
ttagtcaaactgcaagagaaatgcc

SEQ ID NO: 5422357 - DNA, 25 bp, Homo sapien
gatcctgttttctggccatatgatg

SEQ ID NO: 5422358 - DNA, 25 bp, Homo sapien
cattttggtataagcaggacttgtc

SEQ ID NO: 5422359 - DNA, 25 bp, Homo sapien
attgggctgcttctcatcacttagg

SEQ ID NO: 5422360 - DNA, 25 bp, Homo sapien
tctgggattttaaatcatccaatgc

SEQ ID NO: 5422361 - DNA, 25 bp, Homo sapien
gattttaaatcatccaatgcttcat

SEQ ID NO: 5422362 - DNA, 25 bp, Homo sapien
ttttcctctgggattttaaatcatc

SEQ ID NO: 5422363 - DNA, 25 bp, Homo sapien
ttcctctgggattttaaatcatcca

SEQ ID NO: 5422364 - DNA, 25 bp, Homo sapien
tcaacagtcacaaatggctagcaga

SEQ ID NO: 5422365 - DNA, 25 bp, Homo sapien
gccatgttacttatgagatgcctac

SEQ ID NO: 5422366 - DNA, 25 bp, Homo sapien
gatgcctactaaactcctaagtgga

SEQ ID NO: 5422367 - DNA, 25 bp, Homo sapien
cacagttaggtatacaagtctacag

SEQ ID NO: 5422368 - DNA, 25 bp, Homo sapien
taattactgttcttatgctccagat

SEQ ID NO: 5422369 - DNA, 25 bp, Homo sapien
ataattactgttcttatgctccaga

SEQ ID NO: 5422370 - DNA, 25 bp, Homo sapien
aattactgttcttatgctccagatg

SEQ ID NO: 5422371 - DNA, 25 bp, Homo sapien
agcaaaaaatgggagtgtcatggca

SEQ ID NO: 5422372 - DNA, 25 bp, Homo sapien
caagtcttgctgtaaattcatcagg

SEQ ID NO: 5422373 - DNA, 25 bp, Homo sapien
taagcatgtaaacagatagagaact

SEQ ID NO: 5422374 - DNA, 25 bp, Homo sapien
tatacaattaagcatgtaaacagat

SEQ ID NO: 5422375 - DNA, 25 bp, Homo sapien
agaacttctacagttgaaggttttg

SEQ ID NO: 5422376 - DNA, 25 bp, Homo sapien
cctccatcgagaaaataatccaccc

SEQ ID NO: 5422377 - DNA, 25 bp, Homo sapien
tccatcgagaaaataatccacccat

SEQ ID NO: 5422378 - DNA, 25 bp, Homo sapien
ctccatcgagaaaataatccaccca

SEQ ID NO: 5422379 - DNA, 25 bp, Homo sapien
gtagaaactgggcacaatgataaat

SEQ ID NO: 5422380 - DNA, 25 bp, Homo sapien
gcacaatgataaatatcatcaattg

SEQ ID NO: 5422381 - DNA, 25 bp, Homo sapien
atcatcaattgtccaaaggaattca

SEQ ID NO: 5422382 - DNA, 25 bp, Homo sapien
tttgtagaaactgggcacaatgata

SEQ ID NO: 5422383 - DNA, 25 bp, Homo sapien
tgacagagagacaagccgggccaac

SEQ ID NO: 5422384 - DNA, 25 bp, Homo sapien
agcagccgccactgacagagagaca

SEQ ID NO: 5422385 - DNA, 25 bp, Homo sapien
gtccacccccgccagtctcggccgc

SEQ ID NO: 5422386 - DNA, 25 bp, Homo sapien
cagcagccgccactgacagagagac

SEQ ID NO: 5422387 - DNA, 25 bp, Homo sapien
cggtgtgaggtaagcttcaaacgcc

SEQ ID NO: 5422388 - DNA, 25 bp, Homo sapien
ggtaagcttcaaacgccgtatcatg

SEQ ID NO: 5422389 - DNA, 25 bp, Homo sapien
gcttcaaacgccgtatcatgttgct

SEQ ID NO: 5422390 - DNA, 25 bp, Homo sapien
caaacgccgtatcatgttgctttaa

SEQ ID NO: 5422391 - DNA, 25 bp, Homo sapien
tttttggcatagtttcaaagctaca

SEQ ID NO: 5422392 - DNA, 25 bp, Homo sapien
tagtttcaaagctacataatgccag

SEQ ID NO: 5422393 - DNA, 25 bp, Homo sapien
gccagacatagacatgtaaaagtaa

SEQ ID NO: 5422394 - DNA, 25 bp, Homo sapien
gagaatgccagatatacgacaataa

SEQ ID NO: 5422395 - DNA, 25 bp, Homo sapien
tctttagagttcttttctctatgtc

SEQ ID NO: 5422396 - DNA, 25 bp, Homo sapien
aaacactcagccatcacatttcctc

SEQ ID NO: 5422397 - DNA, 25 bp, Homo sapien
cttttctctatgtctatcccagcca

SEQ ID NO: 5422398 - DNA, 25 bp, Homo sapien
ttagatatgttgttttcggtgagaa

SEQ ID NO: 5422399 - DNA, 25 bp, Homo sapien
tgccttggttttatgaagggtgtaa

SEQ ID NO: 5422400 - DNA, 25 bp, Homo sapien
atgaactaaacagccagttttttgc

SEQ ID NO: 5422401 - DNA, 25 bp, Homo sapien
ttgccttggttttatgaagggtgta

SEQ ID NO: 5422402 - DNA, 25 bp, Homo sapien
ctaaacagccagttttttgccttgg

SEQ ID NO: 5422403 - DNA, 25 bp, Homo sapien
ctgggaggagggaggaaacaaagag

SEQ ID NO: 5422404 - DNA, 25 bp, Homo sapien
ttctcctgggaggagggaggaaaca

SEQ ID NO: 5422405 - DNA, 25 bp, Homo sapien
tctcctgggaggagggaggaaacaa

SEQ ID NO: 5422406 - DNA, 25 bp, Homo sapien
tcagttctcctgggaggagggagga

SEQ ID NO: 5422407 - DNA, 25 bp, Homo sapien
ctgtgagagccaagaagcgaatgta

SEQ ID NO: 5422408 - DNA, 25 bp, Homo sapien
caatggtaaggctctccattttagc

SEQ ID NO: 5422409 - DNA, 25 bp, Homo sapien
ttcttggaagcctctccgctgtgag

SEQ ID NO: 5422410 - DNA, 25 bp, Homo sapien
gatgatttggcactcaacaatggta

SEQ ID NO: 5422411 - DNA, 25 bp, Homo sapien
tccaactaaactcccaatttgtgca

SEQ ID NO: 5422412 - DNA, 25 bp, Homo sapien
tgagactgaggtccaactaaactcc

SEQ ID NO: 5422413 - DNA, 25 bp, Homo sapien
gatgagactgaggtccaactaaact

SEQ ID NO: 5422414 - DNA, 25 bp, Homo sapien
ctgaggtccaactaaactcccaatt

SEQ ID NO: 5422415 - DNA, 25 bp, Homo sapien
ggccaagtgttacaggtatacagta

SEQ ID NO: 5422416 - DNA, 25 bp, Homo sapien
caggtatacagtaaatcacctcttc

SEQ ID NO: 5422417 - DNA, 25 bp, Homo sapien
tcagttgtggccaagtgttacaggt

SEQ ID NO: 5422418 - DNA, 25 bp, Homo sapien
ggtatacagtaaatcacctcttctg

SEQ ID NO: 5422419 - DNA, 25 bp, Homo sapien
ccgcgaggacaacactgaaggcgct

SEQ ID NO: 5422420 - DNA, 25 bp, Homo sapien
gcaacgtctgggaagccgacacttt

SEQ ID NO: 5422421 - DNA, 25 bp, Homo sapien
caccggcggcgagttgtagaaaagt

SEQ ID NO: 5422422 - DNA, 25 bp, Homo sapien
tccttttcaggaaatctccgggtgc

SEQ ID NO: 5422423 - DNA, 25 bp, Homo sapien
tccctttttttcagctaggagcgct

SEQ ID NO: 5422424 - DNA, 25 bp, Homo sapien
cttgacatccctttttttcagctag

SEQ ID NO: 5422425 - DNA, 25 bp, Homo sapien
ttttcagctaggagcgcttcggccg

SEQ ID NO: 5422426 - DNA, 25 bp, Homo sapien
gcgcttcggccgctttcttcagctt

SEQ ID NO: 5422427 - DNA, 25 bp, Homo sapien
cacttgaattgggcccacggttttg

SEQ ID NO: 5422428 - DNA, 25 bp, Homo sapien
tggcacttgaattgggcccacggtt

SEQ ID NO: 5422429 - DNA, 25 bp, Homo sapien
ctcgcctcgcggctgggtggatctc

SEQ ID NO: 5422430 - DNA, 25 bp, Homo sapien
gcggtcgctgctcctgcggtgctgc

SEQ ID NO: 5422431 - DNA, 25 bp, Homo sapien
gattgtggccgtgtccagaccaggc

SEQ ID NO: 5422432 - DNA, 25 bp, Homo sapien
ccgtagctgtgcctgcgcggtcgct

SEQ ID NO: 5422433 - DNA, 25 bp, Homo sapien
cacagagttcatctgtgttcaatct

SEQ ID NO: 5422434 - DNA, 25 bp, Homo sapien
tgcgaccagttacaccgaagaggcg

SEQ ID NO: 5422435 - DNA, 25 bp, Homo sapien
tttcagtactcaatgcacagagttc

SEQ ID NO: 5422436 - DNA, 25 bp, Homo sapien
aactctgaagtgacaaccgccactt

SEQ ID NO: 5422437 - DNA, 25 bp, Homo sapien
gacgtcgtcgttccgcttgatgcga

SEQ ID NO: 5422438 - DNA, 25 bp, Homo sapien
tgaactgttggcgacgtcgttcgca

SEQ ID NO: 5422439 - DNA, 25 bp, Homo sapien
gttcgcagcccgaagtccctgtagc

SEQ ID NO: 5422440 - DNA, 25 bp, Homo sapien
ccacagtgctttaacgacgtcgtcg

SEQ ID NO: 5422441 - DNA, 25 bp, Homo sapien
tgccatcgcagaaaggctgggccaa

SEQ ID NO: 5422442 - DNA, 25 bp, Homo sapien
agctctgaaggctcgagtccctgca

SEQ ID NO: 5422443 - DNA, 25 bp, Homo sapien
tgctggagaagaccgggcgcaaaca

SEQ ID NO: 5422444 - DNA, 25 bp, Homo sapien
tctcttccgtcgaacccttttggca

SEQ ID NO: 5422445 - DNA, 25 bp, Homo sapien
ttcgaagtggccactcggccagcac

SEQ ID NO: 5422446 - DNA, 25 bp, Homo sapien
cagaagtgcacgagttcgaagtggc

SEQ ID NO: 5422447 - DNA, 25 bp, Homo sapien
cagggccgaacccgagaaagcagaa

SEQ ID NO: 5422448 - DNA, 25 bp, Homo sapien
agctcccgggcatgaaagccagggc

SEQ ID NO: 5422449 - DNA, 25 bp, Homo sapien
gatgcgatgaatgtcagtaaatgta

SEQ ID NO: 5422450 - DNA, 25 bp, Homo sapien
cgtgacatgcgttgatcagataatc

SEQ ID NO: 5422451 - DNA, 25 bp, Homo sapien
tcagataatcaatgtcaaagatgcg

SEQ ID NO: 5422452 - DNA, 25 bp, Homo sapien
aaatgtagttttcatgtcgtttcta

SEQ ID NO: 5422453 - DNA, 25 bp, Homo sapien
tgtattcccagtagtgtcctcatcg

SEQ ID NO: 5422454 - DNA, 25 bp, Homo sapien
gaatagactgctttgcacacaccat

SEQ ID NO: 5422455 - DNA, 25 bp, Homo sapien
ccaaaatggcttgtgatcgcagcct

SEQ ID NO: 5422456 - DNA, 25 bp, Homo sapien
aaatttcgaggaagggacatcttgg

SEQ ID NO: 5422457 - DNA, 25 bp, Homo sapien
taccaaccagcgttctcatcaatca

SEQ ID NO: 5422458 - DNA, 25 bp, Homo sapien
agaccccaggaatttcgaaatactg

SEQ ID NO: 5422459 - DNA, 25 bp, Homo sapien
gctgataaagggtaccatattttgg

SEQ ID NO: 5422460 - DNA, 25 bp, Homo sapien
tataataaccagatccaatggaccc

SEQ ID NO: 5422461 - DNA, 25 bp, Homo sapien
tagtacttgacagcaggtctccgtg

SEQ ID NO: 5422462 - DNA, 25 bp, Homo sapien
tcaaaggaggtccatcagagagcat

SEQ ID NO: 5422463 - DNA, 25 bp, Homo sapien
cagagaaaagtctacccagggcgtc

SEQ ID NO: 5422464 - DNA, 25 bp, Homo sapien
tcattatgtgaggagccaagtggct

SEQ ID NO: 5422465 - DNA, 25 bp, Homo sapien
cagcgatctatcagtcttaccccta

SEQ ID NO: 5422466 - DNA, 25 bp, Homo sapien
gaaaacgcctctccaaatactacag

SEQ ID NO: 5422467 - DNA, 25 bp, Homo sapien
tatctagagattcaagtatttccca

SEQ ID NO: 5422468 - DNA, 25 bp, Homo sapien
tatttcccagatcgagtggaacccg

SEQ ID NO: 5422469 - DNA, 25 bp, Homo sapien
ggctgaaagaacgtttgccacctcc

SEQ ID NO: 5422470 - DNA, 25 bp, Homo sapien
cactcttcgggcagggtccctaata

SEQ ID NO: 5422471 - DNA, 25 bp, Homo sapien
gggtccctaataagctcaggctgaa

SEQ ID NO: 5422472 - DNA, 25 bp, Homo sapien
ggccttatcagacctccgttctccc

SEQ ID NO: 5422473 - DNA, 25 bp, Homo sapien
cagcgagaaacctccggggcgactc

SEQ ID NO: 5422474 - DNA, 25 bp, Homo sapien
cagcagcgagaaacctccggggcga

SEQ ID NO: 5422475 - DNA, 25 bp, Homo sapien
agcagcagcgagaaacctccggggc

SEQ ID NO: 5422476 - DNA, 25 bp, Homo sapien
acagcagcagcgagaaacctccggg

SEQ ID NO: 5422477 - DNA, 25 bp, Homo sapien
gggccacgccgttcagccaagcaac

SEQ ID NO: 5422478 - DNA, 25 bp, Homo sapien
aagcaacccggacctgagagtgcac

SEQ ID NO: 5422479 - DNA, 25 bp, Homo sapien
tggttctccgttgcttcgggccacg

SEQ ID NO: 5422480 - DNA, 25 bp, Homo sapien
gtgcacagccaggactagcttaggg

SEQ ID NO: 5422481 - DNA, 25 bp, Homo sapien
cagacggctgggtggcaaatacaaa

SEQ ID NO: 5422482 - DNA, 25 bp, Homo sapien
caattcggagcaggttcccttcggc

SEQ ID NO: 5422483 - DNA, 25 bp, Homo sapien
tagttatctggtgagcggagcctcg

SEQ ID NO: 5422484 - DNA, 25 bp, Homo sapien
tttgggaaaccaagcgctcaggaca

SEQ ID NO: 5422485 - DNA, 25 bp, Homo sapien
cgtgcgtcatcatgtaggtgtagaa

SEQ ID NO: 5422486 - DNA, 25 bp, Homo sapien
tcggctgggtgcggccaggacatgg

SEQ ID NO: 5422487 - DNA, 25 bp, Homo sapien
tggcggccgcgtgcgtcatcatgta

SEQ ID NO: 5422488 - DNA, 25 bp, Homo sapien
gtagggcaggcttccggtggcggcc

SEQ ID NO: 5422489 - DNA, 25 bp, Homo sapien
cgcagcctgggttagggagcgcccc

SEQ ID NO: 5422490 - DNA, 25 bp, Homo sapien
gcgccgcagcctgggttagggagcg

SEQ ID NO: 5422491 - DNA, 25 bp, Homo sapien
tgcggggagagacgcgccgcagcct

SEQ ID NO: 5422492 - DNA, 25 bp, Homo sapien
tagggagcgccccgtgttcccagct

SEQ ID NO: 5422493 - DNA, 25 bp, Homo sapien
ttcgggcaggttgagtgccgcggcc

SEQ ID NO: 5422494 - DNA, 25 bp, Homo sapien
gacgccgacgtcgtggtgccggcag

SEQ ID NO: 5422495 - DNA, 25 bp, Homo sapien
gcggggccgcgacacatagttctcc

SEQ ID NO: 5422496 - DNA, 25 bp, Homo sapien
gtgaacgccgtacggtagcgccgca

SEQ ID NO: 5422497 - DNA, 25 bp, Homo sapien
caaacaaacgaccaacagcgcatga

SEQ ID NO: 5422498 - DNA, 25 bp, Homo sapien
cgcatgagtggctgtaggaccaaca

SEQ ID NO: 5422499 - DNA, 25 bp, Homo sapien
gaccaacagcgcatgagtggctgta

SEQ ID NO: 5422500 - DNA, 25 bp, Homo sapien
tgtaggaccaacagcccggcgctgg

SEQ ID NO: 5422501 - DNA, 25 bp, Homo sapien
tgcgcgcggatcggggaagccccgt

SEQ ID NO: 5422502 - DNA, 25 bp, Homo sapien
ctgcgcgcggatcggggaagccccg

SEQ ID NO: 5422503 - DNA, 25 bp, Homo sapien
cgcgcggatcggggaagccccgtca

SEQ ID NO: 5422504 - DNA, 25 bp, Homo sapien
gcgcgcggatcggggaagccccgtc

SEQ ID NO: 5422505 - DNA, 25 bp, Homo sapien
gagacgccggcgaggcttcctccga

SEQ ID NO: 5422506 - DNA, 25 bp, Homo sapien
tctttctcccgctgacctaaacaga

SEQ ID NO: 5422507 - DNA, 25 bp, Homo sapien
tatctgagtcttcggggtttcaaat

SEQ ID NO: 5422508 - DNA, 25 bp, Homo sapien
aacacagcagtagctcaaacccaag

SEQ ID NO: 5422509 - DNA, 25 bp, Homo sapien
ggctcgctcgggctcttagacacga

SEQ ID NO: 5422510 - DNA, 25 bp, Homo sapien
tagacacgagcgcagaaacattttc

SEQ ID NO: 5422511 - DNA, 25 bp, Homo sapien
tagctcggtgtagcttgcctgtgga

SEQ ID NO: 5422512 - DNA, 25 bp, Homo sapien
aacattttctcggactcaggagcga

SEQ ID NO: 5422513 - DNA, 25 bp, Homo sapien
cagcggccgcctctgaataatggcc

SEQ ID NO: 5422514 - DNA, 25 bp, Homo sapien
ttttccttaagctgagcggcgccga

SEQ ID NO: 5422515 - DNA, 25 bp, Homo sapien
ctatttcgaatttgcccttggcggg

SEQ ID NO: 5422516 - DNA, 25 bp, Homo sapien
agatttcggaggagacggtgctttc

SEQ ID NO: 5422517 - DNA, 25 bp, Homo sapien
tgccagccgagttggacaaattgga

SEQ ID NO: 5422518 - DNA, 25 bp, Homo sapien
cgagccgggtgctgcgaattttcca

SEQ ID NO: 5422519 - DNA, 25 bp, Homo sapien
ctcttgcccgccgtagggctgtgca

SEQ ID NO: 5422520 - DNA, 25 bp, Homo sapien
tccagggcctcgagcacagcattgc

SEQ ID NO: 5422521 - DNA, 25 bp, Homo sapien
ttaaaaatgtcacagtggccctgct

SEQ ID NO: 5422522 - DNA, 25 bp, Homo sapien
aaatgtcacagtggccctgctgtcc

SEQ ID NO: 5422523 - DNA, 25 bp, Homo sapien
cttaaaaatgtcacagtggccctgc

SEQ ID NO: 5422524 - DNA, 25 bp, Homo sapien
gtcacagtggccctgctgtcccgtc

SEQ ID NO: 5422525 - DNA, 25 bp, Homo sapien
ctaatgataggctgcgcctagggct

SEQ ID NO: 5422526 - DNA, 25 bp, Homo sapien
tctaaatattattatcgctttcgga

SEQ ID NO: 5422527 - DNA, 25 bp, Homo sapien
cccagcgaacgcctctaaatattat

SEQ ID NO: 5422528 - DNA, 25 bp, Homo sapien
gaaaaattgtgggatgccagagcga

SEQ ID NO: 5422529 - DNA, 25 bp, Homo sapien
ccttccgatcccgagatgtcattca

SEQ ID NO: 5422530 - DNA, 25 bp, Homo sapien
tcatcaaaaagtagcgcccgctcgt

SEQ ID NO: 5422531 - DNA, 25 bp, Homo sapien
tggtcaaaatgacccatacatcctt

SEQ ID NO: 5422532 - DNA, 25 bp, Homo sapien
cattaaggtacgaatgacgctgttc

SEQ ID NO: 5422533 - DNA, 25 bp, Homo sapien
cgcgcctccaaacggaaatcattag

SEQ ID NO: 5422534 - DNA, 25 bp, Homo sapien
tgattttctaacaccgtctgcagag

SEQ ID NO: 5422535 - DNA, 25 bp, Homo sapien
tgagatctgaactcgaagtccccgg

SEQ ID NO: 5422536 - DNA, 25 bp, Homo sapien
tctcgcctacgcattttcctgaggg

SEQ ID NO: 5422537 - DNA, 25 bp, Homo sapien
gctgagcctcttggcgacaactttg

SEQ ID NO: 5422538 - DNA, 25 bp, Homo sapien
caggtattcccagcgttgggtccgg

SEQ ID NO: 5422539 - DNA, 25 bp, Homo sapien
ctgcggccacaggtattcccagcgt

SEQ ID NO: 5422540 - DNA, 25 bp, Homo sapien
agagagtcgccgaacagccttacag

SEQ ID NO: 5422541 - DNA, 25 bp, Homo sapien
ggtaaagccgtagctgcagcgaagc

SEQ ID NO: 5422542 - DNA, 25 bp, Homo sapien
taataaaaatctgtccgggctgccc

SEQ ID NO: 5422543 - DNA, 25 bp, Homo sapien
aacacttttggcctatgactgcagg

SEQ ID NO: 5422544 - DNA, 25 bp, Homo sapien
tcttcaggcgaagtgcggtttccac

SEQ ID NO: 5422545 - DNA, 25 bp, Homo sapien
acagtgagattagtgcttctcttca

SEQ ID NO: 5422546 - DNA, 25 bp, Homo sapien
ccatcccaaagaagggcccgctgtc

SEQ ID NO: 5422547 - DNA, 25 bp, Homo sapien
ctccatcccaaagaagggcccgctg

SEQ ID NO: 5422548 - DNA, 25 bp, Homo sapien
tccatcccaaagaagggcccgctgt

SEQ ID NO: 5422549 - DNA, 25 bp, Homo sapien
gatttggttaagaacactgtccagc

SEQ ID NO: 5422550 - DNA, 25 bp, Homo sapien
tctgatagaatcctgtgatcctggc

SEQ ID NO: 5422551 - DNA, 25 bp, Homo sapien
taaagcctaatcgtgttgtgaaacc

SEQ ID NO: 5422552 - DNA, 25 bp, Homo sapien
tgctttcaaaggagtccccaggacc

SEQ ID NO: 5422553 - DNA, 25 bp, Homo sapien
tgccactcagggaaatggccgatga

SEQ ID NO: 5422554 - DNA, 25 bp, Homo sapien
ttagaaagacatacccatatttggc

SEQ ID NO: 5422555 - DNA, 25 bp, Homo sapien
caatcaactcagtggttgctaaagt

SEQ ID NO: 5422556 - DNA, 25 bp, Homo sapien
aactttcagacgcaatttttaggca

SEQ ID NO: 5422557 - DNA, 25 bp, Homo sapien
tttccttcggttggagacaggcggc

SEQ ID NO: 5422558 - DNA, 25 bp, Homo sapien
aggaagcattggagccgggactcac

SEQ ID NO: 5422559 - DNA, 25 bp, Homo sapien
ggaactggtaagtggcccaggcact

SEQ ID NO: 5422560 - DNA, 25 bp, Homo sapien
aggtccccgtgtcgcgtgattcaag

SEQ ID NO: 5422561 - DNA, 25 bp, Homo sapien
atcgcgtcctggcgctgtgcggaaa

SEQ ID NO: 5422562 - DNA, 25 bp, Homo sapien
cgcgcgggtccggaggctgcggttt

SEQ ID NO: 5422563 - DNA, 25 bp, Homo sapien
aaagctctttctcgcggagcggctg

SEQ ID NO: 5422564 - DNA, 25 bp, Homo sapien
ttcacggtaggttctcgagcgggac

SEQ ID NO: 5422565 - DNA, 25 bp, Homo sapien
aagacccgggttgaagtcctcgcag

SEQ ID NO: 5422566 - DNA, 25 bp, Homo sapien
cccgtgccgccagtagagagaaggt

SEQ ID NO: 5422567 - DNA, 25 bp, Homo sapien
gccgtcgccatgtcgttgaacttga

SEQ ID NO: 5422568 - DNA, 25 bp, Homo sapien
tgcgagaattttgcgaatccccaga

SEQ ID NO: 5422569 - DNA, 25 bp, Homo sapien
tctctgtctgtccgcacggtgggca

SEQ ID NO: 5422570 - DNA, 25 bp, Homo sapien
tttctctgtctgtccgcacggtggg

SEQ ID NO: 5422571 - DNA, 25 bp, Homo sapien
ctgtctgtccgcacggtgggcagag

SEQ ID NO: 5422572 - DNA, 25 bp, Homo sapien
tctgtctgtccgcacggtgggcaga

SEQ ID NO: 5422573 - DNA, 25 bp, Homo sapien
cgcggtgggccgcaatggcatcttg

SEQ ID NO: 5422574 - DNA, 25 bp, Homo sapien
cacagggcttcgaccagttctacga

SEQ ID NO: 5422575 - DNA, 25 bp, Homo sapien
cgccggccggacgtgctcttcaagg

SEQ ID NO: 5422576 - DNA, 25 bp, Homo sapien
tcttcaaggcgcctgagccggtgtg

SEQ ID NO: 5422577 - DNA, 25 bp, Homo sapien
caattttaccgccagtgtgctgtcg

SEQ ID NO: 5422578 - DNA, 25 bp, Homo sapien
ttattttgagagctccaggaagcgc

SEQ ID NO: 5422579 - DNA, 25 bp, Homo sapien
ttggccgagcggatcctaataaggg

SEQ ID NO: 5422580 - DNA, 25 bp, Homo sapien
cagagaccgtctgcagtatttcact

SEQ ID NO: 5422581 - DNA, 25 bp, Homo sapien
ggtcctcggtctatgtgaagtgaga

SEQ ID NO: 5422582 - DNA, 25 bp, Homo sapien
tatagtgacgctacctttcccgagg

SEQ ID NO: 5422583 - DNA, 25 bp, Homo sapien
tctcagcggtctgcagttcctttcc

SEQ ID NO: 5422584 - DNA, 25 bp, Homo sapien
gagctgccctccctaaatgtcgttg

SEQ ID NO: 5422585 - DNA, 25 bp, Homo sapien
gaggcgctttaatgaacctcaggcc

SEQ ID NO: 5422586 - DNA, 25 bp, Homo sapien
ccccagaatgctgaggcgctttaat

SEQ ID NO: 5422587 - DNA, 25 bp, Homo sapien
caaagaaatgttctattgaggtgga

SEQ ID NO: 5422588 - DNA, 25 bp, Homo sapien
gcgggctactaggtcccccagaatg

SEQ ID NO: 5422589 - DNA, 25 bp, Homo sapien
cgagcgagccctggagaggcggaca

SEQ ID NO: 5422590 - DNA, 25 bp, Homo sapien
acttggaggcccctagagctgagac

SEQ ID NO: 5422591 - DNA, 25 bp, Homo sapien
cttctgtgcgctggcgccagggcac

SEQ ID NO: 5422592 - DNA, 25 bp, Homo sapien
ctgggccggttgtctccagcgcgca

SEQ ID NO: 5422593 - DNA, 25 bp, Homo sapien
acgtgacccgagaggaggctgcggc

SEQ ID NO: 5422594 - DNA, 25 bp, Homo sapien
agcacgtgacccgagaggaggctgc

SEQ ID NO: 5422595 - DNA, 25 bp, Homo sapien
cacgtgacccgagaggaggctgcgg

SEQ ID NO: 5422596 - DNA, 25 bp, Homo sapien
tggagcacgtgacccgagaggaggc

SEQ ID NO: 5422597 - DNA, 25 bp, Homo sapien
ctcaacctcacctctgtagggggaa

SEQ ID NO: 5422598 - DNA, 25 bp, Homo sapien
tcaacctcacctctgtagggggaaa

SEQ ID NO: 5422599 - DNA, 25 bp, Homo sapien
caacacgacaagctgtgagcaagcg

SEQ ID NO: 5422600 - DNA, 25 bp, Homo sapien
tattagggacacattaatctataat

SEQ ID NO: 5422601 - DNA, 25 bp, Homo sapien
cataatatcattacagaggtcttcc

SEQ ID NO: 5422602 - DNA, 25 bp, Homo sapien
tgctccatccgtccgttttattagg

SEQ ID NO: 5422603 - DNA, 25 bp, Homo sapien
gagagtcagcgacggggcccgactg

SEQ ID NO: 5422604 - DNA, 25 bp, Homo sapien
cccgcggctcggaagctggagagtc

SEQ ID NO: 5422605 - DNA, 25 bp, Homo sapien
tggagagtcagcgacggggcccgac

SEQ ID NO: 5422606 - DNA, 25 bp, Homo sapien
gccgcccgcggctcggaagctggag

SEQ ID NO: 5422607 - DNA, 25 bp, Homo sapien
agaagcgaacaaatagtccccagcg

SEQ ID NO: 5422608 - DNA, 25 bp, Homo sapien
agtttagcggactgatttactcccg

SEQ ID NO: 5422609 - DNA, 25 bp, Homo sapien
ttactcccggtattggtaaatatga

SEQ ID NO: 5422610 - DNA, 25 bp, Homo sapien
gcgggctctaattgcggcgcttatg

SEQ ID NO: 5422611 - DNA, 25 bp, Homo sapien
cagcctgcgaactagtcggtggctc

SEQ ID NO: 5422612 - DNA, 25 bp, Homo sapien
cagtgtaatgttgggtgggagtgcg

SEQ ID NO: 5422613 - DNA, 25 bp, Homo sapien
tgctcggcggcggacagtgtaatgt

SEQ ID NO: 5422614 - DNA, 25 bp, Homo sapien
cgcgcgaccaatggtggaggctgca

SEQ ID NO: 5422615 - DNA, 25 bp, Homo sapien
gactcgcttataggccatgagggcg

SEQ ID NO: 5422616 - DNA, 25 bp, Homo sapien
tacgtggactcgcttataggccatg

SEQ ID NO: 5422617 - DNA, 25 bp, Homo sapien
gcgacgaggtgttcgcggcgcgctt

SEQ ID NO: 5422618 - DNA, 25 bp, Homo sapien
cgcttataggccatgagggcgacga

SEQ ID NO: 5422619 - DNA, 25 bp, Homo sapien
ccgatcccaggctgttcgctgaagg

SEQ ID NO: 5422620 - DNA, 25 bp, Homo sapien
gagaagcagcattcgcagccgcagc

SEQ ID NO: 5422621 - DNA, 25 bp, Homo sapien
atcccaggctgttcgctgaaggagg

SEQ ID NO: 5422622 - DNA, 25 bp, Homo sapien
aggagaagcagcattcgcagccgca

SEQ ID NO: 5422623 - DNA, 25 bp, Homo sapien
gggttgcccaccagttgcgaaagcc

SEQ ID NO: 5422624 - DNA, 25 bp, Homo sapien
tccaagaatgaaggcagagcgacaa

SEQ ID NO: 5422625 - DNA, 25 bp, Homo sapien
aaagtgctgtagtttagtcccctca

SEQ ID NO: 5422626 - DNA, 25 bp, Homo sapien
tcctcagtgcattggacgcgctgct

SEQ ID NO: 5422627 - DNA, 25 bp, Homo sapien
cggttcctgcccgaggaccagttgt

SEQ ID NO: 5422628 - DNA, 25 bp, Homo sapien
gacgctggccctaaacattgtgtgc

SEQ ID NO: 5422629 - DNA, 25 bp, Homo sapien
ccctgggagtgagacattgttaaaa

SEQ ID NO: 5422630 - DNA, 25 bp, Homo sapien
ggatatttctcctctacccctggga

SEQ ID NO: 5422631 - DNA, 25 bp, Homo sapien
cagaatcaattcgttcgccttcgga

SEQ ID NO: 5422632 - DNA, 25 bp, Homo sapien
cccggacacaagtcaggatcgcgct

SEQ ID NO: 5422633 - DNA, 25 bp, Homo sapien
cccagtagaaataattgagtcggac

SEQ ID NO: 5422634 - DNA, 25 bp, Homo sapien
tcacgacattgtacctatcccgaag

SEQ ID NO: 5422635 - DNA, 25 bp, Homo sapien
gatcgttagcataagatgggccgcc

SEQ ID NO: 5422636 - DNA, 25 bp, Homo sapien
gatatgccccaactcaaatgcacgg

SEQ ID NO: 5422637 - DNA, 25 bp, Homo sapien
cagtaatttcacaggcttggcggag

SEQ ID NO: 5422638 - DNA, 25 bp, Homo sapien
aattcgtaactttgaggcctgcgcg

SEQ ID NO: 5422639 - DNA, 25 bp, Homo sapien
taatctggcaactctggcaaatcgc

SEQ ID NO: 5422640 - DNA, 25 bp, Homo sapien
gagccgaaggcctgacaaattaact

SEQ ID NO: 5422641 - DNA, 25 bp, Homo sapien
ttcttcaggaaagcgatagcctcac

SEQ ID NO: 5422642 - DNA, 25 bp, Homo sapien
tttgaaccgcccttgtaatcgcctg

SEQ ID NO: 5422643 - DNA, 25 bp, Homo sapien
gggacaacgcaaagtccatgttaca

SEQ ID NO: 5422644 - DNA, 25 bp, Homo sapien
agctttgatcctcttaaaggactca

SEQ ID NO: 5422645 - DNA, 25 bp, Homo sapien
aggactcaagttgtaggcccagtgg

SEQ ID NO: 5422646 - DNA, 25 bp, Homo sapien
ccatgttacaccacagcttattgca

SEQ ID NO: 5422647 - DNA, 25 bp, Homo sapien
taggtagtcatcgaagagctctctg

SEQ ID NO: 5422648 - DNA, 25 bp, Homo sapien
ggtagtcatcgaagagctctctgct

SEQ ID NO: 5422649 - DNA, 25 bp, Homo sapien
ctttgttaggtagtcatcgaagagc

SEQ ID NO: 5422650 - DNA, 25 bp, Homo sapien
ttgttaggtagtcatcgaagagctc

SEQ ID NO: 5422651 - DNA, 25 bp, Homo sapien
gcattgaggcaacaagcgaacactt

SEQ ID NO: 5422652 - DNA, 25 bp, Homo sapien
gacagactggcagtgacttgcgcac

SEQ ID NO: 5422653 - DNA, 25 bp, Homo sapien
tagcttacacacacgcccagagtgt

SEQ ID NO: 5422654 - DNA, 25 bp, Homo sapien
taaaccttcagagaatgctttgcca

SEQ ID NO: 5422655 - DNA, 25 bp, Homo sapien
ttgcggccctcattccccaagttga

SEQ ID NO: 5422656 - DNA, 25 bp, Homo sapien
gagaagtcagttcaaggatgccatt

SEQ ID NO: 5422657 - DNA, 25 bp, Homo sapien
cacacaaaagagaatgtgggtctca

SEQ ID NO: 5422658 - DNA, 25 bp, Homo sapien
tatatcgcttacctctgcacaaggg

SEQ ID NO: 5422659 - DNA, 25 bp, Homo sapien
ccccgtgtttgctgaatccttgggc

SEQ ID NO: 5422660 - DNA, 25 bp, Homo sapien
aggaagtgctatttcacatccaagc

SEQ ID NO: 5422661 - DNA, 25 bp, Homo sapien
tgtaacacagaaggaagtgctattt

SEQ ID NO: 5422662 - DNA, 25 bp, Homo sapien
ccgtgtttgctgaatccttgggcat

SEQ ID NO: 5422663 - DNA, 25 bp, Homo sapien
agaatatgacttttgctgacagatg

SEQ ID NO: 5422664 - DNA, 25 bp, Homo sapien
tatgacttttgctgacagatggcag

SEQ ID NO: 5422665 - DNA, 25 bp, Homo sapien
ttaatcaaaaacatccaaggtcatc

SEQ ID NO: 5422666 - DNA, 25 bp, Homo sapien
aatatgacttttgctgacagatggc

SEQ ID NO: 5422667 - DNA, 25 bp, Homo sapien
tctgaaggctgcatggctatgccca

SEQ ID NO: 5422668 - DNA, 25 bp, Homo sapien
gttctgaaggctgcatggctatgcc

SEQ ID NO: 5422669 - DNA, 25 bp, Homo sapien
aaggctgcatggctatgcccatgag

SEQ ID NO: 5422670 - DNA, 25 bp, Homo sapien
ctatgcccatgaggggaatgctgga

SEQ ID NO: 5422671 - DNA, 25 bp, Homo sapien
tttcagggggagttcaccagagcag

SEQ ID NO: 5422672 - DNA, 25 bp, Homo sapien
cagggggagttcaccagagcagttc

SEQ ID NO: 5422673 - DNA, 25 bp, Homo sapien
tcagggggagttcaccagagcagtt

SEQ ID NO: 5422674 - DNA, 25 bp, Homo sapien
ttcagggggagttcaccagagcagt

SEQ ID NO: 5422675 - DNA, 25 bp, Homo sapien
tggtcatgtgcaggcgccgctcgcc

SEQ ID NO: 5422676 - DNA, 25 bp, Homo sapien
gccgctcgccttcacggcctttttc

SEQ ID NO: 5422677 - DNA, 25 bp, Homo sapien
ttccccccgcattctgctttcccag

SEQ ID NO: 5422678 - DNA, 25 bp, Homo sapien
tcattggctgcggctggtcatgtgc

SEQ ID NO: 5422679 - DNA, 25 bp, Homo sapien
accggctgcgggattgcggagtccg

SEQ ID NO: 5422680 - DNA, 25 bp, Homo sapien
cagtcaccggctgcgggattgcgga

SEQ ID NO: 5422681 - DNA, 25 bp, Homo sapien
gtcaccggctgcgggattgcggagt

SEQ ID NO: 5422682 - DNA, 25 bp, Homo sapien
ggattgcggagtccgccgcggcctc

SEQ ID NO: 5422683 - DNA, 25 bp, Homo sapien
ccggcctgctcgaggtgactgcagc

SEQ ID NO: 5422684 - DNA, 25 bp, Homo sapien
cttcttcaccaacatgagcgggtct

SEQ ID NO: 5422685 - DNA, 25 bp, Homo sapien
ttctggcgcggcttcttcaccaaca

SEQ ID NO: 5422686 - DNA, 25 bp, Homo sapien
agcagccggcctgctcgaggtgact

SEQ ID NO: 5422687 - DNA, 25 bp, Homo sapien
caatcacttcgttcctagggcgtcc

SEQ ID NO: 5422688 - DNA, 25 bp, Homo sapien
gcagccttcgggtaagaatcgcccc

SEQ ID NO: 5422689 - DNA, 25 bp, Homo sapien
gcctagtggattacagcagacgccc

SEQ ID NO: 5422690 - DNA, 25 bp, Homo sapien
ccttgggcagctcagtccggctgct

SEQ ID NO: 5422691 - DNA, 25 bp, Homo sapien
gcaggtccgattacgcagcagaggt

SEQ ID NO: 5422692 - DNA, 25 bp, Homo sapien
aatgaaacctttggacagtctgccg

SEQ ID NO: 5422693 - DNA, 25 bp, Homo sapien
cacagcgcgcttgagtgactaaaaa

SEQ ID NO: 5422694 - DNA, 25 bp, Homo sapien
gatcagggagccgatagcatgtccg

SEQ ID NO: 5422695 - DNA, 25 bp, Homo sapien
tcattggcaacgaggagatgctgct

SEQ ID NO: 5422696 - DNA, 25 bp, Homo sapien
gaaatggcgtgaacagatgccctct

SEQ ID NO: 5422697 - DNA, 25 bp, Homo sapien
catccaggcgtagaagcagtgcgcg

SEQ ID NO: 5422698 - DNA, 25 bp, Homo sapien
tggatgtaggatggttttccccgcc

SEQ ID NO: 5422699 - DNA, 25 bp, Homo sapien
cttatccgcactgcgcggtgcaagc

SEQ ID NO: 5422700 - DNA, 25 bp, Homo sapien
cacccgcgccagaggtccagcgcat

SEQ ID NO: 5422701 - DNA, 25 bp, Homo sapien
gcacagctcacggtcccgcagcgcc

SEQ ID NO: 5422702 - DNA, 25 bp, Homo sapien
gcaagccggccgcacagctcacggt

SEQ ID NO: 5422703 - DNA, 25 bp, Homo sapien
gggacactgtagaaccagcctctgg

SEQ ID NO: 5422704 - DNA, 25 bp, Homo sapien
ctgtctggcgcctcgtccaggagga

SEQ ID NO: 5422705 - DNA, 25 bp, Homo sapien
gcctctgggccacgagcttgttgtt

SEQ ID NO: 5422706 - DNA, 25 bp, Homo sapien
tgtaggacaagcgtctcgccggctg

SEQ ID NO: 5422707 - DNA, 25 bp, Homo sapien
gagtagaagtggcaagtcccagcca

SEQ ID NO: 5422708 - DNA, 25 bp, Homo sapien
cttggttatcatttgggtcctcatt

SEQ ID NO: 5422709 - DNA, 25 bp, Homo sapien
tgttttgaattggagtagaagtggc

SEQ ID NO: 5422710 - DNA, 25 bp, Homo sapien
gctggataacaatctaaagcattgc

SEQ ID NO: 5422711 - DNA, 25 bp, Homo sapien
tctgaacaagtcgagcaataaggtg

SEQ ID NO: 5422712 - DNA, 25 bp, Homo sapien
gaaatgcaggtcacagcgtctaaca

SEQ ID NO: 5422713 - DNA, 25 bp, Homo sapien
aatgtgtatattcaccccggtctcc

SEQ ID NO: 5422714 - DNA, 25 bp, Homo sapien
taactcgttggctttgacctgtctg

SEQ ID NO: 5422715 - DNA, 25 bp, Homo sapien
gctctgagtgagtctgcgctctcca

SEQ ID NO: 5422716 - DNA, 25 bp, Homo sapien
cccctgaaatccatcgaggctctga

SEQ ID NO: 5422717 - DNA, 25 bp, Homo sapien
gaactgagggacaagcactgcacag

SEQ ID NO: 5422718 - DNA, 25 bp, Homo sapien
gagtctgcgctctccatgccctgaa

SEQ ID NO: 5422719 - DNA, 25 bp, Homo sapien
cccttcaccattagcgcgccggcct

SEQ ID NO: 5422720 - DNA, 25 bp, Homo sapien
agcccaaggcggctcggtgcctgtg

SEQ ID NO: 5422721 - DNA, 25 bp, Homo sapien
aatgatttcgaatgacccctcgccc

SEQ ID NO: 5422722 - DNA, 25 bp, Homo sapien
ctcggtgcctgtgagcagcgcctgc

SEQ ID NO: 5422723 - DNA, 25 bp, Homo sapien
ggtaaatgcgcgacttcttggagaa

SEQ ID NO: 5422724 - DNA, 25 bp, Homo sapien
agcagcagcggaacggagaggccag

SEQ ID NO: 5422725 - DNA, 25 bp, Homo sapien
gaggccagcccggatcagggcccat

SEQ ID NO: 5422726 - DNA, 25 bp, Homo sapien
cagggcccatgaaggtaaatgcgcg

SEQ ID NO: 5422727 - DNA, 25 bp, Homo sapien
taggaaaaggagtagacacaggata

SEQ ID NO: 5422728 - DNA, 25 bp, Homo sapien
gatattcccctctcgcttctttttc

SEQ ID NO: 5422729 - DNA, 25 bp, Homo sapien
aaggaggagggttatttggatcctg

SEQ ID NO: 5422730 - DNA, 25 bp, Homo sapien
gcttggtcgggcagtaggaaaagga

SEQ ID NO: 5422731 - DNA, 25 bp, Homo sapien
ctgtgcttacaaccagttctgggtg

SEQ ID NO: 5422732 - DNA, 25 bp, Homo sapien
ggattcactcaaagttgcattcttg

SEQ ID NO: 5422733 - DNA, 25 bp, Homo sapien
ttatttgttgggaaatgtggtacag

SEQ ID NO: 5422734 - DNA, 25 bp, Homo sapien
cagaaataactgacaccttcatgcc

SEQ ID NO: 5422735 - DNA, 25 bp, Homo sapien
aaatgttaatggagcctggatggcc

SEQ ID NO: 5422736 - DNA, 25 bp, Homo sapien
gatgtaccatttgaaaggagccgct

SEQ ID NO: 5422737 - DNA, 25 bp, Homo sapien
aatgggtttccatctgagaacgtgc

SEQ ID NO: 5422738 - DNA, 25 bp, Homo sapien
cagcatccatttgggcccacaggag

SEQ ID NO: 5422739 - DNA, 25 bp, Homo sapien
ctccctcctgtttggtgccttaaca

SEQ ID NO: 5422740 - DNA, 25 bp, Homo sapien
ataataaaaggtgtagcaaaatctc

SEQ ID NO: 5422741 - DNA, 25 bp, Homo sapien
gaagcattcatcctttgttaagtct

SEQ ID NO: 5422742 - DNA, 25 bp, Homo sapien
tgcctaaagtgtgaaggttaaacca

SEQ ID NO: 5422743 - DNA, 25 bp, Homo sapien
caaagggctctctccgacttggaaa

SEQ ID NO: 5422744 - DNA, 25 bp, Homo sapien
tcccttaagaaacacggagtcgtca

SEQ ID NO: 5422745 - DNA, 25 bp, Homo sapien
taattaattcagcacgtcccttaag

SEQ ID NO: 5422746 - DNA, 25 bp, Homo sapien
tcccaagaatatcacccgtccaggg

SEQ ID NO: 5422747 - DNA, 25 bp, Homo sapien
gaaaattgggtgtcctaagagccac

SEQ ID NO: 5422748 - DNA, 25 bp, Homo sapien
tcaccggcactccaagaaaattggg

SEQ ID NO: 5422749 - DNA, 25 bp, Homo sapien
aataaacgcgagaagaagtccctgc

SEQ ID NO: 5422750 - DNA, 25 bp, Homo sapien
tgttgctgtgagatacctccattgg

SEQ ID NO: 5422751 - DNA, 25 bp, Homo sapien
gttagcccagccaggactcattgcg

SEQ ID NO: 5422752 - DNA, 25 bp, Homo sapien
tcttgggcgctcattacaggccagg

SEQ ID NO: 5422753 - DNA, 25 bp, Homo sapien
actgtgcctgatgccgctgagcaga

SEQ ID NO: 5422754 - DNA, 25 bp, Homo sapien
gagcagagctggcaacgaaaccaaa

SEQ ID NO: 5422755 - DNA, 25 bp, Homo sapien
ccagtctggcggaaggcccagccag

SEQ ID NO: 5422756 - DNA, 25 bp, Homo sapien
gctgctccacggcagtctccagaga

SEQ ID NO: 5422757 - DNA, 25 bp, Homo sapien
agacgcttctaagagaggcagtttc

SEQ ID NO: 5422758 - DNA, 25 bp, Homo sapien
agctcccggaccagtctggcggaag

SEQ ID NO: 5422759 - DNA, 25 bp, Homo sapien
caggtcccaagcctcctgcgccctt

SEQ ID NO: 5422760 - DNA, 25 bp, Homo sapien
ccaagactgagtcggcccggagctg

SEQ ID NO: 5422761 - DNA, 25 bp, Homo sapien
caggccaagactgagtcggcccgga

SEQ ID NO: 5422762 - DNA, 25 bp, Homo sapien
ccggagctgcgaaaatgtgttcttt

SEQ ID NO: 5422763 - DNA, 25 bp, Homo sapien
tctccaaatccagaaacgaccacgt

SEQ ID NO: 5422764 - DNA, 25 bp, Homo sapien
agcaaaacaaatcccaagctctggg

SEQ ID NO: 5422765 - DNA, 25 bp, Homo sapien
gcgtctgtatttcccgactatgagg

SEQ ID NO: 5422766 - DNA, 25 bp, Homo sapien
gaaggcagcgtctgtatttcccgac

SEQ ID NO: 5422767 - DNA, 25 bp, Homo sapien
cgggaattccgtgtgctcgagtata

SEQ ID NO: 5422768 - DNA, 25 bp, Homo sapien
ttccgtgtgctcgagtatatggccg

SEQ ID NO: 5422769 - DNA, 25 bp, Homo sapien
agtatatggccgtgtctgcgagcgc

SEQ ID NO: 5422770 - DNA, 25 bp, Homo sapien
tctgcgagcgcgcaagaccagggtt

SEQ ID NO: 5422771 - DNA, 25 bp, Homo sapien
ctgcagacaaagggggaaggctagc

SEQ ID NO: 5422772 - DNA, 25 bp, Homo sapien
gggggaaggctagctctgcccccca

SEQ ID NO: 5422773 - DNA, 25 bp, Homo sapien
cagacaaagggggaaggctagctct

SEQ ID NO: 5422774 - DNA, 25 bp, Homo sapien
gaaggctagctctgccccccactgg

SEQ ID NO: 5422775 - DNA, 25 bp, Homo sapien
aaagccagcccggttaaggctgaga

SEQ ID NO: 5422776 - DNA, 25 bp, Homo sapien
caccagtgctggtggtccaaagcca

SEQ ID NO: 5422777 - DNA, 25 bp, Homo sapien
gctcttccttgacagctcacggacg

SEQ ID NO: 5422778 - DNA, 25 bp, Homo sapien
cacgctggccctatcctaaagagtt

SEQ ID NO: 5422779 - DNA, 25 bp, Homo sapien
gcagcctcccctgccaaacccccac

SEQ ID NO: 5422780 - DNA, 25 bp, Homo sapien
cttcctttcctggtgcccttttctg

SEQ ID NO: 5422781 - DNA, 25 bp, Homo sapien
ttcctttcctggtgcccttttctgc

SEQ ID NO: 5422782 - DNA, 25 bp, Homo sapien
tttctgcagcctcccctgccaaacc

SEQ ID NO: 5422783 - DNA, 25 bp, Homo sapien
cttctgcccctaggagagtgtttgg

SEQ ID NO: 5422784 - DNA, 25 bp, Homo sapien
gagtgtttggcttccgggattggga

SEQ ID NO: 5422785 - DNA, 25 bp, Homo sapien
aattctgcacggtctctctcttctg

SEQ ID NO: 5422786 - DNA, 25 bp, Homo sapien
tctcttctgcccctaggagagtgtt

SEQ ID NO: 5422787 - DNA, 25 bp, Homo sapien
tgggaaaagcccttcaacatgtaag

SEQ ID NO: 5422788 - DNA, 25 bp, Homo sapien
caagaaccggctgctactgagagtt

SEQ ID NO: 5422789 - DNA, 25 bp, Homo sapien
ggtcacgggtaccatatacaatagt

SEQ ID NO: 5422790 - DNA, 25 bp, Homo sapien
gactatgacgtccttcaagtgggaa

SEQ ID NO: 5422791 - DNA, 25 bp, Homo sapien
tcttggccgccagaaagagatccgt

SEQ ID NO: 5422792 - DNA, 25 bp, Homo sapien
gatgctcagcaaaagtcttggccgc

SEQ ID NO: 5422793 - DNA, 25 bp, Homo sapien
tcgaatcccgaagtagcaaagccaa

SEQ ID NO: 5422794 - DNA, 25 bp, Homo sapien
gagatccgtgggcttctgaccctgg

SEQ ID NO: 5422795 - DNA, 25 bp, Homo sapien
tagggaattcttttgctgcgctgcc

SEQ ID NO: 5422796 - DNA, 25 bp, Homo sapien
gcaggcgccggtcactttatataat

SEQ ID NO: 5422797 - DNA, 25 bp, Homo sapien
tgatttacgacgattgcagcgctag

SEQ ID NO: 5422798 - DNA, 25 bp, Homo sapien
tccactgctgaaaagtgccgggcct

SEQ ID NO: 5422799 - DNA, 25 bp, Homo sapien
ggtcgcagtcataaattttgctaca

SEQ ID NO: 5422800 - DNA, 25 bp, Homo sapien
cgaagcgtttactgccgccgtggtc

SEQ ID NO: 5422801 - DNA, 25 bp, Homo sapien
tactgccgccgtggtcgcagtcata

SEQ ID NO: 5422802 - DNA, 25 bp, Homo sapien
gccgtggtcgcagtcataaattttg

SEQ ID NO: 5422803 - DNA, 25 bp, Homo sapien
atatgcaccgtgagagctccagctg

SEQ ID NO: 5422804 - DNA, 25 bp, Homo sapien
gaagaaatgagaagccgtgctcgac

SEQ ID NO: 5422805 - DNA, 25 bp, Homo sapien
tccttccggcaggagaccgtttggc

SEQ ID NO: 5422806 - DNA, 25 bp, Homo sapien
aagggcgagccagacctatttggca

SEQ ID NO: 5422807 - DNA, 25 bp, Homo sapien
ttcccagcaccgcaagaaagggcga

SEQ ID NO: 5422808 - DNA, 25 bp, Homo sapien
gcagtggggcgccaagatctccatc

SEQ ID NO: 5422809 - DNA, 25 bp, Homo sapien
catccccatactttgctgggggttg

SEQ ID NO: 5422810 - DNA, 25 bp, Homo sapien
ccagctcctaagcaaggcaggctgg

SEQ ID NO: 5422811 - DNA, 25 bp, Homo sapien
caggctggagctatttcctcttcct

SEQ ID NO: 5422812 - DNA, 25 bp, Homo sapien
tgtagatttatccagccgagcttag

SEQ ID NO: 5422813 - DNA, 25 bp, Homo sapien
taggaattcgcttccaggccgtggg

SEQ ID NO: 5422814 - DNA, 25 bp, Homo sapien
gtaagtctgagacccatcagcggcg

SEQ ID NO: 5422815 - DNA, 25 bp, Homo sapien
tgggtgactcgccataaatcagccg

SEQ ID NO: 5422816 - DNA, 25 bp, Homo sapien
tttaaacggtgtctagcccggctga

SEQ ID NO: 5422817 - DNA, 25 bp, Homo sapien
cacagtgtgttaccgcaggagtatc

SEQ ID NO: 5422818 - DNA, 25 bp, Homo sapien
tacgtaatgtgtcatggctccaggc

SEQ ID NO: 5422819 - DNA, 25 bp, Homo sapien
catcatttggagacgcgtacctaag

SEQ ID NO: 5422820 - DNA, 25 bp, Homo sapien
gccatataaagggagctcggatccg

SEQ ID NO: 5422821 - DNA, 25 bp, Homo sapien
tgagacccaactgaactagccagga

SEQ ID NO: 5422822 - DNA, 25 bp, Homo sapien
gatgcagacagtgagagctttccct

SEQ ID NO: 5422823 - DNA, 25 bp, Homo sapien
caatagctgctctatcggctgcgga

SEQ ID NO: 5422824 - DNA, 25 bp, Homo sapien
tgcaaagacaatataagggcccatt

SEQ ID NO: 5422825 - DNA, 25 bp, Homo sapien
gaatatccaatcatttgcagtagta

SEQ ID NO: 5422826 - DNA, 25 bp, Homo sapien
tggcaagttggaaagtgcaaagaca

SEQ ID NO: 5422827 - DNA, 25 bp, Homo sapien
cattagggaagagccaagtcagacg

SEQ ID NO: 5422828 - DNA, 25 bp, Homo sapien
cttgttgggccaggaatgtccgtgg

SEQ ID NO: 5422829 - DNA, 25 bp, Homo sapien
aaggcctttttgatggctccattgt

SEQ ID NO: 5422830 - DNA, 25 bp, Homo sapien
ggccaggaatgtccgtggttggtga

SEQ ID NO: 5422831 - DNA, 25 bp, Homo sapien
caggaatgtccgtggttggtgagga

SEQ ID NO: 5422832 - DNA, 25 bp, Homo sapien
acaaataccatatccgtccccacct

SEQ ID NO: 5422833 - DNA, 25 bp, Homo sapien
aataccatatccgtccccacctcct

SEQ ID NO: 5422834 - DNA, 25 bp, Homo sapien
ctacaaataccatatccgtccccac

SEQ ID NO: 5422835 - DNA, 25 bp, Homo sapien
caaataccatatccgtccccacctc

SEQ ID NO: 5422836 - DNA, 25 bp, Homo sapien
ctgcaagggtcgagcggaagagtag

SEQ ID NO: 5422837 - DNA, 25 bp, Homo sapien
gcggaagagtaggtctggtgagctg

SEQ ID NO: 5422838 - DNA, 25 bp, Homo sapien
ctgagctctagggagctggtaccat

SEQ ID NO: 5422839 - DNA, 25 bp, Homo sapien
tctggtgagctgagctctagggagc

SEQ ID NO: 5422840 - DNA, 25 bp, Homo sapien
tgcggggaacaatagccgccgcctc

SEQ ID NO: 5422841 - DNA, 25 bp, Homo sapien
tccagagaacacacaaaggaagccc

SEQ ID NO: 5422842 - DNA, 25 bp, Homo sapien
gcgggctgacgtggaccccgtttca

SEQ ID NO: 5422843 - DNA, 25 bp, Homo sapien
cttagacctgaggacacgctcggga

SEQ ID NO: 5422844 - DNA, 25 bp, Homo sapien
ggtgtgcacttttcgctcgacagcg

SEQ ID NO: 5422845 - DNA, 25 bp, Homo sapien
tgggatccgaccagaaatcgcaagc

SEQ ID NO: 5422846 - DNA, 25 bp, Homo sapien
gacagcggttcctcctacttcagag

SEQ ID NO: 5422847 - DNA, 25 bp, Homo sapien
agagttcatcaatcacccggtgtgc

SEQ ID NO: 5422848 - DNA, 25 bp, Homo sapien
tgcgtgcccgagtgtcacccttaaa

SEQ ID NO: 5422849 - DNA, 25 bp, Homo sapien
cacccagagagggacgaatacacct

SEQ ID NO: 5422850 - DNA, 25 bp, Homo sapien
taaataccgctctacacccagagag

SEQ ID NO: 5422851 - DNA, 25 bp, Homo sapien
ccgagtgtcacccttaaataccgct

SEQ ID NO: 5422852 - DNA, 25 bp, Homo sapien
ccagtgtggaggaaacactccagta

SEQ ID NO: 5422853 - DNA, 25 bp, Homo sapien
tccagtgtggaggaaacactccagt

SEQ ID NO: 5422854 - DNA, 25 bp, Homo sapien
cagtgtggaggaaacactccagtat

SEQ ID NO: 5422855 - DNA, 25 bp, Homo sapien
gtgtggaggaaacactccagtattt

SEQ ID NO: 5422856 - DNA, 25 bp, Homo sapien
tgtctgagggtagtcactagcatta

SEQ ID NO: 5422857 - DNA, 25 bp, Homo sapien
gtgtctgagggtagtcactagcatt

SEQ ID NO: 5422858 - DNA, 25 bp, Homo sapien
ctgagggtagtcactagcattagag

SEQ ID NO: 5422859 - DNA, 25 bp, Homo sapien
tctgagggtagtcactagcattaga

SEQ ID NO: 5422860 - DNA, 25 bp, Homo sapien
tacaacaaaccctcatgatacacgt

SEQ ID NO: 5422861 - DNA, 25 bp, Homo sapien
aaacaatgccattactcaccctgac

SEQ ID NO: 5422862 - DNA, 25 bp, Homo sapien
gcaaaattaatcttgggatacctct

SEQ ID NO: 5422863 - DNA, 25 bp, Homo sapien
ggccctgatgctgatcaacctcaac

SEQ ID NO: 5422864 - DNA, 25 bp, Homo sapien
cagcccccggtcgcgacggctctcc

SEQ ID NO: 5422865 - DNA, 25 bp, Homo sapien
ccccggtcgcgacggctctcctcgg

SEQ ID NO: 5422866 - DNA, 25 bp, Homo sapien
ggtcgcgacggctctcctcggggct

SEQ ID NO: 5422867 - DNA, 25 bp, Homo sapien
gcccccggtcgcgacggctctcctc

SEQ ID NO: 5422868 - DNA, 25 bp, Homo sapien
ggcgacgtgctcagcttggcaccca

SEQ ID NO: 5422869 - DNA, 25 bp, Homo sapien
ggcccgtggctctgcagcccgcctt

SEQ ID NO: 5422870 - DNA, 25 bp, Homo sapien
gggtcggcggcgacgtgctcagctt

SEQ ID NO: 5422871 - DNA, 25 bp, Homo sapien
agcttggcacccaagttctgccgct

SEQ ID NO: 5422872 - DNA, 25 bp, Homo sapien
catcatcagactccttggattcttc

SEQ ID NO: 5422873 - DNA, 25 bp, Homo sapien
ttagtcaaaaagaccaaggcccatg

SEQ ID NO: 5422874 - DNA, 25 bp, Homo sapien
gtggagggggcaggacgtcctgctg

SEQ ID NO: 5422875 - DNA, 25 bp, Homo sapien
ggacgtcctgctggtgcagcaccag

SEQ ID NO: 5422876 - DNA, 25 bp, Homo sapien
tgcaggcgagcttggagacggaggc

SEQ ID NO: 5422877 - DNA, 25 bp, Homo sapien
cgtgactgtcacctcatcgtcgtgc

SEQ ID NO: 5422878 - DNA, 25 bp, Homo sapien
gactgtcacctcatcgtcgtgcaga

SEQ ID NO: 5422879 - DNA, 25 bp, Homo sapien
cctccgtgactgtcacctcatcgtc

SEQ ID NO: 5422880 - DNA, 25 bp, Homo sapien
ggcacgggcgagtgtagggcaggcg

SEQ ID NO: 5422881 - DNA, 25 bp, Homo sapien
ctagtcgcaggatgaagtgagggcc

SEQ ID NO: 5422882 - DNA, 25 bp, Homo sapien
tagtcgcaggatgaagtgagggcct

SEQ ID NO: 5422883 - DNA, 25 bp, Homo sapien
tcgcaggatgaagtgagggccttac

SEQ ID NO: 5422884 - DNA, 25 bp, Homo sapien
gtcgcaggatgaagtgagggcctta

SEQ ID NO: 5422885 - DNA, 25 bp, Homo sapien
tagcttcctcggaaggaccgagcag

SEQ ID NO: 5422886 - DNA, 25 bp, Homo sapien
cccaacgcggccttagcttcctcgg

SEQ ID NO: 5422887 - DNA, 25 bp, Homo sapien
gaaggaccgagcagcttggcggcag

SEQ ID NO: 5422888 - DNA, 25 bp, Homo sapien
ctcggaaggaccgagcagcttggcg

SEQ ID NO: 5422889 - DNA, 25 bp, Homo sapien
tctacatagtaagattttgttgaca

SEQ ID NO: 5422890 - DNA, 25 bp, Homo sapien
cggtttcttctacatagtaagattt

SEQ ID NO: 5422891 - DNA, 25 bp, Homo sapien
tcttctacatagtaagattttgttg

SEQ ID NO: 5422892 - DNA, 25 bp, Homo sapien
ggtcggtttcttctacatagtaaga

SEQ ID NO: 5422893 - DNA, 25 bp, Homo sapien
caaactgagaatgcttagccgctta

SEQ ID NO: 5422894 - DNA, 25 bp, Homo sapien
ttctgcaaactgagaatgcttagcc

SEQ ID NO: 5422895 - DNA, 25 bp, Homo sapien
tgagaatgcttagccgcttaattgt

SEQ ID NO: 5422896 - DNA, 25 bp, Homo sapien
gcttaattgtgccaggggatccttg

SEQ ID NO: 5422897 - DNA, 25 bp, Homo sapien
tgaggaagagcggtatccatgaacc

SEQ ID NO: 5422898 - DNA, 25 bp, Homo sapien
tttgttcatactgtaccccactcac

SEQ ID NO: 5422899 - DNA, 25 bp, Homo sapien
tggagagtctccagaggacatgtct

SEQ ID NO: 5422900 - DNA, 25 bp, Homo sapien
ggctttttgcaatagcagagcttaa

SEQ ID NO: 5422901 - DNA, 25 bp, Homo sapien
tagctttatagactttctgacgtga

SEQ ID NO: 5422902 - DNA, 25 bp, Homo sapien
tctgacgtgattaaaggtctttatc

SEQ ID NO: 5422903 - DNA, 25 bp, Homo sapien
tttatagactttctgacgtgattaa

SEQ ID NO: 5422904 - DNA, 25 bp, Homo sapien
gctttatagactttctgacgtgatt

SEQ ID NO: 5422905 - DNA, 25 bp, Homo sapien
ctagccaggcctggcggtaaccttg

SEQ ID NO: 5422906 - DNA, 25 bp, Homo sapien
agccaggcctggcggtaaccttggg

SEQ ID NO: 5422907 - DNA, 25 bp, Homo sapien
tagccaggcctggcggtaaccttgg

SEQ ID NO: 5422908 - DNA, 25 bp, Homo sapien
gggctaggctcgttaactgccgaga

SEQ ID NO: 5422909 - DNA, 25 bp, Homo sapien
gagagcctccgggtttgcggtggag

SEQ ID NO: 5422910 - DNA, 25 bp, Homo sapien
ggtggaggacgctgaggcccgtggg

SEQ ID NO: 5422911 - DNA, 25 bp, Homo sapien
tgggctttgcgagtctgaacgttgg

SEQ ID NO: 5422912 - DNA, 25 bp, Homo sapien
agtatatgtacagtacctggaacca

SEQ ID NO: 5422913 - DNA, 25 bp, Homo sapien
tgtcagcatttcaggtggtataata

SEQ ID NO: 5422914 - DNA, 25 bp, Homo sapien
tctataactagctgggaggagtgaa

SEQ ID NO: 5422915 - DNA, 25 bp, Homo sapien
aataataagtcagattctctgtggg

SEQ ID NO: 5422916 - DNA, 25 bp, Homo sapien
taatcttatctcaagtgccatctgt

SEQ ID NO: 5422917 - DNA, 25 bp, Homo sapien
cataaccatttgagaacatgacaca

SEQ ID NO: 5422918 - DNA, 25 bp, Homo sapien
tctgtgtctctaggatggtctttgt

SEQ ID NO: 5422919 - DNA, 25 bp, Homo sapien
tcttgacccttgttaacctctagaa

SEQ ID NO: 5422920 - DNA, 25 bp, Homo sapien
gacaaccctttgaaatacaggaaga

SEQ ID NO: 5422921 - DNA, 25 bp, Homo sapien
ttactgactttgtctgaccttggga

SEQ ID NO: 5422922 - DNA, 25 bp, Homo sapien
gatttcaactttgggcactcctagg

SEQ ID NO: 5422923 - DNA, 25 bp, Homo sapien
catatgaagacagttatagagctca

SEQ ID NO: 5422924 - DNA, 25 bp, Homo sapien
taattataagacctgcttgtttact

SEQ ID NO: 5422925 - DNA, 25 bp, Homo sapien
tgacgtcctgaagattgggccataa

SEQ ID NO: 5422926 - DNA, 25 bp, Homo sapien
ttggctttacatttagtttcactga

SEQ ID NO: 5422927 - DNA, 25 bp, Homo sapien
aaaggattcaagctaacagtggttc

SEQ ID NO: 5422928 - DNA, 25 bp, Homo sapien
gaagggttcggtcagattacagcaa

SEQ ID NO: 5422929 - DNA, 25 bp, Homo sapien
tatatccacatcgagttatcagcag

SEQ ID NO: 5422930 - DNA, 25 bp, Homo sapien
gcagaacttcttgaccctcccttaa

SEQ ID NO: 5422931 - DNA, 25 bp, Homo sapien
gctagaatctgacgtatcactttca

SEQ ID NO: 5422932 - DNA, 25 bp, Homo sapien
tacatcatctgccacacaggttggc

SEQ ID NO: 5422933 - DNA, 25 bp, Homo sapien
caccgtgtaagatgttggacaaatg

SEQ ID NO: 5422934 - DNA, 25 bp, Homo sapien
taatcacgggactgaggaaacacat

SEQ ID NO: 5422935 - DNA, 25 bp, Homo sapien
tggacaaatgatggccatatgcatg

SEQ ID NO: 5422936 - DNA, 25 bp, Homo sapien
tcttttctcatagcgtgtctttggt

SEQ ID NO: 5422937 - DNA, 25 bp, Homo sapien
ttttctcatagcgtgtctttggtga

SEQ ID NO: 5422938 - DNA, 25 bp, Homo sapien
tctcatagcgtgtctttggtgaaca

SEQ ID NO: 5422939 - DNA, 25 bp, Homo sapien
tcagtggcatgctactcttttctca

SEQ ID NO: 5422940 - DNA, 25 bp, Homo sapien
ggacaccagcattatctgtccccat

SEQ ID NO: 5422941 - DNA, 25 bp, Homo sapien
tctggacaccagcattatctgtccc

SEQ ID NO: 5422942 - DNA, 25 bp, Homo sapien
ctggcgttacttctctggacaccag

SEQ ID NO: 5422943 - DNA, 25 bp, Homo sapien
ctctggacaccagcattatctgtcc

SEQ ID NO: 5422944 - DNA, 25 bp, Homo sapien
tccaattcatccttctgatcattag

SEQ ID NO: 5422945 - DNA, 25 bp, Homo sapien
aattcatccttctgatcattaggta

SEQ ID NO: 5422946 - DNA, 25 bp, Homo sapien
ctagcttaggttcttttcttccaat

SEQ ID NO: 5422947 - DNA, 25 bp, Homo sapien
tcttccaattcatccttctgatcat

SEQ ID NO: 5422948 - DNA, 25 bp, Homo sapien
cttctgatcaggagttttcttaata

SEQ ID NO: 5422949 - DNA, 25 bp, Homo sapien
ctttgcatcagtttttaagcagtcc

SEQ ID NO: 5422950 - DNA, 25 bp, Homo sapien
gcagtccgagtcaatgcggaaacat

SEQ ID NO: 5422951 - DNA, 25 bp, Homo sapien
tcagtttttaagcagtccgagtcaa

SEQ ID NO: 5422952 - DNA, 25 bp, Homo sapien
tttttaagcagtccgagtcaatgcg

SEQ ID NO: 5422953 - DNA, 25 bp, Homo sapien
gctgtttgacatcttagtcctgtga

SEQ ID NO: 5422954 - DNA, 25 bp, Homo sapien
gcagcccttaggtatccatctttgg

SEQ ID NO: 5422955 - DNA, 25 bp, Homo sapien
cctgagcctcattgcagctgtttga

SEQ ID NO: 5422956 - DNA, 25 bp, Homo sapien
catctttggtttgcacctgagcctc

SEQ ID NO: 5422957 - DNA, 25 bp, Homo sapien
taattgcacagctacaggtggtagc

SEQ ID NO: 5422958 - DNA, 25 bp, Homo sapien
ggtggtagcacttgcttcgtttcca

SEQ ID NO: 5422959 - DNA, 25 bp, Homo sapien
caggtggtagcacttgcttcgtttc

SEQ ID NO: 5422960 - DNA, 25 bp, Homo sapien
aggttgtaattgcacagctacaggt

SEQ ID NO: 5422961 - DNA, 25 bp, Homo sapien
gttttcaaaacagctgtcttggtaa

SEQ ID NO: 5422962 - DNA, 25 bp, Homo sapien
aacagctgtcttggtaatatgtttt

SEQ ID NO: 5422963 - DNA, 25 bp, Homo sapien
gctgtcttggtaatatgttttactc

SEQ ID NO: 5422964 - DNA, 25 bp, Homo sapien
tcaaaacagctgtcttggtaatatg

SEQ ID NO: 5422965 - DNA, 25 bp, Homo sapien
ggtatttactgtggctctggtcatc

SEQ ID NO: 5422966 - DNA, 25 bp, Homo sapien
tttcaaaccacatgcctcgggcact

SEQ ID NO: 5422967 - DNA, 25 bp, Homo sapien
ctgtgtcatcgcacctttcaaacca

SEQ ID NO: 5422968 - DNA, 25 bp, Homo sapien
gaagacttctgtgtcatcgcacctt

SEQ ID NO: 5422969 - DNA, 25 bp, Homo sapien
accaaacaatgcagacagttctttc

SEQ ID NO: 5422970 - DNA, 25 bp, Homo sapien
ggcaacctgtatgggacagctggtc

SEQ ID NO: 5422971 - DNA, 25 bp, Homo sapien
caaacaatgcagacagttctttcac

SEQ ID NO: 5422972 - DNA, 25 bp, Homo sapien
tgggacagctggtcttctaaatatg

SEQ ID NO: 5422973 - DNA, 25 bp, Homo sapien
gacttgggaatataaggtagaagga

SEQ ID NO: 5422974 - DNA, 25 bp, Homo sapien
cgtattggtccctgttctgaactgt

SEQ ID NO: 5422975 - DNA, 25 bp, Homo sapien
gatttccgtgggatccgtattggtc

SEQ ID NO: 5422976 - DNA, 25 bp, Homo sapien
gggtccttgaatctttagagatttc

SEQ ID NO: 5422977 - DNA, 25 bp, Homo sapien
tgtctctcagcttagttgccaactg

SEQ ID NO: 5422978 - DNA, 25 bp, Homo sapien
tcctattaggccctttgagcctgtg

SEQ ID NO: 5422979 - DNA, 25 bp, Homo sapien
gccctttgagcctgtgccacatgct

SEQ ID NO: 5422980 - DNA, 25 bp, Homo sapien
gtctctcagcttagttgccaactgt

SEQ ID NO: 5422981 - DNA, 25 bp, Homo sapien
gaatccagggtgacccataaaagcc

SEQ ID NO: 5422982 - DNA, 25 bp, Homo sapien
agggtgacccataaaagcctttgtg

SEQ ID NO: 5422983 - DNA, 25 bp, Homo sapien
ccatgcagaatccagggtgacccat

SEQ ID NO: 5422984 - DNA, 25 bp, Homo sapien
cccataaaagcctttgtgttcacag

SEQ ID NO: 5422985 - DNA, 25 bp, Homo sapien
cagttgggtgtaggccacatttctt

SEQ ID NO: 5422986 - DNA, 25 bp, Homo sapien
ctgccctgcagtgtttactgggatc

SEQ ID NO: 5422987 - DNA, 25 bp, Homo sapien
gtgtttactgggatcggcagcctcc

SEQ ID NO: 5422988 - DNA, 25 bp, Homo sapien
cctgcagtgtttactgggatcggca

SEQ ID NO: 5422989 - DNA, 25 bp, Homo sapien
gctgctgttgctgctctgatagcca

SEQ ID NO: 5422990 - DNA, 25 bp, Homo sapien
ctgctgttgctgctctgatagccat

SEQ ID NO: 5422991 - DNA, 25 bp, Homo sapien
cttcccagtcggctgctgttgctgc

SEQ ID NO: 5422992 - DNA, 25 bp, Homo sapien
tcggctgctgttgctgctctgatag

SEQ ID NO: 5422993 - DNA, 25 bp, Homo sapien
gagtttcagtttgggctcgcatctg

SEQ ID NO: 5422994 - DNA, 25 bp, Homo sapien
aactgatgcttgcagttgagaggcc

SEQ ID NO: 5422995 - DNA, 25 bp, Homo sapien
gccatatctcagattagtagttatc

SEQ ID NO: 5422996 - DNA, 25 bp, Homo sapien
gattagtagttatcagcacctctcc

SEQ ID NO: 5422997 - DNA, 25 bp, Homo sapien
cctgcaggttcaaaatgagttcaag

SEQ ID NO: 5422998 - DNA, 25 bp, Homo sapien
tgcatgtttgcaagccccatggcct

SEQ ID NO: 5422999 - DNA, 25 bp, Homo sapien
agtgtgtggcaacaaggctctctcc

SEQ ID NO: 5423000 - DNA, 25 bp, Homo sapien
cagggcctcctgtagtgacttgcat

SEQ ID NO: 5423001 - DNA, 25 bp, Homo sapien
tctgagtggttaatgggagaggctg

SEQ ID NO: 5423002 - DNA, 25 bp, Homo sapien
ggtttgttcacatgaaagctacatt

SEQ ID NO: 5423003 - DNA, 25 bp, Homo sapien
gagaggctgtaaataccgaatcatt

SEQ ID NO: 5423004 - DNA, 25 bp, Homo sapien
tggggtttgttcacatgaaagctac

SEQ ID NO: 5423005 - DNA, 25 bp, Homo sapien
tatattcacggaattgtgagcccat

SEQ ID NO: 5423006 - DNA, 25 bp, Homo sapien
tcaagtccctctgtgctagacatct

SEQ ID NO: 5423007 - DNA, 25 bp, Homo sapien
gtgagcccatcacaacaatcaattt

SEQ ID NO: 5423008 - DNA, 25 bp, Homo sapien
gattcagcagtgttgtagcatgtat

SEQ ID NO: 5423009 - DNA, 25 bp, Homo sapien
tacaaagtgtagtgtgccgaggctg

SEQ ID NO: 5423010 - DNA, 25 bp, Homo sapien
cattgcacagttacgggaggcatca

SEQ ID NO: 5423011 - DNA, 25 bp, Homo sapien
tacgattgctaagaccctaggaaag

SEQ ID NO: 5423012 - DNA, 25 bp, Homo sapien
gtttttatggccatcgcatccccag

SEQ ID NO: 5423013 - DNA, 25 bp, Homo sapien
tgtaggaatgatttcacacaacagt

SEQ ID NO: 5423014 - DNA, 25 bp, Homo sapien
cactgcaaattcaccaaagggtgta

SEQ ID NO: 5423015 - DNA, 25 bp, Homo sapien
cttggtgatttacatgggtgcaggc

SEQ ID NO: 5423016 - DNA, 25 bp, Homo sapien
taatatatttctggtgtgggctgcc

SEQ ID NO: 5423017 - DNA, 25 bp, Homo sapien
tgctttgccactgacaatcaaccga

SEQ ID NO: 5423018 - DNA, 25 bp, Homo sapien
caatcaaccgacactgagagatgtc

SEQ ID NO: 5423019 - DNA, 25 bp, Homo sapien
ttttcagctgcaattgctacatgct

SEQ ID NO: 5423020 - DNA, 25 bp, Homo sapien
caatatgactgagaactgggaaggc

SEQ ID NO: 5423021 - DNA, 25 bp, Homo sapien
ttgcgaagatacaatatgttgattg

SEQ ID NO: 5423022 - DNA, 25 bp, Homo sapien
tacaatatgttgattgtacaacaaa

SEQ ID NO: 5423023 - DNA, 25 bp, Homo sapien
ctgctattgcgaagatacaatatgt

SEQ ID NO: 5423024 - DNA, 25 bp, Homo sapien
cgaagatacaatatgttgattgtac

SEQ ID NO: 5423025 - DNA, 25 bp, Homo sapien
tttcactttgccttgattctgttga

SEQ ID NO: 5423026 - DNA, 25 bp, Homo sapien
caatgtgagtttgcacttgtcaaaa

SEQ ID NO: 5423027 - DNA, 25 bp, Homo sapien
gtctctactcctgctatcttcaatg

SEQ ID NO: 5423028 - DNA, 25 bp, Homo sapien
atcaattcaaactccacttttccag

SEQ ID NO: 5423029 - DNA, 25 bp, Homo sapien
tgtagagttaagctcgtcaatacct

SEQ ID NO: 5423030 - DNA, 25 bp, Homo sapien
gagttaagctcgtcaatacctcttg

SEQ ID NO: 5423031 - DNA, 25 bp, Homo sapien
taagctcgtcaatacctcttgccct

SEQ ID NO: 5423032 - DNA, 25 bp, Homo sapien
ccaagatttgtagagttaagctcgt

SEQ ID NO: 5423033 - DNA, 25 bp, Homo sapien
gataccaacgcagccgttgcctggg

SEQ ID NO: 5423034 - DNA, 25 bp, Homo sapien
tctcccgaaggacgacctgtgtgtg

SEQ ID NO: 5423035 - DNA, 25 bp, Homo sapien
gtctctgtcgccattccctcggtgg

SEQ ID NO: 5423036 - DNA, 25 bp, Homo sapien
gacactctccgcaacctttgttttg

SEQ ID NO: 5423037 - DNA, 25 bp, Homo sapien
ccggcaacccccactacaatgcagc

SEQ ID NO: 5423038 - DNA, 25 bp, Homo sapien
acagcggcgcttctgtccacagcag

SEQ ID NO: 5423039 - DNA, 25 bp, Homo sapien
gatggccgggacacggcctgcccct

SEQ ID NO: 5423040 - DNA, 25 bp, Homo sapien
agcagcttccgccgatggccgggac

SEQ ID NO: 5423041 - DNA, 25 bp, Homo sapien
gggcgacacctgctctgatgctgca

SEQ ID NO: 5423042 - DNA, 25 bp, Homo sapien
cattctgtttgatgcggagaggcca

SEQ ID NO: 5423043 - DNA, 25 bp, Homo sapien
gccattcggctgtgattttgtagtc

SEQ ID NO: 5423044 - DNA, 25 bp, Homo sapien
gctgtaatagaaacggcttgcgtgg

SEQ ID NO: 5423045 - DNA, 25 bp, Homo sapien
taaggtattgtgaattagtgcagcc

SEQ ID NO: 5423046 - DNA, 25 bp, Homo sapien
agttgaaactttccaacacctcttg

SEQ ID NO: 5423047 - DNA, 25 bp, Homo sapien
accttgacattctgccatcagtagt

SEQ ID NO: 5423048 - DNA, 25 bp, Homo sapien
aattagtgcagccagttgaaacttt

SEQ ID NO: 5423049 - DNA, 25 bp, Homo sapien
gctgtgtggtcgcccctggtgatat

SEQ ID NO: 5423050 - DNA, 25 bp, Homo sapien
gaacaggagtattctccaggggcct

SEQ ID NO: 5423051 - DNA, 25 bp, Homo sapien
atatgggaagctggataggtatgtt

SEQ ID NO: 5423052 - DNA, 25 bp, Homo sapien
tggtatctatgaccaggacagtgct

SEQ ID NO: 5423053 - DNA, 25 bp, Homo sapien
tttagaattatgctcactaaatcac

SEQ ID NO: 5423054 - DNA, 25 bp, Homo sapien
cttctttagaattatgctcactaaa

SEQ ID NO: 5423055 - DNA, 25 bp, Homo sapien
tagaattatgctcactaaatcacac

SEQ ID NO: 5423056 - DNA, 25 bp, Homo sapien
tctttagaattatgctcactaaatc

SEQ ID NO: 5423057 - DNA, 25 bp, Homo sapien
tgtaggagctcctggttgtatctgc

SEQ ID NO: 5423058 - DNA, 25 bp, Homo sapien
taggagctcctggttgtatctgctg

SEQ ID NO: 5423059 - DNA, 25 bp, Homo sapien
tctgctgtcgggatgctgttgggca

SEQ ID NO: 5423060 - DNA, 25 bp, Homo sapien
gatgaacctgcctgtaggagctcct

SEQ ID NO: 5423061 - DNA, 25 bp, Homo sapien
caataattgtgctgagtactgctgc

SEQ ID NO: 5423062 - DNA, 25 bp, Homo sapien
aataattgtgctgagtactgctgct

SEQ ID NO: 5423063 - DNA, 25 bp, Homo sapien
ataattgtgctgagtactgctgctt

SEQ ID NO: 5423064 - DNA, 25 bp, Homo sapien
agcaataattgtgctgagtactgct

SEQ ID NO: 5423065 - DNA, 25 bp, Homo sapien
catatcctggtaagctatgctccca

SEQ ID NO: 5423066 - DNA, 25 bp, Homo sapien
ttctcgttataccttccagcattgg

SEQ ID NO: 5423067 - DNA, 25 bp, Homo sapien
ccaacttgcaggtgaccttggaaga

SEQ ID NO: 5423068 - DNA, 25 bp, Homo sapien
ggaacccataactaccatatcctgg

SEQ ID NO: 5423069 - DNA, 25 bp, Homo sapien
ctcagctatcttgggtgaagcccca

SEQ ID NO: 5423070 - DNA, 25 bp, Homo sapien
caacacccgatcaccaggaacataa

SEQ ID NO: 5423071 - DNA, 25 bp, Homo sapien
tgaacaaaggattcaatgaactctt

SEQ ID NO: 5423072 - DNA, 25 bp, Homo sapien
tcttaaagacctcatcagttctagg

SEQ ID NO: 5423073 - DNA, 25 bp, Homo sapien
ccttcggttgtccaagactccaggg

SEQ ID NO: 5423074 - DNA, 25 bp, Homo sapien
tgttactgcctggtggaagcaccaa

SEQ ID NO: 5423075 - DNA, 25 bp, Homo sapien
aagtaacctcttgtactctgatgcc

SEQ ID NO: 5423076 - DNA, 25 bp, Homo sapien
ctggagcttagctccccagagcttg

SEQ ID NO: 5423077 - DNA, 25 bp, Homo sapien
tagggagtaagaagccagcgtccac

SEQ ID NO: 5423078 - DNA, 25 bp, Homo sapien
gggagtaagaagccagcgtccacat

SEQ ID NO: 5423079 - DNA, 25 bp, Homo sapien
agggagtaagaagccagcgtccaca

SEQ ID NO: 5423080 - DNA, 25 bp, Homo sapien
ctagggagtaagaagccagcgtcca

SEQ ID NO: 5423081 - DNA, 25 bp, Homo sapien
gggaagaacccacagtatcctctaa

SEQ ID NO: 5423082 - DNA, 25 bp, Homo sapien
caaggatcatcatgagtggttttct

SEQ ID NO: 5423083 - DNA, 25 bp, Homo sapien
tgggacctcccttactttgctcaga

SEQ ID NO: 5423084 - DNA, 25 bp, Homo sapien
ccttactttgctcagagtagaaggg

SEQ ID NO: 5423085 - DNA, 25 bp, Homo sapien
gctgcagctgatatgcaagtgcgaa

SEQ ID NO: 5423086 - DNA, 25 bp, Homo sapien
ttgcaggatttccccaacttttgga

SEQ ID NO: 5423087 - DNA, 25 bp, Homo sapien
gagtgtagagagaatgttattccaa

SEQ ID NO: 5423088 - DNA, 25 bp, Homo sapien
tccaagaatcagatgccatgttcct

SEQ ID NO: 5423089 - DNA, 25 bp, Homo sapien
ctgctgtccctgatacattgtacat

SEQ ID NO: 5423090 - DNA, 25 bp, Homo sapien
ccctgctgtccctgatacattgtac

SEQ ID NO: 5423091 - DNA, 25 bp, Homo sapien
ttctcccctgctgtccctgatacat

SEQ ID NO: 5423092 - DNA, 25 bp, Homo sapien
tcccctgctgtccctgatacattgt

SEQ ID NO: 5423093 - DNA, 25 bp, Homo sapien
gaaacactgttgcaagccatgaatc

SEQ ID NO: 5423094 - DNA, 25 bp, Homo sapien
tgcagtcacacgatcccagtgaaga

SEQ ID NO: 5423095 - DNA, 25 bp, Homo sapien
catgaatcaataaaagtggccacga

SEQ ID NO: 5423096 - DNA, 25 bp, Homo sapien
caaacagttgctcgtgaaaccaggg

SEQ ID NO: 5423097 - DNA, 25 bp, Homo sapien
gtttgataaagtgatcatttaacat

SEQ ID NO: 5423098 - DNA, 25 bp, Homo sapien
tctctgtcatacattatctggtgga

SEQ ID NO: 5423099 - DNA, 25 bp, Homo sapien
cctcataaatagtctcattgggctt

SEQ ID NO: 5423100 - DNA, 25 bp, Homo sapien
tgttcatatcctccacaatttagac

SEQ ID NO: 5423101 - DNA, 25 bp, Homo sapien
aatttagactcataaggatgacagg

SEQ ID NO: 5423102 - DNA, 25 bp, Homo sapien
ttaggtgcctgcgatgaaggcccca

SEQ ID NO: 5423103 - DNA, 25 bp, Homo sapien
aggtgcctgcgatgaaggccccagc

SEQ ID NO: 5423104 - DNA, 25 bp, Homo sapien
taggtgcctgcgatgaaggccccag

SEQ ID NO: 5423105 - DNA, 25 bp, Homo sapien
gttccttgagtagggtctggctgct

SEQ ID NO: 5423106 - DNA, 25 bp, Homo sapien
agcatgttcacataggttttgttgg

SEQ ID NO: 5423107 - DNA, 25 bp, Homo sapien
ttcacataggttttgttggttgttc

SEQ ID NO: 5423108 - DNA, 25 bp, Homo sapien
tgttggttgttccttgagtagggtc

SEQ ID NO: 5423109 - DNA, 25 bp, Homo sapien
cattatcagagggagaggctatact

SEQ ID NO: 5423110 - DNA, 25 bp, Homo sapien
gagggagaggctatactttcagctt

SEQ ID NO: 5423111 - DNA, 25 bp, Homo sapien
cttggcattatcagagggagaggct

SEQ ID NO: 5423112 - DNA, 25 bp, Homo sapien
tatcagagggagaggctatactttc

SEQ ID NO: 5423113 - DNA, 25 bp, Homo sapien
tggcatcatcacaagatgcatctgg

SEQ ID NO: 5423114 - DNA, 25 bp, Homo sapien
ttatcattaccaggggtttgtggtg

SEQ ID NO: 5423115 - DNA, 25 bp, Homo sapien
gcatctggcagcagcgtttcttcat

SEQ ID NO: 5423116 - DNA, 25 bp, Homo sapien
cttttgataataagagaattagatc

SEQ ID NO: 5423117 - DNA, 25 bp, Homo sapien
aatcacactgggaaatggagaatcc

SEQ ID NO: 5423118 - DNA, 25 bp, Homo sapien
caaaatcacactgggaaatggagaa

SEQ ID NO: 5423119 - DNA, 25 bp, Homo sapien
aaatcacactgggaaatggagaatc

SEQ ID NO: 5423120 - DNA, 25 bp, Homo sapien
ttccaaaatcacactgggaaatgga

SEQ ID NO: 5423121 - DNA, 25 bp, Homo sapien
ctggtgcagaacctgtacagtccat

SEQ ID NO: 5423122 - DNA, 25 bp, Homo sapien
gctctgatgctctgcaaatctaaaa

SEQ ID NO: 5423123 - DNA, 25 bp, Homo sapien
gaacctgtacagtccattctatttt

SEQ ID NO: 5423124 - DNA, 25 bp, Homo sapien
aaatctaaaacacgtccaccagctg

SEQ ID NO: 5423125 - DNA, 25 bp, Homo sapien
gccagacaatagattcagactttat

SEQ ID NO: 5423126 - DNA, 25 bp, Homo sapien
ctgccagacaatagattcagacttt

SEQ ID NO: 5423127 - DNA, 25 bp, Homo sapien
cagacaatagattcagactttatac

SEQ ID NO: 5423128 - DNA, 25 bp, Homo sapien
caatagattcagactttatactcac

SEQ ID NO: 5423129 - DNA, 25 bp, Homo sapien
agagcctcgctttcccaacgtggag

SEQ ID NO: 5423130 - DNA, 25 bp, Homo sapien
caacgtggagtcattgacgtttttc

SEQ ID NO: 5423131 - DNA, 25 bp, Homo sapien
attgtggctcggcagtcagcaatct

SEQ ID NO: 5423132 - DNA, 25 bp, Homo sapien
cagcaatctgctagggtggtctgag

SEQ ID NO: 5423133 - DNA, 25 bp, Homo sapien
gccaaagctgtgtcttcatacttct

SEQ ID NO: 5423134 - DNA, 25 bp, Homo sapien
aaagctgtgtcttcatacttctctc

SEQ ID NO: 5423135 - DNA, 25 bp, Homo sapien
tgtgtcttcatacttctctctttcc

SEQ ID NO: 5423136 - DNA, 25 bp, Homo sapien
ttacggaaacactgccaaagctgtg

SEQ ID NO: 5423137 - DNA, 25 bp, Homo sapien
gagaggctgaagggtgattccccat

SEQ ID NO: 5423138 - DNA, 25 bp, Homo sapien
gcagaagccggccagccggcagaga

SEQ ID NO: 5423139 - DNA, 25 bp, Homo sapien
ccggcagagaggctgaagggtgatt

SEQ ID NO: 5423140 - DNA, 25 bp, Homo sapien
catgcagaagccggccagccggcag

SEQ ID NO: 5423141 - DNA, 25 bp, Homo sapien
tcttagctgccagtttgcttgcctg

SEQ ID NO: 5423142 - DNA, 25 bp, Homo sapien
caaaaaaggcttataacacagttag

SEQ ID NO: 5423143 - DNA, 25 bp, Homo sapien
cttctgggggagctgaatatatcct

SEQ ID NO: 5423144 - DNA, 25 bp, Homo sapien
gaatatatcctaactcagcaatttc

SEQ ID NO: 5423145 - DNA, 25 bp, Homo sapien
cttctgagtgctccaactcctcgta

SEQ ID NO: 5423146 - DNA, 25 bp, Homo sapien
cagcagttgcggtggagcagcgtgg

SEQ ID NO: 5423147 - DNA, 25 bp, Homo sapien
gagcagcgtggcctctccttctgag

SEQ ID NO: 5423148 - DNA, 25 bp, Homo sapien
gagtgctccaactcctcgtatttct

SEQ ID NO: 5423149 - DNA, 25 bp, Homo sapien
ctggggcagcaaagtaaaatccgac

SEQ ID NO: 5423150 - DNA, 25 bp, Homo sapien
cacaatgtgtcatcagcaacttcca

SEQ ID NO: 5423151 - DNA, 25 bp, Homo sapien
gtacaagctgcatccacaatgtgtc

SEQ ID NO: 5423152 - DNA, 25 bp, Homo sapien
ttgtacaagctgcatccacaatgtg

SEQ ID NO: 5423153 - DNA, 25 bp, Homo sapien
tgtgtcatcagcaacttccaatttt

SEQ ID NO: 5423154 - DNA, 25 bp, Homo sapien
cttccctctgcggtccctgccagct

SEQ ID NO: 5423155 - DNA, 25 bp, Homo sapien
tgacaactcaaggaagccaccatta

SEQ ID NO: 5423156 - DNA, 25 bp, Homo sapien
gcggccgaggcacagtaaattagtc

SEQ ID NO: 5423157 - DNA, 25 bp, Homo sapien
aatgtggaatattgatctgtgctgg

SEQ ID NO: 5423158 - DNA, 25 bp, Homo sapien
tctgtaaggtaaccaaaacttcaga

SEQ ID NO: 5423159 - DNA, 25 bp, Homo sapien
actgacaaaggccttcactagtgag

SEQ ID NO: 5423160 - DNA, 25 bp, Homo sapien
ggccttcactagtgagtggcgtgct

SEQ ID NO: 5423161 - DNA, 25 bp, Homo sapien
gctggccacattgtcaggaaggctt

SEQ ID NO: 5423162 - DNA, 25 bp, Homo sapien
caaacattttcctgcactgacaaag

SEQ ID NO: 5423163 - DNA, 25 bp, Homo sapien
tgtagacaatgtgcacgctggtttg

SEQ ID NO: 5423164 - DNA, 25 bp, Homo sapien
gctatttttatgaggttgtagacaa

SEQ ID NO: 5423165 - DNA, 25 bp, Homo sapien
gaagggttaacactcagttgtgctg

SEQ ID NO: 5423166 - DNA, 25 bp, Homo sapien
agttgtgctgttgttgtgcccttag

SEQ ID NO: 5423167 - DNA, 25 bp, Homo sapien
tgcaggggaactctctgctttagcc

SEQ ID NO: 5423168 - DNA, 25 bp, Homo sapien
tctttgtccgacaagctaatgcaat

SEQ ID NO: 5423169 - DNA, 25 bp, Homo sapien
gactgtcaaataaaatcctgcatgc

SEQ ID NO: 5423170 - DNA, 25 bp, Homo sapien
catgcaaacaaatgatggaatgcag

SEQ ID NO: 5423171 - DNA, 25 bp, Homo sapien
gctgttcttctaacaaaccccgcat

SEQ ID NO: 5423172 - DNA, 25 bp, Homo sapien
ttgagctgttcttctaacaaacccc

SEQ ID NO: 5423173 - DNA, 25 bp, Homo sapien
tgagctgttcttctaacaaaccccg

SEQ ID NO: 5423174 - DNA, 25 bp, Homo sapien
gagctgttcttctaacaaaccccgc

SEQ ID NO: 5423175 - DNA, 25 bp, Homo sapien
gtgatcccaggccatctcgggtatg

SEQ ID NO: 5423176 - DNA, 25 bp, Homo sapien
gcagaacttgatcttgaaggacaga

SEQ ID NO: 5423177 - DNA, 25 bp, Homo sapien
tgtgcagaacttgatcttgaaggac

SEQ ID NO: 5423178 - DNA, 25 bp, Homo sapien
catctcgggtatgcagctgtgcaga

SEQ ID NO: 5423179 - DNA, 25 bp, Homo sapien
tgcgtgcttaaaaccaagttgaacg

SEQ ID NO: 5423180 - DNA, 25 bp, Homo sapien
gaagcagaaatctactcgctgtgct

SEQ ID NO: 5423181 - DNA, 25 bp, Homo sapien
gaacgcattaaaagggcgaagaagc

SEQ ID NO: 5423182 - DNA, 25 bp, Homo sapien
gaccagggctaagtttctgacattt

SEQ ID NO: 5423183 - DNA, 25 bp, Homo sapien
acctgcagaagacttcctggattcc

SEQ ID NO: 5423184 - DNA, 25 bp, Homo sapien
caattcagtagccaaaggattgaac

SEQ ID NO: 5423185 - DNA, 25 bp, Homo sapien
tccacattccacaattcagtagcca

SEQ ID NO: 5423186 - DNA, 25 bp, Homo sapien
aaaggattgaactgatacctgcaga

SEQ ID NO: 5423187 - DNA, 25 bp, Homo sapien
ctggggcaaaactagagagctgcac

SEQ ID NO: 5423188 - DNA, 25 bp, Homo sapien
tggggcaaaactagagagctgcact

SEQ ID NO: 5423189 - DNA, 25 bp, Homo sapien
tctggggcaaaactagagagctgca

SEQ ID NO: 5423190 - DNA, 25 bp, Homo sapien
ctctggggcaaaactagagagctgc

SEQ ID NO: 5423191 - DNA, 25 bp, Homo sapien
tctagtatattcttgtggtgattcc

SEQ ID NO: 5423192 - DNA, 25 bp, Homo sapien
ccagttttcaaatcagacgtcagta

SEQ ID NO: 5423193 - DNA, 25 bp, Homo sapien
tgtaaaaagggttatgaatctctgg

SEQ ID NO: 5423194 - DNA, 25 bp, Homo sapien
tggaaacctgctgtactgtcggcag

SEQ ID NO: 5423195 - DNA, 25 bp, Homo sapien
gagacctggttgttattggccccca

SEQ ID NO: 5423196 - DNA, 25 bp, Homo sapien
ggcatcagtgggtaactgagtctcc

SEQ ID NO: 5423197 - DNA, 25 bp, Homo sapien
tccaggtcctgtgcgagctggagaa

SEQ ID NO: 5423198 - DNA, 25 bp, Homo sapien
cactctgagtcctagtgaggctgga

SEQ ID NO: 5423199 - DNA, 25 bp, Homo sapien
tgcagtctgtcaaaaacagcttctt

SEQ ID NO: 5423200 - DNA, 25 bp, Homo sapien
gcagtagtgtttcatgacatttgga

SEQ ID NO: 5423201 - DNA, 25 bp, Homo sapien
agctgaagtctctagccccttgcag

SEQ ID NO: 5423202 - DNA, 25 bp, Homo sapien
gatttacagtgttcaagctgaagtc

SEQ ID NO: 5423203 - DNA, 25 bp, Homo sapien
aagtggttgatgaattgcttttgca

SEQ ID NO: 5423204 - DNA, 25 bp, Homo sapien
aattacctcggtgaattctgaccac

SEQ ID NO: 5423205 - DNA, 25 bp, Homo sapien
cataaatgcgctttccctttgctag

SEQ ID NO: 5423206 - DNA, 25 bp, Homo sapien
taaagtatctaaattacctcggtga

SEQ ID NO: 5423207 - DNA, 25 bp, Homo sapien
cactgaaccctctcaagaagaaaaa

SEQ ID NO: 5423208 - DNA, 25 bp, Homo sapien
tataagcattgctgaggaaagccca

SEQ ID NO: 5423209 - DNA, 25 bp, Homo sapien
aaagcaaccactgaaccctctcaag

SEQ ID NO: 5423210 - DNA, 25 bp, Homo sapien
ttaaatgttgccagtaatataagca

SEQ ID NO: 5423211 - DNA, 25 bp, Homo sapien
tattgagacataatcacataaataa

SEQ ID NO: 5423212 - DNA, 25 bp, Homo sapien
tttaaaacatctttattgagacata

SEQ ID NO: 5423213 - DNA, 25 bp, Homo sapien
gagacataatcacataaataacata

SEQ ID NO: 5423214 - DNA, 25 bp, Homo sapien
acatctttattgagacataatcaca

SEQ ID NO: 5423215 - DNA, 25 bp, Homo sapien
gactctagtctggttgcaactacca

SEQ ID NO: 5423216 - DNA, 25 bp, Homo sapien
tcctgactgtgagtggtactgggcc

SEQ ID NO: 5423217 - DNA, 25 bp, Homo sapien
tgtgcctcaccagcccaagttagtg

SEQ ID NO: 5423218 - DNA, 25 bp, Homo sapien
gcaggttttgaccagtagctgtgcc

SEQ ID NO: 5423219 - DNA, 25 bp, Homo sapien
gggaaatgagccactaccatggaag

SEQ ID NO: 5423220 - DNA, 25 bp, Homo sapien
taatgggtgccatcttacagccggg

SEQ ID NO: 5423221 - DNA, 25 bp, Homo sapien
gaaaaactttgaggcaccagccctg

SEQ ID NO: 5423222 - DNA, 25 bp, Homo sapien
caggctgcgtaccttgtctgtggaa

SEQ ID NO: 5423223 - DNA, 25 bp, Homo sapien
tcatggtactaagaccttagggcca

SEQ ID NO: 5423224 - DNA, 25 bp, Homo sapien
tcataagtcctgtgctaaactgaga

SEQ ID NO: 5423225 - DNA, 25 bp, Homo sapien
cagtgggaagtcattacaagtctct

SEQ ID NO: 5423226 - DNA, 25 bp, Homo sapien
cagagatcattgctcccagtgggaa

SEQ ID NO: 5423227 - DNA, 25 bp, Homo sapien
ccaagggccacgttaattaaagcag

SEQ ID NO: 5423228 - DNA, 25 bp, Homo sapien
gacacataggaaatcgaatcgaccc

SEQ ID NO: 5423229 - DNA, 25 bp, Homo sapien
gatgtgcaaagataaggttacaccc

SEQ ID NO: 5423230 - DNA, 25 bp, Homo sapien
ttggctgtgaggcactctgaggact

SEQ ID NO: 5423231 - DNA, 25 bp, Homo sapien
cacaggatttcagtccaaactgagg

SEQ ID NO: 5423232 - DNA, 25 bp, Homo sapien
ggatttcagtccaaactgaggctca

SEQ ID NO: 5423233 - DNA, 25 bp, Homo sapien
gccacaggatttcagtccaaactga

SEQ ID NO: 5423234 - DNA, 25 bp, Homo sapien
caggatttcagtccaaactgaggct

SEQ ID NO: 5423235 - DNA, 25 bp, Homo sapien
catggatctcttgcttactatagta

SEQ ID NO: 5423236 - DNA, 25 bp, Homo sapien
tcacttccgtgcatggatctcttgc

SEQ ID NO: 5423237 - DNA, 25 bp, Homo sapien
cttgttctttcacttccgtgcatgg

SEQ ID NO: 5423238 - DNA, 25 bp, Homo sapien
ttactatagtaatgtgcataagcat

SEQ ID NO: 5423239 - DNA, 25 bp, Homo sapien
ccataaggccttgttgagagtgaca

SEQ ID NO: 5423240 - DNA, 25 bp, Homo sapien
tcagatgttacagtatgctcacaca

SEQ ID NO: 5423241 - DNA, 25 bp, Homo sapien
aacagtgtgctacctcttgactcca

SEQ ID NO: 5423242 - DNA, 25 bp, Homo sapien
ggttacacattgctgatctagatca

SEQ ID NO: 5423243 - DNA, 25 bp, Homo sapien
ccacaggccccaaaatgaattagca

SEQ ID NO: 5423244 - DNA, 25 bp, Homo sapien
tgaattagcaagtcagcaagtcctt

SEQ ID NO: 5423245 - DNA, 25 bp, Homo sapien
gacaatatagttgagactcggtctc

SEQ ID NO: 5423246 - DNA, 25 bp, Homo sapien
tctaggtccccatattcaaaagcgt

SEQ ID NO: 5423247 - DNA, 25 bp, Homo sapien
atattttattttcgaacaggcagat

SEQ ID NO: 5423248 - DNA, 25 bp, Homo sapien
tttattttcgaacaggcagattttc

SEQ ID NO: 5423249 - DNA, 25 bp, Homo sapien
tgtcttctaatacactgctcatttg

SEQ ID NO: 5423250 - DNA, 25 bp, Homo sapien
cattcttagaagcaattcagttgtc

SEQ ID NO: 5423251 - DNA, 25 bp, Homo sapien
caaccaggtgagtgtatggctccgg

SEQ ID NO: 5423252 - DNA, 25 bp, Homo sapien
tgagtgtatggctccgggcttttct

SEQ ID NO: 5423253 - DNA, 25 bp, Homo sapien
ctctttatggcttcaaccaggtgag

SEQ ID NO: 5423254 - DNA, 25 bp, Homo sapien
ggcttcaaccaggtgagtgtatggc

SEQ ID NO: 5423255 - DNA, 25 bp, Homo sapien
taaaaatgatgccacgaaatgtgcc

SEQ ID NO: 5423256 - DNA, 25 bp, Homo sapien
taactttcaggcaagatgtggctaa

SEQ ID NO: 5423257 - DNA, 25 bp, Homo sapien
cagcttaaaactttcgacatcccct

SEQ ID NO: 5423258 - DNA, 25 bp, Homo sapien
aatattgacccttcggacagcagcg

SEQ ID NO: 5423259 - DNA, 25 bp, Homo sapien
gggaggcaagactttggtgggagct

SEQ ID NO: 5423260 - DNA, 25 bp, Homo sapien
gaggcaagactttggtgggagctgc

SEQ ID NO: 5423261 - DNA, 25 bp, Homo sapien
tgctcgtcttcagcaaagcgagggc

SEQ ID NO: 5423262 - DNA, 25 bp, Homo sapien
gctgctcgtcttcagcaaagcgagg

SEQ ID NO: 5423263 - DNA, 25 bp, Homo sapien
gcaggctggcagttcgggtcatttc

SEQ ID NO: 5423264 - DNA, 25 bp, Homo sapien
cttggagaggaagtcggacttcttt

SEQ ID NO: 5423265 - DNA, 25 bp, Homo sapien
cattcccctcggagcagcttggaga

SEQ ID NO: 5423266 - DNA, 25 bp, Homo sapien
ttttccaggcggagcctccacgatg

SEQ ID NO: 5423267 - DNA, 25 bp, Homo sapien
tggagccgcgacgtccaaacccgga

SEQ ID NO: 5423268 - DNA, 25 bp, Homo sapien
gggccccggatgcgctgaactccgg

SEQ ID NO: 5423269 - DNA, 25 bp, Homo sapien
acctcggccccatgcgggcgggcca

SEQ ID NO: 5423270 - DNA, 25 bp, Homo sapien
tcgcgcgtcggccaggaacctcggc

SEQ ID NO: 5423271 - DNA, 25 bp, Homo sapien
cagagtttagcaccgccgcgggcag

SEQ ID NO: 5423272 - DNA, 25 bp, Homo sapien
tgaacccgcagcgaggcccgtggct

SEQ ID NO: 5423273 - DNA, 25 bp, Homo sapien
tggctcgcggccttcggagagcacc

SEQ ID NO: 5423274 - DNA, 25 bp, Homo sapien
ggacgccggccttgcccgatcctcg

SEQ ID NO: 5423275 - DNA, 25 bp, Homo sapien
ggtgttgagcggtgttgtttccaca

SEQ ID NO: 5423276 - DNA, 25 bp, Homo sapien
tttctaagtgtacttttgtggcatt

SEQ ID NO: 5423277 - DNA, 25 bp, Homo sapien
ctgccgatggtgactttggtgttga

SEQ ID NO: 5423278 - DNA, 25 bp, Homo sapien
atttaaactgccgatggtgactttg

SEQ ID NO: 5423279 - DNA, 25 bp, Homo sapien
tttctgtcttcagcttcatatttct

SEQ ID NO: 5423280 - DNA, 25 bp, Homo sapien
ctcctgaccctgaaagcaaggtggg

SEQ ID NO: 5423281 - DNA, 25 bp, Homo sapien
agcaaggtgggtggctttgttttat

SEQ ID NO: 5423282 - DNA, 25 bp, Homo sapien
aattaaattttctgtcttcagcttc

SEQ ID NO: 5423283 - DNA, 25 bp, Homo sapien
ggaacccaggcctattattcttgaa

SEQ ID NO: 5423284 - DNA, 25 bp, Homo sapien
gcctgagaccataaggaaagccttg

SEQ ID NO: 5423285 - DNA, 25 bp, Homo sapien
taaacgatggttacaggcactatgc

SEQ ID NO: 5423286 - DNA, 25 bp, Homo sapien
cccaaaagaggaagctaaggagcct

SEQ ID NO: 5423287 - DNA, 25 bp, Homo sapien
ttcttcatggtcagcatattttctg

SEQ ID NO: 5423288 - DNA, 25 bp, Homo sapien
cacttggactcgctgtttagatgca

SEQ ID NO: 5423289 - DNA, 25 bp, Homo sapien
caaagactggcatttggcactgggt

SEQ ID NO: 5423290 - DNA, 25 bp, Homo sapien
gccattgatgtgagagaccgagtta

SEQ ID NO: 5423291 - DNA, 25 bp, Homo sapien
gggtagttgtagcagcccgaccaga

SEQ ID NO: 5423292 - DNA, 25 bp, Homo sapien
ggaaggaacatgaagaggcagacac

SEQ ID NO: 5423293 - DNA, 25 bp, Homo sapien
aaggaacatgaagaggcagacacat

SEQ ID NO: 5423294 - DNA, 25 bp, Homo sapien
ctggaaggaacatgaagaggcagac

SEQ ID NO: 5423295 - DNA, 25 bp, Homo sapien
gaaggaacatgaagaggcagacaca

SEQ ID NO: 5423296 - DNA, 25 bp, Homo sapien
tcaggaggatgagggttgcttccag

SEQ ID NO: 5423297 - DNA, 25 bp, Homo sapien
gtgagctttagagggtagggagccg

SEQ ID NO: 5423298 - DNA, 25 bp, Homo sapien
gatgagggttgcttccagggtggag

SEQ ID NO: 5423299 - DNA, 25 bp, Homo sapien
ggtagggagccgtcaggaggatgag

SEQ ID NO: 5423300 - DNA, 25 bp, Homo sapien
caaacaggaccatgtacagggaggt

SEQ ID NO: 5423301 - DNA, 25 bp, Homo sapien
tgtcatttgaaacgtgcccttggtt

SEQ ID NO: 5423302 - DNA, 25 bp, Homo sapien
gctggagtgcccagaatcagagtga

SEQ ID NO: 5423303 - DNA, 25 bp, Homo sapien
gatcttaaacagtcctggtgtcgtg

SEQ ID NO: 5423304 - DNA, 25 bp, Homo sapien
tcttagaagtaaccctgccagcaaa

SEQ ID NO: 5423305 - DNA, 25 bp, Homo sapien
tacagactgcccatagtgcttacat

SEQ ID NO: 5423306 - DNA, 25 bp, Homo sapien
aactgagggattctgcagtatctgc

SEQ ID NO: 5423307 - DNA, 25 bp, Homo sapien
ggccacttaaagagattccaccgaa

SEQ ID NO: 5423308 - DNA, 25 bp, Homo sapien
gagcaccactgtcaccccgtgtcac

SEQ ID NO: 5423309 - DNA, 25 bp, Homo sapien
tcaggaatatggagcaccactgtca

SEQ ID NO: 5423310 - DNA, 25 bp, Homo sapien
ggagcaccactgtcaccccgtgtca

SEQ ID NO: 5423311 - DNA, 25 bp, Homo sapien
ggaatatggagcaccactgtcaccc

SEQ ID NO: 5423312 - DNA, 25 bp, Homo sapien
aagctttctccgacaacatgggacc

SEQ ID NO: 5423313 - DNA, 25 bp, Homo sapien
tgacaagctttctccgacaacatgg

SEQ ID NO: 5423314 - DNA, 25 bp, Homo sapien
ctttctccgacaacatgggacccat

SEQ ID NO: 5423315 - DNA, 25 bp, Homo sapien
aaatgacaagctttctccgacaaca

SEQ ID NO: 5423316 - DNA, 25 bp, Homo sapien
cagtcttaggtacatttcattttga

SEQ ID NO: 5423317 - DNA, 25 bp, Homo sapien
taggactgagataaattgctcctgg

SEQ ID NO: 5423318 - DNA, 25 bp, Homo sapien
tatagtagcaaacagtcttaggtac

SEQ ID NO: 5423319 - DNA, 25 bp, Homo sapien
ctgtaggactgagataaattgctcc

SEQ ID NO: 5423320 - DNA, 25 bp, Homo sapien
atccagattaacaatcacagcatct

SEQ ID NO: 5423321 - DNA, 25 bp, Homo sapien
ttcccgtttttcatccagattaaca

SEQ ID NO: 5423322 - DNA, 25 bp, Homo sapien
caaaataatcagcccagttttcccg

SEQ ID NO: 5423323 - DNA, 25 bp, Homo sapien
ttctcccaaagccatgtgggaggcg

SEQ ID NO: 5423324 - DNA, 25 bp, Homo sapien
gaatgtgtcctggtatcaaccagtg

SEQ ID NO: 5423325 - DNA, 25 bp, Homo sapien
tgcttactttgactcagtactgaga

SEQ ID NO: 5423326 - DNA, 25 bp, Homo sapien
tgagactctggtgtcacaaacgcag

SEQ ID NO: 5423327 - DNA, 25 bp, Homo sapien
tacttctgagttcacaggaagaccc

SEQ ID NO: 5423328 - DNA, 25 bp, Homo sapien
agactgctttttgctaaaggcaaag

SEQ ID NO: 5423329 - DNA, 25 bp, Homo sapien
gagagtggtggaatttcactgtgct

SEQ ID NO: 5423330 - DNA, 25 bp, Homo sapien
cactgtgctataggaattaggtgca

SEQ ID NO: 5423331 - DNA, 25 bp, Homo sapien
tggttttatgtctcccagactgctt

SEQ ID NO: 5423332 - DNA, 25 bp, Homo sapien
aatttgctcattctgattcttgtgg

SEQ ID NO: 5423333 - DNA, 25 bp, Homo sapien
gatacatatgcaactctacaatttg

SEQ ID NO: 5423334 - DNA, 25 bp, Homo sapien
tacaatttgctcattctgattcttg

SEQ ID NO: 5423335 - DNA, 25 bp, Homo sapien
ctgcgtaggatacatatgcaactct

SEQ ID NO: 5423336 - DNA, 25 bp, Homo sapien
cataaatcttaggattctggttatt

SEQ ID NO: 5423337 - DNA, 25 bp, Homo sapien
taaatcttaggattctggttattaa

SEQ ID NO: 5423338 - DNA, 25 bp, Homo sapien
ataaatcttaggattctggttatta

SEQ ID NO: 5423339 - DNA, 25 bp, Homo sapien
tgtgtttatcagctacgatgggatg

SEQ ID NO: 5423340 - DNA, 25 bp, Homo sapien
actttagcatcttcgtgattttcag

SEQ ID NO: 5423341 - DNA, 25 bp, Homo sapien
tccatgccgtctattagtggtaggc

SEQ ID NO: 5423342 - DNA, 25 bp, Homo sapien
cagataccctgaacgtacttccatg

SEQ ID NO: 5423343 - DNA, 25 bp, Homo sapien
agtccttcctaatcacagagctgtg

SEQ ID NO: 5423344 - DNA, 25 bp, Homo sapien
taggtgaggatgatgaaataataaa

SEQ ID NO: 5423345 - DNA, 25 bp, Homo sapien
taataaagcatttcccgtatgtgtt

SEQ ID NO: 5423346 - DNA, 25 bp, Homo sapien
tgtgtttttcattaggactgttttg

SEQ ID NO: 5423347 - DNA, 25 bp, Homo sapien
gagcaggcaggtaaaaggatttgca

SEQ ID NO: 5423348 - DNA, 25 bp, Homo sapien
gcaataactgtgcactacctctgag

SEQ ID NO: 5423349 - DNA, 25 bp, Homo sapien
tagaagctccgactttactggcacc

SEQ ID NO: 5423350 - DNA, 25 bp, Homo sapien
tctcggaaccctgatgtgcaataac

SEQ ID NO: 5423351 - DNA, 25 bp, Homo sapien
taacatggtgagtcggaaaaataca

SEQ ID NO: 5423352 - DNA, 25 bp, Homo sapien
catggtgagtcggaaaaatacaata

SEQ ID NO: 5423353 - DNA, 25 bp, Homo sapien
gatataacatggtgagtcggaaaaa

SEQ ID NO: 5423354 - DNA, 25 bp, Homo sapien
atagggatataacatggtgagtcgg

SEQ ID NO: 5423355 - DNA, 25 bp, Homo sapien
ctggcatctgttcttctagtggacc

SEQ ID NO: 5423356 - DNA, 25 bp, Homo sapien
tcttctagtggaccactcctcttgc

SEQ ID NO: 5423357 - DNA, 25 bp, Homo sapien
cttgcccctgcttgtaccatttagt

SEQ ID NO: 5423358 - DNA, 25 bp, Homo sapien
gcttgtaccatttagtccagttcag

SEQ ID NO: 5423359 - DNA, 25 bp, Homo sapien
ctggcttgcaacaaaggtttaacga

SEQ ID NO: 5423360 - DNA, 25 bp, Homo sapien
caaattcaggagtactatgatatcc

SEQ ID NO: 5423361 - DNA, 25 bp, Homo sapien
aaaaatgagtcttatcgtgtgctgc

SEQ ID NO: 5423362 - DNA, 25 bp, Homo sapien
gctacagtaggagcttatttatgcc

SEQ ID NO: 5423363 - DNA, 25 bp, Homo sapien
tcatctccatccaaagcgtcaaagg

SEQ ID NO: 5423364 - DNA, 25 bp, Homo sapien
tccaaagcgtcaaaggccaccctga

SEQ ID NO: 5423365 - DNA, 25 bp, Homo sapien
tcagttgggttgacaaagtcatctc

SEQ ID NO: 5423366 - DNA, 25 bp, Homo sapien
cagccccgcagtgctctcagttggg

SEQ ID NO: 5423367 - DNA, 25 bp, Homo sapien
agttcatctttagttggagggtata

SEQ ID NO: 5423368 - DNA, 25 bp, Homo sapien
tcatctttagttggagggtataatc

SEQ ID NO: 5423369 - DNA, 25 bp, Homo sapien
tctttagttggagggtataatctgg

SEQ ID NO: 5423370 - DNA, 25 bp, Homo sapien
ttagttggagggtataatctggtgc

SEQ ID NO: 5423371 - DNA, 25 bp, Homo sapien
ttccctatctgaggctacttggcta

SEQ ID NO: 5423372 - DNA, 25 bp, Homo sapien
tacttggctatgaaaacttgtcctc

SEQ ID NO: 5423373 - DNA, 25 bp, Homo sapien
aaaatgttgtgtggcaaccgggtat

SEQ ID NO: 5423374 - DNA, 25 bp, Homo sapien
cgggtataaacacaacagttggaat

SEQ ID NO: 5423375 - DNA, 25 bp, Homo sapien
ttccactcgtgctggtccgctggtt

SEQ ID NO: 5423376 - DNA, 25 bp, Homo sapien
gggatggcatttctttccactcgtg

SEQ ID NO: 5423377 - DNA, 25 bp, Homo sapien
actcgtgctggtccgctggttctaa

SEQ ID NO: 5423378 - DNA, 25 bp, Homo sapien
ggtccgctggttctaatagcaacct

SEQ ID NO: 5423379 - DNA, 25 bp, Homo sapien
agcacatgtgtctggttcaaggtca

SEQ ID NO: 5423380 - DNA, 25 bp, Homo sapien
agtaggaaggccaggtatcttcatt

SEQ ID NO: 5423381 - DNA, 25 bp, Homo sapien
tatgcagtattacatttgatcttca

SEQ ID NO: 5423382 - DNA, 25 bp, Homo sapien
caaaagaaccttgtgaagtaggaag

SEQ ID NO: 5423383 - DNA, 25 bp, Homo sapien
caaagggctgcgttttggtgtctaa

SEQ ID NO: 5423384 - DNA, 25 bp, Homo sapien
gctacagtaaaagcccactgggtct

SEQ ID NO: 5423385 - DNA, 25 bp, Homo sapien
aaagacgcatcttctagcaaagggc

SEQ ID NO: 5423386 - DNA, 25 bp, Homo sapien
tagatccgagggacatcaaagttgg

SEQ ID NO: 5423387 - DNA, 25 bp, Homo sapien
cagctatgcctccagttgctgaaga

SEQ ID NO: 5423388 - DNA, 25 bp, Homo sapien
cagcatgccagagtattaatagaca

SEQ ID NO: 5423389 - DNA, 25 bp, Homo sapien
cataattctgttccacgccatggtt

SEQ ID NO: 5423390 - DNA, 25 bp, Homo sapien
gcacttgcttccttcggccctggtg

SEQ ID NO: 5423391 - DNA, 25 bp, Homo sapien
gaagtgagactataatttgctacag

SEQ ID NO: 5423392 - DNA, 25 bp, Homo sapien
aatgtgccacttgttctctcagagc

SEQ ID NO: 5423393 - DNA, 25 bp, Homo sapien
gaagggcttccttgctactgataag

SEQ ID NO: 5423394 - DNA, 25 bp, Homo sapien
tctagacttcacagcggataccttg

SEQ ID NO: 5423395 - DNA, 25 bp, Homo sapien
tagttaacctgccttgtgtcgccaa

SEQ ID NO: 5423396 - DNA, 25 bp, Homo sapien
tcaccaaattgtgaagtaaggaaat

SEQ ID NO: 5423397 - DNA, 25 bp, Homo sapien
caccaaattgtgaagtaaggaaatg

SEQ ID NO: 5423398 - DNA, 25 bp, Homo sapien
gttcaccaaattgtgaagtaaggaa

SEQ ID NO: 5423399 - DNA, 25 bp, Homo sapien
tcagttcaccaaattgtgaagtaag

SEQ ID NO: 5423400 - DNA, 25 bp, Homo sapien
ttcctcttctctgtcttcggaaatg

SEQ ID NO: 5423401 - DNA, 25 bp, Homo sapien
cttctctgtcttcggaaatgtatag

SEQ ID NO: 5423402 - DNA, 25 bp, Homo sapien
cctcttctctgtcttcggaaatgta

SEQ ID NO: 5423403 - DNA, 25 bp, Homo sapien
tcttctctgtcttcggaaatgtata

SEQ ID NO: 5423404 - DNA, 25 bp, Homo sapien
ctgaatgtctaacctcttctcaggc

SEQ ID NO: 5423405 - DNA, 25 bp, Homo sapien
gagaagcctggctttgtggactgaa

SEQ ID NO: 5423406 - DNA, 25 bp, Homo sapien
gggaaggtcggagagaagcctggct

SEQ ID NO: 5423407 - DNA, 25 bp, Homo sapien
tgtggactgaatgtctaacctcttc

SEQ ID NO: 5423408 - DNA, 25 bp, Homo sapien
tggcctggcccactctcattgcagt

SEQ ID NO: 5423409 - DNA, 25 bp, Homo sapien
ttgccattccgagggggcctacaga

SEQ ID NO: 5423410 - DNA, 25 bp, Homo sapien
ctcgtcccatcactggcctggccca

SEQ ID NO: 5423411 - DNA, 25 bp, Homo sapien
tctcattgcagtcttttcattgcca

SEQ ID NO: 5423412 - DNA, 25 bp, Homo sapien
tattatttccaaactcgtcttttca

SEQ ID NO: 5423413 - DNA, 25 bp, Homo sapien
agaaaagctgcgtgcttctgagatt

SEQ ID NO: 5423414 - DNA, 25 bp, Homo sapien
gcacaagttgaggatggcatgctca

SEQ ID NO: 5423415 - DNA, 25 bp, Homo sapien
caaactcgtcttttcaagatcttgc

SEQ ID NO: 5423416 - DNA, 25 bp, Homo sapien
tgcagtagtgccataaaacgggatg

SEQ ID NO: 5423417 - DNA, 25 bp, Homo sapien
cagctgaatatagccactgcagtag

SEQ ID NO: 5423418 - DNA, 25 bp, Homo sapien
ccgaaagcctgcagtacagctgaat

SEQ ID NO: 5423419 - DNA, 25 bp, Homo sapien
taagaagtctgtctccaccgaaagc

SEQ ID NO: 5423420 - DNA, 25 bp, Homo sapien
cagattttatcacacactggaaagc

SEQ ID NO: 5423421 - DNA, 25 bp, Homo sapien
tctggtgaacagattttatcacaca

SEQ ID NO: 5423422 - DNA, 25 bp, Homo sapien
atctggtgaacagattttatcacac

SEQ ID NO: 5423423 - DNA, 25 bp, Homo sapien
attttatcacacactggaaagccat

SEQ ID NO: 5423424 - DNA, 25 bp, Homo sapien
agacgtgtgccctttactgcctgta

SEQ ID NO: 5423425 - DNA, 25 bp, Homo sapien
actgcctgtatggttttcagacaaa

SEQ ID NO: 5423426 - DNA, 25 bp, Homo sapien
tgtgcagcgtcctagctctcgagag

SEQ ID NO: 5423427 - DNA, 25 bp, Homo sapien
tccccgagtgccaggaagacgtgtg

SEQ ID NO: 5423428 - DNA, 25 bp, Homo sapien
gaatggcattggtagttttagggaa

SEQ ID NO: 5423429 - DNA, 25 bp, Homo sapien
gctgatgccagttggcatgtcacct

SEQ ID NO: 5423430 - DNA, 25 bp, Homo sapien
taatcagcactataagcagaagttg

SEQ ID NO: 5423431 - DNA, 25 bp, Homo sapien
ggagttcttggtatgaactgtacaa

SEQ ID NO: 5423432 - DNA, 25 bp, Homo sapien
tcagccacgtggagcaaacggagag

SEQ ID NO: 5423433 - DNA, 25 bp, Homo sapien
aatagtcccgggctgggatgatgat

SEQ ID NO: 5423434 - DNA, 25 bp, Homo sapien
tggagcaaacggagagcaaatagtc

SEQ ID NO: 5423435 - DNA, 25 bp, Homo sapien
agagcaaatagtcccgggctgggat

SEQ ID NO: 5423436 - DNA, 25 bp, Homo sapien
aatacccaagggtcctagtctacat

SEQ ID NO: 5423437 - DNA, 25 bp, Homo sapien
gggtcctagtctacattttggagta

SEQ ID NO: 5423438 - DNA, 25 bp, Homo sapien
tagtctacattttggagtaatgtgc

SEQ ID NO: 5423439 - DNA, 25 bp, Homo sapien
cccaagggtcctagtctacattttg

SEQ ID NO: 5423440 - DNA, 25 bp, Homo sapien
tgtgtccccagaccatgtcatcccc

SEQ ID NO: 5423441 - DNA, 25 bp, Homo sapien
tgtccccagaccatgtcatccccac

SEQ ID NO: 5423442 - DNA, 25 bp, Homo sapien
tccttgtgtccccagaccatgtcat

SEQ ID NO: 5423443 - DNA, 25 bp, Homo sapien
cttgtgtccccagaccatgtcatcc

SEQ ID NO: 5423444 - DNA, 25 bp, Homo sapien
agatatgagcttacatatcatcagc

SEQ ID NO: 5423445 - DNA, 25 bp, Homo sapien
gtgtctatgtttacccacgagctgc

SEQ ID NO: 5423446 - DNA, 25 bp, Homo sapien
cttggtggctttggtgtctatgttt

SEQ ID NO: 5423447 - DNA, 25 bp, Homo sapien
ttcctcagatatgagcttacatatc

SEQ ID NO: 5423448 - DNA, 25 bp, Homo sapien
ttaatgatcattatggagaacttcc

SEQ ID NO: 5423449 - DNA, 25 bp, Homo sapien
ttcaaatgaggttccagaagactgg

SEQ ID NO: 5423450 - DNA, 25 bp, Homo sapien
gagaacttccttagttcaaatgagg

SEQ ID NO: 5423451 - DNA, 25 bp, Homo sapien
tgtagcaccagtatttataatagcc

SEQ ID NO: 5423452 - DNA, 25 bp, Homo sapien
caggaagtagagtgtagtatctgac

SEQ ID NO: 5423453 - DNA, 25 bp, Homo sapien
aggaagtagagtgtagtatctgaca

SEQ ID NO: 5423454 - DNA, 25 bp, Homo sapien
acaggaagtagagtgtagtatctga

SEQ ID NO: 5423455 - DNA, 25 bp, Homo sapien
ggccagccaacagccctaggaccat

SEQ ID NO: 5423456 - DNA, 25 bp, Homo sapien
aggccagccaacagccctaggacca

SEQ ID NO: 5423457 - DNA, 25 bp, Homo sapien
caggccagccaacagccctaggacc

SEQ ID NO: 5423458 - DNA, 25 bp, Homo sapien
agttgcaacactatatttgggatcc

SEQ ID NO: 5423459 - DNA, 25 bp, Homo sapien
cactatatttgggatccttcttgct

SEQ ID NO: 5423460 - DNA, 25 bp, Homo sapien
aggtgaggagagttgcaacactata

SEQ ID NO: 5423461 - DNA, 25 bp, Homo sapien
ggagagttgcaacactatatttggg

SEQ ID NO: 5423462 - DNA, 25 bp, Homo sapien
ttagaggcatagatagcttccccac

SEQ ID NO: 5423463 - DNA, 25 bp, Homo sapien
tgatgctcagccacttcctaaaagc

SEQ ID NO: 5423464 - DNA, 25 bp, Homo sapien
tggccagtgctgtaaaatcgcataa

SEQ ID NO: 5423465 - DNA, 25 bp, Homo sapien
gatcctttagaggtataccatgcag

SEQ ID NO: 5423466 - DNA, 25 bp, Homo sapien
gttgcaaccattgccccagaatttc

SEQ ID NO: 5423467 - DNA, 25 bp, Homo sapien
atttcttgtcaatggtggtacacat

SEQ ID NO: 5423468 - DNA, 25 bp, Homo sapien
ccagaatttcttgtcaatggtggta

SEQ ID NO: 5423469 - DNA, 25 bp, Homo sapien
cattgccccagaatttcttgtcaat

SEQ ID NO: 5423470 - DNA, 25 bp, Homo sapien
ttgccataaacctgcctatcacaaa

SEQ ID NO: 5423471 - DNA, 25 bp, Homo sapien
ctgcctatcacaaactgtttccaca

SEQ ID NO: 5423472 - DNA, 25 bp, Homo sapien
actaaactgcctattgcttagctgt

SEQ ID NO: 5423473 - DNA, 25 bp, Homo sapien
aaactgcctattgcttagctgtttg

SEQ ID NO: 5423474 - DNA, 25 bp, Homo sapien
ggctttgaccactccagtctagggt

SEQ ID NO: 5423475 - DNA, 25 bp, Homo sapien
gagccacctccaatgtacaagcttc

SEQ ID NO: 5423476 - DNA, 25 bp, Homo sapien
gacctgctggcccattgtgtcctct

SEQ ID NO: 5423477 - DNA, 25 bp, Homo sapien
cagtctagggttgagacctgctggc

SEQ ID NO: 5423478 - DNA, 25 bp, Homo sapien
gtttccatggcctcttgtccctcgt

SEQ ID NO: 5423479 - DNA, 25 bp, Homo sapien
tccgtggacaagctggtgcttgact

SEQ ID NO: 5423480 - DNA, 25 bp, Homo sapien
tcaggttccgtggacaagctggtgc

SEQ ID NO: 5423481 - DNA, 25 bp, Homo sapien
tcttgtccctcgtcaggttccgtgg

SEQ ID NO: 5423482 - DNA, 25 bp, Homo sapien
agcacagtggatagtttcaatccca

SEQ ID NO: 5423483 - DNA, 25 bp, Homo sapien
tagtttcaatcccaggtgagcaggg

SEQ ID NO: 5423484 - DNA, 25 bp, Homo sapien
ctgcaagcacagtggatagtttcaa

SEQ ID NO: 5423485 - DNA, 25 bp, Homo sapien
caaccaactgactaaaatttcttct

SEQ ID NO: 5423486 - DNA, 25 bp, Homo sapien
gcctgagctggagacagagccacac

SEQ ID NO: 5423487 - DNA, 25 bp, Homo sapien
cctggagctttggtggaggcctggc

SEQ ID NO: 5423488 - DNA, 25 bp, Homo sapien
gagcctgagctggagacagagccac

SEQ ID NO: 5423489 - DNA, 25 bp, Homo sapien
gaggcctggccacatttgggagcct

SEQ ID NO: 5423490 - DNA, 25 bp, Homo sapien
tgcttggtttgagccctggtctttg

SEQ ID NO: 5423491 - DNA, 25 bp, Homo sapien
ctggtgcttggtttgagccctggtc

SEQ ID NO: 5423492 - DNA, 25 bp, Homo sapien
ggtgcttggtttgagccctggtctt

SEQ ID NO: 5423493 - DNA, 25 bp, Homo sapien
cttggtttgagccctggtctttgac

SEQ ID NO: 5423494 - DNA, 25 bp, Homo sapien
gaaacccttggtgatgcagggatga

SEQ ID NO: 5423495 - DNA, 25 bp, Homo sapien
gagtttgcacctaatgccctttggg

SEQ ID NO: 5423496 - DNA, 25 bp, Homo sapien
cagttgattcactcgtggccctgac

SEQ ID NO: 5423497 - DNA, 25 bp, Homo sapien
tggccctgacatcattgacctgcgt

SEQ ID NO: 5423498 - DNA, 25 bp, Homo sapien
catctttgacatagggttttcttga

SEQ ID NO: 5423499 - DNA, 25 bp, Homo sapien
tttacatctttgacatagggttttc

SEQ ID NO: 5423500 - DNA, 25 bp, Homo sapien
gatttacatctttgacatagggttt

SEQ ID NO: 5423501 - DNA, 25 bp, Homo sapien
tacatctttgacatagggttttctt

SEQ ID NO: 5423502 - DNA, 25 bp, Homo sapien
caaatgtggtgaattctagataaca

SEQ ID NO: 5423503 - DNA, 25 bp, Homo sapien
tcttgccaaggtctgtcgtcgaata

SEQ ID NO: 5423504 - DNA, 25 bp, Homo sapien
ctggctttgcgcacgacctcaaatg

SEQ ID NO: 5423505 - DNA, 25 bp, Homo sapien
ttgtcaagagcatctttgcagttct

SEQ ID NO: 5423506 - DNA, 25 bp, Homo sapien
taaattccgtgcacccacttctttg

SEQ ID NO: 5423507 - DNA, 25 bp, Homo sapien
tgtatgttattgtacttctttggca

SEQ ID NO: 5423508 - DNA, 25 bp, Homo sapien
tggcattcagtaaattccgtgcacc

SEQ ID NO: 5423509 - DNA, 25 bp, Homo sapien
tccgtgcacccacttctttgatgtg

SEQ ID NO: 5423510 - DNA, 25 bp, Homo sapien
tctggctgggctagcttttatcttg

SEQ ID NO: 5423511 - DNA, 25 bp, Homo sapien
gatttctgaagtcgagctggagccc

SEQ ID NO: 5423512 - DNA, 25 bp, Homo sapien
gtgctccctggaaccctgactggat

SEQ ID NO: 5423513 - DNA, 25 bp, Homo sapien
tctagagggaaggtgaaacttctcc

SEQ ID NO: 5423514 - DNA, 25 bp, Homo sapien
tgaggagcaagaggctggcatgaag

SEQ ID NO: 5423515 - DNA, 25 bp, Homo sapien
ctgaggagcaagaggctggcatgaa

SEQ ID NO: 5423516 - DNA, 25 bp, Homo sapien
gaggagcaagaggctggcatgaaga

SEQ ID NO: 5423517 - DNA, 25 bp, Homo sapien
aggagcaagaggctggcatgaagaa

SEQ ID NO: 5423518 - DNA, 25 bp, Homo sapien
ctacaggacaatgtattaggcgtat

SEQ ID NO: 5423519 - DNA, 25 bp, Homo sapien
ggtaaataactgcagccaataaaag

SEQ ID NO: 5423520 - DNA, 25 bp, Homo sapien
tgatagtgctggtttgaattttcac

SEQ ID NO: 5423521 - DNA, 25 bp, Homo sapien
tgtattaggcgtattcttaaaggta

SEQ ID NO: 5423522 - DNA, 25 bp, Homo sapien
aaatccacaggatatgcagctggga

SEQ ID NO: 5423523 - DNA, 25 bp, Homo sapien
tccagccaacagcccgtgtctcagg

SEQ ID NO: 5423524 - DNA, 25 bp, Homo sapien
tttgcttcttatgcaccttaaatcc

SEQ ID NO: 5423525 - DNA, 25 bp, Homo sapien
atatgcagctgggagcgagtgtcca

SEQ ID NO: 5423526 - DNA, 25 bp, Homo sapien
gaaaagtacatcatgctccagaggc

SEQ ID NO: 5423527 - DNA, 25 bp, Homo sapien
tgaggtgggagtggacatctccacc

SEQ ID NO: 5423528 - DNA, 25 bp, Homo sapien
gagtcaggaactccacggtaagtac

SEQ ID NO: 5423529 - DNA, 25 bp, Homo sapien
tgagatcccaatgtcagcgaaacgg

SEQ ID NO: 5423530 - DNA, 25 bp, Homo sapien
ttgcccaggaccacgtagtatagcc

SEQ ID NO: 5423531 - DNA, 25 bp, Homo sapien
ccatcttacggttcagaaaactgag

SEQ ID NO: 5423532 - DNA, 25 bp, Homo sapien
cactggcatcttgtcagggattgga

SEQ ID NO: 5423533 - DNA, 25 bp, Homo sapien
tactcttgctgtaaaatagcactgg

SEQ ID NO: 5423534 - DNA, 25 bp, Homo sapien
agtggtagattccaaaggtgatcaa

SEQ ID NO: 5423535 - DNA, 25 bp, Homo sapien
aaggtgatcaagatacaccccagcc

SEQ ID NO: 5423536 - DNA, 25 bp, Homo sapien
tgtgctccatgcagtggtagattcc

SEQ ID NO: 5423537 - DNA, 25 bp, Homo sapien
gattccaaaggtgatcaagatacac

SEQ ID NO: 5423538 - DNA, 25 bp, Homo sapien
tgccaattgatgactacactctcca

SEQ ID NO: 5423539 - DNA, 25 bp, Homo sapien
tcttaactgattctgccaattgatg

SEQ ID NO: 5423540 - DNA, 25 bp, Homo sapien
gactacactctccaatctggttcct

SEQ ID NO: 5423541 - DNA, 25 bp, Homo sapien
tctcccaaatgacgcacactgtgct

SEQ ID NO: 5423542 - DNA, 25 bp, Homo sapien
tcaaaacaagcctgtctcatttctg

SEQ ID NO: 5423543 - DNA, 25 bp, Homo sapien
atttctgaatactgaacggatgtac

SEQ ID NO: 5423544 - DNA, 25 bp, Homo sapien
ctcatttctgaatactgaacggatg

SEQ ID NO: 5423545 - DNA, 25 bp, Homo sapien
gtctcatttctgaatactgaacgga

SEQ ID NO: 5423546 - DNA, 25 bp, Homo sapien
ccataagctgctgatattgtagcaa

SEQ ID NO: 5423547 - DNA, 25 bp, Homo sapien
aaagaggtactatttggtgcccact

SEQ ID NO: 5423548 - DNA, 25 bp, Homo sapien
tctatcactgtcagcgagggaatga

SEQ ID NO: 5423549 - DNA, 25 bp, Homo sapien
cagcagccttaagccagtgccataa

SEQ ID NO: 5423550 - DNA, 25 bp, Homo sapien
tctctcccttctaatagcatctccc

SEQ ID NO: 5423551 - DNA, 25 bp, Homo sapien
ctctcccttctaatagcatctccca

SEQ ID NO: 5423552 - DNA, 25 bp, Homo sapien
tctcccttctaatagcatctcccat

SEQ ID NO: 5423553 - DNA, 25 bp, Homo sapien
tctctctcccttctaatagcatctc

SEQ ID NO: 5423554 - DNA, 25 bp, Homo sapien
agttcagagtgccaacattcctggg

SEQ ID NO: 5423555 - DNA, 25 bp, Homo sapien
tctaagttcagagtgccaacattcc

SEQ ID NO: 5423556 - DNA, 25 bp, Homo sapien
aaaatctaagttcagagtgccaaca

SEQ ID NO: 5423557 - DNA, 25 bp, Homo sapien
taagttcagagtgccaacattcctg

SEQ ID NO: 5423558 - DNA, 25 bp, Homo sapien
tagcttaggaagaattgcaaaaccg

SEQ ID NO: 5423559 - DNA, 25 bp, Homo sapien
tttaacccgttgatgcaaagtctgg

SEQ ID NO: 5423560 - DNA, 25 bp, Homo sapien
gatcactctgaagtctggctccaag

SEQ ID NO: 5423561 - DNA, 25 bp, Homo sapien
cagaagacacgaacactggagatgt

SEQ ID NO: 5423562 - DNA, 25 bp, Homo sapien
caccatatcgtctttgcacatccaa

SEQ ID NO: 5423563 - DNA, 25 bp, Homo sapien
tatcgtctttgcacatccaaagttt

SEQ ID NO: 5423564 - DNA, 25 bp, Homo sapien
ccatatcgtctttgcacatccaaag

SEQ ID NO: 5423565 - DNA, 25 bp, Homo sapien
catatcgtctttgcacatccaaagt

SEQ ID NO: 5423566 - DNA, 25 bp, Homo sapien
tttctaaacaagctgttgacctatt

SEQ ID NO: 5423567 - DNA, 25 bp, Homo sapien
gttgacctattttcaaatggagggc

SEQ ID NO: 5423568 - DNA, 25 bp, Homo sapien
tctgtcccctgaacaaaacatacac

SEQ ID NO: 5423569 - DNA, 25 bp, Homo sapien
gtccttcttgggagctctcatctta

SEQ ID NO: 5423570 - DNA, 25 bp, Homo sapien
gctttgtcatgaaacattacatcta

SEQ ID NO: 5423571 - DNA, 25 bp, Homo sapien
gatcatttatacaggatacattttg

SEQ ID NO: 5423572 - DNA, 25 bp, Homo sapien
ggtaccatcagcaaatgttaaaaca

SEQ ID NO: 5423573 - DNA, 25 bp, Homo sapien
ctgaaaaggcacataggaaagcagt

SEQ ID NO: 5423574 - DNA, 25 bp, Homo sapien
taccatgtcccaacgccgtaaagaa

SEQ ID NO: 5423575 - DNA, 25 bp, Homo sapien
agatgggagtataatagttactggg

SEQ ID NO: 5423576 - DNA, 25 bp, Homo sapien
gtaccatgtcccaacgccgtaaaga

SEQ ID NO: 5423577 - DNA, 25 bp, Homo sapien
aatcaaagatgggagtataatagtt

SEQ ID NO: 5423578 - DNA, 25 bp, Homo sapien
gcagagactgcgtctgccagatcca

SEQ ID NO: 5423579 - DNA, 25 bp, Homo sapien
catgttaaaagtgtgccaatatgct

SEQ ID NO: 5423580 - DNA, 25 bp, Homo sapien
ccacagtgaatgattctccttgctg

SEQ ID NO: 5423581 - DNA, 25 bp, Homo sapien
cttgctgtttccatactccagccat

SEQ ID NO: 5423582 - DNA, 25 bp, Homo sapien
ctctgggcacccagtaatggctgat

SEQ ID NO: 5423583 - DNA, 25 bp, Homo sapien
gcacccagtaatggctgattccttc

SEQ ID NO: 5423584 - DNA, 25 bp, Homo sapien
tctgggcacccagtaatggctgatt

SEQ ID NO: 5423585 - DNA, 25 bp, Homo sapien
tgggcacccagtaatggctgattcc

SEQ ID NO: 5423586 - DNA, 25 bp, Homo sapien
cgtgacatccttaagacaatcaagt

SEQ ID NO: 5423587 - DNA, 25 bp, Homo sapien
gaatccagacatataaggttcataa

SEQ ID NO: 5423588 - DNA, 25 bp, Homo sapien
tgcactcccgctttgttcctgtacg

SEQ ID NO: 5423589 - DNA, 25 bp, Homo sapien
tgacattaacaaaattgcactcccg

SEQ ID NO: 5423590 - DNA, 25 bp, Homo sapien
cacaggggacatgctaatcttctct

SEQ ID NO: 5423591 - DNA, 25 bp, Homo sapien
cttcacgaattccatgtcattcttg

SEQ ID NO: 5423592 - DNA, 25 bp, Homo sapien
tagtatatgtgctgctgaagcaagc

SEQ ID NO: 5423593 - DNA, 25 bp, Homo sapien
gtattattccaattttagtatatgt

SEQ ID NO: 5423594 - DNA, 25 bp, Homo sapien
cagtgtcagataactagccattaac

SEQ ID NO: 5423595 - DNA, 25 bp, Homo sapien
tcatgctttcctaccaccagaaggc

SEQ ID NO: 5423596 - DNA, 25 bp, Homo sapien
ttatgactcatcagtcaacacccag

SEQ ID NO: 5423597 - DNA, 25 bp, Homo sapien
tgaaagaaatggtggccacatgttg

SEQ ID NO: 5423598 - DNA, 25 bp, Homo sapien
cacctcctgactgcatgtcgtgcaa

SEQ ID NO: 5423599 - DNA, 25 bp, Homo sapien
tgactgcatgtcgtgcaaaagggcc

SEQ ID NO: 5423600 - DNA, 25 bp, Homo sapien
gcaaaagggccaaacagatgtgtaa

SEQ ID NO: 5423601 - DNA, 25 bp, Homo sapien
ctgtattcgttacacctcctgactg

SEQ ID NO: 5423602 - DNA, 25 bp, Homo sapien
caataaatgagtggggccagagcca

SEQ ID NO: 5423603 - DNA, 25 bp, Homo sapien
cagctgaccaataaatgagtggggc

SEQ ID NO: 5423604 - DNA, 25 bp, Homo sapien
accaataaatgagtggggccagagc

SEQ ID NO: 5423605 - DNA, 25 bp, Homo sapien
gctgaccaataaatgagtggggcca

SEQ ID NO: 5423606 - DNA, 25 bp, Homo sapien
aaattgtaacatctgagcaagccgc

SEQ ID NO: 5423607 - DNA, 25 bp, Homo sapien
cctaaattgtaacatctgagcaagc

SEQ ID NO: 5423608 - DNA, 25 bp, Homo sapien
tcagcaccacatacacctaaattgt

SEQ ID NO: 5423609 - DNA, 25 bp, Homo sapien
cttgaggggtcacagttagatcagc

SEQ ID NO: 5423610 - DNA, 25 bp, Homo sapien
tgaggttaacgggtctgaaagcaga

SEQ ID NO: 5423611 - DNA, 25 bp, Homo sapien
gagaaaatgggttggcgttactgag

SEQ ID NO: 5423612 - DNA, 25 bp, Homo sapien
gcgttactgaggttaacgggtctga

SEQ ID NO: 5423613 - DNA, 25 bp, Homo sapien
ttaacgggtctgaaagcagacagca

SEQ ID NO: 5423614 - DNA, 25 bp, Homo sapien
catggtaatttattctctagccata

SEQ ID NO: 5423615 - DNA, 25 bp, Homo sapien
cacatggtaatttattctctagcca

SEQ ID NO: 5423616 - DNA, 25 bp, Homo sapien
acatggtaatttattctctagccat

SEQ ID NO: 5423617 - DNA, 25 bp, Homo sapien
aagaaaggcagccaaatgctgttag

SEQ ID NO: 5423618 - DNA, 25 bp, Homo sapien
gattaacatgatcaggaacacaggc

SEQ ID NO: 5423619 - DNA, 25 bp, Homo sapien
tgcagattaacatgatcaggaacac

SEQ ID NO: 5423620 - DNA, 25 bp, Homo sapien
ttccaccagacttggatgcacggag

SEQ ID NO: 5423621 - DNA, 25 bp, Homo sapien
ttggatgcacggagtctttgatctg

SEQ ID NO: 5423622 - DNA, 25 bp, Homo sapien
tgattaacctttcgctgactctgag

SEQ ID NO: 5423623 - DNA, 25 bp, Homo sapien
gcgcagtgagccttcttagagtgat

SEQ ID NO: 5423624 - DNA, 25 bp, Homo sapien
cctctggcgcaatgataaattgaca

SEQ ID NO: 5423625 - DNA, 25 bp, Homo sapien
tgactctgagccacgtgatgcgcag

SEQ ID NO: 5423626 - DNA, 25 bp, Homo sapien
cccattgaggggacccgttcagtga

SEQ ID NO: 5423627 - DNA, 25 bp, Homo sapien
tcagtgagctgatatttggtcccta

SEQ ID NO: 5423628 - DNA, 25 bp, Homo sapien
aaatcgtgtgatgataatgccccag

SEQ ID NO: 5423629 - DNA, 25 bp, Homo sapien
gtgtgatgataatgccccagcctgc

SEQ ID NO: 5423630 - DNA, 25 bp, Homo sapien
gaaatctgaagacaacccactgcag

SEQ ID NO: 5423631 - DNA, 25 bp, Homo sapien
ctgatgtcaagctcagggggcatct

SEQ ID NO: 5423632 - DNA, 25 bp, Homo sapien
ctccctactgatgtcaagctcaggg

SEQ ID NO: 5423633 - DNA, 25 bp, Homo sapien
aatctgaagacaacccactgcagaa

SEQ ID NO: 5423634 - DNA, 25 bp, Homo sapien
ctccagtagcattggccgaaatttt

SEQ ID NO: 5423635 - DNA, 25 bp, Homo sapien
cacaagcccaatattaattggaccc

SEQ ID NO: 5423636 - DNA, 25 bp, Homo sapien
tctcagctcgaatcagactctccag

SEQ ID NO: 5423637 - DNA, 25 bp, Homo sapien
tccacaagtccaatcacaagcccaa

SEQ ID NO: 5423638 - DNA, 25 bp, Homo sapien
ctccacagcacaagttggctgacac

SEQ ID NO: 5423639 - DNA, 25 bp, Homo sapien
acagcacaagttggctgacacactg

SEQ ID NO: 5423640 - DNA, 25 bp, Homo sapien
gctgtcctcctagttcctcagatgg

SEQ ID NO: 5423641 - DNA, 25 bp, Homo sapien
ctcctagttcctcagatgggcccat

SEQ ID NO: 5423642 - DNA, 25 bp, Homo sapien
tttggcactgaggatcccaagccaa

SEQ ID NO: 5423643 - DNA, 25 bp, Homo sapien
atgccttgatgacatccctaatctt

SEQ ID NO: 5423644 - DNA, 25 bp, Homo sapien
ccaatactgctaagctgaaagacac

SEQ ID NO: 5423645 - DNA, 25 bp, Homo sapien
caccaagtatgtccacaaatgcctt

SEQ ID NO: 5423646 - DNA, 25 bp, Homo sapien
cattgttaatgatttgaggggagta

SEQ ID NO: 5423647 - DNA, 25 bp, Homo sapien
tggcattgttaatgatttgagggga

SEQ ID NO: 5423648 - DNA, 25 bp, Homo sapien
gatttgaggggagtaaatcacagtc

SEQ ID NO: 5423649 - DNA, 25 bp, Homo sapien
gaggggagtaaatcacagtcaagat

SEQ ID NO: 5423650 - DNA, 25 bp, Homo sapien
cattctgaactttttacctattatt

SEQ ID NO: 5423651 - DNA, 25 bp, Homo sapien
tctttcataatttcccataaaggaa

SEQ ID NO: 5423652 - DNA, 25 bp, Homo sapien
tctcccattctgaactttttaccta

SEQ ID NO: 5423653 - DNA, 25 bp, Homo sapien
cattcagcattctgtttattctttc

SEQ ID NO: 5423654 - DNA, 25 bp, Homo sapien
tggacagtaccacgcaaagatcacc

SEQ ID NO: 5423655 - DNA, 25 bp, Homo sapien
aacaccttctgttcattacttggca

SEQ ID NO: 5423656 - DNA, 25 bp, Homo sapien
taagctcctgtaacatagaaattcc

SEQ ID NO: 5423657 - DNA, 25 bp, Homo sapien
gaggagccgtctctcccaactgtga

SEQ ID NO: 5423658 - DNA, 25 bp, Homo sapien
gaagaatccaagtagctctctatga

SEQ ID NO: 5423659 - DNA, 25 bp, Homo sapien
ggtccacactggatgctatggaaac

SEQ ID NO: 5423660 - DNA, 25 bp, Homo sapien
tggaagaagctggtctcgaagaatc

SEQ ID NO: 5423661 - DNA, 25 bp, Homo sapien
tcagtgtgtacaatcccgacgaagt

SEQ ID NO: 5423662 - DNA, 25 bp, Homo sapien
atggagttgggagaccaaacggtca

SEQ ID NO: 5423663 - DNA, 25 bp, Homo sapien
tgtactcacatggtcattttgggct

SEQ ID NO: 5423664 - DNA, 25 bp, Homo sapien
gatggagatcgagtggcctaccctc

SEQ ID NO: 5423665 - DNA, 25 bp, Homo sapien
tgggagaccaaacggtcatactggg

SEQ ID NO: 5423666 - DNA, 25 bp, Homo sapien
ccttaggcctaaagcactgtttgct

SEQ ID NO: 5423667 - DNA, 25 bp, Homo sapien
gcactgtgatatgaccaagcctcaa

SEQ ID NO: 5423668 - DNA, 25 bp, Homo sapien
tcagtagacaggctttggaagcaag

SEQ ID NO: 5423669 - DNA, 25 bp, Homo sapien
tccatggtcaatttcacaggccaaa

SEQ ID NO: 5423670 - DNA, 25 bp, Homo sapien
atgctgctaagtgcaatagcttcat

SEQ ID NO: 5423671 - DNA, 25 bp, Homo sapien
aaatgctgctaagtgcaatagcttc

SEQ ID NO: 5423672 - DNA, 25 bp, Homo sapien
aatgctgctaagtgcaatagcttca

SEQ ID NO: 5423673 - DNA, 25 bp, Homo sapien
gagattctgcatcattaggaaaaca

SEQ ID NO: 5423674 - DNA, 25 bp, Homo sapien
cttgactgctgaaggtaatagggac

SEQ ID NO: 5423675 - DNA, 25 bp, Homo sapien
tatcctgtttcctgaacttaacgag

SEQ ID NO: 5423676 - DNA, 25 bp, Homo sapien
aacattgtgtttcaccttgtcttgc

SEQ ID NO: 5423677 - DNA, 25 bp, Homo sapien
ggctcactgtggctgatgcctccca

SEQ ID NO: 5423678 - DNA, 25 bp, Homo sapien
atcttggctcactgtggctgatgcc

SEQ ID NO: 5423679 - DNA, 25 bp, Homo sapien
ttggctcactgtggctgatgcctcc

SEQ ID NO: 5423680 - DNA, 25 bp, Homo sapien
ggctcagtcctcccacctcagactc

SEQ ID NO: 5423681 - DNA, 25 bp, Homo sapien
cttccttggactctaagatgttgac

SEQ ID NO: 5423682 - DNA, 25 bp, Homo sapien
agcagtcagtctgcctcaagtccgt

SEQ ID NO: 5423683 - DNA, 25 bp, Homo sapien
cttagcataatacccagcaggaatg

SEQ ID NO: 5423684 - DNA, 25 bp, Homo sapien
tgttggctggtgacatgccctcctc

SEQ ID NO: 5423685 - DNA, 25 bp, Homo sapien
aagtgagtccaaattggcagaatgg

SEQ ID NO: 5423686 - DNA, 25 bp, Homo sapien
tcagacgcgagaaggttccaaaagg

SEQ ID NO: 5423687 - DNA, 25 bp, Homo sapien
taaggactagctttgccaattaatt

SEQ ID NO: 5423688 - DNA, 25 bp, Homo sapien
ggcagaatggcttgacaataaggac

SEQ ID NO: 5423689 - DNA, 25 bp, Homo sapien
tgtgatcagtgcaaatacaaggtga

SEQ ID NO: 5423690 - DNA, 25 bp, Homo sapien
ggttcagctgctcctaaagaataca

SEQ ID NO: 5423691 - DNA, 25 bp, Homo sapien
gacagtctgtctatcaccagctcag

SEQ ID NO: 5423692 - DNA, 25 bp, Homo sapien
ttcagatgcaattgttaggttcagc

SEQ ID NO: 5423693 - DNA, 25 bp, Homo sapien
taacaacagccccagatttacgtac

SEQ ID NO: 5423694 - DNA, 25 bp, Homo sapien
cagccccagatttacgtacaacacg

SEQ ID NO: 5423695 - DNA, 25 bp, Homo sapien
gatttacgtacaacacgtggatttc

SEQ ID NO: 5423696 - DNA, 25 bp, Homo sapien
cgtacaacacgtggatttctagatc

SEQ ID NO: 5423697 - DNA, 25 bp, Homo sapien
tgtaagctgagtttccccagtcctc

SEQ ID NO: 5423698 - DNA, 25 bp, Homo sapien
tctagttgtaccgaaaatcttctgg

SEQ ID NO: 5423699 - DNA, 25 bp, Homo sapien
gcatgatgatatacactgggtgctc

SEQ ID NO: 5423700 - DNA, 25 bp, Homo sapien
gtacaaatatggctgtaagctgagt

SEQ ID NO: 5423701 - DNA, 25 bp, Homo sapien
ggttctcaatctggaatgttacttt

SEQ ID NO: 5423702 - DNA, 25 bp, Homo sapien
caatctggaatgttactttcttgcc

SEQ ID NO: 5423703 - DNA, 25 bp, Homo sapien
ttctcaatctggaatgttactttct

SEQ ID NO: 5423704 - DNA, 25 bp, Homo sapien
ctcaatctggaatgttactttcttg

SEQ ID NO: 5423705 - DNA, 25 bp, Homo sapien
tctttgggcatcacttggtcctgtc

SEQ ID NO: 5423706 - DNA, 25 bp, Homo sapien
tcatgtaatcgtccccattttagtg

SEQ ID NO: 5423707 - DNA, 25 bp, Homo sapien
tcctgtccgccagtgatcatgaagg

SEQ ID NO: 5423708 - DNA, 25 bp, Homo sapien
tttagtgtctgtgccgtctttgggc

SEQ ID NO: 5423709 - DNA, 25 bp, Homo sapien
cgtgtaggtgagcttcatgtgaacc

SEQ ID NO: 5423710 - DNA, 25 bp, Homo sapien
gagtggacctccattgtgcatatca

SEQ ID NO: 5423711 - DNA, 25 bp, Homo sapien
catctgaaatgtcatccgtgccctg

SEQ ID NO: 5423712 - DNA, 25 bp, Homo sapien
ggagctgtcctttcagtaccatctg

SEQ ID NO: 5423713 - DNA, 25 bp, Homo sapien
ccttttccaaaatcctgaacggcat

SEQ ID NO: 5423714 - DNA, 25 bp, Homo sapien
tccttttccaaaatcctgaacggca

SEQ ID NO: 5423715 - DNA, 25 bp, Homo sapien
tgaagttccttttccaaaatcctga

SEQ ID NO: 5423716 - DNA, 25 bp, Homo sapien
gaaaaacgcctcctcctggatctaa

SEQ ID NO: 5423717 - DNA, 25 bp, Homo sapien
ttaagagcctccgtagaacagggtc

SEQ ID NO: 5423718 - DNA, 25 bp, Homo sapien
tgaccaaaatcaaaacgcgcctgcc

SEQ ID NO: 5423719 - DNA, 25 bp, Homo sapien
tggatctaatcaccttcgggcgcct

SEQ ID NO: 5423720 - DNA, 25 bp, Homo sapien
gtcttgaccacatcttgtagtcttg

SEQ ID NO: 5423721 - DNA, 25 bp, Homo sapien
acatagtgactaagttacttgtccc

SEQ ID NO: 5423722 - DNA, 25 bp, Homo sapien
tagtcttgtagtatgaggaaggtac

SEQ ID NO: 5423723 - DNA, 25 bp, Homo sapien
cccaagtttcagaggtatcaaggaa

SEQ ID NO: 5423724 - DNA, 25 bp, Homo sapien
aggtgtgcaccatcactcctggcta

SEQ ID NO: 5423725 - DNA, 25 bp, Homo sapien
tgcagcctcggcctctcaggttcca

SEQ ID NO: 5423726 - DNA, 25 bp, Homo sapien
gtgtgcaccatcactcctggctaat

SEQ ID NO: 5423727 - DNA, 25 bp, Homo sapien
agcctcggcctctcaggttccagcg

SEQ ID NO: 5423728 - DNA, 25 bp, Homo sapien
tacgtggcccattacaaggtataca

SEQ ID NO: 5423729 - DNA, 25 bp, Homo sapien
tctggatagttagacatacattggt

SEQ ID NO: 5423730 - DNA, 25 bp, Homo sapien
gtgagtgactatgatgaatttccag

SEQ ID NO: 5423731 - DNA, 25 bp, Homo sapien
cagcactttacttgcagggcctata

SEQ ID NO: 5423732 - DNA, 25 bp, Homo sapien
catagccaaggttcaagtctgtgcc

SEQ ID NO: 5423733 - DNA, 25 bp, Homo sapien
tgtacctgagacataactggacctt

SEQ ID NO: 5423734 - DNA, 25 bp, Homo sapien
tgtcatgatataaaggagagggcct

SEQ ID NO: 5423735 - DNA, 25 bp, Homo sapien
tcatatcaaagagtcagggctgcaa

SEQ ID NO: 5423736 - DNA, 25 bp, Homo sapien
taaattccgtcagctacaacagatg

SEQ ID NO: 5423737 - DNA, 25 bp, Homo sapien
caggagcacctggatacgtagaaca

SEQ ID NO: 5423738 - DNA, 25 bp, Homo sapien
aatcatctgactaggccgagaaagg

SEQ ID NO: 5423739 - DNA, 25 bp, Homo sapien
caaacaggtagcattatctggcgac

SEQ ID NO: 5423740 - DNA, 25 bp, Homo sapien
cctgcctcaggtcgttaatggtaaa

SEQ ID NO: 5423741 - DNA, 25 bp, Homo sapien
cacatgttggagtcgcagggctttt

SEQ ID NO: 5423742 - DNA, 25 bp, Homo sapien
acagacactggtccccggcatttgg

SEQ ID NO: 5423743 - DNA, 25 bp, Homo sapien
tatgtcagccgcgttttgaggcctg

SEQ ID NO: 5423744 - DNA, 25 bp, Homo sapien
ttcgggcacaggaatagaatgaatt

SEQ ID NO: 5423745 - DNA, 25 bp, Homo sapien
tttcgggcacaggaatagaatgaat

SEQ ID NO: 5423746 - DNA, 25 bp, Homo sapien
ttcccctgaaagctggcgaggcgcg

SEQ ID NO: 5423747 - DNA, 25 bp, Homo sapien
gcggaaaacgcgtcacgtgacgact

SEQ ID NO: 5423748 - DNA, 25 bp, Homo sapien
cattggcggagaccgcactgacgtc

SEQ ID NO: 5423749 - DNA, 25 bp, Homo sapien
ggaactcgccctgacgcgaacggcg

SEQ ID NO: 5423750 - DNA, 25 bp, Homo sapien
cgtcccgcgctcttgcgttgagaca

SEQ ID NO: 5423751 - DNA, 25 bp, Homo sapien
tcccgcgctcttgcgttgagacagg

SEQ ID NO: 5423752 - DNA, 25 bp, Homo sapien
gccgtcccgcgctcttgcgttgaga

SEQ ID NO: 5423753 - DNA, 25 bp, Homo sapien
ggccgtcccgcgctcttgcgttgag

SEQ ID NO: 5423754 - DNA, 25 bp, Homo sapien
ggacgagcaggcacatccgggcgag

SEQ ID NO: 5423755 - DNA, 25 bp, Homo sapien
gagcgagagttggagacctccttgg

SEQ ID NO: 5423756 - DNA, 25 bp, Homo sapien
attgacattgatccgccgccgcgtt

SEQ ID NO: 5423757 - DNA, 25 bp, Homo sapien
aggcggccccttggaggcgcggctt

SEQ ID NO: 5423758 - DNA, 25 bp, Homo sapien
gaaatggcgcattggcccgcaatgg

SEQ ID NO: 5423759 - DNA, 25 bp, Homo sapien
ggcccggcagaaaaagccgcaaatg

SEQ ID NO: 5423760 - DNA, 25 bp, Homo sapien
tccgcgagaagtcgataattggcct

SEQ ID NO: 5423761 - DNA, 25 bp, Homo sapien
gaagttctgccgacgcttttctagg

SEQ ID NO: 5423762 - DNA, 25 bp, Homo sapien
taatgacagagggtatctcatatat

SEQ ID NO: 5423763 - DNA, 25 bp, Homo sapien
catctcagaatgctccttcattacc

SEQ ID NO: 5423764 - DNA, 25 bp, Homo sapien
tcttaatgggttacataatgacaga

SEQ ID NO: 5423765 - DNA, 25 bp, Homo sapien
taccagagtcactacctgattatgt

SEQ ID NO: 5423766 - DNA, 25 bp, Homo sapien
tgtttgaatactccagacgtgttga

SEQ ID NO: 5423767 - DNA, 25 bp, Homo sapien
aggttgccatctagggcccaggtta

SEQ ID NO: 5423768 - DNA, 25 bp, Homo sapien
cacaggtagttgaagcgtttaagca

SEQ ID NO: 5423769 - DNA, 25 bp, Homo sapien
acgtgttgaagtgagcaggttgcca

SEQ ID NO: 5423770 - DNA, 25 bp, Homo sapien
taactgtaaagaaacacctgctgac

SEQ ID NO: 5423771 - DNA, 25 bp, Homo sapien
cacagttgcttagtacaggcttctc

SEQ ID NO: 5423772 - DNA, 25 bp, Homo sapien
caaaccatgatatgaatgggcgctg

SEQ ID NO: 5423773 - DNA, 25 bp, Homo sapien
ttattaaacccctaactggctggca

SEQ ID NO: 5423774 - DNA, 25 bp, Homo sapien
aaattggtcttcacacatactgcag

SEQ ID NO: 5423775 - DNA, 25 bp, Homo sapien
tactctctttggtagttgaacgttg

SEQ ID NO: 5423776 - DNA, 25 bp, Homo sapien
taatatttggatgcatgcaatgcca

SEQ ID NO: 5423777 - DNA, 25 bp, Homo sapien
tgtgctagtgtttgaatatgctctc

SEQ ID NO: 5423778 - DNA, 25 bp, Homo sapien
cagtgtggaaaagtaagccatgagg

SEQ ID NO: 5423779 - DNA, 25 bp, Homo sapien
gatcacagaaactcactaagacagg

SEQ ID NO: 5423780 - DNA, 25 bp, Homo sapien
gccatgaggagagcgatttaaccac

SEQ ID NO: 5423781 - DNA, 25 bp, Homo sapien
cacctttaaaggacctaagatgtgc

SEQ ID NO: 5423782 - DNA, 25 bp, Homo sapien
aggaaggagctcttcgccttttgga

SEQ ID NO: 5423783 - DNA, 25 bp, Homo sapien
gagctcttcgccttttggaacatca

SEQ ID NO: 5423784 - DNA, 25 bp, Homo sapien
cttcgccttttggaacatcaatgag

SEQ ID NO: 5423785 - DNA, 25 bp, Homo sapien
ccttttggaacatcaatgagagata

SEQ ID NO: 5423786 - DNA, 25 bp, Homo sapien
ccctctctagtaggcacattggaaa

SEQ ID NO: 5423787 - DNA, 25 bp, Homo sapien
catctaaaatacgaaggtttctggc

SEQ ID NO: 5423788 - DNA, 25 bp, Homo sapien
gacagtaaaacctgatgacaccatt

SEQ ID NO: 5423789 - DNA, 25 bp, Homo sapien
tgaaaactaccttggtaccatgtcc

SEQ ID NO: 5423790 - DNA, 25 bp, Homo sapien
tttgtgtcttcagggtaaactcaat

SEQ ID NO: 5423791 - DNA, 25 bp, Homo sapien
ttgtgtcttcagggtaaactcaatt

SEQ ID NO: 5423792 - DNA, 25 bp, Homo sapien
tgtgtcttcagggtaaactcaattt

SEQ ID NO: 5423793 - DNA, 25 bp, Homo sapien
gcagatggatcccaagtccaggaat

SEQ ID NO: 5423794 - DNA, 25 bp, Homo sapien
gatggatcccaagtccaggaatttg

SEQ ID NO: 5423795 - DNA, 25 bp, Homo sapien
tgaggcagatggatcccaagtccag

SEQ ID NO: 5423796 - DNA, 25 bp, Homo sapien
cattaaaagttaccagggccaggca

SEQ ID NO: 5423797 - DNA, 25 bp, Homo sapien
gaacccaatttctacgcgtgttgaa

SEQ ID NO: 5423798 - DNA, 25 bp, Homo sapien
tctcagaagttgtagcagcagtaaa

SEQ ID NO: 5423799 - DNA, 25 bp, Homo sapien
ttagttgggcttggtgatacacatc

SEQ ID NO: 5423800 - DNA, 25 bp, Homo sapien
taagcatgccagtgtgcaagggtaa

SEQ ID NO: 5423801 - DNA, 25 bp, Homo sapien
ataagtttctatggccagttccctc

SEQ ID NO: 5423802 - DNA, 25 bp, Homo sapien
tatcagtcaatgttaggtgctccag

SEQ ID NO: 5423803 - DNA, 25 bp, Homo sapien
ggaagttccttgatagcacgtgaaa

SEQ ID NO: 5423804 - DNA, 25 bp, Homo sapien
cagttccctcgtatgaattggtcag

SEQ ID NO: 5423805 - DNA, 25 bp, Homo sapien
tgagcttgacgtagtaaatccttag

SEQ ID NO: 5423806 - DNA, 25 bp, Homo sapien
actgtactgaccgtggctgcagctc

SEQ ID NO: 5423807 - DNA, 25 bp, Homo sapien
gagatccttctttgggcgatttaag

SEQ ID NO: 5423808 - DNA, 25 bp, Homo sapien
acctccatctggattggtacagcca

SEQ ID NO: 5423809 - DNA, 25 bp, Homo sapien
caaatgttgccacttcagtaaggct

SEQ ID NO: 5423810 - DNA, 25 bp, Homo sapien
aaactctgcctagggtatagtgggc

SEQ ID NO: 5423811 - DNA, 25 bp, Homo sapien
tgtaaccctggtactagaaatgtag

SEQ ID NO: 5423812 - DNA, 25 bp, Homo sapien
ttgttacctccccttcgctagaatg

SEQ ID NO: 5423813 - DNA, 25 bp, Homo sapien
aatcctttattagtaccagctctta

SEQ ID NO: 5423814 - DNA, 25 bp, Homo sapien
aataatcctttattagtaccagctc

SEQ ID NO: 5423815 - DNA, 25 bp, Homo sapien
tcctttattagtaccagctcttaaa

SEQ ID NO: 5423816 - DNA, 25 bp, Homo sapien
aacagtcataataatcctttattag

SEQ ID NO: 5423817 - DNA, 25 bp, Homo sapien
catactgacactccaatgcttttta

SEQ ID NO: 5423818 - DNA, 25 bp, Homo sapien
aagtacatagtggttagttttgcaa

SEQ ID NO: 5423819 - DNA, 25 bp, Homo sapien
cacatcacagtaggagcttttagta

SEQ ID NO: 5423820 - DNA, 25 bp, Homo sapien
actagctcagaaaaggtcaaatcct

SEQ ID NO: 5423821 - DNA, 25 bp, Homo sapien
tagtttttcttaacatctggcttct

SEQ ID NO: 5423822 - DNA, 25 bp, Homo sapien
ctagtttttcttaacatctggcttc

SEQ ID NO: 5423823 - DNA, 25 bp, Homo sapien
tttttcttaacatctggcttcttac

SEQ ID NO: 5423824 - DNA, 25 bp, Homo sapien
gtttttcttaacatctggcttctta

SEQ ID NO: 5423825 - DNA, 25 bp, Homo sapien
caagtagtgtgtctccatagctgga

SEQ ID NO: 5423826 - DNA, 25 bp, Homo sapien
catgctgttgctgatactgggctca

SEQ ID NO: 5423827 - DNA, 25 bp, Homo sapien
cgatgaccaggacttacaggcaatt

SEQ ID NO: 5423828 - DNA, 25 bp, Homo sapien
tagatcagaaacatcaatgggccca

SEQ ID NO: 5423829 - DNA, 25 bp, Homo sapien
tggaaccatggtagtctcaaccagc

SEQ ID NO: 5423830 - DNA, 25 bp, Homo sapien
acttggaaccatggtagtctcaacc

SEQ ID NO: 5423831 - DNA, 25 bp, Homo sapien
ggaaccatggtagtctcaaccagct

SEQ ID NO: 5423832 - DNA, 25 bp, Homo sapien
ttggaaccatggtagtctcaaccag

SEQ ID NO: 5423833 - DNA, 25 bp, Homo sapien
tagtagcaatgaagactgggctctc

SEQ ID NO: 5423834 - DNA, 25 bp, Homo sapien
ctgggctctcgatgtgaccgggaat

SEQ ID NO: 5423835 - DNA, 25 bp, Homo sapien
ttgcataccgtctaaatcaacaggg

SEQ ID NO: 5423836 - DNA, 25 bp, Homo sapien
taactcaggaatggataatagctcc

SEQ ID NO: 5423837 - DNA, 25 bp, Homo sapien
aaacctcttagatacttgcagcaaa

SEQ ID NO: 5423838 - DNA, 25 bp, Homo sapien
tgagtaagctctaaggcaccactac

SEQ ID NO: 5423839 - DNA, 25 bp, Homo sapien
gagattcattgacgggacttacata

SEQ ID NO: 5423840 - DNA, 25 bp, Homo sapien
tacttactaaccagtcatgaccccg

SEQ ID NO: 5423841 - DNA, 25 bp, Homo sapien
gctgcatgcagtcatcaaagtacaa

SEQ ID NO: 5423842 - DNA, 25 bp, Homo sapien
gaatgtctgcgccaaaagctgcatg

SEQ ID NO: 5423843 - DNA, 25 bp, Homo sapien
attgtcatctacaaacgggaatgtc

SEQ ID NO: 5423844 - DNA, 25 bp, Homo sapien
aaacgggaatgtctgcgccaaaagc

SEQ ID NO: 5423845 - DNA, 25 bp, Homo sapien
gttgctgctacttgatccttacagg

SEQ ID NO: 5423846 - DNA, 25 bp, Homo sapien
cacaatttgaactagaccacatggg

SEQ ID NO: 5423847 - DNA, 25 bp, Homo sapien
caataggttgggtactgaactcagg

SEQ ID NO: 5423848 - DNA, 25 bp, Homo sapien
tgctcatcgtagataaaacagggat

SEQ ID NO: 5423849 - DNA, 25 bp, Homo sapien
gatccactggtttctgactggatgt

SEQ ID NO: 5423850 - DNA, 25 bp, Homo sapien
ctgggagtagttggcagatccactg

SEQ ID NO: 5423851 - DNA, 25 bp, Homo sapien
cagatccactggtttctgactggat

SEQ ID NO: 5423852 - DNA, 25 bp, Homo sapien
ggcagatccactggtttctgactgg

SEQ ID NO: 5423853 - DNA, 25 bp, Homo sapien
aagatctatatcttgcctccaaagt

SEQ ID NO: 5423854 - DNA, 25 bp, Homo sapien
gtaactgagcgaaaaaggctttctc

SEQ ID NO: 5423855 - DNA, 25 bp, Homo sapien
tctttccgtcgctgactgaagtcaa

SEQ ID NO: 5423856 - DNA, 25 bp, Homo sapien
caaatacttctcgacttactccaag

SEQ ID NO: 5423857 - DNA, 25 bp, Homo sapien
taaattaattcacattatgccactg

SEQ ID NO: 5423858 - DNA, 25 bp, Homo sapien
ggaagtggggagattacaaatacaa

SEQ ID NO: 5423859 - DNA, 25 bp, Homo sapien
acagatccaatgttctagaagagca

SEQ ID NO: 5423860 - DNA, 25 bp, Homo sapien
aatgagaacacagatccaatgttct

SEQ ID NO: 5423861 - DNA, 25 bp, Homo sapien
gggaatggttttgatgaggagaggc

SEQ ID NO: 5423862 - DNA, 25 bp, Homo sapien
gaatggttttgatgaggagaggctg

SEQ ID NO: 5423863 - DNA, 25 bp, Homo sapien
acaaagagggaatggttttgatgag

SEQ ID NO: 5423864 - DNA, 25 bp, Homo sapien
agagggaatggttttgatgaggaga

SEQ ID NO: 5423865 - DNA, 25 bp, Homo sapien
caaggacgcaaataacatggtggtt

SEQ ID NO: 5423866 - DNA, 25 bp, Homo sapien
gaatcttaaatgctatgaaaccctg

SEQ ID NO: 5423867 - DNA, 25 bp, Homo sapien
tattactttcagcttcccaaggacg

SEQ ID NO: 5423868 - DNA, 25 bp, Homo sapien
caggccacctgtgtccatgattgaa

SEQ ID NO: 5423869 - DNA, 25 bp, Homo sapien
tcagtaaatctagatacatagcagg

SEQ ID NO: 5423870 - DNA, 25 bp, Homo sapien
tgtctagactttctgcaaactggag

SEQ ID NO: 5423871 - DNA, 25 bp, Homo sapien
tacccaaaggttatcatgggagaca

SEQ ID NO: 5423872 - DNA, 25 bp, Homo sapien
tagatacatagcagggtatcctgtc

SEQ ID NO: 5423873 - DNA, 25 bp, Homo sapien
cattcagtgcaatcgtaataggacc

SEQ ID NO: 5423874 - DNA, 25 bp, Homo sapien
tgagcatcctgttcacgttacctga

SEQ ID NO: 5423875 - DNA, 25 bp, Homo sapien
tacctgaaacaatgctggaccctgg

SEQ ID NO: 5423876 - DNA, 25 bp, Homo sapien
tgggagactaagcagctcctgcggc

SEQ ID NO: 5423877 - DNA, 25 bp, Homo sapien
gggaccacaagctcactactgtatt

SEQ ID NO: 5423878 - DNA, 25 bp, Homo sapien
agttaactgaagactcactgttggg

SEQ ID NO: 5423879 - DNA, 25 bp, Homo sapien
catttcctgtaaggagccgtgtgac

SEQ ID NO: 5423880 - DNA, 25 bp, Homo sapien
gctaatatgcaccaaccatttcctg

SEQ ID NO: 5423881 - DNA, 25 bp, Homo sapien
tacaacgggtgagaaagcttcccaa

SEQ ID NO: 5423882 - DNA, 25 bp, Homo sapien
catatggagcaaatgccgtctgcca

SEQ ID NO: 5423883 - DNA, 25 bp, Homo sapien
ggaggaaggccacagtacaaagtgt

SEQ ID NO: 5423884 - DNA, 25 bp, Homo sapien
ggtagatgggttgcacagcactgca

SEQ ID NO: 5423885 - DNA, 25 bp, Homo sapien
taagtcagtatagtcagtcatccag

SEQ ID NO: 5423886 - DNA, 25 bp, Homo sapien
ggtccggtttcttcaatctggcagg

SEQ ID NO: 5423887 - DNA, 25 bp, Homo sapien
catttactgctgctagccggagacc

SEQ ID NO: 5423888 - DNA, 25 bp, Homo sapien
gatactgctgctaggcttcaaagga

SEQ ID NO: 5423889 - DNA, 25 bp, Homo sapien
ccaaggcaatcactagtatcaggtt

SEQ ID NO: 5423890 - DNA, 25 bp, Homo sapien
taagagttaaaggtctgccctctgg

SEQ ID NO: 5423891 - DNA, 25 bp, Homo sapien
tacgacttaacaggcaaatcaggcc

SEQ ID NO: 5423892 - DNA, 25 bp, Homo sapien
catattcaccaagtagcagaggcag

SEQ ID NO: 5423893 - DNA, 25 bp, Homo sapien
cagtgtgagcgtgcatttccccatg

SEQ ID NO: 5423894 - DNA, 25 bp, Homo sapien
tatcatattggcacagggtacccac

SEQ ID NO: 5423895 - DNA, 25 bp, Homo sapien
gtaccttttacactcgcaccagcag

SEQ ID NO: 5423896 - DNA, 25 bp, Homo sapien
cataaatgtgtgagggtatccctaa

SEQ ID NO: 5423897 - DNA, 25 bp, Homo sapien
tcctgaggcctgagatgctaaatgg

SEQ ID NO: 5423898 - DNA, 25 bp, Homo sapien
gacagtgatcgtggagaccgcagtt

SEQ ID NO: 5423899 - DNA, 25 bp, Homo sapien
ccaactgactaaggagagctgacag

SEQ ID NO: 5423900 - DNA, 25 bp, Homo sapien
tggccccaggtctgacctaactgag

SEQ ID NO: 5423901 - DNA, 25 bp, Homo sapien
tcagttccttggttgcatgagccaa

SEQ ID NO: 5423902 - DNA, 25 bp, Homo sapien
gattctaagcccagataaagacaag

SEQ ID NO: 5423903 - DNA, 25 bp, Homo sapien
tcaagcatgagggacagtgcagtat

SEQ ID NO: 5423904 - DNA, 25 bp, Homo sapien
tcaacaatgttatggtgcagatgct

SEQ ID NO: 5423905 - DNA, 25 bp, Homo sapien
gaacctcagagtaagaaatgctgcc

SEQ ID NO: 5423906 - DNA, 25 bp, Homo sapien
tagaccttgcctatggacactgggt

SEQ ID NO: 5423907 - DNA, 25 bp, Homo sapien
tctgccattctagggcacacaccag

SEQ ID NO: 5423908 - DNA, 25 bp, Homo sapien
cagacaggctggagggtcttccaga

SEQ ID NO: 5423909 - DNA, 25 bp, Homo sapien
cctgcctccaacctgtccatcttcc

SEQ ID NO: 5423910 - DNA, 25 bp, Homo sapien
ccaacctgtccatcttccaattcac

SEQ ID NO: 5423911 - DNA, 25 bp, Homo sapien
ctccaacctgtccatcttccaattc

SEQ ID NO: 5423912 - DNA, 25 bp, Homo sapien
tccctgcctccaacctgtccatctt

SEQ ID NO: 5423913 - DNA, 25 bp, Homo sapien
catggtttccagatgccctgtacaa

SEQ ID NO: 5423914 - DNA, 25 bp, Homo sapien
aagttaaccttgtcagccccactgg

SEQ ID NO: 5423915 - DNA, 25 bp, Homo sapien
tattacgtaagcaccaggcatggcg

SEQ ID NO: 5423916 - DNA, 25 bp, Homo sapien
ggcagttaatggactcaccctcaaa

SEQ ID NO: 5423917 - DNA, 25 bp, Homo sapien
ctgcttcaggttaggataaaaggta

SEQ ID NO: 5423918 - DNA, 25 bp, Homo sapien
tgcttcaggttaggataaaaggtat

SEQ ID NO: 5423919 - DNA, 25 bp, Homo sapien
aaaaggtataaacaagctgccacct

SEQ ID NO: 5423920 - DNA, 25 bp, Homo sapien
aggtataaacaagctgccacctggt

SEQ ID NO: 5423921 - DNA, 25 bp, Homo sapien
tcctattgcaagtaaaaaactctca

SEQ ID NO: 5423922 - DNA, 25 bp, Homo sapien
tctcattgagaatcatcaagaataa

SEQ ID NO: 5423923 - DNA, 25 bp, Homo sapien
ctggcctacggttgttttttctatg

SEQ ID NO: 5423924 - DNA, 25 bp, Homo sapien
gtattttaattatgtctcattgaga

SEQ ID NO: 5423925 - DNA, 25 bp, Homo sapien
gacgaacttggtgctgtaagtccta

SEQ ID NO: 5423926 - DNA, 25 bp, Homo sapien
tttactagtaccagcagtttggacc

SEQ ID NO: 5423927 - DNA, 25 bp, Homo sapien
aataccaggatttgcaacacacagg

SEQ ID NO: 5423928 - DNA, 25 bp, Homo sapien
gatggactgtaatgactctcaagag

SEQ ID NO: 5423929 - DNA, 25 bp, Homo sapien
tgttggcgcttatttaaaagcaggt

SEQ ID NO: 5423930 - DNA, 25 bp, Homo sapien
agtgaaatttcaatagctcctagaa

SEQ ID NO: 5423931 - DNA, 25 bp, Homo sapien
tgaataaatcttggcctatacctta

SEQ ID NO: 5423932 - DNA, 25 bp, Homo sapien
cataccattagcaattgaataaatc

SEQ ID NO: 5423933 - DNA, 25 bp, Homo sapien
tagggttgaatttgcgccatcagct

SEQ ID NO: 5423934 - DNA, 25 bp, Homo sapien
taccaagtagcaaggcaaacaaagg

SEQ ID NO: 5423935 - DNA, 25 bp, Homo sapien
gatcctataagtcctgcagcacact

SEQ ID NO: 5423936 - DNA, 25 bp, Homo sapien
gatgtactattctcaaagacccaag

SEQ ID NO: 5423937 - DNA, 25 bp, Homo sapien
taaattgaatccaccgaggcctctg

SEQ ID NO: 5423938 - DNA, 25 bp, Homo sapien
tggtcaccttagcaggtcctggcct

SEQ ID NO: 5423939 - DNA, 25 bp, Homo sapien
taccttggccactcaatagtatggt

SEQ ID NO: 5423940 - DNA, 25 bp, Homo sapien
aacctgtttgaatgctaccttggcc

SEQ ID NO: 5423941 - DNA, 25 bp, Homo sapien
ttcagtcaggacagaggaaattccc

SEQ ID NO: 5423942 - DNA, 25 bp, Homo sapien
tgcatactgaaaagttaacccaggc

SEQ ID NO: 5423943 - DNA, 25 bp, Homo sapien
gggacgtgcccagtaacttatctat

SEQ ID NO: 5423944 - DNA, 25 bp, Homo sapien
aacattgcttataagaacccagggc

SEQ ID NO: 5423945 - DNA, 25 bp, Homo sapien
tagagggctgtagacaattccggaa

SEQ ID NO: 5423946 - DNA, 25 bp, Homo sapien
gaaattctaatctacactcgcaact

SEQ ID NO: 5423947 - DNA, 25 bp, Homo sapien
gaaacgcaagcgttccactctctgc

SEQ ID NO: 5423948 - DNA, 25 bp, Homo sapien
gaggcaaattctcaactgaaaagga

SEQ ID NO: 5423949 - DNA, 25 bp, Homo sapien
ccttgacagcacagaagagaatatc

SEQ ID NO: 5423950 - DNA, 25 bp, Homo sapien
acagcacagaagagaatatcccgtc

SEQ ID NO: 5423951 - DNA, 25 bp, Homo sapien
tgacagcacagaagagaatatcccg

SEQ ID NO: 5423952 - DNA, 25 bp, Homo sapien
ttgacagcacagaagagaatatccc

SEQ ID NO: 5423953 - DNA, 25 bp, Homo sapien
aaaatagcaattgcgcaacagatca

SEQ ID NO: 5423954 - DNA, 25 bp, Homo sapien
attctgaaacgctaaatccaaagac

SEQ ID NO: 5423955 - DNA, 25 bp, Homo sapien
ttttggaattgcaattctgaaacgc

SEQ ID NO: 5423956 - DNA, 25 bp, Homo sapien
tagcaattgcgcaacagatcaacag

SEQ ID NO: 5423957 - DNA, 25 bp, Homo sapien
tctgagcccgctgggcacttaaggc

SEQ ID NO: 5423958 - DNA, 25 bp, Homo sapien
gctgccagagagtgatccgagagat

SEQ ID NO: 5423959 - DNA, 25 bp, Homo sapien
aaccgagggctgctgtgacggccaa

SEQ ID NO: 5423960 - DNA, 25 bp, Homo sapien
agatggatgacttcgcaaagccgcg

SEQ ID NO: 5423961 - DNA, 25 bp, Homo sapien
ctgctgggacgggagtcccggcggc

SEQ ID NO: 5423962 - DNA, 25 bp, Homo sapien
tggaccgtgtgttggggctccccga

SEQ ID NO: 5423963 - DNA, 25 bp, Homo sapien
gctgtggaccgtgtgttggggctcc

SEQ ID NO: 5423964 - DNA, 25 bp, Homo sapien
cgtgtgttggggctccccgacggcg

SEQ ID NO: 5423965 - DNA, 25 bp, Homo sapien
gatgagctgtggaccgtgtgttggg

SEQ ID NO: 5423966 - DNA, 25 bp, Homo sapien
ctcggtaatcggctacacgccggcg

SEQ ID NO: 5423967 - DNA, 25 bp, Homo sapien
ccggcactcggtaatcggctacacg

SEQ ID NO: 5423968 - DNA, 25 bp, Homo sapien
ggctccccggcactcggtaatcggc

SEQ ID NO: 5423969 - DNA, 25 bp, Homo sapien
gtaatcggctacacgccggcgggcc

SEQ ID NO: 5423970 - DNA, 25 bp, Homo sapien
tgtacatctccaaagccagttttaa

SEQ ID NO: 5423971 - DNA, 25 bp, Homo sapien
gcaaactactggtacaatgagctgt

SEQ ID NO: 5423972 - DNA, 25 bp, Homo sapien
gggtgtacacctcactgtgcaaact

SEQ ID NO: 5423973 - DNA, 25 bp, Homo sapien
aacttgtgtagtttcctgctcataa

SEQ ID NO: 5423974 - DNA, 25 bp, Homo sapien
taaacactccccacaaatcagggag

SEQ ID NO: 5423975 - DNA, 25 bp, Homo sapien
tgaattccccaaggacaaaatgatg

SEQ ID NO: 5423976 - DNA, 25 bp, Homo sapien
tgacaaaacaattaagtgactgcct

SEQ ID NO: 5423977 - DNA, 25 bp, Homo sapien
aatggcccaggcttcgtctactcta

SEQ ID NO: 5423978 - DNA, 25 bp, Homo sapien
gaaactttgctggttacataatcaa

SEQ ID NO: 5423979 - DNA, 25 bp, Homo sapien
ctgagaggaaggtatgtacccctaa

SEQ ID NO: 5423980 - DNA, 25 bp, Homo sapien
tcatggcactgaggttttaatacat

SEQ ID NO: 5423981 - DNA, 25 bp, Homo sapien
tttactttcaactggtgcctgagaa

SEQ ID NO: 5423982 - DNA, 25 bp, Homo sapien
tcacagtcttatgaacctcggaaac

SEQ ID NO: 5423983 - DNA, 25 bp, Homo sapien
ttcagcatgactgacaaaagtttcc

SEQ ID NO: 5423984 - DNA, 25 bp, Homo sapien
taatgacggaaaccaacagtcacct

SEQ ID NO: 5423985 - DNA, 25 bp, Homo sapien
tagatactagctgtgagagcctgag

SEQ ID NO: 5423986 - DNA, 25 bp, Homo sapien
cagtacctccccattgtgtggatcc

SEQ ID NO: 5423987 - DNA, 25 bp, Homo sapien
taatgaggacgtgcatctttaggtc

SEQ ID NO: 5423988 - DNA, 25 bp, Homo sapien
ggttcattcccttgacactaacaga

SEQ ID NO: 5423989 - DNA, 25 bp, Homo sapien
gaaccatggattccaaggccagtac

SEQ ID NO: 5423990 - DNA, 25 bp, Homo sapien
gaagactagtaatctacggccaggc

SEQ ID NO: 5423991 - DNA, 25 bp, Homo sapien
gaaagcttgatcaccgagacagcag

SEQ ID NO: 5423992 - DNA, 25 bp, Homo sapien
tttttcctggtgacaaaggctgagc

SEQ ID NO: 5423993 - DNA, 25 bp, Homo sapien
tgaacttctgggtaaggctaggctg

SEQ ID NO: 5423994 - DNA, 25 bp, Homo sapien
gctgggcacaaatgggccatgcaca

SEQ ID NO: 5423995 - DNA, 25 bp, Homo sapien
gcttccctggaagactagaaacaca

SEQ ID NO: 5423996 - DNA, 25 bp, Homo sapien
catccctccactggtgggaagaagg

SEQ ID NO: 5423997 - DNA, 25 bp, Homo sapien
catcagtatcggtaaaggaaggcca

SEQ ID NO: 5423998 - DNA, 25 bp, Homo sapien
gagagaccactaacctcagagtgaa

SEQ ID NO: 5423999 - DNA, 25 bp, Homo sapien
gacttagttcccagctatgatgaga

SEQ ID NO: 5424000 - DNA, 25 bp, Homo sapien
tatgatgagaggtcagacatgccta

SEQ ID NO: 5424001 - DNA, 25 bp, Homo sapien
tacacctaaggaagaaactatgctc

SEQ ID NO: 5424002 - DNA, 25 bp, Homo sapien
tatgtagcctatcctaacactgtgc

SEQ ID NO: 5424003 - DNA, 25 bp, Homo sapien
tgggtctcagggtttccgtccataa

SEQ ID NO: 5424004 - DNA, 25 bp, Homo sapien
tacagcaggactcaacaaggcagtc

SEQ ID NO: 5424005 - DNA, 25 bp, Homo sapien
tgttcaatacgcatgtgtcaggacc

SEQ ID NO: 5424006 - DNA, 25 bp, Homo sapien
gattgtgatgacattcaagtctgtg

SEQ ID NO: 5424007 - DNA, 25 bp, Homo sapien
cacagattgtgatgacattcaagtc

SEQ ID NO: 5424008 - DNA, 25 bp, Homo sapien
ggcacagattgtgatgacattcaag

SEQ ID NO: 5424009 - DNA, 25 bp, Homo sapien
gatgacattcaagtctgtgtctggc

SEQ ID NO: 5424010 - DNA, 25 bp, Homo sapien
ccatggacattcagtattctaacag

SEQ ID NO: 5424011 - DNA, 25 bp, Homo sapien
ggagacaggcctcttcttccttatg

SEQ ID NO: 5424012 - DNA, 25 bp, Homo sapien
ggaaatcttccgcttggagctgaca

SEQ ID NO: 5424013 - DNA, 25 bp, Homo sapien
gagatgctcttggatccaggcaata

SEQ ID NO: 5424014 - DNA, 25 bp, Homo sapien
tgctatgcgatatgatacgaccttc

SEQ ID NO: 5424015 - DNA, 25 bp, Homo sapien
tacaaaatatataagcccaggaagg

SEQ ID NO: 5424016 - DNA, 25 bp, Homo sapien
gacaaatgctgactgaaactctgtt

SEQ ID NO: 5424017 - DNA, 25 bp, Homo sapien
gttatactggagatgtgctatgcga

SEQ ID NO: 5424018 - DNA, 25 bp, Homo sapien
tgttttgctcacgacttactctagg

SEQ ID NO: 5424019 - DNA, 25 bp, Homo sapien
tactctaggcctagtacaccacagt

SEQ ID NO: 5424020 - DNA, 25 bp, Homo sapien
caactgtaacgcttatgatggatga

SEQ ID NO: 5424021 - DNA, 25 bp, Homo sapien
tggcactcagtaggcaattgataga

SEQ ID NO: 5424022 - DNA, 25 bp, Homo sapien
attttaggcctatgtgtgtatttat

SEQ ID NO: 5424023 - DNA, 25 bp, Homo sapien
tatctgatagaaatatagcaactcc

SEQ ID NO: 5424024 - DNA, 25 bp, Homo sapien
gtgcatatacaattgttataccctc

SEQ ID NO: 5424025 - DNA, 25 bp, Homo sapien
tgatagaaatatagcaactcctact

SEQ ID NO: 5424026 - DNA, 25 bp, Homo sapien
tggattcatcatcagtatgtgagtt

SEQ ID NO: 5424027 - DNA, 25 bp, Homo sapien
gcagccagaagcatggattcatcat

SEQ ID NO: 5424028 - DNA, 25 bp, Homo sapien
cagccagaagcatggattcatcatc

SEQ ID NO: 5424029 - DNA, 25 bp, Homo sapien
catcatcagtatgtgagttcttcat

SEQ ID NO: 5424030 - DNA, 25 bp, Homo sapien
gagctggtatcaggacagaaatatc

SEQ ID NO: 5424031 - DNA, 25 bp, Homo sapien
cagagagctctgtctgcccttgagt

SEQ ID NO: 5424032 - DNA, 25 bp, Homo sapien
ccttgagtagctagaagcacagttt

SEQ ID NO: 5424033 - DNA, 25 bp, Homo sapien
tttgctcaagtcaagagctggtatc

SEQ ID NO: 5424034 - DNA, 25 bp, Homo sapien
catatgtctgagtcccaagtattaa

SEQ ID NO: 5424035 - DNA, 25 bp, Homo sapien
gacttgaggcctactgaaccatggg

SEQ ID NO: 5424036 - DNA, 25 bp, Homo sapien
tgacccagaaaataaggccatcaag

SEQ ID NO: 5424037 - DNA, 25 bp, Homo sapien
tctatgggttagtgactgaaggact

SEQ ID NO: 5424038 - DNA, 25 bp, Homo sapien
cacagaagatcaaaggagttaagaa

SEQ ID NO: 5424039 - DNA, 25 bp, Homo sapien
taagaaaaactcacaatttagagct

SEQ ID NO: 5424040 - DNA, 25 bp, Homo sapien
tctgtttttataccgctataaagat

SEQ ID NO: 5424041 - DNA, 25 bp, Homo sapien
taagaaagaggcaaaacagctgctg

SEQ ID NO: 5424042 - DNA, 25 bp, Homo sapien
caattcaagataagaggccgggcac

SEQ ID NO: 5424043 - DNA, 25 bp, Homo sapien
ccgaggcgggcagatggcctgagct

SEQ ID NO: 5424044 - DNA, 25 bp, Homo sapien
caggagtttgagaccagcctgggca

SEQ ID NO: 5424045 - DNA, 25 bp, Homo sapien
gcaacatggtgaaaccccatctcta

SEQ ID NO: 5424046 - DNA, 25 bp, Homo sapien
tgggcaacatggtgaaaccccatct

SEQ ID NO: 5424047 - DNA, 25 bp, Homo sapien
actgtgatgccagcagtggacttta

SEQ ID NO: 5424048 - DNA, 25 bp, Homo sapien
tcctgacctctagattgtagctgtg

SEQ ID NO: 5424049 - DNA, 25 bp, Homo sapien
gatgtacgtgcaacattaaatgtgg

SEQ ID NO: 5424050 - DNA, 25 bp, Homo sapien
tgtgtggactgaactgcgagcccaa

SEQ ID NO: 5424051 - DNA, 25 bp, Homo sapien
cctgttctggtaggattagctgtcc

SEQ ID NO: 5424052 - DNA, 25 bp, Homo sapien
tagaagcagtctatataagccaggt

SEQ ID NO: 5424053 - DNA, 25 bp, Homo sapien
tagtttatggtccaagcccagtatc

SEQ ID NO: 5424054 - DNA, 25 bp, Homo sapien
tagccaagatttcccatgggttgag

SEQ ID NO: 5424055 - DNA, 25 bp, Homo sapien
cagtatgagtactcttcctactcct

SEQ ID NO: 5424056 - DNA, 25 bp, Homo sapien
cacagagctcagatatgtatgcagg

SEQ ID NO: 5424057 - DNA, 25 bp, Homo sapien
ttccagtccgtgctgaatactcttc

SEQ ID NO: 5424058 - DNA, 25 bp, Homo sapien
actcttccagtatgagtactcttcc

SEQ ID NO: 5424059 - DNA, 25 bp, Homo sapien
ccactgaagcagaatttgcatgtaa

SEQ ID NO: 5424060 - DNA, 25 bp, Homo sapien
cactgaagcagaatttgcatgtaac

SEQ ID NO: 5424061 - DNA, 25 bp, Homo sapien
aggctccaacacccactgaagcaga

SEQ ID NO: 5424062 - DNA, 25 bp, Homo sapien
gaatctcaggctccaacacccactg

SEQ ID NO: 5424063 - DNA, 25 bp, Homo sapien
ggtgccaagataatccagtgaggaa

SEQ ID NO: 5424064 - DNA, 25 bp, Homo sapien
aaattgagtgtagagacgattgcac

SEQ ID NO: 5424065 - DNA, 25 bp, Homo sapien
gaagaactagccttctcaacaagtg

SEQ ID NO: 5424066 - DNA, 25 bp, Homo sapien
aaggagaccctctgtgtatcctcag

SEQ ID NO: 5424067 - DNA, 25 bp, Homo sapien
gctgaaatatggagccaacacatgg

SEQ ID NO: 5424068 - DNA, 25 bp, Homo sapien
gagaaccacggatctggctaacctt

SEQ ID NO: 5424069 - DNA, 25 bp, Homo sapien
taattctccgttgtggagggctgtc

SEQ ID NO: 5424070 - DNA, 25 bp, Homo sapien
gaagcatttaagatccagcacatga

SEQ ID NO: 5424071 - DNA, 25 bp, Homo sapien
aatagtacattgcaggagccaggcc

SEQ ID NO: 5424072 - DNA, 25 bp, Homo sapien
caagggcaagagtacaaacggaggc

SEQ ID NO: 5424073 - DNA, 25 bp, Homo sapien
ttgaagggctattctttacaacagg

SEQ ID NO: 5424074 - DNA, 25 bp, Homo sapien
caggcctctccctaacgtttgtggg

SEQ ID NO: 5424075 - DNA, 25 bp, Homo sapien
cagagcttgcagtgagctgagattg

SEQ ID NO: 5424076 - DNA, 25 bp, Homo sapien
agaagaatggcatgaacccgggagg

SEQ ID NO: 5424077 - DNA, 25 bp, Homo sapien
ccaggcgtggtagcaggcgcttgta

SEQ ID NO: 5424078 - DNA, 25 bp, Homo sapien
tcccagctactcgggaggctgaggc

SEQ ID NO: 5424079 - DNA, 25 bp, Homo sapien
tattggggccactgaactttctgtt

SEQ ID NO: 5424080 - DNA, 25 bp, Homo sapien
tttctgtttgtgctcctccttatga

SEQ ID NO: 5424081 - DNA, 25 bp, Homo sapien
tctggtgttatttttattggggcca

SEQ ID NO: 5424082 - DNA, 25 bp, Homo sapien
tgtgctcctccttatgaaccctgct

SEQ ID NO: 5424083 - DNA, 25 bp, Homo sapien
taatcctgataggtgccctcacgca

SEQ ID NO: 5424084 - DNA, 25 bp, Homo sapien
ttcctctcagccagttaactccata

SEQ ID NO: 5424085 - DNA, 25 bp, Homo sapien
gttaactccataaggatttcagcaa

SEQ ID NO: 5424086 - DNA, 25 bp, Homo sapien
gcaataatcctgataggtgccctca

SEQ ID NO: 5424087 - DNA, 25 bp, Homo sapien
cttccaaatctccatccttcaatga

SEQ ID NO: 5424088 - DNA, 25 bp, Homo sapien
tctccatccttcaatgaagtccatc

SEQ ID NO: 5424089 - DNA, 25 bp, Homo sapien
ttcatgtcttccaaatctccatcct

SEQ ID NO: 5424090 - DNA, 25 bp, Homo sapien
tccattcatgtcttccaaatctcca

SEQ ID NO: 5424091 - DNA, 25 bp, Homo sapien
tcctgggattcaggccattttgtca

SEQ ID NO: 5424092 - DNA, 25 bp, Homo sapien
ttctctccgattcatcctccatagt

SEQ ID NO: 5424093 - DNA, 25 bp, Homo sapien
tctcttctactccaatccaatcagt

SEQ ID NO: 5424094 - DNA, 25 bp, Homo sapien
ggaactccctgatactagcctcact

SEQ ID NO: 5424095 - DNA, 25 bp, Homo sapien
cacccggccgtgtcttttgctgttg

SEQ ID NO: 5424096 - DNA, 25 bp, Homo sapien
gcacccggccgtgtcttttgctgtt

SEQ ID NO: 5424097 - DNA, 25 bp, Homo sapien
cgcacccggccgtgtcttttgctgt

SEQ ID NO: 5424098 - DNA, 25 bp, Homo sapien
cagcatcagttgacaagagggtcag

SEQ ID NO: 5424099 - DNA, 25 bp, Homo sapien
gatgtaaacctcaaaggtcttctct

SEQ ID NO: 5424100 - DNA, 25 bp, Homo sapien
atagggatcattttacagcagtgtc

SEQ ID NO: 5424101 - DNA, 25 bp, Homo sapien
gcagcatctggtgacatagggatca

SEQ ID NO: 5424102 - DNA, 25 bp, Homo sapien
aaatgaccatgcttacacaacccct

SEQ ID NO: 5424103 - DNA, 25 bp, Homo sapien
aaaccaggtggcgtggagtttggct

SEQ ID NO: 5424104 - DNA, 25 bp, Homo sapien
gcatgacttaggaacaatgcctaca

SEQ ID NO: 5424105 - DNA, 25 bp, Homo sapien
tatcagacgtgcaggataatgatgc

SEQ ID NO: 5424106 - DNA, 25 bp, Homo sapien
aagtaacatgtaagagacactgtta

SEQ ID NO: 5424107 - DNA, 25 bp, Homo sapien
cggtgtgtcgtcagtcattttttgt

SEQ ID NO: 5424108 - DNA, 25 bp, Homo sapien
acactgttagagtcagttcccctga

SEQ ID NO: 5424109 - DNA, 25 bp, Homo sapien
cagttcccctgatcactaatatcgg

SEQ ID NO: 5424110 - DNA, 25 bp, Homo sapien
ttttttgcaagatagtccacagttt

SEQ ID NO: 5424111 - DNA, 25 bp, Homo sapien
ttaaagatttgctcaatgaggcaca

SEQ ID NO: 5424112 - DNA, 25 bp, Homo sapien
tgtttgagattaggtggtaggcact

SEQ ID NO: 5424113 - DNA, 25 bp, Homo sapien
caatgaggcacatatgaatgatagt

SEQ ID NO: 5424114 - DNA, 25 bp, Homo sapien
caggattacatcaccttttggaccc

SEQ ID NO: 5424115 - DNA, 25 bp, Homo sapien
acaggattacatcaccttttggacc

SEQ ID NO: 5424116 - DNA, 25 bp, Homo sapien
gccacaggattacatcaccttttgg

SEQ ID NO: 5424117 - DNA, 25 bp, Homo sapien
ataacaaggttcaacagcggcacat

SEQ ID NO: 5424118 - DNA, 25 bp, Homo sapien
caaggttcaacagcggcacatctca

SEQ ID NO: 5424119 - DNA, 25 bp, Homo sapien
acaaggttcaacagcggcacatctc

SEQ ID NO: 5424120 - DNA, 25 bp, Homo sapien
atcataacaaggttcaacagcggca

SEQ ID NO: 5424121 - DNA, 25 bp, Homo sapien
cttctttctcagtaatcttggaaac

SEQ ID NO: 5424122 - DNA, 25 bp, Homo sapien
ataaggctcctcagtactttcttct

SEQ ID NO: 5424123 - DNA, 25 bp, Homo sapien
tttcttctttctcagtaatcttgga

SEQ ID NO: 5424124 - DNA, 25 bp, Homo sapien
taaggctcctcagtactttcttctt

SEQ ID NO: 5424125 - DNA, 25 bp, Homo sapien
gaggcaatccacttgagggttcttt

SEQ ID NO: 5424126 - DNA, 25 bp, Homo sapien
tagccgactgagaatcagaatttaa

SEQ ID NO: 5424127 - DNA, 25 bp, Homo sapien
tgtattctgagaacaccggtgtggc

SEQ ID NO: 5424128 - DNA, 25 bp, Homo sapien
caagactgttggtggttaccgcata

SEQ ID NO: 5424129 - DNA, 25 bp, Homo sapien
gcatggacaatggttggactccctt

SEQ ID NO: 5424130 - DNA, 25 bp, Homo sapien
ggctggccagggatcttctgcatat

SEQ ID NO: 5424131 - DNA, 25 bp, Homo sapien
gctaggagtaatagttaaccaaggc

SEQ ID NO: 5424132 - DNA, 25 bp, Homo sapien
tctgctcttgcaaatggtggcctct

SEQ ID NO: 5424133 - DNA, 25 bp, Homo sapien
tcagcaagcataatcccaaggaagg

SEQ ID NO: 5424134 - DNA, 25 bp, Homo sapien
tacttcttggaagggccccaaatgc

SEQ ID NO: 5424135 - DNA, 25 bp, Homo sapien
tatagggcattttgtagcggtatcc

SEQ ID NO: 5424136 - DNA, 25 bp, Homo sapien
caatggacaaaagtcgcagtctcct

SEQ ID NO: 5424137 - DNA, 25 bp, Homo sapien
taggcatacatattaggagtctaag

SEQ ID NO: 5424138 - DNA, 25 bp, Homo sapien
tctacttaatagtgtaggtaatata

SEQ ID NO: 5424139 - DNA, 25 bp, Homo sapien
gctgtctctcatgcaaaaccttggc

SEQ ID NO: 5424140 - DNA, 25 bp, Homo sapien
gagtctaagaagctgtgccaatttg

SEQ ID NO: 5424141 - DNA, 25 bp, Homo sapien
tagactatccagttcagctaatgat

SEQ ID NO: 5424142 - DNA, 25 bp, Homo sapien
tcagaacctatccaagacataatgg

SEQ ID NO: 5424143 - DNA, 25 bp, Homo sapien
tctggaaccccatgttagtaactca

SEQ ID NO: 5424144 - DNA, 25 bp, Homo sapien
gatatgtccttcctcgttacatttc

SEQ ID NO: 5424145 - DNA, 25 bp, Homo sapien
tttcctccttatgtgagtagcctgt

SEQ ID NO: 5424146 - DNA, 25 bp, Homo sapien
tcaggcataccaatcaatcataggt

SEQ ID NO: 5424147 - DNA, 25 bp, Homo sapien
catcttagtagtgctctctgtagtt

SEQ ID NO: 5424148 - DNA, 25 bp, Homo sapien
gagcatcttagtagtgctctctgta

SEQ ID NO: 5424149 - DNA, 25 bp, Homo sapien
ttcaggcataccaatcaatcatagg

SEQ ID NO: 5424150 - DNA, 25 bp, Homo sapien
acaaagtatgacagaagagtgcagg

SEQ ID NO: 5424151 - DNA, 25 bp, Homo sapien
acaaccagtattgggaaccactgac

SEQ ID NO: 5424152 - DNA, 25 bp, Homo sapien
taaaagagttgcctatgatacggtt

SEQ ID NO: 5424153 - DNA, 25 bp, Homo sapien
taggtgttaggtgtggcactgctct

SEQ ID NO: 5424154 - DNA, 25 bp, Homo sapien
gaaatttggtgcatgattccaggag

SEQ ID NO: 5424155 - DNA, 25 bp, Homo sapien
gcttatcatacatctaggacaatgg

SEQ ID NO: 5424156 - DNA, 25 bp, Homo sapien
ggtctgttctcaattaagagccaag

SEQ ID NO: 5424157 - DNA, 25 bp, Homo sapien
cataaagtgattgggagagagcata

SEQ ID NO: 5424158 - DNA, 25 bp, Homo sapien
tagctaggcattttcacatgggcga

SEQ ID NO: 5424159 - DNA, 25 bp, Homo sapien
cactttggtggactatagggaagca

SEQ ID NO: 5424160 - DNA, 25 bp, Homo sapien
gaagcacatggagaatcacgggatt

SEQ ID NO: 5424161 - DNA, 25 bp, Homo sapien
tgatggaacaggatgacagtggcac

SEQ ID NO: 5424162 - DNA, 25 bp, Homo sapien
taattcttatgcaagacaccggctg

SEQ ID NO: 5424163 - DNA, 25 bp, Homo sapien
cagggttctaggacacctcgagggc

SEQ ID NO: 5424164 - DNA, 25 bp, Homo sapien
cagtgccaggcacgaaataggtggt

SEQ ID NO: 5424165 - DNA, 25 bp, Homo sapien
ggatccatcaggtccagtagcactg

SEQ ID NO: 5424166 - DNA, 25 bp, Homo sapien
ttcccgaggcgtgacaagggagcgc

SEQ ID NO: 5424167 - DNA, 25 bp, Homo sapien
tgtgaagctccagacgcatggcacc

SEQ ID NO: 5424168 - DNA, 25 bp, Homo sapien
acccgccgccaagtcgccgcggtgg

SEQ ID NO: 5424169 - DNA, 25 bp, Homo sapien
ctgcttggcaggtgcgcgcttcccg

SEQ ID NO: 5424170 - DNA, 25 bp, Homo sapien
gctgatgaccagtagtattgcttag

SEQ ID NO: 5424171 - DNA, 25 bp, Homo sapien
catggtaaccaatgacagacctttg

SEQ ID NO: 5424172 - DNA, 25 bp, Homo sapien
gacctttgtcaagatatctcaccag

SEQ ID NO: 5424173 - DNA, 25 bp, Homo sapien
cagtaacatcaaagagggaaagtat

SEQ ID NO: 5424174 - DNA, 25 bp, Homo sapien
gcttaaatgaagatcatcctttggt

SEQ ID NO: 5424175 - DNA, 25 bp, Homo sapien
aaaggcacatttatatatccccaga

SEQ ID NO: 5424176 - DNA, 25 bp, Homo sapien
caggaaaggcacatttatatatccc

SEQ ID NO: 5424177 - DNA, 25 bp, Homo sapien
gagatggaatactcaatgtcagttc

SEQ ID NO: 5424178 - DNA, 25 bp, Homo sapien
tcttcttaggtcatgctcttaaacc

SEQ ID NO: 5424179 - DNA, 25 bp, Homo sapien
ttcccacatgcacctattgtaaggg

SEQ ID NO: 5424180 - DNA, 25 bp, Homo sapien
tacatcatttttggacggattaaaa

SEQ ID NO: 5424181 - DNA, 25 bp, Homo sapien
aaatattaagtaaatcaggcagtca

SEQ ID NO: 5424182 - DNA, 25 bp, Homo sapien
gaatatttgcctaggtgttctgcat

SEQ ID NO: 5424183 - DNA, 25 bp, Homo sapien
gctactttaaggtaagagtctgccc

SEQ ID NO: 5424184 - DNA, 25 bp, Homo sapien
taagtactactggtctactaggcaa

SEQ ID NO: 5424185 - DNA, 25 bp, Homo sapien
ttcaaagaatggcagtccttcccgt

SEQ ID NO: 5424186 - DNA, 25 bp, Homo sapien
gcttctcagacgatggttcagttcc

SEQ ID NO: 5424187 - DNA, 25 bp, Homo sapien
cagacaagctagctgttgggcatcc

SEQ ID NO: 5424188 - DNA, 25 bp, Homo sapien
gaagtaatgatgcactccaagcacc

SEQ ID NO: 5424189 - DNA, 25 bp, Homo sapien
tattactagaggtgtaaaaccaggc

SEQ ID NO: 5424190 - DNA, 25 bp, Homo sapien
gaaacagctacagcaagagcagaag

SEQ ID NO: 5424191 - DNA, 25 bp, Homo sapien
gaaaactcttagacttaatgtctcc

SEQ ID NO: 5424192 - DNA, 25 bp, Homo sapien
ccttcattgcaagtgaagaacaggt

SEQ ID NO: 5424193 - DNA, 25 bp, Homo sapien
acaggtttaccatgaaatgaatgcc

SEQ ID NO: 5424194 - DNA, 25 bp, Homo sapien
gaaatcctgataaagctactactac

SEQ ID NO: 5424195 - DNA, 25 bp, Homo sapien
gaaatccacccttgcatagttttgc

SEQ ID NO: 5424196 - DNA, 25 bp, Homo sapien
cctggtattgcctgatggacaagct

SEQ ID NO: 5424197 - DNA, 25 bp, Homo sapien
tcctgtgctaccctataagaaaaag

SEQ ID NO: 5424198 - DNA, 25 bp, Homo sapien
tcatctcattatggcagaggttccc

SEQ ID NO: 5424199 - DNA, 25 bp, Homo sapien
tgaagaggtcactaaacattgcttg

SEQ ID NO: 5424200 - DNA, 25 bp, Homo sapien
actaggttgagctatgagaaactgc

SEQ ID NO: 5424201 - DNA, 25 bp, Homo sapien
cagtggtaaatgatagcagctcaga

SEQ ID NO: 5424202 - DNA, 25 bp, Homo sapien
taagcctaggagctggatactagcc

SEQ ID NO: 5424203 - DNA, 25 bp, Homo sapien
aactcttgggagttgcggacatgaa

SEQ ID NO: 5424204 - DNA, 25 bp, Homo sapien
tgaagtgggagtatgcttaagccta

SEQ ID NO: 5424205 - DNA, 25 bp, Homo sapien
tgtacagccagcatatcctaaattg

SEQ ID NO: 5424206 - DNA, 25 bp, Homo sapien
gtgcaaagacccctcaagatacgtc

SEQ ID NO: 5424207 - DNA, 25 bp, Homo sapien
gcaccataattttgttaaggcaaca

SEQ ID NO: 5424208 - DNA, 25 bp, Homo sapien
tgagactactctcacacaatccctg

SEQ ID NO: 5424209 - DNA, 25 bp, Homo sapien
tgccaaagggtaaataaagcgatgc

SEQ ID NO: 5424210 - DNA, 25 bp, Homo sapien
tttaactgcctagactcatatgtga

SEQ ID NO: 5424211 - DNA, 25 bp, Homo sapien
taaatcaaagcttttaactgcctag

SEQ ID NO: 5424212 - DNA, 25 bp, Homo sapien
cactatcacgaagcatgattgtgtg

SEQ ID NO: 5424213 - DNA, 25 bp, Homo sapien
tgttgtaaggttccaagcttttgat

SEQ ID NO: 5424214 - DNA, 25 bp, Homo sapien
tttccaccattggataattttcaag

SEQ ID NO: 5424215 - DNA, 25 bp, Homo sapien
cttccacacatcatggtcgttacag

SEQ ID NO: 5424216 - DNA, 25 bp, Homo sapien
acacatcatggtcgttacagaattc

SEQ ID NO: 5424217 - DNA, 25 bp, Homo sapien
tctggcaagtgatcacagcgtccaa

SEQ ID NO: 5424218 - DNA, 25 bp, Homo sapien
ggcaagtgatcacagcgtccaagaa

SEQ ID NO: 5424219 - DNA, 25 bp, Homo sapien
tatggtaagtttccggaggacctca

SEQ ID NO: 5424220 - DNA, 25 bp, Homo sapien
gcttcctgtacttgtatggtaagtt

SEQ ID NO: 5424221 - DNA, 25 bp, Homo sapien
agcttcatactgtccctccttgtag

SEQ ID NO: 5424222 - DNA, 25 bp, Homo sapien
tcaggctggtagcccgaggcctgca

SEQ ID NO: 5424223 - DNA, 25 bp, Homo sapien
agcatgcagcttcatactgtccctc

SEQ ID NO: 5424224 - DNA, 25 bp, Homo sapien
aaaggtcaggctggtagcccgaggc

SEQ ID NO: 5424225 - DNA, 25 bp, Homo sapien
cgtagcgtgcattgcggatgaggcg

SEQ ID NO: 5424226 - DNA, 25 bp, Homo sapien
ggcgtagcgtgcattgcggatgagg

SEQ ID NO: 5424227 - DNA, 25 bp, Homo sapien
ggcggtacacgaccgcggtgaactc

SEQ ID NO: 5424228 - DNA, 25 bp, Homo sapien
gcggatgaggcggtacacgaccgcg

SEQ ID NO: 5424229 - DNA, 25 bp, Homo sapien
gagcaaccggaagcggaagactgcc

SEQ ID NO: 5424230 - DNA, 25 bp, Homo sapien
cggctgttatgggtgcggttactat

SEQ ID NO: 5424231 - DNA, 25 bp, Homo sapien
gaagactgccggtttccttgtcgca

SEQ ID NO: 5424232 - DNA, 25 bp, Homo sapien
tactatggcaacagagcaaccggaa

SEQ ID NO: 5424233 - DNA, 25 bp, Homo sapien
ggactgcggagtggcggcattcagg

SEQ ID NO: 5424234 - DNA, 25 bp, Homo sapien
aagggaccactctcgtcagtctctc

SEQ ID NO: 5424235 - DNA, 25 bp, Homo sapien
tcttcaaatactctggactgcggag

SEQ ID NO: 5424236 - DNA, 25 bp, Homo sapien
aaaagggaccactctcgtcagtctc

SEQ ID NO: 5424237 - DNA, 25 bp, Homo sapien
tcttttttgcactaccccgagggca

SEQ ID NO: 5424238 - DNA, 25 bp, Homo sapien
tagagcggcgagcaggaatccttaa

SEQ ID NO: 5424239 - DNA, 25 bp, Homo sapien
tttcagtaaaagaaccgggatggca

SEQ ID NO: 5424240 - DNA, 25 bp, Homo sapien
tacacggtgtggtcgataataatgc

SEQ ID NO: 5424241 - DNA, 25 bp, Homo sapien
agctggagtgggcaggagggaggcc

SEQ ID NO: 5424242 - DNA, 25 bp, Homo sapien
gtgagcgtggcagctggagtgggca

SEQ ID NO: 5424243 - DNA, 25 bp, Homo sapien
ctgtgagcgtggcagctggagtggg

SEQ ID NO: 5424244 - DNA, 25 bp, Homo sapien
ctggagtgggcaggagggaggccat

SEQ ID NO: 5424245 - DNA, 25 bp, Homo sapien
aacaccattgccaccagacgctaag

SEQ ID NO: 5424246 - DNA, 25 bp, Homo sapien
tatcccctctttagtcattataact

SEQ ID NO: 5424247 - DNA, 25 bp, Homo sapien
cattataactatacaaatatgaaag

SEQ ID NO: 5424248 - DNA, 25 bp, Homo sapien
caccagacgctaagtaggaataaca

SEQ ID NO: 5424249 - DNA, 25 bp, Homo sapien
gtcacagactgccccctctcttgct

SEQ ID NO: 5424250 - DNA, 25 bp, Homo sapien
tgtcacagactgccccctctcttgc

SEQ ID NO: 5424251 - DNA, 25 bp, Homo sapien
tcacagactgccccctctcttgctg

SEQ ID NO: 5424252 - DNA, 25 bp, Homo sapien
cacagactgccccctctcttgctgg

SEQ ID NO: 5424253 - DNA, 25 bp, Homo sapien
agaaacatctgtttgactagagatg

SEQ ID NO: 5424254 - DNA, 25 bp, Homo sapien
catctgtttgactagagatgtctgg

SEQ ID NO: 5424255 - DNA, 25 bp, Homo sapien
tttgttcgttgttagagctcaggag

SEQ ID NO: 5424256 - DNA, 25 bp, Homo sapien
atgtaactgacaagtttgttcgttg

SEQ ID NO: 5424257 - DNA, 25 bp, Homo sapien
gcacaagctgtagggctgacttgtc

SEQ ID NO: 5424258 - DNA, 25 bp, Homo sapien
aatcagatccatgctcctggaaatt

SEQ ID NO: 5424259 - DNA, 25 bp, Homo sapien
cagaggcacaagctgtagggctgac

SEQ ID NO: 5424260 - DNA, 25 bp, Homo sapien
acttgtcattgagtccgggccatgg

SEQ ID NO: 5424261 - DNA, 25 bp, Homo sapien
gctctaggcgtgttgcaatttgcag

SEQ ID NO: 5424262 - DNA, 25 bp, Homo sapien
gctccaacacgcgatttctgagaca

SEQ ID NO: 5424263 - DNA, 25 bp, Homo sapien
tcccaacaagggctctaggcgtgtt

SEQ ID NO: 5424264 - DNA, 25 bp, Homo sapien
ttgcaatttgcagctccaacacgcg

SEQ ID NO: 5424265 - DNA, 25 bp, Homo sapien
tacaagccagtagtagttcttagac

SEQ ID NO: 5424266 - DNA, 25 bp, Homo sapien
tagacatcgaatgatctcaagcccc

SEQ ID NO: 5424267 - DNA, 25 bp, Homo sapien
gctggagtctgagccgcactgtctg

SEQ ID NO: 5424268 - DNA, 25 bp, Homo sapien
taaccttgaagcttgccatggcctg

SEQ ID NO: 5424269 - DNA, 25 bp, Homo sapien
cacccagcgctggtccagtctatct

SEQ ID NO: 5424270 - DNA, 25 bp, Homo sapien
agaaagattgagcaccgtcacccag

SEQ ID NO: 5424271 - DNA, 25 bp, Homo sapien
cattgcagcagaaagattgagcacc

SEQ ID NO: 5424272 - DNA, 25 bp, Homo sapien
cagatatttgtgcagagcgtcagtg

SEQ ID NO: 5424273 - DNA, 25 bp, Homo sapien
ctgccccttcagttcatccaaggtc

SEQ ID NO: 5424274 - DNA, 25 bp, Homo sapien
ccctggaccaaagattgacactctg

SEQ ID NO: 5424275 - DNA, 25 bp, Homo sapien
acttgataaggtgatgtccctcccc

SEQ ID NO: 5424276 - DNA, 25 bp, Homo sapien
tctgagtccaggtccacttgataag

SEQ ID NO: 5424277 - DNA, 25 bp, Homo sapien
ctctctctcctcctttccccccttg

SEQ ID NO: 5424278 - DNA, 25 bp, Homo sapien
tttgtataggacagtgtttggtttc

SEQ ID NO: 5424279 - DNA, 25 bp, Homo sapien
caatacatccgctgtcagacagatc

SEQ ID NO: 5424280 - DNA, 25 bp, Homo sapien
tgcactgtgacaatacatccgctgt

SEQ ID NO: 5424281 - DNA, 25 bp, Homo sapien
ctgaaggctggatctcagactgcac

SEQ ID NO: 5424282 - DNA, 25 bp, Homo sapien
ggatctcagactgcactgtgacaat

SEQ ID NO: 5424283 - DNA, 25 bp, Homo sapien
gggtctcaaggaagacatactccca

SEQ ID NO: 5424284 - DNA, 25 bp, Homo sapien
aacttgaggagtgacgctgggtctc

SEQ ID NO: 5424285 - DNA, 25 bp, Homo sapien
cccagagtgtttgggaatacgcata

SEQ ID NO: 5424286 - DNA, 25 bp, Homo sapien
tttgggaatacgcataaagattcat

SEQ ID NO: 5424287 - DNA, 25 bp, Homo sapien
caatgcgattttgcggtagggaaga

SEQ ID NO: 5424288 - DNA, 25 bp, Homo sapien
ggcttaactccacatatagcatggg

SEQ ID NO: 5424289 - DNA, 25 bp, Homo sapien
ggtatacaggaccactgcaatgcga

SEQ ID NO: 5424290 - DNA, 25 bp, Homo sapien
tgtatgtgggaactacctccatagg

SEQ ID NO: 5424291 - DNA, 25 bp, Homo sapien
tgtcttggtaaggattgggtcacat

SEQ ID NO: 5424292 - DNA, 25 bp, Homo sapien
ctttagttgttttgggatgcagcct

SEQ ID NO: 5424293 - DNA, 25 bp, Homo sapien
gatacctgggttccaccctcagaaa

SEQ ID NO: 5424294 - DNA, 25 bp, Homo sapien
tagtgatcaattagaccagcggttc

SEQ ID NO: 5424295 - DNA, 25 bp, Homo sapien
tcatttctttaggttgggcatcagg

SEQ ID NO: 5424296 - DNA, 25 bp, Homo sapien
cacagagcagtcacatggtcactac

SEQ ID NO: 5424297 - DNA, 25 bp, Homo sapien
taacagggacttaatcatggctcaa

SEQ ID NO: 5424298 - DNA, 25 bp, Homo sapien
gggcctcaaaagtctctggtaacac

SEQ ID NO: 5424299 - DNA, 25 bp, Homo sapien
tcctgacttatggtttgcaagcaag

SEQ ID NO: 5424300 - DNA, 25 bp, Homo sapien
agaatgtaagctctggctcctgggt

SEQ ID NO: 5424301 - DNA, 25 bp, Homo sapien
tttagaccataaagaacggcagtca

SEQ ID NO: 5424302 - DNA, 25 bp, Homo sapien
gaacttcccttgtaggaactcagga

SEQ ID NO: 5424303 - DNA, 25 bp, Homo sapien
gaaactacttgcagcgtcttggtca

SEQ ID NO: 5424304 - DNA, 25 bp, Homo sapien
aattgcactccttagcatatgtgag

SEQ ID NO: 5424305 - DNA, 25 bp, Homo sapien
gctttacaatgttagggtgtgacca

SEQ ID NO: 5424306 - DNA, 25 bp, Homo sapien
ggtcaaatcatgtatagctctcctc

SEQ ID NO: 5424307 - DNA, 25 bp, Homo sapien
cttttgaacaaggatttgggcccat

SEQ ID NO: 5424308 - DNA, 25 bp, Homo sapien
cacattatgatgttgtagaacggat

SEQ ID NO: 5424309 - DNA, 25 bp, Homo sapien
tatgtggtggatcaatcttggccca

SEQ ID NO: 5424310 - DNA, 25 bp, Homo sapien
ggcaggtctcacttaaactaacaaa

SEQ ID NO: 5424311 - DNA, 25 bp, Homo sapien
caattgttgcttgagggcaagacca

SEQ ID NO: 5424312 - DNA, 25 bp, Homo sapien
actaacagtgctttggtccatgaca

SEQ ID NO: 5424313 - DNA, 25 bp, Homo sapien
tatcttgtgatacatgctgcagcag

SEQ ID NO: 5424314 - DNA, 25 bp, Homo sapien
tatgcgcaaccataacagagactgg

SEQ ID NO: 5424315 - DNA, 25 bp, Homo sapien
tgtcggtgagggtttcttgagctac

SEQ ID NO: 5424316 - DNA, 25 bp, Homo sapien
tctggcaagtgatcagggcatctaa

SEQ ID NO: 5424317 - DNA, 25 bp, Homo sapien
gatgagccggtacactagcgcggta

SEQ ID NO: 5424318 - DNA, 25 bp, Homo sapien
tacttgcttggtgagtctccgaagc

SEQ ID NO: 5424319 - DNA, 25 bp, Homo sapien
tatgcgtgcggttaccacggcaaca

SEQ ID NO: 5424320 - DNA, 25 bp, Homo sapien
tactttgccacggaaggaatctgtt

SEQ ID NO: 5424321 - DNA, 25 bp, Homo sapien
ttcaaatattctggactgcagcgtg

SEQ ID NO: 5424322 - DNA, 25 bp, Homo sapien
ggaccgttctcgttagtctctcaag

SEQ ID NO: 5424323 - DNA, 25 bp, Homo sapien
tcttacaatgaaacatcagtctggg

SEQ ID NO: 5424324 - DNA, 25 bp, Homo sapien
gaatgagactcaacaaaacttagcc

SEQ ID NO: 5424325 - DNA, 25 bp, Homo sapien
gatattcaggtctcttaaagcgggc

SEQ ID NO: 5424326 - DNA, 25 bp, Homo sapien
tgcttgtgaaatggccaacctgtct

SEQ ID NO: 5424327 - DNA, 25 bp, Homo sapien
taacctttacatttcctgatacatt

SEQ ID NO: 5424328 - DNA, 25 bp, Homo sapien
ttaggaagctggtgcaattttggcc

SEQ ID NO: 5424329 - DNA, 25 bp, Homo sapien
ggagttctttacagcatgtagcaga

SEQ ID NO: 5424330 - DNA, 25 bp, Homo sapien
tggccttcttgtagtcagacttaac

SEQ ID NO: 5424331 - DNA, 25 bp, Homo sapien
catcataattagagacaggctcaag

SEQ ID NO: 5424332 - DNA, 25 bp, Homo sapien
tagtatgtctaggtttctgtcccac

SEQ ID NO: 5424333 - DNA, 25 bp, Homo sapien
gaaaaagcaactggattctggcagc

SEQ ID NO: 5424334 - DNA, 25 bp, Homo sapien
caatacctggaaatgcatagacatc

SEQ ID NO: 5424335 - DNA, 25 bp, Homo sapien
gcattcatttccccctctactttct

SEQ ID NO: 5424336 - DNA, 25 bp, Homo sapien
ttctccagtcttccctgcagagaca

SEQ ID NO: 5424337 - DNA, 25 bp, Homo sapien
ttcatttccccctctactttctcca

SEQ ID NO: 5424338 - DNA, 25 bp, Homo sapien
gcagaggcagtttcttcctgcattc

SEQ ID NO: 5424339 - DNA, 25 bp, Homo sapien
taaccacctgtctcggtccctgtct

SEQ ID NO: 5424340 - DNA, 25 bp, Homo sapien
tcttgcttttattcccctcttagtc

SEQ ID NO: 5424341 - DNA, 25 bp, Homo sapien
tctgagcaattgatgacagggttct

SEQ ID NO: 5424342 - DNA, 25 bp, Homo sapien
tgacagggttctacaccttcatttt

SEQ ID NO: 5424343 - DNA, 25 bp, Homo sapien
gcatgtagaacatggcccctatttc

SEQ ID NO: 5424344 - DNA, 25 bp, Homo sapien
ctgtaaagttaatgattgataatga

SEQ ID NO: 5424345 - DNA, 25 bp, Homo sapien
atttcctgaattgtctactgtgtgc

SEQ ID NO: 5424346 - DNA, 25 bp, Homo sapien
aacaatgtcgcatgtagaacatggc

SEQ ID NO: 5424347 - DNA, 25 bp, Homo sapien
ccccatgtacgtaatcaaagagatg

SEQ ID NO: 5424348 - DNA, 25 bp, Homo sapien
aaactcttcagagtccctgtggacc

SEQ ID NO: 5424349 - DNA, 25 bp, Homo sapien
tctggatgtccaaaccctgcttata

SEQ ID NO: 5424350 - DNA, 25 bp, Homo sapien
gctctcaggtttaatctaggccagg

SEQ ID NO: 5424351 - DNA, 25 bp, Homo sapien
caaggtagtcaatgcttagtctcca

SEQ ID NO: 5424352 - DNA, 25 bp, Homo sapien
taggattcttgggacagtctggcac

SEQ ID NO: 5424353 - DNA, 25 bp, Homo sapien
tagaatatgcgttctttgcccagac

SEQ ID NO: 5424354 - DNA, 25 bp, Homo sapien
cattcagggacaggaagcaaagaca

SEQ ID NO: 5424355 - DNA, 25 bp, Homo sapien
gctcagagtaagtaggccgactgtc

SEQ ID NO: 5424356 - DNA, 25 bp, Homo sapien
tcagagtaagtaggccgactgtcca

SEQ ID NO: 5424357 - DNA, 25 bp, Homo sapien
tcagctcagagtaagtaggccgact

SEQ ID NO: 5424358 - DNA, 25 bp, Homo sapien
ccctcagctcagagtaagtaggccg

SEQ ID NO: 5424359 - DNA, 25 bp, Homo sapien
ccatgcgtgttcattagggaaaagt

SEQ ID NO: 5424360 - DNA, 25 bp, Homo sapien
tgctgaccatgcttcaaggtgaaag

SEQ ID NO: 5424361 - DNA, 25 bp, Homo sapien
ttcatttcagcccatgcgtgttcat

SEQ ID NO: 5424362 - DNA, 25 bp, Homo sapien
tgcttcccagtgcatccttgagatg

SEQ ID NO: 5424363 - DNA, 25 bp, Homo sapien
atggcccttcaggctgtagtcattt

SEQ ID NO: 5424364 - DNA, 25 bp, Homo sapien
tggcccttcaggctgtagtcatttt

SEQ ID NO: 5424365 - DNA, 25 bp, Homo sapien
ttgtagctactgaatctagcatcgg

SEQ ID NO: 5424366 - DNA, 25 bp, Homo sapien
tagcatcggcttcagtttcacgttg

SEQ ID NO: 5424367 - DNA, 25 bp, Homo sapien
cttggctaccataacactggcaggg

SEQ ID NO: 5424368 - DNA, 25 bp, Homo sapien
cagtcgtttttggtgtagctcttcc

SEQ ID NO: 5424369 - DNA, 25 bp, Homo sapien
cttgagtctatttggccctcttgac

SEQ ID NO: 5424370 - DNA, 25 bp, Homo sapien
catgactgtggttagggagtagtca

SEQ ID NO: 5424371 - DNA, 25 bp, Homo sapien
agtcaatagtaagtcctccaacagg

SEQ ID NO: 5424372 - DNA, 25 bp, Homo sapien
ctgtggttagggagtagtcaatagt

SEQ ID NO: 5424373 - DNA, 25 bp, Homo sapien
ttagggagtagtcaatagtaagtcc

SEQ ID NO: 5424374 - DNA, 25 bp, Homo sapien
catagttccatggatacaaaacggt

SEQ ID NO: 5424375 - DNA, 25 bp, Homo sapien
tcgcagacaggacctcggatacttg

SEQ ID NO: 5424376 - DNA, 25 bp, Homo sapien
tggtagtacaccatacagagggatc

SEQ ID NO: 5424377 - DNA, 25 bp, Homo sapien
gttgagttctcttgtgaccagcata

SEQ ID NO: 5424378 - DNA, 25 bp, Homo sapien
ttctggtatggaaccagaactctcc

SEQ ID NO: 5424379 - DNA, 25 bp, Homo sapien
cttaggcatgcctgtagcacactct

SEQ ID NO: 5424380 - DNA, 25 bp, Homo sapien
ttctctggtcttctggtatggaacc

SEQ ID NO: 5424381 - DNA, 25 bp, Homo sapien
ccttccttaggcatgcctgtagcac

SEQ ID NO: 5424382 - DNA, 25 bp, Homo sapien
tcttacaagaggtggttggaacatg

SEQ ID NO: 5424383 - DNA, 25 bp, Homo sapien
caatcatgttcattgtgtaggcaac

SEQ ID NO: 5424384 - DNA, 25 bp, Homo sapien
ggcttcttacaagaggtggttggaa

SEQ ID NO: 5424385 - DNA, 25 bp, Homo sapien
gtaggcaacttctgacttggaagga

SEQ ID NO: 5424386 - DNA, 25 bp, Homo sapien
aaaggctgactacctcattgctcct

SEQ ID NO: 5424387 - DNA, 25 bp, Homo sapien
aaataaaggctgactacctcattgc

SEQ ID NO: 5424388 - DNA, 25 bp, Homo sapien
aataaaggctgactacctcattgct

SEQ ID NO: 5424389 - DNA, 25 bp, Homo sapien
taaaggctgactacctcattgctcc

SEQ ID NO: 5424390 - DNA, 25 bp, Homo sapien
ataatttctcgaaatcatatgtatg

SEQ ID NO: 5424391 - DNA, 25 bp, Homo sapien
attaaaataactagaggactacatt

SEQ ID NO: 5424392 - DNA, 25 bp, Homo sapien
ataactagaggactacattttctgg

SEQ ID NO: 5424393 - DNA, 25 bp, Homo sapien
tgtgacatatgctagctccatctct

SEQ ID NO: 5424394 - DNA, 25 bp, Homo sapien
aaagtactttcatcagtatccagag

SEQ ID NO: 5424395 - DNA, 25 bp, Homo sapien
tgtcagtttctaactcccattctac

SEQ ID NO: 5424396 - DNA, 25 bp, Homo sapien
tagggaacactggattgcttttaaa

SEQ ID NO: 5424397 - DNA, 25 bp, Homo sapien
gtcctggagtagcaccttatatcct

SEQ ID NO: 5424398 - DNA, 25 bp, Homo sapien
cacatgggggactgcttattcggag

SEQ ID NO: 5424399 - DNA, 25 bp, Homo sapien
catgggggactgcttattcggagac

SEQ ID NO: 5424400 - DNA, 25 bp, Homo sapien
aaagttgttgagctttgcacatggg

SEQ ID NO: 5424401 - DNA, 25 bp, Homo sapien
ctgacccaaaagttgttgagctttg

SEQ ID NO: 5424402 - DNA, 25 bp, Homo sapien
ccactccagttgcaaccgaggcagt

SEQ ID NO: 5424403 - DNA, 25 bp, Homo sapien
gcagatgctatcaatccactccagt

SEQ ID NO: 5424404 - DNA, 25 bp, Homo sapien
ctgatacaaaggcatgcagatgcta

SEQ ID NO: 5424405 - DNA, 25 bp, Homo sapien
tcatccttccggttccgatcaaaaa

SEQ ID NO: 5424406 - DNA, 25 bp, Homo sapien
tctcccgatctccttgttcgaagaa

SEQ ID NO: 5424407 - DNA, 25 bp, Homo sapien
gagtttgagctctaatctctcccga

SEQ ID NO: 5424408 - DNA, 25 bp, Homo sapien
ggagtgagtttgagctctaatctct

SEQ ID NO: 5424409 - DNA, 25 bp, Homo sapien
tcgaagaactcactggttacaagtt

SEQ ID NO: 5424410 - DNA, 25 bp, Homo sapien
taggactcaattcacttgtctcctc

SEQ ID NO: 5424411 - DNA, 25 bp, Homo sapien
ttttctaggactcaattcacttgtc

SEQ ID NO: 5424412 - DNA, 25 bp, Homo sapien
gttttctaggactcaattcacttgt

SEQ ID NO: 5424413 - DNA, 25 bp, Homo sapien
tctaggactcaattcacttgtctcc

SEQ ID NO: 5424414 - DNA, 25 bp, Homo sapien
atgtaaatgtgcacatcaggcgcct

SEQ ID NO: 5424415 - DNA, 25 bp, Homo sapien
catcaggcgcctcaaggtgggagtc

SEQ ID NO: 5424416 - DNA, 25 bp, Homo sapien
cacatcaggcgcctcaaggtgggag

SEQ ID NO: 5424417 - DNA, 25 bp, Homo sapien
caaggtgggagtcctgcataggtct

SEQ ID NO: 5424418 - DNA, 25 bp, Homo sapien
acatttgggttgtctttcttggagg

SEQ ID NO: 5424419 - DNA, 25 bp, Homo sapien
tctgttgtagagactagcatgtatc

SEQ ID NO: 5424420 - DNA, 25 bp, Homo sapien
taagagtttgatgccgtgactgatg

SEQ ID NO: 5424421 - DNA, 25 bp, Homo sapien
gcatgtatctcccagagatcctgga

SEQ ID NO: 5424422 - DNA, 25 bp, Homo sapien
ctggagatctcccacggtttggtca

SEQ ID NO: 5424423 - DNA, 25 bp, Homo sapien
tggagatctcccacggtttggtcac

SEQ ID NO: 5424424 - DNA, 25 bp, Homo sapien
tctggagatctcccacggtttggtc

SEQ ID NO: 5424425 - DNA, 25 bp, Homo sapien
aggtcacaggctgtcattaacattg

SEQ ID NO: 5424426 - DNA, 25 bp, Homo sapien
caaggtcacaggctgtcattaacat

SEQ ID NO: 5424427 - DNA, 25 bp, Homo sapien
gtcacaggctgtcattaacattgat

SEQ ID NO: 5424428 - DNA, 25 bp, Homo sapien
gctccaaggtcacaggctgtcatta

SEQ ID NO: 5424429 - DNA, 25 bp, Homo sapien
actcgagcagcattgatgaaacctc

SEQ ID NO: 5424430 - DNA, 25 bp, Homo sapien
aaccaggtggcaccggcatcagcag

SEQ ID NO: 5424431 - DNA, 25 bp, Homo sapien
gatgaaacctctaattccaaacatc

SEQ ID NO: 5424432 - DNA, 25 bp, Homo sapien
atcagcagccctctcaactcgagca

SEQ ID NO: 5424433 - DNA, 25 bp, Homo sapien
ggagactcattggagatgtaaattg

SEQ ID NO: 5424434 - DNA, 25 bp, Homo sapien
gagactcattggagatgtaaattga

SEQ ID NO: 5424435 - DNA, 25 bp, Homo sapien
ggtttttgatgttccaatcgtattc

SEQ ID NO: 5424436 - DNA, 25 bp, Homo sapien
gatgttccaatcgtattctccttta

SEQ ID NO: 5424437 - DNA, 25 bp, Homo sapien
gttccaatcgtattctcctttactg

SEQ ID NO: 5424438 - DNA, 25 bp, Homo sapien
cgaaatatatcacgatggtttttga

SEQ ID NO: 5424439 - DNA, 25 bp, Homo sapien
gttatatctgcccatagtatgttca

SEQ ID NO: 5424440 - DNA, 25 bp, Homo sapien
tccactaacgattgttatatctgcc

SEQ ID NO: 5424441 - DNA, 25 bp, Homo sapien
catctttgatgcagagtgaaagcat

SEQ ID NO: 5424442 - DNA, 25 bp, Homo sapien
catagtatgttcactatagggaaca

SEQ ID NO: 5424443 - DNA, 25 bp, Homo sapien
tgtgtagcataaacctttgggccag

SEQ ID NO: 5424444 - DNA, 25 bp, Homo sapien
caataccaagtatcaaggcagacac

SEQ ID NO: 5424445 - DNA, 25 bp, Homo sapien
gccaggttggtggttcacagctcca

SEQ ID NO: 5424446 - DNA, 25 bp, Homo sapien
cattcaatgcttgcgagagttaccc

SEQ ID NO: 5424447 - DNA, 25 bp, Homo sapien
gggtataattgctagataaaataat

SEQ ID NO: 5424448 - DNA, 25 bp, Homo sapien
ggacatctaactatctattctaaaa

SEQ ID NO: 5424449 - DNA, 25 bp, Homo sapien
ttttctgcatgtaatagtaaggtat

SEQ ID NO: 5424450 - DNA, 25 bp, Homo sapien
gggaggggtataattgctagataaa

SEQ ID NO: 5424451 - DNA, 25 bp, Homo sapien
ttcaaagcgaatggcacaagacttc

SEQ ID NO: 5424452 - DNA, 25 bp, Homo sapien
taactgatgcaatgccacagtgctt

SEQ ID NO: 5424453 - DNA, 25 bp, Homo sapien
gaacctaattctaactgatgcaatg

SEQ ID NO: 5424454 - DNA, 25 bp, Homo sapien
gggagtcatttcaaagcgaatggca

SEQ ID NO: 5424455 - DNA, 25 bp, Homo sapien
tcaaagtacagcgtgaggtctgttg

SEQ ID NO: 5424456 - DNA, 25 bp, Homo sapien
aaagctgcataaggtcactatattc

SEQ ID NO: 5424457 - DNA, 25 bp, Homo sapien
ccaatattgactgcttcaaaagctg

SEQ ID NO: 5424458 - DNA, 25 bp, Homo sapien
tctgttgccaatattgactgcttca

SEQ ID NO: 5424459 - DNA, 25 bp, Homo sapien
tcgcagtctgcattcaggttctgga

SEQ ID NO: 5424460 - DNA, 25 bp, Homo sapien
gaaggcctccatgatattgcaaaag

SEQ ID NO: 5424461 - DNA, 25 bp, Homo sapien
ttactgagagcctaactcttggtgt

SEQ ID NO: 5424462 - DNA, 25 bp, Homo sapien
tttatggggtcgaaggcctccatga

SEQ ID NO: 5424463 - DNA, 25 bp, Homo sapien
tgtggcaccacaaaggaagagaggg

SEQ ID NO: 5424464 - DNA, 25 bp, Homo sapien
aggaagagagggaggaaacaaagag

SEQ ID NO: 5424465 - DNA, 25 bp, Homo sapien
agagagggaggaaacaaagagttgt

SEQ ID NO: 5424466 - DNA, 25 bp, Homo sapien
cacaaaggaagagagggaggaaaca

SEQ ID NO: 5424467 - DNA, 25 bp, Homo sapien
gaaatggtgatgctccaaggtagca

SEQ ID NO: 5424468 - DNA, 25 bp, Homo sapien
ttccatagagttgggccagggcaga

SEQ ID NO: 5424469 - DNA, 25 bp, Homo sapien
caaggtagcagaggttccatagagt

SEQ ID NO: 5424470 - DNA, 25 bp, Homo sapien
gatcatcacggcgtggttgaaatgg

SEQ ID NO: 5424471 - DNA, 25 bp, Homo sapien
cagctttttggatcaaactgctttt

SEQ ID NO: 5424472 - DNA, 25 bp, Homo sapien
taggtgtgcactgttggtcccaaca

SEQ ID NO: 5424473 - DNA, 25 bp, Homo sapien
cggtccagctttgattaggtgtgca

SEQ ID NO: 5424474 - DNA, 25 bp, Homo sapien
catccgcttggtatgtggtcatcat

SEQ ID NO: 5424475 - DNA, 25 bp, Homo sapien
gagataaaatccgatcggtccagct

SEQ ID NO: 5424476 - DNA, 25 bp, Homo sapien
tcagaatgtcttgaaacccagcagt

SEQ ID NO: 5424477 - DNA, 25 bp, Homo sapien
ggttcccctgtggtcgaggtcatga

SEQ ID NO: 5424478 - DNA, 25 bp, Homo sapien
ggtcatgacacaggcatcccacaat

SEQ ID NO: 5424479 - DNA, 25 bp, Homo sapien
cgctaaaatttccacctcggtcaga

SEQ ID NO: 5424480 - DNA, 25 bp, Homo sapien
gaggattgtcaacccagactgagga

SEQ ID NO: 5424481 - DNA, 25 bp, Homo sapien
taaggcagtgcatgtcatggacacc

SEQ ID NO: 5424482 - DNA, 25 bp, Homo sapien
tatcttgtggtagcttgctggtgaa

SEQ ID NO: 5424483 - DNA, 25 bp, Homo sapien
caccagaatttgtcagaggattgtc

SEQ ID NO: 5424484 - DNA, 25 bp, Homo sapien
tttaatgtgatcatgtgctcttctc

SEQ ID NO: 5424485 - DNA, 25 bp, Homo sapien
tattctatatgaaccctagctgaac

SEQ ID NO: 5424486 - DNA, 25 bp, Homo sapien
cataatattctatatgaaccctagc

SEQ ID NO: 5424487 - DNA, 25 bp, Homo sapien
ttttaatgtgatcatgtgctcttct

SEQ ID NO: 5424488 - DNA, 25 bp, Homo sapien
tattttggcaattcgcataaatcca

SEQ ID NO: 5424489 - DNA, 25 bp, Homo sapien
attttggcaattcgcataaatccat

SEQ ID NO: 5424490 - DNA, 25 bp, Homo sapien
tagtctgggtgcaaaaatataaggt

SEQ ID NO: 5424491 - DNA, 25 bp, Homo sapien
tatttaagccagaaaacattgtact

SEQ ID NO: 5424492 - DNA, 25 bp, Homo sapien
tttatgttggaagagtccaagactc

SEQ ID NO: 5424493 - DNA, 25 bp, Homo sapien
cacacccacagatatgtacgtacac

SEQ ID NO: 5424494 - DNA, 25 bp, Homo sapien
tgatcttccaccatcactaagcaca

SEQ ID NO: 5424495 - DNA, 25 bp, Homo sapien
aatgatcttccaccatcactaagca

SEQ ID NO: 5424496 - DNA, 25 bp, Homo sapien
gaatgagaaatgatcttccaccatc

SEQ ID NO: 5424497 - DNA, 25 bp, Homo sapien
gaaatgatcttccaccatcactaag

SEQ ID NO: 5424498 - DNA, 25 bp, Homo sapien
catcagctgacacacgttgaaggca

SEQ ID NO: 5424499 - DNA, 25 bp, Homo sapien
ggttaacatcgcgaacatcagctga

SEQ ID NO: 5424500 - DNA, 25 bp, Homo sapien
ctgtcaaaagccacctacacagtgt

SEQ ID NO: 5424501 - DNA, 25 bp, Homo sapien
tccagttgtggtatagaaccatccg

SEQ ID NO: 5424502 - DNA, 25 bp, Homo sapien
catcaacgtcgagagaaaagtcatc

SEQ ID NO: 5424503 - DNA, 25 bp, Homo sapien
caaaatgaatgtcatcgatggcaag

SEQ ID NO: 5424504 - DNA, 25 bp, Homo sapien
tgaacatccggagagcagctgtgat

SEQ ID NO: 5424505 - DNA, 25 bp, Homo sapien
cgatggcaagttctgacaccagagg

SEQ ID NO: 5424506 - DNA, 25 bp, Homo sapien
taagagattcaatccaactctggct

SEQ ID NO: 5424507 - DNA, 25 bp, Homo sapien
gattcaatccaactctggctgctct

SEQ ID NO: 5424508 - DNA, 25 bp, Homo sapien
tttggctaagagattcaatccaact

SEQ ID NO: 5424509 - DNA, 25 bp, Homo sapien
caatccaactctggctgctctaagc

SEQ ID NO: 5424510 - DNA, 25 bp, Homo sapien
tgtccatgccaggttggctcccttg

SEQ ID NO: 5424511 - DNA, 25 bp, Homo sapien
ttggaccacagtgcaggcgcctggt

SEQ ID NO: 5424512 - DNA, 25 bp, Homo sapien
tcatccaagtaaagggcatccgctt

SEQ ID NO: 5424513 - DNA, 25 bp, Homo sapien
tttgaagaccaagcaaccctttgtg

SEQ ID NO: 5424514 - DNA, 25 bp, Homo sapien
tgaaagaaccagggaaaaagagaga

SEQ ID NO: 5424515 - DNA, 25 bp, Homo sapien
caagaagaaggtaggtccttgcagg

SEQ ID NO: 5424516 - DNA, 25 bp, Homo sapien
gcttcatccctccaagaagaaggta

SEQ ID NO: 5424517 - DNA, 25 bp, Homo sapien
tctgaggttagcctgcttcatccct

SEQ ID NO: 5424518 - DNA, 25 bp, Homo sapien
cagctgggtgactctgaggttagcc

SEQ ID NO: 5424519 - DNA, 25 bp, Homo sapien
ggcttcctgcctacatcaacctcaa

SEQ ID NO: 5424520 - DNA, 25 bp, Homo sapien
atgctcggttgaatcttaatggctt

SEQ ID NO: 5424521 - DNA, 25 bp, Homo sapien
tcggttgaatcttaatggcttcctg

SEQ ID NO: 5424522 - DNA, 25 bp, Homo sapien
gttgaatcttaatggcttcctgcct

SEQ ID NO: 5424523 - DNA, 25 bp, Homo sapien
gagagggagggcacaaccactattc

SEQ ID NO: 5424524 - DNA, 25 bp, Homo sapien
gagggagggcacaaccactattcct

SEQ ID NO: 5424525 - DNA, 25 bp, Homo sapien
agagggagggcacaaccactattcc

SEQ ID NO: 5424526 - DNA, 25 bp, Homo sapien
agggagggcacaaccactattcctt

SEQ ID NO: 5424527 - DNA, 25 bp, Homo sapien
taagcatgcattgccatgtgaccca

SEQ ID NO: 5424528 - DNA, 25 bp, Homo sapien
gaagagaaaggacatctcgcacctg

SEQ ID NO: 5424529 - DNA, 25 bp, Homo sapien
tgtaggaggtcaagggtccagttca

SEQ ID NO: 5424530 - DNA, 25 bp, Homo sapien
tcgcacctgcctgaatcactgagtg

SEQ ID NO: 5424531 - DNA, 25 bp, Homo sapien
taacaaggcataggaagaacccagc

SEQ ID NO: 5424532 - DNA, 25 bp, Homo sapien
gaagtctcccaggagtcagacctga

SEQ ID NO: 5424533 - DNA, 25 bp, Homo sapien
tcaatagtccttggactgctgccct

SEQ ID NO: 5424534 - DNA, 25 bp, Homo sapien
gccaccagacagaaatagagctgct

SEQ ID NO: 5424535 - DNA, 25 bp, Homo sapien
cacctgcaggtaggttatttatatt

SEQ ID NO: 5424536 - DNA, 25 bp, Homo sapien
tataaaacacctgcaggtaggttat

SEQ ID NO: 5424537 - DNA, 25 bp, Homo sapien
tctgatcggaccataaatcctgaaa

SEQ ID NO: 5424538 - DNA, 25 bp, Homo sapien
tgatataaaacacctgcaggtaggt

SEQ ID NO: 5424539 - DNA, 25 bp, Homo sapien
ggcatggagtatggtcactagttta

SEQ ID NO: 5424540 - DNA, 25 bp, Homo sapien
tattcagggaatatgtaggctcata

SEQ ID NO: 5424541 - DNA, 25 bp, Homo sapien
tctcagctgcacataagaaaccttg

SEQ ID NO: 5424542 - DNA, 25 bp, Homo sapien
gaaaccttgccacttctgctcagta

SEQ ID NO: 5424543 - DNA, 25 bp, Homo sapien
ttttcctgttgctgggtgactgcga

SEQ ID NO: 5424544 - DNA, 25 bp, Homo sapien
ggtgactgcgaatattttgaaaaca

SEQ ID NO: 5424545 - DNA, 25 bp, Homo sapien
tgagagagccaatgaaatgcctttt

SEQ ID NO: 5424546 - DNA, 25 bp, Homo sapien
cattggctggctaggcatactgtgc

SEQ ID NO: 5424547 - DNA, 25 bp, Homo sapien
ctggcagaggagtgacagttgggaa

SEQ ID NO: 5424548 - DNA, 25 bp, Homo sapien
ggcagaggagtgacagttgggaaga

SEQ ID NO: 5424549 - DNA, 25 bp, Homo sapien
gctggcagaggagtgacagttggga

SEQ ID NO: 5424550 - DNA, 25 bp, Homo sapien
gcagaggagtgacagttgggaagag

SEQ ID NO: 5424551 - DNA, 25 bp, Homo sapien
caggcacagtatgcggtcagtgtca

SEQ ID NO: 5424552 - DNA, 25 bp, Homo sapien
cagtgtcaggggcagcattggctgc

SEQ ID NO: 5424553 - DNA, 25 bp, Homo sapien
ccagcaggcacagtatgcggtcagt

SEQ ID NO: 5424554 - DNA, 25 bp, Homo sapien
ccaaaaatccagcaggcacagtatg

SEQ ID NO: 5424555 - DNA, 25 bp, Homo sapien
aggacggccacctgttcccacagaa

SEQ ID NO: 5424556 - DNA, 25 bp, Homo sapien
tgtttgacaaacttaagcccaagtg

SEQ ID NO: 5424557 - DNA, 25 bp, Homo sapien
cagcttcagtggtttacggagttgt

SEQ ID NO: 5424558 - DNA, 25 bp, Homo sapien
gttttcacagaactcgtctccatct

SEQ ID NO: 5424559 - DNA, 25 bp, Homo sapien
aaagaagtacctgtggatgctgctc

SEQ ID NO: 5424560 - DNA, 25 bp, Homo sapien
tatagtgagtgtaaagaagtacctg

SEQ ID NO: 5424561 - DNA, 25 bp, Homo sapien
ctttcgtgggtgtggatttgattat

SEQ ID NO: 5424562 - DNA, 25 bp, Homo sapien
agtgtaaagaagtacctgtggatgc

SEQ ID NO: 5424563 - DNA, 25 bp, Homo sapien
ggagcaaggatggcacccagtggcc

SEQ ID NO: 5424564 - DNA, 25 bp, Homo sapien
tctagaagatactaaactttgtgag

SEQ ID NO: 5424565 - DNA, 25 bp, Homo sapien
gcttctagaagatactaaactttgt

SEQ ID NO: 5424566 - DNA, 25 bp, Homo sapien
gaggcttctagaagatactaaactt

SEQ ID NO: 5424567 - DNA, 25 bp, Homo sapien
tagaagatactaaactttgtgagct

SEQ ID NO: 5424568 - DNA, 25 bp, Homo sapien
caggatggatctcggatagggtcaa

SEQ ID NO: 5424569 - DNA, 25 bp, Homo sapien
catctgttagctgtgcacaggatgg

SEQ ID NO: 5424570 - DNA, 25 bp, Homo sapien
tctcggatagggtcaacagcaggag

SEQ ID NO: 5424571 - DNA, 25 bp, Homo sapien
tgttcatctgttagctgtgcacagg

SEQ ID NO: 5424572 - DNA, 25 bp, Homo sapien
aatggcctgcctgaaggagaatgag

SEQ ID NO: 5424573 - DNA, 25 bp, Homo sapien
agtgtacaataatggcctgcctgaa

SEQ ID NO: 5424574 - DNA, 25 bp, Homo sapien
gaatgaggatctgaactagtgaggg

SEQ ID NO: 5424575 - DNA, 25 bp, Homo sapien
ggaaagcagtgtacaataatggcct

SEQ ID NO: 5424576 - DNA, 25 bp, Homo sapien
tggaccttcaggacttgtcgccgct

SEQ ID NO: 5424577 - DNA, 25 bp, Homo sapien
ccttcaggacttgtcgccgctttgt

SEQ ID NO: 5424578 - DNA, 25 bp, Homo sapien
gacttgtcgccgctttgttcctagc

SEQ ID NO: 5424579 - DNA, 25 bp, Homo sapien
ttgtcgccgctttgttcctagcgct

SEQ ID NO: 5424580 - DNA, 25 bp, Homo sapien
agctggcatctttaggttattgaaa

SEQ ID NO: 5424581 - DNA, 25 bp, Homo sapien
ccatcttcaaggagatgtaattgtc

SEQ ID NO: 5424582 - DNA, 25 bp, Homo sapien
tgattccatcgatgccatcagcttc

SEQ ID NO: 5424583 - DNA, 25 bp, Homo sapien
agcctgcattgattccatcgatgcc

SEQ ID NO: 5424584 - DNA, 25 bp, Homo sapien
ccctgccacgggtccgtagtgatgc

SEQ ID NO: 5424585 - DNA, 25 bp, Homo sapien
cacgggtccgtagtgatgcttcctt

SEQ ID NO: 5424586 - DNA, 25 bp, Homo sapien
tgctgccttctgttagcacactgac

SEQ ID NO: 5424587 - DNA, 25 bp, Homo sapien
gctgccttctgttagcacactgacc

SEQ ID NO: 5424588 - DNA, 25 bp, Homo sapien
tgccttctgttagcacactgaccca

SEQ ID NO: 5424589 - DNA, 25 bp, Homo sapien
ccttctgttagcacactgacccatt

SEQ ID NO: 5424590 - DNA, 25 bp, Homo sapien
ctatcgggagcatttgatgcactga

SEQ ID NO: 5424591 - DNA, 25 bp, Homo sapien
tgcactgaaaccataccaaagctca

SEQ ID NO: 5424592 - DNA, 25 bp, Homo sapien
tatcgggagcatttgatgcactgaa

SEQ ID NO: 5424593 - DNA, 25 bp, Homo sapien
tgatgcactgaaaccataccaaagc

SEQ ID NO: 5424594 - DNA, 25 bp, Homo sapien
tttgaacatgttgcatggtatgata

SEQ ID NO: 5424595 - DNA, 25 bp, Homo sapien
tcttccttcatggaatacagctgta

SEQ ID NO: 5424596 - DNA, 25 bp, Homo sapien
tctggtgtgtatgaggtgacaagca

SEQ ID NO: 5424597 - DNA, 25 bp, Homo sapien
tacagctgtaaagcctggaggtgca

SEQ ID NO: 5424598 - DNA, 25 bp, Homo sapien
gacacggccttggtcaatgaattat

SEQ ID NO: 5424599 - DNA, 25 bp, Homo sapien
gccagaggagtggattccttaagat

SEQ ID NO: 5424600 - DNA, 25 bp, Homo sapien
gatggtagcattgttccctctaaga

SEQ ID NO: 5424601 - DNA, 25 bp, Homo sapien
taaatcttgcttaagaactctgatt

SEQ ID NO: 5424602 - DNA, 25 bp, Homo sapien
gataagagacccttaaatcttgctt

SEQ ID NO: 5424603 - DNA, 25 bp, Homo sapien
cagggcacagcgagaacccagtaat

SEQ ID NO: 5424604 - DNA, 25 bp, Homo sapien
tttgcaggttttacacacagggcac

SEQ ID NO: 5424605 - DNA, 25 bp, Homo sapien
ttcatgtattgtatcaatttagcca

SEQ ID NO: 5424606 - DNA, 25 bp, Homo sapien
gaacccagtaatatctgtacctctt

SEQ ID NO: 5424607 - DNA, 25 bp, Homo sapien
ctcttgcaccaattgtcttgaatgt

SEQ ID NO: 5424608 - DNA, 25 bp, Homo sapien
attgtcttgaatgttaatttgttgt

SEQ ID NO: 5424609 - DNA, 25 bp, Homo sapien
ttgtggatttgggcagccatttgct

SEQ ID NO: 5424610 - DNA, 25 bp, Homo sapien
gagcctggttagtgtctttgtgaca

SEQ ID NO: 5424611 - DNA, 25 bp, Homo sapien
caggagcctggttagtgtctttgtg

SEQ ID NO: 5424612 - DNA, 25 bp, Homo sapien
aacaggagcctggttagtgtctttg

SEQ ID NO: 5424613 - DNA, 25 bp, Homo sapien
cagaacaggagcctggttagtgtct

SEQ ID NO: 5424614 - DNA, 25 bp, Homo sapien
aaagtccatggatttccgggacgat

SEQ ID NO: 5424615 - DNA, 25 bp, Homo sapien
ggtacctgggatcagccaaactaaa

SEQ ID NO: 5424616 - DNA, 25 bp, Homo sapien
gaaatgtgcataatgtagggctcac

SEQ ID NO: 5424617 - DNA, 25 bp, Homo sapien
gatgtcattcagattatattccagg

SEQ ID NO: 5424618 - DNA, 25 bp, Homo sapien
ctgttaaaatccagcacagtgtgga

SEQ ID NO: 5424619 - DNA, 25 bp, Homo sapien
taaaatccagcacagtgtggagggg

SEQ ID NO: 5424620 - DNA, 25 bp, Homo sapien
aatccagcacagtgtggagggggat

SEQ ID NO: 5424621 - DNA, 25 bp, Homo sapien
gttaaaatccagcacagtgtggagg

SEQ ID NO: 5424622 - DNA, 25 bp, Homo sapien
tcagtggtgtgaccaaacagcatgt

SEQ ID NO: 5424623 - DNA, 25 bp, Homo sapien
cattgagcaaacactggtgccctgg

SEQ ID NO: 5424624 - DNA, 25 bp, Homo sapien
gagcagctgcacttgcgatgcttct

SEQ ID NO: 5424625 - DNA, 25 bp, Homo sapien
cagacaatgggcctgcattgagcaa

SEQ ID NO: 5424626 - DNA, 25 bp, Homo sapien
tataaagtcctcagggtaagaaatc

SEQ ID NO: 5424627 - DNA, 25 bp, Homo sapien
tactcttgcacatggattcctaggc

SEQ ID NO: 5424628 - DNA, 25 bp, Homo sapien
gccacctgatcactagtgtcaagaa

SEQ ID NO: 5424629 - DNA, 25 bp, Homo sapien
ggtaagaaatccttccagatactct

SEQ ID NO: 5424630 - DNA, 25 bp, Homo sapien
tcaaaacaagcgtctgagattcagg

SEQ ID NO: 5424631 - DNA, 25 bp, Homo sapien
gacaggagtagctttccccatctag

SEQ ID NO: 5424632 - DNA, 25 bp, Homo sapien
gcttcaaggcatctgtgaacccctg

SEQ ID NO: 5424633 - DNA, 25 bp, Homo sapien
taagcaccctgctaggcattgcaaa

SEQ ID NO: 5424634 - DNA, 25 bp, Homo sapien
cttcacttgatcatacataattgtg

SEQ ID NO: 5424635 - DNA, 25 bp, Homo sapien
aggacttcttcacttgatcatacat

SEQ ID NO: 5424636 - DNA, 25 bp, Homo sapien
taattgtgttgttgatgccaagtcc

SEQ ID NO: 5424637 - DNA, 25 bp, Homo sapien
attgtgttgttgatgccaagtccac

SEQ ID NO: 5424638 - DNA, 25 bp, Homo sapien
aaaagtcgttgatctgcatcatcaa

SEQ ID NO: 5424639 - DNA, 25 bp, Homo sapien
cgttgatctgcatcatcaaaaggtt

SEQ ID NO: 5424640 - DNA, 25 bp, Homo sapien
agtctgtttaacacttgagccactc

SEQ ID NO: 5424641 - DNA, 25 bp, Homo sapien
ccatcaagtctgtttaacacttgag

SEQ ID NO: 5424642 - DNA, 25 bp, Homo sapien
gatcttatgtgaaaaccagatatct

SEQ ID NO: 5424643 - DNA, 25 bp, Homo sapien
gctattccaaatagggacacaaaga

SEQ ID NO: 5424644 - DNA, 25 bp, Homo sapien
caattatttggtggttgctattcca

SEQ ID NO: 5424645 - DNA, 25 bp, Homo sapien
gacacaaagaacagatcttatgtga

SEQ ID NO: 5424646 - DNA, 25 bp, Homo sapien
atccaaaaccaacatgacctccttc

SEQ ID NO: 5424647 - DNA, 25 bp, Homo sapien
aatccaaaaccaacatgacctcctt

SEQ ID NO: 5424648 - DNA, 25 bp, Homo sapien
cacaatgaacatcctaaaggaatca

SEQ ID NO: 5424649 - DNA, 25 bp, Homo sapien
taaatccaaaaccaacatgacctcc

SEQ ID NO: 5424650 - DNA, 25 bp, Homo sapien
catcaaagcgcggatcctggtaggc

SEQ ID NO: 5424651 - DNA, 25 bp, Homo sapien
ttatttattagccagtcggagtatg

SEQ ID NO: 5424652 - DNA, 25 bp, Homo sapien
ggaaggcctgttgaagcaaccagct

SEQ ID NO: 5424653 - DNA, 25 bp, Homo sapien
gccagtcggagtatgatgatttctc

SEQ ID NO: 5424654 - DNA, 25 bp, Homo sapien
tgttctgtgatcacaccgtttcgaa

SEQ ID NO: 5424655 - DNA, 25 bp, Homo sapien
gattaattggcttgccagttcattc

SEQ ID NO: 5424656 - DNA, 25 bp, Homo sapien
ctttcagggattaattggcttgcca

SEQ ID NO: 5424657 - DNA, 25 bp, Homo sapien
ttcgaagctgctgacctagagtgtt

SEQ ID NO: 5424658 - DNA, 25 bp, Homo sapien
aataatgtacatgaggaccctaggt

SEQ ID NO: 5424659 - DNA, 25 bp, Homo sapien
gaccctaggtaacacaattgtattg

SEQ ID NO: 5424660 - DNA, 25 bp, Homo sapien
ttacactaggtgctacaggacagac

SEQ ID NO: 5424661 - DNA, 25 bp, Homo sapien
ggagtacaatttagctgctcttgca

SEQ ID NO: 5424662 - DNA, 25 bp, Homo sapien
tttggggacatcaattcaaaggatt

SEQ ID NO: 5424663 - DNA, 25 bp, Homo sapien
tcaggtgagcttcgtggtaccacca

SEQ ID NO: 5424664 - DNA, 25 bp, Homo sapien
caggtgagcttcgtggtaccaccac

SEQ ID NO: 5424665 - DNA, 25 bp, Homo sapien
cagaacaatcggaggatgctcgccc

SEQ ID NO: 5424666 - DNA, 25 bp, Homo sapien
tgccccagaacaatcggaggatgct

SEQ ID NO: 5424667 - DNA, 25 bp, Homo sapien
gaaggagggcactgaattacggact

SEQ ID NO: 5424668 - DNA, 25 bp, Homo sapien
tgaattacggactgccccagaacaa

SEQ ID NO: 5424669 - DNA, 25 bp, Homo sapien
tcagttctcaggattgtatttgcag

SEQ ID NO: 5424670 - DNA, 25 bp, Homo sapien
tcaggactttaaggccctagttcag

SEQ ID NO: 5424671 - DNA, 25 bp, Homo sapien
caaaaccaagccatgcatgtcagga

SEQ ID NO: 5424672 - DNA, 25 bp, Homo sapien
gaggcaatccacaaaaccaagccat

SEQ ID NO: 5424673 - DNA, 25 bp, Homo sapien
ctggtaaggctactttgtgccagaa

SEQ ID NO: 5424674 - DNA, 25 bp, Homo sapien
gctactttgtgccagaattcgcagg

SEQ ID NO: 5424675 - DNA, 25 bp, Homo sapien
taaggctactttgtgccagaattcg

SEQ ID NO: 5424676 - DNA, 25 bp, Homo sapien
aggctactttgtgccagaattcgca

SEQ ID NO: 5424677 - DNA, 25 bp, Homo sapien
ggttggccattccattctgctcgag

SEQ ID NO: 5424678 - DNA, 25 bp, Homo sapien
gaagcctccacaggacaaatctgct

SEQ ID NO: 5424679 - DNA, 25 bp, Homo sapien
gaagggcccagcttcggttggccat

SEQ ID NO: 5424680 - DNA, 25 bp, Homo sapien
tccaagagctaagggtactgaatct

SEQ ID NO: 5424681 - DNA, 25 bp, Homo sapien
cttaagaagaccatggagcattctc

SEQ ID NO: 5424682 - DNA, 25 bp, Homo sapien
tctggactgaaatccaccccccgaa

SEQ ID NO: 5424683 - DNA, 25 bp, Homo sapien
caccccccgaaatgctgagggcctt

SEQ ID NO: 5424684 - DNA, 25 bp, Homo sapien
tggagcattctctggactgaaatcc

SEQ ID NO: 5424685 - DNA, 25 bp, Homo sapien
ttcacacagtcttcaactttaaaag

SEQ ID NO: 5424686 - DNA, 25 bp, Homo sapien
cacacagtcttcaactttaaaagat

SEQ ID NO: 5424687 - DNA, 25 bp, Homo sapien
cattcacacagtcttcaactttaaa

SEQ ID NO: 5424688 - DNA, 25 bp, Homo sapien
ttccattcacacagtcttcaacttt

SEQ ID NO: 5424689 - DNA, 25 bp, Homo sapien
tggtgattcgatgtcctctaggagt

SEQ ID NO: 5424690 - DNA, 25 bp, Homo sapien
aaagaggtcattaaccacctctagc

SEQ ID NO: 5424691 - DNA, 25 bp, Homo sapien
tcagcagagtttgggcccgatgcat

SEQ ID NO: 5424692 - DNA, 25 bp, Homo sapien
gaacagcgttcacatttcagcagag

SEQ ID NO: 5424693 - DNA, 25 bp, Homo sapien
aaagcagcttttcctcactatcagg

SEQ ID NO: 5424694 - DNA, 25 bp, Homo sapien
agaaacaggttcttggtcaaacttg

SEQ ID NO: 5424695 - DNA, 25 bp, Homo sapien
aaacaggttcttggtcaaacttgag

SEQ ID NO: 5424696 - DNA, 25 bp, Homo sapien
agcagcttttcctcactatcaggaa

SEQ ID NO: 5424697 - DNA, 25 bp, Homo sapien
aaagagctgagcgttagatatggcg

SEQ ID NO: 5424698 - DNA, 25 bp, Homo sapien
gagctgagcgttagatatggcgatt

SEQ ID NO: 5424699 - DNA, 25 bp, Homo sapien
tgagcgttagatatggcgattccac

SEQ ID NO: 5424700 - DNA, 25 bp, Homo sapien
agcgttagatatggcgattccacaa

SEQ ID NO: 5424701 - DNA, 25 bp, Homo sapien
gaaaagccgttcctacagcataaag

SEQ ID NO: 5424702 - DNA, 25 bp, Homo sapien
tccacaaaagggattgggaaccata

SEQ ID NO: 5424703 - DNA, 25 bp, Homo sapien
tgcatcaagatgttgagtgaactgg

SEQ ID NO: 5424704 - DNA, 25 bp, Homo sapien
taaactcaaaagtatctacagctgg

SEQ ID NO: 5424705 - DNA, 25 bp, Homo sapien
ccttcataatctattcccaacacac

SEQ ID NO: 5424706 - DNA, 25 bp, Homo sapien
gcttacagggcctacactcaaagcc

SEQ ID NO: 5424707 - DNA, 25 bp, Homo sapien
gggcctacactcaaagcccttcata

SEQ ID NO: 5424708 - DNA, 25 bp, Homo sapien
tacagggcctacactcaaagccctt

SEQ ID NO: 5424709 - DNA, 25 bp, Homo sapien
tctctctgccaccatttactcccca

SEQ ID NO: 5424710 - DNA, 25 bp, Homo sapien
tcatcctcaaagtctggtatctggt

SEQ ID NO: 5424711 - DNA, 25 bp, Homo sapien
agtcttcatcctcaaagtctggtat

SEQ ID NO: 5424712 - DNA, 25 bp, Homo sapien
tcttcatcctcaaagtctggtatct

SEQ ID NO: 5424713 - DNA, 25 bp, Homo sapien
ttcatcctcaaagtctggtatctgg

SEQ ID NO: 5424714 - DNA, 25 bp, Homo sapien
cttcttgcagcccttttcaactctc

SEQ ID NO: 5424715 - DNA, 25 bp, Homo sapien
attcttgcttcttgcagcccttttc

SEQ ID NO: 5424716 - DNA, 25 bp, Homo sapien
ttcttgcagcccttttcaactctct

SEQ ID NO: 5424717 - DNA, 25 bp, Homo sapien
gctgtcacaaaactataatctccat

SEQ ID NO: 5424718 - DNA, 25 bp, Homo sapien
tgaaacaacagacaagggcctagct

SEQ ID NO: 5424719 - DNA, 25 bp, Homo sapien
aagaagggcaactttatcacagagc

SEQ ID NO: 5424720 - DNA, 25 bp, Homo sapien
gggcaactttatcacagagcttcct

SEQ ID NO: 5424721 - DNA, 25 bp, Homo sapien
tctttccctattctctgcttctctc

SEQ ID NO: 5424722 - DNA, 25 bp, Homo sapien
aacccattctttccctattctctgc

SEQ ID NO: 5424723 - DNA, 25 bp, Homo sapien
attctttccctattctctgcttctc

SEQ ID NO: 5424724 - DNA, 25 bp, Homo sapien
ccaacccattctttccctattctct

SEQ ID NO: 5424725 - DNA, 25 bp, Homo sapien
ttaattcttaactctcatggctgaa

SEQ ID NO: 5424726 - DNA, 25 bp, Homo sapien
tatatagatgattctccgcaagcag

SEQ ID NO: 5424727 - DNA, 25 bp, Homo sapien
ttctccgcaagcagaaacatggtac

SEQ ID NO: 5424728 - DNA, 25 bp, Homo sapien
gatgattctccgcaagcagaaacat

SEQ ID NO: 5424729 - DNA, 25 bp, Homo sapien
accactgtcatctggccctctgccc

SEQ ID NO: 5424730 - DNA, 25 bp, Homo sapien
gaaatacagagctgaatggaaccac

SEQ ID NO: 5424731 - DNA, 25 bp, Homo sapien
aaggaaatacagagctgaatggaac

SEQ ID NO: 5424732 - DNA, 25 bp, Homo sapien
acagagctgaatggaaccaccactg

SEQ ID NO: 5424733 - DNA, 25 bp, Homo sapien
ccttctccatatattgggcaaaaca

SEQ ID NO: 5424734 - DNA, 25 bp, Homo sapien
atttcttcgtgtgccccaacctcgg

SEQ ID NO: 5424735 - DNA, 25 bp, Homo sapien
tcagtagagtcttccacgactacga

SEQ ID NO: 5424736 - DNA, 25 bp, Homo sapien
tgaaggctcctctcataattaaagt

SEQ ID NO: 5424737 - DNA, 25 bp, Homo sapien
gactacgatttcttcgtgtgcccca

SEQ ID NO: 5424738 - DNA, 25 bp, Homo sapien
tgtatattcactggctctcttttgc

SEQ ID NO: 5424739 - DNA, 25 bp, Homo sapien
gtggtgaacctgaagttgtatattc

SEQ ID NO: 5424740 - DNA, 25 bp, Homo sapien
agttgtatattcactggctctcttt

SEQ ID NO: 5424741 - DNA, 25 bp, Homo sapien
aagatttctggggtggtgaacctga

SEQ ID NO: 5424742 - DNA, 25 bp, Homo sapien
ggtttccaggatagtgttactgtgc

SEQ ID NO: 5424743 - DNA, 25 bp, Homo sapien
ccaggatagtgttactgtgctctta

SEQ ID NO: 5424744 - DNA, 25 bp, Homo sapien
tttccaggatagtgttactgtgctc

SEQ ID NO: 5424745 - DNA, 25 bp, Homo sapien
tacaggtttccaggatagtgttact

SEQ ID NO: 5424746 - DNA, 25 bp, Homo sapien
gagctaagtgaagttgtctgatata

SEQ ID NO: 5424747 - DNA, 25 bp, Homo sapien
gctaagtgaagttgtctgatataaa

SEQ ID NO: 5424748 - DNA, 25 bp, Homo sapien
ctaagtgaagttgtctgatataaac

SEQ ID NO: 5424749 - DNA, 25 bp, Homo sapien
gagagctaagtgaagttgtctgata

SEQ ID NO: 5424750 - DNA, 25 bp, Homo sapien
aggcctcgtgcaaagtattgcagcc

SEQ ID NO: 5424751 - DNA, 25 bp, Homo sapien
tggcccaactggtgaaaactgtaca

SEQ ID NO: 5424752 - DNA, 25 bp, Homo sapien
agtattgcagcctgattttgaaatc

SEQ ID NO: 5424753 - DNA, 25 bp, Homo sapien
ctggaagtttttggcccaactggtg

SEQ ID NO: 5424754 - DNA, 25 bp, Homo sapien
gtattccaataacttatcaaatagt

SEQ ID NO: 5424755 - DNA, 25 bp, Homo sapien
tccaataacttatcaaatagtttcc

SEQ ID NO: 5424756 - DNA, 25 bp, Homo sapien
ttccaataacttatcaaatagtttc

SEQ ID NO: 5424757 - DNA, 25 bp, Homo sapien
caataacttatcaaatagtttccct

SEQ ID NO: 5424758 - DNA, 25 bp, Homo sapien
ttccactgcggtagtcaagatacca

SEQ ID NO: 5424759 - DNA, 25 bp, Homo sapien
ctgcggtagtcaagataccaaggtt

SEQ ID NO: 5424760 - DNA, 25 bp, Homo sapien
cactgcggtagtcaagataccaagg

SEQ ID NO: 5424761 - DNA, 25 bp, Homo sapien
cggtagtcaagataccaaggttagg

SEQ ID NO: 5424762 - DNA, 25 bp, Homo sapien
cttgtggaatggacagttttagaga

SEQ ID NO: 5424763 - DNA, 25 bp, Homo sapien
gtggaatggacagttttagagaaga

SEQ ID NO: 5424764 - DNA, 25 bp, Homo sapien
aatggacagttttagagaagaaggg

SEQ ID NO: 5424765 - DNA, 25 bp, Homo sapien
tggacagttttagagaagaagggta

SEQ ID NO: 5424766 - DNA, 25 bp, Homo sapien
ttctaggtcggcctgttcagccacc

SEQ ID NO: 5424767 - DNA, 25 bp, Homo sapien
tgaaggtctgttctaggtcggcctg

SEQ ID NO: 5424768 - DNA, 25 bp, Homo sapien
tctgttctaggtcggcctgttcagc

SEQ ID NO: 5424769 - DNA, 25 bp, Homo sapien
ggtctgttctaggtcggcctgttca

SEQ ID NO: 5424770 - DNA, 25 bp, Homo sapien
tttggattcagttagtataagctct

SEQ ID NO: 5424771 - DNA, 25 bp, Homo sapien
ttggattcagttagtataagctctt

SEQ ID NO: 5424772 - DNA, 25 bp, Homo sapien
tctgccactcgaggaagattttctc

SEQ ID NO: 5424773 - DNA, 25 bp, Homo sapien
gccactcgaggaagattttctccag

SEQ ID NO: 5424774 - DNA, 25 bp, Homo sapien
tatatctgccactcgaggaagattt

SEQ ID NO: 5424775 - DNA, 25 bp, Homo sapien
actcgaggaagattttctccagtgg

SEQ ID NO: 5424776 - DNA, 25 bp, Homo sapien
atcttcatcttcacagaggtctaac

SEQ ID NO: 5424777 - DNA, 25 bp, Homo sapien
tgctaatcgtttttccttagtacca

SEQ ID NO: 5424778 - DNA, 25 bp, Homo sapien
tcagaataaattgagctgctaatcg

SEQ ID NO: 5424779 - DNA, 25 bp, Homo sapien
gtgcattgatagcagaatcagccaa

SEQ ID NO: 5424780 - DNA, 25 bp, Homo sapien
tcagccaattctgtaaaatgcttaa

SEQ ID NO: 5424781 - DNA, 25 bp, Homo sapien
catccagtatcacttgataggcatc

SEQ ID NO: 5424782 - DNA, 25 bp, Homo sapien
tttcacaccatccagtatcacttga

SEQ ID NO: 5424783 - DNA, 25 bp, Homo sapien
cagtatcacttgataggcatcttta

SEQ ID NO: 5424784 - DNA, 25 bp, Homo sapien
aggcatctttatgctggcccactcg

SEQ ID NO: 5424785 - DNA, 25 bp, Homo sapien
tggtatcggccatgatgccatagtt

SEQ ID NO: 5424786 - DNA, 25 bp, Homo sapien
ggtatcggccatgatgccatagttg

SEQ ID NO: 5424787 - DNA, 25 bp, Homo sapien
cgtggtatcggccatgatgccatag

SEQ ID NO: 5424788 - DNA, 25 bp, Homo sapien
tatcggccatgatgccatagttgcc

SEQ ID NO: 5424789 - DNA, 25 bp, Homo sapien
catcctcaacaccagttggcagagc

SEQ ID NO: 5424790 - DNA, 25 bp, Homo sapien
tcaacaccagttggcagagcagcat

SEQ ID NO: 5424791 - DNA, 25 bp, Homo sapien
cagagcagcatcatcagtaacaagc

SEQ ID NO: 5424792 - DNA, 25 bp, Homo sapien
tcaggcaccatcctcaacaccagtt

SEQ ID NO: 5424793 - DNA, 25 bp, Homo sapien
gagcagcagggtaaccaaacactct

SEQ ID NO: 5424794 - DNA, 25 bp, Homo sapien
gagaggtgaccagggctaaagaaac

SEQ ID NO: 5424795 - DNA, 25 bp, Homo sapien
gggtggcggaacatgtcggcatgaa

SEQ ID NO: 5424796 - DNA, 25 bp, Homo sapien
tgaatcatgagctgaagagaggtga

SEQ ID NO: 5424797 - DNA, 25 bp, Homo sapien
tgtcttctcttatttggaagaaata

SEQ ID NO: 5424798 - DNA, 25 bp, Homo sapien
gaatcttatttatcgcttgggccac

SEQ ID NO: 5424799 - DNA, 25 bp, Homo sapien
cactgcttcggataggcatgcacaa

SEQ ID NO: 5424800 - DNA, 25 bp, Homo sapien
tgtcttgtatccagttagcttgtcg

SEQ ID NO: 5424801 - DNA, 25 bp, Homo sapien
cgatttcatcattgaatcgtcgatc

SEQ ID NO: 5424802 - DNA, 25 bp, Homo sapien
tgtttccaaggctgcgtctgtccac

SEQ ID NO: 5424803 - DNA, 25 bp, Homo sapien
aaggctgcgtctgtccactggactg

SEQ ID NO: 5424804 - DNA, 25 bp, Homo sapien
tggctacagccctcactctccttag

SEQ ID NO: 5424805 - DNA, 25 bp, Homo sapien
ggctacagccctcactctccttagt

SEQ ID NO: 5424806 - DNA, 25 bp, Homo sapien
acccatctgcaagtttctgagttga

SEQ ID NO: 5424807 - DNA, 25 bp, Homo sapien
tgtggtgccatgaagcacacccaga

SEQ ID NO: 5424808 - DNA, 25 bp, Homo sapien
cagaaaaaggattcccaccttcaag

SEQ ID NO: 5424809 - DNA, 25 bp, Homo sapien
attggatacatttctgacccaggat

SEQ ID NO: 5424810 - DNA, 25 bp, Homo sapien
gagctggttggttccatacacattc

SEQ ID NO: 5424811 - DNA, 25 bp, Homo sapien
ttccccactataagtccctgcatcc

SEQ ID NO: 5424812 - DNA, 25 bp, Homo sapien
actataagtccctgcatccctgaag

SEQ ID NO: 5424813 - DNA, 25 bp, Homo sapien
ggttggttccatacacattcccttc

SEQ ID NO: 5424814 - DNA, 25 bp, Homo sapien
gtccaccctttggatccattccttg

SEQ ID NO: 5424815 - DNA, 25 bp, Homo sapien
tttggatccattccttggtcctcct

SEQ ID NO: 5424816 - DNA, 25 bp, Homo sapien
ggatccattccttggtcctcctcag

SEQ ID NO: 5424817 - DNA, 25 bp, Homo sapien
caccctttggatccattccttggtc

SEQ ID NO: 5424818 - DNA, 25 bp, Homo sapien
tcaccactggagtcacagtctttct

SEQ ID NO: 5424819 - DNA, 25 bp, Homo sapien
tgcttgatcccctgaaccttcatgt

SEQ ID NO: 5424820 - DNA, 25 bp, Homo sapien
tgccattattaactacatcatcacc

SEQ ID NO: 5424821 - DNA, 25 bp, Homo sapien
gaaccttcatgtctccaacagtcac

SEQ ID NO: 5424822 - DNA, 25 bp, Homo sapien
acagagtgtgcaccctctcacttag

SEQ ID NO: 5424823 - DNA, 25 bp, Homo sapien
gagtaacagagtgtgcaccctctca

SEQ ID NO: 5424824 - DNA, 25 bp, Homo sapien
tgtgcaccctctcacttagtggttc

SEQ ID NO: 5424825 - DNA, 25 bp, Homo sapien
gcacagagtaacagagtgtgcaccc

SEQ ID NO: 5424826 - DNA, 25 bp, Homo sapien
ctgtaacccttcagcgtcatcccct

SEQ ID NO: 5424827 - DNA, 25 bp, Homo sapien
tgctctcagttcatctaacaaaaca

SEQ ID NO: 5424828 - DNA, 25 bp, Homo sapien
taacccttcagcgtcatcccctttc

SEQ ID NO: 5424829 - DNA, 25 bp, Homo sapien
cttcagcgtcatcccctttcctgct

SEQ ID NO: 5424830 - DNA, 25 bp, Homo sapien
cccttttgtggccatcattactact

SEQ ID NO: 5424831 - DNA, 25 bp, Homo sapien
ccagtccccttttgtggccatcatt

SEQ ID NO: 5424832 - DNA, 25 bp, Homo sapien
caacccagtccccttttgtggccat

SEQ ID NO: 5424833 - DNA, 25 bp, Homo sapien
ctgccttttgccagtcctcccaaca

SEQ ID NO: 5424834 - DNA, 25 bp, Homo sapien
tgccagatgataaccgaaggcttat

SEQ ID NO: 5424835 - DNA, 25 bp, Homo sapien
ataaccgaaggcttatctcccaagc

SEQ ID NO: 5424836 - DNA, 25 bp, Homo sapien
cagatgataaccgaaggcttatctc

SEQ ID NO: 5424837 - DNA, 25 bp, Homo sapien
gatgataaccgaaggcttatctccc

SEQ ID NO: 5424838 - DNA, 25 bp, Homo sapien
tctgagaagctctccgctgcaggtt

SEQ ID NO: 5424839 - DNA, 25 bp, Homo sapien
tagccaatgatacctttgccccagg

SEQ ID NO: 5424840 - DNA, 25 bp, Homo sapien
tcagatggcacttgtagtcgatggc

SEQ ID NO: 5424841 - DNA, 25 bp, Homo sapien
cctgttcacgtggatggccttggag

SEQ ID NO: 5424842 - DNA, 25 bp, Homo sapien
gcctgtttacacgtgaaccaaatgt

SEQ ID NO: 5424843 - DNA, 25 bp, Homo sapien
tctctggctcagagtggctggcgcc

SEQ ID NO: 5424844 - DNA, 25 bp, Homo sapien
gaaacccgagctatcgctgctcctg

SEQ ID NO: 5424845 - DNA, 25 bp, Homo sapien
gaggcctctagctgttcctgcacat

SEQ ID NO: 5424846 - DNA, 25 bp, Homo sapien
atatttccgaagtgaagatgttgcc

SEQ ID NO: 5424847 - DNA, 25 bp, Homo sapien
tactacaggctgatcaaaaatgatc

SEQ ID NO: 5424848 - DNA, 25 bp, Homo sapien
gaaaaggtcatgttagttccaggga

SEQ ID NO: 5424849 - DNA, 25 bp, Homo sapien
caaatatgacttctctaaacgtgca

SEQ ID NO: 5424850 - DNA, 25 bp, Homo sapien
tctttgggttctccaaatattccat

SEQ ID NO: 5424851 - DNA, 25 bp, Homo sapien
tctgaataaaggtcttcttgcctgc

SEQ ID NO: 5424852 - DNA, 25 bp, Homo sapien
gcacatttctgaataaaggtcttct

SEQ ID NO: 5424853 - DNA, 25 bp, Homo sapien
tggaccagtcttgtgattttcacct

SEQ ID NO: 5424854 - DNA, 25 bp, Homo sapien
tctgtataagaaaatcctggtgctt

SEQ ID NO: 5424855 - DNA, 25 bp, Homo sapien
ctgcaatggaacattaaaaccacaa

SEQ ID NO: 5424856 - DNA, 25 bp, Homo sapien
cacaaaccaaaaaaatatatatatt

SEQ ID NO: 5424857 - DNA, 25 bp, Homo sapien
tgcaatggaacattaaaaccacaaa

SEQ ID NO: 5424858 - DNA, 25 bp, Homo sapien
aaatatatatattagattttcaaag

SEQ ID NO: 5424859 - DNA, 25 bp, Homo sapien
ctggccagagtccacgcctcaactt

SEQ ID NO: 5424860 - DNA, 25 bp, Homo sapien
tcaacttcgaggctggcgatccaga

SEQ ID NO: 5424861 - DNA, 25 bp, Homo sapien
cacgcctcaacttcgaggctggcga

SEQ ID NO: 5424862 - DNA, 25 bp, Homo sapien
tggcgatccagaaagagcacctcac

SEQ ID NO: 5424863 - DNA, 25 bp, Homo sapien
cgccagccaatggcaagccgggacc

SEQ ID NO: 5424864 - DNA, 25 bp, Homo sapien
gggagcgcttctcgccttttggcga

SEQ ID NO: 5424865 - DNA, 25 bp, Homo sapien
tggagcaccatggacgaagctggca

SEQ ID NO: 5424866 - DNA, 25 bp, Homo sapien
gagtccaagggcattgctttcgtca

SEQ ID NO: 5424867 - DNA, 25 bp, Homo sapien
gagatgcatggccagtgcctcggcc

SEQ ID NO: 5424868 - DNA, 25 bp, Homo sapien
taaaatgtaggtatactggttctgc

SEQ ID NO: 5424869 - DNA, 25 bp, Homo sapien
gagatttcatatgttggaccttagg

SEQ ID NO: 5424870 - DNA, 25 bp, Homo sapien
agtaaggcatcgagaagttgtttcc

SEQ ID NO: 5424871 - DNA, 25 bp, Homo sapien
taactttggtgtccacaagaatcac

SEQ ID NO: 5424872 - DNA, 25 bp, Homo sapien
tccttaaagattagcaatgtgcctg

SEQ ID NO: 5424873 - DNA, 25 bp, Homo sapien
ggaatatccagcttctacttaatag

SEQ ID NO: 5424874 - DNA, 25 bp, Homo sapien
tagcttttagctatttgtagcagga

SEQ ID NO: 5424875 - DNA, 25 bp, Homo sapien
aactcaaaggaggtatttcacacac

SEQ ID NO: 5424876 - DNA, 25 bp, Homo sapien
cgcccgcgcccgcgagagctaacgc

SEQ ID NO: 5424877 - DNA, 25 bp, Homo sapien
cggcgcgggtgagagcgcccgcgcc

SEQ ID NO: 5424878 - DNA, 25 bp, Homo sapien
cagcgtttgcattgcagtcaagacg

SEQ ID NO: 5424879 - DNA, 25 bp, Homo sapien
gctgcccgcagatcgtgtcgccggg

SEQ ID NO: 5424880 - DNA, 25 bp, Homo sapien
tgcttcccctgcatcaagccgggag

SEQ ID NO: 5424881 - DNA, 25 bp, Homo sapien
ggttcagaccgggacagcgtttgca

SEQ ID NO: 5424882 - DNA, 25 bp, Homo sapien
ccctgcttctttatgtgcctggtaa

SEQ ID NO: 5424883 - DNA, 25 bp, Homo sapien
aaatatctccgtatctctacttaac

SEQ ID NO: 5424884 - DNA, 25 bp, Homo sapien
cagtattaatctcatccaaggatat

SEQ ID NO: 5424885 - DNA, 25 bp, Homo sapien
tgggtcaggatctccttaccatgag

SEQ ID NO: 5424886 - DNA, 25 bp, Homo sapien
gcacagtacatttacagcagttgga

SEQ ID NO: 5424887 - DNA, 25 bp, Homo sapien
caggatatagactaagcagcactta

SEQ ID NO: 5424888 - DNA, 25 bp, Homo sapien
tacattttgcataagaggtaatcag

SEQ ID NO: 5424889 - DNA, 25 bp, Homo sapien
actaatgtgcaaacaaaatagaagg

SEQ ID NO: 5424890 - DNA, 25 bp, Homo sapien
tgcagtaagcctcatgctagcacta

SEQ ID NO: 5424891 - DNA, 25 bp, Homo sapien
cattagttatcaaggcgtgcttccc

SEQ ID NO: 5424892 - DNA, 25 bp, Homo sapien
tcaggagtttgtgactggccccggc

SEQ ID NO: 5424893 - DNA, 25 bp, Homo sapien
tagtaaccacatttggctagtgacc

SEQ ID NO: 5424894 - DNA, 25 bp, Homo sapien
tcatctttgggcctttccctacttg

SEQ ID NO: 5424895 - DNA, 25 bp, Homo sapien
gaactgcaagctcttgggcctgtgt

SEQ ID NO: 5424896 - DNA, 25 bp, Homo sapien
ttccagaagtagcacctctccaaag

SEQ ID NO: 5424897 - DNA, 25 bp, Homo sapien
aacagcacccctcctctgtagcttt

SEQ ID NO: 5424898 - DNA, 25 bp, Homo sapien
cagggcggacgataacacactggct

SEQ ID NO: 5424899 - DNA, 25 bp, Homo sapien
tcaggtatgggttagtggccacagc

SEQ ID NO: 5424900 - DNA, 25 bp, Homo sapien
actgcctggtagtaaagagggagcc

SEQ ID NO: 5424901 - DNA, 25 bp, Homo sapien
tgctctgtgccgataactcttgctt

SEQ ID NO: 5424902 - DNA, 25 bp, Homo sapien
tgtacattttggatggtagatcagt

SEQ ID NO: 5424903 - DNA, 25 bp, Homo sapien
ggctttgttagtgtccactgttcat

SEQ ID NO: 5424904 - DNA, 25 bp, Homo sapien
catcatgcaggtccagaaacaaagg

SEQ ID NO: 5424905 - DNA, 25 bp, Homo sapien
tcagtgtgtgccatattgaatggct

SEQ ID NO: 5424906 - DNA, 25 bp, Homo sapien
ttactcttccagatgaacttacttt

SEQ ID NO: 5424907 - DNA, 25 bp, Homo sapien
catcaggtttgatggctgtccacat

SEQ ID NO: 5424908 - DNA, 25 bp, Homo sapien
ccagagtagcccagatgaactttaa

SEQ ID NO: 5424909 - DNA, 25 bp, Homo sapien
agttaacccataagcagtgcatcca

SEQ ID NO: 5424910 - DNA, 25 bp, Homo sapien
ctccttgtggagcaaagttaaccca

SEQ ID NO: 5424911 - DNA, 25 bp, Homo sapien
aagaacttgaacactcttctcttcg

SEQ ID NO: 5424912 - DNA, 25 bp, Homo sapien
acttgaacactcttctcttcgttca

SEQ ID NO: 5424913 - DNA, 25 bp, Homo sapien
tcaagaacttgaacactcttctctt

SEQ ID NO: 5424914 - DNA, 25 bp, Homo sapien
gaacttgaacactcttctcttcgtt

SEQ ID NO: 5424915 - DNA, 25 bp, Homo sapien
ctcagtttgtgacccactgactgga

SEQ ID NO: 5424916 - DNA, 25 bp, Homo sapien
acgaaggttattgcttcctgatcag

SEQ ID NO: 5424917 - DNA, 25 bp, Homo sapien
aggtcactcagtttgtgacccactg

SEQ ID NO: 5424918 - DNA, 25 bp, Homo sapien
taaaacgaaggttattgcttcctga

SEQ ID NO: 5424919 - DNA, 25 bp, Homo sapien
ggaacatggctatgacttcacgctc

SEQ ID NO: 5424920 - DNA, 25 bp, Homo sapien
tcaaaatagacggagaatagccagt

SEQ ID NO: 5424921 - DNA, 25 bp, Homo sapien
ttttgccctctccagtaaaacagga

SEQ ID NO: 5424922 - DNA, 25 bp, Homo sapien
tcaagttatagaaccctagacagca

SEQ ID NO: 5424923 - DNA, 25 bp, Homo sapien
ccatcagggaagcaacgactgtact

SEQ ID NO: 5424924 - DNA, 25 bp, Homo sapien
gaatcctattgacttcctcacggga

SEQ ID NO: 5424925 - DNA, 25 bp, Homo sapien
gaggtagcctgacactctgatgagg

SEQ ID NO: 5424926 - DNA, 25 bp, Homo sapien
aatattcattggtgcgatggcctca

SEQ ID NO: 5424927 - DNA, 25 bp, Homo sapien
aaccgcgcctggactcaagttcttt

SEQ ID NO: 5424928 - DNA, 25 bp, Homo sapien
taaagcttgattaaggtataaccga

SEQ ID NO: 5424929 - DNA, 25 bp, Homo sapien
gaacagtacttgatacagtttgatg

SEQ ID NO: 5424930 - DNA, 25 bp, Homo sapien
tacacttcgcatatttgaacagtac

SEQ ID NO: 5424931 - DNA, 25 bp, Homo sapien
gaacccttgtgatctactgatggca

SEQ ID NO: 5424932 - DNA, 25 bp, Homo sapien
catcacagagagtaggatggctact

SEQ ID NO: 5424933 - DNA, 25 bp, Homo sapien
tctatggtcatcagttctcccaggg

SEQ ID NO: 5424934 - DNA, 25 bp, Homo sapien
tggtgcacctactgtggaaaagagt

SEQ ID NO: 5424935 - DNA, 25 bp, Homo sapien
ttggcgacctggtggggcctcgcgg

SEQ ID NO: 5424936 - DNA, 25 bp, Homo sapien
cgccgcggtgatttaacagcttttg

SEQ ID NO: 5424937 - DNA, 25 bp, Homo sapien
agcgccgccgcggtgatttaacagc

SEQ ID NO: 5424938 - DNA, 25 bp, Homo sapien
cgccgccgcggtgatttaacagctt

SEQ ID NO: 5424939 - DNA, 25 bp, Homo sapien
ctcataatttatcctctctctagaa

SEQ ID NO: 5424940 - DNA, 25 bp, Homo sapien
aactcataatttatcctctctctag

SEQ ID NO: 5424941 - DNA, 25 bp, Homo sapien
gaaaaaactggctacaaactcataa

SEQ ID NO: 5424942 - DNA, 25 bp, Homo sapien
aaaaactggctacaaactcataatt

SEQ ID NO: 5424943 - DNA, 25 bp, Homo sapien
aacttgatggcaccttaagcccagg

SEQ ID NO: 5424944 - DNA, 25 bp, Homo sapien
ttagattcagacacttgttccttgc

SEQ ID NO: 5424945 - DNA, 25 bp, Homo sapien
ctctagaaactcatcagagtgatgc

SEQ ID NO: 5424946 - DNA, 25 bp, Homo sapien
ttcttattttcccactaggtcactg

SEQ ID NO: 5424947 - DNA, 25 bp, Homo sapien
actgcagctttgatcttctgggccc

SEQ ID NO: 5424948 - DNA, 25 bp, Homo sapien
tagctgggactcaaagtgtgccacc

SEQ ID NO: 5424949 - DNA, 25 bp, Homo sapien
tgggactcaaagtgtgccaccacac

SEQ ID NO: 5424950 - DNA, 25 bp, Homo sapien
gcagctttgatcttctgggcccaag

SEQ ID NO: 5424951 - DNA, 25 bp, Homo sapien
taaaatcttattcacaatggctaac

SEQ ID NO: 5424952 - DNA, 25 bp, Homo sapien
cattaaaatcttattcacaatggct

SEQ ID NO: 5424953 - DNA, 25 bp, Homo sapien
ttaaaatcttattcacaatggctaa

SEQ ID NO: 5424954 - DNA, 25 bp, Homo sapien
attaaaatcttattcacaatggcta

SEQ ID NO: 5424955 - DNA, 25 bp, Homo sapien
ctttgtgcaaagaagagcttaagca

SEQ ID NO: 5424956 - DNA, 25 bp, Homo sapien
cacagcagaccaatcatgttccctg

SEQ ID NO: 5424957 - DNA, 25 bp, Homo sapien
tgagcagaatcccatcgtaacagtt

SEQ ID NO: 5424958 - DNA, 25 bp, Homo sapien
aataaaggcctgttagtgctgtccc

SEQ ID NO: 5424959 - DNA, 25 bp, Homo sapien
aatgggtgctacactctctcttgtg

SEQ ID NO: 5424960 - DNA, 25 bp, Homo sapien
agtgttgatggaatctatgaagaga

SEQ ID NO: 5424961 - DNA, 25 bp, Homo sapien
acaactatgaggagataattaaatc

SEQ ID NO: 5424962 - DNA, 25 bp, Homo sapien
ctctgatgtgcatggcactgtaaaa

SEQ ID NO: 5424963 - DNA, 25 bp, Homo sapien
ggagataccggagccatgacagact

SEQ ID NO: 5424964 - DNA, 25 bp, Homo sapien
gctattatctttaaatactgcaaag

SEQ ID NO: 5424965 - DNA, 25 bp, Homo sapien
tgtgcattgccacaggagataccgg

SEQ ID NO: 5424966 - DNA, 25 bp, Homo sapien
gttcagcaagacattgatattgtcc

SEQ ID NO: 5424967 - DNA, 25 bp, Homo sapien
tgttaaagacatacagatatctagg

SEQ ID NO: 5424968 - DNA, 25 bp, Homo sapien
ttttcaaacacattacacttcataa

SEQ ID NO: 5424969 - DNA, 25 bp, Homo sapien
acttcataatgatctgacagtgtta

SEQ ID NO: 5424970 - DNA, 25 bp, Homo sapien
taggctgcactctagctcactcaat

SEQ ID NO: 5424971 - DNA, 25 bp, Homo sapien
tacctcccagaatcagcatacagtg

SEQ ID NO: 5424972 - DNA, 25 bp, Homo sapien
tattactatccacaagaatgggaca

SEQ ID NO: 5424973 - DNA, 25 bp, Homo sapien
caaatcttgctctaccgctgactag

SEQ ID NO: 5424974 - DNA, 25 bp, Homo sapien
ccagcagggctagtttaacagccag

SEQ ID NO: 5424975 - DNA, 25 bp, Homo sapien
tatttggaatactaaggaggcttct

SEQ ID NO: 5424976 - DNA, 25 bp, Homo sapien
cagctggatgtaatctgtatttgga

SEQ ID NO: 5424977 - DNA, 25 bp, Homo sapien
gttccttggcaatttcactaagcag

SEQ ID NO: 5424978 - DNA, 25 bp, Homo sapien
tacatcctaaagaatgtcctactac

SEQ ID NO: 5424979 - DNA, 25 bp, Homo sapien
tatctggaagcaccataagtaaatc

SEQ ID NO: 5424980 - DNA, 25 bp, Homo sapien
tctgatggtcacattaagaggtaca

SEQ ID NO: 5424981 - DNA, 25 bp, Homo sapien
gttccaacacccgtaccagtatcat

SEQ ID NO: 5424982 - DNA, 25 bp, Homo sapien
gactcttgactaggactgggttcca

SEQ ID NO: 5424983 - DNA, 25 bp, Homo sapien
taaacactcttttgcacttgaatga

SEQ ID NO: 5424984 - DNA, 25 bp, Homo sapien
tactcctaccaactgtcttggaggg

SEQ ID NO: 5424985 - DNA, 25 bp, Homo sapien
tgcagcagatgtgtacaaaagagct

SEQ ID NO: 5424986 - DNA, 25 bp, Homo sapien
gtgtggcttaactctcaaactcttg

SEQ ID NO: 5424987 - DNA, 25 bp, Homo sapien
tgtgcctggccaaacgctggtaggt

SEQ ID NO: 5424988 - DNA, 25 bp, Homo sapien
aaatgaccaatgttatgaagcttcg

SEQ ID NO: 5424989 - DNA, 25 bp, Homo sapien
taggttttgagtgagaccacattac

SEQ ID NO: 5424990 - DNA, 25 bp, Homo sapien
ctttagtagacttttcctcacgtgg

SEQ ID NO: 5424991 - DNA, 25 bp, Homo sapien
taaataaaccctacttgtcaatgct

SEQ ID NO: 5424992 - DNA, 25 bp, Homo sapien
agggatacaatcataccatttgcag

SEQ ID NO: 5424993 - DNA, 25 bp, Homo sapien
taattggtgggtacttctagaacaa

SEQ ID NO: 5424994 - DNA, 25 bp, Homo sapien
ggtgtttcaccataaggcatattga

SEQ ID NO: 5424995 - DNA, 25 bp, Homo sapien
tgtaggccaatctcttaagctctga

SEQ ID NO: 5424996 - DNA, 25 bp, Homo sapien
gacacacctatctgtgaatatcaga

SEQ ID NO: 5424997 - DNA, 25 bp, Homo sapien
gaagttatatatcatgtgtaggcca

SEQ ID NO: 5424998 - DNA, 25 bp, Homo sapien
gataatgtaccacatgacacaccta

SEQ ID NO: 5424999 - DNA, 25 bp, Homo sapien
tggcttgcttttttgatgccccctt

SEQ ID NO: 5425000 - DNA, 25 bp, Homo sapien
gcttgcttttttgatgccccctttc

SEQ ID NO: 5425001 - DNA, 25 bp, Homo sapien
tactagactatgttcttactgacct

SEQ ID NO: 5425002 - DNA, 25 bp, Homo sapien
gaagtactgtgtttaatcagagaac

SEQ ID NO: 5425003 - DNA, 25 bp, Homo sapien
tgtccacagaggatgatcaaacgta

SEQ ID NO: 5425004 - DNA, 25 bp, Homo sapien
cagagaacctcacggtttttattat

SEQ ID NO: 5425005 - DNA, 25 bp, Homo sapien
caagtgtaatcttcctctagtccta

SEQ ID NO: 5425006 - DNA, 25 bp, Homo sapien
gtcagagacaataaaagaggagtgt

SEQ ID NO: 5425007 - DNA, 25 bp, Homo sapien
aaagtacagagccaacagtttgtct

SEQ ID NO: 5425008 - DNA, 25 bp, Homo sapien
taagttcaacctcagaaagtcagag

SEQ ID NO: 5425009 - DNA, 25 bp, Homo sapien
tccagccatgatgaatagccaattc

SEQ ID NO: 5425010 - DNA, 25 bp, Homo sapien
tctctcttatgagcaggtcctccct

SEQ ID NO: 5425011 - DNA, 25 bp, Homo sapien
gaaagggtatattcaggaagtctcc

SEQ ID NO: 5425012 - DNA, 25 bp, Homo sapien
ccataaatgactctagcctgcaaat

SEQ ID NO: 5425013 - DNA, 25 bp, Homo sapien
gaaatggcctaacagagcacatgga

SEQ ID NO: 5425014 - DNA, 25 bp, Homo sapien
ggagaccatctacaggtttcactgc

SEQ ID NO: 5425015 - DNA, 25 bp, Homo sapien
tagctatagacttccaaacccacag

SEQ ID NO: 5425016 - DNA, 25 bp, Homo sapien
caagaacacatgaggagtagggaca

SEQ ID NO: 5425017 - DNA, 25 bp, Homo sapien
cactttacccatgtgcactgagggc

SEQ ID NO: 5425018 - DNA, 25 bp, Homo sapien
aattccttgtgttagcccctctgac

SEQ ID NO: 5425019 - DNA, 25 bp, Homo sapien
cactgagggcctgttgatcttaaat

SEQ ID NO: 5425020 - DNA, 25 bp, Homo sapien
tgagaattctataagccaaaggcaa

SEQ ID NO: 5425021 - DNA, 25 bp, Homo sapien
ctgtaatgaaccaataggattaagc

SEQ ID NO: 5425022 - DNA, 25 bp, Homo sapien
tgaaccaataggattaagctggttc

SEQ ID NO: 5425023 - DNA, 25 bp, Homo sapien
aagggtcaggcattaaggggtcagg

SEQ ID NO: 5425024 - DNA, 25 bp, Homo sapien
taatgaaccaataggattaagctgg

SEQ ID NO: 5425025 - DNA, 25 bp, Homo sapien
tcttctatgggaatctgatcggtca

SEQ ID NO: 5425026 - DNA, 25 bp, Homo sapien
gatcggtcatccaagatatatctca

SEQ ID NO: 5425027 - DNA, 25 bp, Homo sapien
cagtaagctccttgaggtagggcct

SEQ ID NO: 5425028 - DNA, 25 bp, Homo sapien
agaagcctatccttttaccccagtg

SEQ ID NO: 5425029 - DNA, 25 bp, Homo sapien
gctcagtgctgggataatcctctaa

SEQ ID NO: 5425030 - DNA, 25 bp, Homo sapien
gttagtaccacctaggcaactggag

SEQ ID NO: 5425031 - DNA, 25 bp, Homo sapien
tactagttacttagcaggtcagtac

SEQ ID NO: 5425032 - DNA, 25 bp, Homo sapien
gagaacaacctcttctagggagtct

SEQ ID NO: 5425033 - DNA, 25 bp, Homo sapien
tgcatgccgaagctacccaaataat

SEQ ID NO: 5425034 - DNA, 25 bp, Homo sapien
aagtctctgtattaagtcaggccac

SEQ ID NO: 5425035 - DNA, 25 bp, Homo sapien
gcctgattacagcttagtaattccc

SEQ ID NO: 5425036 - DNA, 25 bp, Homo sapien
cactttaggcctgattacagcttag

SEQ ID NO: 5425037 - DNA, 25 bp, Homo sapien
aaccactgcctactgggtccaagga

SEQ ID NO: 5425038 - DNA, 25 bp, Homo sapien
gggagaacccaatacctgccatgtc

SEQ ID NO: 5425039 - DNA, 25 bp, Homo sapien
aaaggacactccatacccctcattt

SEQ ID NO: 5425040 - DNA, 25 bp, Homo sapien
ttgctgacaaagtgccaagatgcag

SEQ ID NO: 5425041 - DNA, 25 bp, Homo sapien
tatttttgagctgctgaatacaaag

SEQ ID NO: 5425042 - DNA, 25 bp, Homo sapien
ttgagctgctgaatacaaagaaatt

SEQ ID NO: 5425043 - DNA, 25 bp, Homo sapien
gatatttttgagctgctgaatacaa

SEQ ID NO: 5425044 - DNA, 25 bp, Homo sapien
ttttgagctgctgaatacaaagaaa

SEQ ID NO: 5425045 - DNA, 25 bp, Homo sapien
agcctctgcagctctatgtttcgcc

SEQ ID NO: 5425046 - DNA, 25 bp, Homo sapien
tatgtttcgccagcttcttacttgt

SEQ ID NO: 5425047 - DNA, 25 bp, Homo sapien
gtttcgccagcttcttacttgtacc

SEQ ID NO: 5425048 - DNA, 25 bp, Homo sapien
gcagctctatgtttcgccagcttct

SEQ ID NO: 5425049 - DNA, 25 bp, Homo sapien
aactgggcttgggatgtagacagac

SEQ ID NO: 5425050 - DNA, 25 bp, Homo sapien
tactgaactaggtgattgtggagcc

SEQ ID NO: 5425051 - DNA, 25 bp, Homo sapien
tagtctttagacagtatcagaagcc

SEQ ID NO: 5425052 - DNA, 25 bp, Homo sapien
gctcagcaagcacagactgatacac

SEQ ID NO: 5425053 - DNA, 25 bp, Homo sapien
cctgagatgagaggtctcagtttca

SEQ ID NO: 5425054 - DNA, 25 bp, Homo sapien
ctaacgacctgagatgagaggtctc

SEQ ID NO: 5425055 - DNA, 25 bp, Homo sapien
aacgacctgagatgagaggtctcag

SEQ ID NO: 5425056 - DNA, 25 bp, Homo sapien
cgacctgagatgagaggtctcagtt

SEQ ID NO: 5425057 - DNA, 25 bp, Homo sapien
gagaacttttccgaactgaaaagca

SEQ ID NO: 5425058 - DNA, 25 bp, Homo sapien
gtattgactgccaacccactcggtc

SEQ ID NO: 5425059 - DNA, 25 bp, Homo sapien
ttttccgaactgaaaagcaacacca

SEQ ID NO: 5425060 - DNA, 25 bp, Homo sapien
caacccactcggtcatccaggttaa

SEQ ID NO: 5425061 - DNA, 25 bp, Homo sapien
ccaacggttactctgaaggtgaaag

SEQ ID NO: 5425062 - DNA, 25 bp, Homo sapien
tgtgcaggttatgtcaccaacggtt

SEQ ID NO: 5425063 - DNA, 25 bp, Homo sapien
gaatcggtgttttccctggcttagc

SEQ ID NO: 5425064 - DNA, 25 bp, Homo sapien
gaaagtgggcacgtgtatttgcaca

SEQ ID NO: 5425065 - DNA, 25 bp, Homo sapien
aaaccacaaaaaggtgtgctttgca

SEQ ID NO: 5425066 - DNA, 25 bp, Homo sapien
ctgcaaaaaccacaaaaaggtgtgc

SEQ ID NO: 5425067 - DNA, 25 bp, Homo sapien
aaccacaaaaaggtgtgctttgcat

SEQ ID NO: 5425068 - DNA, 25 bp, Homo sapien
tgcaaaaaccacaaaaaggtgtgct

SEQ ID NO: 5425069 - DNA, 25 bp, Homo sapien
gcgtagaggccagttttaaccgcca

SEQ ID NO: 5425070 - DNA, 25 bp, Homo sapien
gattgaagcagaagcgtagaggcca

SEQ ID NO: 5425071 - DNA, 25 bp, Homo sapien
gccaccgacggtgacgagggaggcg

SEQ ID NO: 5425072 - DNA, 25 bp, Homo sapien
aggcgccgagttccccggaggccag

SEQ ID NO: 5425073 - DNA, 25 bp, Homo sapien
tgcggcagtcactccgcaggagcag

SEQ ID NO: 5425074 - DNA, 25 bp, Homo sapien
tcagggaaaacctgacgatcccttc

SEQ ID NO: 5425075 - DNA, 25 bp, Homo sapien
ccgggcacggctttacccagaatgc

SEQ ID NO: 5425076 - DNA, 25 bp, Homo sapien
tgagcgaggtctttagagagagcac

SEQ ID NO: 5425077 - DNA, 25 bp, Homo sapien
ggtcccactgtcctcgcgctccagc

SEQ ID NO: 5425078 - DNA, 25 bp, Homo sapien
tcccactgtcctcgcgctccagcgg

SEQ ID NO: 5425079 - DNA, 25 bp, Homo sapien
ggggcctcggcgcggtgcctgctct

SEQ ID NO: 5425080 - DNA, 25 bp, Homo sapien
actgtcctcgcgctccagcggcggg

SEQ ID NO: 5425081 - DNA, 25 bp, Homo sapien
tgggggcggagccttggtgccgtag

SEQ ID NO: 5425082 - DNA, 25 bp, Homo sapien
agagcggtgcggagcgacgtgctcg

SEQ ID NO: 5425083 - DNA, 25 bp, Homo sapien
cctgcttgcgttgctccagcgaggg

SEQ ID NO: 5425084 - DNA, 25 bp, Homo sapien
ccgcctcctgcttgcgttgctccag

SEQ ID NO: 5425085 - DNA, 25 bp, Homo sapien
taaggtgtcaaattatgtgctagcc

SEQ ID NO: 5425086 - DNA, 25 bp, Homo sapien
taatctcatggttgtgttaccccta

SEQ ID NO: 5425087 - DNA, 25 bp, Homo sapien
tgtatgtactcatctgaaagccctc

SEQ ID NO: 5425088 - DNA, 25 bp, Homo sapien
tacttagtttacttcaacggagcag

SEQ ID NO: 5425089 - DNA, 25 bp, Homo sapien
ccaaggctagaagcttacaccaaaa

SEQ ID NO: 5425090 - DNA, 25 bp, Homo sapien
aagccaggcagtacagtctttatgc

SEQ ID NO: 5425091 - DNA, 25 bp, Homo sapien
tgtatatcctcctttgtttggcaca

SEQ ID NO: 5425092 - DNA, 25 bp, Homo sapien
gggtggcagacatcttataaaggtt

SEQ ID NO: 5425093 - DNA, 25 bp, Homo sapien
gaggtctgtttcatggtgctacaat

SEQ ID NO: 5425094 - DNA, 25 bp, Homo sapien
gaaacacagtcataccattcctgca

SEQ ID NO: 5425095 - DNA, 25 bp, Homo sapien
catgctggtaaggttaaagttggga

SEQ ID NO: 5425096 - DNA, 25 bp, Homo sapien
gaaatgctaattcctgggtccttaa

SEQ ID NO: 5425097 - DNA, 25 bp, Homo sapien
aaaatcaatgtattggggagatcaa

SEQ ID NO: 5425098 - DNA, 25 bp, Homo sapien
gcaaatacaacttggagaaaagtga

SEQ ID NO: 5425099 - DNA, 25 bp, Homo sapien
tgttttatacataaagtacagtaaa

SEQ ID NO: 5425100 - DNA, 25 bp, Homo sapien
aatgtattggggagatcaaaatatc

SEQ ID NO: 5425101 - DNA, 25 bp, Homo sapien
ttcaaattccctttgcaagtagagg

SEQ ID NO: 5425102 - DNA, 25 bp, Homo sapien
gaaatgaagccatcaccatcatggt

SEQ ID NO: 5425103 - DNA, 25 bp, Homo sapien
ttctaaaactgcatcctgatatgac

SEQ ID NO: 5425104 - DNA, 25 bp, Homo sapien
gaagccatcaccatcatggtcattc

SEQ ID NO: 5425105 - DNA, 25 bp, Homo sapien
taataatgaaactcatgtgcaagat

SEQ ID NO: 5425106 - DNA, 25 bp, Homo sapien
tgaaactcatgtgcaagattactta

SEQ ID NO: 5425107 - DNA, 25 bp, Homo sapien
tagttataataatgaaactcatgtg

SEQ ID NO: 5425108 - DNA, 25 bp, Homo sapien
ctggaaggccaaaataacattcctt

SEQ ID NO: 5425109 - DNA, 25 bp, Homo sapien
agctcttgggtactatgcgaattca

SEQ ID NO: 5425110 - DNA, 25 bp, Homo sapien
actatgcgaattcatctgcagctgc

SEQ ID NO: 5425111 - DNA, 25 bp, Homo sapien
tggtctgtgtgcataggctgagctc

SEQ ID NO: 5425112 - DNA, 25 bp, Homo sapien
ggctgagctcttgggtactatgcga

SEQ ID NO: 5425113 - DNA, 25 bp, Homo sapien
cctatgaggcgtgaattatttgccc

SEQ ID NO: 5425114 - DNA, 25 bp, Homo sapien
tcaattcagacccttgctagctctt

SEQ ID NO: 5425115 - DNA, 25 bp, Homo sapien
gacgctagctggctgaacttctggc

SEQ ID NO: 5425116 - DNA, 25 bp, Homo sapien
gtttaccaactttctagcccactca

SEQ ID NO: 5425117 - DNA, 25 bp, Homo sapien
tgtagcatccggtggaatcttgcct

SEQ ID NO: 5425118 - DNA, 25 bp, Homo sapien
taaatgtctcaatgctccgtggtcc

SEQ ID NO: 5425119 - DNA, 25 bp, Homo sapien
gagagctgcctgtcattgtccatgt

SEQ ID NO: 5425120 - DNA, 25 bp, Homo sapien
cctttggtcacagcataaagttcaa

SEQ ID NO: 5425121 - DNA, 25 bp, Homo sapien
gatcaaagaagtaggaattaaggta

SEQ ID NO: 5425122 - DNA, 25 bp, Homo sapien
attaaggtaaagaatatatacatac

SEQ ID NO: 5425123 - DNA, 25 bp, Homo sapien
ggaattaaggtaaagaatatataca

SEQ ID NO: 5425124 - DNA, 25 bp, Homo sapien
taggaattaaggtaaagaatatata

SEQ ID NO: 5425125 - DNA, 25 bp, Homo sapien
tattgttatttaagcactaacaagt

SEQ ID NO: 5425126 - DNA, 25 bp, Homo sapien
attgttatttaagcactaacaagtc

SEQ ID NO: 5425127 - DNA, 25 bp, Homo sapien
ttgttatttaagcactaacaagtca

SEQ ID NO: 5425128 - DNA, 25 bp, Homo sapien
agggttgttctgtgacatgagacaa

SEQ ID NO: 5425129 - DNA, 25 bp, Homo sapien
tgttctgtgacatgagacaaggata

SEQ ID NO: 5425130 - DNA, 25 bp, Homo sapien
tttcaagacatgcagggttgttctg

SEQ ID NO: 5425131 - DNA, 25 bp, Homo sapien
catttcaagacatgcagggttgttc

SEQ ID NO: 5425132 - DNA, 25 bp, Homo sapien
cctttgcctgatggcggtgaaccct

SEQ ID NO: 5425133 - DNA, 25 bp, Homo sapien
caaacttctatatctctgcagcaag

SEQ ID NO: 5425134 - DNA, 25 bp, Homo sapien
gcctgggtagtcattcatatctaag

SEQ ID NO: 5425135 - DNA, 25 bp, Homo sapien
tgtaacgcaggcaaggtcagtatta

SEQ ID NO: 5425136 - DNA, 25 bp, Homo sapien
gatacatgttggtgcatgtctcaga

SEQ ID NO: 5425137 - DNA, 25 bp, Homo sapien
tacatgttggtgcatgtctcagaat

SEQ ID NO: 5425138 - DNA, 25 bp, Homo sapien
ctgatacatgttggtgcatgtctca

SEQ ID NO: 5425139 - DNA, 25 bp, Homo sapien
catgttggtgcatgtctcagaattt

SEQ ID NO: 5425140 - DNA, 25 bp, Homo sapien
tgtatggacatgtggcttgcttcca

SEQ ID NO: 5425141 - DNA, 25 bp, Homo sapien
tattgtacatggctgctatgagcat

SEQ ID NO: 5425142 - DNA, 25 bp, Homo sapien
tatccatttctctatgtatggacat

SEQ ID NO: 5425143 - DNA, 25 bp, Homo sapien
tatacccagaaatctattaatcatt

SEQ ID NO: 5425144 - DNA, 25 bp, Homo sapien
gccttcctttccgtatgcaaatgaa

SEQ ID NO: 5425145 - DNA, 25 bp, Homo sapien
gccttttatgacttgcccaacacca

SEQ ID NO: 5425146 - DNA, 25 bp, Homo sapien
tggggtggccttcattttgtgtccg

SEQ ID NO: 5425147 - DNA, 25 bp, Homo sapien
gtcatagcaatgtctaggcctttta

SEQ ID NO: 5425148 - DNA, 25 bp, Homo sapien
tttgtgcaactggacgcacgggcag

SEQ ID NO: 5425149 - DNA, 25 bp, Homo sapien
gagaaacactgccatataatgtgat

SEQ ID NO: 5425150 - DNA, 25 bp, Homo sapien
ccaatgaggcttccgcttggtggag

SEQ ID NO: 5425151 - DNA, 25 bp, Homo sapien
gcaggcaagattttgtgcaactgga

SEQ ID NO: 5425152 - DNA, 25 bp, Homo sapien
tattttcacttcttcggtgctctcc

SEQ ID NO: 5425153 - DNA, 25 bp, Homo sapien
ctgcagtagaatttcgagccgtctt

SEQ ID NO: 5425154 - DNA, 25 bp, Homo sapien
gaatttcgagccgtctttagccagg

SEQ ID NO: 5425155 - DNA, 25 bp, Homo sapien
tttagccaggtagccgtcataatgg

SEQ ID NO: 5425156 - DNA, 25 bp, Homo sapien
tgagcagtaaaaaggccccacagat

SEQ ID NO: 5425157 - DNA, 25 bp, Homo sapien
gagcagtaaaaaggccccacagata

SEQ ID NO: 5425158 - DNA, 25 bp, Homo sapien
agcagtaaaaaggccccacagataa

SEQ ID NO: 5425159 - DNA, 25 bp, Homo sapien
ctgagcagtaaaaaggccccacaga

SEQ ID NO: 5425160 - DNA, 25 bp, Homo sapien
cggctccagcagaacactgctctcc

SEQ ID NO: 5425161 - DNA, 25 bp, Homo sapien
tggatgtcccgcggccgagttccga

SEQ ID NO: 5425162 - DNA, 25 bp, Homo sapien
gagttccgacgcgtggcaggcgttg

SEQ ID NO: 5425163 - DNA, 25 bp, Homo sapien
gtgtcactcgcgccccgtggatgtc

SEQ ID NO: 5425164 - DNA, 25 bp, Homo sapien
gcggtgtggggctctgaagcatgga

SEQ ID NO: 5425165 - DNA, 25 bp, Homo sapien
tggggctctgaagcatggagggggt

SEQ ID NO: 5425166 - DNA, 25 bp, Homo sapien
ttttagataatggaatcttatccta

SEQ ID NO: 5425167 - DNA, 25 bp, Homo sapien
tggcagcctcgttggtttgttttag

SEQ ID NO: 5425168 - DNA, 25 bp, Homo sapien
tggtttgttttagataatggaatct

SEQ ID NO: 5425169 - DNA, 25 bp, Homo sapien
ggcagcctcgttggtttgttttaga

SEQ ID NO: 5425170 - DNA, 25 bp, Homo sapien
gcaagtagcaaggaagagttactct

SEQ ID NO: 5425171 - DNA, 25 bp, Homo sapien
catggttgtatgtttcagtgtctgc

SEQ ID NO: 5425172 - DNA, 25 bp, Homo sapien
cagtgtctgcaactaagaatgaccc

SEQ ID NO: 5425173 - DNA, 25 bp, Homo sapien
tcagtagttttaccctagcctagaa

SEQ ID NO: 5425174 - DNA, 25 bp, Homo sapien
tgggagtacatgcttgcaccactat

SEQ ID NO: 5425175 - DNA, 25 bp, Homo sapien
tattactttgcattacaatggaagc

SEQ ID NO: 5425176 - DNA, 25 bp, Homo sapien
taatattctcagtacattctgtgtt

SEQ ID NO: 5425177 - DNA, 25 bp, Homo sapien
ctggctaaacgagtatgaatattac

SEQ ID NO: 5425178 - DNA, 25 bp, Homo sapien
catttctacatgaaggcagtgaatg

SEQ ID NO: 5425179 - DNA, 25 bp, Homo sapien
tctacatgaaggcagtgaatgcagc

SEQ ID NO: 5425180 - DNA, 25 bp, Homo sapien
ctacatgaaggcagtgaatgcagct

SEQ ID NO: 5425181 - DNA, 25 bp, Homo sapien
tttctacatgaaggcagtgaatgca

SEQ ID NO: 5425182 - DNA, 25 bp, Homo sapien
tgccactaattaactctaagggtat

SEQ ID NO: 5425183 - DNA, 25 bp, Homo sapien
tgggagaatggatagagggtaggca

SEQ ID NO: 5425184 - DNA, 25 bp, Homo sapien
tactgtttaggttagatttctctaa

SEQ ID NO: 5425185 - DNA, 25 bp, Homo sapien
gagggtaggcatgaattgtactgcc

SEQ ID NO: 5425186 - DNA, 25 bp, Homo sapien
tcttttgttatgacttggagccact

SEQ ID NO: 5425187 - DNA, 25 bp, Homo sapien
gaacttgcacagtattaagaccatg

SEQ ID NO: 5425188 - DNA, 25 bp, Homo sapien
taagggaaccttgcattttgaggag

SEQ ID NO: 5425189 - DNA, 25 bp, Homo sapien
aacaggtccttgaacaggtttgcgg

SEQ ID NO: 5425190 - DNA, 25 bp, Homo sapien
tatcatcgagaatatagggcaatgg

SEQ ID NO: 5425191 - DNA, 25 bp, Homo sapien
ctgcatgggcttactaagagggtgt

SEQ ID NO: 5425192 - DNA, 25 bp, Homo sapien
gcggagaatgacctacctacttgat

SEQ ID NO: 5425193 - DNA, 25 bp, Homo sapien
catgaccatggatagcaaactgcct

SEQ ID NO: 5425194 - DNA, 25 bp, Homo sapien
ttcaaagacccttgtcacatggtgc

SEQ ID NO: 5425195 - DNA, 25 bp, Homo sapien
taatctaggccatgacctttgaggg

SEQ ID NO: 5425196 - DNA, 25 bp, Homo sapien
tagtggcaaacctccttacagggat

SEQ ID NO: 5425197 - DNA, 25 bp, Homo sapien
tacagggatgagttgccctccattc

SEQ ID NO: 5425198 - DNA, 25 bp, Homo sapien
gaaaacgaaagactcactgtgtgag

SEQ ID NO: 5425199 - DNA, 25 bp, Homo sapien
cctctactgtatgttggcatttgcc

SEQ ID NO: 5425200 - DNA, 25 bp, Homo sapien
tacctgtcctgaagagctcttatgg

SEQ ID NO: 5425201 - DNA, 25 bp, Homo sapien
tgacggcagtggatatagtcttaga

SEQ ID NO: 5425202 - DNA, 25 bp, Homo sapien
tgtagagtataagggcacaggccct

SEQ ID NO: 5425203 - DNA, 25 bp, Homo sapien
cagagacagcgtaaaatgagcgaac

SEQ ID NO: 5425204 - DNA, 25 bp, Homo sapien
actgctctggcataggaatacttga

SEQ ID NO: 5425205 - DNA, 25 bp, Homo sapien
caggcactccttatgtcagagacag

SEQ ID NO: 5425206 - DNA, 25 bp, Homo sapien
gaacctcccctgttcttgactgtgg

SEQ ID NO: 5425207 - DNA, 25 bp, Homo sapien
cagtggcagagtcagatccaaattc

SEQ ID NO: 5425208 - DNA, 25 bp, Homo sapien
tgtgttttcaatgtggaacctcccc

SEQ ID NO: 5425209 - DNA, 25 bp, Homo sapien
taaactcagggtataaagtccacca

SEQ ID NO: 5425210 - DNA, 25 bp, Homo sapien
tcagtcatgctgctagcactgctgc

SEQ ID NO: 5425211 - DNA, 25 bp, Homo sapien
catgctttgggcagacatgcttgca

SEQ ID NO: 5425212 - DNA, 25 bp, Homo sapien
gactgactgagacgagaagcttcct

SEQ ID NO: 5425213 - DNA, 25 bp, Homo sapien
tttctacaaaggactcttgcatgga

SEQ ID NO: 5425214 - DNA, 25 bp, Homo sapien
tatacatttctggagcggcttatgc

SEQ ID NO: 5425215 - DNA, 25 bp, Homo sapien
tgtagctgaacactggccacggaaa

SEQ ID NO: 5425216 - DNA, 25 bp, Homo sapien
tgtactttccactgtcgctgactga

SEQ ID NO: 5425217 - DNA, 25 bp, Homo sapien
ggaccattaaggaagctgtagctga

SEQ ID NO: 5425218 - DNA, 25 bp, Homo sapien
gatggctcgccactgatttcacaag

SEQ ID NO: 5425219 - DNA, 25 bp, Homo sapien
tgacacttgacgattccttccttgg

SEQ ID NO: 5425220 - DNA, 25 bp, Homo sapien
tgatggttagggtctgatcgctgcc

SEQ ID NO: 5425221 - DNA, 25 bp, Homo sapien
gaacctttgaagcttcctctttgag

SEQ ID NO: 5425222 - DNA, 25 bp, Homo sapien
aatgattccttaaactaaactgagc

SEQ ID NO: 5425223 - DNA, 25 bp, Homo sapien
gggctgacactatggaatcttatat

SEQ ID NO: 5425224 - DNA, 25 bp, Homo sapien
ctgtgaaggtttaggcaagtagtgc

SEQ ID NO: 5425225 - DNA, 25 bp, Homo sapien
caacggatttaggagataagtggat

SEQ ID NO: 5425226 - DNA, 25 bp, Homo sapien
ttgttaatttgcagctagaggacac

SEQ ID NO: 5425227 - DNA, 25 bp, Homo sapien
cctcccttgtcttcagagagtttat

SEQ ID NO: 5425228 - DNA, 25 bp, Homo sapien
ccactgtcagaagtatcagtcttat

SEQ ID NO: 5425229 - DNA, 25 bp, Homo sapien
tactgtacaagtataaagtccactg

SEQ ID NO: 5425230 - DNA, 25 bp, Homo sapien
ttacagtcttggtgcttacagccgg

SEQ ID NO: 5425231 - DNA, 25 bp, Homo sapien
tcataatcaggagaaggtgtacgcc

SEQ ID NO: 5425232 - DNA, 25 bp, Homo sapien
taattgccctcatcggaagcctgga

SEQ ID NO: 5425233 - DNA, 25 bp, Homo sapien
taataacccgtgtcttcaggcaaag

SEQ ID NO: 5425234 - DNA, 25 bp, Homo sapien
gacttggtaaactgtggcatcatca

SEQ ID NO: 5425235 - DNA, 25 bp, Homo sapien
tttgcagaccaaggtagcattgctc

SEQ ID NO: 5425236 - DNA, 25 bp, Homo sapien
cgataggttttggatgaccagtcac

SEQ ID NO: 5425237 - DNA, 25 bp, Homo sapien
taatctttgcacctccatcactggc

SEQ ID NO: 5425238 - DNA, 25 bp, Homo sapien
taggaagatacagaaatcaagttgt

SEQ ID NO: 5425239 - DNA, 25 bp, Homo sapien
ggaagatacagaaatcaagttgtac

SEQ ID NO: 5425240 - DNA, 25 bp, Homo sapien
cataggaagatacagaaatcaagtt

SEQ ID NO: 5425241 - DNA, 25 bp, Homo sapien
gatacagaaatcaagttgtactcac

SEQ ID NO: 5425242 - DNA, 25 bp, Homo sapien
gatcacaactgaggacacttctaga

SEQ ID NO: 5425243 - DNA, 25 bp, Homo sapien
gaaacccggaagtaatagccagcat

SEQ ID NO: 5425244 - DNA, 25 bp, Homo sapien
tcactgcggagttcttcaatagagc

SEQ ID NO: 5425245 - DNA, 25 bp, Homo sapien
aaagtgttctgagctgaaacccgga

SEQ ID NO: 5425246 - DNA, 25 bp, Homo sapien
gaagaggccttccaacaatctggca

SEQ ID NO: 5425247 - DNA, 25 bp, Homo sapien
taacatgaagccgaagtgtggaacc

SEQ ID NO: 5425248 - DNA, 25 bp, Homo sapien
taccatttaatgtcaggaagaggcc

SEQ ID NO: 5425249 - DNA, 25 bp, Homo sapien
tcatggcaggtactggacgaccaat

SEQ ID NO: 5425250 - DNA, 25 bp, Homo sapien
tctttatagacatagcagttctgcg

SEQ ID NO: 5425251 - DNA, 25 bp, Homo sapien
gaattcatactcagtagcttccagc

SEQ ID NO: 5425252 - DNA, 25 bp, Homo sapien
agttctgcgaggtctgctcagccca

SEQ ID NO: 5425253 - DNA, 25 bp, Homo sapien
gcttccagcaaacctcctattgtga

SEQ ID NO: 5425254 - DNA, 25 bp, Homo sapien
accatcatctttgggccgggaccag

SEQ ID NO: 5425255 - DNA, 25 bp, Homo sapien
gatactcagcatcgggaacaagccc

SEQ ID NO: 5425256 - DNA, 25 bp, Homo sapien
tgcgttcgatgtagtagcctgtgac

SEQ ID NO: 5425257 - DNA, 25 bp, Homo sapien
gggaccaggacaagctaacagaact

SEQ ID NO: 5425258 - DNA, 25 bp, Homo sapien
cacagagcggacttggatgtcatca

SEQ ID NO: 5425259 - DNA, 25 bp, Homo sapien
tatggtaagtctgatgacgccacct

SEQ ID NO: 5425260 - DNA, 25 bp, Homo sapien
tataccaggcggctttaggcacttc

SEQ ID NO: 5425261 - DNA, 25 bp, Homo sapien
ccagaaccaggtcataagtgccaga

SEQ ID NO: 5425262 - DNA, 25 bp, Homo sapien
aatcttggttggagtggtgttacac

SEQ ID NO: 5425263 - DNA, 25 bp, Homo sapien
ttgcatttcaatcaagtagcctgtg

SEQ ID NO: 5425264 - DNA, 25 bp, Homo sapien
ttgactgttcctggtacctcagcag

SEQ ID NO: 5425265 - DNA, 25 bp, Homo sapien
taggacgcggaacctgtattctgca

SEQ ID NO: 5425266 - DNA, 25 bp, Homo sapien
tatttacacggacccatcgatctgc

SEQ ID NO: 5425267 - DNA, 25 bp, Homo sapien
tcttgcattaatggctgtgacacgg

SEQ ID NO: 5425268 - DNA, 25 bp, Homo sapien
ggagcggtaccgtgtcattgtcaca

SEQ ID NO: 5425269 - DNA, 25 bp, Homo sapien
caagtaagtgtcatgccatcacggg

SEQ ID NO: 5425270 - DNA, 25 bp, Homo sapien
gaggttaacacgatatggcaatatg

SEQ ID NO: 5425271 - DNA, 25 bp, Homo sapien
gcaagacagaggttaacacgatatg

SEQ ID NO: 5425272 - DNA, 25 bp, Homo sapien
tatgaatacgttaaaacaatgactc

SEQ ID NO: 5425273 - DNA, 25 bp, Homo sapien
tatggcaatatgaatacgttaaaac

SEQ ID NO: 5425274 - DNA, 25 bp, Homo sapien
ttaacattcagaatcagaggtgggg

SEQ ID NO: 5425275 - DNA, 25 bp, Homo sapien
gagcgtcacgttgttctaccacata

SEQ ID NO: 5425276 - DNA, 25 bp, Homo sapien
gactgcaagtaagagccaatcccga

SEQ ID NO: 5425277 - DNA, 25 bp, Homo sapien
tcccgaagcggtttgttgcagccac

SEQ ID NO: 5425278 - DNA, 25 bp, Homo sapien
tgctgctgcgacactctatgacctc

SEQ ID NO: 5425279 - DNA, 25 bp, Homo sapien
gaaagagaagaaatacaggaaatta

SEQ ID NO: 5425280 - DNA, 25 bp, Homo sapien
tgaaagagaagaaatacaggaaatt

SEQ ID NO: 5425281 - DNA, 25 bp, Homo sapien
tatgaaagagaagaaatacaggaaa

SEQ ID NO: 5425282 - DNA, 25 bp, Homo sapien
agagaagaaatacaggaaattaatt

SEQ ID NO: 5425283 - DNA, 25 bp, Homo sapien
agctctactggtctgccagctggga

SEQ ID NO: 5425284 - DNA, 25 bp, Homo sapien
ccagctgggacatggatggtcttct

SEQ ID NO: 5425285 - DNA, 25 bp, Homo sapien
tggacggccagcaataggtatcacc

SEQ ID NO: 5425286 - DNA, 25 bp, Homo sapien
tcagtttagaaccagcaaagaacca

SEQ ID NO: 5425287 - DNA, 25 bp, Homo sapien
gaacatatccagtgagtcggctacc

SEQ ID NO: 5425288 - DNA, 25 bp, Homo sapien
taacagtggatttggtgacatcgac

SEQ ID NO: 5425289 - DNA, 25 bp, Homo sapien
tgcaggcaccaaaggcacttctgag

SEQ ID NO: 5425290 - DNA, 25 bp, Homo sapien
tctgaggtcttgtacagtcacggct

SEQ ID NO: 5425291 - DNA, 25 bp, Homo sapien
gaaaaacagaatgaaagattcatat

SEQ ID NO: 5425292 - DNA, 25 bp, Homo sapien
cagaatgaaagattcatatttccta

SEQ ID NO: 5425293 - DNA, 25 bp, Homo sapien
ttcatatttcctatttgcctgatag

SEQ ID NO: 5425294 - DNA, 25 bp, Homo sapien
aaacagaatgaaagattcatatttc

SEQ ID NO: 5425295 - DNA, 25 bp, Homo sapien
tacagacaccatcaagcgcaaggag

SEQ ID NO: 5425296 - DNA, 25 bp, Homo sapien
tcagtggtgtcaataattgcccggc

SEQ ID NO: 5425297 - DNA, 25 bp, Homo sapien
ggcttgcaaggtcaatgccctgctt

SEQ ID NO: 5425298 - DNA, 25 bp, Homo sapien
tgctccacgttatgacaggaggtgg

SEQ ID NO: 5425299 - DNA, 25 bp, Homo sapien
tcacgttcacggcagcaactctgaa

SEQ ID NO: 5425300 - DNA, 25 bp, Homo sapien
gcaattgattcgctgtattcgctca

SEQ ID NO: 5425301 - DNA, 25 bp, Homo sapien
tatgcactcggtaccactgatcagt

SEQ ID NO: 5425302 - DNA, 25 bp, Homo sapien
caccatcgtacatgggtttggtcca

SEQ ID NO: 5425303 - DNA, 25 bp, Homo sapien
ctaatgctgtgtttggtggtatcca

SEQ ID NO: 5425304 - DNA, 25 bp, Homo sapien
tgttgacacgtgtccagcgcaggct

SEQ ID NO: 5425305 - DNA, 25 bp, Homo sapien
aagttggaagcttcgctgggctcac

SEQ ID NO: 5425306 - DNA, 25 bp, Homo sapien
caacttcttcaggtatgccgggtgg

SEQ ID NO: 5425307 - DNA, 25 bp, Homo sapien
tgcggtcacccggaactggtaatca

SEQ ID NO: 5425308 - DNA, 25 bp, Homo sapien
tgatgagcctggtaacgacatagga

SEQ ID NO: 5425309 - DNA, 25 bp, Homo sapien
cgcgtctttccacgatgtagtgagt

SEQ ID NO: 5425310 - DNA, 25 bp, Homo sapien
aacaatcacccagttgagcctgcta

SEQ ID NO: 5425311 - DNA, 25 bp, Homo sapien
gagtttctggctacaattggctctg

SEQ ID NO: 5425312 - DNA, 25 bp, Homo sapien
cagaacctgctctgatggtaaccag

SEQ ID NO: 5425313 - DNA, 25 bp, Homo sapien
tttgaccatgacagacacggccttg

SEQ ID NO: 5425314 - DNA, 25 bp, Homo sapien
tgtaatcgggcatccagttcggctt

SEQ ID NO: 5425315 - DNA, 25 bp, Homo sapien
cacagcagttgctcgtttgccagta

SEQ ID NO: 5425316 - DNA, 25 bp, Homo sapien
tgtagttgcacttcagccagcgacc

SEQ ID NO: 5425317 - DNA, 25 bp, Homo sapien
tatgatgtagcccacaaccttgctg

SEQ ID NO: 5425318 - DNA, 25 bp, Homo sapien
tccttcactgagagcagtcacggtg

SEQ ID NO: 5425319 - DNA, 25 bp, Homo sapien
tgctgcattcttggctaacacacgg

SEQ ID NO: 5425320 - DNA, 25 bp, Homo sapien
aacaaatatgcccttaaattgtgat

SEQ ID NO: 5425321 - DNA, 25 bp, Homo sapien
aataaacaaatatgcccttaaattg

SEQ ID NO: 5425322 - DNA, 25 bp, Homo sapien
tatgcccttaaattgtgatacatac

SEQ ID NO: 5425323 - DNA, 25 bp, Homo sapien
caaatatgcccttaaattgtgatac

SEQ ID NO: 5425324 - DNA, 25 bp, Homo sapien
gccaccatcgtggtagggttcttcc

SEQ ID NO: 5425325 - DNA, 25 bp, Homo sapien
tataggtcttgaagcttcgctggcc

SEQ ID NO: 5425326 - DNA, 25 bp, Homo sapien
caacgaatagacatggcattggcag

SEQ ID NO: 5425327 - DNA, 25 bp, Homo sapien
tgtagttgcactctaagcatggcac

SEQ ID NO: 5425328 - DNA, 25 bp, Homo sapien
gccaagctgttgtacccgattcacg

SEQ ID NO: 5425329 - DNA, 25 bp, Homo sapien
tgttctctgaactgacacggaaaga

SEQ ID NO: 5425330 - DNA, 25 bp, Homo sapien
gacacacgattcagctgagacagat

SEQ ID NO: 5425331 - DNA, 25 bp, Homo sapien
tacgtcaatggtaaatgggcttcct

SEQ ID NO: 5425332 - DNA, 25 bp, Homo sapien
taagccaagctaagactgcggagga

SEQ ID NO: 5425333 - DNA, 25 bp, Homo sapien
gatccccgggtcacatctttgaagg

SEQ ID NO: 5425334 - DNA, 25 bp, Homo sapien
cacatcaatgtagcagatccccggg

SEQ ID NO: 5425335 - DNA, 25 bp, Homo sapien
taatgatggattcgggcaccaccgt

SEQ ID NO: 5425336 - DNA, 25 bp, Homo sapien
acctggtgggttgacgggctctcta

SEQ ID NO: 5425337 - DNA, 25 bp, Homo sapien
taactcaggagctgttaaccggtca

SEQ ID NO: 5425338 - DNA, 25 bp, Homo sapien
taccttggtaggcaatgaagaggcg

SEQ ID NO: 5425339 - DNA, 25 bp, Homo sapien
tactttgaccactgtgggaggacct

SEQ ID NO: 5425340 - DNA, 25 bp, Homo sapien
ctcttctttcaaggatatactgttg

SEQ ID NO: 5425341 - DNA, 25 bp, Homo sapien
cacttttacccatcttgtgcttttc

SEQ ID NO: 5425342 - DNA, 25 bp, Homo sapien
tggccttgcccatgtcagggtaatg

SEQ ID NO: 5425343 - DNA, 25 bp, Homo sapien
ttatgttgctaggttctggaatgcc

SEQ ID NO: 5425344 - DNA, 25 bp, Homo sapien
tatgggagcacaaccgtcattgagt

SEQ ID NO: 5425345 - DNA, 25 bp, Homo sapien
aattagtgcccaggcaagtctgctg

SEQ ID NO: 5425346 - DNA, 25 bp, Homo sapien
tgtatttgagcaaccactggatcag

SEQ ID NO: 5425347 - DNA, 25 bp, Homo sapien
ttaactgcagaaacacggaattggt

SEQ ID NO: 5425348 - DNA, 25 bp, Homo sapien
tgaaccaagttactcgaggcactgg

SEQ ID NO: 5425349 - DNA, 25 bp, Homo sapien
tgtgtatacaccacgatggtcccga

SEQ ID NO: 5425350 - DNA, 25 bp, Homo sapien
ttaattctaaggctctctccggact

SEQ ID NO: 5425351 - DNA, 25 bp, Homo sapien
taggctggtggatccaagtacgtcg

SEQ ID NO: 5425352 - DNA, 25 bp, Homo sapien
taagtgtgatggtttcccgggtgac

SEQ ID NO: 5425353 - DNA, 25 bp, Homo sapien
tctgaactcatagcgatccccagga

SEQ ID NO: 5425354 - DNA, 25 bp, Homo sapien
tgagggcgggcttatagttccaaca

SEQ ID NO: 5425355 - DNA, 25 bp, Homo sapien
tactgcctccatcacgcaatggtgg

SEQ ID NO: 5425356 - DNA, 25 bp, Homo sapien
taattggcccaatagtgacaggatc

SEQ ID NO: 5425357 - DNA, 25 bp, Homo sapien
ttacttatgccagcgtgggaccacg

SEQ ID NO: 5425358 - DNA, 25 bp, Homo sapien
tgtgtgacacgacagaccatgttct

SEQ ID NO: 5425359 - DNA, 25 bp, Homo sapien
tccatcaatgagaggaggatcccag

SEQ ID NO: 5425360 - DNA, 25 bp, Homo sapien
tccaggtttcaggttggataccaca

SEQ ID NO: 5425361 - DNA, 25 bp, Homo sapien
cagtttacagcagatacccggaagt

SEQ ID NO: 5425362 - DNA, 25 bp, Homo sapien
gcttactccagccaagggtgatgga

SEQ ID NO: 5425363 - DNA, 25 bp, Homo sapien
cgattcttatcttagcaggtggacc

SEQ ID NO: 5425364 - DNA, 25 bp, Homo sapien
taatctttgtcacttctggtatgcc

SEQ ID NO: 5425365 - DNA, 25 bp, Homo sapien
tatcactaccgccatctgcaattgg

SEQ ID NO: 5425366 - DNA, 25 bp, Homo sapien
gatcagcagctttgtagaattcaga

SEQ ID NO: 5425367 - DNA, 25 bp, Homo sapien
ggttcagaaaatggaccctgtccag

SEQ ID NO: 5425368 - DNA, 25 bp, Homo sapien
tcttggctacaacggaatcagattc

SEQ ID NO: 5425369 - DNA, 25 bp, Homo sapien
catagaccacacaacgcggcttgtc

SEQ ID NO: 5425370 - DNA, 25 bp, Homo sapien
ggctcggacccggaagatgtattca

SEQ ID NO: 5425371 - DNA, 25 bp, Homo sapien
aattccatatttgttcacggctcgg

SEQ ID NO: 5425372 - DNA, 25 bp, Homo sapien
ggacaaaacacgatgttagtacttc

SEQ ID NO: 5425373 - DNA, 25 bp, Homo sapien
caaaacacgatgttagtacttcttt

SEQ ID NO: 5425374 - DNA, 25 bp, Homo sapien
gacaaaacacgatgttagtacttct

SEQ ID NO: 5425375 - DNA, 25 bp, Homo sapien
aggacaaaacacgatgttagtactt

SEQ ID NO: 5425376 - DNA, 25 bp, Homo sapien
tgatgagtatagatgcgaggtccgt

SEQ ID NO: 5425377 - DNA, 25 bp, Homo sapien
tagcatccactattaaggcgatcgg

SEQ ID NO: 5425378 - DNA, 25 bp, Homo sapien
caggtttgccagaaatgccagctct

SEQ ID NO: 5425379 - DNA, 25 bp, Homo sapien
tataccactcaatagtaggcgcagg

SEQ ID NO: 5425380 - DNA, 25 bp, Homo sapien
taatgggccctacaacctcagatgg

SEQ ID NO: 5425381 - DNA, 25 bp, Homo sapien
tcttgctacctccatcgaaagctgg

SEQ ID NO: 5425382 - DNA, 25 bp, Homo sapien
gaaggtcacgtctctcaacaatgta

SEQ ID NO: 5425383 - DNA, 25 bp, Homo sapien
taagaatcgatgcaagtaatgggcc

SEQ ID NO: 5425384 - DNA, 25 bp, Homo sapien
ctggttcagaaggatggctaggttt

SEQ ID NO: 5425385 - DNA, 25 bp, Homo sapien
tcaattgccaagactggttcagaag

SEQ ID NO: 5425386 - DNA, 25 bp, Homo sapien
caagactggttcagaaggatggcta

SEQ ID NO: 5425387 - DNA, 25 bp, Homo sapien
ttgccaagactggttcagaaggatg

SEQ ID NO: 5425388 - DNA, 25 bp, Homo sapien
cgagtaacattagtgacccatggtg

SEQ ID NO: 5425389 - DNA, 25 bp, Homo sapien
ttgaagtgagttgtgcggatgacca

SEQ ID NO: 5425390 - DNA, 25 bp, Homo sapien
taagtccagcactgattgttgtgac

SEQ ID NO: 5425391 - DNA, 25 bp, Homo sapien
ggtgatagcctacgactgcactgcc

SEQ ID NO: 5425392 - DNA, 25 bp, Homo sapien
tcactgatgccaaagcggttttctg

SEQ ID NO: 5425393 - DNA, 25 bp, Homo sapien
gatttcatatctcccagcgtcagct

SEQ ID NO: 5425394 - DNA, 25 bp, Homo sapien
tacttaggtggctcccatttgagag

SEQ ID NO: 5425395 - DNA, 25 bp, Homo sapien
ggaccaggcctgtctagcacaacaa

SEQ ID NO: 5425396 - DNA, 25 bp, Homo sapien
tagtgcttcaacgacatagtgtaca

SEQ ID NO: 5425397 - DNA, 25 bp, Homo sapien
tagttgctccttaataagaacagga

SEQ ID NO: 5425398 - DNA, 25 bp, Homo sapien
tcagaccggaaacaacgtgatgggt

SEQ ID NO: 5425399 - DNA, 25 bp, Homo sapien
gaagcagaagctctctcgggtcact

SEQ ID NO: 5425400 - DNA, 25 bp, Homo sapien
tacagttgttggtcacagagaccca

SEQ ID NO: 5425401 - DNA, 25 bp, Homo sapien
tctagtacggaggtcagtgtctggc

SEQ ID NO: 5425402 - DNA, 25 bp, Homo sapien
tggtgctccaccatcgttttcagga

SEQ ID NO: 5425403 - DNA, 25 bp, Homo sapien
cctcggaaaggcacagtcatggtaa

SEQ ID NO: 5425404 - DNA, 25 bp, Homo sapien
tgtttacacgcacccatcttaggct

SEQ ID NO: 5425405 - DNA, 25 bp, Homo sapien
gacttggaactgtaaatggatctag

SEQ ID NO: 5425406 - DNA, 25 bp, Homo sapien
cactctcgggtcttgaccagcaaag

SEQ ID NO: 5425407 - DNA, 25 bp, Homo sapien
ggatctagtgcctttatagctacac

SEQ ID NO: 5425408 - DNA, 25 bp, Homo sapien
taatagtcgatatctgcaccaccat

SEQ ID NO: 5425409 - DNA, 25 bp, Homo sapien
tactttgcaattaacggccacagac

SEQ ID NO: 5425410 - DNA, 25 bp, Homo sapien
tggtggaccaggcttatcaagtact

SEQ ID NO: 5425411 - DNA, 25 bp, Homo sapien
tcacatattgtccatgcaaggtggc

SEQ ID NO: 5425412 - DNA, 25 bp, Homo sapien
tacatcagtccttcatcaaggccgg

SEQ ID NO: 5425413 - DNA, 25 bp, Homo sapien
gctttgacaacaataacgtctcgga

SEQ ID NO: 5425414 - DNA, 25 bp, Homo sapien
ggttttctgcacaaacacggaactg

SEQ ID NO: 5425415 - DNA, 25 bp, Homo sapien
catgcacaactttaggagtaccagg

SEQ ID NO: 5425416 - DNA, 25 bp, Homo sapien
taaagtagcacttgcacgcagaacg

SEQ ID NO: 5425417 - DNA, 25 bp, Homo sapien
acatcaggtataggtttgccacgga

SEQ ID NO: 5425418 - DNA, 25 bp, Homo sapien
gatacaaggcatcacacgcacggta

SEQ ID NO: 5425419 - DNA, 25 bp, Homo sapien
cagtaactttcagaggcccttcagg

SEQ ID NO: 5425420 - DNA, 25 bp, Homo sapien
ccagcggccatcaggtagatctttc

SEQ ID NO: 5425421 - DNA, 25 bp, Homo sapien
tttggtcttctacaagtccactcac

SEQ ID NO: 5425422 - DNA, 25 bp, Homo sapien
ttttgctaccaccatcataggcagg

SEQ ID NO: 5425423 - DNA, 25 bp, Homo sapien
tttctaatacgttggtaaagctggc

SEQ ID NO: 5425424 - DNA, 25 bp, Homo sapien
tggatcacgagcaacaaagcattct

SEQ ID NO: 5425425 - DNA, 25 bp, Homo sapien
ttcagggcgaccaggtgggtcacat

SEQ ID NO: 5425426 - DNA, 25 bp, Homo sapien
ccatttcagtgtgacattgtttctt

SEQ ID NO: 5425427 - DNA, 25 bp, Homo sapien
cagtgtgacattgtttcttgtaata

SEQ ID NO: 5425428 - DNA, 25 bp, Homo sapien
taggcttgccaatgccaacaatatt

SEQ ID NO: 5425429 - DNA, 25 bp, Homo sapien
ttttgaatttggtgtcctgaatggg

SEQ ID NO: 5425430 - DNA, 25 bp, Homo sapien
ggccctcatcaagcccagttgtttt

SEQ ID NO: 5425431 - DNA, 25 bp, Homo sapien
tgttttgaatttggtgtcctgaatg

SEQ ID NO: 5425432 - DNA, 25 bp, Homo sapien
tcaaggccctcatcaagcccagttg

SEQ ID NO: 5425433 - DNA, 25 bp, Homo sapien
tgccattgcacaagcatctgatctt

SEQ ID NO: 5425434 - DNA, 25 bp, Homo sapien
gatattgtacaataactgccttaga

SEQ ID NO: 5425435 - DNA, 25 bp, Homo sapien
gatggtagccaataattttggtgcc

SEQ ID NO: 5425436 - DNA, 25 bp, Homo sapien
gattgatgtcacaaaaggagttcca

SEQ ID NO: 5425437 - DNA, 25 bp, Homo sapien
taacttcatcaaaccgaactgggcc

SEQ ID NO: 5425438 - DNA, 25 bp, Homo sapien
caccagtataggctggaggttccca

SEQ ID NO: 5425439 - DNA, 25 bp, Homo sapien
caactgttgctgataccatgtgcca

SEQ ID NO: 5425440 - DNA, 25 bp, Homo sapien
tagttgcttatttggcagccaccag

SEQ ID NO: 5425441 - DNA, 25 bp, Homo sapien
cctttctcattataagccttgacac

SEQ ID NO: 5425442 - DNA, 25 bp, Homo sapien
ctcattataagccttgacacggaac

SEQ ID NO: 5425443 - DNA, 25 bp, Homo sapien
aggaacacccaacactcttggatcg

SEQ ID NO: 5425444 - DNA, 25 bp, Homo sapien
cacccaacactcttggatcgctttt

SEQ ID NO: 5425445 - DNA, 25 bp, Homo sapien
tcaaatcgagtgactctcaggccag

SEQ ID NO: 5425446 - DNA, 25 bp, Homo sapien
taagtgatgcactggtctgggacac

SEQ ID NO: 5425447 - DNA, 25 bp, Homo sapien
tcagcagctttcacggcatcaacag

SEQ ID NO: 5425448 - DNA, 25 bp, Homo sapien
tgcatttcaacaacgtaccccagga

SEQ ID NO: 5425449 - DNA, 25 bp, Homo sapien
aactgtagctggacttggttcccca

SEQ ID NO: 5425450 - DNA, 25 bp, Homo sapien
taaactgtagctggacttggttccc

SEQ ID NO: 5425451 - DNA, 25 bp, Homo sapien
aataaactgtagctggacttggttc

SEQ ID NO: 5425452 - DNA, 25 bp, Homo sapien
ataataaactgtagctggacttggt

SEQ ID NO: 5425453 - DNA, 25 bp, Homo sapien
gacggttccaacagacggtcatgga

SEQ ID NO: 5425454 - DNA, 25 bp, Homo sapien
tagctttcatccaacgaccatcagg

SEQ ID NO: 5425455 - DNA, 25 bp, Homo sapien
tactgggaatgacttagaacctgca

SEQ ID NO: 5425456 - DNA, 25 bp, Homo sapien
gggagttcaacctcatccttggcag

SEQ ID NO: 5425457 - DNA, 25 bp, Homo sapien
ggctacatagcattcagaattcttg

SEQ ID NO: 5425458 - DNA, 25 bp, Homo sapien
cactgtatgaccatggagtctttgg

SEQ ID NO: 5425459 - DNA, 25 bp, Homo sapien
cattgttgactggttcatgccactg

SEQ ID NO: 5425460 - DNA, 25 bp, Homo sapien
tagttttgttgacctttgtccacaa

SEQ ID NO: 5425461 - DNA, 25 bp, Homo sapien
caggtaatggttggcttaggacgtc

SEQ ID NO: 5425462 - DNA, 25 bp, Homo sapien
tcttggccaacctgtacactgtaac

SEQ ID NO: 5425463 - DNA, 25 bp, Homo sapien
gatcagactctaaggcaaagctttg

SEQ ID NO: 5425464 - DNA, 25 bp, Homo sapien
taggacgtccagaaattggcacttc

SEQ ID NO: 5425465 - DNA, 25 bp, Homo sapien
ttcaggttaacaggtggacttggcg

SEQ ID NO: 5425466 - DNA, 25 bp, Homo sapien
tgaagagactttactcgagcacact

SEQ ID NO: 5425467 - DNA, 25 bp, Homo sapien
tcaggttttgtccaactcagagaga

SEQ ID NO: 5425468 - DNA, 25 bp, Homo sapien
tgcaagggaccgaggatcacttctc

SEQ ID NO: 5425469 - DNA, 25 bp, Homo sapien
tgtaggacgaccttttataggaaca

SEQ ID NO: 5425470 - DNA, 25 bp, Homo sapien
tggtgtaggacgaccttttatagga

SEQ ID NO: 5425471 - DNA, 25 bp, Homo sapien
gacgtcagcatgttctccaactcca

SEQ ID NO: 5425472 - DNA, 25 bp, Homo sapien
tcaactataataggtccagggacgt

SEQ ID NO: 5425473 - DNA, 25 bp, Homo sapien
ctaggtcaagatcaatgtctggtgc

SEQ ID NO: 5425474 - DNA, 25 bp, Homo sapien
taatagcacagatacggaagttgta

SEQ ID NO: 5425475 - DNA, 25 bp, Homo sapien
caatgtatccttgaatttcacagcc

SEQ ID NO: 5425476 - DNA, 25 bp, Homo sapien
ggtttgctccaagaaaggaatactg

SEQ ID NO: 5425477 - DNA, 25 bp, Homo sapien
ggaatactgaagatctggttatgtc

SEQ ID NO: 5425478 - DNA, 25 bp, Homo sapien
ggagtgcacattgtccattcaccaa

SEQ ID NO: 5425479 - DNA, 25 bp, Homo sapien
cgtgattttctatgagtccagttac

SEQ ID NO: 5425480 - DNA, 25 bp, Homo sapien
ggttcactaagtccagcagcattct

SEQ ID NO: 5425481 - DNA, 25 bp, Homo sapien
aactctgaactcataatcgtgattt

SEQ ID NO: 5425482 - DNA, 25 bp, Homo sapien
tctcaggcgcaactctccaatcaga

SEQ ID NO: 5425483 - DNA, 25 bp, Homo sapien
ggtctttcccatacaacaatcattg

SEQ ID NO: 5425484 - DNA, 25 bp, Homo sapien
ggattcttggcaactactggctcag

SEQ ID NO: 5425485 - DNA, 25 bp, Homo sapien
tggtgcatctggtactacaaatgga

SEQ ID NO: 5425486 - DNA, 25 bp, Homo sapien
actggctcagattcaagaggttcac

SEQ ID NO: 5425487 - DNA, 25 bp, Homo sapien
gctgagagtctgcacattggcatca

SEQ ID NO: 5425488 - DNA, 25 bp, Homo sapien
tgtttactgccattatacggaaagt

SEQ ID NO: 5425489 - DNA, 25 bp, Homo sapien
caagaagcttagtaaccttgcagct

SEQ ID NO: 5425490 - DNA, 25 bp, Homo sapien
cacagtccaaactaagcggctggtt

SEQ ID NO: 5425491 - DNA, 25 bp, Homo sapien
taatttccactgtcgacacgtactg

SEQ ID NO: 5425492 - DNA, 25 bp, Homo sapien
gattcaccagcatgaaccacgattg

SEQ ID NO: 5425493 - DNA, 25 bp, Homo sapien
catacttattcgtggtggatctacc

SEQ ID NO: 5425494 - DNA, 25 bp, Homo sapien
gactggtggcaaagtcggtgctctt

SEQ ID NO: 5425495 - DNA, 25 bp, Homo sapien
gggtcacgagccacataacattctg

SEQ ID NO: 5425496 - DNA, 25 bp, Homo sapien
tcctggtggatcacatgggtcacga

SEQ ID NO: 5425497 - DNA, 25 bp, Homo sapien
tcctgcggcatttcgggctataacc

SEQ ID NO: 5425498 - DNA, 25 bp, Homo sapien
tatctgtgatcttcaactaggccag

SEQ ID NO: 5425499 - DNA, 25 bp, Homo sapien
tttccttgcgttctagatgatagcc

SEQ ID NO: 5425500 - DNA, 25 bp, Homo sapien
tattcaacttaacccagaggatgct

SEQ ID NO: 5425501 - DNA, 25 bp, Homo sapien
caccttcttcaaggccagttgtctt

SEQ ID NO: 5425502 - DNA, 25 bp, Homo sapien
tcggcttgccaatgcccacgatgtt

SEQ ID NO: 5425503 - DNA, 25 bp, Homo sapien
atggatattgggctacagtaggctc

SEQ ID NO: 5425504 - DNA, 25 bp, Homo sapien
tagctgatacaatttgccaggtggt

SEQ ID NO: 5425505 - DNA, 25 bp, Homo sapien
cagtaggctctgaattgaggtaggt

SEQ ID NO: 5425506 - DNA, 25 bp, Homo sapien
ggaagtgtcccgtttctcaacaatg

SEQ ID NO: 5425507 - DNA, 25 bp, Homo sapien
ctaaagattctccatggtcccgggc

SEQ ID NO: 5425508 - DNA, 25 bp, Homo sapien
tctgcgagaaccctgaaatagtagc

SEQ ID NO: 5425509 - DNA, 25 bp, Homo sapien
tagtaacaactttgcgcaggtcagc

SEQ ID NO: 5425510 - DNA, 25 bp, Homo sapien
gaacaaaaagtctcagggtgcagca

SEQ ID NO: 5425511 - DNA, 25 bp, Homo sapien
tctggcagggcaatctcaaccatat

SEQ ID NO: 5425512 - DNA, 25 bp, Homo sapien
tgctggtggagtgacaatctgccat

SEQ ID NO: 5425513 - DNA, 25 bp, Homo sapien
tagtatacgaagttgccttgagtcc

SEQ ID NO: 5425514 - DNA, 25 bp, Homo sapien
gcttgtatccagaacacgtgggtta

SEQ ID NO: 5425515 - DNA, 25 bp, Homo sapien
tggagggaaccatgatagtacacac

SEQ ID NO: 5425516 - DNA, 25 bp, Homo sapien
ggtgggcggcctgaaacatcagctt

SEQ ID NO: 5425517 - DNA, 25 bp, Homo sapien
gattcactgcaagcacaggctctga

SEQ ID NO: 5425518 - DNA, 25 bp, Homo sapien
tagtcgctgtaagggtataggcacc

SEQ ID NO: 5425519 - DNA, 25 bp, Homo sapien
ttcagccaccgtccattaggaaggt

SEQ ID NO: 5425520 - DNA, 25 bp, Homo sapien
catttttggcgatcacacggaattc

SEQ ID NO: 5425521 - DNA, 25 bp, Homo sapien
ccccagtatattcaggcttagccca

SEQ ID NO: 5425522 - DNA, 25 bp, Homo sapien
ttttccaggtgggtcaatgggatcc

SEQ ID NO: 5425523 - DNA, 25 bp, Homo sapien
tactctaatccagtagtaaggcggg

SEQ ID NO: 5425524 - DNA, 25 bp, Homo sapien
tcggtcgaccgagcactggaatttc

SEQ ID NO: 5425525 - DNA, 25 bp, Homo sapien
tgatagatgccacggagatccagct

SEQ ID NO: 5425526 - DNA, 25 bp, Homo sapien
caccatcgtgtttgggcttaggcca

SEQ ID NO: 5425527 - DNA, 25 bp, Homo sapien
aacaagtgttcttcgaagctcggca

SEQ ID NO: 5425528 - DNA, 25 bp, Homo sapien
tattcacacccttcagacaagccgg

SEQ ID NO: 5425529 - DNA, 25 bp, Homo sapien
gcaggacgacctttaattggcacaa

SEQ ID NO: 5425530 - DNA, 25 bp, Homo sapien
tccatctatcagagggaggtcccag

SEQ ID NO: 5425531 - DNA, 25 bp, Homo sapien
catcagaacagaatctgaagcctca

SEQ ID NO: 5425532 - DNA, 25 bp, Homo sapien
gcatctttcatcagaacagaatctg

SEQ ID NO: 5425533 - DNA, 25 bp, Homo sapien
gctgcatctttcatcagaacagaat

SEQ ID NO: 5425534 - DNA, 25 bp, Homo sapien
atgctgcatctttcatcagaacaga

SEQ ID NO: 5425535 - DNA, 25 bp, Homo sapien
gatatcctgtaatttcgctgccacc

SEQ ID NO: 5425536 - DNA, 25 bp, Homo sapien
tttctgcactgacacggaattcgta

SEQ ID NO: 5425537 - DNA, 25 bp, Homo sapien
ttttattgctctcacccatcgcagg

SEQ ID NO: 5425538 - DNA, 25 bp, Homo sapien
tgttactttgcacctgagatcggaa

SEQ ID NO: 5425539 - DNA, 25 bp, Homo sapien
ccttcgtgccaaaaggattggtagc

SEQ ID NO: 5425540 - DNA, 25 bp, Homo sapien
tacaggttctcctttgccatagtgg

SEQ ID NO: 5425541 - DNA, 25 bp, Homo sapien
tataggacttaattggtgagccgcc

SEQ ID NO: 5425542 - DNA, 25 bp, Homo sapien
tagcagtgatggtatattcacccgc

SEQ ID NO: 5425543 - DNA, 25 bp, Homo sapien
ggcacattctgggacattaacatgg

SEQ ID NO: 5425544 - DNA, 25 bp, Homo sapien
caacaaggtcagttacagtaaaggc

SEQ ID NO: 5425545 - DNA, 25 bp, Homo sapien
caagacttcgaaggtagatctcgct

SEQ ID NO: 5425546 - DNA, 25 bp, Homo sapien
tttctgatggagcactgatagcacc

SEQ ID NO: 5425547 - DNA, 25 bp, Homo sapien
tgtaaaacatgcacctgggtttttc

SEQ ID NO: 5425548 - DNA, 25 bp, Homo sapien
gctctgatggtaggcttggcttgcc

SEQ ID NO: 5425549 - DNA, 25 bp, Homo sapien
aattgggtccagtgccacaacaggc

SEQ ID NO: 5425550 - DNA, 25 bp, Homo sapien
ctttccttgaactcgagatgatacc

SEQ ID NO: 5425551 - DNA, 25 bp, Homo sapien
tgcccacacctgctaaattgattgc

SEQ ID NO: 5425552 - DNA, 25 bp, Homo sapien
gatactgaatcgtgtctgacatcca

SEQ ID NO: 5425553 - DNA, 25 bp, Homo sapien
gggtcagtccaagttagagatactg

SEQ ID NO: 5425554 - DNA, 25 bp, Homo sapien
tgtaattggagaaccaccagttttc

SEQ ID NO: 5425555 - DNA, 25 bp, Homo sapien
gacatccacaatattgggaggtggg

SEQ ID NO: 5425556 - DNA, 25 bp, Homo sapien
cgtcttctgaatttaagacacttac

SEQ ID NO: 5425557 - DNA, 25 bp, Homo sapien
ataagaagcctcctcaaaaccgtgt

SEQ ID NO: 5425558 - DNA, 25 bp, Homo sapien
aatgcaagatttataataagaagcc

SEQ ID NO: 5425559 - DNA, 25 bp, Homo sapien
gctttacgtcttctgaatttaagac

SEQ ID NO: 5425560 - DNA, 25 bp, Homo sapien
gatgtctcgcaacaattggctccga

SEQ ID NO: 5425561 - DNA, 25 bp, Homo sapien
tattttcggcactgaccctgaaggt

SEQ ID NO: 5425562 - DNA, 25 bp, Homo sapien
caagtagcacaaatcaggtagaccc

SEQ ID NO: 5425563 - DNA, 25 bp, Homo sapien
tgtcagttgctagaggatcttcccc

SEQ ID NO: 5425564 - DNA, 25 bp, Homo sapien
gctttttccagccaatgctacagga

SEQ ID NO: 5425565 - DNA, 25 bp, Homo sapien
tcaggtccacaactggtccaggagt

SEQ ID NO: 5425566 - DNA, 25 bp, Homo sapien
aaatcttttgcagagtactgtaggc

SEQ ID NO: 5425567 - DNA, 25 bp, Homo sapien
tgccacaacagtgatttcgcttggg

SEQ ID NO: 5425568 - DNA, 25 bp, Homo sapien
caaaatgatgggatgatggttcatt

SEQ ID NO: 5425569 - DNA, 25 bp, Homo sapien
aagtgtaagccccatataacaaagg

SEQ ID NO: 5425570 - DNA, 25 bp, Homo sapien
taacaaaggaaggatataactcaaa

SEQ ID NO: 5425571 - DNA, 25 bp, Homo sapien
tcaaaatgatgggatgatggttcat

SEQ ID NO: 5425572 - DNA, 25 bp, Homo sapien
tcagcaaacactcggaagaagtagg

SEQ ID NO: 5425573 - DNA, 25 bp, Homo sapien
gacagcatcacgagtttcaccggga

SEQ ID NO: 5425574 - DNA, 25 bp, Homo sapien
cttaacagtcacattgacaggtggc

SEQ ID NO: 5425575 - DNA, 25 bp, Homo sapien
tccgccatcaataatgggaggctcc

SEQ ID NO: 5425576 - DNA, 25 bp, Homo sapien
tatgagtgtcttccttaagtccgca

SEQ ID NO: 5425577 - DNA, 25 bp, Homo sapien
agtccgcatcaagttctccctcagg

SEQ ID NO: 5425578 - DNA, 25 bp, Homo sapien
tagtctcatagtaactccagcacgt

SEQ ID NO: 5425579 - DNA, 25 bp, Homo sapien
tcacagcgcaagaaagtgtcaaagt

SEQ ID NO: 5425580 - DNA, 25 bp, Homo sapien
gataaccaatgatagggctgccgcc

SEQ ID NO: 5425581 - DNA, 25 bp, Homo sapien
aagttgcacctcacccagttatcgg

SEQ ID NO: 5425582 - DNA, 25 bp, Homo sapien
gcttgccccaagatagactcacaga

SEQ ID NO: 5425583 - DNA, 25 bp, Homo sapien
tattaacggcatacacacggaattg

SEQ ID NO: 5425584 - DNA, 25 bp, Homo sapien
actgagggtcccgagcataagcggc

SEQ ID NO: 5425585 - DNA, 25 bp, Homo sapien
taataacaggaggatcacagcgtcc

SEQ ID NO: 5425586 - DNA, 25 bp, Homo sapien
tgaccttagtccagttaacagcctg

SEQ ID NO: 5425587 - DNA, 25 bp, Homo sapien
cataagcggccttggatgcgtcact

SEQ ID NO: 5425588 - DNA, 25 bp, Homo sapien
ctgcagaaattgattgaaaagttaa

SEQ ID NO: 5425589 - DNA, 25 bp, Homo sapien
tgcagaaattgattgaaaagttaat

SEQ ID NO: 5425590 - DNA, 25 bp, Homo sapien
cagaaattgattgaaaagttaattt

SEQ ID NO: 5425591 - DNA, 25 bp, Homo sapien
attgattgaaaagttaatttcccag

SEQ ID NO: 5425592 - DNA, 25 bp, Homo sapien
gttcagtgaagactggatcgcctac

SEQ ID NO: 5425593 - DNA, 25 bp, Homo sapien
tttggcaattgctggttcagtgaag

SEQ ID NO: 5425594 - DNA, 25 bp, Homo sapien
caattgctggttcagtgaagactgg

SEQ ID NO: 5425595 - DNA, 25 bp, Homo sapien
gctggttcagtgaagactggatcgc

SEQ ID NO: 5425596 - DNA, 25 bp, Homo sapien
tctataagtttctccacgctgcagc

SEQ ID NO: 5425597 - DNA, 25 bp, Homo sapien
cacagttgcagagacttgagcccag

SEQ ID NO: 5425598 - DNA, 25 bp, Homo sapien
ggttcccaagaaagcatagcacgat

SEQ ID NO: 5425599 - DNA, 25 bp, Homo sapien
tccatcttcaagaggcggttcccaa

SEQ ID NO: 5425600 - DNA, 25 bp, Homo sapien
agtaatggtatagtctcctgagtcc

SEQ ID NO: 5425601 - DNA, 25 bp, Homo sapien
gcatccaagcagacattagttccag

SEQ ID NO: 5425602 - DNA, 25 bp, Homo sapien
tagccacactcaggtctatcctggg

SEQ ID NO: 5425603 - DNA, 25 bp, Homo sapien
gagtccttccggttcacgctgaata

SEQ ID NO: 5425604 - DNA, 25 bp, Homo sapien
agataaaggacttaatgtatgcaaa

SEQ ID NO: 5425605 - DNA, 25 bp, Homo sapien
gataaaggacttaatgtatgcaaag

SEQ ID NO: 5425606 - DNA, 25 bp, Homo sapien
taaaggacttaatgtatgcaaagct

SEQ ID NO: 5425607 - DNA, 25 bp, Homo sapien
ataaaggacttaatgtatgcaaagc

SEQ ID NO: 5425608 - DNA, 25 bp, Homo sapien
cattttctgcgaggatagtcactgg

SEQ ID NO: 5425609 - DNA, 25 bp, Homo sapien
ttaccgcggtcctggcaatagctct

SEQ ID NO: 5425610 - DNA, 25 bp, Homo sapien
ccatcatgctttggacgagcccaga

SEQ ID NO: 5425611 - DNA, 25 bp, Homo sapien
cagaaggtgggctaatgtttaccgc

SEQ ID NO: 5425612 - DNA, 25 bp, Homo sapien
ccagcacaaggatattcagttgacc

SEQ ID NO: 5425613 - DNA, 25 bp, Homo sapien
ccttgttgactttggtgactcgtgc

SEQ ID NO: 5425614 - DNA, 25 bp, Homo sapien
tcagttgaccggacaagagtatcat

SEQ ID NO: 5425615 - DNA, 25 bp, Homo sapien
gagtatcattggctttcacccacag

SEQ ID NO: 5425616 - DNA, 25 bp, Homo sapien
tgccaaatcggttttcagcacggac

SEQ ID NO: 5425617 - DNA, 25 bp, Homo sapien
aatgccaaatcggttttcagcacgg

SEQ ID NO: 5425618 - DNA, 25 bp, Homo sapien
tgcgcaaccatctttggagatgtga

SEQ ID NO: 5425619 - DNA, 25 bp, Homo sapien
caaatgggaactgcgcaaccatctt

SEQ ID NO: 5425620 - DNA, 25 bp, Homo sapien
atgttactgcctccgtcctccagag

SEQ ID NO: 5425621 - DNA, 25 bp, Homo sapien
tatcagaaatgtcaaatggaggctg

SEQ ID NO: 5425622 - DNA, 25 bp, Homo sapien
ttttgtgactgaagctagagccgtg

SEQ ID NO: 5425623 - DNA, 25 bp, Homo sapien
gcaagcatcagcgtctatatcagaa

SEQ ID NO: 5425624 - DNA, 25 bp, Homo sapien
tttgctctggcataaggatctttgg

SEQ ID NO: 5425625 - DNA, 25 bp, Homo sapien
cttttttccatttacaggtgggatg

SEQ ID NO: 5425626 - DNA, 25 bp, Homo sapien
catacacatgggcttcaattcggag

SEQ ID NO: 5425627 - DNA, 25 bp, Homo sapien
cacatcttttatgatcagaattgaa

SEQ ID NO: 5425628 - DNA, 25 bp, Homo sapien
gattttagcacctccatcacgtagg

SEQ ID NO: 5425629 - DNA, 25 bp, Homo sapien
aactgactccaacagcatttctggc

SEQ ID NO: 5425630 - DNA, 25 bp, Homo sapien
agtactctgtccagcgatctgcagg

SEQ ID NO: 5425631 - DNA, 25 bp, Homo sapien
tcctttaggccagtgacaacaaggc

SEQ ID NO: 5425632 - DNA, 25 bp, Homo sapien
taatgtgtcacttggctcccaccgt

SEQ ID NO: 5425633 - DNA, 25 bp, Homo sapien
ggtaacggtcgaccatgtctttctg

SEQ ID NO: 5425634 - DNA, 25 bp, Homo sapien
cagggccatattcgttgacagcagt

SEQ ID NO: 5425635 - DNA, 25 bp, Homo sapien
tagaggatctgatgcaagcactggt

SEQ ID NO: 5425636 - DNA, 25 bp, Homo sapien
aaggaaggccatagtgtcaaccaga

SEQ ID NO: 5425637 - DNA, 25 bp, Homo sapien
tactctgacatttacgaatacagcc

SEQ ID NO: 5425638 - DNA, 25 bp, Homo sapien
gctgggttcacaagtgttaaggaat

SEQ ID NO: 5425639 - DNA, 25 bp, Homo sapien
agatcaacttgtccttttctgacca

SEQ ID NO: 5425640 - DNA, 25 bp, Homo sapien
ctttaggggctggtcgtcctctcac

SEQ ID NO: 5425641 - DNA, 25 bp, Homo sapien
gggcatcctgctctcactatgacca

SEQ ID NO: 5425642 - DNA, 25 bp, Homo sapien
tatagcaaagagacgaatagggcat

SEQ ID NO: 5425643 - DNA, 25 bp, Homo sapien
gcatccaaatcaatctccggaggtt

SEQ ID NO: 5425644 - DNA, 25 bp, Homo sapien
actatgaccagtttcctcatgctgg

SEQ ID NO: 5425645 - DNA, 25 bp, Homo sapien
tgcagggcgcccaataccaacttgg

SEQ ID NO: 5425646 - DNA, 25 bp, Homo sapien
tcggtgcaccaccatcatagactgg

SEQ ID NO: 5425647 - DNA, 25 bp, Homo sapien
taacagtgaattccttgcgtacaag

SEQ ID NO: 5425648 - DNA, 25 bp, Homo sapien
tggttttgggcacacaccctgaact

SEQ ID NO: 5425649 - DNA, 25 bp, Homo sapien
cctttgactcgagctagaatgcgga

SEQ ID NO: 5425650 - DNA, 25 bp, Homo sapien
cagggattgcactcttgttgacagg

SEQ ID NO: 5425651 - DNA, 25 bp, Homo sapien
caaggcccaggtctgtcaaggacgt

SEQ ID NO: 5425652 - DNA, 25 bp, Homo sapien
gttaacgatggctgaaccttgggca

SEQ ID NO: 5425653 - DNA, 25 bp, Homo sapien
tctgaacttcaggtcagcgataggt

SEQ ID NO: 5425654 - DNA, 25 bp, Homo sapien
tagtagccagttattggactgccac

SEQ ID NO: 5425655 - DNA, 25 bp, Homo sapien
tgttgaccctcacccatttgccagt

SEQ ID NO: 5425656 - DNA, 25 bp, Homo sapien
tctcgacgttccatatagtagccag

SEQ ID NO: 5425657 - DNA, 25 bp, Homo sapien
tatgcttagcaacagtaggtgtgga

SEQ ID NO: 5425658 - DNA, 25 bp, Homo sapien
tagcaacagtaggtgtggagtcaag

SEQ ID NO: 5425659 - DNA, 25 bp, Homo sapien
cttagcaacagtaggtgtggagtca

SEQ ID NO: 5425660 - DNA, 25 bp, Homo sapien
taaatttatgcttagcaacagtagg

SEQ ID NO: 5425661 - DNA, 25 bp, Homo sapien
tattaataggacctgttggtggccc

SEQ ID NO: 5425662 - DNA, 25 bp, Homo sapien
ggctactgttttgctaccggctgca

SEQ ID NO: 5425663 - DNA, 25 bp, Homo sapien
tgtccactttgcagtaggaacaggc

SEQ ID NO: 5425664 - DNA, 25 bp, Homo sapien
catcatccttaggtggctgccatga

SEQ ID NO: 5425665 - DNA, 25 bp, Homo sapien
aacatctacatggtgcaggtccttg

SEQ ID NO: 5425666 - DNA, 25 bp, Homo sapien
cgatccggcttattccagactaggg

SEQ ID NO: 5425667 - DNA, 25 bp, Homo sapien
tcagcttttacacggaatctatagg

SEQ ID NO: 5425668 - DNA, 25 bp, Homo sapien
tccttgttgtagtccagtaaccaca

SEQ ID NO: 5425669 - DNA, 25 bp, Homo sapien
tccgcagctactcggaagaggtact

SEQ ID NO: 5425670 - DNA, 25 bp, Homo sapien
gaggtactggttgccttcattcaga

SEQ ID NO: 5425671 - DNA, 25 bp, Homo sapien
ttccagatctctaggtggcccaggt

SEQ ID NO: 5425672 - DNA, 25 bp, Homo sapien
tgtttcaacaaaaggaccacgtcca

SEQ ID NO: 5425673 - DNA, 25 bp, Homo sapien
catgggcagcattacgaatttcaag

SEQ ID NO: 5425674 - DNA, 25 bp, Homo sapien
tgctaccaactggagtcacatcaat

SEQ ID NO: 5425675 - DNA, 25 bp, Homo sapien
caagttacttttgggaatggcactc

SEQ ID NO: 5425676 - DNA, 25 bp, Homo sapien
ggcactcctttgatgatggcactaa

SEQ ID NO: 5425677 - DNA, 25 bp, Homo sapien
gaacatgagctggatctgattcacc

SEQ ID NO: 5425678 - DNA, 25 bp, Homo sapien
ttgcttcaggattaacaggtggact

SEQ ID NO: 5425679 - DNA, 25 bp, Homo sapien
tactaggactggctccggaacatga

SEQ ID NO: 5425680 - DNA, 25 bp, Homo sapien
tggtggctgccaagttagatcgact

SEQ ID NO: 5425681 - DNA, 25 bp, Homo sapien
taggatctttggtaactctagccca

SEQ ID NO: 5425682 - DNA, 25 bp, Homo sapien
tattccaggttactaatgcagagtc

SEQ ID NO: 5425683 - DNA, 25 bp, Homo sapien
caattggctgatcaggtgcatcagg

SEQ ID NO: 5425684 - DNA, 25 bp, Homo sapien
gaaacccggaattcatactgacatc

SEQ ID NO: 5425685 - DNA, 25 bp, Homo sapien
gcatgtatccggaaaatataatctt

SEQ ID NO: 5425686 - DNA, 25 bp, Homo sapien
ttttagcacttgcagatgtcactgg

SEQ ID NO: 5425687 - DNA, 25 bp, Homo sapien
cagaggatcacttattccatacaga

SEQ ID NO: 5425688 - DNA, 25 bp, Homo sapien
tggctttcattgaatcagacaccag

SEQ ID NO: 5425689 - DNA, 25 bp, Homo sapien
tccttcttctcaataatataattgg

SEQ ID NO: 5425690 - DNA, 25 bp, Homo sapien
ttccttcttctcaataatataattg

SEQ ID NO: 5425691 - DNA, 25 bp, Homo sapien
caagagataaccatgtaatctttgg

SEQ ID NO: 5425692 - DNA, 25 bp, Homo sapien
gagataaccatgtaatctttggtca

SEQ ID NO: 5425693 - DNA, 25 bp, Homo sapien
cttccaagagataaccatgtaatct

SEQ ID NO: 5425694 - DNA, 25 bp, Homo sapien
tccaagagataaccatgtaatcttt

SEQ ID NO: 5425695 - DNA, 25 bp, Homo sapien
actaactggtcctactggtggtcca

SEQ ID NO: 5425696 - DNA, 25 bp, Homo sapien
taactggtcctactggtggtccagg

SEQ ID NO: 5425697 - DNA, 25 bp, Homo sapien
ctaactggtcctactggtggtccag

SEQ ID NO: 5425698 - DNA, 25 bp, Homo sapien
tttggtttgcctgagtaacggccag

SEQ ID NO: 5425699 - DNA, 25 bp, Homo sapien
tatctctgaagtcgaggtgaagcgt

SEQ ID NO: 5425700 - DNA, 25 bp, Homo sapien
tgagggcaaaagcttcaccaactcg

SEQ ID NO: 5425701 - DNA, 25 bp, Homo sapien
tatttgccggaatctgaacgtttgg

SEQ ID NO: 5425702 - DNA, 25 bp, Homo sapien
ggaggattccaagtcaaagttacag

SEQ ID NO: 5425703 - DNA, 25 bp, Homo sapien
caggtcttcaggacgctctggtaca

SEQ ID NO: 5425704 - DNA, 25 bp, Homo sapien
gaacttctcagtcccaatgagccga

SEQ ID NO: 5425705 - DNA, 25 bp, Homo sapien
caacaatgttgacagcactgacacg

SEQ ID NO: 5425706 - DNA, 25 bp, Homo sapien
tcgggtaactgtatatgtcactggg

SEQ ID NO: 5425707 - DNA, 25 bp, Homo sapien
gaatggtgttccaacgggacctgga

SEQ ID NO: 5425708 - DNA, 25 bp, Homo sapien
tcagccgcaattcggaaaaagtagg

SEQ ID NO: 5425709 - DNA, 25 bp, Homo sapien
aacaagtgcctctgatgtctcaaca

SEQ ID NO: 5425710 - DNA, 25 bp, Homo sapien
tggctggagtattgttgtgcctaga

SEQ ID NO: 5425711 - DNA, 25 bp, Homo sapien
actgtggctggagtattgttgtgcc

SEQ ID NO: 5425712 - DNA, 25 bp, Homo sapien
ctggagtattgttgtgcctagagac

SEQ ID NO: 5425713 - DNA, 25 bp, Homo sapien
ggagtattgttgtgcctagagacat

SEQ ID NO: 5425714 - DNA, 25 bp, Homo sapien
ggatgcatgtcttcttgttagcatc

SEQ ID NO: 5425715 - DNA, 25 bp, Homo sapien
atggatgcatgtcttcttgttagca

SEQ ID NO: 5425716 - DNA, 25 bp, Homo sapien
tggatgcatgtcttcttgttagcat

SEQ ID NO: 5425717 - DNA, 25 bp, Homo sapien
atgcactctttaggttcactggaaa

SEQ ID NO: 5425718 - DNA, 25 bp, Homo sapien
tttctccgcttcatttttggcaaga

SEQ ID NO: 5425719 - DNA, 25 bp, Homo sapien
ttctttctccgcttcatttttggca

SEQ ID NO: 5425720 - DNA, 25 bp, Homo sapien
tcaacaataattgtcttctttcttt

SEQ ID NO: 5425721 - DNA, 25 bp, Homo sapien
tctttctttctccgcttcatttttg

SEQ ID NO: 5425722 - DNA, 25 bp, Homo sapien
tcaatggtggcttcttgaggtaagg

SEQ ID NO: 5425723 - DNA, 25 bp, Homo sapien
gttcttgatgaccatggatgagcta

SEQ ID NO: 5425724 - DNA, 25 bp, Homo sapien
atggatgagctaatggctgtggtct

SEQ ID NO: 5425725 - DNA, 25 bp, Homo sapien
taggcaatgattcggatcacccctc

SEQ ID NO: 5425726 - DNA, 25 bp, Homo sapien
tctaactctaaatttgtagaatgct

SEQ ID NO: 5425727 - DNA, 25 bp, Homo sapien
actctaaatttgtagaatgctcctt

SEQ ID NO: 5425728 - DNA, 25 bp, Homo sapien
taactctaaatttgtagaatgctcc

SEQ ID NO: 5425729 - DNA, 25 bp, Homo sapien
ctaaatttgtagaatgctccttcct

SEQ ID NO: 5425730 - DNA, 25 bp, Homo sapien
cagatctgcagatgatttagtccaa

SEQ ID NO: 5425731 - DNA, 25 bp, Homo sapien
ttagtgggggagaccactccagatc

SEQ ID NO: 5425732 - DNA, 25 bp, Homo sapien
tctttatattcaacgatgtatccag

SEQ ID NO: 5425733 - DNA, 25 bp, Homo sapien
tttggatccaccatcttttagtggg

SEQ ID NO: 5425734 - DNA, 25 bp, Homo sapien
ctttgggaaatggaggaccaggagg

SEQ ID NO: 5425735 - DNA, 25 bp, Homo sapien
gagccagtatacgttagtattcttg

SEQ ID NO: 5425736 - DNA, 25 bp, Homo sapien
caaagagccagtatacgttagtatt

SEQ ID NO: 5425737 - DNA, 25 bp, Homo sapien
ccagtatacgttagtattcttgact

SEQ ID NO: 5425738 - DNA, 25 bp, Homo sapien
ctgcaaagagccagtatacgttagt

SEQ ID NO: 5425739 - DNA, 25 bp, Homo sapien
tctgatggcagacttgctggaccca

SEQ ID NO: 5425740 - DNA, 25 bp, Homo sapien
catatacccggaattgatagtcgga

SEQ ID NO: 5425741 - DNA, 25 bp, Homo sapien
catggagttacgagtcacgctgcta

SEQ ID NO: 5425742 - DNA, 25 bp, Homo sapien
caattggatctctagcagtcgctgg

SEQ ID NO: 5425743 - DNA, 25 bp, Homo sapien
gatcatattgattataagaaattta

SEQ ID NO: 5425744 - DNA, 25 bp, Homo sapien
aaagatcatattgattataagaaat

SEQ ID NO: 5425745 - DNA, 25 bp, Homo sapien
gaaaaagatcatattgattataaga

SEQ ID NO: 5425746 - DNA, 25 bp, Homo sapien
ctgtgaaaaagatcatattgattat

SEQ ID NO: 5425747 - DNA, 25 bp, Homo sapien
tttatgggtcccactggagggccag

SEQ ID NO: 5425748 - DNA, 25 bp, Homo sapien
caatttgggaatcgtgtacgtgcac

SEQ ID NO: 5425749 - DNA, 25 bp, Homo sapien
tcaggttcactgtcaagaggttctc

SEQ ID NO: 5425750 - DNA, 25 bp, Homo sapien
tacgtgcactccttaggttcactgg

SEQ ID NO: 5425751 - DNA, 25 bp, Homo sapien
agtgtcactcctgcgagactgcgga

SEQ ID NO: 5425752 - DNA, 25 bp, Homo sapien
taaagtgcaagtatcatctaccacc

SEQ ID NO: 5425753 - DNA, 25 bp, Homo sapien
ccaggttagtgtcgggaatggcaca

SEQ ID NO: 5425754 - DNA, 25 bp, Homo sapien
gatggtatataagccagtgtcactc

SEQ ID NO: 5425755 - DNA, 25 bp, Homo sapien
tgtagctcagcccaatataaagaat

SEQ ID NO: 5425756 - DNA, 25 bp, Homo sapien
tagaaagtagaattcacagttacta

SEQ ID NO: 5425757 - DNA, 25 bp, Homo sapien
atccactgtaggcagactttgtagc

SEQ ID NO: 5425758 - DNA, 25 bp, Homo sapien
tcattaggagcaaaaagcattgagg

SEQ ID NO: 5425759 - DNA, 25 bp, Homo sapien
tcacgcttattgcactgcctccagg

SEQ ID NO: 5425760 - DNA, 25 bp, Homo sapien
ctcaacaatatagtgggtaacaggg

SEQ ID NO: 5425761 - DNA, 25 bp, Homo sapien
ccaacagtggctgaaggcttgctga

SEQ ID NO: 5425762 - DNA, 25 bp, Homo sapien
agtagggtcccatgcaaggcactca

SEQ ID NO: 5425763 - DNA, 25 bp, Homo sapien
catgaaagtctgcaactaccccttg

SEQ ID NO: 5425764 - DNA, 25 bp, Homo sapien
actttcagatctttgggtgggcctg

SEQ ID NO: 5425765 - DNA, 25 bp, Homo sapien
cacaggtgggccaataccaaaacgg

SEQ ID NO: 5425766 - DNA, 25 bp, Homo sapien
caaaacggttttctgctcgcacacg

SEQ ID NO: 5425767 - DNA, 25 bp, Homo sapien
caatataagcaacgttccttaaatg

SEQ ID NO: 5425768 - DNA, 25 bp, Homo sapien
tcacaatataagcaacgttccttaa

SEQ ID NO: 5425769 - DNA, 25 bp, Homo sapien
taaatcacaatataagcaacgttcc

SEQ ID NO: 5425770 - DNA, 25 bp, Homo sapien
aatcacaatataagcaacgttcctt

SEQ ID NO: 5425771 - DNA, 25 bp, Homo sapien
tgtatttgcctgtatgagatcgttt

SEQ ID NO: 5425772 - DNA, 25 bp, Homo sapien
tacactccggaataataattactga

SEQ ID NO: 5425773 - DNA, 25 bp, Homo sapien
taataattactgaggagttttcagc

SEQ ID NO: 5425774 - DNA, 25 bp, Homo sapien
gatcgtttacactccggaataataa

SEQ ID NO: 5425775 - DNA, 25 bp, Homo sapien
catcttcgggtatgtcatgaactcc

SEQ ID NO: 5425776 - DNA, 25 bp, Homo sapien
tgcatcttcgggtatgtcatgaact

SEQ ID NO: 5425777 - DNA, 25 bp, Homo sapien
ctgtgcatcttcgggtatgtcatga

SEQ ID NO: 5425778 - DNA, 25 bp, Homo sapien
cttcgggtatgtcatgaactccatc

SEQ ID NO: 5425779 - DNA, 25 bp, Homo sapien
gacagcaggaatcctaatctgtgag

SEQ ID NO: 5425780 - DNA, 25 bp, Homo sapien
agatgattttggtgttgggcgtccc

SEQ ID NO: 5425781 - DNA, 25 bp, Homo sapien
tgggcgtcccttgatgacagcagga

SEQ ID NO: 5425782 - DNA, 25 bp, Homo sapien
atctgtgagccagctttacaaacca

SEQ ID NO: 5425783 - DNA, 25 bp, Homo sapien
caatgtatcctttgattgggctgcc

SEQ ID NO: 5425784 - DNA, 25 bp, Homo sapien
acttcctgagctctttcagattagg

SEQ ID NO: 5425785 - DNA, 25 bp, Homo sapien
tcttttccagtcagtagtaccttct

SEQ ID NO: 5425786 - DNA, 25 bp, Homo sapien
catcctagtgagatgcttgacttcg

SEQ ID NO: 5425787 - DNA, 25 bp, Homo sapien
tagccagtaattggagagccaccat

SEQ ID NO: 5425788 - DNA, 25 bp, Homo sapien
tttaacgccttcaagcaaacgagga

SEQ ID NO: 5425789 - DNA, 25 bp, Homo sapien
ggctaacacgtgaccaataaggact

SEQ ID NO: 5425790 - DNA, 25 bp, Homo sapien
gagccaccattgtccaaaggaggag

SEQ ID NO: 5425791 - DNA, 25 bp, Homo sapien
atattaaaatggcatcaaaccagag

SEQ ID NO: 5425792 - DNA, 25 bp, Homo sapien
ggcatcaaaccagagtcatgtactt

SEQ ID NO: 5425793 - DNA, 25 bp, Homo sapien
aaaatggcatcaaaccagagtcatg

SEQ ID NO: 5425794 - DNA, 25 bp, Homo sapien
tgtacttttaatgtgtataagaaaa

SEQ ID NO: 5425795 - DNA, 25 bp, Homo sapien
taacataatgggtgatttcactgcc

SEQ ID NO: 5425796 - DNA, 25 bp, Homo sapien
gcaagattcagctttaatgtcagta

SEQ ID NO: 5425797 - DNA, 25 bp, Homo sapien
tgtcagtaacagcaagatttcttgg

SEQ ID NO: 5425798 - DNA, 25 bp, Homo sapien
gggcatcccatgtcaagtagcaaga

SEQ ID NO: 5425799 - DNA, 25 bp, Homo sapien
aacagacactggatgcctttttgat

SEQ ID NO: 5425800 - DNA, 25 bp, Homo sapien
ttttgatgtaagaaagcaagtcact

SEQ ID NO: 5425801 - DNA, 25 bp, Homo sapien
gacactggatgcctttttgatgtaa

SEQ ID NO: 5425802 - DNA, 25 bp, Homo sapien
tgatgtaagaaagcaagtcacttac

SEQ ID NO: 5425803 - DNA, 25 bp, Homo sapien
cccggaccgctttgggaatgctaag

SEQ ID NO: 5425804 - DNA, 25 bp, Homo sapien
gaacactgagccaaggcgattggaa

SEQ ID NO: 5425805 - DNA, 25 bp, Homo sapien
tcaacgtgaacatttcggaacactg

SEQ ID NO: 5425806 - DNA, 25 bp, Homo sapien
taactttgatagtgtctcctcgaac

SEQ ID NO: 5425807 - DNA, 25 bp, Homo sapien
tcagtgtatgtgagcctctctggag

SEQ ID NO: 5425808 - DNA, 25 bp, Homo sapien
gatatatccttggatgggactgcca

SEQ ID NO: 5425809 - DNA, 25 bp, Homo sapien
gacagctttgacacggaactcatac

SEQ ID NO: 5425810 - DNA, 25 bp, Homo sapien
aaagtcaggtttgtcatgacgccgt

SEQ ID NO: 5425811 - DNA, 25 bp, Homo sapien
ggcaagtgaaaatgattagcatgag

SEQ ID NO: 5425812 - DNA, 25 bp, Homo sapien
aatgattagcatgagataaatattc

SEQ ID NO: 5425813 - DNA, 25 bp, Homo sapien
caagtgaaaatgattagcatgagat

SEQ ID NO: 5425814 - DNA, 25 bp, Homo sapien
gtgaaaatgattagcatgagataaa

SEQ ID NO: 5425815 - DNA, 25 bp, Homo sapien
tcttgtccctcaagcagacctgtga

SEQ ID NO: 5425816 - DNA, 25 bp, Homo sapien
tggatcagaccagttaagtagacac

SEQ ID NO: 5425817 - DNA, 25 bp, Homo sapien
tcttggcaataacacggaacttata

SEQ ID NO: 5425818 - DNA, 25 bp, Homo sapien
gatgtcacatttagatctctcagtc

SEQ ID NO: 5425819 - DNA, 25 bp, Homo sapien
aaacttctaccctggctgctgcaaa

SEQ ID NO: 5425820 - DNA, 25 bp, Homo sapien
tttgtaggtacagggcgaccagtca

SEQ ID NO: 5425821 - DNA, 25 bp, Homo sapien
gctgtaatcacatatctgccatggt

SEQ ID NO: 5425822 - DNA, 25 bp, Homo sapien
gccatggtcttttcgcagtgcatcc

SEQ ID NO: 5425823 - DNA, 25 bp, Homo sapien
gcattgacagcactcacccgaagtt

SEQ ID NO: 5425824 - DNA, 25 bp, Homo sapien
tttctttgacggtgtactgacggac

SEQ ID NO: 5425825 - DNA, 25 bp, Homo sapien
tgtgcagcgtgaccattcatttgtg

SEQ ID NO: 5425826 - DNA, 25 bp, Homo sapien
cacagtaacaggttgtgtttctcca

SEQ ID NO: 5425827 - DNA, 25 bp, Homo sapien
catgtgctgttttgggatctgaagg

SEQ ID NO: 5425828 - DNA, 25 bp, Homo sapien
tctacattggctttcaaggcattca

SEQ ID NO: 5425829 - DNA, 25 bp, Homo sapien
taggtgagtccttctaataagccat

SEQ ID NO: 5425830 - DNA, 25 bp, Homo sapien
gaaggcttttgttgacacgagacca

SEQ ID NO: 5425831 - DNA, 25 bp, Homo sapien
tgttttcagctcttacacggaagag

SEQ ID NO: 5425832 - DNA, 25 bp, Homo sapien
gctttgaaacacatggtggacctgg

SEQ ID NO: 5425833 - DNA, 25 bp, Homo sapien
tcccatttacaaaggactgaggtct

SEQ ID NO: 5425834 - DNA, 25 bp, Homo sapien
tgaagtgacaacaatccattctgag

SEQ ID NO: 5425835 - DNA, 25 bp, Homo sapien
tcctaaccaagggtgctgcacgctt

SEQ ID NO: 5425836 - DNA, 25 bp, Homo sapien
ggagcttttgcaataccgtggtcat

SEQ ID NO: 5425837 - DNA, 25 bp, Homo sapien
tgttgtcaatactcaaacgctgtgt

SEQ ID NO: 5425838 - DNA, 25 bp, Homo sapien
ccatggtcaggtcggagagaatctc

SEQ ID NO: 5425839 - DNA, 25 bp, Homo sapien
agaaggttcactaatacccgcggcg

SEQ ID NO: 5425840 - DNA, 25 bp, Homo sapien
tctgctcgcacacggaattggtact

SEQ ID NO: 5425841 - DNA, 25 bp, Homo sapien
aatagtcattgcctccgctgtagga

SEQ ID NO: 5425842 - DNA, 25 bp, Homo sapien
tatgaacctctacatctacaggtgg

SEQ ID NO: 5425843 - DNA, 25 bp, Homo sapien
gctttaacacggaagaagtattcac

SEQ ID NO: 5425844 - DNA, 25 bp, Homo sapien
caccatttggtatgagatccttcac

SEQ ID NO: 5425845 - DNA, 25 bp, Homo sapien
gactggtatatatgttctcctccca

SEQ ID NO: 5425846 - DNA, 25 bp, Homo sapien
taatatctttgcatggtccaggtag

SEQ ID NO: 5425847 - DNA, 25 bp, Homo sapien
taaattccggcatctgcacggacac

SEQ ID NO: 5425848 - DNA, 25 bp, Homo sapien
gctgagccgagcttattctccagtg

SEQ ID NO: 5425849 - DNA, 25 bp, Homo sapien
caataatgtcatgagtctccaggtc

SEQ ID NO: 5425850 - DNA, 25 bp, Homo sapien
ctaacagttggaactgggacagctc

SEQ ID NO: 5425851 - DNA, 25 bp, Homo sapien
cctttattgggcgagaattaactct

SEQ ID NO: 5425852 - DNA, 25 bp, Homo sapien
gcatcagtcacatgtaggtcaaggg

SEQ ID NO: 5425853 - DNA, 25 bp, Homo sapien
tggctcgctgacaccaatagcattg

SEQ ID NO: 5425854 - DNA, 25 bp, Homo sapien
ttcagagatttcagatggctcgctg

SEQ ID NO: 5425855 - DNA, 25 bp, Homo sapien
acctctgttccttcgatgacatcag

SEQ ID NO: 5425856 - DNA, 25 bp, Homo sapien
cttcaatggataggatttctgtggg

SEQ ID NO: 5425857 - DNA, 25 bp, Homo sapien
tctgaagttacagtcaggtcctgca

SEQ ID NO: 5425858 - DNA, 25 bp, Homo sapien
gcccgaacctgaaactggacctctg

SEQ ID NO: 5425859 - DNA, 25 bp, Homo sapien
tgtcgttttgtcacatcaaccactg

SEQ ID NO: 5425860 - DNA, 25 bp, Homo sapien
atcaaccactgccagggcgtagggt

SEQ ID NO: 5425861 - DNA, 25 bp, Homo sapien
taggtcaacatgtcgttttgtcaca

SEQ ID NO: 5425862 - DNA, 25 bp, Homo sapien
ggtggctcccactttaggtcaacat

SEQ ID NO: 5425863 - DNA, 25 bp, Homo sapien
caatttcggtgtagtcgctttgtcc

SEQ ID NO: 5425864 - DNA, 25 bp, Homo sapien
gccttttcgcctgacgtctctcttt

SEQ ID NO: 5425865 - DNA, 25 bp, Homo sapien
atataaagagccctcagtcagtggg

SEQ ID NO: 5425866 - DNA, 25 bp, Homo sapien
tttctgcagcaactcggaacacata

SEQ ID NO: 5425867 - DNA, 25 bp, Homo sapien
ttcacagctctaactcggaatgagt

SEQ ID NO: 5425868 - DNA, 25 bp, Homo sapien
ggtcactgggttcactgggttcact

SEQ ID NO: 5425869 - DNA, 25 bp, Homo sapien
gagtattcctgtccttccatgagcc

SEQ ID NO: 5425870 - DNA, 25 bp, Homo sapien
tgagtggtgggaaccccttccgcca

SEQ ID NO: 5425871 - DNA, 25 bp, Homo sapien
catcttttacagttggttttccagg

SEQ ID NO: 5425872 - DNA, 25 bp, Homo sapien
tggttttccagggggccatggagga

SEQ ID NO: 5425873 - DNA, 25 bp, Homo sapien
tacatcttttacagttggttttcca

SEQ ID NO: 5425874 - DNA, 25 bp, Homo sapien
acagttggttttccagggggccatg

SEQ ID NO: 5425875 - DNA, 25 bp, Homo sapien
ctttattaagattggttcagttgat

SEQ ID NO: 5425876 - DNA, 25 bp, Homo sapien
ttttcagccaacacacggaatctgt

SEQ ID NO: 5425877 - DNA, 25 bp, Homo sapien
atttgcttggttttccaggtccagc

SEQ ID NO: 5425878 - DNA, 25 bp, Homo sapien
gccaacacacggaatctgtattttt

SEQ ID NO: 5425879 - DNA, 25 bp, Homo sapien
ctgtatgttgtgtcctttactggca

SEQ ID NO: 5425880 - DNA, 25 bp, Homo sapien
tactggcatcttattgcatctaacc

SEQ ID NO: 5425881 - DNA, 25 bp, Homo sapien
cagtatcctgtgattgggctgccac

SEQ ID NO: 5425882 - DNA, 25 bp, Homo sapien
ccatgtgagagtcactgcgtcttta

SEQ ID NO: 5425883 - DNA, 25 bp, Homo sapien
taatggtgtaaaatgttatatgtcc

SEQ ID NO: 5425884 - DNA, 25 bp, Homo sapien
agtttgacataagcatccttttttt

SEQ ID NO: 5425885 - DNA, 25 bp, Homo sapien
ctatagacaggataatggtgtaaaa

SEQ ID NO: 5425886 - DNA, 25 bp, Homo sapien
aatgcaagtttgacataagcatcct

SEQ ID NO: 5425887 - DNA, 25 bp, Homo sapien
tgatcttagatccaccatcatcgcg

SEQ ID NO: 5425888 - DNA, 25 bp, Homo sapien
tccttgacggtggatgagagcttgt

SEQ ID NO: 5425889 - DNA, 25 bp, Homo sapien
gctcgtctctccacaacatagtttg

SEQ ID NO: 5425890 - DNA, 25 bp, Homo sapien
catcatcgcgtggtgggttccatgt

SEQ ID NO: 5425891 - DNA, 25 bp, Homo sapien
agaatcatatcagcctttgtccaag

SEQ ID NO: 5425892 - DNA, 25 bp, Homo sapien
cagtgtcacttctcttactatcaac

SEQ ID NO: 5425893 - DNA, 25 bp, Homo sapien
tactatcaacaatagtcactgtgga

SEQ ID NO: 5425894 - DNA, 25 bp, Homo sapien
tccggttacggtggcaggaagttca

SEQ ID NO: 5425895 - DNA, 25 bp, Homo sapien
tctgcttggtttgctagcaccctgc

SEQ ID NO: 5425896 - DNA, 25 bp, Homo sapien
gtgtccacagcctggatttcctctg

SEQ ID NO: 5425897 - DNA, 25 bp, Homo sapien
tctgtgggtctgcttggtttgctag

SEQ ID NO: 5425898 - DNA, 25 bp, Homo sapien
agcctggatttcctctgtgggtctg

SEQ ID NO: 5425899 - DNA, 25 bp, Homo sapien
ctgtttaaggccttcacgcggtagg

SEQ ID NO: 5425900 - DNA, 25 bp, Homo sapien
tttgccttcctcaagacctgtcact

SEQ ID NO: 5425901 - DNA, 25 bp, Homo sapien
ggtaggcataccatttgccttcctc

SEQ ID NO: 5425902 - DNA, 25 bp, Homo sapien
gccttcacgcggtaggcataccatt

SEQ ID NO: 5425903 - DNA, 25 bp, Homo sapien
atatcctttgatgcgtgaaccacca

SEQ ID NO: 5425904 - DNA, 25 bp, Homo sapien
taggtggatcccatgttaagaagat

SEQ ID NO: 5425905 - DNA, 25 bp, Homo sapien
gatgctattggctgttcgatctctc

SEQ ID NO: 5425906 - DNA, 25 bp, Homo sapien
tggacatctttcaactatatatcct

SEQ ID NO: 5425907 - DNA, 25 bp, Homo sapien
cagggccacatttgttacgagcaca

SEQ ID NO: 5425908 - DNA, 25 bp, Homo sapien
tatttacaggttcatcaacatatgc

SEQ ID NO: 5425909 - DNA, 25 bp, Homo sapien
tcaggaactgtgaattctagatcag

SEQ ID NO: 5425910 - DNA, 25 bp, Homo sapien
tctagatcagtcacaaagtccataa

SEQ ID NO: 5425911 - DNA, 25 bp, Homo sapien
ggcattgatgcagtgctgctcaaaa

SEQ ID NO: 5425912 - DNA, 25 bp, Homo sapien
aagacttttgtatggcatcccaacc

SEQ ID NO: 5425913 - DNA, 25 bp, Homo sapien
tcaggaagcattagcaccgatgcat

SEQ ID NO: 5425914 - DNA, 25 bp, Homo sapien
tcagtgaggtaaaggtaagaagttg

SEQ ID NO: 5425915 - DNA, 25 bp, Homo sapien
gtatccagttaacggacttcctcca

SEQ ID NO: 5425916 - DNA, 25 bp, Homo sapien
tttagtccatgttttccggctgact

SEQ ID NO: 5425917 - DNA, 25 bp, Homo sapien
catcatcaggtggttcccaagtcaa

SEQ ID NO: 5425918 - DNA, 25 bp, Homo sapien
tactgagtccttggttatatcacca

SEQ ID NO: 5425919 - DNA, 25 bp, Homo sapien
cttggatagcctgtacttggaacca

SEQ ID NO: 5425920 - DNA, 25 bp, Homo sapien
tataaatgcccttgtctgaacgttc

SEQ ID NO: 5425921 - DNA, 25 bp, Homo sapien
caaaacaccaggttgcagttggcct

SEQ ID NO: 5425922 - DNA, 25 bp, Homo sapien
gacaagttcggcataggcagacaag

SEQ ID NO: 5425923 - DNA, 25 bp, Homo sapien
gatggatctgaaacaccagctttat

SEQ ID NO: 5425924 - DNA, 25 bp, Homo sapien
tttcagatggatctgaaacaccagc

SEQ ID NO: 5425925 - DNA, 25 bp, Homo sapien
caaatgcatcgtcagcggtgagagg

SEQ ID NO: 5425926 - DNA, 25 bp, Homo sapien
catcgtcagcggtgagaggaccaag

SEQ ID NO: 5425927 - DNA, 25 bp, Homo sapien
gatgactgagtctgatctgaggaag

SEQ ID NO: 5425928 - DNA, 25 bp, Homo sapien
tccatctttcagaggaggttcccat

SEQ ID NO: 5425929 - DNA, 25 bp, Homo sapien
catttgagctgaactgatgactgag

SEQ ID NO: 5425930 - DNA, 25 bp, Homo sapien
taggtttacaggaggacttggtctc

SEQ ID NO: 5425931 - DNA, 25 bp, Homo sapien
aggtcttcagctctcacagtcatgg

SEQ ID NO: 5425932 - DNA, 25 bp, Homo sapien
gattttgggctctcactcggaaact

SEQ ID NO: 5425933 - DNA, 25 bp, Homo sapien
cagtaacagttgcagacaggtcttc

SEQ ID NO: 5425934 - DNA, 25 bp, Homo sapien
caactttgacgaagggtgtggctgc

SEQ ID NO: 5425935 - DNA, 25 bp, Homo sapien
cttctaagttacgtactggcccagg

SEQ ID NO: 5425936 - DNA, 25 bp, Homo sapien
tctgtagaccagtgacagtaaactc

SEQ ID NO: 5425937 - DNA, 25 bp, Homo sapien
gtaaactcacaactctctgcacggt

SEQ ID NO: 5425938 - DNA, 25 bp, Homo sapien
tcttgcactcacacggaataggtac

SEQ ID NO: 5425939 - DNA, 25 bp, Homo sapien
ttgttctgaagcacaattttatacc

SEQ ID NO: 5425940 - DNA, 25 bp, Homo sapien
ttctttaaaccattcagcttctgct

SEQ ID NO: 5425941 - DNA, 25 bp, Homo sapien
gaaagaagtttgttcagccgtagta

SEQ ID NO: 5425942 - DNA, 25 bp, Homo sapien
tgtcagaggcttgccaacatcaacc

SEQ ID NO: 5425943 - DNA, 25 bp, Homo sapien
ttcaagcttagctctggcttctttg

SEQ ID NO: 5425944 - DNA, 25 bp, Homo sapien
cttagctctggcttctttgtctttg

SEQ ID NO: 5425945 - DNA, 25 bp, Homo sapien
ctgccagttcaagcttagctctggc

SEQ ID NO: 5425946 - DNA, 25 bp, Homo sapien
gccagttcaagcttagctctggctt

SEQ ID NO: 5425947 - DNA, 25 bp, Homo sapien
caagaatatcttgtggaggcctgat

SEQ ID NO: 5425948 - DNA, 25 bp, Homo sapien
tatttcttagccattggacttccac

SEQ ID NO: 5425949 - DNA, 25 bp, Homo sapien
tcacaaatctgtagtcgatgtatct

SEQ ID NO: 5425950 - DNA, 25 bp, Homo sapien
ggacttccaccttatctttattgag

SEQ ID NO: 5425951 - DNA, 25 bp, Homo sapien
tgtcttctaccccgcaagcatattc

SEQ ID NO: 5425952 - DNA, 25 bp, Homo sapien
ccagcctgcaatcttttataatgag

SEQ ID NO: 5425953 - DNA, 25 bp, Homo sapien
taatgagtctgtgtatacttccatc

SEQ ID NO: 5425954 - DNA, 25 bp, Homo sapien
cttccacaaaaagtctagcacgaga

SEQ ID NO: 5425955 - DNA, 25 bp, Homo sapien
tgagacgattcaccttgcaccagaa

SEQ ID NO: 5425956 - DNA, 25 bp, Homo sapien
gagacacggttgtcaaaaggcactt

SEQ ID NO: 5425957 - DNA, 25 bp, Homo sapien
taagaggctcaacaatcctaaggtc

SEQ ID NO: 5425958 - DNA, 25 bp, Homo sapien
gaagacagcgtcatcgaactcagtg

SEQ ID NO: 5425959 - DNA, 25 bp, Homo sapien
ggctttggcaccttcagtattgact

SEQ ID NO: 5425960 - DNA, 25 bp, Homo sapien
ccttaagaggaactacgatcctgag

SEQ ID NO: 5425961 - DNA, 25 bp, Homo sapien
taattctgagggtgtagactaggtc

SEQ ID NO: 5425962 - DNA, 25 bp, Homo sapien
cacctctgtgattggtcaaagacac

SEQ ID NO: 5425963 - DNA, 25 bp, Homo sapien
aagtgcccatatcttgtaatgtggc

SEQ ID NO: 5425964 - DNA, 25 bp, Homo sapien
ttatcatccctcttccactggactg

SEQ ID NO: 5425965 - DNA, 25 bp, Homo sapien
tccagattcaagtgtcttatcatcc

SEQ ID NO: 5425966 - DNA, 25 bp, Homo sapien
ggcccctaccatgacaacgtaagtg

SEQ ID NO: 5425967 - DNA, 25 bp, Homo sapien
ccatcggttcgagagcttgggagtc

SEQ ID NO: 5425968 - DNA, 25 bp, Homo sapien
tataccaaatcacttctgcgccagg

SEQ ID NO: 5425969 - DNA, 25 bp, Homo sapien
ctcaaggtgagcgttctgaatgacc

SEQ ID NO: 5425970 - DNA, 25 bp, Homo sapien
ggattctcttccgtccttcagtcag

SEQ ID NO: 5425971 - DNA, 25 bp, Homo sapien
ttcatcatccagtagacatttgttg

SEQ ID NO: 5425972 - DNA, 25 bp, Homo sapien
gaagttctcgctgtccttacttcac

SEQ ID NO: 5425973 - DNA, 25 bp, Homo sapien
gttgatgacaagaatgcgcactgct

SEQ ID NO: 5425974 - DNA, 25 bp, Homo sapien
cactgctcccttggatatgatgtca

SEQ ID NO: 5425975 - DNA, 25 bp, Homo sapien
gcattttctcgggaaagttcacact

SEQ ID NO: 5425976 - DNA, 25 bp, Homo sapien
ggtcttaagaattccacatgaggag

SEQ ID NO: 5425977 - DNA, 25 bp, Homo sapien
taacttgaaggtcggtgagtggtct

SEQ ID NO: 5425978 - DNA, 25 bp, Homo sapien
aaagttcacactcaaatcgagccat

SEQ ID NO: 5425979 - DNA, 25 bp, Homo sapien
tcctcaagaggcttagtgaattcaa

SEQ ID NO: 5425980 - DNA, 25 bp, Homo sapien
ggagacttcacactccagcactgca

SEQ ID NO: 5425981 - DNA, 25 bp, Homo sapien
tataacaagttttctgaccctgcca

SEQ ID NO: 5425982 - DNA, 25 bp, Homo sapien
gcacgacattcaggttacaggaagt

SEQ ID NO: 5425983 - DNA, 25 bp, Homo sapien
tctaactttacatccctcagagtaa

SEQ ID NO: 5425984 - DNA, 25 bp, Homo sapien
ctttcacaaagaggttggcgtgagt

SEQ ID NO: 5425985 - DNA, 25 bp, Homo sapien
tcagagtaagtgtatgaacttttcc

SEQ ID NO: 5425986 - DNA, 25 bp, Homo sapien
tttgctgttagttggacttccccag

SEQ ID NO: 5425987 - DNA, 25 bp, Homo sapien
cacggtgacatcctttaaaggcctc

SEQ ID NO: 5425988 - DNA, 25 bp, Homo sapien
ggcctcagaagaccaattactcgtg

SEQ ID NO: 5425989 - DNA, 25 bp, Homo sapien
gctcgcagtcgaaggtggctgtttc

SEQ ID NO: 5425990 - DNA, 25 bp, Homo sapien
tatcttcgtaggagagctcgcagtc

SEQ ID NO: 5425991 - DNA, 25 bp, Homo sapien
gaagaaacagctttgcgttactcat

SEQ ID NO: 5425992 - DNA, 25 bp, Homo sapien
ggaagaaacagctttgcgttactca

SEQ ID NO: 5425993 - DNA, 25 bp, Homo sapien
cacccgtctggtccaggcgacagtt

SEQ ID NO: 5425994 - DNA, 25 bp, Homo sapien
gcttaactcggaggtgggcactaga

SEQ ID NO: 5425995 - DNA, 25 bp, Homo sapien
ggtccaggcgacagttgtgcaaaac

SEQ ID NO: 5425996 - DNA, 25 bp, Homo sapien
aacaagggagtgtattttgccttct

SEQ ID NO: 5425997 - DNA, 25 bp, Homo sapien
tctcccttgagtttccagttggcgt

SEQ ID NO: 5425998 - DNA, 25 bp, Homo sapien
tggcgtggatatcatcttcagagat

SEQ ID NO: 5425999 - DNA, 25 bp, Homo sapien
ttcaaagcgtgctgtctcagtctcc

SEQ ID NO: 5426000 - DNA, 25 bp, Homo sapien
gatttcggtttcaaagcgtgctgtc

SEQ ID NO: 5426001 - DNA, 25 bp, Homo sapien
caagagtgaaactcatggaaatttc

SEQ ID NO: 5426002 - DNA, 25 bp, Homo sapien
aataaccccaatgcttcaagagtga

SEQ ID NO: 5426003 - DNA, 25 bp, Homo sapien
catgggtcattagcctctggcacaa

SEQ ID NO: 5426004 - DNA, 25 bp, Homo sapien
aaagtgaagggccagcatgggtcat

SEQ ID NO: 5426005 - DNA, 25 bp, Homo sapien
tcctgaggtcttatctgtcccacag

SEQ ID NO: 5426006 - DNA, 25 bp, Homo sapien
taggattagcatgcgtttcttgcca

SEQ ID NO: 5426007 - DNA, 25 bp, Homo sapien
caccagtataatcttgaagttttcc

SEQ ID NO: 5426008 - DNA, 25 bp, Homo sapien
cacaggtgtactgtccaatatctga

SEQ ID NO: 5426009 - DNA, 25 bp, Homo sapien
tcgtcttgcattgagaccgacctgg

SEQ ID NO: 5426010 - DNA, 25 bp, Homo sapien
gaatgtgatcgaatgagttttccct

SEQ ID NO: 5426011 - DNA, 25 bp, Homo sapien
tgtaggcgctggtcattcttgaacc

SEQ ID NO: 5426012 - DNA, 25 bp, Homo sapien
catagcttctactctaatttgggag

SEQ ID NO: 5426013 - DNA, 25 bp, Homo sapien
tttgggctccctggatacttcacac

SEQ ID NO: 5426014 - DNA, 25 bp, Homo sapien
tagccaacggaatgttttgggctcc

SEQ ID NO: 5426015 - DNA, 25 bp, Homo sapien
caatgatcagtttgccacttgtgtg

SEQ ID NO: 5426016 - DNA, 25 bp, Homo sapien
caccattgaatgcttagtgccatcc

SEQ ID NO: 5426017 - DNA, 25 bp, Homo sapien
tgagaggtgtgatgaagataagagg

SEQ ID NO: 5426018 - DNA, 25 bp, Homo sapien
ctgagaggtgtgatgaagataagag

SEQ ID NO: 5426019 - DNA, 25 bp, Homo sapien
gagaggtgtgatgaagataagaggc

SEQ ID NO: 5426020 - DNA, 25 bp, Homo sapien
cagaatacgtttccattgatgaccc

SEQ ID NO: 5426021 - DNA, 25 bp, Homo sapien
cgtttccattgatgacccttgatca

SEQ ID NO: 5426022 - DNA, 25 bp, Homo sapien
gtggatgaagtcagaatacgtttcc

SEQ ID NO: 5426023 - DNA, 25 bp, Homo sapien
attgatgacccttgatcaatgcagg

SEQ ID NO: 5426024 - DNA, 25 bp, Homo sapien
aggaaacctctcctgtcatacccag

SEQ ID NO: 5426025 - DNA, 25 bp, Homo sapien
gatttggcattagcagcctggaagg

SEQ ID NO: 5426026 - DNA, 25 bp, Homo sapien
catacccagctgacagttatgaagg

SEQ ID NO: 5426027 - DNA, 25 bp, Homo sapien
gaaggatcagaatatgcttctttcc

SEQ ID NO: 5426028 - DNA, 25 bp, Homo sapien
tgtcaaaggctgtcctttcagcttc

SEQ ID NO: 5426029 - DNA, 25 bp, Homo sapien
cgtgaacatcaggttcagaaagttc

SEQ ID NO: 5426030 - DNA, 25 bp, Homo sapien
ttcagcttccactggccgtgaacat

SEQ ID NO: 5426031 - DNA, 25 bp, Homo sapien
tctactccgtacagaggcttttcca

SEQ ID NO: 5426032 - DNA, 25 bp, Homo sapien
tgatttttaagatgcggcgcaggcc

SEQ ID NO: 5426033 - DNA, 25 bp, Homo sapien
tatttgggtgaagggacaatctctt

SEQ ID NO: 5426034 - DNA, 25 bp, Homo sapien
aatttcacagtgaagtagggatcgg

SEQ ID NO: 5426035 - DNA, 25 bp, Homo sapien
aacagtaacatttgccttggtcttg

SEQ ID NO: 5426036 - DNA, 25 bp, Homo sapien
tctgagatatatcatccaatgtcac

SEQ ID NO: 5426037 - DNA, 25 bp, Homo sapien
gatgagtactgttctgcttgtatgg

SEQ ID NO: 5426038 - DNA, 25 bp, Homo sapien
tctgcttgtatggagtttggcatca

SEQ ID NO: 5426039 - DNA, 25 bp, Homo sapien
tatctgagatatatcatccaatgtc

SEQ ID NO: 5426040 - DNA, 25 bp, Homo sapien
tctggaacagtgacatccttcaggg

SEQ ID NO: 5426041 - DNA, 25 bp, Homo sapien
taacatttgcctctcgggtgaggac

SEQ ID NO: 5426042 - DNA, 25 bp, Homo sapien
gaatcgagcctgtcgcctttctgga

SEQ ID NO: 5426043 - DNA, 25 bp, Homo sapien
ggtgaggacacattcgaatcgagcc

SEQ ID NO: 5426044 - DNA, 25 bp, Homo sapien
aatggcagttgtaattgcattaagg

SEQ ID NO: 5426045 - DNA, 25 bp, Homo sapien
gggcctggtagaggacttcaccagc

SEQ ID NO: 5426046 - DNA, 25 bp, Homo sapien
ttgtgcaaagttaagaagcgttttc

SEQ ID NO: 5426047 - DNA, 25 bp, Homo sapien
tgcaaagttaagaagcgttttccac

SEQ ID NO: 5426048 - DNA, 25 bp, Homo sapien
gtaaccatttgaaagagataaattc

SEQ ID NO: 5426049 - DNA, 25 bp, Homo sapien
taaccatttgaaagagataaattcc

SEQ ID NO: 5426050 - DNA, 25 bp, Homo sapien
tagtaaccatttgaaagagataaat

SEQ ID NO: 5426051 - DNA, 25 bp, Homo sapien
ttttagtaaccatttgaaagagata

SEQ ID NO: 5426052 - DNA, 25 bp, Homo sapien
tggtttaagcagttcaacttcacgc

SEQ ID NO: 5426053 - DNA, 25 bp, Homo sapien
tcagtttccattgtccaggaatgtc

SEQ ID NO: 5426054 - DNA, 25 bp, Homo sapien
ttctttctcataaatggtaacgtcc

SEQ ID NO: 5426055 - DNA, 25 bp, Homo sapien
tctgcatcaaagcttgcactttctt

SEQ ID NO: 5426056 - DNA, 25 bp, Homo sapien
gagtatcttttgctatatcacaggc

SEQ ID NO: 5426057 - DNA, 25 bp, Homo sapien
cagtcttatcatttggttccgcagg

SEQ ID NO: 5426058 - DNA, 25 bp, Homo sapien
gtttcacatgctggtctcgtatagg

SEQ ID NO: 5426059 - DNA, 25 bp, Homo sapien
aatagctgtccccttgggtttcaca

SEQ ID NO: 5426060 - DNA, 25 bp, Homo sapien
tgcatcgttgatggtcagagcccgc

SEQ ID NO: 5426061 - DNA, 25 bp, Homo sapien
cactccaggttgttggcgttttcca

SEQ ID NO: 5426062 - DNA, 25 bp, Homo sapien
aatgacgcctggcacaattcggcca

SEQ ID NO: 5426063 - DNA, 25 bp, Homo sapien
ttttacgcaagatgaacactccagg

SEQ ID NO: 5426064 - DNA, 25 bp, Homo sapien
ggtgtattcaccagcatcggaaagt

SEQ ID NO: 5426065 - DNA, 25 bp, Homo sapien
catctgcaataaacctgtgcttggg

SEQ ID NO: 5426066 - DNA, 25 bp, Homo sapien
ttgggactctcacggatattgctac

SEQ ID NO: 5426067 - DNA, 25 bp, Homo sapien
tacaacaagtttagccgtggaggtc

SEQ ID NO: 5426068 - DNA, 25 bp, Homo sapien
ctttgataggaccttttggcttggc

SEQ ID NO: 5426069 - DNA, 25 bp, Homo sapien
gcctcttccttaggtgctttggctt

SEQ ID NO: 5426070 - DNA, 25 bp, Homo sapien
aggaccttttggcttggcagcctct

SEQ ID NO: 5426071 - DNA, 25 bp, Homo sapien
ttttggcttggcagcctcttcctta

SEQ ID NO: 5426072 - DNA, 25 bp, Homo sapien
tactggggcagcgatgggggttggt

SEQ ID NO: 5426073 - DNA, 25 bp, Homo sapien
ctgctttctttccaaccactggcac

SEQ ID NO: 5426074 - DNA, 25 bp, Homo sapien
gctttctttccaaccactggcactg

SEQ ID NO: 5426075 - DNA, 25 bp, Homo sapien
ggcactgttactggggcagcgatgg

SEQ ID NO: 5426076 - DNA, 25 bp, Homo sapien
agaggtattgctggcttgatttcag

SEQ ID NO: 5426077 - DNA, 25 bp, Homo sapien
agggagaggtattgctggcttgatt

SEQ ID NO: 5426078 - DNA, 25 bp, Homo sapien
tggtttcggttcaggtgcagggaga

SEQ ID NO: 5426079 - DNA, 25 bp, Homo sapien
tgcttcgggctttggtttcggttca

SEQ ID NO: 5426080 - DNA, 25 bp, Homo sapien
taacagtaggtacttcaacctcttc

SEQ ID NO: 5426081 - DNA, 25 bp, Homo sapien
ttgtaacagtaggtacttcaacctc

SEQ ID NO: 5426082 - DNA, 25 bp, Homo sapien
tgtaacagtaggtacttcaacctct

SEQ ID NO: 5426083 - DNA, 25 bp, Homo sapien
ccatgtttacatctaacttcattta

SEQ ID NO: 5426084 - DNA, 25 bp, Homo sapien
catttatgtttacaagataaacctt

SEQ ID NO: 5426085 - DNA, 25 bp, Homo sapien
gccatgtttacatctaacttcattt

SEQ ID NO: 5426086 - DNA, 25 bp, Homo sapien
catgtttacatctaacttcatttat

SEQ ID NO: 5426087 - DNA, 25 bp, Homo sapien
tcttcttcaggtctttttcttagaa

SEQ ID NO: 5426088 - DNA, 25 bp, Homo sapien
ctactttaggttcttcttcttcagg

SEQ ID NO: 5426089 - DNA, 25 bp, Homo sapien
cttcttcttcaggtctttttcttag

SEQ ID NO: 5426090 - DNA, 25 bp, Homo sapien
ttctactttaggttcttcttcttca

SEQ ID NO: 5426091 - DNA, 25 bp, Homo sapien
tctggaaagtaagcatttacaccga

SEQ ID NO: 5426092 - DNA, 25 bp, Homo sapien
aaaagcatgctacctagcactctgg

SEQ ID NO: 5426093 - DNA, 25 bp, Homo sapien
gcaaataatgtacaaagcaaggaaa

SEQ ID NO: 5426094 - DNA, 25 bp, Homo sapien
gaaagtttacttaagcagagatatc

SEQ ID NO: 5426095 - DNA, 25 bp, Homo sapien
cgcttttcagaacaacttcttcctt

SEQ ID NO: 5426096 - DNA, 25 bp, Homo sapien
agaacaacttcttcctttggttcag

SEQ ID NO: 5426097 - DNA, 25 bp, Homo sapien
tttgcgaactttcttttcacctcca

SEQ ID NO: 5426098 - DNA, 25 bp, Homo sapien
tcagaacaacttcttcctttggttc

SEQ ID NO: 5426099 - DNA, 25 bp, Homo sapien
tgtaagctccactttttctggaacc

SEQ ID NO: 5426100 - DNA, 25 bp, Homo sapien
gaggtgtaagctccactttttctgg

SEQ ID NO: 5426101 - DNA, 25 bp, Homo sapien
ctttcagaggtgtaagctccacttt

SEQ ID NO: 5426102 - DNA, 25 bp, Homo sapien
aagctccactttttctggaacctga

SEQ ID NO: 5426103 - DNA, 25 bp, Homo sapien
cacatcttccttaggtggagcaggt

SEQ ID NO: 5426104 - DNA, 25 bp, Homo sapien
ccttcacatcttccttaggtggagc

SEQ ID NO: 5426105 - DNA, 25 bp, Homo sapien
ttcacatcttccttaggtggagcag

SEQ ID NO: 5426106 - DNA, 25 bp, Homo sapien
catcttccttaggtggagcaggtgg

SEQ ID NO: 5426107 - DNA, 25 bp, Homo sapien
tcttcaggtttaatatacttttcaa

SEQ ID NO: 5426108 - DNA, 25 bp, Homo sapien
gctcttcaggtttaatatacttttc

SEQ ID NO: 5426109 - DNA, 25 bp, Homo sapien
ttcgggctcttcaggtttaatatac

SEQ ID NO: 5426110 - DNA, 25 bp, Homo sapien
cgggctcttcaggtttaatatactt

SEQ ID NO: 5426111 - DNA, 25 bp, Homo sapien
ctaccaatggttatagatgcttttt

SEQ ID NO: 5426112 - DNA, 25 bp, Homo sapien
ctcttttctaccaatggttatagat

SEQ ID NO: 5426113 - DNA, 25 bp, Homo sapien
cttcaacagggggagtctcttttct

SEQ ID NO: 5426114 - DNA, 25 bp, Homo sapien
ttttctaccaatggttatagatgct

SEQ ID NO: 5426115 - DNA, 25 bp, Homo sapien
gggatgattttctcaggcactttgg

SEQ ID NO: 5426116 - DNA, 25 bp, Homo sapien
tttactggaacaagtttcttgggca

SEQ ID NO: 5426117 - DNA, 25 bp, Homo sapien
ttggtaacaggcacaggttctttct

SEQ ID NO: 5426118 - DNA, 25 bp, Homo sapien
ggaacaagtttcttgggcacctcag

SEQ ID NO: 5426119 - DNA, 25 bp, Homo sapien
aacaagtttcttgggcacctcaggc

SEQ ID NO: 5426120 - DNA, 25 bp, Homo sapien
cttaacagttgggaccttcttcact

SEQ ID NO: 5426121 - DNA, 25 bp, Homo sapien
tcttaacagttgggaccttcttcac

SEQ ID NO: 5426122 - DNA, 25 bp, Homo sapien
acagttgggaccttcttcactggaa

SEQ ID NO: 5426123 - DNA, 25 bp, Homo sapien
taacagttgggaccttcttcactgg

SEQ ID NO: 5426124 - DNA, 25 bp, Homo sapien
gcggtgcttctggttttttgatgac

SEQ ID NO: 5426125 - DNA, 25 bp, Homo sapien
ttttttgatgacaggaactttcttc

SEQ ID NO: 5426126 - DNA, 25 bp, Homo sapien
actttcttctctgggatgatcttct

SEQ ID NO: 5426127 - DNA, 25 bp, Homo sapien
ctttaggaggcggtgcttctggttt

SEQ ID NO: 5426128 - DNA, 25 bp, Homo sapien
ggagcaatttcctcttcaggagcaa

SEQ ID NO: 5426129 - DNA, 25 bp, Homo sapien
cttcaggagcaatttcctcaggttc

SEQ ID NO: 5426130 - DNA, 25 bp, Homo sapien
tggaggtggaacctctggttcctcc

SEQ ID NO: 5426131 - DNA, 25 bp, Homo sapien
cttcaggagcaatttcctcttcagg

SEQ ID NO: 5426132 - DNA, 25 bp, Homo sapien
ttttatttcaatgtatggaacaata

SEQ ID NO: 5426133 - DNA, 25 bp, Homo sapien
aattttatttcaatgtatggaacaa

SEQ ID NO: 5426134 - DNA, 25 bp, Homo sapien
taattttatttcaatgtatggaaca

SEQ ID NO: 5426135 - DNA, 25 bp, Homo sapien
ttatttcaatgtatggaacaatatt

SEQ ID NO: 5426136 - DNA, 25 bp, Homo sapien
tgggggaggagactccgctctttct

SEQ ID NO: 5426137 - DNA, 25 bp, Homo sapien
gagactccgctctttctggaacagg

SEQ ID NO: 5426138 - DNA, 25 bp, Homo sapien
gaggagactccgctctttctggaac

SEQ ID NO: 5426139 - DNA, 25 bp, Homo sapien
gggaggagactccgctctttctgga

SEQ ID NO: 5426140 - DNA, 25 bp, Homo sapien
tctggctttttgggaacagctactt

SEQ ID NO: 5426141 - DNA, 25 bp, Homo sapien
tggctttttgggaacagctactttc

SEQ ID NO: 5426142 - DNA, 25 bp, Homo sapien
ctggctttttgggaacagctacttt

SEQ ID NO: 5426143 - DNA, 25 bp, Homo sapien
ttttcaggaacaacctccttgggca

SEQ ID NO: 5426144 - DNA, 25 bp, Homo sapien
gctttttgggaaccaccagaggcac

SEQ ID NO: 5426145 - DNA, 25 bp, Homo sapien
tctggctttttgggaaccaccagag

SEQ ID NO: 5426146 - DNA, 25 bp, Homo sapien
tcaggaacaacctccttgggcacct

SEQ ID NO: 5426147 - DNA, 25 bp, Homo sapien
tctgggacaggtttcttaggtggta

SEQ ID NO: 5426148 - DNA, 25 bp, Homo sapien
gttttttggcaacgacagcaggtgc

SEQ ID NO: 5426149 - DNA, 25 bp, Homo sapien
ggcaacgacagcaggtgctttcttt

SEQ ID NO: 5426150 - DNA, 25 bp, Homo sapien
tggtggtagttcaggttttttggca

SEQ ID NO: 5426151 - DNA, 25 bp, Homo sapien
tctggctcttccacaacttcagcag

SEQ ID NO: 5426152 - DNA, 25 bp, Homo sapien
ggctcttccacaacttcagcaggag

SEQ ID NO: 5426153 - DNA, 25 bp, Homo sapien
cttctagggcaacttcctcaggctc

SEQ ID NO: 5426154 - DNA, 25 bp, Homo sapien
aggaggctcttctagggcaacttcc

SEQ ID NO: 5426155 - DNA, 25 bp, Homo sapien
ttccggtttgggaggaatagcttca

SEQ ID NO: 5426156 - DNA, 25 bp, Homo sapien
gggacagctacctttggcacctctg

SEQ ID NO: 5426157 - DNA, 25 bp, Homo sapien
tcttttctgggacagctacctttgg

SEQ ID NO: 5426158 - DNA, 25 bp, Homo sapien
ggaatagcttcaggcaccttctttt

SEQ ID NO: 5426159 - DNA, 25 bp, Homo sapien
aacacagcaccatgagggtgtctac

SEQ ID NO: 5426160 - DNA, 25 bp, Homo sapien
aaacaatatcaaacacagcaccatg

SEQ ID NO: 5426161 - DNA, 25 bp, Homo sapien
tttcattgttagacaaagtaaagac

SEQ ID NO: 5426162 - DNA, 25 bp, Homo sapien
attattttcattgttagacaaagta

SEQ ID NO: 5426163 - DNA, 25 bp, Homo sapien
gctttttaggaggaggcactggcac

SEQ ID NO: 5426164 - DNA, 25 bp, Homo sapien
ttttgtgggtggcacttcaggcttt

SEQ ID NO: 5426165 - DNA, 25 bp, Homo sapien
ttcaggaacaacttctttgggagcc

SEQ ID NO: 5426166 - DNA, 25 bp, Homo sapien
tgggtggcacttcaggctttttagg

SEQ ID NO: 5426167 - DNA, 25 bp, Homo sapien
ggagccgctggcactttcttttcag

SEQ ID NO: 5426168 - DNA, 25 bp, Homo sapien
tcaggaacaacttctttcggagcct

SEQ ID NO: 5426169 - DNA, 25 bp, Homo sapien
caggtgtgacttcaggctttttagg

SEQ ID NO: 5426170 - DNA, 25 bp, Homo sapien
tttcaggaacaacttctttcggagc

SEQ ID NO: 5426171 - DNA, 25 bp, Homo sapien
caggtgggacttcaggctttttagg

SEQ ID NO: 5426172 - DNA, 25 bp, Homo sapien
acaggtgggacttcaggctttttag

SEQ ID NO: 5426173 - DNA, 25 bp, Homo sapien
caggctttttaggaggagccgaggg

SEQ ID NO: 5426174 - DNA, 25 bp, Homo sapien
ttaggggttatgaagaccactagaa

SEQ ID NO: 5426175 - DNA, 25 bp, Homo sapien
tatgaagaccactagaaaaaatatt

SEQ ID NO: 5426176 - DNA, 25 bp, Homo sapien
gttatgaagaccactagaaaaaata

SEQ ID NO: 5426177 - DNA, 25 bp, Homo sapien
catttaggggttatgaagaccacta

SEQ ID NO: 5426178 - DNA, 25 bp, Homo sapien
caggagggacttcaggctttttagg

SEQ ID NO: 5426179 - DNA, 25 bp, Homo sapien
ctttttaggaggagccaagggcatt

SEQ ID NO: 5426180 - DNA, 25 bp, Homo sapien
aacaacctctatgggagcctctggc

SEQ ID NO: 5426181 - DNA, 25 bp, Homo sapien
tcaggaacaacctctatgggagcct

SEQ ID NO: 5426182 - DNA, 25 bp, Homo sapien
ttcaagaaatgaagagttcagtctt

SEQ ID NO: 5426183 - DNA, 25 bp, Homo sapien
tttaggaggagtcactggcactttc

SEQ ID NO: 5426184 - DNA, 25 bp, Homo sapien
ttcaggaacaacttctttgggagcc

SEQ ID NO: 5426185 - DNA, 25 bp, Homo sapien
gttttttaggaggagtcactggcac

SEQ ID NO: 5426186 - DNA, 25 bp, Homo sapien
tttttaggaggagtcactggcactt

SEQ ID NO: 5426187 - DNA, 25 bp, Homo sapien
aactgcaaaagaattagatcatctg

SEQ ID NO: 5426188 - DNA, 25 bp, Homo sapien
tcatctgaagcctaaggtcagtgac

SEQ ID NO: 5426189 - DNA, 25 bp, Homo sapien
gaccactggaacaaaatgtcttcaa

SEQ ID NO: 5426190 - DNA, 25 bp, Homo sapien
catttaggggttatgaagaccactg

SEQ ID NO: 5426191 - DNA, 25 bp, Homo sapien
acaggtgggacttcaggctttttag

SEQ ID NO: 5426192 - DNA, 25 bp, Homo sapien
ttcaaggacaacttctttgggagcc

SEQ ID NO: 5426193 - DNA, 25 bp, Homo sapien
caggctttttaggaggagccaaggg

SEQ ID NO: 5426194 - DNA, 25 bp, Homo sapien
ggctttttaggaggagccaagggca

SEQ ID NO: 5426195 - DNA, 25 bp, Homo sapien
ggagactactagcaaaatatacagc

SEQ ID NO: 5426196 - DNA, 25 bp, Homo sapien
tacatgtagagctatggagactact

SEQ ID NO: 5426197 - DNA, 25 bp, Homo sapien
taaaagatattagtaaagttacatg

SEQ ID NO: 5426198 - DNA, 25 bp, Homo sapien
tatacagcagaggaattggatcttc

SEQ ID NO: 5426199 - DNA, 25 bp, Homo sapien
tctggcacaatttcttgtgggactt

SEQ ID NO: 5426200 - DNA, 25 bp, Homo sapien
ctgtaacaggtggaacttctggctt

SEQ ID NO: 5426201 - DNA, 25 bp, Homo sapien
tgtaacaggtggaacttctggcttt

SEQ ID NO: 5426202 - DNA, 25 bp, Homo sapien
tttctggcacaatttcttgtgggac

SEQ ID NO: 5426203 - DNA, 25 bp, Homo sapien
gtttttcacttaggttaatgagaca

SEQ ID NO: 5426204 - DNA, 25 bp, Homo sapien
tagtttttcacttaggttaatgaga

SEQ ID NO: 5426205 - DNA, 25 bp, Homo sapien
cttgaaagatattagtagtttttca

SEQ ID NO: 5426206 - DNA, 25 bp, Homo sapien
agatattagtagtttttcacttagg

SEQ ID NO: 5426207 - DNA, 25 bp, Homo sapien
tggcaggtggggcttctggttttgt

SEQ ID NO: 5426208 - DNA, 25 bp, Homo sapien
tgtgggaggagccttaggaactttc

SEQ ID NO: 5426209 - DNA, 25 bp, Homo sapien
cttttctgggacaacttcttgagct

SEQ ID NO: 5426210 - DNA, 25 bp, Homo sapien
ttctgggacaacttcttgagcttca

SEQ ID NO: 5426211 - DNA, 25 bp, Homo sapien
ctgggacaattggagcttctggttt

SEQ ID NO: 5426212 - DNA, 25 bp, Homo sapien
tctgcggcttcttgaggaacttctg

SEQ ID NO: 5426213 - DNA, 25 bp, Homo sapien
aatttctttttctgcggcttcttga

SEQ ID NO: 5426214 - DNA, 25 bp, Homo sapien
acaattggagcttctggttttttgg

SEQ ID NO: 5426215 - DNA, 25 bp, Homo sapien
cttgaaagatattagtagttttata

SEQ ID NO: 5426216 - DNA, 25 bp, Homo sapien
tggttttttgattggtgccttggga

SEQ ID NO: 5426217 - DNA, 25 bp, Homo sapien
ctgcgggggcttctggttttttgat

SEQ ID NO: 5426218 - DNA, 25 bp, Homo sapien
tgtgaggggtacagacagtaagtta

SEQ ID NO: 5426219 - DNA, 25 bp, Homo sapien
tccggttttttgggcacagccacag

SEQ ID NO: 5426220 - DNA, 25 bp, Homo sapien
gcttccggttttttgggcacagcca

SEQ ID NO: 5426221 - DNA, 25 bp, Homo sapien
ttccggttttttgggcacagccaca

SEQ ID NO: 5426222 - DNA, 25 bp, Homo sapien
cggttttttgggcacagccacagat

SEQ ID NO: 5426223 - DNA, 25 bp, Homo sapien
tccttcggtggcagcacttcaggca

SEQ ID NO: 5426224 - DNA, 25 bp, Homo sapien
acagctgcctttggcacctctggga

SEQ ID NO: 5426225 - DNA, 25 bp, Homo sapien
ggacagctgcctttggcacctctgg

SEQ ID NO: 5426226 - DNA, 25 bp, Homo sapien
gacagctgcctttggcacctctggg

SEQ ID NO: 5426227 - DNA, 25 bp, Homo sapien
tgggacagctgcctttggcacctct

SEQ ID NO: 5426228 - DNA, 25 bp, Homo sapien
ttttgtgggtggcacttcaggcttt

SEQ ID NO: 5426229 - DNA, 25 bp, Homo sapien
ttcaggaacaacttctttgggagcc

SEQ ID NO: 5426230 - DNA, 25 bp, Homo sapien
tgggtggcacttcaggctttttagg

SEQ ID NO: 5426231 - DNA, 25 bp, Homo sapien
gctttttaggaggaggcactggcac

SEQ ID NO: 5426232 - DNA, 25 bp, Homo sapien
ttcaaggacaacttctttgggagcc

SEQ ID NO: 5426233 - DNA, 25 bp, Homo sapien
acaggtgggacttcaggctttttag

SEQ ID NO: 5426234 - DNA, 25 bp, Homo sapien
caggtgggacttcaggctttttagg

SEQ ID NO: 5426235 - DNA, 25 bp, Homo sapien
tctggcacaatttcttgtgggactt

SEQ ID NO: 5426236 - DNA, 25 bp, Homo sapien
tgtaacaggtggaacttctggcttt

SEQ ID NO: 5426237 - DNA, 25 bp, Homo sapien
ctgtaacaggtggaacttctggctt

SEQ ID NO: 5426238 - DNA, 25 bp, Homo sapien
tttctggcacaatttcttgtgggac

SEQ ID NO: 5426239 - DNA, 25 bp, Homo sapien
ttctgggacaacttcttgagcttca

SEQ ID NO: 5426240 - DNA, 25 bp, Homo sapien
tgtgggaggagccttaggaactttc

SEQ ID NO: 5426241 - DNA, 25 bp, Homo sapien
cttttctgggacaacttcttgagct

SEQ ID NO: 5426242 - DNA, 25 bp, Homo sapien
tggcaggtggggcttctggttttgt

SEQ ID NO: 5426243 - DNA, 25 bp, Homo sapien
ctgggacaatcggagcttctggttt

SEQ ID NO: 5426244 - DNA, 25 bp, Homo sapien
tctgcggcttcttgaggaacttctg

SEQ ID NO: 5426245 - DNA, 25 bp, Homo sapien
aatttctttttctgcggcttcttga

SEQ ID NO: 5426246 - DNA, 25 bp, Homo sapien
tgggacaatcggagcttctggtttt

SEQ ID NO: 5426247 - DNA, 25 bp, Homo sapien
cttgaaagatattagtagttttata

SEQ ID NO: 5426248 - DNA, 25 bp, Homo sapien
tggttttttgattggtgccttggga

SEQ ID NO: 5426249 - DNA, 25 bp, Homo sapien
ctgcgggggcttctggttttttgat

SEQ ID NO: 5426250 - DNA, 25 bp, Homo sapien
agtgattgtgaggggtacagacgat

SEQ ID NO: 5426251 - DNA, 25 bp, Homo sapien
gtacagacgataagtttttcttagc

SEQ ID NO: 5426252 - DNA, 25 bp, Homo sapien
tgattgtgaggggtacagacgataa

SEQ ID NO: 5426253 - DNA, 25 bp, Homo sapien
tgtgaggggtacagacgataagttt

SEQ ID NO: 5426254 - DNA, 25 bp, Homo sapien
gcttccggttttttgggcacagcca

SEQ ID NO: 5426255 - DNA, 25 bp, Homo sapien
tttgggcacagccacagatgctttc

SEQ ID NO: 5426256 - DNA, 25 bp, Homo sapien
ttttttgggcacagccacagatgct

SEQ ID NO: 5426257 - DNA, 25 bp, Homo sapien
cggttttttgggcacagccacagat

SEQ ID NO: 5426258 - DNA, 25 bp, Homo sapien
tccttcggtggcagcacttcaggca

SEQ ID NO: 5426259 - DNA, 25 bp, Homo sapien
cccaccaagatattttggatagtga

SEQ ID NO: 5426260 - DNA, 25 bp, Homo sapien
caagatattttggatagtgattgac

SEQ ID NO: 5426261 - DNA, 25 bp, Homo sapien
cacccaccaagatattttggatagt

SEQ ID NO: 5426262 - DNA, 25 bp, Homo sapien
caccaagatattttggatagtgatt

SEQ ID NO: 5426263 - DNA, 25 bp, Homo sapien
tgggacagctgcctttggcacctct

SEQ ID NO: 5426264 - DNA, 25 bp, Homo sapien
ggacagctgcctttggcacctctgg

SEQ ID NO: 5426265 - DNA, 25 bp, Homo sapien
acagctgcctttggcacctctggga

SEQ ID NO: 5426266 - DNA, 25 bp, Homo sapien
gacagctgcctttggcacctctggg

SEQ ID NO: 5426267 - DNA, 25 bp, Homo sapien
gctttttaggaggaggcactggcac

SEQ ID NO: 5426268 - DNA, 25 bp, Homo sapien
ttttgtgggtggcacttcaggcttt

SEQ ID NO: 5426269 - DNA, 25 bp, Homo sapien
ttcaggaacaacttctttgggagcc

SEQ ID NO: 5426270 - DNA, 25 bp, Homo sapien
tgggtggcacttcaggctttttagg

SEQ ID NO: 5426271 - DNA, 25 bp, Homo sapien
caggtgggacttcaggctttttagg

SEQ ID NO: 5426272 - DNA, 25 bp, Homo sapien
ttcaaggacaacttctttgggagcc

SEQ ID NO: 5426273 - DNA, 25 bp, Homo sapien
caggctttttaggaggagccgaggg

SEQ ID NO: 5426274 - DNA, 25 bp, Homo sapien
acaggtgggacttcaggctttttag

SEQ ID NO: 5426275 - DNA, 25 bp, Homo sapien
tctggcacaatttcttgtgggactt

SEQ ID NO: 5426276 - DNA, 25 bp, Homo sapien
tgtaacaggtggaacttctggcttt

SEQ ID NO: 5426277 - DNA, 25 bp, Homo sapien
ctgtaacaggtggaacttctggctt

SEQ ID NO: 5426278 - DNA, 25 bp, Homo sapien
tttctggcacaatttcttgtgggac

SEQ ID NO: 5426279 - DNA, 25 bp, Homo sapien
tgtgggaggagccttaggaactttc

SEQ ID NO: 5426280 - DNA, 25 bp, Homo sapien
cttttctgggacaacttcttgagct

SEQ ID NO: 5426281 - DNA, 25 bp, Homo sapien
tggcaggtggggcttctggttttgt

SEQ ID NO: 5426282 - DNA, 25 bp, Homo sapien
ttctgggacaacttcttgagcttca

SEQ ID NO: 5426283 - DNA, 25 bp, Homo sapien
tctgtggcttcttgaggaacttctg

SEQ ID NO: 5426284 - DNA, 25 bp, Homo sapien
ttctgtggcttcttgaggaacttct

SEQ ID NO: 5426285 - DNA, 25 bp, Homo sapien
acaattggagcttctggttttttgg

SEQ ID NO: 5426286 - DNA, 25 bp, Homo sapien
ctgggacaattggagcttctggttt

SEQ ID NO: 5426287 - DNA, 25 bp, Homo sapien
cttgaaagatattagtagttttata

SEQ ID NO: 5426288 - DNA, 25 bp, Homo sapien
tggttttttgattggtgccttggga

SEQ ID NO: 5426289 - DNA, 25 bp, Homo sapien
ctgcgggggcttctggttttttgat

SEQ ID NO: 5426290 - DNA, 25 bp, Homo sapien
tgtgaggggtacagacgataagttt

SEQ ID NO: 5426291 - DNA, 25 bp, Homo sapien
agtgattgtgaggggtacagacgat

SEQ ID NO: 5426292 - DNA, 25 bp, Homo sapien
tgattgtgaggggtacagacgataa

SEQ ID NO: 5426293 - DNA, 25 bp, Homo sapien
gtacagacgataagtttttcttagc

SEQ ID NO: 5426294 - DNA, 25 bp, Homo sapien
gcttccggttttttgggcacagcca

SEQ ID NO: 5426295 - DNA, 25 bp, Homo sapien
tttgggcacagccacagatgctttc

SEQ ID NO: 5426296 - DNA, 25 bp, Homo sapien
ttttttgggcacagccacagatgct

SEQ ID NO: 5426297 - DNA, 25 bp, Homo sapien
cggttttttgggcacagccacagat

SEQ ID NO: 5426298 - DNA, 25 bp, Homo sapien
tccttcggtggcagcacttcaggca

SEQ ID NO: 5426299 - DNA, 25 bp, Homo sapien
cccaccaagatattttggatagcga

SEQ ID NO: 5426300 - DNA, 25 bp, Homo sapien
caccaagatattttggatagcgatt

SEQ ID NO: 5426301 - DNA, 25 bp, Homo sapien
caagatattttggatagcgattgac

SEQ ID NO: 5426302 - DNA, 25 bp, Homo sapien
cacccaccaagatattttggatagc

SEQ ID NO: 5426303 - DNA, 25 bp, Homo sapien
ggacagctgcctttggcacctctgg

SEQ ID NO: 5426304 - DNA, 25 bp, Homo sapien
acagctgcctttggcacctctggga

SEQ ID NO: 5426305 - DNA, 25 bp, Homo sapien
tgggacagctgcctttggcacctct

SEQ ID NO: 5426306 - DNA, 25 bp, Homo sapien
gacagctgcctttggcacctctggg

SEQ ID NO: 5426307 - DNA, 25 bp, Homo sapien
gctttttaggaggaggcactggcac

SEQ ID NO: 5426308 - DNA, 25 bp, Homo sapien
ttcaggaacaacttctttgggagcc

SEQ ID NO: 5426309 - DNA, 25 bp, Homo sapien
tgggtggcacttcaggctttttagg

SEQ ID NO: 5426310 - DNA, 25 bp, Homo sapien
ttttgtgggtggcacttcaggcttt

SEQ ID NO: 5426311 - DNA, 25 bp, Homo sapien
tttaacaggtgggacttcaggctct

SEQ ID NO: 5426312 - DNA, 25 bp, Homo sapien
gcggataacctctttggaagcttct

SEQ ID NO: 5426313 - DNA, 25 bp, Homo sapien
ataacctctttggaagcttctggca

SEQ ID NO: 5426314 - DNA, 25 bp, Homo sapien
ggcactttctcttcgcggataacct

SEQ ID NO: 5426315 - DNA, 25 bp, Homo sapien
agggcactttctcttcgcggataac

SEQ ID NO: 5426316 - DNA, 25 bp, Homo sapien
agatattagtgaaattacatttagg

SEQ ID NO: 5426317 - DNA, 25 bp, Homo sapien
aagatattagtgaaattacatttag

SEQ ID NO: 5426318 - DNA, 25 bp, Homo sapien
cactttcttttcagggataatctct

SEQ ID NO: 5426319 - DNA, 25 bp, Homo sapien
gaggcaccaccgacactttcttttc

SEQ ID NO: 5426320 - DNA, 25 bp, Homo sapien
ggagcttcgtgcacttgaaagatat

SEQ ID NO: 5426321 - DNA, 25 bp, Homo sapien
taatctctttgggagcttcgtgcac

SEQ ID NO: 5426322 - DNA, 25 bp, Homo sapien
gatgcactttcttttccgggacaac

SEQ ID NO: 5426323 - DNA, 25 bp, Homo sapien
tttgacaggtacaacttcagccctt

SEQ ID NO: 5426324 - DNA, 25 bp, Homo sapien
ctttgacaggtacaacttcagccct

SEQ ID NO: 5426325 - DNA, 25 bp, Homo sapien
tccgggacaacttctctgagagcct

SEQ ID NO: 5426326 - DNA, 25 bp, Homo sapien
acttcaggctttctgagaggaacca

SEQ ID NO: 5426327 - DNA, 25 bp, Homo sapien
ggacttcaggctttctgagaggaac

SEQ ID NO: 5426328 - DNA, 25 bp, Homo sapien
ttcaggctttctgagaggaaccaca

SEQ ID NO: 5426329 - DNA, 25 bp, Homo sapien
tcaggctttctgagaggaaccacaa

SEQ ID NO: 5426330 - DNA, 25 bp, Homo sapien
gctcttcaggtacatcctcaaatat

SEQ ID NO: 5426331 - DNA, 25 bp, Homo sapien
ggctcttcaggtacatcctcaaata

SEQ ID NO: 5426332 - DNA, 25 bp, Homo sapien
ctcttcaggtacatcctcaaatatt

SEQ ID NO: 5426333 - DNA, 25 bp, Homo sapien
tggctcttcaggtacatcctcaaat

SEQ ID NO: 5426334 - DNA, 25 bp, Homo sapien
ttatggttagaggttaaaaggatca

SEQ ID NO: 5426335 - DNA, 25 bp, Homo sapien
agaggttaaaaggatcagtggagac

SEQ ID NO: 5426336 - DNA, 25 bp, Homo sapien
gaagatattagtattatggttagag

SEQ ID NO: 5426337 - DNA, 25 bp, Homo sapien
tggttagaggttaaaaggatcagtg

SEQ ID NO: 5426338 - DNA, 25 bp, Homo sapien
cgaggtgattcaggcactttaaaga

SEQ ID NO: 5426339 - DNA, 25 bp, Homo sapien
aatttctcgaggtgattcaggcact

SEQ ID NO: 5426340 - DNA, 25 bp, Homo sapien
gtatttcaatttcaaggggagcagc

SEQ ID NO: 5426341 - DNA, 25 bp, Homo sapien
tagtgggaggtatttcaatttcaag

SEQ ID NO: 5426342 - DNA, 25 bp, Homo sapien
ttacagaataccatgggtgttatga

SEQ ID NO: 5426343 - DNA, 25 bp, Homo sapien
tcttgtagagatattacagatcagc

SEQ ID NO: 5426344 - DNA, 25 bp, Homo sapien
tatgagaggagcaaatgaacatgga

SEQ ID NO: 5426345 - DNA, 25 bp, Homo sapien
ttccctaggttggaggatattctgg

SEQ ID NO: 5426346 - DNA, 25 bp, Homo sapien
tggaaaaatgcctctggttgtatca

SEQ ID NO: 5426347 - DNA, 25 bp, Homo sapien
aaaatgcctctggttgtatcaggtt

SEQ ID NO: 5426348 - DNA, 25 bp, Homo sapien
tggaatttcaggaatagcctcaggt

SEQ ID NO: 5426349 - DNA, 25 bp, Homo sapien
ttcaggaatagcctcaggtggctcc

SEQ ID NO: 5426350 - DNA, 25 bp, Homo sapien
tttagctggtggaacttcaggcttt

SEQ ID NO: 5426351 - DNA, 25 bp, Homo sapien
gaacagcttcacgaactttttcttc

SEQ ID NO: 5426352 - DNA, 25 bp, Homo sapien
tcagaacagcttcacgaactttttc

SEQ ID NO: 5426353 - DNA, 25 bp, Homo sapien
ctttagctggtggaacttcaggctt

SEQ ID NO: 5426354 - DNA, 25 bp, Homo sapien
tgggctcttcaggaacacgtacttt

SEQ ID NO: 5426355 - DNA, 25 bp, Homo sapien
tcttctaccacaattttcttaggca

SEQ ID NO: 5426356 - DNA, 25 bp, Homo sapien
cacaattttcttaggcacctccggt

SEQ ID NO: 5426357 - DNA, 25 bp, Homo sapien
taccacaattttcttaggcacctcc

SEQ ID NO: 5426358 - DNA, 25 bp, Homo sapien
ctcttttcgaggaacaactttagtg

SEQ ID NO: 5426359 - DNA, 25 bp, Homo sapien
tctattaccctatgaactttttcaa

SEQ ID NO: 5426360 - DNA, 25 bp, Homo sapien
ctaatttgatgaattcttctacttc

SEQ ID NO: 5426361 - DNA, 25 bp, Homo sapien
attcttctacttcatgaaactcgcc

SEQ ID NO: 5426362 - DNA, 25 bp, Homo sapien
gaaactcgccttcttcaaaatattc

SEQ ID NO: 5426363 - DNA, 25 bp, Homo sapien
cttggcggaaggcaactgatacttt

SEQ ID NO: 5426364 - DNA, 25 bp, Homo sapien
gcggaaggcaactgatactttttct

SEQ ID NO: 5426365 - DNA, 25 bp, Homo sapien
tacttcttggcggaaggcaactgat

SEQ ID NO: 5426366 - DNA, 25 bp, Homo sapien
ttactactacttcttggcggaaggc

SEQ ID NO: 5426367 - DNA, 25 bp, Homo sapien
agcttcctttttaggcacaaggact

SEQ ID NO: 5426368 - DNA, 25 bp, Homo sapien
gcctcttttttctgaacaggaacag

SEQ ID NO: 5426369 - DNA, 25 bp, Homo sapien
acaggaacaggtactttttcctcag

SEQ ID NO: 5426370 - DNA, 25 bp, Homo sapien
tgggggtgcctcttttttctgaaca

SEQ ID NO: 5426371 - DNA, 25 bp, Homo sapien
ttttcctcaggaattttctttgaca

SEQ ID NO: 5426372 - DNA, 25 bp, Homo sapien
tattaataatgaggatttgatatac

SEQ ID NO: 5426373 - DNA, 25 bp, Homo sapien
tgcctccacttttttaggaacagga

SEQ ID NO: 5426374 - DNA, 25 bp, Homo sapien
ctttagctggtggtgcctccacttt

SEQ ID NO: 5426375 - DNA, 25 bp, Homo sapien
ttagctggtggtgcctccacttttt

SEQ ID NO: 5426376 - DNA, 25 bp, Homo sapien
tgcttcaggtactgctttcttaatc

SEQ ID NO: 5426377 - DNA, 25 bp, Homo sapien
gtgatgagcagaacaccacccatat

SEQ ID NO: 5426378 - DNA, 25 bp, Homo sapien
tgtgatgagcagaacaccacccata

SEQ ID NO: 5426379 - DNA, 25 bp, Homo sapien
tgatgagcagaacaccacccatata

SEQ ID NO: 5426380 - DNA, 25 bp, Homo sapien
catgtgatgagcagaacaccaccca

SEQ ID NO: 5426381 - DNA, 25 bp, Homo sapien
tcttcaacttcctctatgctaggtg

SEQ ID NO: 5426382 - DNA, 25 bp, Homo sapien
tctatgctaggtggttcttctggga

SEQ ID NO: 5426383 - DNA, 25 bp, Homo sapien
tcttctgaaataggctcttcttcag

SEQ ID NO: 5426384 - DNA, 25 bp, Homo sapien
caacttcctctatgctaggtggttc

SEQ ID NO: 5426385 - DNA, 25 bp, Homo sapien
tcctcttctttagggagaatgattc

SEQ ID NO: 5426386 - DNA, 25 bp, Homo sapien
gagaatgattcgtttttcttccacc

SEQ ID NO: 5426387 - DNA, 25 bp, Homo sapien
tccaccttcttaggcacctcaggaa

SEQ ID NO: 5426388 - DNA, 25 bp, Homo sapien
cttcaactggtagaacttcctcttc

SEQ ID NO: 5426389 - DNA, 25 bp, Homo sapien
ttgagagacattgattattttagac

SEQ ID NO: 5426390 - DNA, 25 bp, Homo sapien
tgagagacattgattattttagaca

SEQ ID NO: 5426391 - DNA, 25 bp, Homo sapien
cttgagagacattgattattttaga

SEQ ID NO: 5426392 - DNA, 25 bp, Homo sapien
ctcaggtttcttaggtaccacagac

SEQ ID NO: 5426393 - DNA, 25 bp, Homo sapien
tcaggtttcttaggtaccacagaca

SEQ ID NO: 5426394 - DNA, 25 bp, Homo sapien
cctcctctttcttgggaatgaccac

SEQ ID NO: 5426395 - DNA, 25 bp, Homo sapien
gagcctcctctttcttgggaatgac

SEQ ID NO: 5426396 - DNA, 25 bp, Homo sapien
gggagcctcctctttcttgggaatg

SEQ ID NO: 5426397 - DNA, 25 bp, Homo sapien
tctttcttgggaatgaccactttct

SEQ ID NO: 5426398 - DNA, 25 bp, Homo sapien
tcttctctggtacaggtttctttgg

SEQ ID NO: 5426399 - DNA, 25 bp, Homo sapien
tacatattcttcttcgggaggaact

SEQ ID NO: 5426400 - DNA, 25 bp, Homo sapien
tcttcctcaggtacatattcttctt

SEQ ID NO: 5426401 - DNA, 25 bp, Homo sapien
caggtacatattcttcttcgggagg

SEQ ID NO: 5426402 - DNA, 25 bp, Homo sapien
cctcttcctcaggtggaatttcctc

SEQ ID NO: 5426403 - DNA, 25 bp, Homo sapien
ctcaggtagaacttcctcttcagga

SEQ ID NO: 5426404 - DNA, 25 bp, Homo sapien
ctcttcctcaggtagaacttcctct

SEQ ID NO: 5426405 - DNA, 25 bp, Homo sapien
cctcttcttcaggtagaacttcctc

SEQ ID NO: 5426406 - DNA, 25 bp, Homo sapien
cctcttcctgaggtagagctacagg

SEQ ID NO: 5426407 - DNA, 25 bp, Homo sapien
ctggaactggttcacgtttctttgg

SEQ ID NO: 5426408 - DNA, 25 bp, Homo sapien
ggaactggttcacgtttctttggca

SEQ ID NO: 5426409 - DNA, 25 bp, Homo sapien
tggaactggttcacgtttctttggc

SEQ ID NO: 5426410 - DNA, 25 bp, Homo sapien
tggtgcttccacttttttcggaaca

SEQ ID NO: 5426411 - DNA, 25 bp, Homo sapien
atgagcttcttgggcacctctggca

SEQ ID NO: 5426412 - DNA, 25 bp, Homo sapien
ctttgggtggtggtgcttccacttt

SEQ ID NO: 5426413 - DNA, 25 bp, Homo sapien
cttttcttctgggatgagcttcttg

SEQ ID NO: 5426414 - DNA, 25 bp, Homo sapien
ccactttcttaggagcaggaactgg

SEQ ID NO: 5426415 - DNA, 25 bp, Homo sapien
ctccactttcttaggagcaggaact

SEQ ID NO: 5426416 - DNA, 25 bp, Homo sapien
tccactttcttaggagcaggaactg

SEQ ID NO: 5426417 - DNA, 25 bp, Homo sapien
cactttcttaggagcaggaactggc

SEQ ID NO: 5426418 - DNA, 25 bp, Homo sapien
caggtggagcttccacctttttagg

SEQ ID NO: 5426419 - DNA, 25 bp, Homo sapien
ctttggcaggtggagcttccacctt

SEQ ID NO: 5426420 - DNA, 25 bp, Homo sapien
ttggcaggtggagcttccacctttt

SEQ ID NO: 5426421 - DNA, 25 bp, Homo sapien
ggcaggtggagcttccaccttttta

SEQ ID NO: 5426422 - DNA, 25 bp, Homo sapien
tctcctttttaggaataagcacagg

SEQ ID NO: 5426423 - DNA, 25 bp, Homo sapien
cttttgctggcggaggcttctcctt

SEQ ID NO: 5426424 - DNA, 25 bp, Homo sapien
taagcacaggaactttctcctctgg

SEQ ID NO: 5426425 - DNA, 25 bp, Homo sapien
tttgctggcggaggcttctcctttt

SEQ ID NO: 5426426 - DNA, 25 bp, Homo sapien
tggaacaggtttcctgggtacctca

SEQ ID NO: 5426427 - DNA, 25 bp, Homo sapien
acaggtttcctgggtacctcaggca

SEQ ID NO: 5426428 - DNA, 25 bp, Homo sapien
ggtatcactggcaccacttcttcct

SEQ ID NO: 5426429 - DNA, 25 bp, Homo sapien
tctacaagatattcttctacatggg

SEQ ID NO: 5426430 - DNA, 25 bp, Homo sapien
tcttcctcagttatgaactcctctt

SEQ ID NO: 5426431 - DNA, 25 bp, Homo sapien
tctacatgggttacaacttcctctt

SEQ ID NO: 5426432 - DNA, 25 bp, Homo sapien
aattaagacaccttagaaacacagg

SEQ ID NO: 5426433 - DNA, 25 bp, Homo sapien
aacacaggcccatttataacagaag

SEQ ID NO: 5426434 - DNA, 25 bp, Homo sapien
taagacaccttagaaacacaggccc

SEQ ID NO: 5426435 - DNA, 25 bp, Homo sapien
caggcccatttataacagaagaaag

SEQ ID NO: 5426436 - DNA, 25 bp, Homo sapien
ctaacaggtggtgctacttcttttc

SEQ ID NO: 5426437 - DNA, 25 bp, Homo sapien
gctacttcttttctagggacaggta

SEQ ID NO: 5426438 - DNA, 25 bp, Homo sapien
tactttttcttctgcgacaaccctc

SEQ ID NO: 5426439 - DNA, 25 bp, Homo sapien
ctctaacaggtggtgctacttcttt

SEQ ID NO: 5426440 - DNA, 25 bp, Homo sapien
gctctttttcacgtttggtaattga

SEQ ID NO: 5426441 - DNA, 25 bp, Homo sapien
tgctctttttcacgtttggtaattg

SEQ ID NO: 5426442 - DNA, 25 bp, Homo sapien
ctgctctttttcacgtttggtaatt

SEQ ID NO: 5426443 - DNA, 25 bp, Homo sapien
ggtttgagtttcttaggaatgggca

SEQ ID NO: 5426444 - DNA, 25 bp, Homo sapien
aatgggcactggtactttttcttca

SEQ ID NO: 5426445 - DNA, 25 bp, Homo sapien
tggtggaggtttgagtttcttagga

SEQ ID NO: 5426446 - DNA, 25 bp, Homo sapien
cttaggaatgggcactggtactttt

SEQ ID NO: 5426447 - DNA, 25 bp, Homo sapien
ttctgggacaggctttacagggata

SEQ ID NO: 5426448 - DNA, 25 bp, Homo sapien
ctgggacaggctttacagggatagg

SEQ ID NO: 5426449 - DNA, 25 bp, Homo sapien
cttctgggacaggctttacagggat

SEQ ID NO: 5426450 - DNA, 25 bp, Homo sapien
tctgggacaggctttacagggatag

SEQ ID NO: 5426451 - DNA, 25 bp, Homo sapien
catactcccgctcctcgtattcttc

SEQ ID NO: 5426452 - DNA, 25 bp, Homo sapien
catgctcttcatatcgttcatactc

SEQ ID NO: 5426453 - DNA, 25 bp, Homo sapien
tcttcatatcgttcatactcccgct

SEQ ID NO: 5426454 - DNA, 25 bp, Homo sapien
tcttcatgctcttcatatcgttcat

SEQ ID NO: 5426455 - DNA, 25 bp, Homo sapien
tattcttcttcccgttgtactgaaa

SEQ ID NO: 5426456 - DNA, 25 bp, Homo sapien
tcatattcttcttcccgttgtactg

SEQ ID NO: 5426457 - DNA, 25 bp, Homo sapien
ttcttcttcccgttgtactgaaaca

SEQ ID NO: 5426458 - DNA, 25 bp, Homo sapien
cttcttcccgttgtactgaaacagc

SEQ ID NO: 5426459 - DNA, 25 bp, Homo sapien
ctttgatgggttgaggttctctttt

SEQ ID NO: 5426460 - DNA, 25 bp, Homo sapien
ttgatgggttgaggttctctttttg

SEQ ID NO: 5426461 - DNA, 25 bp, Homo sapien
ttttggagcttcaattgatactttt

SEQ ID NO: 5426462 - DNA, 25 bp, Homo sapien
tctttttggagcttcaattgatact

SEQ ID NO: 5426463 - DNA, 25 bp, Homo sapien
tcctctcttttaggtttgagtttca

SEQ ID NO: 5426464 - DNA, 25 bp, Homo sapien
ttagctggtggttcctcctctcttt

SEQ ID NO: 5426465 - DNA, 25 bp, Homo sapien
ttcttctgggacagctctcttcggt

SEQ ID NO: 5426466 - DNA, 25 bp, Homo sapien
gggacagctctcttcggttcctctg

SEQ ID NO: 5426467 - DNA, 25 bp, Homo sapien
taaccagtgtatttggtaaagagag

SEQ ID NO: 5426468 - DNA, 25 bp, Homo sapien
caatattgtgcataatggaagggcg

SEQ ID NO: 5426469 - DNA, 25 bp, Homo sapien
gtagcccaaacataaacacttgaca

SEQ ID NO: 5426470 - DNA, 25 bp, Homo sapien
gcagccataaagtagtagcccaaac

SEQ ID NO: 5426471 - DNA, 25 bp, Homo sapien
ctcttgcttttggaggcgcctcttt

SEQ ID NO: 5426472 - DNA, 25 bp, Homo sapien
tggaggcgcctcttttttagttaca

SEQ ID NO: 5426473 - DNA, 25 bp, Homo sapien
tcttcctgggtaatttgcatgtgcc

SEQ ID NO: 5426474 - DNA, 25 bp, Homo sapien
gtaatttgcatgtgcctctcagtca

SEQ ID NO: 5426475 - DNA, 25 bp, Homo sapien
tatactagccagaaagtactgtgat

SEQ ID NO: 5426476 - DNA, 25 bp, Homo sapien
ttagggagttatatcaaagtggacg

SEQ ID NO: 5426477 - DNA, 25 bp, Homo sapien
taaacagtatgacccaaagaacagc

SEQ ID NO: 5426478 - DNA, 25 bp, Homo sapien
cacaagtaatactctacccaaagac

SEQ ID NO: 5426479 - DNA, 25 bp, Homo sapien
catcttaatgacttttggaggaacc

SEQ ID NO: 5426480 - DNA, 25 bp, Homo sapien
cttccatcttaatgacttttggagg

SEQ ID NO: 5426481 - DNA, 25 bp, Homo sapien
tccatcttaatgacttttggaggaa

SEQ ID NO: 5426482 - DNA, 25 bp, Homo sapien
tcttccatcttaatgacttttggag

SEQ ID NO: 5426483 - DNA, 25 bp, Homo sapien
ttaaaagataccaggcaataccatc

SEQ ID NO: 5426484 - DNA, 25 bp, Homo sapien
ataccatcaaacatacgatatggaa

SEQ ID NO: 5426485 - DNA, 25 bp, Homo sapien
aacacaggcacacttattttctggt

SEQ ID NO: 5426486 - DNA, 25 bp, Homo sapien
tcaaacatacgatatggaaaacact

SEQ ID NO: 5426487 - DNA, 25 bp, Homo sapien
ggagcaggaactttcttttctggca

SEQ ID NO: 5426488 - DNA, 25 bp, Homo sapien
tggcacaattttcttaggtgcttca

SEQ ID NO: 5426489 - DNA, 25 bp, Homo sapien
cacaattttcttaggtgcttcagga

SEQ ID NO: 5426490 - DNA, 25 bp, Homo sapien
tcctttttaggaactggagcaggaa

SEQ ID NO: 5426491 - DNA, 25 bp, Homo sapien
tatgaagtgacacagttgtggggct

SEQ ID NO: 5426492 - DNA, 25 bp, Homo sapien
tgacacagttgtggggcttagcatt

SEQ ID NO: 5426493 - DNA, 25 bp, Homo sapien
tatgagtttgccttacatatgaagt

SEQ ID NO: 5426494 - DNA, 25 bp, Homo sapien
gaaagattaggtttaagaatatgag

SEQ ID NO: 5426495 - DNA, 25 bp, Homo sapien
ctttagccggtggaggctcctctat

SEQ ID NO: 5426496 - DNA, 25 bp, Homo sapien
cctctattttagcaggaatttttgg

SEQ ID NO: 5426497 - DNA, 25 bp, Homo sapien
ggaggctcctctattttagcaggaa

SEQ ID NO: 5426498 - DNA, 25 bp, Homo sapien
cggtggaggctcctctattttagca

SEQ ID NO: 5426499 - DNA, 25 bp, Homo sapien
tcttccacaacatattcctcaggct

SEQ ID NO: 5426500 - DNA, 25 bp, Homo sapien
tcttagaaataatgtgcagcttttc

SEQ ID NO: 5426501 - DNA, 25 bp, Homo sapien
tccacaacatattcctcaggctctt

SEQ ID NO: 5426502 - DNA, 25 bp, Homo sapien
tttcttccacaacatattcctcagg

SEQ ID NO: 5426503 - DNA, 25 bp, Homo sapien
ataaactgaaatggacacaccttcc

SEQ ID NO: 5426504 - DNA, 25 bp, Homo sapien
taaactgaaatggacacaccttcct

SEQ ID NO: 5426505 - DNA, 25 bp, Homo sapien
gccgcgtgacttccactctttgagg

SEQ ID NO: 5426506 - DNA, 25 bp, Homo sapien
ctttgaggaactgcgaaggatagtt

SEQ ID NO: 5426507 - DNA, 25 bp, Homo sapien
ctacaacagttttcttagagacttc

SEQ ID NO: 5426508 - DNA, 25 bp, Homo sapien
ttttcttcagcaacaaatctctttt

SEQ ID NO: 5426509 - DNA, 25 bp, Homo sapien
gggaggaggagctttcttagcgaca

SEQ ID NO: 5426510 - DNA, 25 bp, Homo sapien
gaggagctttcttagcgacaggaac

SEQ ID NO: 5426511 - DNA, 25 bp, Homo sapien
cctctgggacgggtttcttaggcag

SEQ ID NO: 5426512 - DNA, 25 bp, Homo sapien
agctttcttagcgacaggaactggc

SEQ ID NO: 5426513 - DNA, 25 bp, Homo sapien
ggaacataaagacagttcttgggaa

SEQ ID NO: 5426514 - DNA, 25 bp, Homo sapien
tggaacataaagacagttcttggga

SEQ ID NO: 5426515 - DNA, 25 bp, Homo sapien
aagaaatacacccacagtgcactca

SEQ ID NO: 5426516 - DNA, 25 bp, Homo sapien
ctttagagacattatgcacttttag

SEQ ID NO: 5426517 - DNA, 25 bp, Homo sapien
cgaggaacaggtttcctttcttcag

SEQ ID NO: 5426518 - DNA, 25 bp, Homo sapien
cttcttcctccttccgaggaacagg

SEQ ID NO: 5426519 - DNA, 25 bp, Homo sapien
ttggtggtggtggaacttcttcctc

SEQ ID NO: 5426520 - DNA, 25 bp, Homo sapien
ctttcttcaggaactttcttctttg

SEQ ID NO: 5426521 - DNA, 25 bp, Homo sapien
tgagcaacatagaagtggcaattaa

SEQ ID NO: 5426522 - DNA, 25 bp, Homo sapien
gacatgcaattaaagaggcttgaag

SEQ ID NO: 5426523 - DNA, 25 bp, Homo sapien
tgcaattaaagaggcttgaaggaaa

SEQ ID NO: 5426524 - DNA, 25 bp, Homo sapien
taaagaagacatgcaattaaagagg

SEQ ID NO: 5426525 - DNA, 25 bp, Homo sapien
gattcctctctttgagttacaatgg

SEQ ID NO: 5426526 - DNA, 25 bp, Homo sapien
gtggtggagattcctctctttgagt

SEQ ID NO: 5426527 - DNA, 25 bp, Homo sapien
cctctctttgagttacaatggttat

SEQ ID NO: 5426528 - DNA, 25 bp, Homo sapien
ggagattcctctctttgagttacaa

SEQ ID NO: 5426529 - DNA, 25 bp, Homo sapien
gaagagacatttttagaattgactt

SEQ ID NO: 5426530 - DNA, 25 bp, Homo sapien
cttgaagagacatttttagaattga

SEQ ID NO: 5426531 - DNA, 25 bp, Homo sapien
ttgaagagacatttttagaattgac

SEQ ID NO: 5426532 - DNA, 25 bp, Homo sapien
attgactttatattttctaaagtag

SEQ ID NO: 5426533 - DNA, 25 bp, Homo sapien
agggacaggtttctttggcacctct

SEQ ID NO: 5426534 - DNA, 25 bp, Homo sapien
ttgcaacaggaacgggaatcttttc

SEQ ID NO: 5426535 - DNA, 25 bp, Homo sapien
gggacaggtttctttggcacctctg

SEQ ID NO: 5426536 - DNA, 25 bp, Homo sapien
tttctttgcaacaggaacgggaatc

SEQ ID NO: 5426537 - DNA, 25 bp, Homo sapien
tggcacgggtttcttgggaacctca

SEQ ID NO: 5426538 - DNA, 25 bp, Homo sapien
tttctcctctggcacgggtttcttg

SEQ ID NO: 5426539 - DNA, 25 bp, Homo sapien
agcaggttccttcttaggcacagga

SEQ ID NO: 5426540 - DNA, 25 bp, Homo sapien
ccttcttaggcacaggaactggctt

SEQ ID NO: 5426541 - DNA, 25 bp, Homo sapien
gggccacttcttctggagctggttt

SEQ ID NO: 5426542 - DNA, 25 bp, Homo sapien
agctggtttctcaggtagctcaggg

SEQ ID NO: 5426543 - DNA, 25 bp, Homo sapien
ggagctggtttctcaggtagctcag

SEQ ID NO: 5426544 - DNA, 25 bp, Homo sapien
ctggagctggtttctcaggtagctc

SEQ ID NO: 5426545 - DNA, 25 bp, Homo sapien
tgagaaagtgtgcatttgacaaggc

SEQ ID NO: 5426546 - DNA, 25 bp, Homo sapien
tgtgcatttgacaaggcatatgttg

SEQ ID NO: 5426547 - DNA, 25 bp, Homo sapien
taaaagaaaagtgccatttttgaga

SEQ ID NO: 5426548 - DNA, 25 bp, Homo sapien
ccatttttgagaaagtgtgcatttg

SEQ ID NO: 5426549 - DNA, 25 bp, Homo sapien
atatactttattggactgtaaattt

SEQ ID NO: 5426550 - DNA, 25 bp, Homo sapien
actttattggactgtaaatttacat

SEQ ID NO: 5426551 - DNA, 25 bp, Homo sapien
aatatactttattggactgtaaatt

SEQ ID NO: 5426552 - DNA, 25 bp, Homo sapien
aaatatactttattggactgtaaat

SEQ ID NO: 5426553 - DNA, 25 bp, Homo sapien
atggcaacgtgaattttctcttcag

SEQ ID NO: 5426554 - DNA, 25 bp, Homo sapien
tttggaaatggcaacgtgaattttc

SEQ ID NO: 5426555 - DNA, 25 bp, Homo sapien
ggaaatggcaacgtgaattttctct

SEQ ID NO: 5426556 - DNA, 25 bp, Homo sapien
aatggcaacgtgaattttctcttca

SEQ ID NO: 5426557 - DNA, 25 bp, Homo sapien
caacaagagggataaaaatctgcct

SEQ ID NO: 5426558 - DNA, 25 bp, Homo sapien
gacagaaatgtctacacgatcacaa

SEQ ID NO: 5426559 - DNA, 25 bp, Homo sapien
gccatgttgtgggtggtaattgtaa

SEQ ID NO: 5426560 - DNA, 25 bp, Homo sapien
taattactgatatgccatgttgtgg

SEQ ID NO: 5426561 - DNA, 25 bp, Homo sapien
tgaaataaccatcttctttgtatgc

SEQ ID NO: 5426562 - DNA, 25 bp, Homo sapien
tgactgacacctcctcctctgtgtg

SEQ ID NO: 5426563 - DNA, 25 bp, Homo sapien
tttcttctgaaataaccatcttctt

SEQ ID NO: 5426564 - DNA, 25 bp, Homo sapien
gtgtgagaagcaaagaacatctttt

SEQ ID NO: 5426565 - DNA, 25 bp, Homo sapien
tagtacaagacatcagatcaaacac

SEQ ID NO: 5426566 - DNA, 25 bp, Homo sapien
gcttgagaacaaattcagtattgac

SEQ ID NO: 5426567 - DNA, 25 bp, Homo sapien
aagtatttagacacagaatgagtgg

SEQ ID NO: 5426568 - DNA, 25 bp, Homo sapien
tgggttaatatggtagcttgagaac

SEQ ID NO: 5426569 - DNA, 25 bp, Homo sapien
cttcttcctgtactggagtccggga

SEQ ID NO: 5426570 - DNA, 25 bp, Homo sapien
gtttttgtggaacaatcttctttga

SEQ ID NO: 5426571 - DNA, 25 bp, Homo sapien
tttgtggaacaatcttctttgaaac

SEQ ID NO: 5426572 - DNA, 25 bp, Homo sapien
ctttcacttcaataacttcttcctg

SEQ ID NO: 5426573 - DNA, 25 bp, Homo sapien
tccattcttcgagaagtcttttcaa

SEQ ID NO: 5426574 - DNA, 25 bp, Homo sapien
cctccattcttcgagaagtcttttc

SEQ ID NO: 5426575 - DNA, 25 bp, Homo sapien
attcttcgagaagtcttttcaattt

SEQ ID NO: 5426576 - DNA, 25 bp, Homo sapien
ttcctccattcttcgagaagtcttt

SEQ ID NO: 5426577 - DNA, 25 bp, Homo sapien
tgcaagcattttagagaaattgcag

SEQ ID NO: 5426578 - DNA, 25 bp, Homo sapien
gcaagcattttagagaaattgcagt

SEQ ID NO: 5426579 - DNA, 25 bp, Homo sapien
caagcattttagagaaattgcagta

SEQ ID NO: 5426580 - DNA, 25 bp, Homo sapien
ctgcaagcattttagagaaattgca

SEQ ID NO: 5426581 - DNA, 25 bp, Homo sapien
gaggtggtggtgctttcttttcagg

SEQ ID NO: 5426582 - DNA, 25 bp, Homo sapien
ctttaggaggtggtggtgctttctt

SEQ ID NO: 5426583 - DNA, 25 bp, Homo sapien
taggaggtggtggtgctttcttttc

SEQ ID NO: 5426584 - DNA, 25 bp, Homo sapien
tggtgctttcttttcaggtactttg

SEQ ID NO: 5426585 - DNA, 25 bp, Homo sapien
gtgctaggatttgaagcaggatcaa

SEQ ID NO: 5426586 - DNA, 25 bp, Homo sapien
gctaggatttgaagcaggatcaagc

SEQ ID NO: 5426587 - DNA, 25 bp, Homo sapien
cacaattcttagtgctaggatttga

SEQ ID NO: 5426588 - DNA, 25 bp, Homo sapien
ctaggatttgaagcaggatcaagca

SEQ ID NO: 5426589 - DNA, 25 bp, Homo sapien
catagacctccttttgaacttgaat

SEQ ID NO: 5426590 - DNA, 25 bp, Homo sapien
cttcatagacctccttttgaacttg

SEQ ID NO: 5426591 - DNA, 25 bp, Homo sapien
tcatagacctccttttgaacttgaa

SEQ ID NO: 5426592 - DNA, 25 bp, Homo sapien
tagacctccttttgaacttgaatta

SEQ ID NO: 5426593 - DNA, 25 bp, Homo sapien
ctttcttggtaagcctcttcccact

SEQ ID NO: 5426594 - DNA, 25 bp, Homo sapien
cctttcatagtattcttgcccttct

SEQ ID NO: 5426595 - DNA, 25 bp, Homo sapien
ttcctccccttcgtcatagccttct

SEQ ID NO: 5426596 - DNA, 25 bp, Homo sapien
cattcctcgtgaacttcttttttag

SEQ ID NO: 5426597 - DNA, 25 bp, Homo sapien
tcataataaggttgttcaaatggct

SEQ ID NO: 5426598 - DNA, 25 bp, Homo sapien
ttgttcaaatggctctgtgtatggt

SEQ ID NO: 5426599 - DNA, 25 bp, Homo sapien
taaggttgttcaaatggctctgtgt

SEQ ID NO: 5426600 - DNA, 25 bp, Homo sapien
caaatggctctgtgtatggttctac

SEQ ID NO: 5426601 - DNA, 25 bp, Homo sapien
taaggttcttcgaaagattcaatga

SEQ ID NO: 5426602 - DNA, 25 bp, Homo sapien
cagctttagaggatacatcaatgat

SEQ ID NO: 5426603 - DNA, 25 bp, Homo sapien
cgtcataaggttcttcgaaagattc

SEQ ID NO: 5426604 - DNA, 25 bp, Homo sapien
ccagttcgtcataaggttcttcgaa

SEQ ID NO: 5426605 - DNA, 25 bp, Homo sapien
gctggaattaaggtagtaggaggtg

SEQ ID NO: 5426606 - DNA, 25 bp, Homo sapien
tgctggaattaaggtagtaggaggt

SEQ ID NO: 5426607 - DNA, 25 bp, Homo sapien
ggaggtggaggcttcttgacaatct

SEQ ID NO: 5426608 - DNA, 25 bp, Homo sapien
gtgtcatctctttgggctttgcaac

SEQ ID NO: 5426609 - DNA, 25 bp, Homo sapien
tcatctctttgggctttgcaacaac

SEQ ID NO: 5426610 - DNA, 25 bp, Homo sapien
ggtgtcatctctttgggctttgcaa

SEQ ID NO: 5426611 - DNA, 25 bp, Homo sapien
tgtcatctctttgggctttgcaaca

SEQ ID NO: 5426612 - DNA, 25 bp, Homo sapien
ttaagcaacatttttcgggtcagca

SEQ ID NO: 5426613 - DNA, 25 bp, Homo sapien
tcttatttcgacatctaggtagatg

SEQ ID NO: 5426614 - DNA, 25 bp, Homo sapien
cactagagggccaatgcgttgtatt

SEQ ID NO: 5426615 - DNA, 25 bp, Homo sapien
ttttcgggtcagcagagtgaaattc

SEQ ID NO: 5426616 - DNA, 25 bp, Homo sapien
ttcttttcttcgggtgttggtagca

SEQ ID NO: 5426617 - DNA, 25 bp, Homo sapien
tcttttcttcgggtgttggtagcaa

SEQ ID NO: 5426618 - DNA, 25 bp, Homo sapien
aggaggagcaaccacaggagggatt

SEQ ID NO: 5426619 - DNA, 25 bp, Homo sapien
tggtagcaaaagggggataggagga

SEQ ID NO: 5426620 - DNA, 25 bp, Homo sapien
gtggcactgctctgataggcatggt

SEQ ID NO: 5426621 - DNA, 25 bp, Homo sapien
ataggcatggttgggattggaactc

SEQ ID NO: 5426622 - DNA, 25 bp, Homo sapien
tgctctgataggcatggttgggatt

SEQ ID NO: 5426623 - DNA, 25 bp, Homo sapien
ggcactgctctgataggcatggttg

SEQ ID NO: 5426624 - DNA, 25 bp, Homo sapien
aggaggcttcagctcaagtttgatt

SEQ ID NO: 5426625 - DNA, 25 bp, Homo sapien
ggaggcttcagctcaagtttgattt

SEQ ID NO: 5426626 - DNA, 25 bp, Homo sapien
caggaggcttcagctcaagtttgat

SEQ ID NO: 5426627 - DNA, 25 bp, Homo sapien
ctcttggctccagccgagcgatgac

SEQ ID NO: 5426628 - DNA, 25 bp, Homo sapien
ctttcgtcgttaggtacagctctgc

SEQ ID NO: 5426629 - DNA, 25 bp, Homo sapien
agccgagcgatgaccgagtagacac

SEQ ID NO: 5426630 - DNA, 25 bp, Homo sapien
tttcgtcgttaggtacagctctgcc

SEQ ID NO: 5426631 - DNA, 25 bp, Homo sapien
tggcatcatcaaaggacacttcaca

SEQ ID NO: 5426632 - DNA, 25 bp, Homo sapien
tcaaaggtggcagactgatgctcac

SEQ ID NO: 5426633 - DNA, 25 bp, Homo sapien
gatggtcatataatggcagcggcca

SEQ ID NO: 5426634 - DNA, 25 bp, Homo sapien
gcagcggccatcattcctgaagttg

SEQ ID NO: 5426635 - DNA, 25 bp, Homo sapien
tgaagatgccgttcccatgcaggct

SEQ ID NO: 5426636 - DNA, 25 bp, Homo sapien
gaaaattggcatgtcatggtgcaag

SEQ ID NO: 5426637 - DNA, 25 bp, Homo sapien
ggtcttctgctcgaacatctgcaat

SEQ ID NO: 5426638 - DNA, 25 bp, Homo sapien
catctgcaatggtcaatttatggac

SEQ ID NO: 5426639 - DNA, 25 bp, Homo sapien
gactctgagtgtatgtcggtcacca

SEQ ID NO: 5426640 - DNA, 25 bp, Homo sapien
aattacagttagtttagcgctagcg

SEQ ID NO: 5426641 - DNA, 25 bp, Homo sapien
aattgccctggtctttaagttgaca

SEQ ID NO: 5426642 - DNA, 25 bp, Homo sapien
tgtgtggaccacaaaccaatcgata

SEQ ID NO: 5426643 - DNA, 25 bp, Homo sapien
caaattccttttcgtccctctctga

SEQ ID NO: 5426644 - DNA, 25 bp, Homo sapien
gtctgtgacagtctttgctgaataa

SEQ ID NO: 5426645 - DNA, 25 bp, Homo sapien
tctgtctgtgacagtctttgctgaa

SEQ ID NO: 5426646 - DNA, 25 bp, Homo sapien
tcaaattccttttcgtccctctctg

SEQ ID NO: 5426647 - DNA, 25 bp, Homo sapien
ccagctcctttctttaagattggag

SEQ ID NO: 5426648 - DNA, 25 bp, Homo sapien
gaagacctcggaagtcagtgattcc

SEQ ID NO: 5426649 - DNA, 25 bp, Homo sapien
agttccatgatatcaatttcctctt

SEQ ID NO: 5426650 - DNA, 25 bp, Homo sapien
tacatgcgggcatatttttcatatt

SEQ ID NO: 5426651 - DNA, 25 bp, Homo sapien
aatgccacgcatcggtataacccag

SEQ ID NO: 5426652 - DNA, 25 bp, Homo sapien
tttggtggatgaaaacacgacctcc

SEQ ID NO: 5426653 - DNA, 25 bp, Homo sapien
tcaccatgttcgttaaatgccacgc

SEQ ID NO: 5426654 - DNA, 25 bp, Homo sapien
gattgggtcacctccaacttttgca

SEQ ID NO: 5426655 - DNA, 25 bp, Homo sapien
actctgatactctgaggttctgaca

SEQ ID NO: 5426656 - DNA, 25 bp, Homo sapien
taccgcagctttcttggttgctggg

SEQ ID NO: 5426657 - DNA, 25 bp, Homo sapien
gttctgacacaaaaaagagtcttcc

SEQ ID NO: 5426658 - DNA, 25 bp, Homo sapien
aaagagtcttccatctaccgcagct
